United States Patent Application Publication US 2022/0090207 A1 - sequence listing, part 25

SEQ ID NO: 334103 - DNA, 1489 bp, Homo sapiens
  chr10:124894818-124896307
  hyper
cggcgggaagcgggtccctgcgccgcaggggggagaggcaggcgcggtctccgggctcgcggccgttagtgcgcttcggccaagggcgccgcctgctccgcgtccctcgctcgcctcctgcgctcgcaggagcgctccgagtgcctctttagcgggagccaatatccttttgtgctaataggcttgtcctcatttgctgcctaattggactatataaagccaataacgggcgggctcttatagcccgaagccaaagcgccaaaatccgagggaaggcgaggagggggcggtggcggaggcggctgcggggccggggctcggctgagccttcgcctgcctaatcccatttgccattgtacgcgcccaatcgccgtatactccccgcatttaacttggatgacattttgatttcatcattagcatccggcgccggattgacgcagcctcgagccggggactgctcttgctgcctcctccgcgggagccgcagccgcagccgagccgcctcgatccctcggtgccgcggcagggccgctccccgcccctccgcacccctccctcatgcgagcccgcccgtctgggtcctcactccgccctcccgccgttggatttgcgcccggggcggcccccgactttgcgccccgtagttgagttccgtttatggtctgatttccggcctctcgcctgctcgccccgccgcccgcctgtcccgctccctccctcccggggacccggaggagaggggaccatgccggaacccgggccggacgctgccggcaccgccagcgcacagccccaaccgccgccgccccccccacccgctcccaaggagtccccgttctccatcaagaacctgctcaacggagaccaccaccggccgccccctaagcctcagccgcccccacggacgctcttcgcgccagcctcggctgccgccgccgccgccgctgccgctgccgcggcggccaagggggccctggagggcgccgcgggcttcgcgctctcgcaggtgggcgacctggctttccctcgctttgagatcccggcgcagaggtttgccctgcccgcgcactacctggagcgctccccagcctggtggtacccctacaccctgacccccgccggcggccacctcccgcgacctgaaggtaccgacctctctttgaactttcgttgtccccctgcgcgcccgccccgtccccgccccgcgctgcttccctccgcagttctgggaccccagcacccgcaaaccctctgctcggtcagtttttttcggcccctagcctgccctcgcgctgggttgcgctgcccgttaatccaatcccacttggtgagaaaagaagtggaattggagccccgggcacggtgcttcccgggaaaagtggcctcgggcgtgaatagggaggcttcggacggccggggcttgggacacggcctggaaggagggggtgattccaatgcgcctaagccgaaagggaaccgttctgcc

SEQ ID NO: 334104 - DNA, 1131 bp, Homo sapiens
  chr10:124899013-124900144
  hyper
cgctgactgcctctgcgctctctaagtacaacctggacgcacaaccctgtattccgggaggcggtggagacagaggcggctttgttcgcgaccagaggcactctctcccctgtactttccgcggcctgaaacgcccagcgagcagggaagaatgctgggcggaaggggagtggacttaggcttatctagtttgcgaaattgagcaaagcgacagcgcgcgaggcgagataccagagacagctggtatttccgaacactggtctgcagcctcccgttctgttcttaaacctgggttccttcgggagccgagagcttttgggcagggcatccctgggcattcgtcagctggttaacttcggtgggctctggttggagggaagaagggagtgagttcagagtttagctgcagccgtaggccgattgccaagtcaggctaggaaaggctgggccacaagaggacaaccccagggacagccagctcttgggacagcggctcccactaccaggagaggggaacttcctcaggtcttgcagagctgagattcccggggcgactcgagcatgggcgcggtcctgatgtgctaagtgtgagggaacagaggctacctagctgctgcagctgcaacagagaagaccttgtctcttccgtgccaggctcttctctttcccctggcgcccaacacctcctgggcggcatctctagatccccgaccctgtcctggcagacgccgagaagcgtagcgctcaccacacccgcgcgctactgggttccaggccgccgcgctcttagtgagcagcctgcggaggcacagcgcgccggaaccgcctggaagggtgggtccgcccgacagaagcaggtgcctgggcgacactcgctggccgggtgtggccgcctgcctttaagctgggggtctgcacgtacaattcctggcggggcacctttgaagctggggagccgaaagggggagatgaggaacccagagggtgaaaaagattccagagagcagccatagggcgcgaccgctggggagcgcctgcacgcctctctttcctctcgcagtgcgttgctaggctcctcaaattcaatcgacacaattgattctactgtggctgaaacgtccagtatagttt

SEQ ID NO: 334105 - DNA, 1317 bp, Homo sapiens
  chr10:124901907-124903224
  hyper
cgggcgctcattctgagccgcgacgccccctcaacaggctcccggcaccgcagagccagaggccacgcggtgagaaccccagtgcgtgcgctcttcttgtgtgagaggccggaggtagagttgggagaaagaggagccggcgaaaaggttagtgggatctgctttcccttctgcggccttctgggccagctagggcctgggagatggggaccagggtcggaggcttgggggcgggagggcggtgctgccggctgcttcctgcaagcggtttgaagaggcatcgcgttgtccggccgcctgcgcaagggccacgcgctgctgctttcacccccttgcgcccgcggggcacctggactccccttaagagtccccgtggggcctgagcttctgctgggcgctacgctgccctccacgattccattttgccccatttactcgggtcgtccacttcccgcggctcagtgacccagccagggggcgtcttccgctagcggtccaaatgtagactccgcaaagaggctaagaagacctgtctacccgggtgcgcgcgatggggtcagggtgtaagaaccaggagcctcatagaaacctctgcttggggtccaaagcccagccgggcactcccagaggacaacatccgcccccgcatgtacacgtggccccgcaggacccagccgcagggctcccacgctcggctccccgccctctcgctgtcccccaccccctaacccgggctttgaggtgtgagcgatcccttgcctctgggcctaggactctggaagtgtgcacggccgttgtgcagggtggatggtgttgaccttttgacctgaaaacagttgggggctggggagcggaggaaggatggcggaagagaggaaagagccacgagaacaactaggcgggatgtacttttgagccctgccgggtgtctccgatcggagtctggggttgagatttgggctgcacttgtccccggtgtgtctctccggcggagtaccctgaaggtgcacgaggtggggagcataggctgaggtgggtaatcgggtcctggatagaaacacaaccctcgtcctcactggggcccatgtatgcgcctgggattcctccccacccttccatttccaggacccctaagggtatcactccagcgacggggcggttctggagacccgagggaagggatagctggagactgcagcgcgccttctccgagagtcccctggaggtgcgcatgagttgtactagcgcagatctcttccttggctgctgctcctggcgatgcatctccgggggaaacttcccaaagtctgagttgcc

SEQ ID NO: 334106 - DNA, 433 bp, Homo sapiens
  chr10:124904560-124904993
  hyper
cgtctgggcctccgtgctcccggtgaagatccccatatgctagaaaggggcggcaaggaaggttgtttcttgtccctcccgtccttgcggtgtgacggctataggtgctggaggggcgggaggtccctcgggctatcaatcgaggggagctcaggggaactgcagtcagtcaggctgcagagctgggtctccaccacagccttccttgccccagccccgtgcccaccaccatctcttccctggtaaagtgcacgcactagtaggagctcagtgaacgtttgctgaatgaatgtgtgagtgtgcgcaggcgtttatgcaagtgccttcatgcgaattaatgcgtcctttgccgggtgtggcagcagaggaagtgcctcggtgaagatcagaccctcgaagcgattagagggacgggacagaggaaatacaaggc

SEQ ID NO: 334107 - DNA, 1394 bp, Homo sapiens
  chr10:124907174-124908568
  hyper
cgcagggcgccacggtcccaggagtgccggctttgcccgcccactggggctagaaggggtggagggctgggggaggatggtggagcagcctgtacaagcccctgggaggcgcggagacccgtcgcctgcggaggcgtcgagccactccagctccgagtcccgcaccgcccctgcctctggagagaagggtccaaggggtccaaggagtcggagttgccgcagccgccaggaacccgggctagaatctgcagctgctttcagccctggctgcccctggttagacgccgctgatgcccgccaggccctcggcgcgctctgggggcgcaccggtgctgtgtgcctggccggagcgttttgaaattttccggggccgctcggcggcgctgcgattggccgcgttcgggtaacctctatgcaaatgaggccgcgccgcctccgcgccgccggagacccggcgagttggcgggcgaggaaggggcatttgcaccggggctgggcgggcgcacccagagccaggcgggcaggaacccctgcgcagccatccggtgcctgcatgtccctggcgcggaagggacgcctcaccagcctcggcgccccctccccctagatttcctccccgcccctccccactgcctgcctgctgcaccaccttccacccagatcacccagatcgtctctaaagggagttcttggtttccttcgatttcttatgaacccaggatgggcagcaaagaagatgcgggcaaggggtgtccggcggccggtggcgtctccagcttcaccatccagtccatcctgggcgggggcccctcggaggcaccgcgggagcccgtcggctggccagccaggaagcgcagcctgtccgtgtcctcggaggaggaggagccggacgacggctggaaggcgcccgcctgcttctgcccagaccagcacggccctaaggagcagggccccaagcaccatccccccatcccttttccttgcctgggtaaggatcgcacgtcgccagtgtggcagcgagcgagcgcgaggggagggaggctgagcgccccgccaagactcccgcgccgggccccctctggccagagctgcggcagccgggggttcgggaccgcggggagaggggcgcgcactgtggtgcctcctccgcccggtgggcccctgggagcaggcgaacacagacccgtgccggcttgggcttcctggggaaggttgagttgttgagagagtggaccacagcgagagggacacgcggccggccttacacccggctgtcctcaatcactgcacatctggtactttctttccggacacgaggtggagatctgcaagtcgggtctgggcagtctgtctccaccgtaatctctttctgagtcttcttcctcactcgctcc

SEQ ID NO: 334108 - DNA, 969 bp, Homo sapiens; identical to SEQ ID NO: 235192
  chr10:124910231-124911200
  hyper

SEQ ID NO: 334109 - DNA, 632 bp, Homo sapiens
  chr10:125650820-125651452
  hyper
cgcgcaaccaccggcgccccctcgggctgcccagcgcagaaagttccttacctggtggaggcggctccggagccgacttctccctcttgggagctttcttgggcttggtggccctcttgggcggcctgggctcctgcgggcgccgctcccactcctccccgggccccgcaggcagcggcggagagaaggtctcgagctcgggctccgggcgcgcgtagtagggctcccggctccagatctcctgcccgtaataatcagggtcctcgagggctgcgccctgggctccgaccccggccagggtcactgccaggagcaccagggccagcgctggggtagcggtccccgggcgggacatgcctgctccgccccgcgcccagggcagggtcacggtcaccgggggcgccgggcgggctgcgggcgcagaagctggcgcggggcaagggcgcagggcacagcagagcggcgcgcttgggcgcgggaggcggccggctggctgcgcgtgtgaccggcccgcggggctgggctgggctgggccggggcggacaggggcgcgcagaggcgcggggcgggcgcaggggggccggccccgcccttccttcttccctccctttcccggcgacccctccgaggcc

SEQ ID NO: 334110 - DNA, 2139 bp, Homo sapiens; identical to SEQ ID NO: 235194
  chr10:125851234-125853373
  hyper

SEQ ID NO: 334111 - DNA, 159 bp, Homo sapiens; identical to SEQ ID NO: 235195
  chr10:125853673-125853832
  hyper

SEQ ID NO: 334112 - DNA, 1193 bp, Homo sapiens
  chr10:126106668-126107861
  hyper
cgggaggttttcatgctgaaagtcctgttgcccccccatcccccaccatctaattaacctgcacgttactgtaaggaaggttctgcttccgtaattttctttatttcgacagaggctggagaaaaaaaatcataggctggaagaggggagcgatgggcaggccgatctgcagggcgcaggagcaggccgggaggacccagccctccaaggctgcatcagcgcccccgccgcgtgaccagggccaccggtttactgcacagctcccccgtccccagaacgcagcctccccgccaaccccaggaaccaagggtgcccaaaggcctcctacccggaaccccggggcgcctcggggtctctgggccgggtgggccgagtcctggcctccacaggccgcgagcgcagggggcggcggctccgcccggtctggcaggcggggctgccacatcctcagcctctccctgccgcccgcccgtcggccgctctgggctggaaccaggactccggcctgcaagccgtgggtcgccacgcccctgccccctgaagctgcgcgccggccggagactccagggcgcccgggtccgagccgcccgcagagtaaacgggccgctgaagcggggctcgttccccggccgaggcccagcgcgccccctcagccagcatcccccgaacccgggccgcggccaccccgcgcccgcccgcctcccccgccgctgtcagggaaccccggccagggcccgaaccagagccccaggacagcggcgcccagacggtacctgacagcgcctgaggacaaccgggtacacgcggcgtctatgaagcgcaacagtgacgccggagagtcactgcaacttaaaggctgattctgccccgcccccaagacaccctcgccgctcattggctggggcggagggcaggataccaatcgcgtgggtcccgtcctccgccccgccctccggccgcgcatcaaggatctttgctcctcccgcggattcgatccgcgctcgcgcctcctgagcccgccggcctgtacctgagctcaggcccctcggtcgcctcctctggcgggacgagaagagtccttgtccgcccttgctgacgagaagactgaggcccgaaaaggaaaagtctgttgggccccccactgcgcgggccgggtgtggctggaggccgagagacgtgaggctggaccgccc

SEQ ID NO: 334113 - DNA, 929 bp, Homo sapiens
  chr10:126135844-126136773
  hyper
accccttggtggcccgcgaggatcgcgggtgcgcgcggcgggcaggggtgcgctgacacccgcgcacctgcacccccggtggaggagccgagggcacacgacgatgccaatccctcgtgaatcccgcgaaagaggggccagggggctccggattcatagacgcggggcgtagaagggggtcaggtaggaaggcccaaggaacggcgcgaaagggctcccgggggcggcagccgtcagcgggaaggaggcggcggacgggaagaggacattggccgcggagtaggaggggaaagtctggaagtgcagagcgccggtgccgggagggccaggactgccccccgagccgccgccgccgccgccccccgccgcccctggctggggcgcgccaccccccacctgcgccgcgccgtcggcacccgggttctgcttcttccacttggtcctgcgattctggaaccagattttgacctgcgtctcggtgaggctgagagacagcgcgaggttcaggcgctcgcacactgacaggtagcgcgtggcccggaacttgttctccaaggccaccagctgctcgtaggtgaaggcggtgcgcgcgcgccgcggcttggcgcagttgggctccaggcgccggcgcctgggacgcggggagccgggggatcccgggggggacctcacagggccgcccccgccgtcctcgcagggctccccagacgccaatgccccggccggggcgtcaggtgagcgcgctaggcccggcagcaagcgcgcagcccgctcccgcagccgcggcctcctcggatcctccgcatcctcctcctcttccgcctcggaaccctccaggggggacgcctggccggcgcctgggcccgcagcatctaggggagaaggggtcggtgaacagaagcctctccaggtccccaaacctcgtcctc

SEQ ID NO: 334114 - DNA, 918 bp, Homo sapiens
  chr10:126137196-126138114
  hyper
cgccgtgttaatagagtttcagatttgtgcggggccggatcgatagatgtcatctattaaaggtaagttttaatcgaacaatattaggatcagacagggaaagggggtttgaagtcggtacctgcaagctgcgggcaggagatatgcaggcgccagtaatagaatatcgatcacgagggtgggggaagggagggcggcccctcggagagaagatccgaacaattaccaggccgcctgcctgggcccaagtgcggccgccagaggcgccccgggccccaggcaatcaccgccaaacttggggaggggagcagggggctgcgcggcatccagcctcccccgatgacctgagcctctgaccctccagggagccgcctttccctgtctgatcccagcaggactcctgctgtcttccgtccttccttccagccacaaactttcctaaccccttcatcaggtgtccgccagcgttgggagtaattcagaaagggtttcgagaagaaagtaccgaaagcttcccaacactccatccgagccccgcccccagcccagtcccagttaacagttgagtctggggagcttgagcgcctggggcagcccagccccgcaggcgtctccgggtggcacctgacctcgctactcacgaagacccccggcgcaagccttagcgtcagctcccccatccataaaatggaggtgatgttaatgatgctgtccatctctcaggttccgaagttttcatcacctttatcccagcccttagcccaggtcctagcacgtggcaagcgcattaaatgcccgataaatgagtaagcctggcaagacaggcgccaggtaagtttccaccgcgagcatcagaactgtggtgcgggtgagcttggcgggtgagcagggatgcggcaaatccctgccctgtaatgc

SEQ ID NO: 334115 - DNA, 1271 bp, Homo sapiens
  chr10:128076009-128077280
  hyper
cgactgacagctagggagtgacctggaagccaggaagaggggcagagaggaaactaaagaagtaggtaagagagtcagtttatgaaaatagagcctgctgtggagagcagcaggcacacctgcggaggagggggctgcctcacctgcggggccgctgcgcgcccccctaagtgtgttagcgggggaggcggggctggaaaggaaacctggtgaagggctggcccggagcctggggtggggatattcactgcgggatagggccagcaagaggacccgacacgcatcgtcccgagtgacacgtgtaaatgtcaagatacagagacatctgcaaatgtcacccaagagggtgaggacgggggagcggtcccgaggctgtgccctccggggcaggtactggctcctgtggggctgcgggccaagtgtcgcccttccccaaggaattggcacctggggggggggggtcggtctcgccgcgctggaagcgcaagccccggggctccggagatgcgccggggcgcgtcgcccctcggggcagccctggacctcggcgcgcccaggcgcagcgtgcggtgccctcggcggggcgggcagcgagccgccctagttcggcgacttacctcgggcctcgcagggcgcgagcagagcaccggccagggcgagcaggagggcgcgggcgggggacacgggcagcgggcgcgctgccatcgtcgccggccttcagtgcagcagctctcgggcccggcggcgagcgctgcaccatcccacgcgggcgccgagccggggccgggcgtcgcgaccggagggatttcctgcctcggcgagtcagctccggagccctcgcgcagcgcccgcgccgccgctgagctcttctagcctttcatttttaaaaaagtttccccccgtgtgtgtgcgtgcgtgcgcgcgcgcgcgccgttctggcacaagccagccttgaccgttgcaataaatgagcaaactgtccgagttggcccggggactaggaagagcgttagtgagagaaggcaggcctgtgaaatggatccacggccagcagtcaccgttcttattaccgcggaacaaattattgtctcccccgcacccccgccagttggcggcgtcccgcgggtcctagagaccgctcgggtccccccgccagggtcccgccccgagccgcggctcgctcacccccgagggtgggcggctcagacgtggctcagtggcgtccgggcgcccggagcgcacacgtccccgccccaggatgatgtggccgc

SEQ ID NO: 334116 - DNA, 773 bp, Homo sapiens
  chr10:128593891-128594664
  hyper
cgcggccgtcccgcctcccgccggcgctcccggcctttcccatccggcccgcgacgctccgcccgccccgtcccacatgacgccgcctccgccgcaaactttttcctccccatcctgtcgcggctcgaaaggaatggaaaatggcggcctagacgcggagtttcctgcccgacccgcggcggctccggcggcgccatgacgcgctgggtgcccaccaagcgcgaggagaagtacggcgtgggtgagcagcgccgccgccgccgcgcctctcgccccaagcccaggctccggcggggcgggtgtgccgggcgcctgttgccgccgccccgagcggccgccgggccggggagaggcgcttccgcccgcgcccgcgccgccgccccgctcgcaatgcccggcgaccccggccgccccgcgcccccggcggcgtcagctccagccccggggatgcgggtcgggaacacgagggggtggggtgggaatgggggcgggcgcgtccctccctagggtgtcccctccgacgcccgctcctctggacctctgccgtggagccccccgggctacccccaactccccggccccggccgctgctatctgcgcggctgggcccgtcagggaagcccaggggtcactgtctcgcggcggcttctgcttcttggatgaacttgcgtcccgcgtccgggctctgggtgggcgggctcaggtcggcgcggtcccagcggataattccgccctttcccggcggggaggagggggcgcgacctgggtggcca

SEQ ID NO: 334117 - DNA, 892 bp, Homo sapiens
  chr10:128993960-128994852
  hyper
cgcagaggcgcagccccgctcctccctgacgtcgccaaagttgccagacgcccctcagcgacccggtcgcgccagatgcagttgcataaccttgccccccacctgcgaccgcaccgggtccgctcccggctgcaccggggtgtcccggccccgggagccgccgagtttccggccaagccggtttggggccgagtgtgtgcgcccgaatcggggtcggcgcccgtcccagcggtgctctgcccgcggccaagtacgacgggcgcgggggcgcgggaggagggcacgcggggctccgcttaccttccgctgcttacagataagtcgaggtcgatgcagcgcctggctcgggcatgtctcgctgcggaccctggcaagcctggggcggcacggagcactccggacagggcatccgcggccagactcgccgcgctcacgcggaggaagcctcggctccggggacttggcccgctgcgcgcctgctgcccgccccctccaccgctgccggcccggccctgctggcccggccggcccccgcgccgcagctcgcgtcgctcgcgtccctccggccccgcttagcgacgcgcgcggggaggcagcggctgggccagctccggggacgcccgcgcgctcgcttgctcgcgacgcggcggagccagccacagccacccggcttcgcgctcctccgatgtcctcatttactgcaattgtcttcggcgagatctcagagccagggccaggaggcgggggcggggcagaggagggagcaggagggaagtcctttccgctgctccaggtcccagctactccgcggagccgggcggccagaggcgagggcgccccaagccgcgcgcctgccgcctgtgcgcccggctggcaccgaggcgggcggagc

SEQ ID NO: 334118 - DNA, 926 bp, Homo sapiens
  chr10:129534422-129535348
  hyper
acaggtgcccgactcggagtccgggaggcgggccctctttccaggtacccagcccagcgtcagcctgggtccatcctccgccaccccacagcgcggggagcaggggaggccgaaagccgggcagcttggggggccgggataacccgggctgcagcaaccccgggcggcagcaggactggagagctggtgtcggacgcactgcagagacgtccctgttttcggcgcgtcctccgacacccagcagagagcttggcgctctccgctctgcgcgcccgaggtcacagcgcggagaaacctggcggggccccggactccccggcttgggaaaagcgatgactgccctgaactgctggggcgttcgaaatttccagggtcccgaccctccgtggggtacgcgcgacttcggcgcagatgtcagtccgctgccttccgggttgagggagcgaggactccagacgaccccagggccgctgtccaggcccagccccgcgttctccacctcgccacctcgctctgcggctccagcctggagatctacggacttcattgcgatctcttgcgcagtgtagtcgccctctatccctagccccgagtcccgggtaacccaggggccccggcgaggcgagtttctttggggcgagatgtcccgagccgagcaaaggggccgcgcattggacggggctcccaagccacagccctgggggccttgaggagtcgtggtacggtccagggcagtcggggctgcggggcccgtgaagccagacgaggctacggacttagggtccctgcaaccaagaccgcgagcgactgtggactcgggacggatcgcacaaaggaggaagggggaatcagaggggcgtccggtccaggacgtgtcaggcctgggcggggcggaaaactgacaccagggcgaggacaaggatttc

SEQ ID NO: 334119 - DNA, 63 bp, Homo sapiens; identical to SEQ ID NO: 235212
  chr10:129948078-129948141
  hyper

SEQ ID NO: 334120 - DNA, 848 bp, Homo sapiens
  chr10:130338555-130339403
  hyper
ccaaggcaggagagcgcagaactttccacgcgccaccgcaaccaacaggcctcttcatgggaaattggctgaaaatgtgctgaccggcataaaacttttattagaatccgagagcaggaggctgaacttccagggaatgacgggtctgggcgggctggggagggcgcagccaggacccagaccggggcgctcggtcccccagccggcccccatccgtggagcctgcgccctgccgtaactttgggggtcggctccctgggcccccagctcacgatgcccgctaggagccggcgccggggcgccccaaggctgcctccccccgcagcgctgcgcagtgcgccctggtgggatggggacgctgcacccctgaacccccccaaatccggcaggcctagggctggaggcgcggaaaccctcactcctgccgagctcccgagcgggacagactttctgaaaggggaaagggacataaatcaggaaattaaaaaaaaatagtttctgcacattttcaaaacccacgttgcgctctctaaggtccttttcattttaaccaaatcagggggaacttgtcctcacagcggcgaggcagatggaacaataaatcacaggcgccgttgactgcctgcagtgcgctctccacagctgtcacttttttgtctctttggttttagctgacatggtttgaggtccactgtgaaccaatctggacttttttttacagtcatatccatcaaaacgaccagtggccatcagcccgctgcggccatcgatcgggtggcccctgcccccgtgcaggccggcgtgacccggctcctaggtgaggctggagagaaggacctcgttttagc

SEQ ID NO: 334121 - DNA, 710 bp, Homo sapiens
  chr10:131757612-131758322
  hyper
ccgaccccggaacccggggctcccgggccccttcggcattccgcgccgccgccaggccgcgtcctcaggccattgtctacaacgagttccaatctgcatgttgggagaggccgatcagaacgccccgaggctaaagaagcagggaaggatggtcgcggcgcaggagcagtttgccaagggccgagggccgcgcccgccctgccctgcgcgctcccccggctctagcaagtctggcgccccgcggcttcccgcggcttcccgcgttccaaacccaggcgcccgcggggagcaggccgccctggaccggccgccgtcccgagctcccggggcctccctgagtggtgggcagcgacctggcctctgcacgctgcgggcggcctgggagcccaggcgggaggcccaggagcagcaaccgcacgtgggccgcggcgtcgccagcgccccgcaggagtgccggggccccagggcgcccgagcccgcgcggccacgtgctcctcgccggatgatatttggaaagaaagtgctaatggccaatctggtgtttattttgaaactgctaacagtgatttttctcgggtaaaaaggcagtctctgcgcgcacgctcgggtgggttttgagcagaggctccgccagatggtgcgaagccctaggtgcgctcacggccgcgctcagcccggctccgccgctgggaacccgagctggggatcgg

SEQ ID NO: 334122 - DNA, 847 bp, Homo sapiens
  chr10:131761129-131761976
  hyper
tctttatgtcctttcaccagcgcagaaaaggagagccagccgctgcaggggcggcgagcacgcagcaggcacttaccgttgctgtacaataactggagtttatagtggatgccgttgttggttttctcgttgtttggctcctgaaagtaacgataaataattgcatttagtgcgatcggtgtcaggcgcggccaccacgctcggtccccctccgcgaccgaggctctcggcctcacacatggcaggattcctagctcgaagcagcgcggtgatgtcactttcctgctggaagcccagcgttctcctcgccccgagtaagtccgagggcgcagagaagttgcccagccctcggcggtcccgggcggccgcacgtggcggcggcggggtggcctggcggagccgagcccgccgcctaggggggcactcgaacccccgcgcaccggcaccgcctgcctcccgcttctagaaagagagagggtgtgatcgtgtgtttgcacttactttctctttctccacaaagtccacaaaagcggtcctttcaatctccaccggctgcccctgcctatcgtagagcgccagcacgaagtggaagaaattggatttccggaggttggaaggcggctgcttctcgaagtgcgcccgcgccagccccacgccgctgcgggaggaaagagacagcggcccggtgaggagcgcggcgccggccggcggagggggccgggccgggccggggccggggccagggcgcgcgggggcggccggtacgtacctctgggcggccgtgttggcgtccaccacgcccgccgtgtgcatccacgagcgcaccgggttcatgccgctgcccagc

SEQ ID NO: 334123 - DNA, 1461 bp, Homo sapiens
  chr10:131761993-131763454
  hyper
cgtccccccgcgcggaatattctcctgaatcccaaacatgaaaactgctggcggcggccgcagctcccggccgaaagcgtttcctcgagcagcggcgctcggggcttggcggcaggcggctgccctggccgccctcgccctgctcggcgcctgcggtccggccccgccgccggcttcagcccgtcccgggcaggcgcgacatacaccagcggccgggcgctccggacggccaggggcgcggaggcggctccaccggcggcggcggcgcttcgaaggagcaggacgcggtggccgcggcggcgcttgttgttgttgttgtttgcaggcgcgctcaacgtggtgtcatcctagccaggcggcgtccgcggctgcaggacactgcgggatcgcccgcttctggcgcggcccgcctgctccaaagacaaataaacggggcagtgagtgctgcggcgcagtcccgggcgcaggcggggcgcggcggggcctggagcggcgcgcgcagcggacggaggcgcacaaaactcagccctctctccccgaggaatggaccctttcccgggagccaaaactcgaagcccccgggagcggcgctgtcagagggtgacgtcggggggcggtgcctgcgccatatatgggagcggccgcccctcgccgcgcccctcgccgccgccgccgccgcgctcgccgactgactgcctgacggcgccgcgagccggcccgagccccgcgagccccgcgagccccgccgccgccgagcgccaccgagcgccgccgccgccccccgccacgcaccgcggctcctcgcgtccagccgcggccaaggaagttactactcgcccaaataaatcttgaaaagaaacaaacgcagccactgcacaattgcagtttggccccttaatacctccctgcaaaacctgccacacagtcgaacacgatgggcggggcggggggctgtaaaatgctgaggcgccccaagttgcccagatgcatgcaataaatgcaaggggctgcagcttgtcctggggccgcccgaaggagaagtgggaagaggcaggtcgaccgcagggagggcgccggagggaggagcgggcaacggactgggaggaggggtgcccagggctccccggccaaggctggacgcgcagctcagcctgatttctaagcagacctaaggctgctgcagggccggccggtcccggtctgagccccgccaggtaccccaagcttcctaccccggcggaggccgccgagtgccgggcagggaatcacgtcggaggcagggtctgccagatgctccctctcccccggtggccgcggcagaccccggcccctggcctgttcttacgcacagcgagtgacaaagaaggctccggtctctccgggccgacgggaagcgcgcccggcctctccggcgacccggagccgggtgtctggctgcgcgacctgcgcggtggccagacc

SEQ ID NO: 334124 - DNA, 534 bp, Homo sapiens
  chr10:131768700-131769234
  hyper
cgcgcacaaaagtttgccaataaaattctagtttgaaaccgcggtttgccaacacgagtaaaggaagttggggtggtggagagctacagtgggcacggacggaaagggtggccacggtcaccgatgtactaatgtcctcctcctcggctacccgatctcactccttcacagcaccttaacagagtgtatacacccgttctggtgcgcaaaagtggggcgatgggtgccggcggccgggccggggagtccgtccgggtaattaactcagctccggcgactgcgacgatgaggccgggagggaaggaagagcataccgctcttggacagaaatgtgtcaagctctcctcccttccagcctgcataaaccctttcgcgcacattcgcgcgacttctaagggatccaagccagcggactgggtccagcagcgcgcggcggcgggacgcacccctcctctccccccaggaaggcgggtgcacgccggggctggaagggggagggtgcacctctggctacaaattcggccgcgaagagat

SEQ ID NO: 334125 - DNA, 825 bp, Homo sapiens
  chr10:131769491-131770316
  hyper
aaaagaagaaagaaagaaaccggcttctcttctagactattaataagcaatttgtcccgctgaaatttacattgcaaagcggagggcgccggcagccgtggcggcgggcctggcgcgggctccgggggtgcgtcggcgcgggggcggggggggtcctccggccatccgggccgccctcgggggcgatccaccggcggctttgaactcggtgtccttgccgccgtgccgccgaccctcgcccgcacacgcgcgcatctgcacgccagggccccgcctgggctgcgcacccggaggccgggactggcgctgcgctagcgccacccgggctgagctgcagccttttgtggggggggcgggaatccctccgctcccagtgacgccttggactcgcggacccccatccgccccaaacgactgcccaggccttaaattaaaaatggcaacaataagcttaatttttttttcctccttagccgcgccgccccggtccaagtctaccgcaagcgtggagccccgagcgccgcgcccccgccggctctcccgcccgcgcgccgcccgacggagccgcggatcccgggcctagcgtggggccagggcgccatctacgggcgccgcgcggctccgggcggccgccgcctcctccctctcagcgtccagagcccgctcctcctcccgccgccgccgccctcgccccgcgccgcctgccacttatcacaattacccgacgctcccgtgccattttgcttatgaaacactgattgctagttatgcggacttttaagcactatattaaaactttcgaaatgaaggcgctctcctgcctgc

SEQ ID NO: 334126 - DNA, 932 bp, Homo sapiens
  chr10:133109173-133110105
  hyper
tgtgaaagtcctaacttctccgcgatgtcagccacggcccgcggcggtcacggagccacttcagcacctcgcgatggacagtgacccccggcgtggcgcgagttccctgcggtccccacgcgggcctgggcggcgggtccctccacggctccgtccagacacccggaggcacctgccaaagctgcggaggtggacgaccgggcgtccaagcacgaactttctcgccgaggcacggctgccgggctccgtcctgagggtttggggcggcgaggaccgccggggaggagggcgcgcgagccggaggccagagccgggccgggcagggcgcgcccaggagcaggggagacggcgacccgggccgaggcgggacggggacacgttacctgcccgtggagcgcggggaaggggtgcgcggcggcggcggcggcggagtctggcgcagagggcagcggcagcagcgggagcaccggctcgctcggggccggccagccggggagaccggggagcagcggggccgcgggcggcggggccgaggcgagcagcaccgggggaaccacgacccccgcgctgagccggagcagcccggccgagcccggcaccatccagacccagggcggcggcggcggcggctctgcgtccatcggccagaggagaggctgccgccgccggggctgctgctgctgcagctgccgccgccgccgctggaacctggcgcccgcctgcatcctacatccccgcgctgacggcggcggcgggggcggcgggcgcccgagatgctgggccggcggcggcgcggctccggagcgaactcacttggctccgcggcgcggccgctcgctccgcccctgccccgcgcgggaagctcctcctcctcccgcccgcgccgccgccgcccccggacccggcccccgccccggtccccgcccgcccgc

SEQ ID NO: 334127 - DNA, 956 bp, Homo sapiens
  chr10:133110114-133111070
  hyper
cgccggaccccgccccgccctcgcgctccccggccctggccggggtctcctccccgctgcgcccctggacccgggcggccgcggaggacgtgggtgggagagggccgagggcgcgcccggctgggctcccgccgatgccggccccctggtggcctctggccctctgggacccagcgcaccgcgagggaggctccgggctccgcactcaagggcaagcggaagccgaggtggcggcgccggagccaggcatgtcccgctgcccagcgcggggctgagggcgcagacggggaccgcgcgagccgctctctacctggcctcctcggagtccagggcgcggagggtactgggctgcggatccggcgcaggcggccccggacgctgctaggcgcgggcggatttctgttgcacaaatgggccaaacaggttcgtaaggcccccgcgggtcccctggcccggaagttgagccgcgggtgcctggtctgaagttccgcgccccacagtggcccgcgggcctcggcggctcctgccctacgccctccaaggcaccaggcaggtggccccagggcctttgcccacgacaccccctgggtggggcaggaccacccctctgtgaattcgtcctggatgcccccaggcacagtctgtactcctccctcccccagcacacgcggcctctgacgctgcacgccgagcttcctgggacccaggacgaaccgggctccaaggaccctcgctccgcccggaccacacgcaggcagcgccggccgagccgagcctgggtccgcactggccacgcgcagccaccgccagacggcgctagccctcccccgctgtagaccctgcttcggaggccgccagcctcctccccatcccgggtccacagcttcagtgcagcccctggcgacgcgcgctgacagctgggcagagacttccgtgcgctgtaaaccccttaggtc

SEQ ID NO: 334128 - DNA, 1471 bp, Homo sapiens
  chr10:133794830-133796301
  hyper
tcataacaggccacttgccacgccttggtgtttggtcattaaaaccaatactggtctgaactacagaccgcggagggcaacgtggactttgaggctgttcggtccaactgcgagacgcagattcacctccaggtggaattctagctcgcgcggagctggagaatcggggctttcccgtgcggtccgacccgggtccaagccaacccccgcccgagtggcgaggccgcgaaccccgggcagtacgcggggtccccacgccccgggctccgcatgcccgcaggaggggtgggtacggaaggggaggatggcgcagcctcgcccggcccgcgatgccccctaggcctccccggcaacctccccttggcgccctcttggccttccccaggcttcccccccgcgccccctcggctcccgcgccgcctcctccgcctcaccctgcaggctctcctcctgcatcccgggcgctccgttctgcgacatggcgccagagggcaactgcggcgatcggagtccgcgccgggctgcgggatgtgcttcagctgcgggcggtgggaaagcggaggtcggagcgccgcggcccagctgcgctcccggactgagcggagccccgcagcccggccggaggaactcacagggcagggcggggccgggcggatctgcggccgcgtcgcccattggccgcgacttggggcctgcgcgtgcgcaggggcgtggggtgcgtgtggcacgtgcggcgcgtgcgcggggcgggtcctgcggtgggcgaggggcagaggcctgcggtgcgcgggacgcgggcggggagaggggcggggcgaggggcgcgcaggcgcgagggcggcagcgaccgcctgaggtgagccggcccgggctggacgccgcgggccgcgtgacgagtgggctgcgcggtcgccgccgcggcgggcggtgggccgggttctcctttgaaggggcggtgggaccggcggactctctgggcactggctaccacggagacgccgctacgcttcggggcggggcccgtctttccatcctgctagtggggaaactgaggcgcggggctggcggcgtccgtgcggggggcgtgaggacgtgcagggaagcggccgctgcggctccgagacggcccgtggggtcgggacctgcgcccggggcgggagctgcgagcggtgggccggagctgagcgtctcgggacgggaccgcgtccccgggtctttgcccgccccgccggggcgcccctgcgtgaacagcggggcccgttgtgtccggggcgtccgcccgcaggaagaagcggaggctcgagcagagtcgaaagagtctgcccgagggaggcgcggaccccaggggcccgggagaggcgcgccgtccgcctctgcggcaaggggcctccggggtgcaaacgcggtgtggggcgggcgtccccggggtgggacgccccgtccacggggcggagtggcgcttggtcgggcc

SEQ ID NO: 334129 - DNA, 993 bp, Homo sapiens
  chr10:133999531-134000524
  hyper
cgcggcgcgcggagacccctcaacggccgcagcaagtccccgagggcagcccggcgtggcccaggcccgggacccccagcaggtagtggccgcgggacagaggccgtgggcccgggctcggactccccgagaccctcgcacccggaggacgccgggcgtggggctcccccgctcccccctgcggggtcctccctatccgtaaaggtcctgagccttctgggtcctgcgaccaccccccacccccgcgaggtcccgcccaccaccgcgtcccggtccctggggagcgcgtgcgcctccttctgtctctctctctctctctctctgtcctattcgggcccctcctgccctccgtctctcgcggccagcgtggaacagcctcgcggggtcacagcctggcgctcggaccctggcccgggtcatctgcgaaggagccggctttggccaaggtgccttcctggacgggtgtggttcccagagcgtcgcggcccggggttgactggctcggaatcccggggccttgggcgcctcgcgtctcctgggacctgggttccgcgctggagggcagcgggggcgcgggcggggcctggcaggacgtggccggactctctccctcgcctccccggggtgcaaaccccgcgcacatcagctggagcaggttgaaatccccacccagcgctcgtccgcgggtctgcgcgggggcccggggtgcagagatcagaccctgcagcggttccagcgctgggggggctttaaagcgaaggagtggctgagggcgggggcggggctgatgggcggggtgaggcggggctcgggctggggcgggccctatcgggggcggggcctgccgggggcggagccggggtgggggcggggcccagcgggggcgggaccggaacggagccgtgcggccccgcgcgctcgcagtctgtctcccgccgtccccacgcacgcgtcccggctcacgcgtccccccgcccgcccgcccgcccgccc

SEQ ID NO: 334130 - DNA, 611 bp, Homo sapiens
  chr10:134121708-134122319
  hyper
cgccgggacacggggaccacggctcagactagacggcgggtacgagagcgagggaggcagggagcgtccccacgggtatcctggggccccggaggtcggcgtccctggcacggggactgctgtgcccggcacggcggcgggaccttctcgcggtctccgggggcctccctcccctgccttcttcgtgaaaacagccggcgcgcgggcttccgccgcccagtgcggggagccctaaactccagccttctgctttgcgcagggtgaggccgggctgcaggcccgggatgcgggcggcgggaatctgccgggcagagcccggctcacggtcaggaggcggcaggctgagtccaagcgctgcgccagagggtggggtggggcagggcgggcctggctgcgcgcgcgcacacgcgggcgcctggggtgggcgctaagccctgagcacgtgcgcccgcgctctcgggcacccccgtgccatcctcgcgacccccgtccggcctgagaccgcgtgcccgagtcgcccagggtccccttgtccagatgcgacaggggcctcggcactcggcgtatttcggaggcctggggcgcggcttgacctccgggcacctctgccc

SEQ ID NO: 334131 - DNA, 291 bp, Homo sapiens
  chr10:134209485-134209776
  hyper
cgaggtcgacaggcgccagcgacccgacggtccccagtggcaccaggggcggtggtcctcaattcccaggctgggaggagccctgcccggcggcgctgggtcgccaggacaactacgcggtcccccgccccgcctccaggcctcgtcaggcgctgcaagtccggctcagaagcccggcccggggccaaggtcaccgcagcaggccgggcccctgcgttctgagccgggtgcggacgtgctggtgctcggggaagtcgggggctttgacgcctgaaggcgcgggagccgggc

SEQ ID NO: 334132 - DNA, 1487 bp, Homo sapiens
  chr10:134599745-134601232
  hyper
cggcgccccccccccgcccgcgcgcccccgccggccgcgcactccatgaagggcccattagcgcggcaggtgcctcccgggctgtaaattcgccccgatttatctccccggggacgaaataaatccagcttggatgggagtgtagttaggcaaaggttttcatgcgaaatcaggaaaaaatacgagaacgtattttattaacggaaagaatgcagatttgaggacccgcccgcgcgctcggagcgccccactcggggaagagtcccggcccgcgtcccagtcgcgactgctccgccgcccgtggctggggtgggtgtgagcggcagcggacgccggcggggaacgcgctccgggcaggtcggggccacaggagggcggaggacgcgggcctcgagtccacggaatccacgggcctcacggccgggcgaggctcgcacggagctgcctctggtttcgccgacacgcggccggcgcggtggaggagtgaggcaggcgggagcggggcggggaggcgggtcccgggaccacacgcgcggctcggcacttccccgtcatcggcctccaggtctcccgctgggggtcccccaggatgtgacctgggcccacgacttcgcccacgggccgcctctcgcgaatccccggccgggagaacagagaccaggacggcctcagcgcggaagccctgtccagggcccgaacgtgggtgcgggctgggggcgcagcggcagaaacgcggccttagacgcgcgcggggggccggtgtcccccccgcccccacggcaccgggagccgctcgctcatccatcccgcagaccgggcggtgagatgactccgagccccgcgcacggcggccgcgagcaaacgctccgacgtctgtggtgacgtctcgtattgatttagggacacggggcggctgtggctgtggcccacggctcgtggggagcccgagtctgtgcgcagggaacgccgctgcgtggcctctctcgggcctgtgccgcggaggaaggcggcgcccggggttcggggccggggtctcacgtccgccccctcgcccccctccagcgtccgttttcgttttgtgcaggtcgaggcggggacttggcgccgtcggccgctcctggatggcggcttggaaaagccacctgcggccaaactccggggcagtggtgcggccgccgggtgtgtgcgcgctcggggctgccccggcggcttccggctccactgaggtgcagccccgcgttcacggggggttcgcttcccccgtcgactccgcactcgattcgactgggattgggattcgattgggcgcggccgccccaccggtgatcggcccccgcggagcctggcccgggaacccccagcgcccgtccggccccgagacccgccccggcctgtcctgcgccccgctccctcggaggagacacgaggaagggccctcccgggtcgggttcgggcccctcccagcaccccaaggcgacggcgcccgc

SEQ ID NO: 334133 - DNA, 547 bp, Homo sapiens
  chr10:134601242-134601789
  hyper
cgggctctgagctgagacgcgggaactgcggggccggggggggcgggcagggggagttgggggcgggggctgctgtcgccctgggatcccccactctgcgcggccgggcagaccctgggcgggccgggaggggtgcgggtcgcccgaactgaggcccaggaggcgcgcgcgggcggaacggcgggaggaagccgcgctcgggacaggctctggctcttctcacagcctggaggggcggggcagggggcgtcgctagcgctgttttatggctgaggaaacatggacctggaggcgctgcgctgcggcccgataaaccctgggtctgtctgcgccccccggtcctccctgggctgccgagggaacgcgtggggtcgcgggtggggctggcgtgtcactggctgcggagcgcgcggctctccagggctcaggggcgcgggatgaggggccagggtgagttgggggcgcagaggagccgggtaagggggggtccctctcccacgttcttgtaagccgtggaagtcttggcgcgctccgcaggtgccgcgtc

SEQ ID NO: 334134 - DNA, 540 bp, Homo sapiens
  chr10:134602002-134602542
  hyper
cgagcgcctccgaccgcgatgtctttgcctgggctccgccgcccggcggccccgctgcctggagaggtccgcgatgccacctcctggcccgcgagcagatgtcccgcgaggaaggctgccggcatcggcgccgacgctccgcgctggaaaaccgagagcgcggggtttggcagaggccattcaagtttgttttactcgttcagcctgtatttgtggggctcctaccgcgcccgggctgtccggggggtgcaccgtgaacgcagcgggctccggcccgggcgcgggcgggtcagagcagcaaacgcgctcccccggcacccccgcggcgtctgcaggggagcgggcgacggggaggacggcgggggtgtcggcccggaaggagagccggcctaggccccggtgtccccgcgctgggggctgaggggcgacgggggaactccacagagggaaggagcctgcgttcgccttcggccgcccaggccatagagttcacaaactctgatttatcactgaggtgacttgtcccgcgcagccctaggc

SEQ ID NO: 334135 - DNA, 418 bp, Homo sapiens
  chr10:134676276-134676694
  hyper
ggcctcggggagcaggttcaggagaggctggagggggacggggcggccgggctgcactggctgagggtgaggaggggcgggaggggagggcagcacatggaggcaggctttctgtggtgtggatgtggctgagaagccagggtgagctgagggcaaagttgaggacgggaggtaggaggccttcaggcaagagggcgggaaagatcaaggaaacaaacaacttcctgtcagaagcgcctgctgtgaaacaaagtccctgcaaaacagcggctgcaggaaggagggtggcgaacccacgttcgcgggagtccagcacccatcacgtctgtcctgggtctgggctccaaggtccacggtggccccgggtatgaggcaggttcactccccaagtcccagagctcaggaccacggaggcccc

SEQ ID NO: 334136 - DNA, 1198 bp, Homo sapiens
  chr10:134901198-134902396
  hyper
cgtgcagtccgcccggcggcgttttcgggcgagggtctggtgctggggagcgagcgcggagcgaggtgtctctttaaatacgctctgcagtgtgacggcggccgcccggctggaagagccatccccaccctgcggcaggagcccgcccgccgccatcgcccgccccggtccccatggttacgcgcctgcctccggccccgggtccccgctgtcgccgcgggaggtgcgcgcagaggcggcggcgctgctggccgggctgggccgctcgtgcgcggggctgtgactcaccggccggcgccgcagccccgcaatctgttgataactcggtcccagctcggccgctgccctcgcgaatggagagcgggtccccggcggggggagcgcagcgcgtctgtctccgggagcgcggcccggccgccccggcagccgcttcggccacagcaggtgggaaggacgcgcgggtctgggcggcgggagggacgcgcggggccgcggctcggcagaaaagctcgcgccccgaggtgacactggccgcgaggaaagcagctccgagtaactttcggctccgctggggcgggaggcgccacggataatccagggcccccgccccgcgcgcccggcccggagctcgagccacatccaggcagagcaggcgccgcggccgggctggggcgggcgggtcactcggtgccggttcccggtgcaaaccccccggcgcgcctctggctttgtgcagcccgagatggttgagtttggctccggagccgggagtggggcgcagattgatttttaaatatggagaaggagacgcatctgccgctggcgcgttcggtccgagccccccaccggtccccaccggcaccgcctccgccagccccaggcgcagcccccaggccgcccgcggaggggagggagcgacaggggccgcggctgctccctggcggggtcggggctgcgagctgccctccgcggggaccctccgcccgccccgctgaccgccgctgtcttcacagatgggagcagctcccggactgcgcccgccccgccgcggtcaccctgaggccaggggcccgggagcgcgacctcctggccgccgtctgggactttgaccttccagaggccatggaggctggcggggagcagggcgccacctgatcgcctccccctggacgcctcctccagcggcgctcacgcttcc

SEQ ID NO: 334137 - DNA, 741 bp, Homo sapiens
  chr10:134973438-134974179
  hyper
cggcccagcgaccgccccgccccccaccccgggccccgccccccaccccgggccccgcccggccctgcccaacgccgctgcagaggccaccccgggactgcggcagccccgcccggcagcagcgggggtgggacgggggcggcgggagccggcgagggggtctgcccgtccgagctttcctgggcgccggctccgcccctcgacccttggggcccaggtggggcgcagaccccgtggctccccgcggaggccacacgcctggctccgcccccggtgcctcccccaggaaggagcgacgttccctaggcgccgggtccggacagcgccgcgcagcccccgcgcaccccgcgccccccgcgccccccgggcccgccccgtatccctgaccgcgtcccctggagacactgcggcagcggcgggcgggcgggggcgggcgagggccgggcgcgtctccatggagccagggcgcgcgtagccgagcccagcccagcccagccggaggccccgggggcggtgcgcggcgcggccgcaggatgcaggccatggacccggccgcggcggatctttacgaggaggacggcaaagacctggacttctacgacttcgagccgctgcccaccctccccgaggacgaggtgagcccccggccccactggggggccccttccgccgccgaggggtccgcggagagcgcccggggggaggacccgggaggggctgtgagctcccgcctccccaggc

SEQ ID NO: 334138 - DNA, 1637 bp, Homo sapiens
  chr10:135043103-135044740
  hyper
cggcgccgtgcggcaaggaggaagagcatttaataggaagagaatttcctcctcccagggatgctggctgcagacgcgctgcagatggaagaagttcagattttaaaagctacttctgcgagcgcgtgaattccgacacccattcccgcggctggcgtggcttctcctcggacccatcccctggcctggcgactccccctgggacccgggtcggtcctccggacccctcgcgtgcaggtgctgagcccgggcgggggcggcgggggcgggggcagcactgggggccggacaagggggcgccagcgccttccggagcgggaggggctccgcacacacctcgacgggggcgggggtaggctcggcacaggctaaaaacgagcggagccgccggggcttaggcatcgcggcacctccgttgaacgggtctaagaacagaactcctgaggaccctccgtttccaaccgaagccagtctttgctctgcgtcttcccggccgcagcgccaggaccgaccccttaggacccggcgggcggggcggggcgcgcggggcggggcggggatggtgggagggtcgcgtagacccggctgggacggagggacggcggcgcgggatgctcagaacgcgtgtgggcggcccgggcggcgtctggccctctccccatcctcgcgcgccgcgccccagccccgggatgctgctccggccccgcaggccgcccccgctcgcgccccccgcgccgccctcgcccgccagccccgaccccgagccgcggacacccggagacgccccggggaccccgccccggaggcccgcctcgcccagcgcgctgggggaactcgggttgccggtgtccccgggctcggcgcagcgcacgccctggagcgcccgggagacggagctgctgctggggacgctgctgcaaccggccgtgtggcgcgcgctgctcctggaccgccgccaggccctgcccacctaccgccgcgtgtcggccgcgctggcccagcagcaggtgcgccgcacccccgcgcagtgccgccgccgctacaagttccttaaagacaagtttcgcgaggcgcacggccagccgcccgggcccttcgacgagcagatccggaagctcatggggctgctgggcgacaacgggcgcaaacggcctcgccgccgctccccggggtccgggcgcccccagcgcgcccgccgcccggtccccaacgcgcacgcgccggctcccagcgaaccaggtaggcgggggactggggggccaggtggggccgaggactgcggaggaaccgggggctgccgagggctgcgggggaggggcgggcgcgccccgcgaaaatccgcccgaccgcctgctccgcgttcccagacgccaccccgctgcccaccgcccgcgaccgcgacgcggaccccacctggacgctccgcttcagcccgtccccaccgaagtctgcggacgcctcccccgcccccggctccccgccagctcccgccccgaccgccctcgccacctgcatccccgaggaccgcgcgcccgtccgcggccccgggtccccgccgccacccccggcccgcgaagaccccgactcgccgcccggccgccccgaggactgcgcgccccctccggccgcgcccccgt

SEQ ID NO: 334139 - DNA, 122 bp, Homo sapiens
  chr10:135075001-135075123
  hyper
cgcgccagcctggcaccacggggacgctcccagggggtgcccagagggaacgtgcgcatcgggcggggtactgcggcgcgtgtgggccgtgagccccgccctgtagtcggacactggagtcc

SEQ ID NO: 334140 - DNA, 293 bp, Homo sapiens
  chr10:135090197-135090490
  hyper
cggggtccgcgtcgcgtcctgcggggagagccaccctgccccgcgctgcgcccgggacggttccctggaaccactcaccaggcagcatcatcgcgcccagcagccagagcccgaggccgcgcatggccgggtcggggagcagaggcggaggtgacagccccgcgggacacggtctggttcctgcgctcctggcccgaggctcttttccgcgcgccccgccccggcgccccgcagccaatgggcccctcggccggtgggaggggcggggcgcgcggcacctgggggcggggtcc

SEQ ID NO: 334141 - DNA, 151 bp, Homo sapiens; identical to SEQ ID NO: 235258
  chr10:135192040-135192191
  hyper

SEQ ID NO: 334142 - DNA, 709 bp, Homo sapiens; identical to SEQ ID NO: 235262
  chr11:280032-280741
  hyper

SEQ ID NO: 334143 - DNA, 295 bp, Homo sapiens
  chr11:308160-308455
  hyper
ccatcccggtaacccgatcaccgctggtcaccatgaaccacattgtgcaaaccttctctcctgtcaacagcggccagcctcccaactacgagatgctcaaggaggagcaggaagtggctatgctgggggtgccccacaaccctgctcccccgatgtccaccgtgatccacatccgcagcgagacctccgtgcctgaccatgtggtctggtccctgttcaacaccctcttcatgaacacctgctgcctgggcttcatagcattcgcgtactccgtgaaggtgcgtatggccctggc

SEQ ID NO: 334144 - DNA, 729 bp, Homo sapiens; identical to SEQ ID NO: 224005
  chr11:369470-370199
  hyper

SEQ ID NO: 334145 - DNA, 307 bp, Homo sapiens; identical to SEQ ID NO: 224006
  chr11:406793-407100
  hyper

SEQ ID NO: 334146 - DNA, 75 bp, Homo sapiens; identical to SEQ ID NO: 224007
  chr11:407428-407503
  hyper

SEQ ID NO: 334147 - DNA, 1007 bp, Homo sapiens
  chr11:416533-417540
  hyper
cgccagctcctcccgccctcagacccagccagcgtcctcggtccgcggccgcccctgcccggtgggttcgacgctcagcacccagcaccctgcgggcgactcccgctcagctcggacgcgccgcccctccgctccccgtgcgcgctgggcccccagcgcctgtcctgaagcaggaacgtgggtaaaaggctgcggccccgcaggccgaggggctctggttcgctcccctaccccgcgcccacctgcgccctgggcgccctccaagtgaggagggcggagaacgaggacgcgcgcgggaggcgggcacgggggtgcggctcggggcgctcggccggggcagaggcgcgcggatggcggaagctccacccggcgccgggcgagctcgggccccagcctgactcttggtccgccctcggcgcctcaggaagcctcgagctgggatccaggcttgggcgaccgaggtgggatccctgcgcgcctcggcgctcctagccccgctctgttctgcgcgagggtcaccaaaaagccgctgaccacgtcgggcagaggaaagggtggcccccgcccccttcgcccactttcctcccttcccccagccctggaaagggccaggacgcgggcgagctcgggcttccgggcgacgcgggaacctccccggccccgagccatttcctgagagaccgcgcccagggacaagcagcgccccgggccccgactccaggcctgcagcggctctgggaggactgcgacctccactcaccttcgcgggtctgatggcgaccgccactcacctgctgccaggacctggggctcgcgccgggcgggggcggggcagctcacctgagccaggtgcgcagcggcaacagccccggcggcggcgtagccccggcagcggcagcaggtgcggccccgccccgcagtcagggcgggggcggaccccagcgtcccgctctgcgcccaaggctggcgctggaggctgcgctgctgcccgggagccgctgccgcac

SEQ ID NO: 334148 - DNA, 117 bp, Homo sapiens
  chr11:441960-442077
  hyper
cggccaggagagtggctgccagcggcgggtgctcctacctgacttccgcgtggggctcgcccctccctcctcctcctccagcgtcctgcagctgccgcgcctgggtgtagtcggggc

SEQ ID NO: 334149 - DNA, 663 bp, Homo sapiens
  chr11:536905-537568
  hyper
gcgcggtcgcagtcagagctcggctcggggcggacacgcatgaacgcgagtgagaagcggcgactggacggcgggcggcagcgtgtcccgcgggccgggcactcgggtgcgctccggcgtccggtgtgtgtttcctggtcctcgggggcgcttcccccggtgcttccttttgccgtcggcctcacttccaaccgaaggtcaggacggcaggcctcggccccaggggcgacccttccacctgggaaaggtgggcgcgagcctccagcagagaccgcctttacccgccccgcgtgggaagcgccaggatcgcgaggaaacgcgacacgtgcatcgcgacggcccaggcacggagccgcaggaagctggcacctgacgcgcctgcgcccacccaactcgagttggtggcgcgtcaccttcccctgggatcgcccgcagcaggggcgcccacgcacgtgccagtccacgtggccccgccctagcgaccgttgctaaggggcgtggctcagccgcacggaacccgagcccccggcgacttataaatatttgcgtattcaaatgaggcctggctcccgttgctatggcgcccaggccgcaaccccgcggcggccggaagaacagcctggagtaggagacagcgcctggaggtggagggcgcccagggcc

SEQ ID NO: 334150 - DNA, 672 bp, Homo sapiens
  chr11:705963-706635
  hyper
cgcggaggggcacaccaggcgggtgttggggaggacgcagagggctggggctggagcccaggcggggcagggggcggggcggagctgggtccgaggccggcgggggcgcctccatcccacgccctcctcccccgcgcgcccgcccgctctcgggtgactccgcaacctgtcgctcaggttcctcctctcccggccccgccccggcccggccccgccgagcgtcccacccgcccgcgggagacctggcgccccggccgaggcgcgaacagacggacgcaccggcgagcgccgaggggacaggccgagcgcggggcgccggaggcaggtgagcgctgcggacacgggggagcgcgcccgcccgggcctcagtttacccggtggcgatgggacgcggggcttctggttcaggacaccgggacgaacgcggcgtcgcagggcgcggggcacttggagggcggccgggccgagggcgcggggcaaggggctgggggcctggtcgagtccccacctctcctggacgggtcctgctgcagcccggcctgcccccgtcggtcctgggcggcggccggcgagcaaggatatttttaagccagcgatgggtgactcacctgccccgtcctgcccactcccagctctggggcttggtgggggcaatccctgcgtccggagagc

SEQ ID NO: 334151 - DNA, 1236 bp, Homo sapiens
  chr11:829438-830674
  hyper
cgacgtgcagggcacggcgggctctctggatgaggaggaggaagaggaggagcgattccacactgtgctggagcagctgggggtggccccggtcctgggcaagtgagtcggcgctggccccgctcccactgcccgctctgctgtttctctgcctgcatgctgtctgcccttgtcacccgagtgctggttctgcacagggtctctaggccgggtcaggcccagcctagcgtcagctgcgattccctgggagggacccggcatgatttcccgcagaatttgcatttcatgaggcagcagccagggctgcagggaggaggggcagcgccgggcgcggggccacataccggcactgcccagggtacacacacctcaccgaccacgcacgccgggcaggggcgaaagcgctcacgggagggatgccctgcacgcagcaagtgctcctgtcctgcccaggggcgaagaagtctcctaagggtttgctgctggcggagggaagcctgcttcccgcttctgccagctccagcctcagttcccgcccgccctccaggcagcgggctgtgaggacgctctgggccaggctgcagcgcgagcgccccgagctgctgggctctttcgaggatgttctgatacgcgcgtcggcctgcctggaggaggcggcccgggagcgcgacggcctggagcaggcgctgcggaggtgagggccggggtggggtatgggggccaatggagggcctcagggcagcagcagaggcggtgccagggggctgtagcgctggcaagttctcatccggggtcgcccggtcccccgaaggcgcgagagcgagcacgagagggaggtgcgcgctctgtacgaggagacggagcagcttcgggagcagagccggcgcccgccgagtcaggtgggcctcgggccccgcccctcccgccaggcccaatcccacctcgctggcctccctggctccgccttctctgaattaatccctccccgacggccccacctccgcgggtccaggctgccctcagcccgaggagatcccactgggcctcacgtatcacccccgtccggtcttctccacccgaccccgctccgcccgggcccactcccagcccctggccctccgtgtacctcttttgcatggccgagcggccggcggaggctcagtggtcctccgtgcgtcccagaacttcgcccgcggggagcggagaagccgtctggagctggagctgcagagccgc

SEQ ID NO: 334152 - DNA, 1317 bp, Homo sapiens
  chr11:1410711-1412028
  hyper
cggacgtggcagccggcgggctggaggctcccaggtcccggcctcgccctggcctcgcctcgccccctagagtctccccgagcgctcgtagcggcggggcggggtggggaggcgctgattggccggcgcgggcaccgcttgccgccgccacggcatcccgctgcgttcgtacaggctcgtgtcgactcggctccgttgcgcggcccggctcggctcccctcagctgcgctcgactccgctgttcggctcggctgttcggcttggctacagggctcggctgttcggcttggctacatggctcggctgcgcggctcggctctgttcggctcggctcggctgctgggctcggctgttcggctcagctgcgcggctcggctcgtctcggctctgttcggctcggctcggctgctgggctcggctgttcggctcagctgcacggctcggctcggctcggctcggctcggctgcgcggccgctgacgggcgtgcgctgggggcgcggggcgcggggcgcgggcctcggcggcggcggcggcggcggcggcggaagccaggtgcccccgcccgccctgtcctctcgacgaggcggaggcgtcgccgcgggccaggcctcggactgccgcgtcggagtggacgcggggggcggcggcgcgggcggacgcgggcggcgcgaagcagcggggcccgcgggggcgccccggccgggtcggcgcggacggcactcggcggacgcgggcggacgctgggcggcccctccctgcccgcgcgcccgggcgcccctggccggcgccgggccccagagcgatgacatcgacggggaaggacggcggcgcgcagcacgcgcagtatgttgggccctaccggctggagaagacgctgggcaaggggcagacaggtgcgtgcggccggggcggggaccggggccggggaggccgcgctggcagcgcgctgggtggggggcgcccgagggaggccccggccgcgaagccgcaggcccggcccgggccccggccgcgaacaatgggcggcccgtgcgcccccgtccgctcgtgcgccccggttccgccgcggatcccgcaggccgcttggctgcggtcggccgggcgcggcccaaggacacgcggcgcggcgcggggcgcgcaggcggacaggggcgcacgggacggcgcccctcgggccccgctgcaggtgcgcggcccgggccgcattgtgcgccccagcgaccgggcccattgtgccgcgggaggagggggccgcgcgggcgcccatctgccgtctgccgcggccgcgctaataggcgtgctgcccgagcagctgc

SEQ ID NO: 334153 - DNA, 1868 bp, Homo sapiens
  chr11:2290847-2292715
  hyper
tcgggcctggcgctcggctccgcgggctcctgggggcgcgacccgccgggcctgcccaccccgtccctccaccccggcccccggccctccctcctccctgcctcccggctgttacctcataggtcgagggcgctcagtagccccctaaccagctggagaagtcgagtagctcgcgctccgcaggactcagcgcgccttcgcagccgctgtcgtccgacgagtaggcggaacgcggggagccgggctccgagctgcccccgcggcccggggacgaagaagcgcgggagggcgaggcggcgaccggggtggtccctggcggcccgcggggcgcagacggccgcacggcctgcggcctcagccctcccgccagcgcgttgcgcacggcgtcgtgctcggccagcaggcgctgcagcgcgcggatgtactccacggctgagcgcagcgtctccaccttgctcagcttcttgctggcgccgccgtgcggcacgtgctgccgcagcgcctggaagcccaagttcaccagcttcacgcggttgcgctcgcgctcattgcgccgcgctacggccgctgcgccgcctccggtctctgcggtggccggtcgccgccgccggctgcagcgcaacagttccggggacgcgggtctccgccgggcagcgcagccgacagggacggggggcgcagggggcgcggacctgggcagtgtgccgccgtccatcgcgcctgcatccacccgcccgctccaggtcccggcgcgccgcaggaaggtgcaggcagaggaaccggaggcgacggggaaaactgtggcgccccaagggggcttctggcacggcgccgccaggcaactccccagggcacgcgtcctaggtcgtctggagcccggggataggaggcctagtggtggcaggccgtacgcgccagggagcgtgggacgctcgtgtcccgcgcgtgcggccggactctcccaggtctccgcaggcgcggcgcaggcggctggtttttaaatgtatagataaccctcctccgcgccgccgccgtcgcctttctcacgccctccttccttcgcctcgccctcccgccacgcttcgccctccccctcgcgcgatcacattctgtaaggcccaaagcgtgcgcatgtccccctagcccatcccccggacgcagtccacagatccccagtgcgcccaactggcgaaatctgcgagttcccggtgcgccccctgctcccggcaggtgcttagtgcgcccccaaagcaaggtacgcaggtcctgggttgagccttcccgtacccccaccctaaccccgcgcgcagccccgccagtcccaagagccgccagaccttcgcacgcgcagcgcgcgctgtgggagggaaggcgcggccctggcgacaacacggctgttcgggaggcgcgcaagatccccgggggcagcacgcgccgcgcagcccacacccacgccccaccctcctggggccgaggaggcgggggccagggtctcagccaatcgtgggccacccgtttggccaatcgcgcagggcgcggctccacgcccggccccattgaggaagcgcgtacgcgtggcgcgtggctcacggggagcatcgctaacaaagctgggttcctgctgggccccgccctgctcctcgcccccgcgactgggctgggcgcgctgtcccctagcgcagctatgtcccgagcgcgcccccacctgtgcgttaatctactgggaatgggggtggactgcgccttacctggggcggggtggggcttaaggagtggtcgagactgaggcggggtgggaggttcaggttcccggggcgccttccccaacccgccccgctttccccgtccctccacgcgcaccctgcctg

SEQ ID NO: 334154 - DNA, 1041 bp, Homo sapiens
  chr11:2398759-2399800
  hyper
cgcccgccgcccgcgccgccatgggagtggagggctgcaccaagtgcatcaagtacctgctcttcgtcttcaatttcgtcttctgggtaagggctgcgccgggggccggggcgggagggggcaggcacacactccacgttgggcaggtcccgcggcagcgtgctaggccccgcgggcgcagcgcgggccgcgaagttgtggggccacctgtgggctccaggagcggggtggggggtcgcccggggccaccgcgccccccgacattggggctgagggctgcgagccgagtttcggggcctctgtgctcgggggcccacctctgcggccgggccggggcttctgggggccgccgggcagttcccgctgtggtggtgatgggtgcggtggtcgcgggtcgggacccgagtacccggccgcccctcagctaaggaggggcctgcgcgggtccctggccgcggattccggactgctgcttcgcggggacgaggggggggctcgcgggcgggactcctggcgccccgcccccatgagctcatcaagagccgccgcccctggatggtggggcgggggcgcacactttgccggaggttgggggcgatccgcctcactctttccccagcccagctcactctccaatctgcggtcaccacccgagaccttcctgggggtcgcgcctaaaaggagcgcagactcccgccgggatggcccagaagctggggtgcgcgcaccctggccgtccctgcctgggagccgatctccctctcctcacccagacacgttccagcggaggcctcctcccagaagggctctggaggcctcgcaggagtggggatcccgcggttctgagttggcacaaggaagagagtggcaccaggggcctggagtggatggcagggtccgggagtggggccgctgctttgcaagaggggcccccacgctgggcatctttgggtgccagcgtgggtggaggagggtcttttgctgagaatggctttctcctgaccgcagtctttgctgctgggaagtgactgatgggctttc

SEQ ID NO: 334155 - DNA, 189 bp, Homo sapiens
  chr11:2465458-2465647
  hyper
gcccgcagctcgcgcgcctgggcacccgggggcgctcacagtgatcgcggggccagcacaccctcacccaggacatccctttcctccccccaaccccaactccggagtggctcagagggagggaaagtagatgccggcaccctaccccgcccctcctgcccccgctgtgccgttctcggtcgtggtatc

SEQ ID NO: 334156 - DNA, 828 bp, Homo sapiens
  chr11:2466019-2466847
  hyper
cggaggcagggccaggccggtccgtggggagagggcgggccaagccggtgggcgcgggcagggacgccctgtgcgcgccggaccggcgggggcggggcgtgcaggcgggggcggggcacgccgtcccatgggaccggccctcggccactgccccctccggccccgccccgagcgcccgggctgggccggcagcggccccccgcggcggggctggcagcagtggctgcccgcactgcgcccgggcgctcgccttcgctgcagctcccggtgccgccgctcgggccggccccccggcaggccctcctcgttatggccgcggcctcctccccgcccagggccgagaggaagcgctggggttggggccgcctgccaggcgcccggcggggcagcgcgggcctggccaagaagtgccccttctcgctggagctggcggagggcggcccggcgggcggcgcgctctacgcgcccatcgcgcccggcgccccaggtcccgcgccccctgcgtccccggccgcgcccgccgcgcccccagttgcctccgaccttggcccgcggccgccggtgagcctagacccgcgcgtctccatctacagcacgcgccgcccggtgttggcgcgcacccacgtccagggccgcgtctacaacttcctcgagcgtcccaccggctggaaatgcttcgtttaccacttcgccgtgtgagtatcgccaccggcgacggccggcacgaaggtgcttcctgagagctggtgtgggggagctctgtcccagcgccacctgccccgtcggagctgcgaccccggagcagaggagggaaggaagtggggaaac

SEQ ID NO: 334157 - DNA, 857 bp, Homo sapiens
  chr11:2949962-2950819
  hyper
cgagaccctgacgcgagggggccagcgcgattgcggggcgccgggtcccccaaggaggtgcagcgcccccgccccgccgtctggggttgaagtggtttttcccaaaggccccggtcccggctgttagggcgcagggctcgccgggacgcgggcagtcactcaccgcggcgggctcatggcgtgcggggtttgggctgcggggatggcctggagggctccgagggctcggagggtgcggcggccgcggcagccacggcgtcctcggcgggtgcggcgggtgcggtgcgttcctggcggctgcgaaagtcctgcagggcgcggcggttctggaaatcgatgagcgccagcgcgatggccgcgttccagcagctctcgcccgcgcagcggaagtcgatctccttgtggtcggtggtgacgatggtgaagtacacgtacttgcccgtgcgctccacgcagtccaccttgaggatggagtggaagcgcagctccttggggcgcgcgcgggggctggcggggaacaggctcaggcggtcggaggtgagcaccccgcgcttcttcttccatagctggaagaggctgtcgctgcgcttctccaactcgccctcgcgtagcacctcgtcgggggatttcatgtcgtgccgagcgcgggactgggagcggcaatgcgggcggtgacggcgccggctctgctcctcgtggccccggcgcggcctttatagctgcccctccccgccccgcccctccccgccccgccccggccctcgggccaccccgcccgcctgagccccgcgcgccccgggccataccctccccaagcccagccgtccgggcccgcaccgtcgcgtccgcgctctggt

SEQ ID NO: 334158 - DNA, 97 bp, Homo sapiens
  chr11:3181650-3181747
  hyper
cgacccacactccccgcgtcgcattcaccctaataggcgggcatacaaatgccgttgcctggagccgcagcccagcgaatgggacccacagcggcgc

SEQ ID NO: 334159 - DNA, 750 bp, Homo sapiens
  chr11:3186017-3186767
  hyper
cgcgtcggccgagctggggggacagaccccctgattggccagggtttgtggtggtcagacccagccaccttccctggcggtcccggctcctttaagccccaccaagtggggagccgagctgggcgcgccgcttcccactcgcgggccccacccgccccaacccgccaggcgccgacccgtcctggcccggggcgcccccaggctcccgcgctccccagctccccagcgcgcgaccggccccgcggcgtggttccccgcactggctactgccagggtccgcggggctgcggcgcgagctcctggatcccttcggccggccccccgcggccctcggttcgctccggccctgcccggcggggccctccggatccttcccagcccgccatccccccgccgccctgccgccccccgggccgccgcgctcctacctcctaccgtgccgcgagctcggtgctccgggccggccgggcgcgcgggggctccactggcggcgcgggcctggctgcaggaaatgccagcagatggtccccccgcgcgaggcggagcgagggcgcggcggagggaggaggcccagggagcccggaggcgggaggaggaggcgcggcggccgcaaaacccgggccgaatcgccgcgcggagcgggcgcccaggggctgccccccaccggctgccgcttctcctcatcccccaaccccccgcgcgcgctccggggctcacacccacccgggcggccagaggtcgggacactcc

SEQ ID NO: 334160 - DNA, 472 bp, Homo sapiens
  chr11:3663265-3663737
  hyper
cgccccccgccccaagtctccgcccccgactccccacaccccttcctcagagcctccagtctggggacctttccgagactgtaaaggcggggccgcagtttggctccgcctgagaggggagggccgggggcggaggacccacttgaaggctgcggaagccgccagcgggagggagcgccgagggctctggcgggcgctgcgctgtccccggaggagtccggagtccggctgaaagcaaaggttctcgaggctaactgtagcccccgcgctggtaacccgacacccctttcccagcgccgcacgcggggccgggagcgggcgcgccagggcagggactgaggagcaattccctttctcaaggcctgcggggtctttctgcgggaccctctttggctgtgagtgatggggaggaaacttgtgagactcggcctctccctcaggcgggccctgacccggtcggcccctggtcccc

SEQ ID NO: 334161 - DNA, 534 bp, Homo sapiens
  chr11:7694738-7695272
  hyper
cggaatccgagccggcccgccccactccccgcccttcgcggtcccgcccacgacctctccccacgcctcccgctccggcccccaacctcccggtcggacgttcgttcccggctctagccggcctccgcgcctctggcctctttccttccggccgtcccgacggagatatttcttcaatactccataaatacaccccgccgcggaacccacccggagtgagacgcccaacacgtcgtcgaactggggttggccgggggccgctccccgccgcgggcccgcagactcgtggcgtcgccccgcagctccgcctggccgacggggaaccggccgagacccggacacgcacgcccgggaggacaaaagcgcgggcggaccccgcaggctgggaccccggcggctggcccgctccccgagaagggccgtggtcggggggctctcactcacgagccgctggctctgggtcagccctgcccccagggcagcgctccatcatgaggctggcggggcgctgagccgtggcgtcctcgctcctgc

SEQ ID NO: 334162 - DNA, 1176 bp, Homo sapiens
  chr11:8040395-8041571
  hyper
gctgaagactcccacgccggaaaggagggcgcctctgcggaagggccccgagtggcgacagcggatccgggactcccaagcaagcaggagccggagcagcctcttagcaacccctgtcccgggaaggtttgaaagcagcggtgccctagtgacgccggaaaagatggagcggttgtcatggcgacgcggagcacacctcggaaataaataaataagcgcccaggctgccgcagccgcgcccccgcgggacccgagcgagggggagggggcctcacgggcccgggtccccgcagtcgcgcgtccccgccattggcagagccggagggggtcaccccccggggggcgaatggtacagtcctccgcccgcgcctcggccgggcccgcagcctgcgagccagccccaagcccagcgccgccgccgcccgcggagccccgagcggagccggaggcggcgatggagggagtcagcagccaccggaccctgtcttacagccgctggagctatgacaggtagggcgcccgaagggtggccctgcgtgagcgcctgctgaccctcgatctcctgcgggagaagcgggcctccgggggctaggactggcgcgagcgcccgacccccagggtgggcttgggcacccggaccctcgggcatccgggacccagagcctcgggtacggcgcagcggagctccagcgagggtagtgtccccacacccacggggcagagctgtcggaggagggcacgcggccactgggactagcgagctggcacctctgcccccaccccagctgccccgccagggtcgctccgccgggggaccccgagaaagggcgcggagggggcgccgggaggggcggggcaggggccggggtgggcccctggcgggcggggcgaggagggggcgccttcggctctgggatgcgcccgccggcgtctgcgccccgccggccctccgcagggaccgaggctggccccgggcggagtgtcccgctggctgccggggacccgcgagtcgctgcctgttccgcggggcgagatggcagcctgggccggctgtctgggcgcaggagcggcgctctcgagttgccaggctccgcgcccgccccgcggggatggcgagcggctgccggcgtgggcggtttggagctgcgctccccacgcactcgtcctggaggaagg

SEQ ID NO: 334163 - DNA, 693 bp, Homo sapiens
  chr11:8190059-8190752
  hyper
ggaacccttgactcaaagcacgtgaacaaatggtgacgagatgagttaagccagcggggtaagagagaagggactgcgcctaaacgggagtacgcaaggccacctagaggatgcacagacctgcatgcatacgttcctgacccttccagcagcagaaccatctgggccgccacccgctgataacaacggaaccgtgggcattggcccttcaacgccgtctcgcccgccctctccagtcagtttggtggatatttcggtgaaggctgcagactctcagagtcacccctccctcaagcagcgttctccgtactcttcggcgccgggaagctcagagggagctggcctgctcttaccttcaggtgtcggcggcggctcctgccgcttcccgcgggacaggaaggccttgggcagcagcagcgacagagccaggacaagcccagaagccagagcgactctctgcactgtggagtacgccatgactgctcacggtggtcgcaggtgcagacgccagccggaaccggaaccggaaccggagcacgggctgccgctcccgaccgaaccgcgggcggcgcggacggcgtcgcgcgagggacaaggtgcgcgaggcgcacgcatcttcacctccactgtcgggagttgacctgctcctcccgcgtggttacccgtcgctgtaaatggtaccctcgccttccc

SEQ ID NO: 334164 - DNA, 866 bp, Homo sapiens
  chr11:8284165-8285031
  hyper
ccactctcgcaggccgctcccgcacaagtgctaccggccggcggcgggacactttcttcctctgggccaaactcccgcctccgcgctcagagagacagggagctagcgggccggcacaagaggcggctctctttctcaccgagtcacgctcatgcagatgtcccccggagggtccaacccgccttcccctcgcctgccgggcaccctggcgctcgcgccgtcctcccgcgctcccgcttgccccgagctctggagcccgattctccccgaagccgctgatttgctcggcgctcagcgcctctcgggttacgcggcggctggcgcgagggtgatggctgcggtgagagcagcagcctcagacacgaaatgctcagagcgaacctccgcggcgcggagatcgcaagggagccccagcctccgcgcggccccgcggcgcagcacacggccagtgcacagctcctcggctcgcggccgggacccggggggcgtgcggccccgggcgcgtgcagcccggggctcgacctcctccccccgcaagttccgcccggctgtcccccggtacttccccccgccccagccccggcccccagcgcgccgcccgccccgcaatccccgcacagcccagcaggtgtgcgcccgtgtccccgcgtgtgtgtgcctgcgcgccgcggcagggggcgagggggtgaggggcgtcgagaccccggcccgccacctaccgtcctccttgtccagcaccatcatctcgggcgctccgtgtccagccgcagctaggctcggccgggagaagggcgccgactcggggcgcgctttggaggggcggccggtcttcgggcagctagcgggctctaattacccgcttgtcc

SEQ ID NO: 334165 - DNA, 777 bp, Homo sapiens
  chr11:8289532-8290309
  hyper
cgctgggatccgttccgcagtagggtgcggaaggggaacgtgcagacacccagagaggctgggagactggctggcagtgggcactgccgggaagcccgcggtgcgggtcgcagaggcgctccggatgcccgcaaggcggcaagagtccgtgagaaagttcccagccggagcgcgcagggctggcggcctcgttgggaccgggagacttcctaatcccgccgccgccgaagcccgggcgctgagcctggcaccgccgaccccggcaccggcgcacacatcagccgccgcgcttccgggaagccacccatcagccggaggaggcccgcgggtgctgagggctctgccgccgctagcggggtggactccgcagggccagcgccgcagtctccgccccacgtcccgcgtgcccccgggcaccggcaccgggcgccgggcacctaccgtcctcctggtccaacaccatggtcccgacggctccagccggactagcgccgaggatacggaggggcgcgtggctccgactcccgccgccggccgcctgcgctgctcccgccggccccgcgcgggcgccgagtccggagagccgcgaccgccgacgggggcagacggaccggagtccggagcgcagccccgcgggcagggagcgcaggaggagggactggggggaaggcgcgggggcgagacggccaggccgggatcgcgggagcctcgcgagcagcagctgcccgggccgggccgcagccggagcctgagccgcgcgcgcgtccttcctccgcg

SEQ ID NO: 334166 - DNA, 713 bp, Homo sapiens
  chr11:8615303-8616016
  hyper
cgcttctaaactttcaaaaagtttcacgtcccaagatggggtgaaggtgagacggtggagatgaaccggggcagacagagaccaccccaaataccggacccgggggaaatggggtaccaacggctgggccccaggagacactcggaggggtccgcgggctcggcccggtccctccgctggggggttaccagccggccggcagcgagatacccagaggcccgtttttccaccgcgttgccatagcaacggcctggccggctgcgccccgggccgcccgccccatcccgcgggcccgccctgagccagtgactccagggaccactcaccgcggccggcggactggcgggtctccgacaggtgcgcacactcggcgcaggctgtcgctgagcccggaattctgcaccgggagaaacttttcagcccgcagagcaaccgcagggcagtggacgggggccgcgcgaggacaaacagcggcggcgggtgcaaagccccttctccaagccgcggggttggccgggaggtgccggctgcacaacggcgcccacgtgacccaggtgcagccccaggcgcgcccaagggcagctcgccttagagaaggacctaaaaccccgtctggggcacagaggagcagccacgtgttacgtaaaataaagctttgtagcaggaatatcacagtactgaggtgattgatgctcaggccactcttctcactc

SEQ ID NO: 334167 - DNA, 621 bp, Homo sapiens
  chr11:9112510-9113131
  hyper
aagccatcagcagaacttgccggcccccaaagaaagaaacggcaaagctgccaccgcctcgcggatgtgcccggcccggccctcagtttccccgcctacgctgaggcgcgggaccccaaggccagggtccgcaccctcctgcctgctcgccggcgacggtctgactagcaggcgctctggaggcatccggaccggggcgggaaccgtcagcagctccgggtccgaggccgggccgaaggactcagggccccagcggtcgtggcgccttggcccggccggcgggtgaggtcccggggggagcagaggcccccgcggagctgcagccgccagccccgagccccgcgcgcccggctctggactccgccggggacctaaacactcttcctggccctgcctgctgtgccaggtgcgcccccgcggccggacactcaccctcctgcggccccgcggcacggccccgacccggcgggacggcccccgccagcagcagcagtggcggcagcagcagcagcagcagcagcaccgcccaggccgccccgggacggttgcggcccgcgacccccatggatggctcagcggttgcgggcagaggcggcggagtgcgggcggtggcggcggcgg

SEQ ID NO: 334168 - DNA, 680 bp, Homo sapiens
  chr11:10326048-10326728
  hyper
cgaaacgccggggtcttggtcctctgggggactagtgagtcctgctcctctcggctttgctccgtccctgccccggcccctccgcgggagtctggggtcgcggcccggtcaggcgccaagccggcaggggggcgcggtccacttgaggccacagctccccaggtccagggctcgggccatccgcgctgtcccttccgcgggctcttgctgttcttcgccaggaggctttgcactccgggccgcatgggtcctggataaggacctcaagaggttgtagtggcgccccttcgctccggcgtactgtctgaaccctgtgcccaaagagggctgtggcagttcctgcaccaaccgcctggagcccatacctaagccctctgggcacgagggacctcctctcccccgctcccccctccccccatcccaactccagccccaaaggaagcaatgcgcgcgtccgagagcaggagcgcgcgtggctgaggaaagaaagggaaggcaaccgggcagcccaggccccgccccgccgctcccccacccgtgcgcttataaagcacaggaaccagagctggccactcagtggtttcttggtgacactggatagaacagctcaagccttgccacttcgggcttctcactgcagctgggcttggacttcggagttttgccattgccagtgggac

SEQ ID NO: 334169 - DNA, 1141 bp, Homo sapiens
  chr11:12029918-12031059
  hyper
cttccaccgcgctgcgcaatttgtgctgcgtgtcctccatcagttcctcaacctcgcggaacatctcattgagggtggcctcctcctgcgggtagctgagagccgggccgggcttgactggagccgaggtcgccgtcggagcgggcgcgggggccgtggggaccgccgccgccagcagcaggcacagcagggtggccccaagccgctgcatctccgctctgcgcccgcagccgccgcctgtgtgtcccggaacgcgatcagaggcgcgcggaccacccccctcgctgggcccgccgccccgccccgttccgccccgccgcccgcccctggcgcccctctttcccgcacccgcccggagacgggaggaaaccgaggcccctgaaaacgcagctcccctacacccgaaaagacgcgaccccacccgctccagcccgagccccgatcgccccaggaccccgcacccccatcctcgagcacaagctgagctctgctcctcacctgtgatgctggagccctcgccagagcaaccgaacccggatcctctacgctaatagctcccaagccccagctcacctagactctgtccccggttcaaaccctagcccctcctcgaccaggtcagagtgcccgacccccacttccacctcaagcctctctcagcccctacctggggtggaccaagcacaggtcagccccctccccttggcgtcgggtcctactcgagcgccccgccccacatccaccaagagaggctgagctcagcagagtcgtcccctcccccgccgccgcccctcacccaccccgactggaccgagttgcgctgcgggccggactggatctgctcgctcccgccgggaggccgccgggctgcgggtgcagatgcgggagcggcgcggtgggcgggccgcgggtgcgggagcgcggcggggtgcggcagcgccggtacccgagggagcccgcaagacgcgccccgcccgcccaccaggctccctctccgcccccgccccgagccccgcccgcccaccaggcccaccccgccccgcggaggggccgcagcccggccattggccagccggggcgccggccacctcacgccccacgccccacgccctcctcttctgcctcagcgaccagctctacc

SEQ ID NO: 334170 - DNA, 875 bp, Homo sapiens
  chr11:12131738-12132613
  hyper
cgtacacagtcggtactagaagtgccatgctgctcccccatgtccaaaaggggatgccgtgtcttgctttccagccgcctagaccaagaagcgtgaggcccaggccctcgccgctcccttgatacccgcttaccaacaccgggggtttcatctcgcagcgccaccacgccccactcccagcagccctcccctggtctccgccctgtgcgggtcagggtgggagcgcccggccactccctgcgttctgggccgggctacagcccacgtgcgccggcggcagcggcggtgacagccggccccacgggggcggggcgggctccgtgctgtcctgtcattggccgcgccgctgtcgggggcgttccccagcccggtccaccgcgcggcgcagaaccgcaggcgctcggctggctaagcctgcgccgggccgcctcgctcgctcccagctctgtcagtggcccgcggggcccgatcgctgcgcccgcggccagggccgaggcaggcctgacccggggccgggcagcccgcgcgactttcggtaaggcgggggcggcgctggcctcagggtggggagggcgggcgggcgcgggtggggaccgtgccagcctcggctggactctgcgccgtgtccaacgcccgggagggtcaggtgcggccgcagcatcccccgcctcaaacccacccggcggggcgcacagtgagcaggtggcgctgcgacgaagcccggggcggccctggccggcctctgaaccaattagaacgcaataaaagcctcccaccggcacgccgaactacctcttactccgctccgcaacacccaaaccctgcagttccaagcctagaaaatcgcaagcgccaaaacggggtgggagtgacgc

SEQ ID NO: 334171 - DNA, 852 bp, Homo sapiens
  chr11:12399010-12399862
  hyper
cggcgcgagggagggagcgagggagggagcgagggaagggaaaggcgagcgtgagctgcctcaaatgcttggaataattccgcttccgtttggaaagccgcagcctcagtcccgccgccgcccgctgcgtccgcccagcgccagctccgcgtcccgaccggcccgcggcagcctgcgccgcgccatggccacctccccgcagaagtcgccttctgtccccaagtctcccactcccaagtcgcccccgtcccgcaagaaagatgattccttcttggggaaactcggagggaccctggcccggaggaagaaagccaaggagggtgagtgcggccaggccggccgggcgggcggtaggagccgggggtgccgtaggggccgaggggccggggcactgggaccgggcgggagcgcgccgcgggtgcccggcgcggtggggcgcgcggcgatgcgtgcgcgcgcttcccgggtacgtcgggcaggagcgacgcgcaccccacactgagcccggggctcgcgggccatcgaggccaccccgcccgctcgcggtcgcccgggcgctgccctcctgggccggggaccaggccaacgcccccgccgggccgtgggcgggcgccgcttggcggccggaggcggcgggaccggagcccaggcggggccccagcccgcagacagtgcgatccagtaggccctgccccgccctctgcgcccgaaggctggcatttcccaagtttccgctgcagctttcctgggcgccgtcgctcttactcgttgccttcattggtccttaaaatcaggtcgtttcctggacctgctgacgtcctctggcagcggcgtcgtggctttggcctcttc

SEQ ID NO: 334172 - DNA, 1566 bp, Homo sapiens
  chr11:12695414-12696980
  hyper
cggagacggcgtccaccgcgctcgagagcaacaatctgcatcaccagaaaggcaacttctctaccctacacttgcagacttccgcgagtccgggagcactcaacgcagtcacccgcgcttccgcgtcccggactagggaaactgaggcacggtaggcgcgtcgcgcgcaactcccgcctcggcgcctgccccctggaagaaacccaggcttccagagttcttcgcgcgagcgcagggacttccaagccgcgcagctcccgtccgccccgccccgccccgccccggctcgggacaaagcccggagcccgcgccgggagacggagggcggctcccgcgcgagccacgctcccccgtgggcgcgagactccgcccagctgccgaaagcccgcgccccaacggcgaagcagccgcgccggtccgccccgattccccatgacgtcaccggcggcggcaggccccgcctccagccccgggcggcaggccgcatgacgtcaccgaggccccacccctccggagcgagttcggtcctggcgttcatttcattcctgtcctcattccgaacattcttagcatcgctcgcgccgcgccgcgccgcctgagccgagccgagcctctgctgccgccgccgcggccccgccgcccgccgcgggcgcccaccaagcactttgcagactcgcttccaccctgcgggccattccgcgcggcggggcccgggcccggggcggccgcgtccaggcacaggccatgcagtgacgcccccccacccctccacctttgcccggagcgcgggcagcagcccagcgcgccagccggccccggggcaggagcggtgctaggcaggggtggggtggccgggcccagggaccgggagccggggagggagccgggcaccgagcagagggcgggggaagcggcgccgaagtttgcctcggactcgccgggcgctgcggtggctccctgggccgaggtaagttggcgcgcggggcggatgctggggtgcggggggcgcacggggcagcggggggccggcggcgcgtccctcgcgggccgctctttctttgcgggctctgctttgtgtgcgacggcgggcgggcacgcggagggccgcggccgggcccccacacccgcctccccgcgccccctccgaggtgagcggccgggcgccgccgcgcgacttgccaggacgccaagttgggccgcgcgctgggagcccgcgcggcaacaggcggcccccggccggccgcgccgcgccccccgcgcgccccctctcccgccgcctgcacgcgcacacacgcacacaccctcgggcgccttggacggggtgcgctggggagccagaagttcggagcgagcgcgggcgggcagagccgccgcctcggagcccggagccggcctgcacccccctgctttcgccgccgccccccggcgccgggtacccccgaggccggcccgggtctgcgcagacttgtgccgctggcggggggttcgctccttcttctcaaagatgaaaaagggcacggtcgtctttgccgcttctccaggactgttgctgccgctgccgccgcc

SEQ ID NO: 334173 - DNA, 317 bp, Homo sapiens
  chr11:12849699-12850016
  hyper
cgggctgagggtgctgccgtgccactgctgcaggatggagctctcttcctggtggagacttgattcacaaggacgctaattattcattcttcctccgtgcagcccgctgaaacaattgctgtgcttgttcggtgcacagtgtggcgtcggacagtcaggcctttttatgtaactgatggcgctgtatgttcatattgttctttatgtacttattttatagcttatgcagcagacattcgagtcaattagcttcttgtcttgcaaactgggcactgctgttctagaaccaagttagaagggtgtgttgagggcgaccc

SEQ ID NO: 334174 - DNA, 2387 bp, Homo sapiens; identical to SEQ ID NO: 235364
  chr11:13030350-13032737
  hyper

SEQ ID NO: 334175 - DNA, 469 bp, Homo sapiens
  chr11:13300232-13300701
  hyper
cgggcaggtgcgcgtcggcctggggatgtcgcccggagcccgggtgcgggccggccttggagtcccagagctccgcggagggcgcagcgagcctggctccagctccgggtttgacagatgtcagggaagaaaaggttcccgctcggctattgccgggcgttgacatcccagagagcttcccgtttgcttggaagaagacgaggaaggtagaggtgaacgtcgaccttgtggggcgcatgttagcctccccgaggggtcgcgagagccggcagcggggtgagctcaggtgcccgccggcaggagctggggagggaaggggagtgctggacaccggcgcctgctgtcaagttctcgccggccggtgagagacccgctgccgccgcgcaccccgcacctcctgacccctctcccctctccgcctcggccccttcccggtcacctagcgttgttttggcgctttggcgcttgc

SEQ ID NO: 334176 - DNA, 1248 bp, Homo sapiens
  chr11:13689464-13690712
  hyper
cgtgccccacccctcagaagtaaacgttattctaactcctatcactaccggtaagttttgtagggaattattttggaggaagtggaaggtggaatgaatgggcccacagtcccctgggactgggcgagacccgtggaggctccaggggtccgtagagctcttcgctctcaccgacccgggccacacccgccaagctggtagttctccgaacggatccctcacgcccagcaatggccggagggcccccgggccccaccataatagcgctaagcacgccacaatggcagccccgctgtctcccgcgcgggcctcgctgcgtgctcccaaccttgggagttggcgcccctcccgcgcgacggacagccgggcgtggccctgggcgcgacccgacaggacgccagcagccggcgggggcgctccaggactcgagatgtggggcgcgggcccattggctgagcattcccccgcgagcctcccggccgcagggcccacctcccggccctctctccgcgcccccattggccgttcgcgttccgcgggcgtccgctcccgccccactcccgcccggagggaaaccgggttgggggtgagaggctaaagcagggaggaggatgactggtcctgcggataagggtgtgcgcgagagccaatcaaaagcggatgtcgaaaagaggcgccgctccagccagtcacgtcgcgaggtgcggtcggggccggctgacgcgactgcgggcctcagccaatgggcgtgccactgcccgtccgctcttcagcagccggtcgcgggcggtggaaaagcgagtgaagagagcgcgacggcggcggcggcggcggcgcagctattgctggacggccagtgggagagcgaggcctgagcctctgcgtctaggtgagaagggggtgcgccagcgggagcggccgggctgcgggctcctcctcgcctggctcgggaagtggttgcgggagctcgggctgcaggcctggccgaggcgggggcgccgaccagccgtcccgcccccgcccccgcccgggtacgcccagaagtgagggcgcccgcctcaccccgggtggtctctgcccctctttgccccgccgccgcccttcacagggccgggaccgcgtgggggacgtacggtggggcctggtttgcagccgcggagcccggggagccgcctggggtgggaggccgctagaggtggcgaaggtggggcggggtggttagccgagcagcgggctccgcgtgctcgc

SEQ ID NO: 334177 - DNA, 1743 bp, Homo sapiens
  chr11:14665096-14666839
  hyper
cttcggactgccgccgccgcgctttcctcggcctgggcacgctgggtcggcgtggtcccggctcgcgtccctgttgggcggccgcggcgcgggtggcggcgggacaagtcgtgagcgcgcgctgggcgcgcgcccggccggggcagtcgcgggggaggagcgcccgcccgccgctcgcgcgcccaacggaccaggctggggccgtgaggtaactgttgcagccagcggaggtgggaggcgacactgagtctccagtcccgagaggtgcccgagggaaaaggaggcggcagctaaactggtcctggagagaagccccttccgcccctctcctcagccagcatgtcccggactccgccgctcctcagtccgcgcggtggggaccccgggccgtggcggccggcgcagccctgacgggttgcgaaccagggggcgccccgaacgcgggggttggggtctgggagcgcgagcggccgctacggtacgagcggggtgtgctgagtcccgtggccacccccggccccagccatgaggagggacgagcgagacgccaaagccatgcggtccctgcagccgccggatggggccggctcgccccccgagagtctgaggaacggctacgtgaagagctgcgtgagccccttgcggcaggaccctccgcgcggcttcttcttccacctctgccgcttctgcaacgtggagctgcggccgccgccggcctctccccagcagccgcggcgctgctcccccttctgccgggcgcgcctctcgctgggcgccctggctgcctttgtcctcgccctgctgctgggcgcggaacccgagagctgggctgccggggccgcctggctgcggacgctgctgagcgtgtgttcgcacagcttgagccccctcttcagcatcgcctgtgccttcttcttcctcacctgcttcctcacccggaccaagcggggacccggcccgggccggagctgcggctcctggtggctgctggcgctgcccgcctgctgttacctgggggacttcttggtgtggcagtggtggtcttggccttggggggatggcgacgcagggtccgcggccccgcacacgcccccggaggcggcagcgggcaggttgctgctggtgctgagctgcgtagggctgctgctgacgctcgcgcacccgctgcggctccggcactgcgttctggtgctgctcctggccagcttcgtctggtgggtctccttcaccagcctcgggtcgctgccctccgccctcaggccgctgctctccggcctggtggggggcgctggctgcctgctggccctggggttggatcacttctttcaaatcagggaagcgcctcttcatcctcgactgtccagtgccgccgaagaaaaagtgcctgtgatccgaccccggaggaggtccagctgcgtgtcgttaggagaaactgcagccagttactatggcagttgcaaaatattcaggagaccgtcgttgccttgtatttccagagaacaggtatgttagctggaaggcgaggtctgggacgcgagcgggttcgggtttaccgctgcagtttccgagttgaattcgcttatttcaaagcatgttaactttcagaatggaaaaagggtgtgttgcggggggggggggggaggaaataatgttttattctggaaaggattcttaaaatacaggaagccttttaaaaatgcagaagcaagtagcttttgtcattgaatagaaatcaaatagccc

SEQ ID NO: 334178 - DNA, 1678 bp, Homo sapiens
  chr11:16626018-16627696
  hyper
gttgctggctgggccgtgcagccagggccaaagcccggccgcaggagtacgcggctagcaccggcgcccgggacgcggacgtcatccgagcgcccattgacagtacagcgggaggtccggagcccagcccagtttgccgcaaggacggcttcgggccacctctagccctaaacttcaagcgcggccctcacagggtctcacacacaaaagcagcccaggacagcccatctcgctaacagcccagccccgccagttcagtcgaagacttatttttagtccccaaataggggctgcattcaatatctgacaattcacacaaaacaacattttcaaacttggtccgcctaagagaccgtaaataaaactcaaaacaagctggcgactgccaccttttatctgctccgaacacaccaattctttttatcttaaagctctgcggagcgccggggaagcagcccggcaccgagctaatctgccctcagcagccccgggccgctcctcccggcatcggagcacaaccccagcagcctttgcacaagccctttcccttctctgcccggccctttaagggagaaggaagaaagcagctcccgcgggagcggccgggctcgggctgggtcccggggcgggtggcagcaccgccccctgccctgggccgagcccgggagcagcggaccgcggccccggctgcagaggaacggcgggtggcggggccccggcagggcgccgagaaggacggagggcgccggctgggctcagggacgcggggcggggaagaaacgtgccggcgaccgtgcgctcggccgggtgactccctggcgaagtccgcgcccggcggggctgaactacccctcgcccccgctcccgccaggtcaggcaccactgccctcgcggccagggtaaagaggaccacagatcagtcagccttggatttcggatgggcttggaattcggtttgtttattcctgaaaagatcattaaaaagtactgtccaaaaacggggggagggggaaggaagggcgacaagcggagggagctggaggcaactcgagcggtgtcccgaaaaagttgcggcggagcggcggtggggtgagggtgggaggagggagcgcaagcgttttctagcgacccgggttttcttcatgaactcctccgagtaaactttatcccggcgagagagcggcggagatcctcgactcccgcccgccctcaaccagtgtcaaccccacaaacagcctaagtttccaaaccgaaatgggggtggggtgggggtagcattaagaagcccagaagctcagcgggtcctcccgacctcccgcacccagagcctgggtgacactgaagcgctccgaacactgtggcgtctcagtcacacagcgaatcaacccaacacttttcaagaaaacaaaatatttgctaggaaacttactttgcatttagtctctattctttgggggatgcggtttaggtcggctcgcaagggaagcccgttttgtccaggttggatattgtctacgtatggatcagcccttggatgagggtttattttaatttatggcttatgcattcttttaaggtcgatttacatgacctccggctacaactaagacagccgaggagggcactccagtcgtcagtcggccaaacccacaattaaaacagccctccccctagtctc

SEQ ID NO: 334179 - DNA, 885 bp, Homo sapiens
  chr11:16628231-16629116
  hyper
cggacgaatacttaggatggcgataacagctttctgttgtcaaaggttgcgttgtgtccctgtccctgcccttttgccttaatgtcctacgcacagttatctacggctacaacatgtgttttctcagggtggattttttggaggggaggtgaaggggagaaaaacagacccccgccacgcagatctgtcactccggaacaaggcgcaactctccaagagggggacgcatcctcgggatcagcgcgtccaccagcgagcggcgggcgcccgggcccctttctctccctccactccccctccgcgtcggcccctcggagcgccctcctcccgctcctcctcctcctttcccctccccagccaagtacgcaaacccgccccggcccggcagccgcggctcccggccacccgcgccctctcggggctccgctcgctcggctctcgtccctctgcctgtcctgccccagcccctcggtcccagctcacagaaactaaccctggagtgcccggaagggcaggagcggaagacgccgggggacggcggcccggccctgggctcctgccccctgccccctccggcgccccaacaggtagctcacagcgggccgcgcgccctggctctgcctccctcgctctcgagatcgctcgctccgtcccggttacctgggcgggctccaggatggtaccgcgcgggagggctccttgtgcgctgcgccgcaggagtaaatggcattaaagaaaaagggaaagatacaaataaaaaaaattaaaaggaaggggagtcggtgctaggtcaattgtcacagtccggggagcaagggaacagaaccccccagcgccgcggccggcgtagcccgttaactcaagtctgcgggggtgtcccgcccc

SEQ ID NO: 334180 - DNA, 408 bp, Homo sapiens
  chr11:16634123-16634531
  hyper
cgggggggcggggttgggagtggggggatggcgatgaagaaaaggagaaaaagcctggagtatactaccttgctcaaaaagctcccaaaggcagcgtggagcggcacagacacgaactaagacaatgtgtgtctgcggagcctgtacagggtccatttctcccccacgtcaccctcctccattcccctctaatgagacgcggatcaccctccactctcaccgacactgcagctctgcacaagggcagctggaatctgggaaccttacctgcagcaccaatacctaagagaaatcgcgcttccctgacactaacacgccatgccatccccacgcaccctgccaaagtcctgtaaccatctacttcttccatctgcctaagagaaactgtaaacgggatttcccccccac

SEQ ID NO: 334181 - DNA, 457 bp, Homo sapiens
  chr11:16635541-16635998
  hyper
cgggctgacaggagtgagagctaaaacttccaactagctgaaaccaatagccgggaatcgagcgaaggcgaactctcccagcaaagtataaagcttcgggccaaagagtctgcagctccaagtcaggggctgcggctccgaaactccaaacactaactcccagggcagtggcagagggtgggggcagcttcgaagaggcataccaactgctccggtcctggccgaagaccgagctcccttctgcggtgacctcggctcagagctgactccgtactccctgggactcatctcccgcttcctctccaccttcggaacagtagacaaagggactcagggacgcggccagacccaaggtcacaaacggaggtctccgagacgagaattgcgtgcaagagaaggacgttcaggcagcccggccgcctgctgcgagagctgaacatttcccagctctatagtc

SEQ ID NO: 334182 - DNA, 1596 bp, Homo sapiens
  chr11:17034991-17036587
  hyper
cgcaggcccgcgcagtggatggaggccgggggcgaggttccgactctccaagaccatcccagagcctgcggcgggagagggggcgtcctcctaagcgagattcccctagtctctccctctccccactccaaccccgcaggcccacaccaggacagaacttctcgttctactcctcccacccgagcccatccaggtcccggcactcgcctctcccggcggggcgcagccccagaccctagaggggaggcgtgcccagcccgcacaccagcacccgaatccagccggattgcaaggtccagggcgcagagtctgcggcctcttcccccccggcccaggtccccagcgtaggtgcggcccccaccgccttcctctcggaggccgccaaacaacttgggcacacaaaacgttgagtgtggccgcggcgcagcgcgcgccaacgagcccgggccggcgggagcagaggaagggcggggcgcccggcgggaacggggagggaccccccccccgcggcacaggtgcgagcgcggcggccccactcactcactcgatgaagtagctggcgccctcctccgtgaagccctcctcccagccgcggggcaggtctgcggaaacgccagaaaagtcgggtcaaacttgggccgccgctgcgcgcgccccccacccgccggcccggcgcccacctgagcggatcatgtggcccgagttgacgggctccccggtgcgcggatgcagccaggtcgtgcagcggagctggtcactgcgggcagagaggtgcacctgttagcgccgccacagcccgccgggtgcccgcccggcccccgcccccgcgcccccacccgcgtccccgcgtccccgggtcctcgcgccgcacttgatgaagaagacgcggccatcccggcacaccccgtaggaccaatgctcaggtaaagtgtcccgcccgaccgtcgccgccgccatgttcgccgagcgcggagccgccgcggggtgggggggagggggcgggggcgcgggcaggggcggaggcgggggcggtggcgggggctcggcctgcgcgtggcccggcggcgccgcgaggcgctccatccaggcgcgggctcctgagggagcgaccgcccggccgggtcctggcgcccggagttcgcagccgctccggccaacccagcgcagtgcccgcggcctttgtccccgagccttccccgcccccagcctgctggcaccggcgctcccctttgcccccgaggccgggagacccgggcggcgcggggggccgctggcgggggccgctggcgggcgcgcctgggcagcttcggggcgcgcggttggacccgaccaactccgaaaacggcgagcgcccgaacgctcagtaaaccccagccgacccgcaccacagaacttcccgacccgggaactccgcttgtgtgtgaaccaagttaacactcaggttcctgccatattcccagcctccttctcttcccctgtaaggttaatcgagtccacacgggattgttgtgtagattaaatgaagtaacaatcgcataaagtgcttaaccggaccatggcatgtagtaggtgctctatcaacggcaggccgagcgc

SEQ ID NO: 334183 - DNA, 739 bp, Homo sapiens
  chr11:17373019-17373758
  hyper
cgcgccaacggtaagatgtcgctctggacgcgtgcacctgctctcgcaatcaccgactgcggtcagcatcttccttagagcagcgccccgggccacttggatcccggtctcaatttactaagcgaacccagaggatgccccgagtcctggaccgcagagccgctcgcgagaggcaccggggctgtaaccgcgcaacctcgtgccgcgggcggaggcgagggaggattccccggccggtgcccgcccccgggctaaagtgcggcgcgggtggggctggtcacgcgcctggcttcctgcagtgcgaacctgggaaatccaggcgacttcgcagttgccgaagggatctgaagaagtgggatgtgcaaaagcgccggctggaaatcccggctgtgtctccgtcaactctttacgcaacagaggtctccccctgcccttggtttctaccgggccgcctgctcccactcggcgaaaaaaattacacaacagcagccgcggcgatgacgtggagggctgccgcctccacgtgcgcggcgctcctgattctgctgtgggcgctgacgaccgaaggtagggggcggctggggtgggctggggcgggggctcctggcgccagagggtcctcgcgggtcggctccctagcatcccgccaggggacctcaacttcctgggggctgagagctctattttcttttctatttcttctcctttttttttttttttttttttgagacggagtctc

SEQ ID NO: 334184 - DNA, 203 bp, Homo sapiens
  chr11:17374000-17374203
  hyper
cgtgagcccccgcgcccggcctgggggctctattttcaagcgtccctcctttgtgagaagcggagtccccgatgcaacaggtttacattgaaggcctgccctgtgcagggtcgacacctgtgagagcggaaacggtgcttccttggatgtcgcgcgtttggtgcctcggtatttggcgcctctctcgcatcatccgaggggcc

SEQ ID NO: 334185 - DNA, 359 bp, Homo sapiens
  chr11:17497463-17497822
  hyper
cgcacgattgtcccggccgtggcgcccaactttgcaagcaagggcgccggggtcgctgcgtcggcgagtcggagctactttgcgcagagcctgagaagttgcgctctggagacacatgcccgggtggggtggcgggggaagggaatccaagtccctagctctcgcctctcctcgcccagggcgcgggcctgggactgtcagagatcacggaccactgcgcggctcagcccggtgaaagcataggggttagctgggcctccatcccagactccaaagcacaggcttccctcttccctaggcccagctgcggctgacagggaggctgccttgcgggaggggtgacccggctccctaagctg

SEQ ID NO: 334186 - DNA, 524 bp, Homo sapiens
  chr11:17742758-17743282
  hyper
cgcggccccacccctgcttactaaccgagccctccccgcgcagaacccaggcccgggaagagtgcggcggtgtcgagcctagactgcctgtccagcatcgtggagcgcatctccaccgagagccctgcggcgcccgccctcctgctggcggacgtgccttctgagtcgcctccgcgcaggcaagaggctgccgcccccagcgagggagagagcagcggcgaccccacccagtcaccggacgccgccccgcagtgccctgcgggtgcgaaccccaacccgatataccaggtgctctgaggggatggtggccgcccacccgcccgagggatggtgcccctagggtccctcgcgcccaaaagattgaacttaaatgcccccctcccaacagcgctttaaaagcgacctctcttgaggtaggagaggcgggagaactgaagtttccgcccccgccccacagggcaaggacacagcgcggttttttccacgcagcacccttctcggagacccattgcgatggccgctcc

SEQ ID NO: 334187 - DNA, 782 bp, Homo sapiens
  chr11:17756067-17756849
  hyper
gcccagacgtctctcggagcccccgcccctggagtggcgttccccgagggcggaccgtgggcgggtcccccgggagcagcaggagccgcgcggggcgggcgcccccagcgccgaggttgagggaggccgggctcggtgcggggctgggaggggggcgcggaatcagggctttttaggacccagcgcggcgccttcctccgggggcgagtgcggctgcgcgcgccgtgtgcccgtgtccggagagcggcgggctggacgcggaccgcgcgaacgagcaggcgacgggcgagcagcaagcggagcagcagcccgggcggcagcagcgtcgcggcggcggcggcagcggccgctccgcgcctcgcctcaccggcctcgctggcctcacctcgccgcgcccggacccgccacccccgcctccccgcccgacctccgcagcccccgtctcggccggcagcgcccaccgcctgcccgaagcgaggagcggagtgcggggcgcagaggcaccggagccagtgcccgccggccccgcaaatcaaacccagccaggagaacccccgcctggccccgtgcagctccgcgaccgccgggagctgtcccttcagcaccgccgcgggagcccaagtccgagcgcagcccagcggaaccccagctcgagcccgggctcacggagagcagcgctcggcgttagccgcacgagcaacaccccgggtgcccctgcccagggggcccgccatctcctccaggaggcggggagaaggaacgaggagggcgggcgggcaggc

SEQ ID NO: 334188 - DNA, 260 bp, Homo sapiens; identical to SEQ ID NO: 235400
  chr11:17757400-17757660
  hyper

SEQ ID NO: 334189 - DNA, 689 bp, Homo sapiens
  chr11:19263432-19264121
  hyper
cgtccggggctcgcgggctgggccgcaggcgccctgcgattccccgcttggggctatctcacccctgcccagccccaggccggctcacctgccctcggactccagccggacctctcccccttgcacccctggcatgcatgattgtgctgcccaccgtctgccccgtgcctcgcagaaactggcgcgaggagggagaagcttggctactggtgcctaagctccgtgggctctgggccttggcccagcggtgagaactcaggtgtaggaggaagaggaggaaggcggaaaaccctccaaccctgtcctcgccgtctttcctcagggtctcccacccactcctccctttctcttccctgttgtctttccctctttttccggtctccgagcctcaggcagctttagcctggttccctgtagagccctagcagggtcggggagacacttcgatccttcgtcctcactttgcagaacgggacaccgaggcccggggcggcggcgctgcctcggctgcacctggatcatttgcgcccgcgttggctccctttgctctcctctgccttagacttttctgcggactggtgctgagtgttgcccaaccgcgccgagatctgggcgccggtctctcgatctggactcggtttggctcgtcctcctctgtaatcgcgtgtctttaggctccagcagggccc

SEQ ID NO: 334190 - DNA, 152 bp, Homo sapiens
  chr11:19367847-19367999
  hyper
cctgtctgtccatacgtgtgtatgtgttggtgggggtggtgtaggtggatcggatccgagccaagccgggggcaactaggccaggcctgcggttcccctggctctcgctctcccacgctccggttagctgcgggcggcgggctagggcgcgg

SEQ ID NO: 334191 - DNA, 1762 bp, Homo sapiens
  chr11:19733708-19735470
  hyper
cggggtcatggagcctctcccggcttcttcaggccactctaattacagagtctgtggtaggttgcgtggaggagctgtctcggggcgggaagcttccctgcgtattgtatttgcctataaatacttcaaatagttaagtgaaatgtgcagcctttgaaaactggagaggaagccgttgggaggccccccgcccagccggcctggaagagcaggcagagaaatggctggcgcgctcttaaagcgggagacgagcttcggccctgcccaagccagatgggggcagcgaggctgcgggcgtgactccggaagactcaaaccgttaaggtgaccggagcaatttgaaaaaggaaacaaacttccctcgagccgtgcccgcgtggctctggggcggacggttgcgttcgaaagggcatttttcaaaagaagggtttcaggaacgcaggggtgtgggccccccgggaggcgcgcggccggggcagtgccgcaaagcggccaccagcccgctttgtactcgcggccaagcgcggccccagagtttcggcggcggccagagtttaggccacaccctctttgcagtgagacccgcggccgctgattggcgcaccgtggaccaatgggcgcgccggggcggccccggctgtcagcgcgcgccgcagcagcgccggcagcagcctgtcctcccctgcgctgagccccgcagccagcgcagccttcccgggaagcgcggcggccgctcccgagcgcagccctgcccggcccgccagccgcgcgtcccggcgcccgcgccccacggccacagccttgcctctatctagctcacggagcatgtgcagacccgcaggcgctaaggtgctctcagtccgggggccttctgggcagcggtgactgtcaccccaagagagacctttcgggggctcttgccgcacctctgctgcgtcgcgggtgacactgcggtgctcgcgagcagggtggcagctgcctctcggtggagacgtcttgggacccttgcgcccttcttctctccttccttcgctgctgtctcctttccttccttggctgctcgctctttctctcgccggctcagacccgtagcctccggaacgggactcgtgggtcgccgccgcctctgtctcttccaaaggggcctcctcacttcggagatgcagtgacaagttaatatgggcgtccaagcctctgtttcccaggaggaaatttgcaagaggcggcagcccctgagcgcccagagctcttgaaaggccacccaggagaggtgtgagacccggcggcagcatccgtccaggtgggacccgctgagcgccgtggccagtcccccattcccatcccggcaccccaaaggcgcgctcgcccgattgcttcgagttccccgacctggggattttttttttagccgctggtggtgggcgcctcgtgggctaaggcccggcgcctgctctgctacccgcgctgcctttagcggtcgcccccgccgccgctgccagggacgtgctgggaaagcccaagccccgggagaagatgccggccatcctggtcgcctccaaaatgaagtcgggactgcccaaacccgtgcacagcgccgcgcccatcctgcacgtgcccccggcccgggcgggcccccagccctgctacctgaagttgggaagcaaggtggaggtgagcaagaccacctatcctagccagatccccctgaaatcgcaggtgctgcaggggctgcaggagccagcgggggaggggctcccgctgc

SEQ ID NO: 334192 - DNA, 913 bp, Homo sapiens
  chr11:19798523-19799436
  hyper
catctttcccccttcgcgcccaccggcggcagtggcgaagggcccactgaagcgccgggtgccacgcggggcggcccgcgggccagctagggggcggggaactcaccagccgccgacccccccccccaccccgccctcggccgccgcggccccagcggcctccgcgctgcgaggagcgggcgcttggacacagggcgagttgtttgatttggcggaggcggggaggccggcggggagcgagcgagggaggcacgagagctgggcagcgcgggcgccggtctccagggtagggtccccgcgcgcagcagcggccccggggcgggggcgaggcgaccgcgggcgccggggatgcctggaggggccgcggccgagaggagacccgggactggacggccagacctgccgggcgcgcgggcaggtgcttcggctttttttttttttcccctcctcctttttcctctgccccttccttcctcgccctgaagtaagatgagcgtgatgctgtggcgctgggaacagaataacaccaccatgaagctggtaagggtggattgcagaccgcaccccctgggcgctgctctactttttaaccccccaccccgccccccatcccctttaggaactggcccgggtggtggaaagcccctgaaatgcattccgcacttggtatttcccttattgttttgaagctagatctcaggggaggtgtgtgtgtttaaaccaggaaagtcgatgtgtgtatgtctctggttgtgagtcattgaaggggggtgggactgggctgcattatctctccgtcccttccacctacgaattcctggagctctcttggattgcacacgctgggattgtctcctacgagcatgtctgcgccctcacagcctgtcccgggacagcgtggtccgcgtccccc

SEQ ID NO: 334193 - DNA, 725 bp, Homo sapiens
  chr11:20153468-20154193
  hyper
cgtgcagcaatactcgcagcgtggagagttccagtcccgaaatggcagcgtcaggcaagctgcttccaatacccctccctccgacaaccagaaacaaatacccagcgcccagatccacaccagcagcaacccagagctccagtctgaggatgagactgttccagggccacagaaaagaggaaaacctcgggcagatggtgagggaagggaacctccgtgttcaggacacctccgcccatccacattcggcctggcaccgatcctgcggaatctctccccaacgcacggtttctacactggaacgattgaaactaagggggtgcgccaactcccccaccttcgcgggtcccctggcaggagacctggtccttgccttaccgcagtaggtgtggctgtgactgaagggagcggcatccctgagcacagtcggagacaaagggaggcgagggccaaccccagcccggaaactctgccctgtaactcggccaaaggagacgccgcattggagcggctgttccgcagcaccatgctgtagaaggtacgttcctctgatgccctgtgcgcaaacccctagccagccttcccacactgccaggataacccttttgaaacctcccctgtttgggacaggccgtgctcccaccttttattggagacgaggcgaacctgggcttagggcgccacctagagccaaaaaagaggaagcgacctggccgcgaagcttc

SEQ ID NO: 334194 - DNA, 984 bp, Homo sapiens
  chr11:20178096-20179080
  hyper
cggttctggaaccagattttcacctggaatgtcccggccggcgagaagaagggagaagcagaggtcagatcaggggctccgggggacgcacgggggcggggagtggagtcgggtgcaggctctgtccttcgggctgtgtcctctccccacccccagaaatgagttccggtggattcccgcattgactccgcccccgcctcagctcgcggttccgtttgcctcatccgctgccaccctgccccgaagggcggggttgggggccggtgaggccgggagagaaggcggggagtcggggtggggagagaagagggctatcctgcggagcttcgagggtagtggcccgtgtactcactccctctctaggcctcggttttcccatctgtacagtgggacctaagccgtttccgaacccttgcaattgacgggtgcgccggggaggggtgaagggcgggggcggggggggtgctgtggaggaaatgcgctcacctgcgagtctttcaggcccagcttggccgccagcttcttgcggtcgggcttgctgatgtacttctgcttctggaacatcttctccagcgccttccgctgcacgtcggagaagactgctcgacgcagcatgccccgccgaggcttcccgcgcgcggccagcggccaggagaaggtcccggggatgggcaccacgctggaggaagctgcagggtggggggaggtggcgagtgagtgggcgtacgccccccagtcccaacacggctctccctggctttttgctctgatcccttcatctctttaaaacgctcctttttctccccctggagaataggccacgaacctacaaacctgcgagagtgaaaggcgctttccgcccaaacaactttccctttcaaccgtgcaaacccggattaggtaaaaccacggaaacagagaaaacagcccccacaatagcctgtttcgtttttccattcagtggacttagggaaacaaacctgc

SEQ ID NO: 334195 - DNA, 901 bp, Homo sapiens; identical to SEQ ID NO: 235423
  chr11:20184581-20185482
  hyper

SEQ ID NO: 334196 - DNA, 248 bp, Homo sapiens
  chr11:20230315-20230563
  hyper
attcccactccagacgccgcagttttgaggcgcaatggggcctttggcctgatcatactcaggaatccttttaggccctttggcctagaggccagagccggggtctgcagagacgcaggcactctctgtccccgcgagccccaccactgggttgctgcttttgagccggttgcttcgggccggcagcccttcttatttcagcacaaaaggtttgaggtgcattgctttctttggcgtaaagcccttgc

SEQ ID NO: 334197 - DNA, 682 bp, Homo sapiens
  chr11:20385084-20385766
  hyper
cgcctgggtgagctgagcccagcaggtgagggaaaacgcgggaagagggtcttgcagattccaaacttaggaagggtcgcggctccgcgcacgtgctctcggggtcaccttccccgcgcctgtgagggtgccaggagttcgtctccaggtcccgcccctgtgggcggggcgaggcagcgtcgccgcgaggccacccggaagaccaagccgggtaggcgctgtctccgtcgcctccaacccccccggtccgaccagggaaggtgggatgctctgatggccgggcctgcggcgctgagcgcggcggcggcggctgctctggcggccgccctgctcctgctgcgtcgtgaggacccggggccgggggctggccccaggtaacccctccgcgtatgggaccgagctgggccaggtctcctggccgggccggggataccgtggggtatgcccagtgatgccagcagcttgtggcacctgggcgcaccctccagctcgggccccttccgatgggtctgctggctcaggtgcgggcgatggccggggagccgcgccccgcacgtgactcagcactttccccagagcccggactgcggagaacaatatcctcctccctaacagataaacagcccttgttcctcgggataaggactggcagtcccctgacaccctaagaccggcatctgtc

SEQ ID NO: 334198 - DNA, 1209 bp, Homo sapiens
  chr11:20618197-20619406
  hyper
cgaatggctgcgcggtgatggatgcggatttacggcctccttggctgcggcgcgctgggcctgattatcactataaacaggcgtccgcggagggcgggggcggaggcccgcgtctagaggacgtgcggctggtcttcttcttcttcttcttctttttttttgtttttgttttttaatactgcggttccatcctctgcgcttcgtaggcgctgacacacacccatacgcacgacctgctgccccagggcctggcttcctgcctccgcatgctctctcccgcccctgaagcccaaccttcaagccctgctgatgcccgcccctccgtcccagcgttggcctcatagcgaaccctcttaggcctctccgttccagaccctccctccattctccacgtagcccctcccttctagaatcttgcggctgaaagtgggggcaggcggggagcccgaatagcgcctcagccaaaccccgcagccgttcctgcgcgtcacccgcctctgcagagcctgacgcgcggcagtctccacgccggaacccaagtgctcactgggccggggagggccagcgggcgaaatatcaggcctgggggctgagcgggggcgctgggcgtcactcaggcccagggccgcagctgggggaagtgagaaggccggcaggattctgcccactctgcgcagttctcccttcctcccggggcagccaagtctgtgcgccctggaacgtccgggcgccgcgtagactctccattcgcacctggccctttgcgggggctgctcaaatgcaaattgggaaactggccagaaccttccaaagtcgtgactgtccctcggggaagtcggccggggaaccgcagagggaggcctacaccgatctttgggcccgcctcgtggtaccgctccggccgatcgctctctgagcccgagcctgcctgccaggcctgccttctacagttctcgcattcgtcttgagccctctcggaaactggggactgtttaggcagaaacactcgtaggtccccttggcgtcccccaagatgccaagagcctgcggggtgcttctcagcgccagccggaacttgagcaggcacccctgcggaattctcagtcccacccactcagacgaccctcctccagccagagtccaccacagcccaccctaccctcttaaccctcgttcccgacctctccctacgagcgggccccggggaga

SEQ ID NO: 334199 - DNA, 338 bp, Homo sapiens
  chr11:20619674-20620012
  hyper
ccaccaaaggcaatgcagaccgtgtgtccccagccagctgccctttagaggggctaggcgggaaagccaaccagcggaggcatccaaacactctcgggctctccagaggagcaggagggtgccccttagtgcccccggcgcccgccgcaatctgccactgcagcctacgcctgcggccgcggccgccgcggcattgtcctcccgccgcgtgggacggcccagccgctggcgacggcgcgcaccccgaggcagtgggctgggctgttggcagtagggaagggaaaacgtgctgtctgtggctcctcatccccgaggccaggggttccccgagctagacc

SEQ ID NO: 334200 - DNA, 316 bp, Homo sapiens
  chr11:20621337-20621653
  hyper
cgacgaggagaacaattctcgcagccctaggtatttgtacttgtgagcgtcacctgaggtcgcaaagaggtttcctaggctgtagagctgagaggttggctgtggctcctaaagacccgatcccgggcactgtcctcggtgctgaaaagccagatgccggtacagaggcgagttgctctgggtcctagaggctactgagacaaatgctggctgaagccgaggtacctagatttgtgcaaatcgaggagttctattctgcgtgtttgtgaaagggggttagacgagaggagtgcggtggaggcgaagataataggat

SEQ ID NO: 334201 - DNA, 1267 bp, Homo sapiens
  chr11:20690403-20691670
  hyper
cgctccgcctcgaggaccccttttctgcacccccacctcagcgccctcttcctgcacccacaaagagagtactcagtcataggggttcaacaggagagaggagacagaaggtacaggcggtgagcagggactcagccatcatccccctcaggtccctccccacccagttgacagagcgaatcccgagtaattgttttccgagggggtccgtgcgcgctcggtggcgccgcctcggtctgggttcccccgaggaaaaatacccacccgcgagggctcggcggcttttcgactcggcggggatgaactgtggcaacttcggcagcccccaccgcggtgcggaagtaaagagggcaacattggcgactgcggctcggaggggctggagcgcgtgaagccgtgggggcgccgtgcgcctcccgctctctcgtttcggccgcaggtcctgggactccgacttcggtgctccgggtgatagcggctgcggcgcctgcagtccagatcctcgcagttctgcgggcgaaggaggcgaacggaatcggcccccagtggggagcgcaacaagccacagtagccaaaccccgcgctcctgcccgggctcccagacgaacgcagccgcagcggggggccgggccccgagccccacgccgccgccgccgcgccagcggtggggggcgggctgggggcggggcggccggggctgccttcccgggcgcatatgcgagcgcagcacccggcgctgccgagccacctcccccgccgcccgctagcaagtttggcggctccaagccaggcgcgcctcaggatccaggctcatttgcttccacctagcttcggtgccccctgctaggcggggaccctcgagagcgatgccgatggatttgattttagttgtgtggttctgtgtgtgcactgccaggacaggtaagcatgactgtggcggttagagggatccgggaaatgggggtgcccacagaccacggcggcgtggggagacctggagccgagctttgcgctggtctggggaacggcggtagcgtggaccggttcctgggatctctttgccctgctcggagtgacagggtgaaaatagggactcacgggcttgaagatgtccccgttgagtgccccttctcaggggacccggcctcaggggcgcaggagtgaggggcgcggccgagtaggcgcaccctcttgctgctagtaaccggctttccgtcccagggagtcgaaacccgcagcagggcgggcccgcgtgccccgagttccc

SEQ ID NO: 334202 - DNA, 1276 bp, Homo sapiens
  chr11:22214131-22215407
  hyper
cgagaccaaaagtaactcccaactgggagaggggttctctccgagtggcacgcatgagcggatcgatgaagacccggccaaccggctgagggagcatcgggaccccctttggggatcggaggaggaggattccgacaggagggaagcggcagccctggggaaccaggattcctggtcgtgggtggacccagtggaaaaggacgtgcgaagcctgtacagaatggagcaggccggccaacagggccggggggcggcgggtcccgaggagggacgggaggctgcatgtccggaggaggtgcgggaggcggcagagcagggacctggggacggcttgagcggagaggagggggccagcgtggagccagccgggccggggggcggggagatggcggtctccgagggtggggcgccggccggtcttgcggtctggaggcggggaaagaggcgtggaaacagggacgcagcgaaggggaaaggaaagctgccagagggcaggagtggaaaggatcctggcgagcaccgggaggagtggcggctgcgggatcagctgccgagcaggcacagggacaggtgcctggagaagtactgggagagcgcccaggagcgctaccggctgagggtggggaagcgcagggccaagcgcgcgaagcaggttgtgggggaccgggtcgagtggaagtacccgccggagaggaaggccggctggctgtggcgcccagagacggtggagtccgaggaggaggagaaggaggcctgcagaaggaagagcaggcccttagaagtccagcagcagcaactccggcggcccacagtcagattcagcacctgcctcagatctccacgtctgtctcagctgcccctctcctgctgcctctcaggcaccagtgccattaacgagctggcgaagatgggcgacccggatctcctggaagtgttggcggaggaaggtaggaccgcgccaagaggcgtcaagggagagccaggctggctgcctgcacccctccacccgcggcgcagaggccccgggggacgttggcggccctgcggcctgagtcctagggaggttcgctgcgtggcgtgctcagcgcgaaaccgggactgcggggcagagtcccccgcctggggtgagtggggttggtttcggcgccccacagatttctctgctgctcctgcgcgccagggacctgcgacctgtgacccctatggttccggaacaccctccttgctcccctgcaggcctgggaaccgccgagtaattcagggctgctaggctagc

SEQ ID NO: 334203 - DNA, 100 bp, Homo sapiens
  chr11:22647396-22647496
  hyper
cggcgactctctgcgtactgattggaacatccgcgaaatgatacgcctctctgcaatgctattggtcgaaatgcatgtcaatctcccagcgtctttatcc

SEQ ID NO: 334204 - DNA, 112 bp, Homo sapiens; identical to SEQ ID NO: 235455
  chr11:27740064-27740176
  hyper

SEQ ID NO: 334205 - DNA, 683 bp, Homo sapiens
  chr11:27740481-27741164
  hyper
ccaaaccctggggcgaaaactgccaccgggcttggctctgtggccggaacaaaaggcctgagaagggggtgggggtgagggttataggagtgtggagagcctggtggcccccgcccaggggcgcctaagtccctgagctccctgaagagtggcaagaggataacgcagccgcgcgttccggcagttcgctgtcccccgggggtgcaggcgggggcgggagaggtagaacacaggtctgggcggctccgcgccgcttctatctcacccgccaagcccctcacctccacccaccgccagtcccctgcccacccgggtggcggcggcggctcagcgactagccggccgccctccaccggcgcctccggacgcaacctcgccctggcagggcggtctgcgcgtccagctgattggtggctctgtccagccgccgcacggagctaaaagtgttcttctccaccgcctccagccgcccaggccccctcgcccggcccgctctctggctcttcggtccggaaaggaccttctactcccaggcggaggctcccctttccctgagttaccccgactgactcggacctgggctcagtgaggcatccggcccggctggggagcggagcgcggtctcggcagctccccttcccttgagaaagcgggaaccctctaagccagcgcccgaaactcgc

SEQ ID NO: 334206 - DNA, 864 bp, Homo sapiens
  chr11:27743487-27744351
  hyper
cggctcgggagatttccctgtcgccaggtaagaaaaccttcgccttgtcaggctagggcgggaagaccgctggggaacttgttgcttatcagcgccggcagactaccgctttaataataataccagaaaagcgcagcagggagggggtggggggcggcaacggcgacgactaacctcgctgtttacgtgaccgactcactgtgactctctgggtaaaaaaaggaaacttcttagaaaagttcgtgcccctccccctcccccatcatgactaagggtctccagccgatgaggtcgtgagtgatgatcaaatggggactggggggaggggggcgagtaagtgacttgtccttgggaacatctgcatgcgtcgaagcgcgaaccagcccaacaactttcccttttcctcttaggtactgatgactaggcgagaggcaccaaggcgagccactagttgcccacaggaacctgtgtaagccgagctctcgagcggctgagttgaatgaagttatgactgcgtttgctctaatgggttatggcttcccaaatgtgagttaacagccccggtgcgcagctaggtcggaaggcgagccgcggagagcggagccgcgggccaaggcagggacgggaggggaggcggcaggttgggcgctccgctgctgctcggtgctgcttccccggagccgcttcctcatcctgcgggggctgccccgccgccggggtgccggggtgagcgcggcgggagccagggctggggtggcgaacctcggagggggctctcccaggaagccctgcggttagcgcccgcgcttccccaccagtggctgcgcaagctgggaagcgaagaggtcacgtgttggcggaaag

SEQ ID NO: 334207 - DNA, 650 bp, Homo sapiens
  chr11:31818829-31819479
  hyper
cgaagaaccccgccgatagcatgctctgctctcatttgcctctttgacattttcttaattttaaaacatggagattcacattcttatccatgttctgtctcacacaaacatacacacgggtttacacaggcagcacgcgatcgccgccaggccctgtgctgcctccagaactgacacttaagagagaaaagtcagcagggacagtagagctcaattttaaatctggaaaaaaaaaaaaaaaaaaaaaagatgggaagcggggattggaattccacagcaaaaagaaacctgtcgctgcaggatcccttctctaccccgcggggagagcggcacggagacagttcattactttagaagtggcaactgtttgcagccaggcggtgacctagcggctgctcttacataaaatgggtacatttccccccactttagtggatttgccttccactcttaaagcttttaacaaaataaaactagaagttggatctcgactcccccacccccacgataaacctaagtggtggacaattaagatatcttcttcaaaaggcgccccctcggagccgcgcaaagcaggggccttcagtgggtgccgttcaccttccagcctaatccgtgagaaagcgagtgaaagcgcctcccattatccc

SEQ ID NO: 334208 - DNA, 2204 bp, Homo sapiens
  chr11:31819804-31822008
  hyper
aaccaccaaatcgccggagaattggggctggatagagttgtctcttgttgttgtcagcccacgtcgtcgcgattttattcaccgccgcatggcgttgatcagatggaaaccatatttgtctccctctgagacctaacccccgccttatgcttttggagtatggactctttaaaacccaagaaaggcttcctgggctgggaaagggggctagggagggagggggaccctcttagcaccaaaaagtctgaggattccccgggaacgtgaagcgaagctcaccaccggtgcccgctacccccacgccggcaactctgtgcttcgtttggcccacgtgtcctccccacgcaactaggggcgacggtcctgtgcctgaggtgacaatcaccccccaaaaacctcacttgcgggtgggggggtggtgattgccagttgacccagaattttctagcaactaggcgcgttaaagtgaaaagcccctggactagctccacctccggccccaaccatcacaggcggaccctagctgatttgactctcacttcccgccctcagactgccggcgacgaaaatccgcccgaatcgggcgccacctctggtggaagctgctgtcctcggcttctgcccaactccaagaagcggaaggggggtgtatcctgcgccccaagctcatgggagcccacgcaccggggagagcccggagtggaggctctgggctcagccctcccaggcctaggccaccgtgccctgagtccctccccaagacttctcggactaagtgggccagactcttgtcaggggagggatcaccaggacctcagattgctgggggcggaggggtggacgctcgtgagtgcgaagttcgggtgtcacttgggtgtgtccagtgtctacaagtgggaatcctacggtttcaaaagtcaggcagggatggggttgcctacactcggtggggtcaatcgctagtctcaccagaggcgggagcgggcctgggggccctctgagctcgcggaggcggcgggttcggggcccgtgcgggcggggtcgcccaggggagcccgggccccgcgcgtcaggaggcctccgccggccgagcggccgcgctgggaaacaagaagcgagcgctttgctccctatcttcccagtgtccgtcctatattgttttctgctcttaaaactgacatgtctaattggcaattggtgccgaatcgtgtccagaggtctcttgtggaacatttctacagctgtctccttcaactagacgcttattcatgtcgccttaatgagaaacaaaacgttctctaatgagcaattacagagcgacaggattgttcccataacaaattcttgcgagtgacagaagcatcctttgtaccagatatttcgcatactgttaccgattttcccttccctcgcccgactccatggaggcgccgggcatccggagccggtccgagagctcacggatgcgccggcagcctcctcgcagtcccgcgcgccgcccctggccccgagcccctcggctccgttgtgctcctgggagtgagacgccacgtcccattatcccgcatattatctccttgtcacgaggacaacaaataccgattaatcttcggagtaaactgtttcctattcttgaccaagctacctcggggtgtggaggggagcggaggggagccaactgaccctcccctccgccccaccccccccatcccccgctcttcttcctccagcccttctcacagaacctggggtgtttcaggtcccatctctcctcccagaccagagcggctcccggcatcccgccgtcctgctcacagtatcttcacctcaccacttccacatagtcgccacccacagagagtgagaaagtgggacccagaggggcgaacgggggaggggcaaggatagtggggtggttttagttgggagaccaccacttccaatgccccatccccgactcgccctgcatctccctgctcaccttttcatgtgcaccctactcatagtcacataatttgtcaattacagcaaaaagcaacaggatacaattatgttaacctcgcagtctgtcagtgcgttatcttgtcacacttctacaagggggctctccctgcattctaatgtcaaatttgaatagtgcaccacgcagctcgttcttatgcacacagtgctgcccacaaacacacacacgcacccaccagcca

SEQ ID NO: 334209 - DNA, 79 bp, Homo sapiens; identical to SEQ ID NO: 235475
  chr11:31822246-31822325
  hyper

SEQ ID NO: 334210 - DNA, 156 bp, Homo sapiens
  chr11:31823126-31823282
  hyper
ggtacagaccccctcggacagtaatctgtctcggatttcccaagcaaagatggacgggcactcccgcttatactgggctattttgcttacaacttctggagtcgctactctcggtttactaccaccgattgccctgggtctgatggagccagtctc

SEQ ID NO: 334211 - DNA, 191 bp, Homo sapiens; identical to SEQ ID NO: 235477
  chr11:31824182-31824373
  hyper

SEQ ID NO: 334212 - DNA, 307 bp, Homo sapiens
  chr11:31824959-31825266
  hyper
gtgctcccttagacgctaaaatccagaaatgtttccatcaccgtccaaactggccaaggcctggcacaagcatcgagttgggttttgtttggttagaatagaagaaggaagaggagagaacaaccagagcagccagtatgtggctggtgaaccccagtccaggtttccgcacctccagtgcagacgtgagagtcagagcccgggctcggcttcagccacagacaagtccggccaccgcaagtaaggcttagagccgggagtcggttcgcaccagccactgctcgctttatttccgccgctgaactcc

SEQ ID NO: 334213 - DNA, 1539 bp, Homo sapiens; identical to SEQ ID NO: 235479
  chr11:31825691-31827230
  hyper

SEQ ID NO: 334214 - DNA, 483 bp, Homo sapiens
  chr11:31827557-31828040
  hyper
aggggcctccttctcgctcaactaggagaagacttcgccccgccctgatcagcccagcccctctctccggggtcagagcccgggcaggggcgagagggggtgtgagttacaggatttgggggggatggggtttctctaccgcagcttcgaaaactcgggcgggctgttcttaagggcccagcccctgcttctccagtatcgagaagagccaagcaaacgccctcccctcccgggctgccgggcgcggagcggggagcagccgccgcaggtccccgggcctcagtcggtcggcggccgggccagcgcgggcgtcgcgagtccctgtgtcctcccctgaccctcgggtccgcgcaccccgagcccgaagtcccagaaagaccagaggcacttactgttctgcatgctggctctggctgggggccgcgggattccacggggctcgaatatggggctctgttagcaagaaaataggagttaatcctc

SEQ ID NO: 334215 - DNA, 227 bp, Homo sapiens; identical to SEQ ID NO: 235481
  chr11:31829161-31829388
  hyper

SEQ ID NO: 334216 - DNA, 718 bp, Homo sapiens
  chr11:31832705-31833423
  hyper
ccggcgcccggcctcgcctccaccgctcctcactggcccattagcgaagcctgacctctgtcatcatcctccagcaaaacacttcctcctgcgcctgaaccagagcgggaaatgaggccgagccacggttcccttttcaaacccactaatcactccgcaacatgcaaatgcaccgctcgctctcacacaaaatattgctttatgcaaagcagcgccggggcctcgcgccagccgattggatgctccctctccccgcctggtgcaattggtccgtttgtttgaatatgaatacacttgttttcggctccgccggtgggtcccggctcctctccccggcgcagggcccccgagcccgggctctggcgctcgcctgcatctccccgctccgcgcacgccgagattcggcgcggcccgccctgctgccgcgaacttgagcggtcaagtgaaggtttctgggttgggggtcgcgcccccactccccctaagctggactcgggactcccagtcctcggagggtgcaagtttctgtgctgtcctttcttgccaactccaggacagcgtggcctgccgccccgcccccgcccgcccccaccccatcccagccggggccccaagacacagagcacagcggcggccgcaccccagcccacctggccccttggaagaagaggaaaggggcgggagcgtcactgggtcctggcagctccattccagctgc

SEQ ID NO: 334217 - DNA, 768 bp, Homo sapiens
  chr11:31835307-31836075
  hyper
gttcaaccccagaatgaggccgagttttcaaagtttaaggagagaggggtgagagtgagatttcctcgttctctctggactggtctcaaggaaggtgggggtgctgttctacctcgtggggagcctcactccctctgccaagtaccggctctgggggcgaagcggcctaggggtgtgggggccgagactgaggtgcgggcgcggttgccagaggtgtgtacaaaaccgagacaactcgcaggtcgccattttaattgcggctaccaacacgcccgaggcccacttgctgccctccaagacgcgggggggcggcggggattgcgctttaggttctgtctcctttccccgcctccccacaggcccctgttcccccctaccctccgccccctgtggccagagggaggacctctcaggccggcgggtgcgttcccgcgggggccgccggggtcgtcccacccggtagcggggctgtctgcgtggagggagtcccgctgggggaccgtggctcgccagagcctgcccagagcttctagccagtattgatgcgtcaacatgaggtgaggcaagcatctcacccgcaccgatccctggcattcccctgtgcccaccccatcaggccttcggggaggcaaagaagtgcccacttctggggggaagtgcctccagctcccagcttcagaaccaagagcctcccatccggagttctgacagttctgacacctccaaactctctctttccccggtcaagcagaggcgcagcgccggcgc

SEQ ID NO: 334218 - DNA, 2118 bp, Homo sapiens
  chr11:31837090-31839208
  hyper
gtcatggctggctcgctcaagcatccagggaaccgaagctaagcgcatcctgacgggcttttaaaatgacattgattaggacaagctgttcccaaccccagtaagagttaatctgcctgttaatcaaggcactaaggggctcaatgcgagttttattagcgacaggagaacagaggcggcagccagggatcaaaagccgggatcccatatatttgtcagcgctatctccaaaaaaaaaaaaaaaagtattttcaatttgaaaacaattcggcgcttttcgtcacttcctaacccagtctcacagagggtgacttccaaacctggctagcggggaaaaccgctgcccgggggacagaggggctgacaggaactgcgggttggctcagccgaatgcggccggggagaatttaagaattctcagcccgcgcggcccgatgcctctgattcctcacgagaggaaagggaatgaaaaatgaagcaacaaatgacaccacccaggctggcagccctcgttcccggccagaccccgctcctcaggcccggctctggcgccgggtggcgtccagcccctgcacgcgcggcgcggcccgcgggaaagtttgtgcagcgagagtgactgtccttccgcctcgcgcgcgctgcccccttctgccccggaggggcgttgggttcccttcggttttcctttccaattctaaaataaataaataaactccgggccctggggaaatctgaatagtaattccagtcatccaaattctatgagagggtctgaggaaaaaaagacaagcctatcacgggcgccctccgatcacgaagggcacgggcatgagaaggcgacagaggaggtcctcggctcgccctgggcgcggagcgaggactctggtcagaggtaattatgtcaccgcgttttctcgccgtgacagccgaataaacacgatctccaataaacatctctaatgagggaggaggcccgaggatggctgggtttgatttatgactggaggagaaggtccacttcccactgcgaagcaggcgacctgctcgccgcccagctccagggagaggaacccgcggaggagaggatcccggcccaggtaaggcgtgcggccggactgccactgcgctcgtcccccgtttccaggtgaggtgagcagggggcgccaccgctcggagtcgggcggaggtcccaacacctgtcacaggtgactgagctccgaaggtgctcccagaagacctagaaagggggcgcaggagcgcgagtgggagtgggggttgggggctagccggggcctggcccagaggccgccccaaactcccgggcggggttcttgggtgccccgcctaagccggcctgggcgtctccagctgcttttagggccgggctcccaggactttcgcccggctgaaccacaagttagtctaagtttgggtcgtcccttccctgactcactaaggggacacttccgggccccggctctggccctccaagggccgcagggtggtgggcgcttctctttcccgggcttggcggcccggctcccatggcgcccgcgcgcttcccgccgaggcagccagcgcagcgcccgcagtaaccggagcccgcgttctagctcagtgagaatcgctaattattaggtcttccgaagtgaagctcaaatcacacgctgggagctttacgcgctgcccagctctgtcggccgcattctttcgtactccgcgtctttctgagaaacgaaccccatctctagactttgttgcggtccagccatctgcactttgcaaccgcgggaaacttctgctgcacctcgcccgacccgcggcagggtgtctttaagcgctccaggcgcgggtacggactttcccaagcgtggatgtcgtgaactgcgatgcagaggaggtctggatgcaaagtgcgtccccacctcctgcatttttcgcggtcgcgagtggctttagcagacagcagcagcagactcccgccccctactcccagctcagggccggactggaagtccactcttaggagtggaacattttgctacttttgcagaagagcacactcggcaaagacaagtccctcctccaccccccttcctatccctccctcagtaactc

SEQ ID NO: 334219 - DNA, 812 bp, Homo sapiens
  chr11:31839253-31840065
  hyper
cggggccacttggggcgggctttgatttggggacagcagtcgctggcagcggagaggccccgcgggccccgagccgggccggggccggagcccgggcggttacctgggagcggagggcggggaggcaggtgagcctggcagcgccggttcccacacttctcaccgccgctcggcaggggaagtggcagatctgacagccgcgttctacgcgaggacctgccccagagtttaaatgtcaatgataagaaaagagggtgctcaggcaggcgctaactttccttaatatccacgccagcgccgtcctcattggctgcccggcccgcgtgacgtcatggcggctagagttgggcacagctctgcgccgactagttttccggccgggcgggagcctgcttctccccacccagggtccggccggctccaacccctgctttggccttccttggcccggcctgtgactgctctagcccggcccggtccagcctgggccgccgtcctgtatggcgtagagtcgatccccaggaaactagtcttgccgagtgcgctcctccgcaccttcgggcactagggccccaagatctctgcccttaggctggccagctacctctctgggtaatcaccctgtcccctcctccgatccccaagggagtcccttcatcggagagacccgaaggccgcgccgggatggagaggcgcttttggcaggaatcatttttaggaggagttcgaggctcgatgagtaccctcaacctggccctcgagcccgcaagtcactagctgggcacagacgggggctccgggaagaggacatg

SEQ ID NO: 334220 - DNA, 503 bp, Homo sapiens
  chr11:31840426-31840929
  hyper
cgttgtcattcccgtccctcatccctcaaaacaggaagcttctcaactccttcccctatgcttccatctggctctccaatttgaaagtgacagtggtggggcccggaggggcaggggtcacttgaggagtttgcgggagaggaaggggcggggcgtggaatttcctttaggcagctcgtggagacccagcctgggtggacccgggagtgtgtgtgtagaagcagggagggggacgcctgggccggagagggtcctagggccagtccctgcgcgccttgatccgggcggcggctaagggagagccgagcacagatggcgccgaggcggaggtctagtgattcccgctcccgcccctggcacacctggacaggtgccgggcctcgcaaccggccaggaggcagctccaggcagcccgtctgcccactcctcttagcccggacagctcctagctggacttgattttttgtcttgctcagcccgtcgaggactggagggcagagtag

SEQ ID NO: 334221 - DNA, 1035 bp, Homo sapiens
  chr11:31841341-31842376
  hyper
cggataggcctcggacctgtgtaggccttcctagctggccagtttctgtccgggtctcgctccccacactgtaccaaccctaggccgccgagagggctgttatgggcttgtttggagtccaggccattaagtgtgcgcaaatccctgcaacccagcagggtgctcgagagcgactctggaaacgccacggcccccgcctgcttatctgcctgtcaataaagggcgcgttcgggctgcgcgggagcgccggtggtgcaggcgaggcccgaactaggcccttccgagctccgggccaacgcacgagccgctctccatttgtcccgggcaaggaggctgggagggagggagccggctctggggtcgccgagggagaaggtgcgggtttagccgctgcctcagctggattcttggagaagcgctcgacctcggagcactctggagaccctaccagaaatctagtgctgggggctcctctccgcgcctgccaccagccttggaggaagctgggcagggccccgtgtggtgcccagcctacgaggtcccacctcgcctctccctggcagaggcatcctctctaggccacactggctcgcattgcgggaagaagggcaccgcgggcggcccgggggcatcatcgacgactcgtagagccccaaatgccgagtgctacctgaggcaggctgtagctggggtgaaaaggaccggaagcgggaaagaaacctcttttctttcaggcctcccttcagcccggggtagcacagactgcaaatttccgacacctagggcagctccaggctctgattctccaccgcacagtgagcgagctcggcagccgcccagtctgcgtaggctcccaggccagccccggccccagagcttccccatcagccagcagaggctgggtggagagcctggatgggcgtgagaggccttgaagtaggggaagtagtggagagagagaaagatagagaaatcggctcttggcttgaactgttgttcttgtcgaaggtatgttttcccctcccggcctctgtc

SEQ ID NO: 334222 - DNA, 652 bp, Homo sapiens; identical to SEQ ID NO: 235491
  chr11:31846201-31846853
  hyper

SEQ ID NO: 334223 - DNA, 812 bp, Homo sapiens
  chr11:31847145-31847957
  hyper
ctagcgccagccgccggggcaacgtggcgctaatgcagaaatcttggctcctgcctgcattattcatttcggggacgtggggatgggataggagtggagagtgggtttcttcccctcccccgaacttattctgaaaatcccggggaccaatggacaccgaggaaccgaaagccgagagaatagctgtcaaggggccactttgaccgacggggctgcggtcgacggcgctccccggctgtctttttgtcccaggggttcccaggcccgcagggctaggatcccccagctcccaccctagtcagtcccagtcagggaggacctaggccagggcctcctcccaaggctgtcatctggcggggcaaacgctcttctctcattccttcgtctcccttccagccctcgcatcctttccttctttctgcttcagagctctcaggctcgcgtgcagggcgggatgggcccggatcgggggccccttcgcagatttgaaagttgcctcggccttgatcttctcccagcctccctgctggggactcacccccacatcccgctaccccccggggaaaagcgaagaaagccagagtctctttgcacggcggggacgctggcgctcacctctgggcgcggcctcggtggagcctcagggccagggcggggtgtggcggggtgtggcccggtggggtgagggagggacccggggtgcaagccaggccaaggcctcctcagtgcgcaggcgccgttcgggcccgccgccccctcccaaggcgtggggtcccggggacagaccccgagcccctctctgcgcaactacc

SEQ ID NO: 334224 - DNA, 795 bp, Homo sapiens
  chr11:31848467-31849262
  hyper
aggggcttttctgtctagaacgcaggcggcgggagttgcaccgccacagcccgggagaccaaagagtctccactccccgctcccggcgcctcctcgccgaccggagccccgagcccagtgagcccagccggtcccacgtcgagaggcgctgggttgggagaagttctgctggtcgtgggctcggcccccaggcgccaggccgagtgcccacctcggcttctttagggggcctacagcgggcagccgagcggctggcggacccggagcttgggaggcgaccgccaggctggtgcccggcctgacccggcgttcgcggccgcccgctcgcccgccgcgggccgggagcgtacaggagtgtgacgcagattgtgaaaacagaagggagggagttgggtcatttccttcgctaatcatcgccccctcctgctcctcctccccacccccatcccatcctcgccgccacccagcctcgaactctcttccttgccagagtctgcctcactttgagccagtggctgcactttatggagaaaatatatgtgcccatcactcacccatctatttgcagcgtccatggagcgcctcggggaacacgcatggacaattaaacacacccacttacggcgggatgatgaggctttctgttaaccacatgtgttcagaaatggatacagccctaattttgacacggaatgcagctaatgcaccttgctatagatgtacgtccgttggaaaagtgtgtgatgggcacctgatctacaccaagagaacagggctgtctgcagaagacccagc

SEQ ID NO: 334225 - DNA, 559 bp, Homo sapiens
  chr11:32354840-32355399
  hyper
cgccccccacccccacccccggccgtatttctccctaggctcttattaaaaccaggtgcacggaaggcggcccattctggacagaaaagctttcgtttgacccaaagctcccccttccggcgtgttttctagagggaattcgtgagctgagccgaggagcgagcaggcggcttctcctgaccggggagacgcgggaggtttgcaaacagaccttggcctgggctgcgcagggacaaagtgttcaagggcagcaggggaggctgagggagtacacggctgggaacaagggacactgccgcccccagccacgcaggagcggtgtctgcaccactgaaagtcccccggggcccacagctctatccaggcggaagggaagcagccaggccgccgcggatctgaacttgaatcccgggtggaccggacgccccggccggcgctcctgacgcgcggaggagctggcgagaacctgcagatctcagggctcgcccgcggtccggcgctcggttcaggacgtccgggaaccccgcagcgcttaccctctgcagcaggcgtcgctggc

SEQ ID NO: 334226 - DNA, 646 bp, Homo sapiens
  chr11:32448534-32449180
  hyper
cttgacgtcagccccgggtccccgcgcggaggggagggaggatggggatgggtttgggggcagccggtgtcaggatccccgagcaccagggaggagggggctatgaggtcatgcgcgcccaatcccgggccgcacaggcctcgcgctgctgctccccggcccccgccccaacttccagccccgtgcgggctggtgtgcgccgcagttactaggcaaccctatcgcagacgcgggcggccggccaagttcacccaaagttgaagaaaaaatttgggggagagaaggtggagcgagaggcgagaagaggaagcacggagcggggaaaagcttggaagggaatgaagctggccttgggcctcccgctcacaggaagaaggtcccacgcgggccagagcagcctccccgcagggccctgttgcgacccgatctccgtcctgcaccccggccgggggcccaccccagagcgtagcaggggcgctgggaacgacgtccacaaagcgctgccacgggtcgaaaccctggagggttgaggtggggagaaggctgtggccaaggctgtggccgaaggtacgcgccttcgaggtagtctggccggtgtggccattggatgggtttgaggtctcagaaccgagtgggagtggactcc

SEQ ID NO: 334227 - DNA, 862 bp, Homo sapiens
  chr11:32455013-32455875
  hyper
cgagccttgggcgaaggtacctcctgcaaaagatacactctgcttcccacgcattccaaaaacatcccggtccctaggccctcgagtaattttgctccaggaaaagcatccgccattgtattagtaaagcgtttactaaattaccgaatcaaaccgaactggcttaggttctcaatagcgtggaaatccactgaaaataaatgaagagggcaaactacaggggctccgcaggttcgggtccgcgccgcccaggcgaaagagaggtgggcgggcatcggcgcgggatgagaaaccaacctgatacttatcgtgtgccgagttccctccttgtatcctgactaagcacagcgaataaccctgtccttgttctaaccccaggtcttgaagaaatactgtcccagctgagccccgcgtttacaagatgaagaggcgccccagatgcgctgaaagaaaggccaaagctcgtgcctccttccactgcctgcggtagaacctggtcccgcatagcttggactcggataagtcaagttctcttccatccccagaacctgcgtggccgccgcctgagcgaagcccagtgaagatccacttctgtattaccatacgcgggagctatccacggacacgacgctgttccagaaagccatttagttactggaggtgcatgtgctcattctagttctctacgatacttaatgtgcacctaagtgtgtgccaacaccgtattataagggctggaggtgctcctggacattttagcgctgcggaggcagcacagcacaggcgctcacccccgcgctggtcccactccgaatccagagtccagacgtctgaaaagcgctacgcttggtgacaatttggc

SEQ ID NO: 334228 - DNA, 1486 bp, Homo sapiens
  chr11:32455921-32457407
  hyper
cgccggtctcctggttccactcccgtggggactagcagtcccggaatctctcggactctaaggggccccagacgccctcccggctcttgcgaacagtcaggctcctagctctgcctggctttggaggatgtcgggggccagtgcctgcgtgcactcccactctccggcctcctccccagccgccgcttccgctatcctcacggcccttgggaagcagctgggtaagagctgcggtcaaaaggggtaggagaggggggtgtcctagagcggagagtccctggcgccactgccccgcgcgtagggggcgctccccggcctacttaccctgattgcgaatagcgggctggctctcgaggcagctgggcaggtagggcgcgttaggaaacatcctggcctggccggatgacgcctggctgggcggaggaggaccgaagggcccgtagcgacaggctccggctgtgccagtgaactggccggaaaagtggacagtgaaggcgctcaggcactgctcctcgtgcggctccgcgccgccccagctcggctcctgtttgatgaaggagtgaggcggcggcggcgggggtggcggcggagccggtggcggcgcggggccgcccaacgacccgtaagccgaagcgcccgggggcgcaaagtccagcaccggcgcccactgcgccgcgccgctcacaggcagggcacagccgccgccgccacccagggaggggacggcgggcagcagcgcgttcaggtcccgcacgtcggagcccatttgctgcggctcagacccggacgccccgcggctcctccggccctggagacgttcagcgctggcctcggcggcgcctaacttggcccagatgccgcccgggtcccggactccctgctgctctggctgctgtaggcacccaggcccggagcggagcgtgtgctgagacgccggctccgggacacacgtggaagccgggtcctgcagcaagaggaagtccaggatcgcggcgaggagacggcggggcccgggcgcctgggctgccgtcccggctctgggtgggtgggtgggtgaatgagtaggtgggagggagggcgggaagtgggggagcggacaggcggtcgggttgcggagagcccccgggtgtgggcgctgccttgaactccttaccccagctgcctggctgccctcagcttcccaaagctcaaataagaggggccggcggcgcggggaagaggaggagccaggaggctcggccgctccattcactcagcagcccaagcccggccaggcagcgcgcgctgctccttgggggcgccctcgcagctggggtgagggcgggtccgagggagcgtccctctcggagacaccctcctcttcaacccaacacgcgctctcagctggccggtgtggcacaaccctccccccacctccccttcttggccttcgccagtgtgggagcctcgtctcactggagagtccgttcaggtaagcagtgagtcc

SEQ ID NO: 334229 - DNA, 467 bp, Homo sapiens; identical to SEQ ID NO: 235500
  chr11:32457708-32458175
  hyper

SEQ ID NO: 334230 - DNA, 360 bp, Homo sapiens; identical to SEQ ID NO: 235503
  chr11:32459414-32459774
  hyper

SEQ ID NO: 334231 - DNA, 384 bp, Homo sapiens
  chr11:32851566-32851950
  hyper
cgcgcgggggccatccagaccctgcggagagcgaggcccggagcgtcgccgaggtttgagggcgccggagaccgagggcctggcggccgaaggaaccgccccaagaagagcctctggcccgggggctgctggaacatgtgcggggggacacaggtacgaggcctggcggcaggacctcggcggggagggggttacctggaaggggccacctcggcggactgggttggattcgaacacatagcgagggttgcccgcggcgacaggtgcccgatcagccctcggcagggtcactgggcacggcgtttgtcccaggcgctctcaggggctgcttcctgggcgcgcgtcgggttccggcgaccgaaaccgcgcgccgggcgctcttgc

SEQ ID NO: 334232 - DNA, 927 bp, Homo sapiens
  chr11:32915115-32916042
  hyper
ggagtcgtggggctccgtcacctcttgggtcctgggctctcacatggtgaagtttgggctcgtggctgaactcgggatctgtgagacccaggattggcgccgggggtccgaagggggcgccggagagtttggggcagtggcgatccattgtattggaacctgggtggccgacaatgcggtcttggggactccggcgtgtgagggttgcggaggcgggagaggaagagtcgcggaaccgcgtcccggagacactggggggcccgggagggctgggctacgggagaatccccggggcgcagggcagaagagggggcccggcagggcgcgaacgcggctccagggccgggtgacatatgtttgcgctggtggccaagatttaggcgatttttcttccacgcgttcaaagttgctcttaggtttcctccccttttaacaacagcaggaagtaaggaatctttctttgccttctatgcctcggggtgactgagagttgggaagaaatggggcgggggttggggtgggggtagtgaaggccgtaaaggttgaagaaccaaagcatgcttctccatctcggcctttaaggtccgggtgcattatgtagcgtggggttcaagagttcatcttgcatgaccaagggaatctaaaattttgactcctacttgatatttaagctcgcgggaaatgtgtagtagtgccacactgtgaaacggtcccatttgaatgataactggaaggcgtggtctggtttggagaattggtgagcggggtgttttaaagccacctctcccgaacaatacagaatctggtaggtgcagcttctgattacatggaccagggaatcctgggttgctaatgacttcatcctcagctaccaacaggaagcttcgtggctttatgatctcatcagatttcttcattatttttcac

SEQ ID NO: 334233 - DNA, 805 bp, Homo sapiens
  chr11:33397688-33398493
  hyper
cgcggcccgggaacccgagccggagccggggctggaacccgaagcccagcgaggagcgaggagcgaggagccaggacagcggggcgccgaggctgcagcggcggcgggagggagggacccgagcgcgccccgcggccgccacccccgttcccggcagcctcgccccctagttctgcaggagccggcccgggggagggggccccgggcggcgcccgtcccaccctcgccgccccaatcgcgccggcgcgcggcgacaggcaccgtgggaaccccggcccgcacccgccgcggctccatgcgggcccggcccctgcgcgggtgaagccgcggctccctggagcccgccccgggcgcggcaggacgagcgagccagtcgcgccgctcggcgccccctccctccggcgcccgggccgtggccggcgatgcccggtgaggaccggggcgccgagggctgggctccccggcgcggtgcagagcgaggcagcggcctggatgtgtgaagcgtccccatggctccgcaggaggccaagcctcagggctcaagggaagctgggcccgcgacgcgggggcgcgggggccggcccgtggcgcgtgggcttggtcgggctgcctggggagccgcgcgctgcacgggtgtgaggggccccggggccggcgcgtcccacgatgcgcccccgcggccaccgacgctgctgctgggacttctgctgctggcggccctcctggagcacggccaggccgacccgggtaagcgctcggcggcggggcgtccgcggaggtttctggaggagcggggcggcgggac

SEQ ID NO: 334234 - DNA, 720 bp, Homo sapiens
  chr11:33890237-33890957
  hyper
ggtgcattaactttcgaggttcacatgtccccatcggtggaccccgaggaggggtacacctactcagatttactccggatttcgctgctctagaaatccctggaggcccagagccagctccgaggtggacggtcggacccctcacccgcccgttatccgcaaggctggcagcggctccacctgcggaccgggaaggcggccgttggggaccccggaggccgccacttggaatgttcccctttccaagaccaaatggacaaagagaaaggaccgagaaggagagggaagaagggagcagagtcaagcccagaacgctctccggactgcacctgcgcgcctccaggctctcctcgtgcctgctcccgtgcaaactttctggcccgtggtggctttggggagcgtcccagtagcctggagtggcccgcagaggcgccgggccgacccctgtccctgccgcccgccgcccagtccctctcccagagcccccggaatcacccgggaggaaggaggagcccagcgctcggcacagggggccaagggcacgccgcgagcgcgcacctggagccccctcgcgggccgcccgggtccccccgacgctccgggacgcgaggccgtggacaccgggggtggcaggggcaggggggccgcacttactctgaagggtccaggctcttcctttcgatggccgaggacattggggagggaggcggggtgccgggc

SEQ ID NO: 334235 - DNA, 535 bp, Homo sapiens
  chr11:33891711-33892246
  hyper
gggacggggagagccgctcagcgaacacctctccttggaaaggaggctgggcaaccactaaatcattcttcagggcttcccctcttccgcctttcccttttggtttaactaaggcagaaagtaacccacgaacagctcgagcaagcaagaaaagacaagaatgtgaaataagcacctacagaaatgcaagtgttcccagtggattttccgcccgtcccaggttcgaggtcccaggtccacggacgccgtgcactgggatgccccggacagcgcggctctgcgggctgcgggctacgggctgcgggccccaggctgcgggctccgggctgcgggctccgggctgcggccgcgctctgcagaggcgatggtggtgcgccagccgggactgcacgggctggggacgcctagagcagagccagggcagctaatcccagagggagggtggctgggagggaccacgcggggccggggctcctctcagtcggctggtggcggaatcccctccctctgcacctttcagaaagcggactcctgc

SEQ ID NO: 334236 - DNA, 763 bp, Homo sapiens
  chr11:35160310-35161073
  hyper
cggattcagagaaatttagcgggaaaggagaggccaaaggctgaacccaatggtgcaaggttttacggttcggtcatcctctgtcctgacgccgcggggccagcgggagaagaaagccagtgcgtctctgggcgcaggggccagtggggctcggaggcacaggcaccccgcgacactccaggttccccgacccacgtccctggcagccccgattatttacagcctcagcagagcacggggcgggggcagaggggcccgcccgggagggctgctacttcttaaaacctctgcgggctgcttagtcacagccccccttgcttgggtgtgtccttcgctcgctccctccctccgtcttaggtcactgttttcaacctcgaataaaaactgcagccaacttccgaggcagcctcattgcccagcggaccccagcctctgccaggttcggtccgccatcctcgtcccgtcctccgccggcccctgccccgcgcccagggatcctccagctcctttcgcccgcgccctccgttcgctccggacaccatggacaagttttggtggcacgcagcctggggactctgcctcgtgccgctgagcctggcgcagatcggtgagtgcccgccgcagcctgggcagcaagatgggtgcggggtgctcagcgcggacccggcggcagcccctccggctgagtcggccctgggggactggagtcaagtgagctgtctgcgaagtgcattgggctccggaaagcagggctgggatttgc

SEQ ID NO: 334237 - DNA, 1479 bp, Homo sapiens
  chr11:35439856-35441335
  hyper
cgctggagtctggcgactcctgcccttgtcccaaaccacacgttttcccgcctcccgggaagcacccaaatctcttccacccttccttagagctagccagggagattccgccttccagggacaaggaccgatcggagcgggcccagcatctccatggcgactctgcaaacctggcgttcaaggccgcgcgcgctggtccttgccccgccccagggccctgtcttggctcattccttccgagccggcaccacctgcaagcccgcctcgggcctggggcgccgcgctccaggcgctgctaccccggtgtctgctcacactatgcccaatcccctattgttttgaaatcccaaaagtaacctcaagaggatttcttcctcacactctcaggcccccagcgcaccttaccctttttatcaaaataaaacaaccctccacctctcgcattttcaaaggattaagcagcaatctccaggaaagaaaatcaatcccctccccaccatcccatccccagccaagctacggctccgccaccacctccgaggcccgccgccgccgcctctctatccgcatcccggataggggcgccaccaccccgcgcgtgaccccgctttcccgcgggtacagataaaaatcccctcacccttccgtagatgccatggtctggggaacgccccctcctcttcagcactatccggcagctgtgggcgagggagaaagcggacgccggggtgagcgcgaagtgcggccgggagcggtatttaagaggagcctctgcccgcccttccacccgcctccggggtaagccctttagcgcctcaacgggcgcaggaggctcctgcgggcgctaatccgcgtcccggctctccacggcgcgcgacccgcgctcccctccgcccgcggggatggcgcttggcggggagctccgggggctccgagggtggcttccccgagagagcgatgcgcccagggctgcaggagggcgcacgccggcgatgcgcccctgcagccgctgccacctgtgctttgctgcggggctcgcgggcgcggcgagtggcgggagcagagagtggtggcagaggacggtgagcgtgcgtgcgcgtgtgcgggtgtgtgcgcgcctggggaggcggtggaggccgctgcgctctggctcggcgccggccagggagggattgcaaggtttagccccgccggagctggggatttgcaggcgatccctctctattttcgtcgagagctgacatcacccgcgccgccgcctcgggcaactcctttaaccgccgccccccgcccccatctccagtcgcggtccctcctctgccatccctccccccagcctctcgccataaattagccaaataagaaaagaggccccgccgctcgtccgggaaggcttgggcagccggtggcaggagcccaggatctaaggagtagctattgtttcccctgaagcccgcgtggccccaggtcaccccgtgc

SEQ ID NO: 334238 - DNA, 552 bp, Homo sapiens
  chr11:35547041-35547593
  hyper
cggacgctactcacagtacctcttggcaaggacgagatgagaaggagctgaagaaaagtgagccccaactgcgtccagcaacccagctccatccttgccgcggctggtgcccgagcgtctactggggagggagaggagggacccagggaggccgggggcaggcgggttttacagggacctccccgagccccagctgagcgggagctcgggtttcagctcgccaggctctcccatcctcatctgaggggaaccaccttcagccagagcgacgtcagcccaaacctctcctctctgctgccttaacccttgcggggccccgggaggtgtggccacgcctggagacccgcggacggcggctgcaaaggaagctgcgggggagggaggccagcctgggtacaggtggggtcccagtgttgggtgctgggaggaggggccataggaccctgggcgggagcagaggtacccagggctgcggggcgctcaggtgaggccgggagatcttcctacgggaggctgagacgggagctggctttgccctctctgactgcacgc

SEQ ID NO: 334239 - DNA, 797 bp, Homo sapiens
  chr11:35639632-35640429
  hyper
gctgcctaggcaaagggacccggcgaccaagacacccccgcgagggcccagggcgcgtccctcccgccaggccccagactccggctctgcgccaccccctcctacgccccggcgcgggcgcagccagtccggcttcctccaggcccccaagtcccggaccgagtgtggggccgcctctccctctcggaaggagccatcgccgctttaagtggaagaggagaggaagggggcgggggagcggggggcggggagcggaggcggaggagggggagggggatccccctggctcccacgtggtccgggcgcctgtgaatcgcgcccaccggagggtctcacagcgaaatacaaaagcagctgggaagcggcggggactcgagttcccagcgccgggcggagcgccggacagagccccgcagcgccccgcggccgcgatggggccgaagcgcccgaagccccggagcccacaaactgccgggcccgcctcgccgccgggacccgggtgcctgggctcggcttgaagcggcggcggcgcaccggcacagccgcgggagcatgggcaggaggatgcggggcgccgccgccaccgcggggctctggctgctggcgctgggctcgctgctggcgctgtggggagggctcctgccgccgcggaccgagctgcccgcctcccggccgcccgaagaccgactcccacggcgcccggcccggagcggcggccccgcgcccgcgcctcgcttccctctgcccccgcccctggcgtgggacgcccgcggcggctccctgaaaactttccgggc

SEQ ID NO: 334240 - DNA, 763 bp, Homo sapiens
  chr11:40314522-40315285
  hyper
cgaagaatttggggagcaacttcccccccactctccatccttccggccggccccttcgccaaagatctgattagatttctcatcacaacccagtgcgcaattgaatttttgatttcagccacccggccagccaccttcccctctcccctccaaactccggttatatcctgtctccttccctccaccgcctctgcaatttcataatctcacgttaaatggagtgcggggggcgggggcgggggcgggggcggaggtagtggaggaaaatttcaaggctccgtcagctgtcaagaagaaacccattcctccccccgctactttttttttttctttttaaggctcggggtgcctttccttcctctgtccccgcccccacccccagcacccggtccagatcctccaggtgttgcagaactccgcggtcggggccgggatcacgggggagacgcaggatgcggtccctcgccggtggcccctgccagcccccgggtccccttctcctccatcagccggtagtggctccgggagcgccgaggtgatggaagttgagactggggcttttatttcaaatggggagggcgaagtgaggggacagacagggtggtaggcaaattaaaaaaaacacacacgaaaaaagaaagaaaaaaagaaaaagaagaaaaaaagaaaaaggaagaaaacgggtaaaaaaaaaattccctaatcgctggctcttctcatccttctcaaatgcaactgcagctttgatctcatttccagctgc

SEQ ID NO: 334241 - DNA, 977 bp, Homo sapiens
  chr11:43596515-43597492
  hyper
cagaggggaaagccgcagtagcaagccggacactcccctctgggcgctccccaccgccagaactgacgccttcgagggcggtggatttgtgaatcagctcccctttcccccacacaggggagcccctaaatggctgctggccatttgcaaagggttgtgtgcatgtgtgtatttaattgcaggcttatttgtttctgctctgggagtctgtccgtctctctgtaactcggatcattgctctctgggaagctgtataactggctgattccgtgggagaccaggcaggatgcgtgggcgcaggaaacagaagagggaaaaggagggagaaaaagagagcaggagggagagagcgggagccttagaatctgttatttgcgtcactcgaggagccggggctatctgcccgacaaacacacagaattaatccgagttacagccatagctgtctatgctacagtgaccagatgagaaagggcggggaaaggacgcgcgcgggagcgtgtgcacggccgagtttgcattgggcgtcttgggagagtttggggagggggctgtcctgctgggcacgcccctcggggccccgcttgcccggtgcagactaggctgcagcctgctctgcagctgcccagcccaagcctggggtggcgcccgcctcggccgcctcgcctgctcagtggctgcgtggaacacaaagcgctgtctccgagcagaagcgtcttctcagctgaaccagacccaccaaagaggagaatctgcacgtgacgtcagtagctgatgactgacgcaggctggcaaaggagactcaaggcggctgctccgcgctgccttcatgagtctattttctccagccccctcgtagtgaattactagaacgcaaaacacacacacagacacacatatgcagctttcaaaatatacatttccaaaggcggtgtgttgcaaacacaacgcgattttgcagagcgtgggtgggaaac

SEQ ID NO: 334242 - DNA, 1513 bp, Homo sapiens
  chr11:43599961-43601474
  hyper
cgtccctctctcggaaggttccctgactgagactgaatattcaactcataatagtaacaagggcttttaccgatgtgcagaataacacaaataacgctgcaacccacactttgtcttgacaattcagttcaaaccaaagctgctcacagcctctcggcccaccccgcggcctcctcgtcattcactgggacctactggttccctttcccaagcctcgcccctctcagccctgcaagttgcgtggttgtgtttacaaattctgccacaattgcaaaggaaataggggtggggggagcggtcggggcgggagtggtggtagcgccaataaagcacttgcaacacgtggagcggtggttggggggaggtgtccaagagtcaagaagggggcggagggacaccccatggcctcatttccacctccccattcttccccaccccttctcattgcttggcacaatgcacaagtttaccccccgaactggatcctattaaataattcaatggtagcggtgtaattttggttggaaccagcacggattcccaagtcgtgactgcaaaaagtgagtaatgcgcgctggctgcgtcatggctctagtcacagttcattccgaactgagaaggaatcgtgacttcgcctggagacgtcccctacatgggagatggggggcgggggggcaccaaatcagtggggacgggggtgggggggaagacctatccaatgaaaaccgctgccaggggggcatttgaactccgtcgcttgctgtctcgctgtcccctctctgccccgcgcacctcgctccccctcccggccggcgctcgcagtggcgcgcctgctcgctctcccgctaagcgacgagtcttcaacaagttggaggaaggcaggaacgcaggggttaagctcggaaagccgcaattaccaagatcgtgaccctcccacacagtacagtaacttatatacttacctggaagaacccgctttgccgccgggcaaacacccgtggggggcggggaggggccggagggagcgggccggcaggagaggggctgcttccagctggctgcagtgcggacgggaccggcgcgctcccgtggcccccagaccgaggtaaggagcagggagtcggcgcccgggtcggctggtggtcggtcggctcactggtagtcggtcggctcacgggtagtctgagcagaacttttttttcccagttgccccgcgccgcggcggcggcgggcgcagaccgcggagcccctctggcgcggcgggcgcgcagacgctcggagggtgtgtgcttgcgtctgtcagtcccggagccgaggggatgccgtgggagggtgagtgggtcgcggagctgcaggagggtgatggatgggcgaagggggtgggtcgacagggacttgaagacagtgcctccaccgtcgagagacgttttctccgggcgtgctgggcgagggtgggagtgtgtgtgcgcgcgcgcgcgcccgcccgcacgtcgattccagggtgccaaagaac

SEQ ID NO: 334243 - DNA, 827 bp, Homo sapiens
  chr11:43602408-43603235
  hyper
cgattttagtccgcaccaatgagctggcggcctcgtctgtatttatttagtgctctgggggagtttttctctttacgcagcgcctgtagtcacggctggaaccttggctgggggactctgagggataagaggggattcggggggaatccgaactgtacctgttcagagatccgcgaccttgcagccggggctggcggaactctgatagggagatagagggataggacaggcaggcggggaggctccgggtgctggggcgacaggaaaggggtggaggctgggctccgggatccgggtgcccctctgcggtccccttctcgccctccacacacttctctcggggctgagttgggggatcgcggacggtctggagaaatggagacacgagtccaggggcgcggaggggcgggcagcgcgcggagtggtgagactgagccgcgatggaacgcgctggggagacccagcctgttcggctccagggttcggagacatcctgggctgaaggcggcggcgaaccgaagaagccggcatattctgcccttcgcgaatctttttgcggtctgggcttgctgtacataactcaatagccggaagcccttaccccaaaaagcatttgcggagggcgcactcgtcgagaagacggcagccatccagcgatcgccgaagcccgcaccttcccgaagctgctccatccgagccttacccggccctttccccgttttccacggaagattcggccctttcccccgtcctttccgcggtgcccgaggctttggtcacctgtcttccctccgagcgagtcccccgcccccaactttttaacagac

SEQ ID NO: 334244 - DNA, 467 bp, Homo sapiens; identical to SEQ ID NO: 235536
  chr11:43603524-43603991
  hyper

SEQ ID NO: 334245 - DNA, 178 bp, Homo sapiens; identical to SEQ ID NO: 235537
  chr11:43604021-43604199
  hyper

SEQ ID NO: 334246 - DNA, 80 bp, Homo sapiens
  chr11:43604829-43604909
  hyper
ctccagggcccaaggagcaacggccgaacccggcgtcgtgcggcaccggagcgagtcctctcctcgcctcgcctcgcctc

SEQ ID NO: 334247 - DNA, 1714 bp, Homo sapiens
  chr11:43963646-43965360
  hyper
ggggtggcaaggatccagaaggggagcccaccccttcttccgagctcagctctggggagccgggcgctcaggctcgccaggctgcaaagagagctgagagctgcctcgcgccccgcgcagaaccggcggtggaataaccagcgcctcaagtgtgtgcatctgggaccagggggcgggggagggggacctgcggccccgcggccaacccggttggtgcagacttggggatcccagaagggacagtgcccgcccagtcgcggcgattgagggtccctgtccgggcgcagctcgggccagccgcgtgctccggggccgcggcttctcccggaacccccgcgggcggggcctgccttccggagccggttggcggggggcgggcggcgccggggaaggggccgttactttcccagagcggcggggcgacgtcaggcggaagggcgcggggcgcgcacgctttaaatggcattcgctgtcatccgagctcagagccgtgtgggcagccgcgggctatataagccgcgagcctggccgccgcggggcagacggcgacagcagcggcggcgagcgcctcggagcgcggcggaacagcgccccccgagccccgtgccccccgacgggtccgcccgcccgcccgccctcccgaggagcgccggcccgggcccgcgagggccgccgccaccccgcagcagatttggatcccccgcccggcgagcccccggctgctgcctcccggggggccccggcgcagcggccgccctcggagagccccggcgccccgccgcccggccccgcagacgccggaggcgccatggccgccaagcccggcgagctgatgggcatctgctccagttaccaggcggtgatgccgcacttcgtgtgcctggccgacgagttcccgcagcccgtgcggcccgccaagctgcccaagggccggggccggctgcggcggccgcgccagtctcgcttcaagacgcagccggtgaccttcgacgagatccaggaggtggaggaggagggggtgtcccccatggaggaggagaaggccaagaagtcgttcctgcagagcctggagtgcctgcgccgcagcacgcagagcctgtcgctgcagcgggagcagctcagcagctgcaaactgaggaacagcctggactccagcgactccgactcggccctgtaaggggcgccgcccgcgggggggacgcgcgcgtccgcggtccgcgcggggaccggcgtgtgaaccccgagagtgcccgcgccctgctcccgggggacccgcaaggacccgggaccgccgctcctcgcgcgctcggactcccgccccgctgcgaaccggtcggtgcgcccctcgccgcgctcgccctggcccgggagcgccgggagcggggccgctttcctcgtccttgtaaatgtttattttttaactcttcccagtgcgaactctgctgtgagtgtgtgcggggaggcgcgcccgcgctgagtcggcggcgggtagccactccatgcccttgtccgatggtttgcaactccgattttgcacaccgctccaccgtgccccccagcgcacacccattcacactcacgccaacactctcgctgaacacttttataattgttaggcgtggccgttgggactttgggcgcagcgcggctgctactgcgtctggaggattgatatttatttttgcattgcgatggctgaaggcatttatttaac

SEQ ID NO: 334248 - DNA, 739 bp, Homo sapiens
  chr11:43965463-43966202
  hyper
cggggtccaggctcccaagactcggggaggtgggggaggaggtggcagggggatgtcggaccagggagccgggagtggagctacctccacaagcttcggtcaccggaacgaggttgcgccaccggtgcgcgggtcggttgcctgcctccccaagtggatccacccccggtccagtgtgctcctgcgtccctggtctattccccatcgccggcatccgggctgaagtgaagccgcaggaggggcggaggcagagctgacgatggagagctctctcctccgtacagttcacttcccagagctggggtcagggtcctcgccccgcacccgccacagaagacgcatctccctctgcgctgattcctggcggcgggtggggagatgtcggagccagcaatgcgagatgtttgggcgttgggacccgagagtgggctggaggccagcctgggttggtcgagagtgtgggtgcgcgctcgctgtcgcgggcaggtgactccctgaccgcagttgacccagcgcagtgcctggcgctcctgcgctgcggggaaaaccgcggccgctatgtctccagccgttctctgcgctccgcagggttcctccaggagggtggggcatgtctttggttagagcctgaagggcacctgggtaccatcgagtccttcccttctccccgcccctgcctttgtttacatatgagaaaacaagcctagggtaacagggagaggagcgcccccagttctcc

SEQ ID NO: 334249 - DNA, 172 bp, Homo sapiens
  chr11:44087366-44087538
  hyper
cgatgaaaggccataaggatgctcacacccgaatctaaaaagccctttgtgtgggccgcagccaagcatactttggcaagaaatttctgtggctctaacctcctttgaaaactggagaaccaaggccaggaggcagaaggaggtggcagacccggcccggcggcggcccagc

SEQ ID NO: 334250 - DNA, 1204 bp, Homo sapiens
  chr11:44337578-44338782
  hyper
cgctgcgcgagttatcagaaatccctggagccaaacactacgggggaccggcggaccaaaaggttcctaactcctttggacctccagggctcgcagaaaagctgccacttctccagagccgccagggcgggcgcgagagcagcgagtccgcgcgggtcctcggcgcgctcgccagacccagccgaccgcgtgactcaccacgtcctccgccgggaggaggtcagcatcggccctgggcaccggtccccagccgccgcagcccctgccccaatctccccggaatgcggacgccgccgcgccaacccgagcctccagtcggatagaggcagggagggaggcactgcccacgacgagtgctctccaggcgctgcaaagagcaggggtctcctaggggctttgagaccgcgggcggacctcgggggagcaggcgtgggacccgatctgtgccggctcagcagggccccagcagcgccccagcgtcgcccgcccttcctcctcgcccaccttacgctgggacttgcaccccgagtttaggggcttagccatttccggaactcgggctagtggactctggggaatcaggcgctgggagaggccttcgcagctgcgtctctcctgcccagcatattgtgttgaatgaggcaagggagtgagggggtcgtaaaggaaacccgcactcaggggcacaccttcatttatctgggaacagcgcggatcccagaggtgcgggataaaccaggcgttccagctgctcacacgctgtttggtaccccgcgtctatgaagcacaaagcaggagcggattggaggttttacaaactgaccaaccccgccgcccgcgcccgctggagggagacgcacacctttgccctgcatattcgcttccaggctctgcatctctgctcttggggagccggccacccgcttttccgcgcgggggctggggttctcgcctgaaggcgaagtccgcgtgcgcgatggaacctggtgccccgccctctctggcaagggcaaggccaagagcgcagggcggggagaggagctccggggacccgcggaaaacctggctcgaaagccctggaggcgagctctccaccgtgttcggtggccaccttaattcttgttgaaccgagaggaagttgttgaaaccggaagtcggcctctggggtctgagcccgtccaccctttgcagatcggtaacagcc

SEQ ID NO: 334251 - DNA, 1661 bp, Homo sapiens
  chr11:44748073-44749734
  hyper
cggcagcgggaagcccaggagcccgatcaggaccgaggatctcaccccaacccctgcgtttgggccccggggtcagctgaaagttcccctggaataaacacttcgggtccagcatgcccctctccccactcccgcaacgatcttccgaattcagacgcagagagggcccgcgagcagagcgggaggtggtcggaggcggaggaaggggagatgggcagagggtgggcccagggacccccagacaaggcctggacgcggggttggaggaggaggcggaggctggcgggaggcgaggggcagcccgcagaggagacgcgcttctcggcagcaacggcgtctggagccgggaggggcggaggtttggggagggggagggagggcgggggaggggagggacggacggcggcggaggtggggccggcgggctggcgggcgtgcagctgccgccggcgtcgcggggctccaggctgcggggcggacgtagcgccgagcgatccaccgcggagccgcgcgaggccgcccgagccccagccccggccccggccccagccccggccccggccccggccccggccccggccccggtcccggccccgagccccgagcgagcgccgccgcctcgcgctgcgggtccccggacgcgccgccaccgccgggaaggcagccggcgccgggcaagttgcgagcgcgcccctccgaccaggaaagtttccccccggccgccggcgggatttggcgcggggtccggcagccgccgctggaaggtatggggctccgcacctccgtgccctccgcacgccgccgccgcgcccccggggacctggggacccccccgcgcgccgccccgggggtgctgctggacgcggcggggaattggggtggagtagggatcccaggacggaagcccggcaaccaagttccactcaaactagcacgcgggggctggggggccggggacggtctccaccccgtgcctgcccggagtccgctgagggccgggggctgcgcccaggacaggtgcagagccggtgggctcccagtgctccgggtggaggagtgggggcttctggagaacggcgcggggtggcaggtgtggttacaaggttcggggtttcggccagggctgcgcccggaaaggggctgctcgccacgccacccggtaagacagtgagggaccagggactgggagcggcgatcggggccgggagggctgtggggcccggcagctgcatggagggcgggctgcctttggggtccctggcagcggggcggggcggggcggaggcgccactcgttcctccaggaccccccttattccttaggtgtgtgcggtttggggaagtggagactccatggagtgctgggtgggtgggaggctcgggcacgtccagatttagggggcagtgggagccagttgggacggtgctcggctcgggtgggatcgcgccggctccgggtcctgctggagtgaggtgactgggctcccgccagggggcgcactgccccggccctcgccagcaggaagcgcgttctggctcctgcgaggcaaccgcgccgacatccaggacgcagggaccacagacacccaacttacgcggggtcccgccccgaggagcccgccctacactagccagacgggggagcgggaccaagagtgaggc

SEQ ID NO: 334252 - DNA, 306 bp, Homo sapiens
  chr11:45376918-45377224
  hyper
cccagatgctgagcgctgaaattctcatccgccacacacaacatggcggcttcctggacccgcgcccaattttcgcttccgggatggaagctacgtcatttccccctctgttgccctagcgccccttggaagccaagaatatgaggaagtcttcttccttcgcgccttcttcttccttacgctccagggcagcctgacagagccgctcgaaggctctgctggccgcggctagccggtgaggagggtggggggaggggccgtcccgcgtgtgggggagtctgaaggcgaccaacgagagggagggcc

SEQ ID NO: 334253 - DNA, 59 bp, Homo sapiens
  chr11:45392759-45392818
  hyper
cgttagcaacgaccgttctctctacgccaagctcatttgtctgagcgtatcagcaacac

SEQ ID NO: 334254 - DNA, 680 bp, Homo sapiens
  chr11:46299162-46299842
  hyper
cgtggcgccttggccagctgggctagccagccaggggttcccggtttcacagagaggaaagtgacagaagacgtgcggagggagacgcagagacagaggagaggccggcagccacccagtctcgggggagcacttagctcccccgccccggctcccaccctgtccggggggctcctgaagccctcagccccaaccccgggctccccatggaagccagctgtgccccaggaggagcaggaggaggtggagtcggctgaatgcccacggtgcgcccggggcccctgagcccatcccgctcctagccgctgccctaaggcccccgcgcgccccgcgccccccacccggggccgcgccgcctccgtccgcccctcccccggggcttcgccccggacctgccccccgcccgtttgccagcgctcaggcaggagctctggactgggcgcgccgccgccctggagtgagggaagcccagtggaagggggtcccgggagccggctgcgatggacgccgtcttggaacccttcccggccgacaggctgttccccggatccagcttcctggacttgggggatctgaacgagtcggacttcctcaacaatgcggtaagatgaagggtctccgttcccgttccacccctcggcacccgtcctcgcggcgcgcctgggcccctagaaggaccc

SEQ ID NO: 334255 - DNA, 871 bp, Homo sapiens
  chr11:46316833-46317704
  hyper
cgggagagtcccctctgccgccaccagagacagccaccaaagcgccccacggtaggacgattcgagatggagctgcaaggggatttaaggcccggctcgccctttgagtcggggtcgtcggggagaccctcggtctccacttctccctgcgggggtgggggcggggccgcgctactgatgaggggtttaggacaccgtgagacggccaggccatttctgcctcggccccagacgcagaaggggtcccatgcaggcccgagccagtgcaccctgcgctccctcagccgcgggccgtcggcgcaggccgggaccctcctccgcgcgagccctgcactcctccggtgccctccacgccgccaccggctgctgctcgcagcctcccgccattggccaggagctctgcggctcccaccagtgagcaggccggattccggtgaggggcggccccgggtgttcccgggttaaccctttgtgggccgctccaggacggcggcacccggatccttctctaaaatttaaagggcgggcggctgaggccaggctccaagagagggtgcagccgagaagaggggtacgcaggtctgcaagcaggagagctcgggaacctctcctccaagggagggaagccggcgccggctgcgcgtgacagccgagaaggagcttatattggcacgactataggaaaaagtctttaacgaggagggaaacaaatcataatatgtccttctccggcttcccacccccgttgcctggaaaggcacccctgtaggacgctcaccccctgcagaaccctgtcgccctcagagcgttgacacatggctcccctgaagttcgtgaactcctggccgccgaccccttgctcttgctcccc

SEQ ID NO: 334256 - DNA, 346 bp, Homo sapiens
  chr11:46867730-46868076
  hyper
cgagggcctcgcgggtggggcaggcccaccgaccactcacctcagctgggtcagaaccaagcggcctgctctaagccgtttgaaaccgcttgggccgccgcacaccccgcagtgtcctcgttctttattggtcctcgacggaccgcccatcggacttttattggtccatttgaaaggcctgtgggcacgcgccgcccgcagccttaaaggggccgcgcgcagccgtgtttccctctggaccagacgccgcctgcacgggtggggacgctggtcgctgccgggggcaagtctgccgactccagaaagaaaggcgaaagaatgtgtgtagacccgggcatccttggtc

SEQ ID NO: 334257 - DNA, 607 bp, Homo sapiens
  chr11:46938441-46939048
  hyper
cgctgtcccaacacgccaaagaggctacaaataaccttccaggagagagccggggaggggagagcgcagagcggagcggaacgtgggccggccaagctaccgctcttcggagagaaagagctcagtccgcgctagagaggacgcggaaaaaagcccctgaaaacccacaggtagtttaaataagagacatgaaaactctgttttggatttgggaggtaaaccaatctttaaaacgagtgcctagacatctccacgccctgccaggcaagttcggaaatctgcactgactttttccacacgagctgtcctacgtgaaagaaagaaccggtaaaagaccaggcagggtctccagacccctccattctgagccccagctcccttcatcggggctgcgaggcaaatggggagactcggaactcccgccacgatgaatagcgatgggtgaatagggctggggttcaaagatcaaagttctttgatctctgggcacaaactagggaaagctgctcaatcacggggtgcacccagggtcgttaagagcccgcggagaagcagattccatcggagccctagtcccacacaacagggggtacgggcaccaaggagt

SEQ ID NO: 334258 - DNA, 751 bp, Homo sapiens
  chr11:47208495-47209246
  hyper
cgtgccctaccgttccacagctgccctgctaatctggggcgccttctaaggcctgagacgaacacgcggtgggggtgggacaaaaaggcctaagctcctcccgctccgagttcttatttccagattttgtaccacgattcattcttacccttcgcccctccaccccctttatcagtctggtacatttttccatatcgccacgatgccaccccacgctaaataaatcccttctccctcctctctccctacttccctctccccgctttcccccgggggtgagattttgcagagcggctccgtctgttatttatatccactggagcggtccaagaatgttccgaagctgacctaatcgccacctgctcggcctctccgcccctcccactctctcctgggcccggtgacccagcggcggtgccctgagccttgaagaccagggggagcgcggaccaacggggtcgaacgcccgggcgcagaaggtcccggacgcagaaggtcccgggcgcgcagaatcgcagcgggtcggagagccccggcgctctcagaggagtgcgcccccagggacgcggctctgagccctgggaagctgaggcgcctggctgcgccctctgaagctcgtacttttcctcccaccctcagctccctgaagagtgtgagtgcgtgcgcgcggagttttaaacggcagctttaaaaatagcaaaattatgttgtttctaaatccaggaggaatcactgacgcgttctttacgca

SEQ ID NO: 334259 - DNA, 98 bp, Homo sapiens
  chr11:57056851-57056949
  hyper
cgaaaacaaagggctgggtcaataaatctgccgcagcagccgtggatcagtgagggcaaaggctcccgcggggagcagccagccagtttctctgaaac

SEQ ID NO: 334260 - DNA, 629 bp, Homo sapiens; identical to SEQ ID NO: 235590
  chr11:57194105-57194734
  hyper

SEQ ID NO: 334261 - DNA, 817 bp, Homo sapiens
  chr11:57243645-57244462
  hyper
cgcggacctggccaacctgagccacctcttcctccacgggaaccgcctgcggctgctcacagagcacgtgtttcgcggcctgggcagcctggaccggctgctgctgcacgggaaccggctgcagggcgtgcaccgcgcggccttccgcggcctcagccgcctcaccatcctctacctgttcaacaacagcctggcctcgctgcccggcgaggcgctcgccgacctgccctcgctcgagttcctgcggctcaacgctaacccctgggcgtgcgactgccgcgcgcggccgctctgggcctggttccagcgcgcgcgcgtgtccagctccgacgtgacctgcgccacccccccggagcgccagggccgagacctgcgcgcgctccgcgaggccgacttccaggcgtgtccgcccgcggcacccacgcggccgggcagccgcgcccgcggcaacagctcctccaaccacctgtacggggtggccgaggccggggcgcccccagccgatccctccaccctctaccgagatctgcctgccgaagactcgcgggggcgccagggcggggacgcgcctactgaggacgactactgggggggctacgggggtgaggaccagcgaggggagcagatgtgccccggcgctgcctgccaggcgcccccggactcccgaggccctgcgctctcggccgggctccccagccctctgctttgcctcctgctcctggtgccccaccacctctgactgcggtgctgagatcgaagaggccagtgtccgatccccgcttcccgtccacccggggctgcggctccggccccagtc

SEQ ID NO: 334262 - DNA, 50 bp, Homo sapiens
  chr11:57334786-57334836
  hyper
cgaaattgaaaccagttttgggggagccggctcatcttcaccacgcgaac

SEQ ID NO: 334263 - DNA, 152 bp, Homo sapiens
  chr11:58668344-58668496
  hyper
cgagtccaagaacggaagctaccattggccttaatcttcacctcccgcttttcttccctgcttcttttctcctccctattccagtaggttagttctctggcgccatcagctggcagcacgcgggaatataccaaacgcggaaacgcgccttc

SEQ ID NO: 334264 - DNA, 503 bp, Homo sapiens
  chr11:58940419-58940922
  hyper
cgattcactccgctgaatcctcgcaggatcctccctcccccttaaacatccatgcaaatagtatcagtgttgtggttttgcaaacccagcttcaacctagtcggtaacaatccactccccacccctttcatgcccccgcttttcagcagttggtggccctaagtctttctatgtagaaattctagggccgccccagactacaggcaatcccagcccttcgcaaaggcttcctgccctcatcccgtggcggccggcaccttggctgacctgaccctgttttgcttcaggcacgctggggcttgccacacgtcccctcacccccgatctcactgcctctgcgtctcctgtgtgggatgcctccccgcagctgggtcctgggtgtgggaactgggggaggaagaagggattccccggaggttctcgctacagtcgggtaagggaagcgccgggctccctgggaggagagactagggctggggtaccctggacgccgcggcattggc

SEQ ID NO: 334265 - DNA, 342 bp, Homo sapiens
  chr11:59323832-59324174
  hyper
gaagggaaagaatgcggccacgtggcctattttcctgtggatagactaagcaaacgcttttcttcaggggcccggatagctcagtcggtagagcatcagacttttaatctgagggtccggggttcaagtccctgttcgggcggatgctgttttagtttccaataaaatggatttgggcgaggctgagagaaaggaacgttatgtgaaacccgcttggggtgcctcctccttgagggaaaccagaacttgctagtgggttcttaccggaagaagtgaaacgtgtggaaaatgccaagaaactttatcttccaatagcaggcttttcttttccaacctttatac

SEQ ID NO: 334266 - DNA, 524 bp, Homo sapiens
  chr11:59333339-59333863
  hyper
cggtccttgttacggtttaaaaagctggacaaagcccgtgcgccgaacgctttcgaggacttctttggccaagagggggcccgggctgtcaccattcccggcaagcccgcgaccaagcaggcagcggaggcggcgcaggccgagagctcccgcccctctgacagtgagagaagggtcgcagcgcccacggctgcctagaacccgaaagaagaggagcggggtgcggggacacagggttgctcaagaaagtgagctatgcgcagtgctccggaagagcttgtctcaaaccaggtcccaagtgagggcagaggcgtaacttcgtactgggcagtttaaaaggtaagacatatgtccccagtatcctccctcccaggggaaaatgacgataaggtttcccttaactgccccagcccgcgtgagaacccacagggtgttgaccctgttaactgcagaaagaccctgttaactgcagaaatcacatgtagtgatgactaacgcctaaaacggaagcgctgccgaaaccc

SEQ ID NO: 334267 - DNA, 614 bp, Homo sapiens
  chr11:60718609-60719223
  hyper
cggcgacgcgggcatctctccgcagaaggagctgcggccgtcggggaaggcggtggcgggcagcaggcccgaggcggccaggtagagcagcaggctgagcgcgaccgcgcggtagcggcccaggtacacgtcggccagccagccgcccacgggcgccagcaggtaggaggcgcccaggaataccagcgcggcgcgcgtcgcctgctcgccggtccagttgaagttggtgctgttgaggtacagcacgaggttggcggtgacgccgaagaaggcggcgcgctccagcatctccaccagcagcacggccgcgcccgccgcccgccgccaccgtcgagggccccgcgcaccgcgaggcagcagcggctggcgctccccgggcacgcggggctgctcccgggcgcgcggcgcgggcatcctggctccgggctgggccccccgcggctcttctctcctctcctctccccgcctcagagccctgcactcctgcccccgggcctcggccctctcccccacccaactggctggccctcctttctcaccgctttggcccacccttccctcctgtcccctctccctttcttgccctacccttcctgtccctccgctcactaccc

SEQ ID NO: 334268 - DNA, 625 bp, Homo sapiens
  chr11:61062458-61063083
  hyper
cggcagcaggagcgcgacacaggcggcccgaaggagcagtccggcccacatgaccggcggcggcgggtcccccgggctgggctcggctcctgcgccgcgcgcgggagagggggctgccggccctcgcccctcctcctggcgccgtggggagcgaaccagcgatccccgaaatggcacgcagagctgagcaggggggcttgggacgccgagaggaggggccgagggccgcgaggggacgcggcggacgattgtggggagggtctctggcacctcgaagcgaaacacacaaaggcaacgccgcccgcctgctgatgcctctccgagaggcgcggagcccggggcgggggcaaagatcagggacccctgggggcggggtttcgccctcggcccacaccccctgccccggtttgggagtcggcttcctgcgaagcgctgactgaaggcgtcagaccgaggccccgggaggaaacagacttcgggaacaaggctagcaccagaggctgcgcgccccgggcatggcccctgtcggtgggacccgagacgccttgttgtgacgaggtgggaaccgtggaaattcgaacccacgacgccaggtcgctgtgccgctgagcagttctaggcctgc

SEQ ID NO: 334269 - DNA, 1484 bp, Homo sapiens
  chr11:61275825-61277309
  hyper
cggccgcacgccgctggacgtgaatggctcgcagtgaccgcgcccctcagcccctccttgtgagcctctagtccagagtctttgatccaccgccagcgtttccttcgccttcttggacccgcggctctggggcgcacacaaccgcacaccaaacagcgtcgggcgtcgggtctcagtgccaggcttggccggggcggggaatctctcggcttgtgcttgctccgcggtgggctggatgggcaggtagggggcgggctccggcgctgggaccccactagggtggcgccttggccccgccccgccccgccctccctccgcctcattggcagccgcacgcgcgtcggggttgccagggcgacgggtcgctaagctgcgagtcagcgcgaaccctagccagtcggcctccggcggaggcaacgggggaggcccgagggcgggcggtggagcgcggcgcgcggcggcggtgccccaagtgggtgcctcctcccggccccgcacggcccccctcccggcgcgggggaaggccggggcggggggcccgggggccggcgcggctccggcaccgtcggggcggctggggggcggccggggcggggcgatgcctggcggtggcagtggcggcggccccggccggggcccgtgaccatgggcatcgccgagtccacgccggatgagctgccgtcggacgcagaggagcagctgcgcagcggcgaccagcagctggagctgagcgggcggcggttgcggcggctgcccagcgcagtgtgcgcgctgagccgcctgcagaagctgtatgtgagcggcacggggctgcgcgagctgccggaggagatcgaggagctgcgcgagctgcgcatcctggcgctggacttcaacaagctcgagcgactgcctgacggcctgtgccgcctgccgcgcctcacgcgcctctatctgggcggcaaccggctgctggcgctgcccgccgacttcgcgcagttgcagagcctgcgctgcctctggatcgagggcaacttcttgcggcgcttcccgcggccgctgctgcgcctggtggcgctgcagtcgctccagatgggcgacaaccggctgcgcgcgctgccggccgagctgccgcgcatgacgggcttgcgcggcctctggctctacggcaaccgcttcgaggagttcccgcccgcgctgctgcgcatgggccgcctgcacatcctcgacctcgaccgcaaccgcctgggcggcttccccgacctgcacccgctgcgcgcgctgcgcgtcttctcctacgaccacaaccccgtcaccgggcccccgcgcgtcgcggacaccgtgttcctcgtgggcgagggcgccgtcgagcgcatggcggagcgcgacgagcccacgccccggcctccgccccggcgcccagcgcgggcctttgaggatgaggaggaggaagacctgctcataggcggcgctggttcccgggctctgggcgcccccgggggcag

SEQ ID NO: 334270 - DNA, 564 bp, Homo sapiens
  chr11:61334808-61335372
  hyper
cgccccgccccccagagctgtccaaggtgctgaaacagctgtcggccacgcggctccttgtccttggtgctgaaacagaactcagtcctggggctgcgccctcttccaggtcgccctttgcgcagctcccagcgagcaggatccgagagactgtgcatagtgattccgccttcctctgccaatgcctccctgatcaaccctcagctgaagctatggcagcacccagtgacctcaagagccccctttcctcgagttaggtcctcggatgctgaagaccccagtcctgactcaggacaaaaagggccgccccgcgaacgtggtaaataccacgccccattccctcccgggggcccgccgcactgcctcctggtggctggcgcgggcactgcaccccggcgggcgcacagacggtccccagcggcggcctgggccagcggcgaagcagcggcagacggttctccggcccccgccgccccctcaccgctcccggggcaatctggcgctcagagcttgcggcgttgcccgacacccgcacactccagcctgtctgactgcatcctggcc

SEQ ID NO: 334271 - DNA, 698 bp, Homo sapiens
  chr11:61347880-61348578
  hyper
agcgctggcacccccggggcaccggtgctggggagcctcgggtgcctctgagggcactgcccggctcccacaggggcagcggctcctcgctccgccacacacgttgtccttgggctgttgaggggtgggggagaggtccttgtggggacactgcgaagccggtcccagacatccagcctggcagtgtccagactgcgggggaccggggtccgagccgctgccgctcgatcccgcgcccccggggctgggatgacccctgggggagcccgtgcggctccgggcggacaacagccccaggctggggctccgagacggcgtccggcgctgccgctgtcctgcccgccggtgcggggcgccccagcccgccggggccgcgcttacctgggctggccgcctccgggtcccggtacatggtcccctcgtcgccggttccctccgggctcctcagagccgcccgcggccgcgcgctgctccgccgccgccgctgggcatggggccgggcgacccccgggggcgggtccgagggcgggggccgagcgggctgcacctagccgcggagccggggagcgggggccgcccgccagccctcccgcccgcccgcggagcacgctgccgccgccgccgaacagcgccgagccgcctccctccggcctgcgcgccgcgtgtgcgcgccggagcgtgtgtgtgtgtacgaggcc

SEQ ID NO: 334272 - DNA, 214 bp, Homo sapiens
  chr11:61355118-61355332
  hyper
cgggggacgaggcgtctccgctcttaatagctgagcgcccgcaaacgcccggcctgggctcgaggcctgcccctccagcgacgggcgcccccaacattgaagtctttctctgcaacttggacggacccaccccgagcgccccgagtatccggcccggggcagagatgcgcgtgcgcggagggggtgccgcggagcccgcgtgagcagacaaatt

SEQ ID NO: 334273 - DNA, 1733 bp, Homo sapiens
  chr11:61594996-61596729
  hyper
cgccagaatgtggatggcgcggacaatgtgggatactggagtctcgactgccgcgcgccaaggaagggcgtcacctagccaagccggccctggagttgagtgccccgcagcccgccggtccacccgcccggccgcttgctggcaccctggtggccgcgccggctttgtgtcggcatcaggtgcaaacccccagagcgccgggcgtgcgcgcacgcgccccggagcgcgcggagcccattcgttgcccccaccgggatctcctctaggatctcctccggcgcccggggccggagagtgggggagggaggaggtcggacacgtagcctgcctcgcagcagggctcgactccacgcgggagggcgggggagccggggacccgccgctccagcccgctggccttcgaaagatcctcctgggccaatggcaggcggggcgacgcgaccggattggtgcaggcgctctgctgatcgctgtggaaactcgggcggcggggaacgcgggaggatgtggaacccgaggcggggggagccggaggggcgggcagaggaggtgtcgaggccctgagctcccggggagtttttactggaggcaaaagtccatagcgggagggctgagggaggggcggaggaaggggaccgcttgggggcactgggaagccagggatcctccgccaggaaggcagggacactcccgagcgcaggcgagaaggctgggggagggggcgcggtgggaggagtaggagaagacaaaagccgaaagcgaagagggcccgggctgcacacaccggctgggaggcagccgtctgtgcagcgagcagccggcgcggggaggccgcagtgcacggggcgtcacagtcggcaggcagcatggggaagggagggaaccagggcgagggggccgccgagcgcgaggtgtcggtgcccaccttcagctgggaggagattcagaagcataacctgcgcaccgacaggtggctggtcattgaccgcaaggtttacaacatcaccaaatggtccatccagcacccggggggccagcgggtcatcgggcactacgctggagaagatgcaacggtaagggtctgggggcgccccagccacccttctctgctgcaggcggagtcaggatccctggctccccgtgggccaaacagacctccggcgctgaatggagcttgggacgtcctgtagggaaggaaagtgcatctattgcactcgtaccccctccccaatcctcctcctcctctgggccgactggggtggagaccggatctgggacccggggaggcggcgctgcggtgaaagtcccagcggtggagaacagggcaagcatctaccgcgcgcgccgggacccacgcgtcctccccttcctcggggtttgtctggaggcagggactccccaagaggggcgctcgggccagacggctttggcgcccccagcggggaagatggccgcccctgcgcgccgctgaaaggagcgggagcgcaggcagccaggtgtgggactccgcgcttgtcccgcactctccatccagactgggtggcgagaaggaaagctcgtccccggccggagatcgctcctgctgggactcttgtctaagaagttcctcaatggccacctgggaaaaaccgcccagcagctcgggttcccacgctccagggattatctagactcaccccaagctcgagccggccttcttggggaccggcgtccgggattggtggaaggagaac

SEQ ID NO: 334274 - DNA, 176 bp, Homo sapiens
  chr11:61659371-61659547
  hyper
cggaggcggagtcccggtctgtgagcagcggggcctggggggcttccagccgcgcgtcctgcaacgtcaaatccagtgcgcccagaggggggacgctgtctcggggtgcctgtgaacagccttcaaaccatgggccccaatctctgcggggcccccaccgccgctgcagctctctc

SEQ ID NO: 334275 - DNA, 624 bp, Homo sapiens
  chr11:61684591-61685215
  hyper
cgctgtcaccccgggacggtcggctgcccacccttcgcaccctgcaccccgagagacacccccgacccctcccccggagtctcctggctgcaagtcggctcgcctgcaggcagggcgggggcgcacagcacctccgggtggcggcgcagacccggcggggacccccgaaatcctcccgtcccgggaggcgaccgcggcccagacccagcgcgggaccgcgagcgcgcgcggacctacccgctccacatcccggcgcctcggggcgcccaggcgtccgttcccagcgccgccgcgtcctcccagcgccgcgtccccgcccgccgccgactccgccaggggccgagccgccccaccgcctgtcagccctgcccgcggccggtcagtaggtctcagacgcctgggctcgcggcccccagcccagccccgaccctgccctgggcgggtcacgtggcggaggggggagcggcccgaggacacgtgcccggccccgcccctccgccggcccggcgctgggatccggcgcgcgctcccaaggcctggccccacccggcccgccgcgccgggacagggagaccacggcgctcggagggaacccggcccccaacatcccgcgggccgcgccgc

SEQ ID NO: 334276 - DNA, 631 bp, Homo sapiens
  chr11:61722665-61723296
  hyper
cgtgctgggtgagttcccccttctggctgttccgggtccctgtggccgcccaggctccagacaggccaggggaggatcacgaggagctgcggcaaggggctggggagggggcgggggaacgccagcggcaggtcggcgcctctctgtagggaaaggtgcggactgcagccagtgaaactgaagttagacgttaggtaagacgtcctgccgttagcaatgaaaaccccattttctgagggaagcgctgacatcatggtccctggagcccctgcgcgggaggggagggggtctggcggatttctgggaccagcagggggacccccgggtgacagaacccttggggctctcgcgcctccatgcgaggctctgcctgcctctcgctcccgagcgccttccaggagggctgggggctaggcccgctcgcagcagaaagctggaggagccgaggcatcgccgggcgctgggccctgggctctggccgcagcctggcccctcgcccctcgccccccgcccctcctgcccaggcttctacgtgacgctggtcgtgacccgctggtggaaccagtacgagaacctgccgtggcccgaccgcctcatgagcctggtgtcgggcttcgtcgaaggcaaggac

SEQ ID NO: 334277 - DNA, 147 bp, Homo sapiens
  chr11:61793177-61793324
  hyper
cgtacgggatgtgggaggtttgttttgaccacacccctgtcaatagttacaagataagccaaagcaagaagcacagacaccatgcctggcagaaaagcggccgtttgcggaactattttatgtaacacaaaaccacgttttcggtcc

SEQ ID NO: 334278 - DNA, 208 bp, Homo sapiens; identical to SEQ ID NO: 202570
  chr11:62369474-62369682
  hyper

SEQ ID NO: 334279 - DNA, 428 bp, Homo sapiens
  chr11:62389464-62389892
  hyper
cgaggggttcccgccccaaaccccggctcctgtccgcaggccccgcccctgcagcggctccgccctgcgtcccgccttcctcgcactcccctaccagctcccagctggggctggcagcgccgccagggcacgcttccggtcatctgtgcacccccccgccttgtagacttgatttccggtcccaccgccaggttccgggaaccaccgggtggtgacgtcacatccggcgtgccaaactcgcgtggccggcagtcaaaaccccgggtaggtgcagaatctcgagtaggtgcacgtggtacctacctcgagacccgccccctcatcacggaattgcctgagaaagccagtcctggcgcccagatcttcaccttattcatccatccagtcagtcacgccacccaatagctgttgctcaatacttattacac

SEQ ID NO: 334280 - DNA, 231 bp, Homo sapiens
  chr11:63705659-63705890
  hyper
cggaagcgcccccggcggtttggattcgggtcacgtgcgggtcactccggtgtgctggggatgggttgaaattaaaactttccgggatgcctggtgttcacgctaacagcactgtccactctctcctaaacagtgcttacgtgcccgtctcccctctaaaccctgaggtgtggcgctgagatggcacctcgctcctctctgtgccccctgggctcagcaccgcgtagatgc

SEQ ID NO: 334281 - DNA, 474 bp, Homo sapiens
  chr11:63767759-63768233
  hyper
ggtccggcactcgtcggtaagcagggggccggcggcccgatgaatgcagccgtccactgcgggaagggcgggcgcgactgagctggcctggcaaggctgcggccccggggtgagcaccctcagtcccgagaagcccctcggcgatgcgaggacccatgcggagccgcgccccaaccccgtggcctccggccgcggccgctgcccccacccccgcccggaatgtttcacatctggggaaaccgaggcgcagagcgggacggccctgggcctggcgggaagtcgcgcaaggaggccggcagggggcgcacccggcccaccctgtcccttccaggccgcgccgccagggcccaggcagggcggctccgggaggcgggggccgccgggacaggaaccgccgcccgagccggggtgacggggaagcttcctccccgacgcccctccctagccctgtcccgggcgcgctgcagggcccgc

SEQ ID NO: 334282 - DNA, 199 bp, Homo sapiens
  chr11:63828227-63828426
  hyper
cggaaaatgcgagactttcatttctacctctcgaatgcccagtctttgagtcctgcagcccccgggtcgcccgggtcccggagccggcgggtgtgaacggggccaaagccctccaggccgggcgtgtcagccccgcccccgaggctctttgcatattcatgaccttggcgggcatgcgcaccgcggcggcggcggcggc

SEQ ID NO: 334283 - DNA, 203 bp, Homo sapiens
  chr11:64015094-64015297
  hyper
cgtcctctgcgcctcgcgacccgagtgcgcacagagggggaaactaaggcgcaaagagctgggcagtgcgggggccgcgacttataataataaaggcggtaattgcggctgaccctaggagcgtgcgtcgggaccgccgcccagtcggctccgcagagagggcgccgtgccggggctcctgcacccccgccctgcggctcctc

SEQ ID NO: 334284 - DNA, 201 bp, Homo sapiens
  chr11:64039104-64039305
  hyper
cgtcactcatcctccggagctcgcggccatagcgctgtgctgcccagaggttggggggcgccgagcgcgagcggccccgaaaggggctgggctcctcccccatcccttcgtcgtcctccgtccccgcggggtaggagctgtggcgactccggatctccacagccccagcgcctgcagagggtcagtgggtaggggggcgac

SEQ ID NO: 334285 - DNA, 492 bp, Homo sapiens
  chr11:64064539-64065031
  hyper
cggaggggtcccaggtggcccctagacttcctgcatcgcccctctgcccaggctatggcaatgtggccctgcgcacagatgccgggcgcctcttctgcatcttttatgcgctggtggggattccgctgtttgggatcctactggcaggggtcggggaccggctgggctcctccctgcgccatggcatcggtcacattgaagccatcttcttggtgagctgctccatgccctgcctgcccttgtgctgggctccggctacccttccccatgtccctggcacatgagcgcgcccccaaagaccataagcctctcccacaggctcctgggggcgggagtggggagtatgggagtggggattgttggtgtctcctgggtcctgcctactgccccatcccgcagaagtggcacgtgccaccggagctagtaagagtgctgtcggcgatgcttttcctgctgatcggctgcctgctctttgtcctcacgcccacgttc

SEQ ID NO: 334286 - DNA, 1330 bp, Homo sapiens
  chr11:64067396-64068726
  hyper
cgctgccccgggcgggtgtatccctcacagcacctcacgactgtgcctcaaagcctgcatcaataaatgaaaacggtctgcaccgctgcgggcgtgacgctcccggacgcgagtgggtgtggaattgctttcctcgggccaccgtgggggcacctctggcctcccgtgacccccaggccgagggtccccgggcacccaggtcggtcaagtctcggccctctcaggcccgcgtctctgcctggaggagactgtgtagggtccggcgtggggatcagccaggatgggctgcgcgtctccagcctctgcacacacattggcgggtggggtgcagggagggagaggcaggggagagagaatggcatctcgcgtggagggctgtcgtttgaactctcccagcgcgagagaccctgccccgcccccttcctggagcgttgactcccttctcgtctcgaggcctgtggcgtctgggtccgttggggcagaaccatggaggaaaagccttcgaaagtaagacgtctccctaggccccttaccctgtccgctccaacccacccttggtccgactcgggcccctggcgctatttcttactcagccttggctgcccgcagcccccacccaaccccacgttctacgggatccccaacccggcccggctcagttccccagcccgctcttccttcccgctccagccatccgcgacccttggctccctccttgtatgtggcccacaggtgtcgctcaagtcttccgaccgccaaggctcggacgaggagagcgtgcatagcgacactcgggacctgtggaccacgaccacgctgtcccaggcacagctgaacatgccgctgtccgaggtctgcgagggcttcgacgaggagggccgcaacattagcaagacccgcgggtggcacagcccggggcggggctcgttggacgaggggtacaaggccagccacaagccggaggaactggacgagcacgcgctggtggagctggagttgcaccgcggcagctccatggaaatcaatctgggggagaaggacactgcatcccagatcgaggccggtcagtgtggcctcgccaggccgtgggcacccgcagggcaataagctggccagggactcaatttctggagctgtaaaatggggggaagctgatgggatccaagtttctaggattctctgggagaggcgcccgcgccaatctttcgccctttaaatccgccaggcattcttggagcgccccctcccgggcaggcgttgtaacaggcctttcggtcgtgacgcgcagagtccggggaaggacgcaccaaataaattgcgcaaagacccc

SEQ ID NO: 334287 - DNA, 184 bp, Homo sapiens
  chr11:64478848-64479032
  hyper
ggcggggagagacgcgcatgcgccgcccccagaccgatgggggagcccctccccacgcccagccagaccctaatggaagaggctcctcccagtgcttcctctcctcagcgccccctgccccccgacaccacagccccgccccgggccgctcagcccaggacccgcccgcacttcaccacttcac

SEQ ID NO: 334288 - DNA, 620 bp, Homo sapiens; identical to SEQ ID NO: 235677
  chr11:64509680-64510300
  hyper

SEQ ID NO: 334289 - DNA, 1460 bp, Homo sapiens
  chr11:64512349-64513809
  hyper
cgcccccgcgccaggctgccccctcccccctccgcccctgcgcggagctccgcaccgccggctgcgccacccccaccgggggctccctctcgccccgcacgcggcggtccctgcggcagcttaacccctcccctgccgcgccgcccgggaggccagggccgcgggcggggggctgcgccactagctgccccgagggcgggcgaccggaggccccgccgcccgggacgcggaggggggaccgaaacgaagagcccctcccccaaccgcggacgccccagtgccccccgccctgcctgggtgtcgggcggaggaagccgggaggggcaggaagcggactgcggtggggaaggggcgccccgcccagcccccagctcgggttcctgttttcgagacaaaccgttcccatggggctaacccggcccgggaccgggcgtcttcctgcaggcagcgggtggcacaggcctagtggaggtcgggggcgtggggacagctggtccttgagatagtctgggggatgggctaggacaagatgggaatattttggggagagggacctgtggggagcgaggaatgaaatcgtggctatctggagacgcggccttgatgtctgggaatgggggcggggggcccagttcacacaggaggaacggggccccggaagcctggctccccacagggtcgaatggaaaggggcagccgcatgtggcggtgggttctccgcagctcggagactggagacctggatgcctggccaacagggaggaacttgggaggggcagccgcaggcggttggggtccccactagccgggcctaggagagcgggtaacggtttccgaccatttggcttcagacacactcactgtgaaaccaccgaccccaaacctcccttccgaggcgtgcccctcccagccttggggcgggggatccaggaccgcccccgcacctcagtcttggtaatgtaagacttagaaacaggacctttctgttcctcagtttccccataatgagggcctagactaggcggtctgcgagtgttccctgccgtaacactcccccgactttggatccagtgtagccacctgctaagagacccttaaacgccgcagtagggcggggctaagggcggagccaagaaggcgccgagcatcctctgcttcctccccctcctgggtcctgccctcgacagcgcggatcctccgtggtccgggaagcctcagcccaagtcccggctcccagccccggtgggccccacccaggcagacgccccgcccccggccagcgaggctggccgctgacctagtatggacacggcactgggaagagaggcgtggagggtgacgccaggaaaggggctggagaggcctaggccccgcccccacgggtcgccccctccacctcccatcaccgtcccgccgtgggacgcacctgccgagggtggaggataagggggtgactgcgc

SEQ ID NO: 334290 - DNA, 103 bp, Homo sapiens
  chr11:64655582-64655685
  hyper
cgcccgccccgcgcctccgtccggtttctgcatctttgcccctggcattccttcctcctccagtgatcacgacctgtttctggggttcacctcagcaaacgcc

SEQ ID NO: 334291 - DNA, 501 bp, Homo sapiens
  chr11:64739249-64739750
  hyper
cggcggcggagggtggagcccggcccggaaacttccctcagaaataaacagaaacgcaaagacaacttcccgagggcccgggccgtcgtgtgccgttacctcagccccaggtggttcccaggctcggccaggctatgtctcacacactgactaggggtccttcggcctcagaaaagtggccccggacggaatacccactaagaagtgctctctgaaaaaggcgggcgccaacctcgaacgaagtcgttttgagggactggctcgccagctcctaagcaacttcggggctcgtgccgcgcacccaccaggccttctgcgcacgcgcaagtgcgcttcccaccgccccttcgggcgcagctccaaggcctggccgcggtctgcgcgtgcgcatttcattgtcgacaccgagaggacgccttggcgccttcaggtccctcctggatttaccagcccattgtttatttcgcgcctgctttagcgtggtgtcgtcgggaactagcg

SEQ ID NO: 334292 - DNA, 635 bp, Homo sapiens
  chr11:65185291-65185926
  hyper
agtgaggacacaggcgctcagcgtggcagggtgggaacaggaaggtctcgtgagctctgtgacaggatggggctacaggagacagaggtagcagtgagctggtgaagaggcaggaggaggcaaggaggacagggtgttctagggtgccagctcaggcaaggctccaaggagtgggtgagtgctcaggaggacgggggaccaaggcctggggtaaggggcaggtgcccaggcactctagcatggcacggaacaggggacagtcccaggacatccggatgcagggggctgacaccgcaaagttctttcctgtaaagcacagcccgaggcctggggcttggccctgggcagaggaagccccccttagatctgccttggcagtagtgaggaaagggcgtgcacagaccccacgcagcccgaggtgacgggtcaaatgcaagagtgagaagccccctcctgagggtcctcccctgcctcgccttcctggtgggcggcctgctttccagcacatgtggtggaccagcccacattaggtcaaagtgttaaaaatagccggagggctcagtatgtttgggggtggggggggaatgggaggtgctgagggagggcccaggacagttgggaaggaggaagggccc

SEQ ID NO: 334293 - DNA, 239 bp, Homo sapiens
  chr11:65192924-65193163
  hyper
gtcagacttgcatacgcagcagatcagcatccttcgctgccccttagcaacttaggtggttgatttgaaactgtgaaggtgtgattttttcaggagctggaagtcttagaaaagccttgtaaatgcctatattgtgggcttttaacgtatttaagggaccacttaagacgagattagatgggctcttctggatttgttcctcatttgtcacaggtgtcttgtgattgaaaatcatgagc

SEQ ID NO: 334294 - DNA, 85 bp, Homo sapiens
  chr11:65420289-65420374
  hyper
cgctgaattttgggacgcgtcccgctgacgataactccttttcccctgctattgtcctcccgcgacggtgcgaagcccaaacgaa

SEQ ID NO: 334295 - DNA, 1970 bp, Homo sapiens
  chr11:65553781-65555751
  hyper
gcagttgaagccacttcctccgtgaagccctccgggcagaaggcgggttctccgacgggtactcggtcgcgcggtccgtgcctccccacacaccggccggggccgctcctgcggccctgcgtgccttttcgcacaaagccggcgcccagcaaacacctccccggctgagccacgagttgcttagccaagcctttgggatcccgcgccgcctgggcccaggcccggttcaacaagtgcggaccgggccgcccgttcccgcccggcggcttcgcgcctccccaggagcctcgggcgcgccgggttgggccggccccagtggggcgagtttcgtgtcatcacccgcggagcgtgccagcgccggtgcaaataacgttgccccctccctcccggctccgctcgctccgaaactcctgtttgcaaacgccagtacgcctggctaggaggtcccgcgggggccgggccggctgggcagccaggggctgagtgcccgaagctcgccccccgaccccgccccgcccggccgccccgcccgggccgcgaggccacctcacccgcagcggaatggaaaccggttcgacaggtaacaaataggtgggttgtcaccgttatttcccaacgcatgcgccgtcgctccccgggccaccccaagctaattagatcagatcaccgccccccacccccacccccccccgccccagccaccaacacacaccgccgcgagccaataaagcgtgaacccgtccgtccggctcgcactttaagacttcccgagcggcggcggggacgccagtcgagccgggagacgcttacctgccgcttccccgcgccgcccggtgcacctggccgcaagggacctcgttctcagggaagacggcgacattccgcggaggtggaaccgccgcgcgccgtccgggctcggaccttccccggaacgtgggggcgccttagcgactccttccctgttgtgcccccgttcccggcgttcagcccggccccgcaaaggtgggacggctcccggcttcagttacggaagcggcccgtgtccagcgacgagggttcgaaaatgccccgcgcgttcctggtgaagaagccgtgcgtctccacgtgcaagaggaactggagcgagctccccgacgaggagcgcggcgagatctacgtgccaggtgaggctccaaccgccctccggcctggggcacccgcggcggcgtcgaggctgcgggcgggcgggcgggcgcaggtccgcggagccaggcggcaggcgcggtgtgggcgccggggctgaatgcggccgcggcctgggctgggtgggcccgcggctctcgacccgggactcggggggcgggggcggggccggcggaagagcgctggtcggggcgggggctgcatggtggaaggggagccgctcccagggccagggggcgcggaaccgcctacccccaccccctgaaccgcggcacagaggaggcagcggggtgtgtcaccgctcaggcgaccctcggctccgacgtcgtaaatccagaaaaccgggactcgcatgaggcgggagaaggcactggagcgatgccactttggggggcggggagcgggctggagtttcggccgagatttgtgttaaaagctcagagcttcagccgctcgcacaggtccttcctcctcccccacaacactggtggccgggtcggagtgagggtcgggccggtggggggcgtgggcccccaaattttcgttgggctccggctgctagtcccgcgcagtgagccgagacggtgggacaggcgcccgctgcgccccgcttgcccttaaagcagaggtgggatcgggtctcacctctgctagaaacgcacttccttcaccttgcggagggcacaattgcatggaaagcagctgcagggagcccaccccacagcggagggccaggcccggggaagctggtgtacccagttatttttggcagacgcctagacagcgtc

SEQ ID NO: 334296 - DNA, 262 bp, Homo sapiens
  chr11:65582723-65582985
  hyper
cgctttgggcaggtgcatagggaggactcaggaaagaggtgttctgccatggaccagtccaggtccaaaaagtctcgagaagcgcccgggagccaggagaaaagccgagagatgaaaggagatgcctgaggtgccgcagcccaggtctgagccgggctagaaaccgcgtgacaaaacaaagatgcgttcttagccgtgatggaactcccagattagcttggctttcttccttttgttttgttttgttttattcatctctgtc

SEQ ID NO: 334297 - DNA, 345 bp, Homo sapiens
  chr11:65779307-65779652
  hyper
gaagcgtcttggcacgcgggtgcgcgccgccccctcggcctcctgggctccctgaacctcgcaggaccccggcaacttcgagccccgccccagctccaggccgcgggggcgcatcgcgggcgtcgggcggggcggcccagcgggtaaaagctgcgcggccgcaagctcggcactcacggctctgagggctccgacggcactgacggccatggcgcgttcgaacctcccgctggcgctgggcctggccctggtcgcattctgcctcctggcgctgccacgcgacgcccgggcccggccgcaggagcgcatggtcggagaactccgggacctgtcgcccgacgaccc

SEQ ID NO: 334298 - DNA, 284 bp, Homo sapiens; identical to SEQ ID NO: 288223
  chr11:66045217-66045501
  hyper

SEQ ID NO: 334299 - DNA, 1099 bp, Homo sapiens
  chr11:66079395-66080494
  hyper
cgaggcctcgcggtggctgtaagtccgtggggccgaggccaggtggcgccaaaggcccatcgacgccatctgcccggctgtccgggcccagtctccgggctcgcccagagaacccgaaatctggacaaacggaaaccgtaggtggaggaagaagagggctccagggccaggttcaagggcatcgtggtgagagatgaggggttcggaggactggtggatctgggcatatcgcgaaggtggtaagggacccaggggtggagtgggcggtgcttgcgccaagagggtgagcctgagtgtgggcggggcgtgcgataagaggctcgctcggtagcgctcttcgcagagccgtatttgtgcgctacgccgcagccagggcgctctgggtgggcgggactccagggcccccaggggcgtggcttgcatctttcgtgggcggccccgggggcggggctccgtgtaggtgaaccgctacctccgctcgatgtgtgaggtgtgacagtcctacgagggcgcagttcttccacttttgtgagcttgagagggggcggagcttgtagctggggacggagcctgaagaggaggttgaggggaacttcacacgtttccctggagggcggagtttacatcatcccccaacagagttaagacctctgagggattccctgcagtgtccagggctctgtgaggcgaagcttgcagttgtgttgggcggggcctgtagcgccgcgtgaagagaatgtgtaaactcggggcgaagttcatacctcctagaagccgagactaatagttccgccaatctgcgcgcgccgagcggaggaggtggggcttgtaggttgtgggcgggggactgggcggggccaagagggcagggggcgggcacaatcgctgctggaatctttgagttggcaggggcggggcttgtggctttgtgggcggggcctctggagagctcccgggggctctcttctgttctgcagcgagtaggcgtggctcgtagctcccaggtccgggctgataccgctggagtatgcagttcgccgccgcgcccgaatgaggcggggcctgcgagtaagtgggctgagcccgggctgggcgcagg

SEQ ID NO: 334300 - DNA, 383 bp, Homo sapiens
  chr11:66176338-66176721
  hyper
cgggcgccgggctgcacccccttaccctgggcagccgcggggccgtgacgcctggcggagggggcgcgcatctcggcgcgcgccggtcttcgcagtggctcattcatcgccgccgaggcacgccgttgccatggggacgtgatgcaggcgcggggagcgggagggagagggaggccccgggtgacgtccgcgctcttctcgcagctagtctcccgcggcctcccaattcttgcctaatttggaagagagccgcagcccttctgctgatgcgcgcgcgctggcgcctttttaaggcaactggcggagtggcggctccaccagagcctgggagctgcccccgcccccgagccgcgagccccgcgccgggccggggagtccccggc

SEQ ID NO: 334301 - DNA, 1936 bp, Homo sapiens
  chr11:66187375-66189311
  hyper
cggcgctgccccttcgcttctcagctgctcccccatcttgcccgcctaggcagggcggggagccctccggagcggtgcggaggcagccaggccccgcccgccgcagccgcggcagccgccggaggattcctgtcctaatatggagctgggattcccccggccccgcccccgcccccggcccgcggggagacagaggctggcagcagggcggggggaagcgctcgcttgggggccggcaacggggggaagggatgcctaagtgcagacccaggtcctcgccgtgcccccacgtccctgcctcagtttccccttcagtaaggttaattagctgagagggaaaccacgaatcactgcagactacagcgctgatgttggtttctattcttggctgtgggaaaacaggatcaacgccaaattcagctggtccctttcccaccggactccctttccacccatcctcgggacttagacccccatgaacaccccctgataagccgccaaggcccgatttgggaagcgggggcgggaatttgttctctaaaaatggccaagggaatcccaggttaaatagtccccagagaggaaccccagcagtgacctgtcccacggaggccaaggaaagtcctccttccctgcatgtgaacgtgaccttgtctgtcaagtaacgagggggatttgtagacaaccctgttcttccccattccctcaactcctcagaaaaattagtgtcagtgccggcccctctctgccctctgcggactcctgccgcgggcttcaggccgccctaaacctggccctgtcgcttccctcaactgaacgcattcagacgccagggtccccacactccattcaagctttcctaacgcagcgccttcctctccgctcagctcccgccaggcttggccccctccgcagcctcctgctcccccctcgcccgcctccctccctctctcattctacgtcatgagatgacgtcggaagccgggcgggaggaggagcccccctccccagtcagcggctcccgctgcagcttgcttagcccagcctcccgctctcccgcccccccggctctaaaacgagccccccacgcctggcaggagctatataaggcggcgtgaggcaggcgaggggggcagcgcagccgagcggagcccaggagagcagagagcgagcctgagcgagagacggggaagcacggaggaggaagccgccggtgcgtcgggacgggagcgcaggtgctcgggcacccgagctggagctccgcagccgccggtcatgtaccgctccaccaagggcgcctccaaggcgcgccgggaccagatcaacgccgagatccggaacctcaaggagctgctgccgctggccgaagcggacaaggtccggctgtcctacctgcacatcatgagcctcgcctgcatctacactcgcaagggcgtcttcttcgctggtggtgagcatgctggggctaccgcagatccgagctgccaggcgccggagaccctggagctgagggaacccgctggggctgtcgcatgtctagggcagcgtgctggcgagctggggagattcgggactcgggagattcgggactttctacttttcctcctgagctccctccagacctcaccttagttctgaatgagagttagagagcctggacggtgtccctaacaccagattatgagaggataagagccaggacagagcggcctcggtgcccgccagtgcagaagcgctccgggagccggggagggaagcccgggaagttgcagggatggagctgcctgagcctaggggaacatagctactgtccgcggtgctgaaagggatctcctgtcgccttcggggcgctgcccatggtgctgacggctgcgccggccgtgtatggctctgtccatggttctgaacccacagtcggcttcggagctctgtccgc

SEQ ID NO: 334302 - DNA, 995 bp, Homo sapiens
  chr11:66725377-66726372
  hyper
cgatggggacaacttgggctcccgatcctgacagacttgggttcgaaccctcagggacctcgcgcgaggcgctttagtcagtttctccatctgcaaaatgggcccgagagcaagaatgaggcagcccgcaggcggacgctgcggaggggcgctcgggggctgcagccgggggcgggtccgggggcgggtccagccggccgagcccccgcgcgagggggaggggcgccgtccgctgcgtcgcgtcgcgcaccgcgcacagcccgtcgctgtctcctccagccgtcactcgcggagcccgcgccgcctttgcgcgcgcgacccttacataagcgtccctcgcagcggtgccggcgcacgtccacccgctccgacccgccgcgggaagaggaccgtgcggagcgcggcggacactcacctcctcgccgtcgccagtcctcgccgccgcctctaccgctgctgcctccactgacagagaacagctgcggtctccgtgcaaccgaacttgctgcagtcccggccccgccttacggacttcctattggcccagacagcccaacccctcccgttattgggcagtgttctccgtcactcctcgcccctaggctctggactcctccctgtgcccgcctgtccgtcacgtttaagccttggcgccccacgtcagccccgcccctcccgtccccggcgagcgcctggataagtggcgaggctgggagagcccgcccctggcgcaccaccgcctactcccttgtctccggagcctcacgtgggccgccggaccctagccgacgcccgcaataggcggaagtggccgggctgtggctcgcagttattggctgtcggcgggggtggggacgttcgattcattcacccgagtagcacgtgtctcccgaagctgcaagcacaacagttcgcactggggctcaggcatcccggctagacgcagatacgcgctggctagcggagaagaggtcgcaggaaaagctaacgttagc

SEQ ID NO: 334303 - DNA, 680 bp, Homo sapiens; identical to SEQ ID NO: 235739
  chr11:66790581-66791261
  hyper

SEQ ID NO: 334304 - DNA, 902 bp, Homo sapiens
  chr11:66885239-66886141
  hyper
cgggccccagagcaagagattggctggggaaatgcccggatcgcggctgggctgctcgcatggcactgctcgggtacctccggccgggctccgtcgacgttcggagcctgctggcccgtcgggcagctgtcgggccgcgggagtcggtccgtgggcagggccggcgcagctcgggcggctgctgccccgtcgctgacccccgcgcgaagctgcgcgcaccaacaggagacatcttcccggccgggcctcccgcgcccgccacggcccagggcggcagggtcgggccgggggccgggggcggcccgcgcacccctccgtggggggcgccccgactcgccgggggcggggtcacgtcccacccgggccgccgggggcaccggcgcggcggaaagctgagcgtggccgaggagcgggggcttcctgggccacctcgccgggcgcctccggccggcggtgggcgcgccggccgccaccgcccccgggccgtcgcggagaccgcttctgcgcctggtacctgtggacgcccttgttaagcgcctgcagcacccccggggagccgagcccaggacagacatgctactcctgtttcctgccccttcggagcgacgagcagtgggtgaggcggggccaggccgctgcaccgaggagcccccgggcccagggcagacgggccccgtggcggcggcgccggggcctgcccgggaatggcgggcaagccggcctcggcccaccggccggcacgcgaagggagggcagccggcggccatgcgccccttccctgcgccctctcgccctgggcaggcctgagccgggagcccaggtcccgcgggcccagcccggcggcttgaccccgggagaccctgctttgaggcgggtatcggttgccctggcccaggcctccc

SEQ ID NO: 334305 - DNA, 513 bp, Homo sapiens
  chr11:67232078-67232591
  hyper
ccgcgatcacttctcgaagtagggcaggtagaagaactggaagccccggtggcccttgaccgcgcagtagatgaagatcacgtgatagactgcggggcggggcctgtcagcgcagaagccccgcccctccccgcaacaccgcccccagtgccgccccacagcccccgccccttccgccccggtgcccgctcgcacctccaggcaccaacaacaggaagcccggcacgaagaagatggcgctggagacacctgcgggagggaccagagcccggtcagggcgagggggcggaggcttcgaggccttccgggctgccgctgactgcccgggcaagcctcactcccagctgaaaaggagccgtgtactgccgggaggtgggagggcttgccgtggacccgtggacacaagacaggggtgtcctctgcctgtgggggcgggagggtcgctcacctggagagggggtcgcctccagtcccacgccgaccaggatcagcactgcacacagacggagccgc

SEQ ID NO: 334306 - DNA, 506 bp, Homo sapiens
  chr11:67350962-67351468
  hyper
gggaatttccccccgcgatgtcccggcgcgccagttcgctgcgcacacttcgctgcggtcctcttcctgctgtctgtttactccctaggccccgctggggacctgggaaagagggaaaggcttccccggccagctgcgcggcgactccggggactccagggcgcccctctgcggccgacgcccggggtgcagcggccgccggggctggggccggcgggagtccgcgggaccctccagaagagcggccggcgccgtgactcagcactggggcggagcggggcgggaccacccttataaggctcggaggccgcgaggccttcgctggagtttcgccgccgcagtcttcgccaccagtgagtacgcgcggcccgcgtccccggggatggggctcagagctcccagcatggggccaacccgcagcatcaggcccgggctcccggcagggctcctcgcccacctcgagacccgggacgggggcctaggggacccaggacgtccccagtgcc

SEQ ID NO: 334307 - DNA, 431 bp, Homo sapiens
  chr11:67895663-67896094
  hyper
cgtccgtgtagccttggccgggcccccaagcttcttagaatgccatctaagaaggcagagggggatgagcggcggcggggaggaggggcaggccttgggaagatccactgggtcacagggaagcgaaggcggaccctcctcccccagcgctactgcccgggccgaattccaaggccagcggctgcccgctgagaaggaatccggaccaacgggattctggcttccctctggcccctcctggcgagagcggcgccgggaggagggggcctcagaaggggcgggcaggggcggggcccgcggggtaggcggagctcccaggaaaacagcgggcggggcctcgcgcgaggggcggggttggcggcgaggcgtcccaggacccccattcctccctccgccccggggcttctggggagcggcgcagcttgactgcc

SEQ ID NO: 334308 - DNA, 179 bp, Homo sapiens
  chr11:68080751-68080930
  hyper
cgggcgcggggcggcctggccggtggcgctgctcctgtgagccgcgtggctgtgggtttccaagcggactgacacctgccaggtgcccgggcgacccgaatgccccgtgtggccgccgggtccccagatagtgtccatccccgggtcggctacgcggaggtgacgtggtcccagatcgc

SEQ ID NO: 334309 - DNA, 311 bp, Homo sapiens
  chr11:68095765-68096076
  hyper
cgatgataaatttggcatgtctttattattattattttttcaacacttaaagaaaataaaagctggtacaaaggtatgtttgtttctgaaatgtgtttccttccccagatgttcttttctgccagttctaaaatgcgttctgagctcggtcctccagtttcctccctgtgaggaagaacaatgagacctttgtaaccacacaggggaaacggccgcttccctctgcagtgggcatgggggaggggctgggacgtcccacctcctcccacctcgatggaaaccacgagtctgtgccagcccagccgactgtc

SEQ ID NO: 334310 - DNA, 744 bp, Homo sapiens
  chr11:68606653-68607397
  hyper
cgatcaaagtgcagaagcagcccttggcccgcgcaggctccggtttccgcctcccgccgccgctgccaccgcccctgcgcctttagatttcgggcagcaagtttaattgctcgcttggaaagcgtcctcggaagggcaccgccagcaactgcggcttcgcgccccgccccttcccccaagccccgggcggcgtcacgtgacggctgagaaaagtaggggaaaggtcagcagcagccccgcccccaggctggcgcgtcccaggcgctcggatcctgttccacccgccgtgcccacagagaccttccggagcgagttggcgcgcgtccctgtggccaccccagcgacagcgggagaaatgcaacgcacctctccgtgggaaggtcgagccctgcggtgcccagctgtggggacagctcggtgctcagtgcttctgatgacagatgctgcatccaacgagccagaaacgcaggcaccgcgctcaagagcccagggcgcgtctaaaaggggctcactgtgaagcctcagtgaaaactgacggtgtttttatgaatgagcactcggggccagggttgggtaagggcaggccctcgttccagggctccccggaggcccaacttgaccgctcggtgaccactggtccggggccggggccaaacgcagcagccgcagcagtatcggaagggacccagtttaattctcttcccctccagggtaggcggcttgtttttagtaccaactcgaaac

SEQ ID NO: 334311 - DNA, 153 bp, Homo sapiens
  chr11:68611262-68611415
  hyper
gcggctgcaccccacgagcccgggcggctctcgcgcgtgaggctctccttgcacgtgggccttcgcggtttgcactacggaagctggactgtcattctcaccgcaaatgcccttccctcctttccctggaacctcagccaccgacaggtcccc

SEQ ID NO: 334312 - DNA, 1387 bp, Homo sapiens
  chr11:69451967-69453354
  hyper
cgcggggatgcggggtcctccccgcagtcttccggaaagggcgggggagggcgcggcaagttccggagtggggcatgccgtgggagcccacgagggcctcagcgcggatcctccgccggaaaaccggctcccgcgagccgccgccgcaggtttcctaggccccgcgagtcccgcagcgaagccctgcgtctccgtccgacgcgggggtctgctcagcctcgggtgggccgcggccaggcctgactgcgggggagagggccgaacgtgacctccgaggtcacccccagccagctttctctcctgtggtcggaagtggttttcttctcgatctgggcgcctactccccaccacttggtctgagaggggctggggccggaaggccagggaatctctggtggatttgggggttcatattgctcagggtaccagccgatgcgttttgaggggcgggagtcgaggaattagaatcgcctttaaccctcaagagttgcgccttcagcctcgggatcccagatgcgtcgttggagccagggccgcccccctacctgttgggtttgcgttttaactccagcgcacaccttgccggcagccctcggagctaggggaggggtctcgtttccccgcagcccgccggacagacgactggggcacgggaggggcggtggcagggtggtctgtgtgtggctgaaactaattgatctggagcggaaacgcacgtctgcggttggggcgatggggggggcggtgcggctgtccatgtgccgagcgtgtggctgtctcgggtgggcactggggccggagttcgccccggcccacctcgcagttttggggcgcctgggatcggcgctacgtaagcgaagcagagctgccatagcacgtgggccgccacgcgcaccccaaaagcaagcagtgtggggggaaggggagctcgagcgccttcggagcccaggggccggctttcggaagcgttttcccgggcgacttaagggcttaacaatggaaaactcgcggagcctgagccaagtcctttcaagtcgccgccaggtatgcggctgcaggtgaccccacctgggtgcgcccgcccgccagccgccctggtggaaaagcgggtgcgggaggtcgctggcgaaaggtcgggactggtccctgcaccacccgcccccaacccaagccccgagccccgcggcgcgcagccgcgctgagtcccggggtctgcgtcgcggcgcgccggttcctgaatgaacgcgctcccttcccccgcctgaatgaaggttcccacagccagggacggtggcgaacacgcgcctgcagcggaattcgctttctcctgaccgaccatccgcccaggccgcggtcaccggggcgggggccagggggcgaggaaagc

SEQ ID NO: 334313 - DNA, 1258 bp, Homo sapiens
  chr11:69516911-69518169
  hyper
cggctctgggtgggagtcagcgtccagcgtgccgaccaccccctttctctgcagtcctctcacgcaggactccgccataaaacctgaaacaggcgctccgagtacacggagcacggcagaggcaccgagcaattttgagactctaaaatgctttgtcccgctgttcacaaaggagctggttgggccggaggcggccccgcctctgcatcctttctggggtgggggccccgggcaggcgcggccacccccgccctggcccctgctccgccagggagtccggggctgcgtgtgaggcctgcgcgggccgagacctcacacagcctcctctgcgcgcggggccgcgggaggggcgcgggttcgttcctttgaactcccagcctttgttcccggccaccagagccccagcgctcgtacacttccggccccgggacctctgcggttacctgggccttccctgccagcccccaccccctgcccccaccagaaagcgtttacaggacaggtgaggcccgcaggaggaaaagcactcccctggcgcaacatgactccagcgcatctgcgtctaagccacaccgtgctcctggtagattaaaaattaattctaaaaaaaaaatctctcctatcccaaatgcactgttttctgccttgcttgacaattgatttgtttttaaaggaaagttatgggtagatcctcttttttctttcccattctttttttcttcttttatactggagggagggaaacggaggcgaggaccacacacgcgcaggcagaggctgaaaaggcccgaggtgggttttcctgtttaatatcaaaggaggccgaataatgggtttcctcggtccggctaggccggcctttgactcaattggaaatgcaaaggcagcttttgcctattctctggctgctggctgagaccctaaatttccgtaggaaatcgtcggacatgcacttaatcggtctttgcaatctttccctcgaagttgcacgcgggtctgggcggaggaggcgaggaaaccctggattcgaaccagcgcctttctctccttcaggcctccgcccggggacaggcgccggtcccccgccccggcgcatccgccccgtggggacacttaccagcccctgcatcttgccgtcggcgcccatgcagaggtaccgcacgctgtgcacgcccttgatggccacggtccgcagagcgactgccttgatctccagcaaacctaggcgcaggggaagcgagaagctgcagcaaggacc

SEQ ID NO: 334314 - DNA, 1122 bp, Homo sapiens
  chr11:69589108-69590230
  hyper
tgtaggggacccccggcggccgcacccagtcccggaccttcagacgcgagcccgaccccagcggttccccagcctgggccaggccggggcgcgtgtctcgggccccctgtggctgcaccgcgcgccctgtgcccacgggcgaaggcgctggaattcggcgctcggagcccgagtttctgaaggcgggaggcggcgcccgacctcaggggttgcgctgggctgccggagccaagagtgtctgcgtccccagccccgcgtcagaagggaccggagcccgagtccgccccggttcccggggcccccgagcaggtgcccgccgagggtctcagagtgtgactgagcgggttggcccggcggccgttgccccccgcccccgccccttcgcgcctggccgcgccactcactgtcgcgggtgtccgcgtgcgcgccgccgatgcggccgtcggggagcgcctggaggtggaagccgatgcccacgttgcagtagagccgccgcagccgcttgatgcccagcaggtagtcgccggcgccgctctggacggccgcctccttgggctgcgctgccaccggcaggcgcgccaacgagagcgccaccaggctctcccagcggcgctccagctcggcctccagcgtgccgttgggtgcagtgggtgcggcggcgccccctcggcccgcccagggcgccagcaaggccagcaggaccgccgggagcagcgctaccgcggccgtcccgggccccgacatcccggcccgagggccgtgcgtcggtcaggcggtcagtgcgcccgggaagctggggggcagagctgcgcctgtggcgtcccgcgggagcgcacggccgacctcgggcaggagtgcgcaaccgaggaggtgcgggaggcaagcgacggggcccccgggcgccgggctctaccccggctgcatggagcggcgagccgggcggaaagcgcgcggctggagctgggactctgaggagcagtgcgcgcctccctgagcgccaggcccgcccgaggccgagccgctatatatatagcccggcgccccctcctactcgcccgctcccgcggggggccgttcgcgttctcctgggcgcccggggcgctgtggcgttcgcggctggtc

SEQ ID NO: 334315 - DNA, 90 bp, Homo sapiens
  chr11:71159315-71159405
  hyper
cgcacaccttggccactcacctgcgcacacctcggcccctcacctgcgcccaccttcccctggcctcgcttgcgcgcgctgctccacgcc

SEQ ID NO: 334316 - DNA, 446 bp, Homo sapiens; identical to SEQ ID NO: 235778
  chr11:71318342-71318788
  hyper

SEQ ID NO: 334317 - DNA, 834 bp, Homo sapiens
  chr11:71951598-71952432
  hyper
cgtggagagcagtttagggcgccagtaaaccttttgtctagggcatccagtcaaggcgggccaactgaacatctgtacacggagttgtacaaatagacaacagtctgctctagcccggctctcttcggccctgtgcctgccacaaactcagcctcccgggctccgggttttcaaagctgcagcgccggggtagggaaccccaggggtgctgactggcctgccccctctcctcctcagctcggccctgaggtcccctgggtctccccctctagcccctcggcctccctcctggcttctcaagcatcactcggaactttctgccctaagagggagacagagcggaggtagcctggagctaaacagatcgggtctcccaagggcctccaagtccgggccctgctgcctcccgtagctgcccaagcaccctgggaccgcgccctgccttcgggctgcatctgcctgtattcccctacccccaggtgttagacattaagctcccacacctccttccatgcgcactctcgtacacacacgtgcatacacgcacctgcacgcgagcctcagtgaggtcgatcttgagcgccagctcctcacgcgtgtaaatgtcggggtagtgggtctcagcgaaaacgcgctccagctccttgagctgcgcgctggtgaacgtggtgcggatgcgccgctgcttgcgcttctcgtgcaggccggatggctctgggaagaacttgtagggcactgcgggtgtgtgcaggggggccggggggggggcaaaaaggatgggggagtgagaagcagagttcaacccgttgtgtccagctccgggggaatcacacg

SEQ ID NO: 334318 - DNA, 238 bp, Homo sapiens
  chr11:71955497-71955735
  hyper
cgggcctccccacctgcggccccgcggaagggaggggaggcaggcctggcggcgctcgtgtgaagaagttaattcaattcgctctgataaccgagttattccgatctggcccctcagccccgcccccagcgaggtcccatcccggcggagactgcggaggcggcccaggaagggggatggagaccgggaagagacggagcctgggatggggacagggaagggacgtggatagacagag

SEQ ID NO: 334319 - DNA, 141 bp, Homo sapiens; identical to SEQ ID NO: 235788
  chr11:71956132-71956273
  hyper

SEQ ID NO: 334320 - DNA, 293 bp, Homo sapiens
  chr11:72432852-72433145
  hyper
cgtgcccaacagcaacaacagcaacggcggcacctcgcttaccctcagacgcctgctgggtcttggggctgaggactcccacagctccggccaggcgggctgcgtatgcccaagaatgtcgtgtacctgcccgtgcaagcctgggtcccgcctgggctggtctcgcaaacagcctggcccctggcccctgggtgggtctgaggctgcgttctcttggaggtttttgagcccaggtatggctttgcacctgtgatttatgtctttaagtgtttgtgaatcacttctctacgtgc

SEQ ID NO: 334321 - DNA, 162 bp, Homo sapiens; identical to SEQ ID NO: 235792
  chr11:72433403-72433565
  hyper

SEQ ID NO: 334322 - DNA, 96 bp, Homo sapiens
  chr11:73358566-73358662
  hyper
cgcctcgggtcagcatctcttcacgtcactccccctccctggggtgggcaggtccggagggcggggcccgggggcagctgggctctcaggcgctgc

SEQ ID NO: 334323 - DNA, 880 bp, Homo sapiens
  chr11:73693765-73694645
  hyper
cgagccgcagggagaacacggcagtgcgtgcggctgtgtctgtcggctggcggagggcgcgtcggacgagccgggcgagcgtggacagtcaatcccaaggcgcgcgcagctgggcttcgcagtggggctccgcgcaggcggcggcgcggcttaagcctcgggggcggggcccggggtggggcctgcggggcggggccgggcctgccagctcctacttgggtgcggagaccctggagcagccgcctttccgcggggaccgccccgcctagggttctctccatgactttctccactcccgtttccgtgcgtcccatcaccgcgtttactccttcgttccccgagatggtcactcccttgccactccccgcctctgcctcacactctctcgggccgccaacctctgtgaggatggcaagactgaccgccagaaacaagtcttgtccagtcacacacctcttgccttcccagccaggacggtttctaacagcgtccagcggggccgtgtcttaagtgcacttcctcttttatgggcccagcccccctacgctgggcaaactacccaccctcctgcgagcgagcgcgcggctggctcctgcagggcgggactggggcctcgcgaccggcctcgctgtcgattggttacagccgccgcgttgtcgggggaaggaaccaatcagaactgcagcaacaggtggcccggcaaccgacaacagccgttgggctcggctggggttcgcgccttctcccccggtggagcggcctggcgtttagggaccaggacactaaaggccccggcggggcgggagcacccagcgtgacctcacgctcctacacacagacaagcaaacgggccggcccccgcacgtgacaaggcagagcc

SEQ ID NO: 334324 - DNA, 385 bp, Homo sapiens
  chr11:74022468-74022853
  hyper
cgcagccgcgcctcctccccgcgcaggtaccgcctcagcagccccagcagccggcgctcgggcgccagggcgcgcgccacgctggtcagcgccgagaacgtgtcgccccgagccgcagccctttctgggtctcctgtcccgagcgccagcaccgccagcagcgccgccagccgcgccccaggacccatagccagcgctcgcgaacttcccctcagacagtcctggccgcgcggcggcagccgctcccgccctcgcctgccccgcccctgtctccgccccctcccggctcaggccccgccctctggccccggcccggcccgtcccgtccaccgcccagtctcgctccacgccccctgactccttccttgtttcgacgcctcacctc

SEQ ID NO: 334325 - DNA, 357 bp, Homo sapiens
  chr11:74178245-74178602
  hyper
cgatcactgcgctcgggaggatcggggaggatccgggaggactagcttggtatttgcagcgcccacccctcccccactccccctcggttccacagtctcacggagagcgcgccgtggcccttggaagggaggcgggaagacccctcatttccaccccaggccgcagctcagccttcccagctgggtgggtgccttacctgcctctcagcaaggctccggggcgcccgtttgctcgctggacacggcgccctctgaccgagggtggcccaagcgctgcgaccctgtgcattccaccagccccgttccactccgcgggtgcccagcaccgcccagcgcgctctctggctctgggctccc

SEQ ID NO: 334326 - DNA, 944 bp, Homo sapiens
  chr11:74441810-74442754
  hyper
cgcatccctcctctgcccacccagcctcccggtctacttacgggctcgagcgtgggagtccagggggaaccagagcagcgcgagtcccagcaaggaggagaggaccctcacctcgggaaccatcctttccccagggtcaggccgctggtccgggagcggagtcgggaggaagggagacgaaaaggacacggaggcacaggggccacagatcaacccacagaccccaggaggtctgctgctagagcggggtcggagaagggccaggaagcagcggtgggcaggaaaggagggcaggaagggaggtctaaggtgggaagaagagaaaggtggaaagagaacgcggggaaaggagggagagatggagagacgaaggaaggtccagcagaagggagaggcgatcaaagaaagggggaaggtgagagggagaggaggagaaagcagggagaggaccggcgtctgccgagcgcgcagcgccgggcgaggcgcgcgggaccagcgggtgttgcgggcgcgcgggctagaggcggccggcgccccctgctcggtgggctcggggtcgggccgcgggggcctggggcccggcggggcggcggtcccagcagcggcggcggcgcggcggccgcggagggaggctgagcgcgggccggctgtgctcgccaagggcttcaggcgccgcgctcgggcgcatttgtactttgccgcgggaagcaggcagcccggcctggcgctggcctagcgctggcgcctcctctggggcaccgcgggctcggtggattggccacccgagaaacaggcccactttttcccctcctctcttgtgcgggtctccgggacggacgctccaggcgcggcgccgagtggaggcgagggggctgcggagggggaaggggccacgcgggccacggggtttaacccctgactccccgcgacgccaagaatgcagg

SEQ ID NO: 334327 - DNA, 1744 bp, Homo sapiens
  chr11:74951684-74953428
  hyper
gaaagcgcagcagccgacagccctgattctcgggagcctcccaccccgcctcccacggcgaggagggcgcggagactccgctgggggcggaggacgagaccgggaggcggggaggggggaggcaaaccctgcccactcggctcggagcccggagcggccgcggaagccggaggccggcgcgcagggcgagggcaccgggggcggggggctccgctccccgtctgacccctcttgcccccggccagtcagccagtaagtgcggctcctcagactttcgagacagcgaacggaccgaccgggactgccagccgctccgggtcaaggactcgccccacccgtgccccccaccaggcgctcccaactcactggtgagcgcggcggcccgggcgctggatgcgggggcggccgcgatggccccgcgcgcgggacagccggggctccaggggctgctgctcgtggcggcggcgctgagccagcccgcggcaccctgccccttccagtgctactgcttcggcggccccaagctgctgctgcgctgcgcgtcgggagccgagctccgccagcctccgcgggacgtgccgcccgacgcgcgcaacctcaccatcgtaggcgccaacctgacggtgctgcgcgcggccgccttcgccggcggggacggggacggcgaccaggcggcgggcgtgcgcctgccgctcctgagcgcgctgcgcctcacgcacaaccacatcgaggtggtggaggacggcgccttcgacgggctgcccagcctggcggcgctcgacctcagccacaacccgctgcgcgccctgggcggcggcgccttccgcgggctgcccgcgctgcgctcgctgcagctcaaccacgcgctggtgcgcggcggccccgcgctgctggccgcgctggacgctgcgctggcaccgctggccgagcttcgcctgctgggcctagcgggcaacgcgctgagccgtctgccgccagccgccctgcgcctggcgcgcctggagcagctggacgtgcgcctcaacgcgctggccggcctggaccccgacgagctgcgcgcgctggagcgcgatggcggcctccccgggccgcgcctgctgctcgccgacaaccccctgcgctgcggctgtgccgcacgccccctgctggcctggctgcgcaacgccacggagcgcgtgcccgactcgcggcgcctgcgctgcgccgccccgcgggcgctgctagaccggccgctactggacctggacggggcgcggcttcgctgcgcggacagcggcgccgacgctcgcggagaggaggcggaggccgccggcccggagctggaagcctcctacgtgttcttcgggctggtgctggcactcatcggcctcatcttcctcatggtgctctacctaaaccgccgcggcatccagcgctggatgcgcaacctgcgcgaggcgtgccgggaccagatggagggctaccactaccgctacgagcaggacgccgacccgcgccgcgcgcccgcgcccgccgcgcccgcgggctcccgcgccacctccccgggctcggggctctgagcggcgcccccgggctcggggcttcccttgcctggcccgaagccgtggagatgagacacccgcgagccccgagctctgagaccttcccctgactcggaggcgctaagccgtaccctctcgttcccgcctccgagagctcccaccgtcaaagacccagagatagccggtccgaatccagaaacccc

SEQ ID NO: 334328 - DNA, 952 bp, Homo sapiens
  chr11:75140896-75141848
  hyper
cgtccgcctccaccttctccaggaagtaagcgggcgccagtagcggcaggcgcacgtgctccagcaggcgtcgcagctggccgcggcgggccggcgcgtcgtggcgcacccagcgcatggccgcttcaaacacggcctcctcgcgcgccacgcccagcgcggggtccgccagcagcgccaccacctcgtcaggcgccagctccaggaagtcggcgtggcgcgccacctcggcgaaggcctgacgcaggacgcggccgcagcgctcggccagcggggccagcgagaaggcggcggccacgcggcgcagcgctaggctgttggcggcgcgcaggcggccctcgagaaagcgcacgcaggcctcgcgcaggcccgccacgcccagccgctccgccagcgccagcacggccgccgcctcgtcctccgcgcgcagccgcacgcccgctccgtacacgtagtcgagcaccacggccagcgccgccgccgccccggccgggctcgtgcctggcgcctcgggagctactggcaccactggcaccacggccgggccgcgctcgggccgcccggccgcgaacaagctgcggaagtaggcgctgcccgcgctgagcgccgcgcggtggcacggaaagtcgcgcccgccggcgcgcagcaccacgtcggtgagggtgccgctccgccggtaggcgttcagggcctgcagcacgcgctgcgcgtggcacggacccgcgcacggcgcttcgcagcccggctccgactcctccggcgcatggccttgccgcatcctgccggggagagaacacaaacagcgtcggggaagccacctggctgcgcccgggagaggcgacagccctcatccgtttatttcctctcttgaccatttgttcagcgactctcccctccgttcagcatccaggttccttacggctacagtgccccagccccgcctcaccagcgc

SEQ ID NO: 334329 - DNA, 1797 bp, Homo sapiens
  chr11:75378416-75380213
  hyper
cgctaggcctgcgctggggatcctgggccccgggcagcccgcggggagggtctgcgtggtgactcccccgcgctagcagcggccgcgtctcacctgtaggagctgctcactgcactcgccacctcctcgcggatttgccggttgagggcgtccgccgcggcgcgccccctgccagcctcggggccggtggcctggacctgggcctgggccgcgggcagcggcgtctgctcgtgccccaggccctcggcgcggcgcacaatccaggcaggcccggccttcctgcgcgtgtcgcgctcgtccgccccggacgcctttccggccgccaggccacccgctccgccgggggccgcctcctgctcccgggcctcagcggcggcctgcactggccagcgctcctggctctgcggccggcgcttgggcgccccgagaatgggcgccgacgcctgggaggccgcagagatctgcacgggcttggggatccacgggtggtccccgcggcgcggcagcggccaggcgcggaagtccttctggtactgggtctcgcgctcgaagggagcgtcggagggctggtattcgctgcgcggccggcagctgggctcgggccgctgcaccttccaggctcggtaatcctgccgcatcaccgagtccgcggggccggaggtggagccggagcccaggcccgggcccggcccgctccggccggggcccgccgccggctcgcgctcgccggtaggcccaggcgctggccccgttgcccgggcaactgcatccaactcgccctgggctggctgcgtctctatggcaaccgcgcgcgccgaggggggcgcgagcgccggctgcgcctgctgctgcggcggcggtggctgcggcggggcgcccgggtgctcggtggcctccgagtacttggtgaaaaccagcggcacagcgatgtccgctttgtccaactggttccagaagcgggcgatgcagcaggccctcgtgatgcacggccacgccatgatgctagctgaaaagccggcctcctctttcttcttgtggttctaaagcaagtctctataatcttccttcagcctccgatcctgaccggccaatgtggttcccaccgttttctacccccgatcagccggagctagttcgccctcctccctcagcgagcacccggggagagctgtcctaggagagtctgtagagtccctcgattaccggtcgcaaacgcctttgggagcgcagtctgctgcgagcgccgaagggtgagacgcacggcgttcccgagtccccggcgagggtgtctgggacgcgcccctccctgcggctgcggcggcgcacagacctcggtcgagcgaggcgacgtgaggagaggtggctacaggcttaagccatggcgcagaggaggggccgggcggtgtggccgcagggtccgcggaccgggctcgagtctccttcctgccggcgtcctagtgcagccggccacctagcagggctgggaggccatcacctccagcggagaccgagcattgctgcctccgccgctgcccgcgaggatgccgcagccgccgccgccaccgcctcttctcctgggaagcgaccccacccttttctgcagctctcggtctccgccgctgcccgcgaatgatgctgcagccgctgccgccgccgcctctgcctctgctgcagggaagcggccccacccttttatgctgctcagcagtgagaaaaaaatccaggaacgatgctgactgaaagagtgctgcagaaaaaaacaaaacaaaacaaaaacacctgctgtcgtcagcttgc

SEQ ID NO: 334330 - DNA, 458 bp, Homo sapiens
  chr11:76032911-76033369
  hyper
cgccccacaaggcccacgcttgcgccctcgggctgcgcagggcgagggtttgggggcgcggtactgacgggtgtccaggcctctcctcgaagggttccgcgcgcagaaaggtgggccggggccagaagacgcgctggaaaggcgttttctgccccctccgggcctcgggaatatttgtgggctgccggcggggcaggcggggtgggggaggctgcccggcgggcgggaagccccgcgcactcgggtcccctgcggtccccggcgggggtcggcgcgtgcggaaagcggcccgagcccccaacctcggcccgtccgcaaccgaagaggaggcgaccgcagcctggaaaagaagagcccccagctgtttccttccacccgggcgggcgggacggagaagggagggagcctgggagagacgcaggtgtggcgctcgcctgtgctggcggggtggcagccgg

SEQ ID NO: 334331 - DNA, 782 bp, Homo sapiens
  chr11:76381512-76382294
  hyper
cggctccacgcgcgcagtggggatggcgggaggggagtgtttggggggcgtcccttgggaccagcccccgccttgcgctcgctagaggcgcgcgacagtgcgccccccgagggccggccagcctcgcctgcccggcggctcctacctggctcagcgcggccgcagctcctctcccgggcagtctcggcacattttgcgcaaacccgcccccgggtcccaccccgcgccagaccccggggtcacggcccgaggaggagcaggccgctcagctgccccaccggagcccccgcgctccggctgcaatttaaatacctctcccgccggcccgccccgccacgcccccctctggcgaggccgtggggtcctagcgcctggccccgtgcctcggtttatccggagccggcgggggcggagtggggtggggcggcgaagcatcttcaccaccctgggacctcggccgggaaggggcgggggcccagtgtggggggatgagagggcgggagggagaggggttgcagaggaagcgccgtgggagcgaggcccatcccagcggccgccgcacgtgcagttcgcggccccgcggggtccggaggggggcgcggtggctctaggagccgcaggtccacagaggaaatccggcctggccccgatttcccagctgctggcgccgccgcacttaacgcgggggcaaacaggcgaggtgacggcggggctgaatgcggaaggaaatgacccttcgctggccctggggcggccgcggagggggttccccgcaccaagcc

SEQ ID NO: 334332 - DNA, 1273 bp, Homo sapiens
  chr11:77184261-77185534
  hyper
actcggtcccggaccggtactcgtgtggcctcccggctccagcctggcctggccccgccccgccccttccctctcccaggtctctcgaatcgcccggcgtctgagacccgcgaccccgccggtacgcgcacagggggcctttgttggcccgacgggagcgggcctcgcggggcgccgcccgcctcaccttacctggcgcctcctcccgcccaggcgcccggccccgcaacgcgaaataaatgggcccagacccccactccacccgtccccacccccgcgccccagccctggcagcccgggacgcgaggggtactgggcggtaggcccgctctcaccttccgcgctcgctcagctcctctcggctcctcctcctcctcccggcggtgggtgccgcctagccgggagtgagggcgcgagtgtgcgcgagctaccgcttcactttctccctcctgccgccgccgccgcgctgcccgtggcggggctcccctcaggacaggggaactgcgagggaagggatgatgggggggcgggagggagcgaggcgacgcgggcggggggggaaggggggactgaggggcgaggtgcgaagggctcagatggcctctgaggcaggaggtggtaactggatgcggagaccaggttcctcgagggggctcacgaaagcgcggggctccgtggaaaagggaatgagagtccaagggggaaggcgtctgtgggggaggactgcagagcctgtgagggaagcgcgatgggcgagcgagggggcgggagcgtgtgggggaagccgtgagggggcgtctactgtgcagccaccaccttcggctccggctgcagccgcgggagggcagcctcccccgcccacagccgcgctattgtacgccgcccggcaggcctgaccgcctagttcactggctcccctactcctcctcctcccgcctcctcctcccctctgccctttccccttctccccctccccctcccccactccccctccccggcgcggcggcggcggctgcggctccggtggagccgtgcccgccccgcctcccgcaggtgagagggggcggggagggcctgaccgacccgtgggagcgaggccaaaccctggcccgcatgagggcgaacgcctgggattacgtcatcggcgcgtgacgccagaggctggggaatcacccgcttgctgcgtgacgtcatcgcgtcgcgtcactgttctcggtccgctgtccgtggcgggttgtttccgtgcagcctttctatcagacaattttgggac

SEQ ID NO: 334333 - DNA, 544 bp, Homo sapiens; identical to SEQ ID NO: 235839
  chr11:79149331-79149875
  hyper

SEQ ID NO: 334334 - DNA, 390 bp, Homo sapiens; identical to SEQ ID NO: 235840
  chr11:79150291-79150681
  hyper

SEQ ID NO: 334335 - DNA, 1140 bp, Homo sapiens
  chr11:79150741-79151881
  hyper
cccactaccttccagtctgctcctccaatgtaacgaccgcatttaaaaatggcaattaaaatgactgaggagctcggtgatcacatttcaacccagagcacatttcccgaagctgggggtgagagtagtcatacagtcacactcacacccgggagccctccaagcgtccatctggcggctgcagcctcagttggctcctagacgaacatcaataccgcggccgggcgcccggtgaggagaggcgggcgccccgcgggttgcagagggcgaggagctggggtcgcatctccaggatctgagctccaaccaccgcccgtgcggggctgctgcagccggcacttgccccgcagggcaggctgcagccgctgaagcccggcgccgcctcgcgggctcctccagcgcccgacgggggcctggggcgagctagtctgcagaggggctgcaggcgaccgggccggggcggggaacgggatccgggagaggcagacgaacctggggcgcgccgcctccctcccacccgcttcccacctccctgccctcccccaacccttgctcccaggctccagtccgcggcgggctccgggggctgcggcggctccaggctccagaacagcttgcctcttcggccacccgcgccctagcctccctcctcctgggccaggggagcaagcaaacatctcccggagccctcggcagccgcgtgagctacccgaaccctgcccgggccagcagtgcagagggcgatggagctggcgaggcgtcgccgcggtccccaaggcgcttttccgtagagcggatcacgccgccttaccgtggctgcaggctgctaccgccggggaagcggcgaggacggcggcagggaggcaaggcgccgcgccggtggctcctctctctctcggcggcgcggctcctctgctccgcgagccgtagcggggcgcccaggaaggagcaggtccgggctctgcgctcagctccagcgagaccaacaatagctcccgcggggagcggagccccagcgagcctccagccgcgcgcgcacgaccggctcccgctcccggccgctcccggccggcgtccctgccagcactgctgccccacatgaaacagctgcaatcccgaggcttctggggggttggggcg

SEQ ID NO: 334336 - DNA, 269 bp, Homo sapiens; identical to SEQ ID NO: 235843
  chr11:79152001-79152270
  hyper

SEQ ID NO: 334337 - DNA, 787 bp, Homo sapiens
  chr11:82444299-82445086
  hyper
cggccgcggcggcctgcgacgcctcccgccggggggcagccttgccgtgggccggggccgcgactgtcggggcgctaggggcggccagcggccgtttggctggcgtgtcggcggcgctcggggagggcgggccggggggcgcggcgcccatgaggccgctgcagcgcttgatctgcttctgcaggtacttgcggtggttcaccttccgcttcgacttgcccggcttgtccagcgccagcttgatgttgctggacgccgagtcaatgaagctgagtagatcgcgggtggcctcgcgcacgtcccctccttcggctcccgacagcagcgcacccgccggagccccggtctcatcgtcctcgaaacagcagcccttgtccagggctccgaaggcgccccctagcccgtccggggagcccccgaagccgaagggcacgaaagggtgcgtgctgaggagcgccgcctgcaccgccatcgccgcggctcccgggctgtccgcagcgctgcccgtgcgcccccgccagctcctgcccgccgcccagacccagctcccgccccggcgcggcgcgcgcggcgcagcctactagttccgggcctggctcgctgcgctgcctcccgggggagctcattaggtcttgtaagcaaggggcggagggagggagcgcgcggcgaccgtcccggtggtagaggggaggggcttacttagcctggcttggaggagtggggggtcgctttagttttctgagctttctgaagctcaacgccttaactccttcgtttccctttgccc

SEQ ID NO: 334338 - DNA, 501 bp, Homo sapiens
  chr11:84148462-84148963
  hyper
cgaacctgcgacccagcttcttagcataccagatagaggcaaacatagcgatgccaatggaaggaattcacaatgaagctgccgcacaatcaacttcccacctcggctcagagacgaacagaatcaggctggagctgtcacttgcaggctgttgctttctcagttcctctcatgctggttagctgagggagagggtgggaggagggaggggttgggggagaaaaggcagtcctgtttggccagtctgcaggtatatttacatcctgccagcaggaggtccgggtgaggcaggcgctgcctttgtagccagctcacacacatccagttggctaagtatttgtctgcagttcttcggcaccggcaccgtcgccaccaaactccatgtgtgtcaggaggaagggaagctgcagtcaagtccggaggcagctcacctccctctctaggcttgggcagttacaatcctcgctttggcttccctctatcttgacagtacgtgctggc

SEQ ID NO: 334339 - DNA, 217 bp, Homo sapiens
  chr11:84431446-84431663
  hyper
cgggctgcggcagtggcagctcgctgggggacccaaacgctgtgctcgccgggcacatggagcgacagcctagaccgagctgccgcttcgatcactgccccctgcacccgccgtggccatcccggagccccggtggaagcaacgccgcgggcaagtaccgagcctctcggggtctcccttccctggggaacgaggcgtgtggggggagggacagaac

SEQ ID NO: 334340 - DNA, 408 bp, Homo sapiens
  chr11:84431917-84432325
  hyper
cgatttggtaaaaagccagtggcttgctgcaatccagagtcactgtggggagcgctggccgggcaagtggggtgggaggaaggggctgagaaagggaggaagcgctgtgcttgccagactggccctgcctttgggcgctcttggtgccacgaaggagtccccagcgtgggagcgcgggacctccccgcgctgacgtgaccccgagactgcatttggcccccaccgctacagccacccgagggtagaagacctccgaggccgacttcccgggaaggggaggcccgctcggagcgcggcagggaacttcctcccagccctttgacaacagcatgccttgccgggggcagagggccagcaaagaaatctggggtagaaaacaggctcaaaatgatttcgctggtgccctac

SEQ ID NO: 334341 - DNA, 216 bp, Homo sapiens
  chr11:86085693-86085909
  hyper
cgctgcctcgagcttctgaatcgcctgggcaacctggaagccgcccatctaagggggtgaggtcgaatcccagccttgacgccttagcaaccgagcgagcctttctcgcgtcccagcaacgcgcccttccctctgccgggcctattctccctggtgcccctcccttcctcgaggctgcagctcacccctcattgggtctctcgttggtcaggaggg

SEQ ID NO: 334342 - DNA, 978 bp, Homo sapiens
  chr11:86382607-86383585
  hyper
cgcctctctccacgcataaaagggagaggagggacaagaaagccaaaccaagtcacaacaagcccctgcaaggcaaaaacagaaaaaccgctggaagggcgcccgggaggatcctttctgggtccagggggcggggcgcaattttccggcagccacgggatcgcaacgcgggccgtcctgccctctggcccattaccttgttgagatgagggttcctggtgacatcgtatccgcgcttcttcaggggcacagggcgcgccgggccaggcttggagtggcagccttgggcgggcgcggtgggtgtccagcgcgggagggcgccgcaggcccggcccggccagggagccagccgcgtgcctgtccccagcgcggcacccatggtccttggcagacctggcacgggagagaaagcaaggtcagggcctccttccagccagccaggacccacgcgcgctgcggggcaccgggcctgatccggggacgcgccctctgggagagggcaggtgctcccaaagggttaaatgttccagcccccgccactcctcggctgccacctgctcggctccgcgcggggcgccaggcctagccaagagccaggcaaagcgaaaccaagccctggaagcagatccggtgcgggtgacagccggcgccacccctgcccccatccctgtgaaaaagaggcgactgcgcggcgaggggtccccgtacccctaatcccgcgtggtggcttgcctcggtcctctccttccctggcccacctgcgctgctcggggagctgaggtctacgcggtcccgctgcggagcaggcggggtgaggagctgcggtctgtgagtcctctcccgccaatgggtggaccgcgctggcggccgcgagctcgcggagctggtgagttcctcaaagagcggtcccacaacctttgttctcagtgcctggcttcccctgaggacgcgcgtggggcgcctcagcactgcgtgcac

SEQ ID NO: 334343 - DNA, 555 bp, Homo sapiens
  chr11:89224244-89224799
  hyper
cgaattaagacaaaacttccacttccagcttcccacccgtgcacgctcagagaatgaatcaaaatcactgcaggacagagagaacgcaaggagagcctagcccgccatcctaccaggcagaggtgtttaaccccttcgttggcgagccagctcctccaggacacagccatgccgccggccccgccgcgctgcgctctgtgcccgccggaccgagaaggagcgggcggcggccggggcagcggttacagttgtgcggcctgccgggccgctgagcgaggaccgagggtcaaagactgagtggaagcccgaaggcccggcgccgagccagcccgggcggggtctgctacccagagccgggttttccgggcgccctgactcccacccgcaccgggtcagctctgcccactcagctgcccagacgcccagcgctctgagcgcgcggcccaggctgcaccagtctgctccgccgcgccggcccctttgtctaggggcgagcctgttgttgtggctgctgctgttcaggatgtcccgggtgggaacttggaggcgtccccc

SEQ ID NO: 334344 - DNA, 1998 bp, Homo sapiens
  chr11:91957644-91959642
  hyper
cgcggcaggaaagtacgttggtgtcatcctagagccccagagggctgagggaagactcgagctctaaaattagccgcttccaggcccggcgccgggaatgccctccagttcgccgcgcctcctccgccgccccctcccgcgcgccccctctcccctgcgccacgctcctagatcgctagtcatccccgccgccgaggctcctctccccctcgcccttttcgctcgcggtttgggaggaggagactgcgagagacaagcgcgagggggagactggagaggggcttggccgtgcgtcggcgtcggctgtgatggggagcccggagcagccaggcggcgagcagtagcggcggcggctgcagctcggagcagacaggagagccggcgctcctccccgcaggctgcgctgtgaactggcctgcggattgggatctcgcgcctcccgtccctctcctcccgctgctgttctcttcatctcggctcccctcctccgcttgcgaacccccggcggcggcggcggcggcgtcccgagcgcagagcgcttctgctcgcggcctcagtcccggctagcgcgcggtgggcgctgcggcggcagcagccgggggaccggctcgcccggagcaagagcgccgagcaccgggtgaagaagaccacgggggaggcgcctcgtagagccgtggatcgccagcggaggcaagggtgcgtggggatttgtagcgtgatgatttggctgcctggtgcaccgactggagcgcgcctgccggagcacagcctcagctgctgggtgcaaatgggctgcgaggtgggctggggaggcgagagccgacgaagcgcgtgggggaaacttttcaccttgtaaagttccaacctccgcgcagccccgagccgccgttgctaccgctgcaaacaggagaagagggtggcttggccccgcggcgggagccgggaggtttacacggagagttggccaagtttggggctgaggatctggggaggggttgcgaggggggttgcggatcagtgcacccatccccggctcccagccgcccctgcaggtggatgagaaggttcaggtggcgagcctgcttggcagccggtgcctctcgggcgcagtgggggatgttcagatgccgatggatgatgcacttaggggaccccgaggtgcaagttgggtcatcgctaggcgaggcgcggcgcagagagggagcccagcctccactttcgctaggaaagggaaagggttaccagtctgcgggtccgttccccacgcctgactcgggcttgcggggcttgtggtcagggtgagatgtagtgaacggcggcggcggctcttcgactggggacgacatcctttacggagtggttggggacagagactgtccctgctatcttgacaaggagagggaaccggaatgctttgcgagagtgcatgatttttggcgggcgtgtgggaaggctgcttgtctttgaaaagaaagcagcgcgggtctgaccatccccaggagtgcggaggagctgtctccggattgggggcgagaacgccaggggcaccagctccgagctcaggccccactcccgggcggttcgggacgaatcccctctacaggccagtgtgtgtgcagggcaagtgtagggggctgaggggcgctggcggggaggcagtagaggtggcctggaccatcttggcgcggcgcgcggtgagcgcgaggattccgccagtgggagtcgctgagctaaagtgcatctggccccccggcttgcatgatggcgagcccggatatttttagctgtgctgtgatctgaattccctcctctcctctctcgttgacttttgtcacatgtgctttccgagatggtttaacattgaacatgattgggctttgcggaaagcaacttttattcactttccaccgttctcctcttgtgggcggggggtggcgggggcgtgcttggggcaaggatgcaggggtggccggagtttggctgcgagctaagagagcc

SEQ ID NO: 334345 - DNA, 795 bp, Homo sapiens
  chr11:91959654-91960449
  hyper
cgggatgagaggaacaggggtgctcccggggtgtgggtgtgctggcggtgacatcctgaggctgcagctcgctggaataatgggctcaaaccaggcggtggagaggggtccccggaatggacgtcgggggcggggaggctgcggagaccctgcgaggtctccgtgaaggactaggaggggctcccgggagggagtggcgcctgcggcccggagcgtgggcggccggtggctctggcacgcggaatctggtggactcctagcgcctcggccgggagctccagctccatcccgccgccgccgcgcgcccaatgggactcagcttcgggtttgggcgaacctgcagcagccgcggcgggagggagggacgctgggaccgcggtaatgattgaagtctttttcccccctctcccctcctcccgctcctctccgcccccagactctggcgcgtttgttttccaagttggatcccacttccatttacaagtgtcagacaaacccgcgagaacctcccccaacccgccccggccccagccagactagggagggcgcccagggggagggggcgagctgtctgggcagtgcctggggaggtgcgacgcgcccacccggggcttgagcggctggggttcctgtgcgtgggtccttaatgtttaaaagatacacatgaacagcaacaaaacccaaaccactcgtggccacttgttttctgccgcttttctcccacttgcctcggacatattaattttctggccccgacgctagtcttttcaaaggcgagtccggggtagtgggagg

SEQ ID NO: 334346 - DNA, 803 bp, Homo sapiens
  chr11:92930623-92931426
  hyper
cgtgagtcacggcgcaggctcttgcgtctttgacgtgtacccacagggccccgccccactcaacacacacactcacccacacgcgcgcgcgcaaacacacacacacatattttaacgccctattcaggcctgggcttcgtctgaccaagttctcggggtcagataaccggttcctttgcggatgctgaccacggggtcagttagcaatcgggcctcaactcaggccaagcgcggggcccctggaggtgtgggcgcacccgactcccgcacagacccccgcccacgtcagccccggctccctgcccacgcacaacaccgacctagctcctcgcgcctcgccgccccggcagccgccggcgtcgccgccgcttccatctctcgcgggtctccaggacgccgccgcccgagtgctcactctcccgccgctgcgtggccggcgtcaggcccaggcctacctcccctgcccggagggacccgcgcctggtgcccgcctccctgccccggcgctccccaaccgcgcggcgaggagcatgcgcagtgggacagcccggctcggcgggcaccgccggcgaggggcgggaggggccgaagacccgaggactgctgcgaggccgggttgggtaacccgagaggagggttgggtaacctgagatcagcgagggtgggaccttagagctagccgagacccgggcccatagctccctgggggttttaaagatgacggcgaacttaaatttggggcgcctgtccgtatgcaaggcgttagcgttctgtaagtcaccttggagaatgcgaagaaggac

SEQ ID NO: 334347 - DNA, 442 bp, Homo sapiens
  chr11:93063608-93064050
  hyper
cgggacagcgaggtcgcgctcgcgcggggtgaggttggaggcagccgaggagccgcacagggcagcgcctgccgccgccgccgcgcccatcccccactccgacggccacgagttcgggccgcgacgtccccatggcaacacgcggcggcgccgcgcgcggggagggagaggcccaactgcctcgttggtcgcgcggcgggagggcccaggcggcgggagcgcggcggcgggtggcggggccccttggggcgggcctggcggggcgggaggtgacatacgcggtcctgcgccctcgcctcagacctctcgggcgagcgcggcgcagcgcaggtaatggctcctggccttcccggccccgcctcgcccctgaccctcacccaaaggccaggctgcgcgggtcctcgagcgggacaggggaaccccaaaagggcggccgctctgc

SEQ ID NO: 334348 - DNA, 1297 bp, Homo sapiens
  chr11:94473470-94474767
  hyper
aacataacagagcagggaatcgggttagaacgggttatgctctgattttttggaaaatgggcaaacggggcggggactagggaggattccgccagccgggagttgggaggccgcgcgcgcctctgcggagcgtgacggccacggtcgcctagcaacgagcggggatgcgcggggcgcctgggtgggcgaggggtgctcgccgccgccgccgcgcgccctcgggcccccgggaccgcgggaaaacttcgcggctcctcggcgctggggcgtcggcgccaggcccggcagacagagcaatgcgccccgcgggctgagggcagaggatgcggccgcggcccagcgcccggccgggggagccgcggggtggcacgcggggaaagttggcgcgcgcctgaccgcgcctggaagccgcgcggtgccagggccgagttgtcccccaagtttctgcggcgatttgtcactccctggggatctggcggtctgaatcccgcggggcctccggctcagggattctgagcgctgggagagagaagcccgcgcttttcccggggacctgcgcttgagctggtgcttgtgcgggttcgtcctgaatggtagcgattcgagttgttttctgcttttcttctcccccagacagtgagtttgtggaagcctcgcccgcatcctacagcccagacgagttaggtaagtctgctcattttgtcttttatttcttggtcgcaattctgcccgagaactgcgagtttggggggcgtccataggaactcagctagggatggggctggggttggagggcggagggaaagggtcaggggacacctgctgccttcgcggccggaaccggcctttcctcggcgctgtgctttcgggggtggcagggcaagtgtccaatgagccgtgcgtgtgtgtgtgtgtgcgtgcgtgtgcgtgtgtgtgtgtgtgagtgcgtgtgtgtgcgtgttcgtctggggcagtggtgctgctccgaggagcctggcacagcaaacttccagagctggggcttctgaaacctgcgctcatcttgccgggaggacacagcggcgactggttctgacttgccaagtacctggcacgagaaggacgtcgtgtgggtcgtccttaccctgaatttaatgaagtcaggggctgaaaacggcggtgtaatcattaaactgtaagacctaggagctgcttccctccctgatttctattcctcagttagcctgtaggtgtctcgagataggacattccatcctcatgcctgtcatggtaagtggagatttgcgatgggtgaacc

SEQ ID NO: 334349 - DNA, 1442 bp, Homo sapiens
  chr11:94501274-94502716
  hyper
cggcaggggacaaaggaagggatgctgtcgccctcctaagtctcagggagacacgtcagcttgagctctgggcaatttcagcctggcagtctcgcggcccggggaggggcggcgggtgtctgcagacgggctctagggcccagcggccgggcgccacggcgggggtggagtgtagggttctagtgacgagcccgggcgaccctccccggcccgcgcgcggggagcggggagcgcggacggcggcgggagcgcgcgagaagctctaggacccagcagcggttgtcgggtttggggctggaggtgaagccctgtgtgaatggggttgattgtccggcgccacttccccgcgctgcccggcagccgtcttccccagccgagggactgaactagccatgatcgcctcatgtggagggcaaagttgcgccggggaacttgtgagcctgcggtgaaaggtaaccagcccccactcgaggtgccgggagggcgtctccgagtctcccacgcgaagaacccagtcgccccgggctccccgggcccctgctgctcacggaagggggcagcttctgggggcccggggctgagatcccagattgttgtttttaagcgggttcccttgccccgctccaggtccagttgcctgcgggccgggcctcagcgtcttgccgccccgcgacccacgttgactgaagttgtggccccggggtttgggccccggggtgctgcgcgcccgacgcggggctggcctttcctgaggggcgcagccatatggccagacactccgaggcgcgcccgcgcccgcgcgcgggtctcgcggcgagggaggggacggaagggggtgtccggtgcagctttccccggcgcgagacaaaggcgcgcgcaccggcccgcccgacgggctctggcgctgtggactggaccctttctgcccgccggccagacccggctctggcgggtgggggcgacgaaagggtcgcaccccagccccagacgctcggatcgcgttagctgctgctccttctttgttctctccccagacaagtttctttgacaaactggagagttacatccagctcccgcttgcctgttagggctgcctttacaataatctgctttcgcggggagaaaatttaaactttccaaatggaactgttttttcttggaatgtgacatttgtggcaggagggagagtggtacgttggccgatgacagccgagcggaacggtggcctagtgccgggacagggaccgagcgtgccccataggcggccgggctggaggacgcggcggcagagcagacgagccctggcgcgcacctctagggcctccgctacctggactgcgctcgcggcgacgtgtccaagtttcccccctcagagccccaggccgagaatcccgggtatctgcgcaaagctcccgcgcctcgcccaccctactcttcctatc

SEQ ID NO: 334350 - DNA, 772 bp, Homo sapiens
  chr11:94963753-94964525
  hyper
cggcggaaataaaaagccgcagtagtccaaaccctcctgccctcaacccacgccccctttctcagtccctgcggagggacggtgcccggggatccctctcagcctcccccagtgcgcgcccggggacgagccgcccgagccccggccggcaggaagcgaccctcgccggcaggaccccgggccgaacccgtaccttccgcagcactttccggcagttggtacagagcaggtagttggcggcggccgacgggctgccgccgccccggttcatcgtggctgcgggcgccgaggcgagagcgggcggagggccgggtccgggctgtcactgcggccactgcagggccggtccgtccccccgccgccagccgcgattccgcctcagcctcctcaaggcgggatgtcgggaggagaggcgactgcctgaaagctagcggcactgccagaggcgaccaccgcggcagctgccccagcgacggcggagacggcggcggctgctcctcaccggcccgttgttccacccgcccccatcttccagacccccgcccccgccaggctaggacgagcagccgccaccgctgccaccgccaccaccgccgccgcagcgcctcagtgcggccccgcctccgccgccccaccaccttcaccacctccacgctccggtaccgcccctcccgccaatcggacagctccggctacgcccccagggcgctagcccgcagccaatgagcaacgagagcccgactgggagtcgcgccggccaatcgcaggggcc

SEQ ID NO: 334351 - DNA, 886 bp, Homo sapiens
  chr11:96122370-96123256
  hyper
cgcaaagtggatcctgccagcatggtatccgggataactatattattcattaaaatccgttaacaatgaaggttaatgcagcaggaatgagtggtagacagtggaatagatcctctcaggaattaacacccggaagggtgactttcatgattacaaacctctttggcgggacgcaggaacccagcgcccgctagcccactagtccgtcactctgcctccaggagggaggggcacagtagctaggaaaccggaccctcaggccaagcttcgcgatgacgcgcgcaggacgacggaaacccccagaccccaaaagagctctgcaccgagaaaacaattacaagggtctggaaaggccagaaacccgagaaatcaccaaccgagctccctacatcagttccaagcacctccccaaggcggaaataacgggcaccgcgcccactgcagctcagctgaggagggttagaggcgcaaagggctgaggggcgttctccggcccacccaaagagcgcccgcgggaatttttctcttagtccgcgaggaggcacggcttcccccgcccctctcataaaccattagcaccgggagcgcgagcgagtcccagccgggagacagccccgcaccgccctcgcgctctcacctttcaaagcgcctccacctctgcctccgcctccgcccctgccccggcaaccagctcaggacaagcgatgctcctcccccccttccggggaccaagggaagtcccgcctctgggtggggcgaggggtggggccaggcggcgggagggatcatcttccgggagcgtggctaggggcggagcgactgccgcgcgatagtcagggagctgtgcgggtcctggttgcaagagaggtggggagaggggcctggc

SEQ ID NO: 334352 - DNA, 1471 bp, Homo sapiens
  chr11:100998184-100999655
  hyper
cgggtagacctgcggcaggccctccttgagcacggcggcctggtagccgagctgcgggagcccgttgaggccgagtgcagggtagagcgcgggggccgccccggcggcggcggcagaggcggaggtggagggcaggccgtcccgcgggagcaggcagccgctcgcgcccggcgccttgcagggcggcggcgcgaacgggccctgctggggcggcgcgccctccgctttgtacaggatgcactccagggtcgaccccgaggaggacgcagacgagactgaggcactggcgggtgcggccgtcaccgccgcttccccgggtctggatggggtcgctcgcggcggcagcgggggcggtggccccaacgggaaatccgggaaggctgcggggttggcaccggccacaaggtaggaacgcggggagcgcgcggaggcctccgcgccttcctcctcctcctttatctttagagcgggcggctggaagtcgctatagagagggtacgcgtcgtccttgggctcggcgtcgggcgggtacgcgcagtcggggaagtcgcctacagcgaccggggtggacgaggcacagggtgaactccgcggcggggcaaaggcgctggcagccccggccccgccgtcgtaactttcgtcttccagcagctgccgagtgcgggctgccaataaggcgtgattgagaggcaggataggcacgtggatgaaatccatcaccgtggtggccagcggggagcgcccgggcgccatcggcgcgtcctgctccaccagggcgaccctgggcgctgagaagcgggaatcttccttggggaccagggcgacgcctcctgctgccgcccccggcgggacagccgcggctcctcctccagccgccgcgccacccagagcccgaggtttgcccttcagaagcggacccgcagactcctcggactcagagccatcctcctcctcaacctccaccgcagcggcctgcggagacggcttcactggggccccggaccagtgagggctctcagaggccgggagcagcagctgccgggctggtgacaggccccggggcagcactttatgggcagctgccgtcccggagctgtctccaaccttgcacccggaccggctcatgagcggggacaacacccgctgggtggcgggggcagccggtggatcttcgggaagttcggggccaaacaggcaccaagagctggtgacctcgcaggcgggagggctgggttggctctgcccgggacctgagggcgccaacagagtgtccaagacactgtccagcagtccgctgtccttttctgggggactagaactgctgcctccagcaccccttgtagcttcagctctggaatatgcgccctccacgtccgacagcgactgctggtcctgcgtcttttcgtcggaggggtcctgtccctggcagggccgagggaagagtagcccgtccagggagataggtatggcc

SEQ ID NO: 334353 - DNA, 874 bp, Homo sapiens
  chr11:101452974-101453848
  hyper
cgaaagggcaccgcagcagggcttgaggctgggcagccctgacacagcacccatctatcaggagggtctgccaggcgcctatggggtggaatcctccctccaactaaagctgtttatagagctgagaacctcgggaaaccgcttgcgggtggatgtgacaagtcaggaaacttgactacccaatcacccaaaggggcaatgggacagaaatgctatctgcccgctgcacatgtggtcacagcggtgtcggggaagcggagtcttttcttctggagtccactctgcttactccctacctcccctcccgccacccacccagctaaaaaaaaaaataccctagattcataaacaaaagcttgcagttacccacagcccaatacaaacgacccgacgccctcacttctatagcccgtgagtctcccagcccctaacaggctcgtctccccagacgccccgggtgaaaaggttcgcgccgccggtggagagtcctattggttctatttctgtcttcactccaaggccccaggaccggggagaggtcctggtctaactttggctgtcccacggtccaaggacctcagcgctcagcccgaaacgctaagccaagcgtggagaccgccgggcgcacccagcacccaggcagctccaacccttggagttctagtcatctctcccccacataggctaagagtcacccgggcgcacatctgaatcagccccctgttcagatcccgcctgttacgtagcgatcctgtctcttgtagagcgcaggatgaaggggtctggagaaatcgaccacccatctaatcacctgcaatggtggtgttactatgcggtctcactctcgtgggcaaacatatccatgcgtacctac

SEQ ID NO: 334354 - DNA, 349 bp, Homo sapiens
  chr11:101918143-101918492
  hyper
acgacggccgccgcgtctccatggaaacggcccaggcatccacccagccgagagcacgatggctactggggagctcggggacttgggtggctactacttcaggttcttgcctcagaaaaccttccagtctctgagctctaaggagatcaccagccggctccgccagtggtgaggaaccgaggcacagggagagaagaggcccttggtcttcgcggctgtggaggcgcaggccgggcgtcgaggggcccgcgcgggtcggcgccattctgagtgaaccctgaggcttcctgagtgaaccccgaaccacccgggaagggcggatgctgtgggtgggatcggttatcggtgc

SEQ ID NO: 334355 - DNA, 1745 bp, Homo sapiens
  chr11:101980831-101982576
  hyper
cgcccgcgttctccgcagacaccacagttcggacccggattggacccatcgtttgcggttcgcggggcagaatacggggcacgcttcgggcccctgcccggctgagcgcgggcgaagggcggaccgggccagggcgagcgggtcacgtgcggccgggagaggcgccgcgggccgggagtgtgcaggaatgtagcaacttgcagcgaaaagtttccctgcgctgccggccgggccgcggtgcgggcgggcgcgcagaggaaggaagagccgagaggaggcggggccgcggcggcgcgggcgggcgcttctcctaactttagttttggcgtttgaggcgagtttctgtctcagtcgggcgcagccgccgccagggaaaagaaagggaggaaggaaggaacaagaaaaggaaataaagagaaaggggaggcggggaaaggcaacgagctgtccggcctccgtcaagggagttggagggaaaaagttctcaggcgccgcaggtccgagtgcctcgcagcccctcccgaggcgcagccgccagaccagtggagccggggcgcagggcgggggcggaggcgccggggcgggggatgcggggccgcggcgcagccccccggccctgagagcgaggacagcgccgcccggcccgcagccgtcgccgcttctccacctcggcccgtggagccggggcgtccgggcgtagccctcgctcgcctgggtcagggggtgcgcgtcgggggaggcagaagccatggatcccgggcagcagccgccgcctcaaccggccccccagggccaagggcagccgccttcgcagcccccgcaggggcagggcccgccgtccggacccgggcaaccggcacccgcggcgacccaggcggcgccgcaggcaccccccgccgggcatcagatcgtgcacgtccgcggggactcggagaccgacctggaggcgctcttcaacgccgtcatgaaccccaagacggccaacgtgccccagaccgtgcccatgaggctccggaagctgcccgactccttcttcaagccgccggagcccaaatcccactcccgacaggtaacctcgttgcccctctccccgtttccccgtcgggcgggcctcagaccgggggggcgctcgggagccgcggccgccagctctggtcaggggaggggggttgcgggaactctagctggggtgggggtcccgaggcgaagtggaactggagtcgtccactccgccgcggtgaccagctccccactcctcccagagtccggggctgagatttgtttttcccttctgagtttctctctgcggttgcagccccggggggcgtgctttccctccttcttcctttctttcttcccggggttcccgagaggttggcgggagtggaggaggggtggggaggaaggaagggggtggggaaaagtcgggcctgggccgcggtgggcttgcacaatgcgcgcgcctccgcgcgctccgcaccttcgctcccgccgggccgggctgggaaagggggaggggggcctctggcatttgtgtgtgggtgtgttgccagcggcggccgagtttgtgaagttgagccctgggcccctttcctttgcggcctctcggtccacttcagtctcctgggggagtcaaataattgttctcttgttttccagtgttgattagaggtgggggtagaaccggtccatttagttttttgctctttctttccttcccccctcccgtttcccctccccctccc

SEQ ID NO: 334356 - DNA, 986 bp, Homo sapiens
  chr11:102962175-102963161
  hyper
cgatacgggagtaggggatcgagggtcggttgtggggtgggggtgggggtggggggaagcgcaatttacatatgcatctgttccccaccctgcagggcacgtagactcttaacgtgggcggctcttctagtctctccataaacgccagcgtgcacacactcgaacacgaggtcgggtcgggcgcggagactcgcggtgttcggcacctacagcctagctcgatcaaaggggcctcacctgtctccagccccagcccggcaggccgggcccgactccttttcctccagttgtccagcaaaggagggaggagggaagcttgaagggtggggggagatggtacctggagattttacactttttgaggcctccgtcttccgctactgctgctgccaccccaggggattttctcttcttcttcaccggcatcttccgccctccccggcagggtgggcaggggagccggggaagggggtccctgtccgctggaagcccctcagcgctggcacccagttcccagagacagcagcaagcggaggagcagagtcgccagcccgcaccggcgcggcccagcccggccgccgcccgctcccaggtatcctcgtcgtctttctctgaccgggacagggctggctcctcgccggtggacactgcggttcgttctcaccgggaggagataacgcggacagcgcggcagctccaccagtcacagcaagcaagaggctcagcctaacccggaggcgaatcgctgaggcccggaagtgacgcaatcgcggagccggtcccgggaaggggcgtggttccggttagcctctgccactcgtaggtaggccaggcagagcgaagctgtctgacccgtcgactgcggcagtccgcggaattcttgtatcctgtccagggtatcctgacctttctcatgaagcttctaccgcgctctgatgctggcagtcaccgccaaaaagtgaaactactaatactttgcagttgac

SEQ ID NO: 334357 - DNA, 1109 bp, Homo sapiens
  chr11:104034057-104035166
  hyper
cgcacgatttctcctctcactcgtaaaaataaataaataaataaataaaatttaaataaacgtctatcacccagggaaagctactcttgactccttccacctatcaaaattgcctaagaaaggttgagtctgaccaaggggcggcgcagcttgcaactttcgccaactccgggatgaggcaccgcatcctggtaccagaggcttggacaccaaaatgacttctctagggtgcagcaaggtgagccacctggcttatcctatccccatcagcacgcgtcccacacctctcagtcccattccggaaatggagctctctcaggactggatacaggcaggagacctccctccccaaacaatgcattcagcccgagttcacattcaagattcaaaaagaaaggggaaaaacatagaaagaacaataacaatagcaaacatgatttttttttcagttaaaaaataaaatgagtctcttaccatctcgcctgaggttggcgttgcgcaaagctttgatggatgcgctctgcggggttgcagaagtgtcccgacagctgcaaaagtttgcgcagattagagtgtagacaaagatgagccggtgcatttgggatcagcgactagagacagcgtcgctccaagaaaaagccgggttctgctcccgggaccgacgccgcgccgccctgcgctctcgccgcctgcgctcgccctgcgctggcccgggtcgctgtgctaatcgccgagctctccccaaacttcctgcatgctgaactttccgagcgcgtgtgggtgccgcacttccttgtggtgctgagctgataaatggtgacgggacaaacaacaggttgacgtttgtttgttcgccccctccggtggccggcagctgcagcacaggctgcagggggcgggcagcgccgaatctagcggggcaggcgagcggagcagcagcgttctccagccccggccgcggcccctgagaggcgcgcactcgggctcagagcggcggcgcgagcacctcagctccccagtttcccaggccgggcctaaacctgctctgccactgagcatgcccagtttaatcgccggccgggactcttcccaccgccctgggctttacc

SEQ ID NO: 334358 - DNA, 1408 bp, Homo sapiens
  chr11:106888298-106889706
  hyper
cgccctagcctaggggatcctctgtcgccggagccactggaaccctaggccgtgcagggtaaggccgggccgccccccagcggtcgggctctgcgctcgcgccccggctcgcccagcgccaactttacagatccgcgttctctcccccgaaggcggtccccccttccgccccccgctcaccgagggcgccgtcaggcggctgatgctctcgcccagcgagtccaggttgacccgcctccggcgctgcaccctcctggccccggcagtggcagcggcggcggcggcagaagcagccggggtcggggccggggcggcggcagcggcagctgcggccgggctgggctccagcggcccgggcgggctccggctgccattccagcagagcctagacagggggcactccccctcctcctccgggctggtctccaggtagtcggagcccagggagctgaaggactcggacgaaatcttccttcgagacatgctgccggcggagctgcagcggccgaggcggtggcggcgaggacgcgagcggcggcggaggcggcggtggcgggaccggcaagcgacaacgttaagcgcgtcggggccgcggggcgctgcggtcgcgcccggcggggcgggagtccccggggccgcggagccccccgagccggctgctcatggcgggaacttggggcgccgccgcaccttggggcccgggctcggcggcggcgccgggctgggctgggggccgccgccgcctctgctgctgctcgcgcggcgccgcctcagcgcccgcctcggcgcatcgccgtgcgccgcgctcccgctcacggggaggctccgagagtgtgtgaccgcggtcggcggggcggggagggctgcggcccaagcagaaggggaggcagaggcagaggcttctgccgcctgcgcgcctatctcgccccctttccctctctgctcccgcctctctccacttgctgccctgcctccctccttctccctttatccccccgcccccccccatgctctccctccgcgggaatcacgtgtcgccatcatactcattgggagtctctgcctcgcctgtcgccacgtttcaggagcaacgaggacacttcgttgctgtcctctgcgcgccctccctgctccgaggaggtgcgcacaggagctcgggtcggactgagggccccaaccccaaacgccttatcctcggccctcgggagcagatgggtcccggcggcgctggtggggagaagggctcggggctggggggcgagaggcctccccctggagccaccttggggaaacctgacagtgtgaagtgggggttagggtccatgttgtcctttctccgagtttatttaggaagttccgaggcaaaagggaaaggccaagcgtccagccagcccactccagaggagac

SEQ ID NO: 334359 - DNA, 1333 bp, Homo sapiens
  chr11:107461570-107462903
  hyper
gaacacaccttgcccggactgtctgggaatcccattgacaggtcatctcaggttcaccatcttcctgtcgtgggctcctccagggaggccacccgggagcaattaaactgggccacaccagccacctcccacagcagcggggtccgcagatttaaccctttccccccagattccggcactgggtgccgcgctctctcccccagcaccgcgcccgcgcccccggctcccggactgggcatgctcagtagccgcccgcttcgtgctcccagggaagcctctgcacgccctcccccgctgctctcggtcgcctcctcgccgccagccgccccgggtgcatcccggcttgctccgctccacgcgacccagattcctgccccgcccccgccccttccgcgcccgcagccagtgcggcagccgcggccgcccctgtccagcctcggcgcccgggaccgagcgcgtcgctcgccgccgcggagcgcgtagccggagcgcctggggaaggcggagatgaagaccacgccgccgcgcgccgggagctgctgagcctaccgccgccagagtccaggtgattggcgaccccagaggagcctagggagtaggggcgaatgcccttggggaggagagaggtgcggcgaggacgcgaggcatcacgcaagctgcgctgtgcctgggaggcagcagaaatgctaagcatcgggggcagagagggaacgggaatgaaagtgcactctgccttggtgcaggggctccggggtcacccaggacagtgatttccccttctatcctgtcctcccaattaacacccgagaggctgcaggtcggcgcgagaggctgtttgcatctcggcccgggcgtaggtcgcctagcgacctaacgccgagggctcggggaagggatcccagacagagccaaaatggaaggcgggacaagggcggcctggctggggcgaggggctggtctgggtccctgggaaccccttgccttgtgggcttcggtctccagggaggagctaggcagccgggctgcggggccgccggactgtggggtcctccgcgcagcgagctgggaggagcggtcggctgggctgttgagctgcgcctcctccaactgctgggaaactccgcacttcaatattggagcatctctttcccgggcaggtagaattggacagccgagtggggagtgacagctgacagctgacggggctgttaaaagcagagcagtggagtgtggtggtggggtgagctgttgtgggtgcttttttttgttttccaagtgtgggtacgggctgttctgactcagtgtttatgctcaacctctaagcggcgagttc

SEQ ID NO: 334360 - DNA, 1154 bp, Homo sapiens
  chr11:107798898-107800052
  hyper
ttggctgaccctcccggagttgagaccttgcttcattttccttggttgttgctgctgtcacgtcttcccgccacgcccactttcctgccggcgcccagtgagcgttgagggagagtgatttgcagccggtcaggggcgggagttcgcggcagcaaacctgcttccccctcccacgcgccaccgcccccgccccgcccccgtccagaggccccgcccctagccgggcctggccccgcctctctctcccgagagggcgggcaccaggcggcggccgcagccgcaggaatatgctggaaggcggcgggcgggcgcccgcgaggtgctgaaaggacagttcccgccgccgaacttagcccgcgggtggggcggcccgggagccagcggggcacgtgagcgatggagaccatctggatctaccagttccgcctcatcgtgatcggggactccaccgtgggcaagtcctgcctcctgcaccgcttcacccagggccgcttccccgggctgcgctcccccgcctgcgaccccaccgtcggcgtggacttcttctcccgcctgctggagatcgagccgggcaagaggatcaagctacagctctgggacacggcgggacaggagcggttcaggtagggaccccggggaccttgggcaccgcgccgccccctcagcccgcccggacgccccttccccaggcgtccgccccgccggccctggtcgggagaggctctggcccttccctctcgaaagtgcaaacactccattctcgcttcccctttgcccctcctcttccagggacgacttcctcctccgcaatttctcacttctttctttggcgcccatttcctgcgccccctttccatctttcctttcccgcctgaaccggggtcgtcctcgccgccccctcttccccaactctttcagcccctgtgggtatttttatcccctccggctccccggctgccttcttcccaaactcggcttccctggctgcgcacagcatgacccgaccaccctcctccaagcaggcgccccttttcctaccctaacccagcggctcccacgctgtgtggccggggagaaccgcgagggagggttcccagattcgtgatggatcctttagcttcacagcaaggagcgctccaacccaggttcctgca

SEQ ID NO: 334361 - DNA, 1257 bp, Homo sapiens
  chr11:110166501-110167758
  hyper
cggcctcaagggcccgagaaagttacagggctccgagagctgcaacagcagcaggtagagctgcggccgggaaccgcggccctggcctggcgggtgcgagcggcgggagcgactggcgccccaaagcctgtcatgcaacatcccctttgccactggggcggaacgcacgctctctagtaatttaacacccctcctttcaaactggaggccggggaacaagttctaataaatgtaaaatcgaattctacctacgctgaatatctggattttcaaacaacccttgggaccatgccagcccgggcccggggcccagtccaggcagcgggagcccaccgtccccagggcgctgggggtccgacaccggcgctgaaggcagactccgcgccccgaggaaaggagaatcccgcggcggcgaaggtcgactttggcccggccaggcacgttcgggccgcggctcagccacgactcgggcagggcctcgcggcccctaccagccccgggaggagcctggccggccgggccgttaccacagtggcgcctcggccagctgggcgcgagcggaggcgcgccaagccctggcggcggcgccacggccgggcagcacgggccccgcaacttcgcgccgccaccttagcgtctccggaggaaccgggagcggggagtgggggaagggagggcgccgcgccttacccggagagcgggcggcttctgcccgccggcgtgtggctggggcgctgcgcggcggcgcggctgcgacagggagggagaagcggtggtgcgagcgctggcccgcgggagacgagaggcgccgccgccaccgcagacagctccgcaatatggccgctcggcgcctccgcgggaaaaggcggggctgcccggcgcccccccgcctccccctgccggccggccgtcctcgcgccgcggactgagcgccaacgccgccgctgggggccgcccccgccccgcccctcccgcaggctcgcagccgcaggcctggctccgggcgtggccgggggtcgcggtctggggccggccaacgcgaggtgggtggctgcgggctcgggagcgcccagggaaatagggcgaatgcgccggagggtcgagcccttccagagagcgctgggctccagctaaacctgcggtcgagggaagcggagccgcccagcccaaagctcggagtgtgcccgccgcctccccaacgagtggaaacttgaaactcccgctggtgccagcaaactcactgagggcgttgccgtc

SEQ ID NO: 334362 - DNA, 1832 bp, Homo sapiens
  chr11:110582246-110584078
  hyper
cggaatcatccaggaccctggtgtggggggcagtactccccatatctgccccccgaaaactgctatggagcagccgcgcctcggcgggcaggtgagggggccgagcccaccagcgccgcagccccgctgcctaccttcttcagcgccggctgccgctcccgggcagacatcgccggccctgactttggggctgacaccgccaaagggcagtcagtgctcgcccaggccacttcgggaggcccaggggcacggcgaggggtcggggaaaggcgatcgcccactacagcccgcgcgcctagactgagggaggagccgggctgcagaaccggcggcggatggagacgggagggaggctgcgaggtcgctcgaggagagactaaggctctagaaacggagaagcgggcgctctgcgggaggcggcggcgctgccgctggccgtcaagggcgggaagtgttctgggactctcattaggggccgcgagcctcgagcgtcaaattcccgcggcgtccgcctagcgcgctgctgtggcgggcgcggagggcgcgcgccggcagtgggggctgcggcggcggagggcacgggcccccgctcagcgtcctcaccttcttggtgcagctgcctcccgcgagccgagacactcctgtcagggaagaggagcgccccggctgtccccctagagtctcctgctggggggacatcgcttccatgaagaaaatcttcaaacaaatcccagcccaggaggaggctacacgatcatgtccgcgggctgccggccggaggggcgaggacgcgcgggcggaggcgcggctgccgtgctcaggcagggagccgagctccgggtgctcgccgcgcgcctcccgtcggggccatgtacctccgcctgcgctcgacaccgcgggctggaggcgagtgcagcggcgacagcccgtcagcgccgcggcccgccccgcctcgggcccgccccctccgctccgggcgccctgcgccggggcccgcccccgcagccctcctcagccctcctccagcctgggccctcctagcctcgtcccagcctgcggcgcgcctggcgggcgtctctctatatatgttagcacaccggccaccggctgaccttttcggtctgtgactccgcgtgggtgcagcccgcaggagctcatcggcctgtgtcacgcacgggggcctctagtgcacggacacgcgcctctcccgccacctgcccactcccaccagaccccatcccttcccgcgccgtgcccgcggcggaaggcgcccctgcagcgcgtgcatccgcggagcggtggcgacctcagcctgagcagaggagttgcagtgattcctgcctcgctttcagcggactgcggagggaatcccccaccccaccccactggggatagggtggcacgtcgcagagtgtcgcagctgtacaaatttggaagcccacagcatcgcctgacctcttgtgcaatcccgaacgctagcctgttcgggtaaccctgagtgggcttctgcagccggtcatgtcagcggcccctgcacatttgcacccgcggtttccgctgtctgcaggctgcagagacgggggcattccaaacgtgaaagagcaatgaaggaaaatgcagacagagcgaggacgccgaaatttggctaagctattgagaaggctacaatatgtggaagtgtttatcagatatctgcgccgagagcataacttcctgtcagcccaaatagaggcaaaaatattttaaaggccaaagaataatcagagggagaggatttggagctgacccgcgttgagctgagtgttgctgcactttgcggggctggttgactg

SEQ ID NO: 334363 - DNA, 764 bp, Homo sapiens
  chr11:111169520-111170284
  hyper
ttggccgctccggacgtccgcgtaccccaggcccccgcccgccctcccacgtatccactgttgtgtcctgagacacgcggtgcggaccctgcgcgcccagaagctgctacggggggagctagaggctcacagtgagcctgggacgggggcagagcgcaccgactgcactgagccgagctgtggcggtccctgcgcggaccccgaggggcgcccgctgcccgcggagtccggagccgatcggggaacggggtggtggggctgcggtaggctggagcgcggagagggcgcggcgcctgggccctgcgggcggggcacgggattccctgggtccgggctaggaagagcgcaatctcctttcctggggagaccctaactcctggaacccggcttgagggggatccctgctgtccagctgcggtccccgcagtgaccaggcgaggcgctggcatcctggcactatctccaggcgtccaggctgaacgcgcggtcaccctcggccgccgcacccagcgcacttcccggcgcgattcctggacgcacactgcagggtagtggtcagggccggagccgccccggactcctgcggccacctccaccttgaaagctcgcccggctcggcttggcctaacagccagtccccaacctactcactgcggcttttcggggcccggggctgaggctgcccctgctcccagcgctcaggggtccctcccagcgaacccctcttgagcgcgcccgccacctcccgcgagccggggcagtcc

SEQ ID NO: 334364 - DNA, 721 bp, Homo sapiens
  chr11:111383170-111383891
  hyper
cggggttccaaggacggttggtcgcccccgccacagtcactcggccgctcagagcggcggggcgcacggggtcgagagagccagctctagggtttggggctgggaactgaagcctggcgtgaaggaagtgggagcccgggccgaggaggcgaaggggaaaggaaaagcgaggggaacctgagcgggagggccctgagaggagcgggaggctgcgggaaggggaggcctggcactcctgggggtcatgggggtcggggcgcggctcccggcctgggagggcgcgggtcctccccggcagcgccgcccgctggcccagctacgcgtgttgtgcgctgcgaggccggcgggggtcccgctgggcccgggggtgtcctcgggggccgcttgcgcccagccatggtagggcgtcccccggtgaaatggggtccgaggcgggccccgaccccgcgtcggcgctgcggaccgtccgggagctgcagccgcgggtgcccggtgctcggtttgtaggcagtgtcattagctgattgtactgtggtggttacaatcactaactccactgccatcaaaacaaggcacagcatcaccgccgcccggccgggaagaagacgccggctcgggcagcccgcagccttcgagagaagatgcctgagaagcgcggcgtcggcgtgggtcctgcgcagcctgccccgcgagcgcccgctgcaagtgcgaggaaacccgc

SEQ ID NO: 334365 - DNA, 1575 bp, Homo sapiens
  chr11:111411097-111412672
  hyper
cgcacagctggcgaacttggctaaggtcagcgggagaggaggggtgagatgtggtgctagttttaggcacactgtgctcgttatcagattgcctaggggcccgactgaagtattcctccgcccagcgcctcgggcaaacgcgggatctcccagggaagctcggagggggacagggagctggttcccctctgcgactcgcccctctctggctggccgagtgtctggcgccaacctcgctggaggaggctgtcgggggcgggccagccagcggggctgccctcctcgcagtgacgtcccagggggcggaggggcgaccgactgactccgcgccctcccccccgcctcccgtgcggtccgtcggtggcctagagatgctgctgccgcggttgcagttgtcgcgcacgcctctgcccgccagcccgctccaccgccgtagcgcccgagtgtcggggggcgcacccgagtcgggccatgaggccgggaaccgcgctacaggccgtgctgctggccgtgctgctggtggggctgcgggccgcgacgggtcgcctgctgagtggtgagtgcgcgcgctggggcgggggctggtgccggggtgggctcactgcaccccagctgctgctgaccctcttctgggtcgccacgtatgggactagaaggccgtcccatgccccactcccagacgcagcccttcggagtctcttgcgttctgggggcagtcgcacggcgtctgagacccacgccagttcccggagctgcgcagttccctgcgcgtcctggaacgctcgaagcccgttcccagtccagagttatgggggtgggttggagaatgtaggagaggtggggcagtgggcaaacctgccccagtgggtgccccttcggcccgctcctttacacgcatcgaatcagtccttgggaccacccccgcggggcaggcttgccagctggcccccgcctaccgcccgctccgggaggcggccgcagagacagcggggtagggatgctggatccccggtgccgtgggaaccctgcctgttactcctcgtctcttctgcggggttggatggctgggtcgagcgcccggtatgagagcgcttagagatcgggaaagaactccagttagtgtgggacgagccccacctgactccggggaatgactctctgcttccttcctcctgttgtgtcactgcagcctcggatttggacctcagaggaggtaaagtgctctggcttctggcttctttcagttgttctgcatgtcggggggagaacatccgtgcccttttctcagatcctttttgcgggtgccaacagcttgaccaaacgggacagaggagactgggaacctcctctactctggcatcctggcttgcgaaactaatttaaagaatgtaaagttggtttcaggatgggggcggggcggcaaaagaggtgggaagctgaattgagctgcttgggttagggctgcgtgggctctgtccttggtcgcggggaacagaaggccctcccacccttcgccttcctgcaaatgagaagagaaggacacttcctgaaggcaggagaaccagataggcccgc

SEQ ID NO: 334366 - DNA, 880 bp, Homo sapiens
  chr11:113345433-113346313
  hyper
cgagattgtggggagcggcctccctcccgccctccgatgccgcggctccgccgtgctgccctgggcgccccgcggggaggctgccccagctgcgcccgctcgtgctcggggagaggattcccttctaagtggcgaggaggctactgagaaggagggagaggggatagcagccgcgggctccagacgccctctgcccccgcccgacggggagcccatgcagagccggatcccaggcgggcgctcccgagcaggcggccaggagtggccgcacaaacttctggtcctggcctcgctccccttggaggtccctcctcctctccccgtgacactgagtcgcccgccgctccatccggccggtgcttaccttcaagccatagggcgcccgggggcagagacggcgccggctgcttgaggcttccagctcccgccgcatccacgcgcggccgcccctccggcagccgtccggggccgccactctcctcggccggtccctggctcccggccccgccgcgccgttcagagccccggcgggcagcagctcggccggctctggcccgcggggagcagtggacgggccgcggcggggcggggcggggcggggccgggcgcggggcgggcgggcaggagggagcgcggggacggggcggaggcggcgcggtgcgcgcgtgaggctgccggttcggcactgaagctggacagctctgcggcgcccgagcgcggggagcgcgggagggaggtgccccggtccccgcccctgagacaggccccgcccccgccccccaccaaaggagctgtacctcctcggcgatccccggcctgaacgggtaggaggggttgggggattccgccatcccttgttttgaggcgggaacgcaaccct

SEQ ID NO: 334367 - DNA, 108 bp, Homo sapiens; identical to SEQ ID NO: 202725
  chr11:113746574-113746682
  hyper

SEQ ID NO: 334368 - DNA, 500 bp, Homo sapiens
  chr11:113929613-113930113
  hyper
cgaccttggcctccagcaatcgcgacagctaaaaacgggtgtctcgcttcgacaatagatccccgcggaccttctggcacctggttcactagcgcccgcgaactctgcctcgggagacttattgaaatccggatgctcaagccgggaggcgcgcagtaaccaggaggatgagagggccgggtttgggctaggaaagcggccttttaaaacagatgtcagggggactgcagccccgagccatgagaaaaaagttaaaggcgagatgacacgcactgaattggggcaaacattggaagaggagacaaaactgcgtgcttgagcaccggggtgcggggagggggggacaaaacccgtatccagtgcaaattaaaatcttgggagtaggtgggggctgctgcgcgcccttcaccctcagttcccctattaaggattctgagtccccatgcactcctgtcctctggctccttccttcctctccgctcggccggtgagaggcggcc

SEQ ID NO: 334369 - DNA, 1436 bp, Homo sapiens
  chr11:113930326-113931762
  hyper
cagcactaaagatggagaggcgccggggccttgcaggggagggggctcggcgttgacgtgggacgcggcggaggcgcagcagccggtggtgatttgctaacctcgcagcagagaggagttgagggcgatgagagcgggtactgcgaactgccgggcgatgctgtcgctgccgccgtgatacggagagcaacagttccccagcaacacccctccccgacacaggcacacaccccccgacaggcacgcacacccaccccacagtgcccggctcggctgcggtgagtgaggggccgggaagaggcgcaccgcccagcgagcgccgcgcgccggggcttcccggggctggagaggtctggggggcgcgcgctcgcttcggccactcggccgctgggcttgtgccttttttatttggcgtgttcccttcctgccgctgcagccgtcgccgccaccggttgggggtcggctagaagggggagccccggctgtcagcctgggcgcagctgcctccccagcccttcctcttcagggcacggtcggggtgagaggtggggggcgtagcggtgtgcgggggctgagggcgtgagcagaggggtcggggatccggaggctttgtaccgccaggggctggcggagcaacagagcccgtgggtgctcttatgtatgcggaccggtgcgcgggcgcaagataaggttgtggtttatttatttgtgtgtttattcgccggccggctgggaagctagaatcggaggagctgacgagtagatctgggggcggaggggagcaggactgggactgcttacgttttgtttctctttgagaaaacgtggtgggctttttcttgattggacttgatccccaccccccttttgcaggggagggagggaagctccagagggtctgcagcgctgcgggccctcctcggctctcggcgggaccggcggtgacaccggagctcgccgtgcgctcccggccgctctcggtgggtgccggtctctgcacctgatgcgttcgggatgcctttcccaccctggcgcgcccgccgctagctcgcacagcgcctcgcacactcccgcacgcgcttgaaatgcgcacggtcccgccggcccgcggaaccacccggacgcacggagcgctccgcaccgactcgctcgccgcctccccgagacgctcgcaccgtgcttgggccgggcgcgctggccgctggcgccgctggccagaggcctgggacccagccggtcgctcccagggggtcacggccctgggtcggagagggagggcgggcagaccccttctcgcctttcctcccacaactcgctgcggggcttttgtgcttccccttcgccgcggggcgggtccgcctcccctgccgctctcgccgcggagtccagcccgcccggactgtcgccgttcctccccgtctctttcgctttccctc

SEQ ID NO: 334370 - DNA, 2832 bp, Homo sapiens
  chr11:115373363-115376195
  hyper
cgctggaattgacgctgctgccagacgccccccaataggtttcccaagccgagctcctttgcaagcctattttgggggcaagcagccaacccggcgtcccccaaatctcaagctagcacccccacacatcccccgtctcctacagcgtgtctcctgcggtgtttacataactgtgtgtcctctagcgtgtaaacaaaaggcacagcccaagcggagaggcgcccctgaagcagcaccgtggccccaacgctgtgcccgcccgggcctggggctccgcaggtgggggctgagctctcggcgtcctccgccacttgttgctcccgggtcctgcagctctggagctgcaaggaggggctttgcaggctcagagccctgctgcatcccctcctgcatcgccgctcgcaccccgcggccccgtgccactcggtcccggcgcccgcctggagcctgcagcaggggccagaggacgccgcgcggctgccaagcgcggcgaggtggcgggaagggaggctgggtgcagcacagccggcctctccgctgaggaagagctccggctcccttttgttagcaaaagcaaacactgccctcttctttcccgaccgcgccaacgcgcccggcacacgggcagccacacatcgggctccagccgagtgctcggtgtcttcagggaaggcaccgggcgtgcagagccgcccctgggcaaattcccaagactgctcttcacgcagggagcgcgcggaggcccgcagggtgcccgcctggccgcagaggccgcgacgccccctccgccaccctcgggccgccgaaagaacgggcagccgggaaatcccgtgtccccactcgtggcagaggacgctgtggggcgggcgggctgcgggctcccggcgccttcccgcagaggcggcgacagcggccgccccccccgcggggccgggccggggaactttccccgcctggagccgggccaaaaagacccgcagcagagccgagggggcggagggctgcgaacggccggagggaaacacgagaggcgtgcagtttggggacaggggagaaaggcagagcgcgttgggggaaggggcaggggagatcagacaagtctggggatgtcctggggaccggggagaaatcacgccgcgggcggctgggagtcagccaccaggaggcttcggggatggagaactgggggggccctctggagaggtgggggcgaatggacagccctgggaggtgggaggacctgcaagttacggggagaacggcgagtttagaagggtccggaagggttgaggttgtctttgaaccatccccttcccccatgctttacagcccccgggccccccattctcactccactctgcaccccgcgccaagccggggagagaaggtgtgggtgcagccatccctggggactctcattcacacttagccgggcaggggagaaggggctcacagatgccctcagccccttccctctcagccctgagtttcctctccacactccctccgcttcggatgtaggaagtggggggaggttgtcatggaaacgtttcccccctctgtggccaaggctactggggtgccttcggagatttaggggccaaccggtcggtgcccacacctacctgtggggatcagtgccgcggcggagaagagcaacagcagaagccggagccggagcccgggaggcgccgccgccgccgctgccgccgcacactgggatccgctcggcagcactacactcgccatgtcgggcacctgcctcagactggcggcgttggctgcctccggagcccgagcggacagctaatgagatgctaatgacatgcgctggaggcggagtccgggcagaccaatcacagcgccgcgagcccaacccggctctcggagggcctcgctccctcccccaccccgccccctggcgctggcgttcggcggcgcgcccgcgccacctaggggcggggccaaggggaggggcgtatgcaaatatgtttatgttaaaattcgggttttgctttccccggatcaaggaaaaagtgttctcccgggcgcctggcgtgcaaggactcgggctccagggggcgggtctagcttcttgtacacctttattaggaatgtttatagcaatcgctgtatcagaccgacgactggagaatctcccttaagagggtcctctgtcccgcacaccgagtgcatctggcctagcgaaccagacgttgcaaatttccgtcactcaccttgcaccgaaggaatagatctttgggaacgggggctgtgcgggagtggagagtaagaaggcaggtccccggattgacaaaacaatctgggagaagtgcatgcgtgctttgcacgtccggcggagcgggagagcccgctcaacagcctagcggtagactcggggatagttggagaaggcagccgtagagtcgggttctgagattttccagtcggtctttttgcggcagaatctcgggaaaggtagatcgaggagggtatgctcaggctcctccgcttgtcgagggtctcctccctggttttaatatataggtgtgtgttgaatatatgtgtgaaatatttgtaatattagatatttaagattacacaacaacggaaaaaattagtcaaggcttcaggtgaagagcgggggtggtgggagttggggagagggagtgtggtgaaggcagggtctgccgtgttcctccttcggggctcaaaccctctcactcctcctctgcgcccccagcccttcctaaggaagctggggaccaacaggtgctccgagcttcccctgtctctgggagagcctctcctgctaaagcgacttgcatctcc

SEQ ID NO: 334371 - DNA, 951 bp, Homo sapiens
  chr11:115630443-115631394
  hyper
tcccgcctctgcatcgccgccggccccttcacgcctctaccttgggcgggtttggggtaagggccgcgcagaccctaagggaaggcccgaggtcgccggagctcctcctctcgcggctgagtgagggtctgggaggccagatgaagggagctgctcggctgagctgcggaccagcgcgagagcagcgggcagtggcggaccagcgccagggcagggcaggggtggacagagggctctccccacccttccctcctccagtgaaagtaccagaagagatggcggccgctccgccgagtgtcattaccgcggaagcagcagaagccggcggcaggagcgggcccgagagcccgcggccagtggcctgcgcaccccgcgcccagcgcccccgccgcgggtcatcagtgtcagcgttgaggggtcccggggagcggttgcagggcggcggcggcggccgggtcatcagaagcacagtggagccgccccctgctttgggaggagcaaaagagcctctcgcttgcctcccgctcgagctccttctcctcttccttttcctagcgcttctctccctccctcggcggggtccgcagagacagctgggcaggcggaggctgcgcgcctctcgcacctccacgcccaccctcccgccgcccccccctcggcctgaaagatctgcgtccacaccaccctgcacccagggcccgtcaggttttgcagaagtttgctgagggtcctcacagggggtctcccaggggaaggggtggagggctggaggggccgcggtgggaagaggtggcagacgccgcctggcaacggagaccctaccctttctagaaattcagaacgcagagaaaccagtgcccagccctgctcttcagcaaacggtgtatttcagcccgagtttccttccgggggtttggctgtgagtgtgtgtgacctcccagatggcggcac

SEQ ID NO: 334372 - DNA, 191 bp, Homo sapiens
  chr11:117746423-117746614
  hyper
ggagaagcctccagtagccacggtcccgcgagcgtgcaggcttgcagcaggtgacgcggcagacccatgtttccagcgaggctgctcccagctcccaccctcgggtgcctcctctaccagccaccacttgtaagagccagaagccagcgctgggagctccaggctgcacacccaactctccacggaagccc

SEQ ID NO: 334373 - DNA, 157 bp, Homo sapiens
  chr11:118662851-118663008
  hyper
tgcgccgggagaggacggcgggggaccggactgtgagggcgtatcttgggggacctgtctaggaggaaccgggaggtgaaggcacaactgggggtgaggcgggggcaggggccgggctgtgagagtgcgactgaggggggattactccggagagcac

SEQ ID NO: 334374 - DNA, 66 bp, Homo sapiens
  chr11:119145611-119145677
  hyper
cgtatgacgaagtgaaagctcggctccagaaattcattcacaaacctggcaggtcagttcaatgac

SEQ ID NO: 334375 - DNA, 121 bp, Homo sapiens
  chr11:119227108-119227229
  hyper
cgggtggagatgggcgccggctcctccgcggcgcgggcgtccaggcggtgatgctcccagcgagctccagagggcgctgtcccctcggaggcgcgggcgctgcggcgggaagcggcgcagc

SEQ ID NO: 334376 - DNA, 353 bp, Homo sapiens
  chr11:119234722-119235075
  hyper
gggctttggccctcgcttaacgttggcagcgggggcgcggggggagtccccgcgcggtgccacagtccggacgccgaggccggcgagaccgctacaggacagcgtccgcggcgcccgaacgcgcgctcctccgcctcaacctccccggcgtgcgccgccaacagcccgggtcccggctctcgcgctccggccgactggcggccccgccggcgcctcgggccccgcgacgtcagcgctggggcggggccaggccctaagccccgccccacctcgcctctaccccgcccccggcgccggcacgcggacccgaacgaggcgacaaggtcggtcctcccccgccgggccttccccgc

SEQ ID NO: 334377 - DNA, 916 bp, Homo sapiens
  chr11:119293218-119294134
  hyper
cggcgggcctcatccttaatccatttccgtattccaatcctctcctttcccaaatgagtcccccttccccctctctcatccttttccagctctcccctcccccgtccgcccgccttccacccagtccccgcctgcggcactgcggcttccttctcctccggtgccccgcacccagcccgccgcgaggtcacccggcagattccctctagctcgccatcctccatcctctccccgcagtttcatccgtcctcctccccgcctctgcgagctgggtttggggacgtctgggtggaatgtagacccacaggctgtccttggtgcccttcctccctgttctccagcgccccagccccagacaccagtcccccagcgggcgaaagcccgggagcgccttccccgaaagacatcagggtgccacgcggcccctgccctgcagaagcatccccctcccgcccctgcctggaaagcaggcccctccctaagctctgcgcccttcttccctgggcgccctcggaccgtggcccgaagcctagtgttgggaagtcttgcatgggcgcctgacggcggtccccgagccccaggtcccaccggctccagttcccacctggactggggtcttccgctgctgcagcctcctccagacgcgccgccgcctccggttgctgcacccagctcggagcccgcagttttcaccggggatggaggagagggggagcggggagccgggggctcagccaatcagaggcggagattgggggagaaaggacggcagggtggggtggggggtggggaaggaagagaaggcggtcccgcattggtgtgagagtggcaggttgcggcggaagggggccctcaccctgtggctggcaggcctggccagggacgggagggttcgggaccccggggatcagggtgc

SEQ ID NO: 334378 - DNA, 751 bp, Homo sapiens
  chr11:119455154-119455905
  hyper
gattccctcttccgcggctccgcgcggcggagctcaggggcgcaggctcttagagctgcggtggggcgggggccgcgggacgtccgtttgttctccgcggaggaggcgacgcgccgccaacgaccgcagctccacgtcctggcgcttctgggagccgccccagcgggagccagggagaaaatgaatcgccttgagtgacacaggacatggcagattggatgtttaatttgggtatctctttagaacgccccccacgcccacctcctctgctcccacttagcatccagccggcgagaaagccctgctcctcacaaattgccttgtcggctcggagaaaaatgccagcgtgactgattgctaggtgggtccctccaagtgcgcgggaaggaaccggcacgaccgcacaatgctccttcctacagagacgcggcgtcgtgccagagccggagatttgagtcagacaccgggaaggactgcccgtggaggagggcggctcgtggggctgggggtttgtttaggggtctctcgggtccagagggagggccaggcgaccctggctggggtctggtggctgtggggggcctgcggggcccagaggaaaaggccggcacccggtccgcgagagggggcacgtacggggcgcagaggcagaacgcagcccgcagcagacggacagccttccccagactgcctggagctcggagcccggcgccgaaacctgcagatcacaacctgtcagtcgcgctttccc

SEQ ID NO: 334379 - DNA, 283 bp, Homo sapiens
  chr11:119587853-119588136
  hyper
cgccgaggactgatgctctctccctcttccatcatcaccgccccttcaggactggccacgaggcccatcatctgacccctgggagggtggggaacggtgctgtggtcagggcagaggcaggccgggagcagggggctgtcgcacacgttcccccaaaggcctatccatcacgccagtggagaccatcagagtgctctgccggcccaggacactgatgactctccaggcaccataaagacagggaataaatctgggaagttgctgggtaggagggtgcctcaac

SEQ ID NO: 334380 - DNA, 367 bp, Homo sapiens
  chr11:119598945-119599312
  hyper
cggagaaagtgctttcatgctacatagagacgtgcatctgactgcttccctgcagggcaggcggttcggcttctcaacctctttctccgccgtgccacctcccaccccctttacccaagccgtgacccaacttttctggctcctttcactccccacaatccagtcgtgcccgccatccggctcccagccccggggaggcattggatgggggtggggacagcagaggtgagcgctcttacctgggaggaagaatgcggtcaagccgagagcgagtccccaccagcgtccagcggcgcccgcaagccccatccgagccatcgggggccgggggtccggcgagaggggcggcgagggcagcgctcctcgc

SEQ ID NO: 334381 - DNA, 400 bp, Homo sapiens
  chr11:119612123-119612523
  hyper
cgcctgggaccctgcggggcctcctggaggcgggacgggcacggcgccacctagcggtcgtgggccgcggagagagcgtccctgtccttccccgtgtgggacctgcaaccgccccatagcgcagagtccgggaggctccagccaccgcctctgtcggccccattctctaggtccacagagggtagagacactcgggggaacgtacttttactggggtacggggagccctgccccacggctgtcagctcgggtcgggcgcgccgggtgcccaggaggcagcctcccaccctcccccgcacacgtcgttccagtccctccgccacaaagagaccattgattgggaagagcggccgggttgtggtaggaaggctggtggggacacgcacgcacacacacgcgc

SEQ ID NO: 334382 - DNA, 452 bp, Homo sapiens
  chr11:119613005-119613457
  hyper
cgcctcctgccgcgcctgacactccgcagggcccgggggtgggtgggcaggggtgcgagggggcgtggggctgggcgcgccggcctggggggaaagccccgcctcccggatgtcgtctcttcgccccctactagctcttgtctcctccccaacccctcgccccaccccctgcctaatttttgccagtggatcatcggcctttggatgaatccgcagcaaatggctcattcggggcgggcccgcctccccatccccccagtgtgcggtctcctctccccagcaaagatgttcggtggcacttacggcccctttttaacaccaggcgaagccaatattgttaggaaggaagaactgctgtggcagctgctgcaaagacaaatcatatgcagtaatgcatcacgggctgagggagggtctgagtgtgcggcagggcagcgcgggcttatcagcgc

SEQ ID NO: 334383 - DNA, 496 bp, Homo sapiens
  chr11:120110626-120111122
  hyper
cgccactccgggcgcggtgaggaggtgctgccaggctgggttggagcaggcaggtgttccgcgggatcgagacccgccccggcagcacccccggccccctccccaggtccccagctccatgtatgcaaatcactgctttgcatgggcctggggccaggcgcggggctcctgccagggggcgtggccggcggcccccgccccgcgccgcgtgctcacctggggagtgtggcaatcctggcggcgccgagtgttgcccgggccggagcagcggagcgcgcgacagtggcggcgacggctccggcagcggctcccgcggcggcggcggccgggaactggaggaaggagaccctggcttcgcaggggccccggctggggcagaggcgaggggcctgggggggcgctggctttggccccgcctggggcaggatggtgaatctggagtccatgcacacaggtgaggggcggagggaatgagctctgacaggtgtcactgcgc

SEQ ID NO: 334384 - DNA, 932 bp, Homo sapiens
  chr11:120435049-120435981
  hyper
cgctcgcggggagggggctcgggaatccgggcccgggcaaccggcgccgcatgctaatcagggggcgcccgcccccgctttgcccgtggccctcctttcccgattccccgacgtttcgggaggagtggggtcggagcgcagggctgggaagggtcttaggacccaggaaggagacgggtgcctcccagagaggaccccatcccctccgaggtccgggcggctcccggcctctccctggggtgccgtagcccccctcgacccgccttcccgcagccgcagtcgttcgggcctggaggtggccgggcatcggtgccgacgccgcgagggcagcgcccgcggcgggaatactaatgcaccctaaagggcacggccgccgccgcagcaggtaattagctggaccgcggcggagcgcgcggaggtggctgctggctgcaaggactgcgcccagcctccgcctcgcccctcgaggctcccgcgtgggccggcgggcagtgcgtgggccacaggaagcgggctgactggacccggctcaggacttcgcacaagggcagctctttgtttacagctcctctcccagctccccgctttcctttcgcccaccgcctcccttttccggcgatcggctccgccggctgcgggggggtggggggggtggggtgtcctgtgtagccgcccacctcctgtcccggcctcgtgctcccgctggggactgtttgcggtgagtctgtcgcacgcacgtcagggccgaggcagtgatgcggggcagcgtgggaggacgggctgcggagcccgcgtcatcctgcctgtggggagcgctgtgcctgctctcctgccagcgcgcccagctgtcccggccgccgccacgcgggactgcctgccatgtcgccaccggctgctgacctcattaggcctcatgtcatggaggagccggc

SEQ ID NO: 334385 - DNA, 477 bp, Homo sapiens
  chr11:120894634-120895111
  hyper
cgagaaagagcagatgaggtgtttgtggtaaagcctaagccagtgcagccatccccgtcgccatggcaaccccagcgcggttggggaggacccgctcctccggcgccccctcccattcacgcagcggacgtgacacgtgcggcggggtcacgtgttgttgttgggccgggaaagctgcttccgggtcaatgcaggacactgggctccggcggccagagtgggggactaggtgaagcggcgccgggccggggctggccgggaccaggcccgaggctgagcggcggcgacagcggtggccgggaggggggaggagaggcgcagccagaggagccgccgcagtagctcccccgcctcccgggctgaggggtgagtggagccgggcccgctggctctgccgggctctcgaggcccgaggcgttcccctctggagccgaggcgcggagggtcgctcctgcagggtgctgggataggacactc

SEQ ID NO: 334386 - DNA, 533 bp, Homo sapiens
  chr11:121593326-121593859
  hyper
cgtggtcccgccaaacaaaggaacatgtgtgctgcaaaccatccccctatcacgggagcgcagagctccgccaggagagggccgggcctgcgcactctaatttttcactgcagtttaaacactccgtgaggctctcaggaagcggcgggggtggggggcggccggagagaaggggcccgcgtctccgccgcttccatcaccgccctggaaatagcatctgaacgcgcacggcccgaccaggcttcccccaagctgctaagatttcatttcacctccgacaggcttcatggggactcgctgttaaaagatcactctcccgggatgctgtcgtgggggagggggcccggcactgtatacagctgtcaaaacgtctccgacaggagacgaaggcacatctgcacaagcctgtctcaggctgcggggcacacagggagcgcctcaaacctatcagtgtaatgccgagcggtaattgcattaggattagttatctcctgtgctctgctcattagcccggaggatggctcgcatccagc

SEQ ID NO: 334387 - DNA, 396 bp, Homo sapiens
  chr11:122852385-122852781
  hyper
cggagcacctgccacaggacaagggccgggacgaagtggaggacgcaggcagagtctccaagcctgctcgaaagccggcaaccaccctccgaggctcgaatctccgctgctctctcccgggcctgggctaccccgggcgctggagaggcaagaagacaagctcctgggtaggttgggtctctgtgttggagaattggcagcttggagaggggggccgggagagccaatgacgaggctgccagaggcagaggggagggtgcgggaggctcggggcggggcggggagctgtccgcggtgctgaacaccaccggccgagcctgggaacaacagagcccgcagggttcttgttcctaccaggtttctcgacctcaatttctgccccgtcactgcaggggc

SEQ ID NO: 334388 - DNA, 631 bp, Homo sapiens
  chr11:123172433-123173064
  hyper
cgacttcccggtgtgctgtggcgcagcgggcagggacggaggcgcccaggggcaggcggcagcacgggaagaggccagcaggtggcgcggtcgcccaacccggccgccccccgggcgccgagggaagcgggtcaggggcgtccccacctgcccaagcgccggctctcccaggcagcaggggcggcggcggcctggctggctgcgctgcagagcggagagcaggagcggcgtgggaggaattcggagcactttcgccgcctgcctccttttactgctggttgccctcaaaggagccctctccctccacacgcctttgggccttaccagccgccggaagcggcggcatccatcccagcaaagcgtgcattccatcctctggaaaaaaagtctttgagcttcctttacagtgaccttactttggggactgaaccgttgcgactaagaaaacccctcctcaagtttaatggaacgatcacatgacacgtggttgacgaagccattccctccttgctacttgccttgtgtgatacactgtcacggcccgggcttctggcttggtggaggggacaccaccgcggctccggctgcggacttcgggctcctcccctgagccaggcggagagcgctgccc

SEQ ID NO: 334389 - DNA, 730 bp, Homo sapiens
  chr11:123228762-123229492
  hyper
tagctgcaaggcagcggcgcttctggcgttggtttccgcactaaacttgatggtctgattttaaaggttgattttaaagaaactgtctggttgtatgtccccgagttacactgcagtgctaaatgttggagcgaggcaataccgggagaatccaggctgcaggcttcacccagagagggagggtgaggggaggagagagacggagagaggagagagggggaatgaaaggggagagagagggaccaagaccggcgagcgggagacaggagcggaaaccacagaggtagagtcagggccgacactgaagaaacgtagatgcacagggaggggccaatattagtgtacagagagaaagagggaacacggtgcggtgacacctagcctcggagacagtgggagctccgagcccacggagagcgggggagttccgcttcctcccgccccagcggctcccgccccgcctgggcgcagccggccgtcccggctccgagggtgcagcgcgcccgggcgcagcgcgagtgcgtggagccgggctccagcacgaccccgccgctcgggtttgggtgtcctcaggctccgcgctcctcctcccctcctccagatgggactggctctcctctttgcaaagccaggctcgcggggagacgtggtgagcagtagccagcagctggtgtgccgtggacgccgctgaccgccgcgcgcccgaaccgggtgtccacatgagtgcctc

SEQ ID NO: 334390 - DNA, 1291 bp, Homo sapiens
  chr11:123300826-123302117
  hyper
cgagtccctccccgagggaatccgtgtacagttacactagcggtcgctgccagtgctagcccattcaggatagcccccctcaccccgcccccagcccccgctcctcctcctccttttttgtttttatccagtgtctcgcttcctctctctctctctctctctgtctctctctccctttccctcctaccactgcctcttcctcccgctctctacctccctgcagcgccaagccggctccccaacctggtctgctgaacgcaaaccgctgagagtttgctgcaccgccccctggggcccctggctgccgagtcccgctaaggcaaagacgccagcaagcgaggaagcgcagcggaagaaaaacaagcgggcgcgcgaggggagccccaggagggctgccgagtggctggcaggcggctcccgcccctcccgggtggcctcgccggcggctgacggcccggaggacgcgcgctccgaaaagttagactccgggcggcggcgcgctacgccgcgtcccctcgcgtcccttcctcgctgcgctccgggaaaggaacttgttccttcggccccaggattggggagtgtgccgcggggccgagggtggggaacagccagagggagacgcgaaccaggccgctggcggagggctcagggggagcgcagaggcgacggcccccatgccggcggccaacatgatggagaaccggccgctgcccgccctgcaggtgcccgagccgcagggtgcgcccgagggcagcccggtctggtccagttcgtcgacccccacgcttcgccgccggcgcttcaagatgcgccgcatgaagaacgtacaggagcagagcctggaggccgggctggcccgggacctgcccgccgtcttggcccccggcaaggagttcctgcagctgccgtccatcgagatcacgccctccagcgacgaggacaccccgtggtccaactgctccacacccagcgcgtccccgcgccgaaaacgcttcctcctccgcaagtggctgagggtgagggagcggaaggagtgcagtgaaagcaggtacgtccccgttccgcccgtctccttcccttccctcccgtcctctccagagccgtccagggccccggggcattctgggggaaacgtcctgggggagaacaggagcccgtcaccagaggcgcttctggagggcgctgcgcctggtcccagggatggtggcattcagcttccacgcgtgccacccgctccccaactcagggtgaggggcttcatgttgcacgacacgtttacgtggggctttac

SEQ ID NO: 334391 - DNA, 768 bp, Homo sapiens
  chr11:123524842-123525610
  hyper
cgctcgtttgcgcccagggtaagctcagctcggaagggagtcgcactgctggcctagcagccaggctgtggaagggtccaggttgattcacctctcgcctccccaggatcggttgcgttccgactggaatcctcccagccccgcggctcctgcttcgtccgccctaactgcttctccagctgggcgtgaccccactcccgaagccgccggggccgcccgtctgggctacagaatgcgttccacgtcggtcccgtccacgcccgccctcggctccctggggaggtgcagcggggccgggaaggaagcggcagctcccgttcggccggcgatgtcagaggttggggggtgggtgtagaggcggagccccttcccgggagctcgcccccggatggtgcggggccccgaccctgggtggcaggtgatcagcaacccttctctaggcccccaggccgtgtgtgctgtcagccctgacatgcgcaggcggctctccgccaccaccaccgccccggaccctccccctagtgcacactccccaccccctgatgggcgtgcccctcccaggcccagcgccgcgccgagcgggggcggagccgggagcggcgcagacacttccagccgggatatctttgctcgcgcgctcgctggtctctccaggtctccctctcgcgcctccgcacctcccccgagctcgggcgcaccgccgccctcggctcacgccctccaggcaaacccactccgctcccgcacggacttgccgggtgtagctcc

SEQ ID NO: 334392 - DNA, 191 bp, Homo sapiens
  chr11:124616924-124617115
  hyper
cgccgagcgcctgggaggctcggtaggaggagtcttccacggccccgccccgcccctgtcggtcccgccctcccccccgccgggctcctggggctgtggccgaaaggtttctgatctccgtgtgtgcatgtgactgtgctgggttggaatgtgaacaataaagaggaatgtccaagtgttcagagggtgcc

SEQ ID NO: 334393 - DNA, 418 bp, Homo sapiens
  chr11:124630133-124630551
  hyper
cggaagtcaccaactggtccgtttttttcggtcccagggtccacggagccactgggagagaaaaggagtctggttgggtctgatcgaaggacactgggacagcccaagaaagggacccttccggcccacagccctctccgaggccagagtgagggagccggcaggggccgaaggagagcgaaatgggcccgctccccggggctatttttagtctccctctttctctgagaaactccccccgcgggcttctcacgccccaggggcagcagcactgagccgccgaggagcctactgagccggagagcctcctccagagcccagaagagcggagccgggcgcctgcacgttgcaccggggtcaccagtgccatttaaccctcgagtggctggcgggaactgggcaaccccccagggggacc

SEQ ID NO: 334394 - DNA, 478 bp, Homo sapiens
  chr11:124631503-124631981
  hyper
ctggggaattgacacgaagtgcgtgtgtcaagcctggggaccaggggtatttccccgggggatcttcctcatcagcttgtatgtggggtcggggatgagagggggctagagttaagtccttaagctctttagccagtgtctcatctagcggctcagctcatccggctctgctgggtggggggtggggagtggacagggtgaggaatggttccgataactcaccccagaggtatccaggtcttccgagagatgcccttacctccccccgccatccgcccccacacccaaactgggggctgtccccgacaaagcgagaagtcagcgccagccagtgatgccctggagtgggattaggaggtcaggggaggagggcgagtcgtgggacccagttccgcagcagtggccaaagttctccctcagggtcgaactcaccccatcccgcatcccaagtcccctccaggtccgggtttcactcacc

SEQ ID NO: 334395 - DNA, 923 bp, Homo sapiens
  chr11:124735074-124735997
  hyper
cgtccagaacggaacgctgggcttggggtgcggggcggggactccaactcgcgcgctacgctactcgtgtctcctgctcggatagtgactgtagaggtaagggtgggagggtggagggaggcggattaatcccttaattacgccgtgatcggcgtggcacctgctttccgcctgcccagctcccaggggactccggcactagggggtggagagaaggacgagggaaggaggagggcacgaagaggcaccgaccgtacccaggcgcaccggcaggagagcggcaccgtggctgccgcagcgcgcagaggctgtggaggggcttacggctcccagcccacgggtctcagacccaggggctgggcccccagcccccagtcccgatcccagctgggtcgagccatgctgcgctacctgctgaaaacgctgctgcagatgaacttgttcgcggactctctggccggggacatctccaactccagcgagctgctcttgggcttcaactcctcgctggcggcgctcaaccacaccctgctgcctcccggcgatccctctctcaacggtgagaccctgcctcttggggatatgggatcctgggatggggatgaggtgagagggcggcgtggaagggaaggagaagcgctcctgtcccgaggtccgggattgagtggcgcctcccagcgcctccctgggtcgtggggtctaagggataatttggagcttcgagcacatgagtgggggtacccgcgggaggtcgagggcttgggagaagatggctactgagtctttttacacctccttcccttcccctacaacgcccaccccaggtgagaagaaccgttgctggtaacgggcagggaagtccgagctaagaaaggcccgggcccagcgcagggagggcagaggagggggcacagtctcccgcc

SEQ ID NO: 334396 - DNA, 634 bp, Homo sapiens
  chr11:124738440-124739074
  hyper
cggcctagaagtttgtgtcccgatccctctactaaccggcctgtctgtaggcatcttcctttgagacgaggaacgcggaacgtctgccaataaggacatattggatcctgcagagggagagggtaggcaggtggggactgagctccgcagagaagcataggagatggaacgaccagaggattctctttccctctggagcctcaatctctccccacaatttccctgtctgaacgctctgcgccaccccctgtccccagggtcaagggtaggaccggaggacgctatgccccgcatcgtggagcagccgccagatctgctggtctcccgaggcgagcccgccacgttgccctgccgcgctgaaggccgaccccgacccaacattgagtggtacaagaacggggcgcgtgtggccactgtgcgggaggatccgcgtgcgcaccgcctgctgctgcccagcggcgccctcttcttcccgcgcatcgtgcacgggcgccgcgcgcggccggacgaaggtgtctacacttgcgtggctcgcaactacctgggggcagcagcgagcagaaacgcctcgctggaagtggcaggtgagagtcagttgaccgtcagctggttgcttccagagcctggggtaggc

SEQ ID NO: 334397 - DNA, 355 bp, Homo sapiens
  chr11:124790854-124791209
  hyper
cgcctccgcgcacccgcctccgtctgcgcatgctcatacacgttcacacccgagacaccagcgcccccccgggacctcccctcgtccccagcgcgccgcgcccgggcttcccagccccagctttcccccgggccactggccgcagaccgcgggcgcctctcaggggatcccgaggcggctcaggcgctgatctccaccgggccggcctcgtcttgctcgcggattatgtgcacgcccgcagtccgcagtgtgcgcgaggcgctgcgcgagcggccgggcgagctcggggccctgggcggcgacgagtgtgtccggccggtggctggggagcgcgctggggagcgcgggtagcggc

SEQ ID NO: 334398 - DNA, 791 bp, Homo sapiens; identical to SEQ ID NO: 236008
  chr11:124932779-124933570
  hyper

SEQ ID NO: 334399 - DNA, 394 bp, Homo sapiens
  chr11:125133215-125133609
  hyper
gcagtgggggaagccgcatgaggaggagcggcgtgggagcaaatggaggggatctgctggcgggcctagtttaggcaaacagcagggactgctggcgacggctccagcccccactcccgcggtaacagctgcagtccagctgctggcatccctgctgggggagcgtgctaaacctctccggggtcagcactgtggtatgtcggtttccatagcaaccagccaacgggccactttctcagaacaattcccctactcagccgggttctggacttagctcagcccaagggcatgtggctgaggagcagcgcgggagggggagagctgccgagggccagactgggccccacagaacgtggctatctcagtccggtcttcgcacggagggcgtggagcc

SEQ ID NO: 334400 - DNA, 43 bp, Homo sapiens
  chr11:125757376-125757419
  hyper
cgggcatgctcccgccggcggagaaggcccagacaaaatgtgc

SEQ ID NO: 334401 - DNA, 981 bp, Homo sapiens
  chr11:128391758-128392739
  hyper
cggcctctggccgagagcttgggtgggggcctcggccgtcgccactcacccggggaggggaaaagctccagatcgactttttccgtcttgatgatggtgagagtcggcttgagatcgacggccgccttcatggtgccaggagtgggggacgtacgggatggtagcaagtttgcagttactgttgtttttctttttaatgaggattagtaacagggggaaggggacgggggaaatccgactttcttcccaaaaatctcaaattcccgctgcctttctttcccccgcgcccggacggtgcgcgcccggcactccaggggaagttggcactttgcggcgaagtgagcgcgctcgggtcccagcctcgcccgcgccgcgcccgctcctcctgcccggccctcgcccgctccctcctctccgccggcggctgcctcgttcgctctcgatctcccggccgctctccctccctctcgccctcccgcgctctcccctcctctttagggcgtttctcgcggcgccgcgtctcggccgctgggtccgcgcgccctgggccgggcgatgtccgcttgggggagcgaggggcggggcgtcggggcagggcggggagccgggggcggggccgagcaccgcggccaatctccgcccgcggcccaaagcgaaaggaagggctggcgagcgcggggccgggccgcgaccgcggaggagcagtgcgtggagccccgggcctcggagcccaggcaggggcgggaagggccgggagcgggtgtgcaggctgggtgcacaggccgcctccaccgtttcgggaaagtccgtctgattctccacgcattcttgagggcttggtcacccgctctcgccccctcccagtagcagcatagttttccaagtgcgtgtacatcattcattcacaaagactgacacacaggacgtgaggcatgtggatgaaggcgagcgtgcaggcaggcgcaggggattcgtgagccc

SEQ ID NO: 334402 - DNA, 1200 bp, Homo sapiens
  chr11:128562635-128563835
  hyper
cgtcggactcttaaataaaagtgagcaagtccaaagcgtggtccggagagcgtggacaaggtaacctgttttggatgtccgggagaagggagtccggccgaaagggcccagcccctcgaggctgctccaactggggcgcgcggcggcccaggagggaggcggggaggtctccgggttgggccggggaacgccggcctccaggctgggtagggaggacggtccagagcgcgggcctccgggtctcaccccgggaaaagtctgggtctgctctgcgctgttgcgtgctgcgctcctgggacctgctgactgtcctagagggaacgtcccgcggtagtgtcagttccctggggaccaggaagggcgactcttgcctgggagtcagtgcttgggccgtcgggtccgggtaagcgctgggggtttggctcgagaagatgcggataggtggcctagggcgccgcggatctccgccctctgcgggcaccgggagcccagggtcgaggcgcgccgccccgaggggccccttctcctaacaatgcgcccggaatggagtccgcgccctgacagcgcgggtcagcccgaaaccgcccagaatccgcttcgatgagtgggtgagccgctctgggagtctgccgcgtctcggcagcggagggcctgagtggaaaaattcttattggatgcactttttaatggttggtttgcctcggttttcgtccgagtcttccccggcagtaggcgctgggttacccgcagccctagccaactctccctccataccccccctaccccacccccaaaaagtttgtctccggctggaaaaagcattaatgaacgtatctgtgggaagaaacggaaagtgaatgagtcaggagggccaccttcggccaaccgcctcaggaaaagcaaagaagccaaaggtctttggctttggattttgggggaaggtgatggggggaggttcagacttcgggaatcagggcgcggacgctgggcgtggaccccgtcattgttcccggctagctcttatctcccaggagcaagtatcctgtgtgcgcagcgcatgaatgtgtctgggcatctccgcgtatatttatatagtgtgtgatgcgaaaagcaggaccagcaggggaggaagagggggtgtggggggggagggaagacgagggagagcagaggggagagaagagagaggagagctcgagg

SEQ ID NO: 334403 - DNA, 1617 bp, Homo sapiens
  chr11:128563902-128565519
  hyper
cgattcgcaaagtgaagtcacttcccaaaattagctgaaaaaaaagtttcatccggttaactgtctctttcgctccgctacaacaacaaacgtgcacaggggagtgagggcagggcgctcgcagggggcacgcagggagggcccagggcgccagggaggccgcgccgggctaatccgaaggggctgcgaggtcaggctgtaaccgggtcaatgtgtggaatattggggggctcggctgcagacttggccaaatggacgggactattaaggtaagcggcggggcaacggacgcgggcggcggggaccggccggggaggcgaagcggcgggcgggtaggtgcggggcccgcgtcccggaagacgtggcctctctcccttccctccgcgccccggcttcgcgccggctcctccggcgctcgggtggcgagtcctactcgcgggccagccggccaggcgcccgcattgagggcgaccctcccccgaaatcccagcccccaaagtggagccccggcccccctcccacctcgctgcccgccggggctgcaggaggggacggcgggaaaccgggggaccccagggtacggaacggagtcaagggcgagagacctcggggtccaccactcccaccgacacccggggctcccgtggccccagcgctaggcactgggcttcctctccgcagaggcggaacacggcgggggcgggggctgcagtcgcccgggctcgggtccctgcctggtgggccctggggtgggtaagtggcctcgttgcacgagggtaggggtgcaagtgagtgtgtcgggggatctatctgagcgggctcctccagatggaagcccctgtttacatgtcagcgctttcccttcctctcggcactcagtcgcccggctctaggcgctggagagccgccggctccgcgggactcctgggccggcctcgccgcctctccggcggggaaccttccccagcccccgtccgcacagatccctagcgccccgagcccccgcccttcgcgcctaggcgtgcgccggctccaggaccagggctcctggagctgtcgcctccgaaagggtcctgcgtccttcggagccgcctccgttgcaggggccggctgtgagcccgcgccccgcgcccgcccggccattcccaccccagccgccgccgccaagcctgggtctaggttgcaaagtgcaacccaggcggaaaggtgagggtttgggttcgcgtctcacttcagaaaagttgactgctgtctctgaaagggttcgccaagtagggccaggagcagagaggagggacaccccctaacgtgacgggccttagaggacctaggggaatgaatgggaccaggggttagcttcgaggctgccgcgcaacaccaagcgggagtctgtctggaaaaactattaggctggcgaggtggggactggcagagcccgccattccccagaacccgaaagaatcgactccctgctcagggctcagcaagagaaggctaagatgttgggctcagagaattcaagagatttttatcttctgggtggggtcgtggtttttattttctaagttttttttatgaaagtttgaaatatgctgacttaggtaaaagacaccaacc

SEQ ID NO: 334404 - DNA, 763 bp, Homo sapiens
  chr11:128760451-128761214
  hyper
cgcggaggacgccggctctgcccacgcctgggcaaggttgagctccgttccctccgggctgctcccgcctcctgtccgtgcagggcgcgtttccagccatcgccgcccagccgccgccgcacgccggggagagatcgtccggggtgagcagcgagcccggggacagctagcctgggtcctgtccctggacctactccccctgcagctggcggatcaggcccccggaccctcactccacggcgggaatcagagccgtcgggcgggggatgcagcgcccagactgtggctcccccgccttcccaaaggaatccccccatctgctccatccctctcgggaaacggcgaaatgctgccaaccgtccgcttagcgcaccgcggagcgactgagcagccccgccgaggctccgagccaagatttctgccctaatagtttctcccttctttctgtctgctccaccgcacccactaaatacgcggcgctcacacacggacacgcgtgacacgcggcgctcacacacaggcatgggacgctcacacgcgcgcgcgcgggtctccgtccctggcaccccgcagcaggggtgcagccgggggcagggggagccgggggagggcgcagggggccgcggggacgcgagcggagggctggatgcctgccgggctctctctccgccttcctcttccctcccagtcctgccgagctgacggcgtcccggatcacatggagcccccgccccaccccagcccgccccccgccgccaacgcc

SEQ ID NO: 334405 - DNA, 1417 bp, Homo sapiens
  chr11:129148499-129149916
  hyper
tcgtccaacatgcagcggcaacttcagtcaatcggaaagacgaggggggaactccacgggagcctaagggagcagagacctctggccccgcggggcccacgcacacctgggggcgggacccgcgatgtcgcccgcgggcagcggagggaaacgctcccgcggctcctccgggagcgccggtgtccctggagcccccactcggccgctcccaggagtcgcggctgccgcccgccttgggcccggggcggagagcgctgcggcaggccagaacgccgtccgaacgcccggctcgcggaggccgcggggagcgcggggcgcgggcgcgggaggcggtgggcccgcagcgccgtccgccccgggaggccggggagatggggccgggggcggggggacaaccgagaggctcctccgggagcatgcgatccggaaccctcactctaaaaagaatattttaagaaggaaagagaggccccccgcagccttccccgcggggcctgcccacgtcaccggcgcccccggccctcccgcgcgcccgccttaccgagccccgcggccccgccgcgccgccgcggcgtccctgcgccccgctggccgctccgtgtctgccctccgcgggccgggcccgacgccctccgcccgccgccgccgccgccgagcgccgcccgcgccgccgagcctagcgcctggccgccgagggcagccgcgggggctcggccgggcgtcccccgcgccagcgcctcatcccgcctcgcgccccgtcaggctcgggggcgggggcgccgggccgcggcctccaagtccccacctccggcacgcaccgcgctcgccctcccgcggcggagtcggcccccggggacgcgggtcctcgggctccagagcctctcaccctgacgccttcgggccgcccccgcagcgcccccgcccagctggccggcgcgtgcccccgccggagcccgccgcccgcccagcctccgcctcctccgctccgcctcctcctgcacccgcgacgcccgcagcggggagaagaggcgcgccgccgcggccgcgggcacgagcacgcgcgaggagggcgggcggcgggcggagcgcgcgcgcggccgagggggcgggggcgcgccgaagcctcgcctgctgttgtcccgggagcgcacgtgcgctgcggtggggcgccgaggggcgttcggcgggtgcccctaggggactgggggacagggaacgcgaagtgggtagagacgctgcctgagaggtcccgacgtaggctgttgcctcggccccggcattgtgctgcggtgcaaaaataaaaaaccggccgccgccgcagcagcagcagtagcaccgggaagaggcatcctccgagactacggcagtggctcctctctactcccagctgacccccagaacactgtcaccgcgccgc

SEQ ID NO: 334406 - DNA, 807 bp, Homo sapiens
  chr11:129242541-129243348
  hyper
gagaggagtgagagcgctgggcgacgcggccagccaaggcgaggccggtccctcccgggcttgggctctgtccctgcgcgtgagccgcctgcagccttccgaggggcagcaccgcgaccaggaacacgcgaacgcgagtccagacccgggtttggaaaaagggaagaaggagaggaggagaagggaagttaaaaagagagagagaaaacaaggatgaacgatggggagaagggagggcagaagagagaaaacagaagcgggaaattcgacagaggaggagaggcccaaagggcggggagcaatgcggggaagggagaagtgggagggaagaagaggagaggagtcagtggcggtggaaggaaggggaagaaccagagagaagaaaagaggttaaggaaaagaagagcaatgcaaagtcggggccccgaatagtgccgcattctgtgggcacacgccgggcagatagaaagtatagacgcgacgcgctcggcccctcgtcgggcgtcgggtcctggtgctgtcgctcaggtgctggtccccagctccaagcccgcctcgtagtcggcgctgcgggtgagatcgcccgcaagcactcagtttactggcggctgcctaccagcggctcactttcctcggggcgcctaaagctccccgcccggcattgccccgggagcgaacgctgagcccctgggacccagccccgactcggcgcagcggtttccctctcggcttgcgcccgggagaaccccctccgtcgtggcgtcggacggcgatgccagggctgagcggtgagctgtcccgggtccc

SEQ ID NO: 334407 - DNA, 771 bp, Homo sapiens
  chr11:129243896-129244667
  hyper
acagagtgaggctcggtctcaaaaaaaaaagaaaaaatctattttctctaacagcctaatgattagtcctctgggcgtgtccctccctcctagtttaatcaccggcccaggcgccctcatttacttgcttccgcggccaccagggccccctgggcaagcagctccgcagagagcccgccggcactcgcggacgcttctaggctgggagcggggaggaaatgtcaccggccccaaactcggccctagggaaggccatccgcgtctatacttctcagtgtccctgtcgtgcgttttccttccaaccccatgcacactcattccaacataaagtcgtggaaacgggcgtgcactgggctgttcccgccgaacaccgggcgcgactcaggctgccggaggcttcccgggcgcggaggctcggcggggtcccctttacgcagcaattccaatgaacaactaaagtccgtacagattttgattggaacagaccctaagactaagagcctggaaagaaaaaggcaaatcacccaataaacgcctgtcttcgcgactctctaacccggtcgtatcgcgagggatccggatattgaaagcccctttgccggaagactcgggcgctgggagaagcccgcatgggacaggctgccccagtgcccgccggctccctagaatcgtgcagctctgaccctttccaacgaggaaaaaatgtttttataaacaatgttttaaaaaaaaccgcacacttttttaaaaagtcagaatctcgctcttgtc

SEQ ID NO: 334408 - DNA, 39 bp, Homo sapiens
  chr11:130083134-130083173
  hyper
cgacggccacacggtggcgatgttgcgccgttccagggc

SEQ ID NO: 334409 - DNA, 245 bp, Homo sapiens
  chr11:130183478-130183723
  hyper
cggtatcagccgatctccaaataaagcattaagaaaataagtggaagttatggagaatttcttcctgacttcaagagattatctacttacacgctgaaaaagaaattaagtttttgtcttcatttttgtaagttccaaaaaaaagcacacaattacggggttttattgtaaattctgcttggattcatagaactcacatggacgcaatttccttttaatcagttctaacgtacctgtcatttctc

SEQ ID NO: 334410 - DNA, 38 bp, Homo sapiens
  chr11:131558065-131558103
  hyper
ggcacccgcgccccccgagccgcgaggctgcctccacc

SEQ ID NO: 334411 - DNA, 284 bp, Homo sapiens
  chr11:131564801-131565085
  hyper
cgctcagcgccctcgcagccggaatggggcctgggaagggaggagccccagcagaggggcagtcggagagccatgaaattgcgacctgctgccaccagagggcagtgttggacgggctgggaggagcgccgccgccgccgggagggtgcaggagagagctgtctgccaggggaaacgcacgatgcgttgtccaggacattctcacctgaaaatgctctgggccacggacaggctgaggattttagtacccacccccccgccctgaaaagaaaaatctctgtgac

SEQ ID NO: 334412 - DNA, 937 bp, Homo sapiens
  chr11:131780712-131781649
  hyper
cggccgcagcgcgcatttgggctccgaggaagttgaccgaggcggctgccgcaggatcccgggcccggatcgcacgaagcccgcgcggccgtctcctccgcgcgccacccctgcgcctcccgcgagctccacttcccatctgctattgtttccgattgttttccggtggcgagcccggctccgaaacttacaaagtgttggatgtcccccgttcgaactgagggactgcagaccgcctctgggtagctggatgaagcccaccccgtccccttctggtaccaaagtgcttactcctctccaaagtgccgtgtctgaactgccgctgggaagaagcggctcctgagacgcgcccacacctttcacctgccgcgcgcttccccctcctcggccaccttcccggcggaagcagcgaggagggagccccctttggccgtcctccgtggaaccggttttccgaggctggcaaaagccgaggctggatttgggggaggaatattagactcggaggagtctgcgcgcttttctcctccccgcgcctcccggtcgccgcgggttcaccgctcagtccccgcgctcgctccgcaccccacccacttcctgtgctcgcccggggggcgtgtgccgtgcggctgccggagttcggggaagttgtggctgtcgagaatgggggtctgtgggtacctgttcctgccctggaagtgcctcgtggtcgtgtctctcaggctgctgttccttgtacccacaggagtgcccgtgcgcagcggagatgccaccttccccaaagctatggacaacgtgacggtccggcagggggagagcgccaccctcaggtagggagctgacattgttctgcgaactgatggtttgtatggggtcggggtaaggggcaggggtgcaggtgtgtgcactgaggcgtgcctgggttggcggagaggtc

SEQ ID NO: 334413 - DNA, 774 bp, Homo sapiens
  chr11:132813620-132814394
  hyper
cggtcggcgactcgcggccagccgggggagcgccgcccggcgcaggctccgggcgcacggggagctgggcggacggcggcccccgcctcctccggggacgcggcacgagacgcggggacgcgcggacgccacgctcagcggccgcccccggcctccgcgccgccttcctcccgggagcagccccgacgcgcgcgggcccggaccgccggggttgtcatggcagcagctccatccctgaccgccactttctcccggtgccgcctcggagcgagcgggctggcgggcggcgcggactgcgcgctcatcccgacgggcgggcgcccaccttaacctccgccgcgcccaccgggctggggatgcctgcggggatgagcccgcaccgcgcccacttcgctccgtcccgacacccgcgccagcggagagaacgcggcgcccctcgcagcggcttcccctacagaggggcggggtggggggagcggggagggagaggggagggcgggagagggagttctggggaaagcagcaaactgaaaactgacactggcaccttccctcgccgatgccagcgcagaagttgacaaaccccgccctggagagctgaactaccctgcccacgccagatggggcaccggtgtgcgtgtccatcgcgctgcgaacggctccccgcccagccaagtccagccctgacggcgcgctgtcctgggcccgcgcagaggtggagtgcacccacctccgaggacccacctcggaaacgcccgtgcccctccactggac

SEQ ID NO: 334414 - DNA, 447 bp, Homo sapiens
  chr11:132952553-132953000
  hyper
ccctcggcacggcacggccctgtcagctacgaagccgggcgaggggctcaaggcccctctggagaccgcttctcccccgcggcccgtcccgccgctgcggaccccatgcgcggcctccccgccccggcgcctgggcctcctcgcggcccgggcggggcccaccaacccggagaggtcgccagcctgcagggtgccgggggcccctccgagccgacctcgtcccaggcagacgcgctgcccggagaccgccgcaagggggcgccaggggccggggcggacgtcgcgccagtgcctcgccgggaccgcacctcgtccgcgcggccgccagagggcgcccgtcagcgccggagcccgcggcggacgccccagccgagcccagccactgcctggtggagccacagggcacccgcccggaaacaccgcctgcgccccgacggcacccgtgtg

SEQ ID NO: 334415 - DNA, 253 bp, Homo sapiens
  chr11:132953053-132953306
  hyper
cacacaccccgccgagcgggccgcacagtcactggggcgccgctcgctttgctgcctttcccgcgggtgcactgagcggcgggagcgggagccgcgggctttgcctgagccgggcgcgcgctgtggtctcactcccagacccgacccctctgagctgcccctctccgaggccccgcgaccgcatgcgtgtgtgctcccactgccccagcctgagtcccggatactggtgcccctgtctcgggtcgctggctgc

SEQ ID NO: 334416 - DNA, 394 bp, Homo sapiens
  chr11:133401972-133402366
  hyper
cgcgcgtgtgagcgagtgagtgtgtgtgtgcgtgcacacagcaagcctacctctttcactcacatgcatctcacactccctgtcctcaccccttcctccttgcctctccatctccccactgcctctcctgctctcacgtcgtacaatcaccccagggagagaaaacacccttcccctgtacggtacctgggatgaagagcagggcagttgtcgccgagaagacgacccagtaggcaggatggtacatctcgacgctgcggtgctctcagctgccgggcttgctactgcttctgctgctgctaccgctgctgccttcctctgtgctgaattctgagcaggtttaaatccaatgtttgcaaagggagggagagagcagaagagagagagagcgcgc

SEQ ID NO: 334417 - DNA, 2224 bp, Homo sapiens
  chr11:133825232-133827456
  hyper
atcacccttcgcttcgccctctgctcgttctgttttcagacaccaccacccccctcagaagcagaggcgacatattcattccattccggaaagtttcctgaagcacgcccccctgcacagacgagtgacgaggggaccccgtgagaggcgcctccagcccacccggcgccccatgccgctgggagagggttctctgtcggcgagtcctgcctgctgactcccacccacagcgggttctctcccgccgccatctcctccggcttggtgaacttgcccgcagccgggtcgtgtctgcgcgctgacagccctgagctcacagtcctggcaccctccaggctccgctcccacttccatacaagggccgagagccgggggtgccacccagaggcttgtaggtcgctctgcccatctccaaagcaaaagcccgcgcgctcacgcacgcatcacccaactcggtggctccccccttgcgtctcccccagctcagacccaggaaagcggaaagagaaaatcccccctccgctcggattcacagcgtggggacccccccttccccgcccctcccctcccccgccgccgcccccagccagctctgcctcgcagcctggggagggcggcgtggggcccgcgcggctgcggcgcgctcccggggaacttttgcctggccggggcccaggtgcggctgagaggcgcgggggccggcggggtccagccaaaagcggacacacctcgaagctggcctcatcaatcctcctctcaccgggcgcccctgctagggggatccgacctccagctgccaagatgtgtgggcaggaggggcgcgagcggagcgatggacgcccgcagggccgcgcgaacccggggccttagacgcgggtgccgccagtcccagggatcctccgggtcgcgcctccctgcaggcgctcctcgcggcgcggggctctagcgtgctgcagcctgcccggagaccgcaaactcccgcagccagagtttcccgcagctctgggaggcggccgccgggcaggaggcgacgggctaggcgcgccggtgtgcaccgtggggcccgtggtgggcgaagtcgacccaggttccactgcgtcctttccccgagtgcccggcagcccgtgggctctggccccttcccgcccgcccctccagcccacggcccccaggccctccccggcaatgctcccgggccgcctggcccgcgtcggagcccaagcctcacccgcgggaaggcgcgccggggagctggggaaccggggggccaaggagccgggaaaccgaggggccgggcgcgaggggccgagggcgccgggaggggcaggggagggacgccgcacttcaactcaccttcagccgcaagccctcgggtgccgatcacacttgctatgaaagtggccacataccaaatcatagtactaccgcgccagcccggagcctcatcctatcgcaaagtgctcccgcgcccgcacgcgcctcgcgcccgagcgcccgcctcgcgcccgcctcgcgccgcctacgccccgcgccggtgctcctgcagcccgggtggccagctctccatccctcctaggctccgctcggctcggcgcgcgcctccccggccccggcgcagcggcacctgcactactcgcccgggcggagcgcagccaggtccacggtgaagcctagccgggccgggcctccggaaccgcccccgccgcccgcctattgggcgccgcccgcaagccgggggtccgattggctcagccttccgcccgtcgcggcgcgaaggaggcgagcccatttcaaggtgcgttgaagtgtggcgagcacagagccgcagaatcatgcgcattgccggggagaaggtggtatagcgtctctgcccgcttctctctcggctcacactgcgtggcaagtttctggtgagggaaatggtagcttctaacgggaccctggcgggtctcaattaccccggacaggtctgagggaagtggagcccccgcccactcatggaacccaacatccggtttccatccggcaaaaagcagttcccgagaggaccatgctgattctatgatggggaaacccaggagccggcggcccgggagagccggggaacgtccttcgccggagatcttttcaaagaggtcacgcgccgcctccccaccccgtctccctccgcacccagacacgtccccagagcagcgcaccaccccctccaaacgtgatgcagacc

SEQ ID NO: 334418 - DNA, 217 bp, Homo sapiens
  chr11:133920473-133920690
  hyper
cggaacaccaaacagctaagcgtgccggtttggggagggcgggggaggaataaggagctgcaacggtaagaggccgccacacggtggcgcagtgaggctgggaaacggtgcaccccgcgcaggagggggcactccccgtcgcggccacccggggtgggcaggaggcggcgcgggctggctggtctctcccgagaaggttctctcccgagaagggtgc

SEQ ID NO: 334419 - DNA, 842 bp, Homo sapiens
  chr11:133938756-133939598
  hyper
cgccaagttcattgaaagagaacccatgtgccggtccagagcatcgctgcatccgtaagcagctagacctcagcttcctctgtcaccatggtgccggctcggctgggcccggcggtcgccatggtaactggggcgggtcgcagggtcctggcaggctgggcgcatgcgcgcggggactacaagccgcgccgcgctgccgctggcccctcagcaaccctcgacatggcgctgaggcggccaccgcgactccggctctgcgctcggctgcctgacttcttcctgctgctgcttttcaggggtgagtttgcgcgtttccgctgttgggagactagggtctgggggcgacggaagcagagcgggccgaagctgctggagccggtccgggcgaggatagcggtcctggctccgagggctcccggggtcccgggccggaggggcggcgcgcgcccgcgtccccgcagccagggctgggactcgggcctggctagggcgggggccctgggacgcccggcagttggaccggggcggggagctaatttgggatggggggcccgtcccaggcagtgagtcggtcccggacagccgtcggaccccgggggcgggctcttctcgggcggggtcctgtgctgggcggtgggctcatcccccgggtgggctcctcccaggcggggtcctgtgctgggcggtgggctcatcccccgggtgggctcctcccaggcggggtcctgtgctgggcggtgggctcgtccccggggtggacccctcccgggcggtgggcacggccctctggagggagcgcggcagctgcggcgtgggcgctggaacttgctggaagaccctgc

SEQ ID NO: 334420 - DNA, 997 bp, Homo sapiens
  chr11:134145792-134146789
  hyper
cgcctacctgagaggacgcctgttctcatccagcctccaccctgcagccgagcaatctccgtaaaacgaacacctggcttagtttctgctggaaaccgttgaatagtccccactgtcttctggaagggtctgggcagctcggcgtggcgtccacggccccaccaggcctctgcctcctgcaggtcccgctacttcgtcaccaaagcgcccgccgcgctcgcatctgctgtgaggctgtgctcgggccgctcccgccgagggaacggccctcccaaggctctgcgccccaattctcgctcgtttgccaagaggtagccgtgtcggggagctagagttctccggggactctctcctgcccctcgtggccctctgtggaaccctcgttttaggatctgcacgccgtttccagtcgcgcgcgcggcacggagaccgcccgctgtgccccgcgctgcgctctctccgcccctctcccgcgcaggcctccctgtgccagccggctgtcgacccaggttaggaagcccgaggtcggggcgttaccccaagggccctcccgcttcccctccgagggcagagaggcgtccgcgcccggacgcactgcgggaacacctggagcgccggcggagctcggctgtccccgcgggagggagcccgacgcgcatccttgggacccggacccggcgcccgcgcctcgggacggatttctgcctcggctgcaggcgcagcgcgcagacctgagcctgccccgcggaaccggggctcgagtcccggcccgagcgcggcgtcggggccagcggagaggggcggaagccgcaagggaccctcggcgcctcggcctggccgcgatgaagtccccgcccctcctcaggtgacggatcgccgctgccgtcccgggctgcccaccaccccggcgcgtgcccgggagcctccaccctccccgggttctgtggccggccacgcgccccaggcacgcgccgcgccgggccgcgccaccaagccc

SEQ ID NO: 334421 - DNA, 944 bp, Homo sapiens
  chr11:134201446-134202390
  hyper
cggacgccttttgtacgttcttcctgatgtagcgctgcgaggggcgactttacctcggcgtttgacaggtacgcagcattcccgcacccgcctgcgcctcgcgagcagaaagacggcggactctgcaccgctccacgacactggggacccgccccggccagacccgtcccctaccgagaccttgtccccgccccgcccccggccggggccccgccccgccagccccgcccccgccagccccctctcctaccgagacctcgtccccgcccaccagccccgccccgccccccccccgacagaggccccgccccggccccggccagccccgcccccgcttgcgcgaggcctagggctgcaggcgcggagccgcgagccccagccaatgagcgccggcgggccggttgcccaggcgaccagtgcgcggctccgccccccgcggcgaggctcccgcgcgcggctgagtgcggactggagtgggaacccgggtccccgcgcttagagaacacgcgatgaccacgtggagcctccggcggaggccggcccgcacgctgggactcctgctgctggtcgtcttgggcttcctggtgctccgcaggtgagagagagcttcgcgcagcacctgccggaccccacattccccagccctccgcacctcgggttctctcctcccgcgacccgcgaatcccgagttcccggggggagcagccccagctgcttctttctgggagctccccaatacccccgagttcccctgcggctgcaggcactctactcctgccgcgcgatccaggcctctgggcgacacccggcgtgccctcgggagccggcgtctgtgccccgagccgcccaccccgccgcgcctgtgacgccgggctctgccccccgtggacgcccgcagccctccagccgtcagagccctctcagacgcaccccatcgcggcccc

SEQ ID NO: 334422 - DNA, 196 bp, Homo sapiens
  chr11:134230275-134230471
  hyper
cgtgtctccggcatggggaggaccagcagtgatccccacggcttccacgcggtggcgccgtctccccacggctgcttccaaggcctgctccgggctccgcagggctgtggctgtgttgggagactcctggtgctggagcacgttttagcgcttggcggcctcccggtttcaggccttgcaaggaagcccgggagcc

SEQ ID NO: 334423 - DNA, 276 bp, Homo sapiens
  chr11:134281604-134281880
  hyper
cgcgcgcccgggaggacatggcgtgggcaccgatggggacgcagaaaggggctctgtgcgcggcggggcgcccgcgggggcgcggggagcactgacctgcggcgacgagtccggagcgtctccggtgcggtccatcgcgggcaacggcccctacgccccggccccggcgcccctagaccgctgccctgggccgcgtgcggctccctccccggggactgtcgggctccgggcccccgggggccacttcatagccgcggggtccgcgcgcccgcccgc

SEQ ID NO: 334424 - DNA, 176 bp, Homo sapiens; identical to SEQ ID NO: 236067
  chr12:298329-298505
  hyper

SEQ ID NO: 334425 - DNA, 350 bp, Homo sapiens
  chr12:708894-709244
  hyper
cggaggccctcccagccccacgactgcgcttggcctactgcctctcctcctcagcttggttggacctgcaccccagcacgcccggggggctcacattcctccccgagatgccgccactgattcaccatggtgccagtgtcccattgcccgtctcgggcacaggagtagccgtgcactcaggatacctctgatgccaaggtttgagcagctctggcccagcccgcctccttctgcccagctgccagggccccgatactcagccctcccctgcctggtttctgagtctgaggaatgtgcccagaagcaaattggcgctgagattcacatttactcctttactccttccgaac

SEQ ID NO: 334426 - DNA, 782 bp, Homo sapiens
  chr12:1639108-1639890
  hyper
gctcgtgccaggatcgcggggcgcgggtacgggctccttgggcgccccgagggggctgctggccggggtaagagccgcggtttcttcggaggatcgggtcgagttccaggagaagggggcagcaggcgtgcggcgccgggagaagggggccgggcggcggagactccccgtccgcacccccgcggcgaggcccccgggccgctctgcttaggggccgagggagccgggcgggaggcaggtgcggaggtcgcggtcccagcgcctgggaggagccctcgggagggtgtcgcggcccggctggtgggcaggagcgagccggggccggcgcggctgtcgggggcggggaggaggcgcgggaggcggggcggaggcggcggcgcccccaggatccactcgcccagcgccgggccctgcactccgagccgcggccgccacccgccccgcagccaacttgggccgaaacttccccgggtcccgcgctccggagcagggcgcgcagcccggcgagatcgacggcggcctcccgagcccgcgcctcgggcccagggcctccctccggatcggccgcaggctgcgcgcccccgaccgtccccgcccgctgagttcgggggtccccggcgcggagcagggagccctccgggcggcaggagggcgcgcagactccgagcgccggggctgcctggccgggctccggtggacacctcggaggctgccccagcatcggggggggggcccgagacgcctcggcgggaccccgggagccgagcacgcccgcccgcgcc

SEQ ID NO: 334427 - DNA, 851 bp, Homo sapiens
  chr12:1639898-1640749
  hyper
cgcgccccggccgcggatgaagagtcggaggcggcggcccgagcggcccgcgcgctgagaggagcgggcagggtctgccccgggccccgccggccgccccctgcgcccccgcgggccgcgcctcgcccgccgacccagcgcagccgggcgcaggaagagccgggccgggccgagcggcgcccggagcccgcgggcctgacacgcggcgggacatgcaggtaagcgccggccctcgcccccggggacggccccgccgccgccgccgccgccccggctgccgaacctcgcgcggctcctccgccttcccggccccgcggccgcgctgggtgtccgccgggtgggtctgcgcgccgcgggcgtcgggtcggggcgggccggggtcaggtcgggggaagggagtcgccccgggccggggcggcgaacaaagctggggaccgccgggccctcgcgcgggcaggcataggaggctccggggtcggcggcgcaggcggggcggcctctgagcttcgcgctcactctcccgggtctggtcgggcccagccccgaccctccgccgaggtctgcgccggcatcgaggaccccatctgggttactttacccgccggacgcgggtgggagcctgcgtttctgcccggaccgcgcaggtagagcccgagcgccgctcggctttgtgcttctccggtcgctccggcgctccacgtccccgccgtgggagaggcgggacgagacctcctccttcactttcttggagcctcggtggacgcgtagcccgcgctccagtcggagccgaacccccgggtatttgctgcagaccgctgggagaggcagttcggtttgcggggagcctgccc

SEQ ID NO: 334428 - DNA, 784 bp, Homo sapiens
  chr12:1739048-1739832
  hyper
cgggctgggggccggctcacttccgagctggctctgcatgacaaaggggaaggagcaagtgtcttctttgatctgccccctgccggccccacacacctgcctgttggtgcccccgccccagccgaggcttcgagaaggaaaatcaaaagggggcttggggaagggctgtgtcccagctctcctggaccctgctcgggccactgtcctctcctggcggccccaggacaaaaatacttcccgggctgatgacccgaagcacccgccgccccctcccggggagcctggggacgccgacgcgcgagagtggcgcagtgagccggggcgcgcggggctgcgctcgtcaggtccggggccccggggaggccgctgggggcgcgggtcacgcccagacgggggccccggaggaccgcgggggagccgcaggggccgtgtgtcccgaggcgcaggctcgctctagcagcactgacctgctgcgggtcccagggcctggggacaggggctctcgggggcggatagaggaacaggcgtgggttacagcaggcaggaggccaagaggcgggaggcccgggagccagcagggaagggctgtggcatctggaagatgcgtcctcagctcaggcatttgatgccagagctgccgcctggcgtcggcagtgtccccggtgcagctgctgggcaaggtactcggtgccgccctcgaggaccacggtgccgggaggggcaggggccgcctagggaggcaccacctcagccgccagagctttccgggcgggcggttcgcggc

SEQ ID NO: 334429 - DNA, 116 bp, Homo sapiens
  chr12:1762097-1762213
  hyper
cggccttaggtcggagcaaatgatcagcctggaacccactccagactggtctgcagttctgcatgtgaccacacagtgtcgctatcttctcagttctagccgaatagctctggccc

SEQ ID NO: 334430 - DNA, 947 bp, Homo sapiens
  chr12:1905625-1906572
  hyper
cggtcataagcgggggagcgcagagccagttttcaattcaggagtgtctactctgaagccctcgcttcactccggagcccgctggctctatcctcgcaccgagcctttgcgacaagtgcacagggaacgctaaccccagccctcaacgctgcacagaacccggggtgaaacccgcgcagcacgacgcgcagggagtgggggagaagggagccccgatgccagcgccgcaggtgccgcactgttaaatggtgtgccacgggcccgggggtctagggaccgcctggcgagcggcacgtctggctgaggcgaccctcgaggaggccgccgcattcccagcgtgggggtcctcccgggcttgggtgcggggggtcagcaggagagacccttccgcgcggcctccctgcctccccggggccagggcgggttataactagcggcttccacacagcaggaagcctgacagaggctgcccgcggggctcccagcgacccgaggacatcgcacacttccggccttctcttctcacactccctctgccttccaagttctccccacgcagctcaggcgcgggcactggcaccgccctgggcaccgcctgagcagggctgggggagacccgccgaagggcccactcgcccagagacgccgtggggtcacggctgcggcctcggcggggtgggctcgacacacagggtcaggcctcgggaccacctctccccatcccggctgtcccggtccccagccgtcctgcccgcctcagaccgtccgcctcctgcgtgtctcctccactgaggacggcgggggaagaccccgggagcgtgggctctgcacttagacgcatcccctcctcccggctgtggagccgtttcccgggggttccggggccctgcccgcacttccgccttgccgagggcgggaggagtgtggcgggacgggcggcgccgccc

SEQ ID NO: 334431 - DNA, 426 bp, Homo sapiens
  chr12:2144066-2144492
  hyper
cgaatccaactttgcgggacaggggaagaagccttaggagctggcgaggcgagggggtgaagaggagaaggaggtctgggcactggaagcggcacacgtggaaacggtaaaggccgacgccggttcagagccgcaaccgcgacagccccgtcgtccacctcaggtgccggcgccccctgctggtgcgcggagatgcgcggagaccgcaaggcccgggggcgtggcctcccctgcgccggcgcgtgtgcccgggccctccgcggggcgccggcgtctgcgccaaggcacgttctcctgctgctccagaactgccaccttccaagtcctgaaggaggccgttttcctgtcatttgcacctggccggagccattctggatgttttaaggaaacgagaaaaccattctttcctcttaccggatgatgtgc

SEQ ID NO: 334432 - DNA, 1846 bp, Homo sapiens
  chr12:2161370-2163216
  hyper
cgtgctcggctgcctccaaggaattattaaacctgggtctaggaatctgttcagacatctgggcaccgctgcctcgcctaccaggctccgcctcgctgcccctcccgcttcccctcccctcctctatctgtcacttctacaaccgctctgattataattgatcaaacagaatcacggaatcacggctcatcttgccgttttgttcagtggcccgatccgaaacgagactctggtagtcgggcaaattgtattcctcctccttggaattccgctcacagaggccttcccggcgtggccggcccagcagggacgcgccgccgcagcggaggagagaacgcgggcggggggctgcaggccggcgcggggggcgcgacgccgccggcggggcgcgagggggtgtgtccgcgccgcggccaccgcggccaccgcggctggcgcccgggtgcgccgcgcgccccggcctccccgggggctcctcacgccgcccctcgcccgccggcggccggggcccgctccctttgacgtcatgcgggcggagggctcgctcgggcggcgctgccgcgggcgccgggagggggcccgacttcgggctccagtccgccgccgtgcgccccgcgccgtgcgcccggctccctgcgcgccgccgcagccacatctggaagcgttcagcgcgtctgcctccggcgcgccgggcgggcgggcgggcggcgcgggcaggggcgggcgcgggcgcggcggggctgggccggggggagtgagcgcggcgctctcgcgcgcccggtgtctccctctcgctgcctctgcagaaacagctcctgccagagcggcgctcggcgcggcgcggcgggcccggagcggcggcggcggctcttcctgcctccgcgcccaggagttgccggctccctttgacagcagagagccgggcaggggcctcaggaggactcgctgggagtgggcagaggcgcctcggcccctgccggcccaggcgggccccgcgcgccccccgcccctcctctccgcctcttctcgccctgcctctcccgatttattttttcaaatggtgtagccgccggaggtgcggtgctcagttcttggaaggggcccggatgtactgaggatgcgttacagtttcactcgaggaggcagtagtggaaaggagcagtttttggggtttgatgccataatgggaatcaggtaatcgtcggcggggaagaagaaacgctgcagaccacggcttcctcgaatcttgcgcgaaagccgccggcctcggaggagggattaatccagacccgccggggggtgttttcacatttcttcctcttcgtggctgctcctcctattaaaaccatttttggtccatggtcaatgagaatacgaggatgtacattccagaggaaaaccaccaaggtaaggctggaccccgccgcctcgccggggctccctgccttttccaccgggttcctgccctacccgcgctccccgcggccccggggccggtccctgcggagtggcccggggccgcgtccgcgaggggcgcctccgcctcgtcggagcgcccgggagcccggcgggaccggggcccgaaccgccgcgcgagacggagcggaaaattcccgcccctccccctccgggccccagcttctccagagcatgtgtttcctgtgaaattccaggcgaggggggaaaagttccccaagtggctgccgccgcctcgctttctcgcgtccgcctggagagcccggctgcctggccagccgcgcggggggcagagggcgccggcgccgcggagcccagaggcccggggtccctcgcccggctcggggcgcggctgggagcgcgcgcgcgc

SEQ ID NO: 334433 - DNA, 254 bp, Homo sapiens
  chr12:2692239-2692493
  hyper
cggcggaggtgggtctgggtggaaacctgcagctttggcatgggtgaggttcaccttcctgaaccctccgggcccgcagcggcgccgcgctccgggcgggctgtcgccgtaatctgggtgagcggcgccccctggcgttgcggcgtgtgcggccactcacaccgcctgcgatagggacgcgcgggagcgggccggctgccctggggccgcggcgtctgctcagaggcgggacgctccgggagggaggatgagcc

SEQ ID NO: 334434 - DNA, 819 bp, Homo sapiens
  chr12:2800445-2801264
  hyper
cgtgacctggagttaaccggaacagcgtcttcattcatttctgttgggaccagacgcggagcctgggtgcgcgagccgccctccgggaggaaggcgcccggctgcgtctgcagaggcggggagaggaggcggcgagggtcccggggcgcgaggaaggcgcctgccctctcccagctcgcaggccccgggcccggccgcgcctccgcggggagagcaccccggcttcccgcgcgccctcaccaaaaggaccctacagcaaacgggtgtctttcgactctgcttgtagaaaccatttgcacatattctgtacgagcctcgctgtctccctagagccagggccctgcggatttggagaagggagcggggcaggacttccaggaggaccccaacccggcccggagagggaggaggaggcctccaggggcgcggagctctggggatgggcgtcgggccggcagtggtgcggctcactccgtccctgcccacctgcgacgggatcccccgaccggcacgggccacgccgagctcccggccagccgccggcccgcaggcagcgcgagggaggagctgcgccgccggctccgcccaaccaggtggtgctgagcttccgctgagcgctcttttgttttgtggtttgacacttttcttgacagcatgttgcagtttcttttcggttttggttttttttaaatgttttattttgctttcccagcgggaggggaggaagaagagtgtttacaaagtcctgtagccccctcacctttctgttttcacttttgccaatgtacatcgggtttggttttcttgtattatttaaac

SEQ ID NO: 334435 - DNA, 653 bp, Homo sapiens; identical to SEQ ID NO: 236083
  chr12:2861785-2862438
  hyper

SEQ ID NO: 334436 - DNA, 142 bp, Homo sapiens
  chr12:3053936-3054078
  hyper
cggcagatggttccatggcgccacccactgtccaggaatgcatgttgcaggtgcgttaaacgggcagaccccgcacaggtgaggaagtcaccaggcgaaaacagcaagccgaccacatgaccatgcagttaccaagcacctc

SEQ ID NO: 334437 - DNA, 1048 bp, Homo sapiens
  chr12:3186012-3187060
  hyper
gcgctgtcagcatctcgcacagtccgcccgaaacaccagggaaggggttcgtaggtgtgggggtggggtggcgaggccaggcagcctggcgcgagggagagagccgaggcctgggccaggaaggcccttgggtgccgtgtgggcgcagagcccaggagagcgcactgccaggcccggacctccccgcccctaccccgggaagaggcccgttcgccgcagggggaaggcgggatcatagcacctcggaggagcggccggtccgggcatgcgggcggcggggcggggagggaggcttccggaaccccgagagagcacccgtgcctcgcgggccccgtgccccgtccccgggctccccttcctctaacgcaggggacccagcccggggcagtgccgggcactggcgctggcgccccgctcagccctgcgatccttctccgccccgcccctccccgctccgccccgcccctccccgctccgcccccgggccgccccgccccgcaggctcgccattcccgggcaggccccgccccctgtttccgctggcggcggcggcggcggcggtgccggagcgcgagcagagcggagacccccaggtcctgcgggcgcggtgagtgcggcccgggcggcgggcggcgaggcgggtctcgagagcgtgcggagtcgcgcggccttgagccggcgccgggcgggctgggcacccccaggccgagacccgagaagggggagcggccgggggcgcccacgggaggcagtgtgggcagggcggcggtgggacgagaggacgaggaacagagtaggcgccgtgcgggaagcgggccgggaaggggagggtgggtgcggggcccgggcaccgagcgaagtggggtcctccaggggatggctccgaggaagaccgtttcagaaagggagtaacccggggccggcaagggtttccgactgtgtgaccccgtgcaccgcttgggacagtccatacaaggaccccagagagggccagggggccttcgggcagggctgggatatggcctgcagccccccggcacccgcgacc

SEQ ID NO: 334438 - DNA, 639 bp, Homo sapiens
  chr12:3474998-3475637
  hyper
tgcacacaccaacgcgtgctcccacgcgccgcgactcccccgggatgcctgccccacccctatccgcagccagcgtccccctgcccgccggccccgccacggtccatcagggactgcgggcggcggaggtggcggcgccttgccgggacccccagcctccctcccccgcccccggcgccccaccccacgcgggcgcgcttctcccgccgcagccgcccgcgctcacctggcccggacacgggctccgccacgcggtgatggaagctgagcctagagaggcggagagcggcggctcgcagggccacccagcggcacacggcccgcgcctcggcccgccccttccttgccggccgggggagtgtccgcgcgcctccagcccgccccgcgccccgctgcggtgcccagtgcccgccgtcctcacctggccagcgggacgcgcccgggaaccccgcacgcgggcgggccgcctctttgttagcaagtttgcctttctgtgattcagagcacgcggagcgaattaagtggagtgaggggtactgtgcgactgtctgcgggaaacctgcggggagcgcgggaagggatggacttgatgagccgcggcgcagcggctttcaaacctccccgcgctccgcagccccc

SEQ ID NO: 334439 - DNA, 965 bp, Homo sapiens
  chr12:3600023-3600988
  hyper
gagctggggtgggccggggtggggagggtgcgagttaactgtggcccggtctcgcccggacctcgccctaggtgggagcacgcgcaccgggtctgagaacctgcaagagcctcgcccggcgccggctttctctgggccccccgcgcgggcctggcctccacgtaagttgtgtgcagcgccagggagtggaggcggccgagaccctcggagactaggggagggggcgggcccgggggcgctgggggccctcggtctgcgcccagccgccgccggctccagcgaacctcctaccccgcccccactcacccggctcagcccctaggagagacgcgcaggaagcgtgttgcttcgcccagcggatcggcagaagttgagaggagttggcggctgcctccggccggccggactttgcgagcagcctggagaggatccgcgaccgccgccgccgccgccgcggaggcttcggggctgcttccctcgagcttagcccgcagcgcgggtggagaggggcggggagggggtcgggggcacgagaagaacttgaaaccgtgtgaaggaatccggagcagatgagaagggaggaaaataaaagaaagtggagactgcagaacagactccgctgtggctgactgtgccggccgacgctccagctgaggggctgggttggatttttttttttctcccatcctctcgctctctcttttaaagcgacaccagctctctctcctcctctactatctcggtatcaccaaacccttgccggctcttatgggcatgaaacactcctcccgctgcctgctcctgaggaggaaaatggcggagaacgcggccgagagcaccgaggtaaggaggcgagcgagcaggggctctcggagaccccgccgcccacccggaccaccgcgccgccgccgccgctcagcgccgagtgccaaactttccccagtttcatcccgctcgcttctgcc

SEQ ID NO: 334440 - DNA, 1426 bp, Homo sapiens
  chr12:3601576-3603002
  hyper
cgagcctgcgcggactgtgggggctgcgcgccgccggctgcagtgagaaatgggtctgcagccacccgtcccgcaagggcttttgaggaggtcgctctagctccgcaaattgtgttctcggcccccgccttcggcagcctttttctctactctccagctggccctgagccgcagagagccctgctgggctttgcgtcccgagactcgaggctgtgatccctcgcctccctctgaccccgctgtcattacaacaaccggactattccgtaggctctgggcacctgtagtcacgaaggggatcagcgtgggcagcccccttaccttcctggagaaacggtgcgccgagatgggggcggagtggggcatgtgtgtgaagatcatcccttactcagtggcaggaaaaagacacagagagcaaactcccaggctctattaatagctgggtgtctggtggggctgccgcacatttcacatatggttacccatatgcagcggggggcggggatgggggtgtggcgcggggattgtccctctgtcttgccggaatgcaaaaaggtagagagacccttcctggtcttcttccctcgagttcttaactctgcgctaaaacccctaccccacggcgtaggcagcaaagctttataaatcccccttctctgagagactagaagcagcatgcatctgacaattgtcaatttcaaaacaaacacgctccgggacttgaacgcagcggggcattcagtagcgaatgctgtctccttgagttagggcaaagcctgcgtgcccgccgtcccctcaccacttcctcttccccagcccccacctgagagcagacattcggaatgatgtgtagtgcgaggcggctagcctcccagcagaaagccatccttaccattcccctcaccctccgccctctgatcgcccacccgccgaaagggtttctaaaaatagcccagggcttcaaggccgcgcttctgtgaagtgtggagcgagcgggcacgtagcggtctctgccaggtggctggagccctggaagcgagaaggcgcttcctccctgcatttccacctcaccccacccccggctcatttttctaagaaaaagtttttgcggttccctttgcctcctacccccgctgccgcgcggggtctgggtgcagacccctgccaggttccgcagtgtgcagcggcggctgctgcgctctcccagcctcggcgagggttaaaggcgtccggagcaggcagagcgccgcgcgccagtctatttttacttgcttcccccgccgctccgcgctcccccttctcagcagttgcacatgccagctctgctgaaggcatcaatgaaaacagcagtaggggcggccgggctcctgcgaacaacaacaaaacaaacaaacaaaaaaccacgtcgcgtgcggggcaccaaggc

SEQ ID NO: 334441 - DNA, 481 bp, Homo sapiens
  chr12:4140253-4140734
  hyper
cgcagcaatgcgcctccaagccgggcccaggccgagcgcctctcgccgccgcgcacattccggagggggaccgcggggctcaaagggcctgcggcgtaggtggctcagccctttccttggctttccctccagggccatacttgccgaaacccactgcctgagcctcccgcccgcccgccgcgcccccgcccggggccgggaaacgagcagggacaactccccgcccgcgcctccccgcgcccggcggcccggctagcaacccagaggcgcggcgctgcgattggctgcgcgggggagaaggggcgctgcgctgctccaatcgccggccgcgcccggaggccgcgccgccaggaggccgcggacgcgtgctcgcatgcctgtggtatttgctcagaggggcatgaccacttcgggcaagcctttaaatgtgagtcagctttcggccgatccctgggaaaaattccttcggtgttgtcaggca

SEQ ID NO: 334442 - DNA, 689 bp, Homo sapiens
  chr12:4273746-4274435
  hyper
cgtgagccgtccccttcgctaacccccaaccccgccttctcctgctcctcctctcttcactcttcctgcctctcggctccggggtctcctcgcttccccgcagtccccgccccccagttcccaaagcggcacccgggcctcgcctccttccagcggagccgcgcgccctgcgtcctggcctccccgccccgagtccccttccctggagcctgggggaccgacagtcgcgggccacgcacgcggtcccagcctcgccgtccgccccggggagagctggaaggtgggcccggatctcccacatcactatgagctcattccagccccggccaagcaaagcctggccctactcgctccacatgcatttcagtctcctctcgcctttcatgcgcggaggagccgggagggagaggatgtgacctcatctgcgcggcatctgagcccaggggtgccccagctcttccacccaggccgctccccgagcccagctccccgcgcccctctctctatccaggagagacgcattggacagccaggagggctcgacgtggaaggaaaggaagctgcaattctgggacaggggcagacgggagaggaagtgaacgtggctaaacgctcactttatgtaaaacgtcccccagactagaatctcgtccacagagctgcacacatacactcgcacgggcccggct

SEQ ID NO: 334443 - DNA, 4797 bp, Homo sapiens
  chr12:4377809-4382606
  hyper
cgtgggctcactctgcagctgcagttttcagcccttgcagtttagaagattctgcatgagcacggatgccacgagggtatccagcgagtgggaagggagtcgccctacatgttttcacatcgatttgtaaaactgttttgaaagggtatttctagatccatttgttccaaatgcagcaaaattcatccgatatcgctcacaatgcatgcacgggttatcttacatgtaatagccatcgtattaaccaacccagctgatactgagatggtgaatggggcgggggagcagggaggaatatgtcgcgcatgaaaaactccgggtgtaaaagtcaatgcagaactcactccccgaggaaccgaaaaagacattcacgactctcaagtggagagaggatagaaagtcaagtggcgggggtcgcgaccagtgatcgggatttcagtctgatctcagtacccagcggaacaggaccataacctaaagaaatgagctttttccggagcaaagagcggccccgatttcaaagtagaaaaaataaactgcttgggggtggaagatggcgaggggcggggggcggggagggaggcgggtcgcggcgctggctccggggtccgcggcacggcctcctctgccgcgctgcccagggcccggaccctgcccggcgctgcgcccaccgcgagggtgccagacccgccgcgccgccgccgcgctctcccagccgcggccccctcccccgccgcttcctcttgctctcccagccccttcccccacgtgtggatgacgtcaaaattccgcgaaaaagccgcgtggtggctccccgagcggaggcgcgattccgccgcccagcggccccctcccgggggcgcctggagggggagaagggcggaggcggccggttccttctcctcccgggaggcaggaccccccgacgccgaccgccggacgccccccgccccaaagcttattggaaaattcacttttgtaaagcaaatgtatttccagagctattttcggccgcgtgaggcgtgtcctaagctgaatcagacaggaagagggggaagttcgggtcttttaattttttttttttccgaagggaggggagtgagatgctaggtgggtgacagacggcaggcgctcgccttcttaactcacgcctgtcgcatctgccgcctcagtaatccagccccgtccaagccgaaattcgccgaagggagtgcggatgcacaggcctggcggactctgcccccctccagaacgcagcggcccagcgccccggcgggcgcggctgcgaccagagggtcccggaagcgagtgaacacctgcaatcgcactgcccgtccccacccaccctgctcccccgtgctctccgcttcccgacgttttcctcttctccttgtccgcatttttctactttgcctgcactccctccttcctcttgatgtgcctcctatgtgtcccctcggatttatgtgtcccctcgcattttgccagtcgggttttcggttttgattgaccgtccatccctccacggagaaacacaaacacagctccactctttgggggagccgaggggaaggcagtggctcccatttctgagcctgaactcagtcactacccgctccccacctggcctaggcgcccctgcgcggagaaggcgggactcgaactcgcgctgctcccgggccttgagccgaccgcggaatcacctggctgggaggcatcctccaggtaagcttgggagtatgtgtgcttagtgctgcaggctcctgcagaaaagtgcctataaacacccaacaccctgctgcaccctccacctccaggctttgtacactttccaaccgaaactccaaaacgctagcgtagagggtggggagccggccggaaaaagaataaaagtccaataaaactggcgttcgctaaagtttatcaccagtcctacatgggatatatatatatgtatttttttttccgtgaagggtgaaaaggagataaggaagaaccaacaatctaccccctcccgccgccccccacccccgcgccacggtgatcagtttggacttcaaagccagagcacaggctcttgcgctttttcttgaaaccgaagtctacactgaaagaaagtgtgcacttttgcctagaaggcaacatgcgttttcccgcgtgctaggtggagtgcattttaacaagacattagggttttaacacatggctggagtggcgaccaaaagggaaaactcagtttccagtccaagcctcctagagacattcctgccaacctccgcaccctctcacgccccaccccacgtgtgagagtctgcaaaaccaccggggattggattcgatggcgagcttcacgctcgggaacagtcagtaatcggaaggggaagtggacaggggaacttcaagaggcgagcctgccacgcgggaagcgcccgaacttgcgggtctccatgaatgcagagggcgccgggaagggggggcatccggccgcgaccctctctgcccctcccattcgctgcccccctccccgctggaatttctctgtaaagcaagacggagtagggggagggggagagggaaggggcgagagggccctcggctcactcccgagacgtgaggactcgccacccaggcattctcctcggggtgggctgggccccgggacgaccacccgcttcttcctcgcccccgctgcccccacttcgggagacccagagctctggatgcctttccccggagaagggggggtgtgcggagtcggggtggaagagaccttgctcgcagagctatatcaagtgatgtccagaggctgggagccccggcggcctctgtcccttgcctgtcgggttagatttatactttaaaaatacctcccgccctccctccttctctcgcctctccccgctgcaactttctttgatccgctcaaaggtggcttaggtgaaattggagtaattcccttatgggggtcttaaaatgtaagtgaatgtccttatccggggtgactcaaaagcttaagtcgggaagcccaacgtgactaaaaccaataggtgattgttcggggccgactgtgtgcgggtgtacacggtattcggcccgggtgtcatccgcggcgctggactgtttcattttgagtttgcaacttgggtttttcagcgagctttttttcttcctgaaagctaatggcttccacagcaattagacattttcctcgcccgccccttccctcccctttctttacatataggagatgggatactcattcccgctgctattgataaggtcggaggcggccgggcctctccccagctttcgcccgccccagcgcccgctctccctccgccctcccttggcttccttttgatgtagtggggaacgcgtcctactaaaaaaaaaaaaaaaaaaaaaaaaaaaaagtaatctgcccggtaacaatcagcgcgcagtagcaggagccccagagctattggctatgcaaatagagggaggggagacggcgccccaaactcttcctcacccttttaaagcgatatcccctcctttcccccccaccaccccttccgccccaccctcgtttaaagaggctggctccggggcctgagttaatcgcttgcacctctagtttattcgctcccctcctccgccttgcagggaacctagtgtacggctcacccagcccgcgccccaccccgccttgctggctctccgcgcccctgcccgggccccctctctcggtgagggaggcactcagtcggcctcggtgtgcccagagagctcgagccacgccatgcccgctgcacgtgccagcttggccagcacatcagggcgctggtctctccccttcctcctggagtgaaatacaccaaagggcgcggtgggggtggggggtgacgggaggaaggaggtgaagaaacgccaccagatcgtatctcctgtaaagacagccttgactcaagcatgcgttagagcacgtgtcagggccgaccgtgctggcggcgacttcaccgcagtcggctcccagggagaaagcctggcgagtgaggcgcgaaaccggaggggtcggcgaggatgcgggcgaaggaccgagcgtggaggcctcatgcctccggggaaaggaaggggtggtggtgtttgcgcagggggagcgagggggagccggacctaatccctcactcgccccctccccctcccgggccatttcctagaaagctgcatcggtgtggccacgctcagcgcagacacctcgggcggcttgtcagcagatgcaggggcgaggaagcgggtttttcctgcgtggccgctggccgcgggggaaccgctgggagccctgcccccggcctgcggcggccctagacgctgcaccgcgtcgccccacggcgcccgaagagcccccagaaacacgatggtttctgctcgaggatcacattctatccctccagagaagcaccccccttccttcctaatacccacctctccctccctcttcttcctctgcacacactctgcaggggggggcagaagggacgttgttctggtccctttaatcggggctttcgaaacagcttcgaagttatcaggaacacagacttcagggacatgacctttatctctgggtatgcgaggttgctattttctaaaatcaccccctcccttatttttcacttaagggacctatttctaaattgtctgaggtcaccccatcttcagataatctaccctacattcctggatcttaaatacaagggcaggaggattaggatccgttttgaagaagccaaagttggagggtcgtattttggc

SEQ ID NO: 334444 - DNA, 1697 bp, Homo sapiens
  chr12:4382915-4384612
  hyper
cgtcaccgcttcagagcggagaagagcgagcaggggagagcgagaccagttttaaggggaggaccggtgcgagtgaggcagccccgaggctctgctcgcccaccacccaatcctcgcctcccttctgctccaccttctctctctgccctcacctctcccccgaaaaccccctatttagccaaaggaaggaggtcaggggaacgctctcccctccccttccaaaaaacaaaaacagaaaaacctttttccaggccggggaaagcaggagggagaggggccgccgggctggccatggagctgctgtgccacgaggtggacccggtccgcagggccgtgcgggaccgcaacctgctccgagacgaccgcgtcctgcagaacctgctcaccatcgaggagcgctaccttccgcagtgctcctacttcaagtgcgtgcagaaggacatccaaccctacatgcgcagaatggtggccacctggatgctggaggtaggtcggggggtggcgctcgccaggagccaggacccctccggatgctcgggtccccggccggagccctaaacctgggagagggcaatccccgcgccggcctcccggctcctgtgcgggagtttaccgcgcgccttctggcgagacgcgtggctttatttctgttcctctccagataaactggggaggcagaggggggaggaaaatctgggagaagcgaggctgtcctgggcgggggtaggggagcatcccgcgcgcgtgttcctgcatgtggctgcctcttcttcccacccccctcgcgacctgtcttttgcgaagccgccgcggctgcttgcgctgcggccaggaagagagtcggggcctgaaatcgggaccccgagtagaaaggcaaccccccccaaaaggccagagcaaattcgtcttggcctcaggtccccgcctgtggtcgcgactccgcgctggcacttcaccggggaggtggagggaggagggagaaggagagaaacggggaattcgggagccccggaagtcccattgaagaaacgcgtgtttcaggggaacccaaaagaaccgcttcttgcccctcactccaagtctttgcccagcgagccgtgtgcccacgtatgcacagctctggacctgccgtggtttcgccatgttgctttgcaaactccctttggaaaggctgggaaacgtcgcccgcttaccctcgcaccccattatcccggccaccccacttctaatcgtgccctctcccccaccccccacctcacgaagattacttacagtttggttttccagcttcctcggtgcggagatttgggtggggtaggaagggggggagggggtgtgtgtaggggggataccgggtcacccctgaaggagaggtgggagccccccgtgcctctttccagggctctctgctcccgtctttcccctcgctcgtcaccgcgttccctagtttctgtccttgtgggccgcagccggacactcccgccgcggcgctcaccccttcaagtttcctcccgggatccaaagccccaggggtcggaatacagacctttctggcacccgaaacctctgtttcgggaagcctggctcttctttggggttttcacgccaaaagggcttttctaggatatttcctcgatttttaattattttttgaaaccatccccccctgctccgactccagctgccgaggctgcggc

SEQ ID NO: 334445 - DNA, 557 bp, Homo sapiens
  chr12:4920230-4920787
  hyper
cgagtcatccgcctggtccgggtgttccgcatcttcaagctctcccgccactccaaggggctgcagatcctgggcaagaccttgcaggcctccatgagggagctggggctgctcatcttcttcctcttcatcggggtcatcctcttctccagtgccgtctacttcgcagaggctgacgatgacgattcgctttttcccagcatcccggatgccttctggtgggcagtggttacaatgaccacggtaggttacggggacatgtaccccatgactgtggggggaaagatcgtgggctcgctgtgtgccatcgctggggtcctcaccattgccctgcctgtgcccgtcatcgtctccaacttcaactacttctaccaccgggagacggagcaggaggagcaaggccagtatacccacgtcacttgtgggcagcctgcgccggacctgagggcaactgacaacggacttggcaagcctgacttccccgaggctaaccgggaacggagacccagctaccttcctacaccacatcgggcctatgcagagaaaagaatgctcac

SEQ ID NO: 334446 - DNA, 2633 bp, Homo sapiens
  chr12:5018018-5020651
  hyper
ggtggtcccaaggccgcgggaggagccaatcagcggcgactctgggctcttgcagcctccttagagactccgcagccctggaggtaccaagctgcctgctgccttttctcgcgctgcaggcgcggagatgcagcgcctctgggggcgcagctccagccgcactcgcagggcaaggcacacgcccccggctcctgctgccatgcgcctctgcgggggaccctttccaaataaattgcaagctttgaaagtggccctgtggaggcactaggctggggaaaaaggctgcgggaggagggacatagggtgggaggtgagtaggcgacttgcttctcagattattcccaattagcaccaagttggcagacaaccccacaaacccacgaagccttcggtcccccacaagtcacattccctgtatttcagaataatcggatcgtaagaaaacttcaagtcccatcgtaggttaaagagggacaggctcttagtaccgccgccgcccagtaaaactacatggaacaaacccagggatcctcatctgcacagctctgcccaaagtctgcagctctgcgagtccagccggcgggggaagctgggtgggccccgcagagagcaagggccttcttgggggaggagcgggatggggcgcagagcagtgcgatcgaagagggttactgtgggactgcacaaaagcaaacccgtcggaggagttttgccagaaacaccaccgcctgcattgcgtcggacctgaccatttccaatgtgaaattcccggggaaggtcgcgagccgctaggggccgttcgtgggcggggcggcgggccacaggggaagtagagttagcggtcggcttttctggtaggagaggaaaaagctgtgctggcaagggtgggaactgaatgacaaccccgctctcttccaaaccaccccctcatattttccatccacctcctcgctcctgccctcccccgccctccccaacccacgcccgggtgggccaatcgctgctcggtattccaggcgctttctcaggtttctgctgatcttgcagcgcccagaaatggaccgagcggacccgccgccgcacgcaccctgctccactccaagctcctaagggctcctggcgcgccgcgtagccttggcgaggtccgcgctggggtgcggagagcgaagggaactggagagccatgtagatccaggctctcgcccgcccgcctccttcgggatcgaatcaagggctcccatagtgttaggagggggcgagagtgctgtttatcgtcatttgcctcggagcttcgagagagggtggtattttgcttttccgccccgcatcctccggaactccctgcaccggagagaggacggcgtctccaggttgctggcaaccggtgagaatgggggtagggaaggaacattttcgccgtagctgctccgtaaagcgattgtccaactgagaggggcgtcggacgagtggaccagggcggcgagtttgcccggcgcgtctcggatgctgctgcggcggccgccgcggctcccgccagggcactgcaaagacgacctgccgcattcccactcgggctctccgctgactcagcaccgcccctgcgccaagccagccggccaggtagggggttccccagctcggggatgcagaagcgggggttggggggaccgggtgggggaggccgggggtgcggggatgctgtccgggaccctgagcttcccccggcgtctctcggcgcttttccgatctctagtttaacgaagttgtaaacagatcggctgttgggcattggggaaagtgggatggaagagccccaaacttggatttccgggtgtctgcgtgtcgtctgtccgtgtgtgtgtgatagccctagcaaacgtccagtgctttctcaagctagaggtctgtgttcttcggtgtctgtaggtccgtcccatctgaatgcttctgattttctacccccgtatcactttctatttctctgcagcgtgcatcgatcgccctggtgggagcttagaaggcggcaggcgaagaggggtaggaggggggagagccgaggagaagcagagagggtggcaggcgtggggatctgccgagccggcactgcaccgggtcctaggaaggctctcggaggggaggggaggccagggcgacccccgaagcaatggcccagtccgctagaacggcactgcgttaaggcacctgggatcaggaagaaatatctaaacaacaacaacagaaaaccaacaaacccccaaacccaaacccaaccctctgcaaaaagctgcacccggcccgcaggcgagggggattccaaactgagtgaaaggcagggtggaggggaaggcagcgagaggcaaagtcgcagatctcccgacctgctcgtgttgaagcacctccccctgggcgtgagggagacgcgcgctccggtgggggggccgcttgggtcccccccacccctggtccctggctgcttcccaccccgggctctctcctggcctcccacccccgcgcccggcttccaccatgacggtgatgtctggggagaacgtggacgaggcttcggccgccccgggccacccccaggatggcagctacccccggcaggccgaccacgacgaccacgagtgctg

SEQ ID NO: 334447 - DNA, 2063 bp, Homo sapiens
  chr12:5540947-5543010
  hyper
cgatacatttaacgtttcgttttttcctggatctctaaaagggaactcaagggtgggggttactgaagaatactacagatttggaagtttttgttgctgttgttgtttggtttggttttgtttttcaagaggggccaggagaaatgaccccttccccgccacgggtcccgaagtgagggcggggggggggctctggggcgcgggcgcgcgcggcgcggcgcgggccggcgggggagggcggcgcggcgcggaaggggttaaggcgctgagcgcggagccatctggccgggttggctggttataaccgcgcagattctgttcacgggactcagagttgaagctcctctcccttccgaacagctccgcgcaccgccccgcgacgcagcccggcgcaactactttcttctctctcctttctttcttcctctcctttttcccctgctgggtagtggctgcggcggggtgggggagactttgaatgaccgagctcgcgtccacctttctcttcatgtcgacgtccctggaaacggccacacggatgccatggttacttttgccacggtaaggggaggcggcgggcaccttgggtgggcaggtttggggatgggggtccacgtggggagggattttccagtggactggtgcggggggccccagatccgcatcccgccccacccccatcgcgccgcgctcactcactttcccgggcttgtgtcttccccaaagtttgcgctgggatctgctcaggccgaagcgcaaccgcagccaccccgctacacacacacacacacacacacacacacacacacacacacacacacacacagacacggacacccttctccacctcctcccctcttgtccctcggctgcccaagaagcttccctcaatctgggaaagtgatcaggtttaagggacctggattggaaagggtgggggcagaagaggggaaatggggacgacgaaagagcaggaaagagattcaacagaatcaaccacccaccactcccaaccgacccgcctgctcctccgagaaagctcctagcgcatcctataacaaaagggggtggcagacagaactccgggcggggaggtgccgcggcagctcccctgcacacgccctgcactctgccggccgctgagcctgattctcagctcgccccagcaccactctggcccgggcgtgggctggggggaggggacgcgcagctcaggacccggaacctcgcgttccagttttgggagttgggactcactgccacgcgccgcgtacctgcgttggagttccccgaaagggttttttcagaaaagacctcgcgccccgggctcctcttggccagcgcccacccggtggccaccccaccctgggcctttgcgcagatgttggagctccgtacgcagcccgcacatctgggacccctccggggagcggcgggcacccgggcccggccatcccaggggatctccttgcggtatcgtccagcctgttctcggactttgagcggtggcgtgggaggccgggagacctgggcacccgcgcagccagccaggtcggagtttaaaggtcccacgacggaccgaactgtcccattgccccagagctttactcagtggtggatgctcctgatgaaatttgggacgcttgggagttgaaggttagggacaggaggggcgagggccgagggcatgggatgggggagtaggattctgcttgttgctctccgcgggagtgggtgcgcgtccaggaggcgctgcttctttgcgggagtttggctgctgcgttcattcgtcgtctgcgcttcagatgcacggcactgagacccttgcgtccgacggtgtcggggctgtggactagaaaggatcccttttgctggaatcgaggctggggtgggattgccggtgggggaaacaccgaaaagatcgtctggcctcggcctctggcggcgggcggcaggttctgagtccgaatggaggttgctcccgggagcgccgggctcagagctagagagctcgggagactgtgcgcctgtggacttgtttatgtgtgtgaagaggcgggggc

SEQ ID NO: 334448 - DNA, 525 bp, Homo sapiens; identical to SEQ ID NO: 121841
  chr12:6419603-6420128
  hyper

SEQ ID NO: 334449 - DNA, 183 bp, Homo sapiens
  chr12:6444950-6445133
  hyper
cagtcaccctgagtcagccacggggagacgctgcagctgtaagctgtgcaggcccggaagttcaagcctcagccgcaaacaggggaagccacacacagaaacacaacagcagcccccgcaggtggaggcgtgtgcccctgctcagaggacaacaaccttcccctgcccgcaccagccaacacc

SEQ ID NO: 334450 - DNA, 690 bp, Homo sapiens
  chr12:6472476-6473166
  hyper
cgcgagcccacgaggccccgcgtggtgtcactgggctgcgcgggcgggtcaggaaaggagcggagcccatgggtgggcggggccaggggccggcgaggggcggggcgggcccctcggcgctgcgggcctcaccagctggaagccgatcttccagtccttccagtccacctgggggttgttgtcccgcaagctggaggccacgctacgggctcgacgggccccgtgaggcgggggcgggaccctcaggcgctgcaaggggtgcggcagagtcccccgcaggtcgcgacggctgcgggagccggccacgagagtggtgaaggagctgtatttgtacaggtcaaagagcgtctgctctgtgatgcggtccagctcctccagctcctctttaatttccgggtacctgaaggggcgaggggaagagggtcaggccaggggccctggagcgagtgtctggcccctccggggtcagggtcctcatctgtgccccgggaggccggtccatcccggagaagcctgggcggggctggggtcgtcgtggcgcctcctggccgtccggcggtgaagggtaaacaggtgtgtccgccgggaaggcggaggccacggcgagcccagccgggacactgtggactgtttattgaaggagagaggcaggaggcgcctgtcgtctgtggggcgctctccccctcgccc

SEQ ID NO: 334451 - DNA, 669 bp, Homo sapiens
  chr12:6492950-6493619
  hyper
ccttgcagtccccgcgccctgccctctccatgactgcccgtcctgggcccctcgctttccagatcccgcacccagctgtcccttgcgctctctggaactccctctgctctccctgcgaggcttgtccaagggctgaccccgggcccgccgcccttccctcggctgggccagggctgtccgcagtccgctctcccgatcgggcttccgaagaagggaggaggccggttccggccccgcggccctcacgtgctttcccggccgcccctcccgccccgcatcgaggcagacaagcctgttcctcttccctgggctgcgattgcgacaggccggcctggctcccagcgctccctgtccccgccccgcggccagctcgctccactcccacttcctgagctccgccatgggagccctggaggcccggcctggccgctcccggccctggggtgcacatcggccctgagtcccgtcccaggctctgggctcgggcagccgccgccaccgctgcccaggacgtcgggcctcctgccttcctcccaggcccccacgttgctggccgcctggccgagtggccgccatgctcctgccttgggccacctctgcccccggcctggcctgggggcctctggtgctgggcctcttcgggctcctggcagcatcgcagccccaggc

SEQ ID NO: 334452 - DNA, 1299 bp, Homo sapiens; identical to SEQ ID NO: 236125
  chr12:6664243-6665542
  hyper

SEQ ID NO: 334453 - DNA, 535 bp, Homo sapiens
  chr12:7260779-7261314
  hyper
acttcccacaaccccgggaatctccctggccacagtcctggcgggaccccccccatccccagctcactgtgacagagtcccctgcacagtcctgggacggctccaggtcgaagtcctggaagacgagcctcacagcaaagccctctggagccttgatgtccgtgctgctctcttggcctttgccatacggctctgggtacccgggggatgtcagctgctggggtagctcttgggccaagaggacggagccccgggttgggcaagcctggaggactccccagagaagcagccaccacctgtgagttggggggagggcaaggtggggccgcgcagctatggccggaagcctgtgggtgtgggaggagcgggggagccgcgctaggactcagaggcctcgcgaggcagggctagaagctgtggcctcacccttgaggcccgggcacttcccgtctcctcccttgctccccttcctcaccccaatccctacagcctcccgcgcagcctgagctctaggattgtgggttttccatcctcc

SEQ ID NO: 334454 - DNA, 499 bp, Homo sapiens
  chr12:7282303-7282802
  hyper
cgaacctgccatcgtcccgggcttcagaatccactgggcttggttcatcatggtttaaggtgaaattcggggcgaaggaggcaggacaggtaggcaggaggaggcggccggtcccgacaggtgcgtgcgcgaggggtgcacgacgtcctgcccctccttgggtcccagagcctcgataccgccctgcggaccgccctgtggcttcctcgcagccctgggctacaaatgccaggatttctcaggctcagactgagggttttacttcacccttcccagagggcacgcagcacggatctgtggatggaaggggctgtggaaacaggttatggcagagttggggggcggggtgacgcggtgccacccctcctggccgccctcaggtcccgctgacgtctctcttccccaccccctggcttctggcttctttctccccacgtccctcttctttcccaccccctccgtggctctccagcttcctccccagcccccgcagttcctc

SEQ ID NO: 334455 - DNA, 212 bp, Homo sapiens
  chr12:8088740-8088952
  hyper
cgtcctcaggaaggatccaaagtcttaccattacagcatctctgggtctcgctgggatcatgactatttataatctccgcaaagggtggagcctgaaagggcgacaagcccccagccccaccccaccccaccccacccccctgaagcaatcttgtgatctctcggaattctgtgttatcagaactacccccgcccccgccccacagacaata

SEQ ID NO: 334456 - DNA, 104 bp, Homo sapiens
  chr12:8113465-8113569
  hyper
cgcctgctggcgtcttgcttttgtaaaaggctgcgtaagcaagtgcagacgtgagttgcagatcatcttgaatctccggagcgacaagctccatcactcaaagc

SEQ ID NO: 334457 - DNA, 418 bp, Homo sapiens
  chr12:8123165-8123583
  hyper
cgtctttatcttctaagccctccacatgcttttaaactgtcagtcttttcatttttatttcttcctcttggacgcatttacccaaattggcccgagggaggctgagacagcagatacgaaagaaaaatgtgtgtatgcgtgagtctttgggtggcgaagaaggaggaggaggaatgtagctcggggctcggcccccgtgctgggattccgagggcgggggacaggatgcgcgcgcggcgggtagcgtgccacacggcacgtcccggccgctgcaggaaggcggggctcaggtcccgccgactcccacatgctgggggacaccgggagcgcctcccactcccagcccgccggagagccttgcaattttcaggaatcggcgtcttctctggaaagccgccaaaggttttaagagggtttc

SEQ ID NO: 334458 - DNA, 501 bp, Homo sapiens
  chr12:8171309-8171810
  hyper
cgccgccgccgcgcccggcagtgacagcgaccgcgccgctgcgctcccgccggccccgcccgcagccgctgggacccactaactgcctcgaaaagcctaggattcgactttgaatggtccgttaatgtggtcgcaaaacgtgactcggttcatcgggcgctccctgtaagcaagacaagcacccacctgcggtcagagcaggggtccggctcgcggtcggggttgtccaggccctcccggcttctcacctgcgcaccacacggtccagccctggcggctgcaggggatccctccgagcgccccctcaggcgtcttcctgcgaccggggagagggaaccctttacggggaaacagttttggggcccaccacccttggcgccgccgttaggagggtgtgaacatttctgctttaagagatacccgagcccctcaccgcctgcggcagggaggtggtgccccggctatcgccgcgggctggccggctgggctgggaagaaggct

SEQ ID NO: 334459 - DNA, 1638 bp, Homo sapiens
  chr12:8849750-8851388
  hyper
cgtagcaactaacttgtccaaggtttacgccggtttctagggggcagagctggcgctatccaccccgcctgtatctccaaacccgcttcagccaggaaatttatcatgtggttttaaatttgcctctcaatatacagaggtactgtctttactccagtcccggataaagaccttctaggtatgaatgatctttgtctccatatctttgcctaccggagggaggaaccaccgtaagcggagactccgggcggcggccggcggaagggctgggcgggaggcgtcgggatgccggcaggaccctgcgcccgagggggtagggggctcgtgtcggggttccaggcgcagattgatggggcctaagcagggaatgtgagggcggggagggcgtacaacggaagggactaatctcgcggtttcgagttgggagcaaacctcgccccccaccccccccatccgtttccctttctcagtgaagacggtttgggggcgggtggggaggcgcgtcctcggagcgccctcgcgctcccttttcgctccccgcgcgcgatccatcgcctctcttcccccgaggccagcgatggctcgggtgcgggcgaggagctgggagggcggctctcgacgcaggtgtcagatccgctcggcagtgctcggcgcgctggcccggcccccagctcctccggccgccgccccccgcccgccgcgccgcggcgccaggagggcggggccggggcgcgcgccgctcctcagcaagcgggcgggcggcgttcggtctgagggagcggggcggtctccgccggcgtcgcgcgcgctgtgtgtgagcggggtcgcgcgcgcgcgcggcaggcgagtgagggaacgaggagcggccgggtgtgagtgtgtgggagtgagagtgtgtgggagtggggtgagggagaagctgacgggacgcgaggctgtgagaaactgggcgagtgtgcgaggacgcccggccagcctgcgggagccgcagtcggcggaggagaaaggaggcggctcccggtatcccgaccccctccccctcctctccttcccccacttccagccgcccggcggcccgcgcttcctcgaaggccccagcccggctcagtcggccgagagcgagggaggagccccccgacccaggtgagcggtacgaccgctgttgccctcgggtgtagagcagtgaggcgaaggcgcgccctcccgagtgggcgagttcagcggaatggatcccccgattagcgggggctgggccggggaggggaccggcccgagcgcgcccggggtccggggctagttgaggccggtggtcgccgctccgcggagtcggtggggagcgaggcggggcccggccttcgcgcgtgtgccgggaggcgccggcccgtggcgtgtgcgtgcgaccgggcgagccgtgtcgagggggcggcgacttcgggcgtgtaaggagtatggtttccccgccggcgagggggtgtggtaaccccgggaacgccggctggagtcggacccgcgggctgctgacctgtcctcgggattgcggcgacactccccctccccccccttcccacaaattctatggagcgaccgcgggaggaggatcacgtggtgcggtcccgcagctactgtattcgattccac

SEQ ID NO: 334460 - DNA, 291 bp, Homo sapiens
  chr12:9216953-9217244
  hyper
cggcggagcagctgcgggagccgcagtggctgctgtgggacatctgtgcctcgcgtcccctgtgccttgagaccccaaagcagccgactgcgccgccaccatcctcgcgttgccgggtggggcgacgtgctccccggccaggagcctccaccgctccggaccctggccctatgtcgccgctctcgcccgccgccgccgcggagtgggagtggggaggaggggaacagtccttggagccggccccgggagtactcccggagcctgccgccctggaagccgccacgatggacc

SEQ ID NO: 334461 - DNA, 565 bp, Homo sapiens
  chr12:12502899-12503464
  hyper
cgggtgtgggtgaaggagcctcggcccctggaaaggaggggaccgactctctccgcaggtagcgacgtcgcctgcggccggtcgggggtgggtattggggagacccctttacctggcgtcgagaggaccccggcgcccctgctgccatccaggtgcgaggacagctctgtcgcgcccgcgggaaggaccggcgaatccgcgcgggggtctcggcgaggaccgcagcggatgctccgcagctcccgcaccggcctggcgggttttgtggttagcaagttcctgcttccgtcgcagcgacggcaagtttgccgcgggggaagggcacgttcctgccctgcaacccggagctgcttcccggcaacattagcgcgtccctccccgcggaggctccgggctcccggccccagcgctgagccccgcagggaggtggctccccccaccgccccgcgctcccccccagctcagccacaccgctgaccccgggctgggcgcgctgcgagggggagtgcgtgcctccctgctggtggcccgagggtctgcaggtgagccttgcctcgcggcccgc

SEQ ID NO: 334462 - DNA, 186 bp, Homo sapiens
  chr12:12848356-12848542
  hyper
cggaaggaggcagacacttcaggtgttgggtggtacctttaagatgttgcggggccaaatccaatgccggtgcaggtgtcccatatatcctgagagacaaaaagaggtcagattggtcagatccctcgagacagttcccaaattcctgacttctgttaccgcgactgttcttcgcaattccacctc

SEQ ID NO: 334463 - DNA, 2000 bp, Homo sapiens
  chr12:14133241-14135241
  hyper
ccggctccgtccctcggtggagcatggtcattcccaaagcgtccccttcctaagggggaaaaagaggcggtcagggcttgattcgcgtgtcccccggagggtgagaaaaatgcattccgaaaaagatatcaattcgttttaaggaaaggggggaggaaaccccgcatttcccacagagtgcacacgagaggaattgaaaacagctggtaccggtctataaataattcagaaaaggtctggctataccattcctgggacaggcacggatgagaggtgggaaagccaacctgaatggaagaggagagagggagggagcgagcgaaggagggaagtgggaaggaaggaggaagggggggagaagcggcaccatacagcaacacacactcacacacacgcagaaacacaattcccacttaactcgccagcgagtgcggcccccagccccatctgcattgctgctgacttgtctcgctcgctctccccatcgcctccagcagcagcgccgcctcccaccccgggcttgtgctgaatgggttctgattgtgcacggggtgcacactgggcatttcttggaaggggcacactgacgcgcgcacacacgcccccgacgcgcacgcgccccgcgcgcactcacactcacccccgcgcacactcacccccgcgcacactcacgctgccgccgcgctgaggtgcagcgcacggggcttcacctgcaacgtgtcgattggacggatgggctcggcgcgtgggtccggcccggggcgccgctgccctgcccctctgctaggtgaagggatgaaaccccccaaaagaccagagacagccctacccagtcacagcaccccctcccccacaaaaaaaaaaaacctttaaaaaagccacgtccaaattagcaagtgccgggttctgctggatttcagagctttacctcatgccagattcgttcacgatttcacggcttcgaccctttatctgcctgacacccccaaacccctacattcaaaggagagactccaaagcccatctttacgtaccggctccgagcgcctccgcggttgcagtctgcggagaggggtggccggtggctgggaatggagggttttcctttcctgcaaagcaggattaatgatccgtctcgggggttttgaagttcatgactcttctttgcaaggcaaaaggatatgcattcggacgccagcactactggatggtggtgatcaagaatcacccttgacgagcactctcgatagagcgaagccccgagatttcctagaggtgaagaagccggaggaagtggtttttgaaagggggtggggggaaccttcctttctcaaaaagaggtggggggtggagaggcaggagcccagattccagttggtgaggatcggagccgggggaagggaagcgggcgggggcaggctgtgcaagtcaaccgcgcggcagccggagagggagagcaggaggggaggaggggagcgtcagaaaaatgggtattaatcaccggggacggggggaggcgcggggaacgcaggttgcctggtctggatttgggtctcacactcaaaaacgtgccgcgcacacacacacagacacacacacaccccctacctcgcacaccctgactccggggggaggagaaacccacgaagctggggaagatactgcttctgctcccaggggcgggtgtgagcgcgcgtgtcctctttctccacaccccccaccccaccccacccccaagcccctgcaccccctcactcctcttgctaagactctggcggaggcagcttcccacgtcatgtgctggggaagtggggtggtaaggtggatggaagggggacggaagggggaagaagcttagcccgagtccgtggcgcctcctcccggccgcagcggggaacagcaccgacggagagcggctgaggggcgaggggagctagacagtgccccccgtgggcggcccgcgggctgcggaaagcatctccaaggcggagctgtagttc

SEQ ID NO: 334464 - DNA, 1201 bp, Homo sapiens
  chr12:14927117-14928318
  hyper
cccaaagactgagccggctggcctcgttatttatgtgagcggctatgtaaatgaggattcggagattgctctattgattggagagagctggaggaggcggtctctcttccagagcgctagttgggagcggagcctgcctgtcattggtcaccagagccaatggaaaggggctgccgcgcggccgtaaagagtttgtagaggcagttcgggtgcggtacgttgcattccggtaccggacgccgagagcggtttgtctccgtctctggagttgtaggcgagaggtgatcatgtccggtcgcgggaaacagggcggcaaagtgcgagcaaaggccaaatcccgctcctcccgcgcgggcctgcagttcccggtgggccgagtgcacagactgctgcgcaaagggaactacgcggagcgagtgggcgccggggcgccggtgtacctggcggcggtgttggagtaccttacggcggagatcctggagctggctggcaacgccgcgcgtgacaacaagaagaccaggataattccccgccacctgcagctcgccatccgcaacgacgaggagttaaacaagctgctgggcaaagtgaccatcgctcagggcggcgtcctgcccaacatccaggccgtgctgctgcccaagaagacggagagtcagaagacgaagagcaaatgaccctgacgccgccctcagggagctggctcccccagcaaaggcccttttcatggtcgtcccgcaatgcttttgaatgtgctggatgtcatggagggccggtgacatctagcggggaggtgggcggcgagggtcccggcgggagccaataaagttggtgaaaatcgtttggtcgagagagctgtgtagtcgcggggacatgtcggatggccccaggggaggggggcgaccgggaaacccctggagcaggcactggtgggtgggcttgagccactctggacggctttagtccgcaggtcaccctcgaggcgtcaggggagggtggcctggaggtgggcagggtggaagccacctcgctgtcagtagggcaaaggggaggcagagtcggtgcggtgaggcctccttcggaattatttttacttccctttcacagagccttcgctctcctgccagtttgtgagcactcaggaccaagttctgggaagataccgtcggatcgagctgagctcggggcaggaagtgtctgc

SEQ ID NO: 334465 - DNA, 524 bp, Homo sapiens
  chr12:15374053-15374577
  hyper
gcgcgctcagggctcggaatgggtctgcaggaagtcgtcccgaaagagctgcctggacacgtgcgtgacactcacctgttcacactctccaggccaggagagctacggtcctctgcaagttcggaatgggtcccccaagatcgcgaagccctcccacactgcgcagcccaggcttcaggttgcgtttgcgagttgctgggctgcggtcgtgggtgggactcgccgcagaagcaagtgccagtggcccggcgggggtctcctcactcgcgctcgctccgactagcggcggagggactgcggcaggacgcgagctgagcccggccaaggccgctgcgctcagcggccaggatgctgcagtgcggcgcttcggcgccccctactgggggcaggggcaggctcctcccgccgcgctgcctcccaggcttgcgagcttgggtctttaacgtgctgcacccaagacgggcttccctttttcactggttatttccaagcctccaggctcccaccgaagggcggctttcctc

SEQ ID NO: 334466 - DNA, 1109 bp, Homo sapiens
  chr12:15941612-15942721
  hyper
cgagggggtaaacgggggtgggaccctgccctaaagggtcattttgaaaagaacccctccccatttgaggcgggttggcagagcagcgcacaaatcccaagtctaacgtaataagccgagatcgggatactcggtctgcagtcgccccacggaccagatgagcgcaggtgtatctgcggaagctcaggttaccatgaatatcactgggccacggcgaaccctccctgcccagcctcccggagccctgggcgcgggtctgcacgggccccacagcttgcccggacccggcgagcggacgcctccggccgcagcgccctaccgcacctggctgccaacaccagttgaaagcagtcaaagtgaagggaggcggacgcggctcctggcaccgctccgattccagcacacaaaggcggatttttaaaatcgagaaagtcaaagccgccggaccccgggaccggcgcctttcgccaaggggctcttacctcggatccgccctcggggccacggctttccccggagacgccgcgagcccagacgaggtgggaggggaccgggagaaagccccccaatctgattcgcgcccagccagtcgtccgcgagccgcggagccgccttctgcacccagctaaagagcagcgatctccgaggcgagcacagcgccggcctcgcgccgggcgagaccgcctcgctagctgctgcctgtgaagtctggagccgcccgcccgctcgcagccagtgccaaccgcgcgccgcgcatgcccagtgcccgcgcgaggaacgagcgagcgggcgggcgggcgagtgcgcgccccgcagccaggagcgaaatccgctatccgggtcttgccggcagccgagccgcagagttctggtcgactccagcgcttgaggcgaagtggccggtgaggccgggtgggcgggagagggaccggaggaaaggagacggggcgctgcgccaagttatcaaggccgcgatcaaagtcggaccaaggcagcgagtcgacagcaggtttccagaagtgccctaacaggactgactagcagccaggaggcgcaggaaggggcaaagagcgtgtggagagcttcgcccccggcgaggatggacgccc

SEQ ID NO: 334467 - DNA, 612 bp, Homo sapiens
  chr12:16500402-16501014
  hyper
cgccaaatagaagggctcaaagggaatcagcaggcgatggttactgtgggcgggtaaatcaggtgatttagaggaggggtttggcgaggttggggtcgggctttaaacgtgggagggctaattaacaggagattaactggagaggggcggtgcctgcgtccggcccgcgcggccacagtccctgcattgcgcgcgacccggcggcgggacaggcttgctgcttcctcctcctcggcctcaccgtgcgtactgggaggggagaaggggaccgcatgcaaagggtggcaggcagggagggccagggtgggtggcagatggaagacttgggggggtctctgccagctggaagtgcttggctccacttagcagctaaacttagcttttcaatcgatcgcttttgaaagggaattgtatttctgtccccgtgcgggtaagttttcccatttctcaaactccaggaatgaaacgagagagtcttttcatgcttgagtgatgatttccaaacttagccttttcaagtcaaagtaacctcctgtttgaaagggtcccttgaactctggggaaggaggaaaaggcacgtgtagtaatggaggaaatgcctgtagtttgaac

SEQ ID NO: 334468 - DNA, 908 bp, Homo sapiens
  chr12:16758693-16759601
  hyper
agtcgtacttgagacgttccgcgccgcagccgctctccctccttccatcaacatcttccgcctgcatctatttcatgtctcatcataaaaataatgaagcctcacatgatttaaacaaaaccgtctcagtagagctgcagcccgagtgaaagttgcagtgcggagctgggttgcagctccagtttatgcctcattagcagaggttggggaagaaaaaaatacccacatccgcacacgcacgcgcgcacccgcagacacacacaccacaaataagccgacgcgtgtgtacacagttgctgcacttaccttctcaattaagcgatacagggggaggccgttcagtaagcacagtggctgctttgtagcgcttctccttgggaaaggtcaaaaagaagcattgtttgaaaaaaaaaaaaaagacgggggagggaatgtctatttttttttaagtttaaaataatgaggtcctcaaggatacgccaagcaatggtgttgaccgcatctgagccacaggtgtcctccttttaggcaactgcagtccgaggctgtctctctccgtcctggttcaagacaacttaccccagcagcgtgcgaggagccgagctgaaggaagctccggctctcagctgcaaaatgcaatcccttcccagccagacataatacagccaaagaaaaggtcactcagttattagtgagccggcggagcccaggcagcgcttgtcaagaccacagagaagcagctcccttccgatttaagactatttacctctcgcccccacccctcccctcttctttccttctctccctccctctctcgctggctccctcgctcgctctcgtgtgcctgttctgcagctcagtcaagtacagccgccctcggaaagtgcaaagcagccacgagacagatc

SEQ ID NO: 334469 - DNA, 1749 bp, Homo sapiens
  chr12:19282260-19284009
  hyper
cgctgtgtttttgttgtttgaaagagagaaatcaggggcttgggcattattaggctccctttgatcgcgccctgggatgggaagccttcgggcaaagccctgggggcaggacgcgtttttttttttttttttttttttttttaatcgatcccggaaccttcgcgcggcggagggggcgggcgcgccgcaggggcccgagggaggggtctggggcgcggcgccgcttgcccatcccccgagcgcgcggcggggcggccggccggcggccgccgggatgcggaggggcggcgacgggggccggaccctgccggggcggcggggcgggcaccgcccgagggggtagggcgcgcgcgggggcgcgccgggccggggaggcgcgctcgctccgcgctcccttcgctcgctcgttccctcctccctcggcagccgcggcggcagcaggagaaggcggcggcggcggctagggatcagacatggcggcggatctgaacctggagtggatctccctgccccggtcctggacttacgggatcaccaggggcggccgagtcttcttcatcaagtaaagagccggggacggcacgggggcccgcgggggcgggagggcaggaggcgggcggctggcgacacgggggagagcccgggtctgtgctcctgcagcccctcggctcgcccccgcgtcccctctcacgctccgtgtctgccccttctctcacccctgcagcgaggaggccaagagcaccacctggctgcaccccgtcaccggcgaggcggtggtcaccggacaccggcggcagagcacaggtaacgccgggcccaaacggagttgggctccgcctggaggaggcggcagagcccgggccgcccggctccccgcaacctgccccgcgccgcgggccccgggaggcggcgaggcggggcggaggccgggcgggagcggccgcaggtagaggggccacggggactccgccgccgggagttctctccagtctcggggcgcctctttctcctcagcctttcatcagcacttggagacggcgccctcttcctgcgccttctccccccatcccagcctagacgaccctcgcgaccctagagtggcgacgctcccctccctgaaacctggagtcctgagtttttcctccgcggccgctactcactccccggtgacccccagctgccgtcttgccccccagcaatcttcaggcagtccttacccactcccctccctgcagccccggaccccgatcgcccgccgggataacgtaaccacatcctccccctcctcccaggagcgctgcctcctgccgtgcagcttcctcctcctaggtgggacttgtgggtaggtggctgatgaaggaggaggaggaggaggagaggagttcgggggtgctgcgatcctctctgtgacagggaacggctcgggaaacgcttggcgcgttccctcctgccacgggaggagcagccggagccggaggaggcgttcgcagcctcagttgctggcgatccggatctaaagtccccgccagccgcacggaggttgcacagactgccaggaggcggtgggcgtgcgagggggtgtcccgtatgggggcacccgggccctgtttggagggagtccgtggggaagcggctctctcgggtggctttgggagcttgtttgaatgctaagtgtgagtggagctggaaaaggctcctcgtagtttctgtactggtctgggtttcttttatcattctttgtttacattc

SEQ ID NO: 334470 - DNA, 758 bp, Homo sapiens
  chr12:21680379-21681137
  hyper
cgggttgcctgggaaatatctcagtaacccgacctccgctccaaagcgcccttgcggcgtccggtcaggcgcggggctttcctccagagctccagggcccctggctcagcccggggttgcgctgggagcgctggaaactcggcagccccgcgcgaccctatcctggagcaacctgccccctccccacgcccggggactgcgctgtgccgggaggagctgaggtttaagcccgggttgtcccgggccaggctgtcgctgagccccaggtctcgtttttgcagagggtcgccgcttcatctccgaccagagccggagaaaggacctctccgaccggccactgccgggtgagtgaccaagggtgcaagggcgctagtcctgcgcttttggaataggatggggcgggcagggcttgctccgcgctggtgccgaaagaaagcgtctcctcaccggaaagacgcggctctgaggcgccctcagatacagtccgcccgagggcagcccgggttggcagcagcagcagctggatgccgagcgccggagctgggagctcgcgcgtccagccccgcgccaatggtggcaagggcggcccaggctggcgctgcggctccccaagccttattggcttgcggctgttcagccagccctctggctgccagggtgtgcagaggtccccagggagttaggacctgaggtgcagctcagaggggtaaggcgagataggaagaactatgcaaatgcttctagaaatgtatctgcgc

SEQ ID NO: 334471 - DNA, 555 bp, Homo sapiens
  chr12:21810339-21810894
  hyper
cgggcacgtgtcccgactcccgccagcaggccgtgggggtgatgtggccgccatgaacccaccaaggacaagtagggcctggttttagctgcaaatgcaacaagtctctccgctgagccgcagctgctaccctctgccttctgctcctccgccagggcacggccccccctgcgccccaaactgagcggcaaagtcagggcccgcggccggatgctcagagctaaaggccgcggaggacagatgtgcttcttcctccttcccgcgtctccccatacaagtactaccccgcacgtcccatcaggcttgcctgtgggccaggattcagggtcctgagccgaaacctaccaggagagagaaggctctggagacctctgtaacagtcgtgcggagaagacaaagtcagctgcgtgcgtctcctccggcgccggctctgcaaggagggaggagggggcggggccccacaaccaccgcagcctcttaggtttctccattgtgattggaaatccgagtaccgcctacccctcccctcggctcgctcaatccccttcaaggaca

SEQ ID NO: 334472 - DNA, 722 bp, Homo sapiens
  chr12:21927268-21927990
  hyper
ttttttttttttttttacaacgaaggaatcaaatatacaaggtgcgggggggaaaaaacccaagacaacagcctgcgggttgcagtagggagtgtgccccgaaaagtccatccatcactgcaagcctctgcggtgttttgcattttaaatcatttacgggaacacggacagcctcccccctccgctcccccggagcagctttgaaacttacagactccgggtagcgggcgcggcggctggacctccttgcacacgccggcgggccgcgggcaggtccctcgctctcccatgctggcgcgcgggaccaggggccgcccaggccggagggacaaattgggggctgcgtgtcctaaggagaagagttaaaataataaaaggtgcaactgaatctaaacgcagggagggctagaggaagggggatgggtgtagatcttcccctccccctgctcagctcaactcccttggccacttcagtggaaggaggagggactgggggggcgggggcgggggggcgatgctccacaaatcagcctcccagttagggctttgacgcacgccagacctcggaagccgacgttgtcgcggagtagggggcgggcggggagggggcgagcgcaagtccccgggaggtagggagcaggccagagggagggacgacccgggggagggcgggacctgcagagccagctcctttccagtagccgcgaccccctgccgccagc

SEQ ID NO: 334473 - DNA, 1023 bp, Homo sapiens
  chr12:22093940-22094963
  hyper
accccttcacttctcgagccgggcctcgtcccttaattctagaaatagcgatcgcgaaagctaagtgccgagaagtgcgagagagtgcgagggcgtttttggatagcagaaatgttagctcaaaatcgacaacttacagttattcctaaaaatgtttaaatggcattcatgtaaaagacacggattcacttactccgatgacagttttcctcccctaggcgaagcacgcagtgcgccggaacggattatttttagggtggtgggagaccagctgctgcctcctatcgagtttctaaattgcacagactgctctgggccggggcagacaccgcggctgagaagcaggaaactgggcagaagccccgcgcgccgcgcctggggccggagaccttccccatccctgctctgctcagctttgacttggggcgggcgcgacgccgcgattttacaaacccaagtaataggcgtccccttaaacttcattagacactgaaacttggaatatgattccatgattctccggagtcgggttttcaaacgtcaaaacactcaaggtattcttgtttctttgttttgtttttccatgctctgtaagcacccctttattagccacgtaaggaagcggatttggggatttcgctgtttccccctgaacggatccgggaaatgaagggctcattctaggtagaggcacccactgctgggttatgagtgcacgaatgtctcacaggagcaaggctggctcaagtctaattttccgcttttccccggcgacctagaaaacttggtttctctggtggaccagccgccgcgctatcgaagggcgacccttgcccaccgtcccctaaagtgagacgctgattcccatggactgcgtaaacagtcaccctcttctcctgtttccaaccagagacataattaactctcgagataacgtgtttatattaagatcaccccacaaccactcccccgcgaaacacaagccgtgaattttgtccccgacaaccctctttaattaacacc

SEQ ID NO: 334474 - DNA, 1454 bp, Homo sapiens
  chr12:22486814-22488268
  hyper
cggatgaaagggatgcctctgcgagacggtgcaaggcggtcctcgccggtgaccctgtcctctgcactcggggaggaaaggacgctagaggggaggagccgcgagggcaggagtacctgaacgctctggccgcggtctggttcctcctccacgccgtgccctgttgcagcaccccctgcacgatctctttctcgttgggcagccggtagacggggaagatgtagagccaacagaggaccacgacacagagggcactggctcccatgggcagccgggtccgcgggaacttccacgccagtacagccatggcccctctggacgtttgtcgccgggcccgcccgcaggggctcatcgcagccccggcgtcccaggggcgggggccggggcctcagcacaaagctaggcgaagtggcagcggagggtcccccaccgccagccccccatgcacacacacctttggttctcttacttgcaaacgcacgcacgcttcttcggccccgtcggccccaaaggtcagcgcaaggattttttcaaatgcaacttttccaaggatttctttctaggggaagtggctgggggtgaagtcacgatctatggccatggtcgcttcccctgcagaaggcgggcgctggggtctccgagtgcgcagagagcggcggcggcgagtcgctcccgccggttctgcagcatcacggtcgccctcggcgagggtccgggagaaggctcggctccctcctaaacatgtggcccgtggcgtccccttgtcccctccgagcgatgctcctgcgcccttcgccgcctcccgcgctgctgcgccgccaggcaacccccccccccccaccccgccccgagacgcgctctctgcgccgcaccaagtccttggaaatttccacggcggcccgggaccgctatcctgccccgggctcctccgcctcgcccgccgggaccctcgctccccacccctcccggagaagaaaagaactcgctctcatcagttaattcagcggcgcgccgcagccttccgctgcgccccggacttcgcagacaaacgcccggggattggtggaaatcaaggtctccccctccctcccccacccgcaaaattgcctccttcgacccgatccgagccgcgacactcgcccagagcgcgcacccctcactcgtgcccttgttctttggagataacggcagacaataaaaaccaacagccccccgccaatagaaatatatcagtccctgagtgtggcggagactggctaatatcctgatccttcgacaagcggccggtgtgcccaggctgtcaccctgctgccgtcaccctagtctttctctagctggttggatattaacccgcagccaggcgcgaggaggctggcggagatttattccttcctgggcccccacccccattagccggtcccggagccgcggcccgtgtgtgtgcgcgcgcgccc

SEQ ID NO: 334475 - DNA, 494 bp, Homo sapiens
  chr12:22488329-22488823
  hyper
agcgcgcgcacgaggaggtgcgtgcactccggggtcctccgcctcgcctcctccctgaaaggaagtgctgcatccagatgtgcaggcagctggtgcccaaacactagacctcaagatgtcacattgccttggaggcgcgcggccttttagattaaaggaccgttggttcttagacgtccttcttgcccttcttgcttgtgataagcgataagcttatcgcaaccccgaccttggaaaagcaccacccgccttgacccaccgagccgagagagtcgctgttagccatttctgctcgccccggcggccgacgcatagctcgggtacctcctagcggtcgcctattctatttgcttaagcatctcgtcaagcataaagtgtgcaaggacaaagaagaaacctggtcagcttagtcatcacgaaaacaaaatctaaggctataactccatttgttcagccgaccaggctgcggtgtctggtacctttgtctagcatcc

SEQ ID NO: 334476 - DNA, 233 bp, Homo sapiens
  chr12:22778949-22779182
  hyper
cgatgtgctttcattgatgcctcacactgcgttttgtcttcccaaaccctagcgtactcaattcccaaagtaatgaccacgaccatgcatcgctaggtcggttcttaggcagcaccacacacattgttttgtttgagtcgatatttctgaattattaaagtcgtcttactgaaattaatacctgatactagaaggagcagtggcttgtgactgtttccttttcatgagacacc

SEQ ID NO: 334477 - DNA, 1913 bp, Homo sapiens
  chr12:24714490-24716403
  hyper
cgagatttcccaaacccgcgcttaaagtgacacaacacgtgagtggtcttcacttggtacactgagtgaggtggggggaaaaagtagttgcaattagaattaaagcttccggtctctgaaatccctagaatcctgaaggatgagacttgtttcagaaattccgggcgggagggagggggagtggtagggagaaggattgcagaaagcgaaacaaaaagacgaaagagtcgggaggtgggggtgactaaggttagggggtgggccaggggtcgctctgatatcctagaagggttaaggggctttgtccaacttttagggtctggccttggacattggccgcgatgcccagcacagcccagggttctccccgcactctcctctcgcatcaaccacctccaccgccaccacttacaaaacaataccagcaacagtacgcaggcttcccaacaaaaatagaaagttatcccgtctccgggtcggggtccaagccggcgctccagggtcccccggccagccgcccccggggatgacagggccactccgcgcctcgggccgcctcccacctctccgccacccccagcccagtccccctccctctgtacttgaggaaactccggcggcggccccctccctcctccgcggctctccagctggagccgggaaggagtgctgagtggcgggcccggcgagcggcagaggggagctctgcgccttggaggtctgcccacaacaacatcgggacgaacaacaaagttaaaacgcagcgattcacgcaccttacccggtctcgttaatgcctcctccggcgtgggatgcaaagtggcacagaggcgggctgggggcccccgggaggagactggagatgggttttggtggctcgcctttttcactctgtgtgtgtgtgtctgtgtgtgtgcgtgtgtgccggtgtgtgtgtgtgtgcgcgcgcgtgtccctctctctccccccgtctctcgctcgcccgctcgctcgcgctccccgtgttgctctcaaggacgaggtgaaatccctttgctggtcatgaggcggcttcagagacaaacaacacaatgcgagtgcaaataacaaaaggcaaaaagacagtaggaacaatgggggaggcgagggcagcgcaccagccggcggtcaccgcggcccggcgcccgccccggggggtgcggcgggggcggggggggggcgcgggggcggtgccgggggctcccgctccctccaggtcgcccccgagctcccgcaagcccaccctgacctccttcttgcagctcgccgcccggccgccctctctatccatccgaagggaaggagccccagagttttcttccccgtctgctgcagagtaactagattgtaaataacgcggcgattacccacaccgtgcaggaattttttttttatctgccctccacttaaaggagcgataaaaatgaaatggcaggagtggaaggagccagggagagcgggatatctctagatctcgatggagctcgcatctataaatacgcattcatgtttagtcaagtccctttgtcaacttcttcccggcgcctgagcctcagccgctgctctgcgcccaggacctggcccctcccggccccctagtccagtggtcaggcggtcgggccggcagggagggcgcgcgcggggggctgcggggtccgtggaacctttccgggaggcgagccgcgggctgctgggcgcggaggctggagccgcgagaggttcggctgctgaagcggccactgcctcccagagccaggctccgcgccgcgcgtccccgccgccgccggcactgtgcacccacctactcctcggagattggggtaggggaaaaaagttttgaggcgctctcatctctgcctccggggtggttgaactggtttggttttgtgttaagc

SEQ ID NO: 334478 - DNA, 915 bp, Homo sapiens
  chr12:25055614-25056529
  hyper
tcctcgccacgctccggagcgggttacccatgagggtgctagacctgggcagcgggaacctcgaagaggtggagattgcaggctgggactccagatttcgggcagggatgcggggaagggaagacgcctcgctggaggcggaatggagggcaaggcgaaggaggatggtgcaggaaacggcgacaaggcgcccggccaggcccgcgagctaccgagacccgggttccaatcctccccccttccgcaaacgcccgggttcgaggtacctggcgggcaagggccgcagcggagcgaagcgggctggccatggggaggctgcggggacgcggggctgcagagagcggcagtggcacggagcgcgcggctggaagcgaaagcaggcggtgtggccaagccccggcgcacggcccatagggcgctgggtaccacgacctggggccgcgcgccagggccaggcgcagggtacgacgcaacccctccagcatcccttggggaggagcctccaaccgtctcgtcccagtctgtctgcagtcgctaaaaccgaagcggttgtccctgtcaccggggtcgcttgcggaggcccgagaatgcgcgccacgaacgagcgcctttccaagcgcagatatttcgcgagcatccttgtttattaaacaacctctaggtgaatggccgggaagcgcccctcggtcaaggctaaggaaacctcggagaaactacattagggcagcttttccaccgactccaaatccaactgacaaaaagcagtttctgccctcgagagtttgcgggcggggattgacatttgtgcgtctgctcttgtctgccactgaccgctatgtgcaaactgaagggggagaacgtgaatccagcttttagatttccctgcgccacctacccaaaccgaatttgtaactc

SEQ ID NO: 334479 - DNA, 921 bp, Homo sapiens
  chr12:25101390-25102311
  hyper
cgttctccctcccctctccacccgggtcaactcttccagccgctccctcctgcatcacgaacacacgctgcaggaaagcgcatttacagcccgggacatccccagacctcctctccaaaattccccacctcctgtgcataggagaaactgagagaagccctcacttcctttccaaacttcacaagcaggggagggagctgtagcagactttcacctccgttcccaaaagcgaatgtgaaaaagtccgagaaggcacgtcctgcgagtggaggttaaaccgaaatctgaacagaatgcacggtccccgcaaactacgattgataaagaagatactgagacgtttgcgggggatataagccatggttgtctcgccttcctcccctccctgccaactatgtttcttggagaaatcgccggttcgattcacgcacacatttttgtaaaacacggacaaaaccataagtagttaccttcattgttccgtcggccacgagggaagctcgagctgagcggagggcagatcccaagggtcgtagcccctggccgtgtggaccgggtctgcggctgcagagcgcggtcccggctgcagcaagacctggggcagtgcccgaggcggcggcgagtacacgtggcgggctggattgcagaccggccctctcgcggcggagactcgcgacctagcggattgcatcagcaggaagacactaaggctgctcccccaggccgcccccagatggtggagtctctcccagcccgaagattcggagccagcgcccagacccgagcctcactcactgctcactcccggggtgcagggcagaggtgccagtgttgcaagcaaatgacacggttacccccgaatcagccactgtgggtgcgtatccgagtgtggggatgcccgtgtaacatttatatggagac

SEQ ID NO: 334480 - DNA, 409 bp, Homo sapiens
  chr12:28122217-28122626
  hyper
cgggcaaggagcatcggtgaccgctgcaagccctcggcagcatcccagcttggcagcccctccccctggcctccccaacccggcgccctggggaggatggggcacttacaggcggcggctgagaccctccaccgagcgcccgcaggagggcaccgcgtagctcagcaggaacaccgcgacgctccactgctgaaccagtctccgctgcatcgtctccgctcgcgctcgggacctgcaacagaagggaatgggacccgagtgtcagtctggactctccatctccccgcactactccgctccccctttttagcccgctctcaaaaagcctcttcaacatcaagggcatctcccaagttgaaaagaaaaaaaatttctctggagcctctcagcacttacttatttagcaacc

SEQ ID NO: 334481 - DNA, 868 bp, Homo sapiens
  chr12:28122887-28123755
  hyper
gaaccaggccctttcgttccagagccacttgtagcgaaacccacatatatatacatagctgtctgtctacctcctctggtgggctggttgcttccggaaagttgattccacacaccctgagaacaagtttcaagtgcgtgtgtcgtcgatcaggagggccaggtggcggcgagggcgggtcgttagtggcagccggagcggcagggaggcggcagccccgcttcacgggcggggagacatgctggccgggcggcgcaggttggaggcgagttgaaaaccgagcggaggaatgttcacacgctccgaggcaaacctgccggagaagtgagctagtcgcaaagaggtggcgccctaggaacgcgcgcggggcgagcgagggcgcaggcgggctggcgggcgggcgcgcggggggcgggggcggcgacgggcggcccgaacgggccccgcgccgcccgagcgagtggaggggagccccgagccgggaatgagcggcgagcggcggagctcccccctcccgcgctgccgaccccggagctgtcaggagctctgccgagccccaccccggagcccgggccctgtcgcgccatccccgtgccgggggcgtgggcgcatccgcttgctccctccaggcccggccggctcctgccggcgcggcggatccgggagccgagatccccgagggcgtgcggactgccccgggcagccggcggtccccggcgcgccgagctggacgagcgggcgccaagaccaccaggggcggaccgacgaggaggaggccaaggagctgggccggggaccgcgggcaaccgggagcctgcgcggagaggacgcgggctgttggcctgtgaatttaaggagcccgaagctc

SEQ ID NO: 334482 - DNA, 873 bp, Homo sapiens
  chr12:28127762-28128635
  hyper
cctcccctcctcccacccagcgtcctcatccccaccgcctgcgatagacttgggtcgcccattaggaagctgatccgcagggacggggcaggcttggctcctggggatcttaggctccatgggaacttcgggggtctcggggcccgtgagcggatctagctactacttcccctaggttctcctcgggcttcagtccctaagagtctggactccggactgccgcacagaatccttcttgcccggagcggtattattgaggtctttgcgttctgccccgccctgtcccgccggcttgggtgcttggtttctaacccgagtatactcggagtctctggtcctgcgcgcccccctcctcccgggagagccccgtatctggctgcgggtaagggaaaacttcgggaaccccgagacccaaggacagggtcggagggagcgcgcgaacttcctctgagcagggctcttcctcccctcccctctccctccaggtcaatttatgactcaaacatgagataagccctaggcagacggtgacgctgacttccccgtgggggcgcggggagagaaggatgaggcagacgtaccccctccctggcctggccctgtccggggccgcgtcggggtgtggaggggcgactcccttcctccgggagccccgactcgctctctcccagcgcgcctcccctgcgcccgtaaagctcggccctgccggagccccgggacccgtctgttttatttcacttaaagcgatctgcaaagtcaaggccgggtgaggtgcggcgcgggagaggagaggatatgaacggacgtggaacgaagttctgtctgccaactccctccgtctgattcttggaatccggtggcatcttaaaggac

SEQ ID NO: 334483 - DNA, 808 bp, Homo sapiens
  chr12:29301988-29302796
  hyper
cgaatggaagcgcggggcgggcctgcgcgcgcggccgccctgcccacgatgctgtcgcccccgcgacctgtagggccttcgctggcccctcaccctcctcccgccccgggctgaggctgccgccggtttcgcgcccagtgccgaggcagcggcggagccggggaaggtcggagggagggtggtttcctcccgccccacacccagtctccgagccggatatatagagtgtcacgtttgggagccgaaagactggagccgtttccttgtggctggagcgcttcccgtagcctcggggaaggagcaggatttagaggaccactagttggaccccatcctcgtgctggaggaacaggtattccagggtccccagccctggcgctcgcagagcccacgcgctccaaaagcagagaccggactgggggtggcccaggagggagggctcggctgggttcgcagggcggggcggttcccggcgggacctcgaggagggtgggtgtgaggccgggtgggaggagagaagcatttgcggaggctctgccccctgaagctgcccccggctgcaccccaatcgtcaccggccgtttacgcgcggttggcgtcggcggagcccgccaaggtggggcgcgcgggggttgcaaagggcagaaagccgggaaggacccagcaaggttaatgtggggggccgcgccttggggactggggacccgggaagagaggcgcggggccgagtcccacccaggcctcctgggcccttggggctattcctggagagagcgcgaaaatgccggggccacgtgtgaaacggcag

SEQ ID NO: 334484 - DNA, 1824 bp, Homo sapiens
  chr12:29935696-29937520
  hyper
cggctggggccccagggtccctggagaagcctaggctctgcgttacctctctctgcaccttctaaagtctagatccagagaagtctggcagattggagagcctctgggagcagccaagggtgcaaggcgggggctggggggctcgggagagttttctgctccctctcctgaacccacgcagccctgtcagctcaaggctcccgcctcgtctcatctgaacgaaacccttaaggggctgatacacttctcatctgcaaagctgcccaacagcctccgagaaattctctacttggaagcatcgccaccaccgccacccctccggaaccctctgggtccgcgctagtcccacttggtcacgatccggcaggcgaaggggtgcggaggcggtttcaccagcccgctcccagccctgcctcgagagagaagcccgctgagagggcagacagttgagaaactcgatcccaactccccagccggcgcctcccgaaccgccccgagagcccagattagccgggcagtggatcccggagcaaagtgccatgcacatcctggagaggagggaggcgtggagggaaagggcggcaaaaatgaaatgcccccaagtcagtcccgcaacttctcccggtccgagggacgggcggagggtagaggaggcagcggcggctagcgcgaggtgagggactcacttgaaggtgaggacgcagagcggccggtaggacttgtggctggtgttctcggccatgcccttgccccagaagtcgttggtgaagatgccccagcggagcggggcgccgggccgcacgtcggggttgttcacgatcgcccacacgtcgtcgtgcacgaactcgccctgcagggagcggccgtagcacaggcagcttgccccggccagcagcgccgcggccccggccggcgctagcccgcagccccgccgccgggagggtgtgcggtccccgccgccgcctcgggcagaggtggtcaccaccatcgcgccgccgccgccgctgctgccctggcctctcccgggcgtctggcatcctcccctaccggggccccggcggcgcgcggcgtctgcccggaggggggctcgggcatggtgctgcggcagctggacccgccgcgagctccccgcgctccgccgccgcctgcgccgcggagttggcccagctgcaaataaacagcagtccccccgcctcccccggccatcgccacctcctccgccccactgcgcatgcccgctcgctctctcttccaccgccccccaatcccgggacgcgggccggttcccccgcacagcccggcgccctctgcccccggcccgccttgcttgcaggtggaccggggttcgcggcgcgcggctgcccgggagctgcggggaaggacaccccaggttcccacttgcggtgtccggctgtgctcacccccacgcccccgcccccatccttctcccccgaatggggctgggaaggggcacatctggcggacccctcccgggggacccaggagggtttagcaggtgcgcagtctggaacccccacacccaccttccagggagaaaagtgccgctgcttcccgggaagttcccggcttttcagcacccgggacaacagcagcggcgcccggagagacgctctccacccgccccgcgctcgcgtccagtcgccggctctgtgctctcctgcccgggctttctctcacccgcccggcgcggcgtcccgcttggcggaggaacccgcggggatagggagcaccttcctcaaagccaggagaaggggtctccctggacaaggacatcctgctcgccctgcccgggtgtgttcagag

SEQ ID NO: 334485 - DNA, 630 bp, Homo sapiens; identical to SEQ ID NO: 236216
  chr12:30322873-30323503
  hyper

SEQ ID NO: 334486 - DNA, 895 bp, Homo sapiens
  chr12:30948583-30949478
  hyper
cgacgcaggggacgcccacttgtctgacgcaggggacgtggctgaagtcagtcgggccgcccgcttgctgcacggcagccgtgggactggcacaggctcctcggcagcattatgggcagctggtagagcggccacttctgagagccggatgggccttccgaggtcgggccgtgccccgctgggcagcgcagagggggtgtgtagggcacgcgacttggagccaggtccagacccatcctggctcctctcagggctccttcccctgcccccattccaccccagccctgctggctgtcccgcaggacccagcgccgcggtagccttctctgaactgcggctcaggcggaggtgtcactcctgcctccagcccaggagggcaggtcaggttatgcaacgcgtgccgcgcgatctccccccacctccaacccccttttctcccgggtccacaccgcagttcccaccgctccgggtgtcctccccagtgcgccgcgatttttgtgtccaagccccagagtccctctgagaccaacccccagccagcacagacttcctgccttcccagctcgggtgagtagccctgaaacgcccgcccccgccgccccgcggccgcagcatcctctcgatggccgcgcctccgggacgacgtggtcccctcgagtagtacaggagctgcaagagaggcgcgccggggccagcaagctctagaacagcaggagcggccccagttgggaccccgggacgacgagtggccggcaacgcggcgcccgcatggcccaagcagtgtccgggaggggtcggggccccggactaggggcgcagcgaggaccgcccggaggctttcccttgggcagctaagtccgagtcagctctactcggatttccagcttccagcccc

SEQ ID NO: 334487 - DNA, 556 bp, Homo sapiens
  chr12:30975325-30975881
  hyper
cgctccacagaagctcagcacatcttcatttggtgggcgctggtgccctttccctgtgggcggcgccagctcctttctcggctgcctgcccagctgctgggctggagctccgcgtgctgggtgtaggtcaagtgatcccgtcgcgggcgggcggaggtggccgggcagccgccgctgtgcccgggtctggggtgagctgcactgctgccctgggccccggctcccacgcctgtttcccggagctccgcggctccggctgcttcgccctccctctgtgggctgggctggggtcctcgcgagaagtcctgccccgctcccttctccaaatccacaggccctgtttctctggagacagggaggctcatacaggatatgtgcaaatgcttttattacaagctgagttgaaagacacccgtttgctctcgggtccttttggtgagcgccgcaggaagccgggctcctctctccccagaggcggccgcaggttcgcggcgcagggcctgcagtgccaggagcaggcaggggcctctgccctccccttcgtccctgatctccc

SEQ ID NO: 334488 - DNA, 1183 bp, Homo sapiens
  chr12:33049138-33050321
  hyper
accagtgaggggcgcggaccggcggagtagaaaaagaaaggggtgaaatcttgaagtgagttagttaacattgatagatatgtacaatatttaatatacataggtacctatatgacaaagctgagtaataggttatggaaaagagtgctttccacaagcaagtcggtcataccgaagacggcgagcaacaggtgggcagaacacggggtcccgcactcccagcacgcggggtgagggcgggataggaggaggtgaccgggtgtggggcagggggcggcgccggggagcggcgggctccactcaccgttgcccacggagctgcggcccttccgggcgagggtctgctgcacctgctcctggatccgcaggctcttgactgtctggccgccgcggccgctgctccccgccagcttcagcttggcctcggagggcagcgccaggctggagctgtccagttgtcccaggatctgctggcccaggacggtccggatgtagccgtactcagctggggcgccgggggctgccatggggccggtgggggcgaccgagctgctcgcctgcctctggactcgcgggcgaagccgccacggagctgggggcgctggcgcgagccccgccccgctcgagtccggccccgcccctggcccgccccccgcgccggtgagaggcccgggccgggggggagctcggcctcgtgggccggacgcccggccttccctgaggagggggcgcggctccggccgggcacgcgcagtcgggcccgggggcgggggcgggggcgggccggacccgctgagcgcgcggacacctggagacttgtacccgcccgcggggaggtggggagaggggcgcggttcgcctggggtcgcgcacgttgtcggagtcccagcggataccgcctgccggggccgcgccccgctctgcccacgccccgcgctggacaggatggatttccgctcgatgcagggaggggctgccctgcaggcaggtgagccctcgagagtcactcctgttcttggactgaggcttgcctccgggatccccgagcgagtagtatgtctggttagtcaggctttgtcgcactgttggaaacgtttcctggttttcctggacctgagggtgagaaagggctatttggtcaggcggaaagggcaatatgagggaaatgtgccaagaagataac

SEQ ID NO: 334489 - DNA, 678 bp, Homo sapiens
  chr12:33592378-33593056
  hyper
cggcgaagcacagctcggtgacgatgtgcagagccttctggcacagactgttcactccgtcctccttgtggaaactcatcgtttggcttttctttcgttttctctttttttcccagttagccgtcttttcctcttcccgtacctctaacccctctggcgccctaagccatagtccgcccgcggtgactttggctggagattgcgccgctgagagccggcaactcttaggagccccacgttggccccatggcgggagcggagggcgtaggggaaggagaggcgcgcgaggaggctgcggctgccgcgaggtttgcgccaactctcccgccgcgcgagcgagccgaggcgcgctggaactagagacccggcatggagtgctgaggggaggggggagccgtaaaaaagccaaagcaagccctcgactcgcaagcacgcccccctcctctccccagcgcactggtgtttctggcgggtgcctggcggcgacgcgtccaatcgcagcccggcgcgggcgctaggtgacaggcggcggagcgcgcagacccggctccccgcgtcctctgaagaagggactcgcgagggagggagggagggagggcgggcggcccggcgcccctgccgaggccggggatgctcatcgttgcccagagttggcccgaggagccctctccgttttcc

SEQ ID NO: 334490 - DNA, 271 bp, Homo sapiens
  chr12:34260770-34261041
  hyper
cgcctggctaggggcaggggcgccgccctcccgcggctccggagctggccaggggaagcgcccgcggggtccgggagcctggctacgcgtgtgcacctgctcctgccctcgccgtggcctctgccaggaccccgacgctccgccggaccctgtcctccagcgtggctgcggccccatggcctgcgacagccgccccgtccggaattcggcgccctccccggggcagaggccgcggcgtcctcaggctgtagcgccggcctgcgacccccac

SEQ ID NO: 334491 - DNA, 1377 bp, Homo sapiens
  chr12:39298516-39299893
  hyper
ccttggcctcccaaagtgctgggaatacaggcgtataaactgtactgagccactgcgcccggccgagagtcagtttttacaagcactcagatgtgggcccgaaaacaaatcaaaacaaaagtcgtgacttcccagatcttaggtaaggcatagattcgtctgcaaggagggccgaaatctctacctatcaggcaaaaggcaaaaagcccggaagggtcggggagaagcaagctggaaggctccaggaagtgggtggggaggaagctgccggggttggagccaaccctagcaacagcaggtttgcacacgcctagcagaggaagtcccgggcctaagcgtgcagcggtcacaagagcttttggcagtgctgtccccttcgattccggtcatcacccaaccatccagcccgggtttggggcggaaaaccggcttgtaaagtgggcggcggccggtgttcccacagctgagtcacagcccagccaacttttacagcgtttcccagaaagaaaatacaaagtctcagtcccggagcccaccgcttctaattcccgctcccctgtgtcacctgacccggggtaactccagccccactactgagatatttcccactcatggcgcaacttcttgcctgcgcaaagcctcgtggtaccccgagcgctctccaagtgctaccaaccccacagatgagagggcaggagagaggggaagggctgcgtcctcacctgcaggacacggacacctccacccgcgtggccgggatggcagcgctcagctggttcaagtccccgatgcccgcagtgctgttgtagcggctgtccatattgggaggaggcgccttggacttgtccggcgcccacaaccacagctcgggcggactgagggctagctcccgtcaggcggggatgggggttgagggtggaggcagaagaaggaggcggaggcagcgcgcgggatgggggagggaagggaggaggcggacctccgcgcagagccacgagggaaccgctagccagtcctgggtgaaactgacgctgccaggcaagtggcgcgcggggatcccggtttcccagcccccttccggcaggcagcagcccgggcgggggacacactccgtgatcccctcctggctggaggggtcaggcttggtggacccagcaagcagcctgatggagaaggtggcaccagacgcagacccctaccgtccaggaccgcaagccctcgccggctctgcgtgcttttaggttttgtctccacctctgcacacccacactcgcctcctgggccgcgacagcttccttctgtcaatcaggtgtggacgggaaggtctcgaagtttcctcgcctgagttgaaagctggaggtgggggcacctctgccc

SEQ ID NO: 334492 - DNA, 890 bp, Homo sapiens
  chr12:39299907-39300797
  hyper
cgttataaggtccccctccccacaattggttctcacctcgccctcggagctcttgggagatccctccgtccctcctactgtgccctcgggcagatgagtctggtcccagcttctggactgcccactgtcggccacttgagagttggggacggtggggcattgtgacgctctccaaccttggaacacggtggcaaagtggccgatcaatatatgggacaagtgggggcgggggggcggactctaaggtggaaaaaacaatactacttgggatttaaggaagcaatctggattctgtctccccttggttcttcggagcttagaggtctaacggcgacattcctcctacagtaagggctcttctgggtccctcgtttccaaaggcatgaaagttctgacctgaaaatgggggccggggagggtgatgtcacaaccatataacgcagctccttcagccgactcccacccgcaagaactgagacctgacggataaaagcagagaggagtcagagtgagcgctgcgtttgggaaactgcattccagggcagcaagactggtgccaagacggagtcgtggcaaaagcatccggaggtagacgaggcgcccctccactgcagggacctttgttccccgcgccttccctcctgcctcacccgagcgcctgcgggtcccgggagctcgccaccaggcggcgacggagaacaggatgcggcgcagctggaaggcagagggtggagagggggcgggtgtccgtccgatttaacgctccaagcacggagtttccagctggttgggctaagtctgggaggagcagtttttgcggtggaggacttgccttgcgttgtaacattttaatccacttgcagcctcctgcctagagaatctatagaggc

SEQ ID NO: 334493 - DNA, 819 bp, Homo sapiens
  chr12:40618264-40619083
  hyper
cggtgtcctcttttcccagcgccctgatttctattcttagatctggagataggcggctttcatttttcctgctcccagttcccagaccttccgtggggccgcaggatccccggctggcgggtcgcggagggtggccggccgggctgcgcactgcgcgcctccgctgcggggctccgggcctgtggactcagcggagtccgctgagtcagtttcttcccgcgcgactcccggccgcgccgccgctgcggtggaatctggtcccaggaggcggcgtccgcccggggtccggtctaggcgtgcgtgggggccacggtcacggtcatcccagccaggcccggctccagcagccccacggccgccgccagagttctgcgcggcccgtcgcctcggcggagcctctggcaggcccctgagctcgtttttggggcctgagtgggggaggaggaagccgagcaggagggctccggagagggagggcaacgcggggcggggagctgcctccttcctcataaacaggcgggcgtgggcgccgatggggcccgcggggagcgctggctgcgggcggtgagctgagctcgcccccggggagctgtggccggcgcccctgccggttccctgagcagcggacgttcatgctgggagggcggcgggttggaagcaggtgccaccatggctagtggcagctgtcaggggtgcgaagaggacgaggaaactctgaagaagttgatagtcaggctgaacaatgtccaggaaggaaaacagatagaaacgctggtccaaatcctggaggatctgctggtgttcacgtactccgagcgc

SEQ ID NO: 334494 - DNA, 766 bp, Homo sapiens
  chr12:41086129-41086895
  hyper
cgctggtcctgggggtgagagtgatatccctgttgtccaatcagagaagcgggtttccctgtggtccccgccccactttccctgctgccccaataaccgccctaaaaggccgggcttctgctgtcaagtagccagggtgggctccgccgaggcgaggaggggcgccggtggggagatgcgctcccaggtgtttgcagcggaagtgggaaacctgtagggtatggtccagctgtgccgcaccgaggcgagcaggagcagggaacaggtaggaagctggacttttccttctttgcagataaaataaagaatgcgcatttccatgctgttgcttcccttcccccagccccgcccagccctcgtcacccccaaatctcctgtggtccctgcagctctcgccgtgcggcgcgggaaggactggggcggaggtggctggggtgcggggaagcaggggtgcgggatgccggagccctggggtgccgggcaaggcaggacggcagtgccctagaagagggctccgagctcggggtctgtgtctcgtcaactttcctttcggaggctgccgccgccagcgccgggaactcgccccagggatgccatatcgcctcggcaggggaggggtggggaagcagagaggtcggcagcccggggcctgcaggtctttttctcccgacgccggcccgcacctgctcatctttcccatcccacctgggcgcctggctagcgcatcccggaaaacctgggagcggttgcggagaggggaggaagc

SEQ ID NO: 334495 - DNA, 819 bp, Homo sapiens
  chr12:41582155-41582974
  hyper
cgccgccgcgagacggctgccccgggggtggcccggggaaggcaggggggctcggagaagacggactctgctttcgctccccctttcttccccatccctaacatgggctttgccctggagcgcttcgcagaagccgtggacccggctctggagtgcaaactgtgcggccaggtgcttgaagagcccctgtgcacgccgtgcgggcacgtcttctgcgccagctgcctgttgccctgggcggtgcggaggcgccggtgcccgctgcagtgccagcccttggcgcccggcgagctgtaccgggtgctgccgctgcgcagcctcatccagaagctgcgagtccagtgcgactaccgcgcccgcggctgcggccactcggtcaggctgcacgagctggaggcgcacgtcgagcactgcgacttcggccctgcccgccggctccgcagccgcgggggctgcgcttcggggctgggcggtggtgaggtgcccgcgcgggggggctgcggtccgacacccagggctggccggggcgggggcgcgcgcggggggccgccgggcggccgctggggccgcgggcggggacccgggcctcgggtcctcgcctggaggcggcgcgagaaggcgctgctggcgcagctctgggcgctgcagggcgaggtgcagctcacggcgcgcaggtaccaggagaagttcacccaatacatggctcacgtccgcaacttcgtcggcgacctcggtggcggccaccgcagggtaagcaaaggggggtgggcaccgcgggcatggtcgattggggtgggaaaaggagcggttctttctgac

SEQ ID NO: 334496 - DNA, 1342 bp, Homo sapiens
  chr12:43944720-43946062
  hyper
gcataagctgacgacggccttgtaatcctcctgtgagttgacctggccgcggtagaagcagtggcgcaggtccgagggccctgcgtcgctctcccaggccccgcgctccggggttcccaagtgcacctcggtgtagccggcggccagaaaggatgcatcggcggtcaggttcagctggaagagctgcccgtaggcagtgaagcgatagtgggttcggaacggcatgggttccagcgcctcggagctgcgtttctgccggctgaagtggtggctctgagggaacacttctccaaactcattgacccgctcggggatcactacttcgtaggaggtcagtgtcctcaccagggcttctgcaacaacagcgacaggaccagtgagctcccacgcgttcctcattgtccaactctaaacttcttccaccaaacgtccccgctaaaggtcccaggtcccagtacagccaggggcaagacaaatgcacacatgctgatgcgcacgcacacacacacacgtgcactgggacggttagtgctctgctttcccacacccccaacttgccctaccctccccaagcaaagaccctaccactaatggccctaagcaacccacttccttccccagtacctcctaacctccccgcagcccccaactcgttccctccgggtgcaagcgaccccctgccccttgcgcccccgccgtgtggtcctgggagtgcgatgcgtcttaggcgcgcgcgattcctcgaaacccggcgcagtcgcgacctctccggctgactggtccgggagtcccgggagctccagcagggccagcgttccccaacgggctgagccgctcgtccccgcgacctgcatgtcccactcgggccccgcgcccccacttagccgctgaaggcgtctcgcggtgactttaccttgcctggggtggaagtcaacttcccaagacctggtgatgaagagcgagagatggtagagcagcccagtcagccacttggccacccacatggttccaccctggggaccccgatcggggaggcccaccagagccgccggcagccaagccggcttccctcgcgctccgatccctctcctccctctcgcccgccgctctccgcgcctcagcagcctagggaacagcagcgcgggccctgggccggctggtccagccacaccgcctgtctccgctcgctgagccgctgcttcatcgcactgcagcctcaccccccttcctgcgcccgcgctgccctcagaaactctctgctcaggttcagctcggcgcggggaagcaactcgacctagcaggaatggtgccaatatagccaccccggaccggcgagcgccgc

SEQ ID NO: 334497 - DNA, 1481 bp, Homo sapiens
  chr12:45269418-45270899
  hyper
cggtctccaaggcaagcacagaaaaaaaaaaaatccatatccaaacccgcccccttactccaagcttcccactccagacctactttgggtccgggaaaagcgaggcttccccagccagcccatgctgccccgaggcgggagccatccctttccccagccccagctctgcggccactcacctgctccgagaccgaagatcaaacagaatgttctcagtaagacccgagactccatggtgcggatcagctcagtccatcgtctccctctttaaaaataaaaataaaaatcgaagaggttcttggaatcaagcgggaaaataacgtttgtctctcctgctgctgcctcggatttactgatcagtaggattaatacgctttggttgcctaagaaagaaaagggaggcctccccaggcgcgtgaagaacttagaccctccaatgcgcacatcattcccacacgcagggccgaggcggcagcgcggcccggagggggcccggagggaggggtcggactcgccccggcgcggctccgtcggggaattagctcccgagccgaataaaagcagccaaagactcgcacacccggtagaaggggggcggccccaagaaagcccgggctggggcggccccgcacccccccgtcttccccgccgcccgaacctgttgtaaaggcagagacaatggagaaagctccgggagacgcgcggagagactgctcctccggggagggaggggcgggccgggggaggcggggtaaggaggagggaggggccgccgagggcgaggccggcgctcagcgtcggtctcccgcacggtctcctggatgccaaacccggtctagggagcccaggagccgttgcagcctcagctcttctccctccctctctcgatgacccgggcaatgccaacctcctttcgggattgaaagctctaaatccaaggtgctaagttgatgggcggtctttgctctcacccctcgatttcgggcgcgtgtcttgaaagacaggagagaaaaaagaccacccagctgcaggaggcaaggctggagcgagtagcgctcgcctgccctttaagcaaaggagggaagcccatgtgcactcgtgcactgggctccggagcagccccggggtgcagggcactccccctccagggcgtgcggaggaaggccaccaaaacacgctgcactgccgaggtggagctgggcaaagtaggtagagactggtggggacggatggcgagcctgggaagccccgggtgtcctggtggagaggttccctgccgggggcggggcgctggagagcttccccggcgcggagagcttcccgggcgcggagagcgcagagaacttggccaggaggtgctggacagctccggaacccgcgcgccccctgccaaataaagcgtggagacccggactcgggctctctgggaccagcatacagcagaaggcaaggggaactgagccagggcgtctgttcacgcc

SEQ ID NO: 334498 - DNA, 984 bp, Homo sapiens
  chr12:45444133-45445117
  hyper
cgcctgggccccctactcccgaagtggcatctccactaaagctcgagatgctccaggaagttcccaaaccggctctccctgggcgcagtgcgcaccgccggcgctcccagatccctggaccacccggcctgggggcgcgggcgcggctggggagggaggggagagctggctcacctggcgctgaaggctggaaggtacagtctcggtcccccggagcccggcccggcagcctcgcactgtccgcagagggactgagcacttgaaaagcccaccgcgttccgtagggcgccccggcggggctaacttgttcggctgcggggcacagctttaggggaactgggctagcaggcaggggccggagctgcgcgcccgcggtggccagggcggtcgccgggtcgtggggcgcgggcggctgcagcctgggcgttggggcgcccccgacccgcagcaaattctcgatcaggaaactcttgcccaggttgccaaagccgggcgcagcggggaggttgaggagcgcggaggaagccacaacgtcccagtacgcaccggcgtgggctgcgaccgcgctggggagcatagtgcggcgccaaccggtctgctgcgcgcccgccttgcgcccgcctgtcgcccgggcgccccgcaccgcacccagagccgcagcttctcgccgccgcctcccgcagggctggagcgcgcggagccaggcagggaggaaaggccacccgggacggcggcggacttggaacgatattatttatttgcgttgggcgtttttttaagggatgggaggagtgagtgtgggagggggaagctgtgagtttctctggccgacagcgtaggctctgggagcgcaggggggagtctttccccctctctatgcagatctggacgggttttttttttgttttttgtttttttctggacggacggaaggtgtgtccagcccatccattcatgtcaccagccccacaaagtgacagacgc

SEQ ID NO: 334499 - DNA, 47 bp, Homo sapiens
  chr12:46663360-46663407
  hyper
cgggttggcgggaaggggaccgaagtggcaggggcggcggggagctc

SEQ ID NO: 334500 - DNA, 458 bp, Homo sapiens
  chr12:46766939-46767397
  hyper
cgggggacacatcaaggcttttgggggacaccaccctcccaccaaacactttcttgattgttatttttgtgatttacagtgaagttttgtctcacaaacttgggccaaggcagcaaggttgtcctgatggtttgttgttctttcttttccacctagacctgctttcactcttcaaaactagccggaggtcggcgagcagctccttttcgggatgtgctttttgtacggccatggaaactggactagcggaaaggctaccttttggccagcaagccaggccccttagaaagaggccccagtggggagcccggcgctcctaaggccgtttgggagtccccagttttccactcgctgacacgttgcttctcttatcccaccaccgccgccccgggcaaaggcactgccttgtctgaatgcgggtctgaggcgctttctgcggagcctggtcctttcccttc

SEQ ID NO: 334501 - DNA, 302 bp, Homo sapiens
  chr12:48299205-48299507
  hyper
cgtcgtccgcgggacgctggggggcgcctgccgactggcaccggcggctagctccgcacgaatgggaaatcccgggctccgctcgccaacctgttactgctgcagaacgccaggaagctcagcctgatcccacagattagggtaaaatatcccggggggccgaagtggaaaccggagttgcgtcattgctcccacccgatatcaccttggcagcgaccgcggctgaccacgttcccggcctgtcgcgaatctcacccaagggagctgagtctcagcttccctggtccctggtcccgagttcc

SEQ ID NO: 334502 - DNA, 1353 bp, Homo sapiens
  chr12:48397567-48398920
  hyper
cgtttgcttgctccctcgctcgcgctctctctttcctacttcacctaagttcgatgagttgagatctgtttttgctgaactcgaagtgcttcgaagaggcgagctgtgtgcatgtgcgcctaattatcaaagctggtggaaaagagcccatttatatctgtgcgcaaacttctccgagccaacactttgcaagttcagtattctagcgcaacgtagggacctgcaaatacttgcaactgcgatgggcaccgaggaccctgggacagagtccttgattggcagaactcttcttggtgaacttctgcgtgtcctgtgcctaagtcggcgcgctacgaccccgggagccgttttagcccggagccgcgggctccagagctggagcgggccggggagaaggatgctgagggacgcatggaaagcaggcaggcaggcaggggcgggggaagacttacggacatcctggccctgacaccgaaggacagcggcgacgagcagcgtcagcagcaccagcgtctggggagccccgaggcgaatcatggctcaccgcggggcctggctgagccgggcccgggcggagcgcagcgaaacggcaggagcacggcgcgggtccgggtctctaccgcgccctcatgcaggaggcccttggagcaggagggggaagcgggagacccggcagcccagcagcgctctgcgtcttctccccgccgcggcgcccgttatatgcgcccggcccctttcgaggctggcgaactcgcccaaaccgcgggccgccccctgccccccgctgggctgtaacctgaaccgcccgcccccggagcccgcctgggccctgccagtgcccgcacctgcccaagccggacccccctctctgggagtcacgcttcccgccctccacccctagtgcgccgagtggcctgatcgggcggggcgcagagatggcccctgccccccaaacccggggctgcggcgctgcccccctctgaccacaggcgggaagggtggcctccggcccctcccctcggagttctgccggagttggaggggagggggtgtttgcagaggcgcaggccgagagccctagaccaaggacggaaaagacatgggagggaggagggaaagcggtagaaaggagcagcggagggcgagggggcaccgcgtcaggcgtttgggagtggggacagggaggagcccacagagattcagagtcctaaatcttggagacaggctagctgagccagatctgaagggttaccccgacctatcttttagcccttccctgcagtacctggtccccagactcccacctggacgttcacagcgactgccctccacccctcccccatccagctctgc

SEQ ID NO: 334503 - DNA, 239 bp, Homo sapiens
  chr12:48551355-48551594
  hyper
cgcctgcgcactgatgagtgttcgtcagcggggcgcgcctgcgcagacttgtgcagcagctttcgccctccagaggcctagttagggggttactttctccttttactcagaggctttgcgcgcaggctcagtgcagcgttctcggccacagccgcagggttcgggtcttggtcctgcagcggggataaaaaagctcaggaaccctgagtgttgggccgattctatatggttgcacctgc

SEQ ID NO: 334504 - DNA, 1481 bp, Homo sapiens
  chr12:48576835-48578316
  hyper
gtcccatccttcccccgctccggtgatttctatagctagagggctgatttactgcagaaacctccgtagcgccctcctcctgcctctgcaccgtcaggcccggtgggtccggctccagagcgccaccgtgccccagctcaactctgggatcattagcaacagcctctctaccctctccgctttcctgcgcatcgctggaggacagggaggcaggactcgactttagcgccatcctctgagaaaggaatgcgggctggaaaaatctttccagggcagtctcgctgggtctcataccccggctaggggagggacgatctctcccggacttggaggtttctgcagcagacggctctctcatacttccctattaaacattgcgaccacacgctctttccagccttggccgaagccactgtagcgtcccctctcctccccccaccccgctagtccagactccagagccccactgcagcttccagccatcctccctttttcttcgccacttcctggttaccatggagacacacgtcatttacgtgccgtgcgtcgccttggaaacagaggagcatccgcgacacccccgggagacccaccccagctgctgctgccacactcgcgggcgctgcccggtaatggcctgggggagtcccgagtccgacgcgccgctggcctcagcctggacgcggacccctccgcgagcgcgtctgtgacccacggaaccggcaggcgctctctgcttgtggcgcccagagggcggcgctgacacgggcgcgatccgggaggcgaggcagggcagggcactttcgtcccggggcgatcccaagagacgccggctctgggaccctcgccgggtcctcgtcccgcagcctcttctcggcctcccgcgatcctgcctgcgccctctgcccaggactcgtctctcacgtcggctccccgccagtctcgggagcctccgcttccctcggctcccgctagcccctcccgggacctctccccctccaccccctcccccaccccggaggccgggctggacgcgacccagagcctccgccacccgcttctgccactcaatggaggacggtctgctggagatcatgaccaaggacggcggcgacatgccggcgcccctggaggtgtccaccgtgccggcagtgggggacgtgatctccggggagtacaacggcggcatgaaggaactgatggagcacctgaaagcccagctgcaagccctgtttgaggacgtgagggccatgaggggggccctggacgagcaggcctcgcacatccaggtgctctcggacgacgtgtgcgccaaccagcgagccatcgtctccatgtgccagattatgaccactgcgccccgccagggcggcttgggcgtggtcggcggcaaggggagcttccagagcgacccccaagagccggagactccttcgcctgggatcggggacagcggcttgctgggtcgcgatcccgaggac

SEQ ID NO: 334505 - DNA, 939 bp, Homo sapiens
  chr12:48591606-48592545
  hyper
cggagtggatacctggaaaggggaggtaaggcagctcaaaggacactgttgttcaacggagggaagcggattcaacaattatacaattcgctgagtcggggctttcactgcgaaagaacttggcttcggatccgtgatcaaggctgggagctatggaggtggatgtgattggcaaagacctctgctcaggtctgcgtcaaaccttgcttcgctcccatcccattctgcgccaatagggcgcagtatcccaaccattccactcggctaggaggggatcctaagcctcaaggtccgcatctcccgctggagggactgagcagccgcactggtgtcccagaatagatcgtgttccccagaggttgtcaggttcccgcaattcggcgcgggcgaggcggccaaagagagggcgctcattggctgccacagccccggtccgagaggccgaagaaggctgattcgtcacaggccgtcagcgcgggccacgcctatttcctctccaggttctaattaggtcaggggccctacagcctcttgggtagtttgcaagtgcgtcgcggagccggcctcggaaatatggcgacagcttcagctttcagtgtgagggagccgagggcccagccaaaccctgcgggaggcaattcctgggtacccttcccatattttcggtctttgggctgcgccgtggtaacctcagagcctggttgcgtgctcaccagcgacaagtgtctttcattgggacatgaaaggggactgggaagtgccgtgcagtttcagggtggtttctggttaattacattttcatgggttttcgcagagtctgggggcaatttgtgtcctccagagaccagggaccagggccgaagctacggcaggggagacgcggccagggccgtggcttctagtgcgagctcggttcgcgtccgttcccgtctggcgccc

SEQ ID NO: 334506 - DNA, 185 bp, Homo sapiens
  chr12:49297817-49298002
  hyper
cgaccgcggtcctccactgggtagggggcgctccaagacagggactcttctagcctgttgcctctccatgttagcgatatcctcgttgctaggagactagacgcgtcttacagtgggagagctcagcctcactgatagccggggatctctcctgttcgagggctgagatctccggtcccacaacc

SEQ ID NO: 334507 - DNA, 695 bp, Homo sapiens; identical to SEQ ID NO: 224348
  chr12:49363694-49364389
  hyper

SEQ ID NO: 334508 - DNA, 2132 bp, Homo sapiens
  chr12:49390799-49392931
  hyper
cggcggatacgggacacggcttctcgcagggccccggcgtagggccctggggtccgcgcccagccccggccggcgcgccgctggaccaccgccacttccgacccctcggctctgccctgggctcccgaagctgctgggcctaaggcttggtgctctgggctacctggctgcgtgggggcgtcccgcaggtttacttcgggggccgggagccccaagatgcggaaagtgcgctcctccagtgtggagtcccccggcctcccgccctcagcttcgcccccgcggcccccgccgggctggtgtaaaaggcgactgctcgacagccgcttttgacaaggggaaggaaagaccgtggccccttcaccctcctccttgccgggcttcgattggctgggggaatcccccaccacgcgtgtcaccccagagggcaaaagctgcacctgctgggttcggggggttggaacatattgggatcgtatcactacgcacgtggcgtcaatgacaaagacgccttccccacgggacaggccctgggaactgcggggcaaggtgtgggcacggcgggtcgccttccaaccctccagggtctccggtcctgccccctctccaagacccagagattctctccatccggtgcctccgggagcccagggtctggggagtgtctggctatggcggggcggctgctttttaggggagggaatccagcatttgggaaaccagatctgttctccttctttcccttccctcgagcccttgaggtggtgcctggatctgggagcgggatgcggggcacagggagccgcagttgcagaccccgcaggagctatctcggtgcctgcgctccctgtagctttggcttggggatggctgtcgctaccactgttcaggtcagcagcagccagccccaggcttttctccacgacccccttgccgggctctggccttgctctggccgctccacagcctggggatccccccaagagaccttgcccctgtcggagaccccaagccccgaggacgtcccggtagatccgaggatccagcctcttctttgtgcgccctccgtctgtcctggctggagtcgcagctggggctgatgaagtgggcacctgagagttcccggggcctctcttagtccccaaggtcctatgggggccttcgtaagaaggtggagccacgtagggtggcggccggtcccagcggcgtcgtggggcggtcccggcagaacctctcagcagcaggtgagcctcgtagcttgggggcccgggccgccgacctccccagggccccgcccacgccgaccctgggtcgctctgcggctgcgcggatggacggggcgctcgccccacaggcgccaggcgctccggccgcaagggagcagggagccctgccagctgggccacccgaggggcgttgcggggctccgggcggggtcgacccggggggctccgtcgggccccaccagccttgcgcctttttcgctcggtctccttggcctcccgctcctgcgacgccgctttccttttctcttgctcccgagctcggacctcggccaggggccccgcccgccagttggtcgcctcctgcagcaccctggaggcccagggccggcggggcggcggctgtggggatcccgggcgcggcccacacctgggacaatgagcaggaacccaggtgagcagtttgtgggggaagggagccgaggtccggggagctgggagcactggagaccacttggggcagccatgtgaaggggtgtgtgtgagtgtgtgcgcgtgtgcacgtgcgtatatgttaggactgaagtcgaagcgggactcctcgccatctctccatgcacactttaacagcgtctgccccatctcacctcctgccctttctcacacccacttctgttcccccaaacaacgggatgagtcaggccccagccctcgggagcgggcagaggtggaaggcgtgggaaagagaagggggaccagcagtgctcgctggtgcctgcggggaggtccggaccccactccccgccccaccactctcttcccctcacccctgcttcactcacgtgcggttctggaacccgcgagcccagtggctggcctggaagtccatgggctgtcgagaaggggcgcggc

SEQ ID NO: 334509 - DNA, 703 bp, Homo sapiens
  chr12:49485561-49486264
  hyper
cgccccaggcaccggctcccctccctccgcctgattcatcttttgtttcattgccttccctggcaccgggcatcgcttccttccttccttcctcctcctcctttgggcccttagcattaaccccttcgtgctctgggtgccccccagagaggtgcccaagaggagctgtgcgggatcaaggctgctggaaaaaggattggggtggcgggggttgcgcgaagtacaatggccattatccgggatgacttaaccgagcgagaatcctgagcccaggccgggaacgcgctgggagaagcggactcagcagctccggccacaaaggcgcttttcagccgccccggctcagggagaggaaagggcagaaagccgcgcccccaatccctgctccgtccgggtaggtcccctccccccgcgcgtccagtcttcccagttccagctaaggctctgccagtccggagagcccctatctctcccatctctgctctagatgcagcccagaagggcgtgggagtagcacctgagaataacggtctccttgtgcggatctggggagccccctgcagggtgagagcggagaagaggaaaagaagctgcggctggaagcctgcacctgggggagtgagaccacagttatcttggccgctccagcctgggagcgggagaccttggcgcgcaccatagcagggacaccgcgggaggaggc

SEQ ID NO: 334510 - DNA, 215 bp, Homo sapiens
  chr12:49487994-49488209
  hyper
cggtcatcaggcggtcggctccactgttctcctcatccttgaagatgatgtcggggttgtagttgggcacgaggtcccggaagcgctcggagccccttgccaccctcccctccgctggcccactggcgcccagggtccgctctggcacgccgggcacaaattgcttgtagagtagcggcacgagctgcttgcgcgcatagcggcgccggccaacc

SEQ ID NO: 334511 - DNA, 381 bp, Homo sapiens
  chr12:49582713-49583094
  hyper
cgctgactccacccaacggccacaaagagccgaagccgattctcaccatggttgctgcttcgcgactgccgagctgatggcggagacgaagaggagaggttgttgcttcttacagcgcgactcttaggcggtcgatgtaagagaacctgcggcacataggcggatgcggctccctatatacaactcggtcaccatggggatgggccggggccttttcctgttggtccagacccccaatctgcccagagaagccatgacaggagactggtgattggtgcaagcgacgtgggatgaggtaatctctcccccacccctttttctctagcatccgtagactgtttgcatcctttagacaaagagaccgtgcagaagcagtcggcc

SEQ ID NO: 334512 - DNA, 532 bp, Homo sapiens
  chr12:49658702-49659234
  hyper
cgccaatcagcgccgcgcgcccccactccgcgggtgcggccgggcgcaggccagggctcgaaggtggggccgcagcggcacggggcggggtctggggcccgccctcccgacacgtggccggggaccgggtatataaggcccttcggggccggccaccctttcactacttctcccccggactccttggtagtctgttagtgggagatccttgttgccgtcccttcgcctccttcaccgccgcagaccccttcaagttctagtcatggtgagtggggttccctcggggctggggaagagtgcgcgtcccaggggacggcgggcccggaaactactgcctgcacctcgggccgcgcccaggacagctccagactaccccgggcccctccggttaacctggcttgtggcggccgggctggaaggtcgagttcacttggcagacaccagttcgggccggaaaacctggcccgggtgcggccatcagtggaaatggaaagccctcttgatcctagtgagggctttccccgcagggccc

SEQ ID NO: 334513 - DNA, 770 bp, Homo sapiens
  chr12:49690662-49691432
  hyper
cggccgtaggagctgcgagacctgcaggtgagtgtggagagccagcaggtgcagcaggtggaggtggaagccacggtgaagcccgagctgacggcagcgctgagggacatccgcgcgcagtacgagagcatcgccgcgaagaacctgcaggaggcggaggagtggtacaagtccaaggtgcaagagccgggagggcctgcgaggcgggacgctggggtggtgtcgcgcgtcccagccgactaaagcctgggttacccccacttctcagtacgcggacctgtccgacgctgccaaccggaaccacgaggccctgcgccaggccaagcaggagatgaacgagtcccgacgccagatccagagtctaacgtgcgaggtggacgggctgcgcggcacggtgagtacgaagctgcgcgctcgggcccggggagcggacgatgaaatgttctgcaactggccccttccactctcctaccccagaacgaggcgctgctcaggcagttgagagagctggaggagcagttcgccctggaggcggggggctaccaggcgggcgctgcgcggctcgaggaggagctgcgacagctaaaagaggagatggcgcggcacctgagggagtaccaggagctcctcaacgtcaagatggccctggacatcgagatcgccacctaccgcaagctgctggagggcgaggagagccggtgagggtggagctgctggggcggggcagggcggggtcgggactgggccgggcagggcggggcctgggcagg

SEQ ID NO: 334514 - DNA, 460 bp, Homo sapiens; identical to SEQ ID NO: 236283
  chr12:49729806-49730266
  hyper

SEQ ID NO: 334515 - DNA, 1359 bp, Homo sapiens
  chr12:49735805-49737164
  hyper
cgccgcgcgcagcgcctcggagccagagaccgctgcccggtgcttcctcccatcttcttccatcccttccctcttgctccccctccctcctgcactccctccccggcggccgcggcctttattagggattccgcggctgtcggtcccgccatccatcctgtccgccggcaattaggcggccagacaaagagcagcttcggatggatgagggtcccagcggatcggaaatgtgaagggtcagcgctgccgcccgcggcgcaccccgctcccccttccgcataatcaccggccgcccgtcactcagccggccgcccagggagctcctgggcccggcccgggagagggcggggtgcggctgcagcctaggcgcccaggacagggcgagggcggacctgcggcaggagcgcctcctgcggggcagtggaggactgtggcctgaggcattggccgaagggtgggggattatggccccgggcactccccgaagggaaactggggctagcggcttggggcctcccagtggggaagagggaacaaaagctgcggagaccggaggcccggggtccagggcgccccctgctgggaagctgggaaccaagccttagaggtccggcaggtacagatggaaccaggcccagggcgacccctcctagggaaaccaagggtttctagcctggcgcgcctcctgccggctttgaatgacactgcgcttctatgcccgctccgttcagtgaaatccaaccaatccgcatccgctcaaaaaaggctccaagtcctggcgaacccgaggggagccgagagggagttcaaggagtccaggttttactgcagattctttggcgctagctcccagctgacaaatcaacatctcaatctgacaattagtggtcaagatgcggggtgaggggctcttacagccccggccgcttagccctcccggcgggaggcagaggggtgggcggtgctggcagtgatgaacgactccaggggggcccgtggccccgagcgcgcattcattactcgactgacaggcgggtggcgggccgggcgggctgcgagtggacgtgccgggaaagaggccagtagcaggaggggactaaggcaagcgtttaacagtcccactgctccatctgctcccggtccttcgccttgaccctgggacttgacttccttgagctcggcctcccagttgttggagctggccctggctgggaagcaagggcggggacctaagccctcttctggggttaggtgatttaaggtctgagatgtcaaggaagggtattaggcaggtctcaagactaggcgattcggcctgacctctgagagattgtgcgtgactgtgcactcagagatggc

SEQ ID NO: 334516 - DNA, 1803 bp, Homo sapiens
  chr12:49738836-49740639
  hyper
agccttagagggatcgatgcggcccgggggccccgcccggggtcgatattcctgattgggaagcggccgcttcgcggagcccgcgtgtaaatcacctgggctgggggagggggcgtggggagcctaccacgtcccaggctcgcgaagccaggaggggtcgggacccgggcggtaccggagggcgacggaatgagaacgacaggccttagagaaccagagagaagcccgcccagggcctccccctcccccgctcagccctgccaactcccccagcaggctccagtctcgcttcagcggccgccacccttcgttgcccctggagccgccggggaggccagtgtcggagccagccatgcggcggctcctctctggccgctcccgcggggccggggcttcggcggctgctgtcacggagccgacaggccgggccggccgggaaggggcgggtggcgggggggagaggcggcggggtgaggctggctcagcgctggcactcagtgggcgcgcaacgtatgtttgccgaattgaaaggctgggacaccgagcggcgcagggcagagggtcggagggcacaggcggggtaggagatggcccagaccgggtgagggcagaagcctcactcacgggggaagaaggcactcgaggtcgctctgaggaccgctgggctgggatagaccacccatcccccgccggggagacccgggtagtaaagaacaagacagaatgggacaggcaggacggtttggaccccacctacaagcgcctccaccaccccagcctccgatccttgtcacgctctgctggggaaaccgaggcagccgatgctgagaatagccaaaaagttaaaagcggggtcagcgacgaagctggggcagcaaccagaattcctgcgtgggttttttggattcctccgcccacgcggggccagtttgcgggtaaatgcaccaccgcgccccgcaccacagctcagaccctttcctctcgctgcagtttgtcagatccccccacctcccactctgcaccagtttatagaacaacaatttggggaaaacaatccgggcggagtgacggccccgtaattgtgacaaagtgagtgcgggcggctggagagagcgctaggccgggagcgctgcagggcgaggcggaggcaggggcgcctccccccgccctgccgccccctcgttcttattccggtcacctcccatccctctccttgactcttcaattcctcttctcccggccccttgcgccttccttcgcttgttcctccatcgctcttccctttcctcccggtaacagctcttctcccgctcccccgaccccgtcgcccctcccccggtgcgctttttcctcgctcacttctcccctctcctctgccctccactcgtttcttcagcttttcctcgcgcttacattgcccttgggcccctggctctccccgcacaatccgcttctctccctccccactcctcccttcctgagatcgaaccctgagccccttcccgacccccactctctgggccgccagcgcagccccgcatttctgggttcctcgggaagtaaacctgggggcgcgctgcggccccgggtgccccggcggccagccccttccctctcccttgtatggctgccgcccccgccccaccacctgagccgggagatagtttgtttgtccagcggcggccgccgccgcccacgctgtttgcaaagcttagcgcgccgtcgcgcagtgcgggcccaattaagtctcattcattattcagcgctcctgtccgcccccgccccccagcagtctgaggcgtc

SEQ ID NO: 334517 - DNA, 419 bp, Homo sapiens
  chr12:49931623-49932042
  hyper
cgtctcgagggatgggggtgctgagcctaccgcttcgctcgttagggaacaaattgctgttttggccccggcggctcctctgggcgcgggcggcagccgcgctcgctggcaaatcgtgggagggaggaggagcggcgctggcaggcaagtccgggggaccgtcgcagcgcgggaggccaagaaaagacggccgccccgggcccggctccgccccgccgggaaggggctccctgcagccgccccagggcagcaccccgcgcggcgccgcgcggagctctccaggacgagctgcgtgaggcgcggggctcggccttcctcgctctcctggtgccaggacccgcacgcacaaggttcggaagttttttcgcagtgtctgacccctgccggtcccctgtatttaccacctgaccctctagcgc

SEQ ID NO: 334518 - DNA, 317 bp, Homo sapiens
  chr12:49942891-49943208
  hyper
cggcaacgtgtccgccaacacggacaccgagaagatcttctccatctgcaccatgctcatcggcggtgagcccggccgcgcgcgtcttcccggggccactcccagacttctgcccgcaggcggcgccgtcccactccccggagggcctgaggccgggggctcttccgctttaggtggccgcggaacccgaggccgggggtgggggagacttcgcccgcacagcggccttcaggccttgcctaggagcgtgcgggccgaggacagatgagcccagcgtggtgtcaggccgggccaggtcccctaggtgaccccctctc

SEQ ID NO: 334519 - DNA, 540 bp, Homo sapiens
  chr12:50297534-50298074
  hyper
ggtgcaggctggggagatgccggtacctttccctgggtcatggtgccgtctctcggggaaggggtccctgaggcccgggtggccgcttgggtaaccgcagcctgcctgcgtctcttccttcctccgcgtgggttctagcaacatccactgcagccgggccaggcgagccggcgcgtaccatcggcgcggggggaggagagggccgggcctgggaagatgctgcggaggacgctgcggattcgcgagcccggggtaaggcggcggcgcaccgccccctcccgccgcttcccccccaccccgccccccaccgccgcccttagccctcccccgggatgagagagagtcgcgctgcggagcaaccccagtggatgggtccgcgggggctgagcgggcggaggacgcgggaactccgtgacaccgaccagctgacgctgcccgcgtgaaaccagagccgggcatcagggcctcatctccactgtctctgcacctctctgcagctccagctgcgcctctgccttttcctcctccctctttggatgc

SEQ ID NO: 334520 - DNA, 300 bp, Homo sapiens
  chr12:50339307-50339607
  hyper
cgtcccgcttcgccccgactgtggatctacccgctcccttctccctcagtccccaaagcaccagactcacaggcctgctgtgtgacccacttttaccgacctttcggggagagtagagggcatttgtgactcagctcagagcaggaaacacatctcacgtcaactgtcagacagcgctgctccgaatcccatcacagtgctccagcagggggcgtcctcaccggccgcggccacagccacggctcaacccggcctagctcccagacaccctccttccaccgcctgttttccaccgtcccc

SEQ ID NO: 334521 - DNA, 915 bp, Homo sapiens
  chr12:50354878-50355793
  hyper
cggcctgggagagggcgcctccggggatccgttgcctagtccaggtactgcccagctaccgggcgtcgaggattgcgaagcgtcggggcaggctggcacggtgcccacttttcccaaaacgccagccttccaagcccagaagctcgcccggcccaggccgggagcggcccacgtcggacggccggaccgccctgcaggacccagcccggccgcccgcccccgccgccggcggtgagggaggtgagcggcgccgacctgcgggacgagcatcactccgacccagccgggggtgaggcgggtcaggatgctccggtcgcaggaggaaaaggaggagctggaccaaaagcccgaagagaagaaaaggggaaggccgcgcacggagcgcggtaaaggccggcggagctagacgccccgaggtcggagtgaagcgccgggaccgagccccgtctcccagggagtccggggcgcacggcaccgaggagagcgcgggagccaacctgggcgcatcatgcgcagggcccgggacgctgggccggtctacaccgccgcctgggtcacgtggcccggacgggccggcggctgccccggccggggggcgggggtcgcgccggggttgcgctggacgacggagagcggcgggcccgcagcggcctggagcctcccaacccgcgcgccgcgctggcccccgagcgtaggagccgccccctgcccccccgcgccggccccgcgcccggccgcccgccccctatatagcgcgccccagcagggcccgcgccaggccgccagcctcggagtgggcgcgggacagtgcgcggcgccccgcagccaggcccccgcccccgccgcatccacctcctccgccgcctgcgacccaacgggcgccccccgccgcggcagctgccgccgggcccccgc

SEQ ID NO: 334522 - DNA, 660 bp, Homo sapiens
  chr12:51785160-51785820
  hyper
cgcgaccagcagagagcgaaggcaggagggaccagcctggcccagccccttcattttactgtcgggggtagtgaggaggaagaggaagaggcgaaggctggcggaggaggaggtgagagcgaggactcggcagaagcgagatccgccgaagggaagtccgagcagtcggggagctcaggggggccctcccggggagagggtcgcgggctccttctgccgcttacctgtcgcgccgaggcaaagccgcagccgcgccgcggggtggctcccgggtttccccaccggacggccgggagggtgggaccggggcgggacctcccccagctgcactaacgcgcccgccccgcccctccctggccaggtgcagcgggtcccgccgtgtcctcagcctgctgcgggcccgggaactcccggcggaccggcagaggggcgccccggcttctctgcgtctcagcccgccccgggggtgcggtctttgcggccaggctttcagcgcggaaaaagattggagggtcctagtcaccccaaagaggacaggcattagcagagccgcgggcggcgggtgcatggaaccggaatgtgctgcgcgccagcctggagcgctcggagcccggaggcctgccccggagggggaaacgcggcggggcggccatgggcccc

SEQ ID NO: 334523 - DNA, 213 bp, Homo sapiens
  chr12:52294173-52294386
  hyper
cgcctcccgcggccaggggcgggcagccgcagagcagcacgctgggccttggctccggtagcagcaagttcgaaccccgctcctgctccgcttcggttctcgctcctcggcccttgggcctccaaacaccatttcctggcagttcgttgcgcattgcgctctccccgccaccaggatgccagtgaccaagaaggatctggcggaggacgcgcc

SEQ ID NO: 334524 - DNA, 1388 bp, Homo sapiens
  chr12:52400270-52401658
  hyper
cgcagccccgctgccgctctccctgccctggagtctcctgcagccccttggatctccgtgactctccctacctccccgactccccaggcttcttacagtgacctcttaccgtgccccactccatgaatcgccagagctattcgtccctaaatttcaaaccttgcgcaatgtcccttcacagacccctccaggtatcacgcagccccgagccccgagccccgccccgggggcctcatcccgccccttcgcgtccgcggctcgttttcccccactgagcgcccagctcccgcagtttccccggccgtcgagcgccgtgggcggggctccagggcggcggcgcctcgcggggagggtcctccgtgctgggggcgaggccacccgaggcagctccccgcccgcccccaaccccgccccgctctcggagcctataaagggaggcgacccgcggcccgcccggctggcatcccccagccgccgccagccccgccgaggggagccagcgccgtctctgaggggcgtccggcgccggagccatgaccctccgccgactcaggaagctgcagcagaaggaggaggcggcggccaccccggaccccgccgcccggactcccgactcggaagtcgcgcccgccgctccggtcccgaccccgggaccccctgccgcagccgccacccctgggcccccagcggacgagctgtacgcggcgctggaggactatcaccctgccgagctgtaccgcgcgctcgccgtgtccgggggcaccctgccccgccgaaaggtgcgtcccccgcccgccttcaggatctgctcagcccctctccgactccctacagggcctgctgactccgcagtgccctctcctcggcgtccgcggagtcccccaccttcttccccggcccgctgggtgcctcgactccccgcgttccccgctgctgcgaaggccgtggccctcgcctgcacaccgcgcccaggctcggtggctcttaactccgcgccccatgcacgccccctctctccctccttgactcctcccagcaccccccttctcctacccgctccatctggctttctgccccccatgccccgcctccccgtggccaggtgtcctgggtccccaggagcccctcgcccgagggacagagacagccccaggcaagttgaaggtccgagagcccccggtgggagaagcgggccggtggctgcgccgcgtgcgttctcactctgaggaagtgcgtggggagccgctgactccggatagcacacccttccgaggggactccccgattcctgggctgggggcctgccgcctggccccacgtctgacgtacggggcgcgagggccactgctccctggacttctgtcggaaccggacgcagtgggaggggt

SEQ ID NO: 334525 - DNA, 762 bp, Homo sapiens
  chr12:52626747-52627509
  hyper
cgggaagccttccctcactgagtccgtttccaatgggctggaactgcggtcccccgctgttctctgcggccgtctagggatggcgctcctgcctactccggaccatccctgcttggactgaaagcctgggcttcggcggggcgggcgggcagagggcggagggcggccccaggaggggcctggcagcagagaaaggtggcccgcggcagccccgcccctacctgtggaagcccagccgcccgctcccgcggataaaaggcgcggagtgtccccgaggtcagcgagtgcgcgctcctcctcgcccgccgctaggtccatcccggcccagccaccatgtccatccacttcagctccccggtattcacctcgcgctcagccgccttctcgggccgcggcgcccaggtgcgcctgagctccgctcgccccggcggccttggcagcagcagcctctacggcctcggcgcctcacggccgcgcgtggccgtgcgctctgcctatgggggcccggtgggcgccggcatccgcgaggtcaccattaaccagagcctgctggccccgctgcggctggacgccgacccctccctccagcgggtgcgccaggaggagagcgagcagatcaagaccctcaacaacaagtttgcctccttcatcgacaaggtgagcgggactggacctcgcctctcctcgagccgcgctccagaccacaccagccgccctaactagccctgcctgcgcgcgggccaggcgctggggagcactgcc

SEQ ID NO: 334526 - DNA, 384 bp, Homo sapiens; identical to SEQ ID NO: 236322
  chr12:52652220-52652604
  hyper

SEQ ID NO: 334527 - DNA, 124 bp, Homo sapiens
  chr12:52672850-52672974
  hyper
ggacagtcgtcctccgttcagccgggctccgcctgcctgctccagccccgagcaggctccggcgccctggagacgagcgcccctggcggcggctacgcgctctgcggctctcccggctgtgtcc

SEQ ID NO: 334528 - DNA, 451 bp, Homo sapiens
  chr12:53084880-53085331
  hyper
cgtggaggggaggagtttgaggagagggcggtgaggggcaggcgtgatgtgtggcagaaacgaggcctctactccaagatccgcctgtgggaggtgttggtggaggtctggatgatctgcacgcgcgaggatccgcggccgcttctgccgctccctccgtagctcccgccaccgccgccgcagccgctgccataaccgcctccactcctgcctcgtgccccgcctccgcggtagcttcttccgccgccatagcccccaccgctgccgccgccgtagcctcctgagccgtagctgccgccgcctcccgcgccgccgttgacgctcacctggctgttctgcacggctgtgggtaggggacagtgcacacggggtcagagggaccgggcaaggcccccacctgcacccgcccctgcacctgcagcctcctccatcctcgatcacccgtggcatc

SEQ ID NO: 334529 - DNA, 311 bp, Homo sapiens
  chr12:53267978-53268289
  hyper
cgcgtcaggggtctctcggggcggctagaggccctgggaacctggaagcccgcggggcgcggcggggcggggcagagcgctagagccgggtggcggccgccgattggctgggcccgagcgctcccacggcggccgggggccccagggcggcgccggccgcgcccgctccgcggtgactcatccagcaccccacctctggagctggacgggcgcccggcctcttcccaccccagacccgcccgctaagccgggagagcctgactcagcagggggagcctggcctgccttccgcccccttcgcgtcctccccc

SEQ ID NO: 334530 - DNA, 156 bp, Homo sapiens
  chr12:53272458-53272614
  hyper
cgcctatgcacatacaatctcccataggaattattccttgtctctggtgcctgaggccctccatatgtgcacctgacagtacacacacgcgcacacgcatgcacacacccacagccccctgcctgcgtgtcttccctccatgatggcaaggctgcc

SEQ ID NO: 334531 - DNA, 262 bp, Homo sapiens
  chr12:53342685-53342947
  hyper
cgtgtccatgcccggttggccaccccgtttctggggggtgagcggggcttggcagggctgcgcggagggcgcgggggtggggcccggggcggagcggcccggggcggagggcgcgggctccgagccgtccacctgtggctccggcttccgaagcggctccggggcgggggcggggcctcactctgcgatataactcgggtcgcgcggctcgcgcaggccgccaccgtcgtccgcaaagcctgagtcctgtcctttctctctc

SEQ ID NO: 334532 - DNA, 100 bp, Homo sapiens; identical to SEQ ID NO: 236333
  chr12:53359363-53359463
  hyper

SEQ ID NO: 334533 - DNA, 724 bp, Homo sapiens
  chr12:53613776-53614500
  hyper
ggcgaaacaggagccgccggtggctctgcgcagcaagccggccccgggcccggccgccccgtacagccgtcgcggacccggggcaaacgtttccatacagtcgtacatcgcgacccggcttgaagggaaactgggtgctggaaacaccaaggacccgcagccgattccccctcctcccccggcggcgccccgctccagcagggggggagggggagggctagcatagggcgctgggctgcatgcgggtaaggggtgggcggggaagaggggggatccccagcaggggaaagggactgggcggggcgcgaagctggggctgccgctttagcctccgtccagctcttatctgggtgcttcggcagctagcactggggagaccttttttaaaagcgaagcctggaggggtggggggtggggcttggagagcgaagggggccgggcaccgagatgagcaaagctgagagtggagcgcacacatacacatacgtacactcgctccgcggcgcgcgcgcttgcttagacacacatccgtgcatgcatttatcttatcaggcaccaagaatttgcaaatatgcaagagtgaacatacatgtgagcacgcatataaaatcataggtgcacacacgtttgtgcaaacacaccttgctcgggagaatgcttgcaggcatactctccacagctcataggctttgcatgcatttgcactgaggcgcgtgcccaggtc

SEQ ID NO: 334534 - DNA, 430 bp, Homo sapiens
  chr12:53719362-53719792
  hyper
ggggcgggagtggcgtcagggtggggagggggctcgtaacccgagcccccccaggatcgccggccccctcccacccgtagcagcccctcttgcgacccgtgcggtggacagtccgacgcggggcgcagctgggagtcgggcccaggccggggggagcggcctgtgagccccctcagcccagcggggtaaccttggggggcgggggccgcacaaagccctattgtggctcggggatgctgccacagagtggtttttgttcttcggctaactccgtggcgggcacgactgattgcagacccagggcagggggcgggttacgtgccaggcccagtctgcccgccgggagccgcaccaccgcccgactggggccgcgcaggagtccgcactgcaaccgcggtgcccgcgctcgggtcgcgtcactgccctgacc

SEQ ID NO: 334535 - DNA, 189 bp, Homo sapiens; identical to SEQ ID NO: 236347
  chr12:54070816-54071005
  hyper

SEQ ID NO: 334536 - DNA, 771 bp, Homo sapiens
  chr12:54088889-54089660
  hyper
cgtacgaacccagaggcaaacagaaaggggcggcaaacactgggcggctcagatttatccttcggcctccgcagggcccggccggacgagatttactgggcctcgaacacggcgacagttcaaacctttgattaatcatgtttttctgcctaccccataatttagttgctctttttccctccctgcctttttttttttttttatcagcggaaacagagacggagtcctcatcagcttcaattacaaatattaaggtcccggacagcactttgacagagaggcggccagccccccacttcgtaccacccccctaaatcatctccgaattaacatcacatcggcggctggcgcgtgttcagatttaaatggtggcatattgttcgcggacggtctagctcagaaccgcgagctcgcagctcccgcggcgggccccgcctctgcccacaccggcccctgcggcctcccgggaggctgtgactcaggagtcgcgggaggctccgactcaggagtcgcgggaggctccgggccctgtctccagcagggggctgcaggcgagggcgcgctggggcgggggcgggcgggctgcacagaggggtcggatgtggggcgagttgggcagaggaagaggaaccgcagatgccgggtggcgggagaggggctggggctgcagggagacaggtgggtttggtcggggttgggggttaggaggggaggacatgctctctgcaaattaggtgcaaacgaaggctcagaatgagcgagtttgggaac

SEQ ID NO: 334537 - DNA, 314 bp, Homo sapiens
  chr12:54132254-54132568
  hyper
cgaggaggaaagacgcagaggctgcgcactttccttcctctcccccagacccgcgcaaggcgctgagggggtcctccctccggcaaaggcggagggacggcctgacaggaacagtgtgcacttgcctctgtcctcccccgagggacagtggcctggggtgaccgagaaacctggccctcccaaggtccccgggctgccaaggaggacccttcggccttagggcggagcctcccccgccgctcaggggaggtggagctcgttgtggtgggcggggctttctccaggtgggacccatcgcctaggcaggtttcccc

SEQ ID NO: 334538 - DNA, 1176 bp, Homo sapiens
  chr12:54144782-54145958
  hyper
cgcgcagactgtccctgtggaggagaaaggcacatgagcagccaaagggacggacactcacacacacacacacgcacacactcactcctgcgcacacaggctgctccgcggacacgcttcacggagcaggtgtgcccacgcgcaataccctcctggcccacaggcctccgcacgcacaggacacacacacacactctctcctggcctccctcccgccgcccctcctctgagccctgcggcccggccttccgcacctcccaacgcctgcaggggttgggggcgctggggctcggggcgctcactcggacctcggagccaatcgccagagatctaatggctcctttggcagtgggaaggggtgtgcgtgggtgtcctctccttcactctttccccagccctgtcgcctcccaccccccttccggccgcggcagtttccgaaatcgcccggcggccgcgaattcattagtggggggcggatgtaaacgcagcgcggtggaacgttttaattaggcctgaacaataaacaagctaaacgaggcgcgcaggactccctggtgggccctcagcctcctccgcgcggcgcggactcattacggctgcagccaatttcatgccagcgccgagcactggctgggccgggagtggggtcgggggtgcgtgcgggtgcgatccgggcctgcagggtgcggagcgggggcgtcccggggcgagggcagcgggccggttcccgcccgcccggggccgcggcttccgcatttctgcaccatccacctgcctttttcagtgtccttgagatgacgctccctccccacaccagagcggccggctggagagtctagcttgctttttagggtctctctcccgcctcttttcctcccccgctccctctctccttgcggctgactccagctccccctcggtgcccgtaaccctcctttcctctttttgccgcagtctccgtctctcttccacagggtctctccctccccctctccccgtggttgtcagactttctcctggactttctccgccccgcaccgcccgccccggatgccgagcgtggtagactctgcagccgggctcctcgctgcccgctggcgctgcctacacccccttgggctcccctccaaggtcccctccgctcgcccctctctgcccgctgccgccgccgccgcc

SEQ ID NO: 334539 - DNA, 190 bp, Homo sapiens
  chr12:54150987-54151177
  hyper
gatttcattatcgacgtgctgtctgtctcgggctcagcccggttgccagggcgactctgatcgattgccttccggtcttcttggcttggccggctgcttcctttctggagcctggctgttggcgagcactccctagcggccctctctggtactgcagagcttcccggttgcaggcttgagagactcaggc

SEQ ID NO: 334540 - DNA, 653 bp, Homo sapiens
  chr12:54321265-54321918
  hyper
cgttccaatgccatgatggagaaggacccctaaaatcgcctttggcgtgtgcagctcgagcgttacaacgatgcaaagtgcggtctttggaggatgcgggagtcggtaacccctcaattcactctcgccgttccttctctccagtctgcgcgaaagccaggtccgagggcttcgaagatctgggggacccgagctgcgcacagtggcgggaaacgagcgggctcagctggccgggccgcgtcccctagccaccgcccgcccgcccgctgctttggcctccggagaagcctggagaggggcctgcgcctcttgaaaaatggcttttgggggcggtaggtctcgggagggcgactggggaaagtgacttgccgcggcttcgagtagagacgttggtgcgggacccaactcctggggaaggcggggagcgctgggcggatgcctggccctagtgcggcgccaacacatacaagttccgctgtgaatgtttgaaagtgtaagtttctctcggattgatttttttttcctttaaatgtatccccttcaaaaaaaaaaaaaaacaaacaaacaaaaaaaaaaaaaacaaagacgtggacaggcaggcgccacccggtctgggagctgaggttcgtgactgctgccgatttcgtttggtt

SEQ ID NO: 334541 - DNA, 44 bp, Homo sapiens; identical to SEQ ID NO: 236356
  chr12:54322134-54322178
  hyper

SEQ ID NO: 334542 - DNA, 337 bp, Homo sapiens
  chr12:54330339-54330676
  hyper
ccaaaggctggggacgtgtctttgagtcctggcccgcggaaaacgggtccggcgttgggcctgaccggggagggagccccaagaatggggtgggcgtttcaggccctttgtttctcctggcagccctgcagaaccctgtccacagcgccccactacttccacctgggagcagcacttcacagaaggggaggccaggatctgggttccacttctactacccgcggctggaaaaaggcaggcgtctccacccacccacccccaccagccaggccttaggcaagggggccaacgtcatacaacccagtctagacttggccaggccctgtttgctctcctc

SEQ ID NO: 334543 - DNA, 1400 bp, Homo sapiens
  chr12:54332438-54333838
  hyper
cgtgcgcagagcgggtcacgtgggcgcgggaggggtgctgagaggtggagagcgggagccggcggatttcttaatgaagtgtctccgcatgcgtagagggaatgtagggagggaggtggaagcactaggaggaggggaggggtggagagaaaagaggggagggatggggggaggggaaacaggagcgaggtgtctccctagctcgctgcctctggcaagtggagtttttaaaaagctccagcagatcatgtcatgacgacttcgctgctcctgcatccacgctggccggagagccttatgtacgtctatgaggacagcgcggcggagagcggcatcggcggcggcggcggaggaggaggcggcggcacgggcggagcggggggtggctgcagcggagcgagccccggcaaagccccgagcatggatggtctgggcagcagctgcccggccagccactgccgcgacctgcttccgcaccccgtgctgggccgcccgccggctcccctgggcgcccctcagggcgccgtctatacggacatcccggccccggaggcggcgcgccagtgtgccccgccgcccgcaccccccacctcgtccagcgccaccctgggctacggctaccccttcgggggcagctactacggctgccgcctgtcgcacaacgtgaacctgcagcagaagccttgcgcctaccacccgggcgataaatacccggagccgtcgggcgccctgcccggtgacgacctgtcctctagggccaaggagttcgccttctaccccagcttcgccagctcctaccaggcgatgcccggctacctggacgtgtcggtggtgcccgggatcagcgggcacccggagccgcgtcacgacgccctcatccccgtcgaaggctaccagcactgggctctctccaatggctgggacagtcaggtgtactgctccaaggagcagtcgcagtccgcccacctctggaagtctcccttcccaggtaaggaagggacccgagcgccgccgccgccggggacccctccccgccctgcctgccccggggctccgcgccccaaccacccccgccgtctggccccggcgcgcccgctcggctgggctgcctatggagccggccgggcgagctgcactgaggaatgcgccggggaagaaatctgctccgacacgttctctgtagctgcccggccgagaatgaagcaatcacaggcgcccgaaagccgggccgccggctctgctctgtccggtagctcgcctccgcctccccttgcaggctccagcctcccgccgggctcttggcccctaaacctgcttccggcaagggatgggggcggggtgggcctatagtgccttggaatccaggacaaaacccccaacccaccgaataactggggagg

SEQ ID NO: 334544 - DNA, 792 bp, Homo sapiens
  chr12:54338511-54339303
  hyper
cgttttgcttttttaaacattgcattaaaatatcgtcttgattactgagtttttggcgccccctcccttaaacttcgagcccagtggcctcatcatagttgtggtcttgctaaaataacagaaatgaaaagcattagggagcttcactatgcagtgcaatcctctggccccgttgagcccctgccagaactctgtgcctaggcagcctcgggtcctctatctcagtccagccgcttgcctcacttcttcccgcttgccttatctccccgcagacgtggttcccctgcagcccgaggtgagcagctaccggcgcgggcgcaagaaacgcgtgccctacactaaggtgcagctgaaggagctagagaaggaatacgcggctagcaagttcatcaccaaagagaagcgccggcgcatctccgccaccacgaacctctctgagcgccaggtaaccatctggttccagaaccggcgggtcaaagagaagaaggtggtcagcaaatcgaaagcgcctcatctccactccacctgaccacccacccgctgcttgccccatctatttatgtctccgctttgtaccataaccgaacccacggaaagacgctgcgcgggtgcagaagagtatttaatgttaaggaaagagaagaaccgcgccgcccggaggcagagaggctccatggccgtgctgctgggccatccccaactccctatcccatccccagcctccacccccatccagatgggactcacgtggcttcaacagctttggaaatgggtcccgagtgggccgtgcga

SEQ ID NO: 334545 - DNA, 70 bp, Homo sapiens; identical to SEQ ID NO: 236364
  chr12:54339505-54339575
  hyper

SEQ ID NO: 334546 - DNA, 342 bp, Homo sapiens
  chr12:54343505-54343847
  hyper
cgtgactaggtctttctgaccttgacatcacagggagcacagggaaggggggggaggggtggaaaaggccttgatcttccggtggccagcgaaggggagggctgcttgcccccttgacgcgccatcccccttcccgcaggagcccgccgcctctgtttacacacagaggaggtgtcgtctccagtctagacaagggcgctaataacgcccataaaaggcggcctctccagagatgctctggcaactccgctcccgcgcgcctgccgctggccgctttctccacctccccccgccccgcccttctctgataccttggcgaggccggcgcacgggcctggggac

SEQ ID NO: 334547 - DNA, 922 bp, Homo sapiens
  chr12:54348695-54349617
  hyper
cggtcgggccccgcggaaatgggcgagcataatctcctgaatcccgggtttgtggggccgctggtaaacatccacacgggagacaccttctacttccccaacttccgcgcgtccggggcgcagcttcccgggctgccttcgctgtcctacccacgccgcgacaacgtgtgctccctgtcctggccgtcggcggagccgtgcaatggctacccgcagccctacctcggcagcccagtgtctctcaaccctcccttcggccgcacgtgcgagctggcgcgcgtggaggacggcaagggttactaccgcgagccgtgcgccgagggtggcggcgggggcctgaagcgtgaggagcgcgggcgcgacccgggagccgggcccggggcagcgctgctcccgctggagccgtcggggccgcctgcgctcggcttcaagtacgactacgcggcgggcggcggcggtggcgacggcggcggcggcgcaggacctccgcacgacccgccctcctgccagtcgctggaatccgactccagttcgtccctgctcaacgagggcaacaagggcgccggcgcaggcgaccccggcagcttggtatcgccgttgaaccccggcggcgggctctcggccagcggtaaggaccccggccactcaagcggcggattcaaacccgacctcttaccagggcgggcagaacaggactgagctagggacgcccagggtgacagaatgtgtggcgaggaagagcttcttataaaatgaagtgcgggtggggggagcctataaacatgtaaacatccccacaaaagaaatggagagtgttcctttttcgtctgcctgcggctggaggcggcagggattccggagttgggggatcctgacggggactccccaggcctgggggtgaggaggtggggacagaaagccc

SEQ ID NO: 334548 - DNA, 1154 bp, Homo sapiens
  chr12:54366668-54367822
  hyper
cgcccatcccaccgcccaccccaccccaaccctctctctcctcctttgctcgtgctgtggtatggagagaaggggagtgacgagagaaaaacgaatacaaatctgcaattgattttcataatgtttctgcggtgtttgcaaaccaatcgcctgaacgtccccgatcttacctaagagagaacccctcctacgtctgcgaagtgctccgaactgatatatgacaatatctactttggatcacgtgctcagagagagagagactaagacggataacgcgtcatctcgccttcccaaattttcccccctcgctagaccgggtccaaaacctccatccggagccggcaggagaggagaacgatgtttaactcggtcaacctgggcaacttctgctctccgtcgcgcaaggagaggggcgcagatttcggcgagcgagggagctgcgcctccaacctctatctgcccagttgcacttactacatgcccgagttctccacggtctcctccttcctgccccaggccccctctcgtcagatctcctatccctactcggcccaagtgcccccggtccgggaggtctcctacggcctggagccatccggcaagtggcaccatcggaacagctactcctcctgctatgcggcggccgacgagcttatgcaccgggagtgcctgcctccttccaccgtcaccgagatcctcatgaaaaacgaaggctcctacggcggccaccaccaccccagcgccccgcacgcaacccccgccggcttctactcctcagtcaacaagaacagcgtcctgcctcaagccttcgaccgtttcttcgacaacgcctactgcggtggcggcgacccgcccgccgagcccccctgctccggcaagggcgaggccaagggggagcccgaggcacccccggcctcgggactggcgtcccgggctgaggcgggtgccgaggcggaggctgaggaggagaacacaaatcccagctcgtccggttcagcccactccgtggccaaggagccggccaaaggagccgcccccagtaggtagcagcggccggggaacgggcgggcagcgagggagggagcgagagagggagggcgagagaaggggggaggcaaggggagcggggacggcctcgtgttttgggtcagtcc

SEQ ID NO: 334549 - DNA, 1386 bp, Homo sapiens
  chr12:54368271-54369657
  hyper
cgcgggtcctcgagcagaaacccaagcaactctggggtcagcggcgacaggggaatggggcgaggcggcgcaggactccactgcgttccaggcgggggtctgggcgtttctcccgggtccgcggccttagtgcttgcctagaactgcggtgtggaaggcgctgccccgcgggcttcccggggcgccagggccccggaagcggctctctggtgtctcggtgcctgctggccggcttcctccccgcctcccgactgctctcgccagatttcactgcttcgcgcctgttctcagctttccccccagatttctgggggaggggttgggctttccgaaccactaggagggcggcccaggaagggcccgagggcggagggggagcagacagggggcccgaggggacgcacgtgtacctggagggctttccttctgtcccagaccctgtcagccgcggctctcgcctgagaactggggacggggtggcgcagtggcgggggggtggggacccgctagacctggcagggggtcgaggcttgcccgggtgctgcggctgcaggagagccagccgcctggcgggagggctgcccgcggtgggctaggagaagggccgctgagcgctcagcgggctggggtcgcccgggtctcacgtgtctctctcccccctctcctcgcacttgccccctcccctccctccagacgccccccgcacccgcaagaagcgctgcccttattcgaaattccagatccgggaactggagcgagagtttttcttcaacgtgtatatcaacaaagagaagcggctgcagctgtcccggatgctgaacctgacggaccgacaagtgaaaatttggtttcagaacagaaggatgaaagaaaagaaactgagcagagaccggctgcagtatttctcgggaaatcctctgctgtaacctgcagaccgggcccttttgggggcggggggaggggaaaattattttattttatttttattttttattttctaactcgtcttctttccgccggtggaaaactggactgtggccagggctggcccccaccgctgtggccggcactccattccggaacctcctggaccctctatctgactctcgctgtgggacagggaccgggcctggaaagggggtgaagggaagtgtctgatgcacggcgagtgaacaccgttggcgccgaggccaagactttgatttaaaagaaaacacacctcggcgacaatgtcttgctgctcggattaggtgggggaggggcgacagtagtgagcgcctgagccgaacaatcctcgaactaaaagccttcccttgcccatgtgaaaagatccgctaagacagcatgtctgccagcggaaacttctcgagctcccccctctacccc

SEQ ID NO: 334550 - DNA, 333 bp, Homo sapiens
  chr12:54371976-54372309
  hyper
cgcagcactgcccgggaacaaaagatcctcgtctagacgctgccataaagcaccccctcacgtttctaaacccagtttcatttcgaccttaacgacccagtctggcctgtattagaaaccacttccgccctaaatagtaaacaaacctgtagtggagggtcttggctctcccaacacactcagacccccacctcctcagcccgttgccccacatttttcctcttttctccagcctttctcagctcccagcaccccagcccctttcctccccgccgcgcccaccccacccccccgccccagtaaataaacctgaggccgagttcaaagtttccc

SEQ ID NO: 334551 - DNA, 2918 bp, Homo sapiens
  chr12:54377527-54380445
  hyper
cgctgggctccagtcctttccccgccaaactccagcccttcggaaagtctgaaccctaggctctgtccaaggaaaaatgtggggcgacaggaaagacaagttgttctccagattccgtttcctgaggaaggggtggagagtttagttcgctttggaagaaggcgatggagaaacggaaataactgtttgaaacatacggttccccttatttcttccttttatttaaaaacaaccacaaaaatagactggtctgtcttctttcaaacatgctcccagcccgtgcgctctgtaaaggacgcttctctgggtcgggttttgttgcgtcttgtgtgctggtttcccgtgtgatacgtgactcctccaaactgaccgaggctccgcaggttccctctttctttcccggaatattccctgttttagcgggggcaaggtcaagcggaaagcgaggaccgccagggcctgaagtaaagcagcagaaccggctccaaggccaaagccttgtgggcccctgagatggtgacccaggagccgcccaccctgccaggcccaggccacagctctcgggtcggggatcgggtgcctctggtctctggcttcctctttcccctaccccgcgtccattcggaacctccttttccgagcagccatgaagtgaccgtgaccccctccctggcccaccctagaggctggagattcccagtcaacccccacaggaaacttgcaactccagcgccgcggcccccaagcttccagccccgagggccaagcccggggaaaagaggaggcgggagagcagaaactttagtcctgtttggtattccttaactttttttcccctttctctgctcatcagatccccccaaacccccccccccacaaacctcaccccactcccatccccaaggtaagaagtgggagtcgggtccggggatatggaaaggggagatgaagagtggggagaagtacctgattcgtgtctcgaccttttaatttgaatttgactgttttgagccccgggttgcctcgctctctccctctctcccgcatttcccccctctccgcccccttctccccaggagttacaggctggttactggataaacaaaccccactcttcctagaacccccacccccacccccacccccctccacccctctacctcccctgccgcccggggggcgcttcctttgttcgcggggaagggctccggtgcccctaccccgaggcagctgctagatggcgctgttactccactctgcgcgctccgcctgccgacaacttgaccccgctgacgtcacggccgtctgaatcatcaaggccattttcaaatcccattggtctagccgtcacatggtgagaaccgaatgcgcggataattacggagctgatatttccccccctccccttctttttcctccctcccctccaaccgcgccccccctcccggatggggaaaaaaaaagatgtcagctcctccgctgtagtattgctccttaaaaacccctctctctgaaaatgacatgccctcgcaatgtaactccgaactcgtacgcggagcccttggctgcgcccggcggaggagagcgctatagccggagcgcaggcatgtatatgcagtctgggagtgacttcaattgcggggtgatgaggggctgcgggctcgcgccctcgctctccaagagggacgagggcagcagccccagcctcgccctcaacacctatccgtcctacctctcgcagctggactcctggggcgaccccaaagccgcctatcgcctggaacaacctgttggcaggccgctgtcctcctgctcctacccacctagtgtcaaggaggagaatgtctgctgcatgtacagcgcagagaagcgggcgaaaagtggccccgaggcagctctctactcccaccccttgccggagtcctgccttggggagcacgaggtacccgtgcccagctactaccgcgccagcccgagctactccgcgctggacaagacgccccactgttctggggccaacgacttcgaagcccctttcgagcagcgggccagtctcaacccgcgcgccgaacatctggaatcgcctcagctggggggcaaagtgagtttccctgagacccccaagtccgacagccagacccccagccccaatgaaatcaagacggagcagagcctggcgggccctaaagggagcccctcggagagcgaaaaggagagggccaaagctgccgactccagcccagacacctcggataacgaagcgaaaggtaaggccgcctgggccgcgggcgccactgggacgttccggcacttggtcttcgcggccggggaggggggcaggggagagggttgggcccaggaggccccagaccatttcgggaatgcgaccctggctttcgactagcgtccgctgagctccaggctggtggcgcgtcacttagctggggaaggtaagcggcgacgtggaggtgtcggccctgccccggccatgggtgctaaggcgggggcggtgcgcaccgcgggccgcctgcaggcgcagtgtgctgcaccggacgggtggctgctcccaggcgcgtgctggctgtggtttgctttctcaatgctggtgtcctggggagctgacgtcccccagctcaggtcaggggcttgcaaaaagcctaaaatggcgatcttgggccagggactagggaaggctggggagatggggggagttctctttactgcgttttcccagttgaaaattgtttcctgcgaaacgcgatttgttgtttgtgggtctgatttgtgcgtgcggcttgggctcctgcggcttttggctcggccgggggccttgggcagcgaggctggagccggaagaggtggaggtgaagggctgcccgccacgtccctccctcctccagatgcctggcttggatggc

SEQ ID NO: 334552 - DNA, 377 bp, Homo sapiens
  chr12:54383388-54383765
  hyper
cgtgctgcgaagatgcttccacttaaagcatgagaaatggggtgccgggatgtggggtgtggtgtgtgccctcatagatgggggtgggagtgtggctggtgtgtgtgtcaagccctcactcacccacgcactcacacacagcattctgttctccatgcaaagttaagatcgaatccatccgcttgtaggggaaaaaaaggaaaaaaattaaccagagagggtctgtaatctcgcagagcacaggcagaatcgttccttccttgctgcatttcctccttagactaatagacgttttggaaagttcggctagtgttcgtgtgtttgtcgtagcacccagagcctccaccaaaccctctccatgtctttacctcccagtc

SEQ ID NO: 334553 - DNA, 898 bp, Homo sapiens
  chr12:54387801-54388699
  hyper
cgggaggaagaaaaggcaagagctcgccaaggcgagccttggtctctgagatctctcgtcggctgctggggctccggctcagcctggcagatccgctgtggcctctctgggacctcgccccggcccacggcctgacttcggctcggagatgcagcccttcccgagaacaggtgaagaagacggcggcagcggggactgggggcttcgggtgggaacgccagggctcagggctttgtgtgggtcgtgcagggggcgaggttcgaagtcctgggctggaccgcagcacgagtgtggcccggacggctgcgtggccagaaggggtgttcgggcagggtgcgagagcaccggcaaggtggattgtgtatggactttggccgcagacagagcagagcgggctcccgggctgtggccggcggcgaggcgggcaaccgcatgttgagtctatagaaaggaccttgaggtctgctgggtgtttgggctgccctgggggcggcggcccagagtgtggagcaagcggcgcgcggggcgcggcggtcagcgtgggagaggctgcaggccctgcacgcctctgcagctgccgggccgtgtccgggacgtctgaactgaggccgaccaatggtcacagcatgaaaaataaatgcaatggaaggtctttctgtcttttcttttccgcgtaaaaggtcctttcttttttctctctttcggatatacctggatttggtccagaccaggttgcccgcgggagggccccgcgagcggcagcgcgcgagggagggagagagagggagggcgagaaggagggagggagggaaggagggcgggcggcggcggccgtggtggccggggcttccctccccaggcgggagccgcctgtcctgtatctatggccgtggggagc

SEQ ID NO: 334554 - DNA, 900 bp, Homo sapiens
  chr12:54389206-54390106
  hyper
cggctctggccccttaattgtacttcgggctcgtattgtctctcctttcgccacctccgcttcctcagtctgggctccaaagtcactgcaaatttccttgcgacacatacatcacacaaaagatcaggtaacaaggcgctcagggccactggggctccgggcagggcagggagcggctctagctctggggcggctccccctccagccactcccaggctggaaaaccagaccgcgttgggggagccggaaatagccccgcttgctgcggagcgtcagggcgggggcgccggcgggaatgcaggcccggcaggccgtggctttgagagagccacgttcacaggccctggggatttcactcctgctgggcctcgggacctgactcctggtgtgtagggatcccagatacccaccttgggtgggggcaggacgcgggtttcctcgcggcaggccaagagaactcagtttctgcttccagcgcaggccttagctaggaggagttgtgtgtgggtgtgtttttcccaacaaagagggatcaggagagagaaggggggaaagtagaggggaaccagggagggggcggggaggggaagagggcagtggagaggtgaaatgagcccatttcagggggagaaggaaaatgaaagcaaatggagtacggccttctccgcgcagggcgggtgctgacgagccgggagcgggctccctgcctgcggcagccgggatggcccgctggggacaccggagaaagcctgttttaaatttaatccgaacttgacggtgtggattgaaccggagggaatttaaatcactaaaaggaaggcgcggggcagggggaggggacgactctaacctgtctatctttctgtctgtccttcccacggtgctagtttggttgtggcc

SEQ ID NO: 334555 - DNA, 238 bp, Homo sapiens
  chr12:54391212-54391450
  hyper
cgagcaagtctcctgggaggggcaggagaggagccctcttccgcctttgtgtccagacagaagtggccgccgcgcccggagccggtcccgcggcaaaggcccggcaagccagcgggctgcacaatgccacggctgctccgccagctcgcccctgccccgtcctgcctgcctacggccgcccttcctccgcctccctctctgcacgcctgcctttcccggctctcctatctcttttcat

SEQ ID NO: 334556 - DNA, 1380 bp, Homo sapiens
  chr12:54393256-54394636
  hyper
cgctccccttccctccttccctccctgtatctcagcttccccagtcccctcccaccctccctccctcaccgcccctgctgctcctgaaagaaatacatacatacacactatttaaaaacgcatttttaaaagccacgttccgaactgacaatcgctgatctcggctcgcgcagagactgcgggagcgtcggggccgacagagacggattacgtcaagaaatagttcctccacctacctcggtcggcctccccgcccctgcggggctcccgcgcccagctcggccctgggggtccgagaaccctggcttcggggactggcattttcaccccattaaaaaatcctcatggttggggggaggccatctgcttatgggtggacatgggcacaggggcttctcagatgagctaggagccgtcctgagggggtgaccggtgccttgggtccagagttccggacccccaggaaatcgcaggtcgcggggagcagcagagagaagggggtgggagagggggaaaagaaggcaaggaaaaaaaagcccctgcgcattgatccgcgccgtatttttgggtaaatacgatcacgtgggggccggggagccaatgagctgtggggaaaaggctggaaaaataattacctgacttgattgttctgtgagcagataaaaagtacatatacagttcatacaataatcttatgtatgtaaaaccccgttacgatgtcggcgacggggcccatcagtaactattacgtggactcgctcatctctcacgacaatgaagacctcctagcgtccaggtttccggccaccggggctcatcccgccgccgccagacccagcggtttggtgccggactgtagcgattttccgtcctgtagcttcgcgcccaagccggcagtgttcagcacgtcgtgggcgcccgtgccctctcagtcgtccgtggtatatcacccgtacggcccccagccccacctcggcgccgacacgcgctacatgcggacttggctcgagccgctgtccggcgccgtctccttccccagcttcccggccgggggccgtcactacgccctcaagccggacgcctaccccgggcgccgcgcggactgcggcccaggggagggccgcagctacccggactacatgtacggctcgcccggggagctgcgcgaccgcgccccgcagacactgccctcgcccgaggcggacgcgctcgccggcagcaagcacaaagaggagaaggccgacctggaccccagtaagttgggagcaattttcctttacaaccggcgcgggaggggaggggaggacgggcgggggcagccgaattacagccctcccgaaccgtgcagggagcgcgggagaggggcgagggggcgaggac

SEQ ID NO: 334557 - DNA, 293 bp, Homo sapiens
  chr12:54398724-54399017
  hyper
cgggagcgctgggatgcgggcttctctcccagaccgagagcggcgtttccgggcttccaccccgcccctgctcccaggccctgtcgcctcccctcagcgtccatcagcgcggcctgcttcctgcagccggcctgagcggccttactgcgggcaggaaggagggccgcgggcttggaggaccctgaggaaagcatgggatgcagaacaggcccacccggcccggcccactgttcaatcccagcccagcctgcaggtcaggattggaatcattttttattcgctatcatttacga

SEQ ID NO: 334558 - DNA, 399 bp, Homo sapiens
  chr12:54399254-54399653
  hyper
gaacaaaacagcagcgcggagctggctagacgtctgggcttaattgttttatggtttaaataaggtggacactttcctttgaaatcggattataggaatgttttgtctatggcccacggagaacaggacctcactggctgagagggagaggtggagagcgcgcgcgcgagagggatgggctacaaaccaggggtcaaacagcctggagaagtccgagtcccaccccaaagtcctgcaggcggcggcggaatagtcggtgcggggccagcatcagggtaagaggagggaggactttagggtgcgcgccgcgggcaagccgtcgtgggagcctcggagcgtgcatccgcgttcgcggagatgttccaagcccagaaatgcgcctgaatggggggagatcgc

SEQ ID NO: 334559 - DNA, 432 bp, Homo sapiens
  chr12:54400009-54400441
  hyper
cgcgcctcggccggcccggccccactggctctgagcaaatcaatcctctcacctgcgaggtgtaaataattcgcgagtggcagcgggagatgggccctcgatctggcagcgggctcggaaggctcaggagggcaggcattaaaaataatcgctttgtggaggagataagtgcaaagcaggcagcgcgtaattaacacaaaaaggcagaatgacccggacaaacgaacataaatccgtggtacctatgagggcggtgcaggcctcggggagagggacagagacggcctcggcgaggatggctgctttcggttcctttatttccaggctcggggagcgaaataaaccagataacgtgtaaaagaaagcaaacaaacaaatgaaagaacggtgagggatccccaaaaggggaaaccaagtccggccaggggttgc

SEQ ID NO: 334560 - DNA, 983 bp, Homo sapiens; identical to SEQ ID NO: 236389
  chr12:54402684-54403667
  hyper

SEQ ID NO: 334561 - DNA, 224 bp, Homo sapiens
  chr12:54404861-54405085
  hyper
cttctgtccagctccggggaggcgcagtggacggcaaacttacagccggtatcagaccttggaactagaaaaggagtttctctttaatccttatttgacacgaaaacgtcggattgaagtctctcatgccctgggactgaccgagagacaagtgaagatctggttccagaaccgaaggatgaagtggaaaaaggagaacaacaaggataaactgccgggagccc

SEQ ID NO: 334562 - DNA, 803 bp, Homo sapiens
  chr12:54422126-54422929
  hyper
cgatttttttcccccttcctgacatctggcttgcgattggctgggagggggtcagctgactttgtcattttgtctgtcctggattggagccgtccctataaccatctagttccgagtacaaactggagacagaaataaatattaaagaaatcatagaccgaccaggtaaaggcaaagggatgaattcctacttcactaacccttccttatcctgccacctcgccgggggccaggacgtcctccccaacgtcgccctcaattccaccgcctatgatccagtgaggcatttctcgacctatggagcggccgttgcccagaaccggatctactcgactcccttttattcgccacaggagaatgtcgtgttcagttccagccgggggccgtatgactatggatctaattccttttaccaggagaaagacatgctctcaaactgcagacaaaacaccttaggacataacacacagacctcaatcgctcaggattttagttctgagcagggcaggactgcgccccaggaccagaaagccagtatccagatttacccctggatgcagcgaatgaattcgcacagtggtgagttttacagctccgagatataaattaaataaactgaactggctttatgaccggcttccctagaagaacgggcggagagagttttttatggccccataaaaacaatcacgctcgtctcctcaccgagacagggccccctcttctgccccctcagctcgcctctcgctcgcttgcaggggcctggcccccttggcccctgacggattggagggccccaaggc

SEQ ID NO: 334563 - DNA, 2091 bp, Homo sapiens
  chr12:54426536-54428627
  hyper
cgctgtgggcttgttgtcccggctacccccaattccaagaacctttttttttttttccctcccccttccctctttctctctctcactccctctcccccttggttgggctttgccaacatatcgagatgcttttcgccggcttccatcactaacctcccggaggtcatcaagccaaatttatgagtggccgctcgagtcacgtgactctatttaaggctcccttatttgggaagagcgcataggataaagaaagagatatctccacctataaattgtccactttggagaacaaaaaacccctcaacttcaaagagtcacaaatcacccttaatcaaaaagggtgcagaaatttttttgggccctccccgccatgagctcctacgtagccaattcattctataagcagagccccaatatccctgcctataacatgcaaacttgtgggaactatggatcggcctcagaggtgcaggcatccaggtactgctacggcggattggacttaagcatcactttcccaccgcctgcgccttccaactctctccacggggtagacatggctgccaacccccgggctcaccccgaccgccccgcctgcagcgccgcggccgctccgggacacgctccgggcagagacgaagcggctcctctgaaccccgggatgtacagtcagaaggcggctcgcccggcgctggaggagcgagctaagagcagtggggagatcaaagaggagcaggcgcagacagggcagcccgccggactgagccagccaccggccccgccacagatttacccgtggatgaccaaactgcacatgagccacggtaaactttaggacttcattttgcgctctcgggtccgcctgggttttataggccatgcggggcaaataaagaaaaaaaacctgcggccataaattttacgatccaggcatcaatggctcgtaaaactgtccactaaaaggcttagaggctgtgtgcgcccaaatttacgacgacataattggatcataggaacaaaacgtgtataaaaggcaatattcaatttttgggggagagggagggagttaaaaaaatagagggatctgaagggtgaggagcgcggggctccagagcggggatccccccgcggctccctccctccctcccctgcggagccggctccgccggcgcttgcggctccggaggattccagcgactcgggaggggcgggaggggggtccccggtgctcggatctcgagggtgcttattgttcggtccgagcctgggtctccctcttccccccaaccccccctcagcccctccggctgcagagtgaaggctgcggtggaaagtttcctgcctgggcggaggcgcctctcccggggctgggctgggctggcccgcctgcggcccgcgtggcctgtcttgcggctctcgcctcctctccctccggccgcgggtgggggcctgggctggggtggggacgggggaacgctgcaagctattcaccccttcctggcttggggtggggtttatgttccagagacggacggcaagcggtcccgaaccagttacacgcgctaccagactctggaactcgagaaagaattccactttaaccgctacctcactcgccgcaggcgcatagagatcgccaacaacttgtgtctcaatgagagacagatcaagatctggttccagaaccgcaggatgaagtggaagaaagattccaaaatgaaaagcaaagaggctctttagaggcagcgggggaggcccgcagagcgcgcccctagccggttcctgtccctgcgcctttccttttcgcctttcctctctatatttcgggtcgggggcaggtgctggagcactgggctcccgggccccacagacaaaagcgcttttccttggcattccgcatccctaccgacccagggttcccgcggggctgtcggcgctgccccatctcccctcagctcggctcagctcggtacccggggcccagggcaagctccgcaggacttccccggagggctgcggcgtacaggctggcgcagaacgaaccttggcctgggccgtatctccggctcccagcctcagcgcggccctccc

SEQ ID NO: 334564 - DNA, 363 bp, Homo sapiens
  chr12:54441117-54441480
  hyper
gcctgagagtcccgcgccgcggggccgctgcagagccggtctcccgagcaccgcggcaggaccatttcgttggaatgtagggcgaggccgaagcccgccccggacccaggccgcgaggtgcgcgccggccgccgaggggccgcctgtaaattacagcccgccgggaggactcggaaatacacaaaaggagccgaaagatttaaacagtcggaggcagaggcgtcccgaggcggccaaagcggaaatcaatcacgtaattaaaacagggaggggacgaagcccaaggctgggggtcccgggttcggaggaggcggccaaggtgcaggccgaggctggcgagcggcttagggacgtggctcgccc

SEQ ID NO: 334565 - DNA, 1408 bp, Homo sapiens
  chr12:54446894-54448302
  hyper
cgagacttctgaactctgcttttgccaaccacttcctgtctctcttcagcgggggctcaacccccagacctccagaaatgacgtcagaatcatttgcatcccgctgcctctacctgcctggtccagctgggaccctgcctcgccggccgcatggccagagggttgggtgagtgtgtatggggaagaggggctggactctggtatccttggatggggggcactccaggctctccagcctcctcggctcagcctgggcccctccccatccaacatccactccagtcctcattcaacttcctcttcctgcgaaagaggggcgctgccccgtgacctacacagactgagacacgatcgccatgaatggagacctctggaaaagctcaggagccgaggcccacggggcccagcagaggcctgaggggagaccctgggcgggggctgaatcactgcctcccgacagtcccccaatgcccgggctttggaggggagccgggagcttcccatctccttttgcaggggagggttgtcagtctggcgggatgtgcactgggggcactccaacctctgctagctaaccccacatcaccacccacccccgcctcccagcaccaccaccaccacacacacaaaaaaattggatacattttgaataaagcgattcggttccttatccggggactgggttgctccgtgtgattggccggaggagtcacatggtgaaagtaactttacagggtcgctagctagtaggagggctttatggagcagaaaaacgacaaagcgagaaaaattattttccactccagaaattaatgatcatgagctcgtatttgatggactctaactacatcgatccgaaatttcctccatgcgaagaatattcgcaaaatagctacatccctgaacacagtccggaatattacggccggaccagggaatcgggattccagcatcaccaccaggagctgtacccaccaccgcctccgcgccctagctaccctgagcgccagtatagctgcaccagtctccaggggcccggcaattcgcgaggccacgggccggcccaggcgggccaccaccaccccgagaaatcacagtcgctctgcgagccggcgcctctctcaggcgcctccgcctccccgtccccagccccgccagcctgcagccagccagcccccgaccatccctccagcgccgccagcaagcaacccatagtctacccatggatgaaaaaaattcacgttagcacgggtaggcaactttgctttttgctccccccctccctcccttcttccctagcgctccccaccctcctcggccccctctggcccccgtcctcctttctctccttccccctctctctccaggagcgactctgggttagcacaattgaactggatttacgagc

SEQ ID NO: 334566 - DNA, 1240 bp, Homo sapiens
  chr12:54519801-54521041
  hyper
cgtggtccctcgtaccaatcgatcgaattctagtcgcaattctctgtctgtccctcggctctggggagaaagggggggctgtggcgtgggggctgaggaggggctaaggcgggaggggcgcctcatcccttcaccctcccttttcgccatgtgggggccctgagcgccgccccagaagaggtcgagggaatgttgtgggctggggcacaccagcacggcagaaactggagaaagcgagagacgtcgccagggacccagggacctctccctccagttccccgggcccgcccggccctgatggccactcacgctatagcgcccactctgtcctgggccatcccgcgccagcagtgtagcccccagcccgggcgcctgaatgctctccctccggatcgctgctcgggtccccactttggcgaccgtgcccccgagtcctgcttccccggggcctgctctgtatcaggcgcctgcgccttcaagggtacccggcccgcctgccctccccaagagccgagtttgcgctcctcccggaatcgtttgagagaaggacaaacttttggcaggatggaaatctagatgagcctgtccggagcaggtaagctgggcccgggacgggtgcgattcagcccgagaacaatctgtctctccccgtcccggtctctccctccccttacccctgtttcccctgcaggctgacatattaatctgccttcccccgggagaaatttgggctggggttgggcttctgtcagatgcatggggtcagagcagctttcctccccgagtttagggactaaggtggtagctggcaggggagggggagggttgcttccgaaactgaggattgaggggagggttaggggccgagaaacccagagtctgagggagacgacttctttcctcaaacgcaacttgggggaacttcggaaaagttttttgaggggagatggagaagggagcggagttggggtttcgagggctaaagtgggagagagggtgctccgcttcccgtactgaaggaaggatgtgtgtgcttattccccagtcgggaccgattaccagcctagaaaaacccagccgcgtcccaaacccgctcaccccagcaggcccttagagacgcttggagatccccagacacgccccgcggaaagggaaggaaatgccagcccgagttgccgactctgccgggacggggcgggggatccgcccagagcggtcccctgctgtcctgggcccttac

SEQ ID NO: 334567 - DNA, 743 bp, Homo sapiens
  chr12:54811865-54812608
  hyper
gtctccccagcttccgaccccagccccagaagtcccggtctcagcacagctccagccgaccagctacaggaaaccagcttttctcttcctcccaagagccagaggaagagggaaaccgcccaccccccttcacgcgcgcacacacccctcccgacacatcccagcacccgcccttggctgagttcgcccccagccccagggccccagtgccagggtccccgcactcgcccccagttctcggatcccctcgcctgaacagagattgggggcggagggaggagtaggagacagaggagaaaggagagggagccgccgtcctctctcgggtctttccccggtctgagttgaggggggaggggaggatgaggctggcccccatttaaccttccgaccccctcagtctttgactttcctcctactacacgtagctcattcggcttctacccgttctctcgccgcacaatggcccctacggatcccgaggtctcctggagcccccaaaagcccttcccggcctctgcgccccctctgcgcccccacccgccccaggtcccagcagcccacagacttcagccagagaccctcagctctccattcacgcgctctcctctcccttggcccggagacccctgcccagacttctccagctccgtgtcctctccccaccggacacatgtctccccactgatctcaaacgccagggcccctcctcacccgccacggtgccctccctactccagcgc

SEQ ID NO: 334568 - DNA, 277 bp, Homo sapiens
  chr12:56472747-56473024
  hyper
cgaagtcttcaggcttgaagttctggagaaaacaactaggctctccgggcgagatcccgaataccagtttaagggatttgaaatgcaaggccgtctgggactccactgccacggatgggcaccaggcggcgccggtcggatccgtcccgggactagcagggctttgggcagcaacccgcagggagcccgaccgcctctggccaggtccgggcagctggtgggggaggttccagaggtccacgccattcgtggacgcagtctctagtgtcctctccgc

SEQ ID NO: 334569 - DNA, 274 bp, Homo sapiens
  chr12:56521418-56521692
  hyper
cgggatagacggggttagttttcaaacactttcattccaaatacgatcgtatcctttccttttgtaagggcaggcaggaaaaagttgaaggataaggaatgtgcttagagtatgaaaactagagaaagtcggcaaaagaacatatatatatatcccagaccaaatcctgccaaaccgaatgagtagagggaaatcctgaagctccacaacccctcaacttcgcaacttgggctttctccaaaaccaagaaattggcggtgcagctctgcatgac

SEQ ID NO: 334570 - DNA, 140 bp, Homo sapiens
  chr12:56882303-56882443
  hyper
cgacagtctgcggatgcttccgcgtgggcccggcgagcgcgggtatccgcggatgctgagggcgggaaaggcgaggacaagctgaggcgaagccggtgggggcgggaggcgctccccgggaacaccgtggggctgcgaat

SEQ ID NO: 334571 - DNA, 331 bp, Homo sapiens; identical to SEQ ID NO: 236444
  chr12:57613965-57614296
  hyper

SEQ ID NO: 334572 - DNA, 654 bp, Homo sapiens; identical to SEQ ID NO: 236445
  chr12:57618691-57619345
  hyper

SEQ ID NO: 334573 - DNA, 223 bp, Homo sapiens
  chr12:57635256-57635479
  hyper
cgcgcgcgcgcgcgctgagtagagtgggcagtggaggaggttggggtgccggttgtcttgtaccccagtaccggcccttcctcggatctgttttcaattcagtctgctccttggcccagacttatgacctttgcagcatgcggcagtatcatccatcacccaggcgccgtttagggggatggagggcgctgggagctcacatagggtcgctgtcacgcctgcc

SEQ ID NO: 334574 - DNA, 160 bp, Homo sapiens
  chr12:57853395-57853555
  hyper
cgactaccctacctccactattatcgttctcggttgaacttctccccctgccccgcaatattttcctcaatctggttgtcggggcctctttggggccagccgatccagaaatccaagccgggatttagtactcaccaacagcagcgtgttcagccggggc

SEQ ID NO: 334575 - DNA, 145 bp, Homo sapiens
  chr12:57944029-57944174
  hyper
tcccagccccacgccggctaccaccatggcggagaccaacaacgaatgtagcatcaaggtgctctgccgattccggcccctgaaccaggctgagattctgcggggagacaagttcatccccattttccaaggggacgacagcgtc

SEQ ID NO: 334576 - DNA, 924 bp, Homo sapiens
  chr12:58014813-58015737
  hyper
agctggacgctcaacgggttggggtagccgcggccgtggccttcgggagcggggcgttgatggtgagggaggacccggggaggaacccggggggatccctgctgaggggccagggaaattgggccggggaagagggagggaccagctttcggcttgggttcgggagggcggaggtgcgcggggttggtttgctcctcctctagatggtgacagcgcgtcttctcccccacagctggggatgttcgtgctgcagctcggcgtcttgtccacctttttgtccgagcctgtggtcaaggcgctgaccagcggggccgcgctgcacgtgctcttgtcccagctgccgagcctcttggggttgtccctcccgcgccagatcggctgcttctctctcttcaaggtgggggtggaagaagaaaggagaaggggcttctagaggtcccgtgaatagggaaactcgaaaagggaggaaggacggagggtggaggggtagtatgtgacaagggagcaggaaaggaggttggagccacgtggctgaacgagggcgctgaggaggtgtaagccctggtggcactgggtagagagggcctcgctctgggggtcccgcgccggggcgcatgagccctggcacggggccctctgctcatcgcccctgccctcagacgctggcctccttgctgactgcgctgcctcggagcagtccggccgaactgaccatctccgcgctcagcctggcgctgctcgtgccggtcaaggaattgaacgtgagattccgagaccggctacccacgccgatcccgggggaagtcgtcttggtgaggatggccgtgcgcgccggccccctgcccgcgcagaccctgcggtcctgtgggaactggccgctgccgccccctggtggagtgcagagaggccacggaacagagggcc

SEQ ID NO: 334577 - DNA, 642 bp, Homo sapiens; identical to SEQ ID NO: 236459
  chr12:58021325-58021967
  hyper

SEQ ID NO: 334578 - DNA, 948 bp, Homo sapiens
  chr12:58025667-58026615
  hyper
ctgcgctgcgccgccgcggtcggcactcaccccactacttgctccttgatcctgaccgggatgtgtgcgtagcggggctcaggagcaagatctggcagctcgggcctgcgggggctttgcgggggcgcccacggcgcaagaggtagccggaggccgggcgcgtcccgggtgctcgcgtacaggagccccagcgaggcgcaggcgagcagaaggaccagagcgcacagggcccggcggcccagccacatcctaggtgggggtagggtggggagtgagaaagggagggaagaagggagggcaagggatggggcccttggcccccgcgtcctcagaggctcctgccggctcccaagagcgctctccactccacacatcgcgctagggtttgcactgccagccgcggttttcccggtacccctcccctcacttcccaggccccagggtctcccggcctcctttcttctcgccctctcctgcatctcggtttcctcacacacccgaggcctggcatcttaatgctgaagacatttggatgccgcggtttcgacgcggccgtgcgtaagcggaaaagccccgctctatcagggcagtggcagtccccaagcccgccgcccgccctggccggcgcgcccccgactcctcagtctgagcatcacctgggccggggtgggctgcggagggcggctccacacctagcctgtcaggaaaaaatgcagaatcatgcccgtgctggcgggcgcccccggcggaggtgacccgatgagtggcctcggcaagcggcgcgggggacagagtggaccgggaagcgcgcctcctcccgcctcctcccgcctcctcctcctcccctcaccaaccaatcccacccccacccacccccgggcactgacctgtctaacgctctaaggcagcggcaaaatttcggtccgggctgtgccgggctctcgcccc

SEQ ID NO: 334579 - DNA, 768 bp, Homo sapiens
  chr12:59313762-59314530
  hyper
cgcgggaagaatacttacagccgagcgacccaggacgggagtggctcgggaagacgcgctagccgcttacgactgcagtccagcaggtccccgaggcagcggcaggtagtggggcatgggcgctcggcggctaccccagagggctgcccgagttccccgcgaccgccgctgtctgaccggccagcgcgccccagcaccgcgcacagcagcagccccaaccccgcggcgcgcgcacggaggctcggcgcgctcatcgcggtccagcggcctaggtctctacccgaagctcccagccggcgcgcgctcggggcccggcacaaacttccagccgagggtgcacgcccgccctcgcggtcgcgtgcgcgctcctccctcgcgctgcccggtcaattccttcttttactcccggcggcgaagccctttcatgcccccaaacagcaggagggaaaccgaaaagaactgccaactgcaacagagttgcagcttgagcagcgtcggctcgccgaagccccttcttgtctgcaaaagaaactttttcgcctccaccccgcggcactgcgccaagtccccgcgcggcggagtagcaaggcgggcgggtagaggccgacgcgcgcccattggccgactcggctgcgggcgtccccgtggccacgtgacaataacaccgctccagccgggggcctacgcgcgggagaaagtggagctgagattgtaggaaattcagagttatattttccagcctctccagccagaagtctccactacgtc

SEQ ID NO: 334580 - DNA, 950 bp, Homo sapiens
  chr12:59989999-59990949
  hyper
cgccagagaccagataaagtaagtacagctggggagggaggggagaggaggaggaggaggaggaggtgccggctaagaggagggcgagcctgcgtctgcgacccgagctgcccgcggagccgcacgcgtgtgtgcaaataatggccagcctgtgacaaacgtgccaacgcagagttggccagcgagcccttatatagacaaaaaaatcccgaagcggccgcgggagcagagctcgcgtcagccagtgcgcgccgacagctgcccgggaactgagggggcgcgcggggtcctgggcaaggagcgcctcgcgtgctttcggccaggaggtgctcacgctctcggcttttacaccgagactcagcgtggcgcggtgcaccccagtctccctggctcacgggactccgagggctgcttccagtgcggcgtgtctctagtgcgcgccccgccagcatccggcccccgagccccctagggtggcgtggcttcattgccgcagaaggtggaggcgggggtggagtgtgtggagagaacgtcttctctttgagcagatgatcaggacaggaagaggctgtgaggggaagacgaaataccgggggatgggggggttgtctttcttcatttttggtccccaggaaggatggcaggggtggaagcagatggaaaactatatgcgggcgaggcctgagcccaggcagaaagggacctctgacttggcaagggttcaggagggcctgagccttctggtcttgctgggccactgcaccacattgggggcgccaggcccggtcaggtggcgccacaggctgcgagcccgctcacgtgcgaactgcctgttttctcagcggatgctgcatcgcggcgcccttctccacccccttttctcctctacttccgcgaaaaggattgcagactgccttggaaagggcggtcgtgcccagtgccactttccc

SEQ ID NO: 334581 - DNA, 1430 bp, Homo sapiens
  chr12:62584702-62586132
  hyper
cccacttcaatcctcgacctggtcgtttgctgttattaggagaaatggggcagagagggagggcaccgctcacggagcctcatttcgcatgctccgatcccctctcggcgtccctctactccgcccctaccctgaccgcccgcgagggagacgccggccgatggacccgcatctgccctcacctctcgccttccccgggcgatccctctacagtcccggacccccgagaaaggggaagggagacgtgtgcacacgggggcttccgggaccgcggtcctgcagttgccgctccggtccccagcgctggccggcgacccgaggcgcggctcgcacctacctgcagccccgcttcccggtggcggcaacacctagcgatgctcctgcagcttttgcgggccggcgccagccttatcgctctcgcatcgcttccaagatgccaatccgccgtcaccatccaggggcatagggaaccgaagtctggtgctgtgtgatcgtggagggcggcgtgtgagtgtggccctgagcgtgcgagtgtgcgcgcgcgtgtgtggatgtgtttcctcctccgatggcaaagacggttcaggaatctgacatccaagctggaatccccctgaagcgggtgaaggtgagcctgatccttctccccgcttctttattccacagtgtcaaagtaatcaaaagatttgtttactgaggaaaagccaaagtcccgcagcccttggcagcgcccgcggtcgcctcctgtcctcgccggatgcgcgcggtgcgctcagctccctggactgcaagaatcaaggcggtcttgctgcaattaccgctcttattccatctctgatttgtttgcttttaaggccgactaaagacttttcctctcgcctcacgtcgtctctccctctcacacacacacacactcacacatcctccgttccctctctcccgccctccctcttgttctctggggaaaggcaattggacagaatgattcaccttcaggaaagcagcctcggccacgcacttctcgagttccctggctctcgcaggtaccgggtctccaacgtggcggagttgctgggaagctcgggacaggaaggaggagaggctctgagctcagccgatgtcccccctccagacgcccgcgttcctccgtccaggtgcccctgttcccactgctcgcagataggtccccgctggtgccctcgcggagacttggcgccttccactcgaatccacttagcagcaactcctggccagcttcagcccctcaatcccgcctcgaagtgctgcgggcagagccccacgcagcccacccgctgcccttctaggcatcgtgggctggaaggaagggaaacccgccgatgtccccctggtagcagtgccctggcaccgtcaccaccgaggaggtgcgagttccaacatcgaacacaagc

SEQ ID NO: 334582 - DNA, 850 bp, Homo sapiens
  chr12:63025588-63026438
  hyper
cgccgtccctcccaaggacaccgcagactgagattattctgtcggccgcactcggcccccaaggagtagcactgcgagggtggagggtcctccagcgcgggggcgggggtgtaggccccgagtgatttcctgccacagtgccggagcgggactggcgctgcctcccgggtccaggttccagccgctcccagctgttggcggcgctgctgagatgatggcctggatcccccaggttccgggactccccaggtggctccccgaggctatttacagctgaggttcggccggtgattgctgggacggaaaactcatttctcagcctggcttttatttacactcttattaaggaggctttcattcgtgttggaatggcagcgagaggctgcgggccaggcggccgaatgggtcgtgcccgagcgacagcggccgcctgcgccgcgaccttgagggcagaggagcgtgggcggcgtgcggggacaaaggcgcgcggggagcctgggtcacggctctgcagcagacacgggacctccacgtttctaccaccccggaaagttgagcgccttgggggctgcatttctccctttattggtagctggttcggctcgcccctttgcccgaccacacgctctttgtaaatacagaataggacaaaacggaaagagtgatgtgctgtcccctccgtctaaaaccctaagtaaatacccagtcctcccccagactcttctccacctgtggttcaggtgtctgggaagaaggccctgcacgcccgtccgcgcctcccctgcccgggggagccccgggtaggcagtggccaaagactctgtagaacaactcccgggagggcaggctc

SEQ ID NO: 334583 - DNA, 1290 bp, Homo sapiens
  chr12:63327114-63328404
  hyper
cgggaaccaagcctgccccggggtatccgggccaccagaacagggtcagcatcaaggcgcccaggcattggaagagctgattggttcccggacgaaccaatcaaccagcgaggccgtgcacggataggggagggccaaaactaccgaggggatggggttaaaggaaaaggcgcaggtgtgccagccaccaggttttgcgtgcacttttgcactccctggttcattaataaccttgaattctattctaaatgtctcctagttttcccgtttcgtacagctgaggtagtagatagaagggaaaacgttacttatcttaccattcataagatggttattaatagtcagtggaaaagtggccatggagctgggggaagggcaataaaatcctccacctctcctttcccgattccactctgggtcgtcaacctaactcagtcggttcctgaaatagctgatcagtcaaacgcaagcttaatcaccaaagcggattaccaaaatgttatattagacagttggaataagtttccccctccccaagggctgagggaaatagtactggcatttaccgaaagcgcagcattttactacctgctaaaggagaagcggaggaactcgcgggctgaaagtgagagaaactgagaccttcggaaatgtacaaccacgcactcggacacggccacctcccggaatcggacacaagctcccaggcgcagtgacatctcctccaagcctccacccccataaactcttcatcacgcgggggcgtcaactatattttgggagggtgggggtacagatagcagattttccttatgtgtttcaaacttcagagcttttctgcccgttttttttccccaagtgacagagaccccggattcacagacctgtctcaccttagctttcccacgctccagcgctgccacccacccctccaccacccataccggggctggagacgccgcgtccttgggctgggggaagagggagtggggagaagagggaaatggccagtgtaagtaaagagctccccgccgaggcctggacgccggcagctagtgagagccctgaggccgagaagcagggagagaagagggctggaaccgtgcggggaagggccgcgaggagagcaggggcgccgccggtgtcgctgcactcactctgcgtagccagtggcccagggcagccgccgagtctccttgaggatgaggatggggcgggcgatgtggtcggcgctgcactccacctcgtcctgagacagccccaggaactctggccgcccgtaggggaaac

SEQ ID NO: 334584 - DNA, 970 bp, Homo sapiens
  chr12:63544148-63545118
  hyper
cgggtggcacaccgcgatgtagcggtcggctgtcatgactaccagcatgtaggccgacgcaaacatgccgaacacctgcaggtgcttcaccacgcggcacagccagtcggggccgcggaagcggtaggtgatgtcccagcacatttgcggcagcacctggaagaatgccacggccaggtcggccaggctgaggtgtcggatgaagaggtgcatgcgggacgtcttgcgcggcgtccggtgcagagccagcagtacgctgctgttgcccagcacggccaccgcgaaagtcaccgccagcacggcgatctccagtttggccagctcctcgttgcgcacgtccctcggtgggccgttgccctccccgagggcttcggcctcccggcttgtgttgccagcgccggtggccagaggccaccatgggctggagttgcccgagggccccgcgtcgggaccggcggagagacgcatgctgtccatgcagctcctactcggccctcttcggagctccagccctcgcgggccgctccctccccgtctcggaggacttgggctcctcgtccgaagcgcagggtctttggcgcgctcgcagcttgccgggctctgcgatccctccagtgggcgtctcccggagcagcgtcccgcctgcccactgagcagctctcagcagggtgagctggcccctctccctgctctgccttttttcaacttcggcgaggtcgggaaggtgagctccgagcttccggaagcactgggttcccaactcaagtatttatgcggtgcttgtttccttgggacgcgctccctcccgccctattgccggaagactgctggttgcctactccccgctccctggagttttattttttcctctccctacgtcggtgtttgtcctctgcatcactgtggagggggtggagctgggagactcgcagattcctcctcacagtaggtgggatcgtggcgctttccc

SEQ ID NO: 334585 - DNA, 871 bp, Homo sapiens
  chr12:63545150-63546021
  hyper
cgagtcatgccttttctgggctcgtagccgtttccacaagcttccctcactagccttcctcgctagcctccttaaccatgcatttgacttcaacaggcacgctaagcgcggtacctggaaacctccagtccacgcaccggcgtccacgcatctagctcctgcacctgaacctggctctcgacctcacctcctccagtccgggtttcttccttctcaccgagctcacccgtgcagcagtctggcaaattttattccccaggcaaattttcccggggcaaacatttctccccgctcgtgacttaaagagctatctcttcctagtaacgtctttgatgcatgctatttattaccctatgtttgcgacgggaagaacgcactcatcactttgcagccccagtggctgctgtgcctgtattcacagcggggtttggggggagtgtctcctggttttctctatggagactagggacttaaggagttttctctagattcctggggttttctgcgggaaaagcctgattcccacagcggggatggcggaaatttggccgcagtggtccgtggggaccgtctggttactactgagtcgtggggacatctttttgggtggacaaagagcagctgccggacagcggccatccaggcagtgctgtccagggcaagggacagaaaacccgcccggctcctgtgctcaggagtaagaaagaggcaatctcaaagagaggaaagaggccctgggaaggaggggaaacaaccacctacctagtaatccgttactctgaacagctggagcccctctgcagggcgggagggaggcagaaatgcgatctccctcagctctgttttaacgttggtgaagatatgcctcgac

SEQ ID NO: 334586 - DNA, 1249 bp, Homo sapiens; identical to SEQ ID NO: 236482
  chr12:64061816-64063065
  hyper

SEQ ID NO: 334587 - DNA, 1773 bp, Homo sapiens
  chr12:65218018-65219791
  hyper
cgcgcctctctaatctgccaggaaataattcaacgcaattcgggctgaagcgtgtgcctcgccgcctgcggttgggtcatggccccttctgagactgctcggaagtgggagaggatgcttgcccttacgggtgttctgcccctgagactggcgccccttggtgctccctctgttccctcccagatcttgggagaagcacggacatctctgtttctgcttttggtccccgaacgcagttacgcgcccactggctccctgtctctggcgcttctgggcacgggggagctggggcggccccgcctgcgcacggcggtgccgggattgggggcgggcacgccgcctccgtctcccacgcgctcgctcgctcgctcgctcccgccctccccgcctcgagcgatctcctgcctcagccttgcaggctccgcactgcagatgcctgctggcttccctgcgctcggcggctcccgcggtgccccgtaagtccccgtgaccctccagcaccagccggctgtgcgctccctgctcccacgggccggtcagccgcagacactcacccagctccgcgagctcagccgctcagcgagtggggtagcggggaccgagacggacggtagccgtgccagagcccggggcgctctcggatgcggcaggacaagctgaccgggtctctgaggcgcggggggagatgcctgaagcggcagggcggcggcgtgggcaccatcctgagcaatgtgctcaagaagcgcagctgcatttcccggaccgcgccccggctgctgtgcaccctggagccgggtgaggaccccagggctgcagatggggcgctgtaaagtagcgccggggctgcccgcgcttctgccttagcctgactccgtctaggccggggagctctggggaaagtccgcgtgccacctggtgcggggcaccgcgttggcacctgcagggagcgattggtctggaagggtagagggcagacgggggcctgggtggggcagcggccaccccaggcgcggagaacccgctgcttccaccctctccccgcggacccccaccctgcggcctgtgtgctcggctttctccgcgtggcggggaagtgcgggtggctgcccgggccctcagaggccgcaccacctattgtgttccaggctcgcaggaagccagaccttgcgagaggtgtgtgggggcggagagtggcacaggtttgacactgcaggtcggaggaggaagacagtggctgcaaaggcaaaatcgggtgttattttcccaagagtcccttcagcgtgagtgccggggtcagctcgaactggagcctgtaatttgtgagtgcgagtggggagcagcaggagatccttttcataggtgaggtccaggaacgagcctggtcgtgctaggcaaggcccttcccactgtcagcctgtgtttacccatccctgcttctccagactgcataactccgtgtcggctccatcacccggcatccctccccgggattttaagagcctggccctagcgcgggctcctgggcacggaggtttctggcaaggagtggctgcagagggagttggctgtactctcactggtgcttggcgctcacctgttccctggagtggcaccggctgcgttccaggcgggttcacggtccccggcccccgccccccagcgccagcgccttggggacctgctgtagagccgcaggagaatcgagctgcagagtcccaaagggtgggatgcggcactgcctttcccaacctcgtggtttctttgttgttctcc

SEQ ID NO: 334588 - DNA, 326 bp, Homo sapiens
  chr12:65220127-65220453
  hyper
cggcatgatgcccagcaggtgccccggaaaagtcagaagagcatattggtcagacatacagggaatccttgtagtgtggcaagaataagtcagcgcgggaccgaatttcctggtctttgttatcaagcaaacgtcatgattatacgctcctccattcagcacctcgcgtccggacagcaacctcacttgttttcagcgtgccttaaagcgtgcgctgggctggaaacactcccgtggccgttgttatcaccgttctatgtttgggcaggacttcgtttaaaccacctcagagagaggcggatccatgtggtacttaatattccttc

SEQ ID NO: 334589 - DNA, 912 bp, Homo sapiens; identical to SEQ ID NO: 236494
  chr12:66122483-66123395
  hyper

SEQ ID NO: 334590 - DNA, 1203 bp, Homo sapiens
  chr12:66135079-66136282
  hyper
cgggaccaccggccttagccttctccaagcccagggcagggcgagaagaacatggcccggttcccctcggggtctctggcccagctgcggagggggaaaggtgatcgatcttgctgggggccaccgctagcccaccgcttcctgccgcgacctgccgcggcggccggagcccgggagcttcccattggctcacgggccgacgccatgcagtctgggggggcgtggccgggcggcggggcgtggccaggcggtgcggggaactgcggagagaggagaggagaggagaggaggggaggggaggggagaggagtggagaggagaggaggggaggggagggcaggggcggggcggggccgggcggcgggggcgcacaccccaatctccctagcgctgtgggggtggctgcagctccccgcgcgctccctcctttgggggggtttctgggctcgtgacttttttttaaataaagaatgagcggatgcccgtgacaagttaatagctctcgccgcgctctaaagttaagttgtatctccttcccgccgcgagtctccttccacagacccgccggagctgccgggacgggcgctgcgcgggactgggcgttaggtgctcccggctggttccggcgagcagcccccacccctcgcccacgctcggggttagagaccccagcaccccacgcagacggcccgggcttagacctctccacgtcgctgtggcgcgcgccccgccaacacccccaccccacgcgcagcccgtgtcttctttacccccgcgcacttaacgcagggcgcacgcacgcatcccggccccctcacactcacactgcgtcttctgtcacaccccctgtcgcacacacactgttctctgactcccaccatctcctgtctcacacccactccagtttcgtgttgagcggccgccagttctccctcggtcgcgccggcgcacgctcgtccccttctgccccggagcccgcccgcgccgcacggtggccccttgcgctggcctgatcgtgggaaccaggcggggccccagcgtccctgcccctgcccggtcatccatctccctcccggtcggccagccgagacttcaaaggcgcctcctccggccgggcctgccaaaccccgacgcagcctggatgtgggccgggggcgctccccggcggggggaggccgggccagggcgcgtctggggccggct

SEQ ID NO: 334591 - DNA, 748 bp, Homo sapiens
  chr12:66217380-66218128
  hyper
cggttgcctctagtctttcctggagaaaaaagttcaatgaagaagctggggcgctctgtgtgtgcacattgtttgcatgtgtctgcgaatgtgcatgtctatctgcgtgcctgtgtgtatgtgtgtgtgtgtaaatgcgggtgtttaccagcgcatgaatgcccccgtgtccacgtgtatctgcgtgcatgtgcttacacgcgtgttcgtgtgtatctgcatgcatgtctccgtgtatgtgcgcgctcgcccgcccgcaggctctgtggtgagggcattccgaggcggagtacggctgtcaggggacctctcccactccactgcagtcccttcccactcacagtgaaccggtgcgctgcctgaggtgcagcctagacgcttcctgcaaagtgttggctcggcacggtagaggcgcaggtaaaggccaagccccgaaacgtggctccgggacagtcacgttcccgcgccttcccaggacaactgcccaggggtgacctcgagaggcgggtggagctaggcccacggcgagccagcccgggatccccggcctgtccctttaaccccgccgccgggcgggagcacgtgagcggggctccgggtggcacccgggcgccgccgccgccgaggcagttgtatttcgaacgctgcctctggctagcagccaggcgccttggctcggcggtccgcctggcctccctcctcctcatacttttcttcctgcgcaaccccctcccctttatccgcccac

SEQ ID NO: 334592 - DNA, 1763 bp, Homo sapiens
  chr12:66218550-66220313
  hyper
cagggtggggggaagaggaggaggaattctttccccgcctaacatttcaagggacacaattcactccaagtctcttccctttccaagccgcttccgaagtgctcccggtgcccgcaactcctgatcccaacccgcgagaggagcctctgcgacctcaaagcctctcttccttctccctcgcttccctcctcctcttgctacctccacctccaccgccacctccacctccggcacccacccaccgccgccgccgccaccggcagcgcctcctcctctcctcctcctcctcccctcttctctttttggcagccgctggacgtccggtgttgatggtggcagcggcggcagcctaagcaacagcagccctcgcagcccgccagctcgcgctcgccccgccggcgtccccagccctatcacctcatctcccgaaaggtgctgggcagctccggggcggtcgaggcgaagcggctgcagcggcggtagcggcggcgggaggcaggatgagcgcacgcggtgagggcgcggggcagccgtccacttcagcccagggacaacctgccgccccagcgcctcagaagagaggacgcggccgccccaggaagcagcagcaagtcagtacgagggcgcggtgggggcaccagcccaccccgtccccactgccggggcccagacacgcgcggggcggccggagtgcgggagcccagtcgccgcggccgtcgcacactgcccgccggccggccggggggagcggcgcagaccccacgagtgcgccgcgcggccccggggcgccagcaaccctccgggcggggaggtggggagccgcggcgggcggcccggggaaggcgggaggtggggtcgggcgaagcgcgtcctcggactttcgctattgtgcacggccccgagtggcgcggtgtcgcccagtgactggaagcgaccgggatccgacaaacccgggctcgcaggcgctttccgagttgcttttgcaactgcccgggaggaaggaggtgccggggacccgggcgcttcggccgatctgggctgaaggggctagagtcttgggggccggaggctctttctcccgcctcccggggctgctcgcgggtcgggggctggcgcgccgcagccgcccccttggcgccctcctccaagctctcggtggcccaagactcgcgccctcccgacaaagaacgcatggagacccggctgcctggtcctttttgggctctttaaatatgcggcggccgccggagggagcccggggcaggggctacggggagcctggttccccgcaggacggggttaactcgcccagctaagggcgcgttgaaaggagtgtccaagagagtgcagggtagccagggtcgcttccttgtcaggggcccggtcccccttttgcccctggatctcgcgcctcagagctgcagccattaaatgctcttctccaaggccagtggccgggggttgagtaggggacgatcgaggggcgcccgggaccctgcggagtggagggttttgtctgcggatgcaaccaattaagcgtgcagccggcgcttgcagagctgcgctcagcgcgcagggctgggggttttgttcgctgtaatttccaagccgcggcgggcagagttggagcgggatatgtctattgagaacatttaaactccactttctcgggctttaaaacttgctctctgcttagtcttaaatcgcttccttcatggcaaacacgccgattagaaaataatcctagagtcccaaagttgtcc

SEQ ID NO: 334593 - DNA, 606 bp, Homo sapiens
  chr12:66582759-66583365
  hyper
gctctgggctttctccagttcgcactctgcttgtctcggcagctccgtccccaccgcagaggtgtgaaggggcgcaaagccagcgaagggagaacccgggtcgggtaacccccaggcctggccaggcggacgcaggggcatctcgggcgaggcgcgccttgcgtcacgtgggcaccgcccctgcagtgaccggagaacggcgtgttcctagggctctgctgccgtcgtggaagcaggatttccgcggttgtgtaacggcctgtcgcaggcgtgcagggacctggactccgcctcgtccccggggctcgggcagccgagccatggcggggaactgtggggcccgcggcgcgctgtcggcgcacacgctgctgttcgacctgccgcccgcgctgctcggagagctctgcgctgttctggacagctgcgacggcgcgctgggctggcgcggcctgggtgagtcggcggggaccggccgggggcggcgggggagcccagcgcgccgcggggcccgctcggcgtcgccctgcatggctggggtccctcgcggggctggcgcggcctccgggaagttcccgccagggagccggccccctcctttcctgggtt

SEQ ID NO: 334594 - DNA, 320 bp, Homo sapiens
  chr12:66629083-66629403
  hyper
ggcgggcgcgggcgcggggcagcctgggcgcggggcagcctcgccgcgagggggaggacgcaaggagggggccggccgggccccgggccgaggcagctttgggaactccctctcgccgcgcggcggcggccggcgggggctgcagctccgcgctgacttcccctccgcactcgtctaaaagtgcggcgcggcgcggggcgagactcgagcagctcgggcagccgccgctctgcgtgccatggacgggagttcgcgcgcggagctggcggcgtcgccgactctcccggcggcagcggaggagcagcgccgccgcgtcctcc

SEQ ID NO: 334595 - DNA, 499 bp, Homo sapiens
  chr12:68041644-68042143
  hyper
cgggtggggtgagaggaattcgaggtgtcgctccctcaccgcagagctgaaaggaaggtgtgtctctcccagtggccgcgcaggggaaaggctcggagttgtaaggaaataggagatgtctctgatgtttatttttgcctagcaacccacagccaactgcttccccagctgccgtccacacgcgcctctctgcctccccttgtcctagcgactggcgagcggtcacttggtgtcagtaaaccggggagggtgtgtggtggaggtgggagggcagccccctctttcgcccctgctcagggtcaacgagctcagcggccgcccctcccgggacttgcctctccgaggtgaccctcgcacaactaagttatctacatgatgaattggggagaggggagtggctaagtcgctgggaccaagaatggggggacggggaagcagtactgtctgtgagcagccattcagttcgaagagctgaaaatgcatttatgtttaggggtgc

SEQ ID NO: 334596 - DNA, 463 bp, Homo sapiens
  chr12:68758776-68759239
  hyper
cgcctcagtattgtcgatttccacatccacagcctaacaacgtggtgcaatcgccctttgcgacgccgcagaccaacagacggatgctgccctgctgcagtttcacagcacaccgggtctttccgcttcagctggacagaggcccagccaggccgtagggaggattccgaaggtctctctgcagaggaccggcctctcagaccgagaaggctccacccaggcaggaaaggacactgtatgtggggcagtcggcctgggccccatggctcgtgtttgttgctgaattgggcaacgtgggctgcggttcacagggcaacagagacttcaccacctaacacatcggggctggtgcagctgaggagggctgcttctgcctcttggtgaccacgccctttcccaggctgggcccacaggaagtctggccgggaagggaggaggcactgcaagctgtgggaaccacacc

SEQ ID NO: 334597 - DNA, 920 bp, Homo sapiens
  chr12:69326527-69327447
  hyper
cgcttccatcccttcctggcggtggtagttgaaatccagcgcagctaccaaaggcagcaacagccctagccagaggcacgggaagtccatgttctagagatgaataaaaataagaagaacctgagaacacatgagggcaggcgggggcatcaccagctacgtctcggtactccggtctcagggtctcccgacactgacgctccctgcctcctaaggaggcaaaagctggaagcaacaccttcgggagtgagccgtgcaaccagagaccgggagcacgggcagcctcggtgccctcgacccagccgcccgcgcctccctctcctcctcctcctggcgcctccgccgtccggcagctgccacagctgcgcccggccccgcgcacccccagcctcaccaggtcccaggcgcgcacctctacccacccgcggccgcccggcggggccgggtgttatagcccggtcagagggcgggcgcgcccgggccccgcccccggacgtccctccggcccactccggagccgcgcgggtgcctcccgggcggggcctcagccgccttcgcacctaggagagacggcgcccgcgcggtgcgccctttcgtggcgcggctgctggtgcccgcggccgggcggctgagctgggcggagggctgcgggcatggagtcgccgctcgcggacagtctttgctggagccccaggtcagaagtgtgtcctcgcctcggccacggctgtagcctgggcagccacagggcgctccaccgagggacactctctgtcgcagactgcagccgcttgggagacgtttagggctcggcgggtttcctgcggttggcggtgccggggcccacctggagccgggacgcatgcggagtcctgagtgccctgagccccgcgcgggctcctgcgggacgggcggcgtcggcc

SEQ ID NO: 334598 - DNA, 90 bp, Homo sapiens
  chr12:70759026-70759116
  hyper
cggcgctgtcgctttaagcagcgctcctggaaacctcatctacaaatcctggggcgggtcaggggtggcaagactcctaaggagggaaac

SEQ ID NO: 334599 - DNA, 733 bp, Homo sapiens
  chr12:70760478-70761211
  hyper
cggggggagcacgccagccgccgagagtggggggcgatggcgaagctccgggtggcttacgagtacacggaagccgaggacaagagcatccggctcggcttgtttctcatcatctccggcgtcgtgtcgctcttcatcttcggcttctgctggctgagtcccgcgctgcaggatctgcaagccacggaggccaattgcacggtgctgtcggtgcagcagatcggcgaggtgttcgagtgcaccttcacctgtggcgccgactgcaggggcacctcgcagtacccctgcgtccaggtctacgtgaacaactctgagtccaactctagggcgctgctgcacagcgacgagcaccagctcctgaccaaccccaaggtaagaacgccccgcgcacccaggggctccccgcgagggaggtttggaggcagcgtcggtgttagactccgcgcggggagggttcggcgtgtgctcgcattgctaggaggagaccaggtggcgcaggctgtgctcaaaccaggaatgactacatcagggagccccagggctccggtcttttcaggtgggtttacgcgcggcgaccagtggtgcccagaggcttactttaaaacctgtcttgcctggtctcagattttgaggcctcgacccagtccgggtcctgcgcctaccggactgggtttggagaagtgcaaggagccaagaaagttaacttttcctccatttaaagccagtggttagc

SEQ ID NO: 334600 - DNA, 1748 bp, Homo sapiens
  chr12:71833328-71835076
  hyper
cggcgcgcggcgttgagcactgaatcttccaggcggaggctcagtgggagcgccgagaactcgccagtaccgcgcgctgcctgctgcctgctgcctcccagcccaggacttgggaaaggagggaggggacaagtggagggaaagtggggccgggcggggggtgcctgggaagccaggctgcgctgacgtcactgggcgcgcaattcgggctggagcgctttaaaaaacgagcgtgcaagcagagatgctgctccacaccgctcaggccgcgagcagcagcaaggcgcaccgccactgtcgccgctgcagccagggctgctccgaaggccggcgtggcggcaaccggcacctctgtccccgccgcgcttctcctcgccgcccacgccgtggggtcaggaacgcggcgtctggcgctgcagacgcccgctgagttgcagaagcccacggagcggcgcccggcgcgccacggcccgtagcagtccggtgctgctctccgcccgcgtccggctcgtggccccctacttcgggcaccatggacacctcccggctcggtgtgctcctgtccttgcctgtgctgctgcagctggcgaccgggggcagctctcccaggtctggtgtgttgctgaggggctgccccacacactgtcattgcgagcccgacggcaggatgttgctcagggtggactgctccgacctggggctctcggagctgccttccaacctcagcgtcttcacctcctacctgtaagtacttccccacgtcactccgggagagagactaagaggggaaggaaggttcgtccaaggcgaggctggaggctcctcggcgcccgcctgctcgtgggggaggggggcgagtttgtcaagggcatcctggccaggcctgttagggcccccagagaaatgcacgtgtctcggggagtagcgtgccggcactttctggacccgcagagaaatggcttcgagtgcaacccgggaaagcgctgctgcgccgcagcttcccagtccagcgctagaaacatcgcagggcgaattcctgcaaatgcaggcatttgcgtgcggagtggacatttgtgacccagagcctggtacccaaaggcaggctgccatctggtccccgccccaaccgcctctctgcgtctagtcgcattccacgaaaagatggtctgtagaaagtttccccaaaggagaaacaacttgcccagctccaaagggtttttagtctgcatcccttgcactgtgacgtgatgtaacctttttggggttttttcctcttttcctcccttccttcctcccttcttccttccttccctccctcctttctttttattttctttcttttttaacggcgtgattaaaatgtggcaaccacaaaccccgattagagctgccagaacgttatctttacctttggctgcccgcgccgccctttgaagtgcccgcggccgctgtgtaatctttaaccatctcttcccccggggaggaaaggggaagtgggctgaaggctgttgggctggtaaacagcggcaccgacacccaaagggagacctgaagctctctatcatccctgggggattctcccaccccttctctccccactgcaacttccaaagccctgaggcggcggctcattgcgtaattttttctgtggaaaacccaggcccgaaggtaacaggtagttgggtgaacgcggtgacccaggaggaaccctattctcggagaccaaggcgactactctctccaccccc

SEQ ID NO: 334601 - DNA, 502 bp, Homo sapiens; identical to SEQ ID NO: 236523
  chr12:75602929-75603431
  hyper

SEQ ID NO: 334602 - DNA, 406 bp, Homo sapiens
  chr12:75728083-75728489
  hyper
cggaagctgcgtctaagaaacgaatatatagtgctttgcactcgactggcccattgtcagcatcccgcacttgttctttacctaacttgtgtggcttgcatattgcaatctgtattacaatccagacgcgctctgcagattacagattggatccacagaaagcagtttggatggttgaaattccctccaccagagggcgactcagagctttcccctgtagctcagagctttgtggaaggggaaccctgctgcctgttcttccccacagcgacactgacaagttgatccagccgcgctgggctcgagcctgtgcggcaggatggagccaagggagagcgtggtgcgggggcgtggggaaatcgggttgccccagccgttactggtccgcgcagtcagggcatcctcc

SEQ ID NO: 334603 - DNA, 420 bp, Homo sapiens
  chr12:77719312-77719732
  hyper
gtcctgggagtggcgggttcggatgggctggctgcggtgggccactttgggcatctcggcgtggcctgcgccggggtcacggggagggctgtcagcgccagggcggcggaacccgaggtctccagacgagtgagggagggatgcaggcttgggggtgatggagcgcttggctggtggctggtgagcgtccatacatcatagctctccttcccactcccccgcccctcttcgggattctctctttctctttccccgtcctcatttctttcttcctttactcaccactcgcttcattctcttccttccatttcctctttttttctcccctcatttcctttttttcctttcccttttaaagaaaggggaatcgtttgtaaccctttcgttctaccaacgtggaatagctgtgaaacctgcagc

SEQ ID NO: 334604 - DNA, 1907 bp, Homo sapiens
  chr12:79257342-79259249
  hyper
cgcccctagcctggcgcgcggtcccttcccccacccgctgagccttcctgttcggtatttcggtattaccaagctataaattgcctgagagcttagagacaatcaggtcaccaccgccctcacaagagaaaagcttcttacttccgagcagaacggttcagctgggaagagaggaagcagggagagaatctatgctttagtcgtcactgctctggcaaggggtcgagagagatgggggagggaggtggcaaaaaataaaaatgaaaaaataaaaaagcatctccaacaatgttgcacttgacccaagtgtacaaacttattggtcgctgcaatggaaactcccagtgcactctccacggcctggcagccgccgctgatgggtggagtcgcgctcccggccccacctatgggacggagctgcttctcccgcatctcggctccaccgcacccttcgcgggaagtccccaggcttccagcaaagctcagcttatcccgcccccgcttccaacccggaaccccagaagaacagcatgatgagcctccggcagccaggtgggccacctccccgcggctcagtttgaggacacttgtgcggaaccctttcacatccccaccctacccagctttcacaactccgccgggttaaatggccaaagacaaacttctacctctcctgtccccggtcccagcttttcaaaaacccacagctggcgaacccacacacatcgaaactcctaggtcgctgttgcagtctgggcatgctcagtatcagggtaggttttgattgagagtaaaaaaaaaaaaaaaaaagctttgtattatgctctctttctcctgtgcatactgcttgctgaacagcttgtggggcattcctgagtctacctagaggttttatcagacgcccttgattgtgtctccttgggatctgttcccctcttacttcaccccctcccccaacccgcctccaccccgcttcccaggtccctgtccgctgtggggatggagagacactaacagaactgggatgggcgatgttggctgaacggatccacctattattagtgcgcggggattggctccttggcgcagcgtacccgaggtggagccaatcaggatgctggggctcggagatgatgggcggccgcctcctcactggagggattcctggagaagctgcagtgtggggatgctctagaccgagtactgcccccagtgtctttccacctcctcctgcagcagcggcagcggcagcagcagttagcagcggcaacttgaggctgcaccccgggcaagtccccagggtggtgctcagccgagaggggggcttggcgccccgaaggggtgtgtgtagggtgggggcgaccacgtgggaccagctggtggccctggaaaacctcccacacacccacacccacacaccccttttgtgttgcaggctgcccctccaagagcggaggcagcgagagtacgcgtgtgcctcgcgccggtccacgcggggagagcactggggaccgagacccggcaccacctcccggtccgccctccaggtaaggaagcgggactggcggcgcggccacctcggcggtgcctatctgctcgaatccatcccaaagattttcttctcgatacacttgggttttagtggtgggagtctgagacctagggagggatccccgggtggcctattgtgagaaatatgagactacatgtgcatctcctggaaaagcactttgcacagcgcccgtgatttagagcctggagttgatgttgggcatcccccatcttcttgcttcctctttccttctcttgttctctctcctccgtcccccacccccaatctcaatcttttctctctttctctcccacacctcccctctcgccctcctcccaccctaagcacgcacagc

SEQ ID NO: 334605 - DNA, 474 bp, Homo sapiens
  chr12:81102174-81102648
  hyper
cgggtgcttgcaataggcaggaaatgcgtacccggcccgaggaagcaggaaagccgccccccaccccaccccaaccccggaaccgatgtttctttcctaatctgccgctgccttggttttccctccagcttgagggtgcggatttcctgcgcacctgcagctcccagtggccaagtgtttccgatcattccagggggctcgtgataacggctaaggaaggtaaagtaaaagggctctgggccgcaccagagaaaatccgggaggtggataggatgcttgggccgagagggctcgaagcgagagcagggacgcgccctgcgaaaagggcgctctttgcgcgccgggaccaggcctttcctcgctgccaaagcggcctcgcgcggggcgcggagctgcttcgtgttccttctttgggtgctatgtttgtgtgttgttttttcgctcaggaggagcaagtattgattcgtcagcctc

SEQ ID NO: 334606 - DNA, 1555 bp, Homo sapiens
  chr12:81330305-81331860
  hyper
catttccaaatggccgcccagggtcctaaatccggcggctgcggagagggactagagggtgtcctcctctgcagagccgtaggactcgagcgccttcatcactggacgctggagccaggaaggaaacccacacactcagggacaggtataaccccacaggggtgcaccagtgaggccccgatcgcagcggaggactccatccctgagcttgtgagggcgtcctggggaggaagcgaacactttccccgttcaagtcagagagcaggactcactgggtggcaggtcagaagttgaattttaacccgacctgcgctttgtccccgcgccttccgcagcctgggcgccgcggtggcaccgagctgggagaggacacgagaggctggcgcgggagaagccgagagttgctatcgaccgggagctgccggcggcgggagcagacgcgaccctcgccgctttcgatctcgaagccgcggagagccgatctcggctgctggggctcggctccccgcgctctgccttgccctttcggcagagggcagctccctgcctgctgcagccccgccactgtgcgcccggcagcccaggggtgcgcccagcccgccccccgagtggccgccgggactccagcagttggaccgaccctcgccctccggcgcctggacaaacttccttcctcccgggcccctgcgccaagcaagctgacaggcggctccctcgccggtctcctctgggctctggccgggcgagcttgctctctgcccctctccaaccccgagcccctggcgcctatagccgtccccgcgcagcggctccaacaaagccagaggaccggagacgacccggcgaggggctgggagtggcagcggggaccccagagccagaaggaggcgtcccctcggcggggcgagtacagtgggaaggggcagcgggaacgtagcggggagagaaaggggaagaaagtgttctgttctcggcgcgaacgccttcctggctcgtcctcgttccccttctcctcctgcctgagcgcgtcccatgtcccgttgggaattggcaggcggggaagggaggaggggagaggggacgcggtggcctggcgagcgagccgctcccttacctctgtccagggtgagcggctggaccactgtcaatgtcgccatgtctgccgtgggagccgaagtgacgctcggcttcagcatcagcaaccgctcgtagtgagaaaaaaaggaggagattgggggcgggggtggagagggaagacggaaaggagggggaggagggggaaggaaggaaggtggtggtggtggagaagaaagcttgggtgggttggtagccagatggagacgcaactgttccgcggcggcagatcttcagttgcggtgcggagctgagcaggtatccgagagcgactgcatcgccgggctctgggagggaaggctctgccctagaactttgctattccacccccaggagcgctgggtgggtgtagctggcgggttgcttcctttcaactttccactctaataaaatggtcagaatatacgtgtgtgcatgcggg

SEQ ID NO: 334607 - DNA, 855 bp, Homo sapiens
  chr12:82152624-82153479
  hyper
cgcggcgccgctccccctccgcgcccgggccacccggggtgtgtggggcgtccctccaaaagaaagcttggagaaaaggcgtgagaagtatctgggagagaagttctccacccagtctcccctcctggagcccctctggagtttaaggctaaccctgggagttagaaacctaaaggaaaacgagtccctagggatgcaaaaagcaggacaggtctcctcctggcccccagcctgtttccgcgcgctcccgtgtctcgtttcacttaaaggaggcgctttttctctggaaaggcaaacatcaccccacgccgtcccccggccccccttccctcccccccgccgcccccccgccgccacagcacacacacccatttttctcctcccggcctttctgcaagcctctttgcttgcttcaattggccggaagaaccaacctgctggcagccggtgaggacgctacagcatcttctctcctcacttgcctcgtgcggtggctgctactcctcctcctccgtctcctcccctcctcctccttggcagccaccacctcctcttcctctggaacaagggcttcccctggaagctgctgcagtggtttccaccggcccttaaataaattctgaagtaatcacgtctttgctctcctcctcacgcacacgcgcccgcggatacactcgtctcccccagagccgctcccgggctgccgaggctcgctctgctcccagtgccccctgcgaaggcgagggccagggatgggcaaagtgggaagggggcacacgcttccccgcctgggcttctttcacacaatgggctctacagccttcgcttgtgtcagcctgcgctggtggggatggg

SEQ ID NO: 334608 - DNA, 957 bp, Homo sapiens
  chr12:85305601-85306558
  hyper
cgccacactctcaaattccaggatgcgcagaaacacaggagccgtgatttctccagcagccacgtgcctttcgtacggcgaaaggccccctttcgggccatttatcacaggatacctcaagcaaaggggaactgtggtcacgtgaaaacactctgtcctcggtagtcgccttctgcctttgctaaagcgaacggaagcgaatgaggaataaagctctctgctctccccgccccatcgcccacctgcacgaggtttagcttccaattcacctcgcgtctctctctgccccaaccctcccaactttcctcttggactttcccgtgttggaccccacccttcaaccaaccccgacttggcttggaaacgagtaggtctctggggatgctgtgggcaatttccacgacgggaagaaaggatggcggcacgtttcaacccatgtgcttccccttacatgtgcagcctgtcgccccccaccctgattgtacagagatgcagagttagacggttgcccgcccagcccagcttctccctcccagggcttttgagctgccctccctcctcccaccccaggacgcagcgagtccttcccggcatccatccatcaattcgttcccggtgctggtgcccaggctcctgggtggctaatggcgagccccacctcacccccagttgtgcccttagcgtaggcgcttgccattaccgtcagtgtgtcttgaccaagcgcctcttgctgcttccacgtccgggcagcagcagcagcagtcgcgaaagggtagggtccaggtggctgtgacggaggccgaagaggagctgttggcagagaagcagcttcttgcctaggttgggacccggagctgggttttgggggtcgccgccctgcaggctggcaaggagagactcgtgagcgcctgtgtgtctgccagggaaacagcacgggatacaggcgcgcgggtgcgg

SEQ ID NO: 334609 - DNA, 322 bp, Homo sapiens
  chr12:85306620-85306942
  hyper
cggaggcgcccacgtgctcggcccgcccgtgttacggccgcctaccggctgcagaggagaagggtaggctgtgggcggcggcggggcgcggaggggtagccaggagcgcaggctgggctccgcacctccctgccccaaaacccattgatgcagcggccactgcggctgccgagcggcgtcttcccagagcccggggctgtgcccgcccgatgcaggatgcaactgaggaagcccgctccaaagcaaaacaaaacaaattcctccagccatgccgtctttctccaacccactcaagcgaaagaatggacaccagttaccagcc

SEQ ID NO: 334610 - DNA, 312 bp, Homo sapiens
  chr12:85430024-85430336
  hyper
cgttcgtttcaatttagaatcgagattgtttgtccttctagagcacctgtagggaaaaaccggtgtctcttccttgtgattggctgttgccatggatacgctttgtgtagcggctatgggcgctgtcttacaacaaagccaaggaatctcgctgctgaggggtgagccggggtcttaagactgggattcccgttgagggaggtgaacagctgtgggagctcaggccgagccgggactctctctgcctggccagacttccagcaaagggagagaccgcgggtcaggggatggctgtgcgactctgcgaagctc

SEQ ID NO: 334611 - DNA, 1766 bp, Homo sapiens
  chr12:85673206-85674972
  hyper
tctctcccacccatcgccaccgcgtccacactccgccgcattccagagaaaaagaaaaggccacggcctcgtaaagctcccagctggcccggaccccgagctcctcccggttagaagccgaagcggcccctctactacggcggctgcgattaacagttgccaatgcatctggttccttgggcttcggattaatgtgaatcttccacgtaaacgatttacggatgaaataaaagccttttagagcaatatttcctttcaagttcttaagacgcctctaaatctttctggtagtgagtggccggcatgggggcggggtggggacgggtggctcaggaaggcgcaggcagtagggagtggaggtttaactgctttgcgatctcaccaagatcttccgaaatgccagtccactgtcacggcggcaatgaatctgggtgtcaggggctcgtctctcctggcatttgtctgaaatggagctgtctgtctgtctatcctaggcctggacgccctctgcccgggtaagtggggaaaatgggggtggggtaggggcggagggggacctggggtggagttagtcgcccgcctattttcatattcattagaactgggaggctgcccgaggaggccagctgagtttcaagatataaaagcaacttcgggtgctccttttccagccgggacgtattaaagggaccggagcggggcagttcccgacgccgcagcgctcgctttcccttccctcctctctggccctccctcctcccacccactggctccctcccccagcgctctccagtttctgtgccccaggagctacgcgacagtcttccaggattatggagtttctgagcgagaagtttgccctcaagagccctccgagtaaaaacagtgacttttacatgggcgcaggaggtcctctggagcacgttatggagacgctggacaatgagtccttttacagcaaagcgtctgcaggcaaatgcgtgcaggccttcggacccctgccccgcgccgagcatcacgtgcgcttggagaggacctcgccctgtcaggacagcagcggtgagtcgctagcgccccagccggagccgccgcagcccttccgcaatcgaaaatgcaggatcggtctgatcaggcagggagggagaaaggagaaaagtgggagcgagggacctggaaggtggaggaaggtagtggaaggtgctcgctttatgaagcggtgttactgctgctgcagcctttgggggcggagggcggagggagggagagatccagcaccgggttgcctctgagcgattctcctttcgctgtagggtctggtcgcctacggatccctgagtccttctgtaatattggttcctggagtaaactgatagggcgctaaatagagcgtaattgagtcaagacagaacgcttcctctgcgagcccgccttgcagtccgggcggtaggaactgaaatcgatcacagctcgttagagtacgtcactgtcgtcacgagtagggaaaaaaaaaccggaaaacaaaaacaaaaaacaaaaaaccctttgagctcctttaggtaaagataaatctttttaattttccaagacgtggcgatatattttcaaagtttgaggatccctagatttctagcgtgtgtgaatttgtaatttctgcttttttttgcgtttgcaatacaacacgcgttgaatgtttgttaaacactaaagcacactaaatagcttcgggcaaaccatccccggcctaatcactcattcccagattctac

SEQ ID NO: 334612 - DNA, 848 bp, Homo sapiens
  chr12:88973866-88974714
  hyper
cggctcggctcgggatcacacaccacgccggcctcccccgcatcctcttgtctcacccggcaggcacagccctgcacgccccagctgcaagtcccagggagcgccggcttccccggggcaccgggcgcgatttttcctggagagcctgggagctcccgggcgcgccctactcacttgtgtcttcttcataaggaaaggcagcgctgcgatccagcacaaacagtggtgtggcgactccgtttagctgttctggagctccagcatattgcacgaacagcggcggcagatagtccacgcattgggtagcccgagcgcagcgccctctccactgtccctgcttcccgcagcgcttctagtctcggcgcgaggcggcgagcgaagcccggctgctgagccgccggcgcttttatacagttcccgcccgcctgctccggacacgcctccttcccttccggagcccggggtaggcgagaagcaggcaagggcgcggagggaagaatcgggagggcggccagagcacggtaaatgccccagaagtttggcagattaggccaaccttgtccgctcgcctgggggccccggacctgcactggcgggagaccgcgaaggcgcggggacgcagagggcgaagcttggtaccctgcagctactgctcgcgaggagtcccagcttaccctcccggatccgctggggctcacctggcacccccggggacagacgaaatacctcgcgcgccagagagggctcggagctccctctgttatacaaagtcggagagggagaggagtccgggaggttcggagcaaagaattcaccctgcctgccttagagaaataaagtttaattgc

SEQ ID NO: 334613 - DNA, 435 bp, Homo sapiens
  chr12:89747142-89747577
  hyper
ccccaccaccaccatcgcctgctgggaggtcgcgctggttaatgatttctgggcaaggagctcggcttctgacgggggagccggtctggcggggctgcctgagcgaggtgtgctgggacgcgccgggccgggccagcagtccccgccatgggcgaggcgtgaggaagtcctcccgcaagacctgcaggctgcgggggctcggcaggggggctcgacgattggttacagttggcagggaggcatgtcagagggggcctccccagccctctcctgccgccgcctcctccctttgtccagcgccgggcactccggggagcaccagccgcgcctgcgcgctgcgctccctgccaccgccccgccgtccccgtctccccgcttgggcacggggctgtgcgcgacgcagtggacgggtgcggggctcagcgagggactccc

SEQ ID NO: 334614 - DNA, 393 bp, Homo sapiens
  chr12:90101352-90101745
  hyper
cgctctaacccaaagaaaaggtaaatatcagcctgtcgaggagggtcgagccctccaagtacctgcagacccctttaacccacccggacgccctgccctcccctccgagccaagcagcgcacagggtgcgagcactcccagcgctgcgagtcccgcagaaaactggtgaatgaaatgcgcacagagaccaacctggctggtgaccgcggcgcagaaccaggggtcgctaaccagcttagccacaggattctcccgcaggatgggataaagagagcacagcccccaccccacacccctgccactggaacgcggtcctcctacagactccttcctcaaaaagggaggtgggggcgcaggcttttttctcttaaactaagtgaataaacacgaatc

SEQ ID NO: 334615 - DNA, 118 bp, Homo sapiens
  chr12:91502991-91503109
  hyper
cgtacacgtgcgcccccttctgggcgagcccagcctaattgttccagtcaatctccaggctcttccttaatgaaatgccttcctgtaagaggtttctgggtggtgttcattgaccacc

SEQ ID NO: 334616 - DNA, 1302 bp, Homo sapiens
  chr12:93966037-93967339
  hyper
cgggctgcgccaggtgtgagaccggaatgccaatttggggaatctctcctgttctttcctttttaattttttctacttgtccttgacaagggcctattcccactggatctgcaggtgactatttgctcttcctaggtcgccagtctttgatttcagctagtgaccctgggcgggaagacaccctgttcaccctcctcctgacctccgccccccacctcttcagccaactttatcttggatctctgctctctttatcttttctctagagctgggccagggcgctaactggaagcttggggttaaatggtgcaggaacgtagaggcggaggagtccctgggattttccacgtctatttccccacccccaccccagccgcaggggtccagtttggactgacccaacctcccgctttctctttgtaggcgatcagtgggtgaccgcggctgcgagggactttgtcatccgtcctccaggatctggggagaaagagccccatcccttctctctctgccaccatttcggacaccccgcagggactcgttttgggattcgcactgacttcaaggaaggacgcgaacccttctctgaccccagctcgggcggccacctgtctttgccgcggtgacccttctctcatgaccctgcggtgccttgagccctccgggaatggcggggaagggacgcggagccagtgggggaccgcggggtcggcggaggagccatccccgcaggcggcgcgtctggcgaaggccctgcgggagctcggtcagacaggtagggagccgatcggccgcgacgcgtgcgggagggagcgcctccccaaggaagcagctaggaagcggggtcgaggtgggaagcaaagaataagatggaaatacgtcccttgcttccaagggaccgcggagagcacgctcgcagggtcctgggtccttgggaatgcgtaaggaaagtggttctccagggactcaggcctggcggagcgcagagcgcgggaagagcttcttggaaatagcttcttagcacgctggaagatttactgttttccgcagctgctcagggttaggctcccgggctcgaaccccggccggggaaagcgtcgggcgcctccctttgcacggggtgcaatcagcaagtcggtgccgcgggccccgcaggcccagcagcatctggctcccgggcggagctgcggctgcagcccaggatcttggcggccaagttcagggactgacactgccgcgagggcggctgcccgggcgtcgagagtaggctgcgaagcccccgccgagcgcggcttccatggt

SEQ ID NO: 334617 - DNA, 2345 bp, Homo sapiens
  chr12:94541793-94544138
  hyper
cgacccggggaaacccacaccctgtcacaggggcgccttggtccccggagtctccggctcggccatgtctcccgcgcgcctccccggggcctccctctcgccgctccacacctgtcagccgctctcgcagcagccctgtggcccgagcccggggcctcagctgcaaccccttcgcaccctggatcctcgctccgcgcgcctggcgtatccccgacccggctgctgtcgtaaacaaaaccgggcgttggagcagcaccgcgggcggacgggcgcgggagcccgctccgtgcgccgttagcgcgccccgggagccccaggcgagccaagggggcgatggtggcggccgcggcggccgcggcgggcggctgagctttgttatgaatagatgaaagaggccacctacacagtaacccaaattacgagacctccctcctccctatctcaccgaatcaagaggggaggggagatgggcgtggagggagggcgggcgggcgggcaggaggcggagggcggaggaggaagagaggatgaggaagggggccagttgcatcccactttcacaatgggaaagtgaaacgcacaagcgcacccaacctctccagccctccccgcccgcctcgctcctctccgcccgtcccctcccttcccctccgcgcctccccgcgagcgccagcgctgcacacaggaactctccggcgaaggagggcgaggaggaaacggtgccggagcgcgcagggcttgctgccgccaccgccgctgcacaggctgccggagcgagcctgccgcgcgccgccctccccgctctccttcctgggcgagctgcggggatggggcggccgcgggagcccgagcgcgcgcaggaaccgccgccgccgccgcccgcgtctccgttgccgcgcgcctgagccgccgtcgccgccgcgcgccctgcccgggggcggcccccccagccccatggaggtctcccggaggaaggcgccgccgcgccccccgcgccccgcagcgccactgcccctgctcgcctatctgctggcactggcggctcccggccggggcgcggacgagcccgtgtggcggtcggagcaagccatcggagccatcgcggcgagccaggaggacggcgtgtttgtggcgagcggcagctgcctggaccagctggactacagcctggagcacagcctctcgcgcctgtaccgggaccaagcgggcaactgcacagagccggtctcgctggcgccccccgcgcggccccggcccgggagcagcttcagcaagctgctgctgccctaccgcgagggggcggccggcctcggggggctgctgctcaccggctggaccttcgaccggggcgcctgcgaggtgcggcccctgggcaacctgagccgcaactccctgcgcaacggcaccgaggtggtgtcgtgccacccgcagggctcgacggccggcgtggtgtaccgcgcgggccggaacaaccgctggtacctggcggtggccgccacctacgtgctgcctgagccggagacggcgagccgctgcaaccccgcggcatccgaccacgacacggccatcgcgctcaaggacacggaggggcgcagcctggccacgcaggagctggggcgcctcaagctgtgcgagggcgcgggcagcctgcacttcgtggacgcctttctctggaacggcagcatctacttcccctactacccctacaactacacgagcggcgctgccaccggctggcccagcatggcgcgcatcgcgcagagcaccgaggtgctgttccagggccaggcatccctcgactgcggccacggccaccccgacggccgccgcctgctcctctcctccagcctagtggaggccctggacgtctgggcgggagtgttcagcgcggccgctggagagggccaggagcggcgctcccccaccaccacggcgctctgcctcttcagaatgagtgagatccaggcgcgcgccaagagggtcagctgggacttcaagacggccgagagccactgcgtaagtcctgcccccggggcgccgcggagagcgctgctgccggggagccgccgccgccgccgaggcagaacgagctgggggcgagcggcggggcgggggtacagccgggtgacatttaccaggtctcaggttcacaccgcgggcggccgtccgaaggctcctctcggacggtccccgagacctggagcacggcctgaggtccccaaagggagagtgtaaaaaggggggcggggagggttggagttagactcaaaactctagtggctgcatcccattgccatccttccctgtccaaacggggacgcttgtttggggctgagtctcctcgc

SEQ ID NO: 334618 - DNA, 1113 bp, Homo sapiens
  chr12:95266893-95268006
  hyper
caggagctgcgcgccgtcggcgggccgtgcctggaggaggctcgcgccttccaaatgccggagtgcaggcatccttcctctccccaaccccagccccggcctcgacctgtcgcccacctggcccggacctggggctggctccgtctctggggtgtgcgccaagggagccccaccgacgcccagcagagctgcccgggctcccaaagaaggaccggggctttgggcagaattctggcagccaggcgggcgtcaggggagccggagaaggggctcgccagcaggcgtggggcggagtgccgggcgcagcccacctcgcaagcgcgggcccagggctccgacgtgccagcgcagccccgaagagtgcgggcccggggtccccgcggcgccccttcccctcctcagtcccccgggggcgaccgcgctccccgccgaggtccgtccccgccgcaccctcactattcccgctgggaggaccccggcgcacgcccccgcccccgcaccccggggcgacggcgcactcaccctccgcatggtgtctgggccgtccgggcggggctcggcgacttgggcgcgagaagggctgggccggcggcgacgctcggccggccgggagctccgcgctgccccctcctgcacacgcctgcgccgcggccgccaagccggcgggggcggggcggggtagcgctggccgcggggtccccggggctctcccgggctgcggcggaggcgcggagccggccaagggcgcactgagctcgcggagctccggggccccggggcctttctgccgccgtcgcagcgtccccgcctcctcgggccgcttcgcccctctcctcttcctcgagttctggccccaccaggagcggagcgagtctccgatgcctgccccgcggcccccagaactgagctggagaagctttggggtgaaagctgggcccaccctacagggaccccaagtttgcggagcaagagtggattggcggagagcgcagatggcaattctcacccgccttaaaagtaccaccttaaaattctccccatgggatgggaaggtggcccgctaatgtccgttcctactcttcgttttctttttaatttttcagacagggtctc

SEQ ID NO: 334619 - DNA, 1120 bp, Homo sapiens
  chr12:95941858-95942978
  hyper
cgaaggccatcgggaatggctttaggaagctgattttcaagctttaagcggcagcaggtgccggcagcgcggggaccgatcgatggagagaaggcgggcaagacgccgggaagcgcattcctcctcaaccgagtgccacaaccgccctcccgaagtgccccggggcttcgagcatcacctcgcggtaatccgggagggtggagggatgcggctggacccgggcgttgcgtgctccacacagcgcccagcccgtgccagccccgcgcccacctctccacgacgctcgtgccgggatcagcgcgaagccccttccagtccccgaagccctcgcccgcgcccgttctcccccagctcgccccctccagcccgctgcgccttgccgcagcatctccgggcactctgaggctgccgccgggacagggtcggagcgccgcagaacccaccgaaacttcccaggggggcaattcaaaattcgccggacgcgtcgccgccgcgcgcccctcggctcattcccttccgcgcgcccgcagccccaggctctccctctctcaggaccccccagcgccctgcgcggcgagaataggcccccaggtgcctcccggccccgggggctgccgtcgcacgtccgctcccgcaggggtcctcactccgccaatcgccgcggccgcgcgccctcgcgcacactcaccagcccgagccggggcggccatcttagcgctcaccccggccccccgccccccggttcggcggccgcgacgacccggtgcggcggctacgacagccgtgacgcgcagcaggccccgccccctcccacagccccacccctgcgccggctcttcgcgggcaccgagaacctgccggtggccgccttccgcgcctcgtgggggggtcggggccacggacggtccccggcgccgcaagtgggtctgcgcgaacaacaagcactgcctccccgggcgggcttcgcacctgtagtgccgtcgggacacgggagggtaaacccagcgtgtcctgtgtgcctgtgagccgcagaatcatccacggacgtcgttagtccttcctggaatttctgcgatttacacaacgtcgaattgtttggcagaaacgcgtggcaaactcc

SEQ ID NO: 334620 - DNA, 106 bp, Homo sapiens
  chr12:96183929-96184035
  hyper
cgctctgcgctcgcagccctggctcccctgcacccccgagtcccgagatgggttagagaagcagcgagggaaggggtgggggccccgccgcgtcaccacccacctg

SEQ ID NO: 334621 - DNA, 375 bp, Homo sapiens
  chr12:96184965-96185340
  hyper
gcgaaacaggctagcgcctacttcccacatcccccagcgaaacaagccctccctcctcctccagccaccccctctcggggagtcccacgacccggggacggaacaccccaacccagccccgcgtcacccgcactgagagcgcgccaactgctaagcggcgttcgccgcttctctgctgccttttgcgggggtagggggatgtctcggctaaacaatcgctgcctacatgatccgaaggtgtgcccactttggtgtaagaggtattgcctaactcaaactcaaggtgctgaaagaaaagggtcacaggattagctagtcggcagtgtaagaacatcgttgtccagaggcagggcaagggcacgacaaagggaactc

SEQ ID NO: 334622 - DNA, 658 bp, Homo sapiens
  chr12:96883072-96883730
  hyper
cgtcatcattatcgttattaagtggccaacatggataaagagtatagtctggatttgtgaccttaaatttttggctctaatattcgccagcgctctgctcagaacattctctgttcgcatttcatacagcggtgccagcgcacaaccaggcaacgccctcaggagcatcattgttttctggacctggttctttctcgctctgccctccaggggccgctgtgtttctcggaatgcgcgcgggatgcccggttgccacgagaccgtcgccaggcaaccgcgtgtacacatactccaggcgggccggggcgcgtcaatatggcggcgcagggctccccctcgagctctccgtcagacgactctaccacctcggggtctctgccagaactgccgccgacctccaccgcgacttcgaggtcgcccccagagtcgaaggggagctcccggagctcgctgcttcagtggacctgccccgaggactcattgcccctagccgtgttttatgggccgctggacgcgaaaaacccgctcctggcctcttgtgagaaggagatccaggagttgttaggctttatgaggaaaaagaaggctttagccaccacggaggaagagaagcacgaattccgccggcgttggtaagcgctggcggggcactggggag

SEQ ID NO: 334623 - DNA, 2061 bp, Homo sapiens
  chr12:99287438-99289499
  hyper
cgtgtctctaatctactgatccaacgtgcccggcgcacataagcagcaccgcgactgaatttcaagtcttctcaaactcacacctcagttgctcagagaggagaaatgcagcgaggactcgccttcctggccagtctctgaaaacgcgaaaccttcctgagctgtccatttgttttaggggctgtttataaacggctggttttcttggaggaaaaataaacaaataaatacggggcgatggcagcatcctgataaacacaggaccttgtttggcttttggcaagttgtaacctggagtaaaatcacatccaagttacaagcacgcaaattggaatttcgctggaaacactgacccgaccttcaccgaagcagcaaatcgcagtctctgctgctctgctcctgctctccaaggcttaacattggaaagtccatgcccacgtccccctctaattaatcaatgtagaaagaaatacgagggaagagagagggagcacactccacaccaaccttgccagcttctattcttcctgctattccttaaaggcgatgcacagcgcacctggaaattacgtggacttggcatggctttttaatattaaagacaaacgacctttggaaaatatacactgttaaagtcaaaccatttggagagacacccagcaatttacctcctcaaactcctcggaaccccaagaatgaggaaaggaaatggaaaatgcgcttaacccgggggtggtgggggaatcgataaccagaacaggtttgaaaaaaaaagcccccctcccgccccctccgtagagaccgctagctgaggctgcaacacctgccccggcaaagcgtctccgcagccttcccggcttgcccgactcggcttcctccgcctctgccccggctgcggcaccacttcttggagccacgtctcggcgagcgggggccgcggagcgagggggccgctgtgccgctactcacccgagccgctcgggctggccgcgagccgggatccgcgagggctggcgggctctggcccccgaggacgcagacatgtggcttgaacctccgctcccctagccgttgcctctgtgcatctttctgggcgcccccagcgaatgcgagcggcgaggcgagggcgagcgcgccgaggaagggcgggagaggcgcggagcttggccgcgccgcgctgcgccgagcgccgggctctccccgcgagctccccgggcccgcgcgcgcgccccccactgcccccgccccccgcgcggcgcgtgccccccaccccccgccgcgcgccctcgcacccgcccggctccacgcggcgcgcgcctgccctggcggcagcggcggcggcggcggcgcgtcctcccccgaacgccgtctccagggctgctggctgcgctctccattgttccgcggctgctgcccggggtgggcggcgaggcgggggggaggtgtcggcttggccgccggggagggcttaccgctcgggcggaccctcactgcgagagcgatgcgggcccaggcgcggcgcgcgggggctgcagggcgcctagcactgggggttgccggcgcgcgggggcctcctcctggctcccaggcactcgctgctgctgggcgcccctcgcatcctcggttactatggatatctcgctcctccgccgccccctccgcgcactccgggaggccgccggggcggtagcagcggcgcggctccgcgggtgcccaggtgaccggctcggcagcggcagagcagtggcagcagccgccactgccgctgttactgcggtcgccgccgctggagagaggaggacgaggagggcaaggggcagaagcaggtcctgctctgtctgccccagaggccacctcgggtttcttctcactaaccaagcgacttcgtgtttacctcgcaggagacgcctcggcagtcctcaacttgtgtgcgccggtggccctctcctgtgggacttgcgttccagctgttctcagagcgggtatgatcggcctccagtagacttggagggtcacgggtgagattttgataaggttcaaatactcctcactcctgcctcc

SEQ ID NO: 334624 - DNA, 780 bp, Homo sapiens
  chr12:101110903-101111683
  hyper
tggcgtgaacccaccggggatcccgcccgacgccggctgcgctgggccaaatccgcggcgcgcctctgccgggcacctcccacctccagcttcgcccctcccctctcccggccgcgcgtcctccgcggctggttcaatccccgcggggacccggagcgcggctgccggtctacgccctctctcctgccgctctcgcggcgcagcccggccgggggcccccgcgcgccggcagctctaggggcgagcgcggcgcgctgactgggcgtgctcagccgcggagcgcccgggcgccgctagagccaagcgcatgcactcgccgggccgggccgtccaggggcgcagcgcgcagggggccgctctagccgacgccctggccagtctgggcaggacgcgggccaggatggcctccctcaccgcatacggtaactggggccgtcgcgggttcctggggcggcggggcggaagggaggggcccagggagccgtcgaaacacccggggaaacttcggggttcgcctctgcggaggggtctggaagggagggagacggcggccgtgcgcgccgctcctgaggggccgatgttccgcggggtttcgggccgcgggtaacccgggaaccgggtgtctgcgggaaaaacgcttcaaaatttgggaggatctgggagcttcgggactctagaaacattcccctcgcttccgaccactcaggggaagggacgcgggtgttaagtcctcctctagcggggtgaggcttggagttgggagatgtgcgttcagccagc

SEQ ID NO: 334625 - DNA, 229 bp, Homo sapiens
  chr12:101674003-101674232
  hyper
cggttgcatcccttcgacactcccgaggccgtcgcgggccactggccctctgcagccatgaagacaaagcccgtttcccacaagaccgagaacacctaccgggtgagcgcgggagcttaggcagggagccgcgggtctccgctgcctcagtcgtgagacaggctctgagcgagactccaggggcctcagacttctgggccgagtgtgtcactttcctggaggctccggc

SEQ ID NO: 334626 - DNA, 110 bp, Homo sapiens
  chr12:102878329-102878439
  hyper
cgtcacgcttgccccacgttgcataaaatgtggggaaaagagacaccaacgccaaacttcaggggcaggacccacataaatgctttcttggggaataaaaaaatgtgcgc

SEQ ID NO: 334627 - DNA, 167 bp, Homo sapiens
  chr12:103218426-103218593
  hyper
tccgtggttctggccggcgtcgacccgtgggtatttaagggttggggcagcccgcctaccttctgctaaaccgcagggaggagtcgggggctgcagaacctggattggttttaattaacccacgcgcaggcaaggtctgagagccgcgtttctgcgccctttgcagc

SEQ ID NO: 334628 - DNA, 556 bp, Homo sapiens
  chr12:103311040-103311596
  hyper
cgtggtgcatctccgcacagtaacgcccctcgtgggcgttgtcctgacgcaggaggccagggcagcctgccggatgctccaggtcacctgcccaggacgggccggaggggaggggctgagggagggtgtgggggacgcaggaggcaccacttcgctgcccgccctgggtaaagggaagaagccagggagcgacgggccacccaagccccgtcgattagacaggtttaggcacttccgggactctcagaagcctgggaagcgagttctctgcaattggactaagcctgcgaccgtctggtataacaattatatgaataatccgccccccttacccccagctgaaacagtcaggattctcatttagatttttgttgttgttgttttcccttctgttaacctctaagcacactgccttgctgtgcgctgacttcagaaaactacagctagagggcacgtgaacgctgagcacagcaggtaaagagcaaatgtaagagcgatctgggtttaaatccagcctggtgttctccagctattcgcacaactgctcctgaagctc

SEQ ID NO: 334629 - DNA, 1633 bp, Homo sapiens
  chr12:103351149-103352782
  hyper
cgccccgagcgcgccgcctgtttattcagccgggagtccggcacgcgccaggcgcacgcactgcaacaacaaacccagctgaatggagagtttgcaaggagcgggagaaaggaacgggagggggggagaggagaggaggagggggagtttagggagtgggtgggaggaagaggtaagaggaggggggggagtgggggctgcagccgctcgctgcagcagcggggagtggggggcgaggcggggccagggctgcgcgtggggctgggtgtcccattgaaaaggcggacgcactccggcagcccagcactctctcacttctggccagggaacgtggaaggcgcaccgacagggatccggccagggagggcgagtgaaagaaggaaatcagaaaggaagggagttaacaaaataataaaaacagcctgagccacggctggagagaccgagacccggcgcaagagagcgcagccttagtaggagaggaacgcgagacgcggcagagcgcgttcagcactgacttttgctgctgcttctgcttttttttttcttagaaacaagaaggcgccagcggcagcctcacacgcgagcgccacgcgaggctcccgaagccaacccgcgaagggaggaggggagggaggaggaggcggcgtgcagggaggagaaaaagcattttcactttttttgctcccactctaagaagtctcccggggattttgtatatattttttaacttccgtcagggctcccgcttcatatttccttttctttccctctctgttcctgcacccaagttctctctgtgtccccctcgcgggccccgcacctcgcgtcccggatcgctctgattccgcgactccttggccgccgctgcgcatggaaagctctgccaagatggagagcggcggcgccggccagcagccccagccgcagccccagcagcccttcctgccgcccgcagcctgtttctttgccacggccgcagccgcggcggccgcagccgccgcagcggcagcgcagagcgcgcagcagcagcagcagcagcagcagcagcagcagcaggcgccgcagctgagaccggcggccgacggccagccctcagggggcggtcacaagtcagcgcccaagcaagtcaagcgacagcgctcgtcttcgcccgaactgatgcgctgcaaacgccggctcaacttcagcggctttggctacagcctgccgcagcagcagccggccgccgtggcgcgccgcaacgagcgcgagcgcaaccgcgtcaagttggtcaacctgggctttgccacccttcgggagcacgtccccaacggcgcggccaacaagaagatgagtaaggtggagacactgcgctcggcggtcgagtacatccgcgcgctgcagcagctgctggacgagcatgacgcggtgagcgccgccttccaggcaggcgtcctgtcgcccaccatctcccccaactactccaacgacttgaactccatggccggctcgccggtctcatcctactcgtcggacgagggctcttacgacccgctcagccccgaggagcaggagcttctcgacttcaccaactggttctgaggggctcggcctggtcaggccctggtgcgaatggactttggaagcaggt

SEQ ID NO: 334630 - DNA, 359 bp, Homo sapiens; identical to SEQ ID NO: 236605
  chr12:103359254-103359613
  hyper

SEQ ID NO: 334631 - DNA, 935 bp, Homo sapiens
  chr12:103889148-103890083
  hyper
cggggcgtgccctccaccgcccccaaccgctccgcccggcccctcccccgctccctcccccacccctcccccttcctgtattagcatgcgggcggcggcgagccggccgggtggggagggcggcggtggcatcgctgcgcggggcgcattgtgggccgcgctcgcctccgcgggggaccatctgctcgctgtcaatgcatcacctgctcgtctgggccgtcgccggggcaacggggggcgggggattaaggagcgtgtgcgtctcggtccgggccgaggcggcgaggtgggggttggggcgggggaggagagctccttggccccccacccccctgccccgagacgggtcgacccgctcgggggccggcgaccaccgcgacgggttccgccgcttgcctccgctccttggcctttgctgccgtgctgcctcttctcacgggcgcggctggagtcccggggagcagcagagagcaaacggtccggctctacctcaccctgccagggggcgagtcccgcgctccctgcgtctacctggagctgcagggtccctatcccggggcgccgcccgcagcctcctccgcgggagctggagcactctgctgggtcctggggacgcggcgcagcgtggttccaagcgctccgcagtcgccgggcaaccacaatggggctgccttgccgtgagaccctcccccgcgactgccaccaaagtcacagaaaactttcacacctctcatctgacactgtggcctgtgcacgactccaagcactggggaagccttcgacatcagaatatgaatggcacctgttcttccgggggcggcaagggggatcccgatgtttatcaaaatgggttgattttccacggagggggtacttctggaggtagtaatccccagaaatcctgaaattcccccttccacctactcatctgcctc

SEQ ID NO: 334632 - DNA, 456 bp, Homo sapiens
  chr12:104235228-104235684
  hyper
cgcgggggtggccgtgtggtgtggtggcgcgcaggccacatgggatggaatgatgaggtacgaccccagcgccgcccgcccagctccgccgcaccttcgtcctgccttctgggactgacccccagctctggccacaaggacagcgcccctcccaccccagctgctctggccccggccctagaaggtgacctctctccgcattaatggcctctggcagtctaattaatggcagtctggacctcccctggatcgtggggcccctctgagacgtccccgatccccagcttaaatttatccaggaggacctgtgagtgggtggctgggccgaggttccactcatgggctgatgtcggctggaggatcccagccccttaagacctcagtaagtttgaagggccctcccattacacagcctggaaggccaatgcccgccccccgcctaggtttccgcctggc

SEQ ID NO: 334633 - DNA, 774 bp, Homo sapiens
  chr12:104322593-104323367
  hyper
cgcacactaaatacgggaagttgtaaaagactgtgacagactgtcactaaaaaacttgtcttcaggaattcggacgattatctgaaaagatattcaaagttcaattttgttggaggaagcaataaggaagtggggtgtctatgtcagagacgggcgcgggtatgcgagggggtaacgtatagagtaggttaaagagacgtagaaaatatttccaaaggcacaagtttagcatgagggacttccctcacaggaaagacacctggtgttttatatgtccttctgagcacagacagggtatttctatgaagttacaaagctgcaatcccgttctcatgtgcagcaccacaggttttgctttcaaatatctgcaggtgcatcctcctgcactcgttaaactaagggttttccttttctgtgctagacccgcttttacgaccacgctctccacctgattcacagaaagggttctacgaccgtcaggtcaccgccgcctttgtactttattggggagtcgaaggcctcagcgctgctcgcgatttccctaaggtggtcgggaaggtcccaaccacgttcttctgtaaaccagataaggaaggcctggggattccggccgcggaaaggcacagaggaggtgaacgctccggctgcccaagtgacgcacttgtaggcggattcggaaactcgtgctcttgagccggaggcggagcccccagactcagaccgaccccccagaaccgggcggccttgcccgaggcatgaaggctttctaggccc

SEQ ID NO: 334634 - DNA, 336 bp, Homo sapiens
  chr12:104359142-104359478
  hyper
cggagagtggtttatgtagagctttacattttacatagcagctttacattcaccctcatttcacagataaggaaactgaggcccaagatggcacagtggcctcgacgcccaggttttccactttcaaagaccctccctcacatctcattacctgataatgcaacacagtctttaatcggggcgaatttcggggtggaaaggactagataatgctgataagcgtcatcatcccatatacacagcaccccaaggacagcaccctatcgcccacgcgtccaccagcccccgaaaatactggagacaaaagctgacgtcggcagagcgctcctagtcccc

SEQ ID NO: 334635 - DNA, 212 bp, Homo sapiens
  chr12:104443924-104444136
  hyper
cgcgaagccgctgggaacccaggagttgcgctggcagagaggggcggccccagaaaccacttccagatgtgctcggctggccggctcggatgcgccagacttcctctggctaagtgcaaaacatgcaaaaaacaacgctgttctggaggaaaagacacaaaaccagagaagagcaaatgctttcagggtgaatttctaccacacgttgagtc

SEQ ID NO: 334636 - DNA, 692 bp, Homo sapiens; identical to SEQ ID NO: 236613
  chr12:104609377-104610069
  hyper

SEQ ID NO: 334637 - DNA, 686 bp, Homo sapiens
  chr12:104682348-104683034
  hyper
cgtgtattaagcttcttttttgaagcttttctgaattcgggatttaccgggaaagtaggacgtttaattttagcggagtagtgcaatgatttaaccctgactagaactctgacgtttacagctagccttgaggccatgttttcagccagtgtgcggatttgccggggtcagactccaagcttgattgtgagttctagcctttgtcagaaatgcagcaagtcatgctaacttgcaagggagtcaacagagggcacgcggtgcctgcggggccgggacggaagccccgcccccggcgcagttcccgcctgttagcgggggagaagcaccttacacgctccgctctgcttttgtgccacacagaggacggtcgggccctggaaggaacgctctcggaattggccgcggaaaccgatctgcccgttgtgtttgtgaaacagagaaagataggcggccatggtccaaccttgaaggtaggagagagtaacgtatctttttaaacgggggatgagctcgttgagctcagcgtggtcacagcctgccttttaaagccagcgtggatgtgaccctccaaacgggacgcagcgctgggaaatgacgaaaaacgctcgtgggctagcgcatgtgttaatcgaagttgatgagacgttggacaaatttcacatctcgggaaacttgaaatttctaac

SEQ ID NO: 334638 - DNA, 2676 bp, Homo sapiens
  chr12:104850142-104852818
  hyper
gaaagctcagctgtcgcctgacccgagggtcgtgcagtttccttaaccctgactttaagtcagccctctttaaccccgactcccaagctgggctgtcctttgaaagaaaaacgaaaccgcccagttctgagcgtcggaaaatgggcactcgctccctgggggtttggggcaacttccccgctacgtcgcccagggattttaaataattgccagccaccagaaaccccctaacccttaattcttccctccgagacccagcccgctgcttgccacttccctctccaaacgctggcgggggtgggtggcagcaccgaggcgattttcttcgtctttttttcctccgggttttgtcatggaaacgctgacacaacctccagacggcggccgagcccggccggggactgagggcttttgggaccctgcgggagcgcggcgcgcacaccgcactccccgggcaacagctggacgcgaccatatcccgggtaggggcggggggagcgcgacgctccgccccggcgctagggtccctccctcctcccggctctccgcaggcgccctcccctcgccgggggccgcgagttgcatttggtaaaacccagccccggaatatatagatcgttggagcgcaatgaagtagcctttggagagaagggagagggcccgtcggacagccacagcggccagcgcagcggcagcggcggcggcaccaccatcaccgctcgcaccccagccgcccggcccgcgaccaggcagcggcggccgccggcgggatcggaggaggcggcggagcggcgaggaggaggagcaggagcgcgcagccagcgggtccacgcatctcagcacttccagaccaactccggcaccttccacacccctgcccgggctgggggctccgagagcggccgcgaagcgactccgatcctccctctgagccttgctcagctctgccccgcgcctcccgggctccggtccgcgcggcggggtccctgctcctgcgccccgggcgcgcttcccggacaccccggtccccgcagccaggacaaagccatgaagccagcgctgctggaagtgatgaggatgaacagaatctgccggatggtgctggccacttgcttgggatcctttatcctggtcatcttctatttccaaagtatgttgcacccaggtagggggcgcgttagcgtggttttgttggatattttcttctctctcgcgctctagctcgctccgcctgatttctgcctcttccaaccctacctctccgccttcggcctcttcggggctcctggctgcccagagctcctggctgcccagatctacccgggtcaccgcgtcgggatggggaggagaagggaaggtgtgcttcgccctcttcttcctaccggctccgggctggaggatgggaccaggaggggcggtagtttttttttttttttttttcttcttctttttttctttgtgtcccttgtctgtctgtctgcgaggtagcagggaaacggagaggtgtgggaagcaaccgggggtgaggggctggtttgaggagaacgaaactccctccctgctgctgccgaggtcggaggatgaaagagttacccggagccggctgctctgcgcccgggcgagccgcctcttcctggttgccgggccgggggcgaagggtgtacgccccggcgaggttgcgagtccctgcagcaggctgggagcccgggactgggctcccacgtgtcccgggctccgcgcagagctgagcaggtgtggagagtggtcgggtgcccagcgttgcccctccaccacgcgccggccgtttgcccccggggtccgggtccgcagtgaccttgcggctggtgccccggggcctgctccagcccccagccctgagctggaaactccgagctcctgggtcacgccttgaccactgcagttttggaggaaactttggccaggtcctgggctgaccgtccgtttgcatcccccacttctgggatccgagcaacgggaatcccccgggcggcgtgggaatgaaccccattcctccggtcccttgtggctcaggcaaagttccacgtccgaaatctggactgggggagggacgaggctcgtcgcttcctaggggtgcgagggaaagtttgggttctggagagggaggggcgccctcgagcgcggcggccgggggtgagcagctcggctgcgaagcccaacaggtagaacgttccgagaagccttccgggtaacgcgggtctccccgccaagccgtggctcccctgctcccttttaccctcccttagcagccccctgccgggccacgttggctcagaaatccattttctacgcctccgagttgcctttctcagcgtagtcacagcaataatttgcttttctaattgcaaggaggagggaggtggaaacgcatttccttccagggaagtggggttggtgtttttcatttttgcctcccgccttctcctttcactgtgtatctaacactttaaacagacgcagtcccgaattcatcaagcctgcgtttgggtcgatggcagaggaataaagctgttctttccatcaaacaggcagggctgcaggctgcagattccttgacagcgcagggacagacggcccctttgccccactcggtctggagcagttgttaaggcagccacactgccaaggatatggtcc

SEQ ID NO: 334639 - DNA, 559 bp, Homo sapiens; identical to SEQ ID NO: 236628
  chr12:106975168-106975727
  hyper

SEQ ID NO: 334640 - DNA, 676 bp, Homo sapiens; identical to SEQ ID NO: 236629
  chr12:106976182-106976858
  hyper

SEQ ID NO: 334641 - DNA, 986 bp, Homo sapiens
  chr12:107486379-107487365
  hyper
cgagtgtttcaggtcgtcagtactctttggccagagaagtattaagtcaattctatttaatacttagggcacctaaaattcgtaagcggtataagcaagacagtcccacgtctaaattcacagatttggcggatcgcatggaattcattaacatcagactcattaaacacccaaatccatttcccacgggcttgtgactcaccgccacctgttgatgcccacattggaggagccggcgaaccaggggtccaggatgtagacgcagcggatggtgtcggcgccctgaatgcactccttcagggcggggttgtcgtggagccggagcccctttcggaaccagtgcacggcgttcacccccatgccggggggcgcggcgggtcctccacggagaaattcaaggaaggaggctccggctcatagccgacaccttcgcttccaagagaattgcctcacccggggcgtgaggaaagggcggcagagggggaacaggaaaaaatgactccgaggaggggaccggagaaggcgggggcgccggaggcgcagtggaaagatgaatggaggttgcctagtcggcggagtccgggtgtgacgccctttaggagcccgcgcccgccgcaaccgcctggaggcgacgcataacttcgagggcctcggacctccggagcctgagcaagttccaggagctcgagccgccacgacggcccgagccggcacggacggccccaggagattcgtcacggaaacctcgccccaccaaggcggcccctaaagacaaaacggcccgcccgaggtgagtcaccgaggagaaccggaggggaatgagcccctgtcggcgacgctgtctctcggcccgggagaaaggaccgggaacggaggctagaggcggtggtcgaggccgctggacggttgccggccggtgaccggtcccgaggctgcccgggtgactctgccgccgccgccgcgtcagcggcctcggccccgccccc

SEQ ID NO: 334642 - DNA, 1339 bp, Homo sapiens
  chr12:107711721-107713060
  hyper
cggctgaaagagggccgcactaattggtttgcgtacccgaagtgggaatagagagggaggaaaaccatgtttcaggtgttacggggggaaaaaagtgaaatgcgaaccgcaggggagagagcgaccgtcaggcagacaccttgtgaaccgcggtggagagcacacctaggtggggaggtcaccggcccaacccaccaccctccgggagaatgcgggcagggacagcagcagggggcagcatccacgtctctacgcttgcaagggttccccaagtccctggccactgctccccacttcctgcagcctcggtgtccgccgggggcgtgtgtgaggggcggggccgcatggggaggagggatttaaaaaaaaaaaaaaaaagcgaggtaattagcattctccgattccactggctctccgccgcccctgctttgcatacgcccgtcccactggctgcccggggtttgctggggttcggcaaggtttgcagccgccacggccgctgctgcgctccggtgcagggcaggctggcgccgagcgaaccagggccgggaactgggagccgggagccgggagccagctgcccgcggagctgcggcggcggcggcatctggggtggtctcagtcccacgaacaccgtggccggcgcccggtggctactgcgcccagcggggctcagggaagagcggtctagacactttttattttggaagaaaggggcaagccccggcgggagcttccttcccggcctggctcgctccccattgcgcccagctccggcccggactctggaagatgactccagggtctgctctgtatattccagcggcggcagttccgggaggcagccgaaagtactaacagttggtagcagcggctagtggaaaagtgagccaaggcggcgcggactcggctctccccgcgccccgcggcactcgctgctcctcgccgctccttccctttggctcccaggcggctgcagcatgaagtggcgcagcgatggccaggagaggtaagaagcccgtggtgagaacgctggaggatctgacgctggactcgggttatggtggcgcggcggactcggtgcgctcctccaacttgtctttgtgctgttccgactcgcacccggcgtccccgtatggcgggagctgctggccgcctctagctgactccatgcacagccggcacaacagctttgacactgtcaacactgccctggtggaagactccgaggggctggactgcgccggccagcactgctcgcggctgctgccggacctagacgaggtcccctggactctccaggagctggaggcgctgctgctgcgttcgcgggatcccc

SEQ ID NO: 334643 - DNA, 404 bp, Homo sapiens
  chr12:108297338-108297742
  hyper
cgattctcctgtttctggggaaggattctcagaaggtggctcatatgagtaaaaatcatttttcctgggtagctgattcctagaaactcgcagggcggcacagcacggcggctcgtggcagcagaagaggaagatgccgcggtggaaggcgtcttcgcggccgggcagcgacgcgtacacctgccgccggaagaagagcgacggtcgcacagctctcaggccgggggccggagccccggcagcccggccgcgcccatccacgcccagccacgcccagccacgttggccgcccgcccagcctgctgggaaactgctcgctgcgcattcgcccgccggcgccgacttggcgatggccagctacacaggtccggcgggggcggcagccatgtggggcgcgggctggc

SEQ ID NO: 334644 - DNA, 261 bp, Homo sapiens
  chr12:109162558-109162819
  hyper
acacgacggggcgtcgcgcctccagggctaggccgggcggatggagggggtccccggagcccgggggaagtggcgcagtgggcgtctgcatcggcccgaaggcacttgcgcagaggtccggcaggcagcagagcaccttgtgggcgtggtcgctggaggcagcgcctggcacccccatctggcacagagcgtccctgccctgccccctggggctgcggaggccacctccacgcccatttgccatccctgagccgcttctgc

SEQ ID NO: 334645 - DNA, 259 bp, Homo sapiens
  chr12:111127127-111127386
  hyper
cggctgcctcccgccccgcagggtgggcctgtcctgggcctcccgcagttacaaaggtcccgcccgtgggagcgaatcgcggatcacaaaaatcctgccccgggccagcctaagggaagggtgggcgggggaaccacttccttcctccgccggctggagcggggcgaatccaccccgccaacccctttcggggagcttctgctccatcccaccgtctccgggccacccctgcctctgggtctcctgattccttggcctc

SEQ ID NO: 334646 - DNA, 534 bp, Homo sapiens
  chr12:111284508-111285042
  hyper
cgattgcatggcgttggccgagggaggggctaagactgttgattgactcaagaagtcacttagcgtcatgagggtccgggtagtctggtaaggggtcgctggagagtgtgtcgcccctctcccccaaccaaaagcttccctccaaccagctgctcttgtcctctcctcccgagggccctgtgccctcccagcggacttgcaggggagaacgtccatgtttgtgcgagtcacaaaggcgcccgttccaggggtcccagaacgcccgggcgtggggctgggggtgtggcgcagcgaggccgcgcagcaagcagtcctcccggcaccgtcggaagcgcagttgcagcagccgtcggacaagcggccggagcagccacggacaagcagtccgggccccgccactggtaagtttcgccgcccgcccggccgcgcctgctgcgccacagctccccctgccagggaaaaggaaagagcggtcgcggtccccagtccattcatatctcgctgccctaagcgttgaaagtatcagggtctccc

SEQ ID NO: 334647 - DNA, 2239 bp, Homo sapiens
  chr12:111471144-111473383
  hyper
cgcggaaactgtgggcggtggtggtgacatttcccacgactcagtggcgcccccgggcggctcccaccctccctccggccggcgcgtctacgcagccccaagtgctggctgcgaccctcggatcccaagcatatctggcgatggagcggcggcagcccgaggcacgtgttgtgtgtgctccgattgcaaaagaaaaaaaaatgcatttcaaactattaacttttttttaagcgtgcaatgccgggagctgggggtagacaggtgcaagcgggggtaggcgccccgcgcgcccgcctcccgcagcgccccctcccaaacttccctttgcattgatcagcacgttacgtcagtattgataagtttgcaaaaagccaaagtcaagtgcaatcgcgcggcacaccgaccccggacttgggggggagatgcagcgagcgctccgcgggcccgggagccggcggcaggcagggcagcggcggcgccggcgcctctcggagaggctgcctccccccaacccctcccctcccaccccatccccggctgcctcccccgggcgggcgccgagctccccgcccggcgcgctccgcccgcgccctccgggggtcgggggggcgcacggctcccgggcccgttggcggcggcggcggcggcggcgcggcggcggcgaggggcagcgggtggcaggaggccggagggcgcccgaggggccccgggccgcggcgctcagggcccgggcggccggcggcggccccggggctggggggagtccagcccggatattgagtgcagccattgagaaaagccaaactcttgtgtgtgcgcgtctcgatagcccccaagatggccgccaatgtgggatcgatgtttcaatattggaagcgatttgatctacggcgactccaggttagtgcgggcagcgccggccgcgcggccgtgaggagcccccgggcgcgccctgggcgcattggggaggtccccgggcgggcaggcggacgccctggggcggcgggcggcggctgccggggctcgccggggctcggccgcccgctgcccatcgataggtattaggaattgatctcgccgctgctctttgttcggttcagtcatcgattagctgccgcgaccatggagaagcgctagtgagccctcggtcggcggagcggccgagcggccaggcggccgggcgaggagcggggaaggcaggggctacggcctcgggcagggggctgctggcgggaacccccggcggtcccccctgagccgcactttgcgcgcctcccaacttcgcggcgcccggggaggccgcggagcgcgccgcttgccagtccgcacccggctggggctccggcgagggagggagggagctggcgggcagggaggaggaggaggagaggaggaggaggaggagagaggaggagggagccggggttggcgaggaggcggctccgcgccccgccgctcgccggcacctcagccttcgccgcccgcctggctgcgcagcccggacgcgccgccacccgggggccgccgccgccgccgccagagccgccgccgccggactggccgcaagcgccggcagacctcttctcctcgggccggggtcttggggttcgtcttgcttcttgcctttacccccccgccccttccatccccttcccaagtctagatgcagacgggcggtggaggtgggcccgggcgctcgcaagtttgcgctcctgcctccagggcggtggagagccgggagcggcgcagagcaggtgactcccagccctcgggcccaagggaacttttaaatgagagatttccttgcttgttctgcctcctgcgtttctccccgctgctcccctcgtctcctctctcccgtctctgcttttcttctgtttctttcctctcttccctgctctttctctctccttccctagggcgactcttcgaaaccccatcactttctccccatcctccctttgtgggagtctgtgtgcctcccctagatttggaggtgttctctgcggaccccgtaggagccggggctgggaggtggaatctcagagaacgcaccgtggaggcgcggctccggcctctgttctttcccggagtgccccggacgcgcctggcaaggccccccagccttggagtctcgcaaagtctcggcgggtgcggcggggatcaggggcgggaaaatggtgcggataacagggcggttagagcatcctgccttgaccgtgacattcgcggaagacgc

SEQ ID NO: 334648 - DNA, 499 bp, Homo sapiens
  chr12:111844290-111844789
  hyper
cgtgttagggagagcgttggggtaactgaggccgtgggatgggggagagggcatcgctgacgcccccagcccaccctacggtagcctcgccggttgggggcggccctcccctcaacttgtgcctggggaggagcggtcaggggtcacccattgctaccctgaaagtgaaagtagtcaaactgaggctgtgagcacagatgagcccttgggtgtgggggcagcgggggaggatgcgccggcccctccccactccccattccgggccatgtggctaagagggtagcgccctgattcaggaagcccctctccccagttcctgcactgccgaggtcgaccgggccaggcccccgcatgctgctgaattgggcggttcaccagggctaggcgtcccagagacaggtttctggtattgatcctctcacacctcttgcctggggttccctgggaatcccccgaccaaaaaacgtctggagtgggtgttggtcttctagatccgcac

SEQ ID NO: 334649 - DNA, 799 bp, Homo sapiens
  chr12:112204379-112205178
  hyper
cgcttttgggtttacggccggtctcttcacctggagcatcagccgggaaggtcagggtcgccctggctcgggcctgttcacattggggtcaaaggcacacattgggggctcaaccaaggcgagctgcgttcgcggggccgggtctttccgcacaggcggagggcggtggcgggcgcggaggcgtcgcgcgagccagggggcagccacgggccgggggtacctagcgccacccgcttcgcttgcatcagctgcgcgccccatcccgaggaatggtagaggcagccccgcccccggcccgcccccgcctttccattggctgccgcgcggggcggggagcggggtcggctcagtggccctgagaccctagctctgctctcggtccgctcgctgtccgctagcccgctgcgatgttgcgcgctgccgcccgcttcgggccccgcctgggccgccgcctcttgtcagccgccgccacccaggccgtgcctgcccccaaccagcagcccgaggtcttctgcaaccaggtgagcccaccggccgggctcgcgctttgttttccggcccgagtcccccgcaggcccctaggaaggccccgcgccgccgtgggccttagtgtactcatctggggctcgaggggtttgcagaggctgacctggaagcacatctgccccctcctctcctgcaagcattttagccccttcgccgcctctgacagtccccgtcccatttccccgtgacttgggccccctctccgtcttcgcccagcctcggtctgttttccagggccaactctcggggttcc

SEQ ID NO: 334650 - DNA, 803 bp, Homo sapiens
  chr12:113494407-113495210
  hyper
gatttggggcgccccgagactcgcgtgtcagcgccggtggcgctcagggccgagatctgtctcctccccttcctcctcctccgccccctcccctctccctcccggagcacggccgaggcctcctcccacccgcgagatcccggcggccgccagccggctcctgcgtccgtccgtcggccgggcagtctgtccacgcgcggaaagctcggcgcggcggccgaggggcctgggagggaacgggcgcggaggcgggaccgcggctccctcccactccggggggagcccaggaggcggcggtgctggagcgcgagccggagccggagccggagacgaagagaggcggtgagaacgcgggtgcttagggaccccacccccggctcccgctgggggcccgcgagcggctcggggacgtctgggctggggaagcggggctgttacccccagggcgggaggcagagacgatccagctcctggcttcgccccctccgcgacgcgacccccgaggggccctgggccgcgcctgcagcgccgcgcatccccgtgcttcccggcgcaccccagcgcacccggcatccccccggcagggcgagggccccgggggaagggaaggctccgggagccaaggagggcgccccccaggcggagagtctcggaaaaccgcgcccccggcccctgccttccctccaggcctgccccaagggaaagcgggcggggcgaccccgtacgccccccttgctgtcccccttcggttccccattgttctcagccgaatgctctcctgggaaggggggagggggtgctgc

SEQ ID NO: 334651 - DNA, 432 bp, Homo sapiens; identical to SEQ ID NO: 236678
  chr12:113541667-113542099
  hyper

SEQ ID NO: 334652 - DNA, 615 bp, Homo sapiens
  chr12:113796265-113796880
  hyper
cgccccgtaggcctcccctcgcgccagcccctcccatcccggaaaggctcagcccaagcccggccccgcccgccctcggccccgcccatggcagagcgcagtcacgtgacccgggctgcggggcgcagcattgtgcggtcatggtgggccagatgtactgctaccccggcagccacctggcccgggcgctgacgcgggcgctggcgctggccctggtgctggccctgctggtcgggccgttcctgagcggcctggcgggggcgatcccagcgccggggggccgctgggcgcgcgatgggcaggtccctccagcctcccgcagccgctcggtgctcctggacgtctcggcgggccagctgcttatggtggacggacgccaccctgacgccgtggcctgggccaacctcaccaacgccatccgcgagactgggtaagggttggcttatccccacgcggggccatcgggggagggggatgcgtgggcgccggacctcgcctgttcccgggaccggcctcttgccgggtgggaacgcccgtttctctgggggtcagctactcccgaggctgcagcaccgccctgcgggccaagtaccctgtttgggagctggctactgc

SEQ ID NO: 334653 - DNA, 1862 bp, Homo sapiens
  chr12:113900180-113902042
  hyper
cgccccacccagggggagagcaggatgtgtgcgtgttcgagtccggcctgctccctcgggctcaacataaacgtcaaagtaaggaagagcgggagctggacccggctggccacttcctgacccacagccctattcctagagaagctgaccttgagcctcaagattggccaccagggagcgccagcgtgcaggtggctcggtctccctctcggtggctcccggttcacgcgagttcctcgctcgctctccgtcttctccctctggctgacgctgtctctccatctcctcctcatcttgccccctttcctctccctctctttcaatctctctccttttcttatcatctttttttttaaagacggggaaagcacagcgagaaataagattacaaaatgccactcggattgcagagagagggaaaaacaccgtctccgccccttggcctcaccctctctcagtccaaagaggtggcggtggctgggtgggtgggtgggggcccggggaaagtctagagcgtgctcgaaatctcttgaccctccggagtattgactttggtcccaagaaattgctcgcggttgctgggagagtactggcggtgggctgaggctcctggagagcccgcggggtggagatgggggtcggccccccctcggcgcccagccgaggagcagctgccagttgagtgcggacccgagagagaacccccgagggacacccacgtctcccaccgcgtctgcgtcgggcgttttggtttcaggaggctgcttcggggcggggcccccgggggccgagcgcggggggcggcccggcggccttaccacacggcggcttcgttgagctcggggttgggatgcgacaggggtccgctgtagccgctggtgccgctcattgggaagggcgggctgggcccgccgctgaatacctcgccgggcatggggtgcagcgtgcccggcaggcctggctcggggctcggtgtgtccgggtgcgagatcatgtcggtgaacctggggttgtccgcggcgtgcgggccggcgagcggcggttccagcgctcccagcggcgtcgagccggggccagaggccgccaggaagctggagtcggccggggactgcgcctgcgaaggcgggccgtgcgcgaagaagtcgtagttgcttcccggcgcgtagtagtcgccttggtagtctgcggagggggagcgggaaggagacagggcgcggtgagagaaggcgaagtaggcgggggacccgggacccggggaggggacccgggcgggcgagagaggggagcgcgcgacaccgacccaaggttagagagacctgcggaggccggcgccccttgagacggtggacgtcgcaggctcacggggagggttggggagagagacaatgagagatctcgaaagggcaagagactcagactgccagagaccacacacagagacgggagagactccgagaccgtgggggacacacgcggcaaaaactcggagacttcagtcacaggttccctgacacctagagatggagagagacagaggcggccagagacgcagagacagacaatgattcctaagtgtcttagggtcggtgagagacacagagatgcgggacagcgagagacagacggagagatcggcagaggggcagagagaaaggcggaaaagagacccagagacgcggagtccgcggctgagacccgaaagcccgagacatcggagggtcgcggaggagtcgaggagacgcagagagaggaaagacggccgcggttagagacacgcgtggaaacccccgggggcggcagcgagggagtcaggagtgagcccgaagatggagagaagtcgatgcgcccagagaacgcaagac

SEQ ID NO: 334654 - DNA, 1155 bp, Homo sapiens
  chr12:113905322-113906477
  hyper
cgcctcttccgcaccaggactcccccgaggcggggccgggccggattaggccgggaggggtggagagaggcttcggcgaaccagccaagggtgaaggatttcgcggacccgtggggcgactcataaagacttgggcttcctggtccccggctcgcccgcggcctgacggctctataaaggcctccctcccggcacggctctcgcctcggcccctcggctccggagccagcctctggccgtttgtctgcccgcgcttcggcgcagggagggagggggcatcgcctgtttctctgctcgaaaggtggaggtaaagagggatcccggaccccagagaggcttacaaccttccataagcaaggcggggggcggaattcagagaggtaaagtgacccgcccccaaatcgcaataccaggaggacagcagggctagatggaatctttcggttcacagtccccgacctcgggcaagtgccccactcgggcgcacggtctgctcccagaccagaaccaggcgcgctcgtagccaaggaagcttggcgggagactcctccgaggctcccggctcccaggccagcggggctaaggagctgtgcccgccccgggccgcacctggatgacgcgcatgttgaggccggtctcctgcgccagctgctcgcggatgtggcgcgtgggcttgggcgtggcggcgaaggcagccttgagcgtctccagctgcttggccttgatggtggtgcgggggccgcgccgcttggtgcccgagttctgctcctcgttctcgttgttggccgtctccttgtccgacgaggtcgagttgtccgtctctttggggtcgtcctgcagtgcgtcctggaggtccggggacaaactgcggtccgtacaggatgacactgcgggcggacggatcgggaaggggacagcggcgtcagcgacggccagacgcctcttcagtccagtggcgggttcccgccggcccaagctacggcctgcccaggctacggccagccccgctggattccctcccaaacctgcgacagcccctcccccagggacccggtgcccgcccactctctccaggcggggctgggcctttggaggggcgctcttaagccctctccgcgcgtctcagctagtacctgggtaagggtagggggacgc

SEQ ID NO: 334655 - DNA, 874 bp, Homo sapiens
  chr12:113913737-113914611
  hyper
cgtcctctcccgacttcgatcattaccgctcccaccccaacacgcatacttcccccaccccacccccaagagccagcgcggctttaacattaaacaaacgcagcgagcgcctccgagctgcgctctcggccgggtctgcgcggcggcggcggcgttacaaattgtaaatttaaattgctcgccggattcattacctcccctctttgatttcagccagccgtgaaaaattatactggtgtaccactgagaaactgttttgccgcaaagagcctacgcctaatcactggctttctccctccgacaaaagtgtaattattttgtttggggtgtaaatataggccgcgcctcgcacacacactcagcgtcccgcagcgccgcagagcaccgcccgccgccggaaggaatcgggcccccgagtaggagcgggcgtgaaggctgagccccgctgtctggaggccggaggagagcggctggtgtggcgctccggcgagacccagcgagcccagcctctgccctccgcagttcgggtttgcccgagaacctcgggaccgcgcgctcccaggcgggccagagaggacgccggcggggtgcaatgggtgctcaggcctagacatccgggcagggatgcgagagggatggcgggggtgggagtggggtgggtggggggtggtggtgaattttctggggaacccttgggggtggccgtctgagagcggcccggagcccaggcggggagagtgtcctggcctgggtggaaccctgggaggcgggggcgtcgtggctggtgtgccccactggcgctaggccgtggattgcttggtttccagaacatctctgcggggcgcagggccttcctgtcagttgaatcgtgctc

SEQ ID NO: 334656 - DNA, 361 bp, Homo sapiens; identical to SEQ ID NO: 236694
  chr12:113916262-113916623
  hyper

SEQ ID NO: 334657 - DNA, 55 bp, Homo sapiens; identical to SEQ ID NO: 236695
  chr12:113916653-113916708
  hyper

SEQ ID NO: 334658 - DNA, 471 bp, Homo sapiens
  chr12:114029373-114029844
  hyper
cgtcacgccctgtcgccctcccctgagctcccggaagcccatggggccgcggccaagtttccccgcctcccgaggagagacagagaagccacgagtcgccgggtgggcgcggcgctcctgggctcaccggggcgcattggcactggcggcggctgcgcgggctcggccggccccaccatcaattaagcgaccgcggggtccggcgagcggcagcgtgtgtggaaattaccttttgatttcttaattacattgtcctcacctgcagctcaacccgcctaggagaggcgctcgccgagctcgattctccgggtgccataaattaggacgccagtcgccggcgaacgctgggggcttccagtataccttccagcgcagcccgcaggctatttttatctccctcagcacctcggcacctcggaggagcttctgctaattcactaccccgacaccgtctcatctcccctgcaacca

SEQ ID NO: 334659 - DNA, 229 bp, Homo sapiens; identical to SEQ ID NO: 224457
  chr12:114075830-114076059
  hyper

SEQ ID NO: 334660 - DNA, 234 bp, Homo sapiens
  chr12:114846284-114846518
  hyper
cgcggaggagctctgggcaaatgaataccgaggcgccgctctagctggttaggcttgggatgcgataactcagtgccctcttgcagacttgcatagaaataattactgggttgtcgtggaggggacacgagacagagggagttctccgtaatgtgccttgcggagagaaaggtccaagaatgcaattcgtcccagagtggcccggcaggggcggggtgcgagtgggtggtggag

SEQ ID NO: 334661 - DNA, 867 bp, Homo sapiens
  chr12:114846782-114847649
  hyper
gagccggagagcgtcgggccttccggaagggtaagttctccgccaaggggtcccgagggagctggacgtctgaatctggacttgcccccagcttcggggttcgattctgggttttgcgcgtccccaacccccagggctttccgaagcatggcctggctccaggcccggtcctgtaaggactggaacggcagcaaaatgtgcagggaggcagtcggccggcagagctgcggcgggagccaaggtcaggcccgcggggagagcgggcagcttccagcgccggccacaagctcccaggccagctgggccgcagacccctttgcttccagagagcacaacccgcgtcctttctctcagccaggctgcagtggctgccccgagcttcgctttcgtttcccaagctgttaataacgatatgtccccaaatccgaggctcgtgtttgctcccagatgccaagaacgcaacccgaaatccttctcccaaaccctaggtcgacgagatgagttcctacttgacctctgagccgaggtgggccggaaaccgaggcctaggccccgccggggctgcaaggaaaaggggaaactccgagcgtagcgtcttttccttgtggttcctttctccggcatcccggactgcgggccctgcagccacctggaccggcattcaaaggattctgcaagtccagcttcacagactggctttcccagacgctccgaagcccgcaccacgaacagaataaaggagagacgagagatcgcaactagatttgagaatcctcgttcttttccccaatcgttcgggcagtaaactccggagccggctacagcgcgcatcctcccttcctcctttcggagaactgtcgctttccc

SEQ ID NO: 334662 - DNA, 491 bp, Homo sapiens
  chr12:114881653-114882144
  hyper
ggggtcgctgggcgcgcgcgcgcggagcaaatttgcccgcgcgcacccagaaacgatgacataagtggcgctgatgagcgctgcgcggctgaaacgcgactacataaagggtccgccggcagcgtgggccggagggattgcttcacactccggaattgggcccagacacatttagaaatgttttgctggacgtgtgccccgcaagggcgacagcggcagccggcagcctgggtgaagctgcgccgctggtcacaggctggcgcgcggcggcggccacagaggcgtcctaggtggagaatgcttctgcctttgcctgttctcccctaacccccacgtttgtatgcctcctggggacaggggtctgtctgcagcctgcagcgccccagctgtgaccagagaagcattaaggagcggcgcgggcaagaatttggcatcaaaggaaatactgtaggtttcagcatcggtctctcccgctgatcgtcgggctccgc

SEQ ID NO: 334663 - DNA, 490 bp, Homo sapiens
  chr12:114885146-114885636
  hyper
tggccagagcctggcgggttccgtgcttggctagccagcggagcggggtgagagggtgagagaaggacgcttctcctttgattcgcagacccgggcgcagccggagaccgcccggcaccgcggcgtctgtctgtctgagcgcctactcgcgggtcctctgctgccccgagtgaactctaggcgcagctggaccggggtgagggcgcgcggtgagcccaggccaagcgctggaagaaacgaactgggggccgagttcgggcggcgatctgccggggacccagtcctgagcggcttgtttgggatactgggattaaggcctcagaggagcacatggctagcctctgcagccctcggagggtcactgacgccccctgcttttccttccaaatgtctttccccgaggctggggacacctgttctgagcagaagagggcaatggttcaacctgtttgaccccgcccgggtctccttctgcgggaacatacgcccc

SEQ ID NO: 334664 - DNA, 835 bp, Homo sapiens
  chr12:115106007-115106842
  hyper
aggcgctggggtgccgagccagctgcggcgacctggacgcattcgtagacgagacagataggtggcactcgaagcccagaaaaaaggcgaaggcgcctgccctgagtggcctctggggcggccgcagccaccataaagcctgcggcgagattgcgaccggcgccaggtgagtaataggcagcaaaatccagagagactgcgagccgttcatcccctccaccccccgcccatcagcgctacaggagttactcattaacatcacaatatacaaatgagatacacaggagattaaaaaaaaaaaaaaaaaaaaaagaggaacgccagtaagagaggctggacacaagtctgagcagggtccccaaatcgggggcggggggagagaagggaggaggtaagcaaatttggactgagaaagaagagaaaagcaaagcatttcttcccttttggaggctgagttcttttttccccaattcgggagagcgcaaccagccaactaccaccttctcagaggcgcggacaccgcgcgttgtcgctggatccagagctgcccccttcaggctgtagccgctgcgcagaaggagcgcgccctggaaatctcccagtcctcgggggagccccagcctcaaaggtccccagggcccgtctcagctcaggccctgccacccccgcagcgcaccccgcccctccccccccccgcgactccgcaccaacatactctggttgtctgtcttccctcccacccccggagacatcgcagaggaggctgtaggggtccccacgtgcctggccagagatggaaggggctttgccccgctctccaaaaggtctcgacctc

SEQ ID NO: 334665 - DNA, 2243 bp, Homo sapiens
  chr12:115120701-115122944
  hyper
cgtcctccacctcttcttcgggctccatggtcttcaaaggcctcagatgcgcctggggccccagggaggagaacgggatgccggtctcggccgcccccaccaattgatccatgatcggcttggccagggcgcccggcagcgagagcgccgccgcgccgttgggaggcagcgtcagcgcggggaagaacggcggctggtgacccagcaccgcgctcatggcgaagtccggcgcccggtgaggtaggaacggatggtaggccatgcttgtcccaggaatgaccggatctctcatggagaggctcatccactccaggcggggcgctgggctccagccggggacaagtccgcagctgctgtgttttgttgtttttttgttgttgtttaacagcagcacataattcaaaaggggggaaaaagcaaaacaaaaaagaaagaaaaaagaaaaggaggcagaaatcacaactaatgcacttcaaagggaggaggggaagtgtcttttggagaatgggaggccgcttttaaagagggcaaggcgaaaaatcagcaaacatagtcgcgcgggtgaccgtccttgtgccttgcgtttttaaaaagccgctcctgaacgtcggtttcagaagcgagaggagcgagcagggtctcgactcgcgcccgagccctgccgctgagctcgaaatagacactccagccctgcgtcccaggaatctctctccagcccctaggtcttttgttgcaaatgtgaaaggttctcctagaagactttttacctttctttttcttcttcccccgccccctatctgtcttcctctccctctttctcgctggtggcgtctgcagctgtgctagacccggctttaacagggagcgagagagcggaaaaagtctctctcctttaaaaaaaaaaaaatctgatttaaacccccttctaccagcgctatcaaaacttgaattgcaaactggcttccgttcgccgccctcctcctccttcctctgctccgagcctccggagggtgtctcggtttcaatccaaatcttgctgggctcttctcccgtgcctctctctcttccttgtcctaaaacgtgagcgaattcgcttcctaaatctgtgtccaggcgcgcagggcagggaggatttagagggggaaaaaatggaacagagggaaagagagggaggggagagagagagagagagagagagacggagtcggagagggagggagcgagagaaagcgagagctcctcgccaccctccgccgcctctagaattcaccgggcgtctgctcggcggctctagaaggtcgggctgcgctgtgggctgcggggagccggaggcctcttgattggctctttgacgctttcggaccaattgtgttgctgcataggcgtggttttcacaggtcgagtgctgggggatagagctgagttataaaaagaaggtgtcggaaactgtaacgtcgcagcgccgcatcggtactactgcctgtcctgtgaatatgtcaacatgatcagagggcgggcgggagccactggggagcgcgcgcgcacagagtcgcctctaggtggcttatcgagagatcgctgcagcccctgagctcgctcgctcgctctggttcagcccacgtctgaaatgcctcagtcatccagccggggatcgagggaggaggcagggccaaggaggaagggggagggagagagggagggagccagcgagcaggcgagccgggcggggaaggcggagagcgcgcccgggcgccgggcaggggcgctcgcctctcttgcactccgctcgcctctccgaccgccgcggccggttctctctccagctctccttcttctccccgccccgggcgagccgggcgggtggccgagcctccccgcgagctgccatccggccactcggttctacaaaagccggcggcagccgagaagcgagcgccgagactccaggcttgcgtgctctccagccccacgtggagccaagctccgcccggccgccgctgaagggctcccgagctcgggtgtctcggtgctggtctcccctgcgtctgggctgggggagcacaaggatgcggccatatctcagcacacgcatgtgtgggcttcctctccactgcgccccacccgcagccatgtgcgggtacccaaacacccccggtgtatctgtactcgaacacgcgccaacacactgggactgaaacacacaccgaaaaacacgtacacacaaacacgtacacagcctgcgc

SEQ ID NO: 334666 - DNA, 283 bp, Homo sapiens
  chr12:115889561-115889844
  hyper
cgtcgtgacagtgccaatagccagcagtctcctgtccgcgtgggttgcgagccccgggcgtggacggagttgggagcggagggcggcaggtgccagcggggcccgcctctccctgcaggcggccccggcaagttcacggccggcccggggcgaggggcgagcggcgcgcggccgtgcggctcattctaccgccctgcgtgcgaaggggaggccgcgcccccgcgcccctcgctcgcgccgtgcctgccgccgccacccgcccggccgccgggccggccactga

SEQ ID NO: 334667 - DNA, 528 bp, Homo sapiens
  chr12:116946078-116946606
  hyper
cgccaagctctgcaagctctcagcggctccagcgttttcaaggagcggggtcaaggtcaaagggcccctcccaggctgcccgggcggggctgtagtgggatgctggtccccaggctgcgcctcggttctccagggcgaaacgcaggggcggggccgtgcaggggctgggcgtcgccgccggagagggtcccagcgcgcccaggcctcccgcaggcgggacgcggcgtcggggggctgctgcgctgctcggccccagcgggcccgccgcgccgccgcggctctggctgcctcctgcatgccaattaggccctaatttgatttctgttctatctgtgcgaaccccattaaaacccaattccgcttattaccaacagctttcttgcaacgcgacgcctctccctcccagggccgctgctcaggcgcgccgaggagccaggctccgcgcaccaggctggcggggacaccttccccgttccccctgccctgggacgtgcagggtccccgctgattcccgccccggggctcccc

SEQ ID NO: 334668 - DNA, 180 bp, Homo sapiens
  chr12:117316485-117316665
  hyper
cgagcggggcatcctgaggtcagggcgccagaggctgcagaaccctggagggtgtggctgcaggggacgcccgggcgggacaaggcaggtaggagaagaacccagaggtgtgggaagagggtgtctccgagtcagggcgcagcacggaagtaactctggggtagaaggcgagggcggggc

SEQ ID NO: 334669 - DNA, 71 bp, Homo sapiens
  chr12:117316909-117316980
  hyper
cggcccggagtcctcggcctcccgggaggggcacccgacatcccgcacgcctggtgccggaaggggagagc

SEQ ID NO: 334670 - DNA, 545 bp, Homo sapiens
  chr12:117317225-117317770
  hyper
cgctttgggcttcgcgtctgtcgctcaacttcctttttctgcaccccgcgatccatccaaaatgttcttcctgtccctgggattgggcagcctcagcctggcccctttcagtcgcgggagcccctggcctctccaacaggagagagagaaggtagggagaagtggatgggacccccggcgcccgggagccgggcagagagcgccccgaagcgcgcatttctcttcgccagcgcccgggctgcgcgggcccacgcgacatctgtcgcctgcggtcccggctcacaccccgcgcacccccgcagctccctgggcgctgccaccccccacgctccggctgccgcctttccccgcgggcgcagacgctcgggcctcgccttcaggcgccgctccaacttcccagggtgtctgcggcgcgcggcggggctcgggggcggggacctaagggcggctggctatgtcaccttcgagcttcaccttccggccctagacccatctatggtgggctcagcctgattctctctccctcattctctgcagcgctcctc

SEQ ID NO: 334671 - DNA, 342 bp, Homo sapiens
  chr12:117319773-117320115
  hyper
cgtgcccccagcgcctggctagaaacctgaccctaaagtgcccccagcgcccggtgggaggctggatgggcccacctgagctcgcgtggggcgcggacggaggcattctcgctgcccggcacccgcacccaaaagaccctcgcaaggggctttctaaagggaaacttcttgtctgctttctttgtgaacattattttcctgatggcgttacagttttctgcgatgaccccgatttaatgcgcagtggagaccctaaggggtcggcgagaggaggggcgcgggggactttaattcccccttttccaatccgacagccactcctgtgcacctccagactggagc

SEQ ID NO: 334672 - DNA, 1013 bp, Homo sapiens
  chr12:117536375-117537388
  hyper
gccgatgcggggcgcgcagcctttgctggtcccgggagactcagcgaactcaggggaggacgctgggctccgggcaaagtgctctgcggccgctgcctcgctaagtctcccagccacccgcggggatgaggctgcctgaacccattttacagatgcgaggacgaaagcaggcgccgggcgccggctctcccgactaaggtcacccggccggggagcgtcggagacctgttcccacccaggtccgccgacttcaaaactttccgctctcgcgctcacgaatgcaaacgactctcaggtgtggggcgcgcgcgccagcgggggtgcctgagggacttgcccgcccggcctgaggcacctgccctgcgcttgggaagcctgggccccgctccctccccggtccgcagtcccccggccagggagttcccgggccagtccgaagctgagcggctgcggcactgagcatcgccgcggagctcctcgccgcagcccgcgaggtggccagcggggacccatttgaaagaggaggagactgaggcgcagagagggcccgccactggcccaaggtcacacagcgcggcggcgggccggggtccccaacagtggccgttcggaggtcccgccccggtccccgcgccgccccccgcgggtactcacagccggtcttgccctcgagctcccgcacctcctcagacgcggagtgggcagcgcccatggtgcccgcggcgggggccccggggcgcgcgtccctctcaggccccgcactggcttcggctgcgcagcggcgggactggcctcgggtccggcctcgggtcgggacgccggcgaaggctcggagccgcgggttccgcgtggggccggagcggggcctcatataacggcggagggcggcgcgccgcggtcctagcgcacgccggtttcgcgcactgcgcggctaggggagcgccccgccccgccccggcccggaaaccgccgggaaggggaccccggagcccaccgctctggagtccccgttc

SEQ ID NO: 334673 - DNA, 1392 bp, Homo sapiens
  chr12:117798076-117799468
  hyper
cgagcgtctggcgtcctctggggcgcagtcccgagagagccccttccgggacctcggacgcaaggcccctgagtggccctggaagttggatcccccggggaccctgctccgaaccctggccacctggaagcaacctcatcgagcgctccttccactgcccagccccgaaccgtggcggaacgcgcccctcggcctccctagagcctcctttgcgggagaagcacaactttcccaggttttggagacggcgctcttacaccccaatctcgcccagacggaagaagtgagaggtgcgggcggccccgccatgaccgcgggaggagagcgcaaggaggctcctcgcaaagttggaggccaggccggagcgatgttccgggagcggagccctcccagcctcgggcccccagccgcggacagctggcagtgccaaagactccgccattacctgcggctcgcagttgcgattcggccgcagagtcgggcaccgaggaaggcgtaaagttgagcttgggcaggtacaacggtccccagggactggcatcccccagcccgggctgcccgcgggagggtagcgagctgtgccaagggctccgccattaccgccagcgcacagctcggagccaagcgcgcggctgaggaacgactagggtcttgcaaagttggagcctgggcgcgtagacccccggaccggagcccccggcctgaggccgcccgctaggaggaaaatgaggccgcccgaaccaagttgggacgcgcagcaaagcccgagccttccgcgcacaccaggggctcgggcgggagcggggagccctggggacggagaaggggcgcgggacgcctggatcaggaactcacctgacgccgagccgggcagcgccgaggctgcctcttcgcgctgcgcacccgcccgcccgcctcgtactcctcctcttcctcccgggcgcccgcggccgccgcgctccgggttctgaatcctccgagtccgccgccccgcgcggctggagggcgccggttgcacccactcgcctcctggtaggagccgcgcgcgtccctccccttcccctccgctttgtgcctccaagatccctccccaccccctctcccctagcccccactcctcccttctcttcttccctccccttgcgtcccctccctcagcctcagcgaacccaagttcgggacggaggctgcgggcttccccggcgcagtgctgggcgccccgcgcgcgcccctggctcaccccgtccgctcggccgctgctcgctgcccggccgcccctcggaggagccgcggcgctaagtagctcctcacccagcggctggaaacgcggcataaatatgtagggactgagccgtgagctcagcgagggtcgtgagggggaatttatttctt

SEQ ID NO: 334674 - DNA, 317 bp, Homo sapiens
  chr12:119212110-119212427
  hyper
cgcggggcgtttgaacacgaatttggaggtccttgtttgtccttgaacgcggcagggagtggaggaaggcgccgggaggaggcacaaaatcgctttgtgcgacagcgcccgacagcttctccgcccggagccggctccgccgtgaatgggccgcggacaaaggcgtcccctcccaagtacctgtaattggagcgtccatgtgcgcgggcgctgctgaaatgcaatggacaaaagggagaggaatggccgcatcttccggctgcccgttgctatggtttccgcggagctggtgaaggggagggctgttaccaggcaac

SEQ ID NO: 334675 - DNA, 52 bp, Homo sapiens
  chr12:119417765-119417817
  hyper
tgcagagcaagtagcgctctcaggcactcaaataagcggacgcaggcgtgtc

SEQ ID NO: 334676 - DNA, 980 bp, Homo sapiens
  chr12:119418675-119419655
  hyper
cgctgcgccccttggcgggcgggggccctgctcggcagatggcgagaagccgaattggtgagggattgtctatcaaatggcactttctgggtggtggagacctcgctaacccccggcgcaaagaggaacgcagggcaccctctgtaccggcctaggccgtgtctcccaaaagtgagggtctgggggaggccggctggggtggatagattaagttttttacgagcccccccaaccccccccccccccccacgcagaagatcagctacaagacttgcgaaggggctggaaagaaaggtggcctggcccaaagggggcacccaggaaagggctgaggaaggccagcgatgatgggagaggagaggggcctgggaagcaggatctcctgcctggcgcagattggggtgccaggatggcttctcagagggatcagcgctgcaactcggtcgccgcggggccctggtgacaggcgcacgccccgccctttctcctcccaagacctgcgggcttttgttatgcagatggcggcaggaggctgagcctgaggaggagggggttggtggggaggaggagagacggagaggggggaggaaagtgcagctcgcgcgaccagcctcctcttccaacgtcacattgtgcgagagacaaaacccgggcgcgccggagctcacacgcgcacgcacacacatccgaccccgtcgcctcttctctcctggtgctgcccagaaagccagccctcccttcccttcttggggcgcagaggctcagccagctcagagcgcagcctggagccgacccagaagggcgaagaaagcccagcggacgagcctcctttctctgctgcctgcccgggctggggcgtcccatcccccgccctgaactccgatctctcccaccccacccctctctgggtttcacccggacagagccgggagctgggtgtcgcccccgtttggaatccacgtttcagcactttggacagc

SEQ ID NO: 334677 - DNA, 129 bp, Homo sapiens; identical to SEQ ID NO: 236746
  chr12:119499108-119499237
  hyper

SEQ ID NO: 334678 - DNA, 1253 bp, Homo sapiens
  chr12:120031625-120032878
  hyper
cgccctcccggcgccgccggcctcgcccatgtctcagtacgcccctagcccggacttcaagagggctttggacagcagtcccgaggccaacactgaagatgacaagaccgaggaggacgtgcccatgcccaagaactacctgtggctcaccatcgtctcgtgtttttgccctgcgtaccccatcaacatcgtggctttggtcttttccatcatggtgagtgaatcacggccagaggcagcctgggaggagagacccgggcggctttgagcccctgcaggggagtccgcgcgctctctgcggctcccttcctcacggcccggcccgcgctaggtgttctttgtcctcgcacctcctcctcacctttctcgggctctcagagctctccccgcaatcatcagcacctcctctgcactcctcgtggtactcagagccctgatcaagcttcccccaggctagctttcctcttctttccagctcccagggtgcgtttcctctccaacccggggaagttcttccgtggactttgctgactcctctgaccttcctaggcacttgcccggggcttctcaaccctcttttctagagccccagtgcgcgccaccctagcgagcgcagtaagctcataccccgagcatgcaggctctacgttcctttccctgccgctccgggggctcctgctctccagcgcccaggactgtctctatctcagcctgtgctcccttctctctttgctgcgcccaagggcaccgcttccgccactctccggggggtccccaggcgattcctgatgccccctccttgatcccgtttccgcgctttggcacggcacgctctgtccaggcaacagtttcctctcgcttcttcctacacccaacttcctctccttgcctccctccggcgccccctttttaacgcgcccgaggctggctcacacccactacctctttaggcctttcttaggctccccgtgtgcccccctcaccagcaaagtgggtgcgcctctcttactctttctacccagcgcgtcgtagttcctccccgtttgctgcgcactggccctaacctctcttctcttggtgtcccccagagctcccaggcgcccctccaccgctctgtcctgcgcccggggctctcccgggaatgaactaggggattccacgcaacgtgcggctccgcccgccctctgcgctcagacctcccgagctgcccgcctctctaggagtggccgctggggcctctagtccgcccttcc

SEQ ID NO: 334679 - DNA, 723 bp, Homo sapiens
  chr12:120524652-120525375
  hyper
cgagcacttattccttggtgagcaaatgtcccaacggtgcagcgcgtggccaggattggaggtcgtccaggcagcccctgcctcagggcgttttttggcaaggaagggaaccccaccatgcccggcgctgcgccgcggctgtagccctgggcccatctgtccctcgccggcaacgttagtcagcacattcctggggctcccgctgctctcggcgccacctgccgggggacgccggaagctcaggaggctgtggctgtcgtggggcaccacgggttctgacgctactggaggggtgtccatggcaaccgatgccgcgtgaggatttccgctgtttgctgccagccaatagcagtgggtgtgacggaggcagccttcggcatctgagccctcagcatccattagacgggctcgggtcccgtcgctgccgcagtgggcggggctgacgcggtggctgagctgtctggagcggtttctctagggaaggcaggcgggccggcgggcggggcgcacttgcggtgtcggcacaggtgactaattgctcggtagacctgaagccaaagaagaagtgctggtcgcagcagtggcctgagcactttgcaagtgggatccacctgttcctttttctggccgcacttcggttagtgcggtcggtgttgtgaagctcgagctaggcggcctctgcaggcggatcctctagctgcccttgagccctgcacattagtc

SEQ ID NO: 334680 - DNA, 185 bp, Homo sapiens
  chr12:122214111-122214296
  hyper
cgcccaccccgccacgtggtgagggttattttaagttctcagagacccaccgcgtctgcctcgtgctcttcttgcccctggagcgctgggggcatcctgagtcaggctgtgagaagattcgccaccagagggcgccccgggccctgggtcgtccaaggggacaaggacgttcccgtctgtgcttc

SEQ ID NO: 334681 - DNA, 751 bp, Homo sapiens
  chr12:122231543-122232294
  hyper
cggagcccgcagcactggcggcggcgcgccgggcactagcggagccaagaggtcgggggcggggcggggccggaaccagccccgcccactcggagcagcgccgcctccgccaggcagcctcccggccgacctcccagcctcagtttcctttctgctaaggtctcagccctgggtgtgggtattcagctctcagtcccagggatactgcagcaccggaaaaacggggctcagctgcgagcaaagctcccacccccaacccaccgccaccctccgcgcgtcacgtcgcgcccctcgccggcgagacccgatcgtggctgcccagcgactccaggtgcccctgattagcaggctccgccttcggcagggaccctctgattggctggcgcggccagacagggtctcccggattggctggctgtgcctccgcaccgggttcgagaagcccccggcctccagctccgggaagagcccctcaactttgcactgccccagcggtgtggcttggcacatgtccgcctctggcctcagcttccccacaggaggtagcggcggtggcaccagggaagatgctgacgcgagagtcatgtctgcccacctcgcctgggccagggacgccagcgtgcacgcgggttcggggtgagggactgggctccgcttacccgcaccccgaccctgggctgcagggtggacgtctgacgccctctgccgggcaatcgcctcggcgccggccgctccgggcgcaggttggccc

SEQ ID NO: 334682 - DNA, 60 bp, Homo sapiens
  chr12:122237462-122237522
  hyper
cgccgaagaacacacaactgggaaatacttgcaagtggatcctctcgtatgctgctatat

SEQ ID NO: 334683 - DNA, 582 bp, Homo sapiens
  chr12:122460955-122461537
  hyper
cggccgcgcgtggttttcgggatcacattagcgtccgcccggcgtggcccggtcgacattaaggggatcgaacctttccgcggcctcgtcggggtctgctcggaatcggcccctgggccaggcccgaggcgcaagcagatcgccaggttgggtcagagttgttgaaaactccccgctgcctgatttcaactttattatttttttcccacgccttcactggggtcccggagggagaggagccgccgcaacgctggctctgagtgtcagcgcccgcgggctcgtctcgaccctttatttcgagcctggaagctgggcaggccctgtggcaggggatgtttacgtttgggggtgtcgtttctcgagtagcgcctcggtctctaaaagccactgggggcgagcctccggtgtggcggtgtcacaagttagctgtcctttctgagtcaaacccaacaaaaaaggcaagaggaaaatcaataaagtccacgtgctccccggcctcctatggaaagggctggctgcgatggccggatgcccggccgtgggctgggtttggctccagtgggacaaagaattttcagaacc

SEQ ID NO: 334684 - DNA, 266 bp, Homo sapiens
  chr12:122667648-122667914
  hyper
cgcgcacgcgtcctagcggttgccgggcaacgcggcccgggccatggaggcgtcgtacgagtccgagtccgagtccgagtctgaggccgggcctgggactcagcggcccgggaccgggaccgtgagcgcggccgtgcgcgagcacttgcggaagctgtgtctgcgcgagttcccgtgcggtgccggcagctgggtgcgggcgccggggccggaactctgggggcctggaccggctgcggggaggcacgggcccgggcgagcggagc

SEQ ID NO: 334685 - DNA, 598 bp, Homo sapiens
  chr12:122688584-122689182
  hyper
cgggcgcggtagaccccgccagcctgggccgcccgcgcccgacgcgcagcgctgctgccaaccccggcccgggggtccccgcagagtgggtctctgctgccgtcagcccttcggagactgtcgcgttgaaagaatgaaccagagttcgccccctgcccgcgccagggcgttttgggtcaccgagtcctgtggggatccgaggcggctgccgcccaaggccgagcgcagcctcaggacccgcgccccaccagacggggtcgtgcgctccgcggcgggtggagagccgggctctggggtctccgcggctcggagggcggcggggcgaggccgtgcggccagcgcctggggacgcccgcggcgggacaggggccacccgggccgcggcgcagcctgggctgaaacctcctgggacggaaccaagccacctgctgtgcgcccttctcggtgaatggcaccgccgcccgcccgggcctctcgtccacagcccgcggtgctcgcacacctgagactcatctcgcttcgaccccgccgccgccgccgcccggcatcctgagcacggagacagtctccagctgccgttcatgcttcctccccagcc

SEQ ID NO: 334686 - DNA, 551 bp, Homo sapiens
  chr12:123258823-123259374
  hyper
cggcgcagcagcctttattgacttcttcattctctgggtagtggtgaacagccggttctttcaggccttccagcgccggagcctcgggcgtgggcaaaaagcgtccatacgcagcctgagccacttgggagcccccagtttccgaggcagaagaacagtgcccaccagcgcagcggggctgcggcccggaaaccctggcggggagccccgagccccggcgggcgcacgccgcgtgggcaccaggcaggcggttggagtacggggcgggggtcggccgagggcgcggggccccggggctccgggctcgcccccgccgctcggggcaggcgcgccgatggcgtttctgaggtgacgccgcccacaccgggcttctccgggggcggaggaaacacctatgaaccctccggcagccttccttgccgggcgccaggtaagcagcggttccgggcgcggcggggcgccgcgggaacggtgcacattggtcgaaatctattgcttctcaagaacggtgtctacttaaaatgtgaaacaggccgggcgcggtggctcac

SEQ ID NO: 334687 - DNA, 90 bp, Homo sapiens
  chr12:123321244-123321334
  hyper
cgtttgtggcggctatttgcaagttccgtcccacttgtccttgcagagagctatgacttctgcggttgccttcacatctagttagcacac

SEQ ID NO: 334688 - DNA, 473 bp, Homo sapiens
  chr12:123380333-123380806
  hyper
cgcggttccctggctcccgcaccccgccccaagcgcccccatttctagcccagtcccctcaacacgaccggaggcgccgcggtcgcctccgcctccggccaccgttcgaggagcgaaccccgctcgaggcctcacagccgccgccttaagcccagctcggctcacctcctccatcttctgcaccatctccgtcagctggccctcgtcctccagcagctcgttgagctgcaccagcgacagcccggcgaaccgggcttcgctcccggcgcccgccatccccacgtctcggccgtcgtcgccaccgccgctgcggccaccaggctccgccgaccggaagcgccgccctcaagggccgccccccgcgggggggacacgtgacgccagccctgggtcgtgacgtcatcaccgcgcgggcgggcggacgtgacgtaagtgtcgcggctcgcttggagtggaatgtgtcagggacagtc

SEQ ID NO: 334689 - DNA, 341 bp, Homo sapiens
  chr12:123874197-123874538
  hyper
cgggccgcttcctttgctgccgcctggctgggagtggcgcccacacggctccgccatgagcctggcggtgtttgacctcggaaaagtttgactgcgccttcgtggcgtctccgcagcccaagaccctacttccccggaggtggccgcggtcccaggctgtgcggggcctgcgcgggcccctcggagaggtcacgggtctcaccgcctcggtgttgaatggtccccgaggcggcgagggcccggcgttgcttctggggacgccctcctccgtctgtacttactcagaggaggggccccacgcccagaggcgcccgcagtgacctgaaccgccccaccgcccc

SEQ ID NO: 334690 - DNA, 467 bp, Homo sapiens
  chr12:124246524-124246991
  hyper
cggtcggcgtggggtggggtcgcaccctcggctgcagcggcccgagggcggctcctggcggcgagggtcccgctccgcatccaggggcgtgcgcgctgccggggccagggagcaaccagcctacctcggcggcccgggggcctggtgcgcgcctccgagatcccggggccggggcgtgggctgcggctcgcgggttcgggatcgaggggccgggcgcggggcactgccgagcttgcagcccccagcgccggcgccgtcggcggggcgagctgcggccgtttccggggcgcccattgctagggccgccgttgccacggacgcccgccctgcgcccggctccctctgcactgcgcggcgccatggacgacctgcgggtgctgtggatgcgcgaccgcgtgtatgcggctttcggcatcaccgacccccagcttttcgaggacctgctcaaccgcgacgacggccagggc

SEQ ID NO: 334691 - DNA, 254 bp, Homo sapiens
  chr12:124456337-124456591
  hyper
tgtgcattctgctccgtttcacgaatcacaggcaaatcgttactcagagtaaactaaagccgcatcaaagcttcaggaaggggctggcaaggtagtgtacttacggaaaggctaccaggacgggaggcgatacaacttgtcagggagggtctctaaggttccccgggtggtaacaagcatttaaaaaggcgatgtggattcagacggcctcctccccacagcatcccagacaaagccgggctaggccccggggc

SEQ ID NO: 334692 - DNA, 665 bp, Homo sapiens
  chr12:124779559-124780224
  hyper
cccaccgcgcaggccggggcggggagaggaagggggaggaggaggcgcctagaaaaggaggcgcgggccggggaggtgcggagagggccgggcggcaacgtgcgcctcggggctgggccggcctgcgggatcgcagcgcagcgcagaggcgaggctgggcccggcgggcgggagccgcggagggcggagggcggagggcggcggcgctggcaggagcgcggcccacggcggcgagcaggctgcaggcccgcggggatccggggcgcggggggcgccgggcctgatcgccgcctctcgcggtgcccgcaggtccccgggcgcgcagctctcgccccgccgccgcctgccccgggccccggagcgcggtggagaagcccccggaggagcggggggcccgcgccccgcgccccccagacatggtgggccacctgcatctgcagggcatggaggacagcctgaaggagcagggccgggagggcttgctggacagccccgactccgggctgccccccagccccagccccagcccgcccttctactccctggcgcccggcatcctcgacgcgcgcgcggggggcgccggcgcctcctcggagcccccgggacccagcgaggccagagcggtaaggaggcgctctctctcccaaacgggggaccgcgtgggc

SEQ ID NO: 334693 - DNA, 173 bp, Homo sapiens
  chr12:125093646-125093819
  hyper
cgtatacgagactgaactgtgtgtgtacattttaaaataaaacaaaacgtgcttcctgttctgcggcctctgcccctcccctcggcagccctgaggcttggccagggtccaggaggaaggcgcggggaacaggttggcccagtcagctggctgggacttcaaaggaaagcgcc

SEQ ID NO: 334694 - DNA, 133 bp, Homo sapiens
  chr12:125477548-125477681
  hyper
cgcaggtggcgctggtacttcctggcactaagatcgattggcgggaccgggacttcgcggcttagcccctccattttcaagttccccgccaaaccctcccctcttggttgtacccatttctgatgatcatcgc

SEQ ID NO: 334695 - DNA, 435 bp, Homo sapiens
  chr12:125815555-125815990
  hyper
cgcccaaatcggggtttcgtctctggaagaggggagggatgcaccaccggctcctcgtgcagcgctggcggcggcggccactgggtggcggtgttgcccgcgaggcccggggtctgcggaggagggagccggactgggagcggggcggggacagcgccggggagggcctggtccgggtgggctcagtccgggctcccgggtcggtcccctcctccgcgttgctgccccaggagtccgcttcgtcctccgctgactctgagcgacacaggacaagctctgaattgcattccaggaaaaggggactgaggctttgtatttttcctccgcaccaagattcccaaggctgctgttaagggtttttacccagggtggggtccacggcgaagccctggggtctgtgtgaaggggaggtgctgtttctttcccgagttctcc

SEQ ID NO: 334696 - DNA, 289 bp, Homo sapiens
  chr12:126018009-126018298
  hyper
ggaatgttcctaaacgcttgttttccctttgcatagctgattgcagagcccagcaagtctttctctaaatggctttactttgacaaggggtcgcgatggcattttgattggcatccgcctctcctccggggaaggacctcgtgggcgatggtcctggcgcacccgctagatggcgccgcagaccggcttgtacaggccgcgcgccctcccctccccggcggaggctcctggagcccctgcccggcctgactggctgcgtcctcaggccctgcgatttccagggattccc

SEQ ID NO: 334697 - DNA, 275 bp, Homo sapiens
  chr12:127865668-127865943
  hyper
cgggaaggcctggaaatcgcaggtcctgaggacgcggcgagttcacggagaggacctgccgggcaggggctctgggagcctccgcggggaggggagggcgcgcggccggcgcggccacaacccggtctgcggcgccatctagcgggcgcgccgggaccgtcgcccactaggcccttttccggaggagaagctgatgccaatcaaaacgccatctctactccttgtcaaagtcaagtcatttagcgaaaggcctaatgagctctgcaatcagctac

SEQ ID NO: 334698 - DNA, 756 bp, Homo sapiens
  chr12:128750713-128751469
  hyper
cgcgtggcagaaagagcagagcatgagcatcaggaaccgcacagggaagccgctgagatcacctgggatcaccaccatgagggaggccagccctggagaaatcagagggaaaagatagagagaacgaagtcgggggggggggggggagggcggatcttccttgtctgagtctgcagagaaattgcctattgcaggagcaagtctagagaggggctattctccacccactgaaaagataataaaacacatgctatgggcggcggggagatgattggggagtggaagccccacagacatgcagtgaaaaatgatcctttcttcccctctgcgttctcgtccccttcccagagacaccgctgtgatctcgtgcctcgccccctccgcacacgcacaggtgcacacccgcatctgtcttgagcccgcaccccgccttcacgctccgctgcgcgctgcttttccgcgctcagtgatccagttaggagctctccccgcagcagctgcgcgggactttgcattccagatgtccccagccctccaggctaaagcagcggccacctgaagttgaggaatggggcgtgacgaccaccaggtcccgcagtgaccacgggagggtggggagaaggagtccagctccgccttgagcgtcgggtccctgggcaggaccctccgggccacgggccgctgtccgttgggcacccgggcaggagtctgcgaacgctgagtttctctggaaaggcgcggacccccggaggagcc

SEQ ID NO: 334699 - DNA, 351 bp, Homo sapiens
  chr12:128850403-128850754
  hyper
cgttgattgtgtgccgaggagccctccccgggaaggctgtgatttatacgcgcaggcttgtcacggggtgaaaggaagggccactttttcattttgatccaatgttaggtttgaaagccacccactgctgtaaactcagctggatccgcgggccgtgattaaacacattgcccgctttgttgccgagatggtgtttcggaaggcgctgtgaatgcacttccctttgcggggctcacacagacaagatgtgtgttgcaaggatgaggcgcctgctcggcctccagcccagggccgggaagggagaaggtgctgtgcgtcgctgcctgtgtcgcccgcggctctcctcccagc

SEQ ID NO: 334700 - DNA, 949 bp, Homo sapiens
  chr12:129337895-129338844
  hyper
acggggcacacccgcgccaccccgcacccagggctcgcgccgcccgaggcccccggttcctgtccccctccccgcctggcgccggaacctgcgagctggggcgcggcctcggggaggggcgggcgggacagacccagccgccccggctcccccgccgtccgcgtctgcgccggccccggggcctggtcggcggcggcggggccggtcgatggcccgggcggcggcggcggcatgcggctcctgttcctggcggtgctgcggccacacaccggcaacgcggtcacggcccagcgcgttcggtaggtgcagggcgccggggcctacgaagcctgggccgggggccggggggcggggacgcgggacccggggacgcggggcgctcagccaggccccctccagccgcgccggggccgtcccgagccgcgcgcacaaacggatgggccggtgccgcctgccgggcgcgcgggggtcggtgccttctgcgtggcgcgcgtgtccccgggtctccgtgcggccggcgcattggcctcgcgctctccggaggggactgagcaggtgaacaggcccggagcctgtcgtggaggggcccgggaaggcctcgctgcagaagcaggatgggagcaggatccgcagggatgcgcagcggggtccgcggagctcccggcgggggcgcgtttccaggccggggaccgcggtgccagccctgccctcgcggatcgggtctcggctgtgtgccggcgtccggggtcctgtccccgaagtccctttcccacctcccctctgccctgtctattctcgtcttcctggctggttagctccttcacactcatctttttctgcctttgtcttatttgtttacttgttggtctgtgttctggtcgctggaacgcaagcccggcgggggcccggggaggggccgccgcgttaatcccgccgcctcccacccgca

SEQ ID NO: 334701 - DNA, 288 bp, Homo sapiens
  chr12:130498574-130498862
  hyper
cggaaagagggcaaggagagtggcggggtgcgagcggggcgctgcggaggaggctgcagcggcagcggtgcgggcaggagctctgatgcgatgcgatgcgatgcgatgctgcccccctgtgtccttcgacgatattgctgcgggaagctttctgtgctcaagacctcgtccatccctccatcagctcagaccttctctgcgaatagctctccgggtggtaaagagatgcatcacatttaaaacttcgagacgtcctggattcacttagaaagatgggaagaggctcac

SEQ ID NO: 334702 - DNA, 868 bp, Homo sapiens
  chr12:130645201-130646069
  hyper
cgatgtaaaaattgtagggcttgttttaattaaaagccaatactctccgaggaagtggccccctcctgcacggcgtgcagaaagctggtcagtgaggggggttcctggcgggccccatctccttcccgggcgcttcctagggagaccttgccccgtgcgcagcgtccccaccgcgggggcccgtgcagccgccccccacgccgggtggagcgccgccaacgcgggaagccccagcactgcctccaaagatgtccgcacactccaccctgctccctggaactatcctcaaacgggcagggggcaagcgaggccggtggacgcgggactcgctcctctgacctctccccggccccccgggaggtagcgggagattgcacacgcgatcctgcgagtttccgaactttggaagatcgtgacccggagagaccctgggaggagagggccggccacctcctaggggtgctgtttttttaagggtcaacccaggacgctacgggaagcacctggcgcatccttgggaacagtggggcttggcggtgggcgcccaccgcgaacgccctgggcgggggaagggaatggcggggggacgtcgtgtcctaagtgaccccgtcacagacccgccccaatccgaggggggatgagctcagaggacctgcccaggacgctccttctccactttccaggaaaaccgagcggcgtgcgcgcctccgtgtcctcgcgggagctgggggtccccgggcaggcgctgacgcgctcctcccacgacccactccatcccaccctactccgggtcctcctgcggggctgcagccaaggagggcgctggccgggcacatcactcgccaaatcacataaataccccacgagc

SEQ ID NO: 334703 - DNA, 1490 bp, Homo sapiens
  chr12:130646597-130648087
  hyper
cggcgtcctcggggtgccggggaccatcccggggaccgccgggaaagggggcgccggcggagaggatagcgagaggcaaagttggaggccaggcagagagagggcgaggagaggcgggcgggactgccggggagggtcgcagcgcgcagagccccgcgcgccaggcgggctgtcccggggctggcgggcgacgcgggcgggactaggcgctgcgccccccgcaggctgggctgcaggccgggggggatcggcccccgcggggcccgggagcccgcggcggggcggcggggaggaggctgccccgggccgctgcgctttctcatgcaaagcagcggcggggcggggcgcgcggcccgggggcggggcctgtcagcgctcggcttttctgcccccctttgcctttttgcgagtcttctcatcccgggacgcaaacctcgaaacagctgccggctggtcccggccgaggccggcgcagggagggaggagccgcccgggctgtgggggcgccgcgagctgggccggcctcggtgtgcccgcgccgccagcccgctccagacgcgccacctgggcgctccaagaagaggccgaagtttgccgcggccgtgagttggagctcgcgccgggccgctgcgccgggagctccgggggcttccctcgcttcccggtattgtttgcaaactttgctgctctccgccgcggcccccaactcggcggacgccgggcgcggagagccgagccgggggcgctgtgcgcagcgctcgggccaggccgggcgggcatgggcgggggcccgagcaggggtggagagccggggccagcagcagcccgtgcccgggagcggcggcgctgaggggcgcggagctccccgcgaggacacgtccaacgccagcatgcagcgcccgggcccccgcctgtggctggtcctgcaggtgatgggctcgtgcgccgccatcagctccatggacatggagcgcccgggcgacggcaaatgccagcccatcgagatcccgatgtgcaaggacatcggctacaacatgactcgtatgcccaacctgatgggccacgagaaccagcgcgaggcagccatccagttgcacgagttcgcgccgctggtggagtacggctgccacggccacctccgcttcttcctgtgctcgctgtacgcgccgatgtgcaccgagcaggtctctacccccatccccgcctgccgggtcatgtgcgagcaggcccggctcaagtgctccccgattatggagcagttcaacttcaagtggcccgactccctggactgccggaaactccccaacaagaacgaccccaactacctgtgcatggaggcgcccaacaacggctcggacgagcccacccggggctcgggcctgttcccgccgctgttccggccgcagcggccccacagcgcgcaggagcacccgctgaaggacgggggccccgggcgcggcggctgcgacaacccgggcaagttccaccac

SEQ ID NO: 334704 - DNA, 184 bp, Homo sapiens
  chr12:131400789-131400973
  hyper
ctgactgtctaatgcacctccgcatccccggcacgcaggacccggccgggctgccgcctctcagaatcgctgtgcaattggcgattgcgacattcatggaataaattccccttcgcgacacatggggacgctcacgctccacgctgtggccacactcttacgcgcctttgttcaaatggtccgc

SEQ ID NO: 334705 - DNA, 1454 bp, Homo sapiens
  chr12:132312451-132313905
  hyper
cgcagggaccgcagagcctccgccgaggaccccagcccccccaacacccgccctcgccctccagtcccccgcgccccccaagccccaccctccctctcccgcggtccgcgggctccaccaagcgcccacctgctgcgctgcggcggcggctccggggcctgaacccgggtctgaacccgggcctcggcgccgtggggggtggacccgggagcgcggccggagaggggagtcagggtcagctccccgcaggcgccccgacccccgcctccgcgcccatcccgcgcgtccccgccgccccaagagcgtcctaagacacccggggaaacgccttccctgtgatgccgcggacccagtcccgtcgcggacacggcggggcgggcgggggtggcagcgtccgaggcggcgcgggccctttaaggcggccggcctcgttagcatacatttgcatggccccgccccgccgcttgaggctgccgcgcggggctcagtccggcgggggcgccgcggagagcggagggcgccgggctgcggaacgcgaagcggagggcgcgggaccctgcacgccgcccgcgggcccatgtgagcgccatgcggcgccgcgcagcccggggacccggcccgccgcccccagggcccggactctcgcggctgccgctgccgctgctgctgctgctggcgctggggacccgcgggggctgcgccgcgcccgcacccgcgccgcgcgccgaggacctcagcctgggagtggtgagcgcgcgggcgggacgggcgcggagctcctgggccggagccgggggtctccgcgggccgggtggcggggaccgggaagaccccagcagtgcacgtcggcgtcgcgcgggagccctggcgccctggacccatttcctgggtggggagactgaggcagggacgcgggctgagcgaccgggcgagcgcacgcgagtcctggggaggcgccggctgccgtcccggctccgtgcgctgggagcgcgccgcagccgcaggagcccgtggagttgtgagggggtcgcccacccggagcccgggtcgccggcttgcagcagccccggagcagccgggctgggcgagagcaggcatcgcggccgccccgagctctgcgcgctgcgtgcgttccgggtgggagtggcgggggcaggagcacgcacccacaaagcgaggaagggcaggggctacggagtgggggcaccccgaaagccttgagcccccgagtttgctcggttgagggtgttgggggcacagggatgctggcccccagctccccactggacaaggacctggccctcagcctccttcccctccaccccaggtcggccaggctggccctgccttgccctggtacagtgctgagccgggggcgcggggagagccttcctcactccacacccagtagctgtccccagctcagcttagaaaccctgcctgggggcagcgac

SEQ ID NO: 334706 - DNA, 229 bp, Homo sapiens
  chr12:133195928-133196157
  hyper
gcggacccgggtcgcgggagggcccctgccgtgcctgcgggcgggactcagccttcccagggtcgcctccggagccggcgccgcccctgcccgcaggtacgtattcatcgtgcagaaaagctaccaggagagcgagacgggccccgagagctccatcatcaccaaggtcaaggggatcaccacgtccgagcacaaagtgtgggacgtggaggagtacgtgaagcccccc

SEQ ID NO: 334707 - DNA, 479 bp, Homo sapiens
  chr12:133286733-133287212
  hyper
cgtccagcaatgggtaagcggtggggtcggtgcacgcaggcgtccagcaatgggtaagcggtggggtcggtccacccagggagcgctggtccccctggaaggaaacccaggctctaacgcggtccctctgaggaccctgctaggcgaaacgcgccggccatagaaagactgtcccgcaggagagggcggtgttcggcccggggtttgaggggtcgggaccaggaggagggacagcccggccgaacctgaacgcacttcaggccgcttgaacagcacacgcaggaactgcgccgacggaaaactttacttcgtgttccgccaccaaaaaaatatcgtttaaacaaacctgcggcagcttcccagctcccttaaaccaggatcccaagttctccgcgtctccgcccctgcacccagcctccggcctcggcaggcgcttccggtgcggaaccttctggaaagtaccgcgccgccctcccggc

SEQ ID NO: 334708 - DNA, 1187 bp, Homo sapiens
  chr12:133463691-133464878
  hyper
agcgcacactgcaccgccgcccgtgtggcctgcccgcaacccggtggctctgcccggccccggcccccggccccggcctcagccccgcacctcgtctccgcccgatggtccactcccgcttcctcaggaggacgtgcggctcgccctcctccgcgcccagacgcaggagccgtccccagggctgcggcggcggcgactgcttgccttcctcgggccgctccatcgggattcacatctgcggagaccccggaaacgcccatggagactcccgaccccagaggccgagactcggcgcccgccccaccccgcgggccccggcccggccgcccgcgcccacgcagccccgcagcccggcctggacgccggcgggcgccccctcccacggccgcaaccaggtcccccttcgccgcccgccgcagccccctcgccagccgcgcttacccccgccccgcgccgaacccggaaccggctgcgccgccgccgctgtcaagagacattgcggctccctcagctgatccgcggggcggggccagaggcctctgcgccccgcgattggctggcggcggcgctcaccaagagcggcagctaaagcggagccgggagtggcccgcgagagtaggcgcgtggagggcgctcggccatctttgatcctgaccaggcgacttcgtcgcctgcggatcacggaagtggctgcggtcggcgccatgttatgttggggcagaagggacggggaacttccggattggaagccccaaggattctgagagccccgctaatctggggatgactcctaggagtagaagacggtccatcttagttgtcacgaggtagtgcacgtggggaccctttcgggtacagttgcacacagtggatcacacagatccgaagtctgaggcacagggcgcggtccgcgagtgggagcggctgcttgtgggcagggtggacgcggggccacgtcttggccggcgttttgcggggtcttcctgttctgaacgcgcgtaacttttgcctcagtatctcacttcttggaatccggcggcgttcacgtgtgtgctccagagaagggcgccagagggtattccctgaaagtgaaaggtcggcgaaagaggagtaaagacggcgagacgcgtccacgcagggggagtctgtgcggtttggaggaacgcgccaatgtctgcactcatgag

SEQ ID NO: 334709 - DNA, 258 bp, Homo sapiens
  chr12:133481383-133481641
  hyper
cgaagacgcggcctcaagtcatccccaagccggggctcctgggtggcttctcaggaagccaagctccctcaccctgtggcgacgccgcgggcggaatgcgcatgcgcgccacgagccacaatcgtagggttgggcgcgccctgccggccaccaggggcagcgcaggagctgagcgcaccccatcagcgaaagaagcgcgcctccccgctcttttctgaaccgtatctcctaaactataattttggagatcaaaagtgc

SEQ ID NO: 334710 - DNA, 1255 bp, Homo sapiens
  chr12:133484601-133485856
  hyper
gtttttctctaggtaaagccgcgggatgaaccagcccctgtggaaatttagaagtaacgacgtccgtcaatttctgtatgaaaaatatacagatcgtgtgacacgtcttctgggaatgaaagtctgctaaactcgccgtcacgagtagatgaacacatttaaagtttgtagttaagaggaaaacaacgccaacgacacaaatgccccaagcgctggatgaagcagcgacctaggatggggctggcctggaacgggaaccaagacgcccgcccggacgaaaacgagcagggaaacccgggccggggtcggccgccccacacgacgcactgcgcagagaccacgcggctccgggtctcgcctgcgccggcgcatccctcgcagacgcgctcctcccacgcgagggccccttccccgaagcgcacgcctaagactgcgcgccgcagcccgccctgtctagctgaggcgcagacccggatgggtcccagaggggcgggtcggggcggagagccgcgcccaaaggcaatgggagccgcacgctgctaggcaacatgctgtctcccggcaacgtagaggcggggaattcgccaacgtgtctgaaacagacaacaattttagccaacggctgcgtgggccttgggcgtcctggccaatgggaatagtgaggggcctgtcactaagaaacctgtccctgagcaacgcataggaggggtggaacccagcagcgctgactgagccgccgcgaagtgccggaacgtattacctgggagccaaatttcagagcgtcgtttgtcttcccaagcccaccagctttcagcgttctccagcctcgccacacccccgcctcgggccgtccccgcccagacgcttgtccccgcgagaagctgagcgcactgaagtgagcccggcggctgccgccggaggaggagcccggctctggacacggccgtcaggaagctcagaggctgcagcaccgcttctgcgttgatttccgcttgacttttactcttttcttgggttaaaaatcaaacgccgacccgaggcgtcagagatgggcggtcgttaggcgcagtggcggcccccggatgtttgcgatgggacggcgggctcggaacgtgtggacgtgggctttggaggtgcgagccccattgggccagggctgggtccgggcagtggtacggggtctcagctgtccgtcacaggagatgtgcaggcctcgtcatctggggtcttacgtgtcagtgatgtggggtctgcc

SEQ ID NO: 334711 - DNA, 887 bp, Homo sapiens
  chr13:20702234-20703121
  hyper
cggggtggccaggccttgtttagagtagctccagcgtttgaatcgcgcaggcacaagaaggccgtctcctcaccgcgggccagcggggccggccagggcccgggcggagggggagcccgggttccgcggtcgggttgtggggccggcgctgacctcaccgcatgggcccctgcggccgccgtggcttctcacgcggcctgactttggactcgagtgcaggctcttagctgaatctctgtgtagacagggtgggtgggactccgccctggggtggcgctgggggctcgggtctcccgccgcaggcctgtcagcggggcgcttcccgtcgattccaggagcgcccgcgtctctgctcagcgccacgagtccaagcgtgggggaggacgagactttcaaggcggggggtgacagtgccatccagcccagaatacccacccccagtggcgggctgccgtgcccaggccctgatccctgcccctgcaaacatcactttctatcgcccacggggctctgcagatgtggccaggctaagggtccagagttagggagattgtcctggatgatccgggcggaccctaaatgtcatcaaagtgtcctcgtaggagagggagaggaggcgaccgtgggggcagaggctggaggaccgcggcgcccgggacctgcccgcacctgactgcagccaggtggcgccgattccggacgcccagaactctgtgggaatgcagctgtactgtgcggcgtgtaaaccaccgcatctgtgggattttgttaaagcagccacgggaccactccaccccctccagctgtggtcctttacccggcggcggccacctggcagcagcccggttccccatcctgcggggttcctcccgcccgcagaccggctc

SEQ ID NO: 334712 - DNA, 837 bp, Homo sapiens
  chr13:20735267-20736104
  hyper
cgcgcttcccagcacgcacacctaccgcccccgcatccctaccctgtacgcgcagccacagcactcgcccgcgtccgcattccacaccctaccccgcgcgcacgtccatgcctagcgcctgcatccccatcccgcacctgcgcgggccctggggatgtggacgcgggggctcttccctgccgcctacgcactccggggcatgcccgcgcgggacgtgagaggagagccgagggctgttggggcgggcccgacccgcttgcggggcgcccaccgcacgcagatgcgccagcccgcgccccgctcgcgcctgtcctgggcttcgcaggcccggcgaggtagctgctctccgggcgctcccacggtcggaggcgcgtgggcgtcgggcacctaggtctcgcccgcctgcagccgcctggggacgcgggttccggacggctggcgcggggcggggcggggaccaccgagcaggaagtccccgcggaagcgccgccgggcacagcgtgggtgctgtcgaggagtggcgcccgggcggggcgggaggttataaatagcggccgccatcctgcttctcttcagacacacttaatttagccggcaggcacacggatgcttatttttaaaaaaagaacttgttttattgcgctcgaggtgaccgggaaggtgtccccgcgggtcactcgctccatctggtcctggagacgagatgccagggcgaggcctaacctgcctgctggcgcccaacgaagattttaacgttttctgttcccttcggggtggttttaccacgcttgagagggacgcctaccgcggaaggccgcggaccgagggcggcatcgc

SEQ ID NO: 334713 - DNA, 821 bp, Homo sapiens
  chr13:20767087-20767908
  hyper
cgccgtggcgccttttaaccgcaccccacaccccgcctcttccctcggagactgggaaagttacggagggggcggcgccgcgggcggagcgcgcccggcctctgggtcctcagagcttcccgggtccgcgaacccccgaccgcccccgaaagccccgaaccccccaagtccccttcgaggtcccgatctcctagttcctttgagcccccatgagttccccaagtgcccccagcgccctgagtctcccccggttaccccgagcgccgcctcccccagccccttggcggcccgggtgaagcgggggcggctgagagtcgggaccccccaggaagcggcgccccagaccccggctccggcgctgtgccgtgggcggggttcagggatggctgtggtcgttgtcctctgtactccgcatagtgcgagaggacttggcatttatgagcgcttctttaattttttattgttagagaaacaggcattcctccaaggactgaagatctgttcgagtcgcggaggctgcgcgggcccgcgaggctctcgcagggggacctaggctgggtggcggggcagtgccctctggaatgggggttaacggtggccgaggagggggcgccgctggtgccggcgaagtccccgcttctttctcccctcaaaatctcaccaatccgaacgaacgccttctcgaatttccgattttattcaattactttcaacaatgtgccaaggactaaggttgggggcggtgggagagacaagcctcgtttttgccatggccggcaggggggtcccgccatctgcggagggtgccccccgcggccccc

SEQ ID NO: 334714 - DNA, 259 bp, Homo sapiens; identical to SEQ ID NO: 236858
  chr13:20875746-20876005
  hyper

SEQ ID NO: 334715 - DNA, 941 bp, Homo sapiens
  chr13:21634593-21635534
  hyper
cgcctcgggccgcgtcccgccaagaccgtgagcaaactcgcagagttggcgcggcagccggccgggagacgccgagcagggcctggccgcccgcagcccgggaggaacggcgcccccagggtccggtggcctctgaggggctgactggcccgtgagccggcggcgcggccgcggggaacggggtgggaaccgcgcggcagtgggtgaggcggcgcagccaccgggggctgaggggcggcgcggcctcgactgcggcaccgccgtgggtccgtcggctcgcgggacgacggggcggccggcgggggccaacagggcgggctctgaaggactgattggcccgtgggacgatggcgcggccgggaggatggccccggatccgtgggaccgctgcgccgccggaccgggggtcccgaggctgtcaggggcgcccggccgggcgtctagtgaaaagccgatcccccggagacagcggaagcagaggcgcgcccggcgctacggcctttcgggtctaggacaccgcccccggcccgcgccgcccctgccccgccgggatcccggccgccccggtcgccgcacaacaaagcggcgcagccccgctgcccccgcccgacgccggcctccaacttccccggctcctctggaaccggctccgcgggctccgtacggcctggactacgagccgccgggcgggggcggctccgggcgggcgcggaccgtgggggcagggcgcagggctccgtccggacaaacttcctcggccgccccgccgggcgcccttcccggagcctcggcaccacagtaggtgcgcggagccgcagggctcgaccgcttcgcggaaactctcgccaccctccgagctgccgccccgaccccagctcccagccccctcacctccaggggcgcggtctacaccctcgggggcgtcctggccggcggctccc

SEQ ID NO: 334716 - DNA, 139 bp, Homo sapiens
  chr13:22178312-22178451
  hyper
gcttctctcccggcgccgccgcctaccgcttgggaactctcgcgacatccgacaggcttccgccccgcctaccgggcctgcgccgtgggtgcggttgctgaggcgacgctcgcagccgcaagaggtggccttcggttcc

SEQ ID NO: 334717 - DNA, 775 bp, Homo sapiens
  chr13:22243231-22244006
  hyper
cgcttttttccccactaagtaaccatcccggcgcactgtacccaactggtcgaggaacgcccctgctgtacccatcactgctggctgcctcggagattaatgcgagcgactcgggtggtttatgagaagtgacacttaatacccagcttcttgtatctgccgccgagcagttaacgttaaagcccgctctgtaccaccgcggatgtgactgctgtaaataccacggggcagggctctcatgcttcagaaacacgtaagcaagacgcaccgagccagccccggacacccaatgaccctggactgcggcaaagggggggtgggaaaggaagaggggaggaccactcgctcttctctccttcctcctcgcccgggccggagcacgccttcctccccggagggcaggggaaggtcgctccaggtcgctggcacctccagcgcccccgaaatctgcaaattcatcgctccctttcgtcttcaggcgaagccctcccgtccggagtagggccagccccagttatgcatctccagcctttagctgactactaaggcggatccgacttctcccccataaccaggttttgattcgcttccccaccgcaggggttcagtctctgctttcgactttgcttctcagttgcacgccccgcagtgtggagctgcgctcaagtctcggcaactttcaccatcttgacccgagagtcgggccgtttctaagacaatgtgaacaaagaggagcagggggagggaaggggggccccgcgggagggctgtgggc

SEQ ID NO: 334718 - DNA, 535 bp, Homo sapiens
  chr13:22244074-22244609
  hyper
gccgccactggggatccgggcgcaggcaggctgtcccgggcgcagagcgcgccgcctccagtctctctggcgggcccggcccggcagggcccctggcggcccccggaggcgggtttctttgtccctgactcccgctgggcgcgaaggccgccggcggctaacagaaacccgagcccgcgcaacggagctcaggcttccacgtgcggccccgcagggcagagcaggaaggagcggctgcagccccggggcgccccgcaagcatccagtgcccggccctcccagctccgcggcgggcttcggacggtggagtgagacaccagaactcgcctttcgcttccccgagccgatgcacggcttgggatggcgccgctcgtcctaagcagcgtggtttgagggcgagaagacgcctactggagcgctcccctccacccagactcccgaagacgcgcgcccgagtcgaagtcggggacagagaaggttctctggcgcccccctgccgactgctttgcggccgccgggacccgagcagcggggc

SEQ ID NO: 334719 - DNA, 322 bp, Homo sapiens; identical to SEQ ID NO: 236876
  chr13:23489699-23490021
  hyper

SEQ ID NO: 334720 - DNA, 1304 bp, Homo sapiens
  chr13:23733511-23734815
  hyper
tttcaccacagcaaacccttcggggtgcctcctagcggcggatggagaactagcattgcgcgagagtgagtaaactgtgataaacccaaggggtttgcgggggacaggctgggtggcaagacttttaaaggctcgcaaatggaaccactccctccagagggactatctaaatctcctcaggtgctgaccctttctgacagtaaaggacgagggccagaagtgtaaagattgtggtcccgcgctccaagcccaagatgcgttcagcaggagtagttgggttggaaagaaggcacccagcgtctgcagcgaaggactcgcgtgggagcgagaaatgtccctgcccagtgccccgcgcgctggatcgcgggggcgagtctgagggtggagaggccgccgggtggaggcgcgcaggggtgcgtgggtgggtgcggaaggagtgcagggtatggaggggaatcttggggcggcgcgaaggaggagcgcttggaaaggcgcggtgtttggtcacagaggggctcggagtgggagtgcaggggtgcggggagggagtgcagggacgcggggagggagtggaggggtggggacgtgctggaggggcgcgcctcgatagaactggagaaactggaaaagtggaggggcggggcagtggctggaggaacctctgaagcgacgcggggaatatgtgaaggagtgctatgttggaacttggaggggaggggggatgctggagaggcacacggtgatggacatggaaggacccgggaggtgtggagtggtgggcccggcccgtcgcgggaaggacacagagggacataggctgccctggagaggcgctttcggacatctggaggggcgcatagtgctgggacttggcggcgcctggggcggaggggcgcgccggatccagccgggcgcgctcgggggccgggcgcagtgggagttgacgggcgtccagccggcggcgccctgggctcggctaggcgcaggacggccctggcagcggtgcagcagcccaggctagttcctggggggtccctggtccccgcctccccgcgcgccccggccagcaccgcccggagtccgggcggggaagtgggcgcccgcggcttgggaagctgctcccccgccctggagcagagtcgtcgctgcggtcgctgaggaaggacggagcagaggcccgcgctgtctggggagaagactgtggtgtcatcccgtcgggaatgaagggaaatgcagcggctgtttgcgccccgggactccaagaagtacagcaggtaaagagaatagccacggcccgccacttc

SEQ ID NO: 334721 - DNA, 543 bp, Homo sapiens
  chr13:24040496-24041039
  hyper
cggaagcgggcagcgtgcgctgctgtcccgctacccagcccgctaggctgcgcagctgcgtctgcgggcggggagccggggcggccgtgggcttcctccgggcgcgggctgacggctgccgcctgtgggcgccccagccctgcagccgagcgggaggggcggaccagcgggtgtcgggagcaggctgcagcggccaggcctctgcggcttctcggagtactgggtccactggagagcgaagagccgcggccgccaggattcccagcagcggccgcgtgttgagagcctagaagtggccccgaagccgtgcctttcccgatagccaagcagaagtaggacttgaagcaccgaggctgggatgcccatgctggtgacgccttggggctcgcagttatacttggtgaccggtctacacggcgattcggtgctttccggagtagcagattcatctatctttagacccaccttcgtccttcggcggtttagcacggcctgcgctttcctgcgagccctgctgtcacccgaacagcctgatgacttcac

SEQ ID NO: 334722 - DNA, 519 bp, Homo sapiens; identical to SEQ ID NO: 236882
  chr13:24477489-24478008
  hyper

SEQ ID NO: 334723 - DNA, 783 bp, Homo sapiens
  chr13:24734971-24735754
  hyper
cggcgacctcggggctccgccggcaccggaggtggctctgagggcagggacgtgttggacacgctgactttgtaggctccgccaagaggcgccgcaggaggtaagacggcttcgggcgcgcggctctgccgggcgggcgcgggcatgggctgttaggtagaatatcgggaggatttgagtcccagtggactgcctcggggcttcgggatgtccagctcccagctgcttggcctctgcttcccccgccggtggaggctaccgggtgctcacctgttaggtccgtgcgcccgctccctgcccggcggtggctctgcgccctctgggccacccggcaccatcgcttttgggaggacatgcacgtggtgttctcgcaaaaggccgtttccagccggaagcctgcagggaggtcgccttgtaacttcacccgcgctcccagctcgcggggcctggcctacaggggcggccgtgggggtggcagagtctggggagcctggcgcggcggagccctgtaacgctctgctccatcgggtggcgtggctggtgcctccggggacccggagcgatgcggttggagagcttagtttagaaagcaagtttctcttggtaccagcggagtctcgtcccaggggaaagattttgggacccggtgcccatcgtctgtggactgcagggaatgcattggcggagttggtttggtcccattctgtgcaggaggtgggggaattggtactccagccccaggcaggtagaagcccgcgctgctgccagcgtcagggggagctc

SEQ ID NO: 334724 - DNA, 1493 bp, Homo sapiens
  chr13:25320293-25321786
  hyper
cgccaccaccaccgcagccgcccgtcgcggtggtcaggggcgctccgcggagaccgagaccaggccccggcccgcagctccgcgcgttcccaggcgcagctcctgatgccaagttcacttggaccccggctgagattagagaggcctggcgaggtgtgggggtgcgcagggagaatgggctgtggtcgccatggtgcgtgttggtcttgtggagatggatgctcctccgggtcaatctctgccttctcggggtcgccctcagtgtcgctgctgaaaaggcctccgtcctcctggtccttgctgtgcgctccccacgtcaccgcgttctccttgaggggccggcgggcgttggcgaaggtggtggggactgtcgtgaggatcatcatgggcagggaagggcgcgcggcagtggcctcgagccctgggtcttctccttcctgaatttgcaaagccaggcgaaggccctcgtgctctcccagagagctgcgctccacccgcgggcctgcctgcgcgtggggagagcggggaggcggggacaggagacctgagcccctgggcgcccctaccacgtgtcccccgtcccaacactggacctcttcagattccttgccgagaggggcctcgtcccaaggctggatgcgccgcgcagcggtgaaagccgccctcgcagcccgcaggcgaccagtgggtgctgttggctttcgccccggggagggaacgggcttgggggcactggcggcggcggagcgcggcggggaagctgtgggggtcgtgcgatggttatggagagtgctccatccgccaggcctgggctctgggcgagctgaggagaccggagtttttccccaggagggagccgcgcaggccggcgacctcttcccaaggctctactgctggaccgcgcccgcggcgccgctcccgccccccttcagcgcactctgcgcctctcgctgggtatggccagctcgcagtgcgcgtttatgctgcggtaaacgcattgaaggaacgcacagcttatctaatagggttttgaaataattttcggtatgccagctggggtgtggtttgcccaattctgatcctgtttccagagaacacagctgcttagacaatctgttatcttcgcgtcctgtcttccttttgacgccagaacatcctagggatcaggggcctctcccatgccctggaaccatcctctcacggtgctgctcttcactggtgccaataacagagctcccgcaggcaggcctggatcagtggggactggggccctgaagtgagatggagcaagacagagcggcccttgggagaggggcatggggcggccctgtgctttagactcggcaccctatggcttgaggaggtgacactgtgtcgacgtgcgtttgaagggaggacggctgaaggtacatgcagtctcccggacgtcacaaactccgcggacgcgggtcacacccgcgcgcacgcgcagcaggggtcttagccacacaggc

SEQ ID NO: 334725 - DNA, 383 bp, Homo sapiens
  chr13:25592172-25592555
  hyper
cgcctcccgcctctcagcagaaacgcccaacagaaccgttagaaccagcgagcacgcgcaccttagccggccccgcccaacaggcccgaggcagagaaaccgccttagcagctctcgcggcgcccagtacaggcggcggttgctgcgcaggtgccgcgggctggcagggctccctggagccgcaaggcgcgccctgccccagggcctgtttgactgtggcccgcgccctcttctcctcttccaacggctcccgatgctcagagacccccgcgctgggccctctgcagcccagggatggggttgagtggtgcttctccacctggtgccgccgctgggcccacagcccgacttcgccactgcgtcgcccccggggtccgcgctga

SEQ ID NO: 334726 - DNA, 660 bp, Homo sapiens
  chr13:25620914-25621574
  hyper
cgggtccagtgaagcatcagacacgctggcgcatggggacgaggagccctggagactcagggcccgtctggtgcggcccgggctttgctccgcgctcgccccctgcagctgccggggccgccgcaacttttcaaacctcaccgcaccgacagctctgtcccttcttttatctggagacgctgagcctcatcaactctcacctgcgtttcaggaaaaataataataataataaatgttccacggacacaggatttcggccaaatgctgcttagctctaccttccccaaaagggcgggaggggtggcaaccagtagcgaaaccccgcttgcctgtctcagcaactctcccacgtccgcaggaggccttgcggggatccgagcatcccgctccgagatggaagtggtaggacagtccgggagaagccgacgggaaactgtcctgggcgcgcaccgcccccgtgccctgcgccctcctcatttgctcggccagcgcgggacctcccagccgctgggcccgcgaccgcggcgaatcagtctccgcttccccgcccagcagagctcagatctgctctggagggctctcgggatgtcgcctttccctggagatgagcagttctgcgtcaccctccgtggccagcgcggcttccagggctgggctggt

SEQ ID NO: 334727 - DNA, 1443 bp, Homo sapiens
  chr13:25744683-25746126
  hyper
cgacgggtctgagggtggatcgacagaggcagggtctggggcggcgggcgcccggccgctgccgccttcggagtcgacaagggggaccgtctttacgggaacggcccccgtcctggaagcgtcctctgccgtgcggacctccccgggccccggctcggcgcgccgatgccccgcggcgtcctctccccgggcgccggtgtcgccggggtgcgcgaggccctctgcctctcggcagctccgcgctggggcgcggtcggcgggggcgggcacctcctctccccctgcgggctcacctgctgggtctcgcggggcgtcctggctgggctcctccggctcgcgcgcggctctgggcgtctcctccttgacgcactccaggctggcggtgagcgagccgggtaggatcaagccgcccccgggcgcgcgcccctccgcggcctccgccttggcccgcttgtctttcctgtgccagcgcatgccgctgaacagcccccgcagcccccgcttttgtttgccgccggccttgctcgcgtccacaggctctcccttgccgttttccgagcgcccgttcttcttcagcagcgagaagaagctgtgcgacttggccaccgagctgctggcgagggagcccccgccgggccctgcggctctggggggccccgggttcggccgccccccgccgcccccgccgctgtcgcccccgccgcgcggctcctccttcctgccgctctccagcaccagcacctcggcaagtccgtcgtgggtcctgctcctcaccagccccgtcggacccgagcttttcccgtcccctttgtttttgaccccaaaaatgctgggcatggtgccacccgatttcctcttcttgaataatttgaaggcagctttattaatcttccccgacggcggctcggcggccggcgtttcggcggcacagtcacaatgcaagtccatgtctgccgcgagggtcccggtcccggccccggcctccgccttcctcctgcagacccccacggacgcgccagctccgccgcgctcgctgacagccccgccgccgccgcggctccggctcgtctccatggaaaccgcgcgggataagccgctttcgtcagcagtgggctcgcgccaggccactgtcacccgtattctaaatcaacctgagccgcgctcgccgccgccgctgcaaaagaaacacacataaaagaccatcttccctcccgcaagggcttatataataccctaacccacttccatccgacttggctcggcgctgcatggcgtttttgtggcaggagcaggcaacacagccgcgagctgattgcagaaattcgagtcgtaattatggaattcaaattccctcaactctcacccaccttcggattccttctctagactcgctcttcacgggagcgcaaccatggatcacgaaatgcctctaaaaacgacaac

SEQ ID NO: 334728 - DNA, 687 bp, Homo sapiens
  chr13:25945988-25946675
  hyper
cccatcgccttccccgacacctaaaagccccggtcctgcgtaatattgcggatccctcccagcctcccgtccgctcctcctcccgcggggctccgctcagggccggtcccccgcccccacgccgcagcccgggccagcggggcccgccgcggtggcgttcgcggatgctgccgcattggccgctgcggcacggacggcgcagcctcgggcgcggcccggcacaggcgccggcggtccccgccagctagcagcccggcgaggcgctggcccacccatggtcctcgggcggcggcccctgcgcccagccctgcgcgtagcctccgtctctcgcccggggccgccgagcccccgacacgggcgagatgctgaacggcgcaggcctggacaaagctcttaagatgtccctgccgcggaggtcgaggatccgctcgtccgtgggtgagctgggaggggcgcggcgagggagggtgggcccggggcgggggcggcgcggggcgcgcctgcggttatgcgacactgccccgcccgcgccccgctcccctccctgggctccctgggctctctgggctgcaggatccgccgacgcggcgcgctggccgcacgggggctgggcgtcgctgcacctgcggggccaaaaggctccaggccggggcgaggtgagcggcgggcgtcagagacccccggctc

SEQ ID NO: 334729 - DNA, 1606 bp, Homo sapiens
  chr13:26624757-26626363
  hyper
cgctgggcgcaggccgccctacctgccgagccgtcggggccgtctttgtccgcccggccaggctcgccagcgccctgctggcggtcattgtcgcagccgccctggtccaggcgcgcctcggcgctggagcagcagtagcgcaacgcgcagctgccgcagcagatggtggcgtcgccgccgtcgaagcgctcgggacactggaagccgatgcgccagacgccctgcgcgtccagccagccgtggcagtactcgccgctggccctcgcccccgccgccagcagcgcagccagcagcagctgcaggagcgaagcggcgttccaggatgaggagacggacgagcggcgagcgccccacatggcaccaccctgggcgcggacagcgcgtctccagagagcgcaggacggtctccgagaagtcgtggccccggcgacccccgggcctcgtcactgactgtcccgcggcgctttccgcgcgggccactcccctctgccgcgacgcccaggaggcgacgacgccgggccctaggtccaggagctcctaagccatccccgtcctcagccggtggcccggtccccttagggactgccttatgagttgcactcgctgatggaaatctcgggatgcagtcagaaggcccccggggctgtcgtccggaagcctctggaggtttcactggcaaccggaccctccctgagcatccccgaagggatgctcactcgagccgaatgaccgctgggcgcgccgccgcggacctggagccagggctctgcgcagggtttaagcctcagggtcccgcgcgcgaatcagggcccgtctcccctcctttattccctcctcgggcgggtagaaggggcgaaggcgggcagtgcacgcaaggctctgggcagcaagtgacgcagccggccgcgctcagcctcctctgccccgaacttggtccgcatggctccggccgggccgcccgggcagcccacgggggtgcagccccgacgctccactcggcggggccgacggccaatcttcccagcacgtcgccgagggagcgctcctgaccccgggaacgtccaggacgcaggcgagggtcctgcgcgcccccagccgcagtcccgggagcctgcccagctggcggcggccgcggctgctgctgggcgcggatccaggcgggcggctcgccccggttccccttctccgcctccccggctgcagcgcggtcccacaggagcccggcagcctccggccggctctccctctcccggtcgctgcctcgccctcgggaggtgtgcgcaccgatggaagcctcccacggaagtttctttcctccgggctacgggagaagccgagcgcagcagccgcccacagcctcgcctcgccccgcccggcgccagaccagctccgactccgctcgctgccgcgctgagccgcgctcttatagaggccggcggctccccggcgcgcatgcgcgctgcgcggctcccccccacccccgacctcagggacgcccgcgggcgccgggcagcccctcactttcctaccccgggcaaggagaaaggtgtggccaagggcggggtctgcctgctggaataggcgcgggaggaaacccaacctaagc

SEQ ID NO: 334730 - DNA, 1193 bp, Homo sapiens
  chr13:27131483-27132676
  hyper
cgcaaactcaaaggtactgtaatgggcacctagcaatcagaggtgatacaagggtctcttggcccgaagtatccccacctctcctcgctggaaaggacgctgcctaagcctcatcccgagctgggggcggaggaccaagggtgagagccaccgcctccgcaatcccccgcccctcggcaccgtcgctcagcgcgctcgccggctccctattggccgaggcactcgccaatcctggtgaagcggccccgtgagttggccctggttggtggagccggcactgagcccccctcctgctccggccgagcccccccgccgggagggggcgtggccgcggccgtggacgggccggaggcggcgtcgctcgcgccgctgcgtgcggtgtggtgcgaggcgggtgcgccgggcggccgcggcgcggcgggaccatggagctcagagcgcagccccggcgccggcggcgggaccgcggaccggtgagtgagggctgcggtcgccccggctctccgctgtaggctgctgtggccctctcggctccgggccgggcggctgtcgggggaggggcggccccacggcgaactgaagttgctgcatcgccgcgcgctccggccgggcggcggggcccactgcgggctgcggcgccgcctcgcgcctatccctgcagcccggccgcattctcccggccggctcccgcgctggcaggggcttctcgccgtcacggcgcggccaggcggcccttctctcccgcgcctccgggcctccggccctttgccgtccggtgcgcgctccctggactcgggacagccacccgccctccccgccgtaagtggcgcccgggcctccgctcgcgccccacgcacgacgccccgggccgctccgcgtccgggaccttcgcatccgttcagtgtctgcgcgccctcgctggttctggtccagctccgcgtgccccccggccccattcggccctcgccgccctggcctgtgccctcttggtgcccgcgtgcgtgttggttgcgggcgtcctctccctcgaggctgcggtgccgcgtggctcccggcctcggagaccaggccggactcttggagtgcaggggaggaggtggggcggcccgcgagtgcgggggaccgcgcgcacggagccgcggcgcgcggggtatcatccccgggggtctttacccgcgcgcctgggctttagc

SEQ ID NO: 334731 - DNA, 489 bp, Homo sapiens
  chr13:28366733-28367222
  hyper
cgggataccgcggccagggaaagcgcgtggagagccgaaaggtgcggtgggcgcagagggcgggctggctgcggggcgaccgcgcgccggggccatgccgcgctccttcctggtggactcgctagtgctgcgcgaggcgggcgagaagaaggcgcccgagggcagcccgccgccgctcttcccctacgctgtgcccccgccgcacgcgctgcacggtctctcgcctggcgcctgccacgcgcgcaaggctgggctgctgtgcgtgtgcccgctctgcgtcaccgcctcgcagctgcatgggccccccgggccgcccgcgctgcctctactcaaggcttccttcccacccttcggctcgcagtactgccacgcgcccctgggccgccagcactctgctgtgtcgcccggggtcgctcacggcccggccgccgctgctgctgccgccgcgctctaccagacctcctacccgctgcctgaccccaggcagtt

SEQ ID NO: 334732 - DNA, 633 bp, Homo sapiens
  chr13:28369066-28369699
  hyper
cgagccggctcctcgccttacagctcagccagtgcctctcggaaccctcagctccgctgagagcccgccttgcatgccagccaggtgcgcgctaacgattgtcccgctccggcgtggcgcacaagcgtcgcggagctcagagagctaagccggaagggaaggagagcgctctccttggactgcaccatgggtcccaacccctgcagcgcctccttctcacctgggatccagccccacctccatccctcaccatttcgctgtcctggccaacagccgggagggcagaaaccactccctccataagcacaagaaatccgtccttcactgcgcttggattgataacgattcgttagggacaaatttccattctgcgggatggtgcagacttctctcagagggccctcctctctttgttttaaggcaaattcccttagccgagtccctggtcgcggaacattccgggcaaggaatccgagaatccgaagtgatcctgccccagggagtccccgagagggactctgcatagctggagccagtggctctgggacctcatgttctcaccaattctcgttaaaatcctatatccccctacgacttagaatccacaccccagctccctttgaggacatatgc

SEQ ID NO: 334733 - DNA, 1043 bp, Homo sapiens
  chr13:28491488-28492531
  hyper
cgggaaggtgctcgcctaatggctcggtatcgctgccgggcctgttgtgggcgaggcggcttggagggggcgcaggcgtcagcggggattcagagcggaaacgcatttcgcctgtaatggactcggcgattttacgataccaggagctagatccacggggaagtacaacacacgaccttactaagcggagggttccgcttgatgcgttttttatacggctgtacgtgataaaattccagataactttgtttcatctaataataataataacaataataaatggttgtttgacctttgctccctgggtcccttctataggtcgcaggcagcagaaaatgctaattgtgaaagtgagaacgcgcctccatggaatacccccggcgatcccctcctcctcccccacagccgcgggtacccgggtttttgccggcgaccgcaaccggcggatttgctttctgctgagagcctcttttctttctgcagggccgagcaaaaatattaaatggaagcaaatgaagcatcgaaatggagaccaatttacagaaatgtgcaattagttgagaagtgcaaagtaaacactccgggggtggcaggcgaggcagggagcaggggagggagagtggggcgcagactgagtccagagtgggtgtaggggtgcccagggaggaggggaagggggaggaaaaggagggggaggggaaaagtggccgatctttgtcctgagcggagcttgccgtccgctcataaccgcgtcgccaagtcaaccctcggcgactcggcagattatctccaagggtcaacacgccgcggccaggcaaccccctccagcctgccctcctgatcgatgtggtcactcgcggccagggtgatagggtagagttctccgcggccgcagacaatggactcattgacgcgggcgcacagagattaggtgcccgggccccacggcctttcactctctgcccccaccaaaactgcaggtggcacttttccctgaagaaatcaccgaaactctccccgcccgccgccgtgcttcccttggc

SEQ ID NO: 334734 - DNA, 1793 bp, Homo sapiens
  chr13:28527202-28528995
  hyper
cgcggcttctgtgtggcagctactgagtgcacgctcgacctttgccaccctccgcgctgatggaaactggaggaggatgtggtttagacacaatgtggcccaagcgtccttgtttcctgaatataccccaaagtacaagtcccatctccagttttgaaagaattccccgaggaaaggggcttgagtggagtgggtggaggtgagaggggaagatgaggtgttggagaagcccggcgcacggggcctctattaatattaacttttattaagagttggcctttccccggggcttcacaaagcaggaagtcaagggcagtggaacagggaagggaactggcaggaagagaagaccttgagtaaattatttagctgtgacacgagattaagagtgaccccaccctcctccctgccccacacaccataaagtgggcccaggttggggagcagcgctccagctgccactaatcatggaagcccagaggcgaaatcagcttcccggggacccagaaaattgctggagtctggcgaggggcaaatcaggaagtgtctttgtcggagatgggacggaacccggcttcggggcgcaaccgggctctgggggagaccgcgtttgtccaggtggcaggccgcgccttctgatggctgtgaagagaaggagcgggggttttaagagccacagcgccaccgagagagtggaaaggagtagattagctcgcgcctgctatgcgaggcgactccccccgagacccacccgcagcccagcgcccttggccaggaggcccggaaagccaccgaggcggccgaaaggggccgcggggcacccctcagcccctcctgcggcggctccggctgcccctgctcagcctcccgctccccgcccggagtcccagctctcagatcggccgcagagctgggaacagaggccgcggggtccaggccgttccgcccgctcagccggagcagcagcgccgcctgccgggggcctcgcgcaggcgagacaggccagacgccggaggccgcgggcggctgcagctttgacgggccgaacacaccagcgctcccgttccgccttttgaaaatcaaatcccttgggcctggtgccaccatcgctcagcccaggtcttcgacgacgggtcgaaggccagtgctccaggccttcttcaccgagtggcttcggcgcttgcggcccaggttccccgcacctccgcgccgtagttgcgcgcaccttttgaaaagcttggcgtcttcaggtataaggacaaaaacaaccgcggacatcacaccattccaaagaagaaaaagaaagtgcccggaatctcagggcgcgacttccggggcgacgggcggcggcggagaggcgctccccgggcttcctacccggcaggaggccgcggcgccgggacctcgcctgccctcaccgcgcgccacctctcgggagacgccgcgaatctctccagggaatcccgggcagcggcgcagacccagcaaggaccggcagcaggccgagaccggccgtcttgggcgagagcagcgggacacgagcccccgggcgcccgctgggagcgcggggaggctctgggctcagggaagctgcgctccgagtggccttggaggacggtcaaggagcccgggccccgcggcggccgggagtggacgcgactggtccgcgccggccgcaggggaaggggcgggtcggcgctgcctgagctctatctgctctaatggctggggtagatccgcggagatacttgaataccaggccgaacgcttccccaaggcgtgttgtagacaac

SEQ ID NO: 334735 - DNA, 818 bp, Homo sapiens
  chr13:28534792-28535610
  hyper
cgttagaagcgcggtggcctcacttgccggagagggtcttggttttgcgcctttttccgtggcccgggaggcttgccaggcgctcgcagcagcgagccgggtgcttgcatctcagagagcagccgagctcccttccctggccccgtacccgcgtgcaaggggaccgagccccgggaaggggaagaacttgtaatcgcttgcagcgggacaatgtcgacttttgaacctctaaccactaagcaaacaacccatgtgctcttgctccactgtccaaacagggtttattgacaggcgtttcacggcaacgcatagcaaccccggcggctagggggcgggcctgtgggcgcggccggggcgcggggagacctgcggggcaccggggctcagaccggccctgacccaggacccctgacccaggacccctcgcccagcggacccggacacggcttcctcctctgcccggcaccccccgaccccacgccccgcactcctccctctggcttcgaggccaggcgcccgcgggccgggccaccggagcccctttcccaatcctggagctgtatacgccacccggaagggccgcggaattggagaggtgctgcagagggtctatacctcttgctgtttcccggctctgctcatcttccccaactgcccttaaggcgcctccgtgggcgcgctgattaggctctcggatgttggtgggaagatcgaaacgaagggctaagcccccctcgcccgggtcctgccggaaagttcagctcggcggcctccaggatcaaaaattttaaaggctgcagcccggtccccagtggatc

SEQ ID NO: 334736 - DNA, 975 bp, Homo sapiens
  chr13:28540420-28541395
  hyper
tttgaatggggctgcggccccgaccccgcgcctgctatgaaagtaaagggaactaacgcgactttctccgcggtggacgctcggacacgcgtgaccgcctcaaacccactccaggctgccattggtactcgcccctttttacagatgaggaaatggagaatcagaccgggtcacgcagatagtatcaggcggggttggcaccggagcctggctggagccacagaggacacctccggagctgaggcgcagggcagttccctcagccgaacaccccgggagggagactcgcctggaagtgtctcggagcgacccttgctcgggtgctgccccttcagtgtcccggacgtgccgggcaacgcgatgaccagaccctgagcgctcttcgacccatgccccaagggccttggaggcgccccacaccccctgggaacctaggagcggggctatggaggggagggatgagagggacttgtcagaattcattattgactgcgaaagtcaccaccctctttccgggccctaaaagagacaatggcagggctgggaaggtgtatatcaaagcaagccaggccgcgtccccccctccacccccacaccttgacagatgacgctccgcagaggagcccggctccggcccgcgggctgcggccaccccacattaacatcacaagggcacccggcgccgactgcggccttgccacctcggcgcaggacttcacagcggcctctcatctgctgaccccgcggcctgggctctggcggcttccctcccgcccccttcccggccctcaccccgcggccgctctcccgggacacgcaaaggtcttccttagggcgtgcgccacccccgccaaccgcgccccagacaggggctgtagaaagtgggtctttgggagccaggatctgggagcccctgctaggagaaaggcgcctcctctaggagaagggaccaagccaaagctctgaggctcaccc

SEQ ID NO: 334737 - DNA, 1275 bp, Homo sapiens
  chr13:28541973-28543248
  hyper
gggcgcgcccccgtcgccttagcagctggggctagcaccttcttcccagcgacagcagctctccctggtctgcctgctcgctgtaccttgaattggcccgagtggccaaacccggtcccacacacagcctagccatcctccgacccccccaggtcacttctcttcttagatggctcagatggggaaagagagagcggagataaatggcctagacctagcccaagaaggttcgagcctccctctctcctcggcggccaggagccacgcaaggaatgcatgccgcagcaagtgccggaggacgcgattctgccggcgtccagcagtgctcacgccgacattccccggagcttcccgaaggtgtcccggggttgcgaatgaggagctcttggaaagaggacgcctgaacacggtgttgagactcagaatattcactcccaggctcagtaggtcagagaagccccgacgggccagaggcccccgaatttgtctccgggccgtgcccctcctggcgccgagctcccagacagcccgggacgcccctgtgcgcactggacgcgcgacgcgcagcagccactggctcgacccgcgccttcccaagcaccctccgaaggggcgcagcctctgcttaccttggctgccgagggactgctgcgccggcttccgcatccactcgcacaggttccgccgctggccgccgggagacagctgctcggcggcagcggtggcggcgggcccaggagggccggggttgagcgtttgcagcagcccagaagcgcaggaaggcgcggcggccgggtggtgcgggtggtgatgcgggtggtggtgcggatggtagtctgcggggctgctgtagcccatggctgcggccggggagccaccgttgaggccgtgagccacggcgttggcggcggccgcggcgcctccgggcgcgtagccattccagtcctcccggagtggggcgccatacgctgccggccaggatggccccggggactgcgcgctgtccaagttcgctgccgctgcagctgcggccgccacgtggtaaccgccgtagtccgggtactgcggggggctgacgaagttctgcggcgccaggttgaggccgccagagtggcgcacggagctagggtacatgctcacgtccttgtccaggaggtagctcacgtacatggtggcgagggtccgggagcagacctcaccatgctgcctggggaccgacgctggaggctgccggggggcacgaagggaaaggggcgaggggactcgaggagcggc

SEQ ID NO: 334738 - DNA, 378 bp, Homo sapiens; identical to SEQ ID NO: 236933
  chr13:28544504-28544882
  hyper

SEQ ID NO: 334739 - DNA, 840 bp, Homo sapiens; identical to SEQ ID NO: 236934
  chr13:28549575-28550415
  hyper

SEQ ID NO: 334740 - DNA, 1058 bp, Homo sapiens
  chr13:28551935-28552993
  hyper
cgctttggaatccacaaaggccggtggtgtcgggggccgcaaagggagtgaagaattgaagcagtgagctggataaatccggggcaaagcactaaacaatatggatattttggcaacgcgtgcgcgtgtgggtgggcggacaaaaggactcattactcgtatgattgcctcaattctccacttcctttgtgcacgtgtgtggacgctgttccaggcccgagtccgcctcccgcccaggacgcacagctccgggccgtggcccccgcgcgtccggttgtgcgtcccgggtccctggcccgcgcggcagctacagcttggcggggtctgcgcggaggaggtcggccaggcgcaggctgccgatcttcttcacctcgcccagagcagtgcgcagctcctgcgcggacgggcagagcagccggcgcgccagctcgcgcggcaccgccgtccggtcgctgaagcgcgcggcgagcacgaaggggaaaccgaagcgcgcgcggtactgcgcgttgagctcggccagccgcagccgctcgtccgcgcccaggctcctcaggcctgcgccgctctgttcccgctgcgactcggccgtgagcgtgccccgctgcagctcgctgcccgccaggtccgggtggcagcgcaggatgccctcctggcctgcggagaagcacagacaccggcgggagcgcgtcaaccgcgcccgtcccgcaccgcgcactcgagggggcgcgtaggccgcgcccggcccccctgccccgccccgccccgcccggccccaaagaaggctgcgggagggtgaagtagagtacccaggcggtgatgtcctggcggaacaggggcgcccttggcgcgcccctctaacaagtcctggaccttgcgcttctcggtccccactacattcggtcgggaccaggatccaggggcggggcgggaagtgacacgtttgtcttttgagaccttgggtcaagaagagcggaggagagagagggcggccgctgaggctcggaatttacgactaggtcgggagggagcagagacgcgataaggatcctgagcttttc

SEQ ID NO: 334741 - DNA, 1112 bp, Homo sapiens
  chr13:28674057-28675169
  hyper
gggctggggggtatcgttattgaggatgactcgctctaggggagaacgcggacgcattttcccatcagagttccctccataaatcaaaacctcaaaagaagagttaaagacgacacccaggtgtctacagtatccaagggccgggccaggagaggtccttggccacctggcgccgagttcgcggccgcagactcccacggacggcccagcacccgagcgcgcgggccgagctgccccagacccggcgcagcgcctcggcgaggccgtctgcgaagtccgggccgccactcgggaccgcggcccgagccagaggagagacttcggagaagagggaagaggacgcggggtgggaaacgccggggccgcaggcaagtagtgggcgagtccggagggcgcgaaagaggggaggggcgcgggaggcaatggaaggagcgagcgcggggaggagcgaggcggctgggccggaggaggcgcgcgcccgggtccacactgcggggtgggggctgagggaccgcgaggggctgcgagcgagcgagcggggccttaccgagcagcggcagctggccgccgtcgcgcgccaacgccggcatggcctccggagcccggggtccccaggccgcgccggcccagccctgcgatgccgcctggagcggcgcgcctcgcgctgcaggtggctctcttaaggatgcgcgtcaccgaccgcaaattccctcggactggtgcaaagtggaaggggggaggaaccctctccccagaggcagggaccgaggcgggagcggagaggttgggcagagccgagcagccggtgcctggcgcagcgctgcagccgagcccacgtgcccgccgcggtccgcagcctgtgctcggcggcccccggggctccccgactgcggcggggaagattgggcgcggtcccgccggagaagttgcactggctccgcggctctgccgccttgctgcccctgtgagtccccgaactctgtcgtttggatccggggcgtggggactgcagggagccacaaaccaccctcctagtgcgctgggatctttgaggccctgagaaaggcgctgaatccgctcggcacgctggcaactcccgccagcgcacaggc

SEQ ID NO: 334742 - DNA, 2036 bp, Homo sapiens
  chr13:29067852-29069888
  hyper
ctgagcagagactgcgagtccgaaccctcaagttcctcggggctttgacccctcaatggcggcggtctaactgctggtaaaacccccggcccctgactgttccaccgcccgtctcccaaacgcccagcgaaggctgacttaggtggcgggcggacctcatcgattcctcaaaccacatcgtttggtcaaaatcgcccgccctctcttcgctcggattttaaaggctaggcttgtaagtcagtaagttaacggtatttgggccctgggctgcccttgtgggtcagggtcactgatgtccgcgacacggactggaccgcgcaccacgcctgctcccggcagaggccccacccgggtggctgagcgcagcgcactggggccccgcggtccgagagcggcggggaggagcgggcgctcgccgagcgttccccgggacagtccggcttggggactcaagcgggtcatgggatgccggcgctggccctctcctgagatcctcctgctcccccgcaggcacgagtcccctccaaatcggctcccctcctacactctcgtgacgcgaggtcgcggccagtgcccaatatcaccaaagtcccggcctcagcccagccccgggcagcctggcaggctttcaggagcctctgctcccggctccgggggaccctgcgtacctgccccaggtcctctgggaatgggctctgggtgccaggcaggtcccggtgcgtgctgctcctagtgcccagggcctcggcagtgagaccccaacccgacagctggataagggatcagcgatcctgtcgcaaacggacagccccagcgcggacccggtctgagcgctgatgctcgcgggtccaggccagccactcctcgaggcgctccctcggagaaagggcgcagcggccccaagcgtgcccgctgcaactagtgtcccaggttctcgccgtagccagcttctccgggctacagcctcgtctccccgcgtgcaccccgccctggcctcggaggctctgccctccggccgccccatcgcagcccgcctcaggccccggcccccagccgcgcctcacctgtgagaagcagacagctgagcagcgcgcacagcaggaccccggtgtcccagtagctgaccatggtgagcgcgacgcggcctgctcgcccggtgcccgcgctccccgcggccaacgacccggccgccagagtccgtcctctcgttcgccgccgccggccccgcgccctgagcgcccgtctcgcggctccagccaggagacaaccacttccccgggtaatcctcgccgccaggcgcccgctggccgctgcacccgagccccggagcccgctccgagccgccgccgctgccggggaggagccgagaggagtgtccgcctggcgcgctccgagcctcccgcggacctcgatgaagagcagccgagggcgggggcgatttataacctttccccagcccacttcctaccccggcacctccttctggtgacgtcaaggggtcccccacccctcatccgcctccccacctaccctcttcttcctcccaggctcgcttccctgcggctacggagaggggcgggggccgacgagggcgggtggcccggggccgagcgcgcgtggggaggtgctggcgacgcgggcccgggagcgcggccccggcaggttcagggtctttgctccgcgccctcttgcccttgcccctcctcctgcccatcgcgctcaggaaatccttgcagactccctccacccggcttactcagctctgggggccgcccgaaactggggaagggacaaggctgaagctccgccgcctggccctaggggcggaaagtccgatccaagggaagctggccgcgcctccgcgacggtgttcttggcacggaggactgaggcgcagtccggctgtctccccttgcctgctcttcccgcgctgtcccgccgctcctgaccccttcagactgtcccgagaagtctaggaaggcaccggagaccctcggcacaaggcactgaacctggagcgcctgaggggaactgac

SEQ ID NO: 334743 - DNA, 986 bp, Homo sapiens
  chr13:29106323-29107309
  hyper
cgtttcgaacccgcagctagccaagggcaaatgcatactcgaaagtgccacgcctctcgtccaccctgcgccgcgtccagtccacccccttcatcccgcgccccatgtccacccgcccgctgtccaccctgcgccccatgtccatgcgccccctgtccacccgctcactgtccaacccgcgccccatgtccacccgcctgctgcccaccccgcgcccccagtgcacccgcccagccccgagcgcccgcggagccgagtggagagcagcggccgcagcgcggcgccaggctcgggctgggctggccggcgcgaacccccgggggcgtctgggcggccaggccgggtggcggctgcgcacgtaggagtaccccctgagcccagccgctcggccggcctgacccgcgggtgaccggatacgagtaacgcgtgcgccccgatctgtgccctgcgcggggtcgggcggggaccggccgggggcgccgcgcgcccggtcgggttgactgtcgggggcgatttccgcggggcaaggcgggggcgcgggagcagcgcgcagctgcggggccattccacctgagcgccctgaggtcagggccggggcctgaggacacggcgctgggctccgggggacgcgggttcacgccggcgcccgagcgccacctccccgccctccgccggctcacgtagtcccggggttcggtacgtgaagtgccggcgcgaggctgctcaggccaccgcatgggccgggcgataaacaatcgcacaggatacacaacaccctggactgtcacaagcccctcgcaggaaaagataaataacatctgaggcgctgcggcgcggcttccccgggctgaacaaaaactaggaggtggggggcggtggggcgaagtaaacaacagaaccgaagaattgccgcacggagcctgggccggcggagaaaatcagatgcagtctccttccctttggtgactatccgtgggggtttctcc

SEQ ID NO: 334744 - DNA, 1093 bp, Homo sapiens
  chr13:29292491-29293584
  hyper
cgtaagttcaacaatgaggttccttttgggaagcgacagttgcacaattgttattgttattttgctgcgtattaaaaacggacagggagggggcgttttaaaaagcagctcccaatcgaaagggccttatttttaactcaccccacgattacagtcttcctgccaggctgggtacaggtcgggccgtgccaggggctgtcgcctcggatgccctgcgctcgtgcgcgcccgggttcaagggcagcctctggactggggcaacagaggacgcgccggggacagtaacctcggactacgcggccggcgctggggtggggagagtactttcccgtcgaactcgaccaaattacgcttgtcggggagtctcaagcgtattgtaaagcaaacctcggcaagcgcacttccgcgtcccgagtgacacctgcagggttctccggcagccctcggcttccccgcggccctgcggacctcggcctcagcgcggcgcggcggggcgcggagcagctgctccttctgcgcagtggacaatcggccaatcggcgcctccgtcggtcggtcagcggccctgccagcgctaggcgatgactcggccgcagccagctgagcatcgctgtccgccgaggaggcggggtcggctgccgcggcgctgtcactgttctacccggctctcctgcgattgggcccagcggtcggtgccccagcggcgattggtccacccggacgtcactctcccctggagagtggctagtggatcgtgcacccaccctcggaggcccggagtggatcccgcgcgaccgagcagccactcagcaccgctgttgagtggtgggccgcgccgcaggctcaacagctctggagttgcaaagcatttctgaatccgaatatcctttctcatagaaacacataaaacaacagttggaaaagtaacatgtttgggctgtagcccccagcaggatcccggtcggcccgcagaagaggggaatgggcgcaggtggagggcataggaaagagagtgctcaatgcagagttagcggagggttggaatgtggtcgctggcttttcctggggaggggaggggggacttgggcaaatc

SEQ ID NO: 334745 - DNA, 291 bp, Homo sapiens
  chr13:29393559-29393850
  hyper
cgcctgccttttgcgcaaatcttttcagagactggctttgggctcctatgaatcaggcaccctagcgtcctccaaagttcttcccgatgctgaaccccaatgcctcctgctgcgcctaattcgaagcggctccctcttctgttctgagcggaaaacagcggaacccattcctggaggcctgccctggaacggccaactcattcttactcctttctcctggggtccgatgctagggcaccacggtgaccagccgcgcagcgggcagcggcccgcgccgcgcccaccgcctgc

SEQ ID NO: 334746 - DNA, 859 bp, Homo sapiens
  chr13:29394053-29394912
  hyper
cgcggggcgcggagcgcgggccgggaggaggcgcctgggtctcggcgagtgcgtctccgggcggccgggagggggtgcgcgcatcagctgccccgcgccgcctaccgctcgggcccgctcgccgcccggccactgtcaccgcggacggcacctcgcgggcgaggcgcgccggctgcgtggcgcgctgcgaaggttgggctgggcggccgccggccccgcggcttctctttgtccaggcgaggcggctggaggagcagccgcggccgcggcggagccgggagcgcctgggcgtcgtgcgggcggctccggtccccggctgcgccccggccctcgagcgggggcggcggcctgggcggtgcctgcgccgaggtgagtgcgggggcgcggagcggagcgcagccgcggcgcgggcgtgggcgggcagaggtgatagcgagcgccggcggctccaggtgcgggggcgcccctcgcgctccacctgcgccgccgccgccggctctcagggcaagtttatctccccccttctgcggaaacccttgaccgcttagcggagtacagacctgtcggtaaatagaaaactcgagctggagaggaggaggaagcagcgtggcggaacccggcccgagatgagcgtctccgtgagggcagtggtggcctcttggacattacatctttcttggctctttttgacccaggtgagcgaatcctctgctgcgcggtccggtggggtcggctggctctgctgccgccctctggacccgccggagacaggtgagcggagttggggagcgcgcagccgggctcggggcagcgccgggctggttcggcttctcgtctccagagcgctgatgcttcctgc

SEQ ID NO: 334747 - DNA, 903 bp, Homo sapiens
  chr13:32605049-32605952
  hyper
cgttcgggctccgatgccccttgaaaagactgcatttctgggagggaaaagtaaaaatgcagataccaccatgcgtgtggaaggcagggaagaaaaagcccagacaagcgtcctcttgttgagtctctttactgcaacgaggctgacggatggggtttttcaaaacgtcgctgcaaccagatgcaaggctgcagctttgcttaccgcagcgtgctgcagttgtgtttatttcagggacagacacaaggggaagcagcagccagagcacacccgggccgctcacgggaagccttgctgaagagagaggatccgcagaagctgggaaattcctcccgcagcctaggcggagactgagccgcggctcaggttgagacagtgggcaggggcagggggcggcgctcccggcccatcccttagccccgcggcggccgtgtgggccggaggctgcctgcaccgcgtcagggaggccggcctagaaaccctccctcccagaagaaagccgatcccagttcaggtggggtcttcctcggttgcgtacctggctggagccgagctggtgggcggccggcagccggcgtttctggtgatgacagccccgaaatgaaagcagcgcggccgccgcctccgagggctgcagggagatcagcgtccagcaaataagaagcaagtcctggacccggaggaggaggagcggccgagcatctctctctgctccgccgtgtcctttagatgagcactcccggccggagccggaggtggatccgcagagctgcctctgggcgcctgaccccgcgctgacatcacaacctgtgacaggcgcatcacgcccggtacctgctcccggccgctgcccgtcctcccagcctctttgtatgccgcagacatggccagccagcaggattc

SEQ ID NO: 334748 - DNA, 538 bp, Homo sapiens
  chr13:33000891-33001429
  hyper
cgtgccagacaatgtgcttggcagggtaagacatggctcctaccttcaagaaacttacagaaggataagaaaaaccatgtgcaaaaaagtaagcacagtcacgtaggtataaacaggaagccaaggagcccagaagaggggcatatactggcggggtgggatagctgcccggtcttaaaaggcaaaagaaggcgggagggcaagccaggcaggaaggccagcgtcaaggagagaagcggcttggtttacaggagataaaaacagttcgaagttgctggaacatcaagcgcaaggcagggagcggtgggagttcaggctggagcggtggggcctagcaaggtggccacaggcacaagcccgcgtaattcccagaggttgggtaccggagggccgcttacgcaattcgcaagtgaacgaatttgggcgcccatggcgaggctctgtcagtgacggtcggtggtggcgccgccagccagccccccgcccccgtgcacctgtgcgccttcgcagctgccaaagcaaacgcaggctccccgac

SEQ ID NO: 334749 - DNA, 1315 bp, Homo sapiens
  chr13:35516217-35517532
  hyper
cgccccgcctctgccagcttgccccagtgtctggcagcagtccccatgcacctgctcacctgtctatccgttcggggtggttgggggagggacgaggggtgtcggggtgggtgggtgggaagagaaggagggcagggcaaaagagggggtgcaccgagggctccgcccccccggaggctgtgcgcaggcgcagtggctgctaccgcaggcagggggcggcaacatggcggagtgagcggcggcgtcggggcttcacaacaacagtggtggccgtagcagcggcggcagcagcgtcaatagcatcggccacagcctgagcttcagcaccggccagcgtcgtggccagctgctcgcgtcctcgggcttctcggagcggctgcagcatctccgcggggggcgggccgggccggacagaccgggagagggagagagcagaggcagcggcggcggcagcggcagcggcagcggcacacctgctgggcgggcacagccgcttgcccggcagcggttagcggtaccgccaccgccgagaataagcctgcggatcccccgccgcctccgcgggggagagcgccggagcgggccgggctgaggcgcaggcggggagcgggcccggcgccgcggcgctggtggatgctggggctccgaggcgacggccggggggcgggggccgaggcaggtataacggtaccggcggcggcagcgccgctgctcttcccttctcctcaggaggggggccaatggctagcgagaagccgggcccgggcccggggctcgagcctcagcccgtggggctcattgccgtcggggccgctggcggaggcggcgggggcagcggtggtggcggcaccgggggcagcgggatgggggagctaaggggggcgtccggctccggctcggtgatgctccccgcggggatgattaacccttcggtgccgatccgcaacatccggatgaaattcgcagtgttgattggactcatacaggtcggagaggtcagcaacagggacatcgtggagacggtgctcaacctggtaaggaaaaggcgtgctctcaatctgcttccccagtccccacatacaccgtccccagcgcctttccctcccacccttcacccccagggtcacacgcgccgcgcgtccctgggagcgcagagcgttcagccggtattgcccagcgggtgacctgcctgcgcgctgctagagccacgccacctccctcctctcctctttctggtcctctcctgccacctgagcgcagtgcccaacttaacaccgcttcttctcactttttaggaccgcgagtaacccagtac

SEQ ID NO: 334750 - DNA, 1153 bp, Homo sapiens
  chr13:36919871-36921024
  hyper
cgcgcaatccatcccaatataaccgcagttgttcgtgggccttcttgcagagaaaggctgcccaaccttgacggggccatgggcgctgcgggagggcaaaagaccacagagatctgcgaagccaaagtaaacaacggggttggggcggcgagaatgatcaatagcgatgctccgaaaggactccgcgataggaatcgagcgggaaggattccctccatcctaacagtccatgggttaagaggccgaagcttccctaaataccacactcccgcgagagaagggactgagaacaacttctcaaactattctctctcgaaatcgctcccttcctcgaaaattccatctctgagactcggatgaggtccccaccccctccacccttgtcccgtgaccgtcgcccgctcagcctcccagccgagtccgcggggcctggggcgcccaccccgcccacccaagggaccgcgcaggggtgaactcccccgcgccccacctgcgccttccagacctcgggcgccccggcgttgcctcgagagctccctgcgcggccgccgcggcacggaccagctcccactcccttacactgggcgccgctgcgctcgccgggggccggtcccgaggttcccaaggcctcgcgcgcgcgcttgccgtggcaaccaagacgttccacgacgcgcgctctcgaacgcttcgcgtcacgcggccgcgcggccccgcccgtcggcctcgctcccgccacagagcccgcagcacgccgccgccgcagcctaggtcacgtgagtacccacgcgcgcgtcttgccagcggattcatcaccggcctgctcagactaggttctgcccactctgaccttctaaatggtacgtgggaggacgtccgtccccttcggacccaagagtcaccgtaacactctagaaggggagaaaaggagcgagggcggcaggcgacagagaacctcgcgagtcagcggccccgcgcagacccccccaggcacggtcccctgcggccacgtcggctgctcggcgcctgcgcaatctctttctctccagcgaaaccgaggcctccggagagcctagtagagagtgtgggcagtgagcgcttgtagccgctagagggagcgctgggcacagtgcacgagagacaataaaggctgatt

SEQ ID NO: 334751 - DNA, 1346 bp, Homo sapiens
  chr13:37005451-37006797
  hyper
cgattatttcacctggcttgtcagtcacctatgcaggcgtctgagcccccgggtttccaggagccccccgtataaggaccccagggactcctctccccacgcggccgggccgcccgcccggcccccagcccggagagctgccaccgaccccctcaacgtcccaagccccagctctgtcgcccgcgttccttcctcttcctgggccacaatcttggctttcccgggccggcttcacgcagttgcgcaggagcccgcgggggaagacctctcgtggggacctcgagcacgacgtgcgaccctaaatccccacatctcctctgccgcctcgcaggccacatgcaccgggagccgggcggggcaggcgcggcccgcaaggacccccgcgatggagacgcaacactgccgcgactgcacttggggcagccccgccgcgtcccagccgcctcccggcaggaagcgtaggtgtgtgagccgacccggagcgagccgcgccctcgggccagcgtgggcagggcgccgcagcctgcgcagccccgaggaccccgcgtcgctctcccgagccagggttctcaggagcgggccgcgcaggagacgttagagggggttgttagcggctgttgggagaacgggtcacggaaacagtcccttccaaagccggggccatcgtggggtgggcgagtccgccctcccaggccgggggcgcggaccagaggggacgtgtgcagacggccgcggtcagccccacctcgcccgggcggagacgcacagctggagctggagggccgtcgcccgttgggccctcaggggcctgaacgcccaggggtcgcggcgagtccacccggagcgagtcaggtgagcaggtcgccatggcgatgcggccccggagagcgcacgcctgccgcggtcggcatggaaacgctcccgctaggtccgggggcgccgctgattggccgattcaacagacgcgggtgggcagctcagccgcatcgctaagcccggccgcctcccaggctggaatccctcgacacttggtccttcccgccccgcccttccgtgccctgcccttccctgcccttccccgccctgccccgcccggcccggcccggccctgcccaaccctgccccgccctgccccgcccagccggccacctcttaaccgcgatcctccagtgcacttgccagttgttccggacacatagaaagataacgacgggaagagcggggcccgctttggggtccaggcaggttttggggcctcctgtctggtgggaggaggccgcagcgcagcaccctgctcgtcacttgggatggagaccggctttcccgcaatcatgtaccctggatct

SEQ ID NO: 334752 - DNA, 786 bp, Homo sapiens
  chr13:38443276-38444062
  hyper
cctactttaagtgccggagagctaaggcctcacttatatgcacccagatgcccccgagatctccattttccccaaatgcataaaaggctaaaaacggccacattccccagcaccacggcgtggctgcagctcctttgtttaccatataagtcacaccgggggttcactcctcgccctctcccctgctttaaagccgagtgcggcggaagactgaggagcacccccaaactcctgctcagcccgagtcaagcaccgaaagcttcacaggtttttttcctgagccttgaagagaaaccacatagccagaaccttttgaactcctaaccccgcagggatgtccgcctcccagaagagagccggcttcccaggcagcttaggaaacttaaccgagatcccagaaagaaggcgaggtgtagctccggtcgaacggagccccgaggcgacatcctctttacctgcaaagttgcaatcttcgggctgaagtgatgggatccgaggactgacggcgcgggtgccgtgcggggtgagagcacgcccggcaaattccaatggaattcccttagtcgctgctgagttttggagcattccaaggaaaacgatcgaagctggagcccacgcagctggcaccgaactgggcggagtgaggatgctctgaaagcgaagccatgggaggcgggggaggggcggcccgggagggggaggtaaccgccaggggaggagaacctctcccacccccgcctgcacagatccctctggataaagttaagagttcccacggctgacagc

SEQ ID NO: 334753 - DNA, 854 bp, Homo sapiens
  chr13:39261351-39262205
  hyper
cggctacaggaggaccccgcgggcaacgcgcggagttcctggcacttcccggcggtgtctcttgttgtctgcccggggaccgacttcgcatgctctcaggctgacctgtccaagcccgaacaccgggaccatgcactcagccgggactcccgggttatcctcgcgccggacaggcaactccaccagctttcaaccaggaccgccaccgccgccccggctgctgctgctgctgctgcttctcctgtcactggtaagccgcgtcccggcacagcccgctgccttcggcagggcgttgctgtcccctggtctcgcgggggctgcaggggtccctgctgaggaggccatagtgctggcgaaccgcggactccgggtgcctttcggccgtgaagtctggctggatcccctgcatgacctggtgttgcaggtgcagcccggggaccgctgcgcggtttcggtactagacaacgacgcactggcccagcgaccgggccgcctgagtcccaagcgcttcccgtgcgactttggccctggcgaggtgcgctactctcacctgggcgcgcgcagcccgtctcgggaccgcgtccggctgcagctgcgctatgacgcgcccggaggggcagtagtgctaccactggtactggaggtggaggtggtcttcacccagctggaggttgtgactcggaacttgcctctggtcgtggaagagctgctggggaccagcaatgccctggacgcgcggagcctggagttcgccttccagcccgagacagaggagtgccgcgtgggcatcctgtccggcttgggcgcgctgcctcgctatggagaactcctccactacccgcaggtccctggag

SEQ ID NO: 334754 - DNA, 73 bp, Homo sapiens
  chr13:39610527-39610600
  hyper
cgtttcagtcaagggtcgtaaaggtatgcagctgacgaaagaataattgcccggaaggccgaaggaaagcacc

SEQ ID NO: 334755 - DNA, 331 bp, Homo sapiens
  chr13:39610817-39611148
  hyper
ccaattcctaagaacgtgactttaaacttaatgccacacttaccatcaggacacgaattttgcatggccaacgcaacaaatatactctaccttatgcttagatttgaaaaccccatcataataactaccataaaagaaactttctgcgtattacctctcgttttcagtcactcttgtgttactgaaagatgaggcaataaactcaaaaatattaaaccccttacccaaaaagtacagagctattacggatttgtaaagccggctttggaaccgagggctttacaaatgtaattcccacgacaccgtgctgagtctcaaatttggcgttaac

SEQ ID NO: 334756 - DNA, 199 bp, Homo sapiens
  chr13:41364049-41364248
  hyper
cggggctccgcgcctcaggggcgccagtgctgggcagcatggagccgcttgtgaatggagacttgctggctgcccaggagtgggcggctgggcaggggcggtgaacgtttagggtccggccaagaaagttggaagtcgtctccctgacctgttccttgcgaggcccgggaggagacgcgcctggccggtccttggcggc

SEQ ID NO: 334757 - DNA, 741 bp, Homo sapiens
  chr13:42032017-42032758
  hyper
cggtcttcccgcgcgggcggctgcagcctcctttccggcccgggctggcccccatgtcccaccttccctccaccaccagctccgcgcgcgcccggggttggggggagcggcggggacaggtaaccggcagcgcctggggaggaatctggccgcgccaagtcgctgggtgaccctgggcctggcgaaggctcagttttcttgtctgtaaaacggacttggtaatagaacgcacttcgggggtggtggagaagattacaaggtaacagcgactgcgtggctgtcacttggcagaggcgccaagtgtcagttatcttcgggaaccgtggcggcccctcctggccctgggaggtggtcccgctgcccccctgacttccgtgcactgagcccctggccctgcccgcagccccggccctggactcggcggccgcggaggacctgtcggacgcgctgtgcgagtttgacgcggtgctggccgacttcgcgtcgcccttccacgagcgccacttccactacgaggagcacctggagcgcatgaagcggcgcagcagcgccagtgtcagcgacagcagcggcttcagcgactcggagagtaagtgcggcccccgctaggatggcgccgggatctcccagctcccaggacctgccccgcgaaggctgcggcctcagttttcttatcagtaaactgaggaatggtttcctgaagctcaacgcagtaggccgagtggtggcggggcccctgac

SEQ ID NO: 334758 - DNA, 588 bp, Homo sapiens
  chr13:43566054-43566642
  hyper
gagtgagtatgtttggggcccgggctcccgccccgaagccaggttgttaaaatactcaccgcctctggcccgcgtgcacgacgctctcccgcgaagggcccttaggggctgcctccaaaccctctctctggtcttccacggggctcagctccccttgccgcccagaagggtcctggggatcccgggtcgggcgggaggcaggggaggcgccgagcccggagttcaccactctattgcgggtgttcatggttcacagcccgcgggtcccgggccgccgtcgctgcgggagggatgcggctgggacgcttagcgagtctcaagatgggattccaaagtgcagaggcagcggttttaacagctgagtttcggtttctcagaatcagcagcagactgcgcccgccccagagaacttccccacgtattctccactgaggccccgtccgaccttatcgcgggttaacagcccaggatgttgacttgagctggcttggtcggctacaggtgagacggtttaaagtctcacaatcaccttagaggttaatcagaataactgggatcagccacggacacctggtgagcgattagccc

SEQ ID NO: 334759 - DNA, 1805 bp, Homo sapiens
  chr13:44359835-44361640
  hyper
cgaccccactttccccatgtgctcgccgcgggatgacaaccacaacactccagaaccaccccccttccgaaagagggcggggttacgccttcagccaatcaggacccgcgagccccgggtgtccaacctatggggtggctgtggccgtgcagggggaggacgtggggtggtctgggaggggccgcgtccgtgggaggctcgcacgtgtcgggtccggagaggcggggaggcggccggcgtccagcggccgaggcgcgggctctgcaccctggcagcggccgagtccggctgccccagtgcctcctttacctcgcgttgggccaggcagggcgcgctcccgccgacgaagacctgtccaaggtgtccgagctccccgcgagaggggacagtcacgaataacaacagtacccagcgcagactaggcggggaggaaagtttccggcccgcagcagagcggagtccgccaaggctggaggaaaagggatgcagagcgggagggtgaaaacctgaaagaagagggcagcgggaacactgtgtgggcaggaacgggtcccgggggcgacgcccgcagggggagacgggtgcggggtgcgctgtccaaggtgcaggggaggtgactggcgcgcggcgggcgcggagcccggagctgacactggctggcgggcggaggggagagcggggaacagctgtctggggcgctgggcacccccgggcgcgtaaaagtgagggagcttgagacggggcacggcggggaagggcgtgggggctgcaccgaagcccccacgcgtccacgcacccctcctcaccagcctcacctctagctccactcccctcccccctcgcccactcccctctcagtctagatccaggtgccgtggcgggggtgagaccagaggaccccggctcggagcccggacgccccagggaggctgcgggccccggagctgcttacctggggccgccgtatggggagcggaggcaacccgctgcgcggagtggggcgccgggcgcggcgcggctcctcctagcctcggcgtcctcctcctcctttgcttctcccggactctgtcccgggcacggagctgggagacgcggccgggctgcagtcgccgttccctctgctgccgccgccgctgcagcagacagaggacgccccgtggcggctggaagcctgtgtgagtagcggcgcccgggagagcggggatctgctgaggggcgctggagactccgcggctggaggcgcgcgggcgtgcgcacgcgcgcctgcgagtgtgagtgtatgggtgcgcgcgcgcccacggggtgggggagtcgcgaggggagggggagagaggccgagagatgctcgtagggaccgaggcaaaattctacgaccccggaaatccgtaaacgcggggaaggaggatcgaacgcgtgtctcgcttggagaagctgcccacggggcggcagcagaggaggaggggaagtcagcgaggcgcgctagggctccggatcccagcccggcagagccgagcggagcgcgcagccaccgatgcagcagaggcggcgcccgcagcccacggtcgcgctgccccctctcgggaggggccgaggccgctcgctcccgccaccgccgccgcggtcgggactgctctactgggagcgggggaaccgagagagggaccgcacggttgctacggcgaccttggaggggccgggcccgctgaagggccaagagaagaacccgggcgcacgtggccgactccaggctggagcgggcgtgttacaggattgtgggcttggggtagacggtggaattgggccgc

SEQ ID NO: 334760 - DNA, 284 bp, Homo sapiens
  chr13:44544261-44544545
  hyper
cgtcattggccgcgctgcaggtgggcggacacggcgagcggctgacgcagtgtcgcgaggtggtgctcaccacatccaaggccatcccggtgcaggtggatggcgagccctgcaagcttgcagcctcacgcatccgcattgccctgcgcaaccaggccaccatggtgcagaaggccaagcggcggagcgccgcccccctgcacagcgaccagcagccggtgccagagcagttgcgcatccaggtgagacgcgtcagcatgcacgactatgaggccctgcactac

SEQ ID NO: 334761 - DNA, 650 bp, Homo sapiens; identical to SEQ ID NO: 236996
  chr13:44947726-44948376
  hyper

SEQ ID NO: 334762 - DNA, 510 bp, Homo sapiens
  chr13:45149906-45150416
  hyper
cgcctggcgcaagaggctgtgcctgcagctgagcctgcgaaaggaggttcaggctttgtggaggcggaggctgtggtcccgacgtagaagatgctgcagggggcggcggctgaagcagcgacggaggcggaaaatcctcggaagatgtggcattactaccgacgccggtacctgctgcattgagagcagaggcgctgccactaccgctgccccttcgagggaacattgccgggtgcgccatcttcctagcgctaatgtctgcagcggcggcggccgcggcggtggactcaggcggctggtgcattgtgttgggtaccgggggcgcggaggagacgagtgcaatttccttctgcaccgtaatctttgtattggagacgccggagaggaaaacgggacctgacgctccgcctggcgcgattcctccttctcctcctcctcagccaaaggcgccggtcgctcctgccttcgagagcgagcttcggaaaggaggatgaacgagggtgaacaggg

SEQ ID NO: 334763 - DNA, 1054 bp, Homo sapiens
  chr13:45491763-45492817
  hyper
tgtatttcggcatgcgaccgcttggttcccccgctttccttcacctctgacctaatctctcacttcaaaaactgacttcaagctgttgccagatacgtcccttccgccgcctgccgcaggtggctagggtctgagcacacttgaacctcacacccgccccaggggtagctccttggttcccttcagccccgatgtgtccctcgtgctttgaaatggaattacagttttggttaaaaacatgccttttccgagttaggaagaatctaaatcgactgaacgccagtctaaaatttcggcgttcccacaccgggagtcgaacccgggccgcctgggtgaaaaccaggaatcctaaccgctagaccatgtgggagacggcaatagcgactccaagcctagacaaattgagtcttctcggtcggcttccgcccactccatcgcgttcatccgtaggcgtcaaacctgctcctgcgcctgcgcggagtctgcagcggtttaaaccgttcaggttcgcattctactgtttctctccttgcaggggcccttgaatctttcttcaatctactctcgcgtctttcgtgatctcatccagtctcctggtgctaggtaccatgtcgacaccaatgtagacactagattggatgagtcattgttcacaattcctcacaaaactcctgcaaagtccaaaagaactggggtttgaatgttagaggctggtgaagaagtgaggaccacggggcgtcataacaccgcgcagtggaggccacgctgcactggccggtgtccgccgacagggtgtgtgccacagacgcgcagtgccttgcccgaatctgtccctcccctcagcgctggtccaggctggccacaggcaccaccccgtccctgaaagtggatcttttcctctgaaaaaacaggaatgagaactgcccggaagcctggaacattccaggttctgatgactcagcggctgaaggcaggatttgtgtcaccgaaagcagccagagtggcggtctgtaaatgtagcttagaaaagtggagaaagtctcttactgcaggc

SEQ ID NO: 334764 - DNA, 246 bp, Homo sapiens
  chr13:46425375-46425621
  hyper
cgtcggggaaagacatcagaccatcaatccagcttttcctgccagctggggaaacaacactcggtcactaacagcacccaatcacctagagagcgagagtgagccgaggcaaacacgccgggttccagacaccgtcccagcccccgagacccgggtttgcaaagggctgcacacgttcgccggagggtcgctgccgcctccgagaaaggacttgaacctgagcccggtgaaggtaaaatgacacag

SEQ ID NO: 334765 - DNA, 866 bp, Homo sapiens
  chr13:46960952-46961818
  hyper
cgccctgcgtaaaagtgtcctgaggtcccgcttctgcgcccttcccggcccaagccgaacacagggtcaacctcactctacaaagtcaaccggatagaaatccgccaccccgcgaggagccccttcctactgtctccaaggggtccccgacactgctctgagcgaccctaagatacctgggtgtctctgctgggcacaaacctctctggcgccacttccaccatccaacctctcccgcggccctcccttccctttctccaaccaccctctccaccccgcgccgctcccatctcgcccccggccccgccagcctcacccagccaaacccgagcggtggaacgctgcgctgggtaaacgccgcgcgtcgggtcctccctcgcgcggctccgggcagcgttccgtggccaccgcgctcccggtaacagcagaaaggggagggaggagagctaccgaggaggggacagcgacgccccgacgccgccacgccccccgcctcccacacgggggccaccgtagctctctagaagctcctcagggaagcaaagcgccgttcccgccgcaggcaccgagacgtcgcccagatggaagaaactctggagatgcgcgctcctacaccggtgccgcggcgcccgggcccagcaccacgcacctatgcgcgcctctgccggtcctcctagaaatcccgccctgcctacccgcggcgcgagacgcaacgacgctttcaggggtcaaagacctggcagaaatgacttcccaaccccagatgcccccagcagcagtatttagcagtcatacaattgcctgaaatgaagaatgagtaatctggatgagtcggccctgaaatcgacctgcaacttacccggaac

SEQ ID NO: 334766 - DNA, 406 bp, Homo sapiens
  chr13:50070360-50070766
  hyper
cgccggggcggcgctggacgaacttggctcaccactcgcgtgcctgttggtgggggagggggccagaggacagggcgcggcccaggccagttccacaggtggctctgactgcccatggtttcgcgcgagtggtgggcacgcttcggtttacctcccccgcgggtgacagcccagtgcttccaccacaaccgatgtcaactctcctagcgcccctccgctcaccggtaaaccaggacagtggaggggcgccctgatgcggtgaggcagggggcggccctgagggaagagctgggtctcacgttcacggaggacgtgactggaacccgtctccccttctccagtcgttccagtcctccccggccctctacttgagtgggtgggtcttctgatgggttcctgcccttgc

SEQ ID NO: 334767 - DNA, 139 bp, Homo sapiens
  chr13:50265737-50265876
  hyper
cgaggattccgtgcccgcctcgcaccctggccagcctgctgagtccggtggttttgccaggtgccgcccatggaggttccgtagaaggaacgtgctcaccaacttgcgcaaccgcctcgaccaaacctgttcccaaacc

SEQ ID NO: 334768 - DNA, 351 bp, Homo sapiens
  chr13:50701609-50701960
  hyper
cgcgcttttcgcccctactttgttcttgcgcagtcttcccagctgcggagaggagggagcgaaagcaaaacgaaagcacccggggcgcatcagttgcaatagcttccctgagcgcggccgtgggaggccaagatctgaggtcgcgaggcgacggtgggggcccgagctgcgcagaaactgggtgggggcggtccctggagggcgcccgggagctgctagaagttgtccggagcccctcaacccccttggaaaagcgaacgcggatgttaatataccaactccgcagggaacttttggcccgggtcttgagctgaaattccagactgaatgggaccgtgctgaaagttcgac

SEQ ID NO: 334769 - DNA, 915 bp, Homo sapiens
  chr13:50704210-50705125
  hyper
cgcggctggatgggcgtggggaatgttgccagtgttcggtcccgactcaggggagaaacggggtgggggtgtggggatcccggaaagggccggaaaagccgggagcaccgggaggtgtgaggccagagtttctgctactgggggctcttccagggaagacgctggcgggaataggatggggctggcagctggggagcctcgcggtggctattgcacgtctcggcccccctggacagggttatgtcaggagagcgccctggcaccgagctctggccgctggataagatactccctcgccggctccctccgtgagcggggctgggcgggtgcggaggggcgggcggtgcgcctcgccgagcccggggcgctgaggtcggcaagtcgtcttcggaactggcggcggcgcttctccagtcgacgtggaaaaaaaaatcgtctcaaatagcacccctcggtctgcagccctttaacactggtaaagtagataacaaggaactctgctgaacgagggaaactcagtttagaacgtcccagagtttccaagtttgtcaagcgactgggaatcttggtcgccgcgtggagagctgcgcccatttccccttccagaagaaaactgaaggcgtattcctccaaaggaaggctgcagtcaggcgccacacagaacacaggcagtcctctccggccgatctcgggctcgcctctcccagggccgtagggagcatcttttctgagcagccccgggagggcagctccgggcgctctccgcgctgggccctgccgcggccggtgcgttacatcaggaaacgcttggtccggttttctgtctgctagtcaaaacaattggctgaatctcgaaataacttttttgatagtccggaaaagaaacatgacaaatagactcaccatcaggcttgc

SEQ ID NO: 334770 - DNA, 530 bp, Homo sapiens
  chr13:52979986-52980516
  hyper
taccccttaaaagcgtcccctggggccgaggcgggtgtggggaggggccgccaccgtccacctgcgccttcaggctgcggtgaggtggcagagtccggaggcatttcccgaccccagaggagcctccaagagtctcgcggcacgggcgcgaacaccaggatgcggagggcgcttcttacctttcgagactgacgggcagcaaccccaggccgtccgggcgcgtggcgaggcggacgggaaggctcaggggcggcgaggtagagcgccaagcatcccgcgtcccagactgcacgccctgaccccgcggcgttcggctcccacagccccgcggggcccgcccccgacggcgtggggagggcgggcgccgggagggcggggggcacacgggaccgggcgtggtcggttcccgccccttctgggcagcgcatcctttcctgccggtccccagctcgccagctgctggacaggaaacaggcaggaaacgcgcggccagccaaggtcctgcgggagggggtgcggccccggcagac

SEQ ID NO: 334771 - DNA, 992 bp, Homo sapiens; identical to SEQ ID NO: 237042
  chr13:53312973-53313965
  hyper

SEQ ID NO: 334772 - DNA, 994 bp, Homo sapiens
  chr13:53420038-53421032
  hyper
cgaccgcaggcggaggcgcgtccgccgcggggctgccaaagggcgctttgccggtgccagggaaggtgagcacgtcgaacatgttgggcctgggcccggctccccgggcggcctcctccggggagccgggagccgaggctccgccgcccgccgccccgggccgctcttcccggagggccccccctttgcgcacctccttcttgcggcggttgcaggtggtggcgatggcgatgatggcggccagcagcagcgtgcagctcccggccagcacgatgatgacgatcagcggcgtgtcccattgcagcaccgacccggacaccccgagccgagagccaggcgggcgggaacgctccgggcttcctgcactggcaggcgcagccggcccacgcccgccccctgctgttaccacgaagctgacagttgcggtggtggtgagcgggggacggccgccgtcggatatgaccaggagcgccctgaacacgcgaccgggtggctcctgcgagaggtcgccggtgagcagtatctcccccgtgcggcggccgatggcgaaggcttcgcgcggctcctgctgctgcagctcgaacgccagctccccgttggctccctcgtctgcatcccgggcctgcacacgggccacaaccgtgtcctttgcggtgcgcccaggcaccgccacttctagggagccattggctggcgccgggtgcaccaggactggcgcatggtcgttctggtccagcacgcgcacttgcactagggcgctgctggaaagctgaggggagccgccgtcgctagcttggatgcgaacgtcgagttggcgcagcgtctcatagtcgaagctgcgcagcgcgtagatggctccggtagctgggtccaccgagacataagtggacacggcgcccccggcgcggcccacctcggcctccagcagccggtaggtgacctggccgttgcggcccaggtcccggtcgcgggcggccaccgtggccaggtaggc

SEQ ID NO: 334773 - DNA, 669 bp, Homo sapiens
  chr13:53421038-53421707
  hyper
cgggttgttctcgcgcaccgacacctcatagaccggccgcgtgaagagcggcgcgttgtcgttctcgtcgcccacacgcaccgtgtagggccgcactgtgcgcagcgggggcgcgccgcgatcctcggccaccagcgtcaagttgtactcggcgatgcgttcgcggtccagcgacgccgcggtcaccaccaggtagctgcccgcgtaggccggctgcagccggaagtgctcgtgcccatagagggcgcagcgcacttgcccgttggcgcccgagtccctgtccgaggtgctgaccagggccaccaggctctcgcgcgccgccccctccggcaccagcgaagtggcaccagcctccggcgtcccggctcccgccggcgagctagcgtccgctcccccgagtgcagcggcggcggcggcagcggcgaagggtgaggttgccggcgcgcctggggcggccagcggggtgatggcgatgtcgggtgcgttgtcattgacgtctcggatgcgcacgatgaccttgcaggtggcagcgcggggcccgggtccgcggtcctgcgcccgcacgtccagctcgtaggtgtcctgacgctcgtagtccacgggcccggccagggtgaggcggcctgatcgcgggtcaagccgaaagaggcggcgcgcctccggcggggt

SEQ ID NO: 334774 - DNA, 708 bp, Homo sapiens
  chr13:53422554-53423262
  hyper
cgcctcacaggactcatgcctccagcctcaagtgcgatccgaaaggctaaggaagtcttctctggtttccaggtcgggcgtcagtctcaggctctcggaatcacgctctttgcgagccctgtgcgggagaagtctgcgggtagcagctccgagcctccagcgggctctgaggacgcgcggacccgccctcactctgcgcctctccgtctcttacagaagctgcgccgcctcgcgccgcctttgcctttatagccgccgatatgctaatcacccgagccgggtagccaatggccgcctccccctcgcgtcgcccctccgcctgcctctgacaatccctttaatgtggaaaggcttagaggggaaaacaagaaaggaaaattagggaatctttcttttgtttaactccttttgctttttcccccttttcttgtcagcaccctgcatgtagaggagttggcacagggctccaggagtaaaaggagcggatggttttgttaattgtcgcctgcctccctccgtgccgcggctagaactaagtgcgaacacgctggggtttcaccccagtggctcctgattccgccttcccccagcccctgccaacacacacactctgcattttgcacctctgacgcttccaaacccttgcagccccctacccacagacttgctctgctgaatgaggctctgctttccttctctcctagctac

SEQ ID NO: 334775 - DNA, 923 bp, Homo sapiens
  chr13:53424677-53425600
  hyper
cgcagccctttcttccgctgtcttccatctcccaagtgcgatttagtatgtagccctcccaccgtccccgcccaagagatattccttggggggtacacgcagtcgaaggaactttctattttccttccgagccccgcaacactcccaccccaacctggggctggctggtgacctttagcgcccctaggctaacgtcatctctcctcacccctcttcccccggagacccagacgggaacaggttcagaacttggctggtggacagcggcctcagcgcttccgctggcgtacccagggcaaggtcaggcccgcctggcgctgctgctgccgggcggaggacccggaaggtggggaaagtgggtggaaatggggccggagtcccaaaggaagggatttcagcggtttccgcgagcacagcccggccgcgaatggctgggacccggacctcgcgccagcgccccctgcgcatctgcaccccgcagttctgggctggactcgggagccccgccacgcgctaagtttgggtttttcgcttggccagagattcggaactacttgcaatttctactcaaagtgcttccgcgtcagcatgctcattctcaaggctgaaataaaccaaggcgtgcttgaaagtgggaaaaggaaaggggagtaggggcaggcaaaagccaggaggcgggaggaggggtgtagggtggctggtagcaggtctaaagtgttttttccgcggccaggccctcgtcgatcggaagtagccacgacggcggcggcgccgggaggctgagagctgggagccggggagcccgggaagggagccgcgagcctccagccgccaccggcgcgcacaggtctttccgtgccggcggtggaggtgtgaaggcacgcgaacaccgtgagctccgggccggcagcggacagccactc

SEQ ID NO: 334776 - DNA, 564 bp, Homo sapiens; identical to SEQ ID NO: 237053
  chr13:58206763-58207327
  hyper

SEQ ID NO: 334777 - DNA, 170 bp, Homo sapiens
  chr13:58207575-58207745
  hyper
agaccggcctaatccgtgtgaagggcaatctggactatgaggaaaacgggatgctggagattgacgtgcaggcccgagacctggggcctaaccctatcccagcccactgcaaagtcacggtcaagctcatcgaccgcaacgacaatgcgccgtccatcggtttcgtctcc

SEQ ID NO: 334778 - DNA, 137 bp, Homo sapiens
  chr13:60738356-60738493
  hyper
accatttgagcagcgctgggatataaaaccatctgctagccctctccttgcacgtctggggctggaaaaagtagttctgggactgggtacggtgctggaaggggtactaggcaggatgaaacgacggggcccacgac

SEQ ID NO: 334779 - DNA, 1884 bp, Homo sapiens
  chr13:67803750-67805634
  hyper
cgcgattagttccggcagagtgatgcaggtagggatgcagatacagccgagtaggtgagctctgccccaaccgtctacccaattacaagcatctttcgcctacactgaggacacatctaaacacagaatttacaattgtgcatgcgaaactttacacttacgttagttgcctcaacctttcccctttcccagtatgctgcagttaggaatgatttgttccaacacatagaaagccatgcatctggtagcaccagtttggggagaaatcagaagcagcaaaatgtttcctccttgtaaaatgtgttgcttcgggctggcaaattagcaactccagagaacaaattcacggatttgtcgttagtcattctctccacatttcgtctctcttacccactgggtctgggttcttctgggcatttagcacacacaacacatagttgcacttcttcagctcagggatattttccacagcagcatgcataccatttccatccgatgccaatactgcttaagtctctaacttcttgtaggaaacgtcagagttgcggtgatgatgattctctgacagctatccgggtgacagttgcccgaaaaattcctaatcggttatctcttgcgtgcttcagagactctgaggcgctcctttccgtctcgcgtgctctccctctctcccttcccctctgcccctctctccttctccctctcctctctctgaactgaatttcttgatataactctcaataagcccagagggagggcgtgactgcccaggccccgcccccgggctctgattggcctgcatcttgcggcgcgggcggccgcagcccggcgcgagggagggagcgcggaacaaggcgctgactgtctcccagcctcccctcctccgcgccccctcggcagcagcgaaaacccggaaatctgatcctggccccaggagagccgggttccatgaggtgcactgagcatgctctgcagggtccggcgtgggagggacgcgctggcgctccccaggcccgggcggaagcggcgctcgcaggcgctgaaagcgagcgaccctctgagcccgggtggtccggcgggcaagggcggcgcgggagacccgcagggcgcgggcgcggatccggggaaccagggccaccgctgcgggcggatgggggtcaccgaggcggctcgtctccaggcgcacacttcgcacatctctttgctaagtgaaggggccaaaatgcacagatgggggagtctacccaggaacagaggcgcgagacgtatagccacccctgggttgggagcacgagccagcagatccccggagcgcgttaaacggacaacatgcccggtgctgcaaatagaggcttttgctggcagggacattggaaagaagggcggagagggagtacagcgaaaggtggggaccgcagaatttggaatctctgcggagaccggaaagaaaattaatcggagcacttcctacatgcagagccacggaaactgccttggaaagagaaagtggcagcgtctgggtcccctcggtcagcccgggccagtcggctgcgcgtgcgaagtctcctctagcggagcgggaccggccgcggcggtggatcgtggcggtccctgcacttctgctccagccgcgcctggaaacctgagcccggactcgcggctgctgcaaaacccgcttccagcccacctcactgcgaactttgcttccgaggggctggaaggagtcccaggcagctgtttcccaagctgtggaacacttcctttcccctaggcactttctgctgattccaactttctttcctgtgattttcgtcttttcccgtgcatttcatttctccgactccagctctgtactaaatcctcacaagtttctcgttttcatac

SEQ ID NO: 334780 - DNA, 695 bp, Homo sapiens
  chr13:72438297-72438992
  hyper
cgcgcgcgcgcacatacacacacacacacacacacacacacacacacacaacatttaccccaaaatagtcgaaggttcaaagcccaaacacacccaagtcccatggaaggaagaatacctaaacacggaaaagaatttctggctaggtcaggataggacatttgctggactggaattcgaatctttttcgtttcacagccttcccgggcactaacagagaagaagtctttctccatggaaaaaagagctagcgctttttcaacccaatgtccttctggtctccttgctacacttcctttccacctaagtttccctatctctgcgggagcacacactaactccgctccttctctcaatcttcaaacttatttggagggtaccgaagtttctgcgcaaattttgcgcgcagttcccacgtgcccgcttcaggtcttcaactttccctattttctttctcccggaatctcactctgaacttttgcctctgcgcttccttgcagagaaccgtggggacaaagcggcgctgtgaaagggggtggaatgatcatctctaccccgaaactgacaagttgccccactcccgccccctcttggtagatcctcccccactgagcgttcattagcataaaactggtctggctggggaccggtcccgccgcctcctccgtgcgcgcgctttgctgggctggggaagc

SEQ ID NO: 334781 - DNA, 1460 bp, Homo sapiens
  chr13:74707123-74708583
  hyper
cggctctgcgggttcccggcccgggtggacgtacaaagttgccccttgtcaactccggccaggtcccccgtaattgaaaataacagccaccggccagcccctggctacttgcatggaccaggcactgtagcaagtgacagttacacatcattacgaccagagacaataatgaatgtagcaccaggagcactattcatgccagcagtgtcatctccgccttaaccccttcccctccactctctccagcgcgcacacacagcccacacggtcccggtgcggagctattcatccaccccgctcgaggccggggggccaactacttccacgagccccccctcccccccaagttcagccctggggttttatttcacatccttggcaactgtcaggcaaacactgcaaccaacaattccactaggggtagaaaaacacttgcttaattcacgttacttgataacttcttctggaaaaaaaaaattaggggaggtggggaagaaacctccttctttcttctccacgaatccgaccgacgctacttgctttgcaacagcatcgcccttccccggccccctcccgcttcccagcactttccccctttaagaacacagaccaaccaaaatgatttaacttgagcagatgacagaaggaaaataaaacacgttaagagaatacggtctgatttgggatggcaaaaaaaaaaaaaaaagaggagggggttgtttattttgataagaaacggaatcggcacagacctgaacagaagctgcagagcaggagaaattgttttctttccctcacacagagtccccctctctctctccctttctctctctcacacgcgcgcgcgcacacacacacacacactcgcacacacacggcgtcacccgcgcacacgcacacgcagagcctctcagcggctctctgcagttctcaggaaatgaatggggggcaacccggggaactgttgtacttgcaaatgacttacccggatcacatgatgcgctaaatgtagggtgggccggtgggtggaggctgccgagttgcgagccccggtctagtgtggggagcctcgccaggcccgcatcgaattaccccggggcccagccgagggggttgcaggacgccgcttctcctccctcgcagcccgcagctcaggaaaccggagaggcgcttggggtggggtggggtggggtgctgtgagggggggggccgaaaacaagaaacccccaaacaaaagagctccgggtcctcctccccagaaacaaagccccgccgctgccggcgagccccggggtggggccgagggcgggggcggcggcggggaggggctcgctcagcaggcgctaagtcgctttattgccataaaatggggcccccgagccgctccgcccgaggattaggaggcgggctctgagtgtgatggttgaaatcccctgtgggaaactaacccctccccgctc

SEQ ID NO: 334782 - DNA, 100 bp, Homo sapiens
  chr13:76054897-76054997
  hyper
cgaagatgacgcgaccagccaaaccggttaaggatttgactgcgattgagaactagtgaggacctctaggaacccaaccttctgcgttcatacacgcgct

SEQ ID NO: 334783 - DNA, 1089 bp, Homo sapiens
  chr13:77459256-77460345
  hyper
cgggcaggagaaggactgggcgctggagtggcgagggggtctggggagctcactccctgcagaagacgtactcggtgtagctggtccagatcttgtcctcgctctggtcggtgctgctggcaaaggcgcaggtgcccgtggagctgcacgccaccatgtggaagcccgactcggacagcttgtcgaaggcctgctccaggaagttgaacttgaggtaatagcgcgaggtgtagcgctccgggggacggtcggggtcccggctttcgttcagggtgtccccaaacacctccttggccagcgacgtctttccgcaaacggtgatgcgcgccactcgccggaacttggcgtccgcctgcgcgtcccgcccgatggtgtaggagccgcggtagccgatggtgatgtagcccgagcgccggctgccgtccagcgactgggacggcgtgagcagcgggcccgccgcgcccccggacggactgcggctagccagctccagcgtgggcgacggcgccccggcagaggcgccctcctgctgttcgggctccgagtagccaagcggcagcagctcgtcacccagcgagccctccttgtgcaccccgcgccgcgagggcggcggccccgggccgggctgctggggcgccccgaggcggcgcacgagctctggcagctcgaagtactcggcctcgcgctgcagccggctgcgctcggggaagtagtcgggcagcacgagctgcaagtcccgcaggtaatccaggatgtagcggaagaggaagccgtcccggtccagaaagaagcggcctttgctgtcccgggccagctcctgcggctgctgctgcgtgaacatgcgccagagcagcgagtcgggcaccgacaccaccgtgcagcgccgggtcacgtacacctggccccccacgttcagctccacgatgtcggggaagagcggtggctccgcggaggacgacgaggagccactgccgcccccgccgccgcccccgttgggtaatccacgtgtgctgtccgccagagccatgacagagaggtggccgggccgggacagtggcaggaagccgcgctgcactcaggagctgcaac

SEQ ID NO: 334784 - DNA, 792 bp, Homo sapiens
  chr13:78271862-78272654
  hyper
gtggtggctgccgcggccggaggcgagggcccggtgctgatgcgaaccgccggctcggcctcagcccgcgcgtggtcggccccccaggccggggcgacagggaaggagccgtagcctccccgtggcccgaggagccggcgcggcggcgcgcactccccggcggccgcggcgccctcggggcccacgatgatggcggagcaggtgaaatgcgcctcggcaggggtcagctctggagcgggctccgggccggtggtgaacgcggagctggaggtgaagaagctgcaggagctggtgcgcaagctggagaagcagaacgagcagctgcggagtcgagcggccagcgcggccgccgccccgcacctgctgctgctgccgccgccgccgcccgccgcgccgccccccgctggcctgcagcctttgggtcctcggagccccccggccgccacggccaccgccgcggcctcagggggcctggggctcgggctggcgctgggcgcggggggcggtggcggcagcggtagtggcagcggcggtggctccagccccgcgttcccgggcaccttctgcctgcctagccccgcgccctccctgctttgcagcctggcgcagccacccgaggcgcccttcgtctacttcaagccggcagcaggcttcttcggcgcgggcggtggcgggccggagccggggggcgcggggacgccgccaggggcagctgcagcgccgccctcgccgccccccacgctgctggacgaggtggaattgctggatctggagagcgtagccgcctggcgg

SEQ ID NO: 334785 - DNA, 774 bp, Homo sapiens
  chr13:78493125-78493899
  hyper
cgcggaattaaggcacctagaggccaagggcttgtgtcaagctctgcattttgccccgcaggggaacctctataccccgcgattgaactcgaaagactcctcccggcggatgaaagccgctactccctggctggctgagctacagctcccgcagcgcgcccaggagtgcgccggagattcggaaacccgcagagacttctcaagtcagcaggaacttggaaaccgctgttccctccaaacggcttcaaacactcgcgctccttcctttacccaacctaattttaatttgccctctctataggcttaatttttatttttttaaaatcccaaactagtaagccaaaccgaagccccagaataaggttcaatcaatgattttaattcaacaccaagcccgaatgtttacctctcggatctgacaaaccagatgcagagcgacgaatggagaccaccttcccgggaggcggaacccagctgggttccagcctgctctgggagaggagcacgcctcccttgagctgcaggcgggtccggctctgacgaaacgctgcgagaatgccagacagtgtagcctccaccgtttgctcggggtctctgctgccatcagacaagtacttttattcattcatcccttcccatcaatcaccgccagactcctcccgcgccttccgaccccgctgcaacctttccccttgggcgatgcctggacagcatcagtagtagttgcccgagggaggggggcagtcctcgtccggggacaggtcccaaaaggct

SEQ ID NO: 334786 - DNA, 245 bp, Homo sapiens
  chr13:79160914-79161159
  hyper
cgaaaagccccagacagccactgcagtgccaagtgtgctgctcactagcgacccctctaggtcttagagagaagagagctcatgcagaagagtactcgggaccattgccgggacgagaagcccatcaggctgactgctccattagggagcatcgcaagctcggggtgcgaaagcttccccgccgccaaccagccagccctgccctgtgtagacgggtcgccagagcgcggcgcagggatcgagct

SEQ ID NO: 334787 - DNA, 1451 bp, Homo sapiens
  chr13:79169699-79171150
  hyper
tccagcccttggttcgccggagcaggatgctggtctcaacactagggctatgtcggcttctcaccgaaccgagattttcaatttcagctttgcgattcaggattccacttgaattccccaggacgaaagcctagcggccaggctgcatttcgccccgggtataaatccctgccggataaattcaaatctgtagcagggttttggtaatatgcatcttagcaacaaaacaaaaaccaacctcgtatgccttccagttctttttaaaacgtgtacggcagttgtgaaagttttgtggtgcttgagactgttgacttatgcaactggggagagggtttttttaaccgctttgagatattggtccatcccttttctctcagaacgtcctcaagggcacgtaagagttggaggtgacctccgggagcgcctaattttgagccgcggaacttcggcccacttctccgaggggaccaggcgcgcgccaatacgcatgtgcgggctctgagcgctcagagcgcgcctcttccttcccggctccccgcggtgcgcacccgctggccactctgcgcacgcgcgccgggtgccccggcctaaggccgttgacctcgggttctccccggcacagtcgaatccacgccagggccctcaggccggtagctgtcctgcagtccgagcggagctgcgacctcgggcagctggaagcctgtgggctgctgcttctccaggcaggcggcggagggatgcaggcaggatgagcggcggtcccttcgccgccacccggagaaccgcggctggtgcccttgaaggccctgggatgcctgggttgggtgggtgagtgaacgagaaccctgagtgagtgaggggagggcgggtcccctcctggcttcaaattcaacccaatcagctctgccgatggtttgaaactgcacacgccgacccacccgccccgaagtctgaaagttatgccctggagacctgcgagctgcggagtgcagctggagagggagctgccccacgaggaggcctccagaataactcccggagtcggaacagcgctgggctgctgaagtttgcagcctccggatccgcgccccgccctgcagatccaccggatttcggggagggaatcggggggctgcccgtcctcccgtaaagctgacttgacaacaattacgaaagtttttaattagctccttgttataattcattttatttccagaactctccgaccataaattattcaaagagtaagccaacccgagcggggcggccgcgcgccttccccacgcgcgccgggctggctctggccgctcagctcacccgatgccccgtgagccagccccgcgccagaagccgcggtggcaggaaggtttgatcaaacattaaataacgtaatgtttgcgacaaggcttatctcacaagtggaaaagaggacctcgcgagaattagaattc

SEQ ID NO: 334788 - DNA, 1783 bp, Homo sapiens
  chr13:79175610-79177393
  hyper
cgcaccacgttctttttgaggtccagtttctcggcgatggcggcgatcttctcggacgagggccggggctgcacggcgaagtaggcctcgagggagcgcttctcgggcgcggcgatggaagtccgcttgcgcttcttctcgccgccgttgaagagctcaggcttgttcattttctcgcgctgggcgccctcggcctcctcgagccacgcctgcaggatgggcttgagcgcgatcatgttgttgtgcgagagcgtgagcgactcgaacctgcagatggtgctctggctgagtgagcccacgcccgggatcttgaggttggccagcgccgagcccacgtcggcctgcgtcacgcccagcttgatgcgccgctgcttgaagcgctccgcgaacgcctcgagctcgcgcgggtccgtgtccgagtcgcagatggacgccaggcccgctgcgcccaccacggccgccgccgccgatgccgctgccacctgcccggccgccgccgccgccgctgccgctgccgcgccgtggtgcgccgccgccgccaccagcccggggtgcggcagcccggacggcatgttcatggcggccgccgccgcggggtgcgacaggtggcccaggctgtgcatatgcgggtgagggtgcgcggagccgcccaggagcccgccgcccgggccgccgccgccgccccccgggccgccaccgccgcctcccccggggccgccgcccgggccgccgccgccgcccgggccgccaccgccccccgggccgtcgtgggcgccgccgccgccggccgccgcgcccgcgccgcccgcgccggccatgagcgcgagcgacggcgaggagatgtggtccagcagatcgccgggttcgagcgcctggtggtggtggtggtggtggtggtggtgcgccagaggcaccgtggaagtggacgtgcacggcacgctgttcatcgtgtggtacgtggcgtccggcttgaaaggatggctcttgccctgggacacggcgatgtccacggccgccagcgcctcggcccgcgccagcagcgtctcgtccaggctggcgaagaggttgctctgcagctgcaggcgacacaaaccaaaccaaaaaaaccacaaaaccaaaagagcaaaacaaaacaacagaagaaacacacacacaggccggaaagcacagcatgcgaagggcaaacacaaagcaaccaaaataacaacgggtttgggggcagtggagagcgggaaagacggagagggggcacattgacgaccagggagggggcagacgagaagggatgggagcgtggagagggggacagaagtagggagaaagggggacacaagaacacattccggaaacgggcgtgggagacgaaaaagagggaaaagaagaaatggaaatgtaactcgcagctggggacccgtgtcacacacccgagcacgcacagagactgcctttctgaggcgtgaaattaacagagaaagtagagggaagtcgagagtcctggccccagcgctccctactccgatcgcaggcgcctgacgcggaggcagaggcagacaggaacacgacattaagggccgccggacaaaacgtgcctcgctgcgggactgctctacaccccctgcccgcagttccccgcaccgggacctgcacacaccagcccccgacatgcagcgtttcggagacggggaggggcgggcgcgcgggccggggccgcgggcgtggggcgcttaccggcggcgtgggcaggcaggcccgccggatggcctcggagctggagtgcagcgac

SEQ ID NO: 334789 - DNA, 218 bp, Homo sapiens
  chr13:84455524-84455742
  hyper
cgtgtaggtccccttctatctcattgcaggaacagatcttctctttgcaaacgtcccctgtaacgtttccagcggcaaaacaaagagacgtctccagcaacagaatccaaagcagcatttttaaagcgagcaattcatccccgatctcatcacaaagtaacagcgaccatcctgctcgccacagacacaattcaagttcatttagtgctccaatgtcc

SEQ ID NO: 334790 - DNA, 1589 bp, Homo sapiens
  chr13:88323381-88324970
  hyper
aggaggaaggcaggcgatcagcacagggctggaatcatctgttcctgaccaccagcaagcctggcactgccggggttatttccactcctccctttcccaatccgagaattgcacagtcccacgctcgaattacacacatggtccaagacttctctctcttcctacgaatgtgacatccaagggggccccggttgcgccgccctagcccagggacgccttcgccctcggctgccatctatcggccaccgagcgcccgcttcgccccgggcccatcatgtctgctgcagcttggctcgcaccagaggcgcgacaataaacaagtgcactggactgggccctgcacccgctccggagcagctgtctcagagacccggtgttgcttaccgcgttgccacctcctcggcgcccgggaggaagacgcaactttctcggagttttttttagagccaccgggctgccaggacaagccacaggcatagaacgacgcggttgctgcccgccccccccttcccccagaaaccccaaaggatgtcggtgatagagagttccaactaatgacgattgtgcgccgcatctggggaagggatacagaaaaaaaccctgcaaacaccgtgaggatgaaactgccaaagggatgcaagagcctctcaaatactaattaggggccgcggcggcggcgggctcggcgcggagacagcgtcggcgggatcccagcgcggtggtcgccgctgcgctggggggcggaggacagcgcaggagctgcagccgccgccttcgctggagcagccgaggggccggtgccacctttgctcgccccctcactaccatgtacagtgtgcgctgcaagaagaaggcgggagatgcatgcacacccccgcgacccgctccctctggctcgtcccccggcgtgcgccactgaccaggggggaatgtggtgaagacggcgaggaggagagccgaggggggaggggagggccggccggcgcgaacccaggccggagggtgcgaggagccagaggaggctggagggggcggcggccacagctgggtcggagaaagttgccccctatgcagatggcaactgtgagtacccctgtgggggggagggtgcagcgaaggctgccagggaccccgcgatcgcgccttaacacgtattggagcgagtgtgcgagtgatcatgagtgtgagcgggtgcgagcgctcggcggggctgaccgtcacgttggcggggccggcggggccaggcagtcttctccgcgtccccctcctcccgctccgtgcctcccctcccagcagctccccctccccgccccgcccggctccggctcccggcccctaccgcgaggcgcctctccagccggacctccgccgccccctcccgccgcctccctatcccgccgctgcagaacgccccccgctctccaccccccaaccctgctgcccgctccgactaccgcggagagcaccggggagagccttttggggagccccggaacccgcggtcgccaccgcggcggcggccccaggctggaggcgtccgggcgcctctttcctccagcctctgggactgcgctgctcgcagtctcctc

SEQ ID NO: 334791 - DNA, 930 bp, Homo sapiens
  chr13:92050674-92051604
  hyper
cggactgggagagcgaggtccgggtttccttctatttatttgcatcgatgtcgctccgagtcttcagcactgggccgcgtatgacagcatcttagtgggtgcggagcgggacagcgcgccgggggcgtggcaggggcgtggcctgtccgcggggcggggagtgcggggcggggcttccgcggagcgcagcgagcgggcacatcccaggttagctgctgcgagccgagccgggcggcggaggcggcggcggcggcggcagtggcggcagtggcggcagtggcggcagcggcagcagttgcagcagtggtggccagagcggatgcttgcgggctccctgcggctccactagttttcttcgccccgcccagccgcccactcttctcggctagggaagaagaccagagggtgctcagctggaaaactctggtgtctcagcttagggcctcctccgggaagagctaactgctcccaggtgaagccggtgcccgcgggcggtccgtacaccccgcagccggctcgcaccgctcgagagcctcggccgctgtgtcttccacgtctgcagctcagccagggcgcgcagggcgagtggggtccactggcgggtaaaggggaccaggacggcgaggatggacgcacagacctggcccgtgggctttcgctgcctcctccttctggccctggttgggtccgcccgcagcgagggcgtgcagacctgcgaagaagttcggaaacttttccagtggcggctgctgggagctgtcagggggctgccggattcgccgcgggcaggtaaggggcaatgagggggtctctggactggcggcgtccgagcccggccttcgctcccccaggctcccttggtggcactcgtgggaagatgacctttcgggccctgcagccgcgcagggtgaatcccggggaggcttccgg

SEQ ID NO: 334792 - DNA, 1320 bp, Homo sapiens
  chr13:93879790-93881110
  hyper
cggagctgcggagaggtccgccaggcgtacggtgccaagggattcagcctggcggacatcccctaccaggagatcgcaggtaagcgcgggcgcgctgcaggggcaggctgcagccctcggctgccgcacgtcccactggccgcccggcgtccccttccttccccctgttgctgagttggtgctcactttctgccaccgctatgggactccgcgtctccgtgttgggcggcggatgctcctgcggcttcttcggcgggggaaggtgtgcgtctccgccgcctcattgtgtgcacacgcgggagcaccctggctcccgcctcccgctgctctcgcgcccttctaccccttagttgatggctcaggcccggctggccagggagcccgggtcactccggggcggctgcaaggcgcagacggagagccgagccgggcgctcactccgcgttctggttcgggcaaacttggaagaactgcgaccgcagtttgcccagcgccacagtctgagtggcgccttctccactcccgcccttgcgccggcaggggcggtggagagacgcggagggctcccccagcccctctctcccctatccgtccttcgggcgacagagcgcccggcgctcgggccgggggcgggcaaggctgggagggaccctcgccggggacctggcctctggacgccggcgtttcaaggctggtttggggacttcacgggctgcctgtttcagatgtggggcgggctttcccgttagggttcctcagtgcttccccagttgctgttggccactcagggcccggggacaccctgccacccggtctggagccggcctcgtctgccagcgaacagccaactttagcgggtggctcagctggggattcgggtccgggttcgggggccccgtgtcccccgcatgcccggccactggcattgctccaccaagagcttgagagcgcccaccctttctctcggcgccagtgtgtgtagcacttggtctccgacaacttgcgcggcagtctgggtgcttgttttccggctcttagctccaaccgaatccgagcttctctggggctctgtgaatgaaacgtgtcggggagagataatcctttggctgctaaagaacagaactgagagaggccgagggaggccaggagatgctgcgagggcgcgggctgctcaaaccgggcagctgaagtccttagtgacctcagatcgtcaagtcaaaacgctgaatttccaccagcctctgtctgctttttgccaaataactggtggatggatgaaaagcattttgcagatatcttagaacatcacagtttcgatac

SEQ ID NO: 334793 - DNA, 807 bp, Homo sapiens
  chr13:95201113-95201920
  hyper
cgtctagacccgtggcttgtttaaacacccgctgctaggccccactgccagagctgcctatccagggccgagaatgtgcatttctaagtagttctcaggcggtgctgatgctgcggatctggggactgtactttgagaaccaccggtgcagaccctggccaacgttctttagtctgatgcgtcggggagctgtaaagctgccatccttcaccggtgggcaagtaacctggtggcgccaccccagggccagacccagggccggcctcggtgcgcctctagccagaaataaccagcactgggttccgctcaccggcaacgccaggtgggggccatctgaccactcaacagttttgctttttcttcaaattcggatacttagaaggaatgcgatgaaattgggatgaaggtgttttgctggccccgtggacagaccagacctcctcccatcggagcctcgggtctcacaccagccccccaggcggcgcgcggccccgtctcgccaccgcggcccgggtcgttcgcgtcttccggcgccgagggtgcctctgggtcccagcaccaggctccgtggcgcgcacgcgcggcagcttcttctagccccgccaggagacggcccagaagggctatgcggcgcggcctcgctcctgggggtggttaggaacgactgtttcatttcctccttcacccttcaaatctcagtttttgcttgggcttgaaggaatgggccagggtatcgtggacggagagtcttacaaaatttgagtttttgaggtcagaatttaaaagtagctgccgaaacccgggatc

SEQ ID NO: 334794 - DNA, 624 bp, Homo sapiens
  chr13:95201987-95202611
  hyper
tgtctcctgagtaaactatcactgagcgctttgcgtccaactggcttgcttgtcttttcctggtgatcatgtacagcatttcttccttgtcctgttaaacggtgtcgtcggaattcttccacctccctccttctacgctgccactgggcgctgcacacgcgccttactttcttagattgctctcggcgcgcgcagcccgcacggtccaggagctgggtccaggcccccgatggcggctcctcgggatgctggttccgtcctcccagggccggtccccgcgagatccgaagcagcggggtcgcctcggggagctcctgcccaggcctggtagccccttcccttcgatctgcccctgcctgtgactatccacattcgtcaccttgctccccgaaaagttccaggccccaggtgaggagccgtgtaggcccaatacgattggatgaaggagtgtacggggcaggaatcgtcagactggcctctggagaggagtttgcagcctctccgtgctccgggcccgggaaatgtccaccttaatcatcacctctttgcatggagcctgactggcaaataaatgctgggtgagctcactaacgatgattattcagtcaatgctatttcccacac

SEQ ID NO: 334795 - DNA, 105 bp, Homo sapiens
  chr13:95357798-95357903
  hyper
cggcaaaggcctctatggacgcctccagggcagcgcagggaaccaaagggcaccccagatctctgcgggttcgcgccttgcctcgtgggggacaggaggttctct

SEQ ID NO: 334796 - DNA, 249 bp, Homo sapiens; identical to SEQ ID NO: 237111
  chr13:95358191-95358440
  hyper

SEQ ID NO: 334797 - DNA, 829 bp, Homo sapiens
  chr13:95359971-95360800
  hyper
cgcgcgacagcgtccccagcaccagttcttactgcttacacagcgcaattccacctgtttgcacaaagcccgaagcaacatgcctggccccttggatacgaggcttgcttcaagttttgggacaacggtgaataccaaagaaattgcatcatggctttaaaaaaaaccttgaaaagaaacgaaaatagaagaataaaaggaagggaaagaagaaagatggaaggaaggaaggagagagaaggaaagaaagaaaaatggagaaacagggagagagacggagatagataaagagatggagatagagatcgcgagccagcagcagctctctgcccaatcacagcgctgcatttgtgggccactttcagacgcttacaccacccacccccgggcctttctctacgccctcttgccccggagccgctccccccgctccaaccccttacttctgcacagtctaacttggcaggaggctctctgcaggcgcaaaacccgccaacttgttagcaagaccattggagtcagaatgggtgataaacgagtctgtggggcctgtggaggtcctcaaacagccgcacaatctgttggcgatatgacctcggtgctccccctcggcatcctcacccctcctcttacccatctttccagtcctcttctcattcatcaacaactccggagcgtttctcccagaaaacgctgatctttgggaaaaggggagggggcgggaggaggcggggagtcttcaggccgaggaggcggccgagctggaaggctcagggtggtaactaagatttagggctggggtgatttccagcgagccgcaggaagttcc

SEQ ID NO: 334798 - DNA, 2728 bp, Homo sapiens
  chr13:95362957-95365685
  hyper
aagcagcttttcccgtgtgccagccatttcagacctcacatttgaacagcgtgcatgcaacacggaccgggagggggttgggggttggggggctgaggggcgaggaagaagaatgagaaacaaaaacaaaaccgaccatgaaacttccaacaaaactggaaaggccaacatgtcaaaaagttactcctccacctccgtgggtcaaaacgcaacaggttccgaagtgcaaagcaaacgccaactgctgccgcacacaaccgcctgctttcgagttggctgccgaagtgcgggtctgaaatgatcctgcgaattcacaggcctgctcgcccgcgcccttgcgcgcttggccactcctgccccgcctggcctctctgcctctacctggcacctatacattctatgtacatacaaaccgggcccccggtcgcgggagggcgcacggggaggccgcagcgctcgtacctatacatatgtacacgtgtgcacaccggtcctcgcgaggcggccccgcggggtcatagcgcggcagcgtaggccgcggggtaggggtccagctggggcttgcccatgcccggcagcaggatgtaggcgagcggcggctgcagcccggggctgggccacgcgctgcagttgcacgggatcatgtagcccgggttgcccgggctggggtgcgagtgcgtgtgccccccggcggcggcggccgccgctgcagccgccgccgccgcgccgtggaaggcgcccgcgcccgcggtcgggtagcccagcgacgacgcgtacgggaggccggacgaggacgacgagatctctgccattttggagcccaggtcgagcagcgagtaggggctgcccgcggcggcggcggcggcggcagcggcggcggcagcggccgactgcgggaagaagacgcgtgcggcggcagcggcggcggccgcggccgccttctcgggattggcgagcagcgactcaggcaccaggccgccgcccgcccccgcgtgcagcccggcgcccgccttgagcgcagggtgctcggcgtccgccacgccgcccaggccgtagggcaccgggaaggcgaacttgtccttcttgagcagcgtcttgggcttgcgccgcggccggtacttgtagtcggggtgctccttcatgtgcatggcgcgtagacgcttggcctcgtcgatgaacggccgcttctccgactctgtgagcagtttccactcggcgcccaagcgcttgctgatctccgagttgtgcatcttggggttctcctgggccatcttgcgccgctgagcccgcgaccacaccatgaaggcgttcatgggccgcttgacgtggtccaccggcttggacatgctctcgccctgccgcggctgcagcccgccgcctcccgggccctcgccctcggcccggaggaaatcaatgttggctgcccgcggagacccgctcggccggccggggctcgtcgcgccccggcgtcgctcccgccccggaggagggggctgggggaccagcccagggccacgccgcgccccgggccgccttagtgtctccggccgagcgctcgagcaggttgtctctgggacactctaacttctcggcggtgccccctccccgcggcggcagtttgccctttacgttctttgggtccttcgtctgcagtggcgtttgctggtgagctccccgcaggtagcggcggccgggcagagcgctcctcctcctcggtcgttctctcttaaatgcaaagcgtccccaaaagttgcgtcgcggagactcctcgaagttgagccgaggagcccgccgccgcgtgctgccaagtgccaaagggggctctcagcggctggagtgtttgggttctcctcggtgactttctcatttgacagaagcagatgggggtggggaaggcggggaggtggccctggaggaggaagaggagggggaggcggaggagtgtccaggcgtgccacgagaacgcagagcgcagcaatggatataaatacaaatacagcagcaccagcctgtcttcttggctccgggcagggtgcgccgatgggaaacccccaatcggctgggtgattttttttttttggaggggggagctgtcccccgcagcacctgcctctcgagtcttcctctcccgctgctggactgacgggtggggcgaggaaggagggtggatgaggcttgagcaagcgttggtcgcccggcctcagaggaagttctcccggctcgccgaggagccgcgtccggccgtcccctgggccatgccggctctgttcgctccgagccccttcaggcgcgcctgccgacttagggctcccggagctcgccggccgcggagggcagcgcagcctccacgcggcgccgcaggcctggcaccggccgcgtccccgcctcgctcttctcggcagccgcctggcacttgcaactaacttcgcccaagtttcctgcgccgcggcgcccctctcggcgcgctcctgggagcgtgcgcccgcgagtccgccgcgcccggggcccctctgtcctcgctgctgtggccagagccgagccggcgcaggggcggaggtgctgcaggagagttaaggaaaacgggccatcacctcagttcgcaggtccgcgctgtggcacctcccgctctccccactcccgcggcgcagggggccccttcccagcccaggccgccctctgcaccggctcaggtgagtgtggctacctgcatgtgtgcgcgcccggagcc

SEQ ID NO: 334799 - DNA, 1256 bp, Homo sapiens
  chr13:95619804-95621060
  hyper
gagtgggttttgctcgggcgacttgattgtctttcaagttggcgttaagagttttcaacaggtctccttccctgccagccgggaccccgggggtccctcggagcagggcgggtgggaccgctcggcctccttctctcgcccgcacgggcgccgccgcagacccggagcaggcacccggcggccgccgcgtgggctgcagcttagcctcctctgcgggcgcccggcagggctgcgcggccgagactcggggcgccggcgccggggcggccgggagctctgtcatttggcaactccctgcagactgatgacacggcgctttccatggtcgagccccacaaagtgtagggctgcggggcgcacctggctgggctcctaattacccggcctgggacgcacggggcagccgcggagggtggcgcctggggtcgggccggggtccccttcgccgcagtcccgcccacccgcagcctccgaggggtcccggccagggcgttctccacacgctcggctacctgcaggggttcgccactgcaagccgggccagtagaagtttgggggcgaaggcagagagcatttccttctcggcttttggcgcctccacgctgcacagaggcaggggcgactctgcaggccccgtttcccccatcctcccctccaccccagttccccgcaggacgtaggcgccgtccctagctcccccttctgtcctcgccctaacaccgcagggcctctcctggggatgtggggtcctgcgtgcttttgggggctacaaaaagtgggggccgtcgcagagcagagggaagctaggagcgggcaacgaattgaatcctggagacccgggaggagcgaggctgctgccgtccccggggaaagggcgacttcggcggggataccccgtgccaggccctgcaactcccgggccctcgggaatgggatgggggaggcgcggggtgcgcgcagctcccggtgatgttaaggcgtccgatggagacttgggttatttgcttcgcgtatcctcccctgttcctctgcaccgagctcctggctgccgctgcggccgctgtgtgcccgaggggcggctctgtaacccggctccaggcatttcttaggtttcccatccccgccctccaagctcccgggagcgcctgctccgctgcccgcagacaggcgtcgttcaaacctcagctctgctcggtctgcattcatggaccccagatcttcaccctaggatttccatctcagcatttcacgttccc

SEQ ID NO: 334800 - DNA, 782 bp, Homo sapiens
  chr13:96204691-96205473
  hyper
cgctccaacaagcgagcccttctccgcggccctttggctcaggggagcgcaggccggccttcctcccgcacgcgggcgcgggccagctgcagatggagaacccggggggcgaccgcgagccctctgaggcccctcaagggacagggcatgggtgtgaggggtcgcgtgcgccccctggcgccgggtccgctgggcggggtggtgggcggggacggtgggcggaggcggaggcgggaggcggagccccggggttgggagtgcgggggtcgcggcgcagagtgggagccggagagcgagcgcggctgcagccggcggcatggctagcacggcttcggagatcatcgccttcatggtctccatctcaggctgggtactggtgtcctccacgctgcccaccgactactggaaggtgtctaccatcgacggcacggtcatcacaaccgccacctattgggccaacctgtggaaggcgtgcgttaccgactccacgggcgtctccaactgcaaggacttcccctccatgctggcgctggacggtctgcatccccgcggcccccgccctcagccctccttccttgatggccagcccgctaggcgccctctcgcccccaatacccccagcgggacccctagactggactcctctgaggcccgacccgtctctcccaacagggccttagggagccagggacgctcctggtgcccgccctctcctgatggctgtctcgcggggcgcctgttcgagcctgggaccccgggaggggggacacgcagacaggccc

SEQ ID NO: 334801 - DNA, 987 bp, Homo sapiens
  chr13:96296233-96297220
  hyper
cgtggggcgtcgtgccgctgaccacccctttccccttgcgtggatctcggtcacaagatggccggaacaggaaagaagggggcatgctttcccgttccctccctcccccatcccgggcagggcccccagccttgcgcggcgcctcaagtcccaggcgcatggcaccgccgggcagccgaaccagcagacaaaagccgagagacgcgggttccaggggaacctcggcgcccttccttggaaggcaaacaggcagtgggggcagcggcggctactccagctggatctgcagaggctcggctcgcagcctggagaggcaggagggccggcttcgcgggtatcgggatgccccgtcagccacctcctgtgggcgcctggcgcatccccggtctcggctcaccccagctgcgcgctcctgggcgggtgccgggcgctgcaggcgggcgggggcgacacaggggacccagaccccagggtcgctgctgacgcgggccgggcccgcggaggccgaggagcagcaaagcggagagaggcaggccggctccttcttgcagggcgcaggatgaaacgtgtctggtctgggcaagttgtggcgaggcgggtcgactggcgccgctctagggccttccagactccggaccacggacgactcaggataccccacccccctcccgccccctcccctccgcgatctccctccggcctcttccctcggtgtcccggctcctctggcaactgggcgggaccgcgagcgtctagaccgcagcgctaaaatgcgctcagccaatccggcagctggcgcagacacgtggttcgggggcgcgctccgttgctggccctggatgctaaccctaggaaggcttttcaaagagaaaccagattcgctcctacccggttgttggtctggccctcagcaagctaatttcccagaggagcttcaggtgaattatcttccaaaaagagatgcgttttaatcgcagaagtctgcag

SEQ ID NO: 334802 - DNA, 601 bp, Homo sapiens
  chr13:96705328-96705929
  hyper
cgctgcgagcacgaagaaagcgcggctgagggtggcagcgcgcccacacccgcccggacgagggcccggcccgcacccaccttgcctccagcagcagcggggtctcgggccacttcgcggccaagtgggcagtcaccgacttggacgcggcgaccgtcccggagccgagctgcgaaagccacagcgctgtggagcctagtagcagccgcaccacgttcgtggctttcgctggcgccatggcacggagagaaaagcgcgagtccctcggacccggtacccacagtctgtggccgccacgcttcggccggctcttcccgctgcgcggctgcccacttccggtgggaggagctcgagtccgttactgggtgccgggtccagaccggcgcatgcgtgtcccgctccggcgcggtttagtgggtgcggcctggagagcccacgccagccggacactgggccacgtcggagccgccggggcggcgccgggttgctgagcggcgtcacagatgctcccgcgggtccgctcccgcgggtccattcccaggactttgggttctcggacagaggccttaggacacggggcgggaagctggctctccagacc

SEQ ID NO: 334803 - DNA, 686 bp, Homo sapiens
  chr13:96742966-96743652
  hyper
gccagccagccacacgcctcggcgtcaggggcatggaggaacggcgggctccgagccgcgccccggagtccgcgaaacttccgagcgggcgcccgtccgccctgccgccgccgccgccgccgcttcgcctgccggcctgagagcgggaccatggatgaaaggttcaacaagtggctgctgacgccggtgctcactctcctcttcgtggtcatcatgtaccagtacgtgtccccctcctgcaccagctcctgcaccaacttcggggagcagccccgcgcgggggaggccggcccgcccgccgtcccgggtcccgcccgccgggctcaggcgccgccggaggagtgggagcggcggccccagttgcccccgccgccccgggggccccccgagggacctcggggggccgcggcgccggaggaggaggacgaggagcccggagacccccgggagggggaggaagaggaggaggaagacgagccggaccccgaggccccggaaaacggctccctgccccgattcgtgccgcgcttcaacttcagcctgaaggacctgacccgcttcgtggatttcaacatcaaagggcgcgacgtgatcgtgttcctccacatccagaagacggggggcaccactttcggccggcacctggtgaagaacatccggctggagcagccttgtagctgcaaagc

SEQ ID NO: 334804 - DNA, 609 bp, Homo sapiens
  chr13:99404493-99405102
  hyper
cggtgtttctgccgcccctgccgtcacccgctgggtcccgtcccgctccaagcgcactcccggcccgcagggtgggaatacgaggattacagtgccccacgggcgggcgggccaggatcgcaacctcggcggagtcggcgcctctgggcacctctggcttccgcgccccggccgcacggtgaccacccgggaggggatcccgggcgccccgcaacctcccggcccccgtgggccttcgggtcgccccgcttcccgccgccgcgtacccttcgcgcctcccggccctcggtgccggcccccgccccgcgtagctccgagtctttagcccggccggccccccacccgccgagcgtacccatggcggcggctcccagggctcctgcgacctgccggcgggacgtgctcctggcaggtgctactcctccgacctgacgtccaggcccggccccgttgccccaggtacagccccagctctgcgaggcggggccgccggctccacccggggggcggtgctgcggggagcagaggtccgtgctcccgagccgtcgcgcgtggacaccagccccggcccaggtgcgggtgggccccgacgggagcgcgtggcaggcc

SEQ ID NO: 334805 - DNA, 930 bp, Homo sapiens
  chr13:100620292-100621222
  hyper
gcccgcgggacggttataaacgggactgggggcacgtgggtcaggaaaggggccttcggaagtggcccggggattagtccctttgatcaatccgttccgggatcccggataacccccaaaagggagagcggcgtggcagggagggaaagaagtccggatgggccctctcagaacacaatgtccaatagctgagcggcccagggaccgccagaaacaccaagcgcgggttggagtctgaacccgaggcgcctgcgtccctcccgcagggacccccacgctccaccgggtggggcccacgcggccgccgggagggggcaggaaatgcaaccgtccgcgagacgcagagccaaaaacccaaatgaccgcgggtcccctcgccgcctggggtcccccgcgccccccccgaccccacgcacgcgcgcgtgccccgggaagccaccggggacagtgcgcagggcgtggcctgtcccgccgggggcccggatcggcttctgcgcccgcagctcccggcagccgcctagggaaggccgctcccctcgcgaggcctgggcaggcgggaagggccctaggccgcgcgcggccccgcgcttgggagttccctttcggggccgggctggggagcggcttcacggtccctggatcctgccctgccgagaagtgctgggcacaggagcgagcagccggcttagcgggccagggcgtttttacgagagcctcctgggaagtttcttcctggaaaaatcattaaggcggactgatcccgattagagagaaaaggggctcctgggaaaacgtgctccccaccggccatcaggcggcccgcaggagccaagccaaggctcccgcctcgggccaccccgacgctgctgcccccgcagagccccgagcgcccccggcccgagcgtgggacccggcggctacctcctggcc

SEQ ID NO: 334806 - DNA, 948 bp, Homo sapiens
  chr13:100621229-100622177
  hyper
cgccgataaatctgccaagtgattactgaacgtaaactccagttacttaagtgtcctccgaggggtaatcgtatctgtccctataaatcccgactgcgttcgcgctcatcagcgcttccgcccgacgcgctggtccgctcaaagggggcacacgacccacaggagccatccaccgcctcgcgccgcagccgccctcctcagcgctgtgggatccccagaggcagggcttgaggtggggtgggagggtccccacgacgccggtggctccccaccaattccacgacagggtaggcctcaccgatggtgggaggctcgggtcctcctacaactagaaccttctctagaaaggcagatgtcaactccagcaccctccagggcgagtgtgatactgcgtgtgagagggcgcgtggggcgtgtaaatgatgtgagtgtgaggacacacaggtgtcgcgggaatggggtgcacgcgcaggaggatatgagtgtgtaaagttgtgggagacgcacgcagaagaaggtgtgcgtgaagagtgtgtcacggtgggcgagtgcgagtggtctccggggttccgaaagcgcattcctgtcttcccggaggggtcccttcccctcccggaaggcctgcctcgggcggcccaaatccggcagcaaatcccacgcccggtcctcggagcgcggagactgcgcggggcctacgacccggtgggaagagaggcgcttgccggggcggcccggcctctctttccatcgccctcccagacttcccagggccgggcgggtggggactgccgaccgtcctgggcgccttcctgctccagctgctgctgcgtctgctccgaggtggcggcggcggcggctggcgcgcgttgcgggtcccggccgaggggctgcgggcgcgctggagactccgccgtgtgggaacccaacgcggggcctgtgtgtgctatc

SEQ ID NO: 334807 - DNA, 1495 bp, Homo sapiens
  chr13:100622725-100624220
  hyper
cgatccacttgcagatgagctcctgcttgattggctgccgcatgtagcgcaggaaggccccagccgcccctgggaggtgggggtggtgctggtgcgggtgctgcgcgggcgccggcggcggcggcggcgccgggggcggcgcgtggtgctgcaggtggggcccgggcccggccgctgctgcggccgccgcagccgccaggttcaggtttaagttcacggctccgtagccgtgcagggcggccgccgctgcggccgcaaccgccccgtagtgcgcgtccccagagcgcggcgcgaagggcggttcggcgcggccgtacagctcagccgccgcggctgccgctgccgccgccagccccaggcgcatctggccgttgagcgggtgcgggtggccgcctggggcccccggcgtgtcgtgcagcgcggggaagagcgccgggccgccgctgccgtccgggcccgcgtaggtgccgctggcggagatgaacatgccggccgagtggggaggcggggccgggtgctggggggagccggtgccggaccgctgctcccctccgagcggggccccgtgcatggccgccgcgggggccgtggcggaaaggtccctccggaggacgaagtccctgctgtggcctttgccgctgctgccgccgccgccactgttggtggtggtgtagcccgagagggcaggaggaggaggaggcgggggagggggagggggtgaaggggtgggaggaagaggaggggctgggggcgggggcgcggagggctgcgcgccactgctgcccccgccgcaggggtagctgcccgcgccggggtgcgcgaccaaggctgcagcacgggcggcggctgccggagcctccgggtgtgccgggaacgcctgggagggagggctgaggcccagcgtgctcgcctgggccatgtgctcgggtccgagcggagtggtggccacgccggggtcagcgcccaggtcccgcaggcggaggtgcgcgacggcggcccggagttgggagtgggcgggcgggccggccagcgccgggaagcctgtcatattctgaagcggctggacctgagccgttgccaaatccgctaatctcagcgctggcgggttcctcttgctcaaagggggctccatcagaactacacaatcaggcccatagaccctcactggggggactttattccctctgcccgccttcaaaaacatgtatgtattgggcgctctttaacttcttttgtcctggcctcttaactctgcttattcctgttcccactctatcctccagcgattggcagagtgaacaccacatttgagctgcacagtgggaccgagattttggaaatggcacgggtgggattggagggagccgcgtgattggcagtagcctcggctgctcgattggctcccgttcaggccctcgacccagcggggattcgcccccgtgcttgcggccgcctgcgctttcgcttcgcgccccctcctccgctggagccacac

SEQ ID NO: 334808 - DNA, 145 bp, Homo sapiens; identical to SEQ ID NO: 237144
  chr13:100630674-100630819
  hyper

SEQ ID NO: 334809 - DNA, 1676 bp, Homo sapiens
  chr13:100631544-100633220
  hyper
cgcttaagccgggagaggctgcctgagccggcgcaagagagcccgggttctgccagccatagtgagctagaggattcttcccgcgtttttgtttatttcatttcagaacataattctgaaaaatttattattttctcttcgtttaattttatttcaactcctagagatttataaataaaagcagttctccaggccagccaggagaacacgcccgaggcgctggcctcaggctgtcccttcacacctccgcagcctctgggccctccgttccctctctagttacctcgggagcgcgagatttgggcggcgggacaggaaacgtccgcagcggtcagccaggcgcggcgccgggagcggcctcgccgctgggccaccgcccgggtggtactccctgctcctggagaaggagtggatggatatatatgctttctagaaggtttaagccctgccgtgtctgacggcttcttctcccgagaccctgagcctgacccgcagccaaactccggcctgagtctcgcttggtctcgggcgttcccacacttctcagcccaaggatgcgcggcccggcttctgggcatttaccctgagggtgacactgtctttaaacgacttccgaacaacccccttccacgcaggggccgctgcccagtgtttactgctgtaaacggagcaggacgcaagcggcgggtggggagctcagcgcgccgaggggcggacggggacgccgcggggggcggggaaggcggtgtctgggtgggcgtccggagggtgggaagaaggggcatgcctggctttctctgtgcccacggtcctgcacctgtggtttcaatgccacagagcaagtttacaaaggcggggtgaaagtagggagcgtgccaagcgggcagcagaccagccccccgccgctccttgtggcgcgctcccggcgaggccccgggcctgaaatgtccccgcgcgcagagcctcctgccaggcgacccagctgttagccacctctcgagcggcctggagtgctcgggccaggcgtccccggggttttcggtgtccgctgggagctgctcagatcccggggaagtcggtggcctacgcagaaagactggagcgctgggttgcctcccattcctgacccggctgagggcgccctgaccccgcggcccgggcccgcgtccgagccacgctggacgcccggctcccgggagcgccgcggtcggccaggactagaagccgcggcgccgaggtctcgggagaagcgcggcaggatggcaggccgggcccacgggcacgttcggcggctgcctgagccggcagcagctcagggagcgcgaggactgaggggcgggcccggcagcggggcgggggcgcgggactgactaggccgcggcggccaatcgcggcgccgggagggcgggcggggcgggagccgccgttaaaggggcggtttgaccgggggggcccggcctcgagctggagggagggagggaggccggggcgggagactagggggtgcggggggaggggagaggaaaaggaggagacaaaaaataaaaaataaaaggctgccgctgcagcgttggcggcgcccatcgaaatcaacggaggcggtggcgaacgcagcccaccgcagccgagacctgggagcccgcctgggcctcacactccctcgggtcgcggactgc

SEQ ID NO: 334810 - DNA, 1393 bp, Homo sapiens
  chr13:100634132-100635525
  hyper
gaggcagatccaggcggcggcggaggcggcgggcgcaggagagcggctcccagggctgaagtggccgccaccaccgccgcctgcgcctggagcccggtggccgccggacgcaccgcgcggatcgggagcgggagtcgaggcggcgcggaggcgcagggctcgcaggggcgggcgggcgcgctggccatgctcctggacgcgggtccgcagttcccggccatcggggtgggcagcttcgcgcgccaccatcaccactccgccgcggcggcggcggcggctgccgccgagatgcaggaccgtgaactgagcctggcggcggcgcagaacggcttcgttgactccgccgccgcgcacatgggagccttcaagctcaacccgggcgcgcacgagctgtccccgggccagagctcggcgttcacgtcgcagggccccggcgcctaccccggctccgctgcggctgccgctgcggccgcagcgctcgggccccacgccgcgcacgttggctcctactctgggccgcccttcaactccacccgggacttcctgttccgcagccgcggcttcggggactcggcgccgggcggcgggcagcacgggctgttcgggccgggcgcgggcggcctgcaccacgcgcactcggacgcgcagggccacctcctcttcccgggcctgccagagcagcacgggccgcacggctcgcagaatgtgctcaacgggcagatgcgcctcgggctgcccggcgaggtgttcgggcgctcggagcaataccgccaggtggccagcccgcggaccgacccctactcggcggcgcaactccacaaccagtacggccccatgaatatgaacatgggtatgaacatggcagcagccgcggcccaccaccaccaccaccaccaccaccaccccggtgcctttttccgctatatgcggcagcagtgcatcaagcaggagctaatctgcaagtggatcgaccccgagcaactgagcaatcccaagaagagctgcaacaaaactttcagcaccatgcacgagctggtgacacacgtctcggtggagcacgtcggcggcccggagcagagcaaccacgtctgcttctgggaggagtgtccgcgcgagggcaagcccttcaaggccaaatacaaactggtcaaccacatccgcgtgcacacaggcgagaaacccttcccctgccccttcccgggctgtggcaaagtcttcgcgcgctccgagaacctcaagatccacaaaaggacccacacaggtaaccgcgggctgggacagggaccaggcgcggaggggagacacgcacaggctgagactcaggctgtgggtgccgacgctgggcgcagaccgccagccggggacctgggatgggaggtgtttttgcgtgtac

SEQ ID NO: 334811 - DNA, 873 bp, Homo sapiens
  chr13:100635554-100636427
  hyper
cgatgacaatattattgggctaggtttttccatgtgcggaaatcgagttttgaatgattagcctcacatcaaatgtatgcttgggtcatgcaattgcttcgtttgctcagccccggttaataatttccgttttaagtagaaagcacaaaataaaactgctcgctaattcggtgcccgggaagcgagcctagagaggattttgccagcttgtctgaatgtgcttttctgctcggagtgtatgtctgtctgagtggtttgtgtgttttcccacttcttttactcggggtccaaacgcccttcccgggactgtttcccatgaaatgagtctggtgtgagccgaagctgtaatgcgtttctcatttttaaagtgtttttaaagcccgtctcggggtgggtcgcgggggctttactgtggtttcgcagcagtttgtgaaattctctaatgggcaccacagagtttgcgattcccaacttggacccaggtcagctagagccccaggtcagctagagccccaggcagcgcggccccgcggggggatcgcgtgagaagagagagccgcaaaagaacgcgcctcccgcctcatagattattcatctatgaccaggtctcagccaaaatcgtgccagacgatttcctaaaagaaagccaaatgttttagcaacttcccccgtcaatatttactccgaagtggggatgcgccagcggcctattgttctcttccgggaagggagggagccgaggtgcgagacaagcttttaacaaggtttaaaatttgagaaatttatttgcatgaaatgctcgctttcgagtcctgtgtctgagcggatgtctttaagaaacaatttaggtgctaatggaatttaacgttaaac

SEQ ID NO: 334812 - DNA, 515 bp, Homo sapiens
  chr13:100637157-100637672
  hyper
ctctgggtgtctgcagccagcgccgatgtttgccgtccacaggggagaagccgttccagtgtgagtttgagggctgcgaccggcgcttcgccaacagcagcgacaggaagaagcacatgcacgtccacacctccgataagccctatctctgcaagatgtgcgacaagtcctacacgcaccccagctcgctgcggaagcacatgaaggtaccaccgcggcggccgggaggagggcgaggcaggccgaggcgccggtgcagcactggcccggaccacctcagccggcctgggagggtccccaggggccagggcggcggggggaacatttctgggggtgctctcccccaggggcccggccccacagcagctgcactcacacccagtcccctctggtcccccctcccggcttttgtcttgcaggtccatgagtcctccccgcagggctctgaatcctccccggccgccagctccggctatgagtcgtccacgcccccggggctggtgtcccccagcgcc

SEQ ID NO: 334813 - DNA, 1228 bp, Homo sapiens
  chr13:100640909-100642137
  hyper
cgggcgggagccgcttttcctcgaaagggctcccagtccctggtccctcgcttcccaaggctttgtccaaacaagtcacggacccgacaaggtggtccattctctctctttggcctttcttttctgcccttcgaatccgaaggactggatggaggggaggggatatggcaatagtgtagaagtgtcaagatgtgaaaattgctcaactgagaacgcacgcgggggctcgcggcccaacagcctgcaccacactcaggagcctgggcctgggcctgggggtggggtgggggggacaggcgtcccccccaccccaaccccacccctatccctgcccggctgtctaaacggacctaaatgctaacctgctgttgccttgactccagagacacgaaactgaagctagccctcgcccctctctgggatcccgcgctgcgctgcgggtagctgcccgcagggaggcccaacctgccgcggctggagcacggtttctgctagccgccgccgtcaacttgaacttcagtgagcctaggccggcttccttcgcgctcacctccatccaccacctaagaagtcccctcagcgcgagcgtcgctttatccggaggcagctggagccccctcgggaggcccgtcattattattattaattatcgtgatccttactgcattattaatgcccaggatgataaccggcatcggtatcagctttccctggttcagtgatatcccacgaagttcggggcggggaggaagtcactccaggatcagaggccgcgtcggttctgcttggggcatgggcagagggaggctgctggggccaagccccggctggacgcgagggaagaaactcgtcccaggacccgcacgcccatacctggctgtcccagagctcttccctaggccggcaccttcgctcttcctcttccccaccccctagcccttttgtctctttttcagacggatgttttcagtctcaagtggttttattttccgcacaaaaccctgagatcaagggcagatcacagactgtaccggaggctcgggtttccctggactctgtgctgttctgcgtcccagggttggctaggaaggaaggcctgggccggcgaggtgacgggtctcccgcccaggtcggcaggacggggggaggtgtgtcccggtaggtccctggtgagctcacccgtggcatcggggacccgcgggaacccaccgggcgcccactagagact

SEQ ID NO: 334814 - DNA, 744 bp, Homo sapiens; identical to SEQ ID NO: 237155
  chr13:100649347-100650091
  hyper

SEQ ID NO: 334815 - DNA, 775 bp, Homo sapiens
  chr13:102068457-102069232
  hyper
cgggtggaggcgcccctccccacccctcccccgcgcggggcccccgcccgcagcccctctagcagcccctctcgcagccccagcgcccctgagccgtcctggcccggaccggccaaggaactaacgagcgcgcatcgcgggcctcgggcgcagggcacggagccggccgcgccgcagcctcccgggcaccggcggcggtgaccaacctgtaaccccagcgctcagagctgtcatggtgcccgcgggcggcggcggcggcgacagtgggcgaccggcaggatcagtgccaggcgcggcgcccagggcgggcggggacgcgggcccctcacctacggcggctcagctcaggcagcgcgctcggcccggctggggccgcggctcacgctcgccgtgtcactcactgagcgccgccgccgccgggcaggctgggggaggggtgggagccggagttttcgggcctttaaaaaattattattttatttaaatttttaaagttagctttgctacagggactgcagtgatgccgaagggcgggcaccgcagaggaggctgcgccgcagttggtggggagcgccagggtcggtactggcagttccttcttgccggctgccacccgcagtcagtctcacagcaacagctaggctctcatctgcgagctcctctcgggggtctttcgtactcaacagcacggcggcggtgtgcacgggagtccgccgggcacacgcggggtacacttaagtgcactgccaggaggccgggagcccagcgtgcgagc

SEQ ID NO: 334816 - DNA, 1339 bp, Homo sapiens
  chr13:102568657-102569996
  hyper
cgcgacggcacccagagtgctcagaagggaggccggggccggggtgggccgggaaaaccgagggagggaaggagcctggagaagctccgtttaggcggggagggggcgacccggggcgcatctcccgaccatgacccccacagaccttggcgccgcaacctgcgcttcttgaggccgaagatgcgcactttggagaagatatccaccaggttgccgttgcagagcccgcggttcttgctggggctgctccgcctcctgctggcagacggccggtcccagtgctgctcccgcgcctgccgcttctggcggatcaagccgctagcgatggccgcggccatggtggccccgggaacgggtccggggagggagggcgcgggaggacggcgagccgggggcaccggaggggaaggcggcggcgcagaccgtggctcgccctcggggcagaggagggggtgccaggcgggactggggagaggggaaggggggctcagtcctgaccgggacccatcgccctctccgcggggcgcggggccaggcgcgcagatgcgcccagggcgcagccggacgatcccgggaagccggacgtcgtggccgccgccgcttggccacgtccgagtggagagcgggaccgcggctgcgggcgctgctggtcaccgctcgtcgcaggaaccccggcgggggtcgccaccgccactcgcgctgccttctcgccctgcccggctcccgggcgggaggtagagccggccggcggctccccgggcgccggctggagggcgggtcccggcagggtctctgcgcgtccgtcggtccgggtcgcgctgggcaggactcagcgccgggctccagctgcccgcgggccggtgccgccgccggcgccgcccgctctcggcttctgccggtgattgtcaagtgctttggaaatcagcatctggagagaccaatcttctcccctgagatctctaatcaaacgctccgttcccaccccactacaccccctccacctatgtggtccccctcctgatgtacctcttcagaaagaaacaaaacgtataggtaataatgatttaaaaataataagaaagaaagctaagatggattgcagggatggggtgctaagaggccgagccaaagcaggtggaattgaaggaacatcggggcgctttttcttagatgcaactcgctggttcccgagccttccgcggcttggttggggcttctcggtcttaacgtggttaccggtgcactgaaactctcagcagcggttggagggcgaggtggtttccgccctccctgctaatccctccagcaccaacgcccccccgtcgccacccccaacccc

SEQ ID NO: 334817 - DNA, 789 bp, Homo sapiens
  chr13:103046539-103047328
  hyper
cgccagctcccttccctttccttcagatgggtctcgggtccagagctggcgcccgctagcgggaggccagaccgggagggccaaggcagccacctgtggctttcccatccctcaggtccagcagtgcacatggggtgcccccgcgtcaacgccggaggagtgaccttgcaaacccgcgccccgcgggcggcagagccggccgctcactgcccggtccccggccaccacggaagagcgaagatctctgccagggcaggagccctagccccgacccgcgccccaagtctctcccgcgcggcggcttccggccgccatggtttccatagcaacaacagcacaagctgccgggtcccagagacgccctagggtcagaggtcatctccgtggcaacggaaacttcccgcgctacggcggctccaacgggccgcttccgccgcattgcgtagcgaagcccccggcgagccgaggctgggagcgcggtgatggccggtccccgtgagcagagggcagcggcggcgggaccggggactctgggccaatgggtaaagccaggaggaagcccgtgcctggcccgttgggctccctcctcctcagagccgaagcagtccacactcggaacccagcttcacccggattaccgaggggttccacgcctggaggcagagctgcagcgtgggcccgctcgcggctttgcagaaaacaaataatgacacacttctctggaagcccggggcctgggcccagagccgtggcttctgccaaactttctggtcccggacaccaactccc

SEQ ID NO: 334818 - DNA, 1173 bp, Homo sapiens
  chr13:103052309-103053482
  hyper
ttttagactgtctaacaactcgcagtttctcctttgctgcaggaatggtggccgcaaacggtctcagcctccgcacccaccgcctccgtccccgcccacccgcacctcctcctcctctgcctcgcgctgcacccgcaggcggcagacccctcggagcgcgccaccccagctacgttgcattggcaaggttcggaggctggagggcagcagccacttgctgccccagtcgctggggctctgggtgccagtgcggcccccggcagagcccagggcgtcagggaggccgtggagagccatgatctactgcaccgcagtgccagcgtcaggagcttccagagcccgggctgccactgcgggacggccgatctgcccgctccctccttcagacacaaccccagacaaaaacagccggccccgggtccctctccaccctgaacggagctaggggacgccacacactcccggctgccagcgtgagcggttccgggaaaggctgcgcccagcctcctcgccagcgccgccgccaccaccatgcagccctccagcctgcctcccctgggttgctcgcccacagctccgcggccgcccccaatcgcctcggactgagacgcggggacgggaacccctgggatccgactccccaaatcagatgcatttgcatttcttatgtaatgtactgcaagttcccttgttggagccctttggaatcggggcgcatgatcaccagtaggcttaaaagcaggaactcacggcctggctcatccccacccctggccctgtgggaccccgacgcagggctttgacaccgctttctaaagggggggacttcaattacaaatattagaggggctgggcttgtcctctcagtctggggttccctcccggcgcaagccttgctcaagtattcccggtggcaggatgtgtcagaggcagacagggggaatgagttaatgctcgggcacccggagctggacgggggagggacgcgggggctgacggaggagcggggccgcgagggagggggcctcttttactttggtaaaggtgatcgtggtggcgaatattgtgcaagctaatcagaaagtctagagcaggttctcggaacccagctacgtccctcgaacctgctgcagaagtaaggggagctcgcggttctttttcctggcaactacc

SEQ ID NO: 334819 - DNA, 2326 bp, Homo sapiens
  chr13:107186806-107189132
  hyper
cgcctctctccagagcccaccagtccccgcgtgccggccagcctagattgtggccatgtccttcgtcctcgaaaacaggagagggtcaggtatcgccatcggacaccttcccggacttgacacccgagccgatagtagcttttagcgcctgggagcgttcgggggaggaaaggcggagagaccgtccgttccagcggggctcgggttggaaagccgagcgaggagtctccacctagtgaaatggggcgggggttgggggtgggggacggggaaccgaggttccagaaacaggctccgaggccccgcggactgacccctcctcccgcccggacggcgcggcggaccccggggcggggacatagggggatcgcggacgccacttacttggagttcgaggaattccaatagataggctctaaaactatcgatttggaaatcgcagttctgcataaaaccatcaaaacaccccagcagtacttccacacggagtcccttctcacagccatggcgaagccactcccagctccgcgcactccgggccaagaagggactgacgggacgcaggctgggacccccaatcctccggggcagactggcggggaagacggcgtgcgcccgcaggcagctccgaggcgcgctgcgcagctccagcggtcgccgggccaggtgcgctcgctctccggggccctcagggcgcggggcgggagcgcacgcgcggggcgcggcggcgcggcggactcggggttccggggcgccgcgccggacgcagctcggacggccgactcccgtgcggctccagggtgccgggccggccgcggctggcgggtgggcgcggggcgggtgcgggctgggacacaaagacccggagcggagacgaccggcgcgggcggcgggcgctgcgccccgagcggggccgcctgtgactatagatccagtgcagcgggcagcggcccgagcgcgcgggcgccgcgtcggcgcggttccatgtcccggagcacggagcggagtagggcgcctccgggcgcgcaggagccttctcagtccgcgcggctcccggcccccagggcaggaaagagggagctcggtccccgccgcgggctccggacgcgcgcgggcctttgtgtgcggggagggcgccgggacccgctgcgtgcgcagctcctcgctccggccggcgccgcggtccccgccgaggagagtcagcgcggccgccgcgctgtcagagcgctataaacgcggggccccgccccgccgcgcgaagcccattggcccgcggctccgcggccgcgcgctggttggacggccggtccgtccgtccgccatcccctcccgacattgggtgccgcgaggcggggctcgggctgacaggtgagccccgcccctggctcccgcgggcggcgggagcggagcagaagccgggcaggagaagcgctcagcgcgtgcacagggcgcccccggggcggcgagaggccttctgggcgcggtgcagacgtggaaacagcgacggccgagtagcgggccacctgtctccgcgcccgggggcgccttccccctcggcggaatcagagggcgcggctttccctcgagcagtgcggaaggcagcaggctccgctcggcgtcccttctccgcagatgcggcgctgccccgcgtgcaagacttgcactccgcgcgcacccttagagctcccggcttctgcgcgcttctcccgacgcctctcggcgagggcttctcacttgattttggtaccaatcgcctacggctcagtttcagtcagtggggccgggaattgcaagacgattcctgcgacgcggcgccggaatttgcagctctaatcagggcctgagcatcgtcgcctcccgccttctctgcgggcgtctcccttccctcctggccccccgggaaggtggcgcccctggagctttccccgcgtgtcgccggcacaggcacgacgcggggaccgtctcactagcctctaggagacacgcgcgcttcccaaagtgaccagagatttagagggtgtgagatggaaaagtcaaggcatgtgcttctcactcggcgtctgcaagaccccagagcagagctggcaggaactcctcgctactttcccggtcgagcgccggtgctgacgctcgtccgtgacttccacggagccacagcgcccactagcggccagctttgcttctccgcatctcgagcgctctgcggtccaccgacccggatccagcatactgcagcatctaatcaagtcacagttccaaggaaaatctttttatatgtccaacagtaggaagaacacggtagaaataaggcacagtgcaaatgtac

SEQ ID NO: 334820 - DNA, 501 bp, Homo sapiens
  chr13:108518148-108518649
  hyper
cgacgcactgcctgcaagtggtcatctcgccgccttccttgagcaccacatccagactgcagttcaaagtgttgggactggacaaccccgagaacaactcccaaagtgtgtaggaattacaaaacgaaaggtaaaaatccgacaagttccagagcggagtgggatgcttgctcctcacctcctgcccgtcccccccggccgccccccgactccagttcctggcgcacaccgcgtccgcattctccaccgtgaagcactggcccgaggacgcgccctgggggtaacaagtctccaggcgccacacgggcttggcagagtttcctagaaaaagagccttgccccggtcgtctttgcctcggttgcccttgccgccgccgccgccgccgtctcccggggaggggggcagggtgggggacgaggaggcggagaggagtctgtgtgcctgggcggcgggcgaggactcccccatgctcgccaggagcgcgggccaggagggctcct

SEQ ID NO: 334821 - DNA, 2348 bp, Homo sapiens
  chr13:108518714-108521062
  hyper
cgctgctgctgctggtgctccttgtcccgggcccgggtcagcttggcctcggcgcagaaccacaagtgatcagagagcaggactgtgaaaaacaagagagatgccagagacagtcgccatttctgagccctctcggaatcgatgaacggtttctcgttctctcggggtgctgccaaccagatttttaagccgtcgtcatactgccgacacatccaagcacccctggtcatattttgggaacgcacagccctggccgactccaccgtgagggcgcctgtgccggtgtcaccacaatatgcattgacttaaagggtttaatttccttatcccctcctcccgtttcttctctctcctctctctctttctctctcttcccctctccctctctcctctctctctctctccctctccctctcttttatctctctctgtctcttttgcctacataaatattaccaggctttgaaggaaggtctgacttgcttcctaatcatcagccgaccccatcctctgtagagtgggaaacaataatggagagagagagagagagagagacggaggaggctggtgctggtggccggcggcgaggctgggtgcagggggcgatggtggaggtgacagggtggctggcgcggctccggtcacccaggcattgtcagcgcgcgggtccccatggccccgcggagcccagcccgctctcccctgccaggggcatgccgcgcctccgctgcccactgacggcgcccggagcgcctcccctcctcctcctcctcctcctcttcttctcctcctcttcctcctccttcctttccttctccttcttcttctcctccgcctcccgctcctgctccgcgctggctctcccagagtccggagcctgggctgcctccggcggggcgctccctcccccccaccccccaccccgcgctctaagtgctgccgccgccgccgccgccgccgccgctgccgcagggccgcccgcgggcgccgccgccggggctccgactgctgacgccgcctcccgcggagctccgggccgaatcgcctgggctgggcctcccgagagccacagtcatcttcagtccgcgggctaagttgccgccatcttcgtcctggagaaacacttttttggggggagcgctggcttttgcgtcatctcctcccgcgccgagctcgctccatcctggcgcagtggcgccggctcggcccgggaggagggagaaggcgcgcgggggcgggcggcggcggggccgcggggcccgggggcccccgcccggctccccgggctcaggcgcctgctctttcctttctgtccccctgtccacgatattttgttttaatcactgaagagaaaaataaaagtcagactgcggacggcatggccggtgaggctcctcgcggccgcgccgcccgcacgctctggctccgggaagcgtccgagttgcaggcgcccgggcagaggtctctactggtgcgagggtctgggcagagtcctctcaactaaggaccgagccacttcggatggaaggtgggggtccgcggaggaagctcgaattggctagaggagggatgaggtgacatttggtctctgaatgcgtctcggatcccggaccgcgagatccatcgctcccagtgcgtgcagttattccgtcctgctgtgtgacacgggagaatggcgcgcacgcctgtgcacctgcatcgaccgtgtagctgcctgggtgacagccacccatttgtctatgttttctttcctattctaaagtaaacgattagaagtggcctcatagagtcttaggaagaaacagtaagccctgtgccacccggggtcactgcctagccctgccctccgcgcgcaccgtccgcgtctccgagggctcctcctcggacctggaccctctggagcggcttcgaccctccctctgcccccgctgcctgcgtccagaccccctcccgggtgggctcctccgaggacctccgcagccgcgggcgagctgggtgcctgcgagtcgccgccgcagtctgagcctctggtgccccttagcgttggctctcggagttctgagaagggaaaggagacagacactctgggaaaatctggggtcacctcgattccggctcctacgctggatgccgtgggcaagcatcggtctcctttgatctgaagatcctgcccactccgccccttgcccctgccagacccgcgggagcagcaggtggcgtgggtgccagacgctgccggtgcgcaccgagtgcagcgctgccccggctcgccccgggggtcgcgtgggacagcggtttgcggtgtcgccctctctgcggtgctttccaaggaccctcatgccccgccc

SEQ ID NO: 334822 - DNA, 1154 bp, Homo sapiens
  chr13:109147714-109148868
  hyper
tcaggagtgagctgcgttcttagaattgtagcagagagagaggagggagagagcagaggatcggagggcaggagtggagagaggcgcggtctcctggaacgcgcgggggaacgtggaaaggagggcgcgggagacccggagggctgccccggcggggattagaagcgaggcgggttcagcgtcctgggcgccgcaggaaagtgacccgcagagcgaggcgcggcgccccgggagctggagctcagccccacgacccgcgctgcggcgggcaccacgcggggggcgcgcggggaggggagaggcggggccggcggggactgtgtcgccgccgacgccgcggctgcgggtcgcagaggcgggcagagagagccgccgccgagcgggtggcggagcagtccccagcctccagccggcctggctgcgcgcaaccgcgccggccccgggcacaggggcaactgccgacccctctcacccgccgcgcggggctggtttccgagccgagtcccggccatcgccgcgtcgcctggcgcccggctccggcggacccttctccggcaggtaggggcgtcggcggggcgctgcgcgcggtccaagcgcggggaacgcggcggggcagcctctccgagtctggaggtacgcggggcgcagaggctgttctgcaccgccgggctggggacgccgggagggtgccccgggtcggacttgcggcgctgggtccccacccagagttcccgcacggtgagggttggacgcgtctggggggcgtggagaggaggcttgtcggtcccttcctgggaaaggaatcgcggggacttcccaaccgctaggacgcgtaagccgaggctgggagtagaagccttctgaactctggacctaccccagaaggagggggcgaaactggccatttcgagggacgcggaagccccgttgctaggggagatgggggaagcggcgtggtcacctacacaaccgctcccaggcgcgatgggggctctgcttcctcctcctctgtttctttggggatggaaaagagagcagaacaaagatgtagagtgaaggagggctccccagctgttgcctcttgcgcggattctgctgacccctctgcgcgaccccagctgggcagtgtcagctccattgtctcagaggccggc

SEQ ID NO: 334823 - DNA, 1266 bp, Homo sapiens
  chr13:110434419-110435685
  hyper
ggacaagaagtcaatgctggcgtaggtgttggcagggggcagggcaccgggacccggccccccgcacccgccgccggtgctgccgacgcccacagcgctgatgagacccccgaggcttcgggtccggccccaggagctcttgtctcccggctgaggaagcggcggcggcggcggctgcggctggggtggcagcccgggctcctccctcacgtcgatggcgatgtagttgagaccattctggaagccggcagaggtctctctgcgcatgggcgatccaccgctcccaggacaaccgaccaagcccccgggctgacccggggtccacggccggccctgcggtgccaaagggggcgccggctgcaactgtcgtggggaggtgggcggctcgtcgccccctccagggccgacacccacgccgccctcgctgcttttcctgagagagacattttccacggaggccgagttgtggcgcttggggttgtgggcgaaggacggggacacgggggtgaccgtcgtggtggaggagaaggtctcggaactgtggcggcggcggcccccctgcgggtctgcgcggatgaccttggcgccgcggtgggggtccgggggctggctggcctgcaggaaggcctcgactcccgacacctgctccatgaggctcagcctcttcacgcccgacgtcgggctggccacgcgggcagcttctggcttcgggggggccgcgataggttgcggcggggtggcggccacaccaaaagccatctcggtgtagtcaccattgtccccggtgtccgaggacaacgatgaggcggcgcccgggccctgggcggtggcaacggccgaggcggggggcaggcggtacagctcccccggggccggcggcggtggcggcggctgcagagacgacgacggggacgcggacggacgcgggggcaacggcggatacggggaggaggcctcgggggacaggaggccgtccaaggagcccacggggtggccgctcggggcgcccggcttaggagacttgggggagctgaagtcgaggttcatgtagtcggagagcggagaccgctgccggctgtcgctgctggtgcccggggtgcctgagcccagcgacgaggccgggctgctggcggacaagagcgaggaggacgaggccgccgacgccagcaggggaggcgcgggcggcgacaggcgggccccgggctcgccaaagtcgatgttgatgtactcgccggggctcttgggctccggtggcagtgggtactc

SEQ ID NO: 334824 - DNA, 1966 bp, Homo sapiens
  chr13:110958728-110960694
  hyper
ccttaggcagcagtcgtgggaaagctcagatacagctgtttccaggcaaagggcccagagcttttcagcctcagccaccagggtctccagacaaggagaaatacgcccaaagctgctcccaggggctaggagctcggagctcccagtgtgggtctctgagcagcgcggggtgggcgctcccggccctccagcccccaactccctcgcgcacccgggacgggtgaaggcgcccagctgccgagcatacccgcgacgcgggttcaaatcccgccggctcccaggcaccctcaccccgccacagcgcgggctgtttctcctcccttccccggaggaattccttaactctccagtacccataccataacaaaggaggctcggtccaccaatgcgcgatcgtagcctacagggacccccaacgaaccccggcccagagaatgcacctggccgtgccacgcgcgacccccgaggggcaggcggacgggtccaggcgcggacaaaggggcctctcggggcgcccaagctcggggcgggacgccgggagcggagctggccgggaactcaccttcgcagcggcccggctgtgctcctcgtggagcagaagggcggcgggcagcagcagcagccagacgctgagccggggccccatggtggcgcgcccgaggcggcgagggacggctgcccggcgtgcgggggccgcggcggacagctagctctcggaaggccggacttccagcgctacgcaccgtcccgggtgcggcggctccaagcggagacctgagcgcggcgggccgagctccccaatttgttggcgctgccccctcccccccggcggtgcgcgggcggcgcctcaaaggggaggaccctgcggcgcgggtaagaggcggcgggagcgcgcggcccgggagtgtggctgcagtgcgccgggacaccagggctccgcgctccgcactcaagaggctcccgcgtcccaacccctcgcgcccgcgcgttcgcggatccaggccgaggaccgaaaggggccgcccgagcccccggggccggcgcccagagagcccagcaaggccggccgccctgccggtgtgccgccggcgggtgcttctggaagggccaatgcgttcgggcagcagcccctgaagccgagcccgaggtgagagcgacccccgagcggcgcccagaccctggcccgagagcaccgacttggagcgccttgtgcaggctagggctgcacgctctcctgcttgggagtagaaagggggagggtgggagagcgaagaccgagctcctcggccaaggagcacccacaggggcctaacgggaggctctccttctttccgggtcgtgggggggacggccctccggtcacccctgcatgcgggccgcgcaccgcgctgtccccgcgtctcgcggaccgagaccggcggtgaggatgggctgcctccctcatcctgcgctaaactcgctttgtctgtcgcctctaggctaagtgggactgaccggggcccagagtggacgaaccgccagcatggggagagaccagcgcgcggtggccggccctgccctacggcggtaagcgactttctgcctggtccccgtgggtcacgcgcgcatggacccttcggtgtaactctcggggactgacaagccgggcccgcacgttcacgtctctcttcctccctttcccatgcaggtggctgctgctggggacagtgaccgtggggttcctcgcccagagcgtcttggcggtaagtcctggctcccgcgcttggacttgcgcgcccgagagtggttgggacgtttgagtggccttggagaaggcagctcgtccgtgcgctcccgagtgtgtgtgtgcgtgtggatgttcgccaggctgcccaccaaggttctgagaaagcttgctcttccctcatcatgctttccacctttccttccccttgggttcccagcgtcaatcctgtgttttgcaagc

SEQ ID NO: 334825 - DNA, 819 bp, Homo sapiens
  chr13:111766866-111767685
  hyper
tgtcatcagttgttcgaggaagctcgcgcatgacgcgacacttgccgtctgggctctccaggttcggcctgctgctttcacagcccagatcttcggcgtccccgagacgcagccaggcgcccggcccggcccggcccggccctctgcacagccccacttcaggccacgccgtttccttgaccttcccccggcagggtctgaagcgtcaccgtccgtctagagcagagtcgcgcaggcccctgccctgccggtgaggtcggcgccgcgctccggagagtcggttcctcccgattcagacccatatggcttcagatggaaccatcatttctgttccgtcatgaccggcttgcaaggtagcaaagcgaaacaaacgtctcgttttcagcctgtccccgccaccttgaaataaaaccggcaaaaataaaaagagcattctgggaagtacttcatcatttcaacgctcacgaattcaaaacataaacaaaggcttccgagtgccccggccaggggcgcggggcgcacggcgggcccggggcaggtaagcgcaggtgcgcgcccgcccccacccccggctccctccccatccgctccccgctccccttcccctttcccttccccgcccgctcccagccgccgccgccgccccgcgcacggcctggagcggaggctgcgcagggcgcggggcggcgcgggccgggcgcgggccgggcggacggccgcgtctttcttctcctggcggtgatgtcattgggcgacggcggccgaggccggggggcggcggcgggcgcccgcaggttcccgagccgctcctgagaaggc

SEQ ID NO: 334826 - DNA, 877 bp, Homo sapiens
  chr13:111767694-111768571
  hyper
cgggccggggcgcacggagaagcgggccgggccggacctgctgggccgcgccgagccaatcgccggcgccggccgctcgatgggcgaggcggcggcggcggcggcgggggccgcgggccgggccgccgctccgaggtgaaggcgcgcgcccctccccgcctgcctcccgggccgcagcgatgaattccgccgagcaaaccgttacgtggctcatcactctgggggtgctggagtcgcccaaaaaaaccatctcggacccggagggctttctgcaggcgtcgctgaaggatggggtggtcctctgcaggctgctggagcgcctgctccccgggaccatcgagaaagtaagtcccggcccgcgcccccgcccgcgccccccggtccggcccgctgcggcccgggatgcgcgcggagcacctgaggccggccgcgctcgggaaacccgtgcgccctcctttgtgcgcggagcggcggcgcggccggcgccaggaccgtggcgggagctcggggggcgccattgtgtgcggggcagggggagggggccggggagcggggtcggggggaggggcggcgcgggcggcgggggtccccgggaaggagagtgcaccgcagcgaggagacggggcttctgcgccgcccgaacgctaagttgcccctccgcgtggggggccggccccgctccctggcagcagccgcatcggaaaccgcgttccgacgcggtgcggctcactccgctggctttgtgtggacagttcttgccggtggcgttgcgtgagtttcgcctcccaggttaattgaccggttgctctgtatttttaaagaggcacgcatctgtagctgagggctgcgctgtgaaacgatctactactttcccctc

SEQ ID NO: 334827 - DNA, 175 bp, Homo sapiens
  chr13:112716639-112716814
  hyper
cgcgcgtgcgcgcgcgcgcacacacacatacacacacacagttgtttgttcttcgattgtgaatgtgcggctctccacacgaaccgcccgaaagaaagcctgggtcgcttttgaggagaaggagtttcttgacccttccccgcaaacgctactggaacggcctccaaactaggac

SEQ ID NO: 334828 - DNA, 664 bp, Homo sapiens
  chr13:112722879-112723543
  hyper
cggcggccgcgtcgtcgggcgccctgggcgcgctgggctctctggtgaagtcggagcccagcggcagcccgcccgccccagcgcactcgcgggcgccgtgccccggggacctgcgcgagatgatcagcatgtacttgcccgccggcgaggggggcgacccggcggcggcagcagcggccgcggcgcagagccggctgcactcgctgccgcagcactaccagggcgcgggcgcgggcgtgaacggcacggtgcccctgacgcacatctagcgccttcgggacgccggggactctgcggcggcgacccacgagctcgcggcccgcgcccggctcccgccccgccccggcgcggcgtggcttttgtacagacgttcccacattcttgtcaaaaggaaaatactggagacgaacgccgggtgacgcgtgtcccccactcaccttccccggagaccctggcgaccgccgggcgctgacaccagacttgggttttagactgaacttcggtgttttcttgagactttttgtacagtatttatcacctacggaggaagcggaaagcgttttctttgctcgaggggacaaaaaagtcaaaacgaggcgagaggcgaagcccacttttgtataccggccggcgcgctcactttcctccgcgttgcttccggacg

SEQ ID NO: 334829 - DNA, 922 bp, Homo sapiens
  chr13:112760441-112761363
  hyper
cggagctgccctggctggtgattggaggtttaacgtccggaattcaggcgcttctgcagctcagatttgccggccaaggggcctcagttgcaacttttcaaaatggtgtttctggaaaataacaaattcagactcaactggtgacagcttttggctatagagaatgaaactgcttccctttggcggtggaactcttaaacttcgaagagtgaaagaatacaatgaaataaaatgccataagatcactggatttttcagaaaaaggaagaccccaaattactcccaaaatgaggctttgtaaattcttgttaaaaatctttaaatctcgaatttccccctacaacatctgatgagtgctttaagagcaaacgagcaaatcccacctcgagaatcaacaaacccaagctctggccaaggctctccccgcgttttcttctcgtgacctggggaatgtcccgccccatcgctcacctggctcttgtcatctcgctcatcttgaagtgacccgtggacaatgctgctccctgccgcagctccgccggtcactcaggcagaacggggtatgcaaatggcctggagaggccgaggccgaacactgcgcccattgtcccgggcgctcaaagcgccgagcagctgcgcagactttctgggctcggaccctcggccgccacgctaatgtcatcattgcaaaacatcagattttgagaactatgcagtctgaattcattagcagccttctcggcgaaggttcttttccccgtgacaagtttcaaagtccagaccccctccaacgttggtaggggtaggaagaggaggaggggcccagggaggggggtctttcgcaagtggggcctcgggggatccctgctctccttctggtgcattccgcaactttaaaagccttccttggggttctgagcgc

SEQ ID NO: 334830 - DNA, 281 bp, Homo sapiens
  chr13:113547097-113547378
  hyper
cgctggggagggcaggttccccagtggagccactccctgcgggtctgagtggggcccggggtctctgcacggtcaccgatgctgctgctgctccagggagcgggcttgcaggagcaaggatccagtccctgaacgcacgtgctccccccgggagaaattctgcagccaggcttggtccacgcaccgtcctcccggcccacacaccctcctcccggacctcagtctgtctctgtgtatcacatgcctgttcccagtgttctgacctcaggtgggcacggcgc

SEQ ID NO: 334831 - DNA, 1101 bp, Homo sapiens
  chr13:113622881-113623982
  hyper
cggccagccacggacccacgcatggacccagcgacccacggacctgcttacctgggcgcggcgcgggtggcatgcggccacacggaaggggcgcgctgggctgctgcggcctctgcagcttctacacctgccacggggcggccggaggtaaagggaggcggcggccaggcgcggccccgcggaggcagctgcactcgctcggtccactcgcggcttcgcggctgcccgcaaaccaggagggcgtggagacccggaaccggggggaagggcgggggcacttgtgcggcacccgcggggctcccaggggacctcggcggtgacacgaatttctaggtgaccttggcggtgacacgaatttctaggtgacctgtgtgatacactaggtgacctagtgacacaggtgacacttccaggtgaccgcggcggtgacccgcggggctcccaggtgacctcgttggtgagccccggggctccccgacgaccgcggcggtgacacgcggggctcccaggtgaccccggcggtgcactcacaggactcccaggtgacccgcggtggtgacacaccggggcgggcgcgcgccgcttccgcttccgccgagccgccccccgccccccgcggcgcagcgcgcgcccccctcccggtggcgcggaaccaatcctgggcagggaggcggcggctggaggctgaaagcgctgccgtggccccctccccgcctccgccgcgccccctccgcactcgcacggccccacccgcaggcgccccccgtgcggaggaagcggatctgccaggatcatttttgttgtgtcggaggatgaggttttggctgaggactgaagagatggccttggaagaaatggtgcagagattaaatgcggtttccaagcacacgggtaggaggagctgctggccgtcagtgatctgtgcttaagcttgacatcatgggctgaaatgtggggaaatgcgtctgatttttgtaagccgccctcgtgttcctttctagccgtggtagctgtgacatggggggcactggttggcagctggtgtgttttcagaggctgtcggcgatcgtatgctgcccgggatagtcaaaatgactgcac

SEQ ID NO: 334832 - DNA, 685 bp, Homo sapiens
  chr13:114017783-114018468
  hyper
cgctgggattacaggcgtgagccaccgcgcccggcatggatcgagttttgatccatcccgatatggctccctgctgggagggacgggtctccttcgcgtccgacccgccggcccatctcaaagcgggaaaaccggtccctgcggctgccctagctcggagcccgcagcttcgtcccgacctgcccggaaaggttcctccccctccctccgctccgggagcccggactttgcccggcccgtcccagcccaacccacctgcgccctcgggacccacctgcgcccccgggacccacctgtccggctcctggggacgcccccgccctgcagcagccgggaccatttgatcgccctgcgggtgagcgtgaccaggtagctggagaaaaacttctcgtaggcggcgtcgtcgaagtcctcaggccgctcgaatccgtacgggtcgatcctgcaaaaccgagagaaggaggccggcgtccccgaagtttcctctggggggtcgcgggcccgcgcggggaccgcagccgccggggacgcccgcaccccgcgccacacacctggggacccgcgagcgctcggcgggctgcatgcggggagggaggcgcgcaccgagcgaggccagcgggtcccaagttcgcctcccggctccggggcgcttaagtccttccggcgggaccgcgggcgcgtgggg

SEQ ID NO: 334833 - DNA, 552 bp, Homo sapiens
  chr13:114565970-114566522
  hyper
ggggccagcaccgtcgggctcctgaaagcacccgctgcctccaggagagcacctggcagaacggggccgcggagccgccctcccctcccgcatgcggccccgctcgattcctggaatcttatttttggacctgctgccgcaagcagttcccgccctcggccctttcaattcctctttcgggaggggactgctctccacccctctcaggaggacgaggcgcggcccgggggttcctcacctccagcccagcagagggagggccgcggggaagcggtttgggttttaaccattgtgtttctctcgcactttggaaacggactcccggcttccccgcggggaggcgtctgacagcgagcgtttcccggacagccccgcagcgtctcaccggcctgcgcggggatcccggggtcgccgggggatgggcgtgggggacgcggggcgggccggggctcctgggaccctgaggccaggcctcgccgcgcggagctggggggcggcagcagcgctgcctctcgggagcggttggaggcgcgcgggcgccaggggttcccc

SEQ ID NO: 334834 - DNA, 226 bp, Homo sapiens
  chr13:114776260-114776486
  hyper
ggggaggagggggccgcgaggggagtagggggctgcgtgacgaggagcctccagcaccgcaacgcccaggaggcgccaggttaggccatctgcctggcctgttcagccgcttcccacacctgacaggtcagatgctgctcctgccacggggccggcgacgagccacaggctcccgaaaaaggcaaggggttcactttaggaggggagaggtgagcgggacggggac

SEQ ID NO: 334835 - DNA, 248 bp, Homo sapiens
  chr13:114776788-114777036
  hyper
cgaggggacgaaatgcaggagtcacctcagagctgctgtggcttgtgcatgagctacggagaaacaggggtagcgacgcagatgggactggagggggtgggcgtcccacagtctcaggagctgctgagaccatcccgcaggcaacatccgacggcaccgcggtgacccactctctcggcccagcgtgcagggtgcatctcaaagtcgaaagcatcaggtggggtcatggctctggggcgctgagtctc

SEQ ID NO: 334836 - DNA, 725 bp, Homo sapiens
  chr14:21098618-21099343
  hyper
cgtagttggaaattcttagagtcctccgctctaccaggtgagctatcggaaagtgtctgtgacattcgttagcgtagatttttgtgcattgagtagcggctggtgagactcctgacttctttgcatttgggctcagattactgttcaagaagttccagagagccaggtctatagttaactgagtcccgggagcagccttgaggcagtaggaagtgagatctgagtcggaggtagtgagaatggaaacagagcagaagccaccggcttggggtgaatctgcatagcttctgaactaggctgccctcagagtaatctgcgagccagttttcgccccaggagcgcaggaagggaccaccaggcaggctacaagtggagaagtgcgcaggactccgggagtcatggctatcagcagattagattagatctgttccccacaaacacagaggtatggaccaagtgtaacatttttctcccagagacgtgaacagtctagtttcttcctcgcttactgcagcgtacaaacacctattttcccagtatcgttcataggatcccgacgctgtactttttcgtctcaaatccaggatctggctttcatggaaagatcataaaatgcttcctttcttcactagtttgtttcagcgttgaaaaggctaaaaagctcctgctcttttgcttgggaaaagtattcctacagccgaggccccagcgagatttgaactcgc

SEQ ID NO: 334837 - DNA, 686 bp, Homo sapiens
  chr14:21099793-21100479
  hyper
cgaacaaacaaaccataaaagacatttaatatatattgttatcttaaaaacgcatgctccacgatacatgctccccagcttcaggcttgacaagtcccaagtgccgagcaacatcagggtcagggtgcgtttcattacagaagagaatgcagtagtgatcagagaggttccccccaacccgcttggattcttagtccaactctcttagtctgagattggggttgtttttaaaagggaggcggctgtcttcaagcacaggacgtacccctcggaccttcagagtttgggggtggacgcagtgagggcgccaaggcttccagatctcccccagcctttcagcggagtccggcttggtcacagattcctctaagttacctgaagcagaggtggctagaaggggtccagcccttttcttggtcctttaacactcctcttcctagcatctcggagtcggaaggcagctccttctctttgggcctccaggcttttctaagcgccaacttgaagtccagaaagaataaaagtggcgtcgtcgcatgggaaggttggggcggaagagtttctcttcttttctctcctttggtgtcagcctgaccaggaggctcagtcattcactggacagctcccactggccgggagccagcttggcgcagggcaagcaatgtgatcaaggcagacactgatgc

SEQ ID NO: 334838 - DNA, 443 bp, Homo sapiens
  chr14:21100726-21101169
  hyper
ggccaaagcacccacgtggagtgctgggtgctgtaggcgagaggtctgaggtagtggcttttagagctcaacatcttggtaatgttggttcgaccttttcccctgccagtcccgcggtgacctttatctttcggtgagtgaaatcggtcgttcgtgtttttcgtgggtcttccaaccacaggccgcctgagatggttctagtccctttgagtatacagacccttcctgtgcattgaccgacacagctcggcccggatcccgaaatgaacgtttctaccttcggaacgctgcgtctcggatccttctgaacccgcacgttgactttcctggagtctggagaaaatcactagattctaaaggaatcaaaactgttcaagtgttgtgctacaactaaaaaaataaatgaacactcttaaagaatagaatctctccagttctggctc

SEQ ID NO: 334839 - DNA, 833 bp, Homo sapiens
  chr14:21439074-21439907
  hyper
cgcaatggaaagctcgtggcatacagcaggcgctcattatttgaagcctcttcattctcctgcttcctcggtggttaaggaggcttttggaagttcaagtccgtctcagctaagaaccaggagacacggctttggtgcctctcggcccgctgggtctcggcggcgcagcgtcccctgccggccactgtggcggcggctggaatcagcctcagcacttaaggggccgcgcgggaggagttgccccacctccaggcagctctttccagagcagtgagggcaagtctggggattatctccataaaggaagcgaggtggctcggtggaggggcttcagatccccttcccaggaccctgtgacccgccatcggaagagagtggacctcattctatttcaatgtctgcatagtacagacatttgctgtgggcaaatcggacccatgagcccagagagcatcatcccgggaaagctttcccgaagcacaggcttccctgcaccaccatacacgcgcacacccgcacgcgctcactcccccagccctcctcccctccctcactcccgccctggaagaagcggggagctgaggggagaggtggaaccagcagagaaacgggccgggcaggagcccgcaccagcccggcttgggacaccgcagccgctcctgccctctgctggctggaaggcgcacttacacattgcggtcatcgcggatcgccgagggccgctggtgccgctctgccgccaaggacgctcagccattggagtagaagtgagagaggccgcgggctgagtagagaggggtgaggattccggaaaggaagcatcgtcaggaagc

SEQ ID NO: 334840 - DNA, 678 bp, Homo sapiens
  chr14:21539350-21540028
  hyper
cgctggacgctggagggtacgctaaggagaagcccacaccaacaggagtgaacactgccctgggaactttcactgcagagtactctgaagcaccgctgcgagagtgggcactgccagagagagcgcccactgcaaagagggcgggggcatggccaaggggccgctcgctgcagagtggaggagggggagaggccttgccagggggagctcaccgcagggagtggaggaggggcaggggcactactggggccgcccctctacggagggaagggcaccctctggcagggaggctggaggaaaaagaaagaggaactgggccagggagagctgactcagtctctctggtctcctctctggtccccgccggcaggaggctgggtctccgtgctcccgcccgccgcctccctccccagacccctcctcccctcctgccgcggccgtttcctgtggctgagactctcgctcagccatgagctcaccgcccctaatgggttgcagctgcctcgctgctcaagccctagctccgcactccctgccttggagcagacggccccactctgcctcacccccgcccatctccaccttccccccacccacgcgcactgcgtccgcctggtcccgggaacactgggggtctgtctgctcgcccacacaccttggggccgggtctgcgcgctg

SEQ ID NO: 334841 - DNA, 364 bp, Homo sapiens
  chr14:21769015-21769379
  hyper
cggtagatgaatacatattatagatcaattcgtgattatatgtcccaaataacccgtagaaataataactgtcatgaaaggagaagccacgtgctctatttgtccacaggctgaggaccaccttgctgcggttgaccgctgctggccgggacctgcgggtcgcggaggaggcggcgccgctctcggagaccgcaaggcgcgggcagaaggcgggatggcggcagcgcctctccatgcaccagcgcccccagatgcaccgactgcaagggcatttccactgcgtcggccctgccagcccccgccgcgcccagcctcgcgtccaagtgggacacagacagctccacacagccggtgcaccggtgcc

SEQ ID NO: 334842 - DNA, 185 bp, Homo sapiens
  chr14:22004982-22005167
  hyper
cgttctcagacgcgctgggaccttcgcagtccgagattaactgttggggtttccgctgctttcgccgagacattcccgggtagagagttgggagagggaggggcaacgctcacttggtcttaaccggggtgacctggtctcgtctcccccttgggtccgaagccaattgatgcctctcccccagc

SEQ ID NO: 334843 - DNA, 528 bp, Homo sapiens
  chr14:23291814-23292342
  hyper
ctccaccccatgaacgctcagcttcctcttccctccctcccaaccctgcataagctggcggccagacaggagtctgggcgagcgccccaacccctgaccacaactgcctccggccccgagatgcttggctgaatctcggtagtgcccccagacgggaagccccttgttgggggggcgggggcgggaggcggggcgaggaatgtgcctcctcggagccggaggaggggtctcccgaaggccgtctcttccaccccgggttcccgactccccgccccctcggggtagctgttgcatcagcttccagattccaaaccaaagaaagtgggctccactaagctgggaaggcgtcgggcagcaaagccgccgccaggaggcagcgcttaatcaaaaatgtccgggccgagggggcccaggataccggagtccccggagcgtctttcatctgaagtcttagcagcagcgcggacctaacaaaaaagggagttgctgaattagttcaagaaaaggcaactggaaatgcttcatcac

SEQ ID NO: 334844 - DNA, 185 bp, Homo sapiens
  chr14:23355352-23355537
  hyper
cgggctgggaggccgcaccacgacctacccgttatcctcgttggaaacaagagcgacttggcccgctcccgggaggtatcactggagggtgtgtatcctgaacagattccatacttgcgatctcaggggaatgctctcccttccaagtcacctcttctccctaaggcctttttaccatcgcggac

SEQ ID NO: 334845 - DNA, 1218 bp, Homo sapiens
  chr14:23834174-23835392
  hyper
ggaggtctctccccggcagcctccactccctggtggactcaccgacgtggcaatggccatggctttggcctcccgcgcagcctgcctcaggccaggctcggttttgctgacttcagcggtggctgccccgcaccatggtccgcggcctctagcccccagctgtggcgcctgagtcgtggcctccgccaaggttggaggaggagaaagaaaacccacaaaacttcccaaatgagaggcaggctagccaggcaggaggaggagcggggcgggccggggcgtcgctgcgggacggcatccaagggcgcgcgctgcgtgctgtccccgcggcctcccgggcgccaccggctcggccaggccccgggagctgcccgccctaggccgcgggggcgccccgggctcgcaggatccgaaaattcccttcccgggccggggcgggtgagcaggcgggcgctgggctgcgctcgacgcctctccaggccgctcaggagagcctcgagggctgggagaagccgccggggcggttgggctggacgagcgagtttaggggccaaccgtctccacccgccggccgcgctgcagagcggtgctcccagggctggggtctgcggcgaccccgctgggaggaagggagagcgagaactgagacgcttgccccaagttgcctggagccaaaggcccccgagagcgtggccgtggggctgggtcgctggagtggccgcttcggcccagacactcgcacccccggcggtgcggcggttttcacgcgcgcactcactcagcgcgcccgggggtctgaggtcgccgctacggcgcctcgccccgggcagcagcaaccagcacgcaggcacccctggaacaggcgggactgccttcccgacgcgcggcctgcgcccaggcggcggaggggcccagcccccttccagtcctcggctccagggcgcagggccacgagctcccgctcccaccctcggcccctggcacccggcgccggctccgccgccctctctcacacgcacccttggcagggccccgcggggcgccccaaagcttgggggcagctcccaggtgtctctgggaagggaaagaaaggccacaaagcaaaagaaggagcaaagagaaggcgagggaggagcaggggcccgggtcctgtggactcgcctgggctgggagtggggacactgagagggctgcgaaggctccgggggtcgcgcgtggccc

SEQ ID NO: 334846 - DNA, 282 bp, Homo sapiens; identical to SEQ ID NO: 237283
  chr14:24045264-24045546
  hyper

SEQ ID NO: 334847 - DNA, 105 bp, Homo sapiens
  chr14:24550913-24551018
  hyper
cgcagtctgtttcggtccagagcccgccccaggccccgacgctccccgggccccccagctgaccgttgctccagtcaggcgggcgccccacggtgcagggccggc

SEQ ID NO: 334848 - DNA, 637 bp, Homo sapiens
  chr14:24803729-24804366
  hyper
cgccgcgagcgcacagagcacgatccccagcagcagcagcagcagcgggtactgctggctcaggctgtagtaggtctcgtagaagaggtcttcgctggggggcggccgggggctgaagaggcgggccatgatctccccagccccgagccccggggctggctagggccgggcgccgggttacctccttcggcccggcgggccccacctgagcttttctcacccgctcaaagccgctaccaccccgcgcccccaacctcgtggcaatcccgtctcctttttcaggccctccctgcggcctcccagcccgctcccagctggcgatgaggggatccctcagtcctttcctcctcctccctcaaacccggattgtagaggtgccctagaaaagcctcatcgccaggagggcaggatttggggttggtgcgagggagccccgggttcccctgatccccgaactcactgcccgcggcgctggcgcagcggagtgggctaggtccggggagggagccggggacctgatggcggagtcacgctcgccgctgcgctctggctcagagtcccgggcgacaggcgcttccctcccggcgccgcggccccctcccacttccccgacgggacagcccggccccttcctgtg

SEQ ID NO: 334849 - DNA, 312 bp, Homo sapiens
  chr14:24808635-24808947
  hyper
cggctggggtcaaccggggtcactcacgagtttacgatcttgaccgccacatcgtagccccacttcctatgttgcgcccggaacactgtgccgaacccgcctttgccgacgagctcctggttctccagttcctcgatggacaccaagggggcgggggcaccgctgggcctgagagaggggtgtcgcccactagccggccgtgccgtgcctcagcgctgctccccgcgcccctgtgactcggcgttctcactgcaatccccagcctccctcgccggcccccaccgtccccggactcaaagacgttctctgagc

SEQ ID NO: 334850 - DNA, 205 bp, Homo sapiens
  chr14:25148244-25148449
  hyper
aactcctgaattgccgcctttcagttcctgcggctgctctgactgtctgcattgcgccctctagtgtccagactgagttcttttactgtctagactggggagtccagagcagattcttttacccgccacgtgagggagcaattcagggaaagtaaaactattagtaaaagacattattttattttcaaataatcgtaattttacc

SEQ ID NO: 334851 - DNA, 270 bp, Homo sapiens
  chr14:25601990-25602260
  hyper
cggcatccctcgggggtgggcagcatttggggaagctggcgtatgcggcacgagagtgcaaggaaggaagagctgcaaccacgtggctgagctcagccctgggagatggggccgtccttcctctgggagccacggaaatttctacctgggtctaggcgggcagaggctctgcagcagcggacacgcatgactgggtagagccagtcttcaacagtgccaccgtgtggcagagaggagcagtgacagttataactccgtagaattatatgc

SEQ ID NO: 334852 - DNA, 882 bp, Homo sapiens
  chr14:27067019-27067901
  hyper
cgcgagggctggcggggcgcggggagaagccgaggaggaggggagagtgagggaaagagtgaatgagcaggaggaggggaaggaggtggatgccgagagaggagcgagcggcagaggagggcaggagccgggaaggagcgcggcggtccccgcgccgcgctagcgttgcgctcgctcccgctgctggtgctgccgccgccgccgctgccggagcggttctgccgttgcctgggctgctcggcgctgctgctgctgccgcccggtctcgctcattatttctcccgcttgttggggggggctggcggggagggaggggggtggctgtgaggggagggtagagaggggttgagttcgtagactcccacacacttcgcgctcgggtccctgcctctcagcagcgccgccgcctcccagcgccgatgcttcagccggcggggcggctgaggggtgagggggaactccgcgggcgggggcgagggagcgtgtgtgcgcgagcgtgtgcgcgcgcgaggggagcgcgtgcgcggtgaggacgcgcgccggcggttggggcgggggcgggggccggggcgctcctgtgggaagggaggggtgaaaggtcgctggtccccggcaacacggctcaggcaaacgtaagcggcttgtcgcagaaaccaaggggtccacgaaacgcgctaggctagaaggcgggaaggagagattactgacagccgtgccagccaataaaatagaaatgtgagaaaggttcttcgggccccttcccaatcaggaaacttgggtgatgaggggcagcgaaggggtggggtgggatcttggtccagctggtactggagcggcgacaattttggctagtctaagaagggcattcgagtgaccgttgac

SEQ ID NO: 334853 - DNA, 682 bp, Homo sapiens
  chr14:29225611-29226293
  hyper
agaatttgagcgctcgaatgctgttgttaaatttcttcccagagccccatgctccctcgtttagcatctcccttccccaataattacttgagaggatgagctcgagattgaagagtgaggttggcttttctgtgtgaggagccgataggatccaccaacactaaaatcaaaaagactcctggtgcttgcgagtacaaccccaaattctctcgcacactgcccaagtttcttgaaactcggaggctcagctcagtgtaaaaacatgggggttctcctgagtcggtttccctgaccacagggggacccctgcaaacacggcctcctctttaatacctttgtaactcagttcttcaagcaacccacctaggagaataaaaggacccactgagctccaataactgagtagatgattaaataaagccgagatctcagatcttcgcgtttggggtggggagtgggggcgctggggaaaagtcgggaatagccccgcggtacctggggatcccagttgttttttctaagaaagcccggggttaaaaaatgcattggaatgtggcgatgcctccatcagccgtcactttataagttcccaagtcacgctgctctagaccattgtggatgaaagtggattgtctctccagaaccaaatattccctgacctgcttccccaacgcgccctcac

SEQ ID NO: 334854 - DNA, 1265 bp, Homo sapiens; identical to SEQ ID NO: 237310
  chr14:29228250-29229515
  hyper

SEQ ID NO: 334855 - DNA, 2266 bp, Homo sapiens
  chr14:29234550-29236816
  hyper
cgggatccttttaaagcccccgattcgcaatttccccattcacttcaacctccaaccgaaccttcccagttccaaagcccaagaagctgggactgtgagatccacgttcccaaggctccccggtgctttccagcagcactcagggttggcaagagctggcttcagtatactgttatttcaggaatgaggcccgcacaaaataaaagcatttgagaaacggaaaggaaaaaaaaggagtgaaaataggaaggcttaaaaaaaaaaccggaaagaaatagacgcccacccttattttccctccaatgtcaacaagcaaaacgaaaatatttccagggtgatcgctcgcagctacccgcttccaattcggattagaagctgaggctggagcggcgaggagaaaacgacatcgagtcaccccgcgcgtgagcgacgctctggagcaggagagaaggaaaaggaagagacacacgtatatagcatgtgttacctgatttatttcgagattgtttggtactgttttctctctgggcacctctcatttcggaaggccatcagaggcgcccactactgagcggccccggccgccgcagcagcacccggagccccagtcccggtttccccgcggtgccggagcccggagctcgccgccgcccaggcctcaggaatcgagtaagtaacccctgtttggccccgcgctcctctgcccacttcctcctcctcatctcatcgctcccaaagctctcccacaccctcctcccccgaagtaaaggacacccccgcacacacgccagcggtgggccttatctccccccttatccaaagctgcgctagactattacctacaaagggcacaattttcctgctggctcagaaatgccagacactggcctgcaaggccgactcggaaaagtagtgcctcgcctctacctcctccatttcctgccctctcgcatcctctccctgcactcccactcttcccactaccaccaccacccccgctttcaaaaataaaattggatacaaactttaatcactaaggacaaatattgacgcttaaacgaaaatgacccagtacaatgaggaggaagccggaaatgtgagctattggccctaggaggggaatttcggtggagcggagccggcggggtggagggggtggcgggggcgcagggaagggctgcggcaccgcgtgctcccgccggcgtatccctacgcggctccgcgcggcctcggggtccgaggcccgcggagagggggaggcgagcgcccgagggggcggcagccggcgggcggggcgggggtgggtgggcccggcccctccgattggtcgacggcgagagagacgctcccgcacgccgccagctctgattggcccagcggtaggaaaggttaaaccaaaaatttttttacagccctagtgtgcgcctgtagctcggaaaattaattgtggctatagccgcctcgatcgctgtctccccagcctcgccgcggccgctccgggacgcgcccgcccgccgcccggctctccccccctttgggctgctgctgctgctgctgtgactgctgctgcgagaggaggaggaggaggaggaagcagcgggggggggagcggggggtggggggggagaccaagaagtacagttgggagcgagggagcttcacccccggggcggtggttgtttcttttttctttctttcttttttcttttcctttttttttttttttctaattcctgaggggtggttgctgcttttgctacatgacttgccagcgcccgagcctgcggtccaactgcgctgctgccggagcgctcagtgccgccgctgccgcccgcgccccccgcgccccgttcggcacccaccggtcgccgccgcccgccgcgccgctgtcccgctcccgcgccgccgccgccgtttccccccgacgactgggtgatgctggacatgggagataggaaagaggtgaaaatgatccccaagtcctcgttcagcatcaacagcctggtgcccgaggcggtccagaacgacaaccaccacgcgagccacggccaccacaacagccaccacccccagcaccaccaccaccaccaccaccatcaccaccacccgccgccgcccgccccgcaaccgccgccgccgccgcagcagcagcagccgccgccgccgccgcccccggcaccgcagcccccccagacgcggggcgccccggccgccgacgacgacaagggcccccagcagctgctgctcccgccgccgccaccgccac

SEQ ID NO: 334856 - DNA, 464 bp, Homo sapiens
  chr14:29243307-29243771
  hyper
cgttctgggcttgactttgtccctgctgggaatatcccagttcctggctttggaaatctcaggcaaataattgattcttaatgcacacttaggagacgtcggtagtacgctcgagagcctctctgtcccagagtggctgagagcacgcgccagacacaggttggctcggcccgaagcgaatttgggactctcgtcgcggtgtcctattaattagcttttcccggcgcctcagggactccggggtgaagatggagaggtggcataatggcgggacttgaagtcgttgtggcagggacctggcagcgttgttttctcgggttttgaaccggtgtggagaagtaacttcagctgctgagttggggccgccctggctgcgcggtggcggaggaggagaggagaagcgctctcgggacattgcggcggcgatccccgcagagggtgaagccgggcgctgcgcagggagc

SEQ ID NO: 334857 - DNA, 108 bp, Homo sapiens; identical to SEQ ID NO: 237317
  chr14:29244138-29244246
  hyper

SEQ ID NO: 334858 - DNA, 595 bp, Homo sapiens
  chr14:29247133-29247728
  hyper
atccttagcgtcagcgctgtaagaggtggagccgctcagtcccgcgggtggctgcagacagaaggtgggcgagtcctgggacttaaaaagttttgcagaaggttgaaaagaggagcagagggagagttttgagtttatttattttattttcctttttttttttttgtcttgtgccaagcccttgaagttaacgtagcgacgacgtggtccttgtaggaccaagcattcttggcattctgtcgagattgagattccagagcatcggatgaacgggacttatagctaaggcgtactcacccacccctcccttcgtctttttacgcacgcagcaactcgtcctcacgtgcataggggtagtggacagtgttgacttgaattgctgtccctcgttccaagcctttcctgtgaatgaacccgaaaacactcgacaggtcgtgaataatcgttttaatgagtgtgcaaagcgtgcgacggggtgcaccgagctgtcgggttaaacaaacaacttgtaccctgaccaaatccgattgttaaagtgcaaagtgatgtcagtaccatttccattgcctttcggaaatccacagatctgacacgc

SEQ ID NO: 334859 - DNA, 754 bp, Homo sapiens
  chr14:29254365-29255119
  hyper
cgtacgtccccgcacccctttcgccccagcggccgctcacaaagcgccacccgcgcctcgggcgcccgcagaagccggagccagttctcagccctgatcgccgccagccgcccaggcttcggggaaggagggaggggagaataatgcgcccctctttcaataaacgccactgccaaccactccaacagacacactttcggtcccccgccagagctccggtgcccccgagtgaccgctttctgcgatcgcgtccgccgggaccccgtccctctttccccttcagtcttcagggagggggaggcgctccgcattagcggggcagttcagcaaccccgaccccacccgcgtggctccaggcccaggggtccgttcacttccccgtccggtttgggggacgccaattcgcctaagaaaaccctggcagaagagcgcggacccttcactacaaacctcacgtcagggttacagccacatttaggaacctcttcggaaaagctgagaaatcactgttttgcaaaaagccttctgtactgtgatggggctttgtggtgagaggaacctctgagaagcctcgtgcggcttgagtttagagtcacgccctgcccagcgacattctcccgcgcacgggagaacctgcacttccggtctccaaccctcgcgggccgtgactcttcccctcccccgcgccgggccctgcatttccggcccccttgctctcctgcacttccgcccagtcacatggatgatggatagc

SEQ ID NO: 334860 - DNA, 213 bp, Homo sapiens
  chr14:30739859-30740072
  hyper
cggaacacaagcgttttgcttggtcactaagcctagacaaatgtaagtttccccgccccagctcccctcagcctgtcacacaaaagcgttcacatcagcagtcgtcagcggcgatgtcaggcgccgtgtcgttcttcaaacccttgggaaagctttagcttctcaagccaattgcactgcattgtcagtaggggtgtccgtgagctccccctc

SEQ ID NO: 334861 - DNA, 195 bp, Homo sapiens
  chr14:32671357-32671552
  hyper
cgcggttcaacgaaggtcgttgggcaagatacggtggtgttcctagaggttgttcaagatctctcggggcctgcattttcctgctcgcgagcttggcccagtagacacctacgatgctgtccgggcctcccaccagtcctgtcgcacagtgggcacacttcctcgacagcctccatcttcgaggcgcctagttac

SEQ ID NO: 334862 - DNA, 1837 bp, Homo sapiens
  chr14:36002437-36004274
  hyper
cgccggcatttctcactcaatctactccatgctaaacaggccggttaggaattaagtcatactctgggtagtacaagtggaaagtgtgaacagagaaaccactttatgcgaggacagtggaaaatgagatcctcctttcctctccctactcctgctcctatcgagaagcacttaagagcgcagacgcccaggacccagccgcgctcgggcgtcccgactcggaggctggcggcgggcaggcacgctctcccgcgctgagagcccttctgcggagatgaactctcgagtgtcgccgccgcgcgcgggcccgatcgataccggcgggcggacgtgctcccgccgccgacagcagccacagggcggtgcagtcagctgtccggccgctcggtcgcacttctcatcagctcaatacccgcagaggacgtgcaccggttccctcccggacacccaccccgtggtctccgccgcaccttctgcccaccgccccttccgctcggccgtccggcgcagagcgggagcttttcagccagacgccctcgcgttgggggcagccgggtcccggcccgagcggagggcgtcgtgaggtggccttttcgcccggctccccagtgggacgctccgcggaggcagccaaggcggggagtgtcgagctccctcacactctggaccttaccttctggcgtcttcgcccgggaggctgcagggggaggcggacccagccggccacaggggcaggttcgcggcgctgtgaggcggggctgggcgtgcgccgccgccgccgccagattcgtctactccagtgaatcggcacgggagaaagccccgcccccggcgcccgctcccactcctgattggccgggccagcccggggaggcccggcgggaccccggcccgcgtctcagctataaagatagccccggcatgacagccgcggcgaagctcttctagttcatctgctggccggctctcagtccccgtggcgccccctttcctcttgtcccagagcgctctcgactccaccatgccaaggggattcctggtgaagcgaactaaacggacaggcggcttgtaccgagttcgccttgcggagcgtgtcttccctctgctggggccccagggggcgccgcccttcttggaggaggctcccagcgcctccttgcccggcgcggagcgggcgacaccccccacccgagaggaaccaggaaaggggttgacggcggaggcggcccgggaacagtcggggtcgccatgtcgggcggctggggtgagcccggggacgggcgggcgggaaggcgcggagtggcgggcgggtggcagggaaggtcccgggcccagccccagccccagccccagtccagcgaagccggcaggcgcagagctgcgtcgggcgttcctggagcgctgcctcagctcgcccgtctccgccgagtctttccccgggggcgccgccgccgtggccgctttctcctgctccgtggcgccagcagccgcaccgaccccgggggagcagtttctgctgccgcttcgggcgccgttcccagagcccgcgcttcagccggaccctgcgcccctctcggccgcccttcagagtctgaagcgggcggccggcggcgagcgccgcggcaaggcacccacggactgcgcgtctggacccgcggccgcgggaatcaagaagccaaaggccatgaggaagttgagctttgccgatgaggtgaccacatcccctgtcctgggcctgaagatcaaggaggaggagcccggagcgccgtcccggggcttggggggcagccgcacgccactgggggagttcatctgccagctgtgcaaggagcagtac

SEQ ID NO: 334863 - DNA, 284 bp, Homo sapiens
  chr14:36789340-36789624
  hyper
cgctaagcgcctcctaaactcgcagtgaagcttttccacattcattctctccaagcctgcctctctcggagccgggttttcacttaggccaacctcacccactcttggggaggacagctgcaaggtaaacgactctgcaaccggtaccgccgtcctcctcactccgaccgaggaggctgggcccgggctccttccacacctcggcttcgggaccgcatcccacacctctgcaggcctagctgcccccggcctctgctagagaaaaagaatggcgaggagggacc

SEQ ID NO: 334864 - DNA, 666 bp, Homo sapiens; identical to SEQ ID NO: 237353
  chr14:36973149-36973815
  hyper

SEQ ID NO: 334865 - DNA, 1030 bp, Homo sapiens
  chr14:36974427-36975457
  hyper
cgtggcttcgcattcatttgaatgctagaaaaaataaacacacattaagacttttgaaggctccatttctgaattcaagagagatgaaacaaattcgcccaaaagatagaaatctttgcctcggaaattatcggagaatattaacggagagggaggggagcgcgcgggtcgccgaggaaggacgcgggtacggccccttgctttggggtggcagagccgggctcaggagccagccaagctgacttcgcgaggtggcgcctgggcctttcgggggaaagccccgacggcggagccgcggctgggcggggactcaaatgctggcggcctctgggctggggccgagcagggggtgccgaccgcgggaagtctgggcggccgccctcccacccagacgagccgatgctgggccgcggtccctctcagctacctcgcttgcccgcctcggggcccctggagaggggtctgtgcctcccaggcagggaagcgtcttgatgtgcaccccggcgttcaccaaccaaataagggcctcgctcacacagtcgatgtcatgctgggtattaaaagggttgtgctgcagctaaaatatctcacagtgtgtgtgaacctcataaaagggaggacccggattccaagcccctcgaagtccccaagcagcctggagggtgggggactcccctctccttctctccacactgagcccccgggcaagcccaggcctcctcctgcgccggggtccccgggctccgaaactgcgagagccctgcggagcccggccagaggggcagagggtgggggctgggggcggggacctggggggtgcagcccagccagaacccgcggcctagcctgatcgcggggagccgggatccgccttccatcctgggaaacgactcgggttagggaagcgggatgggctccgctcggagttcccaggcagctggggcgccctccaagtgacgcctttgtccaggctgcgctcgcggagaataaagggggcgctgtccaacctcaggttcggggaaaaccaagg

SEQ ID NO: 334866 - DNA, 883 bp, Homo sapiens
  chr14:36977312-36978195
  hyper
cgctggctttgtttggtttcgtttatttgtacaaagaaagattgtgcgttaagatcttttttaaaaatccctgcaagttagagtttgcatcatcgtcgtgacctagtgaactaatatttgtatattctgggatcgaaattccgaggaagtttctgctcttccgcacaccagacttgccggtgtggtctccaggaggggttgggggccgcgtcctcagggggcgcgcggccgaggctgttcccagcgcgggaacgggagggagaacctgggcaggggcggggcggggcggggcgcggggacctgggtacgcggagacgcggggcgggcgggggccgagagcgaggctgccggctgggtgttgggagagaggccgcgggtggacggggtaaggactgggactggggagactgagagctggggggtgcggggaggatgaggctgcggacaggaaacgaagggcctgggacagctgcttctcttggtcctagaaaccaaactttcgtagcgagagaccctaagacagctcgagatttcaagtgtccacacttctagtttagacatttggcaaccaattcggaacagccgggccgcgaggggcccccaggtctttggcggcgtcgttgggaggccgcggagttgtccctgggcttccctgaaggccccgcagactccccgccagtcccggccacacccagccagggctttgcagctccagcctgagaatgttagccccggcaaccccttctggcggttgttcctttaaaaaccaattcattttttccatcaagtcttctacccaatgggtagactcttcgttaaatgactgttaaccagtactgaggagaagcacaatcaacatagtttctctgtcacctttcttgcc

SEQ ID NO: 334867 - DNA, 163 bp, Homo sapiens
  chr14:36979694-36979857
  hyper
cgaggttcgctttacacataggcatatccagttccttagacattgactgggtctcctgggttgcggcagagcgtgcagtcagctcagaggaactagctctcggtcctcttagtgtcattatggtaattcacaggtttacttctgcgcgcgcgcactcagcccc

SEQ ID NO: 334868 - DNA, 184 bp, Homo sapiens; identical to SEQ ID NO: 237358
  chr14:36982700-36982884
  hyper

SEQ ID NO: 334869 - DNA, 1476 bp, Homo sapiens; identical to SEQ ID NO: 237359
  chr14:36983115-36984591
  hyper

SEQ ID NO: 334870 - DNA, 809 bp, Homo sapiens
  chr14:36989193-36990002
  hyper
gggttccccgggcacggacaggtctttaggaggagggggctgagggacagggtgggggtttcacctgagcctgccggggctgctcctccctcccgccgcggcctcccagccccgcgccttcccactgcctccggaccacatcgggcttcgctgcgctgagccccagtcgccaacaaatgagcgagcgagtctggggacgaaccctggggccgcactgttggtctacgtgtctgtcagtctgtctgcctctcttctgccgccgtcagagggacacctctgctccccgccccctttccccctaccggagagaatccgagcgggcggagggggcgctgagtaggggatcgactgcctcccggaggctgtcccggatccccgagccacaacccgcccccgcagctcaggggtttttcagtgggccacccccgctaacacgcctcccccaaggtcttccccccccccccccacccccggccgagcaaacacagcactggcccccagagctgggaggatgggaaggggtctcacgggagggtccgtcactgaagttgccccacctcgaacaaacctggtgtccctgaccctcgcccatctcccagacacgcggggatctggggctggagctgactttccgaggacatcacagccccagcacccgagcccagagccacgctgttttcccctctgatgcttcagggagcgcgcgagcagggagcggcgtgagtgcccgtctgtctgttgccgggcggaactgagcctgaaccccggcggctggagcgctggccaggagggggcgaatgccgaggtgc

SEQ ID NO: 334871 - DNA, 51 bp, Homo sapiens
  chr14:36990508-36990559
  hyper
cgcgccaggggctgggagggcggagcgctccccggccggccccggcaggtg

SEQ ID NO: 334872 - DNA, 349 bp, Homo sapiens; identical to SEQ ID NO: 237363
  chr14:36990873-36991222
  hyper

SEQ ID NO: 334873 - DNA, 748 bp, Homo sapiens
  chr14:36993502-36994250
  hyper
ctcgcgagtgccatcgaggcaaccaggcgcagggagcggaaggcaggagtgtaactgggcgctggggggcgctgctccgcaaccccaagatccgaggaatgcctccgggggatgatttctctggaggggtctcgcagggccccctctgcgctgctttctcaggcaccagaaccgaaatcctcgggagggaccgcgggagcccggggcgtgcagacaggcggctttcacagacgcagcgggaggaaggatccctctactgctccctttcccgatttgaccgtctagggcctttgagaggactttccttttgggaaagcttttctcaattcgtggcctgtgggcaggctggggggtggggcgccaagtcatccgagcgcggcttctgcttctccctttccctcacaggcatgctctacggagggtatgggaggcgagggcgcgtctatgagggccagagtccgcgaagagagtccggcccttaggcctttggtgttgaagaatctgctcctctgtcgggtcaagccccactagaagttaacacctgtggtctccaaacttgcctattttcctgtcacgcagttcaagccaagattcaactcgtcttgaatttttgtatttagagcccctaccttctccaccgactccaggggcgccctctggcgggaaggggcctggggtaggagggaacctgagggagcgggttacaaagcagagaacagcgggagctcagcagctccctttgaattgc

SEQ ID NO: 334874 - DNA, 822 bp, Homo sapiens
  chr14:37050238-37051060
  hyper
ctcctgggccgcggcggttcccacctcgccaccgccgccgccgccgcacggctgcccgtcgcgaacaagcaccggcaccaccacgcgacgcagcaggccgggcgcggcgtgcagctcggcggatgctgccaggtcaggcgactccgccgcccctggagcgcgagcgcgcttcagcttgtagcgatgattctggaaccagatcttgacctgcgtgggcgtgaggcgaagcaggctcgccagctgctcgcgctcgggcgcagacaggtaccgctgctgccggaagcgccgctccaactccagcgtctgcgccttggagaatagcacccgccgcttcttccttttctcggcgtccgagcccggagacgcgggcctagcggacggccgctgcgacgagtctggcgggctggtctccaggctgctctcgtccgaggctagggacagcaaaggagacacgggtgggtgagacgccggaccctacgagggcctgctgcccttctggcgcgggcgtggaggcactggccagagggcacgcccactagcccgagactttcgggatgaggccatttcctgagtccacatctggacatccacctctccgaatgcggtgacctcattcataccacagcggtcatcagcgggcctgagatcgtgccccgaaaaaacccaccccggggccctcttaacatgtccgcaccggtagttgcgctggccgaccagtttatcacaagctgggtcaccagcgccggcctcctccaggtcgactgcactgcagtgtgccgaggtttgcggagccctgagtgggaacggggtgggggtaaactc

SEQ ID NO: 334875 - DNA, 836 bp, Homo sapiens
  chr14:37051081-37051917
  hyper
cggaggcctggagatcgtggccgtgttttcaggcatggagagggggcggggggtggggtgggggcggcaggtggcggcgcgttttaaatttcaattattccgacctctagaaatcgtcagacacagaaaccccaaatctcggagcaccagtgccaggcagggatctgctcttaggatgtgccgaccgggatgaatgcgttaggggttcgaggacagggctcccgtttccaagactgaggaaatctagactctgggctgggatttcggctttccggcccctcgtgggctgggcccttgattctgctgccccacgcctcctacctcccaccccgcaccgcaatccaccacgcacttacaagggtagtggccgcgctccgaatccagccaggcggcgcaggggtcgggctggggggcgcgtggttctggctcccgcctcggcaggtgttgcgcgtcctgctcgggtaaatctagaaggctgcgcacggtgaagctcaggcgtccagaggtggccatggccgaggaggggaaggaggcgggggcagggcaggctgggaacggaggggcggccgggacgccgctcctacggatgggcgtgggaggcgctcgccatgcgctggcagccgggatattagcgcatttacagcggaatctctgtttatataaacagctcttcccacccaggccgctttgaaagccgaggtccgggtctccagggtgttaagtacctgaatgagcactggaccagagccggggcgagcccggaaggtgccacctccgcccccgccccgccccgcaccccgccccgcaccccgccccttggcgcccagttacctccc

SEQ ID NO: 334876 - DNA, 1482 bp, Homo sapiens
  chr14:37116049-37117531
  hyper
cgggacaacttggagcctgcttctggggagccacacacgtcctctcccacttcttgctggagacttggggacgtgaagggggggttctgtgatcccggaaaaaaagtaacttctcttggtaggtgatactaggcagttgcgtcccggggagtccccgcctttctgcgcttcccctgacgggggcacaggggccggcgtgcgtgtgtgggtacgtagctcatcccggggagctgggatcctcttttccgcacttggggaagacgaatgccgaccattggctcagacaccataccacacaggcatttctggaggcatttcgcggcgttattatgggaagttgcgcggaccggggccttcgcgctacagccgaggagtctcagcgcctgccaggcgggagccgcacttccggcgaggtgtcttcgggagggggcgccacagcccgtggcagtgccggcctcccgccttaaccagcccgactcccgccgcgccagcaccgtggggagcgagtgggtcccgcccggccgcggcctggacctggcagccgggcttcgtgggcgctctgagccgtggcccgtggcgcggggtgatccttgtgcctggcgccggcctcagaaccccgtttacggctttccgcgcatacggaggttgctggggaccccgacacctgcgcgccctcgactggggcccgctccagcagtgaagacccaggcccttccctgggccgtggctgctcttggtgcctcatgggagcgcccggggtagggactcggctagtgacctgtaggacatgaggggcgagctgggagccgattcgcccacggcgtctccttcgccatggaggccccccacccattccactccggggttgcggccacgcaccataagagcaccttcaggtctgagctctttaggggtgggagtaggcagttcgtgagtccgggaaggcctgcggggtttcccgcctgctgcggacttagcgtggggccgaccggggctggcgagggctggcgaggactggcggggacccgcggggctgagccagctctcgcgaagccctcaagtgaggaacggcgcttgtggctgcgcgctctccgcagccaagttgcagggtccagcaggggctcaggtcctgttccctccgcagatcccggatctagggctctagtggtctcggccggagggaaggtgacgcgcagtgggcgcagacgcagagtgcggggcgccgaacgtgggaaggagcgggttcagcgcgctggtgagagtttcaggaaatccgggagagggcggtatttaccagtcccttccccgagagcaaccaggcaaatcggggaaggttagaggtgggggacctgcctgagccgggacaaaaaactttggagctagggccttctaaccctggagacttgccgactccggggcgggctctcgcactcaagtcccgagatgggatgattttccaactttcgtccagcctctccttcc

SEQ ID NO: 334877 - DNA, 981 bp, Homo sapiens; identical to SEQ ID NO: 237368
  chr14:37123598-37124579
  hyper

SEQ ID NO: 334878 - DNA, 2408 bp, Homo sapiens
  chr14:37126422-37128830
  hyper
cgctgttgaaaactgaaaaatgggtgtaatttgctttcagaaagtaatgttagggtcacggcaatttctcgggccgttatttatttttactttaaagtctttaggaaagatttgcttatatgctcggaaaacttccaaatgcgcgaataccagcaatcccgctcgccttcaacgcgtggggtaagggggggtggggaacaattactgagtgacgctaatatggggaaactgaaaagaaatgtcgattgtttttattgtaatagaaggagtgagcaaacagaaaaaccaaccccgggtgatcggaaacaggcaggcggagaattaaaagcgggtttcagacagcaacaggcccctcccctgctctcgcaaggagaaagcgggcgacgagcgctcgcagcccgtggggctgatcccacctcccgcagggctccggtcgtgtcgctgtcggaccgcagaacgccgggacgcatttccgagctcgggcccgacccaacccgctgccattctagctacctagtggagccgcggagagactcttgaaccgtgaggctccttgatgagaaggtggagaggctgccgggctattctccgagcatcttccggccgagctctgctcctctccgtgcgcttgcggcttctccttgggctagcgcgtccgcagtccctccaagtccaggccgcaggtcagtgtgcgggcgcctcctgtcctcctctcccaccagaggacccctgagggctgtctccatccccaatccccgcgactgctccttttagccgccatcccctcccgcagcgcagatcctgcaggggccagcggtccagggcggaccctccctcgccctgggcgcggggcgagcttctggctgtcacttgccgctgcagtttcagggaaactcagctggccgcttaccctgcaagacggggacatagcagagggccgagttctggagaagctgggcttgtttttctctctgcaccgcgcgcaatgccccaactgaccctgaagggtcttgcctttactgcatttgcccccagacggctagaagtcaatgcactatgaaaatcccagtcccggacctcggactctggctgtcttacaatccctgcaactcctccgagtggacaagaggcgggcaccgtcgcctgggcctcgcttggggggggggggtcctgtccccagcagggggcaagttggaggaatcagctccttaatattttctgctagctctgcttgtcataactgcaactcggaatagaacaacctctctcccgtgcatacgcacccccaactctcgccctatcctcccatccacagtcatcactgacctgtagacccggaggagcaggcttccgggggtcggtccaggttggggatacagggaggggtcctcgcgttccgcacaacctgtagtgcttgggtctgacttcggcagccctcgggtacagtctgccgggctagattcccgttgcttctccgcgtctctccgcgggccgctctagcgccgggaagggggcgccgcaggtgactgcccgcggcactgggacggctgacagatttatggagacttcacagcatctggctggggtccgcgagggcagggcggagtccggtcgatccgatgctggggtctaaagcttccccagccacacgcctgggccgagtcgcccccagagtccccggcccctgctccccttgggcgggtgtacacaaggatccggccagcgccgagtgtactggttcctcccacccagtgtagccccctccttcacactctcggcccggcttccagtctcccactgagtaaatatttatccagagagcgagtcgcccctcggaggaggcctcgacgcggctagggaaaggctttttggcttctccctggcctgagccagctgcaggccttactggtgttttggttttggtcttaaatttctccttttagtcgaaattcttccgatctctttgagatcttctgagtccagagtgagcagtgtaaccaggcggcagactccagctgacccttgttcttgttctaggtcctgcatccttacattcatcgggactgaccagaccttagtgttctctcttttccttccttcatcctctttctctgcctcagatccgtcgtctctcggtcggtctcagcgggtcgctgactacctcgccctagcactcggtccgcgccccgggaaggcttcagcatcaccctcttctgctgggatcccgctgaccctgtctgcagcttcggcttctcttgctcccagagcggggtcttcggcttgccgcggatacttagtggcccaaaacacctaaaattgactcttcctgcgctcttgagaatgccaagagcacccagtacctgcaaccgccggcatgagtggggcctgcggggagccgccagagctgc

SEQ ID NO: 334879 - DNA, 252 bp, Homo sapiens
  chr14:37129095-37129347
  hyper
cgcagagtccccagaccccccgcgggacatgaggtcttgcctgttcgtatgcgaacatccttgtacccgcctagcagccctgcagactgcaaattttccctgggtgcacggaagtagagcagatttggcgcagaggtcgatactcactgcctgtctgtgaggggggaggaggattccttcctggtcaagttgccgggcatgttcattccctcccgcaagcctaaggcagagtcataagctcccctacgatgc

SEQ ID NO: 334880 - DNA, 864 bp, Homo sapiens
  chr14:37130072-37130936
  hyper
aaattcagaagtaggcagaacgacagggcctctggagcttaatggaagacgagggaattacatccatgtgcagcgtcggtgtccactgtcttgggactaagtctctttcatatttaaacaaaactctttcgagagggctcgctggtttggagaaccctcacaaacgctgccaccgagggccaggggcccaggacagtggctgaatgtggcagagccttgggctccgtagtgagtgccccacgcactggcaattggtcgacttggggctgtgcgctagcgttagccgcctgtggttcagttccccgcacacggcgtggcccgtgcctcgagcctgtgtggctagtggttggccggtccacctggactggggggtcgccgcaggaagctggcggtaggaggaacctccctggccttaacagtggcccccacctgtggctcgggctccccgcaacctcctggtttctttggccggcctatcttctcacacctgcgctctcgccacctggcatggactgaagtgaggtagaatcggcaggtgacacagatcctctcctgacagtccccagaggcccgcatgacagattttgctaagacaactccctcacccctgtgcacggtggcgcccgcctcccacctatagccttaacttcaattctgagatgtccatcgttccccggaggaggtctcctcgggccccttctcccttcgagtcattcacattcagaccaaacgctttcatttgtttattcagcattttaccagcctgattttgctgtctttttgtgccgcttctgggaagatgtcaaacacccattttcattgtatttagtcacccaggtggggagctagcctgaaagagacagc

SEQ ID NO: 334881 - DNA, 2385 bp, Homo sapiens
  chr14:37130956-37133341
  hyper
cgctgtcgctcaccgacccgcaccaatcaccatgcagcttgccctcggacccgccccttttagggcgtgtccccagtgagtgatagacggagccgccctgccctgctcagcccagcccacgttgctgcttagattgaaatgcagaactcaagcctctttcatcggggcacagacttccttttacttcttccttttgccctctcgcctcctcctcctgggaagaagcggaggcgccggcggtcggccgggatagcaacaggccgggccactgaggcggtgcggaaagtttctgtctgggagtgcggaactggggccgggttggtgtactgctcggagcaatgggtgagtggcggcgggggactctgtcagagccgggaagggagggagggagcgagcgggcaagggagggagggagggagggagcgcgagggcgcgcgccactaggcgctcacattctctattgactttgctcgtgttcctacaagttgtaggaacacgctaagggtcagcggcgcacagcagttcaatgtgaacgctggctactgggtggctgttgatgccattttctgattttaagagaagggagctgtggcatcagcgagcccctcagcccgagtagcaaaccaagttttgtttcacacgcgcgcacacatgcaaacaaaacaggaaaagaaaagaaaagaaaacaaacaacaacaaataaaacaccctctagcttcccctagactttgtttaactggccgggtctccagaaggaacgctggggatgggatgggtggagagagggagcggctcaaggactttagtgaggagcaggcgagaaggagcacgttcaggcgtcaagaccgatttctccccctgcttcgggagacttttgaacgctcggagaggcccggcatctcaccactttacttggccgtaggggcctccggcacggcaggaatgagggagggggtccgattggacagtgacggtttggggccgttcggctatgttcagggaccatatggtttggggacagccccagtagttagtaggggacgggtgcgttcgcccagtccccggatgcgtagggaggcccagtggcaggcagctgtcccaagcagcgggtgcgcgtccctgcgcgctgtgtgttcattttgcagagccagccttcggggaggtgaaccagctgggaggagtgttcgtgaacgggaggccgctgcccaacgccatccggcttcgcatcgtggaactggcccaactgggcatccgaccgtgtgacatcagccgccagctacgggtctcgcacggctgcgtcagcaagatcctggcgcgatacaacgagacgggctcgatcttgccaggagccatcgggggcagcaagccccgggtcactacccccaccgtggtgaaacacatccggacctacaagcagagagaccccggcatcttcgcctgggagatccgggaccgcctgctggcggacggcgtgtgcgacaagtacaatgtgccctccgtgagctccatcagccgcattctgcgcaacaagatcggcaacttggcccagcagggtcattacgactcatacaagcagcaccagccgacgccgcagccagcgctgccctacaaccacatctactcgtaccccagccctatcacggcggcggccgccaaggtgcccacgccacccggggtgcctgccatccccggttcggtggccatgccgcgcacctggccctcctcgcactccgtcaccgacatcctgggcatccgctccatcaccgaccaaggtaggggctcagaggctgggcgtgtggatgtgcagcgtctgcccccgcactctcgcggaggtcccagtatctgcagcctcagggacactgtctttcccaccacctgaggctttttcctttggaaacgtaaggagtcttcctagggggtgttctgatctcattaacttgaaactcatgcccctggtttccttgccacacacagtcttctgcctcatctcaaactaccagacccataacatccccccatccccaacacatggttcgcattttccaccctcccccgcctctcgcgccgaggcagcctcagcccggcttgctcacttggagagtgcggccggggctggacttggggcgcagcccgggaggcccgagcctgcttggggctgccggctgcagactccgctgtgggcagagcagcttgcttggggatcactacggccgggagaagtctggccgggaggagtccagcacgccttggaaattgaagtattctccgattctggtaatcaggccaaatttgctcaggcaggaagttcaaatgtcacctaattggtttcgttcttatgcttcacttcattttcctcggaaatggaggtcccgaagttactactag

SEQ ID NO: 334882 - DNA, 1206 bp, Homo sapiens
  chr14:37135434-37136640
  hyper
cgtgggtcagagaatttggaaaggcctactctgaggggagtaaaacttcaccaggccctgggctggaagcacaggaggtcgcggctgggcccagcgccctcgggaggccaagggcagggagccgacccaaggtctaagccctccagctctccgtcgcgggtttgggtcccgtctcaagagtggggcgcgcgggctgggcctccggcctgacaccctctcttctctccatcagtgagcgacagctccccctaccacagccccaaggtggaggagtggagcagcctgggccgcaacaacttccccgccgccgccccgcacgcggtgaacgggttggagaagggagccctggagcaggaagccaagtacggtcaggtgaggaggcgagggtcaggccaggtgggccgcgtggcggcggggatttaggcgatggaacactttgtgatgggtccctttctgagcttcccgcgagagaagcccaggctggcgtccctttgctgctacgagccagatccttcgtggactggggcgaagcagaggcctgagccttggaaggcggagctggggcctcgacccccgccaggggccgggagcgctcgtcagggcgctgggggtctggggcggcagctccccggggcgaggctctgggaagcgcctccaggcctgtcggcctccgggagcttggggaggcggctcccgaagccctttcggcggctctcgttgggggtagagttaaccaaagaaggcgcttctgaagggccgagcggagcagccctggggcctcagagccgcgccttcacgcccgcgaaacgcgcgccccgggtctcggccccacggtgcgactgcggctgcggggtcctcacgttcggactttctctccggtggctctcggacaaacacgcttggccaatcctgcggagaggggcacccagataaacgtaacaaagctaccattttctcgactaaaggtcacattgtaatctcccaaggaagttagtgagaaaacctcaaattatacggactggctgtggaccgtttaatttttctttccctccgtccctccctcatgtctccaaaggaaaatttaaaacactcgtgtttttattttccccccgagaaaagctaaacaaccaccacaacaaaagccccagatttaagtctaaattcatcaccgtcctggagtcaagagttcaaaactctcaaaaaacc

SEQ ID NO: 334883 - DNA, 838 bp, Homo sapiens
  chr14:38052540-38053378
  hyper
cgaggtcaagacccgcagtgtcttagtgggttttcacctccacctccgtacaatcaagagggcagagaaggcgggggctggaggtggctgaaagggcagggatggcggtgaaacccgggaggaggcgacattcgtgtcaggtggcggtcccaggcagtgtccacaggcccggaagccgaggggaccaggcatcaagccccgcgtccagatccctgcacccgggggcgggacctggtgtcccgcggtccccgcccaggttcctggggcgcttttccgcaatggctggcgtggaagcgagagggggcccagtttttccttgccaggttgcgggtacagccagctccgcgccggggttgggcggcgcggccgggatgctgagagccctgcgtgctcagccaggggcgcagggcggcccttctgcccagcgcgccccgggcaccagggatggcttcccagctggaggccgggagggaggagagtaaatacccattctgcgggggcagccctcgggggatggttgcgaagggagaaacgaaaaataaatcagacaagagagccgtcccgcccctcctcgcccggtcctggcgggcggcgccactggtcctgcagcctcgggcgtgcccgcgcccccccgagcccagggggcgtcgcagcgggccgggcgggccaggactgcgcctgtgtgcgggtccccaggagcactgctcgcctgccagccccgcccggccgggcccctccggcgggatagagccctgctttgctcttttcgttggccaagcacaattgtgttattggagataatgaattcaatccccatcaaagggcattaggctcgccc

SEQ ID NO: 334884 - DNA, 968 bp, Homo sapiens
  chr14:38057019-38057987
  hyper
cggtagcgttggtgggtccgagcgccaccggagctgtacacttgggtcaggaggaaggctttccctcctcgcccctcttcgccccctccctcccctccccggggacccctcccccatctcgggcgaaattcctaagaccagcgagcaggagcaccgcggcgggacggtcagcagcccctttccggccctggtcttcgggagctggcgaggtgaagaaatgtggaaacacccagacgaaaaggggatggggtgggggtcgcaggaaggcggcgccctcaggcagggtctccgcactccctcggaaccacagatgttttcttcctgacccaggggcgcggcgccccagcccgggcgcccgggtgtttgtgtgtccgggtttccgaggaagggattacgcagcgggagcagccgcggcaacgcgggccgccggggccgcaggagccgtaacgaggcggctggccttctttgttgacttttaggtcccgggctcaacaggagatttattcgctaggaagggaaaatgcccaaacaatgaagaactatctgcacttgtcacctcgagacgcttgctgtcctgctctgtccgccttccctggcaaccagctgtcctggccgccaacccgcgcgcgtcctaacgcgcgggtggcaggtcgcatcacccagaggtggcggagtgtgcggtctgagaactgcgagaagcccacaaagcaggggctgggcctgcaggctccccgcggtccagctcccgaggcaggtctccaaagtgcccccgtcccccgcataactagaaaatgtctccggcaagtaacagagcgagagctaaggccaacttaagcttggtggggtgaaggcaaggcgctgatgtttctaatacgttgaaaaggagaaagggaacatcacagagaggacagcacagaagttaaacatcttagattcagtgggggcgggattccgaggcccaagcccac

SEQ ID NO: 334885 - DNA, 1737 bp, Homo sapiens
  chr14:38060563-38062300
  hyper
cgggagctaggaagtgtttaggacgggtctggaatacacaccttggtagtacgccggctccagggctgagggctcgatggggctcctggtggtcaccgaggcgctgcctagaggcaggctggcgggcaacgtagagccgtaaggcgagtattgcagtgcctgttcgtatgccttgaagtccagcttatgctgctgctccgaggaggacatgaggttgttgatggagaacgggtggttgaaggagtagtgggggtcccctttcaggtgcagctgggactcgtggggtgccaagccgtgtgccgggtgagaggcgggcacagaggccagcgccccgggcccggagcttatggggggcgcagttgaggaggctggagtcttcaactccgaggcgccccctgtcgccgtcgccccactgtggtccagagtctgggggctggcggcgggcccgggggccggcgcgccctctagctggccggtcttcccgtgcacaccccgatggaggggcgagtcggcgctggggttagaggcgccagaggggtccttgcggctctcagggccgcccttggcgccgctgcccccgcttccgctcccgcccccgccgccggcccccggctgcttctcgcacttgaagcgcttctggcggcgcaagtagcagccgttctcgaacatgttgccggagtccgggtgcagcgtccagtaggagcccttgcccggcttgtccggggagcgtgccaccttgacgaagcagtcattgaaggacagcgagtggcggatggagttctgccagcgctgctggttctgccggtaataggggaagaggtccatgatccactggtagatctcgctcagcgtgagcatcttgctgggcgcctgctggatggccatggtgatgagcgagatgtacgagtagggcggcttggcgtgcgggtagctgcgcttgaacgtcttggcgtcgccgccgccgcccgcgcggctgcggcccaggttggacggcgcgtacgccatggggctcatgcacgggttcatggcggccgcgtaggggcccaggccattcatggaggccgcctgctgcgcacccatggcgcccatgccgctcgggctcagcgccgtacccatggccgtcacgccggccgcagtcatgctgttcatggcgcccgccgagccccccggcatgccggctactgcgccgggactcaggccggcccctaggcccgggttggcataggacatgttgaaggacgccggggtcatgttgccgctcgtagtcatggtgttcatggtcatgtaggtgttcatggagttcatggagcccaggcctgagttcatgttgctgaccgggacggaggagtaggcctggagtggagacagcgagtgaagaagccccggagggcggggttagtggtgggcactggagggcggccgtccgggacctaacccgggggcaagtgcagagcactttgcagaacacgggacgcccccacccggggcaaatggctaagcgccctccccagaccgagcaaagatgtcttgcacggcagggggaaaatcctagcgcggcaggcatgaaagataaacgctcacagaaaatatgaccccaggaagatgtgtaatcgccttacacgccaggctcaggggctggcttccagggccccctcatcgcctcctccatccacgccaggcggtatcccaagtctccaccccaaccagcctcggcaaagcgccctttggggggaaatc

SEQ ID NO: 334886 - DNA, 993 bp, Homo sapiens
  chr14:38063865-38064858
  hyper
cggagtttcctaaaactccctctccggctgcgagagtcgggacagagcagggcagcaggtcccgcttccaggcccggccaaggcccggccggggccacaccggcgggcgggcagcggtggcaccgagaaggcgcccccggcccgcctgcctgccttgcctggcgcccaccgctccccggcctcccccggcacgggctccagcggcgccccaccggccgcccgcctcgccttgcctctcacctcctgcgtgtctgcgtagtagctgttccagtcgctggtttcatgcccttccatcttcacagttcctaacatcctggagccaccctgcccaatacaaccatccagccctgtgcgaagcgacgggcggccgcgcggcgcggggcgggggaggggagctgagcagctgcagtcacccgagcgcccgcgcgggcccaacgccacccgggcgaagaggaagcccagagctgcggggcgcggcgtgcgcggcggcggcggcggcgcggcgggcgggggcagcgccgggggcaggcggctgccgcggagcgcggcgccggggagcgcctccgcgggaagtgagcgggctgcctctgcgaggcaagtgcagttgagctgatgtggatcttacgtcgcttgagtgcccacctcctcgtcctctccccatttgtccgccgcacaaagacgctcgcacctacaaagcccgaggtgcacctgcaaggcggccgcccgccagtccggccgccgcgcctcccgccccgccgcttcaccgctgcgcgcgacccctcccccgcgacccctcccccaagcggggccctcactttgtttgcaaagcagtgtaattggtttaggcccggaggctagggaaagagggaaatggggagggagggggtgtaaccccctttggaaaaagaaaaaataggcggggccaggcgggcgggcgggctagggctctggatcggaacctcgcagccggagaaggccgggggcggtggcgtc

SEQ ID NO: 334887 - DNA, 210 bp, Homo sapiens
  chr14:38072497-38072707
  hyper
cggattctggcaatcgtcagttgtaggaacaaagtctggagtagtggctggcatgagagtcagccctgacgacctcacccagggaaatgaggaacccgtgtgaacctaagaaggaaaccgctatggtggttgtggtggtgggtggctcagctccagaagtggtgaagcgactttcccgaaagggaggaagactctgggataattggcacc

SEQ ID NO: 334888 - DNA, 1332 bp, Homo sapiens
  chr14:38677154-38678486
  hyper
cggaaaaactcgaatgtcgccctgccgttcctggggttggtgacaggtctggtcatcgcacggcggcagctcctcacctggatttagaagagctggcgtccccgcccgcccaagcctttaaactctcgtctgccagaacccgccaactctccagggtacaaagtacagcagggacgcgggtggagcccttccaagcggcgcagccttatctttcccgagtgaacacctaggtggattcccaacaccgcgcctggcacgtttctggagggagtctcaagctcctccagagctcccagctgcgcgtcctcgtttctgcagtcgatattcctgtgggagacacggggggctctgagcgctacgagctttattaagagatttgcgaatggttcactcaggtccctgaacactcccaatagcctaagctgcctgctgtgttatagcgcagaagcccctaacgcacggtggttgtcctttcttctcataacgctcgcagcttagggccagtttccgcgattctaagagtaattgcgtgggcacctgtgctggggccaggcgcaaagaagggagttggtctgcgcgaagatcgtcaacctgctaacagaccgcacatgcactttgcaccgaccatctacgtctcagtctggaggttgcgcactttgggtaaggagggcccggaacttccctggcgggtctgagctgcaaggcaagcgagggtgggaagagggaatttagggttctggactgcgggacgggagagaagctggggtctccagagaaaagggcagcaatggagggaaactgagatgaactccagacatccatgttcatggatccgtttgagtctttgctttgggtaggagaggagtggaatgagacagaatctatacctttggttcccacccgccctccagtaaggccgaggaactctcttggttcctctgagagcaagaggcagatggtgctgcgagggaaccccggaaggagccactaaagttgagcagagtgcaggactgggaaggaaaaaaatggggggcgggggggacaagccacctatgtgctctcctccctttctccaccccacccccttttttcgtagctgctgacgcgctggtggtgcctattaatcatttaccagtccagagccgcgccagttaatggctgtgccgtgcggtgctcccacatcctggcctctcctctccacggtcgcctgtgcccgggcaccccggagctgcaaactgcagagcccaggcaaccgctgggctgtgcgccccgccggcgccggtaggagccgcgctccccgcagcggttgcgctctacccggaggcgctgggc

SEQ ID NO: 334889 - DNA, 1441 bp, Homo sapiens
  chr14:38724273-38725714
  hyper
tgttctctgcggcacggggctggttgcagtggccggcgggcgcctggtgggcaccccggtccccccaagggtcggctgtccttccccactggtcacacaagagcggccgtccttccccagctcgaagcccgtagcacattcgcaggcaaagcctcccaagtcgtctaggcagttagggagctctgcgcatttgccagcacggaggtacctcccggggcagggacacaacacatcgcccgagagtttgtcccagcgagcgccgatttcgtccgcgatgcaagtaactgagatcgggagctgtccccggcagagcgcactcacctcggtcccaggtggactgaagtccagagcggcgctgtgcagctggaagggcgcgcgatagctcaagttagaggcggccccggggcgcggcgcaggacacaagacctcaaactggtacttgcacaggtagccgttggcgcgcaggtggcatcgcatctccttccagcctgcgggctcgaccccaccggtggcctggagtaccgcgcatctccgcgcggtgcaggagcgttggggctcctccacccactgcagcgtgtcgctttcgagaccgccggggtcggaggacagccaggagaaaccccgcaaaggctcgttctccagggtgcagtgggaacgcctgcgctccagtgcgacccagaacagcaggtctttggagccccctccgggccctgggcctgcccgcaggagcgcgagcacagcgcgcagctcggcgcccgcacgcacggtgctgagcgccccacctcgcaggatgcaggcctcctcggccgcctgccgcttcatggtagcgtggtgcaggctgtagcaggcccccgaggccgagcagccagcacggtcggcagtggggtgttcgccgccgcccggcccgggccagagcgcctgccagaggaggcacagggcgaacgccggcctcattctctgaggccccgcacgcagagctgctcccaacttggatctgtcccgctcgaggacgcagagctgtgtctggagcgcggtcaccgccctctacagctggcttccccaacccggttccccctcccttcccctccgccctcgctcccgacggaccccccaactgccaagaatccccccgcgggcccagcggccaacagtttcccttaggccgcgacaggaaatgtgtgcggagcgctgccaggcccggtgcagccctgagttattctggggtcaggaacacagctggcgccgggtacaggggacgcagtcgactagaaggtcaaacaccctgcttagagcaagaggagaaattcgccactgggatgaagtgtgtggtttttctccgttcagggagtttcatcaggaccgcagaacccataacacgtaagcgaacataggcaggaaggacttgagaaaggaactggcttatgattataagaccacgccc

SEQ ID NO: 334890 - DNA, 603 bp, Homo sapiens
  chr14:42074283-42074886
  hyper
tctccctatgccttcggagtctgtggcttcagtttgctgcaggttctctccgtggacttctcagaaacctcaactttccacttcgagggacagaaagctacaaggaaaacgctgatggttttggtggagattctcctggacttcagtggtgtcctctggtacatctgtccgcggtgtccctttggtttatttctgtggtcttcctgcgcagtccctcagcggctcggagtttggccttccagctctccaactcagatcctgagcctcctaagctcccgcggagaccctgaagtcccggatctggcgccgctcgccgacctggagggaggctgcaccgctgaagtgcagtctcggagctgcgctcctctggaacaaagcagccagacgtggcttgagtggattcctaagccaaggattggatccggagtaccaggggcagagagggggagcagaggaaagaaaggagatgtgaggagtttccacctaaagcacttcactcctcgtgttcttccccgacagagatagctgtgtggttcttccttacgcgtgggtgcaggtgtgcgcgcttggggtgagcccatggttgtgctcgagtatacgggc

SEQ ID NO: 334891 - DNA, 2431 bp, Homo sapiens
  chr14:42075355-42077786
  hyper
acctcctttccagtcgcacctctttcctgctttagaccctgcgtctgtgccggtgaccttagagactaggtctggcttatgaagactgttgggctccctttctgcccttcacatagtaaaatgtgaccaactgcagtattcgtaatgtctgatgctgagctgagttgattcccaaatataaatgttcttttcagaatccgctcccatctgattagtaagcaaatcaccacccacaactaaggggacagcggaagccagcctcagatgactgaaacccccaagtcagtagctctcctcaaaatttccggcgggttattatagataatgacttttcccaccgccctaagcagccgaagcttgactcagtgatgattctctctatcccgtaactgcgaggaagtgggcgatcagcaaattgcccttttgcaggaggctggggacgcccctggaagttcgctttcattctccaggttttctgccttttcccttcccccttcctgcaacgcccccgcgcctcctcagcctggggatttcctggcgcttcgccggccctctccgcaaccccctgataaatcggttcagaaccagtctggctgggaggcccgagggctgacagcagcggagcggccccggccggggtctcacggactctcggggtctggccgacacggccgctcccgtcactgcagcgcgggctgagctcacggccgcgcgcccgccgccgccgccgccgccgccttcatgctgcagcgcagggctcagttccacgcggccaggaggccgccgttgcccacacgcgacgctttgggaagcccagctcccgggtccgccccggccgcggccgcagccccggacctcggctgcttgcctcgcgcctgaactgcggactcgccccagcgcggtggccagcgggcggggcgctgtgttccgcggcgcgcagggaggcggtgagcgtgtgcagagctgcccgaacggaggactatgtatgtgtgtgcgcgtgtttgcgtgtgtttgagcgtgtttttccttcttcccttgaggatgtgaattgtttagcagctggctgctcccttaggatccttgactttggggagctctggctgtgaacacagcccacccatataatccattttgcacggtccgttatatcagaaaaaaaaagcgcaactggacgggggtggggcagaccaacgaaacctagacagacacacacacactcagaggagagaggaagaattgaaagacttgagaagactttgataacctccctgctggcccttctgtgttccggaaagatcctggatgttggctaccttttcaagtcatcttggcatgtctctagtgttttgtaagccgctttccagctagctgcgtgtgtgtgtgcgcgcgcgtgtgtacgcgcgcgcctatctgatgcatttgactgtcttttatccaactgcccagaagcaaatgtgttaactcggcgatgccccttcatgcccgggttcttgcagagctctgaggacgcccagacccattttcctggctggatttggagcggctgctgggctgtggacccaggtgtgtggatcgctttacccagaagcttggaaagcgccaatattaacctgcttccaggtacatcacaaggtcaagagagtgtcttgcagccctcttgtttccgtgtatctacaccttcttctcttggccagaaggatatttacgttttggttcacagcatttgaagccaaaagttcagcccttcgaactggtttgctatacaaaacaaaacaaaacaaataaggtaatgaggattgcttattaaactgcttaacaaaatccccgactcttcctcagccctttctcggctccctcctccccaccaaaatgtcaccagctcttgaattacgtggattcgggttggaggagaacttgaaggaaacgtgattaaagggctatgcgagaacgctctctttgctgcccgcggtccggtgggcttcgaagccaatcgtgagaaggaccggttccctccgtgctgcttcctccccgtgcagtgctgggtgtgcgtgtgcgagtgtgagtgcaagtgcgcgcgcgcccgggtgcgagtgtgtgtgagtgtgagcgtgtgtctgtgtgtgcgtgcgcggccgccctgcctctgcccgctccccgggcgcggagccgcgggtttcatggggcgattgcagcgattcccccacccagagcgacctgcgggcagcggcggcagtggcaggagccgcctttccgattccctacgatgcgggtgctgagctatggcaaagggcagcgaagtgacgagcgagacccgcgtacgactgtgaaagccacctggagccaccttgccgggattgtacctgcaggcagaaagtcttcctacgaccgtcttttcccttagaggcaccaggtaacaaaccaacgattactc

SEQ ID NO: 334892 - DNA, 200 bp, Homo sapiens
  chr14:45431382-45431582
  hyper
cggtttggtcacgtggtgcccttggttacgcccggtggcagctgtggggtctagggctcagacgggggccattttgccagaggctgcctcccggagttgggggcggcctggcggcaggctgaagctgttcttttgcctcttctgcagcttggggcttggagaggatctggaagtctgggctccatcgagccctttggaga

SEQ ID NO: 334893 - DNA, 586 bp, Homo sapiens
  chr14:50469917-50470503
  hyper
cgtgtccctgcttgtgtcaacatagaaaacgcccatggcaacgggcaagtgcggcctgaaatggcagagtgtgtgtttcacaaaacaggggtggctcacggctgcagccgcccggggaggtcctggccttgccttcgaggggctggtcctcggggggtggatgcagctttgcggggctggctccacgtcgcgccgcggcggtttgggctggggagcagccctgcagggaggcgccgccgggtgggccgcggagatagctgcagggcggggcccccgggggcgcggggacgcccagcggccggatatcagctgccacgcccgcgtgggcggagaaaagagcaatttgactttggacggagagctgagatgcggggaggaaatccaccaccggcctctggcgactcctgtcctgcgcgcaggggaggcagcgcagcccgtgaacacccccgagcccggtgcgggccgagcagttctccgcacctccggtaaaggtgcaggaccgggtgatggtctctgcagcagtcagaaggctcctctcccagcccaggaacgtctgcaataaattgcttccatgtgcgggcttccc

SEQ ID NO: 334894 - DNA, 77 bp, Homo sapiens
  chr14:50511831-50511908
  hyper
cgtccaccacatggctcagcttcctgttcctcccctctgctcggagtcacagtcccgaggccagcggggtgtttacc

SEQ ID NO: 334895 - DNA, 1161 bp, Homo sapiens
  chr14:51026824-51027985
  hyper
tccccactccttcccaccagcgccacagcaacatcctcagagtctgagcgaactgcgcccagcgcgggcacggagcctcccaccgccagcaacctgcggccccggagaaggcagcgagcgcagtgacagcgcctcaccgccaccagctcctggaccaccatggccaagaaccgcagggacagaaacagttggggtgagtagcaaatgagaacttctgcagcctgcacggggtcttctggccctccactttctgcttctgtggagacagggagggccaagggctgctaggtgcctgcgtccacggctgggagacgggccgtagccgagccgctccctgtttgggcggaggaaccatggccgagcggtacccgcgtcaccgaatcgcgctgtcggggtgagggctgcagcttcgcgcaggccgggcctccagctccttcttccccacccccctcccgcctcctcccagcatttggacagcacccaccaggcgcctccggggacttgtgggttccgccttagcgatcggttgggaggaaggctatgggggtgggcagggggctgttgttactcggccccagaggggcgaggggtcggggatctagagcaggccaagccccaacccccctccccgggagccgccaactcgctggctctgcagggcgcgggctcccggcggcgggcggcgggcggcgcgctggaacaatgaggcggagcgcgccgggtcccggacggacggtagcagaccgagcaactgggagaagggccaccctcttgggaattcctgagcactgcagtactcctcttaatttgggggttgggtgggggaattggggaagaaggagagcaaagttgtggtttccagccttctgccccaccccgacgtggtaccccattcagaccagccccaagggtggctttgttctttgattttaccttttggagacattgggctcatgattcagcaccaggccgaggggaggggaaaggagaggcgagacccagtatgttcacaccgcgagtgggtgggcggtgctcacgcaggcggagaagaacgggcgcagcgatgcggaagaaatcgcggccccgcccgccttgctgctccagacctagttctggacggttagtgtgggcaggctgggcgtctttttgtcgtaggttccc

SEQ ID NO: 334896 - DNA, 865 bp, Homo sapiens
  chr14:51410199-51411064
  hyper
ggagtgtgtgtcttcggggaggacgagtccagggcattgcctggccctgggccgcctttgcgaaagactcacggaattccaggagctacacccactcaggagaatgggtgggcggcgctctacgcttggagcgggaccctgcccctcctctgcaccacacttagccactcccagaggcctgagacttacgaccttttcccagctcggcgtttgtctcccctcccaaaataccaagctccagcaaggcaagatttttgtcccttttgtttagggctgagtgtccagggcagagaatagtgtccggcatacaggacaagaggcccccgtcacctcttgattaaatgctgagagtcaaagttccaaaaaagtttgtgaagtggacaggcgagaggggcctgggcttttgcccacctggcggtttccaggggcggacggcacagtggtttgggcgggacactggcgggtggcacctcggagacatgagttcggcgtctgttgggaggcctaatctgtcccccaggctgcccgcccacagcctagacacgtctcctctggacttcggggcaaggaccgggtgcaagggaccactctgaggggttctccacctcgtcccgcccggccgcggccggagactccgactccgggctggaccccggcccgccgtcccgcccccggttaccttggggcacttgtcgtagtagtgctgctgcgtgcggatccagcgccccaccaggtggtcgcgcaccgtgtgcgccagcgcgaagtagtagtcgcgggtggtggccacgttgcggtccttgaccagcgtgaagtgcaggtgccggttgaaactcttcttcagctctgccacgttctccacgcccac

SEQ ID NO: 334897 - DNA, 2326 bp, Homo sapiens
  chr14:51560334-51562660
  hyper
cccgaccctccgccgtgcctcaccaggtccgcctatccagcagcgacagactcccgccgtccgcgcgaccccaccgcccccatcccagtccctccccgagggttcgcagcccgccctgccctcgagcgtgcctagcggccctgggcactggcgcggctctacccagctatgcagtgctttcccacacactggccgcggccactggctgcagacccgccgcggaaagggggcgccctgagtcccgctcgcaggcagcgcgccccgagagacccgctctaaggcatccccgcaacaactctgtgggggcattcaactcccccgtgcgccggttaagattcccccatgcctcctgcaatgcaccagaccagggaggtaaacatcgaaggcacctgcattgcgcccccactgggatgcgctgtgcgcaagagacggggaccgtctgctgcaaaaccggatgatcggagacgcagggagttaggagtgggttttcttaggactcaccttatgtagtttccacatggcccccagagccttgacttcgtggctggagtgtttgccctcctccaagcactggtagcacacgggcatcttgcattgcacgcagtacatgctgtggttctccagctcgtggtctgtgcaggtggagaccttgcgtgggctcagcctccggctcacacgaccctgggccgggggcaccaggcggtgcttggctaggggcccccggggcgggtggcagcgcaggcggcacggatcgcagtagaagacatcgcactgttcgcacatgacggtggcttccttgggcgccttctcgcagagctggcacttgagggccgcggctttgctctgctggtagcggtcaattaccccttccagtacgcgattcttggggaagccgcggagcccccggtcatccaggatgaggctgcggtgacactgggggcaggtgatacaggagttgcggggcaccggggccagggccggtgacaagtgggtggccggtggcggcatagccgggggaaacacgcggacgccgttgggggacttctggcacggggtagtgggggcgctggcgaaccccccgtaggagccatagccgctgtccgcctcgctgtataggctcatcttgtccaggtccagatagtcatagtcggagaccccggagcccgcggcccgatggctctggggggattcagactctggggtctgcaccaggatgttgcgggcgcacgcctgacacaaattgtgagagcagggcaggatgatgggctcccgatagaaggagccgcacacggggcatttcaactcctcttccatctcctccatggggaccggtctgggaggagacagcgacggctgcagcgggtgcctgagctggcgaggtggccgacgggcccgtcttgtccagcaccctggccagcggcggcggctgtggtggtggtgccttcccgcgcagcactggcacggacacccagagaggcgctagctctgtgagccgcagccgcgtagccgccgcgccgcgcgccagcccggaccgcccctacctgccctcctagtcccgccccggcccatgagcagcggcccattgggcggggggcaagagatcgaagctctcattggccaccagacccgtccgtctcctcgtctccgcaggccacagggggttcggtagagtctgaggatagggcagtcttcgctcgcggctgcaagatctctgaagggggccggcgtgcggaggctaggggaccgggaaggaggagttaggcgggatgattcatcctcgcccggcttacttccgacctccggtgcagtctcccaggagctgggggcgtgagaaacccctccccgcagcgagtgggctgccggagggggctggggcttctcgccagcgtttgcgtttggctcccagctctgagctccgcgcccacctaccgcgggcgagtgctgcgcagcacggaggacgccccttctcttccgctgctggcagccttcgcaggcgtctcacccgggcctaggcttctgcacggcagtggggcttttctccttctccgtgaatccgctgacgccgtgccctggagctcccccatcccgggagtctgacggcgctggcgcaagccctggcgacactcttggcttctttcatcctgcgtccctcgtttcctaaagagcatgtataaagtcgatttcctagtgtcgacatgagattcaactgggtaaccgatggaaatggtcagcattagtcagaatctatgaccccttcgtttcatgctttaaattatagctcggcccagaggcctcagtgccgtggtgtgaacgtgcttccttccac

SEQ ID NO: 334898 - DNA, 260 bp, Homo sapiens
  chr14:52327346-52327606
  hyper
cgctgctacacatactcacaacgctgccgccgcgctccgtgggcaactcctactactgctgggctgggctgggctgggctgggctgcgccggagctcgcctgcacagatcagctccggagaggggaaaaccacgctcctcggaccaagcctcgggagctaaggtaaatgaaacgttttccatgttgctcgtttttaattgagaaaaacgaccgtcgcttgtggttttaaggtccgatttctaagggatgatagagacatc

SEQ ID NO: 334899 - DNA, 1782 bp, Homo sapiens
  chr14:52534581-52536363
  hyper
cgagggcagcgccccgcgcttgacctcctcgtaagcgcctacctgctcccaggtggccaggaaggcgtgggtgggggtaaagcgcgcagagcgcgggaagccagcgcgcacatagcgggcggccaggcccagcactgcgggggaggtgtcctctcggtacaggactcggcctctgccgtggctcgtgtcgatgtccgccagaaaaggggcgatggccgggaagtcggtggggaaatcatagtccacatactgcgtttccctggggaagtcctgagtggagatgatgccgttggtgcccacctgggagaggagagggacaaaaaggtgacagtcgctcaagcccaaggacgctaccctttcgcgcagggagggaagggaactgacttaggcaaaaagcctctctctccttccccactggccagggagtctggattcagggaaacaagcgcaacttttgcgactgtcccagctccgcgctgcagtaggtccaggggccctaaaactcgttcacctatcttctcactcccctcacaaccccggagccccatgtcctcggagaggaagcctccaggtctgaagagggaacaccccagctccgcagacgggcacagccttctcgcggtcctaactgcaaagcccgctggccgccctagcaacgccaccttttctgcctgggacgcgtacgtggctgcgaacaattcttgctctcccctccaggtcattcttgctcccctacagcagcggggcaggcagcggcatcgctctctggccgggtaccaccgcaagggtgctggggggctccaggagtggggtctgtttcctcccctctggaggcagggtttccgtgagaccgaccccagggaagaagctgcgggaaaagtgccaggagggggctgaacttacgtagaggttgctgaatcgggcttcgtagaagtgcaggggattcgccagcttcaccacggctgagctttcgtcgtcgccttcctgcaggagctggtccccccacgactccccgtgtgggaagagctcgtctgggtgcagcgccgcggcccgcaacattagcaacggcagcagcagtagcactggtaacgacgacagcaccggccgcccggccacccggtccccctccatgctcgctcggccgtgcgcttacccgctgcacaacgcgtcccgccccggcctccagcccactctccgcgccgcgccagcctcgaacctggatctccgcgggcgcctgggcggggcgggactccaggcccacccagcaagctaattggctgaggccctcggctggggaccaatcaccggctctgagaaagttcggcagtggccaccacatctggttctcgttaacttttctaaggcagcggccgctggagcagcggggctggcggggtaaaagctcctggccagggctgcctggagctgccccttccactccgcccccagggagctcccgggtcatcctctcatccgggctgccccgcggcccccaaggagccccacccccgggaccaaatggcccgcaaggtttggggcagcggcgttgcaggagatgagctcagcgcaaagggaaccccgcagcggcgagtgcggctgctggcctgcgcgctgtggccccaacaggctggcagggcgcgggcgggtggcggggttgcggtatgagctttgctccctgccctggggtcccgggcgctcctggctctggaggcctggccatcggtccgaaaagcaaagggacattgtcgtggtcccctcggccgcttcgctccacccagagac

SEQ ID NO: 334900 - DNA, 1076 bp, Homo sapiens
  chr14:52781114-52782190
  hyper
cgccgtcggcgcgctgggtgcgggaagggggctctggatttcggtccctcccctttttcctctgagtctcggaacgctccggctctcagaccctcttcctcccaggtaaaggccgggagaggagggcgcatctcttttccaggcaccccaccatgggcaatgcctccaatgactcccagtctgaggactgcgagacgcgacagtggcttcccccaggcgaaagcccagccatcagctccgtcatgttctcggccggggtgctggggaacctcatagcactggcgctgctggcgcgccgctggcggggggacgtggggtgcagcgccggccgcaggagctccctctccttgttccacgtgctggtgaccgagctggtgttcaccgacctgctcgggacctgcctcatcagcccagtggtactggcttcgtacgcgcggaaccagaccctggtggcactggcgcccgagagccgcgcgtgcacctacttcgctttcgccatgaccttcttcagcctggccacgatgctcatgctcttcgccatggccctggagcgctacctctcgatcgggcacccctacttctaccagcgccgcgtctcgcgctccgggggcctggccgtgctgcctgtcatctatgcagtctccctgctcttctgctcgctgccgctgctggactatgggcagtacgtccagtactgccccgggacctggtgcttcatccggcacgggcggaccgcttacctgcagctgtacgccaccctgctgctgcttctcattgtctcggtgctcgcctgcaacttcagtgtcattctcaacctcatccgcatgcaccgccgaagccggagaagccgctgcggaccttccctgggcagtggccggggcggccccggggcccgcaggagaggggaaagggtgtccatggcggaggagacggaccacctcattctcctggctatcatgaccatcaccttcgccgtctgctccttgcctttcacggtaagtcactccctacgtttccacagcccggctctgctcagccttctcatgctctcccctgacgcctccaccctttccacc

SEQ ID NO: 334901 - DNA, 1470 bp, Homo sapiens
  chr14:53416859-53418329
  hyper
cacatcccccgtcccgcgtaactacgcaattaaggttataattgggaggctcgaatcattacatatgaaaattcagagaatagcaaaacaaaataagacgcaaaggggaacaggtctatctgcttaaatactgaaagattttacatctccaaaaagcatttgcgagatgccaagatttctcaaatgggcccctcccccgtcgtgagcctctttcctccccctaccaattctgggaagtcattagttggacgcggctgggatgctactcaccgagtttctccaccagcttaagcatcacgcctccaatgtgcacctcgccggtcactctcagggtgacatcgcggttcaggtccgtcacatggacactcagttcccacgtcccgtccgcgtagcagccatctggcatccttatcccgtccagagccatggctccttcctgcgagcgcggaggaaatggctctcgtaagcgtcactcccccaaagaaaggcgaatcccaccgaattcgcagcgccggccacgggctgggaggtggtggaggacccggggctttcggcagaaactcgggagggcggcggcggccggggctgcgggaggaccctacgccccgctcgccccgcagcgttcctcggtcccggcgccgcccgccccacaccgtccccgcctagcggaccgcggagggcttcacctgccggccggccccgagacacagcgcgggctgactccccgttcccctccccgccgcgccccctcgggtcccggcggggtcccgctccctcaccgcgcgctcctagcgctccgggcccgggactcgcgcggcaacaggcgaggggctggaggctcgcggggcggcggtgtccgcgtccggttcctcggctggcgaagcgctgcctgtggccggagcggctaatggagtcccgtcgtcgcggcccctcgcctggctccccgcgctccaccctctccccgccccctctgtccgagcctggctgggctgggcgcgctggctccctccttcgccgcccgcagagctgccctgagcgggtccggccggcctcgcctctgcccccgccctcccggcgccgcgctcgggggagggggctgcgggtcccgggcggggcggggcggcgtggggcggggcggcgcgggggtggcggggggcgcggcggggcggcaatctcggccccgcggagcgctgcccttttatggaaatgaaggacccggctcaggaattgaatccaacatccgggctctaggcggcgggccctgaggagggggagcgggggagcgcgggcggcctttcccggggcgctggtggccggcggggcgtctagagctcaggctggactggggcccccgcggcgtgtgtccgcgctggcagcagggagagggggcttgtccgtgagaaacggccccaggaaattcccagggcaaggtcgttttcggagaacaaagtcctctcgccccctccccac

SEQ ID NO: 334902 - DNA, 988 bp, Homo sapiens
  chr14:54420542-54421530
  hyper
cgggagcgaggtcgggaaagtctcacccgcccaaagcctcaccaccgagaggcacttaaaaaggaaagcgcagagggaccctgcccacgcgcgtgtacacacacacccccccacacacacacaagcaaacacgagctccccgccacttcctccccagggtctcctcaaggccaaatattgctcccaatgacagccagtcaccccttggcgaacgcctgctaaggctccgaagagccgggccaccgatctagctcccggctgaaagcagccgaccttgtcacgcgcggggccgggaatgggagggagggtgttagagggtgatcgctgtgggaaagtgagagggagcggctgttagtcattgctccgggtccattaccgagaatccccaaacctagtccgccgctgcgtggcccctctccccatgcaaagcagacccccgaagaagccatgccaggctgagggacagacgccggggctcgaagctccgggcagattcagaaagaggcgtcgctgcagaaaggacgcatcacagttttcagatcttaatgtggccgaggttttacaactcccgacccggcgcagaaaggaaatcccaccatgttccccggagtcgagaaaacggtgaacagctttcggcctgcgctcgacctctgcgtctgcgtctctctcgcctcggcttcccttattttttaaaccaccaccacactccttcccccgccacttccttcccccacccccttcctccgttgcaccagcagcagagtcgcacgcagcaaatactccttcaagaattttacctacctacagttcaagcagttactgggatgtcctgactaatcgaagatgctgccgcgcgcgtgggtcgctctgcgcaagggcctcttcgaaaacccgactaggcgcaactcagcgttcagcagggccgggagcgccaggtcgtccccggggcccgggccccatgactcctgccccaaagcccactccaccc

SEQ ID NO: 334903 - DNA, 950 bp, Homo sapiens
  chr14:54421572-54422522
  hyper
cgctccggagctcaagaactcgggttgcctgccgccccactctccacgcacatacttggttttcttcttaggggcattggcaggtagactttgaggaagaaaagtaaaggatcgaacagctcagccctccctcccgaccgtggatgcccggagtcgaccaacacctcaggtccgggtgcggaggccgcgggcgcccctgcgcgaccgtccgcgcccggcaagagccgcgcggctttcgcctttgctggtcccgcgccaccgctggggcgggctgcgaaagggttgggaagagcaaagggtttttttgttttgttttgagacgcagaagccctttaaaaagcccggcgaggagaggtccagaagtagagaaagcagacggaggcaagctgtgcccgcggggcaaagggacagtagaaggggcgggcgcccgggttccccggaaaaccctcggccccaaggaatctcctggggcgggagagcgcggttctaaaaccgagaggataggaaggggaagggggagttgtgtttcaatttcggattcaccaggattcatctctagtcacatttttcttctcaaatttttaaatcgaaaagataaaagccaaaagaactttcatccccagagctttttattgggggaaaggaatgtaactcggggtggttgtccttcacttccctactcgaatcttctcctaatgccgaaatgtgtttacaggtagcctcagtttaccaagtatgtatcttttgggggtttaacctctcacaaagccttcaactcacaaaccgcgatccttggaaaccatcctccaaagcagtgcttggaggcctctaaggcccccggaccaactcccgctggaagaagcctgcagggactcgggaatcacgggaacctttcccgtcggttccgggcctggagggccaggaagagccgcgcgtccgcctttcgtccc

SEQ ID NO: 334904 - DNA, 214 bp, Homo sapiens
  chr14:54423285-54423499
  hyper
cgggctcgccagcagcagctcctggggacctctgaacggttgcagtgaacctgggcgagggccggggactgtggcgctgcaggctcgagatagcttggacgggaatcccatcggggagacaagctagatactcagccggagcagcagcggcgtctcaggctcgcgtccctcagctcggatgccacactcacctagcttccgggccgggctccgc

SEQ ID NO: 334905 - DNA, 780 bp, Homo sapiens
  chr14:55595810-55596590
  hyper
cgcccctgcggcggcggctcggggtgtctggccggcgcggggctcgcccagcctggtccggggagaggactggctgggcaggggcgccgccccgcctcgggagaggcgggccgggcggggctgggagtatttgaggctcggagccaccgccccgccggcgcccgcagcacctcctcgccagcagccgtccggagccagccaacgagcggtgagctgcgcggggcgcgggggacgcggctccggccgggcaggggagagggcgcccgggcgctgcttggggcgcggtccggagagggttcggctccccgggaccgggccggggcgcgcgcggagagccccacagcctgtgctctgccctccaggagcggggcggcgggcagcgatctgggcccggggcagtcgcctttgattatcgagggcgctggcgttcggggaaggttggcagcaccttacgagacccacacacgtccccggggcggcacgggccaccttctgcggagcctcgtgggcttcgccgccgtcgcacctccgccgcctgcgctctgcggccccagagtaagccccatccggtgacgagccgcagtctggtcaccccagtcccaccaggtcccgctgcgaggggaggcggaggggctcgctcagcaaaccagacggccgctccagtttctctaattggggttggagccccgtcacccttccccagatcacggccgcgggggagcgaagggacttcccaggactgcatagggcgcctcccgggacccacagcttggctggccc

SEQ ID NO: 334906 - DNA, 1156 bp, Homo sapiens; identical to SEQ ID NO: 237443
  chr14:57260987-57262143
  hyper

SEQ ID NO: 334907 - DNA, 1754 bp, Homo sapiens
  chr14:57263800-57265554
  hyper
cggaaacggggcgactaggggaatcaggttttatcagagcaccctgcgctgacaggctcgggcggtttagaagagaaaatcagaggtgctcagggcacctggtcacaaacctgggcatgcagatgcctgatgggggcttggaccctttcgtggcacgaaaaggagagagactgctgttcatcttaaaagtctcgaaggaggcaaaaacccaggcggaagtcatggctgactctgatcctgcatcttctcattctggttgttttccaccgcgtctgctcccatttgcgtgggatgcgctggtctcctgcccgactcttttgtgttcctcttttgcatgattaaaaacacgtttctatatgcactaaaccatcacctagcactggcacgcctggttttgggttacagctttgtccgtataataacagcgaagttctccctgggtgtgagatgcgggttcgaacatgtggtgtgcgcgccagggctggccgcttccggttaagtggacgcggggacttgactgcgtcccctgccttgcaggtaactggaatgggttgcctggcaagttggccctgcccgggacgccgaagggaccgcttccccattccagagcctgcctctggccttcagggccgctgacaggtccgaaaagaaagagaaggcactcagttttaaaaaaaagagatctagaggactggggaaaaggggatgagccaaggcaaactgggaattgctcgggcttcccccgaaagcctcagctcagtgccgggggagaccccaacggagggccagactcccccaaatccagtggccgaagacctggatttcctgggaggatccccgggggcccgaggcaggcccagctgggccccgtctgctcgggacgcgggaggcctcagccgtggcgggagcccccgctgtggcggcctcgcccttcgaggccaggagaagcggccccctcctaagccgtcagcggctcatcctaccgggagacctggaaaaccagcagccgcgggccctgctgggcttgctttcgccgccccggccccttctccccggccagtggaccccgctcgccgtcccgtctgtcagtctcggttttagctccttcgggcgcagggcgctcgcctcccggccgggccaccccaccctccaatccccgaggccgacccgacccctgcactccgccaggccgcgaggtttcccagcgaccggcgccccggcccgcggccgacctggaggcctgactgcagggctcgggcggggccctctctcggctctggctggcggcccactcccgcgggcgtacaggcctcgccaccgggcctcggccttgccgcggcccacagcgccctgggaccggcgcccccgaggcctgagaactacgcccggggggcgcgggctgaggctcaagagaggtcctaggtgcgggccagggatggagccagcccagagagaaaggggaaaacccggcaaggcaagagcctcagtctcgcccctgcctggcccgccaggctgtgagtggggcccattgggcagcgccaacctggggagtccggcgtctgccccagctgggggccctcggggcagagatgtgagtgctgttcccaggtaactccgactgggcactggggagttagaaaagccagctctttagccagagcgcctagggcgcggcggagagcgggccgcccggcaccacgttccttctggcagttccgccccagcctcccagcgtcttgcgcctgtggcggcgg

SEQ ID NO: 334908 - DNA, 147 bp, Homo sapiens
  chr14:57265909-57266056
  hyper
cggcgtcatttcagtaccaagtatcaccattattgggcttattaacttcattaaaaccggtcttgactaggagtggagatcggaactctctggatgtctttaagccagtgttcgctccccgcctccttccctccctccgttgccttc

SEQ ID NO: 334909 - DNA, 288 bp, Homo sapiens
  chr14:57270914-57271202
  hyper
cgactcgggcaagttgattttcagtgccacctcctctcgcatgaagatgtctgggtaccgggtcttggcaaacagtgcttccagcacatctagctgcgcccgagtgaacgtcgtcctctcccggcgctgtttccggggggtggctgcgggacaagaagcccagggccctttagggtgggggagcagtttctcagtcataggcgtttccgcgggttctccgacgcccctgccctccaccccgcagcagtcccccgttcctcacagcccttcagccgggagcctaccaat

SEQ ID NO: 334910 - DNA, 221 bp, Homo sapiens; identical to SEQ ID NO: 237446
  chr14:57272038-57272259
  hyper

SEQ ID NO: 334911 - DNA, 762 bp, Homo sapiens; identical to SEQ ID NO: 237448
  chr14:57274535-57275297
  hyper

SEQ ID NO: 334912 - DNA, 340 bp, Homo sapiens
  chr14:57275584-57275924
  hyper
ccaaaaatatgtcccgaaatcgggcatcgatttcaagagtcacttgaacgcaacaacgcgaagacttcttgggagtttgcagagcgacccgtcgcccgcgcccggcgctggcagggaccttcggatggttcttactgggccgatccatggcacaggctgggcctcggcgaacccctcggcccccgcccggccccgagccacgacacctcattgtcctggagcctgggaagggggtgcgcgagcgcgcgggcgagccctgcctctccccgccagagaacagctgaggggccgcggtcccagcgggaggattccggtccctggcccggccgcggccttgggc

SEQ ID NO: 334913 - DNA, 294 bp, Homo sapiens; identical to SEQ ID NO: 237451
  chr14:57278006-57278300
  hyper

SEQ ID NO: 334914 - DNA, 1047 bp, Homo sapiens
  chr14:57278622-57279669
  hyper
gttggtaattaattcgtcgctttgttgtcggttcttatactgtatgtgtactcaaatgtggccgtccttgggatttacagcaattaacgaattacgggagtgcgcacgaggcagcaagctctcggcagccgggctccggctcgggctcggcctggggctggggactccgcggcagcggcccctgtcacaggtgtccctagagctttgggccctggcggcccctcgagcccccgaggggcccggagcccgcccagctccttcccggccctctgcagcagctccagtccggagacccgctggctgtcgcgttcccaggagtcaagagtttctaggggcccgggcgggggggagggtgagtaccgaccttttttctcaccccacccccactgtactgaaacacctggcggccgcccccgaagcctttaatggggatggtggtgaggagggggtaacaaatgccccgggcgttatgaccctcgtggcgctggctgtcggaggcactggttgggtgcgcttggtcagagtcatgatgctttcgatgaaggaaaggcaaatccacctcgatcacctgaagcagagtctccttcctacccctagaaaagacaacgtttcccccagtttgatcacaatgatgtttaaagcataaaagagccgaaaaagaaaaatggacgttgtgaatctggcagaggggaaggccggaggaaggccttggggacagtgggcatggggtgggatggagaatgatcagaacatgcgcttgtgagctaaaccaagtaaaccattttggactgggagatccatctgccgtagggtccagtgtccagggtaacctttcaagcccgatgtagaggtttgcgatgtcctcccagatggcgggggcagctgaatctccctaaaaatccccctgttctattcgacaggggcagatttatgcatggtggggcgtgagagggttttgcccttccagcggccggcagcagacagctcccgcttctcctttgccctctagtctaataacttcgcagaaatacagggccaataaactac

SEQ ID NO: 334915 - DNA, 1345 bp, Homo sapiens
  chr14:57283314-57284659
  hyper
cggtgcaaacgcccccggctccctcctttcccaattcacccacttcttaatttgagtttcttaatgtgcaagcgccagggccggctgtggtcaggcgggctattttctggcaagtgtggcgcggggctggacgcccctgccggcgggtcgccgggtctcgagctgcgccgccccgctggaggcgccggggctgcctggctctccgcgcaaacctcgcgcccttccgtttgcgcgcatggagccgggtgagggcggccgcggccaccgcgcgatggaggatttggaagctcagagccagctggtacattttgagaaatttagcaaaccagactgggctgcctcggaaactgggttctgttctgactcatttgcagaaaagttatggggaaaaacatcttgtaaaattaaggttatgtttggcgggtacagtcttgagcgcacatggtcatccggcgaatcagccaagttttccaaagcgccccctctccagctctcaggccaggggagcaaagcgtaggtgtgtgcgtgtgcgtgtgcgcgcgcgcgtgtctctgtgtctgcgtgtgtgctcgcaagcgcgtgtgggtttggggtggggggacatcctgacctttctacaccctagtgcgtcccaactccagactgggaggagacgtctgcggcctctggtcttttcccttcttggacgaggtgcggccagctgagacctcacaccggccacctcggacccagtgcgccgagctaggggagacggcgcgggactgggggacccctgggatcccgccctcgtagcggaaggagtggcagcccttggtgccgggcctggtccttgaggctgccggccctccggggcgccaggactcgaggacgcggtttgcccccgcagtcctaagatccccggggccgtgacagcttggggaaggggcaaactctgtttggtctccacgaagtgcttcgatgttcgcaaaagggtaggcccctcttgcttggggtcctacacccctcggaactggctctgcccctgcctcttccccagcacagtctcccagctaaggctcagacagccggggaaaggggcgcccccatcactattccccacaacccgccccagtgtgagccagggcgcggctgcaggctgacaggcgcaccgtgaccacgccgtcacttcccttcaccaaaggttagatgggaggcgtgcaccctctggggagttcgcaaagcttctcgctttgatcagccgcgcgcagtgccagggagagatattgctggggtctgagtccgtcggaagtgtctagaaaagaagagagaggagcaggtaatcagactttggcggctgccctggaga

SEQ ID NO: 334916 - DNA, 823 bp, Homo sapiens
  chr14:58332249-58333072
  hyper
cggttcagcaccgaggacagcggacatacttttctccccggggggtccccgccgccaggaaggcggtgttgacagcgtccgcagggctgcaggtgtccgtaccgcgcgcccgcccgtccgcatccccgcggcacccctgcgcgcccacctcccttccccgcctcgcgcagggcagccgcgcggcgtcttacttttctggctggagtaacctggataatagccatagtagccggtgatccgcaggatccggtcctcgatagtggccaccccgttgggggccgccttgacatccatagagagcgcggggcgacggccccgagtgcggcggggcggagagcgcagcgcggggcccgggagctggtgcaggtgccggagccgctggtgctgatcttgcagctcctgctcccgcgcccgggctctgactccaccgcccggcgcagcaccggctccgcatcacagcggcggcggcggcggcggcggcggagcggcccccactcgggccggcctctccgtcagcctggcagctctcccgcgcgccacccggagcactgctgcccgaatagcgccccctcacctccgacgcccaccgtggccgggggcgggtgtgggcgccccacctggtcgccagctttcatcattaacccttgcgcgatccttcccgaaaactagacaccccaaccccacctgatgaaagggatgtttggtcagtggggcgcgagaggagaaggcgacggtggccaggggctcagagaagggtgttgggagtgggagaaacccaagagggactcatagctgttaatgcgaggcattaactctgtcgctc

SEQ ID NO: 334917 - DNA, 214 bp, Homo sapiens
  chr14:58862962-58863176
  hyper
cgcgtgcctctggacgggcctcccagccagcatgtgccgtgttgtgttcgcagaaagaagagcagagcctcaaaaggctgaggagcagggcacgcaggtgcagtgctttcgatccgcacaggtagctcagtagacgcaggtccgggctcgctgggttgcttggctcctggcgggctcggcagcaggtagttagttccctcagccgcccgtgccc

SEQ ID NO: 334918 - DNA, 1180 bp, Homo sapiens
  chr14:59931109-59932289
  hyper
cgctgaaggccgcgcccagctgcgcggggtccggggaggtccggtagaggcagccgtggaagctctgcgccgccgcgagttcccggggcgccccgagcagctcccagggcaaggagaagcccagggccgtcagccaggcgcccgccagcagctgcagcgcgcggcggcggccgatcttctcccgcggcggccgcacgatagcgcagtaacggtccaacgagatgagcgccacgctgagcgtggacacgatgccgaagcacgagctgaagaagcggctggcggcgcagaagccgcgccagggccccgcggcggcggcaggcgccgaacccccgggcggagtgaagaggtccaggaaggcggcgggcaggcagagcagcgccgtgagcagatccgatagggacagcgacaggatgaaggcgttggtgacggtgcggagctgccggtgcttcacaatcacccccatcaccgcgcagttgccaaggctagacagcaggaagatgagcaggaggacgagcgcctgggccgccactgcagctccgtgcgacagcagcggcgccgcctccgggcctagcggccgcctcaccgccgcccccgcctcccgcgctgccccggacccgccaaggccgccgccaccgggagcggcagctgtgccgcctccgcttgcgtcgctcaggttccccagcgccgcggtcgccacggtgctgaaggagagcacggccgccgtggccgcggaggaagtcccgccaggtgggccggccgcggagggggcgccggagtgctggctgcccagtaaggccatgctcgctggtgggcggggcggctgcggctcctccatggggcccagtggcggccgcggatctcctcatcccgcaccgggggcggcggccgctaggtcggagtggtggctcggggccgggggctagcggccgccgcggggagctgggctcggccggaggggtggcggtcgctggggacctggcggagcctttgacgtgggttccagcgttgccgagggaaccgcgtgtttacgcaggagcgcggggcgggacggcagcccagtacccgctgcaaagccgacccgcgacaccgccactccggaggttaccggcccgggtgttcgggtttccgagagtgccaggtcgacctcctgagggaccaatgtccggccagataaagtgcc

SEQ ID NO: 334919 - DNA, 523 bp, Homo sapiens
  chr14:60043257-60043780
  hyper
cgctcagggttcccgctgagtgcctcctaagcgccacctctgaggagacgtcccttccagcgcccgaggggcgtcttacccacaacaaacagctgctccagcgcctcgaccgcgaccgaggagcccagggtggagggtaaggtgcataactccagggaggggccagtggagacggcagccgcctgcaccagcttctcgccagcgcccagccctggggtccaggggctcagggccattttgccgctctacttgagcgcctcctaagccagagccaaggattgccggttgccacgggcaacgaggacaccgaggtcgtggggcgccccctcgtggcccgcacctctagtaggtaccctcctggttctctaattttatccacgataattaagcagtctgggaagaatgactctctctttagctaatttttcccctttcaatttccattgcgttagttcaggcctgtatcttttttgtgggccactggaatcataataatgatcacttttgagcgcatctttgtgcc

SEQ ID NO: 334920 - DNA, 459 bp, Homo sapiens
  chr14:60097114-60097573
  hyper
cgggtttcccgtgcgcctcaggcatgcactactgaaataaagagaataccctgacttttccagttgctccacacacagtccatcttggtggaatcggcagtggcctgcatcgtgcgggctttgggggctcgccgtggctctcctcgggggcgccgagcgtgcactcaagcgttggtgcccggctgctgcggctgggctcgcagtggccgcgcggctgcggagagactgaggctgcaccaggcggcgcgcggtgaggggcgggagcgtcgctggcgccgcagtctgcgcggccggcagcgaatcagcgcggcgcggccccggagccgcctgcgcgcatggggatgcgggcgccgctccacgcgacagcgttggctgggctgcccaagggtgctaccctggagacgggtaaagcggttctggccgcgaaggcgctgacgcggacagtgggtgggaggtttg

SEQ ID NO: 334921 - DNA, 733 bp, Homo sapiens
  chr14:60336957-60337690
  hyper
tattcccagtcgcccgtggcgacgcgggggtggggtcggcgctcaaggcagaaagcgcgaggcaggtgcccaggagagccgcgcagaaggggactgactggggggccctggtccccgacgccatttgaggggcagcggcgcccgccttacctgtggatgcagtttccatggcaacgggcgactgccgggcggggcccgagccggcttcccgcgacgccgcttcccgggccctggcgcccaaccccgggctgggctccccagcctgcggcgccggcgtggcccctttcggcgtcaccgcttcgttctccccctccccccggtgcctgagccactgggacccggggccggccagcggcagcagctcgtcctgcggatcccccggcgcggccatggctggcggtcccccggcgcggcgacggcggcttggctgggcagaggctcggtggctgcgcgggcgctccctgctgctgtccccggagggactcggcgctcagggaagctgcggtgtctcagcgtcgccgccgcctctgctgcaactccgccgagccgctgcctgccgctcttcccgcttcagctcctccttctcccccctcctcttcctccggccccgccgcggccgctgcctgcgctcctcctcctactccactcgctgctgccgccgctgcttcgctattcccaatcctgttattacgcaggtgaaaatggcctgcttggtccgggtcctcctgggcac

SEQ ID NO: 334922 - DNA, 893 bp, Homo sapiens
  chr14:60385935-60386828
  hyper
cgtaccttacagcacatgtcaatttggacaagccacatttcaagcgatcatgggccctgcgagtctgtgggtagcggctcaccctgctggactgcgcagatccagagaacgacacgagacctgcggttgctttggtttgccttttactaagttcatttctcagcctctctgcccactctgaaaagtctcccctttccccccttttaattctactctattttgtaaattactgttgtctcctgaaaattttggaatgcttaaaaggcactcaaaagcctgtccgagatcgactagaagaccctcggaaggtccctctcttctctggacctcactgggcgttcgtttgcccgcgccgtccttccattcggcttgccgggcgcgcagcggcttgcggctgtggtcagccaccttcccgggaggcggtggtcgctggccgcgggaaggatgccgcgctgggggtcggggttcgtcccggctgtcacgccaccttgtgacatcacagggccatgccctcggggctcaaggccagagaggctccgcgcttccaggacccgagagctaaagataatgaatgggagagagcgagactggaggaggtaacgaataagtccccaccaccttgcccataacgcgttgctttcagtcacgttccgcgaactggcgaaggtaagtgaaaagataagcgcaggtacagaaaaacctgccagcgagaagctcccgccgtttcccaggagccccaggtggggtcttccggttggacccctgcttccgctgattggttggaggtcgccaccacgtgatgcaaacccgggtcggcctccgcttcccccccacccttttatccccctccccgccccttttctcctcctccccacccggaggtcgccggaggc

SEQ ID NO: 334923 - DNA, 454 bp, Homo sapiens
  chr14:60794412-60794866
  hyper
cgctcaagactcagacccggactgatgagctaagactgcttgcaagagggagtgggagtcgttaaaaaaatatcctcgtggcttaatgaccaaggcgggtttattctcaaggaagggggagcggcgtggtggtgttactaaacataacagatggcagctgtctgcggctatatagggcgcgctgacaaatccctctggatggccacgcggcgctgggctgcggggcctgggtgcacttcgcgcctggctcggagggcgccgcctgcgggaggacctccgggagccgagctgcctccccgcaaacccggcccgggcccacgcgggctcagggcgccaggcggggtgcgccgaggtgcagctccccggccctaggcttcgctggggtgggggtcgaggcctctccgcgggtggctccctccaccctgccgccccgcctcgcggctgggagttgccc

SEQ ID NO: 334924 - DNA, 60 bp, Homo sapiens
  chr14:60798413-60798473
  hyper
cgctttgtcacccgtgccggaagctcacaggccccggagatcccgccttctgactgcatc

SEQ ID NO: 334925 - DNA, 953 bp, Homo sapiens; identical to SEQ ID NO: 237470
  chr14:60951980-60952933
  hyper

SEQ ID NO: 334926 - DNA, 36 bp, Homo sapiens; identical to SEQ ID NO: 237472
  chr14:60973460-60973496
  hyper

SEQ ID NO: 334927 - DNA, 767 bp, Homo sapiens
  chr14:60973758-60974525
  hyper
cctcagcagctaggcgctgggatcggggtcggctctcggctcggctcgcgggctgtaaggtctccgcggaccccaccgcctcttctgcgcgctaagggtgagcgccaagcaatttcgcgagcaatagccggcaaagtaaccaccccgagagggaaaataaacctctgcaaactggagcaagggggtgctttcctcccctggccagaagctccgggatcgcagccctcccgggtccggcttcatccctgcccggccaccgaggccctctttttctgcaccgcggattctcctccgcctgcgtgttcggggcccttgtatccgatgtttctttctaaaagttgtccttccggctgattcggaagtcgctccaagggaaagaaggtttatgctttgtcattatcttcatcgccctctttattttgcccctgccttgtcgtatttcaagaaaatgaactcttagaaaagaaagcctctccgttgaggcggttggcaatctcacagaaatgatgtaaatggtttcagggcttttttcttcccctctgctatttttttcgagtgaactgtgaagatctgtgaaaataatatcagggttttccgtcagaacgagctttgccctgcactcaggcgtggcgtgatctgacccgacacctccaaccatctgtgctatctatctgccttctgatttaccagatctgtacaagccgcatacaaattgtacttgatactaaagaaaagacagtcgggtccagtccagttcggctgtgaac

SEQ ID NO: 334928 - DNA, 48 bp, Homo sapiens; identical to SEQ ID NO: 237475
  chr14:60977339-60977387
  hyper

SEQ ID NO: 334929 - DNA, 659 bp, Homo sapiens
  chr14:60977616-60978275
  hyper
cgcggaggggcggccgcggactcctgcccgacctctgtcgccttgccgagtaatcctcgccttaactgctggggtcttcggaagaacctctagccgccgggctggagggacgcaggaggtggtgggggcgggcgacgggcggctgtgttacgagctgtgacccgtgttccctttcttccccgtagactccagcagcaggtcctgtcacagggttccgggcgggcactacgggcggagggcgacggcacgccagaggtgctgggcgtcgccaccagcccggccgccagtctatccagcaaggcggccacttcagccatctccatcacgtccagcgacagcgagtgcgacatctgagttgcccatccaggatgctcagaagcagattccagtgtaaaaacgagaaaaacaaaatgaaagaggggaagaagatgagagacctgcaaatccagcgccacagaagccaggtgaccagggacccgcgggctcgggttgccgtttcccgccccaccccgcggccggcctggcttcactggcgccctttggccgcgaccacgggaaccagcggtgaggcctgacccagcaccacgttcttcttgctttgctttttcctaaggattttgctgcaaagtctccttcggaacccgaactgcaagctgagc

SEQ ID NO: 334930 - DNA, 96 bp, Homo sapiens
  chr14:60981172-60981268
  hyper
cggcttataaacatttcaaccacactccagtttcaccaaaaaaaacgacggcccctgctccccaaatgccgcagttcctctcgcctccactttaat

SEQ ID NO: 334931 - DNA, 1113 bp, Homo sapiens
  chr14:60981478-60982591
  hyper
caaagagaatgtgaatggggcgggaggagaggagaagcagcttttcgctctattcaacggggacgcgagagcgcggacgatttccgctccttttgtgaggcggagcccgggggcggccgtgaatggggggtctgtggagcggccggcggggctgtcaggcggctctgcgtaatcagggctaatgacggcggccgggcgctcggcgggacaatgcgcggggccgcggggttttgtcggcctgaatggctaataggtttgcctgtgagctgcgagggggcggtgtcggggaggaggcggcggcgaggggagaaggggtcattgtccgcgcgctggcccgggcgccgaggcgtgtccctgcctgcgccgcgcggctacccccgtgcccggcgccgccgacgggaaggcagcggcggggaggccccctggaggcctgctgggaaatggcggctggagcggcgggcgcgtgggtcccctcggggaggcgccccaagccacggtccgctcccaaagagaagcccagactgggcccacagtacccgggaaggtgagtccttactcgggggcccagatctccccacggaggccacagatctgggtccccgaggaaggagagccccccttttcgcgcacccaccttttccatccagcgccccgcgaactcgcggacgtgtaggcctcgagccactcctactgttgggctgcgtgactcagcggctcgaggagagaaacctctcaaaaccgggggaccgagacggggttcaatttaaacctaggtgggagaatgagcccacaagcgcgcgcccctgcagctgcggaggcgcgcgcccgcccaccctcgggcgcctgaagtcgcagcggttgcagagcctcgagcccgtggatgcggcgcgcgccgcggtctgggcctgcgcgagaggctgccgcccgcgtcgggcctgggcctacgcgtgtctggcctgggcctgccggtgcaacagcagttgtcgccaccggtcctaggccgcgccgagcgagtcgccgagaggggcgggaagaggggagaggtccgagaccagggagcgggacctaaagggggctttccgcgcccgacaggtccgccggggttagccttcg

SEQ ID NO: 334932 - DNA, 334 bp, Homo sapiens
  chr14:60982799-60983133
  hyper
tattcccaaacttcttcagacgtgccctaccgcgagggaacgaactggttttcttcccgttttcacctccttgtctggagacaaaggggtgtgagggcgatcccagagctgaacaagcagtttcacgcctccctgcccgctcatgctgtttccgcttgccctgtggtttgctctgcctggaacgccgccccctacctcaactgctaccctgtcattccacaaagcctaccccacctccactaagttttccgtgagccagtgagctccacacagataatgtgccaccaccttttttaatgctcccaccgcaccttatctaaacgtctgttttagc

SEQ ID NO: 334933 - DNA, 837 bp, Homo sapiens
  chr14:61104194-61105031
  hyper
ggggctgccgagcgcgagggagctgagtgaggcccttgcgccctaggcggttgcaccccggacccctgcagctgtggacgccggagctgtgcgcagtcatcctgagccagcccgcggggcccgatcggaagggacgcctctcctaagagctggcctggagtcctggagcctccaagcgggcaagtaggggccgcaaaggctgggctgggcctccgctgaggccctcgggggcctctgggccctcatggcctggaggccgcgcggcccaagcccctagagcagaggccgcgctagcctgcaggggtcgacgcagggccggaggcagcggcttttccttcccactccgggttgaccctaaagacacgatttaacgtggcggcggcagctgcccacgctgtctggaggagcagggcgcctgggatgcggcggcgaaactggcccggaggggggcccaggcctcacgcgcccggctctctcccagctctcctcctcctccttctcgggctcagaaagccttccagccgcggccccagccctccccccagcctgtgctgggctccgctttccctccatcaactccaagccgaattcaatccgagaaggctcctttgagcttttgtgtttgctgggggagatgtgggcgcaggagggatcgcgttacaactttcatttcctgaaatgtttgagggaacatccagggtttttatccccacatcaggccgggcgatgggctcgagtttcaggccttgtcactcagctgtcaccaaacaaacgaagctctcagagcccaggagagggagagctacctgctattcatgacccctggagcaggtgatc

SEQ ID NO: 334934 - DNA, 1957 bp, Homo sapiens
  chr14:61108567-61110524
  hyper
cgcgacagcctgacccgaagcgcgctgcagacctaggctggtgccttccccttggggccagggctgtgcgtgggggacaaggccgctgctctccctagggccgctggctaagaaggaaatacctgacctggccccaccaagaaagtggagctcctccacccccagttctgctggagacactagaagccagggcccctctctctgccgcgggaagttctagcgacaagcccagaaagtgacgtcctctctacctggcacccctcctcagagcgcgcgggtgaagagtttgggtccgaaaaccaaagccaagaccccaggaagcgaagaaggagacaggaggtgtctgaagcaagaagggcactggagaatcggcagcagggcctaggccgcctccgaaccaggatccaaggcctgcgccatctgccctgtgcgggaagcgcggggcctgggaggcagggagcgctcacacctgcggtcgggcaggaggcgcaacgcgctgccagggcggctttatcctgccgccacagggcggggaccagcccggcagccgggtgtccagcgccgctcacgtgcctcgcctggagcttagctctcagactccgaagagggcgactgagacttgggcctgggagttggcttcggggtacccaaggcgacgacagctgagttgtaccacgaagctcaggccgaggcctcctcccttgtctggccttcgaatccatactggcagcctctcctctcaggcactccgcgggccgggccactaggccccctgctcctggagctgcgctatgatccgggtcttgagatgcgcgcgattctctctgaaccggtggagaggaggctctgccccgcgcggagcgaggacagcggcgcccgagcttcccgcgcctctccagggcccaatggcaagaacagcctccgaagtgcgcggatgacaggaaaagatcttcagttcttctgccgctagagaagtgcgggatacaagcctctattggatccacaacctggagtcctgccttcggactttgccaaagacttgcaggcggtggggaggcagtaggaaatgaagccccctccagcctcagccgccgccgcgttcggtgcagcagcagcagtgccactgccacagagcagaggaaggcccgctccgcgcgagttctgtgccaggtgtcccgttggccctcagcggacaagggagagccgctaataagggtcgctgctcagcaaactcagagctcatccataagtgccaacgccactgcttctttctggaagcttccactccggcccggggtccggccccagccacgctgtcctagcccagagaacaggttcaagaacggtggtgcccagccccagcggtgcccttctccgtccctgtagctcgctgggctcttgagcccctacccactaagccaaaaattcgggaaccgggagccaaaccccttggcctctgagaatttaggaagcttcgttttcagccaagaggtcaaggcgagcagagagtggggactcgaacaatcgcgtgtttaggtttaaaacgttaaaaaataaacatcactcgagtgttttttttttttttcatttcacttggcacaatgctgtatggtttcgtcctacaaactatttataagccgttgttcattacttttggctaccgttatgacatctgtagaggagaaacgaaaagtggctttagattcagttaaactgcgacgcccagaaggtaaactggaggtcccttaacagctggttctcgaagatttcctcgagggaagaaaaaaatatggttagtttcccctaatgatctctctgaaatgattgccaaaaaaactcaaagcaatatccagctttctcgcctcctcctgctcgccccttttacccagactgagccgaggatggcggaaggaggcacattgtgcaatttcttattaaacacatctggaatatgcgc

SEQ ID NO: 334935 - DNA, 1314 bp, Homo sapiens
  chr14:61113933-61115247
  hyper
cggccctcgggcctggcttataggacggccgttttgtaactaaaggctaactgcaaccatacaatccctgttcctgtgttacttgctaactcttcagcccctcgtgtccccctctcaaacttcctaccaacacccaccccaacccatcctttctgggcaggggaaacttcgccgccccgcacaggctgccagcgggcgcggcgcgctggggcgtcagtccgggcactcggtaccggttaacttcaggatttcgcttccctcgccgcttccgccttccgagtgctcgtcagtcctcccgactcctagcgcctgtctgtctcctttctttccccttatcctcacagtctctgtctcccgacaagcccatttcagcagaatttatcctggctctggttttccaccaagacaagaaagggagcaagatcttcggcccctagtcttggaagcgaacaaaggaaaacctaaccggcccctgcgctcaggttttcccccaaactctttggcttcgcggagcgctctccccgccacagccacctccccaccgtccttctgaatctctgtccgaaacgctatagagaacagaaggagcctgcccaggtggccgaaggtgttgccccgaggtgggggaaagtagagaccaatttttaaaatattgccttgtgagctccagtgcgagagagggctgcgactggagaccctttcctcgtctgggcatgcggcgcggtcagccagaccgacgggctgcagtgccgggccacgcgcgagcgagcacggcgaggatcaaccctttcttaatttggggcgccggggagtaaatgcagcgccaactctccccaaagctctctttttgttgtatctttaaaagtctcctccatttgtccagctagtgagaaatgaagcaggctacctctaaaccaaaagactatcaagagagagctgtggagaaccaggcgggagtgggggcagagccaatgtctcaggccagcttcacccctctggggagcaagaggagagaggttcgcgaacctcagctcccaccaaacccctttccttgcgacaccaatcaacatttcactgcccgttgatttagaaactcactctccacccaccactcatagccgcggccagccagggaggcataaagaccaaatctagcgccaatatttcccgacactcacatcccagagaaacccacgcgcgggtgctcaaagcaaatgaggccccatccttagcaaggaacctcagagttcatgaactttcgctgcagcgccgcggagggcctgcgcgccgccccgtggacgggctccggccggc

SEQ ID NO: 334936 - DNA, 478 bp, Homo sapiens
  chr14:61116736-61117214
  hyper
cgcgcatgcagcctctggaagagtggcttcgggttggcttcagctcgaggagtccaaccctatttcctcctccctccccccaccaactaccactgtcctccccccactgctgcacaccaccctccaaagggcacaagtactcccagtcggacagcgtttccctcgttcacaaaagacctccatgatttgagaccaggcagagagctgtttagagcatacttgctgagcacctagagactccgagcgttcatttgtgatttggtatcttaatgttctgcgattgaaaccagcaggttcctgaagcttctggactcaatttccccatctgtgcggttgtgttttgcagtgccacctctgctactgaggaatgccgagaggctttacttgctattagcaaaaatgctttgggaacctcgtacgaaaggcgctggatgtggtgtaaattaaataaaactgtgcccggctccaataaccgtcc

SEQ ID NO: 334937 - DNA, 1440 bp, Homo sapiens
  chr14:61123186-61124626
  hyper
cggtgcatacccaagccgtgggatctgtttttgcattctcacacgagcatattgctcgggttctaaaggatccagattttcgcagacagaagctcgaccgcctctgttcccaaaagggccgagcggcgtttgtctgaatcaccagtcctctgagcagtgggaaaagagatactgggtagagggtgctgggaaggtgcccactcatccatgcccctctgcgcgtctcgcccactcgcttaggcttggactttgcaacaaggtttccaacaccgctgcagtgcttgacaaagccctcctggaagccagcagggtgaggctgccagcaagcaggcgggctgcgagggacgcttttaggactaggaagaaggccgtaagatctttccttacctctactcaagttcacccgccaccctcacccatcaaccctcgtgcaggcccgggtccacgtttcgcggactgatcctgagcctcagtataactcgctgtgccaggtgcgcgcgcgcagccaagtatccgcgcgcggacgccggggaggcttcaccgcccggtgtgctggcggccccgcccgctggctcgcagagcggggtctcgcagagctgggcctcacccgtcgccccgccgcctgcaccagaaactccctccccgggctgtgcgggagctcttgggcgccgcgtctgcgccggggccgactccgcccaggcttgtagccagaggtcgcgctatctcgccgggctggcccggcgctctctggggttgttccctcgggcggtgcatggggcccacaggcgtcggggcttgagggaagaggggccggggcctgaagggcggggaccacaacgaggcgcggggaggtcagtggagcggagagccggcgcaggccggcggcggcgcggccggaggagaaagagggcgctgtcttcctggcaaaggagttttcgcctggccggcaggaaccgaaacaacaacaacaacaaaaaaaaaagaaagaaagaaaatctgctccgccgagtccccggagtgaagagcgcgcggcgggaagggtctggggtagcggagcggattctcggcccaaagcctggggaccgctcagcccaccttggcttcgccagcgccacgtagccccggacggcactcgcgaggagggagttttctttggcttctttagctgtttccataatcgccttcttttagggccatccctccctcactttttccctccaaaaactggaggcgttgggataaggacggcgacgcttcgctggcgaatgaggtgcctcaatttgcccgaggcgagcggggaaatcgggatctcctttcatgaagccgagttggcttctcggtttcgtggaatctgcggccggaagccgcgaccccagccagtcattcgcgttgaagcgccgcagcaagtggcaatgcttttggccgcgcattgcccaggaa

SEQ ID NO: 334938 - DNA, 1058 bp, Homo sapiens
  chr14:61188224-61189282
  hyper
agctgaggctgagccgccgtcgccgtctgcgagggtgactcaccgggggtgcgggtgggaggtagatccggagaggggcctaaaccaggcaactgggccggcggcggggtgggtgtggagtttatggggtggggcgggggggacgaagaagccagcagtggagcgtgggggagtcccagggagcgtgcccggctcgcgagcggaggcggcggagcagctggcctgctcgcggtgcccccttgccaccctctgccccggccctgcggattccgttggtttccgagcgcgggatccgcggcctctagtgggcgcagggcaggtggctcggcgtaaccaaagcgccttctctggacctctccgcatatctgcggaaggcgcacgcacatcccggtgcaccttttgttttggttaccgcgagggccggatagggcaccaagcctccctcccagccttgggcgaggaacgccggagcccgagccgtcggacccccacaggggcccagaagcggcaagggcgggctgagaccggctctggaatgcgctggtgatcaccttcacctggcgcaggcgggctggatccccggctcccagtttgcttccccgagaagaaccttcgagctgcttttggattctttctctcctatccccgcggggctggagacaccaggtctttaggcgaccttctccttactttgtttcgtccaacaaaacacacagacgcacacaccaagtgtctgactcgggaggacgcacaaaagaggtggaaaatccggtattttttttaccagagggggaaagcagtctgccaggcaaaaagctcaaacccagtggggtgggagcgcccccactcctttgctgccgcccgccgtaagccggcctgccccccacccataactaccgtaccaggagggagccaagcagcgttcgggggccgagggaggaagcagcccttcagccctgctaccccggctgcgctgaaacccgatcctaaggagttcagaatcaggtttcaaaacatgacagagccgagctgcaccagcaccccacgttgccgcggcc

SEQ ID NO: 334939 - DNA, 1084 bp, Homo sapiens
  chr14:61747077-61748161
  hyper
cggaacgtgggcagcgccgccgtgcgcatccacaccacgaagtcctgattgatgaagccggtgttgttggggtcggggctgagctcgtagactggccggcgccagttgggcgggggcgccgtgccctggaaggccaacgccaggctgccgttgaccagcggcgggttgcggaacttgacgtggtagtcggtccaccaggcgatgccggagcggtcgagcggcacctcgacgtagggcccgccgggctggcgctggtgccaaagcgagaaggagtcgttgaagaggctgttggcgatggcgccgcagggcgcgatgggcaggccggccgcgctgcgctggtagggggcgcactcgttgacagggtggcgcagcgcgctggggagtccgctcagctgcgcgtcgtcgcgggacacgccgtagcgccggttgttctggtagaagttggtcagctcgtagtagaggtacactgggccctggaagagctcgggcagcgagaagtaccaggcgcacgagcaggggggcggcagcgcccggccctggccagccgcggcgcacaccgagcagttaccggtgcccgggtcgcctgtatagtcgtactccagctccttgatgccgttggaggagtagtagaggcccaggcccaggccgatgaaggccaggcccgcgcagaagaagagcggcagcgcgatgctggccgacagcagcggctgccaggcggggaggcgctgctgagtgaaggcggtgttgtcgggctggtgggcgccccgggccgtggcgctccaggtcatggcggccgcgcggggaccgacgcgcgggctgaccgagtgggggccccgccgcggggcgcctccctctccgcgccgcgcaagcccggggactgctcgcgggtcgggtttcccgccagctcaggtgggtttttgcccgggcccctcctctgcctccgtcacaggtgagtttagttccaggccctacgagcagtgcccacaccctcccagttccgcctccgcccaggtgcgctgcacccccgcgggtcaccgggagccgcacctcgcccgccccttccgaggtgagcaggtgggtgttt

SEQ ID NO: 334940 - DNA, 130 bp, Homo sapiens
  chr14:61943723-61943853
  hyper
tgtgacctctttgacgtcagtaactgtttcctgtttatttgaactccctgctcaccctgtagatgactttgtctgagaaaaataataaagcaacggtacttaggagaagttcaacactgctatctgttac

SEQ ID NO: 334941 - DNA, 196 bp, Homo sapiens
  chr14:62105869-62106065
  hyper
cgtaaccgctaactgcatcaaattaactgtagtacatactgtactactgtcatcattttatagccatctcctgttgccgttgtggtgagctcaactgttgcaggtatccacttaaaacgcgtgtgttgctaatcgtctccaagtaagcagtttatctctctactagatttcttattgttgtaaaaagtgatcttgc

SEQ ID NO: 334942 - DNA, 73 bp, Homo sapiens
  chr14:62161828-62161901
  hyper
cgaaatcccttctcagcagcgcctcccaaagccgggcaccgccttccttcggagaaggcgcagagtccccaga

SEQ ID NO: 334943 - DNA, 897 bp, Homo sapiens
  chr14:62162333-62163230
  hyper
cggagccgggcccggaccccggcgattgccgcccgcttctctctagtctcacgaggggtttcccgcctcgcacccccacctctggacttgcctttccttctcttctccgcgtgtggagggagccagcgcttaggccggagcgagcctgggggccgcccgccgtgaagacatcgcggggaccgattcaccatggagggcgccggcggcgcgaacgacaagaaaaagtaagcccattccctcggcccgccgccttctcccccggcgaccccgcccgcctgcccgccctgggctcctgggccggcctcggcgttaatgggattggggggggcagcctttttgtttctgctgctgctcccctcccctctcttcccccaacctcgccggccgggctcccccgctgtccacgtcgccatcttgtcgtggggggtgggagacgcctcgaaagtgctttcaggggccggggtctgagccctgcttgccctccccgccggccgtgggggcctcgcgccgcccacctacccgcctcaaaaacccagcctgctctgtggccccatccggaggggactttacccagcctgaaaaccccgggaagagaaatgagctgcagctcggtagccgcggtttgcacccggagcttccgctccttcccgcccccatcctctccagttccattgaaaactcggccctggggcggaccctgcacgctggtcctggctttccagtggacttggggccttgagttcccgactgagggactcgcgtggtcggatgcgatcttgtcctgtagttgtccagccgtcgcgggtgtctttgcctttgtgcattagggatttgccgcgatggccttaagatgcgaactttttagtttgcacgtgcaggttttgtttcgttttaatc

SEQ ID NO: 334944 - DNA, 834 bp, Homo sapiens
  chr14:62583679-62584513
  hyper
cgctgcttcctcagccgctgaaagtgccgccccacccctctccccaaacccgacctccgtaggggacaccgagccaaggcctgcagcgagtgacctgcccggggaggcgcgggaccgaggctcacctacccgggcccgcgagtctcgcccagccccagcctcccaacccactctgccggccccaacttaggcgagcgcagtcgggacccttctgtcggggctctttgttcgccgcccctcggcgttccagctctcaaccttgctcccagcagcccccgccggcgcactcgacctacaggaaagttgctcccgagctgtggaggggcgtcatcgcctcctagcaacgctcctagcaaccgggtaacatctgctccctgtggtccaatgcgagctgagaacagctgcgcgcccgcctagcgctgcgaacccggagtgagaggcgcttcagagactggagggacggacctgcaggagccagggctgcccgccgagctgcagttgccgctactgccgctgtcagcgcccgactgaagagtgacagccgcaaaagcaggagtgagcaccgaaccccgcgcttctacctaacaggtgcatgcgccgatctggtgagtggacccagctcacaaggtatgtctggattcatccagccaggtgccttcctccgagctcagaagggactcctttccttgagggggaggatagggacgtgttccgggatcccaccccgcccccaaccactgaagagtagccagctgctggtcccaaatgacctgattcgattttttaaatgtaaaccttaggattggttcttgggtgaagagtccgctgctcttc

SEQ ID NO: 334945 - DNA, 928 bp, Homo sapiens
  chr14:63512269-63513197
  hyper
cggccggcgcctgggcgcgggctctgcatctctccccctgctggggagcgcaagcgggaactcaagcccccaccctcccaatccccctcagctcagaccgagaccccttccccgcgccttcgtctcccggtctcctcgtccaccccctcgcgcagcgagctccgggctgaacagcgtagcccaacttctgggctgtgcgcctggtggttgctcctctccccggagatcgaggcaagcgatcgctgtccaatcgggccggtggaatgggagaagagggtgccagagagagcagtggccagtcggaggctcacatctcggcgtctcccgctcgggtcccgaatccgggctgctggcgcggacgcggctcccggggcggaggtgcgggcaggctccagctccagccccagccgaggctgagagcagggcagggactggctgggcggcgcgcggggacgcagagcagccacctgacgctgctaccgcccccctccgggctccggcgcctgaaaccttcctgaacactggcgctttccgcaccgcccttaccccaccccggagcgggagcgcgagccctgaagtccgagcgcacagccggcgcccggaatggcccctgcgacccgggccgggcttggcgtctgggggagcgtgcggccgcccaggggagtttcccccaggaccgctgagcgcaggaggcgatccgcgagcccgccaccgctgcaaagttgcgggaaaggttgcacttgatgtgaagagtaggggaagagggtgaataattcacacccgagagagggggagtgaggagggcagtgttagcgatggaaaaacggtaaaggctgtgggggcgaagatgcgccagggtggagcagggcacgaatcacctctaacaaaccccccaatttccaggcgttgagaacggacagcagcggca

SEQ ID NO: 334946 - DNA, 167 bp, Homo sapiens
  chr14:64805585-64805752
  hyper
cgacttcctccacgttttccttgtcctctccggccggcagtgtagcagcagcaactccctacgttgaagtcgtctccctccgtccccgcccttacttccttttcccttaaggacctcgcgcgcgcttccatattcagaggggcgcaggcgcggtagcgcggcctccc

SEQ ID NO: 334947 - DNA, 848 bp, Homo sapiens
  chr14:65006715-65007563
  hyper
cgagcgctcacaaccactgagacgcagtgaagcacccaccataaaatcccaggaggccgaccgccggttcagactttttcttttctttaatccccgtccaagggatccgccctcaccccccaccccagccaccccaattccctattccctccccttggacggcgccggggaaaacaagctgctcgagctttatttcttcggtgcaaccaactcagaatgaattcctccgcccctgcgtgctcagtgagtcggcaccctagcagtgaactgcatttaaaacctcaggaattgagcgaactctcccagtggctctcctcaccgggatccccttccacgcctcctccccgtgccgcgcctcagtccgcactgctcattggccgcgtgccctgccaatccgatgcacgtcggctagggcaaagaccgcgaaaaagcgcgtacacctggctctgggagcgcgcgcctaacgccagccagcagcaggaggcgcgcgaggcaccacggcctggcggccgagagtcagggaggaacctcatttacataacggccgcccctctgtctcctggcgggggccggagtcccgcccctcgtccaacttgaaatctgttgggtcacgggccagtcactccgacctaggcaagcctgtggtggagctggaagagtttgtgagggcggtcccgggagcggattgggtctgggagttcccagaggcggctataagaaccgggaactgggcgcggggagctgagttgctggtagtgcccgtggtgcttggttcgaggtggccgttagttgactccgcggagttcatctccctggttttcccgtcctaacgtcgctcgcctttcagt

SEQ ID NO: 334948 - DNA, 865 bp, Homo sapiens
  chr14:65008577-65009442
  hyper
cgtgctggtgggcggctccactcgtatccccaagatccagaagctgctgcaggatttcttcaacggcaaggagctgaacaagagcatcaaccccgacgaggcggtggcctatggcgccgcggtgcaggcggccatcctcatcggcgacaaatcagagaatgtgcaggacctgctgctactcgacgtgaccccgttgtcgctgggcatcgagacagctggcggtgtcatgaccccactcatcaagaggaacaccacgatccccaccaagcagacgcagaccttcaccacctactcggacaaccagagcagcgtactggtgcaggtatacgagggcgaacgggccatgaccaaggacaataacctgctgggcaagttcgacctgaccgggattccccctgcgcctcgcggggtcccccaaatcgaggttaccttcgacattgacgccaatggcatccttaacgttaccgccgccgacaagagcaccggtaaggaaaacaaaatcaccatcaccaatgacaaaggtcgtctgagcaaggacgacattgaccggatggtgcaggaggcggagcggtacaaatcggaagatgaggcgaatcgcgaccgagtcgcggccaaaaacgccctggagtcctatacctacaacatcaagcagacggtggaagacgagaaactgaggggcaagattagcgagcaggacaaaaacaagatcctcgacaagtgtcaggaggtgatcaactggctcgaccgaaaccagatggcagagaaagatgagtatgaacacaagcagaaagagctcgaaagagtttgcaaccccatcatcagcaaactttaccaaggtggtcctggcggcggcagcggcggcggc

SEQ ID NO: 334949 - DNA, 417 bp, Homo sapiens
  chr14:65016491-65016908
  hyper
cggctttacaatggataggccaatacgtcgccacggcttttaagactgggaaacggggcaccaggctgggctttagaaatcgctggagaagcctgggtgcggccgcagcccgcgcggcctaggacggaagcgacgccccgccccgctccgcgccccgggcagccgtgtgcaggcgcctgcgggcggtatcctcggcgacgccgtatggcttccagggcgaggccatgtaccgggtgcccgagttttatgcgaggaggaagcggttaggtgggcagaccccttacttgatggatgtaagtgcagccttggtcgcccccatacccgggctgggcgcaaggcgggccctgctgcccccaaccggcgccgcgcccctcgccctcctccagaggcgggtcgtcgccttcgccccgggctggc

SEQ ID NO: 334950 - DNA, 873 bp, Homo sapiens
  chr14:65170688-65171561
  hyper
cggacacggccggctctggtaggattaggatccccagatcgatcccggctggtcactcacttgggaaagccctcagcccccttcgcagggcccggtgttccctgtccatacaaggggtacgttctggcagtccatgctgtctcgggaggcggtgatagcaggtctgtgacaccagggtgaccccaccacgtgcgtcttggtatcctagagcatctaggctgcccgggggtgcgcgctcatcaccctgcgggcgttaatcgttaaccgcgcccaggcctcgccgccgccgcagccttaccccggctctggctcgccgcgccgcgaaggttgccccggcccccgcagagccgccaattgctggactgcagccgcgagctggagtctccacccacaggaaaaattcctggcccgcccctccctcgctccctcgctccctcgctccctcgctccctcgctccctcgctccctcgctccctcctgccctcccgctgcagctccggctccgctcgacttcctgccgggcgctggcaagccgcgcgctgcctggggtctccgggggccgcgcttgcagctggccgagtccgggccagctgaggggctggcggtgggcgggagcggtcggcggcctcagccccttcagagagcgactttcaaactcgcgcccgcgtcgcggcagcacctgggcagccccgcacgccgtgcgcgtcccgagcccgcggggcagctaccgctcggtgagtgtcccctgattctcctctctcccctcttatctccctgcattaggctgagcggcggtgccggcagtcacgctggggccccagtcccttcgcggcccccgtgccagccccctgcggggtgaggaccggggcgacc

SEQ ID NO: 334951 - DNA, 93 bp, Homo sapiens
  chr14:66869973-66870066
  hyper
cgtatagtacacatcctgaggcggagatattaggaacaaagctaaaaccctggcaggaaggaagtactccctggacgatttttttttaacctc

SEQ ID NO: 334952 - DNA, 355 bp, Homo sapiens
  chr14:67878644-67878999
  hyper
cgttccggggcgcgcgtctggccccgctctagggagccgcgtcggcggggccccacccgggcaatgtcccgaagctcgacgcgcactcaccctcttgaccaggaagccctccttgagcacgccgtcctccatgtcgccgcccgcacgccagggccaccccaggtgcgccttccccgcgcctcgcgctcctcggcacccgcgcagcccgcgcagtccgcgcccacggcgcccaggaagcagctccgacgcggcagggcgacgcctccctggcgcgtgtccagagcctgaggccccggggcaggaagtcagaccaagtcgggatttctgacgtgacgtttccacccaaaggtgctcc

SEQ ID NO: 334953 - DNA, 213 bp, Homo sapiens
  chr14:69259278-69259491
  hyper
cgtaaaacaggatcgcccaaaacttgtcccaatcccagccctccccccgaagcccccgggctgccctgccaggcaaacttcgcccctcaaaaccctggcctccagattcacatgtaatccccgccagcaactgttgaaactcaaagggtgggaaggacggggccaaattccttcaaacttgggagaaatgccggaggagaaaagaatcatctc

SEQ ID NO: 334954 - DNA, 217 bp, Homo sapiens
  chr14:69261392-69261609
  hyper
cgtttctttggaaaggacggggcgggccgaagagagcgcattctcaccacccccaacacacacttttttttaaaactgcatttcttatttattcgtaaacatctgggcaaacccagcgaaaccttccaaatcacaattgtttgagaaaccggctgtttttcaactttgtgaaacccaacttttgctgcagccacgaacctacgtgatcccagcgggg

SEQ ID NO: 334955 - DNA, 278 bp, Homo sapiens; identical to SEQ ID NO: 237547
  chr14:70014700-70014978
  hyper

SEQ ID NO: 334956 - DNA, 469 bp, Homo sapiens
  chr14:70346057-70346526
  hyper
ccgtcaatcaggcccgccgtgctccgccccgcccctcccgggggtttataacgggaattcccatggcccgggctcaggcgtccaacctgctgccgcctgggccccgccgagcggagctagcgccgcgcgcagagcacacgctcgcgctccagctcccctcctgcgcggttcatgactgtgtcccctgaccgcagcctctgcgagcccccgccgcaggaccacggcccgctccccgccgccgcgagggccccgagcgaaggaaggaagggaggcgcgctgtgcgccccgcggagcccgcgaaccccgctcgctgccggctgcccagcctggctggcaccatgctgcccgcgcgctgcgcccgcctgctcacgccccacttgctgctggtgttggtgcagctgtcccctgctcgcggccaccgcaccacaggccccagggtaagtgcgcccccagctttgcgcccacctgc

SEQ ID NO: 334957 - DNA, 576 bp, Homo sapiens
  chr14:70653714-70654290
  hyper
gggtcgccaggggccgaggaggcttcccttttggtgccccaccggaaggccggatgtgttcctatcacgtacccacattccacccccgctcaactccctcctccccccacccccttcgggtgtttcttgaccacccaggagcttggctgcgcctgctgcagtctgcgtttctgataaattgaaaccagttttaattcttctgcccgggagacctaaccgccgaatgcgttcggaggtatgttttttaatcgccaggaaagggggagagagagagaaagagagagagagagagagaggaaaggaggagagaagagaagagaagcggggggcggggggagagagagagagagagagaaggaagctgcgatgagcgggtaaatttatggtactgcattaaaggcatttcttctatttaaccccaccccgccaccaccaccactaccacaccgttaaaaataaaatacaatgaattaagacgaagaactgcttttttccccggagcaaattgctttcatcatctttcccagtggctcgggtcctctgggcaggtcagccagggcctgtaggagcagcagc

SEQ ID NO: 334958 - DNA, 1758 bp, Homo sapiens
  chr14:70654358-70656116
  hyper
cgcgcgcgcgtgtgtgttgggggatcgggggagggttagttatatatttcgattctctccaccgagtcccggatcacgcagaccaccaggggctggagagtgcagcactggagaaaccctccttctccctcgcccccttggccccagcggtgggtgctctggggctgcagctcccgacccgcggcggtggagtcccgagattggggtgagcgcgtgcgtgcgtatgtgcacgcgggcgcgcgccgagtggataacgcgcttccctgctagcccccaaacccggcggacactcacagcaccagaagcacaacacgccctggcccaggtggcacacatatgccgacatgcatccagcacacacaacacagcagtcagtctccccaaacagcacccgctaccaacccagcatgctcacgatccaactgtacccacctgcccaggcatctctctctgcccctccccacccggcggcaccctcctgtagacacccactctgccagatctgcccccccaacactgcatacacaatgtacactttccggggcaccctcaccccacttctcctggcactaaatccacaggaaggcggttcatatgaatgatcttgagaaataacttaaccccgttactcacaatcagggatcctcttaggggcatcccaagccccccaacctctacctcccatgtctcggctgcccgctaagggggaagggcaggaggctcaccccattactcaccgtttcctctcggcctcccgagcggagtgggcaagggaggggggtgaggaaggtacgcgatgcccccgccgcccggcgcctcaccggtcgcagcggctcatcgcccccgcgggctgcccgccggccgcagccgcgtccggggcatgtcagtccgccgccgccgccctcccgccggggttcgtgggctcgcagctgtcagggagctgcggggcagcgcatctggagcgcggggtctgggagggagggtgtctggggccagggcgaggggccccgggaggggtccttccgcacggatttcagaaagagggaaaccccgacccagagcggtgactggaatctacgcccgggagaggcccggagtcccggccgcgggcggcgggggattcctgcaggaaggggcaggaaggcaagcagcccggcgcgccctggcggctccgagggacctgggctcgggcttgcggtcgcgtcgcctgggctttccctgggctgggagcgcgccgggtctccgccttgcacgctgtcaccgcgggagacgtctcggcctcgccgcgcgcagaggggacgcgcggagaggctggtttctgggcgagcggagagctttgcccattaagctgccggaagaagccaaatcaaaaagccaatctccaagcctccaaacggaacgtcaccctatcagctgggagacagcgccgcactgactgacaagccgcgcatatttatcctcgcgcgcggaggggagactctcagaacgctcctcgaccagcagcgaggaagtcgagcccgcatcccgcatcccgcatcccgcatccagagcccccgagggacgaattcagatccaacccctgccccgcggccacccaccctagtcgttggagcctggcgcccgcgcctcccggccggcagcacgtcaaaacggcggcgcgtcctgacctggattccgccgagttgggagctccaggcagcaggcgggcgcgcggcaccggctttccccttgtcctcaggagacgctgcctgcaattcc

SEQ ID NO: 334959 - DNA, 978 bp, Homo sapiens
  chr14:72398613-72399591
  hyper
cgtgtggtgtgcatgttgaatacataaaaatgacgaggttaggaacaatatcgctgacggtcgcggtgtcccgttttaatttagagggcgccagcaacacgtcagtgagggagattcagaagccgccgggcacctcaccccgggccgggaatccctaagagaaccttgacgccgctgaagtttccggaccgggccagtttggaattgacgaaagcagcctccgcccggtcgagccagtctctcggttttctcggcggcttcttgaggatgaggcatttctaggttttctcctcctcgagcaaatcacggtctgcgccttccgcggctctgggaacaggtgagccgtgcggcggcgcccgcgggacgcgctcaggtgccggtccccgcccgccggcccctccctgcagcacgcggtccgggcccaggtgccggggcccaggtgccggcgcccaggtgcgcggggcacggggctgcagctccgctcggcatccgacagcgggcgccgctgcagcagctcgcgggccgcggagctgaacggcttcgcgagttggggcagctcctcgcgctcggccctgctcggcggcgagagctccgcctgggcgccgcgttcctacagccgccggagccgccaggcgccgagggaacggacagacctccgcgcacccttgccgaccggggcgggcagaggcgggcaagcggcgaacgcctgggagcgcggagagccaggccagcccggagcgcgccggggacaccctgtgcgccccgagtcccggcaccatgcgacccgccgcgcgtcctcgcgggcccggggcttcgctcttcgctcgctgagcccctgcgctcgccaccacggaaactcggaaagaggaggcgaggctgtggggagcggcgcggagacggactagacttcccctccgcccccaagaggctgccggtccccggttccctgggcttctccagctttatcatgaacctggc

SEQ ID NO: 334960 - DNA, 437 bp, Homo sapiens
  chr14:72399831-72400268
  hyper
ggactgtggaagcacgagcttacataagtggttaggcaagctggcgtgtggacttgtgtgggatgggtgcaggtctgcatataaatcatgttcctgggtttctgggtgtgaagcgcacaccgacggggacgagagcgcagaggatggcgcttttagatacttccagtcttccgatgttgtgatcgcaggtagggcagctttgcctctaatcaggcgttcattaactttttccctgaacaagctcgcccatttgtggtttggaagaaaagaaagcgagtctccgcggtgaggtgtggagggcaggggcgggtggggaggtttgttgtttgggaactgcgctagcaaaggaagcggtggctattcgcttggagaggatgacaaatgaactggttgcgtgaggagtgaagagaccgtgtttacagtcaccagcaggctgc

SEQ ID NO: 334961 - DNA, 720 bp, Homo sapiens
  chr14:73358909-73359629
  hyper
cggttatgtgatttcggctggaaatggggaaactgaaaatcagttgtgggttcggtagaaacagcatcagcggtgttgcagcgaaagcaaccggcagcgaggatgcggcgaagttacgcccatttattctgccataaaacattttctttcttgggtgaaacgctgtggcgttcaagcgcagtgtatccgagcttccgagccagaactgaagccaggagctcctatctgatcagcctcagcttccaacgtcctcttaacggcagctttcatataaatatatttgaaacctggggccttcctacccctttccctatttctgatgggcgacgagctggcgcaaacacgtccgattctccctgtgcattcctttgcgttaggaaccccctaccgtccccgggagcgaacctggttttcaactccaggagtggccaggggtgaagacgagaatgcgctgaattaaaagaaccagggtcgacagcggccacgcaccagggagaattcggcatgaaccgccccccacccgacctgcacctccctctgccacttcgcctgcggcttcgtccgggcggggaagtcccggtcgaaggggtgaggaccccccagcccacctcggatacggagggagccaccctctgccgacatcacccaatagcacccctttcagagcgacactagttttccgaggccacccctggctccgcgatcgcgagcggacttggc

SEQ ID NO: 334962 - DNA, 464 bp, Homo sapiens
  chr14:73359779-73360243
  hyper
cggggctggcccccgcgagtcctcgcccggcccgccccactctgtccaggatctgggcaagcgctcaaagtctccccgaggcggccagaggcacctgcccctcgcccggccgggagcagacgctgccccctcgggccaggagccccaaaaccgcctctccgcctgcctcagcgcctcacccagaggtggcgagaacaccattcataagacctgcggcttccctgcctccaaatccaccccaagttaacccgagtcgttaatccactaaagccagctcgctcgcaaatacacgagcagacacacgctcgatcgcccggagcgcctccgagatccgggggctgccggggaaagcccggggcgaccacctgggccccagcacgcccgggacccgctgcttcccccgcggtgctccaactccggaaggtttgcacaaactccccgcgagcgatcggaaggcgaagagc

SEQ ID NO: 334963 - DNA, 227 bp, Homo sapiens
  chr14:73360763-73360990
  hyper
cgctttcagggggttgtgaatgacagtcgccattttgctacaatgtaacagaatattgtctcagagttctaaaggttcgctcaggggaagcgacgggccaatcacagcgcgggataccggcccgccggccaatcggcgctgctggtagctaggtgggcggggcctgcgccgtggtagttattaggagagctgtcaaagcccagaggtcactcccttttgtagagccc

SEQ ID NO: 334964 - DNA, 1054 bp, Homo sapiens
  chr14:73957523-73958577
  hyper
cgctgccgctacagcttgaagccaaacatttaatgaaagagagcgggaggggccgaatagaagaatgatgggcgtggccaaccccgaggtggctggaggccgcgcccccttcccagagtgcaccgcagccgctgcattcaggaaccgctttagcttcgcccccggccggccgggcggggaagactggtgtggtctggccatggatgggctccaggccagtgcagggccgttgaggcgcgggcggccgaagcgccggcgcaagccccagccacacagcgggtcggtcctggccctgcccttgaggtccaggaagatacgaaagcagctgcgaagtgttgtatcccgcatggcagcgctgaggacgcagacgctgcctagcgagaactcggaggaatcgagggtggagtcgacggccgacgacctgggggacgcgctacccggtggggcggcggtggcggcgtcccggacgcagcccggcgagagccatacggccacctggggcccgcagagctgctggaggcctcgcccgccgcgcgctccctgcagaccccgtcggcgcgcctggtgcccgcttccgcgccgcccgcgcgcctggtggaggtgcccgccgcgccggtccgggtggtggagacctcggccctgctgtgcaccgcgcaacacttagcggccgtccagtcgtccggggcccctgcgacggcgtcggggccgcaggtggataacacgggtggggagccggcctgggactccccgctgcggcgcgtcttggccgagctgaaccgcatccccagcagccggcggcgagcggcccgcctctttgagtggctcatcgcgcccatgccgccagatcacttttaccggcgcctatgggagcgcgaggcggtgctggtgcggcggcaggaccacacctactaccagggacttttctctaccgctgacctggattcgatgctgcgcaacgaggaggtgcagttcggccagcatttggacgccgctcgctacatcaacggacgacgcgagaccctgaacccacccggccgcgcgctgcccgccgccg

SEQ ID NO: 334965 - DNA, 408 bp, Homo sapiens
  chr14:74100395-74100803
  hyper
gtccggggtaaactcgcgaggggatcctacctcttccagatggttccacacgggacctctaggagctcaaaggaccctgggccctccgaagtcgtctcttcttgcagcccgttgctaagtggcgccgcaggaccagcccaggtcccatcacgtggccctgcagggttttgccccacagggccacgacctgccaggccgggcccccctcctccctcctcttcagcgcggaacctcggccgccagtgccaggccgcctcgaccttggcggaggtcaaagccgcgacagtcccggaccatgtggccggcggtccgggcagcgctccgagcctctggggtccccctccaggcctggaggccgatatccacatcgtcctttttctcccaaaaggccgcgaccctgaccgtcac

SEQ ID NO: 334966 - DNA, 185 bp, Homo sapiens
  chr14:74208160-74208345
  hyper
cgggcggctctgaagaggaaatctcaggccctagatgctacaggtcattgttagcaaccccagccgctcccaggaaaccagccagcagcagcggagggcagggctgggcgggcacagggtcccgactatacccagtttgcagttcggcccacccccagcaccaggaatgcccctcccaggctatc

SEQ ID NO: 334967 - DNA, 98 bp, Homo sapiens
  chr14:74238704-74238802
  hyper
cgtgctcactgggctggttccatgaaaacgcaggtgtgaaaatcgtctggggccctgagccagctgggggctggaggcagagtccacgctgtgaaccc

SEQ ID NO: 334968 - DNA, 260 bp, Homo sapiens
  chr14:74254318-74254578
  hyper
cgtttggtgttggggctaaaagggtcatgtcagaaagcagtgtgctctatgtgttcttaatgcctaaagtgggccttaaaacaagggtccctgtccccacgttctctctaaaagtctgcatgatgtccctcgtcatttctacgggttataagtgagcaagacgtttaccacgtatcacacttctgggggctatttcaacgcccaagctggggctgcagaatggtttctgttctaatcctcccccgcgatttccacctctt

SEQ ID NO: 334969 - DNA, 2455 bp, Homo sapiens
  chr14:74706335-74708790
  hyper
cgccccggccaggtgcactgggttcggcatccaggagatcctgggcttgaacaaggagcccccgagctcccacccgcgggcagcgctcgacggcctggcccccgggcacttgctggcggcgcgctcagtgctcagccccgcgggggtgggcggcatggggcttctggggcccggggggctccctggcttctacacgcagcccaccttcctggaagtgctgtccgacccgcagagcgtccacttgcagccattgggcagagcatcggggccgctggacaccagccagacggccagctcgggtaggtgaggagaggttgcgctgctgcctgactggggggcgacagccgggagccccgcgccgtcggctctcgcttgctggaccaggcctccaggcggaaaagttcctgccaggccgggggtcgccgcctgggccttgggccgacgcgcctggtgatggggcccgggaggatgcttcggcgtccgcagggtttcggccccaagcgtttcgggcggccgcgcagttctccagtccccgcgtcgggcagggctcggccacggcactctgttggagccccactgaaaactgggtttggggtgtcggagcccgtggtgcagagtcgccggccgtgtcggagggccccagcaccgctgctccactgcggccccggcctggtgtaggatccgcactcctcgagcccgatgctgttccggctccggccccatccctggtgtccaaagttgtctgattcccaaatcccgcgctggtcaactggggtttatttttcacccccacgagctcagacaacccggccatcgcggcagctaaagcggccgccatcctctcccacgtaagcgccactatatactggagcccggggacgcgcgggctcggggaccctgggtgacctctccgccttctccccgcgctgctttccgggaggtgtgtcgcggcccgctcgaacctccgattcctgtttgagcttggcaattcccccgatttttcgttgcgttttactttgttttacgtggaaaggcaacgaaaaccagcgcgtcgcaggctctcgggcctcgagtagggacgcattgtgccgccttgcgaaaaggacggtgctcggcagcccccagtcttcccggagcccagctccccacgcctccgctccgctcctcgctcctcgaggccaactttccggcccggggcattggggctggccgcgcagggcagggcgcagcagggtcgcgagcgctgccggggatctctgcggccccctaaggctgcctcgctctccgtcgtcccggtcccaagcgcgccggggcctttgcctctcttacaacgaaatctgttcaaaacctccggattcgggccccggcgcgggagaggtcagcctgagctcagggatgggacggccaccggggcgcccgcaggcttcctggggagacagagcaggtccccgccgctcgcggaggcagcccggggtggggccctcgcgggtttcgggcacagcggagcgcgtcccccactctgccgcatgtccctacgcccgcttttcagattctgaagatgtttcctccagcgatcgaaaaatgtccaaatctgctttaaaccagaccaagaaacggaagaagcggcgacacaggtgaggcccccgctttctgttacctctcctgcccgcgcaccccgctgccgtcccccgttccgggatcgggtctctcggaccctattttcgccgacaacggatctgaggtccgaggccgtgccagggcgcagaccacgggttgtttggcggaatctgcccgggggccttggcgtcggcaccggttgagcaggatgagtggccgccgggaaagcggcccggttcgggctttctcctccttgttcaggagaaaggaaaggctccaacacaggccaaactgagccacagagtgggggcggtccccagatccccgcaccagtacattctgagagccacacagacccggcggcgggcagattagctcccacctcctgccagagccggttctttgccctcggcctcaaccgccgcccccatttctctcccggggtccctgtcctctctgccaactccctaagctttctgctcccaccgttctccaaagctggagcgatctctgcactgacagagcattttcttttggcttctgctcattcgtgattctgaccgagtcgcttcccttctgtgagcctcagtttcctcgtctgcaaaatggagtggtaggcgatgtagactggacggtcccaccagccgtagctggagtagggtggactgcatcggggtacagactagaaagggttttgttttgttttgttttgttttgtttttgtctttaaatggaaattacttgcacaaagttaaaactcagtagatgccgacaggtatatcttgaaaagtaacctacccttctcccacccccgccctcattcccttccgcaccagcc

SEQ ID NO: 334970 - DNA, 1346 bp, Homo sapiens
  chr14:75077987-75079333
  hyper
aaatcttccaatcccgattttggaacctcggggctgtttcccgaagtactaaagacagagggacgagggtatgagagcggcgccctctcctctcgcctgcacgcccctccacaaatgagccctggctcccctctgtaccctccaaacttccctctcccatgctcaccccgtgagccgccctcgcggcggggttgggggcgcagccccagaccgctgtggggtccccaggcgtgggagagccggcgcggcccgggtccggggtgctggttgctgctggcccaggggagtgcttctccgggtctgcgcaggtggctggacacgccgcgactgctgcgcgcgggacggcctcctggcctccgcctcggtgggcctcctggggctcccccagcccggctgggcccgctccacgggctgcaagcccgcgacaggcgcgtcctgctcccggaacagactgtacaccttggctgcagccgctgccgggtagctgcccccagggcgccgcagtcgattcgcgtctccaccagccggctcgtatctccctacggggtccctttgggcatgacccgcgcccacgaagagagccagggtgagcggcaggaagcctctccaggggttccgcagggcgcgccccgggctgcgggctttggtccgcggcctcatggcgcggggcggctggagagtggtgcgcgcgggcaccgcgaagagctttgtggtcggcacgctggacgcccgcgggctgttctcccggccccgcccggcggccagcttctctgagtctagggggccctgaagcggccgactgggggcccggctctcggcggaacgagggctgcgcgccccgagcctcgagtccgcgctcctactccagctgggctcgcacggctgctgcaccttcgcgcctcctccctgtgcctgcagccgtctgaaggggacccggacggttttatttttggaaacctcccccggctttttcgtctcttttatccacaccaggccccctcctcggagggacagctcagccccctcattaccggagagggagcgaggaattccagcaacacccactttggcaccgggaagccagcgggcggcgagcgggcggcgagggggattaacccgtgcggagcagggggcggcgcggggctgacccaggcgctggtcgggcagatggcgcctgccacgaccgggacactgggccgcctttctcctgctctgggcaagttcgaactgcagacctgccccgaatcgttctcccgcccctcgcctcagggaccgtctttggatcgggggacccaggctgcagccttgcaggtctgaaggaagccgggaggggcgccgaggcccgc

SEQ ID NO: 334971 - DNA, 493 bp, Homo sapiens
  chr14:75517730-75518223
  hyper
cgggtaaacgtttaacaagtattccgattaatgtaaacccaatgatttcctgatgacgcctcccagcgcctgggactgacgggacgcacgggcctggatccagggcacgggggcctgggagggccgcgcgggccgagtccggggcagcgctgccttcccgccaggcccagcccctccctggccagccccgtccttgtccccaaactgggcccgcccggccgccaggccgccgggcctccggggccctcgcgcatccggctccgaaagctgcgcgcagccatcatcagggcccttctggtgttagaagagaccccggcatcatcttttcgtcgcgtgcttcccccagagtcacctggagtcccgcttaacaaattctccgacaccaaccgcctcggacgccgacgcgcgcaccttggatcttgaggctcgtgcgtgcccacgagcatgcgcttcggagggggcgcgccaggccgcgagacaccagtgcgcatgc

SEQ ID NO: 334972 - DNA, 128 bp, Homo sapiens
  chr14:75894282-75894410
  hyper
cgtgaaggggcttttgacttttcccccggctccggcctctcgcgtctctctcctagggctgcggctgctgctgcctggcgggcacaagccgggcggcggtgcgcggggggtgcgcttacataaccgct

SEQ ID NO: 334973 - DNA, 245 bp, Homo sapiens
  chr14:76597648-76597893
  hyper
cgcttgcccgtcggtgggctgggcgggagcgctgaccctggcgcctcggaggagggagggggcgggctggggagggggaagacagcgtgactgcggtctgatctacagtgacgagtaccaatgttaactgtcacctctcatctccaaactaaatcacacctggaattggaggagccgaggagctgatagagtcagcctcgcagaggcgacaagtcaatcagcgcggagatgcccgcggagacacc

SEQ ID NO: 334974 - DNA, 123 bp, Homo sapiens
  chr14:76603110-76603233
  hyper
cggttaataacacgattgctcccctccgcctccttccttcctctccttccccctccctttccctcgccctccacacaattctctcaattaacgataggcagaaattaatttttcccctcgatc

SEQ ID NO: 334975 - DNA, 278 bp, Homo sapiens
  chr14:76819100-76819378
  hyper
cggccccggttgctctgagctagctgattggaaagccctaaccctcgaactccgggctttctgggaacgcgggctctctcccctctttccctccgcccccacgcgcacacaggcgagcaccgtccgcccttcctagttcccaccgcgcgcccctcgctgagcgctccgcacactctgagatccagcgcgccctctggtggcacacggccccgaatcgccgcgctcctgcgggccgcgcgcagggtcgccgggtaggcacaggcacgtcccgtggccac

SEQ ID NO: 334976 - DNA, 211 bp, Homo sapiens; identical to SEQ ID NO: 237613
  chr14:77228494-77228705
  hyper

SEQ ID NO: 334977 - DNA, 333 bp, Homo sapiens
  chr14:77428133-77428466
  hyper
cggaaccttgaatgcaggggggcgggacagagaaaaaactagaaagctcgacttctgcctgcggggccggaagccccgctgcggccccagcccgcggttagcccctgtttgtcattttgcaaatctggtcaacccacctccggtgaaaactcccaacctcaccccagggggcaatgactaattacaaaacacattttctctcgttttcgtcaagctcgctgtcccgcccacacatcccccgcctatcccggcacccgtcggcttcctcaggagcctcactcaactgtgttgaatgaactcttggcctggtccctcccccagagacttcacacc

SEQ ID NO: 334978 - DNA, 805 bp, Homo sapiens
  chr14:77591041-77591846
  hyper
agctcaggaatggtcgctattgtgacaaatagaaaacccgccaggagacagagaggaggtgggtccctggaccgcggtggcacatgagggctaagaacctcccaggaggggctgggctcggagcgcgctctcggagacgcggtgatgcgcggggcccgggccgtggacaagactgcagtgtcctgcactacctgccgcccactcatcaggccgattctcctcaccttacgcttagatgagtttcgagtaagaccactgctggcatcaagagtctgggcccatgatctcgccctttcgggctaggcgaggcagacccaggttggctgcggcccgcggtccccgcgcagccaacactggcagccaagcgcggggcgcgcgcgccgggagagtggagcgcggaggcccgacggcgccccctcccggcgggcccgagccacggccgcgggctctggcgggtgccggggaggccacgcgcgacggcgtcgcagccggagcccagacagacgccccacgctgcgcggccttcatcccacggctggggcgatggaaaggtggtcccgacacgcgcaggggtctgaggaatcggcttcgggattctgtggtctttgtggtccgcagccggcaccactgcttcctgtaatttaattttctctcccgaaagcgttgctaattaaatcctttctccggcgagccgtcgccccccgcccctgctagtctgtttattaagtacccggcacctgcgagggaatttttgccctcggcggccggcgggtcaggtggaggggccgcgctgccccttagctgc

SEQ ID NO: 334979 - DNA, 153 bp, Homo sapiens
  chr14:77600250-77600403
  hyper
gagcatgaggatgacgaacatttcagaacccaggacagctcctgcagggcacggggaggggaaacaccagagccgctttacacccaggccaccggcataactgcgatctaggcaggctttccaccgggagggagggagattaatgagattgac

SEQ ID NO: 334980 - DNA, 1356 bp, Homo sapiens
  chr14:77606947-77608303
  hyper
cgaagagcgttttcatttgaggcgaaattaaaatccccccttcgcgcccgcctcccgccctcctgctgagagaaacccaaacaaccctcatggcgccgaaatcctttccatgccgacaagcccgccctgggcgcacgagtggatgcttggccagcctttcctgggatcgaccccgccgccgtgctcagccctcaccacgtccccatcccaccccacgcctcacagccggggttcctggccagcttcggaagccaccgagaaataggattccgtgcgcccgagagaacttttccaggggctaaggaatcggccagccggaggcgcgagaaaagttctgggaaggcggttgcacctaggatgggtggatgccacggggcctccgtccaggctgtcccgtccgcacgggtcgactggtcaccttggaatcccctttgcaggtcccagcgccccccgggaacccgcagcctccgcggagagcgtgggcctctccctaccgctggggcgcagcgcagtgcacgcctgagggtggtcgccgggggctgggcacgcccccagtcctgcgccgccgggggctgcggcggtgctgcccaccccagagagccctcggcctggggctccggcgaagcaagtgccttcccggcgccggtcgccaggggggcgcgggagcagccagatgcgccgcagcgctgggaaggcggcgaaggacaggggctaggggagtgaggggcgctcggcaggcagcctcagccctggccctgcgcgggagaagggacagcagagaccgcccgtggggccccggggtgtagggagctgtccgttcagccctggcgcccgcctcgcccgcggcagagggcggcacagccggagccttggaaagaccggcagcgccggcagccgcgggcttctcggccactgcctcccggacgcacgggaagccgccccccgcgccgccgccgccgcactgccgccgtcgcagaggggtgaggaaatcaactcaccgagctctggtcgccgacaagaggagccccggacgccggctctcgccctgcccgaggctgcaaagttgtggactcggcccggctggctcgcagcctgcgcttcgcttcgggaactgggcaagtagcggggatgtggggaggagggagcgggcagctgctggcttcccacttgggcgccagcgagtaagggccaggaagcggcggggatggcagctgggcaccccccagccccgccacccctccctccgctcctgggggcggtgctctggccgccagtctcagcatcgtggacttgccccctcctcccctctcgattccccttgagcgggctggggcgccctgcctggtttcagcgccc

SEQ ID NO: 334981 - DNA, 818 bp, Homo sapiens
  chr14:77964834-77965652
  hyper
cgcccggtgtccgggagcttccggccggccccggcccctctctccatcggggggtcgctgcctgtgtgtgtcccggtcccgctccccgcacggctggagccggcgggctggggaggtgggaccgacagcgcgctccgcagcccggtgccgccgccactcacctctgcgagcctcgtgaggctcccaggccgtggtccgcggagccgcggcttcttcacggggagccctagcgccgcctccagcagcgccgccagcagcagcacgcagaggaggagcccggctcggtcgcggagcgcacgcatcgtctcggttccgaggctgctctgcctgcacctctgcacgcggccgcgaacccagtcgcgccccgcctcgcctcctccgggggcgggacccggcgatcctgaggggcgcgcggggcacggggccgcgcggggcgggggcgcgcagctcgcacagcctctctggccccggctcctcgcgtgggcgcccgcacagctctagggtccgcgcacctggacgtcccccaccctcctccgaggggcccctcggcgctccccgacccgtcttgaccctgtgggcggctctctttgatctggccgcctccccgccctcagtccccgccgctgtcgccgtcgcagcccccagcgaattcctgttcgcgggaagctgcggcccggcgcgctccggccctgcgctgcgactcctgcggggccctgagggtccgacgccacctctgccctccccgaccgcgctccaactgcgacctggaccggcggtgccgcgcgggcgagggaggcgcagcccgacgggagagtggc

SEQ ID NO: 334982 - DNA, 858 bp, Homo sapiens
  chr14:81902288-81903146
  hyper
cgtccccagggacacctgttgtcgcctccccactcgggccgatgaagacatcctgggcgtcccaatctcgaagacacccgtcggccagaagtgtctgtgtatggggccaggtgtcgcaggagtcctcctccacccctacctgccttaagcagagtcccctcgtcctcccccaccccgggacgcccgcggctggtggaaacgccgcgcctccgcgtggctcgaccaggcaggctcgggggcgccagggggcacagcggcgctaggacctcgcggccggcccgcccccgcccccgcccccgccccccgcccgctccacctgcggggcccctcttggggggcgcgctcgcctcctgctgcggggcgtgggtgcagttacctgcgccgcggtccgcagggtccccggcgtccgccgaaaggtcgccgcggcaaagccggcttctctggccgcgggatacccacccggccgcactgctctcgccacgatccctcccggccgcagcgccgacgccggctccagactcgagctcgctctgcgcccgccggctcccggcgccgctcccgccgctcctgattggccgcggcgcgctcccgagccgcgccatgattgggcagccggggagccggggcggggggactggccgggcgccgccgggatctgctggccaagcttcccgcgccgcagactcgctttcccgcggctcccggggccccaaccagaccccgaagctgggattcttcccctctgcgcctagtggggccggccgtccaggcacgaggcaacacggaaagcatcgattcgagcgacatggaaatggcgtggaatggggagcgcatgggagtcccacccgctccgcctgc

SEQ ID NO: 334983 - DNA, 838 bp, Homo sapiens
  chr14:85996094-85996932
  hyper
cgggggcggagagcagagaagtaaaggaataaaaccaacttcgctggcaacttcaataaatccggtaactggaggcaaaaaatagactccgagggctgggtctggtccggatgaaacgctagggctccttcccttccttgaatcttgggcgctggaagccagccacgggcgtcttgccacgcgagtgcccctagacagcaacacacccactggaaacgcacgtgaacaaagctctcgcccccgggagccgctgcctgcggtttcctagtcgatcccagcttctctagggagtgtcaggcgcacacagggttaagttagttccctccctggtaggagggagaggaggaggaggggaaaagcagcatactgtctcaggctgggtaccttgtagttagttgtacgttcgaaacctgtcgccgtcacttgcgcgtttggcattatccattgtcaccgcggaggaacgagcgctcgagatatcatcagtgcccgcaaatctccgcgccaaggcgctgagctactcctttccgaggtgcgcctctggtcctccgtccctggtgcccagcagcggcgaggcggcatctccgctcccgccgccgtgtccaccgagccctgggatcagggtggcagttctcaacgatgggcaggagggacctcggcggcgacccctaaaacaataccatgccccgggatccccgctgctgccgcgccagcgtcttccctttccacctccctgaccctgtcggattcggatgagcccattgcaaggagaagacgcagccgtcaggtaaaaggggctgcgttgccaggtgaagtttccagtaaccggccgagctgctgc

SEQ ID NO: 334984 - DNA, 137 bp, Homo sapiens
  chr14:86000933-86001070
  hyper
cgactgtccgtatgtgtgtctgtgtgtgtgcgtgtgtttgggggagggggttagtggtgttgcagagaggcggaatttttctcggtggcctgatgcgcagtggtcctaaggtagtgagtggccgcgtgtgcgcattg

SEQ ID NO: 334985 - DNA, 731 bp, Homo sapiens
  chr14:88458957-88459688
  hyper
gactgccatctccgcgatgaagacagcctgtgccccactgcctgggacgagggttccagccccggctacttcactacttagacctgtcactttactctctgcacctatactctctggacctccggatcctcatttgttcaaacctaactgcctgtctggttcgtgttaaacgagaaagcacccgccccagccccgcagcgggcccgccccaaccgcctgctgactggcaccctaggggaatgcggcggagagtggagccggtggaaacgcagggcaacgccgcgggggcttgtggggctggccccacggggcgggctcttgccgccccccgcgtatccccgcagcttgccgctcaccccgccgccgctgaccgcgccgatgccgtcgaactcccggcccagcccgtcggagtcgtcgagcacgtacgcgccgccgggcgccagcagcgcacacagcagcaagggcaccgcggcgcggcccgccgaacccgcggccgcagtcatagctttcgctcggcgttgccaggaagccgagagtagccactcagccattgtgtgggtcacatgactccggcgcccagggaggcgggtcccgtcgccgccacgatagatacgggcaggaggccgctgatgctgacgccgccgccgccattttgagtgcgggtcaagggcctctgacgcagctggcggagtgttgagaaaagaagcagcgagctttttcttatcgctcgc

SEQ ID NO: 334986 - DNA, 1118 bp, Homo sapiens; identical to SEQ ID NO: 224744
  chr14:88789388-88790506
  hyper

SEQ ID NO: 334987 - DNA, 632 bp, Homo sapiens
  chr14:89493264-89493896
  hyper
gtctggagcgtgtccgtgctgggcccccggagatgatttctggaatcgcgacccggggacctgaggccactctgggacctgcgaggcagttgttgcccaaagacaaggcctgggtacaggagctcgggaagctctctgctgcccgtctccgttatccacgttcgtctgggcaccctcctcgggtgctgcccattattcctcccgcacctgccggatccaagagtagacgcagaacccggacctcggaatgggacgatgcgacgggcggggaaggcctggcccggccgaggtgccctcggccccgccctccaccgagggcagggaggcactgcctccgctccgtccactcgtaactggtgacgctggcagccccgccggggggcggggggagtgcaagaaaatcctgaggtgtgtcgggggacctggaccagatgccctcctgcaccgccctagctccggggaagtcgctctccggctccgcggcgcgggacccgccagcgggcagaggcgcggcgctttgatgtcgcgcggccacacggtggcgctgccgcaccgcccgctggcggagactgggggccaggggtgcccggggtggggtggagccgggacgcgcgcactccccagccacgccc

SEQ ID NO: 334988 - DNA, 246 bp, Homo sapiens
  chr14:89817855-89818101
  hyper
cgttctgtggagagagggaggcttcctgtgaggcccacttcctgtgaagcgtttggtctatggacagcctatttttaaaaatgtaagtccttcctttgaggccccccggaactggcagcaggccgacgggcaatcgttcctctggccgcacactttcaagtgaccgaatgtacccaaactgtttgataaggtcatttgtaaatatttactgatttgcagagaaaagaagttaaattacataaaccc

SEQ ID NO: 334989 - DNA, 216 bp, Homo sapiens
  chr14:89884061-89884277
  hyper
cgtctccccagtgctgcgtcctgataggacccccagggccttccgagccctctcccagcgaccacctcgtgtcccggaggtaagcaccgcagcgtcccacccaggtggccgcgtgtctcccgagggagggccggtggccattacaagacaagaggcaccgtcctaaaggccacgccggtggggcctctcaagtgggttgtgcggaacgccccggcc

SEQ ID NO: 334990 - DNA, 493 bp, Homo sapiens; identical to SEQ ID NO: 237649
  chr14:90084101-90084594
  hyper

SEQ ID NO: 334991 - DNA, 596 bp, Homo sapiens
  chr14:90085316-90085912
  hyper
acaatgctaaacccgagcagattaggaggcaggaaatgagccccattttcgttaccttcgatcgcctgcccccccgctgcttctcgcggccgcattggggggctgcggcgacgctggactcgcgggtggccccgccgccgggtcgcgccgtctcccggccgagctgcagcagatcgcggccggaaccccggctcctgcgcccggcgcccgcccggggtcggcggcgcggctcccaccccggcctggagccctgctgggtcctagtgcgcgccgcgcgcccgcctcgcggcccggtctgcagcccgcaccgagggcaggcagctcccagcgccgcgagtctccgggcgaggccgccaccctctcggtcccttgcgaaagcggccgcggggtgtgcggatgaactggagcttaatgtcaaatcctggcacaagatgttcaaaagaaagacattggctccaactgaactcttagaaggcagatgctaggatctgcagcccgagggtaagcgtaggggcagtacctggcagacagaggtttgccgggtgcactggtgacattggccgttcacagacggtgagacgcggtacgggatcgat

SEQ ID NO: 334992 - DNA, 729 bp, Homo sapiens
  chr14:90526595-90527324
  hyper
gtttctgatgaaaatgcactcgccagagctgtgtttctttattcgaaatcacacggttttactcaacagggctcctagcccttctgtctctgctcctggtgcgtaagggcggtgtgtggggctctgcgcctgaaaccgctctctcggaaggtgggaagatgcccacgtatccattcctctccgcgtacagattcgctcccacacgcccgggcgggtgattccggagggccgcgcggggctgtgtgcgcgggcgggggcgggatgtgtctggagggggcagagcgccctctcccggccccggagggcccacgcggaccggctgagcgtcccaccagccggttctgcatccactacccagatctgcgcgccctggtgggagcaccgcagccccgggtcggcccttcgaacgccgagcgtctacccgcggagaccagcgcaggaggcgggcccgcgcgcaaggaggcgggcgacagggtggagtcgccgcagctggcagccgcacggctctacctgttgcagcgtcggagcgcgcccgcctgagaaggcagagcgcggtgcggacctgtgctccgcgcgccggctggcagggcagggccgcggctgccaggaggcccgggaacagtcccgacggagcggcgcggagagggcgctccccggaaggtgagatctgagcgcggcagcggcgccagcgcccgctacaaggcggggtctcggggagggggccccggc

SEQ ID NO: 334993 - DNA, 1280 bp, Homo sapiens
  chr14:90527853-90529133
  hyper
cggagactcgggaggccacaggctcagcgcgacaccacgaccacaactaggaggcaccatcgtcgatctacctggggaggcacctacaaagccagcagactgacacccgtgtcctagccgtcggcggcctgcgaagcgatagtcaaaggaaccaggacccaggaccccggcgctctgcttacccgcagacctccggaccgcgccccccccccgccgccccgccccgccccgccccgccccgcgaccgtctctttgcgggaaactcgagttggctcgagcttgccctgaagacgcgccacgccccctcccctatctgagccggacagggagccggggtggaaactgcgcccgcatcccagcgccaagcagacgtgaactctgcgcccgttccccgggaccttcagcgttaaggagaactccgaggagagcagggggagtggaggggaacggcggcgacaaagcggatttgaaactaggagtcaaggaggacgtggggagctggcgccacaggagctaccgaggcggcggccgggggagcctcgcggcctgcgggagagcccggcggtcatgggcgagccggcggtggggcgcccgggagctggctgagcgccggggcccttatttcccgggggtgtgggcgagactccgccgacgcccggtgccgtgggcctgggggctgcccccgggggcccggccatggctggccggggtttcagctggggcccgggccacctgaacgaggacaacgcgcgctttctgctgctggccgcgctcatcgtgctctacctgctgggcggcgccgccgtcttctccgcgctggagctggcgcacgagcgccaggccaagcagcgctgggaggagcgcctggccaacttcagccgcggccacaacctgagccgcgacgagctgcgcggcttcctccgccactacgaggaggccactcgggccggcatccgcgtggacaacgtccgcccgcgctgggacttcaccggcgccttctacttcgtgggcaccgtcgtttccaccataggtaagtgtgctggccggactcgctgacaacctccgggcggcctccacttcctccggggggcaggaccgaccctctcatcctttcattcatccatctgggcgcccagccagactccactgacatgagctgtcgcctgatcaacaggtggtattgcctccccgctgctctaatgtggtccaggcaccggcagcttcagcgtcacctggcagcttgttagaaatgcagtctcagtcccctctgcagacctgcc

SEQ ID NO: 334994 - DNA, 1142 bp, Homo sapiens
  chr14:90849401-90850543
  hyper
cgacccgccgtagaggaaaaggaaaccccaaacaaaactcgggcgcagagcctatttctactggccaaagagcgccgccaagaccccttccgtccggggctgtccgcgctgccactagtaaagatggcggccataggcggagccgctcactccgaaggccgcaggctaccctgccggccacgaccattcacgcggagccctccacgcccttcgcggcttgacgcattgcaggtgcagcgcgaccaatcagacggcgcggctcttttcggccaaccactgcagggtcgcgccggcctatcagagcgtccttgtcaaactgaacgaggaaagaagcctcagcagcgccaactaagcaaccggctacagaccgcgttccggtgcgtgtgtgacgacaccgccgtgtgctcctccgctgggagatatagtgccctcgcccttgcctcgccccgcccgcgagcgctccaaaggcttgggcgtgcggcttgctcttcctctccgcttgacgggcggtggttcccccgagacagaaacttgactgaaaaataataccaaatacccgtgctgcggcccgtggccctccatagggccacctgaactagcctcgcctgtccccttgctctttgccgttcgtccttcgcgttttgtgaaaacagttggcgccgcagaaatgagataaacgcccctgagctcgaaacccgcactcgaactgccaccgagccgacccttcctgttttggaactcagggcccggccacccgagaagcaccctcatgggcactttgtttctacaagggcccgtttccatttccttcctaaggtttccttatcccctgcggcaggaggggcccgctgggctcgggttttcagctgcgttggagctgcagaggctgcggagtgaacgcggccaggagcccgcctgggagcgcgcagcgctctaggagccgagagccgctgcttggccctcgctggccgggtaaaccgaggggaagctcctggcctcctttcccttaagccccttattgcttctgtggggaaggccctcctaggtagaggcgaaggaccggggagataacctctcccatgggccacatccgctgccatggtctgtgtcgtgccagaaggtacctctcagccctcagtgcc

SEQ ID NO: 334995 - DNA, 416 bp, Homo sapiens
  chr14:91580279-91580695
  hyper
cggggagagcaggttaactcttgcagggagaactgggcttgcagggtccagccagctgccagcagctctgcagctttaagaactggggcgggctagctgccgaggagaccacgctgctgcatgggccacgtgagctcaggctgtgggagcggatggagctgctacagtcagcgcttggggctggcctcagcttgtagacccgagccctgcagaacaaccccccgtggcgcaggagagcagaagaaagggggcctttatgcccttttgagggaagcacacattctgcaaggccgtggaaacaaagggaggaactgtttgtagccctcgtccagacgccccaaacaaacagtaagtcagaagggaacagagcacagcacagtccctccctccgccccaggcagtatccaccttgcccc

SEQ ID NO: 334996 - DNA, 479 bp, Homo sapiens
  chr14:91581063-91581542
  hyper
cgcaggcacacaggccagagcttcgtggatacctgcagggcccaaaggtccctccctgttttgaagagtgagtgatggctatgaggtagcggccaggctgatcacccctgcgttggctggaggcagaattctgtaaatcctcgccaagtctttctccaggccactggttagctcatctcagcctcctctgggagcatcaacaccaacatggcacaggggactgcagtggtgtgctttggacctgtgtacccacccaaggctaaaggcagagccaggtgactttgcgggggtctcttctctaggattatctgtacttcccctctgtcctcttttactacgggagatcgagctagctataacccaccttctttcatgagaaccacactaaattgcaaaaattatcccagtgctggaggagggcagcaggttgagattatgttggcaggaagaatgttggcattgattggcacgcaggggac

SEQ ID NO: 334997 - DNA, 267 bp, Homo sapiens
  chr14:91755357-91755624
  hyper
cgttcctgcacacgtgtgcacagccaccggtgcgggacccttcaggacacccccttcctcacccgaccacggccaggacggccgcccctacctttccccacagacccgttgtgggcgtcgcgctcttctgcacagttggagcccagtgcgggggtgtcggggttctcggcctgtgatctgagcggctgagaggccgccggcgaggcggggtctgaggactccagctgccagggagggctgtccacggtggattttaagcgttccctc

SEQ ID NO: 334998 - DNA, 570 bp, Homo sapiens
  chr14:91883365-91883935
  hyper
cggggcaacagacacgagacaggaggaaaaacttcctcgccacttttctcccgcgttccagagcggaagaaataaaaataaaaaggacttttcaataaatgtctcacgtctcaaatccattgtaaatcagtgcgcccaccccagtctgttcgctttcccattcggcgccccccattccccacccgtcaccgccatccaccggctggtctcagggattcagaaaaactacatgagatatttggttgggaagaatggggtccttttcgggagtggctaaaccccagggacaggagtgaccactgggacccggtccgccccgaggcagccagcctagagccccagcgggaacaggtgtacccgcccggctcctggcccggccgaaagcgcggcggggtcccgcgccggacgcacaacgggggcgccggctccagagttacaaagctccggactccaggacgcggccccaaccccggccgggagccacttgctgcgtccctcgcgccccggagccacccggggccccggccgtgtcgggtctgcggcgtcccgtcgccgggctagagagaagcc

SEQ ID NO: 334999 - DNA, 495 bp, Homo sapiens
  chr14:92040380-92040875
  hyper
cggcttgcagatgagaaggctggcaggcaagcgctgcgggcgaccgtgggtggtgggcgggttttcccctcaggcaggtgcaggtcctaagggggcgggccccgttgggtgctcatgacgcaaaggtccctaggatttgctcctcacagcgggagcgccctcgagaggaaccgcgtctgcgcctcccgagacggaccactcgggcgcctccgccccgcgccctgcctcgggggccgccccgcgcagtgagctcagcgtggaggcggcagcgccctcgcccttccgcgccctcccagcgcggtctctcctcgtccgcgcgccccgctccccaggcgtttctgggatgctggttggccgggcacttacgtgtttcaaagcgggtgacagccgccgctcgggtgtactgttcgctctctcccgccaggatccgagttcttgttccccgacaactcgtgggagtgcccgctccagcgtggtttctccttctccgggaac

SEQ ID NO: 335000 - DNA, 551 bp, Homo sapiens
  chr14:92302201-92302752
  hyper
cgcgccgtcggaagcccgagcacggagcagggagccgggcgcccggcgcgcggccgtccccgcctgggctggggtctccaccgtccccggtcacgggtccccctaggcagagccgcccacctggccagcggggacctagcctcgccccgtcgcccacccctggtgccctccagaccaccgcgcttccagctgtcgcggggcctaaagctctctcaggcccccgcgacacaggcgtcgctgaggagacgtgggaacagcccctgggccccaccacggccccattttaaagaaagttaaagacaaaagagacagaactgacactcacctccagcccgcaaggcggggccgccctcacaggcaccccccacagccctgagcgagctgccaggtgggagaagcgcacctgagccaagccacgccgcgcctttccccgcccgggtcccgccgccctcctccgggtctccacgtcccacgcccgcgctgggccggcgccgcgcggccgcggccggttacctgctggaggcagtgggcgctctgctgtcgccgcctgc

SEQ ID NO: 335001 - DNA, 75 bp, Homo sapiens; identical to SEQ ID NO: 237674
  chr14:92414137-92414212
  hyper

SEQ ID NO: 335002 - DNA, 47 bp, Homo sapiens
  chr14:92789091-92789138
  hyper
cgaccaattaattttctcctgcatcttccccccgtggtgggtggcgg

SEQ ID NO: 335003 - DNA, 1442 bp, Homo sapiens
  chr14:92789370-92790812
  hyper
ctactgaagagaagagtgcacgggggagtgcgccctacgggacgagtacacgtgctgggaagggcggggggtgagaggcgggcaggaggggaggagtagggaggcgagagcagcgggcgggaggcgccacggcctctcagacgctggcgcccgcagccgagaagccagagagaaagttcccggggagagctcgcccctgggagggccgacgtcgagcctgctcgccgcgagggtctcaggtaccgcgcgtccagccagccttcccgcggcgcgcactcggccgcccgggctcggctcgtcgggaagcaggggaacatcgccggctggcagccggggcggccgccgccaaacttggaggaggaggatgctgcgagtgggcgcggcggcgcggggcgcgggggcgcactgagtgctccctacggcgctgctgccagggctgtggccgggcgagccggccgaagcggagcgggcaggtagcggctctagcgccgggactgcgccagccctgcgagcccgggccgccagcgccaccgtgccggcgtcgcctcctcgccacggagccatggtgcgcgcagcgcgcacgcggcgcgcgggactctgagctccggccgcgtcgcgcgtccccaccttcccaaggggctcccccgccgacctcgccctcgggccatgaggctttggcccggagctcctcgcctctgagtcgcgcaccgcctgctccagccccagcgccgctcggccactgattgcactctggccgctgaagctccccatcctctcccagagacggcacccaggcgctccgggatggcgctccgcgggaccctccggccgctcaaagttcgcaggaggcgagagatgctgccgcagcaagtcggcttcgtgtgcgcggtgctggccctggtgtgctgtgcgtccggcctcttcggcagcttgggtgggtgctggtacgggtcccctcttcctggggagttgggggctttggctggggagtctcggggcggctgcgagatgttttcccctccttcctcatcaggttggtcccaagggttcatccagtcccctccccgccgggcaggtagagcgcgcccagaagagctgatggacgctctgggctgtggcgccggttcccctgagctacgagcggcccctgggggggctcaggacgcggctgcaggtgtgtgttactaagacgaaagcaagaaccgcttccgtcccgggagtgcgcccggaatgggcagcgcaactgcggggtgcaggcaggattctcttggtctggggtgggcgaaactgagtggcccgctttcctattctgcagagccgcaggaaccgccactgcgtctcgcccctgccctggttcaaaggggtcccctgggtgccctgaggtgtttgttcttcccaaaccctaaaggcgttggggcagtctgccgcggggggtagctgcc

SEQ ID NO: 335004 - DNA, 1291 bp, Homo sapiens; identical to SEQ ID NO: 224761
  chr14:92979677-92980968
  hyper

SEQ ID NO: 335005 - DNA, 330 bp, Homo sapiens
  chr14:93214751-93215081
  hyper
cgagagcctgagagagcagacgggaggccctggcctcgggcgtggggactgaacccggttctgtgctggggctcgcggttacctgtggcaggcgaccgtggtggcagtggtggcggcggcggcggtgagtgaccgcggtggtggcgccggcgggaccgtgagaactcgcggcggctcgcagcctcacaccaaacacccacgacgtcggcactgctgtgattgctgcgggcgccgccgctcctcgcttaagggccactgtgccgcggtgactggtggagctatggggcgtggcatctgccaaaaccaatgggaggagaggacgaggccggc

SEQ ID NO: 335006 - DNA, 957 bp, Homo sapiens
  chr14:94254404-94255361
  hyper
cgccccattaacccccatacaactcactctcactgtgagcacacttcaaacccggcgggcactactcacctgcgcgcacaaccacagaaacagccgtgcacacacactgatccccgtgcacacccaccgactcctgcctgcaccctcgctgaccctgcatgcacggccccaagaaatctcacgctgcctgcacccacactgcccagccggcctcattgcgcacactgcaacataggcacctccgtgcgctgcccctttgcacgcctccgcccagccccgatctcccgctcccgggcgtgggttcccccacgcctccatctccgcccgcacccttccaacgcctcacgctaccttgcctggcggcggccccagccgaccctgggctcggggaaaagaggtccgcgttccccccgcggcagctctgtttcccagcagccggacagcccccatttaaagccagccgcctccccagtcccccgccctctaggcggggcctccgtcctcaccttggcggctgcgcgggcgcccgggggcttcacatgccggggaggagcgcccggcgctggagcaaaagtttgcgcgccggttgggcctcccgggccgctgagcagaggaccaggagcggcgtcctcgcacggggcgcagggcgcggtggctccggactgcgcctagccgcgcgcggggcgggaggggcggcaccccgctcccagggccagggctggccgccgaggcggaggcagagggcggggaaagtctcctccacgccgcctggagccggccgcgcgagccctccccgggcccgcgttggctccccgcctttcctggtggcgccgcgcggctgcccggggcactggggtgcccgagctctctactaccctcacgctggcccgcgagaggcagcggcgggaggcgccggcagggagctcccgctggggcagcaaagccgtgggtggaggc

SEQ ID NO: 335007 - DNA, 481 bp, Homo sapiens
  chr14:94405738-94406219
  hyper
ggggctgatgacgtcgcggttggggtcggcgccgtgttgcagcagcagctcggtggcgtacacgttgttgttgaccaccgcgaagtacagcgcggagctgcgccggtcttcgtagaggcgcgcgcgctcgggggccagcggcgtgttcacgtcgaagcgcgcgctcagcagcgcctccagcacctcgtcgtggttgcgctcggccgccaggtgcagcggactgacgccgctacggcgtatgcgcgtgcggctggtcaccggcagcagcatctgcacgatcctgccgggtcgaggggcgggcgcgggtgaggggagggtcggggtgtggacgggtagggccggccccgccagcaggagagctcgggcgccaggctcggctggtcgccctgaccgcgggctgcgacgcggatcccaccggcagggggcgccgcgggtcaaccattctcaccccactgggcagggtgggtcggctgccgtctcc

SEQ ID NO: 335008 - DNA, 146 bp, Homo sapiens
  chr14:94889871-94890017
  hyper
cgctctctttcctcactttacagccccggtcttcaagagcggctcggaccttaccctcacaatgggccacaggaatttatatgtcccttgaaagacctgaaatgacacggcagtgtctgaacacacgggggcgcgctaatcacctc

SEQ ID NO: 335009 - DNA, 1410 bp, Homo sapiens
  chr14:95235472-95236882
  hyper
cgcgacagcgtgcccacgttcatgtagggcagcatctggtgcggtaccggggacaccagcaccgaaccggggccctcgtagcctgcgacagagtggggcgcacggtcagccgcccgccctcgccaccgcacgcatgcacgcccgccagcccccgaccctcttccacttagaagtcgtctgcaaggggatgctgagaattgggggtgcacgggaatcaggggtgcagggaaaaggaggaggcgtgttagagcatccatccgcacacccgccaaagccagtaagagaattcaaaacaaaacaaaacaaaacaaaacccagtttccccgggcaggcactgaattccagttttcgcgaactctggccaaaagtttgcagcaagaagtttgcaaactcctgcgcccgatcggcaaaagcggaggggggagttgcaagaggagcaaagtttgaggaaggtgaattaaccaaccggctccatgggctaaggaccgcagtgggcggcagaggccggagcgagcgcgaccctacctgggggcgtcgggacgcaggagcactgctgggcgcccagcggcggcacggccccgcagcaggccgggcccacgggcgccgcctgcacgtgcagctgcccgtagaagtagttgttgtagccgaggcgggagccgctgaccgcggccgggaggcccgcgccgccgggggccacggggcgcgggtagaaggcgccatagtccgaggaggcgccgccgctggcgccgtagagcgagtccccgtgcagggccgggaagacgacgggagccgccgcgctgtgcgccaccggcaacaccgagtccttgcagcgcggccgggcggctaggatgttgtcgatgctgaacatgctggcgggcatccccgagccccgcgtcgggaccggggggcggcgggaacgcgccgaggacagagccttaaagtgggggggtccactctcctccagccgccgaccaaaccgaaagagagcgccggcgagcgcgcagccctgcgcccctccccgccccctgcgtccgctctccctcctcccgccctcccctagccgcagcgttcgctgaactcaacccgcgggtaggacggagctcagaccagctgaacctcttgttggttttatactgagtcgacgtcatcctggatttagttcctggtaatatgcagatgacaaacagaaccagatttggccctttcttttcctttgggtgggggaagagggttggggggagggggagaggtgccaaggggagggggttacaaggcctgaaaagagattgtggattgcgaattaatgaaattaacctaatcttttccattcggcagccgggccgcgggccggccgagctgggcgggcggcctaattgccttggttaatctcattaattcctttgtgccgcc

SEQ ID NO: 335010 - DNA, 975 bp, Homo sapiens
  chr14:95239349-95240324
  hyper
cggagctctaggggagctcacccctgcgcggcgggacctcccccatcgggttgccccttcaatctgcagccgcgcggaggcaggccccgggaaaggcagtcggcgctcggtgctcgcactgcgcctcggcgggcggaaactcacaagtgtcctcaacgtgctaaacaaaccatcagggccccgcatcgcctggcgcaattggaataacaaatgcgacgcacgcaaattgtccacctcgtgttgctaagcgattgtttgtcggccccgcacgcacagctcagcatgggaggaccgcgagcgtccagaggcagccggcgagcgcttaggtcggaaatgcagtaaacatgccgctgattttccctattatcacccaaacacgatttcacacaaagcaatcaccacgcagaagtctatgaaaatgtgtttgttgaggagtcactcgccccagtaatagtcctcatttttaagatattaaagaatagctcagcggattccacatgcataaggtctatttgccgttcggcatctgtcacggcgcttttgcactgcggtcatcactaaattgattcatagagtgtagattaaattgcttctctgatttaaaacagtgtccaactttggagtatgcgtgtgagtatcttctcccgccccaaggtatttttgtcagggagaaaactgtcgccccactatccttacaccccattccgcataactgtaaaaaaataatgcatcttcgaccccaacttcttacggttcgtttcaggaactttcttaattctctccgtctcctgcccggccacagagcagagttcacaatcggatgcgtttaagtcggatttttcgtgtcatgtgcaaaaagccggtgtgtccttttcaaggtacggagccctcatcggagggcgcattagcggggtcagaggaattaggagcaatgcgcagagccccctgcagcccgcgtgctgcgccgagacctca

SEQ ID NO: 335011 - DNA, 120 bp, Homo sapiens
  chr14:95240610-95240730
  hyper
cgctccaaataaaagcacccgatcccctaaggacgaaataatcaaggtgttagggaagctcaacagaagagaagagacgagaagagaagagaagagaagaaggggctatcgaaaaatgac

SEQ ID NO: 335012 - DNA, 986 bp, Homo sapiens
  chr14:96342497-96343483
  hyper
cgcggagagggaagcggagggaggagcttggcccgcagccgccggccctccccgcactggagctccccctcccctccctccccgcccctcggctgccgcagcccggctcgcagcgcgcgtcagcgggggctccccggagcgagtcgctaggtaacggggctggctccgcagacgcggggccggggaagcccgcgcgcgtcatcagcagcggcgccgcggggcggggggcgcagagaccctccccaatcccggcctgccaccacctggctcgcgcgcagccccggcccagaatgccttaacctgcgccgattgctgccgccgaggtgcccctcccctgtagggaccccgacgccgccagccccttcctcctttcccgcaggtgcgcactgctgtgcttgcggccgggtgggcgccccgccgctgcggtcgcggtcgccgctggtaagctgcgctctggggcttggggcaggaagcagtggggggcgctcgaagagcagggcagctacggccaccgtggccgccggaccggccatgtgctaaagtttctggggctcggcgccccgctgggcgcgcagcgcggggagcagacgcgccgtgggtggggcagcgcggtgctgctggcgcccggcccccgcggggtgcagctctgcgcgttctcatgctgtctctctctctttccctccgcgctgcctctccgaggtcctcccgccgagccccggcgcggggcatgaggagcccccgggtgccgcccagagaccagcaggctgcgcgcacacctagccagcggcagacggggacatgagcagcgcgcacggggtcccgcgcccggcggccagccctatccggcggcggccagcgggtcaacgctgcccgggagaatgaggcaggagccggcggcagcctcctttttttccttctcctcgccttcctgcggctccggcgctccgggtccgggccgggctgcggctctgctgcgtgccccgcgc

SEQ ID NO: 335013 - DNA, 1193 bp, Homo sapiens
  chr14:96505313-96506506
  hyper
gactctgggaggagcgttggcgtggaaagccaggtcactccgatcttggtcctcaggctcgggataacgtgtcagccccaagagagcgctgcccacagccccgggtgggttgggttcaactgcacggggcggggcgccaacagctcaggacttgggttgcaggctggttcttgcaccaaccagcggggcggcctcgggcctcagtttccccatcccgcccacgaagggaggcgattgcgagcgcttggggtttctgacggaccccgccccgggggtggggcggggagtggtcacgtggaggggcgccccgtccgccgagccccgccccaccccgccccgcccgcccccgcgctcggggccctccgcctagtagagatctggagccagaagcccagagacagccgagtgcgccgtgcggtctccggacgctcgctgctcagcccgatccccgccaactgtgcaggcggctgacccgcagcggcagcggcagcagcgaggactcgagcgctggctgcagcgacaccatggatctctcctttatggccgcgcaggtaacggggcgtcccccccacgcgccccgggccgccaagtttggggaggttcggggccacggtctcgccctccacgctggggctgggcagtggcgcccgcccgcgatccgcgtcccggtcctttgtcccgagccggacacccccacttggtgcacgcgtcgggggcggcgatcgcggctctcccggggtggggcgggctgcgcgccccgcacccccgcggctcgagctgttcccgcccgggcccctctcgttggcaggaaggctgcgaggagcctgggcagcccgagtcgcccccttctgcccatcccccactgctgtcccccttctggggtcccggagccctccaaggccgggccagctcagacccgcgcgaacgtggatgggcacacagtctcgcccttccccactctgttttcccgaggcgccagtaatctgtctcttgccggtgacctcgggcgccccctttgccgccgcctgaggaaggctctgagacccgctttgtgaccgtgacccgccaagcgtcgacgcgccgcggtcgtttgtcctgttttgctttgtgtagagtctgatggagccaccagtgcccagcgcggccagaacccccccacccccctccccgacacaaacaggctcccagtggcc

SEQ ID NO: 335014 - DNA, 713 bp, Homo sapiens
  chr14:97684972-97685685
  hyper
gtgacgactggattcggaattttcctctcacttcgtggtagtgaagaatttaactacaacagtaacaacactaataattctaaaagccgtgggaggtcagagcgggcgctgcccggcgtcacccctgcagcgtccggatcgctccgcataggcaggggtggtgccccctccccggggcacagaaacgccacatcccgggggcgccgcccagaggctgtctctgtttctgtgtcccttcatgaggctctgtcccacaaaggcagcctgagccaggaccctaaagaggcctggtcatcgggaccggagggagttccgcttcccaggccggctctgcaaacgcgagcctgcgccaaggcgccctgcgggtttgctggtggcatcgaggggcagcgcggggccagcgctgggagctccgaacccacacgctccggccagctgcccgggaagcgcccaagcacacgtcccgagtcccagattggattaagttgcccaactacctactttttctctctttaaggagaagcctaattggagaagattcggttttcttcgccatggcaggtccctttctcctgacccgcagttgcaggggctgagggtaggcgcaggtccgccctggggtcgaagccaccatcgggcctcgaggttgcccccctaacatccggcctgcacgcctggcgggggcgcaacagtgtctcacggctcgggagctc

SEQ ID NO: 335015 - DNA, 519 bp, Homo sapiens
  chr14:99736040-99736559
  hyper
cggctctcggccgcccggcagccagtcctctgcggtgactgggcgcgcagccctctcgagctccgcgcgggcagcccggccccagcccggcgaggtgcgcggcggattgcaagcatataacctgcccgcggtctcgatggcacccagaggatgttttatttctattgcagttaaaaaaaaaaaaaaaaaaaaaaaaaaaaaaaaaaaggaacggcgacccaggcaccgcgagagaaagaacggcggggaaatgttcgcgcgcagcgaagaagccgccccgcgggctgcggcgggcggggagcgccgcaaagccaccttcccggtgcaagtgtgcggggactcggggcgggttcccctgcaaacaccgtacctggcccgctcgcgctcgcttttcccctctgctaaataaacccaacagggacggtggaagctgctgcttgtcttgccccgctgcctgactttgcccgcccagccacatgcttgaaatcgacacgatttcagccggtggatttccactgc

SEQ ID NO: 335016 - DNA, 828 bp, Homo sapiens
  chr14:99737178-99738006
  hyper
cgagcgtccagccgggctcggcgcgcacacacacacactcctccagcctgcatgccccctccccggcccggagccggctccgcaggcccccgagcccgaggcgcgtccggctgctcggcgccccaactccccgggctgcaaagaaactttcctatggcccccgccccccgccatgctccaggccgacgccgtagactctgccagccagcgggcggccccggcgcctggccaggctcggctgttccgggctcggtgtccccagccccagacgcccggagccccatctccggcccctcgcgcgcactccgcagacacttacgggtgatgagctccctctgggacaagtgctgcgggttgccctgtttgcggcgggacattgccccggcatctattctggcatcgcccggagagctgcactgatggggggagccgggggagggggtccgagccgccgccgcgccgctgccgccgctgccgccgccgccgccgccgccgcacctcctcctctgcccgggttggtgttttttttcccttcctctctttccctctcttcctcctcttcttcttctttattttgctctttcttctatgctgttttttgttttgtttgcaaaaagaaaaaaaagggaagaaaagcaagaaaaacctctcgatctaaaataagaaaaagaggcaaaaaaaaaaaaaactgctgttgctttccgcggactggctggtttctttaaaaatatattctttcgaaggaaaaaaaatctcttacacttcttcaaactgcttggcctcttgcacttgcaaatgtcttcttgaacttaaactgggttttgcacc

SEQ ID NO: 335017 - DNA, 960 bp, Homo sapiens
  chr14:99739919-99740879
  hyper
cgcccccaggcctggctccggcggcttcacccgggcgcatggcgaggccgtgacgcctcagcgccgcctccctcggggccttttcctcggggggcacacgggggtttttgttttcgtcccgaaggtcttgggtggggcgatggcaccaacaatttaacagcgcccagagtccgtgagcgagaacagaaagagatcccttccagtcccataccctaaaaaataataacaataaaatgtgccctggcttgcagttctgtaaactgtgggctccacggtgggcggacgcgaggccgagcggatggagaccgggggcggggcgcggacttgcacctcctcgccctggccgggcaggctgcacccggctgcccacccccaacaccccacctccacgtggtccaaagtctagtagggcctccctcttctgccatccctctcaccgggaaaatctttccaggaaagtggcttaaaaaaaatatgcccacacgcacctttaataaacttctttaagacattcataaactggccatccctactcgcccggactctaaatttgaaagatcaactcgcgctctctttctgagaactagcgatgtgaagcccagagagggtgagcactttgccctaggacacacagcgcgtcagggacaggtctggacccaaaacaccgcggcgtgcctgcagcccagcgccgccggcggtccgggactcgaaatcccgacccacgaccctcaccttcctggggttgattacaaggaaggcagaccccgccagtggcaaggcgggacggggaggacccctcaggaaaagggagcccctccgcgagcggcgcaagggctctcggagtcccagctgcagccgccaccccgcgtgcggtaaggggccgtgcctggggagggggcaccccctccccactcccagcaggaagtagctggcgtgggccggcgcgtgccccacggaccc

SEQ ID NO: 335018 - DNA, 94 bp, Homo sapiens; identical to SEQ ID NO: 237722
  chr14:100125687-100125781
  hyper

SEQ ID NO: 335019 - DNA, 935 bp, Homo sapiens
  chr14:100259351-100260286
  hyper
cgcccgctctctcccggccttggtctttgtccccgcgcccccgcaagggccgcccgccgcgccccgcagcccctgagcccccgtgcgcggaggcggggcctggccaaggggacagcgggcggcagacgcgcccctgcggctcccaggccgcccgggccgcgctccccgcggggaaagaggccgcaggcgcggggaggctcggccccgccccgccacgtccccctcccggcccgggccccgcggccgccgaggccgccccctcgcgggcggagcgggcgctgggctcgcgcggctgcggcggcggcggcgggcccggggttgccatggtaaccggcagcagcagccgccacagcagggccggccccagcgccagcgccggtcgcggtcgggctcagctcagtgtgtggtgagcggcggcggcgcggccgggccggggagcgggcgcggcccggcggcctcagcatggaggacggcttctccagctacagcagcctgtacgacacgtcctcgctgctccagttctgcaacggtgaggggcggccgcgcggggccggggcggcgagcggctggtggcgggcggcggcgacggcgacggcggggaccaagccgaggggccgaggcccggcggccgcgggcgaggccgcgcaaagttgttgcggaggggcgcgcggtccccgttcccgccgccggcgcattgtgttggagccgcggggccgcgcctcgctccgggccgccccgggctccccgccgccaccccggctcccggcactggcgcgcggaccccgccggctccagcacccgcggagcgcgcccgggcggaggcgcgtggggcacagggcggcggggaggcccgggcagcctccgcgttccggggaacgtgttgcttttttgcttcccgacccacatctgtttggaaatgactggatgaagaactc

SEQ ID NO: 335020 - DNA, 1552 bp, Homo sapiens
  chr14:100437460-100439012
  hyper
ccggtgacctcgacggccctcggatcagggatgccccgagtccgagcgggcagggtgctcagcagggccaggtgatgggaatcatggggccatcgagcacggaccctggctcccccggtggcctctgtgagctctggggtcaggcggggactggaggagcgtccgcgccgggagggagcgcaccgcgccacgtgcccgcccggcgccccgcccccaccccggccacgcccctcgcgcttccctcaaagccccgcccctcagccccgccactctcgtccgccccgcccctcgcagcctcaagctcagcgctcccggaggcgcggacggtggggccccgcgccttttgtgtcgggctttgaccgccgcgcgcgctcattcacctcagcggccgcgggcggaggggcgcacgcgcgcgcagtcccctcggagggcggtggggcgaacagcaacgcgcgtaccctagctcttggctgctgtgctgagactagcccgcgcgcccgcgcgcctctccctcgaggactcggagccgcccgcgcactcgccaggggccgccgccccgagtctcaggcggacgcgcacgcgttcccgccgcccggaccccagccggctcgccccccgcccccccatcccccggcggcggcccccaggcacgcgcccgcgcacacgccggcccgggcacgcgcccgccaagatggcaggggccggggcccagctgtcagtcgccgccgccgcggcccttccccgcagctagcggccccgacgcccacccggagaagatgagcccccgctgccccccgcagcccagtcagacgcggagccgccgcgcccggggccggctcccccgctagcgcccgcgtcccgcgccccgccgccgccgccgccgccgccgggtcgcccctggcccggcgcgcccgtccccggcagcgacaatgaggtgagtcggggccggcgcctcgtgggaggtggcagcggccagcgtcggaggggctgggctgggggcccgcggtgcccccgagggcgggaggggggctccacgggcgcgggggcttccagagaaccgcgggggctctgcagagattcgggggcattcagagcgcgggaatggcttcgcgagagccgtgggggcgtctggagagccgggagggtctgcagggcttgtggggggcagtgttctgcaaggggcaggcggcgctggctttggctgcttgtggggtcctcttaggctccggggggcctgcggcggcctgggaggcagacccccgcgggcaggtgtggccgtgtcccgaccgcgcgaggaccgaagttggcggaagcccctgtgcggtgccttccagcccggaggaggctggcctgaagcccccaggcgttgccgaagcctccccctgccagcgcccagagccgcgtttgggcttttacaggtgtagtttcccctcgacttggagcccgtcaaccccttcgtctcctaattctcaaccccccttttttttcttcttgcacgccagtaaagtgcaaggcccccaaatgtaccgctcgttgatgtatcacccagctc

SEQ ID NO: 335021 - DNA, 170 bp, Homo sapiens
  chr14:100613205-100613375
  hyper
cggcaggtggtcgtagtactcgggcgcgatcttccgcacctgtagagaggagggcggggctcaggggctggttctcctcggggccgcacccgcgagcacacacgcagacacctgagcacacgcggtgggcatgcacatgcatattcatgtacgaacatgtttgcgcgcgc

SEQ ID NO: 335022 - DNA, 205 bp, Homo sapiens
  chr14:100751381-100751586
  hyper
gggggggggcggggtagctagggagggagaggaggcaaggaggcaggacggggtctgagcacgcccctcaggtgtttgcatggcttcttcttggcctgccacgtgcgtctgtaccggaccctaggaatatcccgggagctggtggccagccctagcccctgcccgcctggcctttggccagcacttagcgcgggcagccctgccc

SEQ ID NO: 335023 - DNA, 764 bp, Homo sapiens
  chr14:101033472-101034236
  hyper
cgcccacacaacgcctcggctcaggctccggaaggaaaacacgggaggggtgttcccaaagtaggggtcagggtgccaggggaagtcgtggaggaagtggcaaatattcaaactggctgatcccaggcctgccgcgcaggtggtcccgtgaagtctaccaaggcttaaagtttggcaccgggagggaggccgcgggggacactccccagaagctgtcgcgggattcccccaaaatggctccaagacgcggctgcctggtccagccgcgaggactccatcccccacccccgccccccagaggcggacacttaaaagctcagagccaggcaactggcagcccgggggctggggcgggtggtggttgggggtggggtggggtcgggggagagagcgccggggcagtgcggaacggcacgaacggaacccggagggtccccggggaccagcgagagtccagggcagggagccagaggggcgctgaggaccgcacaggaccaggcggccccgggtagggggcagcccggccctcagtggcgctagccccagcccccgccgcagcggcccgggccggcggaggagccccgcgcgaggctccccagcgcctcgcggcgcgcacacacgcaccacacacacgcacctggcccgcagccccgccgaggccgcccgcgggccctgggggatgcgctcgggtggagcccccttcccccgccttccccagcgccctcacccccgacccggcccccgcgagccgcggcacgggagac

SEQ ID NO: 335024 - DNA, 398 bp, Homo sapiens
  chr14:101543871-101544269
  hyper
ataaatgaagtgcgcgccggcggagtcagtaactcactgcgcggctcccggcaggcgggggcggagtgggggccgcagaaccggacgtgcctggcgaggttcagaggcgctagcggtgtggtgggtgggcagcgccgggatggctggagggaggggctacggggggaggcgctgccgatcccacactgatctggcggggaggagggaggggcggatggggtttgctggagaacttgaccttgcttcgctcccctcaaggggcagctgctgggagaccaagtgtcaccggctggcaatcagggccccaagcctggagacttctggacaagcggaggcaagccgaccatgacggcttgggtgcagggagcaggtgtctgagcctttgacgtagacttccc

SEQ ID NO: 335025 - DNA, 622 bp, Homo sapiens; identical to SEQ ID NO: 237733
  chr14:101923607-101924229
  hyper

SEQ ID NO: 335026 - DNA, 128 bp, Homo sapiens; identical to SEQ ID NO: 237734
  chr14:101924259-101924387
  hyper

SEQ ID NO: 335027 - DNA, 59 bp, Homo sapiens
  chr14:101924417-101924476
  hyper
gtcggcgaggccatcaaaggccgggggtggcggcccgccgcgttgcccatgaccaggcc

SEQ ID NO: 335028 - DNA, 893 bp, Homo sapiens
  chr14:101925019-101925912
  hyper
cggccaggcagagcctgcgacccgcggcgccccccgcggcctcggcgacagcccggttcccacgtcggcgacggcgtgggtggtcccgcccgcccgggagggctccgagtcttggccgcccggggcgcggggcctgagagcgagtgtctgcgccgcgctgcccgccgcgccagtttccgaggtcgcccgcgggctcatgccctgcgccctggggccccggggaccttctccaagccggcctgacctggtggaggctgtgcgctgcgctcggggaaggccgggctggtgccgggggcagcgggtcccagctctgaagtgccagcgccggcgccccactccccgcctgctacggtgctctcgcccggaaaggcccgaggccctggaaggagccccgcgggggggcgccgtctggagcagccctcaggggcgccgggctgccgcgacgcagtggctgtaattgcttcggggtacctggggatcgatggcgtggcccagccgggtgtctgcgcctctgaggttgcaaatctggaaccagttaggatgcgggaggcagataataaaaagccaaatgggcgccaggtggaggagtgagctccgcacgttccatcaggtggcccgggccgcgcgctcgggcggcggcagagtctctggggcactcggggcgggcggcagcaggtgggacccgcggcccgacccgcgctagggccgcccaccccctcggaccccggccgggtctctccacagcctccgtgcgcgtcccagaaggaaaatgctagcaaaccggaaggccgcacggggccgagccggcctcagcccggccaggagaggccgtcggtgccccgaggaggaaggggacccggcccgggacggccgccccgcggtacccaggaagg

SEQ ID NO: 335029 - DNA, 661 bp, Homo sapiens
  chr14:102247600-102248261
  hyper
cgtatttcccgggaccctggcttctgtcctcagggaccccttcagaccttccccaccctccgaagcctcaacccgccctgcgcctcccggtggcacagcgaccttggcggctttggcccctgagccgctaggctgccaaggcgcgctgtgcgcgtggggccaggctcgacctcactcctgttgtcgctgcagacccgcgtgggctcccgccgggccctcctgccgccccccagcctccccgcccctgcccttgccagcctgcgccttcctgggcgcctgacgcacccctctgccccaaccacgttttctcaagagtgttgtctgtcccggccttccaaggagacccttagctcccgccggccgcctccggagcctccggcatgggccccaggccggggtcccgcctttgccccggcctccgctgcctcgccccggagcccggaggaggggagccggccacccggggaagaagcggaggacgccgatctggcctcctgcgttgcgcgctccaaccctctgcttggccgcccgcgaaccgcgctctcccgtttcctttccgtcccgtctcgggggcttcatcctccagccgtggccgtggccgtggccaggtgtaccggagcggcacccaggagcccgccctagcacccgctcccgctcccac

SEQ ID NO: 335030 - DNA, 376 bp, Homo sapiens
  chr14:102975682-102976058
  hyper
cgccacctcctacccgtcccctcccggcctgcacggccagacgtcgggcggcggagggtcgcggggccgagcggggcgtccgcgcgcaggtggccggcgcagcgagggctgcacctgcgtgcgcgtgtgccggaggaggagggggcggcggccgcgggcgcggcgcgggggacggggactcaccatggggggcgcgggggccacaggccgggcgtccccgcccctgccgcggaccggagcgcgcgctgtcccccgcgggcgagcgggcaaaggtcccacgacggacgcacgggagggagccaccgccgcccgcgcccgccgcagccgcgctctgagccgccgcggccggatcgcagggcggcggtgccgtcgccgg

SEQ ID NO: 335031 - DNA, 527 bp, Homo sapiens
  chr14:103010929-103011456
  hyper
cgctgcccggaacgccccgcgggagaacatctgcgccaggggccgggggccgggggccgcggcgggcgaaatccgagaggcccgggctcctcctgctgcgcggccggggaggggggcgcctgccgggtcggggctggaggacctgcgcgcggccccgggaggccccgcctcgccttccagtctgtgaaatggggcgacggcctgggcgtggcggcgagttcttgtccgctgccggcgggcgcggtcgtcgaggacacagctaggggaggcgcagaaacacccggaggcggcaccgccgtctcctccccgggatcccacaccccgcaggttcaggaggaaggcgcggcccgaggcctccggggcggggtgtccccgagacgggaacccgaacccgacggcctccgttccgcctgcgccccttcaaggctcccggacgggcctcagtggcttccccgcccctccccaccgcgtcccggctccccgggcggggggtggggggggtcgcgtgcggacggttccccaccccg

SEQ ID NO: 335032 - DNA, 731 bp, Homo sapiens
  chr14:103021374-103022105
  hyper
cagcccaggcttgccatggactggctcctgggcgttagatgaatgaatcgactcaacccgggccgccacgttgtgttcagaacaccgacagtcgctcccaggcaaccagcacctgctgcgccccgtttccagcgacctccccaaccgcgtggactcgcatccacgtgcccggcggggccgcagcagaaaggctcggaccccccaggacgatcggccggtgggggccggtggggccgcagactcggggggcggggggcgccaggcttccgggtcctgcccccgccccgtggggaacagcaggacggcgccgaggccgtttcgctttcctccgcgcccatttgccgggaggggaccccgtgctccgacctgaaggtgacggcagagcctgcgggaggcctaggccggtcccgccctacgggtcccgggggcgaccctcgcgctgacattggcgtccaggccgcggcccctgcctccgcgcccacccacgccgggcctggccctcgctcccccgggaaaagccccgccggcggccgcgagagcgcggaagcgcagccgtagtgaccgcgagacaaagacccggcggcgggggaggcggcggagagaccccgccagcgcggagaccccagggaagcttctctggaagacctggtgctggtccgctctcccgggacctcattttccttatgtggacaacgggggcggggtcacagcagcccctcgggcttatagcc

SEQ ID NO: 335033 - DNA, 959 bp, Homo sapiens
  chr14:103394622-103395581
  hyper
gaggaccccgggcctgagctcgcccgggctccttccgtgcacagggtctcggcttctcgtcccaggggactgggggcggggtgggcgcggagcaggcccggacccccgcgtggcgccgcctcagcccgtgtctcttgcagctcctgccgctggatggggaactcgtcctggcttcaggagccggattcggcgtctcagacgtgggctcgcacctggactgtggcgcgggtgaggcggtcgggcaggggcggggctctggaaaggcatgttcaggggcggggactggagggaaggcgcgtcgaggggggcgaggaccggagggagggcgcctccgggggcgtggtttagggagtggcggaagtgtcccgaagcggggcttgggaggtcgtgctcagacgcgtggcgtggcgtggcgtggcgtggtgtggcgcggcgcttgttccgtggagctcagggatgtgctccggctcaggcgaacctgccgtcttccgcgactctgaccgcttctcctggcatgacccgcacctgtggcgctctggggacgaggcacctggcctcttcttcgtggacgccgagcgcgtgccctgccgccacgacgacgtcttctttccgcctagtgcctccttccgcgtggggctcggccctggcgctagccccgtgcgtgtccgcagcatctcggctctgggccgggtgagcactgaggggagggaggctcgggtcccctctccccacctcggcccgaccccgcccctcctggtctgcacacgttgggtctgagcactcaggtgaagtctcttcctcgggctggctccggtggggacccggctgcccgcagacgttcacgcgcgacgaggacctggctgttttcctggcgtcccgcgcgggccgcctacgcttccacgggccgggcgcgctgagcgtgggccccgaggactgcgcggacccgtcgggctgcgtct

SEQ ID NO: 335034 - DNA, 142 bp, Homo sapiens
  chr14:103430237-103430379
  hyper
cgcctgcctcatggcacagcagagctggcctggtttttatgaaactgacgttcattatcgtatcctcgtaaaaccagatctgcaaagaggagactctcagcaaatactgactgaatcactgctgtgtgaaaatggcgttctc

SEQ ID NO: 335035 - DNA, 198 bp, Homo sapiens; identical to SEQ ID NO: 237760
  chr14:103655331-103655529
  hyper

SEQ ID NO: 335036 - DNA, 160 bp, Homo sapiens; identical to SEQ ID NO: 237761
  chr14:103674108-103674268
  hyper

SEQ ID NO: 335037 - DNA, 213 bp, Homo sapiens
  chr14:103686664-103686877
  hyper
cgcgctcccgggccgaccctctgcggcctctgctctgcgcagtccgtcctcttctcccgacctggcgtgcgtctcctgttccccggccccccatcccatgggaccgtccttcctaacggcacttcaccccgcccggcccacgaggtggtcccgggccggtgacaagatctggacgtggcgactccgggaaggggcgaccgggcgcggagagcc

SEQ ID NO: 335038 - DNA, 910 bp, Homo sapiens
  chr14:103739785-103740695
  hyper
cgtgggcgggcgcagggccccggcggatacttggcagaggcttggggtcgtggcgggggcgcctcccttccggtgcgcgaaaaagcaaacgcgacgcgcgggctgcagagactgggccgggcggaggagacccccagcctgggttgagcggggcggatctgggactccgaggcttcctacgtggggcgggttcccagcggacgcctctgccgcacccctggcggggacccagctgcgccccttcccgcggccctcctagggcctgggtgcttggaggctcgaggccccaagatccatgtcgcccggaatcccggtgcctaggccttgtcgcgggccctgggaccaactcgcgggggtcaggagctgggggttgagagaaagatgatcaggtgggttggagaaaggagacgcttcccgctgggcgagtgagcccaggacgcggcagaagagggcagaccctaggggaccgccgcgtccccaggcgcgcacgcgacccctccccgcgccgaaaatcctctccccgcctcagtctccccgcctccgcctccccacccatagtgtcactccgaccctagccctgggtccaaacgggcaggagaggtcgctggtgcctccgcggtccccgccgcgcgcagaactcggccgagtgcaccggggtctcctggcctctgcgcgcagctggtcctgcagcgtcaggacccgaacgaccccgaggccccaggggctgggccctccagcagccccgcagcagccccgcagcagccccggcaggcaccctccagcggccgtgggcgcctggtagctatggaggcggtagaggtggaaaccaggcctctgtcttcacacaggaggaactccaggccctcgtttaggactccaggccaaaggctgtgtcagccgcgggtccccc

SEQ ID NO: 335039 - DNA, 114 bp, Homo sapiens
  chr14:103745232-103745346
  hyper
cggacccggcaggcacctggcgggcactgtgcgggcagggaaccagggagagcaggagggcgcgggtccgggccaaggctggcgggggtcgccgcggcgcgaccgcctcctccg

SEQ ID NO: 335040 - DNA, 239 bp, Homo sapiens
  chr14:103745670-103745909
  hyper
cgaggcgaacgcggcgcccgcgttgctggaggtcgtggacgcggcgggcgccgagcacctggtcacgctccaggacctggacatccgccacggcgacggctccgcggtgctcccgggcgtgtgcagcgaggcctcgttccgggccgtgaggccgccgagcaagcgcctgcgccggccgtgggaacccggggccgtcccgcgggtgctggtgggcacccaggccgacccggacgacgggc

SEQ ID NO: 335041 - DNA, 1292 bp, Homo sapiens
  chr14:103988427-103989719
  hyper
cgatgatggggtcgaagagatccttgaacacttcgtaggactcctcgtcgcccgccacgcagcccacggtcatgatgtacgggtggcctgggggagggggcgcgggacggggacagtgacgtcactgccgggcccgagcgcgctgctgaggaccctgcggctgcgcggggggagggggggccgggaccccggccccgaggggtcgcgtacccgggttgtccacgcctgtctggatgacgtcgtccagcgtgaagccgctcggcgtgctcttggcgcgcagctccgcgtacagctcgggggtcagcaccttggccatgtggttgttgtgggcgctcaggtcggggaactcgtcctcggccgggaagcgcagcttcagtgcgttgtggctgttggagaagggcatggcggcggcgggctgcggggagacgcggggtcagaggggaccggcacgccggggttcccgggctcccgcgtaccactcaggcccccgccgccgggccccccggcgccccccgggacgcggccaaggtcagcggggtccgcagcgcgcgcggggagcgccatcatcgccggggacccccggccggtccggcgcgcgctccaggcgacgcgccccctttgcacgcagcgcccctagcccgggcgcggacgcccccggcccccgggcccactcaccgggcggccgggcgggggcgggggcgctccgtccgtcggcagctcccggagcgacgcaggcgaacagcggccgctccgcgctcccgcggctcttaaggggcacaacgcgggccgcccattggcggctatttatagcccattcattccattggcccgcgccgcggggtggtgccgccgctttgtccgccgcccgcagcccccaacaccctggccgcccacccgagctgtcccctcgctgggaccccgcgcagcctgcccagtcccccgcccaagacctcgaggccgaaacctcaggtccttggatatctggatcccctcgcacgcccttgcctctgggcgggaaactgaggcggagagcctccgggcactcgaggacgcttgggttcatccgcatcctcgagcctgcccgcctagtccagccagcccccgcggcggcggcgaggggccgggcgaaagctttcggggcttccgcagcaggtacggcccccgccccacccccggccagtgcgagctggcccggagccgccgaccttcctcaaggtgcccgcaggcgtttcctgggcgatcctggtgcaaagcgaaggcgcgcgggaagcgcagtctggctgcggcccagc

SEQ ID NO: 335042 - DNA, 1282 bp, Homo sapiens
  chr14:104582815-104584097
  hyper
cgtgagggggtagggcgtccctccccccgcgtgggaaatgaggaggcaggtacggggctacccctgtgggctgcggggtgggggttcagggtctgagaagcagaaacctccctccctccagtttcactttctctttacccctccccttccccctcccacgaagttccctttgaagtgagaggggctggggtgggtgtgtccagcccagcccccacacccaccggagagctagcgcggccctgggctcctgtcgggcgctggtcctcacctgttccggccaccctgggcctcgacccggccaaggtggagccccgggccctccgtgcgcccgagcacccccggcccagacgagacggttcgggcgtggcccggcggggacccagaacccgggaggccaggtgcgcccaggccaggcgctggaggctggggcgccggatggggcggggcggccgctgagtcagggccacccccgcgcgggcgcgcggagcaggtccccgggccgtggaggatcagtcgcgggacctatgggcccgggagccgccccgcccggaaaaaccggtcgggccagcgcggcgcgggcacattccggcgccgggaagggcggctgcgccgcataaaaggcgccgccgcgctggccaccgccgctcggagctcagccgccctgccacgcggggcccgcgggacgaggggacgccggggccagcgaggacgcggcggggctgggcttggcggctgggatcccccagcgccaggcgagggcgtctaaggcgtccggtacggcgtcggggccgggtggctgcagcagggcagggggtgcgcgaccagcggggatctgggcgcaggggccggtccccgggatccgcaggcgacgcgggcggtcccaagggcgtcgggggctcctctctccgcagctcggcgaaccgacggtgttggggactcgcgcgctgggtccagtggttcttaacagttcaacagttctgtagcgcaattgtgaaatgtttaggaccactagacccggcgggcgcggcgacagcgacggagcgtcccacgcgcggcctggagtcagagtcacagtcaggggtgcgccggcgaccaatccaggggagcccacggaccggctccgcgctccaggtcggccgccccatgcgccgcgccccgcagtccccagggcctggctggctccacctgctgccagggaagaccctcggccggagagccaagtgctgctgggaggtggccgggcgtggccgggctgtgctgtgggaaccgctgggtgggggcg

SEQ ID NO: 335043 - DNA, 2453 bp, Homo sapiens
  chr14:104603142-104605595
  hyper
cggacccacccggaggctgtggctagggcggagagcgcagcgcagggattctcgggctcaccttgcgccttgctaggatgggcgaagtagggggtcggggcccctgactgatcgtgagcccccgaggtgactccagccttgtgcaccccgtgttctgcggatatgggatgtgagcttgtgcttcccgaagcgccgcggcggtagaagcgctgaagttgcgggtgtggctggccaggggcgcaggaccggtgctcccgaccgctgcgtgcttctgtgttgcgtgtgtgggtggggggacgggatatagagagtgtgtgtcccggagcagtggagcggcgggaggcggtgctgtctgccggcagtgcggggtggggtttgggtgttgtcctcagtacccagatccagatgtgggctgacgcccgttttcattctccaggctgcgaagagacgggtaggggaagcgcttccggccccccaggctgggtggaaagcgactgcaggcttacggatctcagaaagagtggagagcccctgccactttattccatacccccttgcgttttcgaacccctaaggtcatcaacgacccggaaagccgggaggggatcacccaccccactttctggggagtgcgtgcgtgggcggggaggcttatccaagtaaaagggggtgggcaaaacggaaagggtcactttgacgtactgagtctctgcgaaggcctcaccgtatgtgccggcagccgcgtgtcctggtctccgccgggtcacgaccttcggagtttccgagtgcgcctcaggcctgggacgcgcggcgctgtctccccagtctcggagccgtgtgcgcagcggccggcagggggcactcgcgtcacggggagcccgcccgccgcgcccgcctggcttgacccgggctttggggctgacccggagcctggcccggagctgcctgcggccgcggatgccggcgacatttggggcccggctaggcacagagcaactggtcgccagggaagggcgggggggcggcctcccagccggagacaaacaagcaattaattccggagctgagttcccatctgccaggcctgctgacaacaggtccggcgcacgcccgcaggacctcccgcttcccgggcggcacggcgcgcacacccacttgcgggcacacgcgcggctgtaaagacacgtgccgttcgcagacgcgccgaggcacagatacgccggcgcggtcgctgcccggctcgaggcgcacaccgcggcgacactaacccacgcgcgacagttagacctaaagtggcccgcgacacgcagagtacgctgggcttgctggaaaggcgcctgggagtctcggggccggggtcccgccccttcctcggcccacctcgccgtgggccttgggcaagagcgtcccctccgcagcctcagttttcccgcctgtagagggaggggcgtcggcgcctcctgggagacgcgcagccctggtgtcccgggagaggggcgggaggcgcatgcgcgcgcgcaactagatcctcgccgccgcccccagcgcccctccccggggcagggactcacctaacaggttggggtccttggagtgcgcggggccgcgtggggaagcggggaccctaccccccccacgcgccgcccagcactgggcaagggcggggcactctctgggctcccgcccctcgccgcccgccccgggagcccgagccccgcccttccccggccccgccctcgcctcccgagcgcgcccaccggagccaccgcgctcctcgcgacactcgcaggctctgcgaacttccgagcggctgggccgggccatgggggcgcctcggggccggatcacgtagccgcggcgcccccggagagccagcgtggccgggagcgcctgccgggctcttcccgcgccccggccatggtcggccgcggcgtccctctgtgcgctgcgcagcccgcggtacgcgcggcccggcctggagagggaggcgggcggcgggggcccgggacggcgaagatactcgcggtgtgcgctggatccctgggggccgggcctcctgctgagggtagcggacccgcaggcgggacctccggggatggagggagtgggtgagcgccagggtcgtgcccagggctcctaactttggcaagagcgtcacgctggggcagggcgcgcaggggtctggatccgacggacgtcccaggctcactgtccgcttccgcccccacaccctgcaggtggccgagggcggcccggcccgcgagccgccgccgctgctggaggtgtccccccgaaagaggctacccgccgggcccgaccaggacccatgcggcagccgccctgctcccgaaggcgccggggccggcccagagcagggccactcggccggcggaggcggctggtgccgccactgccacacgaagctggtggagctcaagcgacaggcgtggaag

SEQ ID NO: 335044 - DNA, 725 bp, Homo sapiens; identical to SEQ ID NO: 237774
  chr14:105070705-105071430
  hyper

SEQ ID NO: 335045 - DNA, 76 bp, Homo sapiens
  chr14:105155749-105155825
  hyper
cgcgagggggcggccaggttattcacgggagtggggagaccccttaaagcgccctcagggaccggccacagtgggc

SEQ ID NO: 335046 - DNA, 222 bp, Homo sapiens
  chr14:105189936-105190158
  hyper
gctacagccaggcccgagccacagcgcgcccgggcgggacgcggggcccctgccgtggggcagaagtgcgggcagttgcggggacacaaagtcctcggagaggacgcgctgcgcggctcttcgcggccgccagggggcgcgcccgcgcccagggcactcggggttccacggggggcaggtgcgctcctcgagagtgcggaccctctaggtggggtgcaggac

SEQ ID NO: 335047 - DNA, 437 bp, Homo sapiens
  chr14:105196124-105196561
  hyper
cgtcgtggggaggagcgtggcgtcggcgtcgtggggaggagcgtggcgtcggcgtcgtggggaggagcgtggcgtcggcgtcgtggggaggagcgtggcgtcggcatggtggggaggagctgtggggtggcaacccagaggcaaggaggtgggcagaggcccacgaacctggccctgaccctcagctcgtccccagctcacagcacagccctcccctggctgcctccaaggagtctccagttactgagtggccactccgtgccagctcagcccacccctcaccttcccagtgcctgtggaggcccaactagggtgacgctgggagaggagagggcttggaggagccacgggtcaaatgcaggaggccacacctgcctgcccaggaggactgcaggagccggatccttaacacctggaggggagcgggtgggtgcggt

SEQ ID NO: 335048 - DNA, 664 bp, Homo sapiens
  chr14:105293563-105294227
  hyper
gtccagctcaaaaacgccaggcccgcccccgccccgcaggtccgcgggaaggaaggaaaaggcgttggggatgcgtaggaggcagaggccttggtggtcgatccggtgtggagtggggcaggggctgcgaggagggcgcccaggactggtatcagtgaacagtgacggtggggcagggcggtgaccttagcaccagcgcttcggtgggggggaggaagcacctgagccgcggagaaaggcctgcgtgaggtgggcacaggctggcgttgaagccctggggtggactcacgtccaggggagggcggtgcttcacacgtcccaggcactgtcttgtgtggccccaagtgctgtctgaatctctcctgcgtcttgggccccagcaccaacagccgtcgccctggagccaggcagcagccttaagcttccctgggaggctgactggctgggagcagggaggtcccatcggggaagtaggggcgtgcagggggcttggcgcctgcagtcctggaggggcagggcagatgataaggctaagtacctcctgtcctttgctcagccagccactaggaggaggccgcagagaagaagccgccaggggctgggggaggccagggacggggcagggaggaggggctgggctgaatgcaggtgccccaggagctgc

SEQ ID NO: 335049 - DNA, 702 bp, Homo sapiens
  chr14:105309797-105310499
  hyper
cagtggggctccgtcgccgcagcgccccggcggcctcctcctggccgctggccctcccctaaggcttcctcatcctaaacagcaagtgaagccaaacgaaaaccctgtctctcccgccgttccctccctcctggcctccgtcccccgggctcgcctgccccgccgcccggcggaccggtcccttcctgctttccctggcgggtgctttccgctgctctgttacccggagccaggacgcgcatatattcccagaatccgcgctcagtgcgttcggtcccccgggacacctgttctctgcacaggcgcgtctgggcgcagcgggggcagacacgcgttcccgggcagcgactccggaaggcccgagggagtaaatctggccctcccggttcagcacaaagctcccctggccgcctttcaaaaccgaccgcctcccaactctccgcggacacgagtggcggctgcctcccctcccctcccctagggccgcgcacgcctcccgcagggtctcagtgcctcctgggcgggggataattcctgtccccaccggtgtcctgtactcgcggggtcccgggtgtaagttctgggtcccgggctggctccctggtgagcaaagccgcatcgctcgaattccagaaacccttctcgccgagcgcctgcctggctgctgaaagcctggagactgcgctctcggaggtggatttc

SEQ ID NO: 335050 - DNA, 1422 bp, Homo sapiens
  chr14:105330476-105331898
  hyper
cgccatactcaagggcgcctcttgactccctctgaactcgcaatcccgccccagggtccggcacaagggctctgctggggctgagatccgtgaaggcagatgcggagaggcgccgctggattgcgagcaggcccaggtgcggggccaggtgggcgttgtcgcagccgggaacgcccagccgctccagctgcccacaggacaaagcccagggttccccggccgggcgcacgccttccacattctccctcacctccacgccttcgctcactgcgttccccaacacctggaatgcagcaatgcccttcgggcacgctgccccgcccccacgttgatcccgtcccctagcttggctccagggacaccggatacgcctattgtagcacccggcaaggagcgagcagtccgcgggaacttacccaggaaccccgagcgcctccgtagttcccaaccccacccccacccctcggccaggtcaggtccactgtgggcgtccaggtaagacggcgtcgatgcccaccaccatcgcccccagctcagcccagagcgcccggggtcagaggtggagatgtcggacatacgcccagtctggccaggctcgggagggaaaatctgggagcggcctctggaactcaccctgactccttcaccgtccgctcctctttttggcttccggggccaaaggttggggactcgaggcgcggctggagcctacagctcctggagcgtagttaagcgttaacccgctggccctgggccagggcgcggggctgctgtgcgcacccggttccgcccgtcgagctggggccggaccgggaggcgaagcggggggcgctgccgagacgggagggcatggggtctgcgccgggtgcgagatgagccggggaggccagcggggcctgggcggtgggggaaggtgggcctggggcaggggcgggatggcggctcgccaagcctctgccgaccggaccacgcgcggggctaccggggcgggctcacctggcggccgcggacccgccctaacctggtttccggcggggcggcgcggggtgcggcgcggccgggcgggggcggggcgggcgggggcgtgcccggggcggggcgttccgggggcggggctgagcctcccgcagacgtcagggacccgcgcgcgaggccgccggcggccgctctgccgtgggctcggcccgggctgccacgagcgtgcgggcctcgccgggcatgtcctaggcggcggccccgcccagcgctcggccgggcgggcgggcgggcgcgagggcagggaccgagccgggccgagctggggaacaagccggggaccaagccggggaccaagccggggactaaggcgagccggagaccgagcccgaacagcaggtaggacgcgccggcccagcgctggccgcggcccgggcctcccatcgc

SEQ ID NO: 335051 - DNA, 387 bp, Homo sapiens
  chr14:105433911-105434298
  hyper
cgcgggacagtccccagccccaccctcagccaccgcactgggagcggctgttcctacactgcctgtagtggggatggagtgcagaggctcagcgagcggcagacctgcctctggccacagagctgcgcagtggggacccctccagtcactgggctggcaggagcctggcccaggaacacaaacaggaagggggaaatcctgcccgcctcgggataaggctgcgcagccaggctaccggcctcggacccgcgccagtcgggagagagaggaaggcccccagtatcccagtcccccgccaagagcaccgcctcccaggcccgagctcctgaggaagccccgcctcggccgcagagcgcaggggaggccgcctttgcccgcccggcctcc

SEQ ID NO: 335052 - DNA, 583 bp, Homo sapiens
  chr14:105444359-105444942
  hyper
cggccgggaaggcccagaaccacgcgcgagtcccgcaggcgtctccgagtcccccgcccccaaggcccgcactgcgcgcccctggacacgccccggcgcgcgccctcgcgcgtagcccacccgccccaggggagcgggctgcaggcggggaggggcgcaccgctgccgggggttccgggccaggtgggcagcaccatgtggaagcagtcgcacatcgcggcggccaggcggtgcgggcctggcggcccgtcgcgtccagtcgctggtcccggctccggcgcacggggcgggcgggcgggagccgcgctctgccccgctgccctgcgctgccgcgggcggccgacctcggactgcggacaccgcgcgccaggctacccagccgctcagctaggaccccgcccggctccgcccagccctgccgggccactgcggagcgcgctcgcgggcggtgccgtcggcctcattcagcccattggctgccgtcgccgcggccccgcccctcccagccaggccccgccccaccccgcgcccccggcccgcctgtcgcgtccgcagaattaactttggactcccgccagggagc

SEQ ID NO: 335053 - DNA, 492 bp, Homo sapiens
  chr14:105511981-105512473
  hyper
cgcgtattttccacgagtgcctgtgcaggcaggtaaggatttaggaaaggtctggaaggatgtgcaaaatgttccgcctgcgaaggttccgcggtggcggggacactgctccggctccgctcccgcccgcccgagcgctcggatggggccgcctctgcactgcgtggccacaggcgcggcccggctgcccacgggcgccctttgcagctgctgccccctggcggccgcgggcggctactagcgggaaagcgaaacccgcccggtccattcaagccccgctgcctggcgccctctagggtcgttcttgggaacgggcggacctttcgtcaacactttgcctgcaagatcccccattgggggaaccgaggaggaagttaaaggaagatgtgtgtttttgagcgctgctttgtgccaggctcatcttaggtgtgggacgtgtactatctgaattaataccccaccaggcctgtgggacagtcactgtcaccattc

SEQ ID NO: 335054 - DNA, 1083 bp, Homo sapiens
  chr14:105714491-105715574
  hyper
cgcgctctctgcaagcgctggctgctggcgtccgtagcaagctaaatcgcgaagcatctgaacgaacgaggaagcccaacgaccatcccacaggccgcggccagaggcagactccggaatgcaaatggccaaacaagcaggtccacctgcgttcctaaccaaaagatcgctaactgaagaacgggcgcaagcacctgcgcatggcactgcgggtctgggggcggccgcctgccagcgccgggagccgccttccacggctacctctgcacagcgcgcggctcgcgccggttgctgggcagaagctcgagcagcttcgaggatgtcgggcctgggggcggggccgcgaggcagcgacgtcgcgcggggcgcggccctgacgcagcgtgacgcaccggcgccgcggcgggtacgggctcgggcgggcgggcgggcgggacggcgccccccgcggccgggcctggccgggctgcgctaggctgggctcgggcagggtcgcaggggcgggggtggcaggggagcgggtggcagccccgcgggtcacagcgccgccgccgcccatgctgctgcccctagcctgcctgcacggccgcgtcgctcagtgcctgacctccttgcttttgcttgcagagccgctcccgaggccccggcgcggcgcgagggcgcggggcgcggcgtccacaggcgccgaggctgcccccgccgccccgcccgcgaagatggcggcggaactctacgctcccgccagcgccgcggccgcggacctagccaacagcaacgccggcgccgccgtgggcaggaaggccgggccgcgcagcccgcccagcgcccccgcgccagcgccgccgccgcccgcgcccgcgccgcccacactcggcaacaaccaccaggagagccccggctggcggtgctgccgccccacgctgcgcgagaggtgagcccgtgccccgcggcccccgcgcccgcgcgcgcccacgcccccagcccgtgcctctacctttgcaggaacgcgctcatgttcaacaacgagctcatggccgacgtgcacttcgtcgtggggcccccgggggcgaccaggacggtgcc

SEQ ID NO: 335055 - DNA, 578 bp, Homo sapiens
  chr15:26095523-26096101
  hyper
cgtggatgcgttttgtacggggaacaaaactgatttccaacttggcaaaaagcaacaggagaggccccggctgtgtctggtaccgcctcagccgagccctgaagggaaaggcccagaaaaagggatgtggccacaccctgggggccagcccacaggcgaggcgagtccccaggcgccattctacgcggccagttttggagaactggaactgtgtagagcgtccggcggcagcggacccagcgctgctccattctccctccctccctccccccccagccccggtgactcactccgcggcccgggcagggcgagaccacgcccaccaccccccaagacctggccgcgctcacctcccctcctgcacagagcacctaagggcccaaagatcacatctgaacaaaggatggaacttggaacttacatttacctttcctgcccctgactttttaaactgttattagaagtatacaaaaacaaaaggcaggacataaaagtagtgaaatgctttaaactctacaaatgactcagttcaaatgtgcggtgacagcctgggtttcctgccatttcgttaacccctc

SEQ ID NO: 335056 - DNA, 1357 bp, Homo sapiens
  chr15:26107460-26108817
  hyper
cctttcacttcaggtgggagcggctgtggatgaggatgtccagcggccgtcggtttctagccttgggatcattctggccccgacacggagtgacaggggatccccacgcgtccccgcatccagggcgcccctttagctgcggcggaggcacagagaggccttggcggcgctgtggcttcggtcggcaccgggtcccgcgcagccgggccctccaccctgagtggagctgccttctaagcacccagcccctgccaatcactgtgcccaacaccaagttcccggggcgccctgccctgcgccaccgcgcgctcgctcgcccgcccgcccaactcacctgctgaagaccaggcagcccaggtggttgatcttgtggtcggagcggtggcggctgtagtcctcccacaggtccctgaaggccgtgatggccaggatgaagagcaccggcgccagtgccaggccgggctggaaggcgttcaccgccggcacgaagttgagcagcgcgatgaagacaaagtacacgttggccgggcggtggaactgctcgaacaggttcttgggcaggaaggacagcagcgtgtacttggtagtcttgagccggttgtcggccaggtgctgggcacacccgcgccgccgtcgccgctcgcccttggccgcgccagccgcagggtcctcggcgcccgggggcggcagcaggttggagcgcaccgtgcgcgtcctgccctctcggcgcctccgccgtcccggaggcccgggctcctcggtccccgccggctcccgctccatggccgcgtgtcgccgcgcccggctcctccgccgctcacgcccgcccgcgccggcctcttaggttatcatcactcgcggcccgggcgcggcggtgcgagctccccgcctgcgggacgcacggagaccgcggtcagcgcgccgcctggccggcccagcgcgcccagcccgcgcccagccccgtccactcccgtccagccccgccgcccggccgcagtccccagggcgcaagctgggcgggtgccgcacagagcccccttgtcctcgccgcccgcccccggcccgggtcgtttccgccgcggtggccacggccccgccctcgttccgcgcccggactgggccacgccggatagcgggaaacaaaaaaagcccgagctggaaacttcagagaggtttagtttcgtttcccagaagcatcagttcggtcccaaaacgctgcaaacgcgcgctgcctgcagtaggagagaggaaaccgcgaagcgcgagaaaaggcgcccccgtccccaagcagcccgcgcgcccttccaggggccagacctgctccatcctggacggcgaaacgacctcgggagacccc

SEQ ID NO: 335057 - DNA, 409 bp, Homo sapiens
  chr15:26178877-26179286
  hyper
cgccccctgccccatctcaggccctagccctctgccaggagcgtctcctgaggctgaaagtgccccctcccgctctcagactctgcgctgccatctgccttgcttctctcggtaccacttcccctgctctcttttgaatcggattctctccttcaaactccagctgatccagcccgcacatgccaggcccgtatgtagattcgtctgttgccaccgtcctccaagccctagggaggggttgagctccgtggaaggcctctgatgggagggacacgactcggaggctgagcagcacaggacaccgtggtaaactgggattcttctttgcctttctcagggaggcaaaaggtgcagaggcctgcagtgtgctgtgagcgacagtgccagctagtggcgcacgacttacatc

SEQ ID NO: 335058 - DNA, 846 bp, Homo sapiens
  chr15:28339737-28340583
  hyper
cggtggaaccttccagtcctcacactcaaccccaaatcgttcgtgtgggctactgccggccctctctccggctctgcgctctttctgcctgcaaccgtgcccccgaactcgggccctgcgaggtgggggtgggcccgggcccctcctgccgcccctgctgccagcaccgttctctccgaggccctcaacgccccgccgtgccgtggccttcagagcgcgccagacgctcaccaagcctgcccgagccccgcctcccgcagccgtgcccagggcggagtggggcgacggcaccggtgccaggaccgacagaggccagggcgcggcgccgggcgtggtcctgacacctgccctgccgggaaggggacggcgttccacgcctgggcccttctccactgcgtacaggagcctgggtcacctgctcggcccaagaaaaggctccaggcctgcgggtgtgaatgagcagcagccaagagagcggtgctgccggcgctcaagctaggccgggtcaccgcctcctgcccaggtccaggcagccccggcctttcccgctggtactggcacgcccgtggccgcacggctgagtgctccgggcatggtgggtctgcgggactcggagcagagctcgagctggcggatccccggttggcgcccggcgggagggcaggagtggcccagccaggccgccctgcgcactccccgcccgggtgcgcccgggggaccgcggccctcccaccccgcccctgtgaaacgacagccggcagcaggcgccgcacgccgacttcacagtggcggcgatcaacagcgtgtggaaaacagcttcttcgtaaatcttaagaacattgtggc

SEQ ID NO: 335059 - DNA, 940 bp, Homo sapiens
  chr15:28341522-28342462
  hyper
cgtagccgtgtctcgggagcctggcggtgtccgcaggagcgatgctgtgaccgttgcatttgaagcattccttctagttcccggatcccagggagggggcaggagaagccctgcggccaagaaggcctgaagaagcccgtccaggggtcagcctcctcctcagccggtcctgggctgagacaggggtgtcccgctgagggcagtgtagggtgcggtgcccccaccccacttcgggcctggaccgagaccgcgagtgtgaccgtatatcccttcaggtggatttttcaacatgtgaacttggttaaaagcttctagaacgttaagccaaacatcgtggctttccatccgttttctgttcttgtttgaaagagtacgcctccttccagcctgggaggaggggcggggcccgggagagggcctcgggaggccgcgggtgggctctgccgagggccgcgttcgcagggccccccgggactggcggccccgcggcaggccaggcgcacctctcggggagaaacgagcagcgccagcaaacgcgcagccgggcacgcggccgcccagccccgctcccagcccggggccaggacccctccccgcggcgccgctgccgcaagcctcctctgctaccccagctgcgggcagtttggcccggcgctgtgccgctgtagttcggtgtcccttcgcccatcctgcaggccagcttggaaactgtgtcccatgctcctcgaaacaccggacctgctccccgccgccctgcggaatgcgcctcctggcgcctcagtgggtggccgggccgagagcacaggcgcgccagccacacctccccacgggtcggacccacacggaccccgccgcgctccgccgaaactgcgcgggtcccgcgggtggccggcgcaagagccacagcccgcgacaagccggctgcctgcaggtcagtgac

SEQ ID NO: 335060 - DNA, 1370 bp, Homo sapiens
  chr15:28351681-28353051
  hyper
cgttgtccccaagggtctctccaccctccgggccccggcctccggccccgcctggcatgaggagcggggagcgcacagcagggtgggggcaccgggcgcacgcggggaatttccccacgaccacggccacgccaaatgcctgaacctccacggctgccggcaacagcgagcgcagggagggggctgtgcgcgcgggggccctggtggcggagcaggcatcaccccgagagcgccgaggtttgtggtcgcaaccccgggagcaccgctgcgggaggagcggcgtggccgggcagaggcgacttcctcgcaggcagtaccgggccccgcggccgcctccgggcctgtcctggtgccccgggcttccacccggcgggctggcgtgcgggggctggtcttcgccgagatcctgctgggagcgggctctggccccacggtgagcccggccccagcctcggtgatgcgcttcgctgccgcgcggggagggagagtccggcagggtcacgaggcgccggccccggggccgcttgaaacccgaagagaccccgctcgctcgcgcgcccgccggacgaatcctcgcggaggtcccggggcgcagccggcgtgagggtggggtctcatcgcaggggcgccgggagcctccccgctccgctagctcaaccaaggaccgctcagaggggctctcaccctgaacctcggcttttctaaaggaagggcagaccccagatttcccccttctcttctcgaacgtgctttgggtgtttttctgctttcttttttggcaagtcaggacagcgcacagtgcacggagctccgaagctctctcagctactcccggatttctggttaaacctgagggtgagcccgaaagaccgctgccgccggcggccaccccagcgcgggtccgctgagaatggaaacagcaagtgcgcgccggccaggccgccacctctccctcctccaacagcccgggcagccgcaggggccagccccgggccagccagggcccagcacaaaatgccttccagcgacagcagcgccggaagccccttctgaggtcgtggataagcctccgcgcaggggccccgcgctcagcccaccccgcatgcctccgcgccagggcctgctggtgggtggccgcctgccccgggctatcccgggctgggcactggcgccgatcccgcctcgcttgtggagctgcatttggggggaaagatggaccggcagcgtgggacgcagagccaggccaggccgcacgggctgtgcacaaagatatgcccgacaggcggggagaaggcatggcccaccggctcaggagaaagtcctggaggggaggcagtccgcccctggggacaacgcggggggccgtattc

SEQ ID NO: 335061 - DNA, 1185 bp, Homo sapiens
  chr15:29130656-29131841
  hyper
gaggccgcgatccccgagagttcttcgctcgagggttcttcgctctagggtcccccattacagctgcgcggggccgagcaagcagggcgcggcggccggggcaaggtgcggagcctcgcgttcaccggctctacctgcggagcctcgcgttcactggctctacctgcgggaccagacccctgcagctccccagccagcacggccggggcacgcccgggaatctgtgtgctccccagggcccggggcgttcggggcgccgcgccttccagcgcctgggtcccagccccgatcccggagaccggcccggggggacccggggtcccgagtgcaccctcctgccctgcagactgtcccagcgccggggccagggggcgcaggacctcgcgcacgcccggcacggacgcatctttgtcttccctctcttcacggcgcgcgatctagccgggaatcgttttccggccccagtgtgcccggcgcgggtgaggcggaagcggccggggcgggggcgcaggcccggcagccgcaggccggtgcgggatgcgccccgcagccgcgccgcgtgcgcccggcagaggcggccctgcgtgccgtacgctgcgtccggggcgcgcccgccgctattcgggaagctattcagcttcccgggctcattagcagtcgcggtgtgcggctcggcgcgggctcacaaagagctcggcctcgcggactgagccggcggcagcggggcggggacggcggcgtacccgggcagcccagcgccctggccaggtaagctggggaacctgggctgcctgacttgccggcggcggcagcctggggccgcccggggcgccgcgaggacccggacgcgtggggggcggcgcggaggttgcggcccgagcgctccagagcgctgccctcccgactcagcgtggctgcggggcggccgccgctgggatatgggggtacagcccggcggccccactcctctctgaccggccgcttccccctcccacgacgggtgggcgggcggggcggggaccaggcggcggctctcgcatcccgcgcggggggcaccgcggcaaggggccacccggcgcggacaagaggcgctgtgtggcggggctgtccgctcgactcctgccgggctggccgggctgcttggcaccggcatcaagtccccgtgccgggcggcaactactgagt

SEQ ID NO: 335062 - DNA, 145 bp, Homo sapiens
  chr15:29432142-29432287
  hyper
cgcttcccaggctgccgtgcctgggctgccggcaggctctgcctgtagggggtgccagagggcacctggccggcctgcggggcgaggagggagctgcgggtttcctgcgccttcccacctcctcccttctgttccccggctttgc

SEQ ID NO: 335063 - DNA, 1176 bp, Homo sapiens
  chr15:29561185-29562361
  hyper
cggtgtggggtatccgccggtattccaggtaacgctgtcgcacaaagtcctcagtaatgagtttctttggatctccgaaaattaaatgcttcttggtggggtagacccctaagcgccgcagaaagtcccaggcttcagtttccttgatggtgttgcccttcataaagatgagccctaagacgatcatcaggaggcccgtagtgggcgtgccttggtcacccctcatctcggcatcctcctccacaggctccagggtgttgatgaggatgtaagtgttgctcttgggttcaagttccaccagcttatacccgaagacgtactggaggcgctcggcggcccgtttgaagaggtcggggaagatgtccttgtagtccccgatgacgtgcttcagtatgtcggcccgcttgatcggaatcttcttctggtctttaatcagcaagaactgcaccagctcggacactttcagctccagctgcttctggctcctgggccccacggcgggggcggcctgggcccggcgggcgccctgaggcgaggggccctgcgacccctgcgagccgcccggcccgcgggacgtgctcggggcctcctcggcaaagccgtctctgagaacccgggcgtcttccccggcccgcgaagccccggggtttccgctatggctccagtctctgtccctctcggcctggccgccagagcggccccggttcctcggtttttgcaacatgtctccggcggcaggtgccggcgcacactccggtaggcaagcagccgcggcggggattgcgggtcggcgacccgctaacgccggtgcctggaggcgcgcgcagtgtcggctgagactgcgtgctgcgtcatgaagcctgcgccttgcgtcagggcggctgggcggtgcgcctgcgcggctgcggcgggtaccaaaaggaacagcgttttccgtgcagccctgcaggtccgggcgatgatttttagtatagtgaagtgttgttaccaaaccatgcaaacagagagcgagaaccgaaactcctaaacaagtgtgtcgctaaattcagaccacacaggctcaggcaagttttacagacagtattatgagtttctaaatcgggagcatttgtaaacggaaagaattcagaggatgaacgtgtgagaaaaaaaaaaggtgaagaggaagggccgacc

SEQ ID NO: 335064 - DNA, 1307 bp, Homo sapiens
  chr15:29861982-29863289
  hyper
gtggttaagagtctgaaaatcggtcatccttaaggtctggagctcagaaagcacgccgcccccccttgcctgccccctgccccaggacgccggatgcgggtcgcctgcccagtcccgtcgcccacaaaccacgccgttctgggcggacgcgggaaaccagaagtccccgaagccaagtcagcgagcgaccacaggggccgcccggccgatccccgatatccgggctgacccaaaacccgacgggaggcgcccctcccccgcccccccaccccaccccccacccccaccgcccccggtcagggccgccgcgagggtgagaggcgcgcccacatgctgctccgctccgggttcggctcccacctcctcgcctcggccgcggccgctcggatggcgaggtcgtgtccccggcgcgcgcggtccccggcgctccctccggccgctgcgggctcggaggacggcgggcgcctggctgctgtttcctccaagaaaagtaactccgggaatcagcgcaataggagcgggaacgcgatgctccgagagcggcgagccgggccctggagttattctgctcggagtttcgaactgcgccccgcgctgcagctactcggccccggcgttggccgccggaacttgccgcccgcggtggcgtcccggcggccgcagcgcctagcccccccggcccgcgcagtccccggagcccgtccccgcctggtcgcggacactcaccgagaagcctgcccagaaggggcaggagtggcggacgcgggccgaggtggtgagcgccagcgcggcgaagctgactgccacgatgaggcatccgagcgccatctgcgtggccccgagcgccagcacgatgcgggagcggcccgggcactcgcgcaggcgggacaggctgcggggcagcgcggcgggacgcggcgctcgggggccgccggccggaggcatcgcgccgggcgcccgcacgcctcgcccgctcccgcccggcccggcgcgcgccgccgcctctcctcacagagggtccgaggcaagttgcgccgggtgcagggacggcctcccagccggctgccagggctgcggcggccgcgcgccgggagcgggccgggccgggcggggagccgggcgcccgcagcccccgccggtgcccgcgcccatgccgccgccgccgcgccgcccgcccgccggccgcgccgcgctgcgccctcccccgcccgccccgcgcgctccccggcccgagcgcgggcgcgagccgccgccgctgctgccgtaccgggcgcgagccgctgccgtccccgggcgcgagccccgcc

SEQ ID NO: 335065 - DNA, 1677 bp, Homo sapiens
  chr15:30113537-30115214
  hyper
cgtaggaatactttgtattacttgtgaaagtttaattcaagttaaattattaaatgttaaagaggttattttcaaagttaccttaaataagtaatacagcatgaaagaaaacccgacctactacgcctcacaggctgagtggagtgttttgcagtctcaaagccttatcgctggcgtgcgcataccgcagggagtgacatcagatcgaaactacagggtttcgccggggaccaaccactcctccaaagacagcagctcccggccagcaggaggtggcaccccaagccccgacccgctgagagccggcttccagcccccgaaccctcactggagccgagtttctccgcgagggacctgttgcgtgtccccgccctcagcgagccgcagccaggcacaggcgccggcagctatgcacctgcccagtacggcggccgggcgcccgcagccccctccccggccgcccccagtgcggcccgcgccgcccccgcccgaggggctccccgcggcccgcggcccgcggcccgcggccccgcgccagccctgcccaccccgccgccccggggcccagacagccgccagcgagggagggcgggacgcgggccagatgccggtgggcgggcggcgacggtcggcccggtctggccctggcggccgcggaggcgctcaccttggcggccgcagctctggcggacatcttgtctctctccagcgccgcgcgaggctcctcggacccgaaactccgcggcgctggcccgcccgctcctcacgccacagcccaaataaacatctcccgagagcgagcggggcacgggcgggggcggccggaagggcccggcccagggggagggaattcaactcggacaaaagtccgggaagcgcccgccccgcccgggtcttctccacggggcgcgcccgaccggcacctccctccgagcgcggccacccactcggcctcccgcagctttcgcagcccggccacgtcggcctcgcccggtcgcccgcccgtcagcagcacccgtggcctcccggcgtctcctcggaagccggcttcgccacgtaacttcccgggaaccggcggccgccaaggaacgcggcgtccgctggctcagccggcgccggcaactcagcggccacgcaaacctgccggcccggcccactgagcatgcccggcccggcgggggcggggctggacgaggcgaggcgaggcgaggcggggagggggcggggccgcggcgggggagggggcgggacgagcggccggggtcccgaccccaagcgcggaaggaaaagccgggtaacccaagtaacttggaagacagtttccgctgccgtgcgagtcttcctgtttgtttttatccaaggtctggcagaattcgcccccaaggagaaagcgcctgtgcaccaaagctttccttaagagacttgtccacttgctcctcgacaagccacgcacatcatggggtgagccccatgcatgagtgcggctggaaaggccggcagagccgatacccgacagttgtttccttcactgggcaaacagcatggtcacggctgtcaccgcgtgcctcggcgttgttcccacggaaggcggaatgcattttctgcaaggcgcgtcatggctttcatctccgaggagctccggcagggtcagaagcgttgctctcgttcaccggcgcc

SEQ ID NO: 335066 - DNA, 318 bp, Homo sapiens
  chr15:31620729-31621047
  hyper
aaggaatgccctggccgctgcccatcctccgtgctgccctctcgcctgcccacctctcacctgccctgggccggtgcggggcgggcggcacctgcaccagggcgggcgctgagcctccagcctggggatcaccgcccgcccccgccagcccagcggcaacagttcccacgcgcggcccgatactttgtagttgattcatctgtggcggttccctcccccctttttgtttcgtttttaacataaagatgaaaatattttaatggacggcaatccttccccattttggtgtaaagaattgtatgcttcctctgagctcac

SEQ ID NO: 335067 - DNA, 338 bp, Homo sapiens
  chr15:31621317-31621655
  hyper
cgctccaaaccacgtggcaggtgatggggtagagggtgagagcggggccatttctaggcattcggggtcagttaagggtgtgggggctcaggttgggggtgggagtcagtgtgggctcagagttcagctcgggacgcggctgcagggtgggtgtggccctgggggaggggccaggctaggctcagctcggctccaggtggatcctgagtatcgggtgggggcagcgattggggcgtggctggggttgagatccgctttgggggatgatgcccgtgctgggcaggatacttaatgtttgggaaatttttctacggcctctgtcagggtggcctgccact

SEQ ID NO: 335068 - DNA, 503 bp, Homo sapiens
  chr15:31774610-31775113
  hyper
caggggcccgccagcgacagtccactgtggaagtgccttcaaaggagaaatgtgagcagcctgtcctatctgctcctctatgagcaaatccaaattgtgagatgggaaccctgctttttggaccctaggtgtctttggaaagctcctgtcacctgaactgcccggcactgggagccatcgctgtacctcacggcgcccgcgagacgggtggtccagtgccctttccacggccgcccgcggcttggatggcagtgtgaatggtgcttgagccggggctgggggaggaggttttgcttatgaaatggagctgtgtgtttctaaagggccacagtgaccaccagggcgtcagctggcggccaggtacccgccttctcctaggcctcgggatgggaggcaggtagagctcacagaggagcctccaccgcagccccgggtgcgcgctcgctctaagccctgggtactaccaaccgcgcacaagggaccgctacctggaagaggtcatc

SEQ ID NO: 335069 - DNA, 1068 bp, Homo sapiens
  chr15:32162216-32163284
  hyper
cgcagtcacagctccggtgcccggcgagcggcctcgcgcgcggctcggggccgggccctgcccggccgtctgcaagagccgcgggacccccgacgcgcgcgcacggaccgaggggtcggtcgccccacgcctggcatcacgttccagtgcggacagccaaagggctgagcggaggcagcagccccgacccagcggtagcgccgcgccctgcccgagagaggcgcgccacgccgggccggagccggtggcccgggagcccgcggggtccggagcggagcccgcaatgcagacgcgccggcgagcccagccggggcccgcgccccccgcgtccccgcgccccggccccgcggtcgcccggcctcaacgcccacctgcctcgccacggagctcgggaaggagacggcgccggccccgcgcccggagagcgcacctgcctggtccgcgggcccggccccgccgcccgccggcagcaccgcggccagcgccgtcttacctgccgcgccgcgccgctccgctccgccagcccgcagcgccgcagtcgccgctacccgacttccattttctctcgctttaaaggaaaaccagatcagctgttttgctcccgctcgggctccgcggccccctccccagctgccgctcgcggtcccggtggcctctcctcccccgcctcctcccgcgctccgctccgcccctcgcgcccctccgctccgcccgcggccgcgcacaacgcccgcctcccggctccgcctgctgcctccgggcgcgcgccctcctctgacgtcaccggtcgcgttcgcgccccgcccccgccccgcgcggacgtgcgcgcgccgcgcctgtgccccgcccccgcccctccggggccgggcacggagagcgcgtgctcgcggccgcgagccgaggaggggacgtacagcgcccgcgcgcccgcgagcccgctccggctctcccatgcttgcccctcggggtgctccttctgcgctctccgcctggactgcaggaaaaggctgcttaaacagcctgccttttcctgctgcctgactcgcgccatctgcggccacctgtctc

SEQ ID NO: 335070 - DNA, 283 bp, Homo sapiens
  chr15:32322645-32322928
  hyper
aggcgcgcgggggcgggcggggcgggggcgcgcgcccggctccttaaaggcgcgcgagccgagcggcgaggtgcctctgtggccgcaggcgcaggcccgggcgacagccgagacgtggagcgcgccggctcgctgcagctccgggactcaacatgcgctgctcgccgggaggcgtctggctggcgctggccgcgtcgctcctgcacggtaaagccactgcctccccgccctccactcctccgtgggatcccgggcacatcccgggcgcctctgtgcgccccgc

SEQ ID NO: 335071 - DNA, 2055 bp, Homo sapiens
  chr15:33009640-33011695
  hyper
ggggtcagcgccctcgaagttgggggcctcgggcggggccgccggggagccacgacggccgctcgaccagagcatcccgcagtcccgttccctccagaggggaagaatggccgaatctggcacgatcccacggagatctcgctcttcccagcgcagtctccgctactgagcgcgggaccaacgcaggcgatgccgggcggccgacagggaaagcccagacctggggcagagaaggaatgaggggccgccagccggggggatttcctcccgctcttccctctccaacgggagcggaaaatgtgatttgctgtgcattccaggcgcggttccctggggtgacctctcccagccggcccgggcggggggagcagacaaagaggcgaggcgggcggagaggggaccccgcggggaagcaggaggggtgcggggggcgggggcagtaccgggaaagggggcggatagcgggtctggcggcggcggcggcgcctggccaatggagaggcgcggccccgggcgccgcgctctgccgccggcatttaaacgggagacggcgcgatgcctggcactcggtgcgccttccgcggaccgggcgacccagtgcacggccgccgcgtcactctcggtcccgctgaccccgcgccgagccccggcggctctggccgcggccgcactcagcgccacgcgtcgaaagcgcaggccccgaggacccgccgcactgacaggtgagcgcggacgcacccggcagggatgtgagtgggcggagggaagagggccgcaaaccaacccaggacccgctcagttccacgcgcggcagccctccgtgcgcgcaggctcgggtgcgttgttcgcgggggtgaattgtgaagaaccatcgcggggtccttcctgctgaggccgcggacaccgtgacctcgctgctctgggtctgcagggaaacgtaggaaaaaaagttgtcaggagcgggcaggatgacccccacatcccgtttccacctcccggaggcccccgaacacgctcctggtgctggtggcagcagcgcctggcagacgcgcccgcttagcgagggcgcgaagtccaggccgccagagcgcaggagcatccggacctgctagtcggccgctgactgcgcggcgagttgccttgagagggtcccatgtgcttggggcgccgcgctgggtctgggggcgtcttggggcgcccattggagtccgcgggttggagcatccggagaatccatgatgtgtgcatttgccgatccccgaggtgagatggagactggcaagggcagagccgctgtgttcagccacagcggaaaaccgaacggtgggtaatccgacagctgcggtgcggggcgcggccctggccgcggggtccagcgaacccgcagtgctcacaaggcagacaccacacgcgctcgcggaccggccacgcactcgcgggcgctcgcttctctactccagcctcttccccgccccgcgcacgcccgggctgaatggtagacgttctggcgccgggcagcggccaccggctggttcccacttccgcgcgcaccccttaaactgtgttctagaggccccagcctcgccttgcagcgcctcactagctcctgaggactagggactggcggctgaggcgggttggcggctgcaacgagctgggcgtctttcgttctctctcgctgcctggctggctccgctggcccctccacagcttgcggagcaaggccatagcaggggagtgggaggtatattggggctgtcacctccttgctggccggagttatttgtagactacagactccggaagaacagacgcgccaccgctctcgcttggcattgccttcggatcgcagctcctccttgggggtgccccagcttggcgtttatttgcctgcgccaggctctggcgacggtcaccgggccaggcggggagggacggacggcaggtgaccagcctctgctgtgaagaaattcctgcgcgcccggagctgtccctaatgcattcccgggtcgaatccgtctactgccttcccctcctcgaccgactccgaatctc

SEQ ID NO: 335072 - DNA, 871 bp, Homo sapiens
  chr15:34728787-34729658
  hyper
cgcgggcgttccccgcaccctccctccgcgtcggcccggagaaaaggaagttcgcccctagcctgggcttaccaaggcccgccgcccgacccatggagccctgcttggggaccgggggcctcgatgttctccttcaccatctgcggccagatctccctccagcagccttgccaggcagtgcctggcgtggagaaggggccctgcagaggcgcaggtccgcaccgtgcccccaacccggcgcctgcagcccaggggcaacaaggtgtggggtttttgagtttttccctctgggccttattatacagggaaagggaaggggcgaagatccgggctcgagttctcccagggaagtgaacccagaggcgatcccaaactcagtagttgccgcccggcacggggacttgatgccggcgccaagccgggcagcggaacgcaccagcggcccgaccagcccggcgagacgcgagcgggcggccccgccagacagcgccacttgccggcgccgagagtggcccctcgccgcggtgagcccctcccgggatgcgaaagccatcgcctagtccccgccgcacccgcccgcccatcgtgggaggaggatgggccggtccgagaggcgtaaggccgccgggctgcacccctagatcccagcggcggcctccccgcagccccgccgagtccggggggcagcgctcgggagctcttggcccgcagcttacgcgccgccccccacgcgtccgggtccccgcggcgccgcgggcggcccaaggctgccgccgccagcgagtcaggcagccgaggttccccagcttacctggccagggcgcggggctgccccggtccgccgccgtcctcgccgcgccgccgtcctcgc

SEQ ID NO: 335073 - DNA, 214 bp, Homo sapiens
  chr15:34729901-34730115
  hyper
cgccgtcctcgccgcgccgctgccgggtctctcccgggggctgagctcccgcagagctcgcgcctagccgcacacctcgactgctgattagcccgacagctgaatagcggcgggagcctaccgcgagcggagtacggaaagcccgcagggccgcgccacatggcgcacgcgcactgagctgcatacctaggtgacaaacgtgcacgttttgcac

SEQ ID NO: 335074 - DNA, 752 bp, Homo sapiens
  chr15:34806433-34807185
  hyper
cgtgagccactgcgcccagccaaaataccgaaaatcttaaaggtctttccccttccccgcctgggctcaaaaaacgccggagccgccctgcaccgccctgtcgcggtctccggagcaggctggccgactgagggcgaccatgggtcccaagaaggctccggcagtcgcgggctcccacctcggggcgcggcgacgggggcctagaggggccaacagcccccaagcttacgccacgcgaggagtcggagagacgcgccctcccctctcctcccacccaagcctccggcagtcccgggccggggctgggccagttgcgggagaaaggggcggggaactggggcctctctggggaaggctcccctttgtcctgggactccgggcgccccctctctgccctcgccctgccccgcgaggccgccgccgggcgcctcacagtcatgttgcagtggagcgtgagcgggggctgcggctcctggttcttgtggaagatagtcccagaaacttccctttggccttgaaccctgacacggacatcttccactcatctacggcgggaggggcgcggaaggggagcctgtccggagccgctgtcacggccgcgactacccagcggggccgcccagccgagctttcgcgactctgcctctgcctgccgcctggacccttgtgggagcgcggctggaaaatggcaagggcacggaggccttggcgggagctgtgtggcggcctggggggctgctccctttgtaacc

SEQ ID NO: 335075 - DNA, 335 bp, Homo sapiens
  chr15:35014062-35014397
  hyper
cgcgcaactggagagggcccttctgcaggagagaagagggaatgtgctgaatgagttaaagtgccctttgtccaccccccccccccgccccagcactcggcgggcgcaggctgagctggtgacccgggcaggaccggagccaaaggattaatccatcacaatgagacgttctattctgggcaggcggcgcgagcagatgctgggcgccggcggaggcagcgtgcagggctggcgctcacgcaggccgccagcaccctgcgctccaccccaccctgctccctaatgagaagagaggagctgaacccagacagccgctccctgttgacgccttaggc

SEQ ID NO: 335076 - DNA, 875 bp, Homo sapiens
  chr15:35046519-35047394
  hyper
cggactggggattggagcgggagactcagtccaggtgtgagaagggactcccgggggccgcccgacggggccccctgaccgccggcttggcgcccttacctcccgatcatagtggagtgctgctgcaccgcggcttctagcagcctctccaagatggtccattcccccatcgctgtgcatccggaggcagcagacaaagactgggcagcaccgggcacgttcccgctcctggcccctccccgggccgcacttccagaatgggagtgaattgcctcccaattaaagaagcaattttttaaaaaatcctcgaatccccctttccttttattgtacttaaaagagaagaaatggggaaagaaatccaagcgcgtcccgaccgatggggcagttggcgcggtctagagagagggcacgaacctcgggcgccgtccggggttcgggtctggatcccgcggacgccgggacgaggggcggggcggggtggcagcctgcaggtcctccagcgctcgcccgcccaggagaagtctcagcgccgctctccgccgcaggttgggggccaggggagggtccgaacaccggctctgttcctgctacttcagcgggcacctggcgctccggcgcggcagcctgcgaggccagggccgagcgcgcggagccgaatgctgggctcggggatccgcggccgccgcctctaatccgcccttaagtagtctccgcctgcgtcacgccaggtcggcggaggggagcagagcgcgccgtgcggctgtcgctgcgcgtcggagcccgaggggccggggacgcgcgcggggggagaggggcaagagtcctggaggcccggcggggagcggggcgatttcgaaaggaaggactgcagc

SEQ ID NO: 335077 - DNA, 592 bp, Homo sapiens
  chr15:37174944-37175536
  hyper
cgttccgcggtgtagattgacactcgttatgtgggggtctggttgcggttggaagacttatccgagtcagggctgcattgccagcgcctttcccaagagtggaggttggcggtgcaggcggtgcggctgccagcctgagattgttccggctctcgttacctgtgcgccctcgcgttacatggtgctcataaatcccgcggcagattaactgggaaaccaagaaaatgcctctatgcaccgaaccgttgaaaaagaaccaaaattctctcaaatagtagcagtctcacaccttgcattggacgtgaaacactatagtaagatcaaatgtcaaagacatcggttattttggtgcacttcagctaccttttccgtttccagcaaaattgagaagtacgaccccaaaaagaatagacacacccatggaaaagacgtgtgtgtgtgtgtgtgtgtgtgtgtgtgtgtgtgtgtgtgtgtagctatggtgacaacttttaaacactttttctgcttaaaaaaaaagattcggacagggtctggtattgctttgcgttgcaggaaagggtcattctggacaaggaaccgtctgaattcc

SEQ ID NO: 335078 - DNA, 612 bp, Homo sapiens
  chr15:37180043-37180655
  hyper
cgacaccccccttcctgcgttccccccagttatttactgggtgaccccgtcctttctcttcacctcctcacccagcgcctcggattatgagataatggattttgcgattgttcttgtcagggaaaaaaatctccacagaaccccacgttttcatctttcaactgttttatttaagccaatgggaaggtattgagggcagtaattgattcataatgatccataaatcgatgtcggaaagcggggggagagggtggaggtgtactaagagtatgggggggtggcgatgctgtttatttctaaagcttcaactaaagtagctttgacactgttggggctggggggggaggagctgttgggctctgccggatcatccatcattcctgtcacccagagtctgcccggaggagccgtagacgcaatctcccttctgtctctacaccgaaactattaatattaaaacctcccttcaaacactgccccgacggtctccattctcatcacaatctgaccggcctcccccatcagaccagcatttcccccgcgcggcactttctcccagccccggccccgacggagggggcccgccccggcgcgcgacgccctgagttgatg

SEQ ID NO: 335079 - DNA, 480 bp, Homo sapiens
  chr15:37402989-37403469
  hyper
cgctgacaaactcaatctcagggcggggtgtgagagctgggggtgagctggctcgggccgggacagaggtctctctgcgtacgccccgctccgcccggcgccaagggaagccgctgtctcttccgtcgagttctgagaccttggcaaacttccctcccccaaccgccggcgtgacttctgagttgtcactaatccgaacctgatattcaccagagctccttcggtcaccgacaacgctccccgctgctgccgcggcctcccgcccgccctcctcggcgtgttttcatttctaagtctacgggcagggattgccccgacccagtgtgtgtgtgcgtgtgtgtgtgtgcgtggtttcatttacattttaaaaatcatttttgcgttcttcagcgtggatctcagcactttccctgtgtctcaggccgactaactttgcataaacaaagcaacaaccgaagctcatagtgggtgaaatcttgc

SEQ ID NO: 335080 - DNA, 111 bp, Homo sapiens
  chr15:38857279-38857390
  hyper
cgtcgacctccacctcagctcgggaaacgggctgcgcctagcggctcccatgggaccccctttcccgcagccgacccgcagcttccacgcctcttcctgcggccgctgctc

SEQ ID NO: 335081 - DNA, 664 bp, Homo sapiens
  chr15:39872823-39873487
  hyper
cgccccgtcggcccatttttctttttacaaaacgggcccagtctctagtatccacctctcgccatcaaccaggcattccgggagatcagctcgcccgaaagcccctgcgccaccccgcgggccctcctaggtggtctccccagccccgtcccttttcgggatgcttgctgatcaccccgagcccgcgtggcgcaagagtacgagcgccgagcccgtgcgcgccaaggctgcgtgggcgggcaccgacttttctgagaagttctagtgctcccaagccccgacccccgcccccttcactttctagctggaaagttgcgcgccaggcagcggggggcggagagaggagcccagactggcccccacctcccgcttcctgcccggccgccgcccattggccggaggaatccccaggaatgcgagcgcccctttaaaagcgcgcggctcctccgccttgccagccgctgcgcccgagctggcctgcgagttcagggctcctgtcgctctccaggagcaacctctactccggacgcacaggcattccccgcgcccctccagccctcgccgccctcgccaccgctcccggccgccgcgctccggtacacacaggtaagtcgcccccggcggccgccgaggaccaaagctgcccgggacatccacctggagc

SEQ ID NO: 335082 - DNA, 636 bp, Homo sapiens; identical to SEQ ID NO: 237858
  chr15:40544705-40545341
  hyper

SEQ ID NO: 335083 - DNA, 366 bp, Homo sapiens
  chr15:40575352-40575718
  hyper
cggcgcgggagctgccgcccgcctagatacctgactttatagccttgggggtctccatggcaatggctgtcctgggagcggactgcgccgtcagggcagagacggacggggcgggggagaccgctcctgacccccaccccttcgtgggccacgaagtaggggagcggttcctcctccgcgctcccctgggaatgcggcggcggttgcggggcgggggcgggggctgctcgccgggggccacatgcacccaaccgggccaatcccaaagtcgcagtcttctctccccgccctccgcccccaaccgagtcggtgccctcggctccttagaaactggcgggacctcggcctcgtcggggaagactgaaa

SEQ ID NO: 335084 - DNA, 247 bp, Homo sapiens
  chr15:40762832-40763079
  hyper
cggcacgtctggactcggagagagcgctgcccgcctccctgcctccagacccgttgctggaggaagggctaggacaggcctgagtttgtggcgaatcccccttgtccacttccctgaggacacacgctgcaggagagcagcctcgagtcttttctgccttcgaggtctcaggagcttttgtccccaagcccagaggacaggggtggccctgactcaggcgccctcttccgggtaggggtccgcgtgc

SEQ ID NO: 335085 - DNA, 489 bp, Homo sapiens; identical to SEQ ID NO: 224841
  chr15:41136702-41137191
  hyper

SEQ ID NO: 335086 - DNA, 1861 bp, Homo sapiens
  chr15:41786424-41788285
  hyper
gcgggagagggactgcctcccggcagcgggctcttcgcacctgcagcagccgcgccgcctttccacctcgtcggtctcctccactggctcctcgtcgctgctcgaggactcggaggacgacctgctgagcgacagtgagagccggagccgcggcaacgtgcagctggaagcgggcgaggacgtgggtcaggtacgggccgcgggggcggggccagcgccgggcgcgggggctgcacgggggacctggctgggtgctcccggaggacccgctcctgtccatgctccctccagcggaaggtcctgttctcgcggtttaggaggaatctgggggtcagagggaggcgcctggccgacctctcgcctgggcaactttcacctcggctccgccggcgggtcgtggcgctggccctggggcgtctaagaagcggggcgaggagcaggcgacccgccgcggggactgggcgaagcgggggtagcggaccttgttggctgtgggttaggacaggagggatcggaggggctgagccttgccgggtgaaccctcggaaggagagaggcgaaggagagtttcccttaccccccgccccctctccggtgccgcggccgcacccccgccgttgccacggtttccctctcctgagtgggagtggagcggcgctccaggctctgctcgggagccgctgccgtctgctcccagcgcccgcacgaggcgtggacgcaggggagggaggggcgtgggcctgggagctctggctgggagcggaacgcagcccacccagtgcgcgccctgcctcccatcttcccggctcgccgctcctgagcgcggcagagaggggcggtaaactgaggctgcaagggggcaggatcactctgctagtctctgcctctgatagcctgggtgttctgggaccaggtctgaccctcggaaaacacagccctgggcactgttaagtcattcctgacgcccgccacttagggatgtgcggctcccgggacaccctccttgttcccctcgttttaaccaaggccaaataccttgaataactgtccgtggtcagcgcgaaggactttctttagatccacgtttcgcaagtgtccctgaggccgaggaagaggcgaggggcgcccccggcctcgggcgtctggggcctgcccataagtccgggtcggcgcggcggggcggggagagctgtggccgcgcgcctgctccgccgcacaatcggctgggacaaggcagggaagctgtggcgacctgcaggggttcacaagcccggaggccgatggggtttgtcagtgacaccagaggggaaaagcctcacagagcaggaacaccccccgccgccaggtgctgggtgcgccggctcggtcactagcctgccgcttccccttcttccccggtggtcagagcagccccggacccaggatcgtttctggggtaacccttgcctaggtcggggggcggatgccggggcttcccaggatgtggagtgtggggcagtgagaggccccccgccccgcctcttcggaaaagcctgagcagcagctcccggggcgcggaagctctgacacctgagagccggtgcaggcgaaagggcgcgaagcgcgggcgcgtcccgcttccctcttccgcccgcagggactcggcgaagtgcctgggagagggagtgcgctaggaggaggtcctgcggcccaagcctgggtgtagagaccgccccggctaaggtcaagcctcggggacctgggcgaccccgccgccctccgagccgtcgggagccggtgcaaatcgccgctgagggcccttccagctccaaggctgcggcttccaggccttccccacccccaggcccgccggggcctcccc

SEQ ID NO: 335087 - DNA, 764 bp, Homo sapiens
  chr15:41804056-41804820
  hyper
cgcccagcgccgcgaccccgggaccccttcgctcccatccatcgccgcgtgctcttcaacggctcgagactccccgaggcagacgagctggctctccgggctaccctgcgggcagcgggggagggaatcggcggggcccgggagcctcccctcgctgtgctggtgacccggcaccgaggaaagcacgctcccccggcccccaggcagccctcgcccccggcgccggcgccgccccatccccactggctgcgctcactccgggacaggcgtcctctccctgctgccccaccaggatgtacagcgactccccgagaccgagggagaagattgctgagacgaagacgccatgcgcccgcgacaggtggttcttggcgcctttgccgcccgcggctccgtaggctgagatcctgcggggaacggacggtgagtccccggccttcggtgctcaggccggccgctccgggcagaagttggcgacagaggaggctccagaattattttttatctgagggacttggaggctgcaatcgactctgacgggatgggaagggtaggtttgcacaccgaaaaatcagatattacacttatttcaggagggttcgtggaaatgtggggaggctcaagcaccccttggcgccgccctggttgggggccttccgctcggtgtaagaggttccgggtaagggctaactcggtggcgactactgccaccttgaagggcactcaaggtggacctccccgcggaatagtccaagacgcaagtc

SEQ ID NO: 335088 - DNA, 1266 bp, Homo sapiens
  chr15:41804824-41806090
  hyper
cgcacgtggacttcgttaccctgagggtgaaacctccaactagcaggtcactgtccaccctacctccgccgtgcacttacagatactggccagggcccggcacgcgccacagctgcacgcctctcagctgcccggcggcccccacggtcaccaccacgctggtccccgcgtacgccccgtcacattgtgtctgtgtgggcccatgccggccgctggccccgcaggtagaaaacagccaagacccctcggtgcctgagagcaaggagcgaggcaagggtcgtcgagcccctggctgggccagaggggtctggtatggtgagcgaaagaggaaggaggcgtctaaagctcacccggagaattcagcggggaggctggctccaagatactaggcggggcgctgactttcgggtcccgggggctgggacttgccagcggcaggggcgaggaccgcagaaaagtctcctgggaccccgggctagagcagagaatggcgcctgaaaggtgttgggagaaggcgcaggacgttaaggcgggtggaaataggatatgaaagaaagagagaaccccgcaacagctgcccttgcggtcgcggccacacccgtcacccggcccagccgcgctctcagcctggaagccactacccgactccggtcgcagaagccccgcgggtgcgcgctgataggtctgccagtttctctcctcgagcgcctttcccagtgaataacttaggggccgcaatgaatttggtcctgcagcctccccaatgctttcctcaacttagattggtggccccgccccaaggcggtgctgagaccccaaagaatgttcctccttcccaagctgcgtgatccagactctgggattcgcacgcacttggcgcttctcggcccgcactccagaagcacggaccggagaaatttggctgtgagagttcgaggcctctggaggaaccactgacacctggcctgttgaccggccacccccaagcctaggaaagtgcctcaggctggacggtcccctgaccgccagatagcacttacccgcggctccgaaccacaccagcagctgtccccagcagcccatccctgttgggtccacccggcaacaaaagcccttgcggtcgcggccacacccctgtcaacctaaagttgacagctcattttgccacggcagccctggccaccacttacaggggtgtgctgccgctggcgagacactccccggacctaaagctggtctggccacgcccacctcagaccccaggac

SEQ ID NO: 335089 - DNA, 1005 bp, Homo sapiens
  chr15:41913266-41914271
  hyper
cgccacactcccataattacccaaaccgtctcattccaagcccaaggaccgggctttcaaggggacacgaaaggaacgcccgggaggtgagcgccaggagatcgggagaggtgcctttcccggcatgctctgcagcacaccgaggggcgccaggcgtatcccggcgtgcatcggggagcgcccaagggcgatggttcccggctcctggagaggcgtgcgaagttaagccggtaggtgcgagcttccttagctttgagcctctggtttctcgtttcctctttatgggtttaaatccataacggcagaaaaggatggccctctaactaccctccctctccgcgtgcgaacgactcggcgccgcttcgagctcggtgccaggtgattagcgggtaggggcgggcttgcgaccagcacgtgacccgaactggcagccaatgactagccgggtggtccagcagcgcgaggattccgggacccgcgagcggagcggcgcgtgggtcggttgcggtcggccccggcaggtatgcgcaggcgccttgcttgccacgcgctacgcccgtccccacgcgcctggtggcgtgttcttggcgcgaagtgttaagagtctgggtgtttttgtgcgttggggggaaggagagggtggcgggggcgggggggcgctgaggcgtcacgtggacgccacagccaatctcaggccgaggcgcacccacagctttccccggcgccccggggtgcgacgtgttcactgaggttcgaccgggccctgacggcctgagcggtctttcgaagcgcgtgtgcggcctgtaaattctggccgcggcttttcgtggcgtcctgctccgcggtgagcacagacgacaagttctcagcaaaatggctgctggaaagagtcgccaagcagggggagtgctggggccgcgtgaaggtcacatgacgaggttggcagcgcgtgctgctggcgcggggtagggggagggtggggggcgtggcgggtcacgtgccttc

SEQ ID NO: 335090 - DNA, 1083 bp, Homo sapiens
  chr15:41952226-41953309
  hyper
gggctgggcgcggccggggcggagccggcgaggagccctagggaaagggtgaaaggcacagttgagaaaggcccgccgggcattggtttcacagtttccacgaaggcttcgtgtgcaagcctgaggagtttaggtgcctccctcctgcctcgcctttcttggttctagaaccttcagtaggcttttctgggttgcagggacccggaaaagcagcggcttccactcggggggcgggtcccaagggtcttgctgctgctctggggccgtttggactcctggtgttgggggaggggtcagggaggtgctgctcgcgtctccttttgcgcctgcgcggcgggctccgagcgggtaggagcgcgtgcgcggtgacgtggacgtccggtgcgcgcgcgcaggctcttcagctggagcggacacacggtgtgcgaaccgaacagaataacccgcccccagcgggatgtgaaggactccgggtgaggccggccacgccccgcacggtaactctcgggcctgggtggagggcatcgcttagtactggcccgattggagtttttcgagagtttgaagctcttgtgtatttgaacggcgtgagaaacgttccgctgagagagcttcgcacgccctcgccaggccgggccttgcgcagggccgcctttggcgcgcccctgtggtccctgagcgaggctgcgcatgtcacctcgcgcgcgtccccggcctcacttccgcgtcgctcagctacctaactgggaacatcgacgccagagagagcggccacgaggcgggaggggtgagaagcgcccatggctcggccctgccctcgcgtgtgtggggtgccgctccgcgtggtacggtccgcgtgacgacttctcgcccggcgccgggctctaggtcgagagccacgcttacgcgcttttcagtttagagcctaggtctcgtggttctagaactccaagggaaacggtgtcggcgtcgcttttctgagaacttggcgcagcgttttgacacctgtgcaaacgtcttttctaacaagtaatttccggccaaattgtttgaggcaggacgtcaagtttaataaaggagggc

SEQ ID NO: 335091 - DNA, 447 bp, Homo sapiens
  chr15:42873450-42873897
  hyper
cgggatattgggcagatggcaggtggggtctgagccatggaagaactgcgaagatccaacagaaactttctatcataaatgatttgagtttctcctggtgtggtggagaagagcgtcccctcgggcgtggtgcaatagtcaagaggtagctgcgcggcgtcgctgatggccacggtgtgggtggggaaggcgcggctctggctgggctggtggccgctgccagcggaggaggacatggctgtggacgcgggctctgggctttgtgtggcgggtaggcggcggcgccgggccggtctgctccagctcctagggcgggtggaaaagcgagctctgcgcactcctcgctcgcttcctctagttccctcgtctggctccgcccctgccgccagccgatcctcgggcctcgccagcagcctcagcagcagcagcagcggcggcgacgaccac

SEQ ID NO: 335092 - DNA, 395 bp, Homo sapiens
  chr15:43415157-43415552
  hyper
cgtaaatccttccagtttttggcgcccgggtatttgacttgcgctcctttaatgtggtattctgcctctcgttttcctggccgcctccctgggacccagttccagctcaccagcatcggctcctcacactcagtgtttaggaggtatcatcatatcatgggctgacaggaatgacgggagagaaaccttaacgcagagtgagtccccatggaaaccgcgccaaccccgaccgggggcgtcgccagcgggaaggggtgggtcccctctcgaataccccgcccggctccgggaacgtcaccgacgctctggggcttttgctaagaagcgctcgcccaggaggaggcagggcaaattggtgaacagggcggcgtgtccttatacgggcacgaactcgc

SEQ ID NO: 335093 - DNA, 350 bp, Homo sapiens
  chr15:43622638-43622988
  hyper
tggtgttctgtaccgcgcctgcccgacgctcacggctccgggggcccatggccagaagagactcaggaatggcagtctgtcacggttgtgagccgccccttggttagcacacacctcacggacctcggtagggggaaaaaaaccacccatgctcctggacttccccttccgccggcacttgtgcgtcacttccgggaagagcgcatctcgccaaccagaattgaggagggtgtagccagtgctaagttcgcttgcggctgacctttctttggaatgtcgtgagttccatttgtcccagaatacggtccgctaccgctgtgacatgagtgttagggaaggcgggttgtcac

SEQ ID NO: 335094 - DNA, 455 bp, Homo sapiens
  chr15:43803503-43803958
  hyper
cgtctgcatctccatccctagtgtgcacttcctgagatctgcgcccttgtcacctgcatcttccatgccatgtgtccgtatcctctcgctctactaacatctcgcttgcccatccttactgcacactccatggcgttccgcagtctccctgaggcagcggagctctatgcagcccctggggcccctctggtcacaccctccaccgcagtgttttggaccaggtgtcctgaaagtcctcaccatccctggagaatccacgtccctatcttgctgtatcttctttatggtccctgaaccagcacggggagctttctgaacgccccgtacaaatctcaaatctctgaatgccagtagccaaccactaagtgaccttcgtggctaccagctcctaagtcctcacctccttccccagtgctgtgcctgtggctgtggtgcagtgctgcggagccacctgc

SEQ ID NO: 335095 - DNA, 171 bp, Homo sapiens
  chr15:43809685-43809856
  hyper
cgtcgtgaaggcaaagaaacagttaagtctccagtgcctcgtcacggaccagcccctcttccccgccctggcgccgccctcctcatcaagcacccccctcccccccccaccgcccgccccactcccaccctaagtgctgcagactcttccctgaagctgccggctgaggcc

SEQ ID NO: 335096 - DNA, 68 bp, Homo sapiens; identical to SEQ ID NO: 237899
  chr15:45403702-45403770
  hyper

SEQ ID NO: 335097 - DNA, 201 bp, Homo sapiens
  chr15:45404016-45404217
  hyper
cctctggaagggcagcaccacgtccccgcgctggtcggggtcgaacacggggtctccaggtgggatgcggatgttgaggaactcggcggggcaaccgggcgtttccacgctcaccacgtcggaaagaacatggtagcctgcgggcatggggcgccaatacgtgacaaaccgtccgtattgcgccctccccacggccagggc

SEQ ID NO: 335098 - DNA, 629 bp, Homo sapiens
  chr15:45404769-45405398
  hyper
cggtgcggttgtggagcgacggcaggccggctatgccccgcgtggctgcgttgctgagccggcgcgggttgggcagctgcggctcctccagagcctgatacacaccgtcggcgtaattggctggtacgcggcgctgcaaccggcagcctgcggaggcagggagcggggctctgtctaagcactccatcccctaggatcccccaaacctctccctaagcctccctcaacccccatcccacttcactgacagaaccttccctcaagggtctcttggccccgggagcgcataagattgcgctgtgtaggcagcggagctgctgggcgcgtgttccccgcagattccccgctcagggcctttcgcgccccggcccttcgcgagccacggccccagcacgcccgggcccccagaacgcaccaacagcaccacgctcgtggtgcctcaggttgttaaaccagccgtcatagcgctgcacttcccagggcagtgagagtgcgtcctgactgcctgtgggcacagagaagggcctcctcagcactacgctcccagctacccctcccgagcaacgaaggccttggccagtccttccccagctcgcggagcgcccctaaccggacccaagtgtcgggcc

SEQ ID NO: 335099 - DNA, 588 bp, Homo sapiens
  chr15:45406361-45406949
  hyper
cgccagtgtgagcatctggacctagggctcaccctcctgccgtggaggtggggcccttatttgcacaacctcttccagctcagaccagcccctgggctgggacacccgtgtggcacgtcgcccacgctgctataaaaggggtcccgcgcgacttccaaactcagcgccaacccgcagaaccaggaaagtaacggctacagacagtgagaaatagtttcgctcgccggctagaaaaactctgtcggtaccaaccccagagcgttgagagcagcccacctccacgcttccttaacggagaggtgcaggactcagacttcaccagcccactcggtcccagccttgtacgcaaagagacgccaaggacgcgctctcccgcgtccaggcagccccagcttgctggcttgcctgcccgcctgcgtgcagcactcggccggcgtgcagcatgaccctgtggaacggcgtactgcctttttacccccagccccggcatgccgcaggcttcagcgttccactgctcatcgttattctagtgtttttggctctagcagcaagcttcctgctcatcttgccggggatccgtggccactc

SEQ ID NO: 335100 - DNA, 815 bp, Homo sapiens
  chr15:45421280-45422095
  hyper
acacgaagcgcccccgggggtgtgattaaagagggaaccaggtcccgacgttctgtgaacaaacgcgcgcccttactctcagtggggctcccgtccgacccccactcctctcctaactcacgtaaggacccggctgtgaccggacaaaccgggtctggggtgcttccagtcactcttcaagtcactcccaaacttctcagactgcacccgaggctctgcggcgccgcctccctctcccggcctggtacagagaagggctgggtgcgccaggacagtagtaccggggtctgccagctccgcagaggtccctccaatcccccctcctcctctgcgcccccccacccatgcccagcaatcccagcagctccagcgcaaacctagcgacgcagttccgggtctggcggggcgcgggcgcggctcgcagggcggtgggacccccaagacctcacgaggatccccggagggagacgtgactccggggtcttagaggggtttaggtcggatgggtgacttgctttgacgcctggcctggtctgtgggtggcaggtgatcgatggccttggacttggagcccagacccgacggtgtcgagaggatctgaggagagtctcccctccccataccctctccgcctcccaccctctccccagccccatgggacttgtgaaggcggacttgcttttttcgccgtccacacaaccgcactagccgggccttcggcaccgacggaacatctctacctgcgccccgggagccctcgccgtctcacctcgcgcgctgccgtccgctggaagcacctccgcgcctccccaggc

SEQ ID NO: 335101 - DNA, 421 bp, Homo sapiens; identical to SEQ ID NO: 237905
  chr15:45427362-45427783
  hyper

SEQ ID NO: 335102 - DNA, 496 bp, Homo sapiens
  chr15:45479541-45480037
  hyper
agaagctgagacaccgaggggcccgggccaggccacctttgtccctctcgcagcctccagacccctgaccgccttccctcctggccatcccggcccggcgcggcactcaccctatcgctgctggcggggggtccggagatccgctcatcagcaggcggcgccgggggccccggggtctcgacccgaataaggcggtgtgggggagagccgtggcgcgggggcggcgtgggtccgggggcgacaggggtggcgagggcggcggagccggacgaccccccggagtaggggtcttcgaagtcgcgctcccgctgcagcctgtaggcggccaggatgtccgggggcggcgcggggggcgcggccggagagggcgcaggggggcggtagtcgggctcggggggcgccggcttgctgccccctccgccgccgccccccccgcggaagcccaggtgctcccggagccacttggctactccgccgctgccgccccctcctgggc

SEQ ID NO: 335103 - DNA, 858 bp, Homo sapiens
  chr15:45492672-45493530
  hyper
cgatcacggcgagctactagggacacaggacctcggcttgtcgcctgaactcttctctgttgaaagccccgcccccttgcaatgtcattgatttgtcattgtttgttctagcctatctccaccctcgcagccatctgagggcacgcaagagcattaatctctgctttctcgattttggtccacacttgcctgcgcaccagacacggtggccgatttctccaccgtggaggctgctcttggggttccccttacctcgcgcctcaaggaagttgtatggtggtgggtcagaactgattttccttcttgtaaaatttaagagctccagtcccagccaaagtcgttcagatagcatgatagtcagggcatggtgagcgtcagagagactttgggccaccattcgggcgtcctcaggggcttcacatcattgcaggcccggcctcataggaatcctttggttgcaaagcactttcatgtcccttcttttgcggtccgtgcgtacagccaagaggagacttcgggctagggagtccacagcgctcccggctgctcttgcgggtgaacgtgggtgcgggaggaacctggtagataatggacgcttaggaaagctggaatggccgccatctagacgagaagggcaacactgggtcagctgctcgtcgtggcgtcccggtagctcgccgtgatcgtatagtggttagtactctgcgttgtggccgcagcaacctcggttcgaatccgagtcacggcattgtggaaacaatggtacggcaagggcctctttttagacttagaaagccacacattcttctgggaagctaactctaaaagctgttacctggccagggctgaaattataac

SEQ ID NO: 335104 - DNA, 1108 bp, Homo sapiens
  chr15:45669920-45671028
  hyper
cggagcgattccagtactagaagcatgggagggtctgctgccagggcagccgagggcggggagcgcagaaactctgcttacaggctgcactcgccccgactcctctccagacgtgggatcccatgttatacttggagtgaatctggtcgctcgctccccgtccccgattcccactttgcttgcctcttctccccatccatctaccccacacgcattttccagaaatctccccaactcgacgcccactcaggctactgaaccccaataacgccacccttttactaagaggagcctccgtcgtcccaaccccttgctccgagcgggaagcttggtgcagcgcaccaaggtccggtagaggggggcggcgccccctgcgccgtgggccagcaggccgcggacgcgcagacagcaagtggaccccaagggctggagccgcaacgcaagttccccctgactgggggacgccgcccagctcctggagcctgcgaaggctcttgaagctgagcttcccagggataccagaagggacactctcgtgcaattccggctagggaaagcgagggaaggtggcggctccgggcagggagcgagcgagtgctccacgccgcccgcaggatcgagtgagtcacgcggccgccagacgaggccggtggcgcacgcacccgagatccgatgtagtgcaccgcctcggcgccgcggctcccgccgcgcagacaccgcacccgcagcatcgccctggcccggctggtccacgcgcggaatgttcctggcctctgggccgcgtcggtccaagccttcccgagagcgcgcccggagcggggtgggcgggcgcgcggggcccgaggccttttgtagccgcgctccgccccggccgccccccgcggccccattggctgccgggaacaggtggtggggccggcgtagcgccccgaattaggaactgtcgggaagcgccgcggccgctggctcgagcctccgatgcttgcccttttttagccagcggggccactgacggcttctgttgcacgtccggacccggacccagacccgagcgtcgcaagaaggcccgttggagtctcgcgcaactgggcaggacgcgacttctgac

SEQ ID NO: 335105 - DNA, 464 bp, Homo sapiens
  chr15:45722474-45722938
  hyper
cggctatctgcgctcccctcttagggggttccacctcctactccccaaacctccaaactcctcacaagcacctaggggggccaagagcgaccggggtcggcaggtaaggaagaccgcggcgagcggcagggggcgccagcgcccgcgttcgggcgcttcacgtcagccgcagaatgtcctgcagggggcgcccgggagtcgcgtgcccaacggggaaagcgagtcaggtccctcgcgctccccgccccacgcgcgtgaccagagcgcgctggcccggcccacccggggcggttgtggtcgctatatataaggtggggaggccgccggcccgttcggttccgggcgttaccatcgtccgtgcgcaccgcccggcgtccaggtgagtctcccatctgcagagacgcggacgcgccggcccgcagttggcctgcggagcgcggtggacggtttggcgcccaccaggc

SEQ ID NO: 335106 - DNA, 1793 bp, Homo sapiens
  chr15:48009312-48011105
  hyper
cgaaaaggttgcttcgcaggctgcagcacccactgcgagctggatgactgaggcactgggagttgctagaaggagcagctactcagaggtggggagagggagggtgcgcagcagagcgccggagaggagggacgcggaggccaccgaggggtcagcagggccgcggcgccagggtgggggcctccaggcggcgctggccacggttcacccgcgagggcgagcgcgcccggccggccgcgcctcctgccgtccgtgcccgggggtgggacccgcgccgggagctgccgagtgcgtggagggagccaggctccggctcgcctgatggattgacttggagatggatcgaattacaccatttgccgtgcatcggtttgttttgctcctgctctgtcccgctgctgctgctgctgctgcaaggggtggtggcgagtttcaggattctatcaaggaagccaagacctaaggagacagagggatatctatttttacaatatttttctttattttctttcttccttgcgcgtggcaagcttttttttttctttttcttttttcttaccagcctccccccaatgaggtaagaccgttttcaacaatttgctaatgctcttgtggcgcccggtgggggtcggaacctgagatcccgaatcgctgtgtgtgtgtgtgtgtgtgtgtgtgtgcgcgcggtgggggtcggaacctgagatcccgaatcgctgtgtgtgtgtgtgtgtgtgtgtgtgtgtgtgtgtgtgtgtgtgtgttgccactggacagttgatttattttccaagctgctctctctgcctgccgtgcaagggacgcgcaaagggctagagaggtttggcggacgcgtcaaaactggcaaagctggcggcttagggggaggggcaagtggacttggaggccctcctccactgtgcacccccttggaaaaaaagcggagggggcatcaagtaaaagtttcttgccaggcagagccagctcggcgtcccccgcacatagctggggttagcaggggttgcttctctgccgggcacagcgtctccaggagccagccggggagagctgagccaaggccgaaggagccgcctgcgggcttagccgccccctcccgcccgttggccccagagcggacgctgggacgcccggggtctggcagctctgcgcccggctaggagcgggcgggcgagcattagcctgcgtcctggagaaggggcgcagcgccgcagttgaggccggagcagcccctcgcgggcgtaggatacctgtcagtgagcgcccggattgcacggcccccgggtagtgcctgccggcgaggggcgggagctcgggtgacttggccatccccatccccggcccaggcccggagggcggccgcttcccaccgtccctctccccttactggcagagcgcgctgcgggcggactcccgggcccggagcagcccaccggccaccccaccgcccacccggctcccggtgtctcctcccggccgctctacccagcaactttccgtgctttgttccccgactggaaatgctttacggaagcgtcttggacagggtctccgccaggcgacaagagctcggtgctgagatgtgttacgttctcatctccccatcaattatggatggaaacaaataaggaagagtcaattttgctgagccccttctccggcaacgagaggcgttctgcagccgggagggagccgccgctcgcgccggcagccgctggcaggggcatggtgaggaggaaggtagggaaacttttatttcccgtcttgacagcggc

SEQ ID NO: 335107 - DNA, 151 bp, Homo sapiens
  chr15:48011367-48011518
  hyper
ggggattgaagtcccggtatgaatcgcagcgtttgaggaacttagggcagtactccctgttctggggtgaccattcggtaactgatgttccagcatcccgagccctcagcgccgtcagctggatgatctcacagggaaggcgcagcacatc

SEQ ID NO: 335108 - DNA, 681 bp, Homo sapiens
  chr15:48469946-48470627
  hyper
cgtggcggtcgctgagctttgctcaaagattctttaaccaaagtcagggaagaggggtgttcgctgtctcgggctagaaatcagggaagagcgctggtccccgggcccccagccccggctcccagaccacaggcggccaggcctggggcgggcggggaagggcctgggagcggcccagctgcacctgctcctcaggaagccgatggcccgggggcgggccggggtctgggggtggttgtcccccatcggggcacagcccggcctctagccgcccggtagactccccgccccccacctcgccccggttcccggaggaaaagacaatacattttaacgccattggagctgctgctgtgctgcggctgctgcttctccgcctccgcggggtgcggctctcgccgcggctcgcccggcggctctgcgggctgcaggtgcgggctgtcgccaccagtggccccgggcacctcggccttgttggcgtccgccatcccgccgccgctgcctccgcctcggccgcctgagctgaggggctccgagcgcgacaatggcggctgccggggaagcggtaacggatcccgatttgaaaaggccccgagcgctcagtaacccggatctcgcgagaaccggtcgagactgggtgactgggagatggtgtgtgccgggtgcggggggtgggagtgc

SEQ ID NO: 335109 - DNA, 1927 bp, Homo sapiens
  chr15:48936649-48938576
  hyper
cgaacggggtggggactaaacaaccctagcacctctaaggtgcccccaggaggtcttgccaaggagtcttccacagggagagtcatcctgcccgttgttctggatcttgaaacttgggagacccacaccaaaggagggaaccggttcctttaccctttaagcgcgtcgtgtcctccaccgcctcttctcttggcccgactggctctggtttccttcacgttcccagcctccaaattggcgtccgccccatggctcgtgtaggacgctaaaagcacggtaaatcccagggcgatctccagcagacgccctcgacgcatgatgccgagccgccaccggctcccgccgcctcttgccgcgcccggggctcggtctgcggccgccgctgcgccctgaagcgcaccgcgccgccggggtcccgctatcccgccgcccgtcccccgggccgggctcctcccgccttctccaggcgctgctcccacttcaggcggcccctgccagctgcaacacagagacaaatccccgaggcggggagactttcagggcatcgggatgctgaagcctcgcggtccccattcccaagcccaacccgtgcgccgcctgcgcgtggcgcagttaatttgggtaagggaagaccgtttggtccacagctggctggaaagcccaggcccccggcggcagcagccccggccgatccctcggcctcccgggccccgccagaagagcgcggcgcaaagtacccatatccccagcggtcctaagccccgggcgagctctctgggtttattttttttagcggcacgaattgcgcgcgatgcgcgctctgaacgccccactcctcagcctgccctctccgccaggctggaagccagccgcgccgtccccgccgactccgggcgatgccaccgccccccgaacatctgacgcggagcccggcaccaagagccccgggccaggaagctgtcaggcaggggagggccagcgccagctgtggacgttccgggacagcccctcaccccagtccctgtccctgccctcggcgcggcgcaaacgcaaaagcctccgtggccgcagctccagccccggtggccgcccgacccccgtcgggaccccggctgcacccactggagaagcggcggctccgactcccgaggaggcggcggcggctgctcccagtcgtggccgctacagccactgctcggctccgctcgcagctgtcccagctgtggctcctgtccgcttgtggcacccacagtctctgccgcggctcccgcagccccctcctttccccacctcttcaagtatcgtccgcgcagcggtttctcgcgagagaaatactttttttaaaaaaagaaagaaaaagaaaatgacaccccctccttcgtcgccctcatcaccaccccaccccccggccccatccatcctccctttccactcccctttgccagcctccgcctcggtgcggggcctctcgctcgcaggattagcgcagtgggaggaggcagaggtgatcaggtcctgcccggcctgggactttttgtcttgaggtggggaggggagaaatgggaagaggtggagtagcggttttagcccgctctgcggctgcgaggtttagatccgagattaacctctcccgcgataggtgaagccctaccggagcagaaagctgttccacctgcaccaagaatgcgcgctggagacggttgccccggaggccctggcccgagagaaaaccagtccccgctgcccgcgcctcccggtagcgcgctccctgcgcctctcccgccggacactcagcagacgccggaggccgggaggctaagactgggcgcgtcgcaggccgggaccgcggcagaggctgctgtgccgaccgaggagagggctctgccgcccccacttgccctgggtgtcgagagcccactccagacgc

SEQ ID NO: 335110 - DNA, 350 bp, Homo sapiens
  chr15:50474768-50475118
  hyper
cggcggccggcgcgcaccatcctgcgggcgttcctggagaaagcgcgccagacgccacacaagccttttctgctcttccgcgacgagactctcacctacgcgcaggtggaccggcgcagcaatcaagtggcccgggcgctgcacgaccacctcggcctgcgccagggagactgcgtggcgctccttatgggtaacgagccggcctacgtgtggctgtggctggggctggtgaagctgggctgtgccatggcgtgcctcaattacaacatccgcgcgaagtccctgctgcactgcttccagtgctgcggggcgaaggtgctgctggtgtcgccaggtgagccccgaggatc

SEQ ID NO: 335111 - DNA, 719 bp, Homo sapiens
  chr15:51385893-51386612
  hyper
gcgggtcctaggtgcgtagacccgtgggtggggggcggagcggaccggtggaggtgggcagagaccggcggcaagtcgacccacggctgtgggtggcttcctcctgttgctcagtatcagggagaggcgggggaggacattcattttttttcttccctaagtaagcatccacctattgctttaataactatcgattgtgaaaagccggcggggcctcttaaaggcgaagtcgggaggcgcgcgcccctgcgtctgtgttcggggaccagtccgcggggaccttctggaccttctccgccggctgcgcggcagcgatggaccctgtgcatgggctctcctagcagcctcgggaaccgcggccgcaagctgtggtttgacccctgccccaaccactcgcgaggccttttctgttcagagcccccagtcacgttcttggacccagtcacctgcgccgcagcgcagtcccggcgccccaggttcgaggacccggcccgcgctcggaaagttatttcaaaaggcagatgtgttgcaaccctctctgcagcaaactacagtacgcggattcccgaacccttccccgcccccacccagcccgggcgaccagagcccgccgcgggagactggcagcaaggagagccacccctaaatgcaccttccctccctcccgcgcgcccaagtgcaatggggttgggggaagccccaaagcaaactcacgacgc

SEQ ID NO: 335112 - DNA, 480 bp, Homo sapiens; identical to SEQ ID NO: 224851
  chr15:52404392-52404872
  hyper

SEQ ID NO: 335113 - DNA, 814 bp, Homo sapiens
  chr15:52587421-52588235
  hyper
gaggcgctccagtcccgggagatggggacgcacgcgcgacccctgggcactggggattctaggccccgaggccggagcggcggagggggcggcccctcccacagggtcttcccacccacagggcacccaggcgcagcggagccaggagggggcttacccgcgggcagggacggagcacgccggggccctggaggggcgacgctcgctcgtgtccccggtccccgtggcccctccgcggcgcctccgcggcccccagcgcgcgcccgcccgccctgccgtgtcaggtgcgcaggtgtggcaggtgtggcccgggcgccaggtcgagtcagcgttagcagggccggctcccccacagcgctcccaggagcccagcggaccctcctacctgcgtgtacagctcggccaccgccatgggcaggaggggccggggccaggccggggctgccgaacgtgcgaggctcgggggctgggcctgcgccgcagaggccgggcgcaggagagaccgccgcggaaatcaccgccgggccatcttgcccaaagttttccaacggcctcctgttcccgttcccgagttggcggcgaggggagggggcagcggcgggattggtccctccaagcttggcccggctagtcggcgctgccattggccggggccgggcggctgcacctggcgggagcgcgggtggagaaggttggggcccggggcgcgctgccaggcaggaacagatgcatccggaggctgcccggcccgagtgttagctcctcaaagagcagaggatacgaccatttaaatggaagacccaagggaatcaac

SEQ ID NO: 335114 - DNA, 84 bp, Homo sapiens
  chr15:53075376-53075460
  hyper
cgttttagcttaatgatccaacccctgtcacacccacagggacgcgaattccgattttataagcaggtgtgcacgtgcactcag

SEQ ID NO: 335115 - DNA, 1738 bp, Homo sapiens; identical to SEQ ID NO: 237945
  chr15:53075490-53077228
  hyper

SEQ ID NO: 335116 - DNA, 626 bp, Homo sapiens; identical to SEQ ID NO: 237946
  chr15:53077594-53078220
  hyper

SEQ ID NO: 335117 - DNA, 4387 bp, Homo sapiens
  chr15:53078748-53083135
  hyper
cgctccttcgatagcctcctgggtgccacaagcacctgccaggcaccatgtttgcgcctccagcgtgcgggtcccagcactcaggctccctccccctccacagtgccgtcccctgagctcggctatgtagctctccacgcttggaggtcagagggcgctcctgcggccaggtttccatggctcagaggtcgtctctgaacagaacgtgtcagtctgtccttccagggggcgacagcaggcagtggggggaggagggatattgaagtccagagcaagagcctccagggggcgggggtgggggatggggaccgagttttcccggaggggtagccttctccatttctatcttcttcccacattcccccgctccactctttggcttcagcgggcactgcctgggtaagaggccctgaagcctggctctggggtggtgtgggtgtgtgaaaaggcactaccttgggctctggagagacggagcagtcaggacgaggagcagccccttcgcccactccctccggaacctcagttgctcgcgggcagcccacgggtggagatatggtgccggtagcacaagagctagagagtggaaaaccgggggccagcgattcgctggggcgcccagcgagcctcttctcccctgactggttcccgggcgcaggctgcaggaacctgcatgaggactttgcctggggcgaacgaaggcagagctgggctggaaaacctggcagggcagagtctcagccagcgcggtgctttgggaccggtggcctgcagcgcccaaacccaaagaacgctttgggtcgcttcggggcacgaatcgcaggctggtcggcacctgccacccccagcttctcattggcaggcacgagttggaggagggggctttggcctcacgctttgattttagactgtgaaacggctcagtgcccccggctcagagcggattgactgtctctcgttctccagggacgaattaatggagaacgatcagttaattaacaaaccctcattccggcttttaccttttctcttcgccaaggctcaggcctgggcgctgggctgagatggaggtggaggtggggggtgggggagtggggggggagggggcatggaccaggagtcaatcaacttggcaaccgccggccggatctcatcaaacccaggccaccctccgctgtccttagctctacctcccctcatgttctctaccctcaagggtcgccgaatcctcctgaaatccccggtggggttcgggctgggctcagctttcttctctgcctatccgcggtctcggggagccaggcgcggtgtctgcgctgcgccaaggagagcttccagctgaactcagaaacacctggggcttggggtttcgggcaggagacctctgctcctagacttgggggtcatttacacactctcatccccaaacccccctcccgcacggggattcagacgaaaatcgcgaagaggaataataaaacaaaatgcaaagtcctcagggagtcggcagcggagtcggtcccaggacatggctattgctttgcagctctcactgggaccttgggacggtcagcctccctctcctttccacagccaattccatgcgcagagagcgtcctaacccttacaactcgtctgtgctacacacccaccgcccaatggctctgaaactttttgcccatactcttagattgaggtcaccccagccagcgccaaaagaatgagcgcgggagggggtcacagcagccagttcggccaaacatcgacgctgctccggcacgctccagcccagcgcctgggatgtgtcagaggtacctgcgaggaacatttgcgtgcgattccacgcacgcgttgcatccctcttcccaaacccggatcgctgaactgagaggtggcgcagagtgtctcaccaggtgcggggatttctctccgcctcaggccgtacgagcttccctcgctgtccctgagcgcaaatgagcctcttcagtcgccgaggcccggccgcttagctctcggagccttccacagcccaacaccctgagccctggagtaggcaatttgctcccacagccctgtgctggcccttccaggcacagggagtcccccttctaggggtaggggcgggcgggatgaagcgcacccagccctctctcctacccttcctcctttggtcccttcggctttcgtgtaccttatctcccgcgcgcccagctccttggccggctcacctgctaagcggagcgcggacatgcgctggaactccggctcctgcagccacttccacatcctccggaaggtctcccggccggatttgagtttgctccagggtttggggttgcgcagcaggtccgagagggtcccctgggagcggcagagcaccctctgcgcgaagatggcctgtgggatgctgtagcgcttgagctcggtggtgatacgctgcgccacctctttggtattgatctcttccatctgccctgaattacttccattgctgacctgcgcgccggtcaccgaagggttgggctcccgggctgtgcccaggagttgcccgtggccctgggcgttcaggtgggcgtggggatggtgcggaggaaggccgttgatgggcaccatgccggccgaggtgggcgtgaggtgctgctccccgtggcggccgagcatggccgggtggtgggcttcgaagccgttgggggtgagcatcttgtcggtgggcatggcggcccccgggtgggcatagtgggggagcccttgctgggagttgtggatgctgcccagaccggagctggagaggggcgagaggctctggcccatgccggccacgtccttgtggtagggggtatagaggttattcatggaggccagcccgcgctcatcccgcatgagcgtgaagctaccgctcacgttgcccgccaggcgctggtggtggtgcgggtggtggtggtgatggtggtggtggtgatggtgggggaacttgtccgagactgtggagatgggaggcagcggctgcagaggggtcaaggtggtgtaggtggtgggcatgctcatacctgggggagtctcgcaggccatggtcatggtgggatgcagggggccggccaggctgtgctcaggggcccggtggtggtggtggtaatctccgccgccgctgccgccgtccagcagggacgccatgcccatggagcgcgggtgcgcggggggcaggtggctgccgcggtgcgccacggagctgcgcgcgtgggggctgccgcccagcaggtcggcaggggcgggcaccggctcatggctcaccccgtgcagctcgccgatcgcttccatggtcagctgcgcgttcatcgtgatccgggcgagcaggcggcggacacaacatcgatgtggccaggcagaggcggcgaggggcgcacggagtccggtcttcacatcggctgctggcgactgttgccttccttcctctcactgtggggctctgtctctctctctctctctctccgtgtgtgtgtgtccgtgtgtgcgtgtgcgtgtgtgtgtgtgtgtgtgtctcgccttccctcttaccccccaccttcccctctgcgtcctcggcttttttttttttaatattaatttccaaagaggatccgcgccgttgggagagcgcagtgccccagcccgcccgcctcggccacctctcgcccctctctttcttaaaattctgaggtctccggctcccctgccgcggcccgcgcgcctgccgcgtctgctgcctgcccgccccgctggccagcttgagccatggctctgttactgttacagactctgtggccgcggttcggtagccgccgccgccgccgccgcagcggcccgccctcacgcccgccaggcgcagcgcgcatgcgcgaggcccgcccccgccccctaggtcgcggcgcgccaggcccttggcgtcccggtacaaatgaaggagggggcccagcgccttccctgcggcgctggatggccagggagctgcgggcacgtgcgaaagattggcgcagagcgcgacctggggccgccgctgcaatcccaggagactcgcgcctggctcgctcgcctcccttgcttgagtgggctctgtcctcccagcccggggacgctcgtgtcgggcttctagcggctggagtgctgtgcttggagacatcgcccctctctctccagttgctgcttcccggtgcagcttgcccggggagctggggactgtgtcatcaccccttcggctctagcccactaagctttatttcccggggggctgctgggagtgcgctttcccacccttgaattcacggcctattgggggatgggggttggggtggggtggggtgcagattgcttaaagggctgggtccgtttggcggccgttgacccggcacccttc

SEQ ID NO: 335118 - DNA, 770 bp, Homo sapiens
  chr15:53095580-53096350
  hyper
cgtaaaagacgagaaaaacatcccgggtgctctgcataaaccacacgcaacgaaaaagctcaccgccagacagcttccagcactcgaaccaatacaagtaaagcacatttgcaaatgtgtttgactgtttttgtaggtttaagaagactacgtttttctgaccacttcaaaaaaacaaacacgaattcagccgctgctttaataacctctgaccagaggagctgattttgccaccgagttatcggtcagtgctgcgaggtcagtggcctgtgatcatgtttatagcaggtttggcttggatttggtgacacagccagcaaacctgggagattatgaaaccgtgaaccagcccagggaagtgtagtcaagtttcagtttgggcatttctccgggtgagggaatccggtgggctccatttctacaaggctcacaaacgcaggtgcagttcggccgccgcacgctgcctggcgggagaaacgcgcacaaaccgcagacgcgtgctcctgtagttgccactagctcggggcacgcccgtgttatttacaccctgctcgggggcccccctctcatttgttactttaaactcatggggaggaactgttagctgccgtggcgggactggcaggctgggaggggggcgcccccgctcggctcccgggccgtgacgcggccgctgccctccgcccctggcttccaccctgtttgcatggccacaagctcagcggtggaccagcgtggccaggcccccggagcccttgccccggcctacc

SEQ ID NO: 335119 - DNA, 686 bp, Homo sapiens
  chr15:53097902-53098588
  hyper
cggcccggcatggcgctggcgagaaggcgccgctgggcgcgtagggtaggcagcacgcgggatttagccttttcccgacctgcgcgcgggccctggcgggaaggccaggtccgggatgggcgtcttgggcttgggcgccgactgtgggcggtcttggccccagaccccgacgcgtggggacccaggatgctggaactcaggccttcggcctagaaagacagaggttttgtctcctttctgccgccttccagggccggaggccgggccaggctcccgggtggcctagctcgggcctagtctgcgtctggccctcggtctgggaattggcagggacgctaggacctggtgatctaacgcccgcgcggcctcttacgccggggtttcctccaggtgctcgttgccacgcgttcgcccgacgcccgcagatcccgtcgcgcccgcaggctaggccagctccgcaagccgcctgctacctctgccgcccgccccttgctggcagagtccgggcaggactgccggggcctggggccgcagtccccgcgccgctggccgcccgcagcttctggcgcccccgaaaatgaccatctgtcattcaattaaggtttcagggcagctgatgggggagccagggtcagcgaccccaggacaaaacggcctgctgcctcggataggagaagttcaaatgt

SEQ ID NO: 335120 - DNA, 143 bp, Homo sapiens
  chr15:53489679-53489822
  hyper
gctgctgagcacatcgagagcgccccctaggcgctggcacgtggctctgcaggaggaagccaccggtcgatcatccctgcgtttgtcaggcgcccaaacccacacacaaagccctggcacaggcggcgacgcggcctctctcc

SEQ ID NO: 335121 - DNA, 1288 bp, Homo sapiens
  chr15:55879822-55881110
  hyper
ggaggcgagggatccgcgcggatgtctcgggggccagcgggcgcccgggccgcgcgctcggatcgcagcctcggccccggggtgccggcgggacgcgggctgcgcggacttaggcccggacagagccccatggcctcccggcggccgggcacggggccccgcgcacctcactcaccccggttcccccaatccggcacccttctcggttacctcgaactctcttcagcgaaatgggatccttctcctgttctgctgacattacagaccgcaaagcatgactcccccccaggccgcgggaattcggtctctttgatgctgcggcggcggctcctcctcctcgcggggccgctgcggctgcgaggcaagcctcggagccgaggcacggccgagggcggtggggacgcgggccgactttgcaaagtttgggaggaggacgaggcctcggggcggcggggcggcggggcggcgtgcgggcaccggcggggctcagcggcggtggccgggagcgcggcctgggggcggccccccacccggggccggcatgtgctgagggcgagtgcgccgccgccgccgccgcctcctcccactccttcttcttcgccgccgcctcaggagccgctgacaggggaagcaggaggctcgcggcccggccctggcggcacactcacagcgccctctgaggaggaggtctgctctctcgccgctcccgagtcgcagacacaaaagcccccagactggagccgcctgtaaaacccgctctggggcgggcgagggacgtggcgcggccccgcggcttccccgccctgagctccccagccccgcgcggggacgggcttcggggggcgggggccgctgcctcgtcccgcggcgcctcccgccaccgccgccgcctcgcgctccgcctcggcccagcccccacggcccgcgcgcgcctcttgctccaagccggggctcgcgggcccgcggctcttgcagcccgggtgggcagcgcgcgcctaggggccgccccgccccgcgcccggcgctccctcgccgaccgccaggcccgagaacgcccgaccccgcggccgacgctaccgggcccagctttcgcaaggaaagggcatctccgaacttcgtcggaggccacagcagcaggcgtctcggcctcgcagctagggatcggaaagatgaacgtaccatgcgaggaaactttgtaagcgggagctggagagttctcggcgggcatgtggggatccagattccccgactccgtgtccgcgtggccgtggtgtggacacctgtctgt

SEQ ID NO: 335122 - DNA, 378 bp, Homo sapiens
  chr15:57598802-57599180
  hyper
cgcgcacagcccgaggaggcagagccccagacgggaatgggcttttcagaggtggggtgcgggcgaggggacgatgcattatttttaatatttgatttatttttccaactggacttcttcccggggctctttctgggcccagctgcctttgtgatcccgcgccccggtcctcggcctctcacctccagcgccggggcgccccctgctgtcggaagcggctgtgaccgggcagaggtgctatctgggactctgggttctcagcccggggacagcgaaccgaggggcagatgatccatcagaaaagagccggcactgcccagccccgcgcccctgcccctgcctttttccgggagcgcgccgcgccgcacccgctacggc

SEQ ID NO: 335123 - DNA, 771 bp, Homo sapiens
  chr15:57668421-57669192
  hyper
cggtgacggcggaggggaggtggaaggacgaacggctccgggaaggggtgaggtctaagcgcagccccgggcccagcggagccgagggcgggtggtgcgggggttcctgggtaggttcgtcccgacgggccgcgggcggattgaagggagggttgggcccgccggcagccccggcgggtccaggcccccggccagcccctgcccctcctcccaggagggcgggcggcgactgcggggcggggcgcgggctcgctcggcctcccggcggcgccgcggcccttgcactccggccgggctctgctggctgcggcgggagctggacgcgggaggaggcggcggcggcggtgagtgagctccgggctggagcggggcggggtgtgcgccggcagccgggtttcggggtgctaggggccgcccagggcggcgggacccccaggggttcgggctcagccaggtgcactgtgctcagtccgcgcgtccactctcggtgacccgcgccgcgcgtgtcctggggctcgaagatgcgacccggactcccgcgccgcgccccgccgagggcaggcgcagaacagatgcgggcgatccctggggaacccgcttcggggcggggtgggagggaggaggccctgcagaacctccctttagtgaagagggactttctgccttcgcacccctgcctggaccctccggctctagtgacagctgggagagactcacacgaagcagtttctgacctatcctgtcgtacacaagtcctcggcgtgctcggcc

SEQ ID NO: 335124 - DNA, 354 bp, Homo sapiens
  chr15:59729552-59729906
  hyper
cgtgtcccccgcaactccgctgaaatcctgcccaccgagaggaagcacaattatgagtgaatgggcttgtgcgtcctgatgagaatccaaaatcgagaggaaggtggaaagagccaggacgcgctgggaggggatgaagctgacgggagaagaaagggctgggaagaggaggggtgttcggggttcttcttctcgtcgtgtctgctgcgatgagacacgatcctgggtcccaactgcaggtgtcaaggcgattcagtaaatgacacatggcagccccggagggttcgttcacctgcacaggtggggcgtcaccgtggcctaatcaaataacttctccccaatttgaggtggggc

SEQ ID NO: 335125 - DNA, 705 bp, Homo sapiens
  chr15:60287014-60287719
  hyper
ttccagatccagcacggggaaagatgagacatttgccttcgagctcgctaagaaagtggcacctggttggtggaggggagagataccaaatgtcggcgcccagcctgaaataagtggcatgggacgcgcagggagggcgttcagcttcagaaagcagcggctacgctgggtccaaacccggcggctcgggaggccatagctcctaggtgcgtccgagctcctgctaccctgcgcggtgttgtcctaccggaggaagtggctgatgggcagtctaggatcccggcccctgacccagggccctctcctccctgcggtcctggtccgggtcatggtcccggggctggtctgaagtgctgtctacagagggcacttggggaaacatcgtaggtccggaaattcccagggaaagtttttgcaggagttgtggacgccgcagcagccccaactctcccaacccagcttgcgacccgagagaagtcgctcacacttctctttgggggagggcgacagttccggggaggacgcttggatcccgaaaatgacgggatccaggtcccacaaccctcaggaagcgctgcggtcttcaaaactgcgcagctaaattcctgggcgcattctccctttcttggcgagtccagtgcccgtgccggggagcattccagcccagcttacctcggcaggtagaaagcacagcatcgaggctgc

SEQ ID NO: 335126 - DNA, 144 bp, Homo sapiens; identical to SEQ ID NO: 224864
  chr15:60288754-60288898
  hyper

SEQ ID NO: 335127 - DNA, 406 bp, Homo sapiens
  chr15:60289235-60289641
  hyper
cgtcggtaagtccttggggcaacctggttttcccctgctgacaagctgtgtcagttaactgcaacccaccaagagtcagccaacagcccccgcgctgctagagcgcccaaagcagaggccggccgcgaggagggccagagtgcaccgcgggggggtttgcaccgcgctggggttggcaccgcgcgctaggacccacgaagcggcgcgctagtcccaggtgagcacgaaatgagcggaaggactctgccgcggaggggcggcgagcgcctggctgcgctgcaggccccgccaagccccgccccctagccattcttagctgggggaggccagcacggatcagccgctttctttcttttctctctttctttttcaaacccgctttgtgggtggcaactcagcgggggac

SEQ ID NO: 335128 - DNA, 2539 bp, Homo sapiens
  chr15:60295980-60298519
  hyper
ataacccatgcaaccaaccccgggtagtgctaagcgcaggaaaagggtcggcttcaggggaaagccgtgcctaaagttacctaacgatacaaaccggatacaacgcagaggaaacagaataccccagccaagcaatttccatgtcaaacatcatccgcgcggctgctccatctgtgaacgtgagtggtcgcctggctccctcttccgcggcggccgcttcctcataccttcacacggcgcacaccggccggcgcgtccagctgcctgcccagtggccgaggctcttccccctcgcccagtcttgagctggaagtgattcctattggccaaggtgtccatgtaaataggtgtgaaagaaaccagagctggccgggctctcccttctcgctcagtcccctccctctgcagcccccgctccccctcctcttcctcctcctcccaaggcgattgtcatatgatagctaagaagtggcacattaatgaagcgccgctacaggggtcttttctgctcctgtcaccgcttaaaactatcagatggttcgagggaggacatggaggcagccacctagctcagcggagacgcggagcccacagcagcgccctccggagccctaacacgtcgctgccaccatccgcgccgggactccgcagccgagctcggccgcccgcaggacgctccaggagcgtcgcggaccgggcggcacgggacgctgcggggctgagctcaagagcccaggttcgcgccgagtccaaccggacccggacgctgcgcgcggagtgcgcgtcgagtgcgcgccgagagagaagcggcgcgcagcggcgtcctcccggatgcggacgcgcaacttgaagcaactttaaggtgagcagctctctgttccgtccctgccccctattctggccccagtaccgacttacttcccggctatcctcgcgccgttcgccggcttcccctcccgcgcccactaagcccgcaaagttgctggcgaaagagtccgggcgctggctgatcgagcgccgcaggccccacccccgacccccgaagtctgttactcggtctggctgaccccgccggtgtctctgtgcatccatgctacctttccctattacccacccccttcccagatccgagcagtccgccggcccgcgcggacccagagcaagaagagggcgaggaagaagatgcctcggcccggccgcaacacgtacagcgaccagaagccgccctactcgtacatctcgctgaccgctatggccatccagagctctcccgagaagatgctgccgctgagcgagatctacaagttcatcatggaccgcttcccctactacagggagaacacgcagcgctggcagaacagtctgcgccacaacctctccttcaacgactgcttcatcaagatcccgcggcggccggaccagccaggcaagggcagcttctgggcgctgcacccaagctgcggggacatgttcgagaacggcagcttcctgcggcgccgcaagcgcttcaaggtgcttaagtccgaccacctggcgcccagcaagccagccgacgcggcgcagtacctgcagcagcaggccaagctgcggctcagcgcgctggcggcctcgggcacgcacctgccacagatgcccgccgccgcctacaacttgggcggcgtggcgcagccctcgggcttcaagcaccccttcgccatcgagaacatcatcgcgcgggaatacaagatgcctggggggctggccttctccgccatgcagccggtgcccgctgcctacccgctccccaaccagttgactaccatgggcagctcgctgggcaccggctggccacacgtgtatggctccgccggcatgatcgactcggccacccccatctccatggcgagtggcgactacagcgcctacggcgtgccgttgaagccgctgtgccacgcggcgggccaaacgctgcccgccatccccgtgcccattaagcccacgccggccgccgtgcccgcgctgcctgcgctgccagcgcccatccccaccttgctctcgaactcgccgccctcgctcagccccacgtcctcgcaaacagccaccagccaaagcagccccgccacccccagcgaaacgctcaccagcccggcctccgccttgcactcggtggcggtgcactgacccgcaggagcccacgccccctctcgttctcctccccaccacctcactcgccttccctggctcccagtcctgccggcccccacctgggaccgccaccctaacttgttcatttcaccttcggccaacccgccttgccccaagagaactttgttttggacccaggagaccaaacacaaacttgcagatgggccgagaggcgcgtgggagttgtcctcgcccccacatcaaggaaggccggggccacctgagccgaaccatcccctccctgaggccccgaaaccccctcctatttgaccggcgggggaaaccctgtcaccccctcttcgccgagaaaagcgcgtcttccctccgcccagatcggcggagccccgaactctgc

SEQ ID NO: 335129 - DNA, 150 bp, Homo sapiens; identical to SEQ ID NO: 237981
  chr15:60883426-60883576
  hyper

SEQ ID NO: 335130 - DNA, 1564 bp, Homo sapiens
  chr15:60883785-60885349
  hyper
gactaacccgcgcccgtcggccctcaccacggtctaacctccgcccctgcccgcggatcccgtgggctgccgagttcctccccacctccatccaccagccaaagtgtcaagcggggtgcgccgcggctccctgggccgcccagagcgtcttggcacgctcgaggcgcccgtctcgctccggcccgcgcgctttcggaagtggccgcggcgggacacagcgcgggacacagcgcggacctgcggcacttgcccggccggcggccgctgaggcgctcggggacgcaggggcagggcgcaaggcctggggcgctgaccagtccccggggatgacatcgcgacaacgcgcacgcacggccctgcccggccgcggcgcctccccgacctaggccggagctgtcccgggtgcgggccctggggaccggccgcgggcgtccccggcttcctctgaactccgcagaccctccccttcctttccgaagcgcggcgactcccggcaaactttcttttgggagacccgcccggtgccaagcggacccaagagactgacaggagccggagggggcagcagagggggatccaccccgtgcgcctttgccccccaatcggaggcaggccgatcccgtggccgggctcaggtggcgccgcggcggtggcccagaaggccctggcagggcccccgcgccgagccccgggcagtacgtgcgttcgggcaggcgcgcccacccctccccctgcgcgccctcctccccgccccccggagccgccagcccacccggccccggcggggcgcccgggctcacctttcatcgctgcgatcacaaaatacatcatttaagccgcggtgcggagagcgcagggagagcggatggtccgaccccggagccccctctgccgccgccgcgccgccgccgcccgagccacagcagcagctgccgcagctgcccgcccgccgagagccatcccgagccataagaggctccatgtgaccggctgacatcacggccgccgctctgtttacaccgcgcccctccgcttcctcccggggcgggaggcgggaggcgggaggcgggaggcaggcgcgccccagcgccgcgccccgccccgcccccgcgggcaggtgagtagcagcggcggctctgctggcccaccccggccgggcctgccctcccgcgccccgggccctcgcccgggcgcccgccttcccctcgccttcgggatcacctgtggccgccggtcgcttttctgcacgcagcgccccgcggaacgcgcctctgaccactttctgcccccactcggtggggcaagaggctcgcaacccgacgccactctcccgctggcttgccggagcactcgggggcgataaatgcgccagctcgttggtggaaaagacaggtttggtctggggagctacggtcacccgcatttcctagagtgccccagctctaatcggaaggtacggcccacttctgggccgtggagaacgaagccactgggaccgtccggggagtggagtaagctcctccgaagtctttctggagagactcggcctgggcgggggaactcc

SEQ ID NO: 335131 - DNA, 559 bp, Homo sapiens
  chr15:61519485-61520044
  hyper
cgctcgcattccaaatccaccgtctcagggtctaaatatactctttgcagccaaaagctccccgcacacaaactcaccgagctagcggcaggtccaggcccccagccctcatccccttcccttttgtcccagccctcgccgcccccctcccgctgaaaccgcggttcgccgcggtcaccctttggaaatcgcctttaattaaatgtttttcgcgtgtgtcatcctgatggcttttactgtactcgaattccgtgaatgggaaagcgcctggacagggggtgtggctaaggtggggggggggatactgtaaaacagccagcacatgatcagccatattcctacctccaactacaacatcgagaggaagggagcagttcctggggcccccattcgcctctacccagccctccccaaccgccgccagaagccgagtgcaagaggagggggcgcgctgggccggtacccaagccggggctggagaaatcctctccgtccccagctccaggcggctcgcgcgagcacgcttcctccggagtgacaggcgcgatttatacattat

SEQ ID NO: 335132 - DNA, 803 bp, Homo sapiens
  chr15:61520369-61521172
  hyper
cgagagggaaggattcccagagcagaaataagtttcggtgcttgcttttgtagacgctccctccggatgcgcgtggagcgccccacaggaccgccgccctctgcgcgttggcgcgcacacgccccccgccagcctgggcgccgggctccgaacccccggtctgcaaacttgcgcatctcccctcgccgcgcccgccagacaacttggcgaacagctcgcccgcccgcaccccgcttccttcggcccttccttcaaatcccaaacgcaccgccgtgctccaaagaaggtgtccacgtcgcccccagaccccggagcgccccctctccacccccgggacttcccaggtcgctcactcctcccgccccccgcccagatctgagagggaccgaaaacacacccccgactcgggcagccagggccgaaactgtcaagaggagaaaaggtaaagcggaaggagggtggccataaacagatttttttgccccttcttaaaaggacactgccgctttaaaagtttctttcccgggcccccactccccgcatctccgtattttgggggagcgtatttaattgaggcaacgcagctttcctccagtgtttgcagaaaaatcaaagccaggggggtgagcccgccggctgtcaaccttcccgccgcctcccccgccccactctgctcccgcaagccgagaacgggctgcaaaagtttgcaacatttctggggggcggaggggggaggggaggggggtcctccgggctcggggcgccgccgcaggctcgcgcgcggccgccggaccccgcgcccc

SEQ ID NO: 335133 - DNA, 763 bp, Homo sapiens
  chr15:61521175-61521938
  hyper
cgcccgctcccggccgccccccgctccgcgcccgggctcccgccgccccctccccagcccctctccagcctcctacctctgctggtgctggaatagctctgtctgcgcaccggggcaggcggctcgctcttgcgggcggattcctggttcagcggggtctccctggagccggcggccgcgtccgcgccgctgctgcctggctcgctggcggcggggtcgggggctgccggagctgactccatgttttttcccaatgtagagatcgctggagatggcgagctccgagactccctctatcttctgttttcagagcaactctatggtaccaaaaaaaaaaaaaaaaaaaaaaaaaaaaaaaaaaaaaaaaaaagaaggagaaggcgaccggcgaaagcaggagggaaaaagcaggcggcggcgggcgggcaagcaaaagcgcgagggagcgcgcggagtgtctgggtggacgtgtgtgtgcgcccgaaaggggacaagaggcgggtctggccacaggcagcgctagcgagagcttctccagccggcccccacacccacattccccaccctccagaccccagaccgagagccacagactggctgccaattttgggaggtggggaaaagaggggaggaggagaacagagcctcccgcgccccaatcctcccctctccccagcccagggacagaaattaaaatcggtgagatgattccgtgcctacttctgagactctctcgggaacagaactcgtccccatccgctgc

SEQ ID NO: 335134 - DNA, 479 bp, Homo sapiens
  chr15:62359006-62359485
  hyper
cggagagagaaagaactgggtctccaaaccttgctcagcaaatccagccacgtggcagagggacagggaagagcctggcgtcaggttaccaggcagcgcccctctgctcggcccactggcaagcgctcccagcggcaggtataaaagctcaggctggcagtccttgaacactggtgctgaaccccgccgcgcgcgctttgaatttcccagccgctaagcgcctctcctggtcggtgtcccaggcagaaaggtgcagagacccatctgacgcaggactccaggtattttaggagggacccatcggcttgcttaattccctgggggattcgtctgaggctctttgcctctgcaaggggagaaccagccacagtttcccggaaggaataacaattactttaattctagctgaggactagactgctatggtccaaagagtcaggaaacgattgcaaggcaatcgttggcacagagaacagagc

SEQ ID NO: 335135 - DNA, 352 bp, Homo sapiens
  chr15:62359741-62360093
  hyper
cgggactcgctctgacgatccttgtgcctttgtgcactgcaggtagacaagctccagcagagagtggccagatgtggtgcctggagcgactccgcttgggtcctgagtgccttcggcggagcggagactggcttctcccgggtcgggcccgcggagccaagtctcgcaccaccgccgcgtgcgcaaatgtgctcactccggaccgcatccctgagttctgcatcccgccacggctcatgccccgcctggccttggctgcgctccggaattcttgggtcgaagaagcagggatggacgagggcgccggccgcacagactgggacccgcgctcgcaggccgcgctgtcactgcc

SEQ ID NO: 335136 - DNA, 954 bp, Homo sapiens
  chr15:62456599-62457553
  hyper
cggcgactccttccagcccgcagcgcgcgactcagcagcccgtcggggacgcgcaggaggcggcagcggcggggccccgcagcgagcgcgtcctggggcaggcggggaccgccgggggccgcgggggtggccgggcccggacctcgcgggccgcacagggtccccaggggggcgtccgggcctccgccgccgccgcagctgtgggcccggggccggggcgcgggcgggcccccgagcaggagcgactccttgcggcgcgtgtgcgggctctcgagcagcgcgcagaagccgtaggtggtgcgcacacggggcaggtgcggcagtgacagcgctgcctgcgagcgcgggtcccagtccgtgcggccggcgtcctcgtctgccgcgcggggccacaggtcgctttcagcggcgcagcgccggggcacggcggcggcccggattggagactcgagcgtgcaaggggccggcagccgcggcgggatgcagaattcggggatgcgattcggcgtgagcactttggcgaaggcgggcttcggcgcggagctgcctgcggccgaggaacagagtttctcgaggagccgcatccttggaggctggggctaggagtggcgggaagaggtgcgcctgcgggggagagaagctgctgagtttgggcgcctggagctgctgcagcccctcgacgcggctggatccctcccccagaccctgtaaacgtcccccacgtgtttaagaccccagaccagttccagccttcctctcccctgcacccacaacaaatcagccccgcttcagacctttctctcttcttcagtgtctctggatctggttgcaagctcagtgccagtggcctctagcccgctgccgaggcgccaccttcagtactgcggccaggagagtggcgctcccctcttataccgtaggctgagtcccgcccagccgccagcggcccaaccc

SEQ ID NO: 335137 - DNA, 55 bp, Homo sapiens; identical to SEQ ID NO: 237989
  chr15:62684295-62684350
  hyper

SEQ ID NO: 335138 - DNA, 132 bp, Homo sapiens; identical to SEQ ID NO: 237993
  chr15:63674098-63674230
  hyper

SEQ ID NO: 335139 - DNA, 79 bp, Homo sapiens
  chr15:63779680-63779759
  hyper
tgtcccctagggggcgagctggggagagaccggagtccctgggagagctctgcgcggaaggcccgagagaattggtccc

SEQ ID NO: 335140 - DNA, 832 bp, Homo sapiens
  chr15:63795400-63796232
  hyper
cggtgggtggataccattaggcagaggtctatgcggaagaggccgacttgtggcgtgggaggtagggaggagtaagaagtgattgacggggcgtccctggctgctctaggactgcattgcggggaggtgcccggctctaaccactgcccggcccggttaatcatttcctgaccttccttcctcctctcgctctggccgcaggattgccacatcagtcttccccctcctcctgctcgccttctggccccgaggctccttcgccgggttttacaaggagccccaacttggaagcaatatttgtaatagccccggacgtcctcaagtgccccagtgagatcgcaggctcgatccagggtatgccggcccaagcggccccttgaggcttgccctcttctctaatccctcactaaaaagaggtcagagggtcagggatccaatctccatacagatcaacaagttacagactcggtttccccctgcggtaaaaaggggatggtaacagctggtagggtgttgcgaggcttaaatgcggtatgggaagtgcctggctgggagaccttaggtatctaacaaatgctagatcccttcccttcttatcgcctggtaatggggagtttagcttgcccagcaatcccaggctacgtttatctcacttgaacttcctggcttgaaagtcctacgatgtgctggaggtaacgcagatggtgagtcacagtgacaggatttgaacgtgggttcatgggcgcccctgcgggcccacccacgcagcatctaggtggctggctaacgccacgtgttcagaacctagaaagggctacggatcgcacctgcc

SEQ ID NO: 335141 - DNA, 134 bp, Homo sapiens; identical to SEQ ID NO: 237998
  chr15:64443636-64443770
  hyper

SEQ ID NO: 335142 - DNA, 203 bp, Homo sapiens
  chr15:64454743-64454946
  hyper
cggaatccggcaggcgtgatctttcaccatctccccagcactgaggggtgtttgcaaaaagcctgctctgagactgccagtgtcggccccagatgggtatccggggatccaactaactccctgggtcagggcaggggctgggggtgtcggggtgggtccgggtcgttccctggactgaatgggcaggacggcccagacgccac

SEQ ID NO: 335143 - DNA, 206 bp, Homo sapiens
  chr15:65186319-65186525
  hyper
cgagccattctcgggctcggccagccattgggctgggaacctgtcaatcctggttgatcttccaatgagctgtgaactggtcttccgggaggacttacaggaggctggaaacggggcctggcgcgcgcttccctctcagtgcgaggctgactggttggactcgccgggctctactgtgggccccacgctatgtttagacgcccgac

SEQ ID NO: 335144 - DNA, 448 bp, Homo sapiens; identical to SEQ ID NO: 238018
  chr15:65713971-65714419
  hyper

SEQ ID NO: 335145 - DNA, 394 bp, Homo sapiens
  chr15:67357339-67357733
  hyper
cgcacacgttcccgaggctctcggccggtgtgatctcaccgactagagaataaaaacagcccaggggcgccggcgccggccaagggccttgacggggatcagcaagcgcgaggccaagtgcgggccccaacttcctgggcccgggccttccgcgcgccccctctcgggctcgggtcctctccagggtgcactcgcgtccggacgacgcttacttgctgcgagtccaaccctctccggcccgcaactccaaccgagccgcccgagtgtggactccgagagcggacgccacgggccgcgctcagccctcccgcccgaggcccctctcgccgtgtttcccaggacttcctccccgcgcccgcccgacttcaggtcggggccgcgcagggtcccgcgc

SEQ ID NO: 335146 - DNA, 652 bp, Homo sapiens
  chr15:68115496-68116148
  hyper
tgcagggtgctggacgcaggtgtgcggccgcttacctggggcgtgcaggccttgggctgcggggaggcggcgggcgccgcgcgtggcccgcgggcgggcggacccggggagggcgctagcgactgcgcgggcggtgggtgtggcgccccggctctcagctgtcaggcgcgcctgccccgccactcgggctgtgaccgcgccgtccccgccgccgcgccatgcgctccaggcttcggcctcttcttccggccagtccccggcctcggggtcaacggctcagggttcgcatctccgcgcccggggtcccggcgccccgtgcccgctgagagcgggaggggccgcgggtgggagcgcggagaaccagggagcacggctgtgcgcgcgcgcggggaggggccgcgccgtcacccggagagcccggcggatcccggactcccgcccgccgctcctcccgccgcgcacctccgctcaccgctcgcccggctccagccgccgccgcactgtgagtacccacgtccggtagcccgccgcccccgcgctctgctcctgcagcttttttttcgtttagttctgatttgggctcctgtggctgttgtttttatgattatacctaaagacaccaccgcctcgctcccaccactgccagtctccc

SEQ ID NO: 335147 - DNA, 332 bp, Homo sapiens; identical to SEQ ID NO: 238041
  chr15:68117233-68117565
  hyper

SEQ ID NO: 335148 - DNA, 817 bp, Homo sapiens
  chr15:68117892-68118709
  hyper
ttgccgaaggcgcacggatctgggcgctgaaaaagccaggatttggcaatggctttgctgtgtggccttgggcaagtcactctgcgtatctgggtttcacttccttcccaatccgaaaacgggattgggttccttgcagcccgggcattcctgaggtctcctttaccccttctcctcccccaagccccgggggctgttgttaacggcgccaacatgggtctgagtaacaaaagacgcctgtccagggggtgaatgagtttggactccccactgccaagtatcccccgcgcgcccaactcggagcgccctgctgggcgggcccgagcctcggcggcggcgctgaaaatggctcatctgctctctgctttctctatttcgcaggagcggcggcatggaggctctcaccactcagctggggccggggcgcgagggcagttcctcgcccaactccaagcaggagctgcagccgtactcgggctccagcgctctcaaacccaaccaggtgggcgagacgtcgctgtacggggtgcccattgtgtcgctggtcatcgacggccaggagcgcctatgcctggcgcagatctccaacaccctcctcaagaactacagctataatgagatccacaaccgccgcgtggccctgggcatcacgtgcgtgcagtgcacgccggtacagctggagattctgcgtcgggccggggccatgcccatctcgtcgcgccgctgcggcatgatcactaagcgagaggccgaacgcctgtgcaagtcgttcctgggcgagcacaaaccacccaagctgcccgagaacttcgccttc

SEQ ID NO: 335149 - DNA, 529 bp, Homo sapiens
  chr15:68119718-68120247
  hyper
cggcggcagcggcggcggcagcggcagctgctggcagcggtgccccagagcccctggacggtgccgagccagccaaagagagtggcctcggcgcggaggagcgctgcccgagcgctctgtcccgcgggcccctggacgaagacggcacggacgaggcgctgccaccgcccctggccccgttgcccccgccgcccccgccgcccgcacgcaaaggctcctacgtgtcggccttccggccggtggtcaaggacaccgagagcatcgctaagctctacgggagcgcccgggaggcgtacggcgcggggcctgctcgggggccgggacccggcgctgggagcggcggctacgtgagcccggactttctgagcgagggcagctccagctacaattccgcctcgcccgacgtggacaccgcggacgagcccgaggtggacgtggaatccaaccgcttccccgacgacgaggacgcccaagaggagaccgagcccagcgcacccagcgcagggggcggcccagacggtgaacagcc

SEQ ID NO: 335150 - DNA, 1427 bp, Homo sapiens
  chr15:68120277-68121704
  hyper
cgcggacggtcccgcaaactctcccgacggcggcagcccccgcccccggcgccgcctcgggccacccccagctggccggcccgcatttggggacttggcagccgaagacttggtgcggagacctgagaggagcccgccaagcggcggcggcggctacgagctgcgagagccttgcgggcccctaggaggccccgcgccggccaaggtgagccccgcgcccgccccgccagtggcgccttcccacctaccctgtgcgcggcagggctgcggggccgggcggagaacgggaattttgttccgcgcaggcgtgggagcagcaggcctcggccactctccgcaggcccagccttgggcgcgctgcgaaactgggcccacccgcaccctccagtgagggtttcgaagggaagggaagctgggggcggcgggaggactggggaacttgtgtgctttgtttttgttgatgggaatggggaggagaccggctgagactgccagacacagagacagaaaaggggtgtggagaaagaaagaggaggtaagaaaggaacccagagccagagaaaagcgctcgcccgggtgggcatcagagccccaaggaagaggagaagagaggacagtgtggcctctccctgagtcgggccccagcagtaccgggtccccggaatctcccaccaccccaactcgcagttttccgagtctcttcgcactcccgccttgggaaccacagggttcgttgctgggaagctgtctcgggaccgcgtgcggagcgggaggggggctctcaagctggcagggccggggcttgaggggcaggatgcagccaggctggagtcgttggccattttgaaagtgagtgcgcatacctgtacattcggttcattaaaacacgaatcattaaccggatgcgaaaggcgtcatttatgccgcggacggggcactggcgggagggaaaatgcctaaaaggaggcgggtgcagagggtggaggacactttgaacgcccctcggcttgggagccgctttgtgtttagagtaattttcccgagggcgctaacaattaccctgaatctacaagggggcaagggtgcgccgcgtgcgtcactgtgcccgctcaagtccagcgggcgcaccaacctttgccactccgtcggctttccctcttggccgcggggtagggctgggcgtctttgggccgccgcagggcgccaccctaatcgcctgtcatttctcggccgtcgcaggtgttcgcgcccgagagggatgagcacgtgaagagcgcggcggtggcgctggggcccgcggcctcctacgtctgcacccccgaggcccacggtaacgcctgtcgcggccgctggccactgtaatgggggaaccgcagacagagggccggggtcaaggaaggcctgcgaaggaagacaaggagagagac

SEQ ID NO: 335151 - DNA, 573 bp, Homo sapiens
  chr15:68125183-68125756
  hyper
cgagcccagcaaacggcttgcaggcatcattacatggagtgattgaacttcttatcgcggcaatttccatggtttctaaattaaaaatcgaggcgtaaaattacctgggaagtaatgcctaagtttgctttaattttggttagatccatctgcctttaagcgccatcccaggccatttccttcctccgccagtctgcagttaggagctccggtaccccctcccccatccctggagttgtttctgcgcggagcttagccctggggagaggaggaagcccgggctgtgaccccggcctttcggagggtggtctgcgtttcctcactggcccctccccttgtcttccagataccctgtgtaacgaactcgaccaggagcggaaggcgcgctatgccatccagcagaaattgaaaggtgcggaagccgggaaacaaagataggaggggtgctgggtgccggccgtgctgtcgactgaatgaatgaatagtgggactagtgaggaaggccacgatccacgtggatcaggatctgtgagggagaaaagtgggaactgattttaacgggaagattattct

SEQ ID NO: 335152 - DNA, 536 bp, Homo sapiens
  chr15:68126032-68126568
  hyper
tgagcctggagaggcgcccagagtgaccctcgcgactgtctccccagaagcccacgacgccctgcaccatttctcctgcaagatgctgacgccccgccactgcactggcaactgctccttcaagccaccgctgttgccctagggccggcctggccgcacccctgcgccctcaagccatgctgctccttgtaaatacccgctgctgcggtggccctgagcgaggaacaagccattcggacccgaccgatgtaaatacagccgcccgtccgcccgccttcctcccgggctccccggccttgcccgccccctcccgggcgtccctgtccagggccccggcttggtttccaagtgtaaataccgcctcgcgcctcaaatccccctaccccgtgtgaactctagggcatcggacctcaaggggttaactggacagacggggggcgggaggggagagcgccccctcccattgtatagccttgaacccgattgtgaatacaatgtagcaacttcgctggcgcctgccccgcactccccgtccc

SEQ ID NO: 335153 - DNA, 1773 bp, Homo sapiens
  chr15:68126860-68128633
  hyper
cgtgactttcgtttttaataataataataataataataaaagatgtcacttctggggctacggaggtgggagtgcaccggcggagcggggcggcggaacaccgtgcaacaggtgggggtgggagccgccccgcgggttctggggctcccagggtcagaatcgggcctgctcaagtgggcagcagcgagcactcaacctctccactgtgccctccagacacactcagttttcccccacagggcactccctctccgcgtttaggaccctcccttgggcccggaatggaggaggggcattacgtcacggtccttagcgcagcggtcccgggctctttcctcaagagctcgaaggcgccgagggttcatccatgcccatttccacgcctgccacaccggggaagttacctccggggcgctcacagacagggcgccctgccgggaatcccaggttcaaccagaattgtccctttagatggcgcgggcaccgccggcctggcctggcctgggagcgctgcggcagggcggaggtctcagggagtaaggtggtctccgccgggcaggcttggaaaggaaggcgggacttggagagctcggtcacagacggcctcccgtctgccccgccgctacccgaaaggagggagccccgtccgcattttctgttcggtccattttagttcgagaggggctaaggactcgccgggcctcggctggggcgtccgacgtccgggtcacggttggcaaggcctcccagcggcctcagtttccacagcgcacctcctgcttgggctacagacgacgctgcaaattgcagaacactctttgcagggaggagagtgtggatggagtgggagagagctcacggcacagggaatcattcagccttggctttcatttctcgccctcggctggctagtgggggtcccgggttgagcccttcttttatctttcctgggtctccgtttcggcctctatgaaataacacgcaggcctccgtccatgcggctcgtagaaggcgggcggcaggccccgcgccaccggccagcagctcgggaccgggagccctgggctgagggggccgggaagtttcgtggcgggttgtcttggtgggccttggacggagccggctagtaggggcgtgctctgggcctccccgaagctgtgcagacgaggagtcccgctgcgcggtacagccaggaagccagtccctagagtcctttgcgctgggggtcggagccttggagtcccaggatgttccgacggctaagaccagagcggacacaaaggagataacaatgaagagggcgccggcaaatggcgaagcatcgcctccggacaggccatctccgggcagggcccctctagggagcgggaacgtttcatatgcatgggacccaccagatccgctttccgctggaccggtggcgaaactgaggtccagagaggaagagactggagtctccaggccgcgccagggcccgcggaactgcgacggggcgggacagcgcgggtgtgggagtttgccggcccctttccccaccgcggattgcacctttggaagctgcacttttcttctctgtaaaatgggcatcaccattaccacccaggcaggaagttccgtggctgcggctcgacagaggagccaggcaaatgctccttcccacccttccttcccaactccccccaaagtggaaaagctcctaggcagctggggccctccggaagggacgccccatctgggcaggaatctctgcggactggagtcgtaggcggatcc

SEQ ID NO: 335154 - DNA, 258 bp, Homo sapiens
  chr15:68260481-68260739
  hyper
atgcaaactaggatcattttcgggcgttggggcccccccgcttgaaatctggtttccatgttcacaaaacgcagcccgactggtggaactcgcgactccagacgcagagaagctgtgggcagaggcggaggcagagggtgggaatgcagcctggcgttggagtggggagaaaggggagggaggaaccgcgcgcccaggccccgcccggttgcctaggtgacggggagcgagaggaagaagtgggggctgagctgatcc

SEQ ID NO: 335155 - DNA, 287 bp, Homo sapiens
  chr15:68347714-68348001
  hyper
cgcctcacgaaattagatgaaagggtgcccccttttccccgcttttctcccaccccaatctttacctgatgatggcttctttaccgtagcagatataccactacacaagcagttgggggagggggtggtggaacccttatgactggattgtgacaaatggggctccgcttgaataattttggtttagtagcaggcagttcttaactaacgcgtattatttcgaggctctgaacgcgatcttctctgtggcttcctgtgtgtgtgaacccagcagctggttatgtctc

SEQ ID NO: 335156 - DNA, 1197 bp, Homo sapiens
  chr15:68723471-68724668
  hyper
cggggagcccggtgtgggacggccggggccagggtaccctagggcggagagctcagggctggcttcccgctcccagccgcgcgcccctcgggccggaggttcctgccgcgccccgacacctggagtgcattaggcggcggcgcgcgtctaggcgacggcggctttccccagattattgaataattgcataattccgagcgcgggttgggaggcaatgccgggtccctaccccgggtgtcaggtaacgtttcgggggtcctgcgctgcgcgactgtgtcccgccgctgctggccgggcagacgagagctagcccccgcctaccggccatcgccccggggctttgctctgtctttggccggaggcactctgcgcagccctcacccccacccttcagccctccggggccgccgcgcccggctctccaaactttgagatgcttccccggagccaggcaggagggcagccagggcacactctcttggcgctgattcccttccccagccggggccgtgcgccctcggcgctcccgggacacccgagtgcccctggcagccgtgcgggaaccccggcatgggccttggaggcacctaaggcgcccaggagggccaccagatctgggagcttttcaactcaagcctcttcaactcttcccaaacacaccaaagagtcccggctttcaatagccttcgcacctccctctttagcgaaacttgactgaaccgctagactggggccagtccctgggggacccacgtccccaagagcagctgaggtctgaccctgggaggagggtcgcgtcccgatcctggccgctggatccaagccccgagggcccagggagggactccgagaggcaaggggaggcagagggtgggcacctacctggccacaggctgagcgcccaggccaccaccaggcccctgggcaggtccatggcccgcggcacggcggctgggtccggtgtgcagcggcggcggggggcggcaagccagagcggcagcctcctcggcgcggcgcctgcagcctgcactgcgcggggcgccgggctccctgacagctgcggctcattcagaggaagtgggagggctcgagcggaggggaggggcgccggacaccactccggctcgggctctgggccagtctcggccgctctgccacctgggcaggcggcgcgctgcctcgacgcgcctgtgcagc

SEQ ID NO: 335157 - DNA, 202 bp, Homo sapiens
  chr15:68821338-68821540
  hyper
cggtgcagactaatcctaaattagtctttctctttgcctcaacaactactagatatcttctgatctctgacactccaatgtttcctggacaaacaaagggagcgaagtacgtgggttgttcaataggaagtggcttgaaggtggtttggcaggctggggttttattccctgactctctgtgggtacattcttactgtggctc

SEQ ID NO: 335158 - DNA, 234 bp, Homo sapiens
  chr15:69109452-69109686
  hyper
cggctttttaaaattctcagagatgccagcatcggaggacccgacgcgacgaattgcctggctcctaagtcaacatccggagaaaggcggtttacttttttcaaaagcaaaccttcatccctctctttcgctttaggatctcattactattgtagctgccttctcccaggcaaaaataaaagggggaaggagcaggtttagaccgaggaggagggttcccctagcctgcagggc

SEQ ID NO: 335159 - DNA, 263 bp, Homo sapiens
  chr15:69114222-69114485
  hyper
cggcgcacggtttattctaatcgtccacctgagtcattcggttcggtttgggttgccaaggaggctctaactggagccctttctcctggtttttcggcgtggttgccttgggtatttttgaatcacattaagttttaagagaccttaaagccccgatgcccactgggttaccgacttacggcactaagttggctgcctgtggctgttaataaaccacggggattgttgtcaacgaggacagatacatccttacctttccacac

SEQ ID NO: 335160 - DNA, 204 bp, Homo sapiens
  chr15:69136239-69136443
  hyper
cgtgtgtgtgtttcggggctgctcaggaggacaggcggctctgcgctgcggctgtggtgggctccgtgcacaccgcgctaggctcatagggcggctggcaggtccagagagcggcgtgggagcagctgctgccacggtggcagcggagatgaaggtgtcagcctgacgcgggcggctcctgagagctcgctggggcgcctcagc

SEQ ID NO: 335161 - DNA, 416 bp, Homo sapiens
  chr15:69366379-69366795
  hyper
agatgggctgtggagggggacgttgggaactgcccgaccccattctcgccttttcccgctggatgtgcagctttcggaacgtgcaggggcgggagtgtctacaacctaagaaaagggccgcggtggggagcccggagcagggctgggtgcagggagcgctctcgctgcccggggcgctctgcgctgcgcgcccagtggggacagcacgccgccccgggagtctccaggcgcgggaggtcccagcagattttgcataaagggaggaatcgagtccagagaacaaacaagatactggaggtggtggcacggagaggattgattcggtttgcaaccctacgaggtcgtggccgctcggggcaggaaagcaggctcctgtctctccaggatccagcctcccgatcaccgcgctagtcctc

SEQ ID NO: 335162 - DNA, 954 bp, Homo sapiens
  chr15:71055275-71056229
  hyper
cggccgagcgggcgtgggcagcagggcgagcgccgggagaggagagcgacgagggggggtcaacggaaagagcggagtaggggtgccaatcgaggaactttggatttaggaggagggggccagaaccgccccactgaggtttcttccagaagttcggaggcttgggagaaaggggtggggaagagacccgtagaggctcgggtgcggcggcggggaggatccccggggtctctgggctgacggagtctccggcctcagggaggagtcgccagggccgccgaagccgaactggcagaggaaaagcagaggaaggcggcgcgcgaactcgccagcaaaggagggctgcgctgctcccggagcggagcgcctcgcagcccggaccgcgggactcaccgcgctggcggcggcggcgccagacgacgcggggccgggcacgtcctgcctcctcaggcgggacttgaggctcttcatggctaactcttgcctggcccccgcgcgaaccttaaaggctgcggagtgccagcgcgcaaggagtagacggcagcggctgcagcagaggcggcgcgggctgtaccagccccacctgcctgccacctgcgggccccgggcagcagacgtcgacaggcctgaggcggggctcccctcccgtagccaattgacccgctgccctggcgggggcgtggcaaaccgcgaccaatcggaatgcgggaatggggcgggacttcccttttaaactgagtaacacccttcctctcccagctggaggaaaagtttgggaactttagcccgggaaggggcggaggaggtgggcggccagaggcgtggagatgcgcgcaggccgggctccaggccaccggcgcccgcccacccggagcttaagatctagagagagcacggggtcccgcctttgccacctctcatcttcccggactcccctcctctttccacccacgc

SEQ ID NO: 335163 - DNA, 748 bp, Homo sapiens
  chr15:71146071-71146819
  hyper
ctgactcaggggctcggcccggagctgcttccccggcggcggggctgactcaaccccctctgcccgaggagttgtcgcgcgcagtcagcgccccgaactcgcgcgcggcccggcgccccctcggggcccacctcccgggccagccgccgcgcctacctgtgcccgcggctcggctcctcctcgctcgcgctgccccagccggggctgaggtaccgggccgggtccccggcgccccgagtctccgccccctcctcctcgtcctccaactcgtccacgtcctcggcctcctggatggcgacgcggatctgcaccgccgtcttgggcccgggccgagcctccccgccggactgggccatggctcgcgggactgcggcgccgccggggtcctcacgccgcaaggcccagccagccggtcggcagcgactgcgacgagggggcgggggcggtgcgagcgcgcctgccgctcggcccaggggagggacaggggtcgcggcgccccgccccgcgccgccgccgccgccgccgccgccgccaccaccccgaccgctagtggagcgcccgcgcaggcggggcctcggaggtggagggcggctttccggagctcctccgacggaggcccgtcccggaaggatccccgcgacccccgatcactccctccgtcttttcgccgctgtggggccccagcccgagaggaggtgtcagggctccctcctcctgcgccttctttcacggcgccgcagggatgggc

SEQ ID NO: 335164 - DNA, 1146 bp, Homo sapiens
  chr15:71184276-71185422
  hyper
cgcgtgtccaggcggcctgcttggtctccctcctctcccctcttaggtgccggggcgggcacccggtgcagggtgggcacggcgcctgccaccagcctcaggcgctgggagaagcgcaggttcttctggataaccgaagagacgtcaaaacaggctggggcaaagtggtcagagcagatgaccgagcggtcattgcctccgtaccagtcggcgcggcaaccccgcacgaagcggtcccagagcagccgcacggcccggtccttgggaaagcggaacagcgacttcccagacttggtggtgttgccgcagtgggcggccacacaacgggccggcatggcggccgtcttcggtgcgcgggagccgggttccctggaccttcgcccttgggcacgctcctcgcagcggcctcggcgaggcaagtcctcccctcctcacctgtccactccgggtcgggattgtttccttccctacctctggtcaccggaagtggcgatctggggcccccaatgggagggctctttgatatcttcctcctcctcctccctgcgctgctccccaggagccagtggacacaagcagagggatacaaatttcgcgcgggcagcgctgaggtgggccgtaaagaggaacggaccggaagtggtggtggttatagcaaccagtgtggccagcctcttccccagcttatcctcctcccaatactcccgctctgtttttatgaggctgggaaaatagaacgaggaagtggtgacgcactgggctctcacgaatacaactagaagctgcaacgactgtgtggctctatcgattcgggagaggtccagaccggaaatggtcgtttccatggtaaccctgagcaggttgcctgggagatgacctctttcgggtctctttgaatctccgctgtagcgtcacctggaaggcagatctaacagagaacctggactgtctcctatcatgattcccgggaaatatcgctctgtttctggccgggctgcgaacaacgtaagttgggccttctactttctctttcttcccactggtactctttctgactggcgtctttgtcctaggagatgggctgtattattaggaccggcaccgctgggtctactcaagctattgtctgaccagggtttgaggttc

SEQ ID NO: 335165 - DNA, 1032 bp, Homo sapiens
  chr15:71407571-71408603
  hyper
ccccctcccgccctcgtggcctctgtctagaccgtactccctcctactgggtgatgtctcttcccctgggacccagggaccatcccgttgttgacctccggggtcaggggtgcggatgggggccggcccttcccgcggtcgccgccagggggcggcaggagcggctccagatgacagcgggaggccgcaagaggggagggaggaaggaccgagggagcgcggatcccgctctcggatcgcaaactctgagccagagctctccgcgcgcgcctgaaccgctggccgcccgcgcagcccgacgcggaatcggggcacagcgggagcccgtgcagggcgggcgcggggcggctgggcggcggtggcggccgtccatgcggcggcgctcggggctgcccggcgccgggaaccacgcgggggcgaggcgaggcgaggcggccgccggtcgctccgggacgcggaccgccaggtgagcagagccgcgcgccccgcgtcccctgcgcgccgcccgcgcggccccgacccggcttccgctgcccaggctccggctcccgctctctggccggcggggcgggctggcgcgggctacccagtgggtgtgtccggggcgccgcgggctgcgccgctccgggctcggggagccagcgcgcgcctggtccgtgcggacggctgcgcctccttctctggttctcttccttgctgggagtcttgctctgtgctggcgccggcgctcatccctccaccctcgactctagggacagtcttaaactctagggacaatccacctcagtcgtccccgggtcggggccccgtgctccccgggtcgggtcggaggggaccggcgagtgcacacccagcccgtgcgccccccacctcagcctcgcctccctcccgcctggggcccgagagccgggcaagtctcggtcagcgctccttgagtcctggcctggggcctcggatctgtgtgtctgtctgtctcagtttagttgctgcaacccagcgagcgcctggagcccgagtggatgggttgtttcc

SEQ ID NO: 335166 - DNA, 771 bp, Homo sapiens
  chr15:72523255-72524026
  hyper
cggcgctggggacttctgaagagcaggccccaggcgtgaggagccgttctcctctctctgagctccactgcatcccagacgccctggatcctgcgccgccctgcctgcgtgcccggggccggccggcgcgccgggattccgcactagccgggcgactggcccttggtggggactgatggcgtagcctcctgcaccgctcacctccggcgctgaccgactcgggctacgctgcaaagacgaagagatccggagccacggcgcgtgcagctgctgtgcaaggagccactgcctcagcctcaaggttatcccgctgcgggccgccgcaatccctccgccgccccgccctctgcccaatcccggctccgggcgacccgggccccgccccctgcgtccccgcgggcgcagtcaccttcaggaggaagcgcggcggcggcggcggaacgcgcgggcaggttgccctttcggtgggactaaattctgcggcggaaggacacagattcagagtcacattttaagaaacctgatgaccaatggggacgcggcggggcaacggggcccgcccccggagcgactttcctcccagacccccgggcgccgggccacctgttgccgccaagttgggctgccagatggggtgtcttttcttggctctcggcccaggccaccccagctgtcccggcctacctgggcagggcccagatttatgggttccggggcagcattctcccggccccgccctgccactccccactcctccgggtgtctgctctg

SEQ ID NO: 335167 - DNA, 631 bp, Homo sapiens
  chr15:72564635-72565266
  hyper
cgctctgggcccgatctatgccgcccggccgccgggcctgagtgaagcctgtccagcctaggaggggccctcagaacctcccggtccaagcctctcacttcgtccacccctgcggagacggggcgagccccgcacccttcccgtggcccggccgcaccgccctgtgcccgtggtggcggccacacaggccagcctggcgagtactcacggcgaccccgggccgcgcgcggccgcagccgacgggacgagcggcccgggacgccccgcgggggcggagcggcaggccaaggggcgggggccgggcctggcgggcgaggtcgcgcaccccacgcctcgtcgttccgtcacgggcgcgctcagccactctgcgcacgctcgcgcggtgacacgatggcacgtggcccgctcctgaccaacagcctgacggcctgctcctgggcgcgcctcagcagccgacgccagccttgagacgcctgcgcggcggtcgctagtcgggaaagggtgcggagtggggggtggcgcctgcgccgtgggtaggggaggcagtggagaaggaagagggactctgggggagtgcggggagccttccaaaggagaatacttgcatttagcgccccgagtggttgggagg

SEQ ID NO: 335168 - DNA, 118 bp, Homo sapiens
  chr15:72612103-72612221
  hyper
cggcgggaccggggtttagcccgctcatgccgacgccgctgtccgcggtgctgaaacccaggcgcgggccggggccagcgggctgcgctgaccctcccggcgccgcggccatgtcccc

SEQ ID NO: 335169 - DNA, 471 bp, Homo sapiens
  chr15:72612514-72612985
  hyper
cgagccccagcccccgtgcttggtgacgtcaggcagctggccgccgagtctacgcaaatgatttgcataatgaggaagcagccgccaatcagagtgggagttgactgggctcgccgggggcggggggggcggctgggctcacgcgctcctgctcgccatggcaaccggaccctcgaatgccctgtgtgtgtcgagtgtgtgcgggcgtggccgtggatcgcgcgtgtgcgccttgggccgcgtgaggggaagcagcttcgtcatgcgtgatggtgtctgccggagtcggggctaatccccaccgcacacacaggcacacacaggcaaacgcaggcacacgcaggcacacacacctccaaacgctggtgcgtttcctgcgggggtggatggggattcctcttctctattcccactatcgagccagtccctcggagccaatcccaccccgccccatcacacatctctgtcttc

SEQ ID NO: 335170 - DNA, 331 bp, Homo sapiens
  chr15:72668400-72668731
  hyper
cgtgaccagaggcggctctgcgcctgcgaccccaggaggacccacaccctgccctttcacttccggcctggacctgaggctcctgctacgtgcagcggattgtgccgggcgtcggcaactgctcggctcgccagactgttcacgggcccagtagagcagtaaataaccggccacccctgcggccgtgccggccgtgatggaactagacagctcacccgactcgagaagaacggggtggggaggcgaggacgcagggcgacctggagaagaaagtttcccagatggctctagggtgaatcttgaatgttgtgatgcagctcgccaggcctac

SEQ ID NO: 335171 - DNA, 874 bp, Homo sapiens
  chr15:73660499-73661373
  hyper
cggccccctcctcctcggcgtcctcttcctcgtccatgatccacgccttggcccccacctgctgcgggaggctgtagagccgcttgcgcatggacggcggcagcttgtccatggcgccaggggccggggtcggaccgggccgggggcaggagcgcggcgccgcggacgggctccaggtccgcccgccggtcagtccgcccgtggggacgcgtcctttgccgccggcgtgggggcagcctcaggcgcccatgcttgggcaggctgcgcgccgcggggaggatcctagtcccgctccgagtccccgggctcgccgcgctacacctcctcccgggcccggctgggcgcggggaccccgcgctcccttcttgcctccctccctccctctggcgttcaggggcgcggcgcgccgcccggctccaggcgccccgcccccgcggggaacaatgggcgccggccggagaggctctgcggccgcggcgctcagggaaccgctccggagtgcagagcgcacggcccgcgcgggtcccgggcgtgcgtcccgcgggagggctggctgtccgtctgtctcgccgcccgggctttgtggctggccacccgcgagctcgcctcgcctcctctgccccggcccgtccggcccgtcccggggctcccgccgcaaccgagcggagcccagcgacccgccgggcttacatcagcggccgcctcccccgaagcgccctccggcagcgctcgggctcccgcgccccggaatattcatgaagccgccgcagctcgcgggttgccataggagcggctccagcagccgggcctgcctacctgggcttcttaaaggggcagcggcgcacgggccgggggctggaaaggggcggggggc

SEQ ID NO: 335172 - DNA, 981 bp, Homo sapiens; identical to SEQ ID NO: 203968
  chr15:73976465-73977446
  hyper

SEQ ID NO: 335173 - DNA, 260 bp, Homo sapiens
  chr15:74219416-74219676
  hyper
cgtccctgcccctgccggggcgcgtgggctcggacaccgtgcgcggccaggcgcggcacccattcggctttggccaggtgcccgacaactggcgcgaggtggccgtcggggacagcacgggcatggcccgggcccgcacctccgtctcccagcaacggcacgggggctccgcctcctcggtctcggcttcggccttcgccagcacctaccgccagcagccctcctacccgcagcagttcccctacccgcaggcgcccttc

SEQ ID NO: 335174 - DNA, 870 bp, Homo sapiens
  chr15:74422098-74422968
  hyper
cgcggcttgggggatagtgcgtgtggggttgaccgtgtgtctgcttgagaggctgtgaagatatggggggcagatatgggagaaatgctcgggcctgaagtccccagcccaccgtgctcaagagtagcggacgttttgccaccatccttgtctgtgctactgtctgctgcagcttccgtgccccgttctcctggagcaggcaagacctggagtgaggtgcttgggtgcgctcgagagagcttccccctgctccacctgtcccgcggtgcgcgcaggccaacgcgtcgggcagtgggcttcaagcgctggtttagccacaaaagaccagaagtaaagagttccggcttaagaggctgggcagggctgcggtgggctggggaggggggtgtcccttcccagcacgccctgcagggctgtgcgttctggtgtcgggttagactagcaggcggggcgggggggttggggcggcggggcgggggagactagggcttatatcagcccagatccaggcaaaaatggtagggagggtgcggcgctctgctaacactatcaattatgcatcatgttgaacgtggcttcggggaggaggcggctagcagcggggggtgcgggagggaagggtccgcgcgagctcggctgcgcgcagctcagcgggtcccgctcgaagtctgtcggtgccaccgcctgcatttgcaaaaagagtttaaaggcaaagacacgccttccccccccacttcagccgcgcgcctttccttcccccaaattcctcaaagatggtttgtctcacgtgttgcagggcgtaaaagcggcttgcattcaattagcagcgaagctcgcgggcgctggcgggacaggcgcgtgagggtgagt

SEQ ID NO: 335175 - DNA, 1095 bp, Homo sapiens
  chr15:74725128-74726223
  hyper
cgaatcggactgggggcggggaggcatttgtgtgcaatgcaggggaggggagatcagttcctcgcggcagaaagcctcaaacccccgcctaaccggctttctgtcccatagtacagggtctaaactgaggtgccctgggggagactccagtcccccaggttcttattatctaccctggcctaaaggctgcacccccgccctagatccaccgcctgggggtcccaacggccgtgccccacccaacgggcactgccccccaacgctggagccgatttctggtgacaactgccacgtgcgggcaaggggggagcggccggtcccggcattgctgaggcagcgccctggtaccccaagccgccgcaccgcaccatgtcccgccgctcgctgcaggatgcccacccccttgcctggcccgagctccgggccggggcgggggcgggggcaggcggcggggtctttgttcccgctgccgaagcgcggcggcggcggcaaggggtccgcgccccccttgccggcccagcctgcgccccgcgcgccagcagagcccgcagctcaaaaggagggtacccgggttggggtcccaggcggggaaaggtcctccgccgaagcccccgagccagaggacccagagtggctcggggccgagagaggggcccgccccctcccctggcgcccgggcgttgcggctcctggctgccagggacttggtgcgacttagccggggctccggcccccgccgctcgctcgccgcagcgttacagccggctctggtgtgccagcgtgtacactcacacacactcacccaaacccacacgctccacgcggggacagcgcggggacagcccgggacccgcagagctgcgcgcacgcactccctccgggtgcagcacactccgcacccgccccgcgcagcgtctgatcccgcgcctgaccggccgcgcggcgccgcctacctttccagacggcgaagatgcggggtccgctccttaggtggccctgggcggaggcggcggccgcccagagcagcagcagcagccgcagccgcagcggaagccccaaccgagccggcgggccagggacgcgggcgcgcggtgc

SEQ ID NO: 335176 - DNA, 262 bp, Homo sapiens
  chr15:74988541-74988803
  hyper
tcttggctggaatcggggctctacccacgactccccagcctcgatgcctgggcccccctcttgcaggctcgatgaaaagcacccgcttcccctcctgttaccccagcgccaatcgcagagctggagcggaggactttcagggaggcctggtgacgtgacagcccctccgtgctaaactgcagctgtgggacttaataagtgcgacaaccccctgatggattaaagaaaacaagatattcctgccgtggtcgatcttcaaagc

SEQ ID NO: 335177 - DNA, 457 bp, Homo sapiens
  chr15:75075794-75076251
  hyper
cgcccattttgtacacccgggaaccgaggctcaaagggagaagttgctaccccaggcctctagtggagttaggctggctgtcctttcatccccagctatacagggctggatggctgtgggtggaaggaaaccaggcaggcaccttcacccactggggacacaggcccccagcccggccccagagggaccttgttggttgagcacgtgcttccctgcagagggctggagggagtgaaagggcttccggctccagctgtggctgggtcagctagcaggagatgtggggaatgtgtggtgtatggccatctgtgtggtgtggcaggaaggtccggtcctggccccggctctgagttgaaacaacctggtggtcagtcctgacccagcactcgccacacctatggcccagctggcacaggagcagccaagttcaggatataaatggggtcacatgggaacc

SEQ ID NO: 335178 - DNA, 536 bp, Homo sapiens
  chr15:75248554-75249090
  hyper
cggccggctcgccaggcgtctgaccctgcgtgggcccaggcgggaggctctgccacacctcgcgtacgctccggtagcgcagccgcgtgacctggtgcaggcccgccaggcggcgcttgaggatctcggcgcacgtgacggttttggtggtggcccggccgcagccgctgaagacgatggcgcgcgtggctggctgcgccatgctggcggtggcgaaggccatcaggttccggatcttgctgccttccttgacccgcatgtgcaccgcgcccggcgccaggtctgcgaaggggccggagcccgggccgcctccctcggccccgcaccccgctggcgcctcttcggagcgcaccttacggaagttctccatgcgccgtcgtcgccgggaccgccggctttgccatggggcggcctcagccccggggctgcatggccgccggtcgcgccttgcaagggccagcaggggtaagggcgccggagcagcgcagacgccggcgggcgggctgggacggcgcgatctcggccccacttctctc

SEQ ID NO: 335179 - DNA, 901 bp, Homo sapiens
  chr15:75250996-75251897
  hyper
cggccctcggtccctgctgttcagaaccgggatttaccctcttaccacttcctgggagtggctgcggcgactggaccttggcaccgcaatgtgtgaatggctgaccccctccccgtctcctggtgggatcaggaaccctcggggtatgctccgaaccgggacttcggtctcggtccagtctccatgggccccacacagcggtgggggctggaggcacagcagccttgggaagaaacaaagactgtccgcagcgcgtagcggggcgtggagaaccgagggctgtgtaaggtcaggccctgagaaaaagcccccgaaaggctggaagttacgttggaacgggctggttgtggaaggagcgagctctccgtccccgggagtatgcaagtttgggctgcacgatcacttggaagggattgggcggagttctgtcatttggagaaagggtcctgggagcttcaggtttgtgtagggcgaggacggggcggttctgcgtccggccaggttggccctcgaggacccagccgtccccaacctcctaaactgctgtcggatgtagaagactcgcattcactgctctccacagtcggtgaagggagaacgccgaaaagggccgcattccctcctgccggtcccctccccttcccgcgctccctctgcagcacttaaaatgtaaatgtacatcgtgattagccgcggggtcgctaattacagctgaagccattcattacactgtcagcgcgcgtcgcagcccgccggctgtgcgctccctcctagccgtgaaggggtgtagggggtgggggcgggagatgcggggagtgagggaggaaggatggggtgctgtgaattagggtaatgtggcaggcctggaggaagctggagtgggagagagcgggcagcgagc

SEQ ID NO: 335180 - DNA, 456 bp, Homo sapiens
  chr15:75470762-75471218
  hyper
tggctcggccactgcgccaggtcttggaacatctaaggcagaaacaggaccaacacccgcaagcctccaacagcccctggggctccgtccagccgttggggtggaggggttggggggaggtgcaggggcgggcactgtggggggtggggcggggccggtggccgcgactccaccccgcgcccctagtcgagtaaacaagccacgggcggcgcctgggggccgctcctgcaagccggggcgctgggttacatcacggttccctggagactcccgccccagcggccgggtccctgaggcccgcgcccgcccgccgcctgtgtccgagaagcagagagctggcaagggcccgccagggcgggaaggctcccacgttttctccggaggcccctgggactttgttgcaattgggttcagcccgggcatgggctgaacgtggacgcgcgggaaccgcgcctc

SEQ ID NO: 335181 - DNA, 191 bp, Homo sapiens
  chr15:75976190-75976381
  hyper
cggggcaggaccccagcactaggcttctggagcaaacacaggtagatggcaccacctggtggctgtgctgccacacagccgtcctggcctgtggttccagagcactgtgtcccactctttggcggcttccgcaccaccaggccacccgctacgggcacatcctagaccaccaaggccccgcccccaccccc

SEQ ID NO: 335182 - DNA, 528 bp, Homo sapiens
  chr15:76627538-76628066
  hyper
ggacgctactggacgaggcttaaagcgctcgccccagcgcggggccggtgaggaacgttcaccgtggaccatggtcgaataatgttagcgtgcactcggggcctcgccctagccttctgcaaagcctcggcctgcgccctcggctgcatccgtttcgacgccaaccaacctcatgctcttagtagaacggcagtagcgaccgcgccctcaggcccacaagcccgaaggtctgggcagggtctggaatggcggtggagacactttatccgcaggcgtttcacctcgcgccccacccaggcgcacaccaagttcttggtactccttttaatgggaaaacaagaacagacaccatggttggataaatgttatttataattcatgggccggtctttgaaccctttcaaacaaaacccacagcgatttctttgaaagaatgcctggactgtgctcagagctctcagattttctcaggaccaacgagccgccgcctcgcagataccactgtaaattacccagcgccttacgttc

SEQ ID NO: 335183 - DNA, 864 bp, Homo sapiens
  chr15:76628342-76629206
  hyper
cggcagcagcagcaaggatggagtcaggacccgtcccagtcccgggtgagcgcttttggatctgggttctggctcaacccacgtaatgccccaatctaaagttttctacgtgtgtgtggataggaaagtctaaatagagtttatcagaacccaggtggtcattctctacactctctctagcttggacccgaagaacaaaggcacatgagaggagaaaggtgaccagctggacgatgacggtcacgtccaaacggatcccccttgtcctcggctctctcgtcctgagagtgggtttaatttttttttttttaatttatataagaagggagctcttaaaggagagccatctccaccctcaggtatccatcacccagctccagcgcgcctgggaaaaccgccccgaaagtccaagaggaagctcagagttgtaacggccgcggagccagctcggcggtgacgcaaggtccagtccagattgccaggcccggggcatgagagaggatccttgtaggtttcggaggtgggggggctgcactccattgttcactccgggccaatcagggttggcccacttcctcccagccaatctcccttcacccccagcctccaacccaacccaccccgcccatcagcccctggatccccatcacctcccccgcatccccggcagttctggggaagcttcgtgacgccacaggtcccgcccccagctccggcccggggctagtgcgtgttgacgtcatgctgcgtgcgggccggtgcggaatcgctccttcaactccgcggggcagtaggagttagttagcaaagagccgaggccgggcgcgcgaccctcgtccttctgcccctggccgcacactttgc

SEQ ID NO: 335184 - DNA, 1423 bp, Homo sapiens; identical to SEQ ID NO: 238127
  chr15:76629495-76630918
  hyper

SEQ ID NO: 335185 - DNA, 1190 bp, Homo sapiens
  chr15:76632174-76633364
  hyper
cctgggcagcgcctcgccctgggtccacgtcggtccctttccctctccagagtcctgggcaagcctctttcctcttcctctgaaactccgacttcttccggagggcttcgctcgttccgagggtcctgcgactggaggaggcacatccctgagcagccactccctccccgcagcggcctgtcgccgagctcccgcgccctgcttgagctcgggagagatcgctgcggggcagtccggcccgggagcgagagaaagaacgaaaatgcacagctctctccgagtaaggcgaacagatggagaggaagacgaacaattaaacgaaacaaacagaataaaacagaaacgaaatcgggccccggggggctgggccacccggaggttgggctcggggcgggtgggtggcggcccctcgctaacctctggcctcaccctgtcctggcagacgctgggtcgggccggcagcccgcgttgcgcccgcacgtgcacaagcagacggagaagacgacccgcgtgcggactgtgctgaacgagaagcagctgcacactctgcggacctgctacgccgccaacccgcggcccgacgctctcatgaaggagcagctggtggagatgaccggcctgagcccgcgggtcatccgcgtctggttccagaacaagcgctgcaaggacaagaagaaatccattctcatgaagcagctgcagcagcagcagcacagcgacaagacggtgagcagccgctgggccggaggctcgagtcgggtgggggctgcgcttccgccgcggtatctgcgtgcccttttctgggcgagccctgggagatccagggagaactgggcgctccagatggtgtatgtctgtaccttcacagcaaggcttcccttggatttgaggcttcctattttgtctgggatcggggtttctccttgtcccagtggcagccccgcgttgcgggttccgggcgctgcgcggagcccaaggctgcatggcagtgtgcagcgcccgccagtcgggctggtgggttgtgcactccgtcggcagctgcagaaaggtgggagtgcaggtcttgcctttcctcaccgggcggttggcttccagcaccgaggctgacctatcgtggcaagtttgcggcccccgcagatccccagtggagaaagagggctcttccgatgcgatcgagtgtgcgcctcccc

SEQ ID NO: 335186 - DNA, 962 bp, Homo sapiens
  chr15:76638250-76639212
  hyper
cggttccccgttgggaaagagcgtgtttaagttaaggcgtggtttgagagtagctaaccagagatcaggtcagctgttagggcgtgggggagggagggggcagggagcagggacgaggaagtggaagaataggggattgtgaggagtgatttctttccagattatcgagactcaagactttccagaacgtggcaaagagccctggaagaaatgtcccaggaacgccgcggtcaggaccgaggctccccggggccaggttcagggttcgaggtcccagcctcgcaactgctggcgtctggagggcgggagagtggccgggcccgaagctgcggctccgacgtacagttgcgagtctggggcggtgggccccgcagagctccgggggaagggagccgccgccgctgcggggaattggcttgggcaacgccgctgagtgttcaaacgtcgctgctcccgggccttgggcagcctctcctacctgacccaaattctgggctgcaaagcccgggcgaagttgtcgctttcactccgaatacgcccagtcgcaccgtcaacttcataggctgggcccggcagaggcctttcgcctccgcccagcggtctccgctgcggcccctcagcctctggagagccggggggcggccctcgccccggcagaaagcaacctgtggcggcactgcgtccccgcgagctacaaccagacgcggccgcgctcacctgggcgttgcgctcccccgagccccggagagtttagaagccgtaaaagcccggggagctggagcttaaatcgcccggaccgggccggggcgcccgaaagcagtgaactcgagacccccaggaaccgcgtgcgccgggaggcaccgggacgctcccgggcccgagccgcgcaggctcccggctgggtggggcctgggtttgcttcttacgcctcctcctctccgggacgagggggcaatgagacc

SEQ ID NO: 335187 - DNA, 300 bp, Homo sapiens; identical to SEQ ID NO: 238131
  chr15:76639454-76639754
  hyper

SEQ ID NO: 335188 - DNA, 440 bp, Homo sapiens
  chr15:78236702-78237142
  hyper
cggccggcctgcgctgtcttacccgccccgtacccccgcccctgtctcgggagcggagtagcggtggacttttctcacgcccgcacacactgtttgcggagaggccagggcagacaacctccacccgtttccggagccactggcgccccctcattcccgctccagcagcccatgcctcgcttcacccctggtgcctcatcatcgcaccaggaagccagggcccgggaatttctttttccggtccgacagggtcaactgagtcgacgatcacttgacttggactaacggcctctgggagggcggggcctgctcgagtgaggccgggagcggaccgcagcccgctggaggtgccgggggcgaaatgctggcgtctcctcctccgtctcccagaatccttccctggaaaaaaacagcatccaccgtcagtttaactgaggacc

SEQ ID NO: 335189 - DNA, 173 bp, Homo sapiens
  chr15:78556921-78557094
  hyper
gtggaagtcggtccggcgcggggcggggggcgggcgggagctacaagcggcggcggcggcggcgaccgtgaccgtgacgcgcgagcgggcggcgggggcgcgggccaggggcgcgggccagggtgccggcaggggcgtccggggcgctctgaccggcctcgcccgcccccccc

SEQ ID NO: 335190 - DNA, 968 bp, Homo sapiens
  chr15:78912246-78913214
  hyper
cggttgagagcgtatggcgttctgagtagtgcaggcctcggcaccgagggcggaaagcgctctgagctcacagccgcacgacagaccgccggcctgggccctccaggaattccctgcagccttgcccggtccccgactctcgctacccaccagccctcccaggcacccaagagcctcccagcggcgggccagggccggcttcccccagcaggctcctctggagagcgggaggaagacaggaggcgctctcccggtggagggtccctcagcgacgcagccaggagcgctaggaggctacaaccggaggagaggctggcgctccagctccagccccagtcccgaagcgactcccctcttcccgaggtggccttggccaagtcttcagccatctccgtcaaatgaggaggtgggcgggatgcagacggtggagcgggaggcttgggcgcgccagtttgggagccagtgcgcggggcagggcgacgggcagcgcggggacgcgaatccccaactcctgcgcccaagacgaaggacccggtctcgacctccccatcacccggcgcgtaccagcgcccgctcagtgactcccaggtttggtggtggctaggggtgggaggtgagccgaaagggaaaaagccaccccacccaagtcgccgccgggctggagccagtctgcgcgggttccgagtccccggcgacggcgccagccctctccgctcgcccgcgcggtgttctcgccggcagcccctccggaccccgcgccccttctcgggcgcccgtccctccggagccctaacgcctgtgcgcgtacctggcagcagagacagcagcagcagcagcagcagccgcggcggcgacagcgccaggggcagcgagagcgggccagagcccatggctggtggccgggctggccgcggacccggacggtcgggagcgggcgcggcggtcgcagagacggcctctccccgcgc

SEQ ID NO: 335191 - DNA, 2466 bp, Homo sapiens
  chr15:79381742-79384208
  hyper
cgcccgggctccctgttagagccaggcctggctcttcagccttgcagctcaggaaaccagagcgcagcgctatagccgcgactgcggcggcggcggcggcgcagggggcgggggaggagagaagcgcccacttcgtcccgctgcctccgcagcagccctggccctagccccggcgcatcagagcggtccttgggaatctttgggcttgttgctccggcggccgccagctgggagcccaccaccgctcgatggtaccgaaccgacccgtgtagccccataaccccagcccaactccgaggagctagcgcagaccgctctccgccctcagctgcggcgaggcaagggctggcagcgctcggacgcctccgtcttgcccttcccatgcctaagcgcggggaattacacgttcccggtgtagaacagacgatcggggctattagggctgggcggtgggagtgggggttgggagcaccatttttggctggacgtgtgtccagactcatcgtctctggtccttaggaccccatcttcctctgcatctccaggtgtcggcccctctgtacccgcctcccacggggctcgtccggcgaagggcagccgcagcccacatctactccccgccctcaatccctgccccctctgcccgccgcagtcactcgcctggctgggagcaagcctcccctctcgctgagggtgcagagagcgcctagggcgccaagagtagaggggccaaagttcaagcgccatcagccagccgaaggccctgagcccccagggccgcggccgggacgcagggaggtcaggacgcgacgctcgcctcacctgtttctccagcggctccttggccgacagcgccggcttgggggagggcgcgcggtcgcagacgcagccctccagcaggtaaagccccgagggccgcgagctcgagtcgctctcgaagtagaagagcaggttctgcagcagcgcgaaccacttggtttgccattttgtgttgtccgaactccgcttgctcaggtagcctttgcgcgtgccgtccttgcgcgccagcagtcccagggacgcgacgtggccatcattcagccggatccccttctgcatggtgctcagaggccagcgagaccccacgcgcttacatcttctccgcgcagcagccccccgtccgtgcgcgctgcgcgctgcctctctctggcgctcgctcgctcgctccctctagctctcccctccccccaaatatctacactccaggatctggcgccgagccgcggcttcttgaatccagatataccattccccgctggaacctcttctccgctccgcagagccccagtacccggaagatgccgcccgaccctcctccggtgccgggcaaactgagggactggcgatctgcgcgctggcgaggggcaggcggagtcatgtgacgccgatccctcgaagagcccgtttcagcagcgcggacagggacacacgcacgcagccccgccgaggcgcagagccgcgcgcaggctgcaacttggtgcctcctccccctccccagacacacacacacgcacacgcacacgcacacactcaaaccctgccctccctcccctcatctccccttctctccctcggatgttaaaaagcaaatcagatcaattttcgtttaacccaatgaaaccccgaaggctcgccatcccgggagtttgcgtctttgcgccccaccgcggcgcactgtagacctggggttaagtgccagttgtcattttctcctccaaaggctcgccccccccccccactttatttctaatacgaggtggaaggaggaaggtgggtggcgaaatagagctgcaaaagcgtccagtcctagtctttgcatagtcagccgggtcacattgaattccagcatccggctgcactcccggcggcttccccagctacctgaggacagtacagggggtgagatggggtggtggttggtgaacgttggttactttattttatattattttattttgagagttgccataattaccggcgccaccccccgtgcaccctgaggtctggttggcgagccgctgctgggagttttctgcaaataccccccaaagcctgaaggcgggcttcaaacgcaggcgccggggaccatgggagccttcaaatagctgcgctggcgcaatgataccttaatgatagattttccgttcttatttttagctctcattcgcctacacagttacacggcatttatccgagaacgtcacagcgcccgcatgctgcaccgggagggcgcgcgggccgccgggcgagccgggagctggggcggggagcgcgcatcgctgtctgccgcagagggcagcgagctcgccccgacccggagcaagccgcgcctggcccgggcgctttgcagcggggatgggtgcccgcgcagccctgtgaaggaaagacaccatctttccgcacggaaactgcgtatacccctccccc

SEQ ID NO: 335192 - DNA, 293 bp, Homo sapiens
  chr15:79502053-79502346
  hyper
cggggagggctcgccgggaaatcaaacgtccatttacatcttgtcctgcaaagcttcatcaaaacttctttgccggccagtcacgtccccttatcacttttccagcccagctttgtgactgtaagtgttggacggagaactgataagggtaggtgattgacactcacagcctccggaacccccgcgccgcctgcacttgcgtgatggggaaaacctggcgttcccgctctgggtgcccgaggacagcaggggattccaggaggagaccttgggcatagggggcccaggtatgc

SEQ ID NO: 335193 - DNA, 802 bp, Homo sapiens
  chr15:79724808-79725610
  hyper
cgtgcggaccactgccgaacagccgctggagacccgcagagaagggcgggccctgcgcccggggcgcctcggaggtaagttcggagagcccgggccgggcggagggcgggagcgcacgagtgtgtgtgtgtgtgtgtgtgttcgcggtgtgcccgcggctcggtgcacacgcgcgcgggttgtaaagtcaggagctgcgggagcgcctccctgcctcggcttggccccggagcattgcgggccgcggaggtgtgggggcccttgtcgctgcgctcagggcagcggcggaaaaggtgtgtgcggatgcggggcggggccgcacctggtggacagagcagggattcgggaagagaagccacggaagatgatcatgcagtttggggcaagttttcctggttgagcatcgcttcaggaaacggtgttttgagggttaaatatgtgagctatctgtgcaaaaagcctgacacatcagaggcgcgaagtaagatggaaagctggacaagccccaggtggaccgaccggtgcatccaattcttaaattgagatttccagtcacgttgatgtggaatgggatcgttgttcttcccgagggtttgataaggatgctcaacttcacctgtcagaaagcacgggagctgggcctggcccgcggggagcgtaagctcgctcacacgcggtccaactcaggcaaatgcagcatgcccgacctgctctgccgccatccctccgaaagcgataatttccttgggctaccgaatccatcagagtagtcatttgtcccctcgccggcggtgcggggagc

SEQ ID NO: 335194 - DNA, 1218 bp, Homo sapiens
  chr15:80215312-80216530
  hyper
cgaacccccaactccaactgacctcccctctgccagagcaagaccacgagtacccgccgagagcggacctggctggctacacaaagccaggcgcccgaccagagggatcctccgggacgtcctccgccaccggggcgtccccgcccagccccgcccggcgcccggcgctcaccagctctcctccccctcctcctagcctgacagacgctccaggtcgtctagcaagccgccctcccccgccgccagcaagaaggtggcgtctcgcagctcctcgttattcgtccgcctcgggtccatccggccccgccgcccgactttgcgctgagacccaaggggaagccccgaggggaccccgcgccgtaggagggagtggaggagccggcgaaccgcgatggagccggggcccagcacagcgcgagcggctcctcggctgttcgtgctgcttccccagcttcttcaccggcacctgcagcttccgcacctcctggtccgcgttcacgttagagttaacgtcctccatcccggccccgctgcctccgccgcccgcggccctctcgctctcgcagcaacaagggaagagccggaggaaagaggcgtccacgccgctcactccagccgaggcccccgcatatagcagggccaggccccgtcgccagggttcccccagcgcgggtcccgaagcaccgctggccacagatgaaccgcctcctcagcgcaggtccgggattcggggaggcagcgccaatatccggtctctgcagccatcttccctccgtccctccgcccaccgagggtcggccctgtaggtgacctcagagcgtcggggatgggcgtggccccgtcgggcgctaagaagacctagcgcagagaggaccgccgagctcccgacggggcggggccaggtgtgtgaggggcggggattggacccggaggggcgtgtctggactgccggcggaagtggaacgcggcctgacctgcgacggaaagccactgcaagcccggaggcgaacagaaggcattccgcgagccgggctgagttggtgaacacggtcctcgttcaccccgcctattggtctgggcgtgtggggtattctccacccacttatacggcgtgtgggaccgacgggcccgtcctgcccggctccggtccggatctcgagtaggcgctcaatgggattcggggagacgtagtttactttgttcagcaaatatttaacc

SEQ ID NO: 335195 - DNA, 128 bp, Homo sapiens
  chr15:80352864-80352992
  hyper
cgctatgatttaccttcacatctcggaagttgtaaccagttgtgaggaagttaggaccttggggttacctaaagataatttatattaagttgttgggccataaaaactgggcagaattggccacgcgc

SEQ ID NO: 335196 - DNA, 907 bp, Homo sapiens
  chr15:81072326-81073233
  hyper
cgccgaggagggagtaccacaagggtcaggtctcggtgtcctgccgactgggagccagctcacgccgagctctagcgggcgtgcgcctagcaacaggtctgcgccctgctgctcctgcctcagcacgctcttcctcccagtttccctcgcctcccagtgcctccgggacagcgctaggcacccagcgacgcgctggcgcggggccgagctgaggcaattgcaatgttagatgaacccggggggctctgctgatgtttagactgagactccaaacgtggcatcgctggaagaaggtctggtggtccctggcaaaggacgtcggctccaagaaaggtcgcgttaggttgtgaggaaaggcagagagtcctggcagaacgctggccaggtctccagctcgccgctctgggaacgaaggccagtgacattctggaatggaccccaagggatgcgtgtgctcatgagagaggagcgctgtgcgccctgggtcctcagccgcagacactctctgcgacagccgctgttccccaagggtcggacgctacggcagtcccaggagttccgccagctgccgggtttgaggtcctgagtccttctccaagcagccaacgctacccacaggtgagagctccctttaaaaactaatcttctgatgtgtgagccagtgcctggctgcagccccataccagggacggtgagccggggagcgcgtctctccatccctgcggtctggaaagtgatccagggcgcgcccgagggcggggagccggcggctctgcgtgcccaggcgcgacgccaccatggacagctcccagccacttcctccactcggggtctgtggccctgggtctccggggaagtcgtgcgctttcttcccagacccaaggcgttggggcgctgggaaagagga

SEQ ID NO: 335197 - DNA, 194 bp, Homo sapiens
  chr15:81294107-81294301
  hyper
cctgagctgcctcccgcgctcctccccgaggaaaggattttgatttcaaagaaaggaaggaaggaaggacaactcccagcttccccgtcccgccctccccgctccgagggccgcgccaggccatgcccaagaaggcggcggcggcggcgaaccagcagaagggactttcctggcagcccggcgacgaggagcgc

SEQ ID NO: 335198 - DNA, 530 bp, Homo sapiens
  chr15:82339684-82340214
  hyper
cgggccggggcggtgcgcgctggtcctctccgcgcgcatccccctccgccgcccactagggcggacgccccttcgggccccgcgcgctctgctgtcctttgttccgggagccgccgggctcgccgcgccctttgcgtcccgctgcggatcgttccgcagagcggctgggcccgcggttcatagagtcgcccaagatcctcacagagggacgtcttcccaaaacaatgaggccatgcggccgcagccgcacacgggctgactggggagatctcgtggtgccgcggggcggtcccggggctcgaaggcagaggctcccctaggtgtgccctgcctgaccccggctacaggaacgagcgctgtgggcctcggtttctcacccgtaaaatgaagaaaataatccccgcctttaccacctcgtgggtcgttcggaagattaaatgcgacagtggatgggcgcgcgcttacaaatcagtagacagttccgcaagcgcctttacttttgagaacgcggtggtgcagctcccttcacc

SEQ ID NO: 335199 - DNA, 379 bp, Homo sapiens
  chr15:83315057-83315436
  hyper
ttgcccctcttccccaccaacgacacagcccagtagttgactcaggtgccaggagagagcgcggggaggctgggcggtagccagggagaccaagggaagcggttgccagagaaatgcggcgtcagtcagggccggggctgcaggcgcggggcgggggaggagagacgcggcctcctcccaggcgggcctggcgggaggcaccccggcttctaagagcgaattcggctcccgactctcttcccccagctgagagcacggtgcaaggggccagggctgcagggagcaaagtgcccccgaaaaataagcgcgcgcccacgaaagcgcccaagagcccaggcgtctgcctggcttttctcggtcacggggtcaacgcggggcc

SEQ ID NO: 335200 - DNA, 1016 bp, Homo sapiens
  chr15:83316057-83317073
  hyper
gccctccaccttaaaggtgccgcgaccgccgccgtcgtggggctctccacagagcacggggtctacgccgtcagcagccccgccccgtcccgcccgggcgcccccaccgcgcgccgggtgctaaagagacccgcagggggcgtgagcttccagcgccagcggcttcgggtctcccgtgcgacggcagtgtgagaaagaaacgttccgggcgccggtgctcctttatgtccggtcagctcccgtctggacagacgctcgaggccgcctggaggccgcagtgcggctcggaggccccaccggccgcccccgcagggctgcggcgcctttaagcccaaaggccctgagtcacgaggaggctccctgcccccctcgccctccacccctccacgaggccccacgcccgcgggcacgtgaccgcgccccgcccgggactcgcccgcacggggcgggggatgggggtaccgcggcgccggacccggctgcgcgcggaccgttagctactgcggccgggacgcggccccgcccaggcgagcggcgggtggctcttaccagcgggaacgccatggggccggtgtggccctgcggggctgacgggctgaccggccagccggcgggcgagagacgcgcacgcacgtgggcactatttttgcagcgggccgcgcgcagccccgcaccccggcagcttatgaagctcctacgagccgctcctcggagccgccccccggccggatgcggagcacctgtgtcggccccgcccgggccctcgcctccgccccctcgcgccccgcccctcctagcaggccgagccgaggagggctccgccgcccacccggaacccggcggggactgccgccgctgctagccacagctgccccctggggggccagagacctaagcctgagcgcgccatcacctaagtgacccttgccgagtcactgtctgccctgggcctcagtttccctcttaacgaaagagggcacgatttacaagcccctgcgagcggcggcgatcgcttc

SEQ ID NO: 335201 - DNA, 863 bp, Homo sapiens
  chr15:83348864-83349727
  hyper
gcctccagtgcccgcagaagcggccctcggacagcgaggacagcccgccgtcgcaggctcacccggcgcttgatggacatggtggccacgttctggagcacaacgtactgcacctcactgcggagaggacgggtcagagcaccccgggcccctcggttggggcaagggtcagcggatgaggggaaaaggtggggcaagtcgttgcggggagaggaccagtgcggagggcaggactacggtcagtgtggagcgggtgggcagaggtggaagcggctggtgggcgtgagggggcggagccgggcagcccgtggggcggggcaggaggcgagggagggggcggggctgggggcggagcgcacctgtggctgcgcagcaggcgcaccagcgccttggcgatgacgcccacttccgccttgggcgccaggtggaagtagagctgcgccaccgccatcaccaccgcggcgctgcggctctgcagcaggggtttggtgttgcgcagcagcagccggtggtcggggtccatgacatagggctttcgggagggggcggccgcggcggccgtctcctcagaccccgcgcccttggcctcgtcctcctctgagccgtagaaggctttttccgcgttctcctctagtagggattcctggacggggagaccgacgggtctgtgggcgcctccccgggacacacttcggcccgctctgcctgggctgggcccacttacgttctgggtggggctcaggaactgcgtgcgggcgtagcgggtgagcatgctgatgatgaccacctggccccactcctccacgtcgatcagcaggttacagagtttccggtagtttttgtgaatcaggtcgatgcgctcc

SEQ ID NO: 335202 - DNA, 800 bp, Homo sapiens
  chr15:83377928-83378728
  hyper
cgccttcctgaagaggccccaggctcaagctcaagttcgctgactcagacccctcccccacatttttgggaagccaacccgcctagcacgaaaaaggaagggaacccctaacgcaacgccgcaaaccggagaaacacctggaaccggagggtttctcctctcgaaactgagctggcccatcccccgccagcccctatctgcccccctccgcgtcctaggccggcccctggagccggggtgccagcgctgcccgcgctgggccggggctccaggccgcaggagggggccgggcgggcttccggtcggcgcggccggggcggggccggcgctggggccgggcgctgtccatggtgcccgcgcgcctcgcccggtccccggccccaaccctcccgcgagcttcctggcgggctccctcaccgcttgtagtcggaggagaagatgccgccgctcgcggggtcgtggccgtactcgggctccccggggccagcggagccgcccttgtcttcgctgtaggcgggggcggccgacatggggcggccagggagacttcgccgaggaggaggttgcggggccggaggccggctggagcggaggaagggaaggcgggccggtccggtccgggctggcgaaggcggcggcgcggcaggggttcagcagaggctgcagtgtgcagcggcggaggctgcgcgcggatttctcaatcagggccgcgcgctgaggtcttaaaggcaccggcgccagccgagcggagggcgtgtccgcgaggaggcgacaggggcggtgcgtcagggcctggcccc

SEQ ID NO: 335203 - DNA, 826 bp, Homo sapiens
  chr15:83620900-83621726
  hyper
cgtggagaacgacaaactgcttagactcacacaggccctggagttgactgcgcccaggggcgaagagaccgcggaatggccgaggcaggaggccggccagggcaccggtccccgtcaggtgcccccgtgcccgggctgtatgggaggggaagggccacgggctccgcgcccaggccagggtgcccctgctgggtgtccgcgtgccccggcggagggcgcgggtcaggtggccccagactcccgggcgcagagtgtgcgctcgctccggcttggggaggcgggggccggcccgccgggaggctccgagcccggttacgccagccgcggccccgcagtccctccggaggggcgcgcggagagcgcgcggcgcgggctcactcaccccatctccggcgctgctccggcggccgctccgacggggcctctcgcgctcgctctccgcccgctcggcagccgctccccgcgcggcacatgcggcggcccgtgcgcgcccggctcagccccggcgccgctccattccgcggggctgcgcggctgccactgctgccactgccgccaccgccgccaggcgcgggcgggcgggggctgggcggccgcgctggggcggtgcccgccccgccctccccagccgctacccccgcccggctccttacgtaacctcgtggcccccgggccgcggcagcgagccaagaggcggggggcgcagcactgtgtgcaccgtcccccgcgcagccgcgcagtcgccgcttttctcccgggccacccagtcctcggtgccggccccgcgttggcgcgcccccgccccacgccgacccggggccctggc

SEQ ID NO: 335204 - DNA, 1025 bp, Homo sapiens
  chr15:83775916-83776941
  hyper
tcccacttctgggccgtgggctcccccatagacgatcccgcgggcccttcctcctctgacaccctcggatctggttccacctttcccggaccgcagctcagccccgcgcctctccagctcttcgatgaccggttcccggccgtgccccgggccctccctcggagcgcgcgccgccaggggcacctgtccctgcgcgggggtgtcgccgcccctcggcgccgccgggcgcttgccgctgagccgtggcgcccctggcaggagcactgcaaggacgcctcccgggactgcaccgcggccctgcgcacttggggcgacggggccaggcgcgggggacggctgcgggctgggagggcgcgcggaggagacaccgctgaggggacgccgctgagggcgccacgcggggggcgcggctgaggcgcctcgaagggcaagcgccaagggggcgcgggcgccgccggaagctggggcggggcgcccagcgggatgcggtgaagggcgagcggcgcggcggctgcgatgagtgcctctgcggccaccggggtcttcgtgctgtccctctcggccatcccggtcacctatgtcttcaaccacctggcggcccagcatgagtgagtgagccggcgcggcgggggtcgcgccgaggggcggcgggagttggctcgccgcgacgggagcctcgcaacttttccgagggggctgggaccgtccgccgcgggacagaggttcgtggccgcaggggctccccgcgcctggccagactaggggggcgccccaggggtcgcacgggccgggtcttggagccgggccctgaggtgcccaggctggcgcatttcgggatgttggtgccagcaccgcgccaggtgcccggggtcacaggcgtcaatacggccatgcccctgccctggaggggcccaggggccggtggggagcggaacaaacacggacactacgaacctggccgtgtcagctcgtttgtgccttgttctttttgcatctcacgggaacgtttccatgtatggactttc

SEQ ID NO: 335205 - DNA, 1634 bp, Homo sapiens; identical to SEQ ID NO: 238172
  chr15:83875522-83877156
  hyper

SEQ ID NO: 335206 - DNA, 2282 bp, Homo sapiens
  chr15:83951722-83954004
  hyper
cgtctgggccgctttaaatgccctggccttcagaggactgaggcgagcacagccataaaaccaggggacgttaccgaacccccgagcgtctgatgccccccgccccccaaccacacacaacttcactcacacaattaaggctgggagatggcattccacttaactgtcagactcggagcggtggcagccccgcagccacaaagagatgccttaaatgagaagaacatgtttctacaccgcatttgtgaaagtttggctcggagctacgcgctgattaatatcagatctccttcactcgcctcgccacaatcttgtcacatctggctgacaaatcccgaggaactccggcaaagccaggcggcggcggggctccgggtctgggcggcggctccggaggagcagcgggagaccccgcagcggcctcctccttctccgcccgcggcccccagcctcgccgccgccgcccggctcccagcacggaaccgacggggcgctcccgagacgggcgagccacgcgctcgcaggtcccaaggccaggctgggcgggactgttaagggagctcgaagtcgggggccgggggcttcccgtcccggcgcttcccatgcaaacccctgaaggaagcggcaggcgcagccgcgggctccgcagcccaggcccacttcctgtcactccaggaaaacctcggagcggcggacgcggctcggcccggcttccagcccagagcccaagcgccttagccccgtcccagcgctttctgaaagacgggccacctcgcgcggagccgcgacaaggactccagggtccgcagtgaagctggtcaaatctgccccgcacacggtcaacgctcggtctgtgtcccggaagctttcggaccggacctgtctaaatagcgactttcagtcgtgggttttttgttcttgtgggtttgttttgttttttgttgttgttgttgctctacaaaagatttgtcccgcagtggacgggagcctcctcacggccgcccgcccgtctccgcagttctcctcagtgaccggaggctgccgcgcgccccgttctccagagaaacaatccccggagagaaagacggccagtgtgaaatatcagctgtttcacaaattctgaggtaaaagaaaaaaaaaaaaagaaggggtcgacccccacaggtggaaacagcaagtcctaacgtcctgggctgaagcctggggtgcgggcggcagagagtggcgtgtagggtacccgccgagtgccgccgccgatttccacaggctggcccgccggcacctccgacgcgcccgcagatccggcgcggagaccgtttgccagctccgggacgtcgggcagggacgggtcccagagccccaacccccccgccgccgcctcccggccggagaccacggtccctcccgccgcgcctcggggccgcgctgccgcgcaggtagccagctggccctcgggaggtggccctcgggtacccacgggagccggagcccagcggcgtcccgggccgcctgctccgcgcacagagaatccccgcgcccgcggagggcgccgcgcttacctcggccatcctgcgaccgctgcggtgccggggctgccggcgcgtctcccgggcccgggccgccccgcgtccgccccggctcggcgggcgccgccgcatccacgctccggccgtcggggcgcgacccggcgaagtgggcggctccccaagcgcccaggctgcgcagcacgatggccgcccccgccgcgcaccgcgtgtgcccgcacgcccgccccctgcgccccggggacgcctctccgcccctccccctgcccctccgcccaccgcgcggtcgccccacgccgcgggcgctgcttcgccgcccgggaggccgcctcccgccccgggaccggataacgccctaaatcagcgcagctgaggcgaggccgtggcccccgcagaccgcggagacctcgccggcggccggcgcggaggtgtctgcccccgccgggcttgaaggcacttgttggtaaaagacacagacgtgtcggtgtttgcctctcccggggaagggcgaaacgctctgaagttctctggcgctcttctcaggagatgattcggcctcccctcctaccctggggcgccctcggggtctcactgccgcggaggaagaaggcagcgccgccctcgcctgcagaaacctcattcccgagaaagtgcgggacgagcgtcttgggatgtggaagaagggggtcgccaggaggttttcttaagaactcaaaacaagcgccccccaccgcacac

SEQ ID NO: 335207 - DNA, 922 bp, Homo sapiens
  chr15:84322693-84323615
  hyper
cggcgcgcaggctgacgggcgcctgggcgcgccgtgcacttgccgggcggtgcaggtggcggcgcgcgccctccgcctctgggccggggccagcgcagcgctctgcgcgcccggagggggcgggagaggcggggcagcccccgtcccagccccatttaacttcgcggcggcggcggcgactgcggcgccgcgggctggaggccggcgtcggggaaggtcctggtgccggattccgcacgaggtgttgacgggcggcttctgccaacttctccccagcgcgcgccgagcccgcgcggccccggggctgcacgtcccagatacttctgcggcgcaaggtgggtgcaccgagctcggcgcagggcggcccctcaggggtcgggggaaggcgctccccagagggagtaagacttggagcagtggcctctctaagcaagttgggggtctccaagcagagtcggggcgtgccacgcgggccccagggggcctcaggactggggtgctcctcactgctgggcacctcgggtcgggcgcgcttcgtgccgtcccggaaggttcagggagagtctttcggcggcagttcgcgggctgaggggcgttcttgattatgggggaactccacagggttggagtttttcaggattgggagttactaagcagaaacctcgcgggtccgaaggtccggccggttgaccactgggtagcgagcgcccagaacgccgggggttgaggcgacgcgcgatcgtggaaagtgggcgtgggggtgaccgggacgcggcggaggcactggaggagcgacttcgaggcagcgggtagtcggaggagtgtgcactcggaaggctggtgcgagcaggcgagggtggcgcagagtcccagggccccgcactggccgcctcccttcagccaggagtcgccgcctcaggtc

SEQ ID NO: 335208 - DNA, 2446 bp, Homo sapiens
  chr15:88798893-88801339
  hyper
cggggtcctctccggggagaggcacacacacgcatagccggatcgcgcctcgccagggccggagtcacctggaatgcgcagccggagagcatctcccgagccagagcgagcctgacgcgcgcccagcgggcggcgggcagcggcgagctggggcgggcggagggccggctcccggccgcgggtgggcaggagggagacgcagagcgcgggggaggcaggctggggagcggccgcctgacttacatggaagtgatattccttgagatgtccgtgatgttgatactggcgttcccattgctgttccctgaatcctgcccttccaggagggggaagaggttcccatcgtccggccgccggcaattgatctcagtcttgctgcagacacaatttgcagggcaagccagcacggagcccacatagtccagccagacgcttcccagcaagaaaatccgccagaaactacacttggctgggcaaagagagacatccatctccgatcgctgcttctaaaaaagaggaggaggagaggagaggggggtggggtggggggagtggggagagcagggggggaaggaaacaaagacggcgagggaggggggaagggggagggggggcctctgcctttgaaacgccgagcgatcagatgcaaaatccttcagcgtctgaaaccatcgcggacgccgccgccgccgccgccgccgccgggtgggagccgcgaggagcgcctagtggcgcggtctgccgggcatggtggccggctcggcgatcgctgactcgccgggtccgggggctctggaagcgaggcgcgctctccgactccgagactttgcagggttgcaacagacggtggggaggcaaaaaaaaaaaaggaaaaggaaaaaatggtgctaaagtcaccaagtcccacctactgggcagaattaaaacggacacaccacgcacctgcaaaacacacacactcactctcacacatacacacacccggagcccgaggaaaggaagagaaggaagatgcagtaggagctgcagcagccgccgcgaatggctcgccgcgcggctgcagaaatgtacaagtgctccgagccttacgaaacgcacgggttatcggagcgtcttcctcggctccctccctcccttcctccctccctcctcccctccctcgtcgcggcctcctccccccgccccccgcccgggctgggagcggcaggagagcggaatctccccctccctcccctccccacacccgtctctctccccgcctgtcctctccctcctccccacccacccacccacccactcgccggctcgcggctgtagccggcaccgccacccgcagcctcgcggcagcccgcccgctccacgcctcgcagcgcggcgcccgctagccgcagcccgggggaaaccgagaccgaagggaaaaagttgcatttgagattgcgagggtcggggctggggagggagagttggcgagctggctgcacgacacggaaaggcgctctcctttccactttttggccctcgcgctacccggttttgctgcaatccggaccgcggtaggaagtgaaatgaacgtggcggaggtgattggggagtgctcccaagccttgggtggggggcgctcccaagcctgggtgggtggggggcgcaggctcacggacggcgacggggggtgccggagcgcacagacaccccagagaagcacccagagccggggaccgggaccgcagacgcgcagtccttggtctgaatgacactcatttccgtaatctagagtctggggctctggtcttggctgggaggggactgcgggacatggcacgctaggtgccccccgtgcccgctgcgctttcttggaggtgggttttgcattcggccttgagcaggcatggatcggggaaggaagaaacaggggtcgaaagggctgcgctggagagccgaggtggccccgggcgagctgtgcgtgcaagagaaatggccgggggaaattgagatgcaaggggcatattttggcaagcgccacgccagcaccgtcagaggccggcttctcgggctcagctctcgggtgagctgagctggctgccgggtgagggggcgggcgggctgctttctccggattcgggggcgcagaacctcctccttccctcccacacaagcaccccttcctggtagggacgcaaagcaggtgcagctttcgacgagagctcagatctcatccgggaaagaagtgtgtgtggggggggccccgcttttgcgctggtagggatttttttcttaataaaacataaagatgccaagtgtgagctgtttgctgaaaaaaaaaaaaacgagcattcgctgtgggaaaggagaagaaagggttaggggagtccgagcaggcagacacactacagcattcacacgcagaagaaagcagggttctccttcccgagcttggaggagggcaggc

SEQ ID NO: 335209 - DNA, 985 bp, Homo sapiens
  chr15:89148045-89149030
  hyper
cgcactgcgctgctacttgcactgcggctcctggggggaagcaaagtaccggcagctgggtggtgaggggctttcttccagaaagaaacggagagcaagtggtcttcctccctagccgcggcgacccatgccaggtaaaaatcccagccgaggtccccggtcccgtcccctcctccaggtcaagggctcgggactggagaagcagccaactggagctgatattcgggaagctaagcctgaggctgctctggagggccggagaagcgagcggccaggcttggcacccgccaaatgtgccttgccaaaatgaagaggaaggaaggcgactccggagcccagcaggtgagcgctcctacgggatgctgggcaggctagaggtgtgggggcgtctggttccagtacctgcccggggcgacgcggaaacccagcttgcagtttgtttcgctcggtcccgcgcccagtaggagaaagacggccccacagcctcgcgggagccggctctcgcaacccagccgccccaagcccgccgtcgcccctcctcccgcgcttctcgcccctgattctagatgcagctgacttgttgcatgcagaagagcagctgggttcggcgttccaagcctctcctctttgctttgcctgccaccagatctgagcgccaggctggccagcacccagagagcccagagccgcaggaaaaaatgtgaaaagtaccaggagaccactgggtaatcgccccagtgcaaagggcctttcttcctacccaccgcaattgcagcaaataactccagggaggggaatcagaggcgccggggattgcgccctgggagagccctatctgctgaaagagagcgcctaatgccgttacttcccagtgtagcctttccactcggcagaccaagcgcctctccttcgagtcgctacccgcttggagtcggctcagaatcaggctgctaaaggtccctggagcccctcccccagcgaatcc

SEQ ID NO: 335210 - DNA, 876 bp, Homo sapiens
  chr15:89346018-89346894
  hyper
cggggaatttgaagacccagagactcgcagctccccgtgagcctccccgctgacgccttacctccccctctccaccatcccctgccatcccggtgtacgccacccccaaaaaaactttcagccagctcctcggtgagggtcgttccaaatcgtggccgacagtagcgggctgcaccctccttagatcgcgtcgtggccagcctcagctgcagaaccccgccgggcgcccgggagccctgtcccgccgcggcggcctcagagtccgggcacttggggattctctgagggtgcagccctcctgggcccctccgactgcggagctgccgaccgcaatgcagatgcgggccctccagcccttctcgcgccgccttcctcccgccagccccggagctgccgggtccgcgccgccccggggagcgctcctctcccgccctgagcgcaggccggcttccccatcggcgcgccggtccggagccagggtccagcgcgctccagacgcctctgccttcccctccccctgtcggccgcccctcggtccctgggggtggggtttccctttgcgctcgccccctcccgcccccacccctcacgggccctcccctcccccgcccgtccctatgtatgtgtcacagcgcgccatgcccgcccgcccgcccacctacctccccgccgctccagagggggctcgcagagctgaggacgcgcgcagcgctgctcaaggtctctctctctcagcaccctcgccggccggcgtctgacgcgggtgccagggtctccgggcacctttcagtgtccattccctcagccagccaggactccgcaacccagcagttgccgctgcggccacagcccgaggggacctgcggacaggacgcc

SEQ ID NO: 335211 - DNA, 1286 bp, Homo sapiens
  chr15:89437678-89438964
  hyper
gaggcagcatcgcccgcgaggtctgcacgagcgctgctcccagcgagaaatttgacatccctgtccctgtttgcacaaggcttgatctccgcctttgaaacctgcagcccccaggagaatgaaaaccggaggtgtttcccaatccgctggcccgggcggcgtcgagggagagaagccagggcccctctcaatcgctgccccctactccagggagcacaggcactcccgcgggtcagcgctggacaccaaggtcccaacaggtttacaggctgcctgtggcctgtggctgccaacgagctggtggcaggactgggtccaagtgccgtgctgtttccatactggctgcgcacaagcctacgtttctccctgagggtcgccatctcccacccagggctctgccctccaccctccctacccttctggcctcgctgtccctggggcaagaaccccggtgagcgaggtctggaacccataggcatcagttgcctttgccccaggcgcccagagccggccagctgcggtccagaggcgcaggtccgccagccgcctcgcaggttgccctcagcccctcccaggactcccggggcccccggagcatccaacagatacccaggggcagggcctggggcgccgcggacggcactggaggcagccgaccctggacagacgacaggggagagagccaagcggaccctggcaggaagggggctggaggcggacggtggtctcggaggccacggggtccgctcgggctctgctccctcacggtgggcacgagggtccggcgcccgcatccccgcgccgctccctccccacttgtgccccgggcgcccctcgcccgcgatcacagcccatctcagcccgggcctccgcagtgcccggcccacgcctcctgccccttccccggaccctgcccgggaggtgtggggacccgcagggcacccaaagcggtaagggaggaacccggcccgcacacagccccagaagcccagcgacccctaagccacgtaccgtccccaggcagctcctcgacggctagagctctcgggggccgcgagctgtcccggtccaaggcagcagtctgatttcggggaaattaaaagggcagaaaggaagcggcagcagaaaaacccccgcgctcccgccagaccagccccttaaaggaacacgcgcacctttccctcccaagggctgggctcgaagggaggagctgctgcaggcttgagcggtctccagactcgctgggaaccaccgcaaagagggtgtgcaagagttgaggccctcac

SEQ ID NO: 335212 - DNA, 99 bp, Homo sapiens
  chr15:89908903-89909002
  hyper
gcgcgcggttaccgcgagtctcgctgaggagccattttgtgcagcatcctgcttaaatcacactccgaggggctcgttcctcgctccctcttccccctc

SEQ ID NO: 335213 - DNA, 640 bp, Homo sapiens
  chr15:89913307-89913947
  hyper
tgactagagtgtttcgggattcacgaggctatgggctgcatcccttgggccgtccctcccttcccaatgcacctgggagcctgtgtgctgatggtgacctcatttcggaggaaaccggagcagcacttcctgcccccttgccctgcactccctgccttcctccctcaccggccaacgggtgtgggcaaaccctgggccccgggcttcgatcttcccctcccaccacccctacccgtttgctgtgttgcaagaactagtccttcacttgccagggtggctttgcagcttcccagcagtgtctacacagttcagatgagtgttgttgttaaacaccactgtcccataccatctgggcaggtctgaaacccgagttgagggtctgatgaaggaggagtctgtgcgggagggcaacgcggcattttcccgctttctacgaaaatctgttgatgcaaacctcccgcttcagagaaagatcgcggcagcagggctgcggagggcgatgagcatgccagttctaatctccaggagcccatcccacaccttccttaaacggccctcggagagaggccagaggccagaggccaacccatccgatttcggcctcctggtacgaatgcctgcccctactagagcaatgttc

SEQ ID NO: 335214 - DNA, 837 bp, Homo sapiens
  chr15:89921803-89922640
  hyper
cgcggctgcttcccgcccgcgcaggatcaggccggcccccgcgggcctggagctggatccagagctagggaaactggaaaaacaggcacaaactcggaagccgcggtacggcaagagcctaagcaaagaatcctttccaagattcacacctcgtctacaccagggcaccgcctgggcctacggccttccgaacccgaagcgcccgcagcccagagctggcatcaggccatcaggccgggaaggtcgtcgcaggccccagagtgcgggcgcggggggcgcgcgcccacaggacgcccggggttgggtaggcaggagagaagggcgccagcaggcccgcggctgtttcccctcggtccgcacagcgggcccgggaggccattttgagagcgcgaagaggggcggcaagatggctgcgtgggcacccggaaggtcgccgcgccaagggcccgctgagcccctcctcccattcgtccagccgcgcggcccacagaagcggaacgcgcgtcgagagcgccctgtccgctcgccccagacagatgcccggttattcattaccgcgaggcctagaggaaagagtggctgccgtcttcctgcccacagcccgccggaccctccgtcgcggctgcccggtccccggagccgcagccgccgagcccggctgtgcgtgtcgtggctgctggggagaaagaggcttccggtaagagcccccctgactgggctgcccaccccgggcaggggcggaaacggccttccccgcgtggggaacaatggcgttattttggagtctgcaaccgcgagcgcttcaagctctttgattattttcgaggagtgttaggt

SEQ ID NO: 335215 - DNA, 1283 bp, Homo sapiens
  chr15:89942592-89943875
  hyper
cgggcccacgaccccaaatgaaacatctttcactcgccccccagcagcccgggccgcgtttgaccactagtagggcagaaccactgaccggcaggcggcgctccccggggctcccggctcgagccccagggcaccgggaggagtaaggaccccgagcgggagggagacgactggggggcgcgcggcacaaagagctttttattcaaatttgtttagagtttcgcgaatttgcatgaaaaatgtgtgagaaaagccagctccggtgacctcatccgcacctgccattaacgttcaattagcggctgaatagcggccgccgacgcgacgtgcagagaatccggcctgccccgcgcagcgagggcggcgggccaggcccgggatagggtgggaccgagggagggggacgcggcgtagggccccggcctactcctctggcccggagacccaggacctcgtccgcactccaactctccgagggaacgcggggatctcaggactcacgagcccaagattgtttggagcgcgccgggagccttaggatgcctggctccctctgggcgcagaaaagggcgggcttgcctcctccccaggacggaaggtggccggaagagccccgtcccagctcagatgggcttccccgccatcttccggacaaagtgtcaagtacaagttcaagttcagggccaggcccgggggggggcgctgagccttacccggccgcctttgttctctggcataatcgctcccacgtccccctcccgggcggggcccagcagagacccccgccccgccccgccccgccgcgccccgcaggagcctcctcctcccgccggcgcggcgcctgtgccctggtcccggtgtccccgctcggtgccaccgaaggatctaggggctcgggccggggagggggtggaggggggagtggaggcgcgatacgaacccgtgggagcctccccaaccccgcagtcccagcggcaaactgtgcttggtcggacggatgcccgcgcggaggtaagagccctttgcgggattcgcccgtatccctgtgccccgccccccgcctgggactacgcgggccccaaggagcggggcggaggatggtgtgctgaaaaccggctgggcagccccgctgggcctccggtggggtggggggcgcactgtcgctccagggctctggggagtacgaggcctgggcggtgggtatggagggcaagtgcgcccagccgaggcccagtaagatcgccggcctttcccaaaggcgtttggctcacccatctctcctc

SEQ ID NO: 335216 - DNA, 963 bp, Homo sapiens
  chr15:89949775-89950738
  hyper
cggccgcccgcacatctggcccctagacctgctcggtagaggactggctggtggatgcgcggtccaggccgtgggcactcgacccacctctattttccttcccgaggcgcccctggattaccactttcggtttgcgcttacatccgggatgtcgaatttcccagggaatcataattattttatctataatttattctaaccccaaggttccaagaaaatctgtaatgaacgttaatatctacagcctcctggtcaatctgcatcgggcgagagagccgtcgggttcttcgcagtgggtgacttcaggtccctgtgccttgtttcctatcactctgaaagaattttctccccaaaggaaatccaacttgtttgaaacaggtttctcctctctgactttctgcactggagaaaaatctggatctgcttttcgaaaagattttttttttttaagaggcatccgggcaggcctgaggagtcgggctgaaggtgcgccagccattattgcctcagacctccggacgctacgtaccccaagcacctgagctactagtggtatatcagacaagatttctgggagcagccccaggagtccctccgcccgctcccagtccgcaagcgcagaggatcctgcgctctgtcccccaaggtcttggcgtttgctgagctctctccgcgcgcgtcgaggagaggccgcctctcgtgagcaaaagctgggagttgttagagattccgcagccgctctgagggcgagatcgggtttgtcccacgacctcggcgccaggaagctgtagaaagagacagaccccaattttctccccttggagttgaaacaaaacctgaaagcccgaggttgcccgcaccgccagaggtggcgcctaggcggcgggggcgaccagagccgcgtgcccgcgcggttcccaggcctgggttctgtttcttcctattttagttagttacttagcc

SEQ ID NO: 335217 - DNA, 735 bp, Homo sapiens
  chr15:89950778-89951513
  hyper
cgccaagcctggacccacgctgagtctccgcggccgccagacctatagttgcccggctgggctcccagaggagtgaagaagggaaattcctagtaattaaaggggaggttttcccggggcgccccttggtgaagtggccttggcttccagtgaggaacaaaggactaaggtgcctgcgcgcagcgcgccctcggggcccggcgcgaccagctttcacgcctctcccagctcccacgcctctcccagctccacggcggccgcgggctttgtgagctggggccgcgcgccgcgctgcacctgcccggatttaagtaccttggcgaggcagcgcaggcggctgttctaatcgccgtctccaagtacctgctcatgaataaacaccaaccccatttatcaggtacttagcgctcattgtgaaggggaaattggcccttttctgaaattgtctatccacaacccatctgcgcagttctggttgcagaattcccctcacccttgagacacacacacacacacacacacacacacacacacacacacacactcgcaacacgaggctcctccaagctaagataaactcgcttttcttccggtaagtgcgcgattgagccgcgacaataggcggcgaggaggaggccgttgggtcaatagcctgcgtctctcccattgataggaaaagtcagtgcgcggaatgcagggccttaggaaagccctgtccggcgttccagccacagg

SEQ ID NO: 335218 - DNA, 1226 bp, Homo sapiens; identical to SEQ ID NO: 238211
  chr15:89951773-89952999
  hyper

SEQ ID NO: 335219 - DNA, 177 bp, Homo sapiens
  chr15:89954212-89954389
  hyper
cgtcagatcaccacttagagcgtcttgatgcccaggctagaaggatctcggttgcaccagctttccccactgcagtttcaggttttgtcccgacagactttcagcaagcggcttagctcagccctggcgctgccttccaggaaagaggggcagcagcagcctcggctgagccgggtg

SEQ ID NO: 335220 - DNA, 462 bp, Homo sapiens; identical to SEQ ID NO: 238213
  chr15:89954591-89955053
  hyper

SEQ ID NO: 335221 - DNA, 233 bp, Homo sapiens
  chr15:89956224-89956457
  hyper
cgcccccgacctactgacccctcttcccccctgacatgaatagtgggactcacagcctccccagcctctccaactagtgcctgcaaagccacggctcctaatcagggtaatttaatatattttaagcccccggcggctttattttccctccttttcgagtttgttttaggcattcacagctctcaccccgtcattagacggccttatttgacggatggaaggagctgctatga

SEQ ID NO: 335222 - DNA, 40 bp, Homo sapiens
  chr15:90016187-90016227
  hyper
cgagcgccaccttgtgatcgccgtgcggatcacatgccac

SEQ ID NO: 335223 - DNA, 526 bp, Homo sapiens; identical to SEQ ID NO: 238218
  chr15:90039453-90039979
  hyper

SEQ ID NO: 335224 - DNA, 535 bp, Homo sapiens
  chr15:90319583-90320118
  hyper
cggccatggcccagtcgcctcctccgcagagcctcctcggccacgaccactggatcttcgcccagggctggggctgggccggccactgggactccacgtccccggcctcctcctccgattcgtcgggttcgtgcccctgcgacggcgcccgcggactcccgcagccacagcctccgagctgcagctcccgagccgcagaggcagccgcgacgacgcccagacgagcgcgcaccggaccagcgggcggacagcggcagagcgccagcgagcgggagaaactgcgcatgcgcacgctggcccgcgccctgcacgagttgcgccgctttctgcctccctccttggcgccggccggccagagcctgaccaagatcgagacgctgcgcctggccatccgctacatcggccacctatcggccgtgctgggtctcagcgaggagagtctgcagtgccggcgcaggcagcgcggggacgcggggtccccttggggctgcccgctgtgccccgaccgtggccccgcagaggcgcagacgcaggc

SEQ ID NO: 335225 - DNA, 696 bp, Homo sapiens
  chr15:91427360-91428056
  hyper
cgcggacaccctgggcttccctgggcccagcatctgcctggggcctcgccctgggctccccctcctgacccccaccttgcgccccttcccggtgttcccggggcgctgccgggccctggggcctgcggggcgcgggcggctcttggctgggccattctttcccggccccctcctcccttccgtttccgtggccgtgcggccggctagaggctgcggcccagcgcggagcaggggggctggcaggcgtcggggcggtcgggccggtcccgcccgccccttcccctccacaggcccgccccggggcctgggccaactgaaaccgcgggaggaggaagcgcggaatcaggaactggccggggtccgcaccgggcctgagtcggtccgaggccgtcccaggagcagctgcccgtgcgggtacctctagccccggggcctggaggagcggtgggagctgggggcgcggcaggcaggggcagagcaggcgttccgagggccagagacccacccaggtgggggtaggggccgcggaagggcggggatggccgcaggggcagggctcaggctgtgggcgcctgaggcttcagctggggcaggcttggcctgtcgaggacctgggcaagggtgtccctgtaaggggtggtgggtggaagggcctggggagggaggctccaggttggctcctgttcccgaacgtgc

SEQ ID NO: 335226 - DNA, 865 bp, Homo sapiens
  chr15:91642951-91643816
  hyper
cgagaacaaagcagtcgaacagcaccatgatcgacgatactttgggggcggcgtgatcagaggattccccttcccgggaacttgcgtctagtcctctgacgcatcctagttcggagtgggtggaagggcatgtggagtccacagcgccccctcgccctaggcggggtggagacagcgagacgacgcccatgatcagctggttacaaaactcgaggaataagaagtttaatatttattggtctgcaaatccggagaccttgcggcctcactggtcctccttccctctgagctatctccacacccagccttcgatcagaaggagatttagaagcagagctgcccgcagcgaatacttttaatgcccgggccgggaagaaagcgggttaggatctgatcccgctgagtagaggacccaggagcctcccgccccgcgtgctctgtagcgcgggggcgcgctgcgcgctgcgcctgggcggctggcgggggcggcgtgggcgcggtgatgcaggtgtgacacccgccggcgcctgcctccgcccggatcgcccagctccgcgttagccggagctgcacgcggggctgccggggcggacgctgctctgcctgcatccggaggcggccgccagcggatttgccacccaggtaggggactgcgttgctcgctgcggtgcaaccgacccagccggggcgcggaccccgcgtgcgccagggctcccagactcgcctgcctgggctgaaatatacacgctcgcacagctgagtgctgttcatagtaaatggcacaaaagatcggagagtcttgaaaaaccggcgcagaaaagcaaggacttgcccgctgcctggagctgtgcgcttctttgaaagc

SEQ ID NO: 335227 - DNA, 423 bp, Homo sapiens
  chr15:92459227-92459650
  hyper
cgtcctgaccaccctggagcgtaggttcaacctgcagagcgctgacgtgggtgtgatcgctagcagcttcgagatcgggaacctggcgctcatcctcttcgtgagctacttcggggcacgcgggcaccggccgcgcctgatcggctgcggcggcatcgtcatggcgctgggcgcgctgctgtcggcgctgcccgagttcctgacccaccagtacaagtacgaggcgggcgagatccgctggggcgccgagggccgcgacgtctgcgcagccaacggctcgggcggcgacgaggggcccgaccccgacctcatctgccgcaaccggacggctaccaacatgatgtacttgctgctcattggggcccaggtgctcctgggcatcggtgctacccctgtgcagcccctgggcgtctcctacatcga

SEQ ID NO: 335228 - DNA, 907 bp, Homo sapiens
  chr15:92936677-92937584
  hyper
cgccttctcgccgcgcgctgggggctgtccccaggtgttggtctttgtgtcgagaaaactttgcgaggaggcgagggagctggacaaagagcgggcgagggagggcgtttgccagcctgaggggtgcgccgggcggtgcgcgcacttccctgggctcagctccgtacccggtcgctcgcggtggccagagcccagtctctctaggccaggagtggcgtccggctgcatccccgcgccctcgggagctgaataaagccaggcgggagaagcaaaggctagcgcctggacgctggagttggtgggaggaggcgagcagaggcgcggagcaaagctgtcaaactgcgcgcggagccgggcgcggggcgggggaagggagaggagggagggaggggcaggcgggagccgggagggagcgagcgggctcgccgcgcctgagcaacccctgcctgtcgctgccgctgccgctgccgctgccgccgccggcccggactcgtccggagcgcagggtgtctgcccagctgcgcgcggcgcgcggaggctccggcgtccgccgctgcgccctccggcccctgctcctcgcgccggcccgcgtgggtcccggcgggcgcgaacccaccatgcagctgcagttccggagctggatgctggccgcgctcacgctgctcgtggtcttcctcatcttcgcagacatctcagagatcgaagaagaaatcgggtaaatagctgctcccaggcccgtgccacgagccctggcgggatctctccctccttctgtactctccaccctccgaccccctttgtgtgcgccgcgccccgctgtagctccgctggagagatggggacggtttggcagaaggtggcggcgacaggggcccgggacggtttggggagaggagggtgggggcgc

SEQ ID NO: 335229 - DNA, 865 bp, Homo sapiens
  chr15:93198374-93199239
  hyper
cgagcacaccccggccccccacccactctcccgggcagggcaggaggcacacggctggctggggcgcaccagggcacctgtgcgtgcaggtggggcgggcgcgcggcgacagcaggttggcgatgccgccctgtcggccggcgggggaaggaagagggcgggagggcccacctgaagacgcgcagcagcaggcaggcgatgaggagggtggtaaaggcgaacgccacgatcacggctgccttgagggtgggtaggtcgcggaggaggatggaaatgcgggtcaccaaggcgtcgccactgctgttggagctggagctgccgctgccgcccgccgccccagacccaaaccgggtggtgttcccgggccccgggccgggcggtggccgcgactcgcgctcgggttcgggccacggcgcggagacggactcggctctgctggcgcgggcggcgggagcggccaggagcgcgagcagcagcagcggcaggagcggggcgggcagcggcacggcgcgcatagtgcggtgggtcggcacaggatcgggcagggcgcgcgcggctgagctccaggatccgcaccagcacggaggcctgcaccgggggatcctgcggcggaggcggctgcgcggtgcttggcaggaagctgcggcgcccggaagagcccgcgccaccgccgccgccaccaccaacacgttgcaaggagtcattcgacgggccgcggccccacgtgggcggggcaggccacccggcctgggtcccggctgcgctccgctcgcccgcgaccccaattcctcgggacttgagaccccgtggtgaagcagcaactgccacgatgacacttgggctggccctgtgttacacgtttcac

SEQ ID NO: 335230 - DNA, 87 bp, Homo sapiens
  chr15:93352994-93353081
  hyper
cgaggcgagtcctcttggatcgaattaatgcattggctcttcccttcgcaacagctttgatgaccgtttcccgcctttgtgcaaagc

SEQ ID NO: 335231 - DNA, 852 bp, Homo sapiens
  chr15:93615977-93616829
  hyper
cgcacccacgacggggtgcgggagaaacaaaagacccgtggaaataggaggcggggtccggaggaggtccggagaacttgagcccggactcactcgcgcacatctggcccagcattgaggggcggcccagggacccggccccgcgcgcccggccggcagtgccttacctgcggggaagctgcagagaaggaaggcgagggtcggccagaatcccagggctgaacgtcctgcccctctccccatacccatccatccagctcggcctgttaccactagcctctccctggaagaagagttcagaaaaaaagaagaaaataaatcacgctgcgaagaaagggcagcctcgctccgccggcgggagcagcgagccgggaggctccgtccacctcggccgcgggcgcccggcgcgctccccttcccgcgccgccccccgcgcgcccctccctcgccatccatcactcggttctccgccaatgtcgacgcggccccgcgccccagccgcctgcgcaccgccccctcgcgctcgggtttcagcgaggccggcgaggtagccggaggcggccgggcggggacccaggctgcccggccgcagcgctcgccgtgaggacctcggaaaaccacggccctagatcagagggcgcgccacgctccccgaccctcgcgccatctccagcccgcggctgtccttgcaaaccaggcccagcacccttgggaggccgcagggcatgaggcggggcaggacgcccccttaatcccctccacgaatatccaatccaagtagaaaaactgtccttggaggcaaatcccagccctactttccaaccagactgccgaccccaagcttccaccgac

SEQ ID NO: 335232 - DNA, 918 bp, Homo sapiens
  chr15:93631396-93632314
  hyper
cgagcaagtctaatacaattacattaataagacgcaatcccgaattgcacccgagcgtcccccacacccgccctcccattgaatacacctgtcccccatgcccgggcttgtaccctgggttgagctgcggcgcgagccggcgctgaatcgtcgccgtgccctcccgtccacttaggaaagccggggcggcttggcaatgggcatcctcggccctcaatccaaggtccgcaccttcccgtacgccggcgcgccgaggcaaagggccgccgggacgcgagcccacgcggtgcactgcgccgacatccccgagggcaggagatggccaggcagctccgcagccgggcgtcgagcgggaggcgggggcccgggcggcgcgggccaatgggggttcacggcgggacagtcgggtggccggctccgtccggggctccgcgagccgggctgagggaaggagctcccagcccgcacacggtgtaagggacgtgtgccgggtctgcccaaccacgcgcgctggcggctgcccgggggagagtattttaggaaaaaagaacaaacaccaaaccacaaaaactttcctgctgccaacagctaaagcgatagaggcgcagcaaagctccaaatgtgggcaagatgggagcaagatgagacgcggggctaaggaagaccaaagcagcgccgtggccccggcatgtgtcggcggcgcctcggagatgtcagagccgggtctgcccggctcccgacccgcgcttaccttggcggctgcatgagcccctgcggcccgcggggggtggcgctggcggggctgcgggagaagagggggtgtcggggcgccgctcgtctgccccggggcaaggtgggaggggctccgctggcgctggtccccgccgccccggccggctcagcagcggcccggggagc

SEQ ID NO: 335233 - DNA, 757 bp, Homo sapiens
  chr15:94774574-94775331
  hyper
cgccttctctacgcccagccagtgcccagcaccaagcatagcgcctccttgcaacacccggccgagctcccggcggcagcgcgggcgcttgggtcggaggctgctcaaaggtgacgcgcggccgcctcctcccctttaggcggggctcgcaagggcggtgggggggcccgaggaagtccgggggccctcggtgatgcccccgcccccgccgcgtcagggttgctccctgcgcttccgagtggcgactgcagcgggtccggtgcaggtgaggggcgcgcgcctgcccagctttgcagcccccgaacgcggcctcgcacaggtgagggcggtgccgggttcacctggcagcgcgcgtgggccgggcagcacggtcgccgcctgggggtgggcgtcttctctcaaccgaagctgggagttggggagctggagggtccaggatgagaattcagtggcgctactaccccggagctgcttgtggttcagagatcagaaaggtgtcctgaggactggaggcagaaatccaggcgtggcgtactggaaggcgcactaggggagggcagcctggcccagaatttctttgcattttaaaggccacacattcagtctccccggggcgctacggaggtagtcaccgccacatccaggactccttccacagaggtcagttcctcagctgggtgggctttaatacgctctcttcgtagagacccggaggttcaactttaattctttgcgctgacatttgctcaacgacacc

SEQ ID NO: 335234 - DNA, 202 bp, Homo sapiens
  chr15:96596605-96596807
  hyper
cgttaaacagcggggagccgctggcgctggcagcctgcccaccggcgacggtgaaccgggctggcaccgagcagggagccgggcctgccagcctgtccgcctcgcgagaggaggcccgggctcgccctctctgccctccagatgactctttgcattcttgtcaaatatatttagaacaagaggtgtccacttaaagagaaac

SEQ ID NO: 335235 - DNA, 875 bp, Homo sapiens
  chr15:96873798-96874673
  hyper
cgcgcgcgcgcctggccaggccaaccccggctgctgccttataaggcgcgccgtcgccatggcaacgtgcgctaagttgcagcagtcgtgtcaaagttcactatatagagagctcagtgagctgatcgcggagaagccacttctgccagccccggcgcctataaatcgcattccctcccgcgcccccctttttagcatatttgatcactttgattctctgttcttttctctccgcggtgtgtgtgtgcgtgcgcgcgtgtgtgttttcttcttctcctcctcctctccccgagttgcctcctttctccgggtgccgtactgccttttttcccctctttcattctttctctccgtctttttctcccccctctgcgcacgaaggatgtgcttctaggtggtgatctgccctcctctctctcttttatcatttctcccccgccgccggcgagttgactctttccctatgtgtgtgaggcggcggcggcagcagcagcagcagcggctccggcggcggcagcagcggcagcagcgacttcagcggcggcggcggcgctagacgcagcggctccgggcccgacccggcggcttcggcggcggctccggcggcagcggcggcccgggcggcccgcagggaacggcgagcggcctccacccagcgactgcgggcggcggcggccggagagagcgaggcgcgcgccggacgcccggggcaggcggcggcggcggcggcccagcgccaggacgacgccgcgcagcgcccgacgcggaccactttcatgctgattcccccggacccgggcagcgctccggccactccgcgggccgccggcctccgccccggcctgcctggctccctgggcgcgcccgcacccggc

SEQ ID NO: 335236 - DNA, 867 bp, Homo sapiens
  chr15:96883789-96884656
  hyper
cgagcgcgttctgtgtgaaattgacgagatctttaaaaaagctgctaaacatggcgactctttccctttaagtgtctctttttccttgctgggtttttttttttttttttttttcatctgatctgagctcgctttatttcttttcccaaccccgctccccctcctcctcgtggcgctcgggggtgtgagagaacccagttagacgcgaaatgcaacaatagtgcaaggagagagaggggcgctcgctgcttctcgccactttcaaacaaacctgggggaagattgagcccgggggggattccagcctgctcgctcggctcgcggtcgccctgcctcggcctttcaccattagctctccctgggccgcgaggagctggggctcaaagttagcgggcgacgtccgaggcttagcctctagccggctgcagggacgggggcctggagttggcagctgctacgggaaagtgcctgccccccagcccccgcccccacttacgtgcggcagaattccgccagcgccccgggaaagtccggggtgccgggcgcgcggagctgcactcctgggatgtgcattaagcggcgacaggcggggggggcgagggcgggggcggggggcggtcagggggagctcgagcgtgtgaaactctgcctcgaatctcgcttttgacttggtcctatgagctgagccaacatggcgtctcccactgcaccgcgagcgccgggctgccaggctcggcagggccgggtaatagaaaacacattggttaccaaaaagaaaaaaaggagggcggggggcgctaaaggccattccgtctgcaggcagaaaacccttttttaaactcttgctggcaagtgagtccggtcctc

SEQ ID NO: 335237 - DNA, 838 bp, Homo sapiens
  chr15:96959376-96960214
  hyper
gcctttcctcttgtcgctctcgctttattacattagcgcgggcttccccgcgccggcgtgggctcagaagccgaggcgccgggtcacccatgacaaatgtccccgtgtctcgccaacaggccccgcctggccctgccactccatctgcccaacaggaccccggagagtgcttgcgggtgtcagtttcaggtaaagagctctcgaaagcgcaaagtctccaaaaaggttacaagggttccagcgcctccccaagtcacggaagcctgggccgccgctgcagcaggaagggttcgtacccggggggaggggaccaccccaagcgcgtgtgttaacgaaccccaagcgaatttcggggcttgaaagcgctaccggggcagccagattactacctcccactctcacctccatccctccccgccccttgcccgtcccacgggcctcagatttgggcgtagggctgggtagggcgcctgggaggagccagagggggcggatcaggccgggatttggcgccaggtacccccacccgcccgcgtcccggggtcgccagctgactccatgtgagcccacttggcaccggccccccgagggatcctgcgacgcgaggggtgcccatttgcagtgatccgcggactctcgaaccctaaaccccggggcccagctctgccccggcgtggatcttcgggaaaccggagcggaggctcgtggagacctgggaggagctgcgctgactggggcaggggacgcccagattggatcggttccgagctctcgtcgcccccgaggagggcacgacgcgctgacaaacgtggccgtcaacacctcgagctgccccggc

SEQ ID NO: 335238 - DNA, 873 bp, Homo sapiens
  chr15:96960242-96961115
  hyper
cgtactatttgagtggcaggcgacgcctttccccactctcggtatttatgttgcaccgacggcacttaggagagcttagttttagatgcggcattaatcttcacttgttaagagatagtctgtcagcctttaccaggctctcccactcccgacgtgcaaggccctcccccagcgcgcggccacccccaagctggtcctcgcaaaggcgcgcggagccgcactgccgaggagaggagcccggggttaaactggggcaaggcgagcgagccgcggacgccaggcgcgagcgcaaggttaaagtcaaaagctctgcctgggccagcactcaagacggtcctggcaccaacgcctttcatttttgcctgtttgcaagcggggaaagtggagtcctcaatcatagcgaggagcttttcttaagccacaaagcacacgggcgcaaacatcctcgctgctaactcagggcaattgtcttcctattttctcgttcctgacccccaagtttcaccggtgggaagtcatcgaagatctcccttttaccaccagctctacggggtcgcttttctcttaagcgccctgtgagggtcctcccttttaaattatttcctgcccagttatttttcccccaattaatccagaatagttttctcatctgctccagatgcacgcaaactgcagagctgaaatgaactgaactaagagcggaattgaaatacaccaggggtttccctgcaggaattgttccaacgaggtatccacgggtttcaagatccgttgaaatgcttcaggtgtggtttgcattctcaccgaccctcgggccagttccctcgcccccaaccgccgttatttgttccccccacctacttcaatagttgc

SEQ ID NO: 335239 - DNA, 889 bp, Homo sapiens
  chr15:99090794-99091683
  hyper
cgtcatattcagccctgtttaattcccactgtcttgggtctagaatttaggcttttgagaaatctttattgaattaatgaaaactcaaagaccacgattctgcattcccccaaatcctgaagtgcagtaggagcccatgcagggcttgggacgggctttttgcctcagcagccaggacagcctctgcatccgtgaccacctccccgcccccctcgcattcccccccatcccctggtgatatccttctagcgcaggctcgtgctctggaggcggggtggggccgggattctgcagctgtaaccaactcccccgctgggggcatggggctggtccctggggcgcacagagaagttgtgacagataattgacgtgatcgggaggggcgtccaggcagacctcatgtgacttctaaaaccaacccacaaatctgaagcgtggcttgcgtggtcagccgcctgcctggcacccggtgaacagtttctcccggactctctgcatctagccccaaagaatctaagattctttgtctagaaaagtgccctggtcttccctggcacccttcgcggtgggtttccttgactccgcataaactcccgttccagcccaaatcagaggcggtcgcagcagccgttcctcgtctccatcagcatccgcgttgccatttccccgtcctgagctgttgctcatatcaaatgtcactcggggatgactaagagccgatgttgatgaggagccttcagcgttacggtaaaggagctcgtgcaaacttagaccccagtcatctgacggtcacgtgggcgggcgtcgcggcccaggcccccgcctcctccgtcctccgcgattcggacatgacacggtcctccgcgaagggcaggcgttacataaaccc

SEQ ID NO: 335240 - DNA, 863 bp, Homo sapiens
  chr15:99192824-99193687
  hyper
cggaggagggtccccgacctcgctgtgggggctcctgtttctctccgccgcgctctcgctctggccgacgagtggagaaagtgagtatgtgcccgccgcccgcggccactgcgggaacttttcctccgaggggctgcgccctgtttgcgaaacccgagttgccaccgtcgcagctgtcgggcccccgggctcgggagcggcggggtggggcgcagggcggctctgccgggagggaggctgcagcggacccgggacccgggctcgttcgtctggagccccgcgggccctggctccgcgcatccccgcgcgggaagggcttttctctttctccgtcctgacagcccagccgtgtttcccggctaggcgcgaggactcggtagggaagttggtgccggggcgggctccgcggttcccgggccccgcgacccgcacctcgccccttccatgcgcaagagcctctccgcacacagcgctgatcccctgcggcgcgcaggcagcagcgacagcaccctgggccgcaccgcgtctccgctgctggggctgaccgggcagtggggagcgggcagccgcccggcccgcggggtgcgagttgccctcgaggggggaggtgccctgcggagaggccccgaagccccaggacacgtctccaagcgcccgtcgctgcctcccgtcgcccaacgtgcttttgcccctcgggctcctcgggttcctggccttgcccgtcactttggcccgctcctcgttgggttacctgcccccggcgtcccggggctgggcggtggggtgaggggaagcgctctctgggcagccccccgggaagtgcgaggccgggagtcttcctcagcttgtctcttccggggagc

SEQ ID NO: 335241 - DNA, 820 bp, Homo sapiens
  chr15:99193738-99194558
  hyper
cgggccgggggatggaggggtactagggccgcatccgagtgtgcgttggtgggtgtgtggtcggagccgacgtgcattccgacacacgtgctcgcagcgcggggtgtagtcgccgcctcacggggacacctagacgcccgtccctggcgagaggtgtcgtacgctgtggtttcagcgccagggtctgcggcggcgcggggagggtgttgtgttttgcgagcgcggagccctggccttggttttgttgtggtcggcgtcgtgtcgccctctcttctgccgccccgcacttcctttgtacgtagttaataagcagtgtcgctccacattcgctgtcttttgcaatctgatagcttttgttttggtggtgtcgggtgggggttagtagggaagcgcggggatgcggggagcgagaactccccccggtgtctacggccggaggaggtgggggttttattcttctgaaaaagttgaaagtgtggcttactggtacattcaagatggtagggtaatttgaacacgattaaaagtttaaatgtcgcagaactgggactgggaacggtgagggcgtgttggtgagtaatggttgccgagggtatgcaggtggtgccgattaactttgaaaaaatcacgactgagccttcacgagtgaggcggggaaggaggaggcagcggaggttgtatggccccatcaccggggcaattcagaaaggctgtttctataaacaaatccttaaacgtctggtaagaaatgagtccgcgacggaacgagagcagatcgtggttcgcgtgtttactgccgagtgggacgcggactggggcc

SEQ ID NO: 335242 - DNA, 1399 bp, Homo sapiens
  chr15:100881161-100882560
  hyper
cgccccacccccaccctccacggcgaccactctgcgtcgcaacagaccggacgggccgacccggaggtggcgcgggcagtaccaggccgccggcggcgccgcaggcgctgagcgagacgagggagccggggtggccgagcacacggcccgagtagaagcacagctcggcggggcggccgcggcgccgggccgcgcccgcctcctccacctcgaagcctcgggacaggaagcgcaggtcgcggcgcagctgaaggtacaggtcgcgcccgaaggccggcaggtgcagcagcagggcgcgctctccgggccgggcgcgcggggcggctgggggcgtgcgggggcgtcgccgccgtcggggcccgggggctgcgggcagcggcggcaggtgcacgtcgtcggggcgcacccgccacgggagcaccacctccacgtcggccgccgcgtcgccgacagctgcggggagagaggagacgcgtcagcgcggcggggcccgcccggacgcccgccctcccgctggccgccagccgcgccagcgcggggacagcgcgacccggagccggcgctgccttcccttccctcgcccggcacctccacgctggcccgcgccacccggggagggtctccggcgcagccgcgcgagcacctcccggaacggcgccgcgcatcggcgagcggagacccggcggcggcgcgcctgccacggagccacccgattcccgtactccggccgcggcccgcgcctcctccgctcgggcgccgtcagcggtcccgccgccgcccccgggccgccaggacgccgcgagaacgcagagggaaggtagccgcaggacgcggggtgaagagggctgtgggagggggcgctacctgtgcccgggtccagtccccaaaccagcagcagcagcacgggcaggacgagcggaggcagcagggcgccgtcacacatggtacccgggaccggcagcccccccggaccgtggcggcgaagcaggagcgcgctaggcggcggcgccagccggagtgaagccctccagcctttggaaaaagtaattagcgctgcggacaaacccaacgtggtaaaccccaagccccgccttcccctcggaaggcgggaggggattgggccctcgctttcctccgccccgcctcctccttccctactggttgggatgggtcgaaaccacagtgcgtagttaggttgtcagcgctttcttacacgtggtttctgggcagtggcggggacacggcaccaggtggcgcgcgggagccgaccggagccgtgggaccctggaagagctggaggatgcggggctggtcttcagagcttgtcctcattttggaactctctcagcctgctgcccagtttcccgggaaggtagggcggaaatcgccccggccaagc

SEQ ID NO: 335243 - DNA, 547 bp, Homo sapiens
  chr15:100889946-100890493
  hyper
cgctggttgcaggagtagccaaccccgctccctggcagcccgtgagatgccacatcccctccagcagggggcggccggcatcggtcccgtcttcctaaaccggcgttggtgggaaatgccggcaccagctccctccccgctccagagccctgttttccccatttgtatttcactactttcctgttgagcttggattccagcctcaaattccgcgatttggccggcatcctaatccccgagtgactcttgccaaccactctctgtggggcctgtgtgcttcctcctgggttctggggcgctggcggcgtccgcttcaccgggaacgggagccccagcctcccgaggccttcctgcctggctctgggaatggccactgtccagaaagccccgcggccgtccatgctcgctcgctcagtcaggcccttgtggggatattgcagaacgagtccgagttactatccctttaaatacaggcgtttcggcctagctgccgccggtccaatccgcagcgcttccgtgccccactttcccgcgtcagcctggctcc

SEQ ID NO: 335244 - DNA, 599 bp, Homo sapiens
  chr15:100913438-100914037
  hyper
cgacccccgctgcgaggggtttcccgcgggaggtggacgaagcgtgggccaggacaggcgcctggcactggggtttcagagccgcgagtaggccctgaaggccgggagggaccgccagtccccactggaagccgcttccgtgcagcccgggacaggtgcgcggcgcccctcgccttcgcctccgcttctgctcttcccctcgcggccccgcgcgcccgcgccctccgcccagaccccggtgcagcccggccaggcgcggcggcggcggcgtctccagcgagggaaggtcgtcctcacgcgctccggcctcagggcgcctctccgcccggcctcgcagccttcccgtcctgcccacggccgaggccgcggctgtcggggtggcctggacgggtgcagggctgggcgggggcggcaggacttgaaccggcgcctgctctcgcggaggcagcagcagagctcacccctttctcgggaaatggtttatcgtggataaaacgcagtccccaaagcgaaggtccgacgggcggccagacgcaccccggggaccttcaggtggacacacggggcctccgcgcgccgagccgcgagggaagaggggc

SEQ ID NO: 335245 - DNA, 497 bp, Homo sapiens
  chr15:101458286-101458783
  hyper
cgcgtcccctccagcgtctgcccgggccctgggcctgcgctccctcgcggtggcgccaggtggcggggctgcgcgccctggaggagctgcaccgccgtcgcggggctctctcagcactgaggacaccacgccctgcaaattgttgggaacttgtcggtggcaatcacactgctggctcctgcaaactggtgtgaggccctcaggggtgagaacaggattgcagaactgcgctcacccttttggaaagtcgtccagtggcagaagtagcctcccaggagcagagcgaagctgctcggtggtcccctctccaaccagggacccaagaagccgctcaagggaacacggccccgcggcgtccgggaggtcctgcaggagccctgcggctgccccggttctgtgaaatggcagtgagggtgggggagatgtgcgctaaatcctgggaacgtgcgagtcataactttccaggagaggggcccagggcgctggtcctgcagggc

SEQ ID NO: 335246 - DNA, 1300 bp, Homo sapiens
  chr15:101459085-101460385
  hyper
cgttaacgctttagaacgacacatttctgtatcgccccgtgaagagctctacgcacatgaatgttccccgtctgtttaactgttacggccgcagtgtgtgggccgcaggcgcgctgggggctcatctgctgattttgctgcccctggagcagagggatagcgaaagcggggctgagcgcagcacggaccgatcccatcgccgcgctcgccccgcgtggaggcagccgggtgcccgaacctgaaggaggacccggtgccggaagggcccgcggaccccggcgtctcccggggcatcgagcgccatcgcccgcgttttacggccagggaaactgaggcggccgccgaggggacgcctcgcgacggttcctgggagagctggcggcggccttgctctgcgcgctcttcgcgccgccctccccgcccgcccgcctcaggattgaggaagtgcgtctgggcccggccccggcgcggggggcagacggcggtgggacggccaggccccggccccgccagtgtgtccgcccggccccgcgtcccggagcgcccgcacccggccccgccgccgcctcaggtaagcgccgctcctgccggcgccccccggcggcctggctgcctcccggccccgcccggggaacccagagcccgcgcccggcgcccgcggggagcctcggcctctgcctgcccgcgggcccctgcgctccgggcggccgcgtggtcgggcacggggggccgttgcgcaggggccgcggcccgaggggcgcggagggcgtgtggggcgaccccggtctcacgtccccgctgcctcccgccgcgcccggagcccagccagcctgtgggaggggagcgcgcggggcccgagcagggaaccccgaaaccccgtccgggcagggtcgggaaagctgggaagcggaggcaagagacacgagtcgggagacacgagccggggagcccataggtttcctctgcctttggagcgaacccagtcccttagcggggagcgggcggagtgtgagcgcgcgggtgagcccgtgccggggtgtcggcaagagaccgcccgggagcctctcgctggtccggggcttcctggggttgcggggcggcccagcgaggcttcaccctcctcgatgtctgggtcacgcttcttgcccaggtggtctctggctggcgcagatacaactgctctgtctaccatggtctctgcaagctacaggggaccttcctggcaggcagggacgcgggaaggaagcctaggaaggccggggtcagcgaggagacgctggtggagaatctgagaaccccc

SEQ ID NO: 335247 - DNA, 432 bp, Homo sapiens
  chr15:101513643-101514075
  hyper
gcgtggctgagacccgcggctctctcgccaaagcccctgcgcctccgctgctgtcggcgaggtcggcccggccgctcccccgcgggccgctgtccccggtgccctggaagggctccaggtggcggtctcgctgcagaatcctccgagctgcgctcgccgcccggtgccttcgcagcggccccggttgggttgcgggtcgcggggcggcgagcgcagggagcgtcgcggggccacccctctctcttcctgaagcccccgcgatcgtgcaacgggccgcgccgcctcctgctgtgttccacggtgattctcaagagcacgcgggcagtgggcggtgacgccgtgtgtgtgtgcttcctcccgcgcaggtgccggggacacgggcggcaagccgtccacgcggggcggtgaccctgcagcgcggtcccgcaggac

SEQ ID NO: 335248 - DNA, 1389 bp, Homo sapiens
  chr15:102028780-102030169
  hyper
cgacaacccagcggtgtagacattgccactgactgcaaaggagcttgtcaggggagcgacttgccaaaggtcacaccgctcggccatcagaaccgcggcagaagcccccacacaaagcgccctccctccgctcctggagaggttttaaacccaggacccccggccctgcgctgtcccaaggcctctccgacggcggccgggctccagggtgcaggctcccggccatctacccccgggagccgcggacaccgagggagcgcgagtccccgagacgccgggccacgctcatgtcacccaagcagcggccgcggccgccttggcgcgcgcaccgggtccggagctcgcgccgcccgtcgagggcagaggggccgctcccccgcgggggagagccgggtgggcgcccaggacccagcggcggacggcgcgcgacgcctgaggcagcccagactcccccggagcccggcaggtgtccgcgccgccccggcttctgaggccacacttccgagcgcggggttgggcggcactgccgggggacttgcggtcggcgcgccggacctgcgtgggcgcccacgcgggaccccagtcccccccaccccgccgagtgtcccgcgcgcgcccccccgggcgacacccccccccgcagggcgccccggccgcccgccgtccccaagcggtcccggagccttcccacgcgcgcgcggggccggggccgggcggacaggactgcggaggcgcccccctcgcgcgcgccggaggccgccgggaaagttttgggcgcgcggggccggccgcactcacctggcccaagttgaggtacccgtgcgccgccgccacgcggtccgcctcggccgggccgcccagcacttgcaccgcccagtggttggtgtagacggggcgcggcgggggcggagcaggcggcaggcagcgccagcagcagcagccagcgccagggacgcggcgcgagcggccggaacccgggcccgccggcgccccccgcgccccccgcgccccccgcgcccgcggcggtgtcggtggcggcggcggcccggggcggcggccggggcccgggcgcaggcggcgcgcgcggaggcatagcggcgacaggctcgcgcggcgcccgagctgcgagtgcgccggggggtggagtgccgccttttaaagccgctccgcgccggggaagcgccgccgccgccgccaccgccgccgccaacaccgccgcgggcgggagccggggaggaggaggcggccgcggcgcgttcccgcccccgggcccgcgctcctgcgaccgggctccggggccgagagccgtccgggaggcccgaaacgccccccaccgggggaacttccccgccgacttctggggctctcgggacgcggtgccgccccaga

SEQ ID NO: 335249 - DNA, 488 bp, Homo sapiens
  chr16:325111-325599
  hyper
gccgcggaagcgggcgagggcgggacgagccgggcctcctctcccctatgtgctccccacccttgcacagcgcgctcagcagggctctgagaactgccagactccaggaaaacccaggcctaggccaccagcccagtgaccccagggcccagtgggaggcagggcgctcaccctcctccgagacgcagaacttctgggccaaccactgcacgacgtcgctgcctgcacgggagagacagaggtggagggaggccgaggcgcgcacgcacccccgccccggcgcgcctcacctgtcaccgcgtggggaatgacggtgaccagcaggcgctggctccgcatcttcacgccctggtcggggtcctgcatgctcacgaccacccgctccatctgggcggagggagtcgtcagggggtgtctggccgccccgcaaccctgattccctggcaccggccgggatgccccggatccgggagcgcggagattaacgc

SEQ ID NO: 335250 - DNA, 819 bp, Homo sapiens
  chr16:745060-745879
  hyper
cgtgatgcgtacacacctgtggttgcaccagaggggacccccaccttcaaatcacctggccccggccatccctcgtcttcctgggagtgcccctggcgtgaatcccttcctgccccacccggagcagccgctggcccctcctcgctcccacccaccgggaaggacgggggtccagccaacccgtgctgcggttctgcggttcccactccccaggctccgagggctctgcccgccgcgccacagccccagccccgccggaagcccccgcccccggccccgtgcagccccgccccgccccgccccgtgcagccccgcccggcccagccccgcccggcgcggcccgggggcgcgcacctgtcgagcacgagctcctctaggcggtgcaggtcgcaggccacgtactccagcgccatgtcggtgatgcgtgggcaccacgagaggtcaaggctgcgcagcttgcgcaggttctcggccacgagctccacgccgtcgtcggtgaccttggagcagcccgagaggctgagcgcggtgaggttgggcaggctgtgcaccacgttgaccacgccgtggttggtgatctcccagcaggagagcaggcgcagcgtgtgcgtgctgtggccctggcgcgccgtgaagtaggccagcgccgtgtccgtcacgtggtaggcctgcaggctcagctccgccaggttgggcagcagctgcgagatggccgcgatggcgtcgtcggccacgttgatgcagtcactcacgctcagcgaggtgatgcgcgcgctcaggctggaccacagcccggcctcggtgaagtcgttgcagccc

SEQ ID NO: 335251 - DNA, 105 bp, Homo sapiens; identical to SEQ ID NO: 238295
  chr16:750434-750539
  hyper

SEQ ID NO: 335252 - DNA, 511 bp, Homo sapiens
  chr16:750612-751123
  hyper
tcgcaggatgccggcgcccgaggcggcagcaccaggcccacgggcgccccagtctaaatatcctccgtgcccctagagcggggaccctcgctccccagacccggaagcgccgccttccccgccagggacgcctgggcctccgcagaccccgccggccggcgcgccacccgcgccagcaccatggacagcggccgccccagccgcgcgctcagggccaggcccgggctggcttccaccgcggacggctgcggggtcggggcagccccgcaatcccaaatcccggcagcccccgctcagcagggaggggccccgggggcgaagagtgggggagaagccgggaaggatccggaggaggcggcgggggcggcgccaggggaggaataatcccggcgcagtgccgatttaggttgaaaacgctcccagtcatgggcctgcacgtggagcgccggggctgggggaggcattcgcggggctcctttcccgccccgctcgggagctcacgtttgccggc

SEQ ID NO: 335253 - DNA, 408 bp, Homo sapiens
  chr16:1030271-1030679
  hyper
cggggtctgcggacgggggcgggcggccgctgggggcaccagctctcggccgggccagaacagggggtaggaggcgcgtcctgtgcggtcggtggcggccccaggtgggtgcggtgcgctggcaggaagcggcagcacgacccccgactttgcatctggacttttctagtaacggaccagctccttctgccgaccgggccggggagaccgcgtggctcagtggctgcagcggccaccggcccgggcgtgggggctttgagggcaccggcgcggtaggtcacccgggtttcgcgggccgcaagctcggagacgcgcgtgtcccgcgttggctgcctgacccggaatggcgcagccccttcgcctccagcgcgctggttgaaaggatccgagccaccctcggggacggcc

SEQ ID NO: 335254 - DNA, 563 bp, Homo sapiens
  chr16:1035088-1035651
  hyper
cggcgaccagccccgaggctcgcccgactacggttcctgcagcggccagtccagcgccaccccggccgcccccgccggccccttcgccggctcacagggcgactatggcgacctgcaggcctccagctactatggtgcctaccctggctacgcacccggcctctaccagtacccctgcttccactcgccgcgccggccctacgcctcacccctgctcaacggcctggccctgccgcccgcccacagccccaccagtcactgggaccagccggtgtacaccaccctgaccaggccctgagggcccagccgcggggagggactcgcaggcgtcagggggcagccttgtcccggcccagtgtgtgtgaccagggcgggaggggccccagtggctgagctccaagtgcctgctgaagtctgcagggaaacacgcttgctgcccgtggccctcggcctccagatggccacacctctgccgacgacggaccagctccctctcccttctatctttctttttgaggtggtgggattattccacaaagaagggctgccgtttggtccctctt

SEQ ID NO: 335255 - DNA, 141 bp, Homo sapiens
  chr16:1202445-1202586
  hyper
cgcggaaactgcccgtgcgtgtcggggagagatgcgagtgcaggagcgcccagccgtaaagcacacccccgcccgcccccgcgccccatcacacacgcgcgcgcgggcacacccgggacacacacgcggcggggaaggggc

SEQ ID NO: 335256 - DNA, 1232 bp, Homo sapiens
  chr16:1203076-1204308
  hyper
gccccgccccgccccgccccccgccgctcagcccgaagtttcctgcgccgcgcgcggacgggctcgaggctcgctcgctgcctcaccggtccccggcccgcgccccgcgccccgcgccccgcgccccggcctcacccgtccgctcagcggcctccacgccgcgccgaggccgccgccgtcgcctccgccgggcgagccggagccggagtcgagccgcggccgggagccgggcgggctggggacgcgggccgggggcggaggcgctgggggccggggccggggccgggggcggaggcgctgggggccggggccggggccgggcgccgagcggggtccgcggtgaccgcgccgcccgggcgatgcccgcggggacgccgccggccagcagagcgaggtgagacgcggcgaggacgcgcgcccgggaccctcttcaacttgcgcgaagcgggccggggagcccctcggggtgggggtggggccgctggagggagggagggggcgggcgggggcggggggcgcgtttgtctctaataagaaaagacaaagacatcccggcggccgcggctgttcccgcagctccgcgccgcgggaggcagggcgggggcgtcgccaccggccccgggtcaccccctgtcctctgcaggtgctgccggccgccaccatgaccgagggcgcacgggccgccgacgaggtccgggtgcccctgggcgcgccgccccctggccctgcggcgttggtgggggcgtccccggagagccccggggcgccgggacgcgaggcggagcgggggtccgagctcggcgtgtcaccctccgagagcccggcggccgagcgcggcgcggagctgggtgccgacgaggagcagcgcgtcccgtacccggccttggcggccacggtcttcttctgcctcggtcagaccacgcggccgcgcagctggtgcctccggctggtctgcaacccatatccttcccggccggcggggggcggggggcggggggcgtggggagggtgggggcccggggcgcgggactccctcggcatgcgcccccgcgcgcccctgttggtgggacctggcgtgggccgggcgcgcgggggtgcagggcaggggctggaggaccgcgctctaatttctgagagtggcgggcttggggggccaccgggcgcctccggactcccttccccagggccggctccggacggagaaggtggaagcgaagcggtgaggcccccgc

SEQ ID NO: 335257 - DNA, 320 bp, Homo sapiens
  chr16:1382868-1383188
  hyper
tttttgagagctttttcgagactctgtctgaaaaaaaaagggaaaaaacgcagatcgcgcccccacccagacttcgggaccagcgggttggggacaggacccatcaatgccttaacaaaccctgcaggagaccgcgggcccgctggggttccaggacagcgcagcggaggaagagcggggagccacccgggaggggctggcggggtccagtgcagaccccaggggctccgggggctctggccggctgtgaccccacaagcgccaactgggccctcaccagagccccagggacgatcgccccacagaccgtccgcgtgggc

SEQ ID NO: 335258 - DNA, 859 bp, Homo sapiens
  chr16:1967780-1968639
  hyper
cggtcccaaccccactgcccggagcgcacccctgctccctgggaggcaggatatcgtgccgctgctccctggggcgcacgataccctccccaggaaggcgccggtcagggcggacgggccagggtgctcaccggtaccaggcgaggccgcgctcgtagcacctgtcgaagaagtggggctcagagcccagcgcgcggacgtcggggtgcagccgcagaaactccagcagggcgcgcgtgccgcccttcttcacgccaacgatgagcgcttgcgggaagcgccggcggccgggaccgctggccaaaggcaggccgggtgctcccgggcggtggacggagctggacggctcggagggcgcgggggccggcgcgggggcgcgggcggccggcgggcagcggccggggagggcgcagaggcagtaggcgccgagcaccagggccacgagcagcatcggcgcgcgggacgcccgcagagcggccccttgcccggcccctgcgccctggccgcccccggccccgccgcccaggccgccgctacctgccatggggtcgcgccgctccaggcccgggagcgggggcagcaggcgggcgcgcatctcggcccgcgcgccgctcagtccgtgggtgcccggcttgtgctctgcgcccggcggtcccgcagcctgggagcgggcgcggggcgggaccgggggcggggtctggacgccctcccccctccccctcccccgcccactccgcctccgaggccactgcctgggctggacccgccggcagccgccaccacccgggcgcgactcgagctgccgggaccaccaggacgctcctgctccgagatcccaggccctggctcgcttgactcc

SEQ ID NO: 335259 - DNA, 1418 bp, Homo sapiens
  chr16:2040762-2042180
  hyper
cgtccctgggagggccctgctgctccttccctccggcaggggaggtggcagttgggtgccgagctctgggttttgtccaggtggcaacctctgggccagccgcacctcggcgcctgtcttggaggagggcggtgcccacggtggggcaggggctttggcctcccctgcggagtggctctgaccagaccgggaggcaggacgctgcgttttggtccgagcgcacgtcccgacttgtggcccactcttggggacaagtgcatgtcccggcttcccccttggctccactctcggagctggagcgggaaaggagcgaagggatgaggttgaggctggaggtcgtttcttggaaacacagggctgccccgtgcagcgctggttaaaatgactgcggtccccctcatgcctgtctcccggaactggtgggcaggaggcattgaggtttgacggaacctcagaggtcaacggtgtcatcttttcagcccaaacacttacaggtgatattaataatcagtcacgtgggggctgtcatccctcgggtacccaccacgtgcaggaagctgggtggacatgtctgtcccagcactgcatgagctgtgcccgtcaccctatttgcatgctagaaaacaggccagacagttcccaaccgcgcaggaagcaacagctccgctgcctccataccctccctcccgccccgctctgcctgctgcactctcacctccccttcgccgttccggctccagcctgggaatcgcgggcccaggtgaaggctcctgttcccacactcttgagtgggctctgaggggactccacgggcccacgcggtgcagagtacctggcttgaatcaaccccggcttttgtcagccatgtgatcccggacaagtcacttcacctgttggggtcccaatgtcccccgcatttataaagagaataagaacaatggcgatcccacggggactttctgaggatttggtgaggggacgcatgtaaagtggctgtttaacacaatgtctgggcatagtagatgctcactaaacggcccgtgttgtcaataattactaaatacgcgagggttcgggaaagaaagaggtgacaccgccccccacccagatacgggcctgggaacgcagggacaggcccaggggcgtgggcgctcgaggcgggctcgcagaggtcgggtcgccgcagggccctgagcgccgcgccgcacgcaggtgttctccatcgccgtcttcgggcccatcgtcaacgagggctacgtgaacaccgacagcggccccgagctgcgctgcgtgttcaacgggaacgcgggcgcctgccgcttcggcgtcgcgctgggcctcggagccttcctcgcctgcgccgccttcctgctgctcgatgtgcgcttccagcaaatcagcagcgtccgcgaccgccg

SEQ ID NO: 335260 - DNA, 344 bp, Homo sapiens
  chr16:2042499-2042843
  hyper
gaggcgggacctcgcgccacgcggcgagcccaggcgaggcgccccaagcctcgggcccaccgacctttcctcctccgggcgaggccgccgtgggccaccgcgtggagcgtcgccctgacgcgccgcactgttcgcaggactctggtccttcctgtggttcgtgggcttctgcttcctcaccaatcagtggcagcgcacggcgccagggccggccacgacgcaggcgggggacgcggcgcgggccgccatcgccttcagcttcttctccatcctcagctgggtgagtgcggggcccgggagggcggggcgaaggggcgggcgctcggctgatcccggctgacccc

SEQ ID NO: 335261 - DNA, 146 bp, Homo sapiens
  chr16:2245390-2245536
  hyper
cagaccccacgtgccgacctgcagagccctgtccgtgcccgcacaggtgccctgacacactgacacggctatacgtgcgcagccgcacacgcggctggtccacacgcccatccatccatctccggcggcccccagggaggctacgc

SEQ ID NO: 335262 - DNA, 208 bp, Homo sapiens
  chr16:2301873-2302081
  hyper
cggtgttcgtgaccgcgagctctcggccgggcccagctactgcagtatcggcgctggaaaggcgatcaaagcacggaacccctcccgagggggccgtcagggaggccaggggctgcctggggtgagcccggcctcctgcccctttgggaacaggatcagagctgcaggtttagtcaccgaaatgggggtgggggcagcagaacccagc

SEQ ID NO: 335263 - DNA, 359 bp, Homo sapiens; identical to SEQ ID NO: 238327
  chr16:2391752-2392111
  hyper

SEQ ID NO: 335264 - DNA, 748 bp, Homo sapiens
  chr16:3016808-3017556
  hyper
cggggaccaggggcctgggcgggcctcgaggtggggcctggccgggcaggggagccgccgtgtcctggtcctcaggatgctgactgccggccccgcccgcagtgtcggtgggctcctgccaggggaactggacagcgcctcagggcgtcatctactccccggacttcccggacgagtacgggccggaccggaactgcagctgggccctgggcccgccaggcgccgcgctggagctcaccttccgcctcttcgagctggccgacccgcgcgaccggctggagctgcgcgacgcggcttcgggcagcctgctccgcgccttcgatggcgcccgcccaccgccgtccgggccgctgcgcctgggcactgccgcgctgctgctcaccttccgaagcgacgcgcgcggccacgcgcaaggcttcgcgctcacctaccgcggtgagcctcagctcggcgcgccctgcccgctgttcccaccccgctctccccaccccgcctcacgcccctctccgcagggctgcaggacgccgctgaggacccagaggcccccgagggctcggcccagacccccgcggcgcccctcgacggggccaacgtgagctgcagccccaggcctggggctccgccggccgcgattgggggtgaggcgggcgcgcgggacgggagtgagtcagggagccgccccctcgcgcccatcctcaccgcagccgtgtgcccgcagcccgggtcttctcgacggtgacggctgtct

SEQ ID NO: 335265 - DNA, 573 bp, Homo sapiens
  chr16:3078146-3078719
  hyper
ggcccggggcccaggcgcagcgagaagcggggcgcggcacggcgcggggtcgacgacgacgcggaggcgctcagctccttctggcgctgtgagcgcagctgctgcccgatcaccacctgcatgtcgtcctgcgggaggccgtggtcggctcagcgccggtcccgccccttgccccgccccgcacacgggccccgcccctcacctgccaggcctccagctcctgcgtgagcgccaccttctggcggatggcgcgcagcagctcccgagacagggagtctcgctccagcgagacgcggttgagctgcagggacagctccagggccctaggcgggcaggagcagaagacgcgtttgagggcgctagggcctcagggagccggggtggcgggggacttctgtacccgggcgggaggagggctgcaaacacctagatcaaggaggtcagggggcccctgggtgggagtggggatcattataacccgtatcagaagaggaatcaggagcccaggagggcccagagggcgctggggcggtggtcaatggcttgaggcttacttgttcacggcctcgtccc

SEQ ID NO: 335266 - DNA, 640 bp, Homo sapiens
  chr16:3208795-3209435
  hyper
cgggacccgggcggggaggggtaggggtggagtgaaggcggggtctgggggggtgcgcgtggacggggagagtggaaccgcgggtgtggacctccaagtacagacgtcagagaacgtttgtcgtcctggctcgttggtctaggggtatgattctcgctttgggtgcgagaggtcccgggttcaaatcccggacgagcccgcttttttttttttttctgaacaccatcattttctcgcggtgaagattgaggagcttcacggagtctcggccgcagggaacttggtctctccgtggcagctgcaggcgccggggccgatccgacttcccgcttccgtccggcttgcggcccctcgccttgcccggctacaggaaggactcgcctgcgcctcctgactggagccttccacctgggagttctgagtgcgcctaaggcctggcgctgaggcagtggaccccagatccgggacccgaaaggagggcaaacacctccaccgccgcgtctgcctctgcggacgtggccctagatcccgggtggccatggaacttggtctgggcgtgtagttttcctttgagtgggtcggttctaagtttaaatttccgacgagcccagggtttcgaacttccttccttttttccttc

SEQ ID NO: 335267 - DNA, 2166 bp, Homo sapiens
  chr16:3220285-3222451
  hyper
gccgacttgttcttttttaaagaattaaaatatggtctgggtcttttactttggaagaggggtgttaacttcagaactgtcctaggttcagttcagatccccgcgagggaaggggattaaagagagaaggaagttgagcctctgagcccattgcgccccggaatctgggaggcggcgtgaccaggtgcccgggttccatccgctggggctgggcagcccccctgcccccgcccagtacagaggctcctgccgggggaggcgtccatcgcgttcgcttacttctctagaccaacaagcgagggacgcggagactgagttggctgcggccaccgggtccccggacaccgtcttcattcactcccaccctcagtcaagcacctgtacccgcagtcctttcctaaaagaagaaaaacggccggtcgcgcgctgtccagagtactcagtcctggatccaggaggtggctggcggtgagctgatttccgggttcttaaacccgggcccggggcccaaggccccgcctggtggggtctcatcctgcagtttgagaaaccgaagaaggtaggagagggaggaagcgccggctttgcctgtgaaagattctttcattcgctccattcttgttcttgcgcgctggatttaccaggctaacaaacaacagctgatcacggcaggctgggctcctctgggactcgcaccggggcctctcgcacccaaagcgagaatcatacctctagaccaacaggcctcggtggcgggaagcaccatctttgctcctccactccctcacccccctcccgccccgcgccttatctttctggaacccaagacttcgtattctccgctctccataaacgtcgatgccagctctaggagcgtggccgggagcccacgatcgcggcagcgagaagcccaaccagaggggaggagggagtccccggagtgggacagcgctcaggtctggggtggggttgatctagggcaaaatagggcgggcggcctgtggcgatgggcaggaccctctcgcccaccacacgcggaactcgctggatcctctccacatccaggccgcgtccactggctttccaacctgctcaggtccttaaagaaggattcaaaaggtgttgcggtattggcccaacaggatttgaccctgaggcccactctcaccctaatcataaccgcaaaaccacagcgcctggagagagagtgagagagaaacagaaacggagcgagtgtgtgtcgctgtgatgccctttgccgtcgctgctcatccccagtgacctcctggaactttttcagctcttgctgacagaggaagacacgggggcagagctaacgtctgagtcagggcagaggcgctgggctccatccgagggaggctatgggggcgcctctgggatggagccaaccaccggcgcagtcggatgaaaggtgggctggccgctcagccatcctcctagggcaaggccttgggtatgagtcagcagccccaggtgtgagcgcagacccggtaaccccggcgcaggggaaaatacagcggggagccccaggctgcaggcctgaccctgagcatcccctaccaagcccagtgtggatgggctctgtctccaaggggctggttcaccagggtctccccgcagcgaccccagaattctgccaatcacttggggacggcgatgagctctatccacttcggaatcagccgatttgtgccggattggtggcaggtgtctgaaatgtcagcggaaatacacgcacgggaggctcgttggtctaggggtatgattctcgcttcgggtgcgagaggtcccgggttcaaatcccggacgagccctagaagtggttacttttcccttgtcattttagagaatatagagctagaaaatcggggaccgagcctgaagcctcaactaccagtcgcgttgctccgcttcaggtcggtccaggtctgtgcctcagctacaagggacaaggatgctcctgaggctggcctggtcggcacttgcctcagcctcgagggagtcccgcgcccttctccttcccaaccccagaccagagaagctgtaccctctgcagcccgggtcgctcagctccacatgggctccgggtatggtggaggccggtggttgggttctgagtgatcgagtagtgtgcacggtctgggc

SEQ ID NO: 335268 - DNA, 853 bp, Homo sapiens
  chr16:3232599-3233452
  hyper
gaaagggtagaaaccgatattttggaccaaaaaccgggctcgtccgggatttgaacccgggacctctcgcaccctaagcgagaatcatacccctagaccaacgagccacacgccccgtagcctccggcttgtctttgtggccttcgtggagtcctcgtggccagaggtggggacccagcagagcagagctaggaggagactccgatttcctgaagtctggaagagacaagttcaagcgcgggtggacgcggagggagccctgagcccccgcttctccctgcgccgcacaaaatggggagcatcccctgtgcccccacaatccggggccccccgggccctcgcccgcctccgcctctcagccctgggctggggatccgcgcgtcacgccgcgtcgcgtagtgaggagctccagctccggcgggacatgggaacctctcaagagctggcagcggctgcgcggagggtccgcgaaccgcgaccactggacgcccgccttggaaacgctgcagcccggcggcgtggtgcagatgggtggtcagtagaggcctcgccagtgcaccaggaaccagccaccaggccccctacctcgacgcgccccacgcttctcccgctccggtcctctcttctcccccagggaagccaaaacccagaaggtgagcttcccacgtggaacctcaattcaagaggctgacactgagcgtcgcttcgctccaccagacccgcggcgcccgccggagtcagcgatgtacccccttccctttcactgggggaactggcggaacctccggtcaccaggacgtggggaagcagaggccgcttggggcagcagaggccgcgtccaggtgtcggttcc

SEQ ID NO: 335269 - DNA, 877 bp, Homo sapiens
  chr16:3233501-3234378
  hyper
cggagcccgagaattcggcaggtctggactgaaaacgtctccccatcccctccggatccaagcctcgaatttcctggctcagtgggaaggcctcggggtctgggcgtggagacggggcccgagacccccaccccgccagggcccactaaagtgctgccagctgagccccggccttcgcccctccttcgtctctccctcattcccctccctctgacaccccgccacatacattactccccgcaataccatgcaattttaagctagggtagggctcacctgagactggagccgccataccgtcgaaccctacgaaaaatttatgcccgtaaataaacaagcccggcgcattcttccttattctaaataacttcttcctgctgcacggggtcgtctcctttaaccacggctaccgcagttggtagtgctggatcccatttcagggtgatgggatgctggatcccatttcagggtgataggaccgaccgcaaggcgaacgattcaggcccgtccgtctgcgtcccgggaccccgggaggtctccactgacgccctgccagcagcaggctccctccgccttcctagtctcctgtccttgctgaaaatgcgaaatgggaaaaaagagaaggaaaagggggctcgtccgggatttgaacccgggacctctcgcacccaaagcgagaatcatacccctagaccaacgagccgccgcttcccctctgttttgttgttgttgttgttgttttttgacacgtccttccgcccctgacgcagagcgagactctctccatcgccccaatagctcagtccttagcgcgcgcacctgcgaatctgggcttttgggttcgcggccaccctcagatttgcgaggcaggctttac

SEQ ID NO: 335270 - DNA, 265 bp, Homo sapiens; identical to SEQ ID NO: 238346
  chr16:3237826-3238091
  hyper

SEQ ID NO: 335271 - DNA, 1641 bp, Homo sapiens
  chr16:3238154-3239795
  hyper
cggacgagcccccttttccttctcttttttcccatttcgcattttcagcaaggacaggagactaggaaggcggagggaggctgctattggcagggcctcagtggagacctcccggggtcccgggacgcagacggacgggcctgaatcgctcgccttggtgaaatgggatccagcgctgccaactgcggcaactgcggttaaaggagacgaccccgtgcagcaggaggaggttatttagaataaggaagaatgcgccgggctcattggtcgctacaggggcataaattttttctaggattccagagtatggctgctccagtcccaggtgagccctcctccgcttaaaattccagtttattcggagaaggggagaataccggaagcgggggagaagggaggggagtgagtgagaggagggaggcggggaagaccgggcatccgcgggcagcacttcagtcggccctggcggggtgggggtctcggcccttgtccccacccccagaccccggggccttcccactgagagcgagggaattcgcggctttgatctggaggggacagggagccccttttagcccagatctgctggattctcgggagtcaggtgaaatctggatacagggaagggcagagtgacagtaaagggtgccccggaaccgatgcccgacgcctgctgccccacggccttcattcttgctcctcctcacgtcctggggactggaggtcccgccagctccccccagtgaagggcaagggggcgcatcgcagaatcgcccctggtgcgcagcgtagttggtggcctaagccgtcttctccgagagctcagccatcctgggcacttgaggccaggcaggcgctgcggggctggttcagtcgatggagaaaagagactctcagcgtcagcctttagggttcgaggcccacgtgggaaactcgctttctgggttttggcttccctggggagaagggaggaccggagccggagaagcgtgaggtgcggcgaggtagggtgcctggtagctggtgtctcgtgcactccgtcaggcctttattgaacacccattggtgccacgctgagggactgcagcgtttccaaggcgagcttgcagtgatcgaggctcgcagaccctcagcgcagccgctgcctgctattgggaggttcccatgtcctgcggaagctggagctcctcactgcgcgcctcggagacgccgaatccccaactcaaggccgagtggcggtggcgggcgaggacccagggcccttctggattgtggtagcgccagggctgctccccattttgtgcgtcgcggaggaggggccggggctctgggcttccgccacacccatcctcacttgaaattgccccttccaggcgggtctgaaataagattctactcactgggtcctgctgggtccgccccagccgcccccaggatgctaggacgcccacaaagataaccttaatgcgtaaatcgtgtggctcgttggtctaggggtatgattctcgcttagggtgcgagaggtcccgggttcaaatcccggacgagcccggcttttggtgcagggtaaaagtcgtttcctgctcttttttagattcggctcgacttacagacctcagcgcaggacgtggacgccctgca

SEQ ID NO: 335272 - DNA, 665 bp, Homo sapiens
  chr16:3241328-3241993
  hyper
cgcagagcggtgagcaaagtcttgcaccagcggggatgtcggggtggaactgaacctgttgtaggggacccccagtgtgccctggtttctggggctgattcattacgtcacttagtttctactattctcatgccaccccgccaattactagacataaaacgttcccagggaagcccggctagctcagtcggtagagcatgggactcttaatctcagggtcgtgggttcgagccccacgttgggcgacttgttttcttccttgctaccttggagttctggaaacagccagcatttaatgaacactaccaggtgccacatcgcgctctgtgatggtatcccctcaatgattgaattttggtctccgcgcgctcccagcagcaaggattgtcagtgaaatgaccaaaggcagcaccgggacgggctggttgccagccaggggcagaggggcgggggcgggtgagaactgaggggccacaggatgggtgtgaggggtgcaggggcctctccccactttgtgcggtgcggagaggggccggggcgctggcccacccactgagtctgcaatcccagtctcctgtcactttgctttcgcaggcttgagctttatcgctccaagtactccacggctgccacaaagaaaagtaaagggcctgctgctgtggctc

SEQ ID NO: 335273 - DNA, 783 bp, Homo sapiens
  chr16:3355112-3355895
  hyper
cgaggaggcggcgacgagcccagcaacagctcgagcacggccggccgggccgcgggaagcccgagaacgcggcgcgcgcagctgggaggcgacccttacccggcgaggctcccgggaccaaacgccgcccgacagccacgcagaacagacgcggcagtgcgacgcctcccccactggggacacgagacagcgacagccacgcggtgagccggtacaaggccctctaggcttcagcgggtctggatactcggtggcattaacccttccctaccgccggggaagacagcagtttctctggcgaggaagtaggccgggctcaggcgccttagccagagggcgggcctgcgccaccctcggaaagcgtcacttccacttccggccggcgctctggctctgtacctggacagggctgcggtaggccagcggtgggctggcggttgcgctcctcagatcggcggcctttcgggcggtggcttgcgtttgagcctcagaaagcgaggagcggcctccacggaagccaagctggccgaggtaaccgagaagcggcttcccctatggcttcgaccctggagccgctggagcggcggcggccgcagggaggcagccattttccgtaggcggtggccgcggcgcttccgggccgcgcggctggagcctgaggcggggccaccgtcgggcacgagaaaccattctctccccgcttttcgcagctgtatcccagaggcgcggctgaagctcgctgggacactgcccgcttgcccagtgcccacgggcacgcctgtc

SEQ ID NO: 335274 - DNA, 1432 bp, Homo sapiens
  chr16:4165534-4166966
  hyper
cgcctagaggcccgggacctgctcctgtcctaaggggcggctccagcacgcgacctggacaggcaccatctgttcctgtggttcccggctcagcggtgctcccaccgcccccaccgcccccaccttcgaggcgcacgagaaccgctcgggacggacctagaacgcccgggggtccccgccgcgtggccgccgtggctccgggaccgctttgctcgctcgccttccgcgcctctcgccccgagggtggcctccgcgccgcgcggcttctcctcctcgcgcgctcgcctcctccagctgcggctccggagggaagttcagaccttgagcgctcccagccccgcgagccgcctgcgcacaaacaactccgctggcggcgcggagccctccatcctgcaggagccgcgctccgatgcgtcaaaggcggcgcgcggccggccccgggcccggaccccgacccggagcagcgagcttcggcgggcgcccccggctcgcgctccccggccgccccccgcgctccgggccggccctgcccgcggcggcgggcgctgggggtgggggcgccccgggctgcgagtgcgcggagcccgtcggcgcggcccgtctagtggggcctgcttccccccgagtgcgccgccgctcccgccgcggccgcagctgtcccgggaccgagcgcgtggaaccacggacgcgggcccctcgccgggcggcggtgcagacgctgccgcagagccgggctcccgcgacgccggccgggacgcccgcccgcccgcgcccacgccgggggccgcctccccgagctagagatgcggccgccgccgcgcccgccgccgtgtcccccgcggccgctgcctcatgtcggaagagctgccgccgccaccatctccggcccctgccccgcccgctgtcactgacagacgcgcgcccgcgccgcccctcgcccagccgcagcgcgcacgcgcggcccgcgctcgccgccaccgcctcctggccccggacacgcgcacgggccgcgcgccgccccgccttggtgcgcgcgctgggctggggctgcggggcggggcggggcggggcggggcgcgcgctcggctccgccccccgccccgggcggcgccgcttctaggcggcgggctgtggccgctgtccgcgctccgggcgctgtgggcccgccctccctcggcgtcccagaggccgcgcgccgcccggggtcccgaccctgcggagagacctgaaggcgcctgccgtggaagaagccgctggccgcaacgtttgggaaatcaaaatgttgccttcccactcggcacgcctttgggataaatcgaagtttccaaccgttggatttccctcccgggaggctccccttgctctgtaagcaatgaatgcgggccccggggcactcggcctgccctggacctgctcacggggcgaccttcac

SEQ ID NO: 335275 - DNA, 540 bp, Homo sapiens
  chr16:4233245-4233785
  hyper
cgctaagggctgcccttcggttttcaattactggcggagagggcggttcgtttctggcggggaagggaggtgacattccggtaggagaatctcctaaaactcgcatttcctgtttgccctgggcgccggcctcaggtggaaacctcaccccgataactgagggcagcagtcggccttgggcgttcttccgtcacccaggtctccagaacctcccggactcaatggcaagtcactgcacaagttcagggccttttcggtcccgatcgaggatctggagatctcggggcttcccggtcgtctgccccacagcccacgaggcggaccgacctgcggggtgaggcaccgggagcgcatggcagccccggcctcggcctcctggcgccctcccagccacgcggtgaatgcctgagaggacagaggttcgcggccctccccatcccaccggcagcgaccgcaaagcccgggagctgagtccgcggcgtgaagcggcggaggtcagcagcgagggggcagggccggcgctggcggccacggagcttg

SEQ ID NO: 335276 - DNA, 187 bp, Homo sapiens
  chr16:4234090-4234277
  hyper
cggccgcgagatcggtccctgtccgcagggtcgggtagtggccccctcggggacagcgtgtgaggattcgggcgcgaaggacggggtcagattcagccaggtgcccactttccccacggtcacgaccctggtccagaactgccctgccccgggcctcagtttccccactaaggagaggaggcgtgcc

SEQ ID NO: 335277 - DNA, 366 bp, Homo sapiens
  chr16:4363872-4364238
  hyper
cgtctcctgtaccttttttctacacacctcgaccccagggctgcagttctgcctgcctgaggtcggatgcggtcggctgcagggcagggctccgggctgaagcgcagcgattcccgccgccgtgagggggcgctctgcgggcctcggcctcggcccttccggacgcccgcacaggtcgccggacccagagagtcggcccttaatagccccctcctggaagcgctaggtcccgaaactggccttcccccggggcccatctcccggctaatgtttaacccggccacactccacattatccacactcaggagaccggggtgaggtgagggtggaggctgggggaggtcacctccaaatcgccaacttcc

SEQ ID NO: 335278 - DNA, 809 bp, Homo sapiens; identical to SEQ ID NO: 238357
  chr16:4377512-4378321
  hyper

SEQ ID NO: 335279 - DNA, 629 bp, Homo sapiens
  chr16:4421674-4422303
  hyper
gcaggtcaggtggccgcagggtgagggccagggcaacccggcccacgagcccctcggtggggaaggggcgtgtctccacgcggctccgccccggccaatggggagaggccccgcccctgccgcggcgggcccgccccccgggactcttaaggcgcgacctgcctccagcgagccgactccggagcccgagcccggggcgggtggacgcggactcgaacgcagttgcttcgggacccaggaccccctcgggcccgacccgccaggaaagactgaggccgcggcctgccccgcccggctccctgcgccgccgccgcctcccggtgagtttctgtggggctggggggctgcgggcggggaagggggcgccacggccaggctgtgcacacgcgcggggaccgccgccgcgcgcacacacgcactctcgggcgggaccgcggccccagccccacacggtcacctgggccgcccggcgggcaggccctgtacgctccctcccccgccgtcctggggcgccgacagccccgcggccggccagggtgcgcgcctgagtgtgcggtgagcccgcgaggctgcaagcagacaaaataaacaccccgtcccatgcttcctcctcccacggctgggcctcc

SEQ ID NO: 335280 - DNA, 886 bp, Homo sapiens
  chr16:4986646-4987532
  hyper
cctctgcgcaagagcgaccctgggacacgggggtgccctgtacccccagctcagctgcccgtgccctaggccctcaaggcaatgctccctgggctcccggagtcccctgtgttatgctccccctcggggaccccagccagtcccttcccacctggcggcgcttcccagcttcagggtggcctcggtcccgcgttcccgagagtcccgcactccgggttcagttcccggttcctggacccccgtaccccccattcctacactgcccgggaggtcttccaggtcctgtgcgcccacaggggcaagagcgtcccggagcggagctgtgggcgcctcctcacctccgggtctgcacagtggggctgtatttgcctttgtttctcttcctgaagagcgagttcatggtggcgctcggggtgcgggcggcggcggctggcgggccgggcgcgcaccgaggggcgggcgggagcgcaggtgagcgagcggcggcgcggggagcccggactgcggcgcggcagtggctccgggtccctactcgctgggggcggggcgcccgccggccactggctctgcgggccgctccccgagaaggtggtgcttaccttcccgaggaggggccaccgcgcgggcggggcttggacgcgggggtggggacactgggtcttggccggacgccgcccacccccagccgggggactccggaggccgggcaggcactggggcgcaaaggccgccggggcgagcgctcgcagccccaccctcctcgggcccggcgcgcctctggccgaggccttcacctggttctgcgctaccgcggaactcggcgctcctggtgctttggcggacacccagctgggccccgcaagacaggtgcggcagagacccgcac

SEQ ID NO: 335281 - DNA, 664 bp, Homo sapiens
  chr16:5007944-5008608
  hyper
cggccagacgcagggtccggggcgggtcggcccggactcagggtctgcttggaggcagagctagattagggcggggtcgtcctgtggcctaccattccccgaggctgagggccttggagggcggggccagtgaagggggaggggacttcctgaggtgtgaccaatctagagaaaggactgggctgagggcgtggtcaaacaagcgacatctaaaaataaggggcggggctagaaccagggggagttcgcctggggcggggccagagtggggcgggaccagttagggggcagggccaacctgggcggggccatggccggggacgtgggcgggaccaggtcaggggcggggccaggccaggatctccgctgtcccgggtcctggagctctctcggcccggcaggtttcgctcccgcccctccggccttccacagctgtcctggccgcagggtgttcaaggcgggacacaccaggctagagatccgcgatcgggccccgcctcaggtactgcgctccaggccaggcgggcgcgggtaagcgctcagctcccgagccaggcgggcttccagggcacttcccctaggctgcattcccaaaggctcccgagggcgagggtgagcaaagctgcggggacctgtgtgtgcatgcgtgtgcgattgcctctac

SEQ ID NO: 335282 - DNA, 813 bp, Homo sapiens
  chr16:6068914-6069727
  hyper
cgggtcgcgtgtccgccgccgccgcccgctggaatccagggctgcacgcgtgaccgcggcggcggcggcgctggcgaggggaagggggagggggcgctccctcgcgcaccagattatttttggctccgcagccggggctgctcgctgcttgtcgcgcgctcacacacacacagacacacacgcacacacacacatgcacacattttctcgcgctctctccggctctcctttgtttattttctaatctatatttttactggaagatttcctctttattctctcccgccctcctacaagcgctcttgctggccgtctgggtgcacacaccgctccctcgatcaccccagcccccttcctggtctcccgagcgcggggtttgaaggtcacctcctttccagtccccgtgcgagccgcgctgccgccgcctcctccagccagagtcggtgggactggctgcgctgccctgaagtggttctccaagcagcgcggagggtggcggacggcggacggagcccaggggccgcgtcgggtggggaaacccgaactcgcggaggggaatccctccccctccgccccagccccccagcagcacccgcggtggggcgggggcgctctgccagccccgggaacagcagaggcggcggcactggctggacccacgcgcgcgcctccggggctgaagaaggaaggagtgagccgagccgagcaccccacatctggaggggacagccagccgtgggccccgccccggcgtccggagcaggagaactccgagcttcttgcccaggcagagagagcaggagcggaccgcgc

SEQ ID NO: 335283 - DNA, 814 bp, Homo sapiens
  chr16:8767901-8768715
  hyper
cgccctgtttgtcttccggagcgctggggccaggcggaggaaagtagctgggagcaagaagggctggcagggccctgagcgccgagatggggagtgaggtggggagggcgggatgctccttcccttctccgcaaaggaaccccttctgattccgactctggagctccagagaccggatccgagacgcgggtggaggtggagttacactcgcctgcagccctgagggtgtaaatggcccattaagatccaggttaaatcaacctatggagctgccccccagagggtcagggtccccacaacttgacgggggtcctcagccgtctcctccccagtcccaggactccctcccagccctcgcggtccctctggtgggtcccgccccagcccccgtctcccccgcccccggaggctggactctgcccccgccccgcctgccacctccctcctgggggcggtggcccgtggcgggcgcacccattggctgtggcgaaagcgagggccggggctggcggcgctgattggccgggacgctcggcggagccagggagtccggcgagtcgctgggggaagtcgagcagacacccagcgctgccggaactcggggcgcgcatcccgcaagtcggaacccggcggatcggatcccgcagatcggagacggggcctggaggtgagcgcgaggcgccgggtggcttgggacgggcccttccgaggggagccgagaggaggtccttctgccctgcccccaggagcaaaacctgggcatcttctcctggaaacggagccctcatcttcccaagacgcggggccctccccc

SEQ ID NO: 335284 - DNA, 173 bp, Homo sapiens
  chr16:9056313-9056486
  hyper
cggcagaaaaccgagttacctttcgagtcaggtttgattctgatgcaggcagccatgtgcggcagggctttcgcacggttgcaagcgcacacctggccggatgctggctgcaccacacactgccaagtacaaactccccgaaaaacaggtggattcggaaaccaacagcgccc

SEQ ID NO: 335285 - DNA, 298 bp, Homo sapiens
  chr16:9186882-9187180
  hyper
cgattcagggaagggccgcctgcgtcagggtgtctgccctgcgttccaagtgtgttttctgctccccagcccagctgctaaccttgaataccttgcaacttgagaatcgcggcggtgctctagctagatccaccggaggcgattttgacacctccctccgccccccgggacagatggcaacgcctggggacgtttttggttggcttctcctagaaggggctgttgttgggcacccagtgtatagaggctgctgaaggtcctgcagtgcccaagataaccgccccggccccctctcagc

SEQ ID NO: 335286 - DNA, 804 bp, Homo sapiens
  chr16:10274229-10275033
  hyper
cggcagcaccagcagggtccaatagcccactctgcccatagtcgccactgacggtccctgcaaggtgaagagtgagaggcagggccgcggtgagcaaggcgaccagaagaaagggattaccaacttggcttcctgctctaggagccaggcatggaactcagcagcaggataggctgctgggatcacggactccattccgagtccccgacgccatccacatccctcgatccatctctaactctatccacaactccaattcgagctaattctccatcccccagccccttctcgcatccagcttcctcatcccctgtctccaggcacttccccatccccatctctgtccatatcccccaccgcattccccaagttcgccgcgggccacagaccctaagcgccgcgcgtgttctgtaccccaccaagctcctaggtgcacagaataaaccctccatccaacccctcccacctgggatagagaggaccaagttatcaaccccgccccctgctggcgcggagcgaactacagaccccgcagggcgtgcggaggcggcacccagaccccgcgtcccagcttgagagctcagctagttggctgaccccgccccctacgagcccgtcgtgtgcaccacacactttgctctacgcccagccccaactacagacccggctcctctcagtcagagtacaccccaagtgcttgggagtgaggacgctgcctggtgggcccaggctccgctgtgcctggggaacttggggctcgccccacctcgagccaaggggccgtggagagtccttcacccctac

SEQ ID NO: 335287 - DNA, 856 bp, Homo sapiens; identical to SEQ ID NO: 238386
  chr16:10275093-10275949
  hyper

SEQ ID NO: 335288 - DNA, 1212 bp, Homo sapiens
  chr16:10276211-10277423
  hyper
cacctccccagcgccggctgctgggagttgtgcgaccgggagctgctgagcgagggaggtagggagagaaagaggaggtaacgagggtgggggggcgctggctgagtttgtgacgagccagcagtaggagagggggagggaaggacgcgggctcccgcggtcccggttccccgagggaggtggatctttcccacgcagcgaccctcttgtgatcctgccgcttcctccctcttcaggcctcccacctccccccttcccaagggggcctcccaggcccggcgtcccgcgctagcactcaccgcagcctctctccacatagttctcagcagtggccgctcctggtcatctccagggctgatggctgcggccgcgattctcagcgctcacccggtcccatgatccggccaagccctaggagctcccctccaagatccctagctccgcttcctgccccactccggacggcaactgcccggtcctctgagcgcgccggagcaccctctccgcaacccagctccgggctggtgtgtttgagggcgagtgtgtgtgtgagtgtgggagcgcgctcgcgtgtggccggggatccccgcggtccccggccgagagaggcgcgggcggggaaaggcagctccctccgggcccttcgctgctgggccagctccgcgccgggcgttcggctccccacttcccagcgggagtccggtgagcgcctggacaccctggttcacagcactggcaaagccgggttcccggggcgtctttctgctgcggtcgcctccgaggaagaggagaaggaaggtagcggcgccctccacaccaacttagggacttgttctcagccggcgagacgcagtagcccccgctcaagcccaagaggcttcgagctccggcgggcgaaagcgtctcctgcccgcagcctctctcctaggtgggtcgagacagaccccgcagtccctcggcggcgacgcggagcgcggccacccgttccgagagcgcacggcggcaaataaggccaggataggtggctggctggcgacgggggcgcctgcggcggcgcgcgctgctgtccgtggtgttggaaccacgctctccgcccgctcccgggcgtctggtgcggctgaagaatcaattattcagatctctgctaccgcttcctcctcccccagtgcctcgcgctgggtacagttatccccctccacgcacaggcgcgcc

SEQ ID NO: 335289 - DNA, 667 bp, Homo sapiens
  chr16:10479686-10480353
  hyper
cgctatggcgggtaagccccggtggctgaccggaagaagcgcccacggaggcgaaccccaggcgcccctcagcctacttccatttcccctcgcgacccttcgccccgcccactctagctggctgtgcctgactggctgggctgccgcatattcgcgctgccattggtccataatcagctgggggtgggcgtagggagacctacttcagcaggtcctggccggaccagcattgttaacggctgcggttcgaagtggctgtgggtattgctgcggctggtgcgtcgtcgctctaggtacgttggggccgggcgagtgtcctgcgagagcggcgattggcggggtggcggctctaggagcgtcggtcgcctctctgagggccggccccggaggcctcggagcgccgggcctaccggacgtttgcggcgaagctgccctgactgaaaagcgtccgcggggccgtctgacaggtccgggaagaggcccctgaggggcggacgggcgcgtctccaccgttttcgcagagggatactggtgaagcgggagtggtgtgcggcctcaggtccgggcggcactggggttagggactgcggagggaagtggtgcgtgttttttgtcctgaggggtaagtaaaagctcgctcttgtccggaatgctttcagaaattaac

SEQ ID NO: 335290 - DNA, 136 bp, Homo sapiens
  chr16:12211191-12211327
  hyper
aaccgtggaaacaggcgtggtcaatacgtgcttcagtgcggacgaaccgtggaaacaggcgtggtcaatacgtgcttcaatgcggacgaaccgtggaaacaggcgtggtcaatacgtgcttcaacgcggacgaacc

SEQ ID NO: 335291 - DNA, 523 bp, Homo sapiens
  chr16:12897365-12897888
  hyper
cgctctctcggcctcgcctctcaactgcgcccctggaatccctaagagcaggctttgatgcagctatggcggctcccaggccccggtgcagccccggatggtgtccgactggcggagcgcacacctgaacaaaaggttcccccggcggaaggttccgcagccccagagtcccctccccgggtgaggggcgggcagtacctgcgggaaacgcggccagggtcctgcccctggctctgtggaaaacaccccccgcctctgcagccgacatggcgagcgagtttctggccttcacttagaacactgcgtgggtggaagccgcgcgacttcacacagaacaaccgctggacctgtcccgctttgggcgacgccctttgatctcggggcgggactggggcgggacggggaggggcccggtggctcggggcgccactagtgctgcctgggcggagcggaggcgccagcggcccctctgggatcgacctgcgcgcctggcgagtggagactgtctagggcacgcgtgggc

SEQ ID NO: 335292 - DNA, 881 bp, Homo sapiens
  chr16:12994419-12995300
  hyper
cggggagctggaattcgctaggagagagagggcagatttggaaacacagaggagacgggaggctggaagctgaggaagcaaggcagagctctgcagcccccggtgaggatttccggggggatccgtggggacaggggccagccagctccagagaccgatgcgcgggctccaggtccgggagggtggctgaggctgggtgcccaggccttgcgctgcgccagatccgggagcgcagaggcggcgccgcggtgttccctcctgtggagcgcagaaaacgctgcgggggcgaagagggacagaaagcggcaggttcgagaggctgggggacttccaaggaaagaccttccaggacacgccatagcctcggccttgttcggctgtcccctcttacccccgaccttctttgattcgttcatcccgagcccctctcccccggagggtgcttatccctggctcaggggcttgccacctgtccttcccagctccgcctgggtccttgcttgggcccagagagttgagccatgcgggttgcgctcagggctggagggcgcagccgggaagggcaaggaggccccgcacgcctgggaggggcgatcctgaccagactgcacccagtctgtcttggagtgaaagccatttagtctgtccccatcctctccgagtcatccttcccctgatgcacagatttcggccgccgctcctgcacacgcaccggtgaaaaagctacgagctgagccgcctctgcgctctggacagggctgagccgcgcctcctacccagagagggcgcgggaggtcctgccgcggttttccacctgcctggaaatccgagcggctcctctagcctcggctgctgccgagctcgctcctccccgtccgctc

SEQ ID NO: 335293 - DNA, 1484 bp, Homo sapiens
  chr16:12995318-12996802
  hyper
cgccccccagctagctcccgctctagtcacctcttccccgcgcccccgcccctctagagctcgcgcccgcccccccccacccgcgcctcctctgcccgccctcctccccctcccccttccctcctgccctcccttcattccacaagtgtcgcttcgctctcttcagcgcacttggcgagctggtgaggtgagagggatactgcgagagggctaggggcggccagtccggggctgccggccaaggctaggcgctgccagcccgattctcctctgctctccacccccgcctcacccagtggccggccggacctgcaccccgcgcttgaccccgctcatcctccccccgcccggccgggcgcgctcctccccggccggcccctcggcgcgcggcgcgctggaggcgaacgcgggctgaggcgaacgcgggctgagccgagcgcagtggccgccgaccaccgagcgccccgcgccgctccctgcatgtgcggcccgcggcggctcgcagctcccggcagcagcctcggcagcttcggccgcgcctcgagaggcggccgcagaggctccagcggcggccgagcggccgagcccgggctgggagacaccatgcgccgcgtccttcggctgctcctcggttgcttcctcaccgagctgtgcgcccgcgtgtgccgggcgcaggagcgagcgggacacgggcagctggcgcaactgggcggcgtgttgctgctggcggggggcaaccgctccggggccgcctccggagaggccagcgagggcgctgaggcatcggacgcgcccccgacccgggcgcccacgccggacttctgccggggctacttcgatgtcatgggccagtgggacccgccgttcaactgcagctcgggcgacttcatcttctgctgcgggacttgtggcttccggttctgctgcacgtttaagaagcggcgactgaaccaaagcacctgcaccaactacgacacgccgctctggctcaacaccggcaagccccccgcccgcaaggacgaccccttgcacgaccccaccaaggacaagaccaacctgatcgtctacatcatctgcggggtggtggccgtcatggtgctcgtgggcatcttcaccaagctggggctggagaaagcgcaccggccccaaagggagcacatgtccaggtgggctgcctccccttcgccctcccctcggggcttcgctctccctgctctctcctccccaccttcccccaggcaatggcgctccccacggtccccgctccccgcatcccagcctctccgctgggggatgtcaccgggaagccaacttcggcttggaacacggagaaggggcgctgggctcagcacaggtgtgggtctgagcgtgttcgtgtgtgtgtgagcgtgtgtgtgtgtgtgtgtgactctgctccctcaccctctggccgcctcctcccgctggtgactgaggcggacttgagacacgtagcctgggagccc

SEQ ID NO: 335294 - DNA, 37 bp, Homo sapiens
  chr16:14164836-14164873
  hyper
cgagcactcaggacgggtggcagcggtcacctttgtc

SEQ ID NO: 335295 - DNA, 349 bp, Homo sapiens
  chr16:14396725-14397074
  hyper
cgaggcggtggagcgtccgcgtccccgcccccaccccggaaagcccgctcgggaaactgactcgctgcgtgaccccgatctcaatgccgcgcgcggagcaggccggccgcgcccgccgctccacgtgcgcccgagccccgctggcatgggcggcggcgcctgcgggggccgggccccggggatcccggactagccgggaaccaccgtccccagagagttaccgccgccccctaaagttgtcagctccctccccccgagaagcaggcagccctggcgcgttggctttagcttctgcaggacgggggcaaaaaaactaggttccggggtgcggagcggggtgtctgtgccc

SEQ ID NO: 335296 - DNA, 810 bp, Homo sapiens
  chr16:19566591-19567401
  hyper
cgtcttcgctccgccgccttctggagtcctttctgcccctagaggacgcaggtgagctaagcagcagtcatgccctttaccatcatgacgcccgcaggcgggaccacccggcactgtagacagctgccctttacaatcatgactcatagaaactacggcactctggccgtggccgacgttgctcctccgaagcatggcgccggcgggagttgtaacccgggctgtccggagcggggagctgcccctcacaagcatggcgtcagctgaaaatgaagcctgtgctgtgcggagcgtcgcctgcccctcacaagcatggcgtctgcagaaggtgctgtgcggccgctgcggggcggccagctgcccttcacaaacatggcggccgaggggtgcggggagtggcggggtaaggatgggaagccgagcagacggccccagaacaagcggtcatgtgactgggaagatggccgtctttccttggtaaggaagcagcggcgggtgggctttggagaggggctgtccttacttgtgatggggtcggcctgggtctgagagtgtgaattcctctctgtcgggttctggtggtcgaccggccacccccaagttgtcttgaccgtagaatccctggccgctaccgcggtccagcggagcaatctgaagccagactggcgggttcttggttctctccccgtctgctgcctctctgcgccttccacgggcccctgtccattcattccctaaagaaaacttgagtttccaggcttccgcgtccccagaagttggcgcgggttctggggtcgctggatgagggta

SEQ ID NO: 335297 - DNA, 822 bp, Homo sapiens
  chr16:20084643-20085465
  hyper
acagcaacttcctttccccccgtgtggaaatatccatagttgcccttaaagcttaaactttttccgagggggcgccagggaacgcacgggggaggacgggggattctgggtagggttgcccggcacttggggttcctggcttccctccctctcccccacgcccctcacctggtaaaccgaggcacagcaagaggctgtagtagaccacgggcacgaaacccaagccgcaggccgagccgggggaccaccaagacagcgagctgttggctgcgaggtgggcgtgcgtgtgctccatgagcgcgcccctcgctccccttgccgcttcgcgcccggcctgccagcccgactctggtcgccggctcggtggtggcggcggcggaggcagcggcagctggagcagcagcgcctctctccccgcaggactggctcctacccttggccgtgatcccctctgctcgctccgcacctgcccgcctggagtcttggctcagccctcccgcagggcgcggggcgcagggtgcggggcgcgctgcgcggggcctcgggaggggctcccggagcccgtctgtgcgcctcccacctcggacccgctccactcccgcctcaaagccggggggctgggacgccgctccccgcagccaatcagcggctgcctggaagcggagtgtgtgtggggtgggagggatgcggaagaggagggggtcccagccgcctcgcttggctccactttcaggggagaagatgcagttagacctgggagccccgaaggaagaccggagtggaaaacaggctatccccaatctccaaccccgagggaggggc

SEQ ID NO: 335298 - DNA, 211 bp, Homo sapiens
  chr16:21531391-21531602
  hyper
ccacgatggagaagacgccgcacgcggcccacaccaccagcgccagccccggcgagcctgcctccttgagcacgcccgtgggcgtcacgaagatgcccgagctcatgatggcgaccacgatgacggccacgcccttgagtagcgtgatgttcccctgcagggtcacgccctcgccctcgcctgccggcgccgcgccgtccgcgcgcttggc

SEQ ID NO: 335299 - DNA, 394 bp, Homo sapiens
  chr16:21831549-21831943
  hyper
cgctcctctaagcgcggtcctgagctttggtcccagacgcgcagaaggaagcggcctgaatcttacccagtcctcgacgcgcccagcgtcttgactgcagaggacgaagcggccgcatctcccgacaaacaacgtgtgaagcagcggtgccgccattgggccgaactaacgcgaccgctgcgcctcaggccggatgcccagctccttccagccacagcctctgtcccggaagttgcgcgtgccagcgcaaccttcagacaatcaggggccccgtgtggggagggcgtatgctctcggcgggctagagcgccgctaaaacgcgctcttcgttctacttggaggacttgttccagccagcgtgagtgcgcgagtgtaaggagagacgggaaggatc

SEQ ID NO: 335300 - DNA, 56 bp, Homo sapiens
  chr16:21964488-21964544
  hyper
cgcaaaaagcagtgacgtacattattctctgcatatatttacttgggaaattgtgc

SEQ ID NO: 335301 - DNA, 1452 bp, Homo sapiens
  chr16:22824947-22826399
  hyper
cgggctgtgtgtgtccatttggcgagatgtcgagagcggggggagtgtccttgtcggtgtatctgggcccaggttaggggacttctcctccccacccccgcgtgggtgtgggggtgtgtccgggctagggcgcgtgtgcttctgtgcctgtgcgtgcgtgtgcgggtcagggtggtgggaccgcgcatcagggcagggtgcctgcgtctgcgtctgggtctgtctggtctgcatgtcggcgcgatctcgacctggattcgtgtccctggatgtcgagaggccagcgtggtgggggtgtccagcctcccggaggagtactatgccttgacaccttcgtttcaccgccccaaagctggcctggggctccgtagggagtggcctgcatggggagggcccgcgtgctgtgtttctgggaggggtaagagagtgggggcgcagggggcgggccaggtccctgggcgcggcgcgggctcgggggacccgcgcggctgacgtcaggccactccttaaatagagccggcagcgcgctccgctcggcatttcccgaagagccagatcgcggccggcgccagcgccaccgtccggtccacccgccagcccgcacagccgcgccgccgccgagcgtttcgtgagcggcgctccgaggatcaggaatggggcttcgggcgctgggcgcgctccgaacccggcgcacgtaagagcctgggagcgcccgagccgcccggctgcccggagccccatcgcctaggaccgggagatgctggaaatgcaaccgcctgttccccgaggagccgctgcccccgggaccccctggcactgtgcgcaccctggtcagcagcccccggagaagacggcgcccccaacgcccgacccgcgtggccgtggcagcgccacgcgagccctctaggcgaccgcagggccacagcagctcagccgccggtgccccctcggaaaccatgacccccggcgcgggcccatggagccatggcctatagggtcctgggccgcgcggggccacctcagccgcggagggcgcgcaggctgctcttcgccttcacgctctcgctctcctgcacttacctgtgttacagcttcctgtgctgctgcgacgacctgggtcggagccgcctcctcggcgcgcctcgctgcctccgcggccccagcgcgggcggccagaaacttctccagaagtcccgcccctgtgatccctccgggccgacgcccagcgagcccagcgctcccagcgcgcccgccgccgccgtgcccgcccctcgcctctccggttccaaccactccggctcacccaagctgggtaccaagcggttgccccaagccctcattgtgggcgtgaagaaggggggcacccgggccgtgctggagtttatccgagtacacccggacgtgcgggccttgggcacggaaccccacttctttgacaggaactacggccgc

SEQ ID NO: 335302 - DNA, 182 bp, Homo sapiens
  chr16:23193716-23193898
  hyper
cgggagtggaaggaagtcgcggggcagtaatagggggcagcaggcgctttgaggcgccttggggtaagtgccgcagagacccagcgggaatgcaggatggcagggcggcctcggggcggcagcaggcactgcgcggtggcccaggaagacgcagcgcggccgggctggggcgcagggcggct

SEQ ID NO: 335303 - DNA, 377 bp, Homo sapiens
  chr16:23724337-23724714
  hyper
cctcgccccaagtgcgacgccgccccctgcgccccgcgaccagactttggggacttggcgtcggtccctggctctcacctgtggactcagcgtcccgagcagcagcgccgcgaactggagctggagccccagccggggccacggcctcgaccccctgaccgcactcgccatagcgcctgggcagctgcacggctggccaggtccctgggtgcctccaagggagcgctctgtccccgcccgacccggagaaggctccgcccctggctgggcctgcaaccccagcctggagtcctcgccgatccccgcccttctcatcacactcccagccgcatcctcgcgtcccagtcaccccaccaaacacggtggggcgctttccc

SEQ ID NO: 335304 - DNA, 1694 bp, Homo sapiens
  chr16:23846783-23848477
  hyper
cgctcctcccctacctctgcagaacgtgtgtgtgtatgtgtgtgtaagtgtgtgcggccacaagcctttccgaatgagtgacagcgggagcccatccctccaggagacgcgtgcagaatgaccaatgggatggatgggggtggatgggtaccagtctccgcagaggccggggtggaattcgctgcgccccaccccttccacccgctccccttcgccccgtaggtctttccactctcgctcctcccctgggcacatctcctgaacgcagccccgggggccgaggacggggtggggtggggggcgaggctcgggtccgacgaccccgggctgcggtcccggcgctgcagagctgcggctgtgcacgcttagccgcgaggcccgcggtagcccgggcgccgatatgtaaagcagctggcagcgctgggcggggcctgggcgcgatgcaaatgaggagggcggggctggcccggggctccgcctccctcccccgcagctggggccagcggtgccaagcgcagctggacgagcggcagcagctgggcgagtgacagccccggctccgcgcgccgcggccgccagagccggcgcaggggaagcgcccgcggccccgggtgcagcagcggccgccgcctcccgcgcctccccggcccgcagcccgcggtcccgcggccccggggccggcacctctcgggctccggctccccgcgcgcaagatggctgacccggctgcggggccgccgccgagcgagggcgaggagagcaccgtgcgcttcgcccgcaaaggcgccctccggcagaagaacgtgcatgaggtcaagaaccacaaattcaccgcccgcttcttcaagcagcccaccttctgcagccactgcaccgacttcatctggtgagcgcgcgcgcgcagggcaccttcccgggcccccgagggcagcgccgcgccagggaccccctctccgcgccctctgcgccctccgcgccctccgcaccctgggaccccgcgtctccggactcccggctccggaccctgctgcccgggactcccggatggacagtcctgccgttgccctgtccccaccctggtcccagacgggccgccgcggggcgcctcctgccctctcctgctctcaggcgcctctagagcgcccaggggcggcgtcgcgggagcctttgctccacctgactaggagcgcgcggggtctgtgcctgccctggagggcagcgcctcgggtgctctccgacccggggttccctatctctccgcctgcttccgggcgcgaggagccctcgccccccaccccttgtttccggggggggcggcgccctgggtgtccttctctatctccctgcgggcatgggacatcctttctcactcctctgtgcctccgggcagcgccctgtgttatctcccattgcccctccccgagggcctgggttcccctttccactcctcggtcacatcactgcgggcccctttcttccccagtccctccagtagtggggcatcctttcctccttcccagtccccctcccagaggacaccaccgccgcggggtcactctcgccctccctctgaatgcgtctttatctcttctcttttcccgagggtgctcggggcatctatgggtacatctgtcgcctgccttcagcccctaccccgacggaaacgctccccactatcccgccacctggtggtc

SEQ ID NO: 335305 - DNA, 643 bp, Homo sapiens; identical to SEQ ID NO: 238444
  chr16:24266969-24267612
  hyper

SEQ ID NO: 335306 - DNA, 400 bp, Homo sapiens
  chr16:25078047-25078447
  hyper
cgggcaggcggcgccgcaggaagtgaccgggcaagaacgggggtcgccgcccagctcggccttctggtctctgcgccctcggcctggggctccaggccacaaggggaggccgtgctgggcgggcccgaagggggtgggcggggccccggaagagacgtgggggcggggccaacggaccgcggaggcggagccgctacagtctgggcgctggagcggtgggagcagcgctcgtccgccgttggggcccccagcccgcgcgcgtgaagcagctagccgaccaagccccggaaggcgagtgccggagggggcgggacagctcctccggggccagcgggcaccaggcttgggggctgaggcccagcggcccgagaccaactgggctgaccgaggccgcctcccc

SEQ ID NO: 335307 - DNA, 989 bp, Homo sapiens
  chr16:25703066-25704055
  hyper
cggcgtcccgagctcccaagggaggggagtaaacgaggtggggtggggaacaccccaagtgcgtgcgtgctgggggctggggggcacgatctccgttctcccgggtgccccagccctagcgcacgcctccgctcccccgcccccttcgcaggcgcgcgcgaggcgcaccccccttccctcggcggcgccgggcgcgcgcccggccccctcctcctcccctccgcgcctctcctctctcccggcagaaagttagcagcggggaaggaactccgggctgcaacagcgcgcggcggcggcggcagaggctgaagcagaagccgcggcggagccggggaagcgggggcgctgcagacggagcaggtgccgccggcgggtccgcgcgcccccctcggtccccttgcctgaggctgaggggggggcggtggtgggggggccacccggactcggcgggcagcgtggggcggggggccatgcggccgggctcccccctggcgcagcgggacagcggccagggccgggggcgcagcggcgtcgcttcatgcagccggggcggctgggcagcggcggcggcggcggcggcggcggcggcggcgggggcggcggctgaaaccatgtccgggcagcgccgggggctgccgccgccgccgccgccgccgcgagccgggagccgcgatggcccggtggcccgcacctcctccgcctccgcctccgcctccacctctggccgcgccgccgccgcccggcgcctctgctaaggggccgccggcgcgcaagctgctttttatgtgcaccttgtccctgtctgtcacctacctgtgctacagcctcctgggcggctcgggctccctgcaattccctctggcgctgcaggagtcgccgggcgccgccgccgagcccccgccgagcccgccgccaccctctctgctgcctacccccgtgcgcctcggcgccccctcgcagccgcccgcgccgccgccgctggacaacgc

SEQ ID NO: 335308 - DNA, 748 bp, Homo sapiens
  chr16:25704061-25704809
  hyper
cggggagccgcccgagcccccagagcagccagccgcccccgggaccgacggctgggggctgccgagcggcggcggaggcgcccaggacgcctggctccggaccccgctggcccccagcgagatgatcacggctcagagcgcgctgccggagagggaagcgcaggagtccagcaccaccgacgaggatctcgcaggccggagagcggccaacgggagcagcgagaggggcggcgccgtcagcacccccgactatggggagaagaagctgccacaggcgctcatcatcggggtcaagaaaggagggacccgcgcgctgctggaggcgatccgcgtgcacccggacgtgcgggcggtgggcgtagagccgcacttcttcgacaggaactacgaaaaggggttggagtggtacaggtaggaccctgggctccgcgggctggtggagacgcgtgggggagacgcggaggggaagccgcggctttccacgcccttcgagcatccaggcaccgtcccgagaggcccaagcccccgcgagggctctgcaaaccctggcggcgttgctcagggggatcggctgagagggctggactccagcgaaaggtcactttatttcagggcgaggggaggaggtgtcaccctgccctgcctcccgcgctcctcatccaaggaggtgctgtctgaatctgcccagctccaagcctgggaacccccagccctcctgcctgctgggtgtttccgaaaccaggctctt

SEQ ID NO: 335309 - DNA, 793 bp, Homo sapiens
  chr16:28074461-28075254
  hyper
cggtcgtcgccggtctcccagctgtagagcgcgccgccaggggggccgttccccgaggcggtggcggcggcggcggcggcggcgggggcggcggtgccgttggccgtggcgttggcgcccgagttggggcagttggcgcgcccgccctggccgcagcccggcttggggacccgctgcgtgccctggcaccagtgcgtggtgaggaaagcggtggtggcgaacagcagcgccagcaggttcagggccacggccaggagcgctcggccgcggcggctagtcttcatgccgcccgcgccgccgggacgggactgcaccgccggggagctccgcgcgcgaagttggcagctggcgccccgcgtcagcggccgctgcccgccgcgccccggggctcgggtgcctgagatcggcggcggcggacgcggcgcgggcccatgccccccccaaccccggggtgggggcgcggcgcggggggcgtgcggggcgggctggcggggcgggcggcggtggaggagcggctacggcgcgcccggagcccggagcgcgagtgcacctcggctaggagccgctggcgcctggcagcggccacggcgcagggacgcgcgcccctccgtggggagacacctgcaggcggccggcgacactgttccggagcccgcccgcacggggagagggggccgccacgccgggcgcgggcgggggcctgggagtggagggacgcccccgaaagaaatccgagccagggtgagggtctgagacgcaaggagaatcccaggcaaggcgctcctgagaaaag

SEQ ID NO: 335310 - DNA, 904 bp, Homo sapiens; identical to SEQ ID NO: 238463
  chr16:28891022-28891926
  hyper

SEQ ID NO: 335311 - DNA, 88 bp, Homo sapiens
  chr16:29607025-29607113
  hyper
cgagcgcacacaggcgtgcccttggtttcacgtgcgccagttttcccactttctacgggggggagtggaaagtgaaaatagtaagatc

SEQ ID NO: 335312 - DNA, 530 bp, Homo sapiens
  chr16:29624654-29625184
  hyper
agcagagcgcgcccacgatggagaagacgccgcacgcggcccacatcaccagcgccagccccggcgagcctgcctccttaagcacgcccgtgggcgtcacgaagatgcccgagccgatgatggcgcccacgatgatggccacgccgttgagtagcgtgatgttccgctgcagggtcacgccctcgccctcgcctgccggcgccgcgccgtccgcgcgcttggaggccagcatcttctcccgcgcctcttccttctcctcggccaccggggccgctagcgcccgccgcttcgggcccgcacccgccatgctctgcttaccggccgggcctgggacacccgagagccgcagccgagcgaggattgtgcgcgccgctcgccgcccgcagctgcgtcaagaaccccgcccgcgccgccttttaggccccggcccgctggccccgcccaccgtccgcggctcctccccgccccgtggcccggccgcggctctcagccccgccccctcgacccagctcggagcacgtgcgtcctcc

SEQ ID NO: 335313 - DNA, 76 bp, Homo sapiens
  chr16:29938107-29938183
  hyper
cgggtagcagtggtgcccgggcaccaaggatggaaggcctctctgaggaggtgatgccgagctgaagctgggaagc

SEQ ID NO: 335314 - DNA, 1135 bp, Homo sapiens
  chr16:30620879-30622014
  hyper
cggatctagagcagccggttcccagtcatcggtgtttcgttccaaccaggagatgagggctggtttgggacctgcgcaccctggggaaagagaacaaatcagaaggccagctcctagatcacgccgagtagtatctccccgacggcacctcctgctaagcccctgcccacctcccctgacaacctggtcgcctgccaggaccgtggcctccctgcctacaccctctccggctcctgcatcccttcgcgccccgcggcagcggatggggccggcctcaccgagcgcgcccaggtgaccgtaggtctcccgcatcacgtcccggtacagggccctctgcgcgggccgcaggcagccccactcctccggggagaagtacacggccacgtccacgaacttcagagccctcggcctcctgccccttttccgactgggtctggcctttcctggtccctgcgcagggagcggagccgaaggtggcgccatgggacccgagaagccggcgccacggccttccgtgtccaggcctcggccctcgggcgctggcggcccctgggatcgaggagcccctgccggaccagggctgagcgtggccggggaggcccggagggaatcggaattggtcgcccgcggggctaacggaaaccttttgctgttattcaggaaactcctgcccgaacttgggtgaaaggcaccggaagatgccttcggggaaaatggcggcgctgctaccgcaccgcctttgcctggaacacaggcagcttccagctatcgattttattgaccggagcgccatgccggcttcctaacctctttgccctcaagtgtaatggcgctgcgattgggcttcacgccgtcttttttcccctccccaatacgcgcgttcattggacgagagccgaagatcgagcgttctgattgggtgctagcaaaggcggtccgtttgaacgaagccaagagctgcataagggcaggaagctggactgctaggatcaggcgactacaaggagttgtgaagcgacttgcaccgacctgggggcagcaagaggccccggggctgctttccgctgttcgactctggcaggctcagccaatcactgaaggagggaacgatttgagcgatggagccactctggcc

SEQ ID NO: 335315 - DNA, 548 bp, Homo sapiens
  chr16:30959765-30960313
  hyper
cgagcgcggggtggggcttcgggaccccggggatgagccgggccaggtcccgcccctccgcgcaggcctccggggggccggggcttaccatgtaggggaggggagatctatccacatacctcaggtaacagggaggtgcgcgggtggggggagggctgggcggaccaaaggccggaggggtggggcctggggatagcgagaggcttgagaatggggccgcttgggggagggaagaggcagcccggcgaggggcaagcgggggacccagccgggctgggcccctgggccccgggtctgtacaatacggtttgctataaaactcaaaatcttccagccggggctgcggagttcgtgtgtgtatctgcggggtccctacctacagatgagtgggctcacctctcctggactcattttgggagggatttggaagtgtggacacctggggtgtccagctgtaccttggagggggctggggttggcgtgcacctcggtggggtccgggcgcttggataacgttcttggtgggtaggggtcgcggggaatctctg

SEQ ID NO: 335316 - DNA, 684 bp, Homo sapiens
  chr16:31213480-31214164
  hyper
cgactgaggaggggcctggatcccagctggcgcggctccagagcctggaaggatatgggccaagtgatccccttcccttcccttcccgccgtggggccggggtcccgttggtcggtaggccaagcgtggggagcctcctttccggtagagcagctttgtttaggggtaggaggaacagaaagcggaagagcccgcggggtaagcgctggtgtgggtggaggggaaagacggggtggaggggaacgggggcggctcaccctggtgcgtggccgcctgcagctgcccggccatctcctgcaggcccatgtcgcgcagcacgttagcggtgagctcggcgccgtaggtctccaggtagaagctgaccagcttgtcggtgaggtccaaggcgtccatggacagcagcgcgccccgcgggatgcgcccgtagccctcgcgcagcggcaccgacagcagcttcagcttgaacttcttgagctcctcggcggtcaggttctccagcgcatccaggatggcgtcgcgcgcgcgccccatggctccaggatccccggccgctgccgccgctcaccccgctgcagccgccgaccaggaggaagtcggctccggggcggaacctggactccccgccttcctcccactctggtctcccgactccccgccccggtccgttgccctccagcaaaaggc

SEQ ID NO: 335317 - DNA, 554 bp, Homo sapiens
  chr16:31227822-31228376
  hyper
cagaacccatgaaacggaacagggcccaggcagcccaggagcctggaagggggcagtggggcgagatgcagcccaccagggttcgcggcagcccagcccttcgcccccgggaggggctggccggaggtctgagggaggaccccaggagggaccctgaaggaggggaacaggaaggctctgggcgggacctgacgcgtgggtccttggcgaggaagcggggttgggtcccgagatcacgtaccagctcagagtggccctcacgcagcccgctgcagccgtgcggcctcctccaacatgcgcatgtcgcgcagcacggccacgacgagctcggctgcgtagtcctcgtagtaggaggcgaccagcttgtcggtgaggtccacgatatctagctgcccgagcgcgccccgcgggatgcgctcaaagccctcgcgcagcggcaccgtccccagcttcatcttgaacttcttgagctcctccggtgtcaggttctccagcaccttcaggatggcctcgcgcttcgttcccatggctcagccctgcgcctctgagcctcc

SEQ ID NO: 335318 - DNA, 33 bp, Homo sapiens
  chr16:31483764-31483797
  hyper
cgggaggtgcggcgcccgcgggcgcccgggcgc

SEQ ID NO: 335319 - DNA, 803 bp, Homo sapiens
  chr16:31498993-31499796
  hyper
cggcaccccgtgaccggggatctgccgtggcccgcgctgctcctcggactcacaatcgtctcgggctggtactggtgcagcgaccaggtgcgggtatagggctgcgcctgcagtgaggccggggcggagccgagacgggcggagcctgagtccctccccgccttccccacaacggtctaaggcgcagtctgaggggcgggaacccctcgggttggtgctaaaccagacagaaggctccatctactccaagcgtgcagctgaacttggggcactcacgagccagaggcggggcacagagcggaacggggcgcggggcggggccgaggggaggcccgcaagcgggcagctgaacgcccctcccgtaggtcatcgtgcagcgctgcctggccgggaagagcctgacccacatcaaggcgggctgcatcctgtgtgggtacctgaagctgacgcccatgtttctcatggtcatgccaggcatgatcagccgcattctgtacccaggtaacatccctgccccgcccctttcctgtgccagcaaccgggcgcccgtcgcccagttccgtcaccctcctaagactcggcagtttgggcccggagtcccgcctccctccgggggtcgcacgcctcctctgctaggattcccagtccccacctcctgggattcccagaccaggccccgtcctaacggcgcggtggcctctctctggcagacgaggtggcgtgcgtggtgcctgaggtgtgcaggcgcgtgtgcggcacggaggtgggctgctccaacatcgcctacccgcggctcgtcgtga

SEQ ID NO: 335320 - DNA, 355 bp, Homo sapiens
  chr16:31548824-31549179
  hyper
cggcgtttccccgcggaggtcatgaggtccccacggcccaggccccgtccccggacagccccgggtgccccaggagctccggccgcagctcacctgggaccggcctcccgtggagccaccccttgcccagccgcccccaagttcccgcaggaggaactggcgacagacacgtccagcccgcagccgccggccgcaccggcgctgcactaactgggacgcgccccggggccgcgctggctcggatccgcccagacccccgctcctccattgccgcccagcggggatcgcggcgcgctgccctcccttcctgggttcccggggctgagcttcctgggaggtccgcacacccccaacc

SEQ ID NO: 335321 - DNA, 396 bp, Homo sapiens
  chr16:31712179-31712575
  hyper
ggcagctgggaccccgggcgcctcgtcccgtccctgcgcgacgaccttggtcctgccttgagccctctctgggcagtttcgcgcccgcagccccgtgtctccccgcgttgtgcggtgatgacgggaggggccgtaggggagaaccccggctcggggttcgggcgtgggaggagctgtggtccgtggggtccgtagtcctttctttcttttgttaaaaattaaactgaggtttggttaaaacgttaaagattttatctgagcaaataacgacccgtgaatcaggaagccacaaccatggattgtggtttggggtccaccggaggggcttgaaggaaagggtttaataagatgcatgaggaagcaaagccaattcagtaattgattggctacaattac

SEQ ID NO: 335322 - DNA, 1278 bp, Homo sapiens
  chr16:47176468-47177746
  hyper
cgtaccctcgaaatttttaaaaaaagaacatgttacgacattacaaacacgtcagctttcaatttaaatcagcagggggaaaaagggaagtcctttactgagtggtggtgctgttttccctctggaaattgaaaagacgatttattcagtccgagtttcaggagcaactttgtatcccaatcctaattatctatgtatataaattttcatctaaattaccacctcctgggaaatgcaaagccggtggagtaggttttagagctctgtgctctggacaagccaactgttttaattcccagtacaacaaattagtaagaaccgaacaccagcggcggggaattctgagacctctggcggagcgcgaggagcgccgcgtcccgggaagcacccgagcagcagcgctccccgggggccgggacaagccgggtccgcggcgcccgcgcgccgcccccggagcccgcagtggtgccgcagcctccgtggccgcagcaggtgggacccggctggcccagcaggccccgttccccgccgcgaggtgcaggcgccgcggggctattcgaaaaccactgcacgacgtcacggccgcggcttttattgttctcgtggaattactttttgccatcacatctggagaaagagcggcctccgctccacgacaggaatctcacaactttgcaaagggatgcgcggaattctacggaagcggcgcgagggcgcagcccggagggccctgctgggcccaggggcctcctggccgccttcccgacccgatccctcttcccacacgcgccccgcgaacgtcggccggactcgcaggggtcggaagcggcgcgcccggagagccggcggagccgggcagggctcgcgccccgcggtccgctccgagtagccgcgagccccgccagacaaagaggcgcgtcgggtcccgggcgcgggtaagggacgcagaggcgcgggcagggcggcgcgccagcctcggcccgcagggggcgccgtccgtggccccagccccggtccttacctttgaggaccgagcagagccgctccagggccatgttcccgagctgcccggcgcttcgcgaagggctgaggtagcggcggcggtggctcggcgctcacggctcggcgcggcggcgacggccccactccgtccccatcgccggccagcagctgcctccccgctcccctgaggagagctcaggtcctgcggcccgccatgcccgagccccacagtgggctcccgcgcggcccgagcaccccgacgggcgccgcctcctg

SEQ ID NO: 335323 - DNA, 623 bp, Homo sapiens
  chr16:47177806-47178429
  hyper
ggaccggcaggcagctccgcccgcggccccggcgcgggatccactgaagtggcgggcgcggggcgcccaggctcatttaaggagggagcgcgagcgccgcgtgccggctgcgccgcctgtgcgcatgtgcccgccccgccccgccccgcgccgcgcctcgcgcgcccgccgcggcctcgcgccgtgggacggcgtcgctccccgccggctgccgttagggctgggagccggctgggcgcgggggtagtgagggtgcctctcgccgtggctgcgcggcggcctcgtccgagaggccggcgccggggcagtgaccggcccgtgcccagccgccgcgcagggcgcccggggcagctggccgagccctcgatgcctcccgtctgacggaggcgcccgggaagcgccgcccacctcggccccgcaccctcgccggcctgccgggtctccgccagccctagcagacagagaggggcgccggtccctagtcccccagacctccattcaaggtcaaaactttgcccagctcagccttgctcgaccctgggcagggaagcgcggacatcggcagagggagcccgaggctctccgtgcccttcgcgccggtgagttcccgacccgcggcgctg

SEQ ID NO: 335324 - DNA, 542 bp, Homo sapiens
  chr16:49311507-49312049
  hyper
taccggattgcatgcggagaagaaacgggcccgggtttcaacagaggccccgtgctccgtgaatttctaactcgaaccagccgctgggataaatccgagaaacgttgtttattgtgctattattaactttcccttctccccacgcccctagaggaaataaaattcattcctgaatattgggccaggaaaacgtttctctgaaaggaaccacaactgcaggggaccacccggctgcagctcccagctcccggcccttcgccctaggctgcccactcgctccggctcccgacctccccgctgccgaagcaactgggtcagcctttcagacttaaaacgaagtcgtttatttcatttttgctttcacattatgttccgatacaatcaaaactcctggacgaacctcttgaataaagtcctgtgaatgagcggaatcataggtcctgggcgcccgagtatgcggcgggtggactccggattcagaggcggtgtataaaacatacgctgcttcgggaactgcgagggggacgcggtgggagacatcc

SEQ ID NO: 335325 - DNA, 1995 bp, Homo sapiens
  chr16:49315005-49317000
  hyper
cgtccccgcgcctccgcagagcccttggagaggaccgggcatcggtcttccatccatccctccttcaccagcccaatctgcacgccgcgggaggaaggaacactcacctggtcgaagtagatgatcatggtgcgattactcatctcggacggctcgtggttggtgctcctgatggcagagaaagccaccttggcgctgccagagcgcacagagatgcccagggcagtgcccgtggggtcggacgtggggttggagtcgcacaccaccaggcacttgccctccagcacgatgggctccgtctcattctgcccgcgggccgggcccgccagccacgcagcccccagcagcagcagctccaggacgcccagcatcgcgccgccggcgcccaccccgccccccacccccagggctgctcgcgccagccgccccccccgtcccagtcccgctccgaagccccctcctcagctccgtgcgcagctccgccgccgccgctctggacactacacctcttcctcgcactccgggactagcgtcccctccgcgactagcgtcccctccgcgctgtgttcccggagcccctcccgggcctcaggggtgccgcggctgcccagccgcacttggatgcatagccgctgctgctcggtcccgctgctgccgccgcctcctgcccgcacccgccgctgccgccgccgccgccgctctgaattattgatgcagccggcgctgcagccggagcgggcggagagcgcgcgccgggcacaaaggcgcggacctcggcctggccccgcccccgccgcctcccggcccgcctccctccgaggccctgcccccgccccggccgaggccacgccccccagccaatcctgacgcgccgcgctccccaccgagccaatggcggcgctgtccgcgctcggccacctgaccccgggcgccgttgttattaggcgcggcgaggcgggtggcgcgcggcagcagggttgggctctcgccgtgagtcgacgaagggagcgcgggcgcgcgcccgcgtccgcgcactgagagtcgcctcggccgctcgctttctcgactcccgcctcgcgcctcgatcctgttccgcctccctcggccctcctgcccgcccccactcgtcggccctcaggtaggaggcggcgcgccccggggtcgggagtggaatcgctggaggctgcgagtcgcctgcccgcctgtgggcgcgcccgttgggaggggagcgccccccagcgggcgcgggcgcgagggcagccggcgcgctgggcgagcctggctcagggtcccggcggccggggtgcagggcgcgtgcgcgcgcggcggggcggggcctgcgcggctctggcgggcgcacgtggtgcccgggagctgctgggcgggcactcaccgcggggactcggtgcggagccggggcgccgagtgtctccgtgtccctctgccccagccggcggccgcgatggtggagcttggcctctcgctctctcccgcctctccagcgactgctctgccggccgcggaggtcggatcgagcggtcattcattcatttgttaattcgttcacttattcaggggagatcattgaacccctacggagtaccgggtactgggccgggcgctgaggacgcggggctgagcaaaagcagccgaggcccaccttcgtgccccttaaaacccagcgtgcggggcggcaacgagtactgcttttctgttttgcacttaaaatttacattttgcatccgtactttttatttactgtgcacccttacggcatgctttacgcacccgtacctgcacctcctagccttgagtgtagacaccagatcctgagatgggcgatttttcgagaataatttttaccctaagtggattttcgtgccacgcatggacttggaactacacacacgtagtccaaaacgtgaaagtcaaaatgcagctttgccaagtggcagggagaaaggagagctgagaagatgaggagaggaagggcgc

SEQ ID NO: 335326 - DNA, 2791 bp, Homo sapiens
  chr16:51184597-51187388
  hyper
cgcccgaagtaaacttccttaccgctggcagcaaggccgggcggcggaggccgggccgggtgccctggggccggcgccgggagcgctaggggccccgtgcggtcaggccggggcgacctccacccgcacccacgcctcatggggctcccgggtcttggccgcggctgggatccccggaaaagcagggacggagaagccaggccggcatgcccgccctccttcccccgggaggacccaacaactccggaaagatcctgccgggagatgtgctcgctttccccggggcagcgggggaaagcccagcaaaggcacattgaaaattaaaaagaaaaaaaaaattacgccgagtggaagaagcaatcggggccgcggcggcggtgaggtagggggcgcgggggccagccgcgtgtgagtgggtccgagtgtgcgtgagtgtgagtgcgtgtgtgtgtgtccacggcgcgggccggagcactcaccatctcgccgggggagcgaggccacttcggggtcggattggaaatgttgaggcttcgcttgcttcctccgcgacatgctggctcaaacatcagctggggcagaataaaaaattactaaaaaaaaatcttctcaaaattacggaaatcgagcggcggcggcggcggcggctccccccgcccgccggcccgcccgccccctccccggctccccggccccgggcgcagcgcgcatgtgtcctgctataattatgattatcaataatgcattgcgattaatcatagaggggctctttgaaaggcgattggcaccgggccagcgctattcaaacccgctcgccttaatcaattagttcgtgatttgctgcagacccctgtctctccgcgcgctggcccaataagccggccgcggggctggctctgcgcgccgcgccgcccgacactgggttaaccctctttgcgaccgcccgggactccgcggcccggccgccgggggccggcctcctctccactgcgggcccggcgccccggcaggcgccccccgctctctccctctcccctccctcttccctccctccttcgcccccccccacaatcccgggctgggccgacccaaattagcatgccctccccggaattgagccgccccgggtggggggtggggccgggcggcgagggctggggacccgggctgccggcgcgctgcgaacttcccaactcgggggcgaggcgcgccggcccgcggggggagggagtcccgcggcgggatcaggggggagggcgtcccgtttcgtgagtgtttcttcgtttctttaagagctaccagaaagcagcccacccccacccccattaaaaaaaaaaataagcgagtggggaagagccagccccacgccggtccgcctcccgcccacggctcggcctccctcccgcctggctcggcgctcctccgccccgagttctccatcccctggatcccgggctcgcgggggcgcggagaagaggatccaggaaaggtttgggaacctgatgggtttgtggctggggggaggggcagttctcccgccaccccatcccctccccgccaggggcactgatcctccagcttcttgcttgctccctcgctccctttctctacctcggacattcccaggacaattagggctgaagttttcgggagaagcagccccgagcccgtgggataagggggcggcccggctccgcccaggacccctcccggacctcccccccggctgccccggttggctgcagggcgcgtcactccgcggggaggcggcggcagcggtggcgccgcagagccccgggcgggcggagagcggggaccggcctgggctccgagttcagctccggccggggggaggggaggggctgcggctcacactgagcgcagcagcgagcaccggcctagggagacacagcccgggcggacccggcactggactgggccagtccctgggacccctgggcaccccgccctggggagggggccgcgccccagccttccgggacgaggtggcggcgcagagccggaaagcggggtggggggagggcggtggggaggtgttctgtccgaggctgcctggcggcgccgaagctcgcctccactttttgggcacttgccgagcgcggcgcccgaacttttcgctctatcaccatctccctcaagctgagatgcaacctccctaccctcgccccagagcccagagccaggagcccgatccctctgccgggctcaggcgcccgcgaacctgagactcggtacgcggctcagcctagctctttcccctcgcgcctcggggtctcctcgctccaaggttctcgaagtcttgcgcccgaaggactaaactaaactaaacttcggctgagtaatgggggaggaggggggtgcagatacacaatccctgccctatctcacgatcaggaaaggagagggctcataaggacgccccaattcgcgagcgcccttgagtctggccggtgccacggtcggttcgcgcgaagtgggcaccggtctcccgagccgacttcgtgtactccggacctgtactgcgctccggtagaggacccttccctttctcttagcttcttaaatcttttcttttaaggtgtaaatgtgtgtgtgtgccgatgaatgtttctgtttttcatctgctgactttatttttttttattggtataacttctcccttctctctccctgctcgtccgttttccaccttttctcttacttatcttctgccctcgctcactccctaacacacacattcacaccctctccgcctcgctctcccgttctc

SEQ ID NO: 335327 - DNA, 756 bp, Homo sapiens
  chr16:52579636-52580392
  hyper
cgacaaattcggcgctgggggcttcagggaggacagaggacaccggatggtgggggggaattccgcgcggcccgggtaccagggctgcgactctcgcccgcctcgctgctccgagcgacgcccgctgcccttctgaggtccacctcgccacctggaacgctcggtcctcgaagttggcgcagggggaggtggagaaggtggagtgaccccagggtgtggtgtggaggtctccaatcccgatctccccgaaatgcaaaacttagcccccccaaaaaaatgagaggaaagaagccacttactctaagcggggaggggcgggcaccccggttccgaggtccaaagtgccctaacgaaagggcagcaaaggccacctgcggggtcccaccacttccccccactcccctgtccaggcatactcaaaagtttgttcctttccgtccgtaagcggccccgaggccggctctggagtaggtgggggaggtaagaaggactgggggtgggggagggcaagatcatcggaccaggagatcagggacccctgcgtagcccccactcagtccaggggggctgcgatcgtgtttactaataacagcaacaaacaatcacacgccagcccttctttcagtcctcgggctctcttcgctttttgggggcagcaaaggagagtctggcggggaggtgggagggagcggaggggctgaggagagcgccggctgggggacaaaaagcggcgtgggatggggcagaaagagaagc

SEQ ID NO: 335328 - DNA, 814 bp, Homo sapiens
  chr16:54316028-54316842
  hyper
cgtgtcttgttccgtggcttcgaggggtgtgcgcgcttcctatacctccccggaacgcgcgagatagtcacacgcgccactttgagggtcaaacaccccgcatctggccacactgtacctttactaacgtggggagggggcaaaaaaatgtgtctctccttcttaccccgaggtgtcactcgcccaaacactccctacaacttcttcaagtcaaacttgggcaaggttggctggctgactgcgagaggaaaaagagggcgcggagggggcgcggcgcgcggccgggtgtagaggccacggaggcgaggcgccgagcgtcccctttgtcctgtagagggagctccagccccaaatttccctgctgcctcccccggcccgcccaccccaggcccgcctggagccggaatcccggctggaaaggtgcggcggtctgacacccccgcaacccccgcgccggggccttagcaggatgcctcttctagggcacgtgggaaaacccaccagggtgccaagacgcacagatgctcccaggacccgggctccccaactctcaactagagctgggcagtcacacatcatctagaggattatgtacccctaggcgaccctcttctccatatccgcctccaccgtcaccccacaccctggcatctataaagagggaaggggggcaaccgggttggaaggaggatggaatctgggcttgcacagcctcttataggtaacagtgagaaagcctcaactgtgtcgatcaaagaatggggacgaagggagtgatgagaacacgaccccgccacccgcgcaggctaacccc

SEQ ID NO: 335329 - DNA, 936 bp, Homo sapiens
  chr16:54318434-54319370
  hyper
cgagcgaaggcggcggcggcagccgggtggcccgcggctccgggaagtcccagcaggtgcggaggggcagagcccagcagggagagcgggtgcaggcgggggccgggcggtgggcctggaaacggccggttggtccaagccgggaacttgcccagcggcgctgagaccagtctgtgagcggcggcggcggcggcggccggagagagctgcagggcggaaggcgcgaccgctgcccccggtggagacccccccgcgccgggaggcgagcggcgcgggttgtccgggcttgtggcagtctccgcgagggaccagatcttgggcttctgcagggcggaggcgggggctggtgcgggagcgcaggggtccaggctcacggggggcgacggcagagacggcgaggccacggccactggtggtggcgctggagccagactcaggaccggtagtggccggtcctctaagccctcagagctatcttccgagtcgctatttttggagtccgaaatgggtcccaggcctaggtcgccatccctgcgcgccgccccagccagggacagctcaggctcggtggccgcgccgtctaagttctccaaatcgatctcctcgtcctcgtcgtcgtcagccaggccctcgccccccgtgtcctcctcctcccccccgagctcctcctcctccagctctagctcgcgtttgccgtcctcctcgtcctcctcttcgtcttcctcctcgcgctcgctcccataagcgtttccctcctcgtcagtgcggctgcgaggcgcccaagtcatcttattctccttcttgaggcgccggcgcgcgttggcgaaccaggtggacacctgggtgagggtcatcttggtgatgatggccagcatgatcttctcgcccttggtggggtaggggttcttgcggtgctcgttgagccaggccttcagc

SEQ ID NO: 335330 - DNA, 2084 bp, Homo sapiens
  chr16:54319392-54321476
  hyper
cgttcttgggacgggacgggtccccgaactggtactggccatacgggtagaaggcggggtgcgggtgcggaaacgcggcagccgcggccggatgctgcaccccggggctgtccttcagctcatactgcgcgccctgtacgcacatggagaaggaagggacacgcgcggagggagcgcgagtgagccccagccatcgctgcctcccccctcctggcctgcacccctctagtccggcccccgcgcgctcagctcgccctgcgccccagcgccaacccctccttccctggctccgcgggctcttaccagctgcgggaagatgggcagctccgcggcgtagggcaggaaggcgccgtagccttgggcggcggcggccgcagcggccgcggcgtagggcgccccgtacacggacgagagcacgttggacagggaccccgaggcgttcagctccgaggctccggcacccaggccgccccgggcccccgcgctgccgccgctgccgccagcggcccccgggcgctcggacgggtaaagcgggcggatgtattggtatcccagctgggggaaggacatggtggcccgcggggcacggacggagaggggggccgacccccgggccgcccagctcagcgccgcccgcgggctccggcgcgcatcgggggctgggccgggcttggggccgcgctgccgcccgcgctgcgctgtgctccgcgttcgcctattgatctgctccgcggcggcgacggcggcggcgagggcggcggcgaggagccaggtcaggtccgaacagattggcggagattcccggggctccgggctctgattgacatttctacggggcgcaagcccctcctctctgcgccgcgctccctcctctcggccgccggagctgcctctgcccgctcctcgctcctcactgccctcctctccccagcagtgtcgcgcctcgcttccttcgccctcctctagttttcactccccctcctcgcccttcctctcccctcccctctccgcactcctcttccccccaggatcgcttccgctgcttcgggctcctgcactgccctggacgctatgaaactctcctttctcctctccccttctctttccctttctcacgagggcttttgctctccggtccgttcccttcacttcttcctttctcactacttctattttgtaaatctctctctttactcacacgatactccccgcgacctttccagcctctgcgccctgggctaagtaaggcagccaaaagttgtggacacttagggtgccgcgcggggggtgtgtgtcggtgtctgtctgtccatccccgcccttccaccccctccctcgcctttccccaaatctcgggtctgacgtcgcgccctcttattcgacttttccccgcgtctcttccccgagtcgccaatcgcctgggcgccttacgggcgaggccgcccacccccgcggatcccgcgcgcggggcggggcggggcaggggcgggagccggagcgccgcgagtccctgcccgccccctcctgctcgcgccgggcgggggagcgagaggcgcggggactgggtgagtgcagggtcagctcgcccctcccgcctcccgcccctccgagcctgtccccaggctgaggcgcgggacctgggccgaggctggctccgggagctcccctgtgcccgggccccttttacagctcgcacctctcgactcccggccactttcagcagcttagggagggagctagcagccggcgtgggggtggggagcgagggagtgcgtcctaacagagtctccagaggccacctcgctgccttgcgggggcgaggcagcccccaacccagcaggaccaaacccagagattagccacttaacgccgcccccgggtccgtgtgcgaatcccttactaaaaatggcgggctggctccgggggctgaagggtggcagcccgggggcactggaagggtagggagccgccacaaatcggtgaagcaggcccgcgccccaggcggctgggaatgggggaggagcagggcgccgggggacggaggccctaggaacttttggagagctcttcgagaagtttctgta

SEQ ID NO: 335331 - DNA, 310 bp, Homo sapiens
  chr16:54324293-54324603
  hyper
cggagaagcgacggggacacttaggggaaaactttgccaacttcgctcttggcgcggaagaggccgctggccggaatggtgcagcagcggcggcgggccgcgacgcgcagggtgggccccgggccagtgctgggcaccctggagcgcgtcgggatgcccaaagtggggcgtgaggccggtgggctctttgctcctccgcttcgcccctgcgcctcccgcgacccgtctcacttccctgcgtctctgagcggcccgagaggcgcagcgctcagagtggccttgatggaagaacctggccctcggcgggaac

SEQ ID NO: 335332 - DNA, 263 bp, Homo sapiens
  chr16:54628744-54629007
  hyper
tagctgcaggaaaccgggcaagggagaatgcaaatagcagagacctcaaggtgctggaggagttaggaatctcccctccctcactctaacgctgccgccgccgcaccccgccacctccccccctccccacccccgccgcccacccgccctcaggttttaaatttggaagatattgtggaaatggacaaactcgcctttgcctgctgaccagagcccagccccaggcatgaaactgagaaagtgagcagttgcaaggacgtgac

SEQ ID NO: 335333 - DNA, 881 bp, Homo sapiens
  chr16:54962422-54963303
  hyper
cggaaagccgtgtcccggacgagagccgcggcgacgaagggaacaggcgtggacagaggagccacgcccacgcgcgcccgccccgaaccccgacacccggagaggctcgaccggcgccgacgcggcccgaggcccaggccctagcccacgggacgtctggtcgggcgcggggcaccgccgcgtccgttcggcccacgaggggacacgactagaggggcggacggcgcggccagagggcctggcccgggcgggggctcacctctcctccgccgcgcgggcgcgcgggccgcggacgctccctcgtggctggcgcgagcccccggcgggcggcgcgcgcgggccgttaccgaccgttagcgccaggggctgcggctgcggcgggcggagccgggggcgggcgctgaggggccgtggggccgcaagaggcgggagcgaggggagcagggcggggacgctgctcccaggagctcccggcgacgactcgggcctactgcgagcccgggaagaggccgccggcgaggccgccactggccggctgcgcgctcccccaggctcgggccgcctgggccgctccgcctcgcttagacattggccggctggcagccacctcggccccacggtccccgccgccgctgcagccagcttcccgtctccatgacaatagcgcgatcgagaccccgcccctccccgcccctctggcgccgagactcggaggaaagcggggttacgtcaccagggggcggagcccagggaggccagcgcccaatcataggtgaaggaggtgtcaggcactgggctgggcggacccaggggctctcggagaatgtagtctgaaccgctcaggcctcttggtgggcggtgtctgggggaggggagcagac

SEQ ID NO: 335334 - DNA, 1626 bp, Homo sapiens
  chr16:54965796-54967422
  hyper
cgtaatcctatcttcgcaatccgatttgggagtattaaatttctgaaaagtcggtcgagctgcggtgcatccgggatttttcggccgggttgtaacttcggtctggggtagtatttttggagggtgggagtgcgtgggcatggctcagctttttgtttgcatttcttagctgttgaaaaaagaaaaaaagagccttgacttcccttgttttccccccttgcgcccaacgtgcgtccgctcccccgccgagcgcggagtcgcctcagttgcccaggcctctatctgcatggagggccgggccgccgtggccagatctgcgcacggggtacggacgtgcccgggcagatgggggcctacggggtgacaccgaggccgggacagcttcaggggccccagaaggacctgacccagaaattgaggtccccgctgccttctgaggagggggaggagttgctcctaggtctgaaccccgccagccttgccccgtaggaagctggagtgcgggcctcgtccacccacagaccccggggagcgcagggaaaagggtgcttcggtcgttccgatggcagtggagaccacggtccacactcacctctctgcgtctccaccgcagggctctccctacgaccacacacccggcatggcgggctccttggggtaccatccttacgcggcgcccctgggatcgtacccttacggggacccagcgtaccggaagaacgccacaagggacgccacggctaccctcaaggcctggctcaacgagcaccgcaagaacccctaccccaccaagggcgagaagatcatgctggccatcatcaccaagatgaccctcacccaggtgtccacctggttcgccaacgcgcgccggcgcctcaagaaagagaataaaatgacgtggacgccgcggaaccgcagcgaggacgaggaagaggaggagaacattgacctggagaagaacgacgaggacgagccccagaagcccgaggacaagggcgaccccgagggccccgaagcaggttggtggacatgggaaagggcgtgttgggcgggagtaaaaaggaaaagagaggcctggagggggcgcgcacggggcctggaggttgggggcaggggtccctgcctttgcgggcgggaaccgggtcccgccgcgcggcctctgcgcccctgacagcctgggtttcgcccgcaggaggagctgagcagaaggcggcttcgggctgcgaacggcttcagggaccacccacccctgcaggcaaggagacggagggcagcctcagcgactcggattttaaggagccgccctcggagggccgcctcgacgcgctgcagggccccccccgcaccggcgggccctccccggctgggccagcggcggcgcggctggcggaggacccggcccctcactaccccgccggagcgccggcgcccggcccgcatccagccgcgggcgaggtgcctccgggtcccggcgggccctcggttatccattcgccgcctccgccgccgcctcctgcggtgctcgccaagcccaaactgtggtctttggcagagatcgccacatcgtcggacaaggtcaaggacgggggcggcgggaacgagggctctccatgcccaccgtgtccc

SEQ ID NO: 335335 - DNA, 1738 bp, Homo sapiens
  chr16:55357501-55359239
  hyper
gagtgagggggtggtcagaccgctgggcccagccgggcgtccaggaggagcgcagggaatgggccgccctcccggagcgctccactgcggctctccagcgccacccccagcggagcgcaggggctgcagcccggaccgggagccttcttcaggctccctggctgccccgcggccactgcgggaggcgcgcgcgcgaggcagccaagccttgccttcggaggagatgcccagggatcttagcaagcagcctgcggctgccagggatcggacctggcgagtttcccgacggaatctgagggatcccgaacctcggcctcgagggggcgctatccggcctactcgaggaccaggcagctgcagagaagctccaaggtcaaggccctgggccaggccagggcttggagagccggaatctagcccgagtcctggggaggctgaggcggggaaccagatccccgaggacaaagatgggcgggccagtgggatccaccgacgctgcccggagctgctccaacgagagccgggcctgtggcgtgaacaaactttacttcagcgcaggggcggaggaaccgggctggaggcttctcccccgggcctctgctctcctccacctgccagtgctcagcctccgcccagccttcgcccaccccagctccctccccctcccccacgcgcctctgttcactcagactcctgtctcccctctcccctcctccttctccctcttgcctttctcccccacttttctcctgtctcttcttttgtattctctcctccctcgccgccccggttgcctctcgcctcctccgggccgcaggggaggaggtgagcgcgctgcgcccggggcctgcgcggctcagagggaggcgtttctcctacttctcccgggtaatttggagaggttgtgtgtgtgtgcgcgcgcgcgtgagctccaggcgaaaaggggtaggattcagcgccgagcagagagggtcagggtttttgacgttcctcgccagctgcacaaacctcccggagcaagtgtgagtgtgggtgagagtgcgcgcgcgcgcacgggctggctgcgcttggcacgcttggtggcccagggtcccggggcccggggtcccgtctggcggcccgggattaccgtgacgtcacattgagcctctggccaccttggactgggacacctccggagcctcacagccccgcgccgcgccgcgcctcacctcgccaccacgcgcctttgggaacccgcatcttcttccttcccctgcccatccatgggcccttctgtcttccggaccccacgggccggaggggcgccttccggagcgcagggctcggcagccgggctgccctcggctctgcctccactggggccaaccaggcgaaggaaccggcgctgggcatccgcagcggtgtaaggaactgagacacctcactgctgggggcgcggaacagctgggctgagacgggaactcgacagggaagagagagacgggccagggacagccaccatgtccttcccacactttggacacccgtaccgcggcgcttcccaggtaagaggcgcctctatgggggataggggacagactgggtggagggagtgcctagtgcacggcgcctgcctctgatcatcctcctcttgtgttctgggggaagccagaaggagcaaggaccagggtaatgtgtcacagcctcctctgacatccccagtccctaaatgagaacgtttcaccccggagtgcac

SEQ ID NO: 335336 - DNA, 782 bp, Homo sapiens
  chr16:55364744-55365526
  hyper
ttgcgacagcgcggcgtgggctgcatacctcagttcctttagtagctgggaaagaaactgacaaggtaacagacaaggccgtggcgcctgcagctcagcggactaaccgctgcgtaaccaatccgtggagccaagctgaccacctcgcgggtcctgcgcatgggaagtggtgggacttgtcaggatgtttatctggaaactgcatctgtttccgggttcgtatttgggttgtaagtttactgggggaggggtgacgaggaccgcgctcctccgatcgaactgaacctaatggggaggtcaggcagctttcagggtcggtgtgaggcgagagggggcattcttcccgttttatcaaaagtgtcagcaaacacttccggtacaggccaaccaatgggaactgacgggcagggaaggggtctttgtcccccttgctaggagtgtcgagcgaccgggttgggggtaagagatttaaagacgcccgcgcaatggtgggtgggggaggctgcctgcgttcgtgtcccgcgtctagtggctttggctttagccagggagtgagcgcaccgctgctcgcagggaagcagggacccggggcagtgccctagaggggagctccgaagagcaaatgaggcgggaaggcaggacgaaaggcagctggggtgtgcgcccaaggcctggattcctggggagctgcgtttccaacgccgggtcccggccaggccaggccttccaggccagcgcggaggccagactatcagtcactgaaatccaggcgagcatagtcc

SEQ ID NO: 335337 - DNA, 438 bp, Homo sapiens
  chr16:55404823-55405261
  hyper
cgcagcctcacctacgggaagatctacatcccctcctccagggctctaccgagggagaaccaaggtagaaaagcatgcctttccggctgctgcttttgcatcttatacggatagccggctcatggcaatgtgactcaagctggcaggggtctttgagcatcaaacgtgtcctccttccctctacctacttcggctccggtttctctcccgaagcctaaataaagaaggtaacagacaacacctctattggcagaggcttctgccttttccgtcaggctggctgcagcacatccgtaatccttatgtcagcctgcactctagcgttgccggcccggtccagcatctgacagccgcgaatccaaagctgccggcctctcgtttctaagcagcagctcacagcgccagccgccctcccgcagaaggggaacaaagcccggc

SEQ ID NO: 335338 - DNA, 658 bp, Homo sapiens
  chr16:55512752-55513410
  hyper
cctagccaagccggcgtccctcctagtagtaccgctgctctctaacctcaggacgtcaagggcctagagcgacagatgtttcccagcagggggttctgaggctgtgcgcccagatcgcgagagaggcaagtggggtgacgaggtcgtgcactgagggtggacgtagaggccaggagtagcaggcggccggggaaaagaggtggagaaaggaaaaaagaggagaaaagtggaggagggcgagtaggggggtggggcagagaggggcgggcccgagtgcgccccccgcccccagccccgctctgccagctccctcccagcccagccggctacatctggcggctgccctcccttgtttccgctgcatccagacttcctcaggcggtggctggaggctgcgcatctggggctttaaacatacaaagggattgccaggacctgcggcggcggcggcggcggcgggggctggggcgcgggggccggaccatgagccgctgagccgggcaaaccccaggccaccgagccagcggaccctcggagcgcagccctgcgccgcggagcaggctccaaccaggcggcgaggcggccacacgcaccgagccagcgacccccgggcgacgcgcggggccagggagcgctacgatggaggcgctaatggccc

SEQ ID NO: 335339 - DNA, 493 bp, Homo sapiens
  chr16:55513960-55514453
  hyper
cgtctaggtaagcctttggcaaacagctacaggggtcgtttttgctaatgtaggactttgggaacggtgctctggcacacaatttgggtaaacttatgcgcgcataaggatgggagggagcttggtcaaagcggggcttggcaaatttctaggaaccttcggcacagatccggagagggacctttaaacaaacagctcgagggggccatttgggaagtgattggggcaggagggaagcagagagcgcatcttttttctcctggcttaatggacaaattggtcaagggctgggcctcggaaagtttcctcgaacttctccaaagggtcggagaaaagaaggagagagctggcccggcaggagggaggaggagtggggcaggcgctggagggcccggcgcgtggggcgggggcggactgcgctccgctcgggtcggagagcggccagagagccctccttcctggctgggctcccaaaccgcggttcagatgttgt

SEQ ID NO: 335340 - DNA, 1309 bp, Homo sapiens; identical to SEQ ID NO: 238571
  chr16:55689584-55690893
  hyper

SEQ ID NO: 335341 - DNA, 1867 bp, Homo sapiens
  chr16:56224483-56226350
  hyper
aggggtttgctggaaactcccggtcgcttgaagccctgtccctccactccgggcaccctggcctccccagggtgggcacccctcctgcacggagagcggcggctgggatctcggagcagggtcggctatggccctggaggcagcggctcacagagaaaaagctctggcttttctccgcccgctgcgttcctcttcttacagcctcgggtgtcacatattaggtgctcaataaatgtggacataggaaacgaaaagtccgaatctgtccttacgcccccaaggcgaattctggggcgcgcgggtttattccgacccactaccacatcgcgtttcctgaggtaacccggcctcggctctgcggccccagcggctggagagccacggagaaggcgggctacgggcgacaagatggagagccggcccgagagggacagaggccgcgctggcagcgagctggggggcccacctgaccgtcctgcgggcagcccggccccgcgctcccattgacaaggaggtccgcgccgccggcgcgtggggcgggggcggaggcggggtggggcgccccggcgcgcgcccggccccactccccgcccccgccagtcccgcaagcacccaccccgggggagccgcgggccgggagggcgctggggggaggggcaggccgctccgcgagcgcgtgtgcgcgccgccgccggctgacgcgaactccggcgcgcgcctcccccgccccgcgccctccccgtcccgggggcccggcgcgcggccctgctgacgtcagctggcggcccgcggagccgggtgcgcagagccgctggcgcactcgcgcgctgcgctggcctcctccccgccccgggcccaggcgcgcgcgcgcttgttcgctctcccattttttttttcccctccctccctgcctctctctctctccctctccctcgagctcccggctggctgcggctccctggcgctctccctctctctccggtaggctcaccgagcgatgcgagctctgggagacagcgacgccgcctcccgctagagacctgcccctcggcccggccccctgcccaaccctgcccagcgcgcgggggtcggcgaaggcgccgcggacgcaccgacggctgaagagcggcgatgcacatgcactagcagcaccccctaactcactccctccacatcccgcgccgccgccgccgcctcctccacctcctcctccgccgccgccgcctcctcctcctccggcagccgcggcagcaggacccaccctgccccccaccccaccctctgtcggctccggctgcggctccagcctcgactattattttatttattttgggtcgtgcacaagcctcagtgcctgcagtccgcgcctcctcggcccgcgggcgcctcctcccttggctccggagccccagaccccggccaccctcgattcgacaaccccagacccctgccagctgccgcgagtctccgctgctggaatcttgttagcggctgtctttttggagggttctggtttcccgacatttttgtttccagcccaggagaggatatcgtgattttccccccttgagcccaggctctgctctctgggggggtggggggcgctccaagccggggagccgtgccagccgagtcgtgcgggctgtggcagggaaggggccaccatgggatgtactctgagcgcagaggagagagccgccctcgagcggagcaaggcgattgagaaaaacctcaaagaggatggcatcagcgccgccaaagacgtgaaattactcctgctcggtaaggaccgccgctgctacccccatcccccgaccccggccactccgcaccccctgccaccagctcccccaccccactcgcgccc

SEQ ID NO: 335342 - DNA, 364 bp, Homo sapiens
  chr16:56228284-56228648
  hyper
cgaggggggacgttttaaaacttcagaagtctgtaatcagcagtggcggactcggagcccagtagaagccccagccacctgagctggatgaggtttcaggcgttgcaagtggtggacagcgcccagccgaggccggaaaagtcgatggggctcagttcggcgacgctcggctaggttcggtgcggtctgggcgcggggctcggagggagtcggcggtgttcggagccgagtcggtgctccggcggagagagccgagccgcttcggagggggtcgaaagcattcggaaatactcgggggaggggagtgcgcaggaggggaaggaggagggggagaggccagagtctgcaaattaactttgcatcc

SEQ ID NO: 335343 - DNA, 573 bp, Homo sapiens
  chr16:56390323-56390896
  hyper
cgtcccacctcgcggcgcagcccctggagctcctgctggggggcagggcccatctgccgcctggggctccggtgcggtgcactggtccgaggagtgtgctcaggccgggctttccagaaggccacaggccactgcaaaccctgctgcctgccggccgcccagacaccacagacgccacctggcggccctaagccactcccgccacacgctcactccaggttcgtatagaaaaagcacagctctcactggccagtagctgccaaaaagaacacccatcgtataaggaaatccagccccatagaaaacaatctgcccaccgaccccctttctaaggatagcctttgtaggggttttttggttccttttttttttttttcagtttttgtttttacttttgtcccgccgagtactatgtattaccagccccccaccccacagatcagttttcctagtctttgggaaacgggttgtgttttttttcctttgccgtgttggatttccggtcccggctgacacctcccttcgtgtgtgcgcccctccccacccctgcctttgtttcggtgccctgtgtcc

SEQ ID NO: 335344 - DNA, 637 bp, Homo sapiens
  chr16:56659228-56659865
  hyper
gaacacaactcgctcgctaccgcacgttccccgctccgcactcagcggatcccgggacggcagcaggtgggctgcacacggactctgggacaagtcgagctgaaaaccgcggagctaggggtggggtggagacgcccgcgacgccaaggctggggtcccggaacacgctgggaggagggtggaaggcaacctcggggaaactgggaaaggcggcctggacttcgggaacaccgcgtacctgcgggggcacagccccacccgagcgaacgggctccaaaggggaggtcccgcggtgcccaccgcgcagagctcagggggtggtgcgcccggcccttctgcggcgcacagcccagcccaggaacgcgggcggtgcggactcagcgggccgggtgcaggcgcggagctgggcctctgcgcccggcccgacctccgtctataaatagagcagccagttgcagggctccattctgctttccaactgcctgactgcttgttcgtctcactggtgtgagctccagcatcccctttgctcgaaatggaccccaactgctcttgcgccactggtaagggaagctctgcgccctggaatccccatttcccagccctattacagagggtctctgggtttcaggaagtc

SEQ ID NO: 335345 - DNA, 612 bp, Homo sapiens
  chr16:56666028-56666640
  hyper
gtggacagggacaggcaaggcggggaaggaggagaaacgaaagccacattggtggcgggtgctctgcacacgactcgctccctaccacacgccccccgctccgcacacgaccgatccggggactggagcaggagggctgcaccgggactccgggacaggcccagttgaaaacggcggggcgagggggtggggtggagacgcccgcgacgccaaggctggggtcccggaaagcgcggggaggagggtggaaggcaaaggcaacttcggggaaactgggaaaggcggccgggacctcggggacactgcgtaccacccggcgcacagcccctcccgcgcaaacccgagccaaaggggcggtcgagcggcgcactcggagcggagctcaggggatggtgcgcccggcacttatgctgggctcagcccagcccagcccaggaccgctggcggtgcgaacccagccgggcgggtgcaagcgcggggcagggcctctgcgcccggccccctcccctgagtagaaaagcagccgcaggctgtggcgctccaccacgccgtccgggtgggcctagcagtcgctccatttatcgcttgagatctccagccttaccgcggctc

SEQ ID NO: 335346 - DNA, 666 bp, Homo sapiens
  chr16:56671950-56672616
  hyper
cgagagtgagaggccgacccgtgttcccgtgttactgtgtacggagtagtgggtccgagggacctaggtgtggacagggacaggcaaggcgacagcgaggagaaacgaaaatcacatcggtggcggttgctctgcacacaactcgctcgctaccgcacgctccacgctctgcactacgccgatccggggacaggagcaggaggctgtggctgcactcagacttcgggacaggccgagctgaaaaccgtgagaggggtggggtggaggcgaccgaaacgccaaggctgggttcccggaacgcgcggggactagggtggaaggcaacttcggggaaactgggaaaggcgaccgggacctcggggacgccccgtaccccgggcgtaaactcactcccgcgttagcggccccaaagcggggagggggtggtcccgtggtccgcacccaggggagctcagtggactgtgcgccttgcctttctgctgcgcaaagcccagtccaggtcatcacctcgggcggggcggactcggctgggcggactcagcggggcgggcgcaggcgcagggcgggtcctttgcgtccggccctctttcccctgaccataaaagcagccgctggctgctgggccctaccaagccttccacgtgcgccttatagcctctcaacttc

SEQ ID NO: 335347 - DNA, 374 bp, Homo sapiens
  chr16:56677223-56677597
  hyper
gggggtggggataccgcgaccacctgaggctgggttcccggaccgcccaagggcaggaatggagtgcaatctccgggaaattcgggagggccgggattatagcagggacgccgcgtaccgccaggagcacagcccctccaaagcgagcgtgagccaaagggccgcccccagggtgcgcaacagccacgttaaggaggatcctgcgcccggcccgcctggtgcgcacagccccgccctgaaccctgggcagcgctgacactgagctgggctggtgcgagacctggggcggggccactgcacccagcaccctgccctgactgtaaagtcaggcggcctgctcctgttccgcctcctaccggcccgcctgttttttc

SEQ ID NO: 335348 - DNA, 217 bp, Homo sapiens
  chr16:56691542-56691759
  hyper
cgaaggaccggggcggggccggggggcggggcgaaggccaggatctccaggtacccggaaccccaaggggcgggtgtagcaggcaatcttggcgaaactgggaagggcgggcaggagggcagggaagccgctcacccaggcacaaagcgcctcccgcttgagcggactccaaagggacggtccgcggtgtgcagcgagctgcgctcaggggaccttg

SEQ ID NO: 335349 - DNA, 450 bp, Homo sapiens
  chr16:56703387-56703837
  hyper
cggggtgtggggcgcaggtcaggatctcggggcacgcggaacgccaaagggcgggagtagcaggtaatctcagggaactgggcaggcccggcagggtgaaacaagcagctcacccgggtgcacagcccctcccgcgggagccgctgcgaaagggccgtccccgcggtgtgcaccgacctgcgctcagggtactttgcgcccgacccgtctgctgcgcacagcccagcccaggaccgcgggcggctcggactcagtgggtcgggtgcaagggtggggcagggtctctgcacccggctccctcccctgactagaaaaggagctgccaactgttgcgctccaccacgccctccacgtgttccactgcctcttctcttctcgcttgggaactccagtctcacctcggcttgcaatggaccccaactgctcctgcgaggctggtaaggaacgccc

SEQ ID NO: 335350 - DNA, 281 bp, Homo sapiens
  chr16:56709754-56710035
  hyper
cgcgaccacctgggaatgggaaatggccctcagggtggcaggggcggcgcgtacctctggcagcatagcccctcccgcacgagcgggccccaaaagggcggtccccgggagcccaccaggctgcactcaggggatggtgcgcctgacccgcctgctgcgcacagctcaacccaagaccgcaggcgccgcggattccgcgtgggggtgggtgagaagggtactctgcacccggccccctcttctaactataaattgagcttccggttcctagaatccaccac

SEQ ID NO: 335351 - DNA, 467 bp, Homo sapiens
  chr16:57318149-57318616
  hyper
gtccgtgcgggaagcgccctaggggtacgcgcagcgcgtcggtgacagtgtgagcccgggtggggagcgcaaggttcgcgaaaaatgaacgcagcgccggagtccctcacccatcctggccggaccgggagcccccggccaaccccgtgggcccgcgcgtgctctcaccagctgcagcagcatgagcgccccgaggcgggagcgcacgaagcccaggtccgggcgcagcgccgacaccgaggcttcggcgccctgcgcaggactgctggtccgcgtgctaactttcgacgggaactcggccatggcggctccgcttgcctcccgaggtcgctacggccgccgtcgccgcccctccagcggtgggtgccggctcccgcgccgcttttcccccaggctccggatccctgtgtggctccaggcgctgcaggaggcgtcggggctgggagcctggggcgccaggtgcggcc

SEQ ID NO: 335352 - DNA, 287 bp, Homo sapiens
  chr16:57519818-57520105
  hyper
cgaacaggaggccccggggaggagcaggaaggcagagagaaggttgggagctgccaggggctgggttatgccccttccgggggggcaggcccgggagcgcagggcctgggttgctcggatgaggtttgtgtgggtgcgggtgaggtcagctcgcgacctgggctcccccggagaggaaagctgcgggtggagagagcgcagggagtttcagggcccaggcactggcttttggggggcgggtctctaagctccccacccgagagtaggaaggtcccatgggacggagc

SEQ ID NO: 335353 - DNA, 1525 bp, Homo sapiens
  chr16:58497229-58498754
  hyper
cggcagcgccgtcccctcccccgggaacccgacgccgcgcggccacagggggcctggaggggcgggcagggcctcgcagcgcacccagcacagtccgcgcggcggagcgggtgagaagtcggcgggggcgcggatcgaccggggtgtcccccaggctccgcgtcgcggtccccgctcgccctcccgcccgcccaccgggcaccccagccgcgcagaaggcggaagccacgcgcgagggaccgcggtccgtccgggactagccccaggcccggcaccgccccgcgggccgagcgcccacacccgccaaacccacgcgggcacgcccccgcggcgcaccgcccccagcccggcctccgcccctgcagccgcgggcacgcggaggggctcctggctgcccgcacctgcacccgcgcgtcggcggcgccgaagccccgctccccgcctgcgcgtctgtctcgtccgcatctccgcggtgagtcggcggcgccctcgcccctgagcccagggccagcttctctcgccgccgcggctgctgcgcgcgtccccgcccagcccagcccagccccgagcacgaccccagccccacgcacgaccctagccccgcgagtcccgcaccgactcgctcccgccccatttcgcctccgcgggggcggcgccccctcctccccgcggctcccgctctccttcctcgccttcccggccgcgctggggacccccagccgccgtccgcgaccccccaccgcgacgcccggaggcggcggggtctctttgttcgggcggcgggcacgggggaccacctcccacggtgtcaccgcacccaccccgcgcccttcctccgcctcctggagttcaccgggaccaggtggcggcgggtgcctttttgggggtgcgcggccatgcaattggtggatttttttaaaccgttttggaggggggagcgcggcgttgggggcgggagagcgctcctggctgtgagctgctcctgccgcttcgctccgcgctctcctgccgctccgctccgggtctcccgcgctcctctccccggctcggccgagcgcgctgccccgacgccgccacccagagccgggccgcgccgggcgccgagatgaaggtgctgggacaccggctggagctgctcacaggtaccgcccgcctgccccgcagccggccgccactttccgagttggagcggactccgggcgcggcggccggggactggggcggctcgggtctgagcaggaaggggtgcggaccccaactaagtcctagttttgtgctacctgtttgtgtgcggagcccagccccgggagaggacttgaggttgtggcgagtccctggcgctggcgtccgggctgcgggagcaccggtcagggggtggccccatggggtctctgaccagcggagctcggattaggaccctgaaagctagctcagggctcctgccctccaatcagtgtcgcttgtcccctaagaaaggacccgtgggcttctggcaggacccgcgccatggacctcttatttctgc

SEQ ID NO: 335354 - DNA, 1414 bp, Homo sapiens
  chr16:62068832-62070246
  hyper
cgctggtggaggcaaacggctagtccttgacatgccgccggctccgtgcctgcgggggaagggtcaaccgcaaggaaactttgaggattctgccagactgggtgggggaaggctctggtgtttgggaggaataagcggaggaaattgtggatacctgttggcatcagcgttggcggcagcacgtttttttaccgtttcccagccttggctggatcctgggagaaccggagtaggtcccttatgaacctcttacgtactggcagaacctaggcaagagcctttttccctccgatcctgcgaggggcgcgaccagcccctcaaaggttcccggatgagaagcggccagaccacagaaagcgcaggtctgggctcagctgtccctaggagagcggctacggagtccccggcttaagggggcctccgtgcacgcaatctcgagttgcggggagacactgcctgggggtcctgcaggggtgctgggcagcgtcttggcgagggcagagccgcagggcgactccggagcccggcaagtttgtagcgggcaccgcacctcccagagctggagctgccacttgtgggaaagcctcgcgctggggctttcgcagctgagccttggcccgcagccctgccgcgggggtcgccctccctcgcctcggagatgaggcggtgcagaaaaccagccatagaccactcgggccccctcgcctccttttttccctggcttgcaccctccgcacagcgggctgcaggtgcttcccattcaccgcacggaccccgcagtgaaggcgcgcggctgcagccgcgcctgcctgcgttgggaagcggcgaaatagccaagtcgccgcagggaaggaaaccggcaggaaaactggaggggcacagcctggagcttgctactctctaggatctgttgtcaaagcagtttgcaaaaacagtcaggcaaaaccttgaggcgtacgtacgttatcacccacggatatcgcgaaagacacagcttagcccagagcctatgctaagaaccctcatccaccatctgaggggcaggaggcgcgcaaggtgtccgaaggggcatgggaattcctataagaaacggtcccttctggatagtcggaacatagaggaaaacgggggtgggttaggggaacacttactcttgtggggccctgcgctggcgaatgtcaagcctccaggttcacaaatggctggaggtgctcggggttagctcccgagggcggcaagcgccgaccggtcctcgctcgctaggcaggcgcctccggattccgttcatgcctctcggagctacagggcttggtgcggagacgcagggcgggcgcgctgggctctgggtgtccgcaacccaaagtgcagctggtgtcttgacgctaccgtctatgcacaagccggcggcggcggc

SEQ ID NO: 335355 - DNA, 376 bp, Homo sapiens
  chr16:65157302-65157678
  hyper
cgccacagccaagcagtttgaaagggctagaggggaggagacgggcccaggagttaacggaaaaagaggccgaaaacggaagagaaagcttgggatcctgagcgcatggggaaggaaccccagtgcggggctaaggcaagagcggccgagccctgccctccagctcctggtcaccagcccgcgggtcccgagcgcccgcagccgcccgggtttccacacggcttggggagacgcccgcgggggcgggtgccggcgaggctgccccgggacctaccctcttcggcctgcgcgcccgcgtttttcttgacgactccaggatccgggtggcgctgcgtgcctgcccccagtccgcgtcctgcgcggagaggatgcctct

SEQ ID NO: 335356 - DNA, 524 bp, Homo sapiens
  chr16:66612754-66613278
  hyper
atcgtgtgttgcatcgatgcgtttgtggtcaccacgaagatgaggaccaacttgaaaagattcctgggagtcgaagttgaaaggaagctttcccccgccaaggacgcctaccccgaaaccggccccgacgccccgcagaggcccgcctgaagccagcccggcgccctagcagatgcacgtgtctgtcgaatcgctgcctccgagcccacccccgagctcgcatgctgtcacccattccagcctaaatgtgaccataaaattagggctgctgcttttatcgagaacacctgcttcctctcgttgccttgtgtgaaagtcgcgttgtattttcctgcgcttggcgctgcgcccgcggagctcagggccgtgacccggtgctcgcagccccccgaccccgcagcggagcggcggcttacagacctggggccacctggagacgccgggatgggaccgcgagggcagctccgcgcggaggtgggaccggcgggttgggaacggagttggggcccgtcgggggccggcgc

SEQ ID NO: 335357 - DNA, 988 bp, Homo sapiens
  chr16:66638030-66639018
  hyper
cgcgcgcgcgcgcgtgtgtgtgtgtctgtgtgtgtgcctggagctgcgcttgcaggtctgagagtcctctgagaatgggttgggggaggcgggtgcaggaccgaggcctggaacagccaacaaagaggccctggaggagggtggggctggccggggacaggaggggtggccaagaaagtcgcaagaaaactccggcccccaagaaaaagagagggcatgggttgcggagccgacatcacggccggggtctttgctgtttagacgcctgggttcccggatcccagacacgcgcacgggcaggaagttagaccggagacagcgagtatagacagcccttctggataggggcagacgggtgggagctccgaaggggtgccggggcggtgatcgggaggtctccagcggcccgaaccagggtgaagaagaaggtggagtctgcggaggccccaggccggggagggggcgggtcgggcccagcatcccccgcagccggggtccgagggggaggggcgggctggaggagcgggtgggggcggggcggggcgtggcggcgggggatgcgcccctgcgcgagccagtgtcgcctgccctccttccgcacagcccgggtttccgcttccctccgggcgcgagaagaggggagccaggccgagccccggccctaccgccgccgccgccatgtggcccccagaccccgaccccgacccggaccccgagcctgccggcggctcccgtcccggccccgcggtccccgggctccgcgccctgctgccggcgcgggctttcctctgctctctcaaaggccgcctcctgctggccgagtcggtgagtgcggcgggaccctcggccgccccgctaggactgcgcggctcctttcggaggaggacgtcggggcgcgggtggggtccgggggcggccgccgtgctccgataccccctctccgcgccgcctcggccgacttctctcgggcgcctggcgaagttgggtc

SEQ ID NO: 335358 - DNA, 129 bp, Homo sapiens
  chr16:67184512-67184641
  hyper
cggttgagccccttgcgttgttctcctcctcccggccgtgtcgcaccgccgggaccggcagcctgaagggacaagaagttcacccatgtagccaactcccccgcggcctcagctccggcccaggactgc

SEQ ID NO: 335359 - DNA, 595 bp, Homo sapiens
  chr16:67189038-67189633
  hyper
cggcggcggcggcggcttcacctccgacagagagggcaccgggggctgcaagggggccgaagcgacctccccgtcgccaccccgggcccccgagccgcacttcagatttcgcagcgcatcctccagctcagccagttcttcatcccggagccggtcgggctaggggaatggaacgtgccgtcacgggggacttaaccgcggatccccgccctaccccatcctgaccctagcccggccgcacctgctgggctaggatgcaactcaaacagcgctcctcgtccgccagcaaagcgtccagccgctcggcgccggcgcgcagctccagttgcagcggcaccgagtgctgggcgagcgcggccgccaggctcctctgcagcgcggcgcgcagcgccccctcgcggtaggcgcggaggaagcggccacagggctgccgcccgcagaatcgcagctgcacgatcagctgcgggtcgctgcggtggatcttcagcatctgcagcacgtccgggctcccgccgctctctgcggaggcgggcggtcaggcgccgggcggtccccaagctcggccgttctccaaacggccggaggaggggcgaag

SEQ ID NO: 335360 - DNA, 1770 bp, Homo sapiens
  chr16:67197294-67199064
  hyper
cgcgcgtccccgctgcccaacgaagcctgggtcgcgttgcgccgccgccaccctgggctggcagtggagctggagctggagcccgcgctgcccgctgagagcgtgacgcgcgtcctgcagccagccgtccccgtggctgcgctgcgcctcaacctctcaggcgacaccgtaggcccagtgcgcttcgcagcacaccactacgccgcaaccctgtgcgcgctcgaggtgcgcgcagccgcttcggccgagctgaacgccgcgctggaggagctggcggcgcgctgcgcggccctgcgcgaggtgcattgtttctgcgtggtgagccactcggtgctggacgccttccgcgcgcactgcccgcgcctgcgcacctataccctcaagctcacgcgcgagccgcatccctggaggcctacgctcgtggcgtgattgggcgacttctctcccccgtccccgtggacgtaagcgctctgagagggaacggggggggtgtccaggcgcgccccgagtgctagtgccttcttttgggattgttgccccccgggtctttaccgagttgggaactgtgatggcatcgggaccagtcctgggcgccctgagaccactcgctgctctcaccctctgcagacgccccacccgctcggtcctggacacactgcccccctctcttgcctccacccctctgcggactctgcagctccgcggccccggcgcagggagagggagggcacgggcgcgggccgggcctcaagggtgagtgtgaaataaacaaatcctgcagtgtttctgcgtcctattaaaggcggggtcggatctgaaagggaaggacagggaacgcgcggggtaccggaggagccatcccggcagaggttgggtttcctcaagagcctctggacgacacagctgcggggggtcagggtcggggcactcacacccttggaatgactacgtcccggggttcggcgggagggggcgtgcttccctgcccccccttcctatctgcttgccctgcctggggcttcactgtgcctctggccattaccttctaggacttgcccagcccacaccaggtcgcgcaccggcgatttctcctgtagaacaaagaaggaaatagagggaccgagaggggtgggactcgaacccaagtctcccactcatctcaccccaccccaccccactccaccccaccccacccctccactccactccactccacacatcccatccagccagccttttctgcctgctggtgcctcggccgctgtccgagccccgccccgcgggcttgcacgtggcccccgcctgacccggcgccccggggcggagtagggcggagcgggcggcaaacgcagcactttccgcggctttgacgagcccgcagcggccgggcccgagcgcagagccgggccgagactgcaccatgcaggaagcgccagctgcgctgcccacggagccaggccccagccccgtgcctgccttcctcggcaagctatgggcgctggtgggggacccaggcacagaccacctgatccgctggagcccggtgagggccggggcccctcgattccccctgtggtcccggggtccctccacgtcagtgaacacccatgcccgcccaaccccctcctgagactgggccgtggatccccggatttggccattcagagaagttcaccttggagggggtgtgcgagaggggggtttcctctgcggccgaagaagggttaggagcctgccttctgaagacctagagtccgagggaccttcgag

SEQ ID NO: 335361 - DNA, 310 bp, Homo sapiens
  chr16:67199320-67199630
  hyper
agcatgagtgtgtgcgcgcgctggagcgcaggactggccgtgagcgggcaccgctcaccctcctggtctccgcccgcacggtgggcgggcggcgttcttggtagagcgggaccagtttcctcgtaagcgaccagagccgtttcgccaaggaagtgctgccccagtatttcaagcatagcaacatggcgagcttcgtgcgccaactcaacatgtgtgagtccctacggccgggcggggagcggggatgggggactcggtgccggggatggggcgacccacgcccccacgccccactccccagacggttttc

SEQ ID NO: 335362 - DNA, 783 bp, Homo sapiens
  chr16:67204024-67204807
  hyper
cgcggggccgctgcaatctctgggaagcgggggcttctgggtcgcgctcagctctgcaatgcatgcgttctgtgatcctggtgagttggtatccttctctgaacttcctctgtgacaggcagagaagaggggtcgatgacaagatagatggaaagcacctggaaattggcaggccctgagtgggcgctggacgtgtggggccgcgggccgaactgccccctcctggcctcatctcctggtgcgccccgggtggggagggaaagctgactacatgcacgtccccagccagcgcgcggcctccgcggtgtggctcctagtgcccggggaagaaccctcaccctccctattcccagcagccctggccgccccgcccccgccgcagctgctgcacccacccccaccctgcccggccctttctgcaccgtcatctcctgccccgccgaggcttgacccgtgagtggggacgcccaaaacgggccagaccgggagccccactcccggctgtgggagggaagggaaaccgagattgggcagaatcagcgccccaccacccgctgcggcgctcgggggtcgggggggcggggtgggtaggactgtgggccccgccctgccgcaggactctcaagctctgggactgggtggagggaggtaaggggcggggggggaaaatccgtgcagtcgcacatgcgcaaaggctcttcactgtcccaagaccctggcttcctggccaaagagcccgcgcagcgaggtggggttgggggctgggacccagctccgtgcccc

SEQ ID NO: 335363 - DNA, 296 bp, Homo sapiens; identical to SEQ ID NO: 238624
  chr16:67427325-67427621
  hyper

SEQ ID NO: 335364 - DNA, 185 bp, Homo sapiens
  chr16:67433368-67433553
  hyper
gagggggcacagcgcgattggccggctcattccccgctctgcggcccggccggtcggggtggttgagtggggtctgtggagggaccaagcgccaggcctgagacagccccgagcgaggcgacgaggagcgcgcgcgccctctgcaggcgctgcggggtgggtcccctggaggaggcagcgctccc

SEQ ID NO: 335365 - DNA, 402 bp, Homo sapiens
  chr16:67678724-67679126
  hyper
cggtgggccgcggggatccccaggcaggcagcgtcccctggtgttcgcggcagggactgcggggcggggtggaagccgggggcaaggacccgctggaggcccgccacacccgcgaccctcccggccacgccactgcccaccccgacgtctaccctggcggagaagctcctgggcgacggggcgggcgggcaggtgggactcggcccccctcccacaaccccgctcccgggcaagctctcgagccgcgaggccggggcggggaggggccgggccgggggcggcctggcaggaagcggcgcgcaccttccgccgccggaggagcaggtggctgccgtgcgggtctgggccccaggcttcctgtgtgcgcgctcgtcctctgctgtttcccgccggagctcgttg

SEQ ID NO: 335366 - DNA, 751 bp, Homo sapiens
  chr16:68118298-68119049
  hyper
ccccagaccccaggaggaggcgtcttgggccatctcgggaaggctagcttgctcgggaggggcagatcacgaaaacggttctttaggcagtgtcacttcctctccactgccagccacccaatttaggcggctccatccctcccgctttcatggatatgcagcaggatgcagagagcacagagctgtgattggcacgagctcacaacgggctttcccgctcaatctactcaacttccagcaagggacaggccctgcccattggggttcgctgaggcctcaaacgcgcatgctgtcaagggagcagctgcgggggcccgctagtggggacaaaggcgcagccaccggggcgaaagctccgccccgcagagggtgggcctgcggcgaccgcgagctcagagtccggacttgtcgcgcaatctgtctccttcggttccaccccaacctagctggactctcggtccggtccctgccctctggagactcagccattaaagttgaggtggggggatgaggatgtgggcggcgtccaggtaactctgaggggccctgatgccttccctagagccagccatcaggagtaacacgatgcgcccccacatcaccgaacccagaacctcagtgcttcagcaccccttcctcgacatgagctccgcccaatgaggagaagggtcttctgcattggccggtggtggtcccctatccaattagagaggctaacggccttctctcgtctggtttagaaggaatcgcc

SEQ ID NO: 335367 - DNA, 462 bp, Homo sapiens
  chr16:68269820-68270282
  hyper
cgtcccagcgcacccgccgtagccccgaagaggacgaccagtgatccgggccaggggcaggggtccgcggcggggtcggccgcggggtcagggcccgggggagggggcggcggcggcggcggagtcatggccgcagaggaagggggctctcggccagacacgcggaccgacgaggcgcacgcacgcaccgaccgaccgcagacgcggatcagcttgggcgggacaccgtgtatcgggggcggcacctgcggcccggctggctcagtgggcgctgccaagacccgcccgtggcgccccgcggggcggggcggctaccggcccacgccctctccaggcgagttacctgccggccccgccggccacgtgaccggggcggctccgggaaccttgggggagggccgccagaactcaacccaggacgcaagagctcacgctcccggcctgggcgcacgcttaggatcc

SEQ ID NO: 335368 - DNA, 636 bp, Homo sapiens
  chr16:68270868-68271504
  hyper
cgagcgctctggccgatggggggctagcgttgagcgtgtgtgcgcgcatgcgggctgcagatcctcccttttccatcccgcacctacaacccaattgacagccccgcatttggggctcccattcctccctttgcccagtggagcttggtgaggctcctttatggcgcgtttcccggccgttccttactttcccaaactctcccagggaggtgactgagaaactgaataagtgactgagaaactgaataatccagcaggaaggagggggctccagcgtggcgggaactgagtcacgcggttgcctagcccgactcgagactgagacgggagccgcaccacgcgctttcggacaaggagggtgctgcggcccggcccctggacaatggagagagcggggcacccgggcgcatcaccagagctcatgcccgggaaaggggcgaggcccggggggagagagctcagcgtagctccacttggcagctaaagaaacaggcgcccgggacggaaatgactcgcgcccggacacggcgacagggagagcatgggaagtgcttccttcgcccggcgggttcgagcgagtagcactttactttccctacaggtggaggcgggccttggtgcgcggctgtccatctc

SEQ ID NO: 335369 - DNA, 374 bp, Homo sapiens
  chr16:68504020-68504394
  hyper
cgttctgtgcagttagtggtagcgtttgccagaaaaaaataatagattgtaaaggaagcaacacggaacaaccacgtttttgttattcgaaatgcagctacacgtgtttacagtccttaaccatttcatctgacagcctggggagacagacttctaatttgtgttttgataaactgagagtgacagagcggttgttggccctgcttggaggtggagtgatggtgtggtcagaagggaagccggagggaagttacactcgtggggtgtgtgttatgtgacctttgtttaatacacgttcttatttgatcttcacaaccatgccacttggcaggtggggaaactgaggtgcagggcagggtagtcatttggccatc

SEQ ID NO: 335370 - DNA, 522 bp, Homo sapiens; identical to SEQ ID NO: 238645
  chr16:68676403-68676925
  hyper

SEQ ID NO: 335371 - DNA, 978 bp, Homo sapiens
  chr16:68678997-68679975
  hyper
cgagacagaggctgagtccctgtaaagaacagctccagaaaagccaggagagcgcaggagggcatccgggaggccaggaggggttcgctggggcctcaaccgcacccacatcggtcccacctgcgagggggcgggacctcgtggcgctggaccaatcagcacccacctgcgctcacctggcctcctcccgctggctcccgggggctgcggtgctcaaaggggcaagagctgagcggaacaccggcccgccgtcgcggcagctgcttcacccctctctctgcagccatggggctccctcgtggacctctcgcgtctctcctccttctccaggtactccacagcctcgccgtggccccgaccgggaccgctccctggggggcgggcggggtccgcatggggcagtggcgtcggggagagcgcggggctgcgctccctggggccaagggagtcccggaaggcccgtgaggaccctgcggtgtggggagtgcagggccgggcacgcctggacccagcctccttcactctctgccctcgggcgcaggtttgctggctgcagtgcgcggcctccgagccgtgccgggcggtcttcagggaggctgaagtgaccttggaggcgggaggcgcggagcaggagcccggccaggcgctggggaaaggtaagatcctcagggtggaaccgcagggtaggggccgcacgtgaccattttggtgtggaccgcgcgaggggtgttcgggccggggcaagggactcctggcgccacctcagttcccggggaggcgcagaacgcgcctcgggggctgggattgggggtggtggctgacggagaaggctgggcagcagagcgcctatgacatccagccccttgtccggtagccactgcttaccttgaccccctcctccgagatgccggatggctgagcccctcacccagtctcgacgtgggaagttctcccccgctggccccagcagaggaatgc

SEQ ID NO: 335372 - DNA, 999 bp, Homo sapiens
  chr16:68771034-68772033
  hyper
cgcgtctatgcgaggccgggtgggcgggccgtcagctccgccctggggaggggtccgcgctgctgattggctgtggccggcaggtgaaccctcagccaatcagcggtacggggggcggtgcctccggggctcacctggctgcagccacgcaccccctctcagtggcgtcggaactgcaaagcacctgtgagcttgcggaagtcagttcagactccagcccgctccagcccggcccgacccgaccgcacccggcgcctgccctcgctcggcgtccccggccagccatgggcccttggagccgcagcctctcggcgctgctgctgctgctgcaggtaccccggatcccctgacttgcgagggacgcattcgggccgcaagctccgcgccccagccctgcgccccttcctctcccgtcgtcaccgcttcccttcttccaagaaagttcgggtcctgaggagcggagcggcctggaagcctcgcgcgctccggaccccccagtgatgggagtggggggtgggtggtgaggggcgagcgcggctttcctgccccctccagcgcagaccgaggcgggggcgtctggccgcggagtccgcggggtgggctcgcgcgggcggtgggggcgtgaagcggggtgtagggggtggggtgtggagaaggggtgccctggtgcaagtcgagggggagccaggagtcgtggggacgatcttcgagggaaggagaggggcatccgtagaaataaaggcacctgccatgccaagaaaggtcgtaaataggagtgagggtcccggggataagaaagtgaggtcggaggaggtgggagcgcccctcgctctgaggagtggtgcattcccggtctaaggaaagtggggtactggagaataaagacatctccaataaaatgagaaaggagactgaaagggaacggtgggctaggtcttgagggggtgactcggcggccccctcccgggagttcctgggggctcggcggccgtaggtttc

SEQ ID NO: 335373 - DNA, 110 bp, Homo sapiens
  chr16:69760293-69760403
  hyper
cgagagacgaccgccaagcaccccgccctttgcagcactcaccgaccatggctctggtgcagtccggggcgctgattggctgggctcgtggttgccggggcgaccctggc

SEQ ID NO: 335374 - DNA, 706 bp, Homo sapiens
  chr16:71459795-71460501
  hyper
ccctgacgcccacccgcggctgaggtcgcacgctccagcctcagtccaccctggaaccctgcatttggcagccacgagagcccatctcccgcccaatcaagaggccgtcgccctggagacggaggaccccagctggggtcaccccttgcagcctcctctcccgtgcttgccggttcttgccaccctccgccgcttgcaccggacccaggcgctcatcccccgcttcccccgcgccccagcccggtcacgcctcggagcttgtccccacctggccgtgctcagagtctgcctgcccggcgtcccacacgcaccgcagggccccaccgcctcttggtgagccgcggtggctcgggtcccgggtccccaataggctgcgctcccggcaggcagctttcttcccggcgcggggctcgttccctgaggccaggccgctcagtggccgcaagagcgaccttcccacatgtccccaggtgtgcgcacaagcccggggtgagaccagaagctgctgcctgcagagcccgaccttgcgtagatgactccgcgagtgcaaggggctgcaggcattttcttacaggaggtagcaagcttgtctaagcagaggccctcttagcgcagtgggcagcgcgtcagtctcataatctgaaggtcctgagttcgagcctcagagagggcagctgttttgttgtgctacgaatgcagcaaatgt

SEQ ID NO: 335375 - DNA, 908 bp, Homo sapiens
  chr16:71659878-71660786
  hyper
ggctgtgggtcgccccgcccgggtttccagcagcagcaccccagcccccacccagcacacaggcacccctcccgcccgggccccagacgcgctcaggccgccccctgagggcgcccgttctcaggtgagctcccggactagcgcgcatgcgcacaggtgagtgcccgccccgcccccgggcttggccacctgcccaagaaacttgttggttgttgccctcaggtcgctcccgggcggggacacggaacccggccatggaagatccgtcgggggctcgcgagccccgggcccggccgagagagcgggacccgggacggcgcccccacccagaccaaggccgcacccacgatcgaccgcgggaccgacccggggacccgcgcaggaagcgaagcagcgacgggaaccggcgaagggacggggaccgggacccggagagagaccaggagagggacgggaaccgcgaccggaaccgggaccgggagagggagagagagagggaaagagacccggaccgaggcccccgccgggacacacacagggacgcgggccctcgcgcaggtgaacacggagtttgggaaaaaccgcgccaaagccggacgcgggacggagcccggggactgacctgggacgcagccgcgcctcctgggcccgcgccctgggaagccccggagccgccgcagccgcagaggaagggagaccccgggcgccgcagacccgaaaggtgagaggggccggggcgctgcgacctccgcgccggggacacctgtggcccaggccggcccgcgaggccctggcgtccccgggttctcgtcctaggagcccgtttaaatgaacaaatgccgtttctcccttctgcgctctcagaggcgacctggcagggaaggaaaactttagggttcccccttctc

SEQ ID NO: 335376 - DNA, 691 bp, Homo sapiens; identical to SEQ ID NO: 238674
  chr16:73099948-73100639
  hyper

SEQ ID NO: 335377 - DNA, 174 bp, Homo sapiens
  chr16:74659437-74659611
  hyper
cgcaatggctcacgcctataatccaaccttttttcttctgccattgacttgttgtggaagccagatcagctgtcttatagaacgcccacaacccggacttgtgtatatgctttctgtgctatcattaaacttgttctcctctattccctgcaactccagtcaatgaaagttagc

SEQ ID NO: 335378 - DNA, 349 bp, Homo sapiens
  chr16:75033799-75034148
  hyper
gggcaccggcgactccgagagggcgcccggcggcggagggtctgcgtccgactccacctatgcccatggcaatggttaccaggagacgggcggcggtcaccatagagacgggatgctgtacctgggctcccgagcctcgctggcggatgctctacctctgcacatcgcacccaggtggttcagctcgcatagtggtgagtccgcgggtggtggaggcctcggagggagggcgcgccggggcgccccaagccttcgcgtgcgtgccaaggtttgggaatgtagtgcacgaccgggatctgtctgcattccctttggttcccgatgccaagggataaatgggatacctacc

SEQ ID NO: 335379 - DNA, 263 bp, Homo sapiens
  chr16:75263542-75263805
  hyper
cgatgccgcgcaggaggtcgcacagcaggttgctgtagtgggtcacctggctgcgcacgtcagcagccttggcctgccgtgacagtgtgtccccgatgaacaccagcttgtgggcgctgaggatgacgaacttgctgtgcgccacaaagatcttgggcggctggttggtggccacggcggtaaagaaggcgtccacggcgttggtcagtgtggtcaggttggcctcacactgctccaggtagaagagcagcagctgccggtcc

SEQ ID NO: 335380 - DNA, 73 bp, Homo sapiens
  chr16:75600006-75600079
  hyper
cgttttccgccaccaacgctcccgagaccccactcctgtcaccagttccccgaacattcctgcgagcaatgtc

SEQ ID NO: 335381 - DNA, 1028 bp, Homo sapiens
  chr16:77245984-77247012
  hyper
agaggacggccaaacggggaggcctcctctttgtcctcgcagatgctggagcagcgactggcccgggagatccgtgccctggagagaagcaaggagcagctgctctcggagagtgagcctcccgcgccaggtgggcggggggagggggatgtgcccgggcctcggccctgcccctgacgcccgcccaccgacagggaggctggtgcgcgccaagctgcgggaggtggagcggcggctgcactcgccgcctgaggtcgagggcgccatggcggtgaatgacgggtgagaggggaagggaggagtgggcgaggagggcaggggcagggcggaggggaacccgcccaggtcccccgctccgcccccgactgccgcttccccggcctgtgcctccctcggcgtcgtcgggtctccgcgtctcggtggcttcctcctcgtcccctggactctcgctctcttcctcctgtctcctcggccccttctccgcaggctgaaggcggagctggagatattcggggagcaggtccggagcgcccccgaggtcggggccggcgagggagaggtagggagcccgaggaagggaggcggggcgggcagggaccgagtcaggagagagcgggcgggggtcctgggagcggcccccgagagtggggtctgtggggagcagggcggccccggggacagaggaagccgcggtggaggcctagggcagacgcgggcggacgcgaggagcgtaggaacctggtccgcagcctcacccagcccccggcaggccggacctgagctcccccgcgctcgcgacgaggaggatcccgagccgccggtggctgcccctgacgccctctaggccagcaggacccgcccgttcccgaccttccctcgagacccgccaagaaataaaggcgatgatttccgaccatgctcgcgttctccgcggagtctgtgctacaccgtggagcggggcggggcgtgctgggatctcgaggcggggcctctgccggacccctcccaccagtcgagccccgggcgcc

SEQ ID NO: 335382 - DNA, 371 bp, Homo sapiens
  chr16:77247397-77247768
  hyper
cgccactctggaggccggcatttgggacccaaatccaaaggcacccagcagcaggctgcggccattgactgagcatgtactgactaagcaggcatttgccgattgcctgctgggtaccaggcactgttctaagcactggattttaaacagcgcggtcagcgacggcctcacctaggaagtggtatctgagcggagaagcgaggtagagaagcgagggggtgagccctgtgggtgtctggggaaaggtgggcctggcagaagacatgcctcatgccaaggcgggaggtgaggctgcacttcgctgtgtttgaggagacgtctggagaaggccggcgtggtagagtggaatgaggtagagtgggatgggagac

SEQ ID NO: 335383 - DNA, 925 bp, Homo sapiens
  chr16:77468276-77469201
  hyper
cgaaaggcccttcttggggatggggggcaaatacgaaccatcatttaatccgctggcgccgctgctgctgtcactggctaaggccgcggcgaccgacgcacagcagaggcagcacagctggagcgcctgcaagagaaaaggtgacatcgcgcgtgaggggcgcggcggggctggcgtcgggcgccccctgccacccgctctcggagctccgctcggcggcacctgccttggccacgcgccccagtcccgccaggcccctcggcgggcccgaacccgcagccgggaaggcacacgcgagcaggagggcgcactccatggtcaggtgcggacgcggcggctgcgggtggccagacgcggcaggcggagcgcacgggcggcgcgcattctttccgcggccccggagctcggcgccccaggtgcggctccaggtgagagccgccgccgttcacatcgcagcgggggcgcgctgggacctcccctcctccggccgcctgcgcgccctcccttctcccggcgcgggcctgccgagctgcagtttgcggcaccccagagggtacggggggctccctgggccgggactggagcgcaaacggttgggagactgtcggtgtctgcccgcccgtctgtgcgtctgtctgtgtcggtgtgagcgtctgaggcgatggggaagacagcgccagctggctcccccagcgcgccggagccgagcgcccgcctctccaccgcgcggtgattggcgaccagcggctcccgggctcgtccgagcccccgggctggtgcaagggcgtgggattcccggctccagctctgagggagggggcgaagggggcggggaggctgggtgggagtgatagggagggagggaccgaccgccatgagaaggaggggagcgcccagggtcaggcttggaaaacgtaatttaagc

SEQ ID NO: 335384 - DNA, 729 bp, Homo sapiens
  chr16:77756212-77756941
  hyper
cggccctaagtcccgccccgcgcctctccccacctcaagtcccgcctctggctataagccccgccccgccccgatcccggcctccgatcccagatctcgcaccgccccgccccctgtctccgccccagacaccaccccgcctcgtgctctaagccccgcccctctctctggctttaggccgctcccaagcccagagctgctctgcgcaagcgcgaccgaccgagcagctccgaggagtccgcccggaaacaaacattccccagggcaatgtcacgacttggtcttcccgaggagccagtcaggtaaaggctttccgggccctggcaccccgagcttggtcaggcccggccttgatcgtagcggaggccaccggggccttttggccgggactgattttgcagctcccgccagtccacctgcgagcgccggatgggggagcactcgcctccagcaacccgcagggtccccgaacctttgcactgctctggccaggaacagagccggcttaagccagtatggtttacatacacgctgctccccttcccagccggcttggctgttctgcaatccgcgtctccagagttggaccccaggacccccgacagtggcacagacccgcagcaggcagccccggattcaagtcccccggtggctactttcagttgtgaccttgggtctgtcagtttcgtaaactctctgagcctggaggtgaccctgtgatcacttgcc

SEQ ID NO: 335385 - DNA, 1237 bp, Homo sapiens
  chr16:77822069-77823306
  hyper
cgacccaatttcccgactatcccgcccagcctcgaagatgggagggagagagggcaaccttgtcgcggtaaggcatcctccaggcccagacattagtctcggtccatttcaaggcacccgagcctgtgccgtatataaccaagtactgggcccacaggaagggggatgacagggtggtctctctaggctcgttttagtcacagatcttcggcaaatttgggtttagggccgcgatcccgaccctaacttgggactatttcaggaactggagttgaggcttcgttgggacaggaaagaagggtggggcgggggtgaagcgcttagggcacggctcttgtgaggattacggcggaggctgtggaccgcggcggcgctcgcagaggctgcagccattgcacagccgagcatcccacattcaacaggaggaacccgcgggagaggagccccactcccccagcgccgcagccaccgcagccaccgcagcccgtgcgccccgcgccctcgagcgccatggccaaggaaggcgtggagaaggcggaggagacggagcaaatgatcgagaaggaggcaggcaaggagccggcggagggcggcggcggcgacggctcgcaccgcctcggggacgcccaggagatgcgcgcggtggtgctggctggcttcggggggctcaacaagctgcggctcttcaggaaggccatgcccgagcctcaggacggcgagctcaagatccgcgtcaaagcctggtccagtatccgcgcctttctcgctttctctctttttgcgcgctgggcgctggggagggggtgggaaagctgcggctgggatgctgcccgggtagaaccgccgcgcgcaccccctccgcgccctcacccgggtctcagagcctccccgggccaaagctggggaggatgcagaggggcggcctccccaagccagatctaggggtgacgggaggagaatgtgagctcctgggcgcggggagaatgctggcgcccaggcaccccgggtctggaagattgcgctacgggagttctccgtctgagaggacaactcagctttcgcacgggagggttgatgcttaacagaattaaaaatatatgtattaagaaccgcaagcccactgtgtgccagccgccgttggtagttttacacgtgcgatcttatttaatacttcctgggacctaatgagtcaggtgccatcatgatccgtttacaggtaagaaagccgccgctcagc

SEQ ID NO: 335386 - DNA, 337 bp, Homo sapiens
  chr16:78079828-78080165
  hyper
caggccagggaaggacaggccgggcaatgggcgcggagacgaaggggccggacagcggcgaggcgctggctccggtcgcggcacccggctgctgagggcagtgctgctgcttgggacgttccaggcgaccaagtaccctcggcggccctggcagggcggtgcctggggtgggcgctgggcctccaggcctgcagccacgcttggcgctgtccgctagggccaggtgctgaagtgttggccgcgagcggagctgctgcagcgctggcttccccgggccgctgcgggtggacttggacaacataaagggctgattgagcggggccactttttcgcccgc

SEQ ID NO: 335387 - DNA, 315 bp, Homo sapiens
  chr16:78322882-78323197
  hyper
cgcagtgggaaggttctgcttttctcacaaattctcggttaacacaaggcgtgccaacagctggtagagcgagagtcagggtgccaggctgaaatggagtggaaggcagccctggctggaagtcttgctgggaacctggagcgctgggaggtaaaactttacttggtgctggcagcgtcactatgccagtctgtttcttcccgagcttcaggccatgctgatgttcaagttgaataaatgagagctaatgattttttaaggcgtttttagtgaattgccgtgggaatgctaagttggcaagaataaaacctaggc

SEQ ID NO: 335388 - DNA, 2829 bp, Homo sapiens
  chr16:79632619-79635448
  hyper
cgagccggacccccgcggagcacttatcagggtggctagctggaatcgcgtgtcagactcacatgaaaaactcgggagaggacgggttgtcgctgctcgagccgttttctcggaagccgctgctcaccaacttctcgtatttctccttgtacgcgtccctctcgcgcaccagcctggagatctcctgcttgaggtggtcgacttgctgcagcagctggttcttctccgactccaggacgtgtctctgctgcaccctcttgaagcggcaggactgggcatagccgcggtttttcagggtccgcctcttctgcttcagccggatcacctcctccttgctgaccccgcgcagctgccggttcagctcgcgcacagacatggtcaccagctgctcgtcggagaagcggtcgtcgaagtgcaggccgccggcggcgtggtgcgggtgcagggcgccccccgcccccgccgcgcccccgccgcctccgccgccgccgccgccgccgccgcccccagcgctggccgggccaccgccgcccgcgcccccagcgccaccggccgaggcggccgcgctgcccgcggcgccgggcgcgccggccgtcgggtggtggtggtggccggcggcgtggtggtggtggtggtggtagtgcgggcccgcgccgctctgcgcggcggccgcggcgatcacggcggacaccacggcggcggcggggcccatctcctcgccgctgccgcccaaggaggcgccggcaccggccccggccgccgcggccagctgctgcgccccgcgcgcgtagccatcgaagccgccctggagctggtggctgttgctgatgagcgcctcgaccgcgtcctcggggctgaagcccagcgcctcggggttcagctgctgcgggtagccggtcatccagtagtagtcttccaggtgcgccttctgctcgctgcccgagcccgggctgggcgccgagaagctgggggaagggggcaccgagctgcacggcgtgctcatgggggtggaggacagcgagcccccggcgatgagacggccgcactggctgatgatgcggtcggtctccaccggttcctttttcacttcaaacttcatcagatcgaagtcattaacatattccatggccaggggactggtgggcaggtcggagttgctcattgccagttctgatgccattctcctgccgccgccgccgccgccgccgccgctccgccagatgggctgcaggagaggggccagcgggctgtgctgggtggccagcgggtgagccagcttgccgggctggggcgcttctagcttgcgcggcggtggctggcccgaaacctccgagcgcgctcacacacacacccccccgccctgcccgcgccccccgcgcccgccctccctcccccctgctcacgccaatgtgctccctcgctcgccccggcccctccttgctcgctcgcctccttgcgcgccgagccggcggcttcaggctcgggaagatcctccgcgagctgcggtggcggcggtggtggctgcggcggcgaagctggaggagcccggcccggtgcgcggcgtcccccgctcgccgctccgctgcgcgctttgcataaggaagggctcgcctcgccggcccgggctgcaggcagggcgcgcgcggcgtccgctcggggctggaggcgcggcgggcgtctgtccgggcggcgcgggccttggcacgggggagttaacacttcatgcttctcgcctcctcttctgcttggctctctttattattttttttctttcctctctctccctcgcgcgctctctacctctgtgcaaagtgcaaggcagaggtgcagcccgactggaggagagggaggggggagtttagttctttcttgcctttttttaaaaaagcaaaatagcgaagtcctggggaaagacgaggcagagagcaaaggggggagggggaggccaagccgacaagcagcccgagctacagctagaagatgaaaaaagattttaaagcctctgatccagcaagaagagtttaaagcaattgctgagttttatagcactcgtgacgtcaggtccaaatgagaaattgactggcactccgggccaatgggaggcggcgagagcggccgcgattagcataatagtatagaaacaaggaaacttttcggagctgtcaatcagggcccaatcagctgactgtcagctgggacgggctggcttaacccttcctgcgccgctgcctacccgggagggaacgaggcccggcgcaaagtttggtgtaagaggggaaggagtttttccagaggggcttcggcaatccgggcggacctgggagggcggtttgcttttctttggagcgcgagacaggcctcccatccggagccccagctcgctgggggctcactcggctgggattggcctgattcccctcccctgcctgccctccacccccaggattgtgaattcgcctcccagcttttcctcctcgcaccaactctggtacccaggtgtctgccggggaccttccttccctgagcctggccgtgcccggcgctcaaacttggccccaactctttgtccgtctctcgggcgcccgtgcggggaagggaccgggaagggagggatgcagtggggtgtccggatcggggctgcgggctgggcgccgcccggccatgcgcctgcccagaaggctgggcatccgtggagagggaaagcccattttatccctctctttacaacgaggtaaaataagttgtttagaggccattcttcacggagaccggctgcccgctggcgtcgcgtgcccttggacagagcgagcgcctatgcgagataactcc

SEQ ID NO: 335389 - DNA, 536 bp, Homo sapiens
  chr16:79804157-79804693
  hyper
cgtgtgtgcgtgtgtgcgtgtgttcaagggctgggggctcaattgtgagaggtggcccaggggccggttagagactgggaaggacgacagaggcaagacacgcagcgagtgctctcgcgagagttcaccgagttgataaaattattaaaacacaaaatacacatttgcgtgagggggaaaaaatacccgcttgtccgtcctgtcccttcaggctgcgcaacgctggagggcgatgggagctccacacaggtgggacgagcctagcaggtaaaccttccaccggcccgagctccgcgacgccgcgcccccagccccgccccgccttaaaaaaaaaaaaaaaaaagaagaagagaaagagccgccgggagaagcgcggacgccgccgcttcccgggctccagccgcggcccagaagaggaggagcccagacgcccttcgcgcgccattggtccatccgcctagcaacagccgcggccggaccaatgggagccgcgaagcggccggccccgctccagaaacttggctgcggagaagttc

SEQ ID NO: 335390 - DNA, 583 bp, Homo sapiens
  chr16:80574541-80575124
  hyper
cggtactgtttcgtgcattttgtttggtgcattttgtccgtctccctggcacctggtgggtggtgaatcagcagtttttgaacgaataagtggttatcacattaattcgtgcctcaatgaatgaatgaatggacaaacacaggccgggagcctgacccacttccctcttccctcccgggacccactgctccaggattgggcgaacctcaggtgagcgcctgctcccctcttccgcgaaccttcgcctacggcggccgggaggcatcaggagcgcggtcagggcgaaaaagccgactcgcgagcgcgcaggcgcagccctgacgcttccgtggggccacttccttttttgtctcctagcaacggcgggtagcgttgttgacatcccgggaggctgtgccgccggcctgagcccagagtttcgcggcctccgcgatggtaaatctggggtctccgtccacgccccgccgttccaagcacgccgaccgtcaaggaccttcgcacccagcttctggggcccacccaggcacgggcggtccaggggccgcggcggaggctggtggctccaggatcttcctggaggggc

SEQ ID NO: 335391 - DNA, 1630 bp, Homo sapiens
  chr16:80837325-80838955
  hyper
gcagcgccccctttcgcccccagggagcacgacacccgcaagggccacccccacgcccgagcccggagggcgtccgagctggtgcgggggcagcaggtggggggtgagggaggtggcccggggaccccggggagcggtttggcggttgtccccccgaacccccacccagcctcccccttcgcagccccccgggaccccgcctcgccccggccaggctccgctccgatcgcccgcccccctcctcccccgcgcccccggcccagccgggccgcgcaacccccgccccacacccccgccggccgcggcgcgcccccccgcattcccagcacgtccggcgccgacttttacctgtactttctgtactcgaggcggctcgtcgggcgagaaacacctccccgggaccgctacctcccccgccccggctccgcccggcttcctccttcccctccaaggccgcaaagtagatggagtaagagagtgtgtgtgcgagagaaagagaaagagggagcgggcgcgggcgccgcgggaggcggcgggcggcgggcggcgggcgggaggcgcgcccggcccccgccaccctccggccgccgccgccgccgccgcgggctcggcaactccggattgcgcccggccccggccccggcccggtccccgccgcccgccgccgccgcccgccgccgcccgctgactggggccggcccgcgcccccgcgtccccgtacctcgtaaaggtccccagaagccatgccaggctgcggaacttggctcgccggtgtgcgcgtctgctcgctcgcgccctccgtgcgtgtgcgcgcggggtccggtgtgcgcgtgtgtgtgcgcgcgtgtgtgtgcgagtgtgtgtggtgtgttgagtaaactgtgtttttgcagaatgacaggcttgggggctgcctatgcgcagaatcagagcgggcggcggcggggctggcgtaaccggcagcagcggcggcggcggcggcggcggcacgagcgcgggcagcagcgacggccgcgcagcgcgcccgggaggcacggacgcggcccgagcgccgcggcccccgcgacccggcgacccggcggcggtggctgcagccggcaacggctcgccccggcgccgcctgcaggaagccgcccggcgcccgccgccggcccggacgctgctgccactgggcgagtccccgccccccgggagcccggcccggcccccggggcggggaggcgggggctgctgcccggccgcgccccgggggaccggtcccagagtcgactagcgctcgggcccgccccgccaccccgggccggcttcgggagcagctggcggggcccccggggggcggcgggccaggtgcccgccgggtgcgcccgatctggggccgcgaaggggcggccggggagccaggtagagggctgcggctgcagacctcagggaaggggccccagccgagccccgccggcccggggtccccacctacctcctccaccctcgaggggagtggacgccgcctgggagacctggcccctcggggctgcgcggcccctccctccaggctgggttgtaagatgtggaggccacagggaggaaggatgaaatggcccatccagaggcaccatggggatccaggacaggc

SEQ ID NO: 335392 - DNA, 348 bp, Homo sapiens
  chr16:81779788-81780136
  hyper
cggcctgctggataaagggaggtagaaacgctttcagccctccccggtgcttcccggtttataacttcatctactcgtgacacgtgggggtccgccgccgccactggcagggtgccttgagtgcttgagttttcgcccccagcacaggtggagaacccaactcccagaaaacatctggggcggaaacggaagcatggccgcagcggtgaacgcactgcattctgggaaatgtagtcgaaacggccgctggggcagagtgagcacccacagtggtgccttctggggagggtcgttttcacgtagtccaagagccaggggtgggaaccgcggggctctcaccccagcgcc

SEQ ID NO: 335393 - DNA, 83 bp, Homo sapiens
  chr16:81813415-81813498
  hyper
cgcggacgctcggagccacacttccctgtctcacttcggtggttgcgggtggcgggtgggagcgataccgcgggaggcgcagt

SEQ ID NO: 335394 - DNA, 987 bp, Homo sapiens
  chr16:82660825-82661812
  hyper
cggggggtcggggcctccggtcgcggcggcgaagacagatcggggctcggtagggaggtcattccgagcccagagatcctaggcaccccccacacacaggctcccactctggcgtgcgtgtgtgtgtgtgtgtgtgtgtgtgtgtgtgtgtgtgtgtgtgtacgttcgttaacgggaggaggagagagctcccagtccttttttgctagcaggggcgacattctcgcccacatcaagtggggtaactttggttccctcctccggaggctcggtgcattggagaaagactcagttagaggcgactccaacgagccgcggttttccccagcccaacgcccagcggccgaagcgctgctcgggtccggattgcgggatgcggggctggagaggccgagcaggcaccaccgacttcccagggcgcccgggccccctggtacagcccggctgcccgctggaaggcgcctcggggcagcagagagcctcagcccggctgctgctgtcgctcaaaggcgccggcgccggccgcacccgcatcggggtccttttgctcccagaccccgggcccgaaagggccggagcgtgtcccccgccagggcgcaggccccagccccccgcacccctattgtccagccagctggagctccggccagatcccgggctgccgcctctgctgccttccctgagcgggagcggagcgcagagaaaagttcaagccttgcccacccgggctgcagctgcttgttaaccctcagagcgccacggcgcgagggaagggcacgccaaccaggagagggggcgagggagatgcggtccgcctgcagtcacctctgcacctcagagatttcgggaagtttgagtgcaggaaagcagcgctccgaggccaggcctggggtgctggccgctgcggggggcacgccctgcgctgctcaggggcctgtggtttcggagagcaccccgatccagtcccccatcgcctctctggcaggc

SEQ ID NO: 335395 - DNA, 160 bp, Homo sapiens
  chr16:84328207-84328367
  hyper
cgccccagcctgcaaggaagtgctcattatggagagtggagagtgacaggccactcccggccacgtctccaagcaagccggtgccccctcctcctgctgccaccgcccactgagctgcctgggctgcagacgccctggttggagcgtctggggccagatg

SEQ ID NO: 335396 - DNA, 849 bp, Homo sapiens
  chr16:84650982-84651831
  hyper
cgccatgcgccaggggcaccccatgtggccaccggttcctcccgggttcgctctggccggggctccccgggtgcagacaacctcccaacgaccgcgcatccgcccggcaggcgcgcctccctacctgtgcactgctggatgaagtgctggtactccgctccctgctcgccggggacgatggtggagccgtcatatttaaaagtcaccctttgggttgggagaagaaaaaaacacacacacacatcagcgctggtggccgcgcgacgcggcgcttgcagaggacaatctaacagacgcgctggccacggagaagcccgcgggggcctggcacgccgtcccggaataaggcgaggaagacagcgcgggaggcccgaatccgtcccgcctggaggccggctcggtgcacgaggccccgcgcgagcccggggagcggggcgtggagacgaatgaaaagttcctaccagatgacggccgagccgtcgtcgcgcaccaggttgtacgccgcccggcaagcctctttgtcgatcttggtggccatcgccgcggagccgcagcgggacactgtccggggcggccgagcgcgcccctggccggcggcggggatgggagcgcggcgggtacgcgccgagggcgcacgggctggcggcggtggcgacggctacgcggcgcctgcaagctgcgagcgcggcggcggcttccactgcggacggagagcgcgcggggaccccaggccgtggcccgccccgcccccccgcgcccattggccgcccaggcggcggcccgcctcttcattggccgtcgggctgcgggggcggagcgtcttgattctctggcggccaatcccagacc

SEQ ID NO: 335397 - DNA, 503 bp, Homo sapiens
  chr16:84853348-84853851
  hyper
cgagggagctgagcgtctccttgtccctagccggccctggaggccagcggccccgccttcctcgcccacccggcgcccgcgcctcagctgccccccgcctccttcagcccgctgagcctgcggggcggggccgggggcggggccggtgatgctcggtcctaccagcgccgccagcgatctgggggcgtggcctccgggctccggggagcctacaagaggcggtacgctgagccccggcacccactcgcatcccagggcgtctccggctgctcctattgagctgtctgctcgctgtgcccgctgtgcctgctgtgcccgcgctgtcgccgctgctaccgcgtctgctggacgcgggagacgccagcgagctggtgattggagccctgcggaggtaagtgtgatttccatgcttctcccttttgcaaactgttacccccccgagaagctggaataactaggacagatgccacctcgcagggctgactgtgtgctggcaccacacc

SEQ ID NO: 335398 - DNA, 1143 bp, Homo sapiens
  chr16:85202563-85203706
  hyper
cgcgcgcggctccggctggacacaaaatagatagaggagccggccgctattgtgcgcagtttgggacgcggggggaggcggcggcgggcgggagggaggcaggcttggaggaggagggcggggggagggagcgcgcggggagggattcccccgcccgccgcgcgcccgccctccgcccctccccgcccctcccgcccgccgccgccccgccccctcctccccaattaaatgaccccacgccttggcaggcgccggagctcgcacatgcggctgccgctccagccgcccgggccccgccgccgccgccgccgccgccgccgccgccgccgcgttccgggcgcgctcgccgcggcgccgcctcggcccgcgccgccgccggggggtgctcggcaggcccgggggggcgccgctgcgaggggccgtgcgcccgcgcccgcgccggccgcccgccgccaaactttgcggcgcgcacacatgctccaagttgggcgcggcggcggcggcctgggcgggagctgagggcggcccggggcgcgcgggggcccgggcgggcggcgcggcgcggccatgagcgggcggccggccccggtctcccgcaagcagcggctcatggcagccgtgggcgagcgggctgcgggcggcgcgccgctctcctgcttcatctgcggcggcggcatcgggcgcggcaaggagctgaagctgcaggtgaagcagccggcggcgggcgcggggaccccggcgcagcccttcttcccgttcctgcagcagcaggagccggcgcccggcgcgcgcgagctgtccccggccgacggctgcgtgttggtgtgcgccgtgtgccgctgcttcctgggcgagcagtgggccgccttcgagcgcgcccgcacgccggtggacaagcgcatgtactggctcaagcggccccaccagtgcgacgcgggcgcaggcggccgccgtggcggcgccggggccccccgcgagtggaacgtcgcctacgcgctgggcagcgccaccggcgacgacgacgaggacgacggtggcggcccccggctgcgcggggccgcggaggagacgcgagactccgacctgtcggagctgtcggacaccgaccccctttccgagcccgacccgcccgcgcgggacgcc

SEQ ID NO: 335399 - DNA, 772 bp, Homo sapiens
  chr16:85590112-85590884
  hyper
cggatcctcccgctgcggtcaagcccgcggtgtgcgcggctacgtgcggcggggagcgcccacctggcccgccgcccccatcgcgccgccgccgggggttgcgcgtctcgctccttttgtctgccgggagccggctccgccgcggcggcggagcgagcggccgaggcacttaaaccttccaaggtgaagtaagcgccgagtgtgaagttactttcctgcaggccgccccgatcgggtagcatgccccccccccccccagtcctggggtttatttccctctccctccagccaacccccttgcgcggtctcggcgcgagcgtggctcgccggcccccccgccgccccccttcctgcctgggattccctggaaggttttgttccgccgaggtcggaggagggggccggggaagctcaggagggtatttggcgtggcttcctgtttccttaaccttcctgcgcggtgacagccgcttgccctgtaactttctgtttcggggcaagtcgcgctttcagcctggaggggaggggaggggagggggttgacagctggaggtttggggagcccctcctgaattcaccttatttggatttctaaaccttaaaaaaaattaagtgtaggctacatggaagctggtgatccaggaattcaggcgagggagccctgggtggtgaaccccagggttcttccccaccgcgcgccgtcacccccactcctgtgccccctggggtcggggagaaacgcacaggcctgccccaggtggggccacgtgac

SEQ ID NO: 335400 - DNA, 859 bp, Homo sapiens
  chr16:85932121-85932980
  hyper
cgcctagcaccttcgatgctcctgtttcagtcgcggtctcagcgggcagtggcctcctttgaagctgggattctcctgcccctcccgggcagcgcaggccaccggtgacccgggacggtctgtaaacgaccttcgcgtccccgtccccgtggaataacgcgcggcgggcatcactgcccaatatccagcgctcgtgaaggcggagaccggcggggcagctagtttctggctgtggattctgattaatgggccgcaggcgcacggtctgcaccgtccggctcgttgctagtggctcgctcgggagccgccgcactcccggggctgtccgcccgagccggcctggaaggcggaggacgcctccaggtcgctccgcggggcctccggaattcctgggaaagcccccctgcagcgccgcccctggaccccaggtgtgaggagcggggctcggccagcggctccagaagaggcccggaccccactgccgtggctgccgggggcgggaaagtgatttctcggaaagcagagcacttcgaagaaggcgggccgcgcgagccaagctgacgctattggtcggtgtggccgtcgctctgcgcaccgcccgtcccccccacgaccctttttaaggccgcgcgaccgctggcgcatcgcctggagcgcggcagcaagcgtgggaacgcgggcggcgagacggcggcaggacggcggcaggtaggcacagtgggcgggtagggcgcccgtgtcccgcgcggtccggtcccgcggggtccccgacgccaggcggggcgtgggggtggaactacctaccgtaatgtccccgggcgcagctcagtggccacccgtgtccctctctgctttttgc

SEQ ID NO: 335401 - DNA, 1058 bp, Homo sapiens
  chr16:86530886-86531944
  hyper
cggccacctacttcgtcgggaaagacagtccagcgcccaccggcccgtgctcgcccgcctgccgagccccgagtcccggcaacgcgccccgggtgctccggtccactcggcacacgccgcgcgcggggctcggccgaggtggcttcgggtggctctgaagcctcggtcttcccggctcccaggacgccccccccgcccccgcccctccattcagcctgtcatctcggccctccgccgcctccggagccccgacggaggtgctgagttgtcaacgcaaattcctagttaagccacttgttgataaaccctctaggcaaattggttccgtctttacctgcccgccccgcccccgcccccggccccagccggcgcgcccctaattgctggaggagctcgacgccggcggcggcctctgcagcgagctaattgagttggaacccgagcggtcttcgttaagccggacgcaaggcggggacgggggaagggggcgggaggtgagacgcagcctgggacctccggcctggggttggaggcccacgcttgctggggtgggcttttggtggaggaagagcaatcatgcggagggctctgccgccgggttaagtggacgcagcgactatctggcggttctcgggggtctgcgttccctggttcacaaccaccccacccccacgcgcctgtgcacatgtccctcccgccgcgcagggtctccgcgggcgcgccccgccccaaatagagcttactacagtaacccgggagtctcacatctgcgcgtcccccacccgcccacccccgcaccgcctgtaccccaatttcggcccgcacccgaccaaattttaaaaattgggagggttttggggactgcaatggaaaatcagctggccccggccccagactccgtctacactggcacagacaggtggagtacaaagccggcttcctggatgattcaggccccaaatcgtaggtagaaatgtgcaagtaatggaccttcgatctgctttccctcccttagcacataatccgtagtattcgctgtttcccgttgcccctataga

SEQ ID NO: 335402 - DNA, 760 bp, Homo sapiens
  chr16:86532210-86532970
  hyper
cggcgggagacgcgcggggcctgggtttccagaaggtgcctccccaagggggcgggccccgggtgcaccccggtgccccgaggccccccagcctgaaggcaggccgaatccgcccttgaccaagtcgaggccaagcgagtgcgaaaaaggcgtgtatgaggggccccaagaccttttcccagcctgaaaagttttcggcgttgcagctctggcgttcctggaccccgggcgctcaggcgcgcacccctcccctgggctggtgaaggtataataaacacggcgttcacgccggcaggacccatcattagcccaaaccgcggtggaaaggagcgctcggttgcagagctagaacagcagttaccagccggggctgcctggcaccctcccgccgccgccggcgccttcctggccgccgagctgcctcgcagccaggtcccaatgccgaccccaaggcgtgccgcccctggaacccgcgggggtcccaggtccacgccaaaagaaacgcgctctgcttctcccgggcgtcagatgcaccgcctcggccggacgccagccctggacaaatttttccgggaaggcgacgtaaagaatgtcagacttgcaaaaccagagtgcgcctcggttgcttaaaatggagagagagagagagagagagaagtcaggggcaggtgggcagcggtggaggggcggctgccctggagtcacggacttcagcagaggcggcttagcaaaaaacgcagaaaaacgtgggggcggcagc

SEQ ID NO: 335403 - DNA, 142 bp, Homo sapiens; identical to SEQ ID NO: 238736
  chr16:86539364-86539506
  hyper

SEQ ID NO: 335404 - DNA, 890 bp, Homo sapiens
  chr16:86542053-86542943
  hyper
cgagaggcgggtaggctttgaacgcgccgcgccgcgggccgtgctgcgagcccggcacacgcctctcgccccagctcgcgctggggcttggcctctaggctcttcgcgatgacccgcgaaaacacccctcgcccccctcttctcaactcggaaccctggagggagaggccgcgcccggccagcagtcgctgcgagagcagcactcacctgggtctgtgcgcgccgcgatgcgccggggctcctgcgctgtcctgcgctccgctctcggcaccacctttcgtggctccaccgcccccagcccgcacccgagcgctgaggtggcaagggcaggtctgcgtgcgagccccctgcgggctggcagccaggtgcgcgagggccgcccttgccggcgctcccagcccgcgctgtctgctctcaggaacctggcctggcgcgcagtgtcagaggccccgcggcggcggcaggccgagcccacaggggcattaggccaactcccccctcccgccctgcgcacgcggaattctctattattattattaaagaatcccccagaacttgtttacgttaaaccctgtaaacttcctgccagggcctttgccatctctcgggaaatcggaacctgcgctttgaaaacggggccgcggggccaaataggcgggttttcagtgtgtgttgggggtgggggagggcaactgaactacgtgtgagttcagatccgagcgtggcgtgtgtacgcgtgagtgggagtgagtgcgaacttaagctcctgtgggccttaagcttccgtgtcaacgagtgcattagtgggtgcgcacatgcctgagcgccctctgcatatgagtgtgcacacacgcatgggtgtgtttacacgtctgtttgcgtaatttacc

SEQ ID NO: 335405 - DNA, 1367 bp, Homo sapiens
  chr16:86543378-86544745
  hyper
cgcgtcggggaaggccccggcccagggagcgtttcccgccgcgccgcccgggcggggaaggcggggtccagcgcgcaccggggctgaaccgcgggcggagggcgcattaacacttgctcgccaggttggtggaggcggggcggattctgctggcggccgcggggcggcgagagtgggggctctttaagcgcccaccaacgcgggggcccgaggggggcagggacggagggagggaactccgggagggtcttaggccgacccgcgagacgcagccgagcggagatggagtgaaggctgcctcgcccggaatctcggagccgagcgccgcgggcggcggggactcagggctgctcccggctggggcgcacggccgtaagacctggaggtggtgcctccccccaaaaaataccggcgggggtagcttcctcacggccttcgcccgggctgccctcggcctcagctcggctcctttccttgtgggagggcgagaaagaaagagggaggagagaggtgggggaggcgggagttggagagagaggggctctgagccaaccgccggcggatccagcagctcctcggggagggcgggcgggagcgcgggggcgggcgcgccgcggctcgctcgggagaagtggccgccgatgacggcagaggtgcagccagccccgcgcgcgcagccccctccccttcgccctcctcccccccgtcgtcctcttcctcctcctcctcctcctcctcccggcccgtccgcggcgcagagcagcggcggcagcggcggcggcggcagcagccacccgatgtcttcggcgcccgagaagcagcagccaccgcacggcggcggcggcggcggcggcgggggaggcggcgcggccatggaccccgcgtcgtccggcccgtccaaggccaagaagaccaacgccggcatccggcgcccggagaagccgccctattcctacatcgcgctcatcgtcatggccatccagagttcacccaccaagcgcctgacgctgagcgagatctaccagttcctgcagagccgcttccccttcttccggggctcctaccagggctggaagaactccgtgcgccacaacctctcgctcaacgagtgcttcatcaagctacccaagggccttgggcggcccggcaagggccactactggaccatcgacccggccagcgagttcatgttcgaggagggctcctttcggcggcggccgcgcggcttccgaaggaaatgccaggcgctcaagcccatgtacagcatgatgaacgggctcggcttcaaccacctcccggacacctacggcttccagggctcggccggcggcctctcgtgcccgcccaacagcctggcgctggagggc

SEQ ID NO: 335406 - DNA, 606 bp, Homo sapiens; identical to SEQ ID NO: 238743
  chr16:86599307-86599913
  hyper

SEQ ID NO: 335407 - DNA, 389 bp, Homo sapiens
  chr16:86609636-86610025
  hyper
cggggctggggcgcaaagccggagttctacagctgaaacctcccggagactttgcacacttctgcaaacgcgcggggctgggtgtgcgtctccaaaccgcgactagagcgtgggcatttgttttttgttttttggtttttctctctctctcctaatctctctctgtctctttctcgctctcttttttttttttttttttttgctttactatcggtgccccgcccaccagcctcccgtgtctccgcccacgtcccgcccattaccaaatcgggcagtatttatcaccgtacaaattcaagctcggatttgccttagagtttagaagacgcgccgggacggcgggagtttcggtagaggcagggatgtgcgtgctggacttcgggtgccgc

SEQ ID NO: 335408 - DNA, 546 bp, Homo sapiens
  chr16:87417704-87418250
  hyper
cggcgaccacttcgcgccgcggcttttgtggagataggggtcgcccctcgcgcccgtgcgtcccgcttccggcgcccgaaactgtgccgcgccggccggtgagtagaaagatgcgccttacagcctccaaatacagaggcagcagccagaaccccaaagggcgcctagaagcccttttgtccattgaaacaacgcgcgttccatcgtctccgccttatggtaaccaaaaggcccgagctgcggagctctgcagggaccttcggggatcccgagctccctgcggaagccccggggagggcttggaggggcggcggccggcgcggcccaagagatccggggatgcgcgcccggtctggaaagggaggccctgccatgcggcgccgcccaaagggcgcctgttcctgcagctgctgggagccgcgcacgcctgctccagctgggctccgccgaggccgctgagcggggtcgtctcccaggtccgcgggtggtgaccgcgaaggcgtcctctcacctgagcagccgcgcacgtcgccgtgggctcgcctc

SEQ ID NO: 335409 - DNA, 868 bp, Homo sapiens
  chr16:87525633-87526501
  hyper
cggccgggttgttggccttgatctccgagtcgcgcagcgagtggtagtccttgcgggccaggtcctccaggcacgagccgaggaagcgaagctcgagcgggatgcacaggtccagcaggccgcacaggaactccacgcgctgcggcgacggcagctccgagaaccagcggtacacgccgtccctctgcagcgggcagcgcttctccaccatgctgccgcccgcgccgcgccgcgacccggggccggggaccgcgcgggggcggccggggggcgccgggggccgcggccggggcgcgccgggaccggggacgcgcgggccggggccgggtccgggcgagggcgcgcgggcgccgcgggccgggcgggcgccggggcgggggcggggaccggggccgggcaaggctcccgtcaggggccggcgggcgggcgcgcgcggggcgccgggggggcccggggcggccggggcggccgggggcggcgagcggcctcgggccccccgctcacggggaggcgccttccccgcgcccgtgcccagcggcggccggtgcgcggcggcggcggcggctgctcctcgtcgtcgtcgtcgtcgtcgcccgggaggcggccgcccccatctccccccgcgccgcagggtctgtcactgcgggccgccccccgacggagccgccccggccatgccgtcgccgccgcccgcgcctccgcccaggccggccgttaccccgggccgcgggcgcggcgtcgccgcctggggagcgctgggggccgcggccgcgaaacggacgctggagggggagggacgcgcggcgggaggcgcggagggatccggccgggacttgccggccttgctgctcccgcgcggcggacggat

SEQ ID NO: 335410 - DNA, 505 bp, Homo sapiens
  chr16:87526565-87527070
  hyper
cgccggccgaggagcggagggatcgtcgcgctcgcggctgacgggcggccgggatcagcagaagtgggcggggtggccgcctctcgcgacagcccgggcctgccgggcccgtcccccccccactgattggctcaggcggcccgttctcggcccgtgattgtgccgggtccccaatcccattcgcccgttccgcggccacgcctccctgggggctgtcgatcatgttggggccaccgcctcccgtccctcggcggccgtcaagacgcgattggtccgcggaatcggagaggcggaaaacccgggctggatttctggttgcttttgttcccgcaaatttgcgtggagcattgtttttcggcgaaaacggggcgttcggccttcctgctttatttttgagcggtgtaagagggaggtagtgggtatcttcgagaaacggccgccgcggggtccggagccccgggttccaatcccgggtcggccactgcaaagctgtgtgaccttgggc

SEQ ID NO: 335411 - DNA, 1491 bp, Homo sapiens
  chr16:87635912-87637403
  hyper
cggggagcgcggggctgggggcgcggagggcggggcgcccggggtccccgcccgcgcgccgcgccctagcctgctgggccgcgcccctcttgggaccgccgcgctccgggggcgggggcgggggcgggggcggggggcggggggcggggggcgggcgggggcgcgcgggcgggcggggtgcgggcgcgcgccgcgcggcccgagcgcgcgagccgggcccggagcgcacgccgccgccgccaccgccgccgccgccgcccgagccgccgcattgctgctgctgctgccgccgccgccccgcgcccggcccgcggcccccaatatggtgcagccgccagcgccgccgcccgtgccgccgccgccgcccgcgggccccgccgccgccctcgggcgcccgcagcgcggcagccgcaggtggggggccgcggcccgggcctgagctgccccccgcccggcctcggcgcggcgccctccccgcggggctgccggcgaggggccctctcgccgctgaggtggagccgcgggccccgccgccgccgctcctgccccctccctccctcctcccctccccctcccctccggtcctgtctccagcgggagcgcgagacgctggtcaggctccgcggcgcagctcgaaaaggaataatcgcccccgattgactgaaattcctccggagccggcgccgcggccgcccgcgcccgagaccgcgctccggggccgcgtcctcctctcctccggaaaacgctcgcgacccagggccgccggcggccgcgactctgctgtgtcgatcgcctgagtccgttttcaccgtttgcgggatctggaaccgagttacatgcatgtccagtgggggcaggtttaattttgacgacggagggtcctactgtggaggctgggaggacggcaaggcgcacggccatggcgtctgcaccggccccaagggccaaggcgaatacaccggctcgtggagccacggcttcgaggtgctgggcgtctacacctggcccagcggcaacacgtaccagggcacctgggcgcagggcaagcgccacggcatcggcctggagagcaaggggaagtgggtgtacaagggcgagtggacgcacggattcaaggggcgctacggggtgcgggagtgcgcgggcaacggggccaaatacgaagggacctggagcaacgggctgcaggacggctacgggaccgagacctactcggacggaggtaggtgccgcgggccgggccgggccggggcgggagggacgtgcttccgatcgcgccccttctgtggatctctggggaagttgagctgcgtcctccggttgggccgtgggcaccaggggcctttcccgggcttccctggaagccacggcggctcctggctacaggttgccccgctgcctggtggggacagtgcccctgtgccagctgaagggtgttgggggctttccaggggcagagccaggcggggcccagcagagcctccgtgcgtc

SEQ ID NO: 335412 - DNA, 490 bp, Homo sapiens; identical to SEQ ID NO: 225160
  chr16:87902836-87903326
  hyper

SEQ ID NO: 335413 - DNA, 83 bp, Homo sapiens
  chr16:88292860-88292943
  hyper
cgcccccccgaagcgggccagagaggtgtcctcggtgggtcaggaagggtcgacgccccctccttccctcagccgcatcccgc

SEQ ID NO: 335414 - DNA, 474 bp, Homo sapiens; identical to SEQ ID NO: 225163
  chr16:88496876-88497350
  hyper

SEQ ID NO: 335415 - DNA, 259 bp, Homo sapiens
  chr16:88519038-88519297
  hyper
gggcgtcaaggcctcgggcttcctgagccggttgtcactgcccccaccgcgcacgtggagcgtgcggcagagcccaggggtctagggagggaccaagggctgggggcggagttacagtgcgggggcggagcctcggcgtctcaggacccaaccaggtcgggtcaggtttggaggcggagctggcgccgagaggcggggcgcaggatgcggtgccgcggggcagcagaacagaaccgaataggtctcagactcccagcgc

SEQ ID NO: 335416 - DNA, 369 bp, Homo sapiens
  chr16:88700843-88701212
  hyper
cgttccgcatctccggaccagggtccgggggcgtggtctgctgggggcgggcccgggttgtggtttgagagccgctcggcctgtctgggcctccgcctccgggtcgccctccagccttcctgccgccgcttttccagtcttgcccaacccggtatttctgcgcttgcctcagccacccgcaggagcgcaggccgcccttcgtcctcccgtcctctgcgcccacaggaccccgggccccgcccagtccgcaggtcccgcaggtccccccgggcgtgtcttcctggccctgcgacccccgggacagcgctgagaacacgcggaaggtggggagacgcgcggcgctggccgggtccctggcgccgttctcgc

SEQ ID NO: 335417 - DNA, 1701 bp, Homo sapiens
  chr16:89006898-89008599
  hyper
tgtgccgaggcccgcggccgtcaggaccccagggaccgcatgccaggcagggtccaggacccccagcgcggaccacctttagcctgcggggcagcgccggggacccgggcaggagggagaggagcaggagggagctctggacccccctccccagaccggccgccgccacctctgcctctcccagggccgccctcggcctccccactcccgggtctccgtcacgcgggccgcggggcctttgttaggaaaaccgggcggccccaggggagcccgcgagactcccagcgcccgggcgcgtcgttcccctcgaagtttcgccgcagcccccgcaggtcaggctctgctcacggggggctgcgctcagcccggatgggtgggcgctgggcgggttggctccaccctgccgtgggcaccaactttgaaaacggcccgtgcgctcggcgcggctgcggcgcagatccgggaacggcagccgcgggcggagtcggggtagagcggcggcggcgcgcggggcggacacggcacttacggtcggggggtccgggggatccggcgggcggcggacggcgcacactcgcgactcggtccgggagtcgctgctccttccagcttggtccccgcctccacgactcaggggcggctgcgcgctgtcttctggcgccgcaccgggctcaggcgcgcggcggggctggggcgcgcggggcggccgcctgggccatgccggggactcggctccggccaccccgcgcgggaacaaagcgcgcaccccgcccggggcggtctccggcctccgcggcccgcgccgggtccagccgccgcgcctgtggctccaacgccgcgcgctcgcccgagagtctcacggggccccgcggcccccgccccgcgcgctccgcctccgcctcctgccccccgccgccgccgctgcgccacctgcctcccgcccggcgcccatggcgctcagctccgccccggggcgccggcctggagaggggctccccgccgccgagagccgcccccaacgcctccgccaccggggcggcgccctaagaactggccgtgggggccggggctgtgcggagcgccgggagcagggagaggggagaggggcgcggggagggggcgacgggcgcgccgcctcctgcggggggcggcgcggggaggcgcaggcgggggcgagcgaagaggttgaggggtgcgggcgccgtggagggggcgcggctctggggggcggcccccgcctgcgcccaccctctccccctccgcaggccgcgcacacccacctcgcagcagtcggcggccgcgggcctcgcagctttagaaccgcggcttctggcggccgcgcgggaggctgaacgggagttggggggtgtggggggggtggggaggtggggagttgggggggaggtcgctccttcggccgccgcccccgccccctgccccgcgctcgcccccagcgcggcgcctggcccggcccggggccacctccgtgcgtggccggcaggggtcgcgctccccccgctcagcctcccgggcgggtccgatgcgaagccctcgcttcccgcgggtcccggggccaggtcatttgcatacactttgcattcatttgcatatcgtgcgtttcatgtccacctgcagaaacgccccgagccgctgctctgccctctccgcactttctctgccggcaggccccctcccccgccc

SEQ ID NO: 335418 - DNA, 396 bp, Homo sapiens
  chr16:89189500-89189896
  hyper
cgggaacatttccagttcagccaaggagtcggtgcagcaggtggagtacagctgccctgcggggcctggctccaccaggggccaagacccttcgtggggaggagcacagcctgagggcctcagggtttgtgccctccgacacctgagattcagggctcccagaggggtgggtgggcgccccaggacaaccaggtgatgatgggcgctgtgaactctgaaaagccccagcatcagagacctgctgctctctcatgtgaagggactccccaccccacgctcacactcgcagacgcacttggtactttcatctgagtctcacgcagtagcccttctctccacagcatcccagaacccgagggtgcccctcactaccacggtcccggatccacgtggctc

SEQ ID NO: 335419 - DNA, 102 bp, Homo sapiens; identical to SEQ ID NO: 225175
  chr16:89268346-89268448
  hyper

SEQ ID NO: 335420 - DNA, 175 bp, Homo sapiens; identical to SEQ ID NO: 238767
  chr16:89268832-89269007
  hyper

SEQ ID NO: 335421 - DNA, 601 bp, Homo sapiens; identical to SEQ ID NO: 238768
  chr16:89323409-89324010
  hyper

SEQ ID NO: 335422 - DNA, 570 bp, Homo sapiens
  chr16:89641257-89641827
  hyper
cgccggcggggccctgagcctcctcgccctgtcggcggcggtcccctctgaccgcagggtcttcttctagagtcctgatcgccgaggctgagcggaggcgcccggtcttcccgcctcttcagtcttaatgtctccctcaccctcgccccccacccccgtggcttttggcgaggtccgtgccctatttttaggcagaaatcggcaaaaagagtggactgcgaggtggtttctgtccccgccgacgcctcctcttccgctgctccctcccccgggaccggtgatggggaaggtgggggagtgagttcagggcggagcgggcccaccccccacggaacccaggcctgccccgccccgccccggcctcgggggactggtgtggaccgtgccccgcggacccctcggaatcagaccgcgattcagccctcggccccccgggacggtccttccagccccagacgagcgcggcgcctgcacacaacaggcgcccactaaatgcttgttgatggaggtggcgagtacccgaaaccagcggagcctggaaatgggatcctagagatccgggaagggcgc

SEQ ID NO: 335423 - DNA, 256 bp, Homo sapiens
  chr16:89992768-89993024
  hyper
gcgggaaccgcattcgggtcctggaggggcttggaggccccagtctcgcagccccttcatcggggacccccgctcccacctgccttggccactgccctcaaagcccggccccgctttccccaggaccccaagcgctgcgcgaggtcagcaccaaggacagcgcccgggccgagcgcctggcctcgaacgccgggttctgctttgtgtttccaggtttttgtttttggttatgagaggaggcctggctctgtcgccc

SEQ ID NO: 335424 - DNA, 307 bp, Homo sapiens
  chr17:523549-523856
  hyper
cgattcacccgcttcacctgctctgaggctggtctcatgggacaaagagggaattgcactgaagtctcagggttttaggaccagaagggtaggagctagagaaggtggcagaggtgaaggttgaacaagtgagtgggactccaggtacaagtcccagcctgcccccggcttcaaccacagtagctcagtttcacggtcttacacattagctccgtggcctggagtaagtttcaaatgagcacagcgcctacttcctatggctgatgaagcacagtgactgactgcaggtaaacgcacctaatatagc

SEQ ID NO: 335425 - DNA, 483 bp, Homo sapiens
  chr17:576352-576835
  hyper
aaaaaaaaacaaaaacaaaaacaaaaaaaaaacaacggcagcatcatttcgaaagccaggaggtcctccagagagcagaaacatggatgagtgctaccacatctgataagccctacacggaagccctcaccacatccactgagggtggacaccaagggtcaagtcgcctctctttagagaaagtctcttcttttgttactgctgaccaccccggcatcactgagagctgttgctatggaaacgaggtatccccagctgaaacagaggtgcttcagccagcctcagcaatgctaacaatgcagcccgctctccacgacggtgctcaacagcagcagaggctgcgggactctcacacacccagcctcagcaatgccaacaacgcagcccactccccatgatggtgctcaacagcagcagaggctgtcggactctcacagccacagatggctgcacgtctacagctctttgcttccctacgtgtcc

SEQ ID NO: 335426 - DNA, 145 bp, Homo sapiens
  chr17:850237-850382
  hyper
cggccccacggtgcgtcctccaggggccgcatgaggagagacgatacacgccagcactcagggcccagcacgggccccccactcagtgaaaagcatcctctcactcttaggcttgtcatgatcatgcaccggcagcgtccccctc

SEQ ID NO: 335427 - DNA, 197 bp, Homo sapiens
  chr17:1011791-1011988
  hyper
cggagacaccaagtccctgtctcctggctgggaagagggtggcccctctcttgcggttgccgtggaaacgggggattcctgcccacccgctccagggaggcggcgaggctcgggctgacaggcgcgccaggtgactcctggcacagccgccggagccctgagctgggctggcctggagggggcggccaccactgccc

SEQ ID NO: 335428 - DNA, 139 bp, Homo sapiens
  chr17:1082878-1083017
  hyper
cgatcccgatcctggggtcccgatctccatcctggggtcccgatcccgatcctggggtcccgcccccgcccggcacacgtactgctgtagagggtgtcgatccaggacaggcgcggcaggccccggtggctgagcggct

SEQ ID NO: 335429 - DNA, 243 bp, Homo sapiens
  chr17:1881128-1881371
  hyper
cggccgcgggccgcccgggtgggagccggggtcgggggcgcatcctgcatcctgcaccccgcatcccgcacctgcatcggagccccgcgtcccgcaccccgcaccctgcaccctggatcctgcatcctgcaccccgcacccctcatcccgcatcttgcaccccggatcccgcaccccgcatcctgcaccccgcatctctcactccgcatccggcaccccgcagctgcacgcaccgcaaccctc

SEQ ID NO: 335430 - DNA, 731 bp, Homo sapiens
  chr17:1901339-1902070
  hyper
tccgccccaggccgcgatcgatcccggcctctcccggcctcattaccgagggagagctgccggggctggcaggggagccagacggcggcggagggggcggggaggcctccttggctccctggcccggattaaatatttactatgttttgtttggcctttgggggaggggcggggagggctgtcgcattgatccggagctgcagggcgagggcggtgcccagacccggcgccccaaggcctcccgcaggccgacccgagccgagcgcgccctttgggcaccggccccgcccgggagggtcttctcgctctagagccgggggcccgcgctgagagatcggggttaccgcgcggggagccgcggccgcgctgggatccgttccctctcgcgggagccgccggccggggatctgcgcaccccacgcgccccgctcgggtcgggcctcccctccccgcggctgcccccgggccggccaccgctgcccagcgcgcaggtccctgccggatccccggcggctttcctgcccccactttacagacgtgaacgctgaggcggagggtgggggacgtggggccggctcgcctcctcctgggctcgccgggatgtggcctccgaggtcgccgcggcgctttcctgcccaagctggcgctgccggagcgcccgggccccgctcccctcacgggcctcgcagcacagacggggacaggggcggcctcgcgcgcacggggacccc

SEQ ID NO: 335431 - DNA, 324 bp, Homo sapiens
  chr17:1954662-1954986
  hyper
ggggtagggggagccgcgcccctgcccagccgacaaggggttaactttccggaaccgcgggcctggggccggggaggcggcgcggaggggcgcggcgggcccttcgagcttattcacgctctccttccggagccccgcggctcctgggggtcttcacgtggcagccccttccccctcctcagttcctggacctgacgtttctgccgtcacaccccgcaaggccactgcggtgtcgccaccctctcgtcctgcagggtgggcaggagaggaagctggactcccgtgggggcctggggcgcagcgagggctgtggcgtcgggggcc

SEQ ID NO: 335432 - DNA, 360 bp, Homo sapiens
  chr17:1957353-1957713
  hyper
cggggcggaggcggagcgtgggccgcggagatccggcgttcgcaggaggcttggtgcgcggcggggctgcacggggccacttccggagtagtactgcgagcagcggcgcgacagtgcggggtcccctttctcccagaagagacgtcacccacacaaacctgaccttcacgtggggcgcgggaccttgcggggtcccagccgcaggcgcccctgttgtttccttcgggcgggtgggttggagaagaagtccacgcgggattcttcaaaacggcgtacagggggattctagggccccatggttacttctttggaccccccggaggcgctgtccagccacttccagtcgccctgatgactcgt

SEQ ID NO: 335433 - DNA, 704 bp, Homo sapiens
  chr17:1958916-1959620
  hyper
gcaggtaacgggccgcggggccccgcgggccaggaggggaacggggtcgggcgggcgagcagcgggcaggggagctcagggctcggctccgggctctgccgccggatttgggggccgcgaggaagagctgcgagccgagggcctggggccggcgcactcctcccgccctgtctgcagttggaaaacttttccccaagtttggggcggcggagttccgggggagaaggggccgggggagccgcggagggaggcgccgggcccgcgcgtgtagggcccaggccgaggccgggacgcgggtggggcgcaggcccgggtcagggccgcagccggctgtgcgccgtgcccgcccggggcgctgccccctccctcccctgggagctgcgtggctcccccctcccccccacctgcttcctgcctcagcctcctgccccgatataacgccctccccgcgccgggcccggccttcgcgctctgcccgccacggcagccgctgcctccgctccccgcgcggccgccgcccgggccccgaccgagggttgacagcccccggccagggcggcgccagggcgggcaccgcgctcccctcctccgtatcacttcccccaactggggcaacttctcccgaggcgggaggcgctggttcctcggctccctttctccctacttgggtaaagttctccgccctgaatgacttttcctgaagc

SEQ ID NO: 335434 - DNA, 496 bp, Homo sapiens; identical to SEQ ID NO: 238808
  chr17:2658619-2659115
  hyper

SEQ ID NO: 335435 - DNA, 714 bp, Homo sapiens
  chr17:2756327-2757041
  hyper
gaagcggggtcgccgtgaagttggttattgaacccatgtggagtcaaactcccagggccgggagagccagtgttcgcggggagccgaccccagcccactctgcatcccagctcggcgatccttgcgccgactctgcggggaggcgggggcagaattccgcctcgttcctcccatccgcaagctcccacccggggacccgggcccgggagctgcgagccggggcgggcgccgggctcaggtgccccctgtaagcgctgggcggccgggaggggacggggaccgcgcgcgggcagtttcgtttggacggaggaggacgcgcgtttcctcttggtgcctgttttctctccctctgttttaaaagcagtgacagcatcggggaagtatccggggccgggccggggagggcggcagccgcctctgcctggggagggagctcggggccgccggcgggagtgcgggcggggaccagaaggagcgggcgaggggaggcagggccggggccggggagggcgcctgggagccgggcaggggggtcccgggagcgctgtccgcctcctcctgcgcttcgcccgctccctgtgccccgcgtcctccaccatccgggcggccgaggccggggcgcgggaggcggggccggggcgggtcccggcgcgggcggcgcgtctgagcgggagccgggagccgccggcccgggccgcgccccgagcgagcctc

SEQ ID NO: 335436 - DNA, 621 bp, Homo sapiens
  chr17:3599052-3599673
  hyper
cgggaaaaccgcgtgcacgcctgcgaattccaggaccctggagaaggacgcggcggctggcacccgccctgcccctcccccgccttcccaaaagtccgcggagaacttacacgaccaggtacgccaggatggaggcctgcagcagccggtacagcaggcccaccttcttgttcttggcgatgacatacttctcggtcttgtagtcgaacagcgacaggcagagccccttgcagcccgcctgccccatggcgcgctctcagccgggcttgcggaccgcccggcccacgtgcgctcatggggagcactcggtccctcggtccctgcgcgcccggcgcccgcctcggcccgtctgcgcccgctcagctgcagcccggggtgtccggcagggctgcggggcgcgggggcgggtcggggcggccttttattgacgcggttgagaaagcctcggctgggagctgggcggcggcgagcaccggaacctcagaccgcgaccttgccgctacctcttcttcctcctcctcctcctcctcccctgacacagtgacacccctgcaacctactccccagccaccggtctgggagcgcagccccccggatgcgcaggaccgccctgtgctgttg

SEQ ID NO: 335437 - DNA, 667 bp, Homo sapiens; identical to SEQ ID NO: 225198
  chr17:3867000-3867667
  hyper

SEQ ID NO: 335438 - DNA, 201 bp, Homo sapiens
  chr17:3867893-3868094
  hyper
cgcccgcggggcgcgtgctgggcctgtcgggagccgggggcgcgtggcccgggggtcctcggtcccggtccgcggagctgctaggggtgggatctggccgagagctggggcggtctgcggagcacccggctctgggctgcgcgtcgcctcctctgggctctcctgggcccggggcgtcctgcttcccagctcgaattctgc

SEQ ID NO: 335439 - DNA, 85 bp, Homo sapiens
  chr17:3908060-3908145
  hyper
cgccgggacgcggcggctctggctcggcagcgccacccggtggccggagacagaggcggccgggccgagccgggagagcagccgc

SEQ ID NO: 335440 - DNA, 716 bp, Homo sapiens
  chr17:4544584-4545300
  hyper
aattccaaggagatcgggtagcggcaacatttattgagcgcttactgtgtgccaccgactgccctaaagccccccacccccgtggcctccgcgcgctttgagcccaatgcgcgggcccttggcaaagagaatcggccagaggccaacgggggcgcatgtcctccccggtatttgactgactcggagccaggggcgcagcccaccccgcccggctctggggagctcaccttgccccgtgcgggccacagtcgcttcccgagcgccgcctccccgtgctggccgaccagccacagctgcacctggttgttggaaccggcatagagcgaggccccagtggacacgcggatgcggtagagacccatcttgctcaaagatgtttcgctccttctggtggagaagggtggacgagctaaataacccagcctgagaccccgccctctcggaggtcgcttggggtcggaatgtgggtggcaggtctccaatcaactccgcctaccgctggggcccccagctccaaggagcagagcttcaaggggcagaattcagccccagtccaaaaggcggtgtcctggcgagagcagggagtggaaaccactatcttgacgggagggagaaaaagaaaaggatttggaccgaaaacacgcaggaagagggaatcaacgcctggtacagcaggcaggcgaggtgggggtaggagttatgcacgtgtgtaccac

SEQ ID NO: 335441 - DNA, 513 bp, Homo sapiens
  chr17:4853393-4853906
  hyper
gcgggggtgagtcaccgggcgcgcgctgccccggcgccgacgggaagggcctccgagtcgggccgaggcgccgtgtgtcccccgccggtcggctggtatggctgcagaggagctcggggcagaccccgcactggccccagagccggcaaagtggagatctctaccgagggcagagacctacctccccgcagtgctacaagtggggcgccggaagagccccaggcgtgcagaagctcacaaaaggccacccgtcctcggtccattcatttttgttcactgttgattcagccccattcattgatgggctggggccgtgcgctgagcgcccacagtcgatggggaaaggggctctgaccgacagtccccacgccgggcgacaagtgctgtcccagcgttatcagtcgggcgccttgccagccgaaagggcctgtctaaattcgtttcctgtcccctaactcatcccggcgctggctggcctggagagggtaggatggggcggcgccgagaatggcc

SEQ ID NO: 335442 - DNA, 341 bp, Homo sapiens
  chr17:4890368-4890709
  hyper
cgtcgggctcggctatgtgcagtgaagctggggttggggtaaggactccgccccagggcgcaggtgcgcagtcctggctaggcagcctgccagggtgcggagcgggagcgggtccttgggctgcacttgggcggcgccggatcggacgcttggcactctgggcggccccccggcggagtggtggtcccaggagaacctccgaggtgggagggtcccgcccgcatagagggatgttctggagaagccgggagcagagtccgcgggcacgcggtgggcgagggacagtgcaggtgccgggtgcgggggtctccgggacagtccccggcacgcgctggtccgcc

SEQ ID NO: 335443 - DNA, 634 bp, Homo sapiens
  chr17:4981385-4982019
  hyper
cgcgcaaacggtccccgcgggaatgcgaagcggattctcgagttcttgagcctagagcaatgcttggggagcgacacgagggcgcagagcggcagatcgcggagcggaagttcatccccggagccgttctaggaaacccggaggactcaggtcgtcaatgattccggggctgaagtgggcatcgacgggtgcactttgctgttccagggagccggctcggcaggcggcggcgacgtggaacttgggctagggctagaaccggcgaaaagcaagccggaaaaggcaagggggcgtcggtgcgctgaccacctgttcctccagcggagtgcgacgcgcgccgattggctggagtgccgcccgggtaccggaagtggccgatgcccgtcgccagtgacaccgggacaacagctgcgggctctgtgcgagcggcccagcagcgcggagcctcagcggagtgagcgagcgcggggcagtagcggcctgcggtgagacctcattccgtcgcggctgtgggggtaggcgggggctgggctcccagctccctagagagccgagcggaaaccctacgtttaggcccgttctgaccggggttcgctgtgtgaccttgaagtttatgcctccctccattcccccc

SEQ ID NO: 335444 - DNA, 705 bp, Homo sapiens
  chr17:5973337-5974042
  hyper
tgggagagtggcggcgtgctctcctctgcgcggcagtgccccgtgtgtttgtgggtctgtgtctgggtgtgagcgtcatggtgcgtgtgttagagcccgtggggccccggtgaaaggctgtggctctgggtgactggtgtgtgtgtgtgtgtgtgtgtgtatcagagtgggtggcggcgtctctgctcggcagtggcgcgtgtggcccgccccgcgcgcgtgttctcgcgggccggggcagggcgtgggccccctccggcggagccgcgacccctcccccgggcggcgggaggtgcgcaccggcgcctctaggacccggcggcggccggccgctgtccccgggccgcgcgagtgagcatgtgcagagcccggcgcccgctcgcccgcccgctgcccgccccggctccgcgcccgcccgcccgccccgccgttcagcccggacgccagcagccccggggagccaggcggcggcgccctgtgcccgggcgcgtgggtccgcttgccgcgggcggccggagacgtgcgggcgccggggcttctgggctccgggcactgcggggggctgcgggctcggcgcccggggaaggcgggccatgggcgcgggtgcgggcgccccagccggccgcgatcgcggggtgagtcctgtctctcggcgctccagccggacccccgcgcgggctgcgagcagggtgttccccttgccgc

SEQ ID NO: 335445 - DNA, 409 bp, Homo sapiens
  chr17:6939640-6940049
  hyper
cggcgtccagaacccggctcctgcagaggctctgggtggcagcagccctgttaccgcttagatggcgcgcaggacagagccccccgacgggggctggggatgggtggtggtgctctcagcgttcttccagtcggcgcttgtgtttggggtgctccgctcctttggggtcttcttcgtggagtttgtggcggcgtttgaggagcaggcagcgcgcgtctcctggatcgcctccataggaatcgcggtgcagcagtttgggagtgagtgcggcgcctggatctggcggactgcgaccctcggaagggagagggaatgcggcgactgggaagtggaagggcgaggggcgggagatgctgggggggagacccctgagatcttctcgcagcgccccttccacttcctcaggccc

SEQ ID NO: 335446 - DNA, 988 bp, Homo sapiens
  chr17:7165743-7166731
  hyper
cgaggctgcggtgcgcagcagaggtggctcggaggtgagccagcaggtgcgggcggacaggtggggcgcacctgagtatatgtagggcgtcgggggcgcggcccgcgcgccccgggagcgcgggagggggaggcgggaccggaggggcggccgaggatgacctgacgtcaccgaagggacactcacctgaaccggaagtcgtggcccccacccctccttgcccaggtgaggaggaagaaacctgagcaccagggtcacgccccttcgcttgcccggttttgaccgccgctggggaggaggcggtggctccccaggagtcccaagctccgagtcagcccctccggactggatttccctcgaacaccgggaagccccttcctttcttcccaacaggtgcgcctgggacgctgcggggcgcccctgacaagcctcggcgccgccctttccccgccgggttctgtccaaagtgctctctcctcggccctgctttcgcccccacccgctgctctccttttttttcctgtctcctaccctggtcgatcccaccttcgggggccctggctcgatccctgagagtcgcccccttcagcaccctcttcagtgtcccggttctctggctctgctacagacacccggcttagcgtggctccccaacagccccaccttcctgtgcccccattccaacccaacatgacttacagcctgaaccctttgcactcaacctccccacctaccactgtcccctccggcatcaaggctcctaactggaggaagaaaccactgggacctaaagccggccgagggtggggagcagggtgagggctaggtcagagtcttggccacacccatcgttcccctcccttagagtcttttcagacctatcctccacctttcccacccctcccccacactcgcccgtttctctttccctcccgggcctgggcttggactgccaattgctgtgcactctgtcacgcctcactgttcc

SEQ ID NO: 335447 - DNA, 70 bp, Homo sapiens
  chr17:7198346-7198416
  hyper
cgctcgcctccaccctcgagaccgaccttgcccgtatgctgccaggtgcagacgccttccggccaccacc

SEQ ID NO: 335448 - DNA, 1343 bp, Homo sapiens
  chr17:7254485-7255828
  hyper
cagtgcccgcggcgcgcacgttcccacccaggctcggagcgcgaggtccccaggtgggccccaaccgccggatcctgcccttctgcactggggcccagccgcctcccggcctttcctccctcccccaggagatgagacgtatcttgacatcttccgcgacttctccctcatggcgtcagacgacccggagaagctgagccgtcgcagtcatgacctccacacgctgtgacccgaggcccacggggcccgcgcctgcctcccttccccgccaccgggccctctgccattaaagcctccgtgcttcgctcttcccttctggttcacttcttgggcgccaccttcgggcccgtagggtgttgggcgctgcggctcccgaggtgcggggagcagctgggggtttgcgagctccagtccagcaaggtgcgactccggggagcgaggcggcagcttcggccgcggcctgagcgcagggcgctgcggggcgggggctctcgggctggggcgacgtggccagcccagtcctgccgaggggtggggctggccctggggctcgctggccccgcgccgccgcggagagagcgcgcccgggccaccccggctggaaggcatccccggaatgcggcggctcagcacccgccccctcgggaattccccgggggagccgctgggagggactcggctcccgggctgggccggccgggcctcgggctctgagcggtgggattagaggctccagccccgccgacttgcagacgtgagatcgggcacacctgagcggcggcggggcggtcgtggccacatccggggcgacgtgcctgagtcaccccgtcccgccagcgtctgccagtccagccagtccgcccagtctctcgcgtccgagactcgcctccagcctcccacctccgcccgggccgcgcgagcctcgcgggggcgggggcggggcgccaaggggcggggctgtctcttaaagggccccgggccgctgcccttaggccacttcctgggggcggagaggacctcagcggctgcggcgacacccagggaaggcggcgcggccgggtcccgaaactcctggctgtttccatcagagccctcggacactcccagcccgggctgagcacgcatcgtcgctccccggcggatacaagggggctccgccatccgctcccgtcagttcggcctccatctcctgggacccgcgccggcagccaggccaggcctctgagtggccccagagccctggctggactcgtccacggcggcagcgatctgcccggggtctcggaggccatcccttcagagtcggccctgtgctcgccaccgtcacctgctggttggattcc

SEQ ID NO: 335449 - DNA, 783 bp, Homo sapiens
  chr17:7348518-7349301
  hyper
cgaaggggcagtgacggggccagcggtcgtggccaggcaccagggctgcacttattctctcctcccccaggcgtccgcggctcggaggcggagggtcgactccgggagaaacttttctctggctatgatagctccgtgcggccagcgcgggaggtgggagaccgtgtcagggtcagcgttggtctcatcctggcgcaactcatcagcctggtgagggcgcgcggggggtggaggtcaggccagccgaccggccgggggcgtggctttaggcaaggccggaccagggacaggctgggggcggggcctgggacgagaccaggctgagatggaccagcctttggtgaagattggatcgaaatcagaccaatggacaagctctggccgtgggtggtggacgggcctggagtagaactgggtagggtgaaggacggacctgtgatcggaccttaaagtggggctggggacgaggcaggggctgggggacggacctcgacgtagggccacatgagtcctgagtgcccagggtggggcggagcttggtgctcaggggtcaataaatggcagcgggtggaggttcggggctgggtggattatgagctgaaggcagggccggggacagagctaggcggagggctaggcaggggcgggtctggtaggttgataggctgggagtgtagacggcaggaagaggtgtttctgagatagaggcaggtcttaaactaacgccgcttctgggaggtggacttggacccgagaggatggggctcagaaaaagggggcggc

SEQ ID NO: 335450 - DNA, 315 bp, Homo sapiens
  chr17:7554512-7554827
  hyper
cgttttgtttctagacggtttggtggggggtgaagctgcattcataccccttcctcttgttattctcccctgctctgacagcaccccttttcatcgcagttggggggcctaggatcggtgcatcttccgccgcgctgccagcaccccgcagcgcgtggtcgtgcaccccggaatctgcagcagctgcatatctgaggggggtctcctttgcccgcgccgccttcgctccccgtgcttttgggtgtgtggagggcttcagcgcgcggcgcccccgcttctccgcaaccccccgccccgcgcccggactcgccccgc

SEQ ID NO: 335451 - DNA, 49 bp, Homo sapiens
  chr17:7748395-7748444
  hyper
cgcagccaccccgtccctctgaccggccttttggttccctgccacacac

SEQ ID NO: 335452 - DNA, 1083 bp, Homo sapiens
  chr17:7760506-7761589
  hyper
cgtccgaatcctgcgcggggtgtaacaagcgctcagaccgcgcagcccaggctgcccgcccgcggaaccacagctcccggcagcccgcggggcactcacacaaagcccagaggctgccgggagctgcagttccccaccccctccatcttgctgcttgactgcccctcagtcccagaaccagagcccgtgctaaccccagcactggagctgctctgacgccgactgcaacagccattctcttctcgtagcagcatggtcggtccagctccggccatttgcccggaggcctcctctgggcctttcaacttcctaagcacctttcaggttgggtggtccgagatctcgcgagcgctcccgacctctttcctttcgcgagatcccctctcctccccctcctagtctcctcggcaacggcacagatctcgcgagcttctcctacttctctagcgctgtggctcactgaagcgtactacgccggatgtcttaagatatcgcgagacctttacctctggtttcttacacatcctttagaaactggaatttagcgagaatacattctttcatactgcctcctcccttgtttttctgtctcagagagatagtctgtcctaaatatcccatgtagcccaggccactgaattaaaacggagcgtattcgttctctgccccaccccgcaactcctgaaagcggcgcaactcaattacttgatccttatatgccccacgcgggactcatactacgtttcccgtgaacacgtgcagtccaaaccccgcccctgatatttatctcagtggacggtggccggaaaaggacaatggtttccatgtcagcggataaacgctctcccctcggctcccggacgcgacggaggtcgtagtagtagtgagtacgtgctgaggagcaaaggagtaaccaagagatccagtgaccgacagagcaagagccatgccgcgccggggcctggtggctgggccagacttggagtattttcagcgtcgctatttcacgccggcggaggtggcccaacataacaggcccgaagacctctgggtatcttacctgggacgcgtgtacgacctaac

SEQ ID NO: 335453 - DNA, 40 bp, Homo sapiens
  chr17:7982656-7982696
  hyper
ggaggagcattcgcgcacacagaggctcagcggcagcgcc

SEQ ID NO: 335454 - DNA, 748 bp, Homo sapiens
  chr17:8055144-8055892
  hyper
cgtccaaccacacccctactactgagcattttctgagcgccaggggaaaagggaaggttgtggccaacagcaggaaccagcgctgggaacgggatgttctagtccgaagtgggctgacatcacaggcggcgcagggccagggactggagaacagagacacggggagcgctgaaagcctaatagggtcctggtaccggggcaaacctggggcccctcgagtaacgagcaagaagaccggggcatgcccgctgagagtcggctgtggggccgggaaagctgggacggggaggtggggacaagctggaggtaagatgagtgggtcaggagtgcagactcccggtgcaagatttcgaggaggacttcggtccttgggggcagggagagggtgggtagcggtaaggacgacagtgtgccctctgcctgggccgaaagtagcccatcagattggaagtggcagcggtccggctcagggacggagatcggccccaggatggccgcagagatgcctacctggtcgcaggagtgtcctccgcacgcctgcccgccgccgctccagcccgcagccgagtggaagctccaccgggcgggcggggaggcgggttgcataatgccgggcactgccccctcattggcctcttgccgacggagccgcaggccccgcccccgattggctggggatctcttcccggcgcctgattggctagtggtctccactaaggtcagggctgtgtcacacacacgggcgcac

SEQ ID NO: 335455 - DNA, 799 bp, Homo sapiens
  chr17:8229957-8230756
  hyper
cgccctcttccccccacgccccggcccccaagcctgctcactagctctctcctcctccttccacccgcaaggaaccctccagcccacttcctgtgatcctttccggagcccttcagcctggctggctctccagccatctcggaaagcttctctttcctaaaccctccatactcgcaggttcagctacagaggtaactgcaggctcaggttctccagggtggccagcccaccagcccaccgtcccggtgcagcagtgcctctccagcgacagctccaccgcgagcctggcgggctcccgaccttgctccccagcacgtcgtctccaagccacggtctcaccaccctccatcagcctcgggcgacaccaaggggaacagagcgctggagctcctcgaagtcctcccgaccttagcggggctccgttcatcctcccggacgtggccaggccccgctctggccccgcgcccgcccctcccgcggggctgcccctgtctctctgccggagacccggactcagtgagtgagcgcagcgcggccatagggcttcctgcagcggggtctcagcacgtcttctggctggactctggggtctcctggcctggctgtgtctcctggttctcagcgctcgcctcccacgcggggcggagtatgggagtgggctgctcccgcggaagaatcctggggaagttgaggcactggctcccgctgttcagaacactgcccgacgtccccagagctagccactcctccttcccacccacccgcagcactctcgaggtcgcaacggcagtcaccaggt

SEQ ID NO: 335456 - DNA, 1091 bp, Homo sapiens
  chr17:8533841-8534932
  hyper
ccgcttcggtcccccgttcctgtcctccagagccgcccgggacccctcagcccaggagccattcctccctccacaaactgtcccccagccctgggccgtgcactcggacccgggtagccgcacctctcaccttcagccgaagatggtggcgcgggcgcacgtccccagccgcgaccacagatccagcgcctcagtcccaaacccaccgctgcctccgccgggctcctttagcactgctgctcggggctgccccacccacccctaccctcattgggccagctccacgcccatcaccgccgcccccagacccactggttggtttgcgcgcccatctccaagggaagacgttagcaacccgaacgaagctaccttcccgagtccggctccctccacccacctggaatgacgctcattggctcccgctcccagcccaggccacagaggccccaatctcatgggctggctcttacgcccgtcataggctccgggaggtgcggccggggcagtggcgcgggattggctggctcgtgcgtagatggacagctgaggctggctgaacgcccggcgatcccgcgaggctgcgggtgcgggccccgcggcggccggcgcgctgcgctgacattggctgtgcgggccgcggggcaggtgggccgcggcaggaggctggcgctctgactgcagactcctcgtcctagcgtcaggcagccgccgcagccgcagcacattcgagcgcccggtcgccccctgtgcttgcggcagccggcatgtaccgcagcgggacggggttccaccgcggagtcgcgggccctcagcgttgcctgcaggggcggggcggagcgcggtccagagtcctgacgtcacccccggggctgcgcggggttggggccgcggcgctgcgactcacctgcagtgggggaaggaacgcgggggagggcgctgctccgcccatgcgcacagggtttggcccgggacccggctgcgctccacgctgcggccactgtcccgaccccggccccaggcggactctgccgggatcggccgagcgccaggcgcaggacacggtcctccaaggtcgcagttttggtgttagc

SEQ ID NO: 335457 - DNA, 870 bp, Homo sapiens
  chr17:8868587-8869457
  hyper
cgacacagggcgtcctgtgtcagaggcaggaggctgaggacacagctgcgcagagccgcccagcagaggttacccggataacgataagtggtccccgcgacgccccttaagtctctggggttatctggagcgcaggtttgcagacccgctgcccccgcggtgggccaggtccacggggccggaagatagcaggatctgtccagccctcgggctgcggcggctgctcgcggagcccactctccccgacggtccccagcttgctccagctctgcctggagctcccatgcgtgccctccgcatccgccctggccgcccagtcacacacctgcagtccccgccgggcgccgagcccctctccagcggcgactccctgcgattcgggtgaccgtcgggaccaccgcgccccagctggagccgcgcggcgagccgcagcatctgcccagcctgggctcctccggcgggcggggcggagcctgtcagggggcggggcctaatggggcggggctgaccgcggagccggcctctccagccacctggcggcccggcagcgtcagccaggtgcgcgcccggccccacatcctctgggtcacgcccccgaggccgcaaggcgtctgagaagcagccccggctctgacccgccagccctcggaagaagcagaccctggccggtccatggcagtggcccgaggggcaccagcgcggagcaccagcgacccccaaggagtaaggggaggttaggcccccgcgtcggaagcgcggctttggccccgcaggagggctgggcggagcaggggggcaggtctggggtaggggcttaggggaaagacgagaaagaggaagctccgacgagctgcttccttctctcactgc

SEQ ID NO: 335458 - DNA, 107 bp, Homo sapiens
  chr17:8901441-8901548
  hyper
cgtttctccaagcccagcatttactgtgcgagccacctgggggccatttttgttgcccgaggtggtgcgcctgcgccacctggtggactacgggaaagtagcagatc

SEQ ID NO: 335459 - DNA, 900 bp, Homo sapiens
  chr17:8906203-8907103
  hyper
cgcatcctatcttggcccagctccactggagcccgagcggcggggcgcagggtgcgagcgggaggctggtgttctgcccgcgatgggcaggggagccgggtggccgcggggcgaggagccgcgagggccgggccggcgtgacaccacctggcggagtctcggggaagagtcttaaaggcgcgcgctcctccgtgccccgcgcactcgaacgggagccgcggagagctcgcctcccgctgccgccggcgcctcggggaggtaagtgccacccgcggatcccgagtcgcggccgggtgggggcggcccgcggctgccccgcgctcgggaagctctggctggggctgcggtcggagggcggcgcccaagttttcttgaaggcctcggagggcagctggagcggcgtagagcctgcgcggggatggcgggggtggccgcgggccggggccgtctgggggcggccatcccgggcggtgcgtggaaaagtaggcactggtgcgcggcgaggggcgcacgccagagccccagccccgcgtcctgcgcacttggcgcgctctggccgcggtcccggcgagccccagcctgctccgggccgcgaccccggctccgcgccttcctgcccgcccgggtcctttgtagcccgctggccccgcggtcgcgcacggtcacgccggcaggtcgcgctcggcggccggccaagccagccccggccctgccgcgcccgcgccccgggccaccccgcccggccccctcggcgctgcacccctcgctttccccatctccagccgctcgctattttcacacctcccggtgccccggccccggcgcctgattcagtgcttagtaattaatttggcgtttcagaatggtcagcgggctggataatgggtgcattcatccccc

SEQ ID NO: 335460 - DNA, 782 bp, Homo sapiens
  chr17:9143012-9143794
  hyper
gtgaacatcatctccgtgtataagcagggcacgagccgcatccgccgcggtgaccagagcctgtggatccgctcgcgggacatcgcctgcaagtgtcccaaaatcaagcccctcaagaagtacctgctgctgggcaacgcggaggactctccggaccagagcggcatcgtggccgataaaagcagcctggtgatccagtggcgggacacgtgggcgcggcggctgcgcaagttccagcagcgtgagaagaagggcaagtgcaagaaggcctagcgccgaggcagcgggcgggcgggcgggcgggcgccagggcggggccgagcgagagcgggcgccttggcccggccgccgcggacttggcccgcgagggctttcccaggtggggggagggagggggcggggccgcacggcgcggggggcgggaccctcggcggcccctccccctacccccaccctgcgcgctctgggcgggagccgcgtgcacgcggggcggggtgcgccgccggccgggccctggagaaatgacgagacgtagctacctcacggggctccttccagagcagagacgcgcttccctgggcctgggcgcggccgccgtggaggggctgggggcagcctgccctggggcccgggggcgggcgcagaatcgcacaactggggccccaggcgcggggcgtggatggcgcggagacgtggacgggaggagaactgtgaattctcaagcccgtagtgtgggcggggcgcggagcacccaccaaaccaccacccgacacgcagccgac

SEQ ID NO: 335461 - DNA, 1219 bp, Homo sapiens
  chr17:9548277-9549496
  hyper
cgggggcttttttcacagggcaacacgtggctcccagttcaggtcccgggttggcgggtgcaggcacagactctgcctccccccaaggggcagacggtctggaaggaggtggcgacacctgtccgcacacacctgagcctgcggaggaaccagcggtgcacaaaagcgctccccacccccacacagcgcccagcgcgcgcctctcaccacgcccgaggctgtgctctggagatgcctgccttgcccttttcttcctgcagtagccaggcctttaccatttactaggcgctttcagaatgttcatttctccgtaatttccactgcttgaaggctgctcgaggaacaggagcagcggcgaaacccaggtctgtcggtttacgaggtaaggaagggtggggaatccgaccacgaagactcccagtcagcgcagcgggggcggcaccaggcaggggtaggggtggcccggcgctgccctggagggggctggtcgtgccgccggattcccgcgcggggcggggctgccccgcccttggctccgcctccgccccgtccccgcacacctggcccgcaggtagccggcaccaggagccttagagaagctgtagggcctgctggccgctcgtccgcctcgcgcccgggggctccgcgcctggagctgcgccggcggcagccatggacctgggccccggggacgcggcaggagggggaccgctcgcgccccggccccgccgccgccgctccctgcgccgcctgttcagccgcttcctgctggcgctgggcagccgctcacgccccggggactcaccgccccggccccagccgggacactgtgatggcgacggtgaggggggcttcgcctgcgccccgggcccagttccagcggcccccgggagccccggggaggaacgcccgcccggaccccagccccagctccagctccccgccggcgatggggcgcggccgccgggcgctcagggcttgaagaaccacggcaacacctgtttcatgaacgcggtggtgcagtgtctcagcaacaccgacctgctggccgagttcctggcgctggggcgctaccgggcggctccgggccgcgccgaggtcaccgagcagctggcggcgctggtgcgcgcgctctggactcgcgaatacacgccccaactttccgcggagttcaaggtaggcagcgctgcgccgccgaccgccctgtccccctggtttc

SEQ ID NO: 335462 - DNA, 1500 bp, Homo sapiens; identical to SEQ ID NO: 225232
  chr17:10101106-10102606
  hyper

SEQ ID NO: 335463 - DNA, 881 bp, Homo sapiens
  chr17:10632714-10633595
  hyper
cgactaaaaagtttaatgatgctataaagggttttggtcggcttcgtctcctaggccctgagatatgttcagtgtcgtccgcgggccggacgttaacgcaggagccagggccgcttcttctgaggtcccctgggaagttccacgcgcggaaccagccccttccagggtgtgagccctggtatgggactcgcttccatgaacacatccgcgtctcttagacgggggagaaagtgggggctccccaagcagaaagcccaagtcccgtcctccccactaactgtgcgcccctgcgactctgcccgctagtcagttacacggcccgctaggccagggggcggagctgggagccgggcgggtccccctcccaccgcggccgcctgacctgcaccaaggccgccagcgcgaagaaggcggccatgagtccgttgcaggcccgccacagcgctggcgccatggctcggagaacacggcgcggggcggtgagtcctgccacgtgcggggcggtgagtcctgccacgtacggtccgccttcctccttgcgcggagggaccgagacccccgcctcggtttcggtgccttggggacactgccgtggccgtcgctccgcccgggggcggggagcgaagggcgtgggtgtagcccccactcagcgacccattcagcccgccccgaacgccgcggggtgtaggcggcgccgtcctggtttcgcggatgggaaagcgagtccctcagggagcgcaggtctcggtggtggacggaagtcgaatttgaacccgtataggttcaactccaaaccctgttttcactaaagctaccttcctcacaaaaaaaaaaaaaaagaagaaagaaaaaaaagaaggaaaaaaggaaggaaggcaggc

SEQ ID NO: 335464 - DNA, 911 bp, Homo sapiens
  chr17:12568526-12569437
  hyper
cgccgtgtcacatttgtccccccaaaaagcatatcctagaaaatgaaagcctttccatttccccgtggaaatgcatctaagtccagtattggagctgcgagatacagaatcgtctctgccagtgccctgagcccctcaaaccgaggggaatgcgtgggcttcggtccgtcggaagcttttcttctcaggggtccagcttatttccaaattgccccgcgtgaactgtcccgcgggcgcgcacgccctttcgcgcagcctttgcagccggctggcgggagatcccggccgcttccctttcgccggcagaagcccggccggggaagccccggctgcgcacgcccatccccaggacctcggagctcccagcggctgccgcagccccgcgaaccacctgcaagccccgcggcgtcgcagcccttccttctttcctccgggcatccgctctttagctcgcgcccctctcccagattcccgacccctggccctgctcccgccctctgtgcctcggcggctgcggggcccgccgcaaagagttaagagccggttcccgagacggcttcggcggctccgggtccccagaccccgctcgccgctcctgattggctgagcgcctgtcagtagtaaagggtatcagatggcaaagttgggaccttcataaaggcgtggtggcgattctccgcaatcgccggcagcctatgacatcagacaggaacgcctgggatgccgcgctgctcctggccaacctccgaggaggaggagggtcccgccggctaagagttaattagccccgcacggcgaggggggaggcgccagttttctggggacactggctgccactgtactcctacccaggggagctcacggagagttggatgaattctgggttgttagctgcggtcagctgggctccc

SEQ ID NO: 335465 - DNA, 954 bp, Homo sapiens
  chr17:12692672-12693626
  hyper
cgctgccttctcccacctccgcactccactgtccttgcaaactttggacagaggaaaggtgggcacggggcgcgaaactacaagtcccggcatgcacggcgttctccgcacaggcgcacggggaccgccgggccagccggccagccagcctgcggagactcccgggtccccgcgccggactgggactgggagcaggcagcccgggcggagcgggccggtgccgaggacggccccaggcattgctctgccccgggcattgcgcggcgcgcgtgagggggatgcggcaggaggcggcgcggcgggaggagtaggcggcggcgccctcgggagggagctgcgcgcgggccagacggcgcccggaggctccgcagtgccgccgccgtcgcccgggaggctccgcgcgggagccatgtaaccctgcggcgggctccgggctgctccgtccttccccagctcccgggctagcgcggcagcggggccacgatgaagaagcagttcaatcgcatgcgccagctggccaaccagacggtgggcaggtaggtcacccgcgggcaccgctgtcggtgcgcgcccgcgaggctgcatccgcaggggcgcgcaggtgatggagcccgcccagcctccagtcctccttgcctcagtcctttcccctgcaccagctccctccaggcgccgctcgcaggcgcgacccctcctccctaacttcccagaccccggagctcttctcactcgccgccttctgctccgggctccggttgccaagcgcaaagtgtgacgcatcctttacctgcgtccccggctgccccttcgcttcgtcctccctgcctttccccgggactcccttctccctctggccgcctgtcttcctggaaacaggtgtttgctctgattgtgctggaggcagccgaaccgcagtcggtctccggagatctcttccctcccctcccctgcgcc

SEQ ID NO: 335466 - DNA, 1251 bp, Homo sapiens
  chr17:14203859-14205110
  hyper
cgaatgagtccccggcgtgggttggggggggggttccagtgcctagtgcatctcctaccctgctctccctcctccaaccgcctccctactctgcaacacgtaagcatcacgaaacctcctgcgaaacatctggatggggactggtgtcccaacatctgggcaactaccgccaaggctggcttctagggaacgagtgcggaaatgcgtgcgggtgtgggagcgcaccactcagtagggtaggacctctcccagcgctaggtcactgcagcattcttcccaccatctgctcctgtcaccagcccctaactccgcccctttgggcccgccccttgttccgaagccaatagcaacccctgaccgccctacaccgcccagaagcctttccacaccccctcgtcctgggagcgggttggctgctgagctctcggagaagcgcctgtatttgcatggcgttcggggtttttggtaggtagagcagcccgtcactctggaaggccgggaccgcccactccacctcggtccacagctctcttcctgcgcagttcgcctctgcagcctctgcggggaagtgccggggctgctcgaggctcagttcttaggactgcaaggaggcagccccggcgtgcggcggtgcgcacagtctagagtggccagggcgcgagagtgcaacgtcctcctggccccgagcgcgtcgtcgcgccccgggagcagaccctcgcccagcagttaccgccgtcccgactttccgttccagttgcagctcctgccgggcaacatgtcaagagccgccgccgctacagctgccgccgccacctggggaagagcagcagcagcagcggcggccgcgggcacacgggggcaataaaccgagccacccgggcgtccagcgtgccggggaaccctctctgcgctcactgcccggcgggacccacgccatgtgctgagccatgtccctggccgcgcccgcgggcagcgcatggggcagcgcctgagtggcggcagatcttgcctcgatgtccccggccggctcctaccgcagccgccgccgcccccgccgccggtgaggaggaagctcgcgctgctcttcgccatgctctgcgtctggctctatatgttcctgtactcgtgcgccggctcctgcgccgccgcgccggggctgctgctcctgggctctgggtcccgcgccgcacacgacccgccagccctggccacagctccggacgggacgccccccaggctgccgttccgggc

SEQ ID NO: 335467 - DNA, 313 bp, Homo sapiens
  chr17:14212398-14212711
  hyper
cgacgttgccacgtgtccgctcctttcgggagctaggggggcgttggcttggacatcccgttctggaagggtggccgggggcgctaccacgggcggggaaaatggctccgagccacccggcctcgggcatcaatcgacgcggccctggtgtcgcgcgggatcgccgcctctggcccgggggccgctgagccggagacagatggcggagcttcccagtgcgggggcagggctggcagccgagactggggccgcctcccccgcccctaggctggccgggtagtcctccgtggccacgtgaccagcctcgccgtcc

SEQ ID NO: 335468 - DNA, 840 bp, Homo sapiens
  chr17:15244306-15245146
  hyper
cgaaagctttgcagccaagctaaacagaaacgactttgggcggtgagagaacagctttgatctgaatttaaggagctcggtctacaagaccaggtgattgaactctcctccccgtggctgcagatctgaaggctcggctattgaagcagagggggacgaggaacagcgtgcggggcggccagcaccgcagtggaaaggcacagcgctgctaacgggtaattattagaattaagaaattaaacgaattagcacagtgtcgggggttcggatgccccttccctgggcatcccttgaaaacccttgaaaagcatcagaaaggtaaattacgaggaaaccaacgtctgggtgggaggtgcctgtggatttgtacggtttttatttggaaggaaaagtgaagatcgcggggaggaattgcagggtgtccgcgacctcccgcgatcctgaggcgagaagttggagtcctggttggcgaagggggatcctttggggtagtcctagaggcaggctagagtcagcgagaccactcacctgtcggcggatgcccggcgaggggcgggaaggggctgtgggaggaaggggtcgcagcctaccacctgcagccctcgactggggcccagaccagtctggccctggccccgcctttcctatctgtgacgatagcagcgcctgagggccactcagcggccgccccggccggctcgccggagctgactggccagttataggagaggcgggagctgtcaggccaggagggaaacccgtcgggcggcggttactatggacgcgctcacgcttagtaaccgaggctccccgccctccgggagacctccttggtttggg

SEQ ID NO: 335469 - DNA, 640 bp, Homo sapiens
  chr17:15848769-15849409
  hyper
ggcttctgcactgacttctacggctgcctcttcctcgcctgcttcgtgctggtgctcacgcagagctccatcttcagccttctggccgtggcagtcgacagatacctggccatctgtgtcccgctcaggtgaggcgctcggcgtcgcccgaactcggggccccgtcggagctccgaaatgggtcgtcttctccaggccggggttcctccctcgggggccccagacgggccaggctgggggcgcgcggggcgcttggagggctggttcccagcctggccaccccgcaacgctagaccagtgcgcccgggcacccaagacatcccagatgcgcgtcgctctaaggagatctgcgtagggacagctctagggggtccggggagtgcggtccccggcgcccggggaggcgccgtggaaaccccggggaaagcgtcacccccggggaaagcgtcacccccgtgggcgggtggagcccggggcgcgggagttttggtgatcacatctccactcctgccacgaaggccgttcctaacactcgcccgcagcggcggtgcagcggcagtcccgtgagtgctgcggctcccggaggcccgggaggttcccactaagggcaaggcaactttggacgctgggcattcgcacc

SEQ ID NO: 335470 - DNA, 232 bp, Homo sapiens
  chr17:16256915-16257147
  hyper
cggcccgcccggccgctgggacgcacctgcctgttcagtcccgcaggcagaggggctgcgcctgggcctacgctcgcgatacccagaatccactcgcacctgcgaaggcgcccctgccctgtgtgaatccagcgggctcttcgtaccttcccgacctggaggggcctgggttgggcctgaattcgcaggctcatccgagcgggcagcctggggtaacttcgtctccaaaaac

SEQ ID NO: 335471 - DNA, 1225 bp, Homo sapiens
  chr17:16283879-16285104
  hyper
cgaaactccgtctcaagaaaaaaaaggaaagaccccccctccttctcccgccggaaataccctctttcaggacggcgcgcctgtgcggcgcacgcgcgctcagttacttagcaacctcggcgctaagccaccccaggtggagcccagcaacaacagagccaccgcgtcccccaccaatcagcgccgacctcgccttcgcaggcctaaccaatcagtgccggcgctgcaaggaagtttccagagctttcgaggaaggtttcttcaactcaaattcatccgcctgataattttcttatattttcctaaagaaggaagagaagcgcatagaggagaagggaaataattttttaggagcctttcttacggctatgaggaatttggggctcagttgaaaagcctaaactgcctctcgggaggttgggcgcggcgaactactttcagcggcgcacggagacggcgtctacgtgaggggtgataagtgacgcaacactcgttgcataaatttgcgctccgccagcccggagcatttaggggcggttggctttgttgggtgagcttgtttgtgtccctgtgggtggacgtggttggtgattggcaggatcctggtatccgctaacaggtactggcccgcagccgtaacgaccttgggggggtgtgagaggggggaatgggtgaggtcaaggtggaggcttcttggggttgggtgggccgctgaggggagggcgtgggggaggggagggcgaggtgacgcggcgctgggcctttccgggacagtgggccttgttgacctgaggggggcgagggcggttggcgcgcgcgcgcgttgacggaaactaacggacgcctaaccgatcggcgattctgtcgagtttacttcgcggggaaggcggaaaagaggtagtttgtgtggtttctggaagcctttactttggaatcccagtgtgagaaaggtgccccttcttgtgtttcaatgggatttttatttcgcgagtcttgtgggtttggttttgttttcagtttgcctaacaccgtgcttaggtttgaggcagattggagttcggtcgggggagtttgaatatccggaacagttagtggggaaagctgtggacgcttggtaagagagcgctctggattttccgctgttgacgttgaaaccttgaatgacgaatttcgtattaagtgacttagccttgtaaaattgaggggaggcttgcggaatattaac

SEQ ID NO: 335472 - DNA, 360 bp, Homo sapiens
  chr17:16290077-16290437
  hyper
cgcgcgattttttgagatgtgagagggaattgtgcttcacggtcaccaccaggtgtcgcgacatcaggtgccgcgccgtcccgcttctgaggcgcggtggcctgagaaactggttgcagagcccgctcttcctagcctactgcccgaaaacgcagaatttggggaattggaactttggaggcgggagcgaaagacctctccttctcccgccggaaatacccctcttttgggaagcgcgcccctgccttccggaaaggaagaaacgtgatcacgccgctgcactcaagcctctgggtgatagagcgagaagaccctgtctccaaaacacaaacacacaaacaaacaaaaaggtaatggggg

SEQ ID NO: 335473 - DNA, 256 bp, Homo sapiens; identical to SEQ ID NO: 225242
  chr17:16310308-16310564
  hyper

SEQ ID NO: 335474 - DNA, 745 bp, Homo sapiens
  chr17:16472054-16472799
  hyper
gcctcttactcctcttcagccgcagggtcgaggtcgagggcagcgggggagtcggggaccgtgcgacgcgcaacgctgggactgggcccacagcagcctccaccccgtctttgccctcccgcaagccacgagcacgggagcccgcgcgtggacgggctcgggctgtcactgatcgcgcggacactcgcgcgctgcgcccggacatcaatacctgtcgctgggacccggccgacgggcagccggagcggccctaaggccacaggcaacaatggcgacgctggcacaggcgcctgcgtggcgggctcagtcccgagcggcagcggatcctcgggctccgccacttcccttccccgcaaagcacagagtgtcccggccaggagctgcacgttccagcccggtcctgagaagcccggcccagaaaccccggcgcctctgcttagccgcgacctcgcctcggcgtcactgcgcatgtgcgccagaggaacgctgcgcgcccgcagagccaatcggagcccaagctgccgcctccccctcccgcgcctctggccctggacctgtctccatggcaacctcctccacccatcgctctgacttgcttgtcagcctgcgaggttccgaagggaacttcaaagtttccccgggcagacgcaggtctggtagacgtcttggaggccagggaggtgccagtagctggaggagcgccgggagttgaagccccgcgccaactacgcagagaaaactgggc

SEQ ID NO: 335475 - DNA, 438 bp, Homo sapiens
  chr17:16487650-16488088
  hyper
cgccgggaggggcacgggatcaccgtgcacagtgagtgctgtacaaagtgcctgtgcagctccccgaagccgcaggagggcgcccgactaagccttttctgccctgcgtgaggcgcatgcgtgttccgtctgcagctgcagacgcccatcctgggagtggacaccagcttcgttccctctcagcccactcgggaagcgccacacggcttcggcttcggacgatccagggccgcgtcctctgtgaggaaacagctgtgacggctgaggagggagggaccagctctaactgattgcttaagttgttacagatggtacagagccagtggctgagttttgtaaatcaggtgtgttcattgagcgaactttccacttcggaatattcagcatctgaggaggttcagtttgattttgtctatcgctggcggggcgcgggctgac

SEQ ID NO: 335476 - DNA, 95 bp, Homo sapiens
  chr17:17287173-17287268
  hyper
cgcggggcgcggggcgatgcggcgcgccttggcttgccgggccttacgtctgcggatcttccgggccggctggttgaaccacgtggccacgcgcc

SEQ ID NO: 335477 - DNA, 1358 bp, Homo sapiens
  chr17:17398686-17400044
  hyper
cgctgggcagcttggccatggcgaagagcgcgcggaacatctggtccaggctgctgttcttcttggccgagatctcgaagtaggcgcagcgctgggggtcgtcgcccaccagctgctcgatctcgcgctggtccacctcgcggtagaagtcgcggtcacccttgttgccgcagatgaccaggggcacgtccacgttctccttggttttgttcttgaggcaagacttggtgtcgaggatctgctgcctgagccgctgcacctcctcgaaggagtcgcggttgtccagactgaacaccaggatgaaaacgtctcctagagggggcacagagagcagaaaaggagaaggtgagggtggccgcccaggggacaagtcgggctgactttgaggccgcgcggggcgcgctagcctctctaagcgcgaagcgcactactcggcgcgcggcagccggaccggcgctcgcggggcgccctggccgagggttccccgcccttccctcccgcacctgcccggcccccggctcacctgtgaggatggagaggcgccgcatggcggggaacgggtggttgccggacgtgtcgaggatgtcgagctggtagacctcgccgcggatggagtagaacttgcggtggaagtcctcgatggtaggcgtgtaggcgtcctcgaagcggccggtgaggaagcgcgacacgatggccgtcttgcccaccttggacgagccgaggatgaccatgcgatagcagttcttggccgggatactcagctccgagtcgctcgggcacatcttcttgatcatcgcggccagtttcattgggcagaggggccgcgagggcgggcgcggggccgagagaagggcagagagcggctgagggtcgctggggtggcacgcggggtgagcggctggagggctctgctcgggctgggcgcggctcgggcttggggctccggctccgctcgggctgggctcgggctaggctgggctcggctggggttctcccaggatctgggcacaggccgcttgctctggctttggcgcccggccgccgcccttatatgcagcctgctcggctgccccgccccggccctcccagctcggtgcgtcacgccccgcggggcccgcctcccccgcaccggctcccagtcccggcgacctcgtcacccgctgccgggctcctgctctctgggcgcgggggctggggggagcagtccagggtcgggctgaggctggaggcgctcggactccgcttttccactgccgcgggctcggcggccgcaggggcgtcggggttctggtcccggcggtgcccctgtccctctgcgacttcgggcaaggacccccattcctgcacctcccgcgcgc

SEQ ID NO: 335478 - DNA, 2167 bp, Homo sapiens
  chr17:17685255-17687422
  hyper
cggggccccgggccggccgccccctttttgcggggggagagcaggagccgcctctcgcagccactctgcgcgcggggtgggagggagagagggaggcgaagggacgacagcgccgggctccccgcccccatcccacccggttccaatatttcgcagaaaggcacgcggctcctaatcggtcttttccaggctgagatttagccgtgcgatgcccgcgcaggggcgggggccgcgggccaggggaggcgctcagagtccggagccgccgagcgaggtgaggagcccgcgtcctcggctggtggagcgggcgggcgggcgcgcaaacccgagaggcagatatagaaaggggggcaggttaaaaataaccctctccggctgggaagctcgcgcgcgctctctcgcctcgttcggtgccagaggactccaggggaggtggcgttggggagggcagagcgggattccccctcctccgccgggcggggtgcccgcctgcgcgccgcggttgcacgtgtgcggggccgcgcgcccgggccccctctgcacccggtcggtgggtgccccctccccaggaccgggcgcatctggcagtggccccccgcccgcagccttgcgcggctggagggaagcgctccattattcattatttacgagcgttaataggtttgagccacgggggcggggggttgggggggcgacgaggacccagtggggaccgaagcattagaagaagggatagggagggagggggaagggcgggggcggggctgtgccgcggcctggaggaagaggtctcggcctggggcccggcgagccgggcgcacctctccgtcaggtttctccacaccgccggccgtcgaggctgctcagggcgccaagagggcagcacgggccttagattttgctctcggcctctgtccttcgcgtcctcgcccttaccgaggcgtggggagggagctgcggaggccgtacgccccgccctgcgcgccccttgccgccgccgcgtccccgcggcagccccggcctcatttatcatcatctttggtcaagtggagtgtgcaaggaacagctgcttcactcggctgacttcgagggcggctacgggagaatcagggagatgaatgatgggggctggtggcagccccccgcggtccccgcgcaggcgagagggaggcggggacgtccagggccgcctccgcctcatggcgagtgcagcgcccccttcctctctcctggcgcctgcagcgaccggggaccgggggaccggggcaccgaggaccgggcccgccccgggaggggactgggcgcggggacgggggggcgcccttcgccggcggagaactggcgggcgcgctgccggcagagcccgaggttgccgtgaccttgctggggtcagcgggctgggctgcggaggcggcggcgcggcgtctttggtgcgctttccggattggcgcagaggccgggaaacaaggcgggggcgggcgggggaacacaaatagaaggtgaaattttacctgcccctgagggagtcctgcggattttctccggcagcagcaggcgctctgcctttgtcttacacggctgaaacatctgttgcagaggggcggagaggccgcaacaacccccacacaccctgcgctgctccccgtccccctctgccccagccgggctgcaggactccaggcgccgcgttaaccctgctcgcgctggggcgcgcgcccgcactcgctgccgcagtccagcgcctcgcgtggggctcctcgcccccgccccggatctggtcctggccggggcgcccggtgacccccctccacctcgatggggtgctgaggtgtaggcggggggcgggggcggaaagggttaatggcctagtcgcagaccctaattgtcagagccggccccgcttcgtttcaattaccctaagtagagactgaatgcgcaattaacgaagtcagcttgccaactggaaagccggccccgctttcacgttgagcagaatactccaccagctgacttggacgaagcaatttcctcctctctctctccccttttttctctccttctctcttccaatccccctccctctttttctctctccttaataataaaattataccaagcagtttgcggtgtggcaggcggccagaaaagcgtttctttaaacgccgcc

SEQ ID NO: 335479 - DNA, 363 bp, Homo sapiens
  chr17:18218758-18219121
  hyper
cgggggcttttgctgtcgcagtgggttccggagagtgcaggtgatttcgcagcaggtttcttgtgctggccgcgctcgccggacgaagaagagaagggcagttgggcctgcggccttggcgttcatgaggcctcagagagctccggaggagctacaactgtgagggggctgctagagttcttctcctcgggtgtgtgagaagcagcctaggaccccgggttcggggagtcgcaaagaaggccgtaagggcttcacttccttctccggaggcctgccttctgcgcgtcgattaacaccgcattctttcccacttcctctcaatgttttcttcatatatctggaaatatgatcagcgcccctgac

SEQ ID NO: 335480 - DNA, 811 bp, Homo sapiens
  chr17:18907431-18908242
  hyper
cgcgcgctcgggggcctctccgcggcctctgcttctctgcccatgagcaatctgcgggaaagacctgatgagcccggctcggcggggagggcgggccgcgcggggaggggcggcgggggcggggccgggaactcaggtgggcgtgggaaggacggggctggggctggggctgggaagatgaggtgggggcactggactgggatgggaagaaagtaagggatcggaacagcggtgagggagcggtgggccacgtcccagggctcagcgtgcctctacgtgcagggaacccatatcccagatttccggagctgcctgaagtcctcgcaacttctgagggaaactagggcagccggggaacttcccagtagcttcttagagtgggaggcggccccggcacagaggcgccccgcaaaccgagggcttccgggtaagggaggggtcttaaaatttccgggtgccggcaacccaggaggcctgcccggaggaggctggggctctgggaggggtccaggagacccagaaacgcggttgcggggcggcgacgccccgcgagacccgggatccggggggcgcggccgggacttgcttaccgagcgggcgctggcggagcggggcgcacacgcggcggctgcggcggcggcgcgaggctgggcgggggcgcgccggtgactcagggccgccccgcttaccccgccgccgccacctgcggtcacgtgccgcccggggcggggccggaagctgattcacccctcgacagacagacagacctggggcggacgcactgcccacggtcccctggtgcccgaattcc

SEQ ID NO: 335481 - DNA, 300 bp, Homo sapiens
  chr17:19140744-19141044
  hyper
cgcggcggtggcggcggctccgcgggctacggtcgctcccgcctctcgagcgctgccggtggccgcagcggcgcacccacgccggcccggaggagcagaggtgagccacagcccgtggggctccaaggccagagcgagtccccggggcgaggaccctccccctctccagggcgcggacgcccccagagcacaggctcccctacctcaccagccccgccagggcatgcgcccctgccgccccgctggtccctacgccaggctctgggggatccccttctttccaaccaggccccgccccac

SEQ ID NO: 335482 - DNA, 410 bp, Homo sapiens
  chr17:19282076-19282486
  hyper
cgaaccagccgcgcgcttctgcccttgtcggtttaggaaactgggaagttccctggtcctgctccccagcccgcagaggggacactgaggcccacggtaggtggtcctctcctcacccgagtctccacacagacaccatggccgagcctctgaaggaggaagacggcgaggacggctctgcggagccccccgggcccgtgaaggccgaacccgcccacaccgctgcctctgtagcggccaagaacctggccctgcttaaagcccgctccttcgatgtgacctttgacgtgggcgacgagtacgagatcatcgagaccataggcaacggggcctatggagtggtgtcctccgcccgccgccgcctcaccggtgagcttcctgagccgtcgcctcccagatgtggcagcgtc

SEQ ID NO: 335483 - DNA, 774 bp, Homo sapiens
  chr17:19770530-19771304
  hyper
cgggcggctagccgagtcgggggtctcggctcgcggctgcgccaagtttcagaaccacctagccccgtgcctgccgcccggggcccggcctcgccccggccggcgctcacctggcggtgccgcccccggaagaccacggcgaaggccccgtgtcccacgagatccctcttgctgtactcgaagtcacccaccacctccatggccgcgcccccggggcacacagcggacgggcgggcggcgcagtgcggcgcaggtatcagcaccgcggctccgcgggcccggagcgcgccagcgtgcggcgggtctggggcagccgcagccccgggcccgggcggactctcatgccgagagaccggagcggaaactggggaagctgccgcgcggagccagggtcagcgaggcccggcccggcccctgccgctcatggcccggcctgccgccggccgctggctgtctggcgaagcggcctcggcgctgccgggccaggggtgccgtcaccgtcactgtgcgcgcccagagccgcacacgcgctctgaggcagtgaggggcccggtactctccatccccagctcgtcgggcctcctcggccctccccgctcggggcgctgctgcgacggcgacggccgccgccctagaacccgcaccgccgcggccccgcgcttccccgcctcgcggcggcgcccaacgccctcgcgcgcgctacccgctcccgcgcgactggctgccctccgcgacgtccgcgcgccttgaaggccgcagcgccagccggctccc

SEQ ID NO: 335484 - DNA, 51 bp, Homo sapiens
  chr17:19912429-19912480
  hyper
cggaaatggggtccacatctggcttgggacgcccaaacatcgattatgtgc

SEQ ID NO: 335485 - DNA, 489 bp, Homo sapiens
  chr17:20755763-20756252
  hyper
cgatcaccgagcgcacctcgcaatctctgatcttcgaacccactgaaaaagcacaaggcatggggagtcctgttggttcacgccccgggtgcgaataccaaaagcaactcccgctggaaagcctgcaggaaactcgagacaaagacagaggcaaacgcaacgctgggaagagccaggggtgctgccgtctgcaaaagcagagacgcgtctcccttcgggcaaagtgactgctacaaagtctgttccctcctgcgcagggacagagacatttaaaggcctgaacggacgtcagcaccagtagagctcgctgggtgagcgccaggcctccccgccccaaggatagcgcgcacagggcgatctgctgctcgcgaggtagaaagtggcttacttggggagaaaacagagctggtggcgctgctgagtgtcaaaccctggagcccatcgtcaagacgttatattggtggcagttctgctgtgagtgcacttgcc

SEQ ID NO: 335486 - DNA, 860 bp, Homo sapiens
  chr17:26554429-26555289
  hyper
cgaggctcccggcgaagacgccttcctggggtagctgagccgctgctacgcctatcctcgccactacctcatcctggtcactcagccgtcgtgagcgcaggcgcggggcgggcggagcgggacccctggggctctccccctgcggccccgctccaccgggggcgtggctagatctgaccgcgcccttccaggccccgccctcaggtatgggaaactaggccgcccggtcgcgcgcctctccaaaacgttcttcccagactgcgaggaccgcctcggcaggtggcggtaaaagcgcccccatcaagtcacataacatcctgcctccgagagcgcggtctggccccaccctggtccatcacttacgacgtctcccaggcttgcctccccggatcggattcctttcccttcgatcccgcaggccggaggcgcagacctgtggtgaggacacccgaggcctcctgggagacctgcagaccacgcccacctcatttacatgttcactcccgaccctggaaacccggatttcgcctccggacagcggcgtctgggcagggttcgggtactgcagtcccgcgtctggatgcccccgccccctgagctgcagggctgtgtgtggtccttccctggtcccaaaataaagagcgaattgcacagaaacggaatgtgtgcctttgtattttctttcctttctccttcgtggaggtggcgtctcgtggaagtggagggtggaggcgtgggggccagaggagagaaaacctactcggacagaggcgctccaggacaaggctggggcgagcgcgggggttccctctgctcggagcccaaggaaaattcgaccacccagcctggggctggacagc

SEQ ID NO: 335487 - DNA, 531 bp, Homo sapiens
  chr17:26578404-26578935
  hyper
gacagagccgcgggcggtcacgtgaccccacggctggggtcggcgcgatccctgacggtagcttgcgggtgttccgcgccgtgggcagcctggcgtgcaggggcgctcagccgagggacgtggctatttctgggacacacaccagtgcacggacgccctaagggacatcctggtgcccaggggaatggtgcacacctggacatgcccggtgatgcacgcagaaagcatcgaggtaaaaatgaacggggagacacctctaaggtgtacgcacgaggacggcataaaaccattggtcagctccctaatctcaccgacctctctcccgcaaattccttatcgccctcctttctccctgcccttccctcaaagtgtcagtcaggttgtcctcagcccagaagactcttcctccagacatcctcatggccggctctgtcgccccctggaggcattagctcaaaatccaccttttaaatgggtcttatcctgacacccctgtttaaaattgcaacccggcagcgtgcggtagatgac

SEQ ID NO: 335488 - DNA, 429 bp, Homo sapiens
  chr17:26903726-26904155
  hyper
cggagtcccaggtagcaggacgaggatggcaggggaagagccaaggaaatgaagcggagatgttgagtggctcccgccttgcctggccttacctgtgcgcagccagttagcagccgcagccacaagcacagctcgggttctgatccgcaaacagatgaggctgcagccctggctccctctggtaaatgaggctgcggatgtcgcagagctacgtgactcctccgggggcgtggcctgcatgccccgccctgaccacaccccctccccaggactggtgtccggggcaagaccacgccctcagaggcggggcggcgaggtggagtgagcgccccgccaggcatccgtggctgttagggactgccctcccacctcggggagcctggccatgaccttgcgttcatttctgccacaatccctttaccacgtgcc

SEQ ID NO: 335489 - DNA, 840 bp, Homo sapiens
  chr17:27038294-27039134
  hyper
cgatagccgagcgttccagctctggctggaaccagacttcccgcccatcccgcgggcgacccagcagggcctcaggaccccagtcctcaatcattggcccgcggctcgacgcgagcccgcccccggccctagctccgccccggccctagctccgccccggcccagcactgggccccgcctctctcgttggtttgcccgtctccctcgtcggtttgccggcttcccgcgtgcgccgctcggggtctgcgagccgggccgcgccctctgcccagcccctgccccgcccctcttaccgcggcatctgctctcatcccacgagcgggccttgggctcggtcttttccttagtccatctttcaattgtgagcgtcgtcctgacccacatcgctctccgcccaggtcttcgtctctacaggactcttgcgtgaagtccaaccctgagcctcagcccggccgagccctcggcccagccgtgaactccagtctcggcttcgcccccgcctagcccctaaccccgcctcatgctggcgcagcccccgccggcctccccagcccggctccaggctgcgtagtcttcccagctgggtctcagcgtcagccgcgttcttcatccggggcctccggcgcctcccaggcccctctttatctcagaccttaaccttacaggcccagctctcaccacccatctctggttccagcttgcagtccaaaccccagattttcaccctgcctccagatcgtagccccaattcttagtgttacaacgagccttgcccccagccccattcttagccccgccccggccattctctaaaccgcacactcccgtcccgctccccgc

SEQ ID NO: 335490 - DNA, 553 bp, Homo sapiens
  chr17:27044400-27044953
  hyper
cggggccacggggaccctacgggagtccgcggtctcggagacgctacgaccaccgcgggccacggagatgaaacaatcacccggggccgcggcgagcccaaaatcacccgggccctgggcgtcccgaagatgactctggggcgaggagactcttcggccgccaattgggggcggggagtcccgtctggtgggggccgggcccgcgcagaccctacgattacgcggggccggatagttcctacgattacgcggggccggatggttcctacaataacccggggccgcggagacccgacgtcatctcggggctgaggctgccctaccattacagagcggcccgggggcgcggagcggccccgccacacggggtcagtgtgggcaggggcggcgctgccaaggcccgcaggccgctggaggagggggcgaggggcccagtccggctacagggcctcgagtcccactccgctcgggctccgccaacgctgtaacacgatccccggaaattcctggagaagggccgccccccgcccctctcctggcggctccaggcctc

SEQ ID NO: 335491 - DNA, 548 bp, Homo sapiens
  chr17:27332307-27332855
  hyper
cgaggtcccaaccccgggtccggccgccatccggccccgtctcccctcagtaagaacactagaggccctggaaccggcggcaaagtcgagcgaagtttggcgggcggcaggggaagcgggaccacgggccgccagctggaccgtcccgactcactgccttgcgccccccggcacgcgccccagcaccctgagatgcctagagtgtggcgaggtagcgcgcgggtgagcgcgtgtgtgcggggagtgggtggcgtgatgaattgcatcagagaaatcccattagatctggggagatgattaaagacgaggtctcggccgggcgcgaatggcgggagccgcggcagcttcccgcccgcgaagcccgcgccccgcccggcttggccggcgccgggggcagcgcagccggcggggcgcggtgcttggactgggcagccagatgcccgaagctgggcaccgggtctcccttcccacccctggggccccgctcccgcccccgtcctgccgccggatgccggggtcccttaccgtgagccaggagcgccagcagc

SEQ ID NO: 335492 - DNA, 590 bp, Homo sapiens
  chr17:27893141-27893731
  hyper
ctcgtagggccagggcaggccggcctcgaaccactctcggcagcgcagcacgggcgagatgcaggcggcgcctgtcacgtagctggaggagccgcactcgcccaggtaggacaggagcagcgccgagcccgagccttcgctcaccgcgaacagcggcgccgccgggtgtcggaagcggatgtatgtgaccgcctccttgaggtcggacgggtccccgaaaggctgcagccgggggctgaccagtgggcaaccgtggtggccgcggcgatggaagatgaccgggtagtagccgcgctccagggcgagcaagcaaaggccgagcacgttgcgggtgaggcgaccccacgcattggggatcaccagaagcaccgcaggaaggcccccggcgctggtgatccggcggccccgaacacaaggtcctaccacccagtccagggccactagcccatcgtccgccaactgcaggtactcccgggccagctcaggcccaggcgctacgggcaggacgaagtggcagagggtctgcaggtggggcccggagaaccaggagcgcgggccggcctccagcgcctctgagcgccgcagggcgc

SEQ ID NO: 335493 - DNA, 733 bp, Homo sapiens
  chr17:27940231-27940964
  hyper
gggccaggacgccgcgggactgaccgcctccactagagggtggtggccgcgggccgccctggagcctccacgccgtgtcccggccccggccggtgggtgggtgcgcccgggagcccgcgacattccttccccacccccaggagcgccccgcccacgccgcagcgccagcctgcgcccccggcgtcagtgcccagccctcggcccagctcagggccaggttccggcggccacgtgttccggagctacgacgagcagctgcggctggcgatggaactgtcggcgcaggagcaggaggagaggcggcggcgcgcgcgccaggaggaggaggagctggagcgcatcctgaggctctcactgaccgagcagtagcgccccctgccgggaccctcgccagcgccacgcgcgccacgcccagggccaggagccagacaaaccccggcctgcgcgcctgcagagcggcggctggagactggagccaccgcctcgcgggtgcagcagcacagcaggcacggttcggggagggattcggcatggccgcggggtaccttcccaggccagggccctggaggcaactggcacggcctggtccccctgctttgctgtattctgattccccaacccgctcccctgggctcagatctgtcctgtcctagggcggagccaggcggtcctgagggggagatgaatccttagaggagcgctgtccctatcccttgctccttctggccggtcc

SEQ ID NO: 335494 - DNA, 796 bp, Homo sapiens; identical to SEQ ID NO: 239001
  chr17:27949458-27950254
  hyper

SEQ ID NO: 335495 - DNA, 516 bp, Homo sapiens
  chr17:28088027-28088543
  hyper
cgcacggagacctccaggcaagcaggatgcgcgctcgccctcgcttgattgtttgctccccaggatgctggggaaagcggctgctgaaagagcaaactttctgagcgttcgcggaggcggagggcgcgcggcggactcacagctggttgatggcgttctgcgagatgaccgcgttggcggagaagtaaggaatcatgtcggggccaccgaggctgcaggtgcaagcgaggggcgccttcctcttgcgggccaacgtgctcagggtcatggggccggctcaaagtgcacaactccgcatcctggcctctgctctgctccggcacgaggcgcaggctgcgcgtgcacccggcggcggaggcgggcccgccgggtcgcgcggaggcagccgccgaagccccagggctcggcggtagagtccggactgacgggcgtcgccagcagttcgcccccacccgcgtccggggcgggacgggcgggtcctgagagcggagagggtaggcccggccggcgccccgc

SEQ ID NO: 335496 - DNA, 135 bp, Homo sapiens
  chr17:29020921-29021056
  hyper
tcctccgcccacccggcaagcaccacttcatcacgccaccgccagggtgtcaggcggggctgagcggttgtcatttctctctaacccgtcagaactctgcacttccttgacagttcgctggctggcctccgaccc

SEQ ID NO: 335497 - DNA, 913 bp, Homo sapiens
  chr17:29248950-29249863
  hyper
cgccgcggccgggtccctctccacctgccgggcggagcgcacgggccatgggctgagccccgctgagcccgccgggccggccatgggcgatcgcgagcgcaacaagaagcggctgctggagctgctgcgggcgccggacacaggcaacgcgcactgcgccgactgcggggcggcaggtaagggcgcggcggcgcgggcagcgcgagacccccggccggaccccaggcccacccgactcctcccctcggccccaccgggtcccgccctcggccccctggacccagacgtggcacctgcgggccccgacccctcccacccacaccgtgaacctctcacccgagccccgagggccgtctccaccacaccctgccccggcccctacgagcccaggctctgctcccctcgcgggaccagatgcgcatcttcccacgtgcttggacccggacacgagagccggcagcctagagcccttccagtcccgctctcttccctggccaggcacccgaccgcccgagtccgggctctcgatgtctgcgcacccaggcgcgccccacgccctcggactcagacatcccagccagggctaaacgtcgggcccaggccgccgacagtcctgtgccccctgcccgctcccagacgccccccgaaggcctccccagcgccccacctcggggacgccgagggccccctaactcagcctccccacctgcagctccgcgccgagccccgcggtgcgccccccgcgccctcctctcggttccttctgagtcccttcacttccacgtcgcgcagcctcagactctctccccgggccctgaactgcctccaggatcttcaccccggtcgccgcgcagcggccggtgggctaaccagaaggtgccaggctggccgcttagttcgccttaggtgggag

SEQ ID NO: 335498 - DNA, 776 bp, Homo sapiens
  chr17:29297829-29298605
  hyper
tttctagcagctcgcggcatgttggtttcccagggcaagaggccgccactgaaggtcagctctgtctttccagctgggcactggaggctctaagtctgttttcagcaggatcggaggaaggagacggggtggcgccaaggaaggaggagaaaaggcggccgagaaaaggaggagggcaaggggaagaggaagggcgagggaggagcctgaggagactcgcccggctcaaccccgacgtccgcgccccggccgcctgttggccatggcgggcctgggcctgggctccgccgttcccgtgtggctggccgaggacgacctcggctgcatcatctgccaggggctgctggactggcccgccacgctgccctgcggccacagcttctgccgccactgcctggaggccctgtggggcgcccgcgacgcccgccgctgggcctgccccacttgccgccagggcgccgcgcagcagccgcacctgcggaagaacacgctactgcaggacctggccgacaagtaccgccgcgccgcacgcgagatacaggcgggctccgaccctgcccactgcccctgcccgggctccagttccctctccagcgcggccgcgaggccccggcgccgcccggaactgcagcgggtagggaggccgggcccgcagctcccctggctcccccgggctgcccgccgcctgaccctttcccatgtggctcgaacccctttcctcagccgttctacttttacgttccttttctcagtctaaaagtcgagttccgctcttc

SEQ ID NO: 335499 - DNA, 428 bp, Homo sapiens; identical to SEQ ID NO: 239012
  chr17:29335427-29335855
  hyper

SEQ ID NO: 335500 - DNA, 311 bp, Homo sapiens; identical to SEQ ID NO: 225316
  chr17:29718210-29718521
  hyper

SEQ ID NO: 335501 - DNA, 514 bp, Homo sapiens
  chr17:29718750-29719264
  hyper
cggaggctgcgcggcgcagacccagacgggcggccccggagggcgcgcggcgatggcggcggcgggcaggcggcgggcgcggcgggcgaggggtccgggctgagctgcgggccggcccggatggcgggcggcgcgggctggtcgggcgcccccgcggctctgctgcgctccgtgcgccgcctgcgcgaggtgttcgaggtgtgcggccgcgaccccgacggcttcctgcgcgtggagcgcgtcgcggcgctcggactgcgcttcggccagggcgaggaggtaagctggcccgaccccagtcccggcccggggaccccagcccagccccgccgcccctcccccagctcccccgccgggtcacccgcgtggcccgaggcggtggcctccctcccaatcccctccctccgccggagcccaggacctcggccccccccgggtatccctggcccagccgggccctcgctttccgccccccggcgcccgtgccccgagcgtcacgcgtcacgcctagggt

SEQ ID NO: 335502 - DNA, 256 bp, Homo sapiens
  chr17:30846472-30846728
  hyper
cgccgggtgggctctggcggcggcggcgggggcggaggctgcggcttcgagcgcgacgcggtcgccaaggcaacgccggccccagcgcccgcggctgaaacgaagccgctgcccgagcccgagcgccagcgcacacgccctccttgcagccccccgcagccccggccggccgcgcttctccgcctcgccgccgacagcccctcccagcccgcctgcccgccctccttccggctgtttttgtttgtctgtctttccc

SEQ ID NO: 335503 - DNA, 165 bp, Homo sapiens
  chr17:31264142-31264307
  hyper
cgacgtgcctgagcagagggtcggggccaggatgttttccacgtcagccacctggcccctccgcccacccgggagggcacctctgtatgcctgctgaaacaatggcactgctgtgagttccaggggcccacacgttccttgttgccatggccccaggtaaatcac

SEQ ID NO: 335504 - DNA, 2007 bp, Homo sapiens
  chr17:31618426-31620433
  hyper
gaggagaagttgtgcggcccgcagagctcgccgcggtacttgcaggagagcagcatgtcctccagctggtggcccaggcggtccatgaaggcggcgctgattccctcgaagtggcgcggaggcaggaagaggcggaagtccgccagcttgcggaaccactggcggcgcggctcgtcgccccgcagcagctcgctgacaagcgggcgcgcggtgcggttgggcagcagcagcccgagccagtggccggcatagtagaggtcccccttggagaggcgcgggaagcgcagcgggttgttgttgcacacagtgacggcggggaagggtaactggcggctccactcgcggtgcacccgcgtgtgtgacgggaagctgagccagtagagcaagcggttcgaggaccaggacagcagcaagccgaaggatgtacagaaggccagcacccacagcgcccgccgctggaaggagcccccagccgccgtgcgcccggcacacatgtgccgcagcccgtgcagtttagcgcggctcagcgatggccgccccctgcgggcgacccctggcccctgcagcgcccgctcgccgcctctgccgcccccgggctgcccggcagccgccaacgccgcgggcgccggctcctcgcgggccatgcggaagcgtcccgggccggtgagcgcggctgcgggcagcccggctccgccaatccggctcattcattcagcccgcggctggcggcagcggcggcggccccggccgggcggagccgccatgggagtccgcagcagcagtggaagcagcagcagcggcagccgcgcgcagcccgcgccagggaagcgtgcgcccgaaaggagctccggtggcgcggcatgcccgcccggcgccgccgctgccgcctccgcgggcgcccgcccggggctgagcgccgcctcagcccgcagcccctggcagtggcctctcccgagcgcctcccaggctttcccggcccctggtcttcctggaggatgcccggcgcccggcactacttctggaggggtcccactgggagccgcctctccagtccctgggtgctgcgcccgccttccctcgtcctggacctcgggggaccctgagccgagtcccccctgccccgcctaaccccagcttttacgctggtcctgggagaagggccactcggccaccatgcctgatctggacatccccagggaccccaccagcccggcccgtagcccagcggtgctgggacacgggagagaaggcgccaaggaacgagcgcccccagaggcgcaccgcggctcctggctgggcgggcggggtgggtgtgtacgggggtgagtggtcgccttgccggctgccgccttctttcccttcccctccaggacccttccttgttactgctccctgggctgcgctcggcagagacctgcttaggcttccccaagtcctgcgcctaagtcctgccaggcgcccgctctcgcctggggctgagagcttctcagggcgtcctgcgggaggctgttcgccgccggggtccttcaaggatgctagccgcagggaagtgtcgcttctcgcctcggctctcccaggtgcctcgcgtctccagaaaagcccagccttgctgtctctcgcgtcttctctctgcccccgcggcgacaagagctggggactgcggggacccgccaacacctcccgggggtgacccggactcgctgctccgcgcgcccttctcctctcgagactccgagctcgcggtggccgtgacgccggctaagctccttccccggttgcccgggagaaccctctttgggccccaggcgaacttgggcagcggccgcgcgacgctggcgcggctgggctccgagcacctgctcctcagctcgctggccccgcggctccgggcgggcggggcggcggcggccgtgagcgccgtgcgctcctggagacgcggtgctgacgcgcccggctcctcctcgctgcattttaattcctggccactgtggccgctgcacaccgagc

SEQ ID NO: 335505 - DNA, 358 bp, Homo sapiens
  chr17:32483881-32484239
  hyper
cgccactagagacaagattaaaagcgagagcgagagagaaaatgcttaaaacaagtcgctgagcagctcggagcctgttaaccagcgcataatgccccatgttaaccatcctgggggatgtcagggcggccacgctgatgcactgcggtcgggcgcagcggcacagccttcagagccgccgccgctcggttccttttcccatgatgttttggactccgaatgccgtttctcgccgccggcctccgtccctcctctcctcctcctccaggcccccttttgtgggcagaattccaaatgccagcggccgctgctagcaccggggagaggaggcagcgcgcggcgcggagaggcgaggacc

SEQ ID NO: 335506 - DNA, 2406 bp, Homo sapiens
  chr17:32906886-32909292
  hyper
cgcggcgatccgctcgcccaaactgactcggagggagcgggagccgatgcccggcagcatcgagacagcgggcgaacgggcgtccggggacagggtgggggcggcggggaggaggcgtcggagactctgaaccccagaaaagttcaaggtttgtgcaggttcccccagggaaggcgaggagcgaggcggggcagcgcgcctctctgccgagacagcgagaccttagcggggtggcccggagctgccgtgagctgcaggagcccctctgcatcttacagcgtttatggtcatcaagctggagtcgacgtcctgggcaggaagggctcggggcagggcgcattagccggctttctcgctccctcgcttctccaagccccatctacatggggcagcccgttctggccgcgccacccttgccccagccgccgagcggctgcctgggcaggaggcgctgagccggcctgtgtggagcctgggccctgatccagactggagaaagcgcgctggagcggaggagcgagccttgcgaggggacaaacatctggccgcccgcctcgggcatccggtctgggcgtcgcctagggtggtggcgaccggcgtcgccagtttcagcaccgcacggaaacttttccttctccagatggattaaagttgtctggattttctctttctttgagaaagacagcattcatttgcacctgacctgggatttttatgctgggctgctgcaggggcttggaggaagaaagcggcgctatccatgtgcggttactaccgaaaccgaggaaactggggattgcgttggaagtcggcaccctcgagtgagttcggattcgagctgggccgtgaggccgggagattcagcactgggctctaggtagcccccgggacgcccgcggccaccgggctccggactgcacgtgcagctccccccgcgcctcgcagatcctgcagggggcaccagctgggggaggtggaggctcctcccgcccggagctgcgcccccaccggctccgagggtgtagccgccagcgcctgggacgccccctccccgcaaagtgtccccgaattgcactctctggtcccggagctgcatctgagacagccgggcgccacggcagccctgagttggatgtgaccaagcccagcctggggccaagtcgtcgtcgactgttgctctctcggacccctcccgcccccgcctcggccatggccccggggatgtcgggccgcggcggcgccgccctgctctgcctctcagcgctactcgcccacggtaagtgtcgcggcgcggactgggggtgaggatgcggcaggcgccactggagggggtacggggaagactggggagaggagcacccacaccccctggactcgcagccgccactccgggtttggcgtctctggctgcagctcgagttaccgccagcccccgagccctccggcgagctcagctgaggggaccgagcccggcgccagaaaagggtggggggagggtgtcgctccagtcctctcctggttataaagaagggttcgaacccgaaggtctggggtcgtgtccgcccacggaaatctagagggatccgagggatcctccggatcgcgtccaggccgccccccgcccccgtctctccctgcagccggccgggctgggggctgttgggatccgccgggatcgcgtctttcctcgccccgggcgcgcaggccggtgcggggccgcgccgcccgtcgcctcgcttcctgcggcggtcctcgggaagggaagtggactgactccgggccggggagccgccgcggctcgcacgcccgcggtcctgtgagctgcatctaaatggccggcttaggcgagcccggagggcgggggtctgggcacccgcacaggccggggcggtgggccgcgggccgcgcgcggagggagcgggctccgcgctctcgcattctgcaatctgttgcgtctgctccccaggctcgccccgggctccgcggtaaagggggtgggagaaggagggattgaggttggcgcgctttggcggtgggacagcgggcatacgggtggggggcagcgggtttttgaacagcccccaagaatgggaaatcagaccagagggaaggaggctgcagcgggccttccgcaagctggagacgctccaggaggcgaggggagcagaccgaggtgggagggagagagctccgaaaggagagtggagaagcggggccctctgctccctcctaacgtgaaaccagccgacctgggatacattttcttaaccagcaaggcgtggcggggttggggggcgggggtgtttcgatgctccacgctgaggggtgagcctcaggcagaatggagggcgcttagatggagggggcagtgggctctccgcattggtggagcgccctcggtgtgcc

SEQ ID NO: 335507 - DNA, 170 bp, Homo sapiens
  chr17:33213953-33214123
  hyper
cggggcccgtgcaccccgggtagcaagagccacgtgaacacatttgggttagtgtgtcaataagattagcaggaaagaaaaaggagaagttgtcagcatgtgagacataaaggtgtaaagcttttatcagtattgccaaatggcttcagtctccccgacctagatcccat

SEQ ID NO: 335508 - DNA, 1615 bp, Homo sapiens
  chr17:33700165-33701780
  hyper
cggttcctgctccgcgccccgcagaaaccgcggctggctggccaggggctcttccaacttccagcgggagcaggtgcacaggtcaggcccgccccgcccctaatgccttctacccccattacccacccccgccccgcccgccagtcctccatagtccgctttttagggaacctgctgagcaaactagctgggcccccggacaggggagaaaagcacagatacccccactccactccacccccagcccctccgcacccctccagcccctccccacaccccacaccctggctggggtggggtgggaagggtgctgctcccttctcgaacctggcactcgagttacagcccgacgcggattcggctgggctagaccctgaagcacgggtagaaacgcaactccggagtcccaggctgggggcaaggaccctctctgacctctcaagctccagcgcttccgaagcccccttagcgtttccctggaggcgcccaggtcgagtccttatatactagcgggttggcgccatcccacgcacatcccacgcaggagatgcaagagccaatgggcgggtctgctaagcccgcgaactctgccgcgttaaattgcctagaagctcccacccttctgactgttgccacgtagttcttagtttccgggaatttggggattttttcctcccccttcttcccacccttcctccgtctcctcgctccctccatccatctctccctccctatcatctatctattcatctatctggattacagcaaaacaaagaataaagattatgaagaaagagaagaacttcccaggcccaagcagctgtcggctcctgcgctcccaacggggtggccgtttccttcctcgcaccctcttctctcccggtgcctgcggtcccaccttccagatacccctcggagagtccagctgagctctcgccagagctttccccttccaacccgctcgacttgcccagatcccaagctgggcttctctctccatcgccccagaaagtgggtcttggagaccgaggcaagaatttgggcctccgcttctgttccagaccccggaccccttgccaaaatgcggcagatgtgcagattgggccgcgcttggttcctggctgggtttatggagcctgcggctgaggcaggctccgcagaccccgagccagagtgggatttaacggcggccggtgcgctgtgcttggtcaaccccggtaaccgtcacgctgctagtgatatgaaaaaaacctgccagcgttctgcttttctgccccgctgcagtctttagcacccgccaggattctgtccgagtgtttggattttgtaatcctcctgtctttggccaactccccatccttggcggagcgctcgcccttggccgggctccgtgctgccagccttgcggaaccctaggcccgggcggctctgtcggaggcccacttctcactgatgcggagtggcccgagggtgggagcagcggttaatgccgcactgattaatacaggctccagtgaaagcgaaagtaagaaaataaaacggatttcattatacatatacaatgtgtgtatggatacatgtacatacatattacacttatgtgtatgttacgcac

SEQ ID NO: 335509 - DNA, 436 bp, Homo sapiens
  chr17:33775294-33775730
  hyper
cgcaacgggggaagcctccaggacgcacttggctctgcctgtttgttccgcccccgcggaaaccgctgctcgctgggcaggggctttctgttttgcagccggaacaggaacacagatagcccgccaagccgccggcgacaccttccaacccctttagctctccgcaccgtccctccccaccgccccgcctccacccgcgccgcgatcaagtcctcatagccttttagggaatttgctcagcaaactagccgaaccccaaaggcaggggagaagcacgcaaataccccgactccaccggctggccggagctggggggcgggggttgctctcctagcttgctccccatccgagtcaacgccagtccagggtcgtgccggactagaccctagggcgtgggtacaaacgggagctccgcagtccccgtaggagcagggac

SEQ ID NO: 335510 - DNA, 717 bp, Homo sapiens
  chr17:33814248-33814965
  hyper
cgcgcccggccgccctgcggctttttaaggcgctccccagcccacgcacgggcggaagttttgtcatctacagctttcaagtcctccattgctaagtctacaacagcctgcggttttgacagacattgctacagagacaggagccaactttcccagaagggagagaaagcagcctcgggtctccccgagatcggtggggttgctctggcagcgccccacctcgtcccggagcccacggaccaccccccccggacccccggaataagaaacggaggctggaaggtttggcagtggagcgggacgaatttatctgccagcaattccctggaaacaggattccttgcaggcgctgtgccagcgcgggcccttaagcaactgaaagttaaacgcccacgtgaatagctctgagggatcacggagaagttctcgtttcgtctgtacctatttgtattttctaaggcgaaaaaaaagttatttaaagaaaaagagaacgaacctggcgaggtccatgtctgcgcactcttcaccaagtagggggacctgagttcttttccactttcctgctctccgcgtccgtgtgcggctagcccctcgctcagctgcatttctatcgggcactcgactccccggaagtggtggcaccgcacgcgctgttatcgactctgcgcctttggaaacggtgtgtctgcgaatccaacgacgggcgcggtgactcac

SEQ ID NO: 335511 - DNA, 73 bp, Homo sapiens
  chr17:34400028-34400101
  hyper
cgccgcccaccggctcccccattgtattgactccacattgccccctgctggtgaaacaagtgcgaaggtcagc

SEQ ID NO: 335512 - DNA, 486 bp, Homo sapiens; identical to SEQ ID NO: 239046
  chr17:35078589-35079075
  hyper

SEQ ID NO: 335513 - DNA, 190 bp, Homo sapiens; identical to SEQ ID NO: 239050
  chr17:35285489-35285679
  hyper

SEQ ID NO: 335514 - DNA, 320 bp, Homo sapiens; identical to SEQ ID NO: 239051
  chr17:35289323-35289643
  hyper

SEQ ID NO: 335515 - DNA, 2478 bp, Homo sapiens
  chr17:35290220-35292698
  hyper
cggacaagcctcctaacttgggcctcctggccgggaaagtggagatagtacccttctcttccaccccccaccaccctcttgctatacggttcaggggagaccgtgatacaagctgtgaagtactgcacacgagtagatcatttccatgagagagtgatgggtgagattaaggcaatttgagtccggagagaactagacgggaaggagaggcgggagaccttggcgctcagatccgagcgaccttatccacgcagttccctgcgtggcattactgcggcctcaccgagtctgggcggagtttgcgtggcctctgggaccggcagagtccaggggtgctccgggctggctatttcctccctcctccgggatgggtgtagcagggtgtgtactccgcatggggtaacctcctagagccggctacgccccaggcgcctcctttcacggccttgtcactcttttctgctccttgggctgttctggaaccgaagagagaggagggaaatggctaggggcggccatcatcctcgggatcaatagcagccgagagtgactgggcaggctctgtccatgggccgagcgtcattctggaacctggagggggcgggggcgggggaaggaagggaagtggaagtttgagaggggcaccttcaggctccccaaactgcatggcagctggagagggctgacagaaccctctccaacccgggttctgaccagggtccctctggggctgatcgtcaaggagcttctcaagaaaagaaacctggactgtgaaagtcacctcctaggccctctggggccgtatccgggggtgcctgggaggagggtggaaaggattctgcagtcaccgagctatgggcgaaaatgatccccgcggaccctggtccagaatgtacaggtcctgggcggtgtaagtggctgtgggtctgtggaggacattgggtaggaaaacgcttgcgtagttgaggatgcagacaataaatgtggccgggaaggtgaggagggaaggttggtgctcttcgctgaacggaactggcttaaatgcagagctgagctgagcggcttcggagaaggcgaatttagaaagcctggtcaattttctctccatgtccctgcgaccgattatgttttaaaacaaaagctcaatggaaacgaaaacaaaacaaaacccaccatttgtctaatgtgctgtccccgtggaggagttaaatctggactccaaacctagaatctggagccaagaggcgcactttgagttgcgctcctggccccccttgcagagacgccagggttggctcctgcggacctgtttactgagccatctggacaccaggacgagcggagcctgacgccctagagcgagcgtcctgtcctcatcctcaactctcctgcctcgctggtccgtctgtggggaggggccttctttcccctatacctaggtcccaaggttcttacacccctaaatggatggagcaacctcctcctgcccaccagagggaggtgacaggccctgggttggggaagggccgacagctaggtccagctgtcgtccggtaggtcccactgaccgccccacactccaccgtgacccctctgctttgcatgagaaggagcccagctgggacgggggcggaggcaagccacccgggactggggccactatagattccagaaaggggcggttgggtcgagggcgctggcggcgagaaccgggacagctgcggggaggggaggagtgtgaggacagcagggctggactggccccctccccgcaggcctcacgcagcgcagcaggctgggaggcgcctgggggtccgggtggaagaagtggggaccccatgccacacggcttttggcgcttgcgggggtgccagaagcctaccgagtaccggtcgtcttccgccgggaagtgccgggtccgcaggaggagcgcgaagccgagtccgagcccgcggagcccgccccctagatcgcagaaccgccttctccatcctctgccctgccccgcgtcggggtctgggagcgaccggcggaggccggcggcgcgccggagctgactagtcccctacgctcctccggcccgcagcggggagcccacatgtgtatgtgcaagaaggtgtggagaaggcgttagggtcccggcacccacgggtcagggcagaacgccaacgagtcgcactgcgggtctccgcggcttcggtttccatgacatggtgacgccggcggcaaggcggggggctgcctgtgggccttgaggttgctgggcggtgcgggcggagtcagcaaaggggcgttggcaaagccctaaaaccccacggttccacggagcgcaagccagattctctgaagcagcttccccgttcgtccgaagagggtattccatctgcacagcgggattccctgccagcccaggttcactgcgactccgcttccccgagcatttcccccgtttcagcttccgtctggtctgcgcatcgc

SEQ ID NO: 335516 - DNA, 2476 bp, Homo sapiens
  chr17:35293365-35295841
  hyper
cgccagggttgcaactcctcacccgaggcgcttcccggtccactccttcccccgcgccggcgccgcgcctccggtctccccgcccccatcaggaaaccgcccgaatcaactttgcaagagtgctctgcgggagacagacactcagctcgcccaggacccggaccctgtggactttggatggattgggggagggggcacagaaagagggacgggaggagggagattctgctgctaagagcctcctccccctccaaagatgtgcgctgcgcttgggacaaacttccaggtcaagaaagtacggggggacaatggcaacagccgctgaattgcaaagcccagcagtgcaggggagccgcctgggattccggacccggctgcaccccaaccttccacaaggctcggtcttggactacccccactctacagcagaactctggcctccgcctgcgcctattcccgctctctctctgtccctcccatcgaaacccacgccttaccggagcaggagggggcccaggcacggtgctgcccgccgtccgcgccgcgcggggccgcgggtgccgccgccactgatcctctaaacgcggtctccccgcactctcccgggccgggggatgcagaatggtttacagagggaccgcgaggcgctgattggtcgcaggccgcagtgacgtcggcgggcgctgcattaaggcgagggggcttccagagctcagccaacagccaggagcagtgaccaagccgccggagctggggagagacgcaccggggcggcgactgggccaggagaccagggactgagggacgcgcccggggagggccagcaacaagccgcggcccgggcgcgacagcggcggtccgcgccgagccgttccagccgccggcctactgtagccgctgcgccaggacatttttttttaaagctctccaagctgcccccctcctccccgactcctcccgctgcaaaagaaaaacaaaaaaaaaaaaggaaggaggctagaaaggaaacccagatttgccaccacaacgaaaaaaagaaggggaaaaggaaaaggagagaaagtcgagcgactgtggggttagacggaggcagacagagcgtgggccgagcgatgcggggctgtgcgcccaggcggccgcgagttgtgactggagccacgatgcacggccaggcgcggtgagaagccagcccgtagtgcctcccgaaggagcccgggcgcagggagggtcgccctgaggacacggaggccgccaggcaggccaagggccgaggtgactgggctggggcggtagggaaggagcgagtgcgcctggctgcctccgcacggagttgtccctctctgttttcgattgacacaaacacttctccaaaagcggggaaacctaagcaacaacagcaatcaacaccaagatcttcctcctaccctcccctctttcccttctcccgcggtcggccctcgccccctcccccaggcccagcgcgggcgctcggcgcgtccagacccgcggcgcgatgccggcagtttaggatccaaagcttctctgctccttttgttctttccttcccttttttaaaaaaagaggggggaaatcccagtggtgggcagcctggcacgcacacagtcgccctcataccccgacaaaagcagatgcactttgacttctgacagctctacctcaagccccggagaactcagcggcgctttcctcgcaacccgagctcggcgagtcgtcgtcttcttcttctccgtttttatttatttatttccgttcccgccgccgttctcgctgaccttcactcctccgcgggctctgagcagaagggtcgcattctctcccgcctgagacttcttttcctcgccccgggagctcaggcggcgccgctccagcccggggccccgggactccccggctgcacacttcactgagacgcccccccaggccccgatcagcctcgtttcctccaccctactttgatttcctggtgcgagttttggcttgcacggccgagtgtgtgtcctctttttggagagactggggagctcgtgccgattgtcttcaggagtcatcccctgggctctactttgcccctctctctctctgggcctcatcagaccaaaccaaagaccatggttcactgtgccggctgcaaaaggcccatcctggaccgctttctcttgaacgtgctggacagggcctggcacgtcaagtgcgtccagtgctgtgaatgtaaatgcaacctgaccgagaagtgcttctccagggaaggcaaactctactgcaagaacgacttcttccggtgagtactttcctcccacgcctctgctgctacctccccgcgggcccttcccggccagcttcggatcagaggttagcgtggcctcgctgcccagttaggaactgcttctagagagggcagccaagtcccgcgggcgcccgcctctccgccagctggcgcgctgggagcccgggacgc

SEQ ID NO: 335517 - DNA, 569 bp, Homo sapiens
  chr17:35297630-35298199
  hyper
ctagcgacctggtgcggagagcgcggagcaaagtgtttcacctgaactgcttcacctgcatgatgtgtaacaagcagctctccactggcgaggaactctacatcatcgacgagaataagttcgtctgcaaagaggattacctaagtaacagcagtgttgccaaagagaacagccttcactcgggtgaggccccaattcctggctggctaggtgcaagcgggtcctgggggaggaaggctcgccaaggccccggctcatctgtcctttccctcttagccaccacgggcagtgaccccagtttgtctccggattcccaagacccgtcgcaggacgacgccaaggactcggagagcgccaacgtgtcggacaaggaagcgggtagcaacgagaatgacgaccagaacctgggcgccaagcggcggggaccgcgcaccaccatcaaagccaagcagctggagacgctgaaggccgccttcgctgctacacccaagcccacccgccacatccgcgagcagctggcgcaggagaccggcctcaacatgcgcgtcattcaggtcaggccccggcgc

SEQ ID NO: 335518 - DNA, 1750 bp, Homo sapiens; identical to SEQ ID NO: 239058
  chr17:35299252-35301002
  hyper

SEQ ID NO: 335519 - DNA, 341 bp, Homo sapiens; identical to SEQ ID NO: 239059
  chr17:35303270-35303611
  hyper

SEQ ID NO: 335520 - DNA, 3706 bp, Homo sapiens
  chr17:36101946-36105652
  hyper
cgtgtgttcaccgggaagagccgggagagctggttatttttgtttgtttgtttgaaaacacagctcaggttcagaggttccctaacacggagaaaggcaccggtcccgaagagggcctgcggccattgtgtcccaagcgcaggtgtcaaacgccggccgcggcgcccgcagggtccgtcccgcacgctccttctcaaacaatgactttgctgcccacgagcagagaagcctggactccagcgcagtccgcagcgcgttcgttaaggagcccaacttcggcttcttagaatgcagcccactttctagacgcccccggcgcacctgcctcgaggccgcgagaaaggccagctccggccgggagccggggaccgggaagcgcgcagtcccgaccttcctcccctgcctttctcttccaggaggtttactagaactccaggaactccaaaacgcgacttttctttctctttgcttttcgtcttaagggaacacggtgggcaaaagaagggagtgcgtgtgcccgaggcttgggagccccctgtgcagtgacctaggaaccgctagcgatttcttgaaaaattactttaatcaagtccggcgctcccgggagcgggggaggaaaggcagcacccgctcgggacgggagaaaaaagcctccaggtctgtcccgcgtctccaactcggcgagggtctccggctccccagtccctctccctgccctgctggggcctggggctttggggagggaagagcggggctggggtctaaggaccctgggccgggcctggctctccgccggccgggcctgcgggtgtcggcgacccgggggctccgcgggcggctcgggcgctcacagagcccgcgtcccgcgccagagcggtgaggccgcggggccgcacggggcgcctggctgggtgcgcgctgggagcggcgagcagccccgcgcccgcgttttgatctccttcccccctctaagccgcgtttacaacttcaccaatgaataacccgcctctcttttcaacctaatcacggctctttgtgtatctttctgttgatgatttatagaaataaattaataacaccccaactccacgtgctgcagtttatgttacgtctcagctgcggccagcccggcgcggggctgggtgcggaggggcgccccaggtccttccagcgccgcgctagaaagcgggcgcctgcggccgggtgggagggcctaggccctgtggcccccggtggccggcggtgggagcctggttcatccgccaggtcctgagcgacctccccggcagccctggcgccccagccgctcctaggggccactctctcgacccctcttagcctccgcgactcacaccttccgcctcgcggaactctcttgcaggagttctctcccggtaggggagaaatcacctccgggcgggagagcgacgagggaagaacctcaaacctatgaattataccaaagtgtgtttggggaaaaaaaatctacaagttcccctgattgttttggctagagggcaaaccgccaggccctcggagcacaaattcaaatgcaaggtcatatcccaccccaaaccgccgctgcggacgtgcggccaaggctcagccccgaaatcgcggcgcttcagtgtccgaagccacgcgatgggctctgtcctaaagcggagtggcccgggagcgacgtgctgtctcagggaaccgctcggctccttagataattagtaaccagctgtcaaagtctagggcggtcggggaggacccacaaacgatcccggccctggggatacactgccagccggcctgaactcccggggagaggccgggggtgggcagcgaggtctggaaacgccctcctttctcagactgagaccagatcctctgcgaactgaggtctgagacgcgttcgcccccacaccaccgcgcttcgtttctttggccccgcgcgtgtccacccggaccctgcatggaacatgccctttgcaaatctaaacccgcgttggggatcccggataattccgggccttgcatgggcgcggctaacaagagtgcccaccagggaactcgcctcccagatcccggctccggatgccgcctgtccttcggcaaagaactgcaggtcatcatgcaggtcaatgtgtccgaggccgacatgcggctttccagacccgaggcagcgcgcaggaaaaatgcgcggcctggggcttgcagcggcgcgaggctctgctcccgggaagtcgcagcggtttcactgcacccactcgcaccttcagtcgcgtgggcaaacctcccggcaaagggctccacagctccagttctccccggcccagccccagccccgcggggaaaagcccttgggtctcggacgctggcctgggcctggggagaagaagcccggtgggccgcagggtcgtcccgctaagggattgggaagggtccgggtgttgggagagaagcagagcgccccccgggggacttctctggtgggaaacgggcttggcgagtgtggtcgggcgcagtgtcactcaggcccggggccggggctccaggggttcgggtgggtcccctccacctcgctctgcgcctacctgagcatccggtccacctccgcccgctgctccgccgcctcctcggtgttgagcgcctgcagctccttgaggatgggaggtgtgtcatagtcgtcgccgtcctcggagccctcgtcgccggacaagcggcccttggcgtggccgttggtgagagtatggaagaccggcttggtgtcgggctcggccccgctgccaggggacaggggcagcgtctccagcttcaccccgaagttcggggatggcagcaactcctccaaggcctgaaccagcacctccttggtgaccccggagctcagcagggcgctcaggagttcttgctggagcgacgtgagcttggacaccattttccaaggacggaaaaagaagggggtgagggggtgggtgggtgcgagagaggagggtggaggggagtttcacaagcaaaccccaaatccaggaacccctccacccttcagcctccagacacctgttactccccggggtcccggaggctcctccgaaaggagtcagaaaacttctaacttgccatgatcgccaccattaggccatataagatatgcaaattagtgggaagggcccagctttcggctggatgcaaatgatggtggggagggggaaacccggagagagggagagccggaggggcagacctggagagcagaagacctgggccgggagcggggctttgccagggtccattgtactcacgctggggggctagagaccttcttttactggttctgcttatcagccaaacttcacctaacctttggacttgttaagccagtgccttgcagcctaggcgcggggcttttccaccggttctcagttccgctttagtccagagagaagacactacgcttcggggttcaggtgagagccagaggaagctggggtgctcgtggaagaaggggacgcaggaggaagcgaagagtagagaccctggatgcgtcccggccgacgcaggtggtgggccaggagagcccgcagggcggaagagaaactgaccacttaggaaggggcgccgaggccacgggggaggtgaggcagcgttaggtgtggtgagcatgccctggagggactccatttatttctacctcggttactacctccaggcccca

SEQ ID NO: 335521 - DNA, 236 bp, Homo sapiens
  chr17:36204375-36204611
  hyper
cgggtgtcagtaaccaggggggccgcctgaggcgtcgcatccaacccccgcccaggtttccgccccgggccagcagtagccagtccccgagggcccatcttccagccctgaagcggtaaacgcctcacctctagtggcgagtgcgaggaaccgcaccctagcccgcctgactgtccagccccgggtggtgcccatcctgcctgttgttccctctcaaaccaaataaacctcccgac

SEQ ID NO: 335522 - DNA, 1501 bp, Homo sapiens
  chr17:36714788-36716289
  hyper
aaggggtgggatggcgaagggcaggggcgggatggcgaagggcaggggcagagggctaagttctggggaagaacagaggcaggaggagaacggatggggatcgtggagaggggagcgttaaaatgggccatgcaaagggggagctgcatggctgtggccgcgagcaggggtggtattgcagggggaggagggcaaggttaagttctggggaatatgaggcaggagaaggggttgggaatatttgcgggacagggtgtagccctatgtaggtccctgccgacagtgcggccgcatggctatggcttccatcatcccggaatggggacgggactggaatgaaggactcaagcgctggcatttgatagagcttctatggctgggacaggaagactaagttgatgatcgatccaaccctgttccaagcctgaatggcgggggtgggcaagatcttacccgttgcccagatggcaattctctgccccctccccagcctgtctctgctaattatcctcacctgacggcccctgggcctgcttgaggagcggactcggcgatgccaagctcctgacaggtgggaccatctgccaagcagggccggggagactgttggggctcaggagggaggagctgagaggacttgggggaagggctctcgctgactcagggaaagggatgcagggcaggaaggaactggaactgccccgagggatactgacgacggaggggctcagtgggtgactggggctccaggagggcgatggggactcagggaaggagaaggagggctcaatgagggggtcacgggcgagggataaggccttggtgaggaagtggaggttcagcgagggagcggaagctcaagaaaggggaaggggagaaagggttcggagagaggccagtgagcggcgaaggactcgggcgtggaagctctgggaaaaggatgaggtagtaggggatggggcgggacttgcggcaagggacttctaccagtaggtgggcgttggtggggcggggcccaggacggggcggtacctggagcttgcgcaactgctggagctggccgcgcaagtcactggcgctgttctgcaggcctcgcaggtgaagctgcatctgcagccggctaacggcggtaggctgacctgcgggggtgctgctggccgagggcgggggcgggccggacaccggggtggccccgctgctccggccgcctgacccacaggctgcagaggaccacgaggatgggagaaagtgaacaaactgtgagcctgggaaggactgggctgggacaaagtcctccctactctccgaccccacacagtagccagagaagcccgtggctctacctgccccaagtggtcagccctaacggtggggaccaaagtgccaggaaaaagacctcttgggctaaggccagtgatgtagctattgcttaatccccactttatagattagaaaacaggctcggagagaacaaggatgggggagggggaggttcactcac

SEQ ID NO: 335523 - DNA, 243 bp, Homo sapiens; identical to SEQ ID NO: 239071
  chr17:36729019-36729262
  hyper

SEQ ID NO: 335524 - DNA, 534 bp, Homo sapiens
  chr17:36829818-36830352
  hyper
cgtggtggggagcgtcggtgcagggcggcggggctgcgcggtgcgcggagggggcgccggcagccggcgtttcttggcggctccccgagccggccctttcgcaggcggccgctctggcccccggcgcaaactcggagtgtccaaggcgaagcccttcgcgtaacaccaaagtttcgaccggcggatcagacgatcgaaatgttcctggcggagatctccgggtgcggccggagccgggctggccgtcgaggggctggccgctggagcctcgggggcggccggcggggggtttccatcgacttcggcaggctggccgggcaggaacggccgcggcgccgtcccgggacccgcgggctcggtggagaggcccgcaggtggcgacggaggccgggaactgggttcctgaggcgggctggcggctgggccacgctgaggctcgagacccggggccgggcgaggcggggccgaggcgaagctggtcgtagattcccgagggtgcgggggcgcagggcagcggcccggaggtgcacagga

SEQ ID NO: 335525 - DNA, 222 bp, Homo sapiens; identical to SEQ ID NO: 204568
  chr17:36886754-36886976
  hyper

SEQ ID NO: 335526 - DNA, 159 bp, Homo sapiens
  chr17:37183538-37183697
  hyper
gctcagggcgcggcgccagcgcctgtcatgtcccagctgcgcctctgggtcccacggcacctcctcaggttggcaactactgtggctactagtccaggaggctcagcctctggagtgggtccaggaccggctccagccgacttccgaccctctggggcc

SEQ ID NO: 335527 - DNA, 727 bp, Homo sapiens
  chr17:37321167-37321894
  hyper
cgaggagccgcagtactaggaaggtccaagcagcgtgcccaatcgctcctccggactacagaggagcccgggaacccagggaagagctccagtgattggtccccctgcctgtcagtctggtgggaggcccagctctctaccctccccgcccgagagtcacttacaaccggtagagaatggtggtctttccttcattgtccagtcccacgatgatgaccgtgtgctctggaagcgtcggaggaagggcagcgtcagggccaaacccgaagaccaagggactgtgtgcccccaccagacctcccaggaaggagatagcgctccccgcaggctggggacctctgcccaccgtaccgcgtctgcttcccacccagctccgacacctgccccactccgggacggtggaaaagacagctgagcccccacctcccttcacattccagaaaagtgtctgaaaggcccggggcgcttcggggcttgccaagagacggtgtttagagaaagagcataacgcgaagtcacaatcgcaggaaactcgcagcagccccccatccccgccgctggctccgtttagcggggagaaaggagggtcgcccagctttgcgtcctggggcgcaccgaagcgccgggacccaagaggagcaggcagggacgggggcaggggaggccgcggggcagtcgaggagcgcccatatacgaccctcggagcccgaggtccccccgtgcgtcc

SEQ ID NO: 335528 - DNA, 631 bp, Homo sapiens
  chr17:37365986-37366617
  hyper
cgggggctgtaaaccggaaccggtggaggagggggcgctcatcaggaaaggcagcccccactctgcatccgggcagcgccagcagtgccccagcacccccgcagcccgcctctccttggcgccccgctcccctccgcctataaatagcacaggacgtgctcgccgtggcgatgacgcggctgggcaggcggaggggaaggaggcagctctgccagagcggtgggcggcgagcgcggcggcgggaggggtgcggcccctccatgctgggctccgatgacaggggcgactgagtcatcccggggacccacgggccacgactgtccccgccgccagcgtttctgtctccggcttgggggactgcggggacgaggctgacctcggatgggtactgagccctcccagacccccggcacgcccggtctcggagggcacctctgggtgggcaagatcggcctcgacggccctggcgcgcaggagcatgtccgcccctgcgcgactcaggtgcacatggaggcggaaagtgaccgcagccccaagccgtttccctccagcgtccccagacctcctcccactttcctcaggtccccttttggctctccccagaccccaccctcctcgggctgctggagga

SEQ ID NO: 335529 - DNA, 1556 bp, Homo sapiens
  chr17:37380887-37382443
  hyper
atgatgacattcattaattacgatgacttctctttttgcttctacccgctccccctcctctggtcccgctcccgtggtggggcgcggggctgcctgtctttctggtctggagccacaaccgcaggcccccgtcctcgcccgtgaccgacggccggcgctgctgcaggccccctcgcggactccgcagctgcgcacccccggccgcggcctcgcgtccccgagcccaacagggctaggagcggggaatgcaggactgcggaggggcagggagagacgccctgagacgcggagataaacacccggagacgccgggagagacggggagagacgcacacagagacaccaagacacagacacgcaggttgtagagacaaattcagagacacgagcgaggatagaggcgcggactgagcccgggactgggacccggcggccgctggagggtgcgcctcgcacgcacagccgggcgcgtaccccgcccgcaccgctccacgcgcgccctccggcctcgctgcgcccatctctccaacgaagaccagtggccgcctccccagaaggtcgcgatggcgcgcgcgggcgtgcggtgccggtgtgatcgggggctccttgtggcccctcgtcgccaacccactcctacccccgggagcggcgcggagcctcagtggtcacgcgggcctcgcgaccgcgaccctaggacgcccgggcccacaggaggaccccgccgggaagagggcgcccgggcccggggcgcggacaggccttgcgccccccaagttaccttggtttcctggagggcggagacggtccctggggggctgtgggtggccgcgtcatccggttcgttctccttctcgctcatctcggtcatggttcggggagaggggaggagagggtgccgagatccgacggcaggcccaccgcgggcaggctgcgggtggcgggcgtctccgggactctgaagccgttctccagaggctgcccccagttagcccccggcacggcagcccccaacccgcgggagcgggcagagaaagttgccggggtggcgggcgaggggaggccaccacgctgagccgcaggagcgggacgaccccgggcgcgaggaccgagggtctgcagaggatgctgctcgcagcgcggggaggagggaagtggggccgcggggatgagccgagggagggagccaaggagctgtccgtgtccagccggctccgccgtccgctgcgcccgccccccatcccctcccctcccccgccggccccagcccggcacccggcggcccctccgcccagtcctcgccgcccaactttgatttaggaggtcgcctggtcccgccccctgccctacgccgctcccccgcgcagccctgcaaatcaggctctcagctattggctgcctcggtggccaggagggcgaactgggcggagtcttggggggctcgacacgatggggcggggcttggcggggaaagaagcggaggagggagtttcacactgaaaaacccgggatggaggggcgtgaccagattgagggaagcttggggagatcatagtagc

SEQ ID NO: 335530 - DNA, 912 bp, Homo sapiens
  chr17:37618442-37619354
  hyper
cgaagcacaagcggcataagtccaaacactccaaagacatggggttggtgacccccgaagcagcatccctgggcacagttatcaaacctttggtggagtatgatgatatcagctctgattccgacaccttctccgatgacatggccttcaaactagaccgaagggagaacgacgaacgtcgtggatcagatcggagcgaccgcctgcacaaacatcgtcaccaccagcacaggcgttcccgggacttactaaaagctaaacagaccgaaaaagaaaaaagccaagaagtctccagcaagtcgggatcgatgaaggaccggatatcgggaagttcaaagcgttcgaatgaggagactgatgactatgggaaggcgcaggtagccaaaagcagcagcaaggaatccaggtcatccaagctccacaaggagaagaccaggaaagaacgggagctgaagtctgggcacaaagaccggagtaaaagtcatcgaaaaagggaaacacccaaaagttacaaaacagtggacagcccaaaacggagatccaggagcccccacaggaagtggtctgacagctccaaacaagatgatagcccctcgggagcttcttatggccaagattatgaccttagtccctcacgatctcatacctcgagcaattatgactcctacaagaaaagtcctggaagtacctcgagaaggcagtcggtcagtcccccttacaaggagccttcggcctaccagtccagcacccggtcaccgagcccctacagtaggcgacagagatctgtcagtccctatagcaggagacggtcgtccagctacgaaagaagtggctcttacagcgggcgatcgcccagtccctatggtcgaaggcggtccagcagccctttcctgagcaagcggtctctgagtc

SEQ ID NO: 335531 - DNA, 152 bp, Homo sapiens
  chr17:37755367-37755519
  hyper
cgccgcgccccagcctcggcctgggagcccggccgagcgcgagttcgctgcaagcgggatccgctctgagcccggccggccggcagcctccgcggtattcccggcgcgggcccctccaggggctcccctgcggctcctgggggcaggggtac

SEQ ID NO: 335532 - DNA, 754 bp, Homo sapiens
  chr17:37757116-37757870
  hyper
cgtggagcttccagagtatcagggttttcctgccactgatcctcctgggggtcggtgtcccgcagtgatttatcgggctgtctccccgagtcacaaaatcagggctgggggttcactgggggtccatagctcactgtccgagtcatggctggaacgcagctcaacaatgaagggacaggaatggagctcaacagtgaagggacagggagtaactgctttccttccctttcccgccagatgggcaaatggcctggactcggagatacctctttttctctgtcatcttccaaatgctggacttggaatggggtctggaaaatcaagaggaagatgtcctcctgattgaacttggatccagccgtcgggttcagcggcccaggggttgagctgagccggctggtggacgcttggagagcctgccgctgaggctagggcaagaagggcgtcctctctgtgccttctccccaggccaggcacagcgctggcccctttcctcctccctcccctgcttctgttcttggagcatctctgggtgtgtgtgcgcaggcgggagagcaagcaagagaaagagacctgcgaggggacgtttggggccgcttgtccgcgcacatcttcttctcctgctcatcacaccatctcgccagggaagttgagcactggggaggagggtgatgagaggctagagccagccagagtgcagggaatgtggggggaagggtcagaaatcgggaaaggggcgactggtgtggatgcc

SEQ ID NO: 335533 - DNA, 749 bp, Homo sapiens
  chr17:37760007-37760756
  hyper
cgtgagaaaccggtccggctttgcatctcatttacataaatatttattaatcgtcattaaactgaacagaaacacgcaatgcacttcgggtgtccgacgggagtttcatcttcgctacaagaggaaggtaaaattgcgtgtgtgtgggtgagtgtgtgggtgtgtcgcctgtgggattgcatttttgcatcgtgtatttggatgcctgatcccctgcctccggtgggcagagggtctccttttgcccctttttgggggaacctccagtaggagccctcagacctctccccgcccacccaccagctaaagccaagaggactccttggaccaaaaaatactctctccagacaccggaaatcgccaggtggcacccaccgaggcacagtccgggcaggggtggggctgcccccaggtctccatccccacccctcaccccaggaggggacagaatggccgcggggaggaggagccggcgagctcacctccttctgccccccggacgccggcgccgggcctgcttgtgcgtgcggtgtggtgtgcgtgtgtctttcatgcaaaccctccctccccaaaccgaccccccaacagtttgccattccatacaaatttggaaacaggtttttaaaaaacagcatgacgcacaacggggacggggcgggggagggcagtggcactggggccccaaatctccgagtcactgattgtaagaacctggggagggggagggggcggcgcgggcccccacttca

SEQ ID NO: 335534 - DNA, 897 bp, Homo sapiens
  chr17:37761159-37762056
  hyper
cgcaaaacgcggagactggaggttgggggtgagggcgttccaggcccgggctccggcgccctaacttctaccctcttcaagaaagagggagcgcctggctcctttttgcctcggcagctgggtgtctgtttttaaaataataatgagagggggaaacgcgttccattgctcagctgcccccttaccaacgccttgggcctgcagggaggagggggaggaggaaacctcagcgaagatattgggaatgggggaggggtgcctccagggagcccccggagagaggtccctggagaagcactccttgggagagaggaggagggaaccccttggggagagagaaggcgagtcccctgggggaagcgaggcccctgggacaggccacccacaggtaacaggactgcgctgccccaggagagcggcaggaccggtggcccgctccccgcgcccggcgccggggtaggatgggggtgtccctgcgctctgggggctggggacaggggggcgggcaaaggcaaaagaaaaagaagggagccggcgcgaagtctcagttatgaaaaaacgcattgagctcctcgtacatggggccccggtcgtggtgaaggtgcatatcgtaagacaagagattctccgagtggacgcccccgcgcacagccgacgagccgaagactagcccgtggcccgtgggccgcgaaccgggcagcgccgagtagtgcatagagtagtggtagcttttctcgtggtcgggcgaggagtcctgcttgagtgagaagttgccattgagacagagcggggggctgagcgggccctcgtactcggagctgttgtagtccgggctcgcgccgccaccgcctgccgccgcatacagcgtctcgtaggcggcgcagtagccgtgggtcc

SEQ ID NO: 335535 - DNA, 756 bp, Homo sapiens
  chr17:37782857-37783613
  hyper
cgacctcgcaggcctctctgaaactcccagtaccaggaccacgaaggggttaaagccagagtcctgcctccccgctgcccctctccccctccctccccctttatcctctctgctggactccatcaataatgcagcttcaagttctggggagaccgcagggggccccccagctggctccccaggccttggctctaactcccaccctcctcccagccccaggagaacacgattctccatgctcattggccagtttcccctaaaccctccctccgagcacccgggcgccagtcccaggcggaggggacgggctggggaccccaaagctgggaccggagggtgagcccggcagaggcagagacacacgcggagaggaggagaggctgagggagggaggtggagaaggacgggagaggcagagagaggagacacgcagagacactcaggaggggagagacaccgagacgcagagacactcaggaggggagagacaccgagacgcagagacacccaggccggggagcgcgagggagcgaggcacagacctggctcagcgagcgcggggggcgagccccgagtcccgagagcctgggggcgcgcccagcccgggcgccgaccctcctcccgctcccgcgccctcccctcggcgggcacggtatttttatccgtgcgcgaacagccctcctcctcctctcgccgcacagcccgccgcctgcgcgggggagcccagcacagaccgccgccgggaccccgagtcgc

SEQ ID NO: 335536 - DNA, 126 bp, Homo sapiens
  chr17:37794000-37794126
  hyper
cgttccctcaccccgcatttttgggttagtcaatgtctcctggttttcttcgtaccgctctgacagtcggtcaaagtcccgcttcacgttttcctctgtcgcccaacccctcgctctgtacactga

SEQ ID NO: 335537 - DNA, 297 bp, Homo sapiens
  chr17:38020387-38020684
  hyper
cgggccgggctggagctgccgctgtggctactcggcctctccacgtgctcctgccgtcgcctggactcagcgcgcagctggcgggagattcccggcgcggggagtccccgggatccggcagccgcgtcggcgcagactgaaaagggcaggagccggcgacctgccggtgcgcggggttacagcggcgctggctggcggcggctttaaaggacgctggccgcggagtgccgcgggttccgcgcctccagccccctttcgaatgtcaaacccaaggaaccccgacaggatggaaatgtc

SEQ ID NO: 335538 - DNA, 379 bp, Homo sapiens
  chr17:38478466-38478845
  hyper
cgtctgggcgggcaccttggagcagtgagggggattcctcaagcacaaaaggcaggggagaagtggcagggaagaggtggcaggggagaggtggcaggggctaggcacagttgggaccttgcttgcctggaggccagtagatgccggagatgaacctggaggctcaggacagggcaagagtggggcacgccggggctgggtcctctggctgttccctctccccacagagttacttgaggtcaggcagtctccatgtgtcactgtaccccgcaggcagtgtcaccgtgacccactcgctgtgtgtctgtgtgtacacacctaccttggagtggctttatcccggccctccccccggagcctctgtcccctgggtcctacc

SEQ ID NO: 335539 - DNA, 1069 bp, Homo sapiens
  chr17:38498097-38499166
  hyper
cgcccgcccctcttccgtccttgtcccctcgcagccccctcctctccctgtactcggcgtccctctgtactctgtgtactcctcatctggagcctttcccccttcctgcttctctcctctcctcccccttcccaggctgcccccacttgcctgtccacatgccgcctctccctctcggttccctgcgtttctcccgctgcagccggacgcgccgggaatgggttaagccaggggcggtgcctggacggggcggggcggtggaaagggggtggtgcccggaggggagggggcgcgcagagctggggtgggggggccgtggcgcgtaccaccagagaccgagcgagtcgccagctgcccctggcctggcgggggcggaaccgcgcgggatccccacccccacccggaatcctcgccacggagaatccctggagaagccccggatccccggctgggaggaggaagtgctcgttgacccccagccccgcgctgatcccgcccccggcctgcggacttggggagccgctgtactctgcctcggacgccacgagactctagacgggagtcccctcgaggtgaagccgctgagttcccgggccccgccaggcttccctgggagagccgacggaccccccctcccagcacacacaacttccctgcttttcaccgggactggcggagcggccggcggacttagacgcggggacttcagggcagggggcgccccctgcccgggtcaccagtcggggcgaggggacgtctcctctcccccagctgctctgctcggatggcgccgccggctgagtgacgggggcggcgcgcaggacttcccagctcggacctcttgccttcgaggggaaagatgtacgagagtgtagaagtggggggtcccacccctaatcccttcctagtggtggatttttataaccagaaccgggcctgtttgctcccagagaaggggctccccgccccgggtccgtactccaccccgctccggactccgctttggaatggctcaaaccactgtacgtaccggcctctcagtctgctgttgtagggggtgggagtgggc

SEQ ID NO: 335540 - DNA, 1103 bp, Homo sapiens
  chr17:39683530-39684633
  hyper
cgaatgggccccagggcgggagagtgggaggaggccaaagcctgagagggatgaacactagacccttccggccagagaaacggaatgcaggaggccctacgctgcggtggcagagggggcaagactggccccgggtggaccagatcaccaaagccaaactctcgcatcttcctgcggcagcgcggcccctggcctagacctctgggcactctacagccgggtcccatctcctcccactcttcaggcctcgctgacccgcgtcccttcttcgtcccggggctccaaccttgcccccgccacctccagaggccccacccacttatctgccctgcccagttctcctcccctttccaccaccccggcctctgcatccagccccgaggtcctgccccgcacgtctcctgtccccctttactcggccccacctgtggaccttcccacgtcctaacgggctcctgcccgccgccccgcctggaacctcgcccggcccgcggggctgggtttccgcggcaggtgcactgcacttcccgcggccgggcctccgcccaccttgtcccgcaggtcctggatggtcgtgtagtagtggctgtagtcgcgggagggcccaggcccctgcttctggtaccagtcgcggatcttcacctctagctcgccgttggccgcctccagggcgcgcaccttgtccaggtaggaggccaggcggtcgttgaggttctgcatggttagcttctcgttgcccgccagcagcccgtcggacgcggtcaggacgccgccgtagccgccgccgtaggcccccgaggaggacgaggacacaaagcgggcggaggacacggatacgccgcggccgccggagcccccgtgaatgctgggcgcgcgaaaggcgacccccggcccaaaacgcacggagccgccgcccaggcctccgaaggacgacgtggccgacgactggcgatagctgtaggaagtcatggcgaggcggagcacggacggagcaaccctggtctcagaagctgcgattcgcgggaggagcggcgaggccctcacctggcgccttttatgcccgcggccggtggaggggggaagggaggaatggtgtcaggggc

SEQ ID NO: 335541 - DNA, 439 bp, Homo sapiens
  chr17:40332770-40333209
  hyper
cgcacctccattctctcccctcgcctcgggtctcaccatgtccaggagatccgagacggccccgaggatacttgccccccagctcgaacctcaagccccgacctccgtcccactcacgcgttccgtcaaaacgggtggcgatggtgtccaggaaggtgttttgcggggccagcaaccccttcatgaccggcatggccccggggcgtgggttcaaggcgcggcgctggggagctttcagcgcggccgggccggagggggcgcgctgtcggaggggccggggcgccccatgcgccctcctgcctcctcccctccctcttactgccgctgccgctgccgctgcctctgctccgaaccccgtagctctcggctcggctcagcgccgtttcggtcccccccacctccccacgggccaggttcttcccctcgggctcggcccgca

SEQ ID NO: 335542 - DNA, 42 bp, Homo sapiens
  chr17:40427473-40427515
  hyper
cgcctcttgctccgtgtgagttctttcctctttgttcacccc

SEQ ID NO: 335543 - DNA, 367 bp, Homo sapiens
  chr17:40464205-40464572
  hyper
cgaggtttggggaaatgatggagatgggcgcgggtgggcagaactctgacccaggcttctccttagcagctgctgctcccagcagcctcgaagctggcggctgagggcccggcgccaagatgcttctcaaccctcggggccaggggcagtcccagagccgcaacaaccgtcccatcctcctccttcccagagaccagcaggtggcaccacgcggctgcgctgttttcagctggctgccggcgactgtgcgaggcggaggtgcagcaagcgggaccggctcgccccggctggacccccgcactgccggctgcagccagtccctgctgtcgctggggcccttgggctcagggacgcgcgctccctgggc

SEQ ID NO: 335544 - DNA, 190 bp, Homo sapiens
  chr17:40558083-40558273
  hyper
cgggtcggagatggggttgcgtaataattgcacttgggctaaaatctctgtggtcgtccaaccctgtcctgatccctttccacccgtagatgatattaaaccactacggccctcgggagacacagctccactttggaaatgggcggagcgccctctggtgccgcaaatcgcacactgcccgagccaggcc

SEQ ID NO: 335545 - DNA, 597 bp, Homo sapiens; identical to SEQ ID NO: 239134
  chr17:40573766-40574363
  hyper

SEQ ID NO: 335546 - DNA, 841 bp, Homo sapiens
  chr17:41245464-41246305
  hyper
cgctgtcatgtcttttacttgtctgttcatttggcttgttactcttcttggctccagttgcaggttctttaccttccatgagttgtaggtttctgctgtgcctgactggcatttggttgtacttttttttctttatctcttcactgctagaacaactatcaatttgcaattcagtacaattaggtgggcttagatttctactgactactagttcaagcgcatgaatatgcctggtagaagacttcctcctcagcctattctttttaggtgcttttgaattgtggatatttaattcgagttccatattgcttatactgctgcttataggttcagctttcgttttgaaagcagattctttttcgagtgattctattgggttaggatttttctcattctgaatagaatcaccttttgttttattctcatgaccactattagtaatattcatcacttgaccattctgctccgtttggttagttccctgatttatcatttcaggagtcttttgaactgccaaatctgctttcttgataaaatcctcaggatgaaggcctgatgtaggtctccttttacgctttaatttatttgtgaggggacgctcttgtattatctgtggctcagtaacaaatgctcctataattagattttcagttacatggcttaagttggggaggcttgccttcttccgataggttttcccaaatattttgtcttcaatattactctctactgatttggagtgaactctttcacttttacatattaaagcctcatgaggatcactggccagtaagtctattttctctgaagaaccagaatattcatctacctcatttagaac

SEQ ID NO: 335547 - DNA, 640 bp, Homo sapiens
  chr17:41790849-41791489
  hyper
cgcaatttgtcaccaggggttttgactttccttattgcctcgtgggaggtggcagaggcagcacatctcagaccgagcctcggttcctccccctacctcccaccgctgcgcttgaagaaagatgctgcagcctccccagtccccatgccagcgctcccacttttctctgagctttcggtggcagacagcgccttgggcactttttcatgctcataattcgaattacctgtttaagtcggtcaaatgaaaaaataccagctccgcccccacgcgggctggccggggcgcctggagcgccagggcggctgcagcgcgctctccgcggccgtcggccctgagctcatttcctggggcgcgcgcgccgggctatttcagcctggcgctgtgcaaacaggacaatttactgcggccaaaagggacccaaattacaatcgtatcacagacaaatatccgccacgccaggtctccaggggccaggaggggcctctctcccggcgcggggggcgggcgcggggtcaggcaggtccgcggggctcggctcggcctcgccgtgccctgatcggcgtttgccaccgagctgtgcctgctctctgcaacaggaaggggcccagctcccccgggcgaccgttcctatctgagt

SEQ ID NO: 335548 - DNA, 869 bp, Homo sapiens
  chr17:41984411-41985280
  hyper
tagggggaccagggggccaccgggacccagcgcaacctctgtctcgctccccaacccccggaagcgctaacagcacggttcttacgtaatgccgggcttctaagtacccccaacccgcacagcccccggggaggccgcgcagataccggggcccctcacagctcaccaccttggtgcctgaagccactttggagcccctaccgcaggggcggggaccagtgtcaatgggcagcggggcttggttctcccaaccagcaccccagaaagagggcccaggggcgggggcgggtggacagggagggaacgggcctgggtgaaaggggcctgtggagtttaaacccagtgaatagggtcctaagtgccgtgtcaggacgaaaagaaggcggaggtcttgggataggagctggcccgggggccgggggacgcctacctgcgccccgggaagcccctagctccgggcggctccagcgcagccgggcgctcagcgtttattgcttgtcaatcgctagcccggctcttaaagcggcaaggcctctccgcgagggggcggaggtccggaggagaggggaggtgaggagaacgcggaggccggcacaactcggaggaagtagtctttcccagcagctggtacgggggcagccaggtagtggtttgggagacaccgcacagaccacgacgccctgctggagtcccactgggaagggttagggaggcaggactggtaccagtacccgctggtgcccctcggctcccaaggatcccttaaaggggcgatggtaaaagtgcctaatgagaccggcttgattactccgcccacccatcttggcttagaccggcgttctagttccaggcgtgcctcacttttcctc

SEQ ID NO: 335549 - DNA, 322 bp, Homo sapiens
  chr17:41995104-41995426
  hyper
cgacagggacctgatacaacagtgcgttaaataaggagcttattgagctatcatgtcgtaagccggtggagaagtccagggctagtgtgggggctccggcgggggctgtggcccccatccgcatggagcctccccacggttcacaggtctcggtcttcggagccttcagccccgtgagcccgaacagtccacacggcggcgccagaccctcttcccaacgccaccctctgaagcctccgctccaaccgtctccacttctgcttcaggctcaggattttcacttttctcgaatgggggtggccctcccctgatcttctgagtc

SEQ ID NO: 335550 - DNA, 627 bp, Homo sapiens
  chr17:42030245-42030872
  hyper
cgggtttctggggtcgggagtgcgtatgcaaatgacgtgggcgtggttggcagatctcccaggaggcctcaggggtcctcaccacaggtctgggccctccgacctgcggaagcgaaggggaaggaattggatctggggaggcgagcctgggagacgtcgttaagtgatgttgccagggtagggccaggccgcgctctcggatgcaggatgtgtggtaacgggcgcttttaccgcgacctgacggggcggtcctcgccgtcggggaagaacgttttggaaagaagcgtgtccgggccgtctcttttcccatacctgggggcggggaagggaagagcgtggtcagatctggccacgcccccaggtggagcggggccgcagggtgagagccccaggggtcccgctccgcgcctgcgctcaccgctgccgggtgaccaggttgaggtagtggcgcagggaggcgtagtagcggttcagctcctccggcgaggcgtcttcgcggggagcctcgggtttgatggggtaggcgtcgaccagcgcccctaggcagacgagcagggccagaagcactgtggtcaaggcgggccacggcctgcgcacgaacaccatctgggaaggcgacattgggac

SEQ ID NO: 335551 - DNA, 523 bp, Homo sapiens
  chr17:42061046-42061569
  hyper
cgctccccggggccgggtcttaggcgcacattggctcgcggtgcacgtccactctcctgtaggctcgtgcccttgacatatccggggctgtcacagtcccatgccccgaccccgaccccgcgcgagtctgcttgatgacgtcgctgtcgcaccccaccggcctccccgggtcctccccaggcgcgcgcaggggccgcgtgtccggtgccggccgggctgagtgttccgaggcgagcggctgctgtttgcgcagctaagtggcgtctgtgtacccagcggggcgcagcggtcgcgcgcttatctcccgcaaacaccgcgcccggatccgccggaaccacggccgcgccgccccatttgcacgccccggccgccggaggcccttatcgcccgcgtttatcgggccatcgctgataagaaaccgagggggcggcggggcggcccctctccttggatccaagaagcgatggggtcgctgttagggggggcgccagccccggggatgcggggagccttcgcagcctcc

SEQ ID NO: 335552 - DNA, 2121 bp, Homo sapiens
  chr17:42081919-42084040
  hyper
cggaccccgccccgaccaggtccagccccgcccaacggcaagttaagagccccccagtgccagacgctccagacagactgccactcttggggggcaagagttggttgtcgtcatggcgacggcgctgatggctgtggttctgcgggcagctgctgtagccccgaggctgagaggccggggaggcactgggggcgcccgaaggctgagctgtggcgcgcggcggcgggcggcgaggggcaccagcccggggcgccggctcagcaccgcctggtcgcagccccagcccccgcccgaggagtacgcgggcgcggacgacgtctcccagtcgcccgtcgccgaggagccgtcgtgggtgccgagtcccaggcccccggtgccccacgagtccccagagcctccttcgggccgctcgctggtgcagcgggacatccaggccttcctgaaccagtgcggggccagccctggggaggcgcgccactggctcacgcagttccagacctgccatcactccgcggacaagcccttcgccgtcatcgaggtgagcggagcccggcgtgggccgtgacgcagcgaggggatggggttgtgcggccacctgtcctcaggcatggcaggatacgctgcgggctctgcgcagcggaagcgggaaggagcccggcagggcccagaccagcgccgccgggaatgggagaggccgtaagctcctccggaagcctcccgcccagcccgagtgaggatcctgggggaccccacccgccaggtgtgatgctctgaagaaggcccccaacatgggcgcagttaggggttcagaaggacctggacaggagccgcttgcactgcccctcccccaaagatgtcccggagtccaaggtcggagggaggagggcgggaggtaccccagcgtgagacaagggagtggcaagacccaacggggcaaagggcggagcaggtgggcactggtggccagaactgggtcctgacagcttctggaagggtagggtcaccgagacggccctgcaggccaggctgtgggagccagcggctcaggtccgtgtcacgctccttgaaagcccactcctccgcaggtggacgaggaggtgctcaagtgccagcagggcgtatccagtctggcctttgccctggccttcttgcagcgcatggacatgaagccgctggtggtcctggggctgccggcccctacggctccctcgggctgtctttccttctgggaggccaaggcgcagctggccaagagctgcaaggtgctggtagacgcgcttcgacacaacgccgccgctgctgtgccattttttggcggcgggtctgtgctacgcgctgccgagccggctccccatgccaggtgagtgcccgccctgcccgcccaggcgtcctcagagcgtgctactctgcccgccctgccccgtccggcaggcctggagggggccctctcgagcaccacgtctggcccacagctacggcggcatcgtctcggtggagacagacctgctgcagtggtgcctggagtcgggcagcatccccatcctgtgccccatcggggagacggccgcgcgccgctccgtgcttctcgactccctggaggtgaccgcgtcgctggccaaggcgctgcggcccaccaaaatcatcttcctcaataacacaggcggcctgcgcgacagcagtcataaggtgcggccctttctttcaccttcccccacgccggcgatccgggccttctcttgcgcccctcgcacttctccccgacgggccgcagactcactagcaagccgggtgggtagaaaagcctaagggagtataggggaggagttcagccctgggtgcccagatctgcgccctccctggctaaggactccgggcggaagtaaggataaaggggtcagagaaaagagaggtccgtgggggtaggggggcagtccgtgccggctgtgggccaggctcacccgctgactccggacacaggtcctgagtaacgtgaacctgcccgccgacctggacctggtgtgcaacgccgagtgggtgagcacaaaagaacggcagcagatgcggctcatcgtggacgtgctcagccgcctgccccaccactcctcggccgtcatcaccgcc

SEQ ID NO: 335553 - DNA, 815 bp, Homo sapiens
  chr17:42091712-42092527
  hyper
cgaggcgctcaccttcagccagtccccgtagtggacgtagcccccgatgtaggcggcgtaggtgctaatggccaattggagtgcggcccccagcgcgaaccagcgccgcttcacgccaaaggacatgaaactagcgcacagcacggctgcccccatgtcgaaatacaggtaaggcactgggatgtcgggcttcctgcgagccgggagtggggaagcaacgaggacagaatgaagcggtgggggaagaagcttgagaccccttgagttcccacaggctccactgctcccccaaaccagactcccctcccatgggcaggaccgccctaccagatttggtccgacacccagaccagaacccctcccagggaggtcccaattcctcccagttcaagggtcccgacttctagcccccaatttcttgcccacatcaccgccccctgccgcgtttagcggctgcgtaggcctgctcaccggcgtgcctcagccctctcagcgtacagcatgagctggctgaagcagccccaaaaggggcagcgtgtgagcagcaccgaacccaactgcatgatcagctgcaacatccaccgtctcgaacctatcttcgacgccatcttgggaaagggcagtccgctgcggcctcaccccagtcagagaagcaggcgcggggatgggacacgcagcttccgggtcaagcgctttttctttttcctcccggaaacaacggtgtcattctctagttccggatctaaggtgacccagttgcgaagtccagccttctcgtctgctcatggagccttcagggccatatttgtccctgc

SEQ ID NO: 335554 - DNA, 399 bp, Homo sapiens
  chr17:42402710-42403109
  hyper
cgtgagccgccgcgccggccttaacagcgcattttcaccagccccgccccggccgcgcgcggcactggaaaccccagcgccttctggacggcgagggtgacgcactggccctcttcctcggtgtcctcaggtgcgtggcggcggcagtgagaatgagttcttcgagatcgccgggagaccacacaataacgacgaagttacttgccgggctacccgccgagacttgaaaacttcgcggcgacttctctcgccggccttagcatcgcccccatttttcaggttacaggacaggcctgcaactgcaaaacgctttgtaaaccacagggccccgcgcgggtgtgcgccactgggttagctgagctgcagcccgggccgggcgggctgggacgtgagcaagcc

SEQ ID NO: 335555 - DNA, 1685 bp, Homo sapiens
  chr17:42906461-42908146
  hyper
cgatttcacatcgtcttgatgctaacaaaattaagcatgagcataatgaaatcggtatcactgccagttctcaatgaacaaaaagaaaaccaaattcgcccatttcgcaaaggaaaagtactcccaatcagacaatcgcaaaaaaaagaacaaaatctaaaccatacattcacgtacatcttttcaactcagagctccaaacgcagccgccaaccacacaactgcccacaatcacagcggtagcgcctactcttaattttgaagctagagacttaaggaaacacacacacacacaaaacagttctcaagtttgacaaagtgggggaaaagtcattttaagtaaagacaacgagttaatcaggaggcgatgagcccagtccttccgccccgctttcccgcttccagccctcgaacgaaccctcctctaacccccgggaggcaggagttccagcggggagatgcgggaagcctcagacgagcccgcacgccgccggagacgcagggatcgaggtcggggagacaaagagcagcccgcgaagagcccgggcggcgaggggcggcccggctccgccctgcgcccctaaccgcccgggtagttgtcggcaccgccggggcgccgccgagtgcgcgccgcttctgtccgggctccccgaccgtcgcccgacacctccgcggcccaggacacccccgagccgtttccctcccgatttgggagccgcgcgcctggggacaaagagggagggtgcgccggggacagtggcaggacgcgggccggcgacgcccctccggactcggcgggaacccctcggcggcgcccccctccttctcccgctctggccgcgctcctccccggacctccggaggttctcctcggcccctccccgggctccccaagagttctcccgcctccccctgggaccccgcccctggcccgcttctcctcagccggccctgcggccgcccctcacccggcggcgggttcccccggagccgcctcctccgccgggcctcggcccgtcccgccggtcgcggcctcatgtgccccgcgtcgccatcgccttcaccctcgcctctcctccacctcctccgccgctgccgccttcgcctcagtctccagccgaggcagaagccgctcccgccgctgccgccgccgccgccgcctcccgctcccgccgccgcgacccgcgggaaggcgcctgcgcactgcgcgctgcggtgggggcgggggcgtcccgccgcggcccgggagcggggggcgcgcggcacgtggcgctcgagtgggaggggggcgccccagaacgcgcgggaagcgacgcgagcgccaactttccgcggtcgagtcctcgccgctctctcggatagtccgggacgcggcggaggcgcggcgcgcgtgggagtcacccgcgtggagtctggaccccgggtgggcgcagacttcgctccggacagttcattcttccaagctgattttcgggcgagagtcccccgccagccgcgcctcagtttgagcgggccgctaacggcgccgtgggttctcgccttacctgggtatcctgggttggtttagcgggcccagagttgtcttctgcgcgctccgccgaggccttggtccattgtagcacgggatgctaatgtctcctcccaggttctgctctacaattcctcgaggatctggcgggccctgc

SEQ ID NO: 335556 - DNA, 434 bp, Homo sapiens; identical to SEQ ID NO: 239193
  chr17:42988669-42989103
  hyper

SEQ ID NO: 335557 - DNA, 841 bp, Homo sapiens
  chr17:43044728-43045569
  hyper
cgcccccgccaactccgatcaggtacccatttgccccgggctccctgggtgccctgggcccagcccagccccatgcccccgcctggcccacctggccattcttgcagaggtctgcccacatactggtgccgtcgccgccgcgcatgaggacatggtaggtgaaaaagtaggtgccgggaatgttgcacgtaaacttgccgctggccgcgtcgtagttgttgcctaggttggtgaccacgtcgtcaaacttgagtacctcgtaaccctcgtgggggttcttgaggccggcgtagaaggccacgcgcggcaccgtggtgtaggtggcagtgctgatggcgccgctgccccccgcgcccggcagccccggagggcccggcttgcctggctcacccttctcccccggcggccccacagggccgggaggacctgggtccccgggaggccccggagggccgggcttgccggtgcggcccggcttcccctgggggccctgcaccagcgtggaaggcgggggcgcgccgctctgctcgctcagggcgtcgccgccgtcggtccgcgcgccggcgccggggccccgcgcggggtaggggtcgcacaccatgcggcaggtgcccagcatctcatagtggccttccgggccgcccgagctcaccagcacggggatgagcaccaccagcaccagcagcatcaccacacccgcggcggccgctagcagcgtctttcggcccgcgcggagcctggggagcgccgggccgcccggccgcgccgtcggggcaatggtgccggcgggcagggggcgcgggctaggcgcccgcgctcaaggacggtccggcggggctgc

SEQ ID NO: 335558 - DNA, 398 bp, Homo sapiens; identical to SEQ ID NO: 239197
  chr17:43047527-43047925
  hyper

SEQ ID NO: 335559 - DNA, 309 bp, Homo sapiens
  chr17:43298587-43298896
  hyper
cgtccgcgccccccaccctgtttaggagttcctgtttggagatggctccccctcgtcctcagctcgtctctgggctaagcaggggaggagagaaataaaaggtggggggcctggaagggggttcccaccttctcagtccgggacgcgagacgggaacgcagccctggcgccccaacgctgcaccaccgtgggtctccgagccgtgctcgcagtcgctgagatcctcggtgcggagaagatgtgcccctccaatccccaggccgtgatccccttcacccagacccggccaatccctcgcccgaggcgagc

SEQ ID NO: 335560 - DNA, 883 bp, Homo sapiens
  chr17:43324788-43325671
  hyper
cgggcgccggggagaagggctgcttcttcactagagttggcggcgagggagcccgcttcgagggggcggaggctttcgtggctggcccagtatccctgcgggaggccggagggggcgagcgggcagctggggttagacacgccgggccagccccgcagcagttctccttccggctgccccgccccatttgcgccagtcctgcctcccacccgggcatctggccccttttcctttcgccctacccagtacttagtgacgccataagtgacctcgccttacatctccgcgcgtgccgcctccgtcaccgcctgccgggtccccatttcttccgggcctgcccccgctcctcgcctgcccctcccctccaccagccagtgtcgccccatctgtctgtcctccgggcacttgtcccgcccctcactgcgtgtccctcccccgcccgccggctctcacctaggccgagacacgccccgggctgggcgggatcttggggcggccgggctagtagggctggatcaggcggaagccggggcccggggctgggcttcgtgtcctgcgttccgggagcgccaacccctccaggttaggaatctgagagtacgggctgcgcgcacctggggcgggtgcctgggaggaggtggaggaggagacggtcctcagaacgggtcctgggggtcggaggcgagggcgggggttgtaagtggccgggagaggtccctcccgcgggtcccggcgccccccgccccgtcggggacgcacctacttcgtgcagtttgtgcagcgagcgcgccagctcctagttggagaggtcgctgatgcgcgccgcgtggcagaaggcgagccccgcgtgggagcgccccccaacccccgcagcctgggctga

SEQ ID NO: 335561 - DNA, 225 bp, Homo sapiens
  chr17:44849686-44849911
  hyper
gtggtgacttaaaacgttcaacgcggagtgaatgggtagcgctcccagagccgctttcccctggctcttggccggagacgggaagagcgatcagaggtgactcgcttttggggagcgcgtctagacgcagggttgtttgattcagcgctacctggcccgaggaggggcaccggaaagcgctgagaccaacacaccgacaagaacgagtttgaaatgcaaaccgcc

SEQ ID NO: 335562 - DNA, 267 bp, Homo sapiens
  chr17:44919154-44919421
  hyper
tgagagaccttgagcaaccacgtcctcctctgagctccgcgtttgccgtgtgcaaagtgaaggggtaggccgaccccgcagggcccttcttgcgctcctctgcggtgtgtgggggggtctctggtccgcgagaggacagtccctgccgcgccgagcgtcctccagcgtccgcggccgccgcgagcagcgctgaccggcagggggcgctcctgcagaaggctggccgcggtggcgccctcggcggggcctgggctggcctggggaccc

SEQ ID NO: 335563 - DNA, 726 bp, Homo sapiens
  chr17:44928894-44929620
  hyper
cgccgcctgccccgccccacccgggtttaaagtcccgcgggcgggtggtggcggagctgcgagcttgagcggcgcgaggagatgctagagggcgcagcgccgccagcaccatgcgccccccgcccgcgctggccctggccgggctctgcctgctggcgctgcccgccgccgccgcctcctacttcgggtcagtgcccgccgcgccccccgcccgctccccggcctgcctgtctctccctcctgcgctacagctgggccaatttttccctcccgctgtccttggccccgccgaggtctcgaactcagaccctagcccggcgcgacccaacccacttcgcagtcggagttcgcgccctgagttcggtctccagcttccccggctccgaatccatcgccctgttcagtgtccgagtctctggtcgccccccagccgccgctctcctcatcccgccgggtctcggactctgcgcacgcctcggaccctggccccgtccgccccggccccgcccgttcaggcgtcagtcccgctctctgatgccctctcgggatcctcacgccggtgccctgtctgccgccatcctggcctccggcgagccgtccttgcctcggactccttccccaccctccgccttcgccctgcggagcggagaccgagagggctgggtggatgggtgggacgggctgttcccggtctcggggcagaggatcgtgcgcgtccagggagaa

SEQ ID NO: 335564 - DNA, 895 bp, Homo sapiens
  chr17:45055681-45056576
  hyper
cgcgagcgaccgcagtcccaaattgcatctccatacccactcccaccctgccccgaacgtcttaaaaaacaaacaaacaaaaaaaactggtaagaaccctcaccccacattctcccaccccgcaacgctgcagcgcacacaggacagagccgggcgtccaagtcccttcccgcgcccccgccgacagtctcgccgcgtccccgcccgggcgccccaggcacgtagctgcccgcccggaggcggcggcagagcgcagagagcggggcgagggtccgggtctccggggtccttcttgcagcagcgctggcgagggcggacccagatggcgctcagtacagccccaggatggctgcgcccacgtccttggagggccggcgctcctgcaccagaaagttgatcatgctctcggacttgatgagcaggttgcagcccaggaagaagacgccgaagaccacggtaagcgacagcacgcagagcacggcgatctgcgccacccgcgacacccacaggctgcgctcgtcgggcgccagccccgcggggaccccgtcgctggcggccagcggtgcgccccctggacagcagcccagccacgtgcccagcccgtgggtgcggtttcccagggcggccccggcgccgccgcccacgccgtccacctcctccaagccgctgtggttcaggaaggtcgcgttcatcgccgcgcggcgccgggggtctcggcgcgcagtcccgggtgcactgggctgctcgccggggtccgcgctctcagggacgctccggacccctcggaccggctcctgcggtacggggaggggacgaaggcgggaggctggctgcctgcgcgctctcgggccgcctacccctgggcaccgggcgggaagcgaccgcccggaggagc

SEQ ID NO: 335565 - DNA, 814 bp, Homo sapiens
  chr17:45330951-45331765
  hyper
cgctgacgacccggctggcaggcgggtcctcgtgggcgaggcgagggaggcggcgagagaggagcaatagtttcccaccgctccctctcaggcgcagggtctagagaagcgcgaggggatctagagaagccggaggggaggaagcgcgagtccgcggcccgccccgttgcgtcccacccaccgcgtcccctcccctcccctcccgctgcgggaaaagcggccgcgggcggcggcgcccactgtggggcgggcggagcgccgcgggaggcggacgagatgcgagcgcggccgcggccccggccgctctgggcgactgtgctggcgctgggggcgctggcgggcgttggcgtaggaggtgagtgaggctccggctcggcagcgtcgcagctgccccaggatctgcgccccggtcaagttgcggacttggagccggcaaacgcggagggctggtcccgcgcgtctgcgctgggaatgcgcgtgtcctggctggcgcggtcggagccgggagctggggaccttcctggcccggcggtggcggggctgagaggtgcctggtgcctgggagcgggtcctccgagacgccgaagccatcagccaggctgagcgccttcccggccgccgcggcgcgcacggtgcggtgggcgcatctctgagccccgcgctcacccggggctgcgcgcgtcgcgggtggtcctggtcgggccaaggacgactggcccaggagccaaggcgaggtggggcttccgggggttgttcccgcgccttggcagagggatgccgctgtagcttcctgggtgagagcgtgcgcgcgcgc

SEQ ID NO: 335566 - DNA, 475 bp, Homo sapiens
  chr17:45500789-45501264
  hyper
gtcggctgcgcccgcggcccggggcggagttggccaccgcgcctggctgcgggcggccgggcgaacgggctcggcgcgcaggtggctcctccttcgcttctcccgatccccggccgtgccaggcacggtgccggctgccgagggaacgcctttgtgcccggtcctgggaacccgcgacggccgccgcgcgccccggtccattgtttcgcttctctgggttccaggtaggtgcgggcggcgcgcggggtccgcacgacgtgtcaccccggcggttggggcgccgggacccgcgggcgccggcaggggcgttcccgggcgcacggcggcggtgcagcacctgaagcggtggtggtcggccagcggcggcctcctgcacctcaccctcctgcaccttaccctcctgctgagctttgctgggctccgtgtagacctagacctttacctgctactgccgccgcccaccctgctccgggac

SEQ ID NO: 335567 - DNA, 938 bp, Homo sapiens; identical to SEQ ID NO: 225395
  chr17:45810488-45811426
  hyper

SEQ ID NO: 335568 - DNA, 618 bp, Homo sapiens
  chr17:45928211-45928829
  hyper
cgcgttcggagtgcgttttttcgagacaatctccgtagcgctcacccctggccaccccgacccgcgctcctacctcgaggctgcggcgggctccgggcacggctggctggtgcgctactgacggtcgctcataggccctgtgcgccggcgagctctccagcggtaaggggcaggagcccagggcgagccagacccggcggctggcggcaggcggcaggcggcggaggtgagcgctggcgagagggcggaggacggagggcgggcaggagccagcgagcgaacaaggccagctccgcccgtgactcacccgcgctctctgccttcatcctctccccagcgctgctttttcccccggactcgcggccccgcccacctcacctgcggccgcctttaacccttgagggctcggctggaccggagcccagccagggccgcgaggagggggtgggcgggagtgggggaggaaagataactagggcgtgcgccgcccgctccctcgctcctccctggtcccctccactcccagggagaggggcccgggtggggtgattcccaggttctaagacccgccccgccgggtggaaaactgccctggagctagctcggtctagcagagga

SEQ ID NO: 335569 - DNA, 790 bp, Homo sapiens
  chr17:46089217-46090007
  hyper
cgtttcctgggccattcctctccaggcagccctcgggagttcccgccgcaccgaccccagccaggctccagcggtcccctctcttccatcccgccatctctctgaggggcttgcgtctccctgatgcgctctggtgtctgtctgagccatccatcaaggatggcaggctgggggaaacatgaaaaagagcctatttggctattaacatcccctcccgctttgttgtctctctcctccccagtcccctaccagcccctcacccaacccctcccttttccccttttgcaggagacaaaaccagactgacaagctgaagactcaaacattaatcaaactgcgctccggaacaacctttccctcgcattaataaatacatttgcggcccctcattggacagttggcctaatttgtttctttttcgcggggtggggggagcagccgcgcccgcgccccctggctcccagcagccctgtgcaaagcagatgttccgccgcagacgcggagctgcgcctagccgcgcgccccggaggccgcggttgccatggcgacggcggggccgcctgctgtcgccgagcacgctgtctcgcccgctcagtgattacctccatctccgcagtgttcgccatacggcccggattctaatcagatcccctcccccctcccccctccctcctccgcccggcccactaccccttcagctcccacagccttgggactcattgagaactgcccgcgcatccctgacggtgcccaggaaggcagagtgggggagagacgacccgcactcagc

SEQ ID NO: 335570 - DNA, 629 bp, Homo sapiens
  chr17:46124683-46125312
  hyper
cgcatcagctgcgttaaaatcaccccagcaggcaggttatccggccgccactccagggtcattaaatcagactctccagtgggacctcggaattcgtagcttagcaagctccccaagtgatgctgggagtaaactaacgtttgagagtcacaaacatgttttggcaatataaccagatgggactggagaaattaaaaaatgagaaacatccctaaaaaagcaagactaagctgcgtgggaggccaaacgaggggggtcctttgggctgtttctaccatgacaaaaatcgccattaccccacacctctcacaccgccaacgttccgccaacgttccgccaacgtcccaccaccctcatgatatccgtccgcggtactgctccagcgaaggtacccttgcctgggccatgaggcgcaaccgtccctcacagctggggtggcttctccaggttcgcaccgaggggaagttggggtaccggtttccgccgccagcacccaagatggcggcacgagcgtcgcaaccacaagaaccacatgcttcgtgtcccgcctcagcattctcgggtctcactagacttttgcaagtcactgtgggaaccctcaaggcgagggtgttccgcactctggcggc

SEQ ID NO: 335571 - DNA, 210 bp, Homo sapiens; identical to SEQ ID NO: 239223
  chr17:46507535-46507745
  hyper

SEQ ID NO: 335572 - DNA, 1855 bp, Homo sapiens
  chr17:46620299-46622154
  hyper
cgctaattcagtaatacctgaattttagcaaaacacataagtctatgcgactgagggtgggagaggctcgatttttccagtagacggccaaggagcgcgggggtcgaaaggaccgggaggaggaaacaggttagggaaactgcaggtcgatggcacagagcgtactggtgaaaaaatccagctcttcctcggaaaaagggaccgggctgtcgagagaaccctgtaggctaggggagaggcctccggatagctggagacaggagtcggccgcgaagaagttgaggtcgggaaggaaaggtgaatcctggcgccccgagaagacgtcttctggcaatggcccgggctccagcccgccggccccgcgcagcgcgcagccgggactcgacgcgcctgcgccctctaagcgaacggctaaaggccgggggtccgcgcttaaggcccccggcaccacctccggcgggtgacagcaggcttcccacgccgcccgcgaggcggaggggccgcccgggctggccgcgggttcctcggcagggtcgcagatgtcctccagggctcccgggcaggcaggctccccatccggcggctctcggtgctgcgtctgccgcttgtgcttcatgcgccggttctgaaaccagactttgacctgcctttcggtgaggtccagcaaggccgcgatctcgacgcggcgtggccggcacaggtacttattaaagtggaattccttctccagttccagcagctgcgtgttggtgtaagccgtgcgcagcctgcgcgccccgccgccaccagcctccggcagtcccaggccatctgcagggaaaacaggctcggcgtcatagcgggccgtgtactcagcccaacctcagttcggactaccccatcctccaaaaccagtatcacctctccccttcctcgccaccccacccccgcccccaccccaaagccgctcgctttactgcttttgggttttcttctctccctctctagtctacagccccggcccgggtcagggcaaagcattcagagccgcccacgggccacgcagggggcggagagcggctcccttcggcgccggaacctcagatccccctcccaagccctcccagtggacccctcaattcggaactttccaactcaaccggagcgagggtcagaaagattgttcttcacccctcttcctccctagctctgaattcttcctcttctcctagagttggggcagaaaggaccgaatcttttctgcttctagggtctatcccagcaacaacatactcattcccctacacagatacgggtgaaaacctcaatcaaatcattttcttctagcagaaaaaaaggcgtttccccaaccagcttccaaaatcagccatagggagagaaagagagagagagacagaaaaaaaaaaagacgctgttagcggccaggcctgaaccccagtgggatattctacttccccatcccaggaatggagggggtaaggaaccccaacaggctcgccaccattttttttaaacctccttccactgctttttctccccctcttctagctgcccctcaccccacccccaccacgcttaccgacctgcaggcgatccgaccccggaggccggaacggcggaggcggccggagaaggagacgtggcggattggctgggtttcttggcggatttcttctctttcatccaagggaactcgggggccgggggggcagcggggagtggcggcggcggtggcggcggcagagcaggcccatcttcggctcgcttttggctcctgggtctctgaagggtggaggcgccgggctggaggctggggaaggtttgctcgaaaggaggaggaggaggaattaatgtc

SEQ ID NO: 335573 - DNA, 1577 bp, Homo sapiens
  chr17:46654966-46656543
  hyper
cgaaaaagtcgctggtgagaatggtgaagaggatggggaacctacttcaaaggcgcagggcccaccaggccataaaaatttatgggggatgtaattatgtggctctgaaaacaggcgaccgtaaatctccggcaatggcgagtttatagcggggacaattggcttccccagctcaacccccccccaacccatgcctccgaagtccctttggtgtaaagctccaggggtgggagggggaaggggtgcccacgcactcacccgtgctcacgtgaactttgcgcatccaggggtagacgacgggctctttgcacgcggagtgggacgggctggggtgcagggggttctgggcgcagggaggcggcggggggctgctgctgaccgcctcgcagcgctggccgggctccgggaggagggccccggcgggtggcggcgcaggagcccgaggggacagaccgggcggtggcgggggcggcgggggtggtggcggaggcggcgggggcccagggtcccggcaggccgcgtagcgctgcacggtgcacgccgcgcgccgcccgaagcccgcctccggctggaagctgctctctcgcctctggccgccggcgtagtacccgggcgagtggtcgctgggtaggtaatcgctctgtgaatattcctcgcatggagggaacttggggtcgacatagtttgagttgatcaaaaaagaactcatagccattaatttctgggaattgcccacaaaatatactaaaatttattccgacccctgactcgttttcctgtttccgaaagccctcctacttactgtcaagtgaacaaagttaggcgcccacgtgatcctccgagccaatggccgccccgcctgcgattcccggataaggaaatctgctcacccggaccccactccagccaaagaggtttatttccccttcttcccttccccctccccacccacccacccaacaccaggatttacatagggctcctgcggggcgaccccctccttgcctcgctctctccgggatcagagagagagcgagagagagagcgcgcgcaggttgcgactggagggcctgttggggcgctaggcagagcgcaaaccctagatcccttaagaagttggggctcccggtgtagccctcctgttctgcctcacctctgcccagcattctgtaccttccaaaggccccagtctcctcccctcggcgggagggagcgctagcaccctgcgtctctatggggagttaggttactggcgggttgggggctccgtctcgaaaggggaacccatacgggggccagagcacagagcttggggcttttctctgcagctggatggggaagggtaggggtgagagaggaggcgtccagagctagagggcgggtgcgcagagggacttgtcagagatgaatggaaccgcgggcggatcgataggaaattcatgcactaattcggggagacttcgccttccaaatctcatttagctgcacggttagctagactgtgtccgtcagtccgtctgtcccccttctcctatccactcctccctttaacccacacggcccaagcctggagaaac

SEQ ID NO: 335574 - DNA, 773 bp, Homo sapiens
  chr17:46659093-46659866
  hyper
cggcagagccaccgcgggtttgggtatccttgatcctggcgcccaagagcagagatttttctcctctgcgccctggaagtcaccacctgccaatcccaccaaggcgccgcacccccctcacccctccagccgcctgagatggagaacagggtttatgggcgactcccaggacgggtttcaccggagcgggaggctgcctctccccttcaccgcccagaaggatacgaacagcaacacgcataatagtaaaataagagcaggggctgcgcgcgagctgagccacctcccctgcgctcccgggtctttccgtggcttcccagccgccttctcctggcagccacaggttgctagcgtgacctcgcccctcccagccaccctccgccgtccaggcgtgcccagtccgctaggaatcatcaccttttgttggcggggagaagggactcagcgagggagcgaaaccgaaggcccgagcggaggcgagtccccagccggcctgcgcaccggcggcggcggcgcggaggagagaaaggcccagagggggcgcgggcgagggtactcaccgggaggctccccagccccgccggccgccgagccgcccgcggacgcgccgggcaacagctgagctctctcctgtccactattgtgtgtccggaaaaccggaccgcggcggcggacacagccacgggctccctcagaagccggaacgtgacttttttttttggtgtgtttttgttttggaagcgcaagttttcgtgttaatctcatactttggc

SEQ ID NO: 335575 - DNA, 563 bp, Homo sapiens
  chr17:46663380-46663943
  hyper
gaccaaaaccagccgctgtgctccgaagccgcaaggctcagcccggatccactaggggagaggcagtccagagggcggcctcgcagactgggaactgtttccggggaggagaagctagaggatactgcagagagtgcatttttctctccaagaggaactttagggggagaagagacaagagaggagacgcctaaatcactgagaaaaggaataagaagagagggaagagaaacgttaaaacttggggacaaggtgctttttgggatccgacaggttcccgaattgcccgaagtccaatactctccaggctcccaaatttcccctcttcctcttggagcctgcaatcagtaaattcgccaaaagaaagaacgaaagatccgcctaaacctgccggcgtgcccccacccccggtctacagaggcggaggtggctgcggcggtgtggccggcggcgcgtaatgtatgctgcagcggctcggagccccacgtaggccggcgctgctgcccccgtctgctgacctctgcatgatcccggactctatgaattattgatgagatatgagc

SEQ ID NO: 335576 - DNA, 765 bp, Homo sapiens
  chr17:46670752-46671517
  hyper
cgggcgaggacagggagcagctcgaagccgcttgcctgaagcggggctcctgggcgggcgcggggaaggcgcgcgagctctcgcccaccgccccaaagtggctggaggaggccgaggagcggttgacgctgaggtccatcccattgtaattgtagccgtaagagccggtgtgcatggcagcgggatccctgtaagagccgctcagagagctgccactgccataatttagcaactgatagtccgggccatttggataacgccccgagaaggagtttacaaagtacgagctcatttgggtgattttggagggcttgatttgtggatcgtggtcgttataaccctgtgcttcacgatttatgatgtattaatgaattatagcgatgcactgtacttcgttttgctatgtatgcggccaaatatggggggggggttggaaggggggtggggggcgttagggaatcacgtgcttttgttgaccagtcgtaaattctcgctgatgacctcaagaggtaattcatgctctatggttacaaataatgacgatccgagaatcgttagggccgattcaatgcgagcctccgagagagggggaaaaaaggagaagggggagaaacagagagaaggttggctttggcctctgagcagagcgcgccacctcccggcgaccgacgggagcgcgggcgtgagaccgccatggcggcgggcggctgcctccctgctggctccctgcaggctccctgcagtcgccgggagagaaagaaaccc

SEQ ID NO: 335577 - DNA, 908 bp, Homo sapiens
  chr17:46674938-46675846
  hyper
gagagacccccggccggcgcccaatcttcttctatctcctaactgagatgcccacccagcaccctgtgggagattggggcagggggcgctcactagttctgtgtcccggggtgggcgcccaggggagccggggcgacggcgacgggaagtctcactcactgttgcacgaattcatccgctgcatccacgggtagaccggagtggagcacttctgctcttctgtctcgccgaacacgctcttgtcctgcgcgcagtccgacttccgcggctcggggtggaacgggggctgctcgtcggcgccggagagtgcgcaggccgactctttctcgcggtagaaggccggcgccggcccgtagtcgcagggcgccgctcggccgtagccaccgcccgccggcgggtaataggaggaagtggcaaagcccttgtcctggcccggccctggcccgtagggcgcggggtaatgtctcagcgggtccgcatagcccgacgaatagagcggtagctggcccaggaaggactcctgcccgctggccagagtgacggggaaggtggagttcacgaaataggaactcattgggaggggaggcgcgcgcggccgctgctgctccgccgggtttatgatttgttgtgttttatagtccgagcgccgcgcctattagtagtatatccgagattgggttttagctgaggggggatggcgaggtgccagtgagggccagaaggaaatacaaccatctgatccaacactgaccaatggcagaggcaggaattgtcaaatagcacccaggaggagcgcagcccgcacgagggacccgcgcacaaacctatcaacctttttttttttcctccttctccttcgcctttctcctctctccccccaacaacacaacgcgtcctgttccacctac

SEQ ID NO: 335578 - DNA, 1600 bp, Homo sapiens
  chr17:46687527-46689127
  hyper
cggccttcctccgcaagacaaacggcctcgtctccagcccgtgccggcgctgctgataaatatttaaagctaaaaggccgagaggaagggtgggggcgggctgggggctcgcagcgccgtggtgccggcgaagagagatccgccgggaagcagagcgagcctgagagcaccgagcaaatatgggggcggggatggcctgctgggtcgcggcccagtgggtgcagccttccagggccgacctccggctgggagcactctggacgcggaaaggggcgcccagccgggaaggaggcgccttcagggtaatgtgccccggcccctggggctcaggacagctcggtgcgcggcgttacctgagcttcgcatccaggggtagatccggaagttactctcggccgccaagtccgagtccctctgctccttggcgcccgccgccttggcggagtcgccgggacacaccccggagaggttctgctcaaagggcgcgcagtgcatgttgaaggaactcggctcgagcccatagccggccgcgtagacgccggccgcgctctggcccgccatgccccccccgccggggtacaagccctgcatcgaggcggcgaaggaagcgcccgaacccgctccatagcccgggcgctgggggttggaagcaaacgcacaagaagtttgttctgggaaggctccggtagcgaaaaccgaacttgaggctggatatttagaaaataaagtattcgcataatacaatgaactcataatttggccggatgatttgtaggcagggacgttttagtgtcggttttacgagattccttgatatattacagaattagagtccagatttacaccaaaaaggaccccctttttcctctccggaccacgtgaccccgcccacgtgacgtcccctccgccaatggccgggccgtctccccacggctcccggtaatgtggaaaaaattgtgtggcgttggatttataaaatatgatcaataatgaatgggaaagccgagccctgtggattggggctgggggctcaagggccgctgccgactcccgcgggctggaggccgcttgcaggcgagatttggggaggaagagattgagtggaagggaaaataaataacctcggggcgatccgtgtcaccctccacccatcctcttcagcccgttaccgagcgagagacaaacgcagggattgaatgcacgcaactgggtgggtgggtgcttggggcaggtctgttctttattaaaccaggccaattctgcacggcaaggccttttggggaagttggtccggttctcccaagacgaggaatgaggcgagcctggctcacgactctgtctctcttggtgccccagatatgcgggcggagatggagcaagtcttcctaggtgctcctagggcacaggatccagcccacgggccttggacgctgccgtttctggtggcaaaaaaaaaaagaaagaaagaaagaaaaagaaaaaaaaaggtttgaaagtaaaagaaaaagggggttgggagggtggggagagaaaggaagggtggaggttggcccgggcgcgctgctctcccggttcccggaggcggatgcctcagtggagc

SEQ ID NO: 335579 - DNA, 1023 bp, Homo sapiens
  chr17:46690031-46691054
  hyper
attgggaggggaaatgaggacgcagcgagagagagcgagagcgagagcgagcgagcgagagagagagagagaagggagacagaaagaattacggcgtgaataggcagtttcatgttgttgggagaacttagcagaaatcggtaccttggtcattacaaagaagcacgttcaaaggaaaaaaaagacaattgcacaaggaggctttttacacggggaggggaggggcatggggggctcagccgggcctttgccgctcgccctcacagggcgagggagcctttgcttaaatccttttctttccccccggcccccaagagaagggaaggagatccacggtagctcacacacagaagctattacgagatactaccactagcggggactggcgcggcgggggacgctgcggtgggaggcccggctcctggccccgctagcggggccagagctctctcgggcaggggcgcgcggcggcggcgcggccgggacccgcggacgtgcgggcggccgcggccctggcagtcccagctgaagcctacttcttgtcgcccttctgcgcgtcgccctcgtccgccgcctctggggcccgctccagcttctgtttctccagctcctcctgctcgcatttgctgctggggaacttgtctttgttgttctcttttttccacttcatcctccggttctggaaccagattttgacctgtctctctgtcagtcccagggcgtgcgatacctcgattcgccgcttacgagtcagatagggattaaataggaactccttctccagctccagggtctggtagcggctgtaggtctgtcggcctcgcctgcgtccggcggctgctgggaatgggggaaagggcgagacagaggggaggggagggtgggggagggggcagggacggagaaggttggaagattcgtgaacgagcctgggagaccattataataagggcaggggaccttctaccccgtgcgggggcggggggggcgcaagaaggccgcggtcggcggaggaggaggggc

SEQ ID NO: 335580 - DNA, 1155 bp, Homo sapiens
  chr17:46691437-46692592
  hyper
attcaggaaatgtttctaagcgacccccttcaagggaaagaaaaaagaaagaagaaagaaagataagaaagaaaggggaaaagcggcaggcgatcggaacggagccggcaagtcttccagaagctggaggaaatgcgccccggcctgccaggccttgggcccttccggccccctcctgcccttgtcggccccgaggcgagctcaccttgcgggcgcatccaggggaagagctgtgtgggcgacgggctctgctcggagccctcggcctcctcgcccaggccgctggcggcggcaagcttgcagtctgcgtactgcaccaggtctggatcctgcgcaccgaataggctctggcgttgcagcgggtcgtagccgtagaaattgccggggtccccgtggcacgccacggcgcacgggttctgctggtagggagccgtggacagcgacgacggcccgtggtagaactcctggatttgcgacgggtgctggaagctgccgccgctgctgggaccgtacaccacggtgggtcggccgcccaggtcctgggcgaagccgcagtcataataattggggcgcagggactccccggttttgtatttggagaacagtgagttgacgaaataagagctcattttattgaattttgaggcggcggcggcggcggaggctatagttgggggctgttggggagggggtggggagggggaaagggagggagagagagaaaaaaacgcggattcgccggctcctagtcaccctcgccaggaaaggagagggaaagagaggagggaaaaaaagaaaagaaagaaaaggcgaagaagatctcgaagccgacacactttttgtggtttccaggaatagaaaaggacagagaagcctccaaaagtctaagcttgcatggcagccgcggctcgctcgccctccccccaccccccaccccccaaacaaaaatataccaccacttaaagaggtcctcgctttacatttcgaagaagggatgccagttcataaacagttttcggtgatttacttccctgcaaatgagttgtttcatattttgcactgtcttttcatgatcatttgcatccattagagaccccgcatcctattggcttcttcgtactcctcccggacagaacgcagagcgagggtgagagc

SEQ ID NO: 335581 - DNA, 492 bp, Homo sapiens
  chr17:46711018-46711510
  hyper
agggagtccacctggccgcccgctccccctcccgggtataaatcttggggaccggaaatacaataaaacttcaccgtgttgatgaacttcaaacggtttacatcccctcctgtcctgaaaagaaagacgtccgggggcggattaaaaggaaggggaaacaaatttacgagcggcagaagcacccgcctcggcccctttctttgcccgcacactttgtccgcgtggagagaagcagccccagcccccgggacttggcctccgccgaaccggccgccaggcgcgctcttctctcggaggagtcggcgctgacccagcccgcgcccggcagagactggaagccgccgcctacacggaaaatccacagagccccgcgcagaccctatgatcggctcggcccgccgggcttgggatgaggctccctgcttctcgctagagcagaactgggctccctggcgcttccttgcgaaagcccaggctctcccaaccacgccc

SEQ ID NO: 335582 - DNA, 471 bp, Homo sapiens
  chr17:46713841-46714312
  hyper
cggagaattcagaggtgccagaagccgagttcctagaccccagctggattttttttttttttttttttttttttccaatttctggcggcgggcggctggggaagcagctctgtggtctcccggcgggtgaggccgagacagagaccaacctctaggcggcgccctggcgttgagtccgcgctgaacaagattctctcgcagctctgcgtcccgcgccgggtgaaggggcgtgttcctgcaggcgctcggggctcggcctggagctggcggccggcacgtcgcctttggcgccctctgccaaccaagagaaacacggttaaatgagtgcgctgggacagaaatccacagctaatcaaggccccatccgctcccaccccctggcccttacctcctaactccatctccgacgctagggagccttccacagcccgaatctcctttgatgtccccagcagccggctagagggcagc

SEQ ID NO: 335583 - DNA, 531 bp, Homo sapiens
  chr17:46723839-46724370
  hyper
gcccacgcctgccacgggcggttggtcctgaaagctcgggccacggggctgcccagcttggagaggggcctttcacgccgcagtccccagctgcgagaggaagggctgcgcccgcctcctcacctacctctcggaaccacgccgtcccccgcgcgtcttcgtagactgcaggagtccagggcgtctggggactgtgacggcgcccaaggcgggggatgtggcggctctgggtcgccgccttctgcccccgcctctgtgaggcctctcgaggcagtgtctgtgtctggggcagcgacgccgacggcgctgggggcgcgaaggggctcacgctcctgcgttcccctggcgccggtgagtggcgggcgaggacagggtccgggagggggataggcgagagcgcttcctgcctccgcccgggcggggctcggccgtctcacctgcccccacccacggcgccgtcggatcccagagcggctggtgaggagatgggcctggcgcgccgcggggaggccagaggcgcggaggagcagc

SEQ ID NO: 335584 - DNA, 371 bp, Homo sapiens
  chr17:46755634-46756005
  hyper
gcaggaagggcaggcgccaagcctcaagtctcaaacacggtgcggggctgcgcggcaaggagaaacccaggagatgctcggggtcggggcccagggcagggaaaaccctcagctctggtcaaaagccaagtgagcgaaggaggcgatgcaacgtcaccctggtggccaaggcaggcacccaggtctcgaggttccaggagagggacgcgctgtgaccaccagccccctaggctcctgtctgctcgatgagcgtccactcgccagttccagccgcgagcgcccccagcactcccggagctgggccgggcgccgccttccctcgggcggccggcaggggtcagtgtttggccgcaggtgaacagacagcggcc

SEQ ID NO: 335585 - DNA, 218 bp, Homo sapiens; identical to SEQ ID NO: 239243
  chr17:46795453-46795671
  hyper

SEQ ID NO: 335586 - DNA, 857 bp, Homo sapiens
  chr17:46795709-46796566
  hyper
cttaactttcataaacgccggcaccgaactcaacgcaaaactacccaagtgccaaagaccatttctgggaagctcattccatgagaccttcgcatttttccaaatcaaaggcttcccttcggatctaattatttctcctctacagggctgcgggagggggaggggatgtgagactagggcaacagattaagattgaaagtcctttctcgcagcttcattttcgcccccacactgtcccaaatgcttagaaccctcctcgtcagaatgggaacggtgcccccgcttgtcctaaaagacacagaccaggtccgtgaacttgacccaggcgcccacgcctcttttccccgaaggtcagacaaaggcagaagggttggctggattctttcccgggccgcgaaggcctggggatcgcaagttgaggaggagaagaccgcaaacccctttggttcaagcaagctctgcggcaggtaaaaggcaaattggtggggacgggtaggacagggagagcattatctggctaactcccgcaggcctcttccgatttgtcggcggggacctgactccctgcggtgtctctggccccaaatacggaggccaggagcttttcgttgtctcgcccgatttggtatcttattagccggtgtcgctgagccgcgggggactcccggctggaaaggaagccctgcgctcgaagcgccccacgccagacggagtggcccctgcgcctccccgcgcgccggcgcgccctgttcaccttcgactggatgttaccgagccagggagagacccggagatcgagtgtttgatcttcccttgctccaggatcctgaattctttaaacacactcgcacgcgctc

SEQ ID NO: 335587 - DNA, 999 bp, Homo sapiens; identical to SEQ ID NO: 239245
  chr17:46796632-46797631
  hyper

SEQ ID NO: 335588 - DNA, 498 bp, Homo sapiens; identical to SEQ ID NO: 239246
  chr17:46799464-46799962
  hyper

SEQ ID NO: 335589 - DNA, 1140 bp, Homo sapiens
  chr17:46800174-46801314
  hyper
cgggggcggtggagaccaccagcctggaacttcaagttcaatggcaaagtccctgaccctccccccaggctgggcgccagcattattctaggggcgattaaactcttttgctgccccctgtgcacctcccagttcgggggcagtttaggggaggagagaaggtaatggtggaattctttccctcactctcccccgaccacttcgtcccctccccctcatcccctctacacagaactaactggtagggagagaggaagaaaggctggcatcggttcctcattggatgttttaaatctgtctcaggcccaggccagtgcctggggggaggggcggggtgtcctgcttttgggctagaggcccggggccgctcccgagctttctcccctcttccctggagagcgactgttcgggagggtgagaatggtataaatttcaaaaacaacgaaaccttcttttgccccctccgcagcagtcgcctccgggctttattgcaagtttacggtaacgagttcatctatttaattcgcggttgcagctcggggatttctattagacaggacgggttggggccggggggcacagggtctcccctgaaggaaacccaattagagtgcagcacttagcaccttcaatataactttaatgaagggggggaggggagctgcagggaagagaagtttgctctaggttggggaaggaaagctggagctgctcccgagaactggggggcctggatgaggctttttcctgcttcgagggctttccagcttccggcccgggaactactatttggagtagggatcgcctgcagggaaggcggggcggattctcggctggcggcggcctcgcagggttcccggaagcgctagccagccggagtaaaacccgaaagatggagcctcaggttcgcgctctgcgttgcgggtgctggaaccgagattcaaaaagagcttccggaggtagtttctacgcattgcgccactactcccttattcggcttctggaggcctaataaaatccacttgctttggagttagaaattatttcgggcctggagcccgcgtagacgcgaccctgtgatcccatttcgtagcttgctgagagattcgctgcgggagtttggctctgagggaggggaac

SEQ ID NO: 335590 - DNA, 243 bp, Homo sapiens
  chr17:46801836-46802079
  hyper
cgagatggctcgtaccgaacctccttgccttcttcctgggtctctcgggggctggaccaatacatctgccgatgccctggccgaatggcaggcgacatcgggtcctggacccccacacgcagctcagtacccacgaggccccaggccgctggaagcctgtagctccgcggacgatgaaagcctgcccgcaggttctcctggagtggtgagcctctgtcggaagggggcgcccacgtcttttta

SEQ ID NO: 335591 - DNA, 891 bp, Homo sapiens
  chr17:46802381-46803272
  hyper
actctcgccagttccgaagtcggcgagggagggggtttacttgcccgatcgttggtgggtttgagcttatagaggcagaggagtaagaacctgcgatattgaaagctacccacatggggcttccttgaaggaggacgtggaaggcagaaagtgacctgctctgagcggcgcatgtaaccgaggaccttaagctggaccacggggcttggacgattttttaaatcaggaaatcgacctcatcttcctcctcctcgtcctcttcccctgaacccccagtccgcatgcactcacactctttggccttttccctcagtcccgggctcctctttggtaaatagatttgtaggtgtctaagtcacgtcccaccctcactccttcccaggagaggagacagggctaggatcccacccgaccgcgggccataaacacttggctgcggcggccgccgcggggtttctaggagagctggctccgggagggaaatgtcctcgaggtagtggcggccgcggcccaccaccaactgctcgccaccgaccccactactcgccaccgacccgctgctcggagcttcggttctgcgggttgtccagacttcaggcctgtgcgctcaatcgtggagaatgcgccggcaggccccccacccccagcctaaggtgcaggaaggaccagcacgaacccgctggctttgctgcgcggccaggagatgagtcccaccgggcactgagcccaggtacaggacatcagagaatgaacacagaggcagaggccctcatgtccctctcagagtcccggctctgcaaagagcccgtctgtctccagcttccagaattccgcactgtgaatctgtctacgtggactgggaaaacagggttggcaccactctgccactcc

SEQ ID NO: 335592 - DNA, 292 bp, Homo sapiens
  chr17:46804122-46804414
  hyper
cgctcctcccacccaggcaaggagatctcttaaggggtagcgctgttcttcaccttggcgagaaccttcttctctttgacccggcggttctgaaaccagatggtaatctggcgctccgagaggctggtggctgccgagatcttgcgcctcttgtccttggtgatgaacttgttagccgcatactcccgctccagctcccgcaactgccccttgctgtacggaatgcgtttcttgcggccgcgacgaaaggcgcaggcgtcaggagggtgctgcccgctggagtctgcgcggc

SEQ ID NO: 335593 - DNA, 615 bp, Homo sapiens
  chr17:46806440-46807055
  hyper
cgtccggggggaggggaggcgtggtgggcggaggaagaggggacgaggagccgggccccacctccttctcctcctctccctccctagctttctgtctcctgcgctttgacaggtttaacgagagaataaaaagctctctctataaagtgtccatctcctgggggggaaggggagtcgggggtggggctgggaggccgctcccggcctcagaggagaacccgggaatgcgcctgtgtaagaggaggctgggaaatgggggttaataggtatttctggcagcccctggctttgggtcctgggtactagcaccccagttcattcccggtacccttcctgtcccagatgtcctggaatgagctgctccgggccccagggaggtgccctggacgccccttacccagggactcgctactgcccagaatgctctggaggccctgattcgggtgaggctgagggaagaggcgggagacacgaacgtagacgtagaagacatgcgatctggatggaacccaggacactccacttccggacctgaaggggaaatggagcctctagagtggcctgtggaagggtctggatttccctttaagtaaagacatacggagggacggagac

SEQ ID NO: 335594 - DNA, 432 bp, Homo sapiens; identical to SEQ ID NO: 239254
  chr17:46810526-46810958
  hyper

SEQ ID NO: 335595 - DNA, 238 bp, Homo sapiens
  chr17:46811407-46811645
  hyper
tcctttgcagcgctctcgcccagtttttccattgttcttctctgaagtctggaaagggcctgcggggctatagctctcagcggccggagcctgcgcttggcaggggacggcctggaggacggcctagtgtggctggtgggttcgcggagccctgccctggagctctgcctgaggctagaacagcacccgctggagatgaagggtgactccggcctttcgccctgaaacgaagtcaagc

SEQ ID NO: 335596 - DNA, 1071 bp, Homo sapiens
  chr17:46824276-46825347
  hyper
cgctttataattccacgatgtttgcatcattttggcttctgagaggctgcgttttgaggagacaccagaagcctgggaagttcgcttactggttctcaagtcagagtcccccttcccggggctccttctggggactccgggggagagggatctctctgtccatcctgcaactcctctcctggcatagatgccccgcacccccaccttgggccatccttatctgcctgttccccatcacgattgatcctccagggtcgccaaggctcctgctgactacaaaaacatccccaagattcccttcttgacccggttcaggcatatctctttatacttccatgtctccgtttctctatatttttactgtggaggactcagaagagagctgaggctattgtccggggaggaaaggaattcgggcaaatttgtgggtaggggcccagacccaagacccgtgtttctcctgcgtgggttggagtctgtctcaggtcgctccagggacatcaagagcccgcgccgccgagagcccgcgccgccgtccagcgggaagcagcggacccacaggggcctccagccgcctccccgctcccgccccgtgtttctcctgggcctccagctccgtggagagagctgagagttctcggcccgcgggcttcctcaccaaatccccaaaaaccgacgcaggcacagagggctgactgtgttttgagtaatgcacgcgaggcagtccaatccggcgagatggcccgaagcggggcccagcggtcgggggtgtgggtctggagagagagggtctccccacttccttcctccggctgctcggtcacccatcgactacccgggcggaagcggggcgcagaggggcgcagagggaggcattgccctccaggagtatctattcccatcggggtatggtgaatgccatctaggcccatgctccattcccagggccccctcggttcctccaaaggcgtccacccagaagcagccccagtgtcgcgcattgactcccgccggccaagtcgccgccgaaacaggatctcctaaagcgggctccaccgggtcccagggcga

SEQ ID NO: 335597 - DNA, 198 bp, Homo sapiens
  chr17:46826849-46827047
  hyper
cggaattccgaccttattgaaaaaaatgaggagaggtttgttttgtttcttaatcatttcttcgccatctctgactctctttaaggttagaagacacggaaaagttccacattgggccgggatggcaaaggctggatcactgcagaacaaagacctcagtcctcgcatccccaccccgacccccggcagcctctttcg

SEQ ID NO: 335598 - DNA, 321 bp, Homo sapiens
  chr17:46827421-46827742
  hyper
ggaaagccaggggtcgaagggatcgattctaggggccgcagaggctactctcgtgctctggagaagcaccgcatctttctccggacccccgcgctcagccaatcgccccaaagtctccaggtgggggctccgcattaccagtcttggtcgcaaaagcagccctttcaatcgcaccgaatttcccctggtgtgaaaaggcgccatcgccagcattttgccggggtttatgcctcaatcccgcattccagccacttccacgaattacttggaagacagaatggtttgtgcccatttatcctacctggagcacagacaagaaac

SEQ ID NO: 335599 - DNA, 1263 bp, Homo sapiens
  chr17:46829437-46830700
  hyper
cgcacctccaggcgaccctgcagactggggtcgggaaaaggacaggctgagaagtctagaaaggcaaagaagttaacgatgtttggcagtctgaggtcttatcagtgtgttggggtcaggtgggggccgaggcaacaagctcaggcagacgccagccggggctgggacggtgcaggtgaggaggggctgcctgggggacagcccgcctcactgacccaacctgggacaaggtagtggctgggttaggggctggggtgtgtcttggagcccccaggtgacaggagagggaggaagggagtgactggtgaaacattaaccccctcagggttctgaagggaaggggaacatccttagaggacacagggagaagacaaacgtcccttcatcctgagattcacttggaaatcccctgaacttccaactcctggctgatgaaacggagcaagttgtctctgccttatggcctccatcaccaagcctgaaggagagtctctcagcccggtttgggagtaaacccaaaaccgttcattcgtcagggaatgccccaggttggttcacgcgagttttaaaatgaatcggaggtgaaatggagctcattaccctctcttcagcccgaccctcaatctttggcagcgaggggcagttatgggacggggggcgggtgggaagagcgcccagggccccctccgggttctcccacggtttcccgcatctgggcctggccagcgcctttgggaggaagggcctaggcgcggtagggatgcctgggagtctagggagtggcgggggtgtttcttggcccggcagggtggggtttccaagcgtgatctcctcgccctggcagagccggggtgccgggtgggggcaggctcgggggcctgcctgcggtgaatcaggcttgtgacctcaggccgtccaggtaaacatcctctgcgctttggaaactgttgggactagaaaggagcgggcggcagggagagggaagggggaaggagggattctgagtggaggagacctctgaaatcctctctcctgccaggaaaccagggcggtcttccaagcgggcagccacgttgcctacttgaggccaaggcagaagcatcaatcacatggggcgtagtttctgtctggctaaagaacggctcacgcggacctcgggaatgcgactgtggaaacgacggggaagctggaagggctgggtggcgggggaagctggagggcacagcttccagattccagtttgttaagaatcacctgaaggac

SEQ ID NO: 335600 - DNA, 1722 bp, Homo sapiens
  chr17:46831220-46832942
  hyper
cgctgcagagccccgtgcttagtgaccaaaataatgtcccgcctgcctcatcttcctctcggatttttgccaaggccaaactgcgcgtgtcccagaaaaaaaccctcggacacttggcctctgccctgtctcagccgagtgactaggatgactgggaagtgaatcacaggaaaatcacccaagcccactcttctccacagccggtgagcagaaggaaggaagcaaagaaggaagggaggaagggaagaagggagagttcagttccctttcgtcgttcacacagtggtcctccacaccaggaaacctaagggctctgtggagggccaggtgccgtggcagcaacactcctcagggcctgtttcagcaccccatttacgtggcacatgaaaaattcaggatgaacgccctggctgaaagctcttcctgggtttgggacatcagaagaccttcccgggatgggctcttgtctctgcagtagctatgacctgcacataaacctgtttcctacactgtaaaattggcgtaaccaccattccctcccagtctttctctggagtcctaatgggaacagtgacggaatgaaagtgaccacgctggaacccgaagcgctgttcccctccgtggcttcacactgatctccacactagaattccgtgtctgcagttcaagttcaaactactgtggtcggggaagggctacagagatctcgcttggccgtggagtcaccggccccgtccagtcttgcttgggacacatactggtttacactctctcgggttcagtttcctcatctgtaaatggggctcgtatccccctcataaagtggtttgggggataataaagcttgtaaaagcgctttgccccagtgcttggcacataatacgcgctacgttaacaatgtcgcgtacacgcccgaaccggaggaaccccattccacgctccttctggaaccgaattcacctctgaggctttggggcttcagagccggagccgcttgggcaaaaccagcagaacagcgagagggaacgggctggtctagccctgccctgagcatttctactgagacccccggtcctgcttcttccagcctctgctggatttctctccgacccctctggagcgaagccctttggccctgcgttgcatgcggcacggtgcgggttcgggctctgcgctggagccgggatgccctccggcggagggtgcgcgtaggcggcgcctgggcgtgagccccgcctgcaaggctcagcgtcggggaagcacttttctcgtcgacccggggtctttttccgccaaggagctcggggctcaagaactcgggactgggctgtgggcggggcatggttttcctctctgggcgtcctaatctccaatttcaggcaaattcgctaggaagaaccttcccgagcgcgccttctccaacaggacctccaagccagcctcacgcacgcaggcctggctctctcctgcagaatccccacctgccctataactacccacttcagatatgggggaatggaggagatattccaatcacgccatctacctacagtttccacggccccttctgttgaatggtattttcctttagggtccctagaagcagagcaaatgaaaaggccagggggaaaaaaaaaaaaaaaagaaagaaccggtgaattggctctgagcccaataaacggttcctctttccttctccggtcctttcccttccaacagagc

SEQ ID NO: 335601 - DNA, 2217 bp, Homo sapiens
  chr17:47072749-47074966
  hyper
ggtggaggatatagagaaaccgagttggaagccctcccccgcccctaagtcccagccccatttcttttcagcgcgccgggaaaacggggagggggacaaaggtgctgcgtgctgtctttcaactcccgactttttgaatggcatacaatcgtccggccgcagagcggtgagccaaagtcggagtcagctcagactctgcaaacgaaaaataataacaataaaaaaaattcaaggcattcatatcggtgtagtcaacacgtgttgcggagtcggcccgggccgcaggcgactgagacaatggggtcggggactggggaaggggagtgacccccttcctcacctgccctcccagcacgcgtgcccccgctagaattatcctccctcccacagagtccggagtaacaccccagttttcgccctgttcaaggggattccagaatttctgggggtcgacccctcctttttccccgttccctgggcgagggggttccagggtctccgggccgcgctctcggccacccctggcgccatcccagcctccgccgctagaaactcgttggcctcgctcgccgctccgccgtggagccggggcttgcccgtggaccgcgcgtcccgctctccgccgcgtatccgggactccgaaacgcgcggcgagcagccccctcccccaccgcccagacggggtgcgaccgcccacgtgtcgccccttgcccagtcgggtccttccctcgggctccgggagccggaggatccggaatgagttggtcaaagccgagggaagggacccaggcggatccgcttccccctccccaggaacggcgggaggaggaggggagtggccgccgccccctcccctaagctcccgcccctcgcttccccgtgcgcggagcggaaattaccccctccccccgcgggtctgacctggggacgtgggcggggcttcccgcttagccccccgccctccgtccctctcccgccttcccgccaggatcggaatcctgcaccccaaacaaagttccgagacccgaacctagggcctagagagctgccagcagtgtcccgggtggtgcaggctctggaaactccacctgtctgtccccgactctgggagggaaaaggggaccattcaaatctccacccggtcactccctccctaagacctcccccttcagttcgctccggttagccctagctatcactcctcttccttgtctcccaccgttcctgtctcctggagtcatctccggccagttccgcgtgttcccctcaggaccccgaaacgttatcatttaacagccggaccccgggtgcgaaccaccctttctcccgtggggatctcaaaacattatttcctgcggcttcctcgttctccactgggataccccgttcccagctttccagtcccgcgctcgcagggtcccccggtcctgcatccccggaggcgggggagtttcgtggggctggcgtggggaaggcggagaccccccccatttaaacatctagggaaaaggttcctttctttttaaatcaccagctcgtgcgaccctctcctgaagaccccagagtcttcggcttctctttgtctgtctcggccgtcccccgcctgtcagtcgctagcagttaaccggggaggggtgagcaaccccgccccccaaaacgaatgaaaaataaccgtacattttaccctttaagacatgtgagatctgggctggaccatcctcccccagtttgggctggggtagggggatgggtgggggcggggcgcttccctaggggccaggttcttgcaaagggggaaggggcctgtagagcttcagggacgctgccgcaccgccccagtttaccccgggggtgagttgagttccccaccctcaggcgggagattatcgggtttggccggagggccgaggggccctgtggcgtcgggggtctttccctgcagggtgggtgggggctgtcaccacgtggcttctcctttttttttttttttttttttccgctccattttttttcaagtcgattttatttagaggcggcgccagggcggccgcggagaaacgtgacacaccagccctctcggaggggtttcggaccgaagggaagaagctgcgccgtgtcgtccgtctccctgcgcgccgcgggcacttctcctgggctctccccgaactctcccgcgacctctgcgcgccctcaggccgccttccccgccctgggctc

SEQ ID NO: 335602 - DNA, 314 bp, Homo sapiens; identical to SEQ ID NO: 239270
  chr17:47075727-47076041
  hyper

SEQ ID NO: 335603 - DNA, 371 bp, Homo sapiens
  chr17:47439801-47440172
  hyper
cgctccgccgcccagataaccgccggctccccgcgccgcccccgccttctcccactccgcccactgccgggagcccaggtaaagacgagagctgcgcatgcgcggcgctctccgtgagtcggggggcgtggttgccgaaaggaagccaaagtgaagagtgcagggggttgtagcaggcgctgctgtgggattccacaaaataggcgcgggttaggatggggaaggtaaagtgaagaaacgggccaaagcagaaaagtgggtcgacgtgagatttggaagtaaaaagagactttgaataaaaacttaacgactgctgacctccttgttctccttggagggcagtgggagtgacggggggcagaaatcagctc

SEQ ID NO: 335604 - DNA, 2329 bp, Homo sapiens
  chr17:47572986-47575315
  hyper
cgggaccacgaaggagggtctagggttcccggagcgcagaggcgactctccagggtggagatgagggcaagaccggagcacggatgccggtcctcaggtaccgcagggggcggtgggggagctgggaggggtctttcaagagggggcatggggctctccgatgcccaggttcttcggaagaggacactcgaatgccgggatcccgaagggactttcccctcagcatctcggtctctggagagtcgtgggacagaaccaaggcgagagaaggagggggaactggacggggactagagatgagaggggcgagctgggctggggcggggagcccgggacgacgggatggaacaatggaggaggtcggagggactggaggcagaggggacccggcaaggacaatggggaccggccagacaatgggggggaggggcgtcggagggagaggttggggagcgggagagaggttgagaagtgggttagggagggcagaagaggggcgacggcgagggcggcagagagatggaagcagaaggaaaggagacagagcggggcgcggaccctgaagtggtcggggtcccgcctgcccgctgagggacagtgagacgagaagagagagcagaggcttggacatttccagcgcctgtccccgcgctcctgctcgcggcctctcccagtcccggaattggggctgcggatctaaggctgggaggggagtgcccacttcgccggggcgaacccgctcccggggttcccccacggccggcgggctcctccgacgcgcgtgttctcacggcttgaagcagcgcagcggatcgcgagggacggagcgggtgtgcccctacccgggctggcggtggctacgtctcggggtgcagagcgccggggcgcactaggcggggacccttcctggccgcgcgcagctctggctacgcaggcgggaggcggcaggcagggggcgctgcggggcgaggcaagtgcagtccgccgctgcctgcctgcgagtctggggctgcgcgccgctccccacctagctgcgcgacccgagcgccgcgcccaccgcgctccgtgggctcccgcgcctcgaagggtcgggatccggtctgagcctctcctggctctcggtgcaagccgctgggcacctaacgagacgggggcgcccggacgcctcggattctgtagcgcggtatcccgggccaccgactcggcaaaggtcggcgggtcctccgggtggtccgacgagattgtcagatgtggcctgctttatggccatgaaccgaatgccctggaaggtctggcaacggaggaggcgtcttcactctccccgccagcatctttcatcagagcactgcgccccaaattccggctttacagatacggagactgaggctctgagagtttaaacgacttggccaagatctcacagcaagttgggccagagtcgtggctagactccccgacctgattcccagctcggtactcccccaccttttcagggggcagccgctgtcccagctcggggtcacggctgcgtttcccagcagggcggggggggttgacactgtccccagagtccgtcggcggtagagcctgcgggtgaggtgggcagagattctgtccgggtgcgggccccagcccgaaagctcagccccagttccctggagctgtcaggacctgtggctgcgtccggggatttgggagcgaccgcgggcacgtctgctgactaacgccgctggttagagacgctgctcagacgcgggtgggcgagcgtagaccaggagagcggggaggagggaccggatcccagaggggcaacgacttgggctccgggtctgggcaagagcgagggtccccgcgcgaagacccaaggaaggaggggagctgggcgtggaggacctgggcgcttgggaaggtgtaccccgacaggaacctgccgtctgcagcccctgcggctcccgcctccgcctcggcgcgcggctgctcggtctgggatggctgtgcgcggtccgagtttcttcctgggccgcggtgagagagagagggctgaaaccagagcgcgtcccggcgggtcggctggcgggccgcgccggtaatggaggcactttgtcattcagacgtctgtaaccagagccgccgggctggctaatgcgcctaatagggatggaacgagggcagcaaatgggcgtgcgtgagcggccgggctgagctgggtggatggtggatggggaggcagctccgcgggggacgggcccctaccgcactgttccagcccagtctggctcaagcgcctcgcttcttccctgggggaccgcgtggggaggcgggaataatc

SEQ ID NO: 335605 - DNA, 200 bp, Homo sapiens
  chr17:47647459-47647659
  hyper
cgagtgagcagagcgcgcggcgggcgcggcggggcctcaccttctcccgggccaagcgcccacaggaggcgccccgagtgcccaccaggtggcgcgctgacgccactcgcctcccacgcgccacacccgcttggtctcttcatcgccccctgcggagctggcgtggaccgcagcgacttgggtccagccgacaggtggcc

SEQ ID NO: 335606 - DNA, 844 bp, Homo sapiens
  chr17:47653244-47654088
  hyper
cgagagcggcgccgctggagccgaggggggcgccgagcgcagatctggagcagcagagccacggcgcagctggggcccttcgaggcgctcggggcgcacatctgggacctcgagcgggggccgtgccgcgcgcagctggaccaggggaggggggcggcggctgcacagctggaccgaagggggcggggtcggccctgggcgacccgctgaggggagggccgcgggccgccggggactggagcatgggacggcgcgcctgaaggagcaggaaggggaaggaggcctgggaccccgaaaagagaaggggagagcgaggggacgagagcggaggaggaagatgcaactgactcgctgctgcttcgtgttcctggtgcagggtagcctctatctggtgagtggtccgaggggagctgcgcagaggggcgggggcccggaggatcgggggagagcgcgggaagcttgcgagccctgaaactttctcccttcccccgacatcccggggatggcggggaagactggaggctgggggagagggcgggtccgaggccggagactggacagatagggttaataggggcggggagagggtgcttggctggcccacccactccgcagcgggtggctggaggtgcgaccagcgctcggaaaaaggcctggagccgggtcgccagggttaccctaccccttcccagagcctcaggaccgctgaagccgggggcgagtggggcgcgggtcgtggagctggtgacctgcaggcttttcccctgacctctgggactcagagagcctcgggttctgggtcccccagagcacagagccggtccaggcggggggcggcccccgc

SEQ ID NO: 335607 - DNA, 526 bp, Homo sapiens
  chr17:47987574-47988100
  hyper
ctttcctggaggagcggctcccggtggcggcgggctgcctggaggaggaggcagggccaggctgggcgctgaggaggccgccccggtggcgctcccacgacccgggcaaggcagtctgggcgccgtctccggtctcggggcctgcggtcggggcaccgcggtgccgcgtttgagccggtcagctccctgcggaaattacaggggcgctcggcgctgcggtcgcgccccccggggcagcgcccgctggttggaggcgtttaaattgaaagcagctttggggagagggggcggacgcgggccgccgagcaaggggagggggcggcccggcacagcgaccccattgtctgtgcccgccgaggggtggaaccttgcggtgagctcggcgcggcgccccctccccgagctccggcccagcggcgctctcagctggttcccacgctgcgcagcgctggccacgacccctcgtcccttctccacctgggtctgcctcttggctcgctgactgcaagcctggcagcgcgcacgc

SEQ ID NO: 335608 - DNA, 891 bp, Homo sapiens
  chr17:48049697-48050588
  hyper
cggaaccgctctgtgcgcgctgcccaacgaaggaaggggctgccccacgcagacccggcttctgggggtccctggaaacccaggcggccacggtgtggcgggggagacatggtcacttttcctgcagggtgcgcctgagcagaggggcagcccgttacagtaggcgaggccagggcaaacccggggtcactatcagcgctgcgagactggtattcaaggtcctctcagccgggcctctcacccaccccgctggccgcagccggaggctgccacgcggacaccgtctcaagcctctgagcattgctctgagcctctgcctgcaatgtccttcctctgtcatctctaggcctcggctcagccctggacctagcctttctgccccgccctaccccaagctggcgccaccgcccgtggctgaactccgacctcccaccgcaggcgccgcggtaccctggctgtggccctcggcgctttcttcctagggtcacaggacccatacgagtgggagctccctgggagcagaactgcgtcttgtatcacctggcgcggtgaacgtgggggttgaaacgctccacgcggaaggtagagggcaggggccaagggggcgatcctggtggctgcgctttttgctatttgctgccgacggcatgcagacgagatgcaaataagcttatgaaactgtccgtcctaccccctcgctccctcctcgccccctacaccgtgttgtgctgcccaccagactcggagaagccgcggctgtccccggaaccctccgagcggcgccctcaggcccccgccaaaaagctccgcaagccgaggaccatctactccagcctgcagctgcagcacctaaaccagcgtttccagcacacgcagtacctggcgctgccc

SEQ ID NO: 335609 - DNA, 251 bp, Homo sapiens
  chr17:48503155-48503406
  hyper
cgcttcgcgcctgctcctttggcccccggctcgcaagtagcggggccagcacgtgacccgagggggcaggggatggatggatcttgaccttgccatctggcccctcacggatgtgctgctggctctccctctaggaaatcaacaaatttttgcgcttctaacatccaggcccctgaggatggtcgcgaggaagatctgtttcggactgcagctggggccttcggatccagaggaaaccagggctattcttc

SEQ ID NO: 335610 - DNA, 807 bp, Homo sapiens
  chr17:48619126-48619933
  hyper
ctcttcttcccaacttccacgacctcccggtgtagggctctgaaccccgggtcactcaaagccactctcgttctgcaggtctcagcgctccgtcccccaccaacccgttcggcgcgggcgagccgggcaggccgacgctaaaccagatgcgcaccggctcgccggcgctgggcctggcaggcgggcctgtgggggcgcccctgggctccatgacctacagcgcctctctgcccctcccgctcagcagcgtgccagctggcttgaccctccccgcctcggttagcgtcttcccgcaggccggagccttcgcaccgcagccgctgctgcccacgccgagctcagccgggccgcggcccccgcccccgcagaccggcaccaaccccttcctctgagccccgccccgtcccataccggcctgcgcctgcgccggacgctccgcggccccgcctccggacccggggctgggcggggcgccggtgctagtggaacgccgagccagtggcggctggtatcccgcggcggctctggaagctggacgcggaccacggcccgggagctagaaactgaacgcccgcataataaagactggaaccctcgttctcagctctcaccaagtggactttttgcggggtgtggcggccgggtctcgaccacagcgtggatcaccggctgtttaggaaactgcagctgcacaacgtggggtgcaaaactgccccgcttcctttacagctcttctcaaccctcacctccatcccccgtcacccaggcaccttcgcttccagatgctgccaggctgtcactcaattc

SEQ ID NO: 335611 - DNA, 626 bp, Homo sapiens
  chr17:48639236-48639862
  hyper
cgcgagcaggtctcgtcggtaacccgggcttaccccacctgcgtacacacacctcagtcttcctgggttgggggggtggggatccaggccaggagaagagagctgtgccccgctggctcgcagctggacgccctccagatgtggtcaggggagggtcgtcatcctccagatgtgggaagcttcgggagcctgggagctgtactctgcccgcgccggttagcgagctgggtttggtttccgagtttggtggggggtgggtgggggcggtggggaggaagctgcggggacggaggaggggggaccgcaatctcctgggtttccctccttcccccgccccaaagtttgcggcggattctagggtctgatcccccaacctggtccttgaggctgaggtttttactgacctagaaggagatgttggggggcggggaccaggtcctggcccacctcaccccccacctcgcgggttggaggcacaacaaggagattccggcggcggctgatgtcaggggcgcagaatgagaacaagatgtggtggaggggagctgtctgcccccggagctgggagtggagcccctttccgctagagcccagtgccgcgggtgcctcctacccgatctccattc

SEQ ID NO: 335612 - DNA, 715 bp, Homo sapiens
  chr17:48711989-48712704
  hyper
cgactcctggactgttagcctcggtatttagagagacatccccctggcttggcccaggggccgctcgcaggggctgtcgccgtgccaagggcccccccacctctgccccaaagtccctcccagggaggcgctgtcgcaacccgcgggacgggggcagggagaccggacccagaggcactggggtagggctcggcagggcgggtccgggcggagcgcggggtgcggagggcggaggcggctccggcgcccgctctgcccgccgctgggtccgaccgcgctcgccttccttgcagccgcgcctcggccccatggacgccctgtgcggttccggggagctcggctccaagttctgggtaaggcgcggggctccggggtcactgcgcgggggccagggtcggccggcttcgcccggtccccgccgcctgccttcccgcggggccggcaggtatcccgggacggagcccctgagacggcctgggcgcccgggagggggcgatgggctcgggagggaggttggctgcgccgcccggagccgggtcccacgcggtgtcggggacctgccctgctctgcccttcccggctgcagcactggggagcccgggaaagtgaggaagagtgcgcggctggggcgcaaaggcacagtgcgtggctgggtgagtcggctccatcccagcccctccgtcgggtgcggaaggggcgtttcgcaatcagccgc

SEQ ID NO: 335613 - DNA, 382 bp, Homo sapiens; identical to SEQ ID NO: 225429
  chr17:49008769-49009151
  hyper

SEQ ID NO: 335614 - DNA, 543 bp, Homo sapiens
  chr17:49021800-49022343
  hyper
cggtgctccagggtccccgcagagggcagggaagccctggacctggtctgaccttgcgcgctagccccagaggtcgccgtgctctgctgtcggcgttcaggtgcccgcggtcgggccggggagggcagtaatcaagccggcccggcggctggcgaggggcgcgggtccagcgcgctgccctcggccgccgccctgagcggttatttataaccgcgggtcgcgttacctcctgaccttaagctggggcgggcgatccgcagcgattagcatctatctcctccccgccgcccgctgcgaacaaacacccctctgtgcgccctcccccgcccgccccgcgggaggccctgcaggaagcaggatgttgacccggagcctccctgcgctcctgcggcggccccgccacatgtgagtggcgggcggtggagtgcgggtgggggggaagcggggagcaggagctactcgtgtttgatggcttcccgagttgccaatgtcctggtctattctgagtgaccgccttatttacaatatagggctccccagccc

SEQ ID NO: 335615 - DNA, 892 bp, Homo sapiens
  chr17:50235175-50236067
  hyper
cgacgggaaaacggggggaaggggggagcccgacacggcacacacacatacacactcgcacacacttccgagcgagtgcacactcgcactcccacccgacagccggccagggacagtcacccccaagatcaatatcgcagtttgaattgttccggcaaatctcccctcgggctcgacggatgtgcgccccagatgtgctgacacatgtccgatgcctcgctgccttggaggtctccccgctcgcgtgtctcttctcttcgcaccagcggcggaaaccgcactagcagcggcggcggcggcggcggcggcagcagccacctgaagccaccaacactgggctcttccagcaaaaacgagaccccgattcgtctggcgccccaagaagacatagacgatagccccccgccgggctgcgccgtgcaattccgggctcccgggagcgcgtagctcgctggctaagcccaggcagtccgcggcaagttgccctcgaagtccgcccccctcaccggggcatggtcggagggtggctgctgcgctccggggcagttcttctcctgcttccggggggcggggaaggagcagacacagcagacacacagagaaagagaggcagggattattgcccgaaaccgccagccgccggcagcctccgccgaccctccctgctccccaggtccgcgcgcagcctgcagcctctcagccgggttccggcagtgcgtccagggcgccgaggggaagggctgggccccggggactggggcgcggtgggggcacacagactctccaggtcgcgcgcgcccttcctgctcctctgctattttcctgaactccccagaacccccagttgcctggcttccatcgcccgcaactagcgccgctgtcgagattttcc

SEQ ID NO: 335616 - DNA, 745 bp, Homo sapiens
  chr17:52977561-52978306
  hyper
gcacacctcccctcccggatctctaggacaaaggcaggtcgagggtaaatatttctagttattcagtatattcagtggctaactatttattttgtgggtaccagacaccgacataatcggttacgtccttcccttaattctcataattctgaggtttgtgttattaaccccctattatctttggtctacccagggcagccaaagaggcgcagagaagaatgacaaggtgcccagcaagcggcaggatcaaagcctgggtctctaattcccaggctggagattctgggctgcctgctcctcctgcacggggcgaaaagcccacctgggatccgagcgggcggccgcgccactctcgcaggctccatacacccgccactacccgcctgtaccacctgcagccggcagcgcagcctcctcgcgggtcccgcagggcgcgctgcaggtgcgctgggcgtcccgaagccccgccctcgcgtccctgccccgcgcccagctcctcacgctcggtgcccgcgccccgcagcggcagcgcagaacgcaccgcctctgccagagcccgggaagcgctcgggcgaagaggaggagccaagggtaccgagcgggtggagtcgggagccggagagcggtggaggcggatttcctgggcccggccctctggcgctaccatggcgtttggcaagagtcaccgggatccctacgcgacctccgtgggccacctcataggtaaggaggcgcggggagagac

SEQ ID NO: 335617 - DNA, 534 bp, Homo sapiens
  chr17:53341253-53341787
  hyper
catttgtgcccattcgttcttgcagccccttccccagatcgaagactagggtcttagtaaggagaggtaaggagggaggggaagaacctgcctggccccccgcggagctctgcagggggcgtcgcggctgcacgccagcgcccgcaccaccccaggcgggaagggagttatcacacagggggtcgcacgcagatctcggggaccgtgggtgccacgaggtcaaactggcagagggagacgctgcagctgctgtaacagcaaggaaagccgaagcccccttaggggatactttacaaaattattttaatcaccgtgcaaacctaataacttgacccaagcgcaatcacctgtattcacccagagtaaatattcctaaaatcccgttcagtgtgtctgtgtctctcccgcctctttccgtttcaggcaaatgtctaccccccctctccccccaccgttaacacctctctgcagcgtgggaaacagtgcccagcagctcagtcctccgcttcccgctctgctttttgcatcccattc

SEQ ID NO: 335618 - DNA, 1568 bp, Homo sapiens
  chr17:53342198-53343766
  hyper
cgaaaatcggcgcgagcggcgacgctaaacacgcggcggcggggcgagcgggccaggcgggcggtgccgcgcgtggccccgcccccgcacgcctatgggcgcgaggtgcgggccctgacgtcactcttgtcagggccgcggcacatgggcggccggatgcgctgagcccggcgctgcggggccgcggagcgctggggagcagcggccgccggcgcggggaggggggtggggtgggacggcgcaccgcctccggtgctggcactaggggctggggtcggcgcggtgtcttctgcccttctgcagccgtcgacatttttttttctttctttttttcaattttgaacattttgcaaaacgaggggttcgaggcaggtgagagcatcctgcacgtcgccggggagcccgcgggcacttggcgcgctctcctgggaccgtctgcactggaaacccgaaagtttttttttaatatatatttttatgcagatgtatttataaagatataagtaatttttttcttcccttttctccaccgccttgagagcgagtacttttggcaaaggacggaggaaaagctcagcaacattttagggggcggttgtttctttcttatttctttttttaaggggaaaaaatttgagtgcatcgcgatggagaaaatgtcccgaccgctccccctgaatcccacctttatcccgcctccctacggcgtgctcaggtccctgctggagaacccgctgaagctcccccttcaccacgaagacggtgagcgctgccgcggccccgctccgggaagggacgacgctccgggggtccccctccgcggccgggcacgcccgctggagcatcccccaaccccgctcccgccctgtcccgcggcgccccggccccgcgctgatgaaattgaggagctcacccagcacccttcctccccttcctcctcctccatgaaaggggagggacccctcctgagctacatttaaaagagcttcgggcacccggcctccctgggtcccgctcctgcggcgcgggtgggaggtgtaacttgacaggtcaggatcgttccctagaacgaggcacacccgcacgcagagcgagcccgcctgcggagggcagagcctcccgggctggggaggagaaaccctggggcctggttctgtgcggggcagggggcgggggtcggcttgagggagggggtttcactgcgtagcctgggttttggggttgtgttacagcttctgttactggttagtatttggaactcacgaggtgtgagagaagactcgttttcttctggtgaagggtagctgagaaagcggggtgggggctggggccggtggggggagtggtctctcggcgggaagccgtgcacgcctccagcgttgacactttcccggtgcactttttctggtgggaggggagagcggagcaggctcacgtgtaaccgcgcaggagcctcctctggcttgagccctttcttggtaagtcccaaaccttcccaagacaaccttggccttagcagtagaggaggggtacgtgtgatgaggccccaaacccggctaagtgatgcc

SEQ ID NO: 335619 - DNA, 791 bp, Homo sapiens; identical to SEQ ID NO: 239330
  chr17:54673562-54674353
  hyper

SEQ ID NO: 335620 - DNA, 259 bp, Homo sapiens; identical to SEQ ID NO: 239331
  chr17:54674987-54675246
  hyper

SEQ ID NO: 335621 - DNA, 407 bp, Homo sapiens
  chr17:54755974-54756381
  hyper
gctgctggtgcgagcgccggcgcggcgcactaaatcatcgctggcgtccacatttcaaagcggagccggaggagtgccggtgatttctgggtgccacaccgatcactcccaagctctgatctatggattgttttgatttcctcctttgaactcttcctatcccgctccagcggcagacagagatactgaattaagcgacagacaagttggagacaatgagcgccgggggccccctccctcccccggctcccctcccccctcctccccgaaatttgcagacatctgctagctggagcccagcgttggagtcataaagaagagctggcaggagagtgatgtacagccctgggccctcccgagtgactggcgttaacctccaacggagagacgctcaccccgtttacgac

SEQ ID NO: 335622 - DNA, 905 bp, Homo sapiens
  chr17:54911484-54912389
  hyper
gatcggcgtgcgtgcggctggagccttaagcgtttcccccgcccggcttcatccctgctggcggcccagcgtcgttctcctcctgcgcgaggcggccaaggcctgctggcccggagccgcgcctccacccgcgcgaggtagggcttcgaggaccggcgcggcgcaggtctccggaggcctcccgagaggggctagggtcgccgggccgcgcgtgggagcgggtggggcccgggaggagacggcgccccggaggggagtgcgaggcctgggccgacggttacgggcgccgaccggcgttgcctggcctgaacgcccggcctttcggtggagggcagcttgcccctgtatgttgcgcccttccgtgggtcagaccggcggcaaggtgaggcggcggcggcagcagcagccgccttgggctcctggacgcgctcccgaggtggggcgggttggggagtggggattggagcgtgatggctggacgtcgccttctcggcgcggcaggtcccgggagacggggggacgaggcgcagtcccgccctcgggagagcggagccaccttcactgagggcgcccggtttggccccggaaaggcaggaagggggcggggaagggatggcgagctcggggtgcaccgcctgtttcttttctggttaggtatcgtccttggagaagatggaagcggagaggcggccggcgccgggctcgccctccgagggcctgtttgcggacgggcacctgatcttgtggacgctgtgctcggtcctgctgccggtgttcatcaccttctggtgtagcctccagcggtcgcgccggcagctgcaccgcagggacatcttccgcaagagcaagcacgggtggcgcgacacggacctgttcagccagcccacctactgctgcgtgtgcgc

SEQ ID NO: 335623 - DNA, 414 bp, Homo sapiens
  chr17:56326873-56327287
  hyper
tggagccccggagccggcctgccgaagctcagcgaggatcgtgctggtttcaggaggaagcctgcgctgggcgccgccaacagggctctggcgcgctggctgcccgcggagtacgaggacgggctctccctgcccttcggctggacgccggggaagacgcgcaacggcttccctctcccgctggtgagggcaggccgggccggggtgaaggatgggagccagaggggacgggatgcactacccaaacacgcagtgaaaggaggaggagggatcggtgggggcagcaggggtgcgcgatggagatctgcacagacccccaccttccgctagagggcagcagagctcggagcccggagcccggccacgtggcggtcacgttctggccgccgcaggccagataccctggggtctccc

SEQ ID NO: 335624 - DNA, 301 bp, Homo sapiens
  chr17:56405993-56406294
  hyper
cgcttgctgggtggctgggctggtcctaaggaggcctgggtcgatgggctgcttgcctcatagtctcagcccctgctggcctctgctctggggactgcaggggtcccttacagtccaggagcctcgagatggtgggctccgaggagggctgagcctcagaattgggtgggggggtgagccgggaagagccagccctcccctcctcctcctcctcctcccctcccacccaccaataggaagtcggctgctggtttccatggtgatggcgctggactggtgggctgaaccggctgacagggtc

SEQ ID NO: 335625 - DNA, 787 bp, Homo sapiens
  chr17:56429059-56429846
  hyper
cgttcccaattccgttttatctattcctttctctagtctactcagggtcaggcatcctttccgactactcactcagcagcggatccccacccgcctctgactcccagtgtctttcggctccaacgtaagttcaccgaacgtctaagagctgaggattcaaaggcatgtaagaccgcccctgccctcagctgcaagacctgtccgcgatcctacgaggtaaacgatggcctccttcggcttctcactccccctgccacctctgagttctgagacttaacttttctctttactgtcccacagccccattccgccctctttccccgaccttggtcccccatgggccctacaaccaggtccccgactgacaccttgaccagcgaacacagcaaacaggcccgcagatgccgcaggtccttcggcaccgtctccagggccatcttcgccgatgggaagaacaacagggagatagacgaccacagcctgtgcacccgcaggaagtaaatagctcgttacccagaatgcccaccacttccggcgcttagacttcctcttccggtgtgggcggacgccagctccgcccctacccccgccagaggagatggtttctcccgccagcaggcggggaggctgggcggccggccgccacctgggccggagcgcgtcgcagccacctgagcccgccgagggcgcggcggaggctgtgtggggtagtcagcgggcccccggggcgggggggcggctgcgcttgcgcgggagtgtgtcgggctgagccgcagcgccgagacgc

SEQ ID NO: 335626 - DNA, 1294 bp, Homo sapiens
  chr17:56833016-56834310
  hyper
tgcttaattagaaccggttgccatggcgacagtctctaggcagcgtgggctgagctctccgtaggaataaagggtgggccgccgctggaccctgcgcgcgcccgccaccaactttccctccagatccgagaggggcggcgcgctccgcccccgggccgcgcacgtcggtgctcggcggcgcgcacgcctgcgggagccctctccaggcaacctagtgctgatcgctcgtgccggtgcggccgttaaccgcccttgccggagccctaggctcaaaagcagccccttacccttcctgggcttcccccaacccctttcccggtctgccctggggcatgagcagcgatggccggctgcatccctgaggagaaaacttaccggcgcttcctggagctattcctgggcgagtttcgcggaccgtgcggcggcggcgagccggagccggaacccgaacccgaacccgaacccgaacccgagtccgagcccgagcccgaacctgaactggtagaagctgaggcggccgaggcttcggtagaggaacccggggaggaggcggccacggtagccgcgacggaggagggggaccaggagcaagacccggagcccgaggaggaggcggcggttgagggtgaggaggaggaggagggcgcggcgacggcggcggcagccccggggcactcggccgtgccgccgccgccgccccagctgccgcctttgcccccgctcccgcgaccgctgtcagagcgcatcacccgcgaggaggtggagggcgaaagcctggacctgtgcctgcagcagctctacaaatagttaagtagctgggcttggctggtggtgggcccgcggtccccaccgcgccggcctcggacgcggctccctcggcccctcaaactgctctcttttctgctcctctcccccgcacccgcgcctgccgccgctgaaagcgcccccgctgctcggacccgggcggtcggctgagagctgcccacgcccgcctcggcccccacgcccgcctcggcccccacgcctcctacccggccttgaagccgctctcctgagccccggcgccctcccgccgggcccgggcccctcatcccctttcacctcggcccccagcttctagctccacttcacgcaacctttccctttcctgcctggaaaggtccttcctcccaggcttgagctccctcttcttcccagatcccttctttctccgggaggtttcctcccaccccagtctgtcttttcccgggctgagtgccttgttgtttggcggcagagacgcgactcctttcta

SEQ ID NO: 335627 - DNA, 257 bp, Homo sapiens; identical to SEQ ID NO: 239360
  chr17:58212866-58213123
  hyper

SEQ ID NO: 335628 - DNA, 281 bp, Homo sapiens; identical to SEQ ID NO: 239361
  chr17:58216282-58216563
  hyper

SEQ ID NO: 335629 - DNA, 411 bp, Homo sapiens
  chr17:58216773-58217184
  hyper
atttacctgcttcccagaaacggtccatggcttccgtcccggtcatagcgctgcgcagcgggaccgttctgccccgctgccctcgaacagcccgtccgcgctccattgcccctccaggtgccgttattttgccttttaacctggggcgggaggttttagacgaggctgcaagtctgggccagcggggacctgagggtcccttgcaaccagcacccgcgacggtgtctacactggaattccaaggaaaagagggctccaggggcgcgaccaaggtttggtcttctgctgagcgctgctggatgaatcgccagccttcgcccgcggccccctcctcctcatccctgaccccaactcgacaagatcccccgagcgcaggcccaaactccgcacagcttgtgggccgtgaggtcc

SEQ ID NO: 335630 - DNA, 421 bp, Homo sapiens
  chr17:58228061-58228482
  hyper
cggacccgcctcaacgcacgccttcttttctcacccagcctcctccgtctgcccgtgggtttccgtccgtcccgctgggactcagcgctgggtgactgccccgcggccagagcaagggcggtctggcagggtcctggaagccgcgcttcccacacgggttccttgcccctgagggtcgcaagctcccctggcctccctaacctccagcgctgaattgggagcctggcgggggcggggggtgggggacccggagccccaaggcctctgcggagccggtctttccggacagggtgattttcgtttaaagattaatggtgaagccgagctcttaattattcctctaggtgggaggtggcaggaaaggcatgttaatatttgataagaagctaaaggcgcttcaagcggctgggcacagggatcc

SEQ ID NO: 335631 - DNA, 652 bp, Homo sapiens
  chr17:58498618-58499270
  hyper
cgacaacaataacaacaagacgtttgctgaacatgctggcatagaggacaagttaaaaagtttctggactcaaagggtgctcctccaaagctccgggcctccgggctacccctacttgaagccgctatgcccctctcctgtgcccgaggtggccgctgggtggcaggggaggcccgggccgacggcggtcccaccgcactgtcgcgaaggcaggcgaagaacagggccacactgagtggggacaactgggcccgggcccagaggacacgaaggaaggtccgggagaaggaattcctagtttcagggaagaaaaggtggctcgagtgaggaaactgcgggggcaacggtctctcgtcgccgggaccccgccgtgtgccgcccagggacgcgagggggcgctgctgccgcgccaggggcgagggtcccggggcctcctgagcacctcccggccctgcccggccaactcagactacacccggactctgcccaccgcgtttccgccctcggcctcgggtccctggagggctcgcgggtaggaagagtcggggtggcgggactttcgccgacacccggctccccgcctggtggctgcgcacacgaggccggcgacgggacttgcccgcgtctcagcgcctcctgtgtgaagcgggac

SEQ ID NO: 335632 - DNA, 140 bp, Homo sapiens
  chr17:59467400-59467540
  hyper
cggcccgatcctaaggaagcccctgcttttcttgcgcctgccggtgctcttctcccgcccgcctggccctgctgtcagcgccccctagtgccgggccggccgcgcatgagggcggtgggacagatcgcccacaactcctc

SEQ ID NO: 335633 - DNA, 746 bp, Homo sapiens
  chr17:59473674-59474420
  hyper
gaccaggagggagtcgagccgcccgctctccccgcgtcccccgccccatcccagccagttggccccaccctgcgcgggataattgggacgggagggaggcgacgggagggcggcggctccagagagactgcgcgcctgtcagcggcaatttgtttaagtggacgggacgggccgggccgctgcgggctggggtcaccgaggccgcggcccccaccccaaccagacctgggaccgcgggggagcccggtccggccgctaaaccgggctggctggcgccagggctccgggaggtgcggtccggcggggaagccgtgatgggaagcgactctgtccagggagtgtccttcaccaccacactcctcacgtccaggcagtgatcgacggcctggcggcaccctcacagcgggcccatagcacggggccacacacgtcccctgagcttagcctgggcacattcgtctgccaccgagggcttaagccagtctgcagcccgcgccccgtcactcggacgcaagtccgtcgtccgctctgccacgcggccgcacagcccgagcttcctgctgcccactgcccgcggggtcacgcaaccccggccctgcacacagaggaggaagcggcggggaccccctgccacctggaggctcaacccggggaaggtcccagcagtgccccttaaccctgcgagaggtgacggggccggaggacggaagggcagccacgccaggctcaggaccgcggccccaccc

SEQ ID NO: 335634 - DNA, 754 bp, Homo sapiens
  chr17:59474429-59475183
  hyper
cgtccccgctcccgccccatttcactgttgcgggaagcgcggggcgcacagaccgcgcgccaccagcccaagcccgcccgacgccctggccggagaccgcctgcgagagggaggggcggccgagcgcgcgtcccccgcctgtctgcgggacctggccgatgcgaagtgacaggggccggagctttgttgtggagcctcggccgcctggcgccagccgcccccgcccgcgccctccccctccagccccgggcggcccgcgaggcgccccccggggcctcttaaaggaacacgcacactcggcccccggggctccgccaggggagggggttcctgggaagggggagggggccggcctaggtgggggaggggcccagcggaggcctcacggcgccgctccagggcctcccaggcctccccagcgccagctttcggtgagcctcgggcattcctagctggagagtttggctgggggtcgctacagactcttcagagcggctgcagcaggacctcagggtgatcgcgggaccgcggggcggggcgagtggtgggatcctggcccggacagagccccggaaagccagagggaaggtcggtgccactgtaggtggggtcgccgtccccagatgcagccgctgcactgtcgccgccaggtttctcggtcaaataacccaggcctgagtgtttcaaactcttcaggcctcggacccctggaccagctatggatggactaatgaaatggactaatgtctaaaac

SEQ ID NO: 335635 - DNA, 942 bp, Homo sapiens
  chr17:59475276-59476218
  hyper
cgcgcgcgactttgcgaatgtattcacggattcctaggccggtacctgggttcccggctaaggaaagctgccctggttattatctggtcacctcaccggctgcgcaaacgtgtccacaacgggtccctccccgagaggccacatctcgcctaaggtggagccagcaggtatttgcctgtggaaaactgcagtggatcctgccccgtctgcgtagactgcgcagctcggagtcaaagattcgttctggccagagaggaggtactaagagaggtgcgacctagccaagaacgaggtcgtggagaaaaccctgtgggggcggcgctcacatatgcggtgatgaggagttgtgagggccctggggtcggccccgaaaagtagggataacggtcgcagaggccatactgcttccgccggtcccgaatccgcactgccaggagagatccggccttcaaacgctgctcccaacgttcaacaacgaagtgccctgcgaccggtgtgcgcagtgggcgggcgcctgcatgggtcaatgttggatgtacgcgcccaccacgcggttgtacgggtgggaatgtcacccgtggctagtgcatgctctgtcttttccttcagaaaacgaccttcaggaatcagcctgagtgttcgcgcccgagcccgattggaagcaggtgcgtggtcgcttcactctccccgtgcacaccttgagttatagctctcgctgcgcacagagggcaccacacggggcccgacacacacacacacacacacacacacacacacacacacacacacaccatcacttcatgggggggaaactgaggctgccggaagacagaaaacgaagactgatcacagaagagggggcttcaatcacaggtgctcgcagacaccccaactccctcacgcgttactcagcactccttaacttaggagacgtgcgcttcc

SEQ ID NO: 335636 - DNA, 971 bp, Homo sapiens
  chr17:59477745-59478716
  hyper
cggccgaggcggggctgcacgtctcggcactgggcccgcacccgcccgccgcgcatctgcgctccctcaagagcctggagcccgaggacgaggtggaggacgaccccaaggtgacgctggaggccaaggagctgtgggaccagttccacaagctaggcacggagatggtcatcaccaagtccgggaggtagggctgccggccggctggaaggcgcgcgggcgggcgggcgggctggggcacgggactgcacggatcagagcagagctggggactcccggctcccggctcccggctccaggttctggccctgacgccacgcttcgctcccacggacaaccaagttgacttttctcgtttggcaccggagcgatttttttttaaaacaaaaacgctaaaatcctccgaatgaaataaaacgaaaacatactgctaaagaatagccccaaccgttctgagtcccagcgcagaggaggccccgcggcttggccctggcggtctcctccgccccgcgctctcgctcttctgcgtccgggtccgtctccgagctcgggggaaattcagcctctctcagactctgctccgaccccgaagcccctagtgggacctgggcccagctaaccccacgctggttgctcggttcctggcagcgagccccgggtcagccgagccctccgcctcaccgggctgggagccctttctccaccgcgggcatccgagccctggacgcatccgccgccccaggccttaaagcctgaagaaagccacagccccggcccctccacccttcgactcagccaccgagaatccaggcctcgggttcaccctcttcccccgaactgcacggccaggatgtcttatcaggctctgtagcccagttcccaatacaaacaccctccagatttatttctgggagcttccgtcccaagtgggtatttcccctgaacgaatttcggggagattaaggagaagc

SEQ ID NO: 335637 - DNA, 981 bp, Homo sapiens
  chr17:59488510-59489491
  hyper
cgagatcccccacaccactttcgccgccacctcccgccgcacatgtcccctccgagtcgcccacccggcgctccgcggggccccagctggtagcctgagtgcgactgcgggaacccgcggccggcggctgggccttgtcccagacaaaggctaggccactcccatgtccaattaagccaccctcctccccggcctcccagccctcattgtccccggggtcgccaattagcctaggcgcccggcgtacccgccgctccggtgccgcaaggcctccttaacccttcagggcctggcccggggtccttggacggcagagccgccggcacacgcgtggcaggagggccagtgctgggacgatggcgatacctgctggcggcctagcctgtcgcctcgggctctcgcgtgtggggcgtgtgaggtctaagagggaattgtgcgtgtcggtgtggggtggcgcgtgcgattcccggaggaactcggagatggagggtgtgagtgcaggggctccgagagacccctagcggctaagccgcccggatcccaaggcccaggggacctcatttcctctcgggttaatcggaatcttccgagccctcaagcccttcctcctccactcccccgccgctgctgtggagaaccggagccaccggtatggcctggccctgccctcccgaaggccgcagctcccgggcccgcctccccagctgaccgcgaactcctgcgtggggtgctcctggggcgggaggggcgcgctcagcctcgctctccccgggactctcacgctcaagcgccccggcttgaggccgggaccccctatttcccggttatgggacggccccttgagggacagcctctacgagccctggatttataccccgagcctgccttcctccgctctgggaaggacccaaaatccagtcccgcttcctccccctccttcgctgtccttggccccgaggtgcggagcaccggcggtcaggc

SEQ ID NO: 335638 - DNA, 1267 bp, Homo sapiens; identical to SEQ ID NO: 239377
  chr17:59529012-59530279
  hyper

SEQ ID NO: 335639 - DNA, 872 bp, Homo sapiens
  chr17:59531720-59532592
  hyper
catcgcaaaggcagcggaggttgcgggccgcacccgcggaggagtggatgtgaaggacgagagcggaccgctatgcggtgctgagtgcgggaccccgcggtgctggcggcggccgagcgcgcccaagctcgaggtccgagaggaccgcgaggacggccgccccgggccagccgggcgtggaaaaaaggaaattgctgggaagggggcaagctgtcccgaggtctggatgtggcttcgtggcggagagaaaaggaagaggcaaaccctgagcccgggagggagagcactgagcaggcctcgtccccagtccgagctgcgggaccggcgtcagtggacgcgggcggtgaaccagctcctcacagggcagggctgagcgcgtaggactgagagcgcagggcgcgagccgcagggctccgctgcacggctccgggtgtgacaagagcccagcagaggaccccatggccatgcgggccaagcgcgagacggcccctccttgcgaccccgcaggccgccacatctgggaccagcggatcgcttggtcgctggagccgatcccgccggggccctagatatagttggacccagcgcgctggccggagcgggcagctaccctactggcgcagcggccctgtgtggggactcctaggtttccgaggctcggcccgcgttcgcacgtggcccgaggcgggtgctggcgctggccatgtccagcgagtctcactccctgcaggctgtggccgaagactggtccgcctgtcaaccttatctttatgggtttttcccaacccagactggccccggcccctttttatctcctgggttgcacttggcttgtttactttgcgaggtcctgggagtcgaagtctaagccc

SEQ ID NO: 335640 - DNA, 1381 bp, Homo sapiens
  chr17:59533754-59535135
  hyper
cccgcacgaagtcccggaatcggctggagagggccaggggtcctctggcgagtgtggacctgggcgagtgactcgttgtgtgctgtgcccgcaggagatgctgcaggataagggcctgtccgagagcgaggaggccttccgggccccgggcccagcgctcggagaggccagcgcagccaacgcccccgagcccgcgctggcagcgccgggcctcagcggagccgcgctaggcagccccccgggacccggggccgacgtcgtcgccgccgccgccgcggagcaggtagggctgcgccagccgtcgggtagaagtcgggcgtcggtctgtctgcggggccgcctgtgtccgtctttccgtccgattgtcggcaggactcgctttcaggaggacctggctgcattcaggacggtctgcccgttcgttctccactggacatggctcgctttctctgccttttgggtccttctccactttgagccctcggggctactctgggacaagcaagagctagagctagagatagaggagagggcggtaagagagagggagacccccgtagcatctgagcgagcctggaccaagtgtccagctccaacaacccgtagagggcctgggacccaacggcgagggggcaggaggaggccaccccgccggtgcgcacgggagccgctgcggggatccgaggcctctgggacgtcgccgagggcttcacagtgataatcggacgatcacagcgcacgggatgccgcctggggatctgtgtgcactatctgcaggcgcgcgcctggccgagggtgcgtgcgcctctccctgtctgtgtctgccccgggagcctgtggcgatggcccgccacagaaatgttcatgagtgagcaggagtgtcgtctaacctgcgctggccactatgtgtgtcctctgagggttcctccgtaggtgcagctttaaaggaggaagttttagccaccgattaattcttttatattcacgaatagttcaaaatcgttctgtgaaacgaaatctggagccatgggctccgggcgggcagggttccgcacagctcttcgggtctggttcttctttcctcaggctccgcgtggagccctgggcctggcagacacaagtttctctccctcccatccccagaccatcgagaacatcaaggtggggctgcatgagaaggagctctggaagaagttccacgaggcgggcaccgagatgatcatcactaaggctggcaggtcagcgctgggagatttacttccggggatggcggtggggagcaaggggggccagggaggtcccttagaagtcctctcggccccggcctggtggcctgtgggaggcctctctgcctcctcgggcgtcagtgccacctcccttc

SEQ ID NO: 335641 - DNA, 761 bp, Homo sapiens
  chr17:59539230-59539991
  hyper
cgagaaagtcggggctgcagcggggttggggcttgggggaccctccaggtggagagaatctaggggtatcccctagtctctgtccctttccccaggaaaggggctgagagtaagcgccttgaatttggccaccgctttggccggggagctcccgcggctctcgcagcgcagctagaacttgcgtgttccctcagcagtgagttcgcagttacgggtttgttgccagaattaaaaaagccccaaacccttgccccgcgccccgcgcgcctccaacaccgagaaacgtccgaggaagcttatcttagcagttcattctaaagccatttccgagtatgaatagataaaggctccagctccgcaccctttcagagcctgtttcatgatcagaggagaagccccgggctttcatctcctcccgggccggcgagcaggcggcttgtttattcccctggcggagccgtttccgcgtgtgccgtggggagggcgggggagcccccatctgtctgggggcgcgggagcccgacggcgcgaggggaactgggggagcatggagagggcgcttggggcgcggagagaaggtgcggggcacgtggaaagcgtgccgaggggctgggaagagggagggacaggaggacggggtgggagcagggagagggtagggggcatagggagagggtgcagggaggggagagggggagcgcgcaaggagggggctggctggggcggacccagaggtagagcgcagagtgcccgggacaggc

SEQ ID NO: 335642 - DNA, 448 bp, Homo sapiens
  chr17:60885408-60885856
  hyper
cggagcggcgggggcgagggggccgttacctgtgggtctgcccttcctcccctgccggggctacaggggtcgaggggctgggcgggcgggccggtccagggcgcaggagccgcccattaattgcgcggggacggccctgagctcctcttcctcctcctctttttgcttcttcactccctacacctgcccctcttcctcctccttccccgaggctgctttccgcggcgccggccggccttgcctggggcggaggcggtgggggcggctaccgggcgtcctccggtttccctagcaaccgcgcctccccgcccccgcgcgaccaggtgcagccgccgagagcacggggcggggcggggcggggctgtggccccggggtcccaagccagtcgtgggcgcccgccggttgccgtgggaacgaggcgggctgcagtcggggagtcagagccac

SEQ ID NO: 335643 - DNA, 582 bp, Homo sapiens
  chr17:61553834-61554416
  hyper
cggccgccctgagcccctccagcacctcccggaggcgcctgcaagacacctaaggtccccgcctccctcctctcccccccgccacacccctacccccggcaggcgacgtccccgcccctcgaccatggcctggtgaagaagccggccaggcccgatcagccccatccccgccgcacgagcggcgcctgcggacagctcctggggccccggccttgtcactccggaggcgggaggctccggggggtcgggctgggaagatcgagccggaggccgctaggctcccaggccccggccgaggctgcgcggccgcacggtgggcaggctcgggtgttccggcaaactgccgggtccccatcttctaaagagaggaggccctttctccagcttcctctgcgggagcccgacccagccccatcccgccacccccgggctgcacctcggcccctccccggcccgcgcccctgcccggggcgggccaggaacctcggcccgcgccgctggggactctggagcggaggaggaagcgcggcggggcgggggcgggggtgtgtcgggttttataacccgcagggcggccgcggc

SEQ ID NO: 335644 - DNA, 733 bp, Homo sapiens
  chr17:61777763-61778496
  hyper
gcgtggggaagcaacggtggcagggacaggatggaagggccgcgctccgcatcctactgggaggggacgagttcaggctgcggcggctgcggtcgcgggacactgggcgctcccggcctggctccgggataaccgggcggggcctgggccattcactgcctcggtttcccccggttggcctcgcgcgtaggcgccggcgcccccatccccgcccagagctgtggggccgcagagacccagccggggcgaccccggagcctggcccggggtccctcgggcggccgagtcctcccgccgccaggggccgcccccgcccctttgcggcccacgaggctggcggcggcgtccgggcacgcggtctccaggcccggccgcgaggctgcggggaggagcctgcacgagggcccggcagccccggcagcccccccagccctcggcgcctctgcaaccctgcgacgggctggggaggccggtatgcgtggttcccggagcacccgtcccccgaggctccacgtactcaagcgtttctggggcggaattctgtgggcagcaacgggggccccctctccaacaagcgcacctcatttctcacgtgggagccgcggcccagagagctgaggtgacagagcttgggccgcagagctgctccctccctgcagccgcacagcaggccggaggcacagccggcgagagacggccactcgctttggagcggcggcgaggccggcgcctt

SEQ ID NO: 335645 - DNA, 428 bp, Homo sapiens; identical to SEQ ID NO: 239398
  chr17:61926212-61926640
  hyper

SEQ ID NO: 335646 - DNA, 771 bp, Homo sapiens
  chr17:62776313-62777084
  hyper
cgttcctcgactaggaaagggtatacacttgagtcactaagcacactgggccccggaggcggggtcatcgagctgcccagagccaacaaaccccaaggtggacactgccccggcgccccttccccccggaccccgcagcgcactcacgtctgctgggcgggcctcagggagcccaagggccgggtgggcggggccggcaggttaggcccggaccatcgccctgggcggggcttccgaggtggtgccggagaggtttcgcggaatcggagctggcaacggcagcgaatagggacagcgacgctcaggagtgctgtcacccatacccaaagaagctgcgtctgggcggggcgaggaggaacctgaatgcctctgctggggaccttggggggcattgggacgaggaccggagcagaaagccggggtccggagccaggaaggctgcgtctgaaggggcgctggctggtcgctagcggagcccaaggagggtgggcctcccctgtcccgccttcccccttcccttctcccccggggatttgctgtcccggagtccctgcgtccctcccgcctgcggctctgggaatgccggtctggggctggttgtctagtgcgggcgttcccgttcgcggggaggtcattggcaccctgaatcacccactgcgagcccttccaaccggattgtagacctgccagctccgggcccacctcccccaacagggcctttcccggagcaacccggccgggcctggaaaaactccgagagggattcccagc

SEQ ID NO: 335647 - DNA, 760 bp, Homo sapiens
  chr17:62777091-62777851
  hyper
cgcccaccggagcgcagtgtctcgggctggataagaaggggacccggccacagctccttcgccaacctgcgggaacacagagaaggggagggattggtgggggccgagaggatccctggagcgcgagagcgcacccgtcgccaggaggtcccctgcgtccactgcccaggcgacgcaagctacagcggcgtcaacgcctgggtcggcgctaggggcctgggcctgctccccacccgcctccagagggagggcagcccttcgcctaccttctcctccccgtgggatgcggcccgagcagctcccgccccagcacggagacaaggggagcaggcgcgcggagctcccgggtgcggacccgccacctgccgcacccttccctccccaaccctgcccctttccccacccccaccccacctcccacctcaactcccgctcggcggcccactgcctgcccgggcacctcggggcgtccgctcgccggcctcgtctccacttgtcccggcaggcgcgcgtgggctcggcgtcccgcgctccctcctcgaccgcgcggctccggcgctgccaggtttcctgtatagcactataaccagtgaggcaccggcggagagcgcccggcagaacttcctcccggactggggctgggctgcggttgcgagagacaatccccggcgtcctggcttcctgtcgcctctgggccaggcccgcgcctgaagaggaaagatgccaccccctcccctgcatttcccgggatcctgggcca

SEQ ID NO: 335648 - DNA, 848 bp, Homo sapiens
  chr17:63555681-63556529
  hyper
cggaaccgtcgcccccgtgcccccaacccacctcccggatccgcgaaacctacaaaactggatcaccagccgtctcacgccactactgcctgtgccaagaatcccaaactctactgatttcaagcctgtcttttttccaaagaaaaaagtcttatctaaccaataaacaagctgctttccctagcacggaaaagatcaaactaagaagggtaggggctgaacggggtgcaaccccgggcgagaagccagggaccccggatctgggatgggtgcacgctgaacccgaccagagcctcgagccgcggggctgggcggcgcggcccacggagaagtggggctgccgttggcaccgcgctacccgggcggtgggaggtggagcggccccgttacctggaagacgaaggccgccgaagccaggctctcatgtcctccgagcccctccggcccggtcccccggcccaaatgcaactgaacgcctccagagccctggcgggcacacctcgaggccggaaccccgggacacgccagcagcgccccgagcccgggcggggggtcggtccccggcgccgccgtttgcagaggcgcccgcagaaaaagcacagaaagcagcagcctagtccagaaatggcgacgcgcggagtctctgcctctccgcaaaaggggccggggcggccacgggcgaggggcccgggccgggaggagggacgcgagggacacgggcgccccggacttgggccggtcctgcgcgcagactgagcctccgccagcgctgtgggccccttagcgcggacccgcggcagggaggggaaaaggggagggggaagagaagtaggaggagaggatggggc

SEQ ID NO: 335649 - DNA, 669 bp, Homo sapiens
  chr17:64187889-64188558
  hyper
cgtcccggcctggatcgcgctctgcctgccggggacaccacagcgggcagcgccgggaccccaggggcgcgcgccccccaggcccggagaacgggcccagggcctgagggcgacgccccttcccgaacgggcccgcaagggcggggcggcagccaccggcgcaaaattccactcaagaacctggtgggaggggcgggggaaggaaattcagaaaaaaacgagaacctggcaccaccacacgcaagctttccgctcggccgctgccgccaacgccgccgccaccgccgcccctgccaaacggtttcaaatccttgcgggccgctgggtcgccgccgcccagcagcccgggggcggggactttcgcgctcgcatttccccgccccctactccacccctctagcctgcggtgcggttgccatggcgacgttcccggcggcggcgaccaccggcgccccaggctgggggcggagacttccgcgcgggcatttctccacccacaggtggcggcgtgcgcgcggccccgttgccatggcgacgctcctgctggcccagcaaccgccagactcgcaccccagcttgtgggccccttggcgggtccccagtcgaagcttccgggataacccgaccacagtttgaatgctgctgccctcccgcatcccgcgcagagtc

SEQ ID NO: 335650 - DNA, 671 bp, Homo sapiens
  chr17:64298989-64299660
  hyper
caacgactccacggcgtctcaggacgtggccaaccgcttcgcccgcaaaggggcgctgaggcagaagaacgtgcacgaggtgaaggaccacaaattcatcgcgcgcttcttcaagcagcccaccttctgcagccactgcaccgacttcatctggtaggtgccgggccgggcactcctgccccgctcctccccgcctccgggtcccggcacccggcgctccggcgcgtccgccccggggctggctcactccgataacttggaaccggcgggagtccgaactcttcgcccggagtgacacgcgcgcccggccctgacaccggcgggcaggactcccgggacgtcgccgtcccgccacacacaccccctggcgcgagagggaggctggccccgtacggtggcgaaggggatccctctccgggccgggcccctcacctccccgggcgcgcccacccgcacgcacccagcggagcggccgcttgccggggtgtgagcccaggggacaggggaggaggagaggccctaagggggcaaaggttcccggagaaacgcgccccggagtaacgggggagcggcggcgattgcactgcgcgcggtccaagttgctggcgagccaggctgggcgcgttcggggtgggggggttgtgtttgtgcttcccatcgggctggactgc

SEQ ID NO: 335651 - DNA, 84 bp, Homo sapiens; identical to SEQ ID NO: 239408
  chr17:64831323-64831407
  hyper

SEQ ID NO: 335652 - DNA, 1419 bp, Homo sapiens
  chr17:64960805-64962224
  hyper
gcggccgcgcagcccgcactcgtcgccgcgcctcggagtttgagccccagcgctgccggagcgcaggcacgcccggggcgcggggtcggagcgcgcagcgcggcgccgccccccggccctcggccccccaaccccggcgcccccggagcggcgcgcggagggaggagggcgggcgggcgcggcgggccgggccggcgggcggcggactatgaggcgcccaccatggtgcgatgcgaccgcgggctgcagatgctgctgaccacggccggagccttcgccgccttctcgctcatggccatcgccatcggcaccgactactggctgtactccagcgcgcacatctgcaacggcaccaacctgaccatggacgacgggcccccgccccgccgcgcccgcggcgacctcacccactctggtctgtggcgggtgtgctgcatcgaaggtacggccagccccgacccctcgccgccccacacacacacacacacacacacacatatacacacgcgcgcgcgcgcgcgcgcacacacacacacgcgcacacactgcccggcgcgcgggccggggagagggtgggcgcggcgctggctccgcgcgagacacaaaggagccggagctggcgggcgggtcccttcgcggccagctgtacatcagctctggtccctctcggctggggacctccccagcacaccgatcccacaaactctccacgcgcacaccccctcgcccacagacacaatgaaacacaccgaaactcaagcacgcgcgcgtagcccgggacccgagcgatccccaggggccgcgccggcacccccgggggaggtggaggctggcgagggggcgggaggaggctggggttggggggagcggacgggagggggggaggggttgcttggcaaccggtgtctgtgctattgctatgggaactggccatcctggggcggggccggccgggggcggggcgcgtcggtgccgctgggcgctttctacaggctcgggctgaggggtgggggcagaagtaggggcagaagtaggggcgggggcgcggtcggagccggggtaggggctgagttcctagcggatctagggtagctgggtaggcccagcccgacgcccgcctcgtctcccacggagtcaccggcccgctcctcgctgtgcggtggggtggtaaggggagcgacaccgagtctcccccaacggagacagcgacctcggtcgcggcccctcagcagggaggctgcggagacctcagtaggaaactagggtgtgcaggaccgatctgcggaccgggaacagactgggaggggcgtggtcatctcgtcggagctgggcgctgcgacccccaaatgcgactggaggctgagtagtaggtgtcatgaggctggaatgctaggggaccaggatttcagccccgggacc

SEQ ID NO: 335653 - DNA, 406 bp, Homo sapiens
  chr17:65822956-65823362
  hyper
cgcacaaaaaaatgcgttttcacacccctagctgtggttttaaaattgtgttaaggaaacggatcatttgggttagtaggggaaccttatctggtcctgtgtgtttgtttttattcttcgagtgctaatgggcccgtgcaacagttgctgttaaatggctgattaaaaagcaacgcagaaagccaaacaagacccaaccaaatttggttattcatccgattcagaattattttggttaaatcaaaaataaaagtacaaaactacaggaacgcgcgtcttaactcatttgatcgctttgccttgcttgggaaatgcagtttcgtgtcacctgttgcagaagatatgtagttgatcatctagacataattgccgaagatgaacttctggaacaacttctaagtcacac

SEQ ID NO: 335654 - DNA, 110 bp, Homo sapiens
  chr17:66434339-66434449
  hyper
cgggaggaagtggctgagccccggaacctttaactgcacgttctggcagccctgccacccctttggcgatacaaggtcattcctggccccagccttagaagaggccactc

SEQ ID NO: 335655 - DNA, 1724 bp, Homo sapiens
  chr17:68164458-68166182
  hyper
cgactgcgccgtccacaataccagctagtttgctgaattagttcagcgactcaaggaggccttacgaggtttaaataaactgcacaaaagacacatttgatcgctcgagaaaataaacatttaaaaaactcagtggaaagaaagactcctaaaatatatcctgtcctttaggagcaaagcttcgttaggacaccgaagtactcagaaataataggcacttactcttcggtttacacacacacacacacacacacacacggattagtttataaagttccaggatccagacccggttaacactgaagttgctttttaggggtctgcgcgctctcgcctggctgctgggaaggagggctgggaggcgctgaagcgagggcagatctgagtgtctgtaggagttgctattccaaaaaaaatcattactctctaattgttctgattttagatcagcaaagcgtgccgggcggtggtggagagactgagggcggacaaggcgagagggaacgagccgtccacccttcggagaagcctaggcgccttgtaagtaattcgcgaacagtcgggagaacaaacagccaagcggcgctgcagtggccgcacttgcgcgcgtctcaatcctgggggctctgcgcgcccgccccagtccctcgccccattgactcagtggcttctccgggcgctgcagcctccgcggggggcttcgaagggccgaggggctccggcagagagggagtggagagggagacgcgccgggaccgacgaacaatcctgcccctgcggcaaaggtctctacccggcgctggcacctcgcaggcccctcgaggagcacgcagggcaagcggcccaagagcgggggaaccgggaagtgtgtggggctccagacggagtaggaagctttgcccaaggccaggctgcaatcaggcagccgcaacagccgggcgcggagcttcccacctgctgctgtcccagctgggccgcaacttcctcctccccggcccgggcccgactccccggccgggctccgagggtggagggggacgaggcggcggcaggttccctccgctggcaacgcctcgcagcatcctcccctccccgccgcggttcccggggccggccgcgcggccaggcgcgctgcgattggccggcagcggccgggggcggggccaggagagccggtgtcgcacggaccgcctcaaaagagcccaggatattgcagagcgcactggagccctggccagcgcgcagccttcccggcgccggcgggctgggtcttgggaattctggtttgctttggctcactcgctttttacaaaccactggatcttacatgcctctgtaccccccacttccactccatgtccccatgctcctgcgccagcaacaggtaagggctgctgtgttttcttccttttcgctcgctgccggtgtgtcctggggaatggactctggccgccgtcccctaccctaccctgccccgctgctccagaggtgcccagctgtcacactgctgtagcgctcacccacactccggagtcccagatcatgcctatatagtttgtgtgcgcaccagaacatccccagagctaaaaatactgagacatgcttggaacagttgagcaatagaaacagatttctctgcagcatctgtttgtgctcataacttccaatgcaccagctgtagcgagatactgggtttggaggcaagggcgagagcgtctgtgttc

SEQ ID NO: 335656 - DNA, 1383 bp, Homo sapiens
  chr17:70113240-70114623
  hyper
cggagtcgggattccacagccctgagtggcacatgccggtcaacttcccaaagtcgggctcccgtgtggggagaaatacacacgcaggaatgcacaagcatcgcgtgttcgcaactgtcgctgggaggtctggcggctgtgatgggacatgcactcactcgggcaacacgtccacaggtgacatctattcgatcagtcaacagatatttattgcgcacctacgacgctatctggtactttccttttccccttagctgttgctgtccagcccagcgccagtccagagacgggcttaccggccgctcccttccacaagaaactcgtgtccggcgtgaagagcggacgataaacactctccaagcccagcgaaatgtactaattacaggagcggctgggagcccgcgacacggggacctgtccctccagggataggagtcttctacctgcaagggacccggcctggggaactggaatagacaaggggtaaccccttctcccatcacctctaatgagaacattgtccggggctgagatatttgggggacgccgctgctcaccccaccaaactttccctagggacagaaaagcgtccctaccgaaaacggatttaaacaccgtccccacttttgctaaggaagtttggatagggaggttgtggtccttaattcgccaggtaaaaggaaccccatcagctcgcatccctcacccccatcctgagcactgagtgtttgcgagaaactcgccctgcgccagcaactctgggctccggtctcagctcccgcgtagacgcggaggagagattggcggcccccgctggggaaattgagcccggcgccggtccgggacgtgcaagagggggaaagggggagatcccagacctcggtttcccgagggcttccctggggagccactcgcacctctgtgtctccgctcccggcggcagacctcgcggcgcttgctcaagagcgggtatccgaaagcacgtcccgaacacggagaagcgccctccgtctcctgcctcgtgacctgcgccctttccctccctcaccgcatcagatggaggaccctggctcctttcgcccctggcaaaatgctctagccaacactgggtcaacagccttagtttccagatctgtaacctgaacatcaggagcgggttcctttccttctacctgtgtctgaggtcctctggtcggggactgcgcgcgtcttcccaggtcagggaggaggggtcggggcgacctgagaaagacacaacgaagcgaatggagcccctgaatggggaaaggggagtggacaccaggaggcccctgcagaaatgcaggaccgatccactcgcgagctgacaatgccacgcgctagacttggcctgacggtggcaac

SEQ ID NO: 335657 - DNA, 910 bp, Homo sapiens
  chr17:70215682-70216592
  hyper
cgctctcccaaaggggcggacacagacgtcctcacaccgcggcccgaccggccgcacattaatccgggtggatttggccatcttgtgacatagccaatcagttcgagggaggggacggcaggaacgcctctcctttcacgccacaaaaggattttcgtcccttgagagcacaatgaaaaaaaaaaaaaaaaaaagccaatcaaggcgggatcagctgtgggctggtcgctgcagatctgtctctcccagaggggggtgggggcacatattggtccgtgtgggaaacccagagcctcagcttctcacacattgttctcctcctcttcaactgcaccccctccccaccagcccggaccctcccctctcccctccccaaagccgttattgccacaaaagatactttccccattgtgccccggacagctgagaggtccgagttagccatacacagctccgcgtcctctccagggagaaaggggatggaccctgcaagtggagagcgggatgcttatcatacaaaggaattaaacccacttgggctctctcgccatccaggactgtggggggttaaatacggttacattttcattaggtgctaatagcagaagggcagccccgggcagcacggaccagacattgttatgaagaacgtccccgacaagggaaggtcagggcaggtggggtgggaggtggggagagggacatgccagcgtcaaagccgggtccagggaaggggggcatgccatgggcgtattgttggcctgcgagttccgtcaatgggaaaagtcatgtttcctccgaaggaaacaagtggaaattgtcggggaggggaagggctggtgggtggctgggaagcagagctcggccagttgctactaaggctgccttcgaactgtccctccccactgcc

SEQ ID NO: 335658 - DNA, 907 bp, Homo sapiens
  chr17:70588172-70589079
  hyper
cgcttggaggcagggggatgactaaaatgacctccaagaagatgtcaattacaagaacaaaaatttcaacccggaatctcgagaccttcgaaaaacgacgcggaggaaaaaaggaaagaaagaaaagaaagtaaatcagatcccttccccgaaccgcagggaaacttacctccagcttggcgacccagctgttaagcagaacaaatcaatccacggatggagaagaggtcgtgggtcttctgagcccagctgatacacaccaagtaatccacgttaaggggtccgcagccccccacccaattccccactttccatccaaggccaaagagcagccagaccctgtcctctgcgctccagactcgcggaggtcgcgggcgggggtcctcaggcggccgccttctcgtccccaggggtgggcgcgcgacgcgggcagggaccgggcgcccggaggaccaagcgagcgcatcccgcctactcgtgctgggacatcacccagcctggacgccgctcctcgcctttcttccccgcgcatcgccagcgccaaccaaagatccccgccgggaaagcctctctgccaagctggaaagcgctgaaggcggatcgtctctcagacttgggtttgcaggttcacaaggcccgggaggcttacggtgggcgcctgcctaacagagggtccttgcggagaagcgcagaacgacaaatgccagaggcggtgaccgcgtcctctggataccagcgccgcaccgcgcacccgcgccgcctgcgcgccctgcagtcggctgggccattcggcccttatataccaggcggacccgcgccgggacggggcggagcggggtgggcggggagggggtggggaaggccgaacggcttcctgggagtcgtagttcgactacgtagtcctgtc

SEQ ID NO: 335659 - DNA, 681 bp, Homo sapiens
  chr17:71160734-71161415
  hyper
cggggctggcccacggtaaacacagctttgctaacttgtttggctaaggaaatcacagaggtcccggtataagtctgggtcaccccggccgccactccagctgcctagaatatatgggtggaagggaatcgactctgtgaaatcagagggaaaatagcgcttgtccttgccatgagtcttgaggagaccgaaaacgcttaaccttttacgcccccgcaggcgggtcccctctctccccgctccccggctgtctgtaagctctgcctgcggccacccgcaggcgtttcagccggtctcacccctgtccttctgcaggacccgggaggaggggttgggggggcggagcgaagccgctgtgacgtagcgggaggggggcgtggggaaatgtgccgaggggcccgggctggctgggccagtcccagcggcgcagccacccatgcgcgcgcgctcgcaagaccaccagcgcccagagccccagtctgaggcttggcgccgggggtctgcgggcgaggggagctctctacgtgcgaggggctagcgggagccggcacaagagggtcgaggagccaggaaccccaaacgtccggcgccaggcgctagccaagctgctgcgcgccccggcgcccagctggctcggggacagccgctgggtgtcggagaccggagctagcggattgcagc

SEQ ID NO: 335660 - DNA, 938 bp, Homo sapiens
  chr17:71161494-71162432
  hyper
cgagaagcgcacttgggcacctgtgtgcatctgcgctgatggtggtgtgcccatccgagtgcctgagcttaggtcccggtgcgtgattctccgctcttgtgccttttggggtgattgtagtaggaatgaacgacaacgggtacccttgcctgagtaagggggctgtgggtagagtgtgctggaacggacgtgtcctcgcagcctcatgcccgtgtgcgtggcgtgtgccctttagcccgagatttcaggtagctgcgacgggtgacaacttctctcccagccccctacaaaagagacctggcgcgaggggagcgaggccgtgagatgccagctggggctcctgcgggagcgcacccggagatccgagcctgccagaggcaggcggcgggcgcagagcggagaaagaggggcttctctccctagacgctgaacgatctaggatccgtccccgtcccccacctcgggacagaaaggacagtttgtctaggtttggagagaaaaaaccactgcataggccgtgcccaaaagccgctggccaagtcccccaagcgactgtcttctgcgccccgatgtctctgtcctcagcgccccccccccacacccggcacccctgctgtgcgtttcgatactgggcgtgctggcgccacaatctccgctcttgcctcgtcttcctggaaatggcacagagttctttgggaaacccttgctctgaggatcagcgagttggatggccaggaggaggactttctgtgccagccgggagcaaccggctccgcggtcctgacactcgcccctccatttctcaaccccgtaggccagcaccgccccggcttttcccaggcgctcacgcgccgcggtggccctcaggggcttttgtcaccctgccagtgggggctctcgctctagccgcacagagaccaagccgggttctgcaggcc

SEQ ID NO: 335661 - DNA, 525 bp, Homo sapiens
  chr17:71897934-71898459
  hyper
cgagtggagggaatgaggagggcctttcaagggaggcgggattgcattcgcacctgattacgctgcgcggacacaacagaggcgcccggacccgcagccctgccttcgccgcctttgctgggctgtttgcgcttcgtttccttctcgccgccccatggcgcgctttctctcttctttatttcgccggttctccccgctcctaacctgcttaacaacttacctcgctctcccgcttgctctccccccgccccccatctccactggttcccgagcttctcttcatgtccctaatggcgtggctgcgccagcatttaataaaagctgctgaccgggaaatccgagctaactgaattacttcctcattaaagaggcgggcagattcttgggccccgcgtgcagccaccctcgctgcctccctccccgccccgctccgccctgctggtcccgcctgccgtccgcaattaggcggcagatgcttgccgcccggtggtggcctgggttctgcagggactgagggggctcgtc

SEQ ID NO: 335662 - DNA, 887 bp, Homo sapiens; identical to SEQ ID NO: 225487
  chr17:71948434-71949321
  hyper

SEQ ID NO: 335663 - DNA, 497 bp, Homo sapiens
  chr17:72209877-72210374
  hyper
cgcagccacgcgcgccccaagtccccgcactaccccctctcccctcgagagcctgcactttcccacgtgcctctcagaccccttctctccccgcgcagccctttcccgtctcccctctccccttttcccccaccctcccaggcccgtggcccgcgtcccctcctgtctgggaacctgggggccgggaaaactgaagagatcagagtgaagcgagcgtggggaaggggaggaagggcgcaagaccgcctgcggggtgaggggctgaacgctgagcgggcagggcggcgcgggggaggggtaaggacaggggcattcgtctcggggtaatcctggcgcgcgaggtgcggggatgctgaggggtgccccgaagttttcgaccgtctgagattccaagatggggcgctctctttccggggctgagtggcctaggaaagtttggcagaaactgagtagagtctcccgagtcggtcttcgcagcacccctcctccccagcccc

SEQ ID NO: 335664 - DNA, 215 bp, Homo sapiens; identical to SEQ ID NO: 225489
  chr17:72270296-72270511
  hyper

SEQ ID NO: 335665 - DNA, 677 bp, Homo sapiens
  chr17:72352837-72353514
  hyper
gatgaggtgcaggtgcagggcgttctcaaccaggtactcggagttgcgccgctgcaggtcggcgtgcgccaggaagtcgccggcctcctcgctgctctggtggaagctgtaggcgtggcggaccagcaggcggccctgctggcgcgcccccaccagcaccgtcttctggaagctcacgcccgccgcgtcgccgccgctgctggccggcgtcaccaccagccgcggtcggccgtcctccgggcgcgcggcgggcagagcagtgcccgcggcgtccgcgtaaacgggccgcaggctgacgggcagccagcgcggcgagaagagcacgttccaggtgacccggcggcccgcgtcgtggccactcgggcccagctgcgtctggaagctggtgctgcggtcgtcgcgggccgggttgttgatgacccacggggcgccccaggcgggcgcgaggtagttgcggggcaggaaggcgctgccgttgacgtcgaagaacttggcgtagtgcagcggcgacgcggcgtggaactggtaggcctgcagcaggaggtcggccaccgcggggccgtggcgcgccagggctgccgagcgcgcctgcagctggaacagctgtgccggtgggatcatggggtagcgtatggcgcgcagcgcccgctcggccacggcagggggcggccgcgcgc

SEQ ID NO: 335666 - DNA, 1911 bp, Homo sapiens
  chr17:72427030-72428941
  hyper
cgcgggcgctcagggttgagcaaacactccgggccgcccgccccgccaccagctggctccgaccggcgcaccgctggcgatcccccaggcaattcggcgtcatgagaaccggcaccccgagactcggcgccctgccctccctccgcgtctccagggccctggccaggcccaacaacctctccctcctctgtgcgcctcagcccctacgggcctctggcgcgggctaactaggcctcgctgcgggcccccaggactgcgcaccccaccccccgcgaggccagcagccccgggggaaggcggccggaaaatctcttgtttatcgggctggataagtaccagcctggattcgcttcccaatttctgcggtccagcttcagcagattcctggggccggaggggaaagggtggcaacccacagatccaccccggaacagggagtggggggtggggctggtgggaacctgacctcctggaaaggacggactcggagtcagagccaacgtgtcccggagcgcagaggcccagggggtcgcgctaaacactgtacctcggggaacaaaaccgtgaaggctaattaggacaagtcggagcagggaacggggacgccgggaggggagagcgcgctccgagttgggcagaacctggaacggtcacaggaaacccgggcgcggggtagtcgggccgagggggacctttgcccacggtccagagtggtctggactcggcccacgcgtgagaggagcgcttggtgacgatcccacgtacgcttggtgactggtggaggtcccagagaaggaccgtgcgtgcaaaaggcgaacctcggtgtgcggtgtgtccacgtgtgcaagctggggaggggagggggcgcagaaggcgtgacaaagacggactctgtcttgagtgtgcgcctcgctccggcccgctcccagcgaactgtgcctgaagtgtgtctcacgggagggccaggacgaaggtgacaaaggctaggtgtcccccacggagacgcgccaaggtagccccgcgcgtgtccgtaggcgcgctctctggaagacgcggtggggggtgcgcagggctgcaccctcacaccaattgccccggcgaaggccgagcccagaaagtgagtgcgcgtgagtgtgcgcgcgcccgcatgcgggggcgtggcagtcaacagcaacaacccacacgccggcagggccagaaactcccatctccctcaccagccggaaagtacgagtcggctcagcctggaggtgagtcggggcggggagggccgggcaggctttgttcctgtgtaaacggagcgcacgtacctggagcgcggcgggcgcccgattagcgccctgaatggaggtgatgtaacggtgatgcaggctccagcccaccctcgccgaaagcaaggagccctgcctggggacaggcccgcgcgagagcgagcaacccagcgcgcctggctcagcctcggtcccagggagaggcaggccctgcgtcccggcccgggccccgccatcccagccaggaccgggcctggcccagcgccccgcgccgcgtccctcccacccccgcccgccccccgcctggggctggagttggccccaaacgctgcgctggagcggggccggcggcgagtcccaggtaagggctgctgccttcccgctccgccgcccggaagagtcgggtcgggacggcggggagtgggcgagggcagaggcggggggactggacatcctgcgggctggggacgccgcgccaactccgctcggtcgctgaaagttttcaaacccgagccggctggggactgggggggtgggggagcccggcgctgcggctcgggctggagggaggggaaaccactccataatcggggtctccaagaggagcccctccaccgcctgcctctcggtgggagtccgc

SEQ ID NO: 335667 - DNA, 712 bp, Homo sapiens
  chr17:72449954-72450666
  hyper
cggtggcttgcctcacccccaactccaccgacggcaggagagggtccgcgggggcccgggcccagggaaggttttacgctccgtccttaacccagcgtcctaacctgacccggctgggagagggggcggggccccggaaccccacccgcagacagcccactcccccgcacgcacctgggttgggggaggtggggggcggtggggggcagtgaaggtggggggaggtgggggtgggcccgagcagccggcgcgcccacgtgcctctcccgcgagggcccggccaccccagctccagccaacccgaggccgcctctcgtgccccaccccaagccccgccccggcccctgcaacccgatcctcgccgcggggcggcggccgaagccagctgtcccagctcctgctgtagcctgggggccgggccgccgcgctccgcccatccccgccctcagagctgggcctcgcagccgctagggattgcgggggccgcatttatccctgtgtctctcaggccccgcagagacgggggtggggtgggtgacgccagggaagcaggccccttttcccaagggaagaatccccttccggaggcccgccgggccatggagtttccgcgggtggaggtagtgaggccaagggcacggggagccctgtcgctgccttacgtctggctctaggccggggttcctcggctccaccagcgacatttgtggcc

SEQ ID NO: 335668 - DNA, 425 bp, Homo sapiens
  chr17:72667264-72667689
  hyper
gtgacggagatgcccgttcgctcgggatcaggaacggtgagctcctgggaccgcaatgccctgagaacgcagccgggtgctgagcctccggagtccggtagctgaatgaaatacgcagggatcaccagccggacccaaatcttgcgtccctgccagcatcctggagtcctaagaggcagggattggagcggacaggatctcagaactctggtcccgggcgcacaacggcggagtcgctgttcctggtgctgaaacgctcagtcctggaagaacgtggccgcctgcccgcctggtaccgcgccgcggccgctgcggggaactgtccagtgctgaaaacggatgcggcccggcccgcagagctcagacccaagcctgccgcacccagcggagctcgaaccgagctcctggaagcgctgacgcagagc

SEQ ID NO: 335669 - DNA, 272 bp, Homo sapiens
  chr17:72732911-72733183
  hyper
cgggccgggtgacttaacagatgaggaagtgtctcggggccatcggcggaggcgcagcccaggggtccccagctccccgcctcgccacctggggacagcccacggcccggggctcgggcgccgcctgctgtcgcggtgcgcagcgactacgggaactcttccgcagcagacggggtccccgcggcccgctcccccaggggcaagcaagcgaccacaggggaccggtcccggggctggatgtggctcatgtccgaagcgcacggagccgagcc

SEQ ID NO: 335670 - DNA, 785 bp, Homo sapiens
  chr17:72855929-72856714
  hyper
atcaggctccccccgcgggaggagggggcgcgagcagcgagagccaccgtcacccgcggctcaaggacactcgcgatgcggcggcggcggcggcggcggcggctccgggcggggacccgcgccacgcctcctggcggccaagctgagcaccacgcacccggcgccccccgccccacgctgccccccgccggcgtccgcggctccggggcccccacccccactcccccaagctgggtcgtgaccccgagtcccgcagtggggggaccaagccagcctggcaggcggccccagtaccatcccaggcccgcccgggggccctgggcgaacccaggtgtcccggacctgcctacctgcccctggcacgctcttattcttcgggagtttagaaacaggctcaaagtcactagcaccgccaagacctggacgggctctgaaatacagccagcggaatggtaccctccccaaataagtgtctttcctcgattttcctgtggcccggggtcagggactgaactaagataacgccaccatccgagggctgggggaccgagccagaagtccccttggacgaccagggctgggaaaccgagtggacgaatggggtgggcatcagggcctggcgggaattcccgtcttgctcacccagcagctccttgcagggtcgcgggacgcacctgggggttcaggttgccgggtgcctttgctccgcgtgtccccgccctgcccgcgtaggcaggaaacaggagactcggggcttcccctccccgccgtcggggatcctgggc

SEQ ID NO: 335671 - DNA, 770 bp, Homo sapiens
  chr17:72931833-72932603
  hyper
cgagcccccgggagggtaattaacgagggattaatgagatttccaaagtcaacagaaaaatcgatgggccgcggagcccgagcggcggctgcgcagtcccgctgggggagggcgtcgcgggcatcggtctcacctggacggacgatccgctcagcgcccgcagtcggtggttagcccacggcgatgcctctcccggcctcaggtaagcccggagcgccggcggaactttcccagcttgcgcaccccagacactggcacatactacccacccccccaaaaggggggttcacaagtaggggctgcagggattggaacgggaaagcggggtgactgtggagaggtgaactccctttaatctgaggccggcccctccacccgccccgcaacccgcgctccgcgcccctactcctttccgtggacccggggagcacagagggcctcagggcgcgactcctcccggccgggtccacacagcagaaagcgcggaggcctggggtgtgaggttggttggggctgtctggacgcccggtctggggcacgcaggaagcggctgccccggccccgcagtccctaaaatggctcggaaggaaatcccgagggcgcccgcactcagcagcctcctcggagccggccctgcgctgctgggccgggcgccgggcccgacggctccgcggctttcatcgccaatccagccgagacccacaaaccagtccagtgtcccggccctcccttggactggcgtcgcgcccaggggcgtgccagggggcggc

SEQ ID NO: 335672 - DNA, 1416 bp, Homo sapiens
  chr17:73029792-73031208
  hyper
cgtcccagtgccgggggctgggggctggtgctcgctaagtaaggatgggggcaggtccctgcgcaccgcggtatcttcccgcccgctcaccaaaagtgcgcgcggcagggacggacccactccatggatcgcgcctctgtcaggccttctctaggaaaaggggacactcgcttatgaggggaagggatggcacggccacgtgccccaagccccagtggcctaatggataaggcactggcctcctaagccagggattgtgggttcgagtcccacctggggtagaggtgaaagttccttttacggaattttttatttcttttctcttcccttctcagggatgctggaatcgaccttggtctctagttcgactcccgtgcaacgtgttgaggaggagccacctcctccaagcgcctaaagccggtaagctcgggtcttgccaagcccttgaatgaacagctttcgtccgggtagggccccacaatttcgaagctggggaaactcgtaagaataaagttgcccaaagggttcccaggacaccccagctccacctggcggggcagccccggagaaccagaggtaaatgaccaccgcgactgcaaacagagggtcctgcaagagaaggcgaggggcgcaaacagggcagaggcaagcaggtagcgggcaggtggtggtggattctgaggtctctggctgccggcaccaaaagaaaccttgcgagcacagcccctctcgacaccccaggtgggactcgaacccacaatccctggcttaggaggccagtgccttatccattaggccactggggcgcggtaagacgctaaacccacgtgctccttgataggtgttcaaccatagtgcccaaacacggccctgctgtgggtcaccgcgctccaagcctgagaagccatggggacgacaggatgaaccgctggctgggcgcggcgtccccaccgggctacacaagagctccatgcggtgacgacgcgcggggaccaggagcccgcggtgccctgtaaccccgagaagaagtgctcggcgagcgcagaggccggtggagcatagctgggaggaatagggatggacgagggcggagggaagaacaaaccctcaaactatgctgggattcgggcaagggctgctcgctccaaaagagcccgaccacaaaggaaccctcaatcttatgatctgacgtcagacgcctcatcccttaggccacgcggtcgcaattcccagggaggctcagagactagtccaggtgccgctccgctcgggggtgactaggcgggcggctggggccagaggaagggtgagcgcttcgctcaacaggcggccagggtgcgagcagtgaagctgcggcacgccggagcgtttaatggccatcaaattggcctctctaggaggtagctgcagccggag

SEQ ID NO: 335673 - DNA, 571 bp, Homo sapiens
  chr17:73073461-73074032
  hyper
ggccgccactaggacgggaggtggaggtgtccaactcgtgggtgtgcctgggcgtcacctacccccgcagctccccgctcggcggccgcccgagccgcagcgtggtctacctgctgggccgcaaccccttctcgtggtgcctggagtgggacgacaacgcgcagaccgtgctgcacggcgcctaccaccgcacgctgggcgtggcgctcgactgcgacgccggcggcttgtccttctacggcctggcgggtggcgccagcctcttctaccgcttcctggcagccttcctcgagccgctctaccccgcggtcatggtcagcagcggcgcctcggccacgctcaagcggcgcccggagcccgcgccgcccgtgacagcaccccataaataaacctggacttatctaagcgctggctggcgcgccaggacggttcccggccctgcgccatcccacctcccaaaacgcaggcgaccctttctcgccacagccacaggagggctctaatccggctagagttcccccaggcactggggacagtcccgtggccttgtgggtgggggattcctgactgc

SEQ ID NO: 335674 - DNA, 968 bp, Homo sapiens
  chr17:73584153-73585121
  hyper
cgcaaagcgccccagcgcctggagaggcccgggaggccggcctcaggggagcaggagtcggggtcggccagcgcggatggcgcgcccagccgggaacgccgttccgaccgcgggcaggcggacagggcgaaaccggcggccgagcctgccaccgccgggggccagggaacccctggtggccgcaggaagcccactgcagaggggaacggcggctgcagacgcccaggggctgggctgtccccgaaagcccaggagaggcaaagcaacgcgcagcgtcagggacgcgggcccaggggcggccgcggggggcgcctggaggagggaagcctctccggaggagaagagctgggcggccgccgtaggaggaagcggaaagataaggggccctcggctcggcggggccgccggacgcccaggagcctcaatggggacacgtcgggtggggacggaggcagctcctgtccggacagcgaaacccgcgaggcccaggagagcggcagccagcgcggcacagcccgggagctgcggcccacgccggagcctacggacatgggctcggaagggacaaaaaccgggccggagtcagcgctggagccaagcagcgacggcctggacagcgactggccccacgcagatacccggggccgggaagggtcgtcggggacggggcccctgggagccagcgagcattccggcggggactccgactcgagtccgctggggaccggacctggacggggctctcgggcagctatggcctccaggaccttcgaggacagctcgcgggctcctcgggacactgggccggccaaggacgcgagcgacaaccgggcgcagcggggcgccgagccagaaacaatgcaggcctcgacggcccgggctccgcgccaccaggtcggaaaggcggtggggcaggtgccagcggcggcaggcgagggcgaagcgggagccgcagcaggagcggggcc

SEQ ID NO: 335675 - DNA, 392 bp, Homo sapiens
  chr17:73585949-73586341
  hyper
ccttgccccgactgcacccgacgggccttccctcgacgagagcggctccagcagtgaggcggagttggagaccctcaatgacgagcccccggtgcgctgggcgcagggctcaggcccccacgagggtcctaggcttggcgccgccgtgctgctaccccgactctccttggagacccgcctgcagcaggagggagacccgggcctccgtgggtccctgagggagctgtgggaacccgaggatgaggacgaggcggtgctggagagggacctggagctgagcctccggccgggcctggaggcgccacccttccccggtgccaagggcaggagcctcggagacggcctggaagacatggaggacctggcgcggttgcggttagcgggcgcggtgc

SEQ ID NO: 335676 - DNA, 292 bp, Homo sapiens
  chr17:73749759-73750051
  hyper
cgcagagcctacggccttcccccgcctggccctgctcggcccggcgccccccggcggtgccaacgcggcccttcgttgttcccaaggctgcggctggaagttcgagcccctgctgggggaggagctggacctgcggcgcgtcacgtggcggctgcccccggagctcatcccgcgcctgtcggccagcagcgggcgctcctccgacgccgaggcgccccacgggcccccggacgacggcggcgcgggcgggaagggcggcagcctgccccgcagtgcgacacccgggcccccc

SEQ ID NO: 335677 - DNA, 363 bp, Homo sapiens
  chr17:74070955-74071318
  hyper
agcggcaccatgaacgtctcgggctgcccaggggccgggaacgcgagccaggcgggcggcgggggaggctggcaccccgaggcggtcatcgtgcccctgctcttcgcgctcatcttcctcgtgggcaccgtgggcaacacgctggtgctggcggtgctgctgcgcggcggccaggcggtcagcactaccaacctgttcatccttaacctgggcgtggccgacctgtgtttcatcctgtgctgcgtgcccttccaggccaccatctacaccctggacggctgggtgttcggctcgctgctgtgcaaggcggtgcacttcctcatcttcctcaccatgcacgccagcagcttcacgctggccgcc

SEQ ID NO: 335678 - DNA, 104 bp, Homo sapiens
  chr17:74072105-74072209
  hyper
cgggtatttcccctctccatcctctggaaaaacagagaggcgaggccagactgcccccacacctcctgtagccactgagcgcgaagtgcgttggttccgagcgc

SEQ ID NO: 335679 - DNA, 810 bp, Homo sapiens
  chr17:74236139-74236949
  hyper
cgaagacccgcggggccccctcaggccgtcccgacccagacccctgcccctgcccctctccctcctcgcggctgcggcgcccgcccgccctcaccggacttgggcgggtagcggtacacggaattagacgggatgtccacctcctccacgcccgcgtgctgccggctcgtcagggcccccatggccgctgcggctgcagccccggcccggccccggtgcccgcgccgccctccgcgcttcaccgcggccgcccgccccgcgcccggtgcgggggccgactgcccgccgcggccggctccgctgcggcgctgcggctctggcggcggggagcccccggcgcgccgcgcaccatcctccgccgggcaccgcggcggcgcctctgccaagggggctgcgggtctgggccgggggcgccgccgccgcctcaggccgcgtgatgtcagcggccgctccgcgcggggaccgcggcggccccagccaatggcgaggcggggcgggagcgcccgcgccggagcagccaatgagcgcgggactgcagcaggagccggcggcgcgtgcctcgcgcggggagccgcggctggactcggcgcgcgtggacgcggcccagggcctcgcggcgggggcgtgggcgtgggcggggactcgcgacggggacgggggcgcggccgggtgcccgcggcggggcggggcgggaccggccggagctgggaccccaggagacgagcgctgcacccggccgggacgcgtcgcccctccgcgcctgtttatcccggctcggattaccgcgcagggagccgccccctcccgcgg

SEQ ID NO: 335680 - DNA, 788 bp, Homo sapiens
  chr17:74533662-74534450
  hyper
gcggtggcggggcgcggggcgcggggcgcggggcgccgggagccggggccggctgcgtgcgcggcgggcgggcgaggggtagagcgcggagggagggagcgtgtgtctgtgcgcgccgggtgtgtgtgtgtgtgtgcgtgcgtgtgtgcagggtatatgtgcggggggcgggggacagccagcggtggggcggggatgtggtctgctggaaaatgtttaaaaaaacaaatccgctccaaacccccagccccgtgtgggtaagagccaatgccggcaaggtgaaggctgcgcggggtgggggcgacgcgactgccgcccgcccacccgcaggccacggcggagttgcaccgcggggcggggctcgggtaggtgtggccggggcgctgggggtcccgggaggaatgggcggtcacgcggcgctgggcggcgcgggccgcacaggagtgcgctggggcgggcgcgggccgggagcgctgggttccgggtcccagtgcttgcggcgtcgcgagtgtgcgcgtgcggacccttcccgcggcggggaactgactcaaagtccaacactcccgagctttcgcggcgaggccgaccgccagcccgcccgtgggggcgaacaggagcccctccggcggccgccgtggacctagctgggctcccctcgcccgggcctctccccgcgcccccgagccagccgctgggggccgcggcgccactcccacggctctggacgcccaggctctggggggttagcacgggggtcgtccccctgcccgcccaccgccccggctgtc

SEQ ID NO: 335681 - DNA, 136 bp, Homo sapiens
  chr17:74620111-74620247
  hyper
cgcggaggacagggcgccgcgagcagggcgccgagctgccgccacctgccgcccggagctggcactgcacccttttagtgcaaagcaaatccctgtcccattggtcccctccttccctaaccatgaaatctaaagc

SEQ ID NO: 335682 - DNA, 855 bp, Homo sapiens
  chr17:74864603-74865458
  hyper
gcgcgggttgccctcgtcgagagccatgggcgcggcgcggcgcggggctgaggatcggcgcggcccggaggcgctggggaccggggcgcgggcccggggccgcctttagccggcaccgagggcgcggggccggggatgagggcgcccgccgcggggagcccgtctgcgcgccgcggcaccttcccgcccagcgagcgagcccgagcaggcagacgcgcggccggcggtctgggggcgcgccgcctcccggtccccaaaatgtgaagcggggagggcggagacgcagagacggcccggccgggcgccctcgccgccctccggcagccgcgccgctccctccgctgcacgcccaggcctgagcagcgaggccaccgggccgcgcgctcccagcttcgctcggacgcggcttcggcccgcagagggttcgtggcccggacgcggcgagagctgggcccaggacggtgcgtccggcctcgcccgcggctgctcgcaccaacaagtttgaacaatgatcaccgtcaaccccgatgggaagataatggtcagaagatgcctggtcaccctgagaccctttcggtaaagttccctcctggttggttttttccccaggggggcgccgggtggaggtgggcgaggtcggttcctgcgaacgttcaagtcctggtggcagagggggcggttcacacttcaacccctggtgatgaccagtggggctgggctgggggaacggatggcgttggggttcggggtgcggatggggagggttgtgttattcggggacctgtcccgagttgggcagggttggagaggactcggggtgcagaggtaagaatgggggcagaaaacccccaggtc

SEQ ID NO: 335683 - DNA, 682 bp, Homo sapiens
  chr17:74865491-74866173
  hyper
cgcgccccttcccagcccctcagggtccttcctcaccccgcggacggtcccatccgggtggcaaagttagtgtgcggcgccttggagctccccctccggtccctcccgtcccgcccgtctgcccctaggtcggctaccccccaacccctccgcctgtgccaccctctccccagcctttggtggcactgctctcctccccgcggggctcgggcctggctccgacgagagggtcccgagattagagcgaggactcgctcatcccaggattcgcccccgatcgcaggcgtcggagaggcgggggcaggggcggcgctgcagggctacggggcggctggagccgaggctgcggcggagcgtggtgggcgggcggtggcgaaggcgacacgcttcgggcggccaacacctgggggcccaggccaggcagggctggggccgcgcgggactcactggacccagccaggggcccccagggcccagcggtgccggggcagccccctctcctcccaggcatccgcggaaccggcccgcagcggggtggggagggggcgctgcccagtggacgcccggcggggcccgagtgtcaccccgtgggtagctgggcagcgaggaagctgggggagtgaccgccccggcgcgggggccggactcgggacgtggccacaggtgggctccgggcgcggga

SEQ ID NO: 335684 - DNA, 90 bp, Homo sapiens; identical to SEQ ID NO: 239500
  chr17:74866203-74866293
  hyper

SEQ ID NO: 335685 - DNA, 597 bp, Homo sapiens
  chr17:74965156-74965753
  hyper
cgcagccggcctcggctgtttaccaggcacccgttacgctaattgaaatgtgccaaatagctgcccggggcggggccgagcggagcagcgggctccgggtcacctgcggtgttgatgaggtattcaagaggaaaaagcgccggagcggcagcttcatttgcaagggaaatgacttgacgaggcccttcatttgcatctttcggcccagaggttctgattagctgcggaggaaaagcccgcctgttttatgcatgaggagctctgcctggagaccctcggctgctcacccgccccagccctgccttctcctcctaagtcggggaggaggagaggggtccccagagggcaggatccaaggctgaagcctaagaccaacccttggtggtgaaaatagaaatttcttgaggcaaggctgccataaagtgcagtgagactcatcggtgaggggggcactgtgcgatctccatccggggtcttcagggcaattgcatgagctcagcctgctaagagcctggcaggcagcgcgagctcccctggagttccggccgctccgcccagtggctctgtgcagcgcttcccgcccggagaacctagtgc

SEQ ID NO: 335686 - DNA, 84 bp, Homo sapiens
  chr17:75082793-75082877
  hyper
cgcctgtagttttcgcctgtccaggacgccttcacccctgcttcctttgagaaaagtccctctcccactccaagtggtactgac

SEQ ID NO: 335687 - DNA, 1804 bp, Homo sapiens
  chr17:75368688-75370492
  hyper
cgtcgcccgtccctggcttctctgacagccgtgttccatccccgccctgtgccccttctcccggacagtgccttctccagggctcacccaggagggtgcagcggtggcccccggggcggtggtcgtggtgggggtgttagctgcaggggtgccctcggtgggtgggagttggtggcctctcgctggtgccatgggactcgcatgttcgccctgcgcccctcggctcttgagcccacaggccgggatcctgcctgccagccgcgtgcgctgccgtttaacccttgcaggcgcagagcgcgcggcggcggtgacagagaactttgtttggctgcccaaatacagcctcctgcagaaggaccctgcgcccggggaaggggaggaatctcttcccctctgggcgcccgccctcctcgccatggcccggcctccacatccgcccacatctggccgcagcggggcgcccggggggaggggctgaggccgcgtctctcgccgtcccctgggcgcgggccaggcggggaggaggggggcgctccggtcgtgtgcccaggactgtcccccagcggccactcgggccccagccccccaggcctggccttgacaggcgggcggagcagccagtgcgagacagggaggccggtgcgggtgcgggaacctgatccgcccgggaggcgggggcggggcgggggcgcagcgcgcggggaggggccggcgcccgccttcctcccccattcattcagctgagccagggggcctaggggctcctccggcggctagctctgcactgcaggagcgcgggcgcggcgccccagccagcgcgcagggcccgggccccgccgggggcgcttcctcgccgctgccctccgcgcgacccgctgcccaccagccatcatgtcggaccccgcggtcaacgcgcagctggatgggatcatttcggacttcgaaggtgggtgctgggctggctgctgcggccgcggacgtgctggagaggaccctgcgggtgggcctggcgcgggacgggggtgcgctgaggggagacgggagtgcgctgaggggagacgggacccctaatccaggcgccctcccgctgagagcgccgcgcgcccccggccccgtgcccgcgccgcctacgtgggggaccctgttaggggcacccgcgtagaccctgcgcgccctcacaggaccctgtgctcgttctgcgcactgccgcctgggtttccttccttttattgttgtttgtgtttgccaagcgacagcgacctcctcgagggctcgcgaggctgcctcggaactctccaggacgcacagtttcactctgggaaatccatcggtcccctccctttggctctccccggcggctctcgggccccgcttggacccggcaacgggatagggaggtcgttcctcacctccgactgagtggacagccgcgtcctgctcgggtggacagccctcccctcccccacgccagtttcggggccgccaagttgtgcagcccgtgggccgggagcaccgaacggacacagcccaggtcgtggcagggtctagagtgggatgtcccatggcccccatccaggcctggggatatcctcatccgcctcccagaatcgggccgtgggggacagaaggggcctgcgtgcgggcagggagagtattttggctctctcctgtcttcggggtttacaaagtgtgttgggacttgcggggctgctctgtccaagcctgggtctggcgtccgcgtctctgagcctgtgagtgcgtgcgctttcctgcgtcctcttgactgccggtgctggggctctgc

SEQ ID NO: 335688 - DNA, 343 bp, Homo sapiens
  chr17:75447477-75447820
  hyper
cgcgctctgggaggctccttgttccgcgaccacaaagcccctttgatcctctgctcggctctgagccatgtgacccggtgggcgggccgcggctctcggcgcgtccagcgcagcccgacgttccgctgctggggtgagtcctgctcctttgttcttcccagccttgcaccactggctcgggggctctcaggtggcgcggccgcgaggcggaccctgatggccatggtggcggtgccgggagccacgctgtccctgggccccggcccgaggccggcaggaccgagcggggtccccaggagaggggtggcggggagctcgatctccacgcggggaccagattttc

SEQ ID NO: 335689 - DNA, 427 bp, Homo sapiens
  chr17:76123746-76124173
  hyper
cgagtcctgccggcctctgccctggactcctcctgcgctcaccctcaggaactcagggctcaaagtcggccgggttgaagggcgctttcctcggacaggcaaagcccgggggcgccccgacagagcagctccttgcaggggtgccagtcacaggaccggacggcgccctccctcagtgtcctgggtgccatcttcgggcccaggccccacaccaccccctccctccagcaggagcaaagacgtgggaaaaccagcccagagctgggtccgaggcggccccacccagcctaacacgggacagctgccgaaagaggggctgaggacgccccacccagtccctagagctggaatcccttcctccagacaggcccttctaagctcagggaacccggggactcgggcacccagcgccccagcactccgcccc

SEQ ID NO: 335690 - DNA, 533 bp, Homo sapiens
  chr17:76227788-76228321
  hyper
cgtgcccagggacccggggccagcccgtggggacgctgggattggagcccaagccccaggttcgccgcgcggctctcgacttcctctcctttcccccaggggcgagctcagcgaccgcagagaggtggggtcgatctccctgcgaccccagggggcccgcgaggccagtgcgcgggcaggagcggggacgtgctcagaagagccgggcgccgccgcgcccgcccgccccccgtcccccggctcccggctccgcgcgccccccgccgcccccggggccctgctacccccgacccgtcccctcccgccggccgcccccatggcccggctgggcgcgctgctcctggccgccgccctgggtgcactgctcagcttcgcgctcctggccgccgcggtcgccagcgactactggtacatcctggaggtggcggacgccggcaatggcagcgcctggcccgggcgcgcagagctgctctcctcgcactcggggctctggcgcatctgcgaaggtaaccggccaccgcgccggccctcct

SEQ ID NO: 335691 - DNA, 227 bp, Homo sapiens
  chr17:76254688-76254915
  hyper
cgacataagccccaggtgggctgcctttcacggcgcccccggctccctggcacccgcccaggcgcaggcgctggggtgtgggcacacactcacatgctgagttcagtgtgcggattcctgtaacgctgggctgctggcaggaagtgcgcgccggggaggctgctgctgggaacccagggctggccccgctgagataaagggaggcagcagatcgcagctggagatag

SEQ ID NO: 335692 - DNA, 164 bp, Homo sapiens; identical to SEQ ID NO: 225518
  chr17:76337744-76337908
  hyper

SEQ ID NO: 335693 - DNA, 192 bp, Homo sapiens
  chr17:76355660-76355852
  hyper
cgaaggccccagccggagtattccgggaacctgggatctccggcttccatccgctctgcccctacctcgtcacctccctgccgggaatgacccgggaaggggaggggaaaccgggaaaagctcccgggactgagcgagacccctccccacgccgcgctcctccttcctacctggtcccgaatcgaagtctcc

SEQ ID NO: 335694 - DNA, 360 bp, Homo sapiens
  chr17:76588327-76588687
  hyper
cgcgcttctgttgacctttggtcctgtttgcaggaagctctcaagtttaactctgaacttgaagggaaggaagggagtgaaccacatggccctggggtcggggcctctggccgaagggcgctcagcttggtctgtaaaatgaaatgtgttttgaatgtcatgagtcaggaaaaaagaatttgagcgcagtctggaaatgaaatttcctgcctgtggtttgactcacgtctgtctgtctcgaaatctaccccaaggacatttattccactgtgacagggctcatctctgaggagcaccagactcctgcggtggggagggaagattatccgcgctgcagagactagctggcctccggaagcc

SEQ ID NO: 335695 - DNA, 344 bp, Homo sapiens
  chr17:77020165-77020509
  hyper
cgcggcgcggggcacacacggttaatcctccgcggctgctgtttggacgaaaagcgctgggggtgttggaggctcctcgctgctcacatctggctgggcttcgctccttgcgcgtctgtcccactttctccctctcttcctttactttcgagaaaccgcgcttccgcttctggtcgcagagacctcggagaccgcgccggggagacggaggtgctgtgggtgggggggacctgtggctgctcgtaccgccccccaccctcctcttctgcactgccgtcctccggaagaccttttcccctgctctgtttccttcaccgagtctgtgcatcgccccggacctggcc

SEQ ID NO: 335696 - DNA, 256 bp, Homo sapiens
  chr17:77071245-77071501
  hyper
cggcacgggcgcgccgaggggcggggggccggcgcctgtgtccgctccgtgcacagtaagggacagagggtggcagcgcccctccgccccggtccgccccgccgtcctcgcgccactgccgggcagcggcctccggcccccgtgcgtgacccctgcctatctcagaaatacgggtgcaaacccgagtggccgcggggcccagcgggaatcccgacgccccggccagacccctgcttcccacgtcgctggtctatgc

SEQ ID NO: 335697 - DNA, 786 bp, Homo sapiens
  chr17:77178616-77179402
  hyper
cccaacgccccggccggccggcgggcaggcggctgctgatgctctgtgcgcacctccccacggggcatcctggggatctggtggctcagagtcgccgactttcctgcccccacccaaccccaactcgccagccggagcttcctgcgcagcccccaagattgcaaaagtctggccccagccccctccccggccagagctcctggggcctccctcgccaggcgggtggcccacctcccccgcctccccggaggcccggcgcgcggtctgcgctgcagcagagctcggcgcccccgccgccacctctgcgcgccccccggctttcccgacgctgccagggaggatgccccgctccccgccccgagtccccagcggcccggcgcgaagttccccaaagtgacccgggcgccgagaacccccgccccctcccctcgggcttccccggagactccgcccgccgccccctcccgcgccttcggaaaagttgcgagcgacgccccaaactccggcccccccgcctcgcgccgcgcgcgccctgggcgcccccgcgctcggccgccgcgcaggggcgcagttccccctaccccagccccggcgccatgacgcggggagcgcagcgggggccaccggtggcggcggcggcgcagaggcggccaagtgcggggcgtgggcggcagcgcggggcgcacgtgcgccgggccgggggccggggccgggcggggggccgcttacctgttggaggtagaggaaggcgggcgggcagggcacggagtgcgggagcatgctgcc

SEQ ID NO: 335698 - DNA, 361 bp, Homo sapiens
  chr17:77216338-77216699
  hyper
gaagcggccgctggcggcaggttggtgggggtaggggcttggtcccccaacgctggcactcagtttagctgtcacttgcagctgtcttaggaagtgcggctctcctctctgcctcccgctcgctcctgctcactccaggtcctctctccctctccctgtgtctctgcctctcgctttatttccccaggttgctcagctccgtgcctgctctccgctcgcccatcgatggggtcctgcccggcactgccctgtcgcagtcactcctgctgcctggatctctgttcagagttgaactacagcgtcctgattccagcgctcatcaagcaggggacccaggggagggtgtgtgtgtgtgtgtgtc

SEQ ID NO: 335699 - DNA, 205 bp, Homo sapiens
  chr17:77290660-77290865
  hyper
cgtgagccaccacgccccgctagatacctttgcttcttggagaaacaggaaagatgcggaatgggggaaggcaggagttcagcaccacggacagcgacctgcgggtgggagacgctgccagccacgcggccgaactccggactgggggccacgtggaggaggccttggttcagctctgccccatgcctcacgggacacacattta

SEQ ID NO: 335700 - DNA, 357 bp, Homo sapiens
  chr17:77773671-77774028
  hyper
cgcttgcgaaaagtctgagtttgcaaacgtcggggaatcctgcaaagcttgtggcaaaggtggaactcgattcagaaggaaggaagaggtatagaatgatctgagggcagggagcctggctcttgtcagtagcagacgcgctcagtcccgccaaggaaggcaatccccaacggggcagagtgtgtctcatccctgcctggcgcaacccctgccccccaacccgtgagagagcagcgttgcagggggtgtgaaaacaggtcaccgggcaacctcattcctcgacagtttggagacaaagcgggaggtggcggtctgagaaatgggagcccacctcccgggctctggctgggtgggcgc

SEQ ID NO: 335701 - DNA, 63 bp, Homo sapiens
  chr17:77774710-77774773
  hyper
ctgggcgcacggcccgcgactgcccttcccgacaaagggtctgcgacctgctcccgggagccc

SEQ ID NO: 335702 - DNA, 922 bp, Homo sapiens
  chr17:77776572-77777494
  hyper
tcgctgggaaaacgcgccggcgtcccctcggagcgccgaggccgggcgagctgagggtgcggtgccgctggagcacgcgcacagcgcccgaaccagcacgcatgcgcgccgcgggccggccccatttccgccccccccccacgcgcccccccatcacacgcacacccaatccccggactgctcgctggtgctgcttgtgagacccattcctaggagccccaggcgcccttggggagcagaaagaggcggtccagagttgggccggacaaccgcaacctggaaggagtccgggagtccttgggtctgggcgctcagttctcacggtctggggagaaggggctcagacgggacggactaggcacagccaggggcggggactgcgagaggcgaggggaggccggcagggtgtggcggcagagcagcccgggacaagtgagcggcctagagatcaaggccttggagtcccgtccgagagcaggacgttatcagaaacctccagccccaacccctgcctggagatgcccggggcgcgctgactctgttctcgcatcaccccgggccctggctcaacgcgtgagcagcctgtggttccagataccccgagtggagagtttgaccccagattctgcctgcactgacaggcttggcctggcggttacgagccacggttgatgagcgcccctcctcccgtgacccagctcatgagaaaggcggggagcaccaaccctcccacgggaaaacacggggagaggctgggcgagtcaaggaatggtggcaccagagcctgggcgcagagaggcagctggacctcctgggctcccttgagccggagctccgccagggtgggcacttctgcctccagcgatgctgggtgccacagtcctcccgcctcctcctggaccacacgcggctctccagagtc

SEQ ID NO: 335703 - DNA, 753 bp, Homo sapiens; identical to SEQ ID NO: 225530
  chr17:77777713-77778466
  hyper

SEQ ID NO: 335704 - DNA, 168 bp, Homo sapiens; identical to SEQ ID NO: 239530
  chr17:77778673-77778841
  hyper

SEQ ID NO: 335705 - DNA, 578 bp, Homo sapiens
  chr17:77786288-77786866
  hyper
cggccggcccggcccgctggggcctgggttcctttgggttggggaagtgggggtacgaacccacgcggctgtgccaaggggtcccaactccggagtccaaccccacccaccagtcctctgtgcgcacttttcgtttatttctcagcagtctcagtcctggagctcctggggcgatttcgtcccctgccctggtgcgcccccgggccctgccctgagcccatgccccaggccgggtgtccagttcaccctgagctccccttggcgcccggagaagggtgctcgggcccgggtgctggggagcggcggggtggccgccggcgcctcttcggcgcggatggctctcggcggggccgaggagggggtcgcagagcggctccccgccgagaggagggtgggcgctcggcacctgctgagctacggtggtggctgcggtttatggcgcccgaggatccacccggatcttctccgcggagttccgggcttggctcgtctgtagtcagcacgcacacagctttgttatttgttatttttttaatttttctgcggggagcatcggggctagcccgcccagctccaac

SEQ ID NO: 335706 - DNA, 1366 bp, Homo sapiens
  chr17:77788305-77789671
  hyper
cgatcgtatttcctggggacagctcgacccccaggggagcacgtggccaccagctctgccgccttcctcctcctgagaccgaccctaggagtcctcgtgccccagtctacctagactcccaggagcgtccggccggaagagacagtgggagatgaggaaactgagattgggagggggacgtgatggggtaaggccattcctaaggcttgtggcagagctgcctcttcaccccacccccatttctttcagatgcggagatcaaagcccaggctcactggtgggtcgggagctcactcctccaagtacacttggccaacctcggggagcccggcggcggcgggaggggcgcgggcacctgggggatgggggtggggagcggccagtctgctggtccacacctgaaaacggggtttccccgaccggatgcctgccgtccccccgcctccactctgcggggtcgcctgctagggtcgggaaaggaccctccaccgccaccctcggggttcggtcctcccccaccaacgtctgccagtccgcgtggattccgagcccggctccggaaaccagtctgaccacttcgcccatttcccaagcctccccgggcggcggccggccagcttccatggtgcggtgagccaggctcggccgccgcctcggccgccctgcgatgaatggctctgcccagaaggccggcgtccaagcgacgctcccgcccgcgcgcccggggcctccaggccgctccccgccccgtgtccccacattgcgaaacggacggtcggatgctccgctccagggccggggtcgcctgtcccctgccgacctggcgcagagccgccttctgcacccggccccgtgccgccctggggttgcttacagccgggctgtgccaccgagctgagcccggaatcgaatggcgggccgcggaaaaggcggccaggcccgcaggggcgactgctcgaggtcccagaacagcgcccggggagccccaggccggcctcgaggggaccgcgggcgggacaggaggggaacagctggcatcggcgcccggcttcagctgcccgactgcggtgggcgggtaggcacgttcccccgcagccacccgcgcacgggtttccaaggcgtcaagggcaattcacctggtcgctgcaagaaagcgactgcgcccccacgtccagccagccgccttgtccatgagaaccacctggagggcagggtccagtgcccgggtgccacccgccacgtggtgacggctctgggatggcacaggctcgtgcgtggccgccgggctgccgtctcggcccctgtgcgggtctgcgctttggcggccgccgagccgaggggagaaaatggccggtggcgcggggcc

SEQ ID NO: 335707 - DNA, 2009 bp, Homo sapiens; identical to SEQ ID NO: 239535
  chr17:77814211-77816220
  hyper

SEQ ID NO: 335708 - DNA, 397 bp, Homo sapiens
  chr17:77817078-77817475
  hyper
cgggccgcgcggcactgcagccgggggttcctgcggactggcccgacagggtgcgcggacggggacgcgggccccgagcaccgcgacgccagggtcctttggcagggcccaagcacccctcggggccacaccgccgcccgcagggccgcgcctccgcattgcggcacgctggggtcgcaggcgccgaagcgggacgcgctgttttctacgacgtccgtccctcccaacgtcagggcagccacctcaggcccgcccggagaagcccacccggcccccggcccccactcagtcgcgaggccccgccggcctggagatctgcgcccccgggatccatatttcaaatatgatctttggaacggcttccaccgcccgccgccgccgccgccgcgctcacaac

SEQ ID NO: 335709 - DNA, 1019 bp, Homo sapiens
  chr17:79007528-79008547
  hyper
cgtctcccccaggggcctgactcgttgaaggaatgaatgaatgaatgattttgcagggatgggaggctgggagactgagaggtttcattaaacggaaacgctcagatctggtgtttcacaacgtaaaacaaataattcctctatgttagcctaatttatgtaaatatttctccacgggaattgtaccgggagacctgtgtgccaactcggccagcttccccggcagaatctccccttgggaggacccttaagcaggacccttcctaaaaattggaggcagctctgactcctccattcctcctacaaggttcccccaccccctagggctttccaccgcatgagagtcctccgggcccctcgtttcctactgccctcgacccttccttcccgagacctctctctctcagtaaactgcctccaacgagaatcttctgacggcaggagggtcctccccgtccctaagggtcgccctgtccccaggccttccagcaggacactcccctgtcccctctccagatcctccttcccagggccctcctccaagatcctcttccccaaccctcctctcccagggtcctcccctctccagaatcccggccccaagcccccaagcgctgtctgcctgtctggggtcctccccagagttcaccttctgcaggatcctccctccaagtcctctcctcacgatgctcccccgaaatcctccttctccaagtcgtcccccactccagggccgagctctctccagggtcctcctgcagcaccccctcccccagggttctcctctctgccccgaggggccggccggggggtcgccgcccgcccggcgggcttacctgcgaagcggcggggtcggggcctctcccacctgtaagcccggcccgcggcgtcctgcgtccgagccgctccccgccccgcagcgccaggccgcgacccggcgggccgcccgccccgaagtgccacttcgcgaagtgccgcctccacgcgcgctgccgccggcgccccccgctctcctcccc

SEQ ID NO: 335710 - DNA, 892 bp, Homo sapiens
  chr17:79008842-79009734
  hyper
cgggggcggtgatgcgggcgcaacgggggcgggacgcaggggcggggactgccgcggggcggggcctgaggcggctataaaggtggccgccgccggacgccgggctctgtggttcgggtccgctttcgtctccgtcctgctgccgttaccgccgctgctgccgccgcttgcgtcccccgctccggtctgtggtgcagccgggacccaggaccatgtctctgtctcgctcagaggagatgcaccggctcacggaaaatgtctataaggtgagcgccccccggcgccgagctgagcccgctccgtgtgcgcctgggtcgcgcgccgcccgcgcgcccgagcccgaccagggcggccccggggccgcgcgccgggccaggaggctgggactttgggggtcttcccggcgcggccacccgggacccgggctgctggggtggtgagcccggcgccggccgctcacaggtggccacccccgcccgggcccccccatcccatgcgcgccgcggcccggtcagtccccagccccaggcccggggagcactccccgctccgacggccctgctcggcccccgcgcgctcgccttggcgtcggcgggaacggagccgcgcgccgggccccggaagccctcggaccggtcggggtcgtagcacacccgggcagggccggggcggcgggggcggcgggcccaggggttgcggcggccaggacggcatgggggctgtctgaaggccgcggtcggcgcggtggcaccgtggggctcctccaggcgcggttgcgcgagcctcgggcacttcattctcaacaggctttcccttcccacaactcctgcccggcgcccatgctggggcctaaggtgggaggtcggagcgcgggcaggctggatgggtggac

SEQ ID NO: 335711 - DNA, 387 bp, Homo sapiens
  chr17:79317848-79318235
  hyper
cgggtgtgcgctccgagcgtctttcggcgggggggaggggggagcaggaggggcgaggagacttgcgcagtcagggagccgcgaaccccgagtctcggtcctcgaaggcggcaggagaaaccgcgcgctgtgccccgacctctctcgccctggccaaccgcgacttgggacgagctggaggagcttcccccgggctccggacgcccgcgccgaaaaccgggccatgggtaccaaacccgactctaggcggtcattcactttgtccccacccaaactctgatgagctatttgggagtgcgcggggactgggaagtgagggacttttataacattcttctttcgactccggcttccgagcccaccacccatcttgcctccttcgcctcc

SEQ ID NO: 335712 - DNA, 1254 bp, Homo sapiens
  chr17:79988364-79989618
  hyper
cgccgcccactggtgggacgtgaggccagccagagagcggggctggccaggtctcccgtgctgaggccgtgccacggtgcgctggggctgcgtccgctcactgcgctccttgccctgcagtgatggcgagcgaccaccgagaggcgctgctggacagggagagcgagaacgcgtctctccgggagaagctgcggctccgggaggcggagatcgcccgcatccgggacgaggaggcccagagggcgagcttcctgcagaacgccgtcctggcttacgtgcaggcgtcccccgtgaggaccctgagccccccaaagtgagacaggccgggaggacccgggcgcagtaggagtgcatcaggcggcgcccgagatggaccaggggctgcgtcccgcccgcgccgcctctttgagacccgggtcgtctgttccacgcggcggttgcggcgactgttggtggtgtcgcggctgcgggggaaccccgtgggaggcgcctgggaagggctccctaccggccccttcttcccggtcgacgccacgtgggagcacaccgggaaggggtcccgcgggcgcgtctccccctcgccttttgcgatgtcaccgtgaacgctgcggccgcctgcgcgcggcggggtttggaaatacagcgcgtttgcactttgtgatacattctggccccgcctctccctccaaacgcgcgaccgtccgtgcctctccaaacgcgcggccctctgcccccagccctgcagggagggcctgccggggtgcggctgttcgcccctcctcgccgctgccttgaagggacgggagggccgcgggggctgtccgtctgggggttcgggcggctgcagaccccggagttcccagctggctcccggcggcagggggcgggtccccgagaaagcgcagcgcgcggagccctccccgccgggtccaggtcgctgggctctctccggcctgcgctgcgccccgagggacccgtaggagacccccgggccggggtcgcgctggaggcgggggcgccgcagctcgcgcagctctgcccgggttcgggcggccccgccccgccagccgcgcggccgggcgccccccgcccgcccccgcccccgccccccgccccccgccggccgcgctcggctgtctccgcgcccggcgctcggcggcgctcggctgtctccggccgatcgctcggcgctcgggtccgcggccgctgcggcgccgggcatttctccgcagctcggctcgcggccgcgcccgc

SEQ ID NO: 335713 - DNA, 1101 bp, Homo sapiens
  chr17:80186335-80187436
  hyper
cgcaggccgcgggccgctcccctagccaggaagagccgccgtccgcaccgggaccggagaggaagcggaggtctgaagggggacaggtcggacgtggcctcagagagggaggatgtgggccccggagctgagccaggcggccggaaccccacgggacccgcgcgcacctccccaccaaaggggccccggcgttggggggcgaggggtcgctgccctggaggacgttgggacctgccgcgctgcgctccgaggcggggaaacggagggacggcggggcggaggggcgaagcgagcctggactccgggggaggcgaggccgggaagacccagtcccgaggagcagagggggcgggccagctccgggccgggggcgccgacggggccggttccggttgggggggtccctgggcccggcggggttgcgggacgcgccgtcggggagctgcggcccgggagcccgtccggaggcggcgcggggtccgggcggggcgcgcaggggcggcgccaggcggtgacgtgcgcgggggacgtgccgcgccagcgacccgagcacttaaagtcgcccccggcgcggagcggaccggcagaggcgggcagaggcggcgagaggcggcgagaggcgggctgaggcggcccagcggcggcaggtaggcgcggccgcgatgctcgcgcgcgggccggggcccaggagctcccccgtgccgggcaagggggcgacctcggggtccgcgctctcacccccaccccgcccactttgtccatcaggtccgggggcgcccggggcatggactagccttctcgaccccgagcgggccccaccgagggctcccgagagccagccgcgcccctccgcgccctcgcatacctggctgcccagtctcgtctcccccggtccggcccggcgcccacccgtcgggctgccctcaggggctgggctcgggccaggagatggctgcgccggcggccaagcccggtccgggtataaatagctcggtccgcggtggcggggggcgcgggctatatttggtggggctgctgcagccctccctgtatgggtggcctccccgagggagtggggagcacttgcgctcgggccgtggc

SEQ ID NO: 335714 - DNA, 98 bp, Homo sapiens
  chr17:80277699-80277797
  hyper
cgtgtgtgcagagacgggtgcgcgactccatgcgtgtgtgcagaaacgggtgcatgtggacacgtgtgtgtgcagagaagggtgcacgtgactcacgc

SEQ ID NO: 335715 - DNA, 514 bp, Homo sapiens
  chr17:80332182-80332696
  hyper
cgtcgtgaggggtcagagatggcgctgacccccgagtccccgagcagcttccctgggctggccgccactggcagctctgtgccggagccgcctggcggccccaacgcaaccctcaacagctcctgggccagcccgaccgagcccagctccctggaggacctggtggccacgggcaccattgggactctgctgtcggccatgggcgtggtgggcgtggtgggcaacgcctacacgctggtggtcacctgccgctccctgcgtgcggtggcctccatgtacgtctacgtggtcaacctggcgctggccgacctgctgtacctgctcagcatccccttcatcgtggccacctacgtcaccaaggagtggcacttcggggacgtgggctgccgcgtgctcttcggcctggacttcctgaccatgcacgccagcatcttcacgctgaccgtcatgagcagcgagcgctacgctgcggtgctgcggccgctggacaccgtgcagcgccccaagggctacc

SEQ ID NO: 335716 - DNA, 75 bp, Homo sapiens; identical to SEQ ID NO: 239569
  chr17:80333154-80333229
  hyper

SEQ ID NO: 335717 - DNA, 365 bp, Homo sapiens
  chr17:80452529-80452894
  hyper
cgttattggggcctggagaagaattatgggccacaggctgcccagtcaggaaagaaaagggagtctatagcagaggatggtttcgatccatcgacctctgggttatgggcccagcacgcttccgctgcgccactctgctggctataaggggggagcctgagtcagatcatgaccacaggagtcatctccctgcaggcggcgacccctactggccaagaggggccaacagaggactggctgggcaaggcacatgctcaattataagcctactcctcctctctcaacttcttgtagataaaactctctgaattcatgtccttttctgctgttaaaacattggctggaggccgggcacagtggctcac

SEQ ID NO: 335718 - DNA, 1325 bp, Homo sapiens
  chr17:80655520-80656845
  hyper
cgaggtgttcgcctctgcgcgttcccccttctcctgggttcctgcccccgcctttctttccccggagccgtccaccccctcgccgggcgccggctttcaagcctcaaacttgggggatccccgggctgcctgcctgggagctctgggcgctccggcctcccctcgccctggaacccgctctccggccgctgtcgtggggggtcccctcttccgcacgcgagtcacctgtgctccttcctctcccccggacacgcgggacccctggcctcgggaccggaccctggtctcccctcccctccgacccacgcgcagacccagcacctgggcgcctgctcgccgcgctccgccccaggagccccggagctcgcgtcccctcccgcccctcctgccccgcggccgaacgcgcacttgcggactcgagcccccgccccgggtccccacagcagcggccccaggtcgggaggagcccagcgcccggcccagccgcgggctcccgctgcgcgcagactgcggagaaggatggagactgcgccgcggggcctcgagtggaactgggggtgcaacagggacgccgcagcacgagggccagggccgggcggagaaaggcccgcccgcgaaccgcgctcctcctcagccccgcgcccccggaccgggactcctaccctccccggccacgcgccccggcctcttcccgacccctgcccggtctcgcgtccccggacccggacccccacccgcaccccctccccagccccgcgcccctccccggccccgcgcccgcaccccggcacgccctccgcccgcgctcacccgccgggtggccgtacggggactcggccgcgccatcctgcaggctcgccaggatctcgcccttgcccacgtcgctgtcgcccaccagcaggaacttgagcagaaagtcgtaggcccggaccgggctgcccagggcgctcatcgtgacggcccggcgcccccacccatgcccggcctgcggggctgagcgcagaggcggcggcccggccccgagaggcgccgcgcgggccccgagtccttgctcgcctccggccccgccccgccgcccagcgctgacagcgcgcatccccgcccggccccgccattggtggaccgcagttgctagggcagctgcgcgctttcactggcttggttgtccgtccatcttactctcgtcaccgcctccgggctgtcgcccacccgcccctcctgaaaggtcgctgtcaccacagccaatggaggcccggagacggggcaggggcggagccagaacaagcaggaggcggggactctgctcccgcagccaatggcggggc

SEQ ID NO: 335719 - DNA, 857 bp, Homo sapiens
  chr17:80692982-80693839
  hyper
tatgcatgcatgggcgcgcgtgggcattcctgtgtctcaagtccctttcccaggacatcctggaatcagcagccccaccctgggccgggtcagcgcgtgccatcggagcccccacgtcagcctctctctccgatcggcacctggcgtcccagtgcgcaagccccacgtcatcacgggggccgctgggcccggcctggtctgcagtgtgggaagccggccaggcctgtgaccagcgcccgggccgagggccggacctgcgtccgctgcggggcagggataccgggtccctgcagggagctcaagccccagcgcgcccgcgaagagctgcgcggactcccggctgcttcccccgaatcccgggcgcaggaagcgcgaagccggacgaacgcggggagcgcgcggcgagcccgcctgaggccgcccctcccgccgcccggggtcacgcgccgcgcgctcccgccccgccccgccccgcagcgcctcagccgacaggggcttccgagcgagcagagtcccgcgccccgcactccatggagcagctgctgcgcgccgagctgcgcaccgcgaccctgcgggccttcggcggccccggcgccggctgcatcagcgagggccgagcctacgacacggacgcaggcccagtgttcgtcaaagtcaaccgcaggacgcaggtgctggcccgtgcgcaggcgggggctctgcgggtctctgcggggcctgggaaggcggaggggtcgggggcaggcgcatttcctggggctgggcctggggaggggtcagctttggcccttgggaggtggcacctgctgggtgagcccggctcaagcgttctgtgaaggtttgtgtctgcacgatcc

SEQ ID NO: 335720 - DNA, 441 bp, Homo sapiens
  chr17:81036717-81037158
  hyper
cgggggttgctactgatacccagagtgcgggggccagggtgctgccaacatcccaccatgcgcaggacgtccccaccccaagaaccacccggccccgcgtatccggagcgaggagtgggcagcgctcggcagaggccccggcgcggcggctgcacgtcctccgggaggagggagggaagccgggctcaccgccgggcctcccccccggtcaggagggagccgggaactcccgaggcaccaactctgcggaacgcggggcgcccggatcgcccctgatcaccgcccgctggcgaggcgcgggggacccagaaccggcggggccgggagcctcctttaccgctccgcgccggggctgcccgcaggatggggcgcaggatggggcgcaggatgcggccccggcaccgcctcgcgggggtctgcggggggcgaccgcggctcgcg

SEQ ID NO: 335721 - DNA, 806 bp, Homo sapiens
  chr17:81038567-81039373
  hyper
cgcgaagcccagggcgccgagggcaccgcggccgaacccgccctgcgcgagcctcgcagtcgccagttccggggttcgcagatgcgcggggacccgagtgacgcgcgcctcccggagagccgtggccgggctggcccgggcctgggtcccgcttcccctcggcgcggcccccgcccccgcccccgcccccgccgcgggccgagtcacgcggtgatgtcgagcgaagctgttttccgagaaggtcggggcagagccggtgcggggcgggtggtgtccgcggggcgggcgcaggtctccccgcagccgcagcctccgttccgggtccccgcgaagccacagtcgccccccagcgcccccggcggagcctccccgggggaaggggcgtggcgctggggggcagagtcgccccgagggccgtgggcggtgcccggctgtcccgggagcggccgcctcccttctcggccgagcggggccgcgggcggatggaggtctggggggggtcggccgggaacgccggcgccgggagcctccgaggccgacggctcttctggggccgcccctgcccccgcggagtgattcagccccggctcgctgcctctgcccggcgggtcggtgcatccccgaaccgaggcccggggcgttccgctccagcagaccgaagccagaaacgccgcccccgccacccaggccgagtgtgtcgagaaggggccggcgcccttttcagggtgtcaggggactgtgtgcccggtaggagggggcgcctcccggagcccgaagggagggcgcggtaggcagccgagggtggc

SEQ ID NO: 335722 - DNA, 992 bp, Homo sapiens
  chr18:499804-500796
  hyper
cggcctgcagaggacaccgcgcagggggcgactaaccagctgaggtgtgtcaccccaaaacaccagtgggcacaccccaaggcgggcacgtggaagggacgcggaaccgagggcaactattttccagtcggtgaatctgatggagaaagatgccaaatgcacttcccgagccagctgaactcctcgggcacctaatcattgccagatgtggcgagggcgcacggagaacatccccagtcccggagaaaacacccggccgccagcgcggggaccgctcgggccgggaaacggctagaggcgggaggagagaggactgggcgagcgtggggagcgctgcggcgtggaaaagcgaccgggagggatggcgatgcctccactctcctcggcaggttttttcaattaaaaagttggaaacgggaatccgtaaacaacgacttagggcttcaaactacttgcaaagacgcgatggggaggggaatacttgcgcgcttcaaaaccccaacctcgaggtctccagccgcgcctgacccgggagccgggtgcgcccccagtgtccgcgcacgaacccggcgccctggcagccccgactccccgggcccgcagcccaagggaaggttcgcgcgggaggcacctccgtggcctcccgcgcgccccgaagcccgttccccccgcccagagccccgcggagctgccgccgccctacctttcatggtgaccgtggggacgcaccgccggccggggagctccgcgcgagcgccgcgcagccgaggaagtcgtcccgagcggctgctcaccgcacgcccatggtagccgcgccgcgcgccggccgtctgcgcccccgtcctccctcgccgccgccggcccgcgctccccgcgctcccggctccgcgctctgctgcctcggggctgccgcgcgcgccgctctcgctctcccagcgcccctccccctggcccgacccggccgagcgagcggccgcgcccacgcccctctc

SEQ ID NO: 335723 - DNA, 1556 bp, Homo sapiens
  chr18:811503-813059
  hyper
aacgcaacgggaggcggagtggcatgattccgtaaaagtggacgctgaatggtaaatttcccaacccccaacccaaaacaaaggaaaactttaaacatgttgcggttttcaatcaaaccaagtaaagccagaaaggctcatccactcgccccacacacccgctcctctccccgcacagctgctaccggcgtcggccgatacacagacccccagcctttaggacccaaaggggccgcttccctcgcccctacttcggccgtaggggcaaaaataaacctctcctccccgtcgccgggcggtccacacgaccccaaagacaaggggtggggagtgtccccacgcccctggaacctcaggtcggacttgggcgggacccggcaggtctggacagggcagagaccgagtcaggggcgagcaggtagcgcggggaacgagacaagcccgccgggcgatccgggggaggggagaagtttcttcccaacttcccgactcgggcccgcgggggcggggaaccgcggcggcggcggcggcggcggctccgggcgctggggcctagccctgtccgggcagaggtggaaccctccgcccgcggggccccaccgggtccttacctgtcctccggccgcgctctcatgagtcgctgctaccgcagctcgaggtggcggagggcggaggcgaggcccgcgggccctctccctcctccacctcctcgtcccggggcgcccggcggcagcaacgacggcagagccggcccgggacgcgttacttcaggaggagggagttcccgggctccccacgcctcggcctcactctccacctcctccgccccccccccccggccccgccccctgacttctagcgggggcgggggctgcgggtacctgcgcgcgccgccgtccgctcaccggaactcgggccacgccggcccggctccggggcccccagccttccggcgcctacgcccccgtcaggtcccctccgcgggctccgggccgctttgctgtggtcaggataggcgaccggtccgtgtcacttctcccgacccaacatggcggcggggtccggggcggattcccgggggcggtgcaggccgagggggcgtgaggaggaggtgcttccctgcccggagagcaggcccgcggcgtcccttcccacccgcgaacccaccgacgctcggctgccgcggagattgaatggagcgctccgattctgcccctctgcctttctctgttccttggcccagctctcagtagtggccagggctttggggcttgcttttgtgggggaggacggggttgagtttttttggttggctgtttgcttctcagcgctacgcttccgcaccctttgtcgttggtagtaaaatctcaagcccaaccgcgtgagccgggggcgttactcacaccctcatcaccatcctgatcgccgtccaaaaaacgttcacgtcttgcctccttccgaggcagggatcctgtccctgcccccaggagcttcctgttgactgtaggtcgaaccagccttgccgggaggggaaccgaagctgagttctgtttggc

SEQ ID NO: 335724 - DNA, 967 bp, Homo sapiens
  chr18:905728-906695
  hyper
cgggtagagccagtgagcttctggccgctggagaaccccccctcccccaacccggcccacaggatgggggcagggcacggcccctagcttggtttcttttacctattcttgggacgagttaggagaacttcagctctggagcctggccgggggttgagcgtgaagctccctcggactttgctttgttactgcttgttctggactatccgggtggggtctctctctctcctccaccctttcttttcatttcattccaattctttcccctgaagagctttctttcaagtgatccgtgttccaactgcattttgaatcccaggctgtcttggggggcgtgcggtggggagggtgttggcccggtgtgattgaggaaaagcgacttaagagagggaagaacaaggacgagactgcgaaggagggggaaaaacaggcgcaaaggaggaggaagggaaagccagcaggcaggcaggaccgggagagcagccctgcctggcccgggatggaggaaccttggcttttttcttaaccccgggtttctaaccggcaggcgcggcccaggttcccggaggcagccccagagtcgcggaccgatgtgccaggctgtggatgagccctgggtaggggagggttcgtaccagcggcgcctggggcagcgaggagcgcgcgttctgcctgcgaagctgccttctccgagccccgcccaggaacattagctctggggggccgctgatcattgatttggacggagagatgggttctgggttctgtattaggattccagcatctgggctcgaggcagggcaatatccagaaagaccccagggttcggggtacccgggccagggctgaggcgcatcgccgagcaaaggctgggtgcgaggcgtgcggaatgatgcgcttgccttgcccgggcctctccaaggatggagaaaaggcgagtgaagcagcgaagtacgactccaacccc

SEQ ID NO: 335725 - DNA, 1308 bp, Homo sapiens
  chr18:907197-908505
  hyper
cgcacgccccacgcatcctctcctttgctttctgggcctccccattcgggtcttcgcgtgggtcagcgcccggtctcccagggcctttctcgtccccgcccgttgctgctttggggaggctcgggagccaggcggggaggggggcggtccttttccgtagacaggtgtgcgcgatcggcggagacgcctcggtttcccagcgcttgttgaggccgtggcccgcaggacgaccctttacccgcgaagggggggtgggcgggccgcccggcggggtaggagtggttgggtgtcgttgcctcctccttacctctgctcccacccccagtcctgggagaagagacaattctcagcggaggacttttatcacctgtgaaaatccgcgcgagccccttactttggatcctcgccgagctggggaggaacttgcactgaccacaccttctgtccccggccaccccgcaggccagaggaagaggcgtacggcgaggacggaaacccgctgccagacttcgatggctcggagccgccgggcgcagggagccccgcctccgcgccgcgcgccgccgccgcctggtaccgcccggccgggagaaggtgagattcgcgcggcctcgcgcacacccgcggctgggagctcgggactgcggtgacgggaggggcagtgtggtgacccacccaggatttttttttttttcccgtgaaagtcctcaagcctgtcctctccctggcccgatcctattgcagcgacagaaaatcagcagcgggcgggtctgtgtggacctgagggccgcgtggggaccgaggggggctgtggcccaaagagtggcagtgagtggcgtcaaggaacccacactccgcatctgccactcctagagccgggactagctcccgatcctagcagttgctctcgagatcatcccgggagttattggcgagttctgggcctctggaggtttccctgtcagcctccccggccgccgagggggcgcgcgcccaacaagggggtctctagcggccacctggggacagaaacagtgaccctgggcgcgcactttgcctccccgttagagatgtcgcccacgggatccttaacgaggcctaccgcaaagtgctggaccagctgtccgccgggaagcacctgcagtcgctcgtggcccggggcgtggggtaagagtttgtggaaggattaacctgcgcgcgccggggtgggtgcctgtgcggggcgcgcggggcgggcggcggtgggtgcccgtgggggccagggtgagtctgcgcccctgggtctggggtgggcatccgccacgggtc

SEQ ID NO: 335726 - DNA, 588 bp, Homo sapiens; identical to SEQ ID NO: 239587
  chr18:909045-909633
  hyper

SEQ ID NO: 335727 - DNA, 1859 bp, Homo sapiens
  chr18:2846545-2848404
  hyper
ccatggagctggtgggggaacggccctgtcttgcccgaggaggaaattcgagtcgagcccccactcctctccccgcgggactgataaacatgtccctcattcgccccgggaggctggcacccaggcacgacgcgaggacggccagactcgccgacggcggccgcgtcccggggggccgggagcgagcctgtcggaaggtgggaggcggagtcgctcggcatctgggaagagaccaaaggaatgagtcattggaaatgctgtaacgtagacccttatcccaaaccctttcgcccctccaccccgagccccctgccgagaagcgaagggactggagacggggagacttggtggggggagagtcacgtttcggagagggaagtgaaataaagagggcggcacccggggggacctgtgcgtcattgagggaccggggagaagcgcagggcgcacggggctgcagaaggagaagtaggaacgagaagccggagggggcggccgcggagcactggttggagcgccgcgaagcgcccgagcctcttgccttcgcgggcggcgccctggccgccggcagccttgtggccggtgccccgatccgccgcgctccggacccgggcaggcggggcgcgcccgctgcgcgcgggatgtggcagcccagacggccctggccccgcgtgccctggcgctgggcgctggcgctgctggccctggttggcgcggggctgtgccacgccggcccgcagcccgggtatcccgcgcggcccagcgccaggaacaagtaagtgcgcgccccttggctggccccaaaccgcctacccctccccggcccccagttgagccccagagctgccctgccaaagacgacgagcggcagccgggggcctcccttggacttccccgggcggctccctctgcgggggaccgcgcgctccgcagccggcgcctcaggcagagctgactccgggggcgtgggcgcagagagcgtcccgcagacccgggcgatccgaaaacgactcccaggaattccatgagcccctgggaccatgggtgcttttctttcccgtcttggtcgggtccaggcgcgcgctctccagaggcgcacccgggcaccctccggcgtctgctcggtgaagctcccgcctccgcagagggcgacgggcccccccgaccctcgctcggtctggtgccgcagtcccctctcccctggcctcattgttctccgggtttaccccgtgcccctctccctctctctcctgcaccccaggaactggtgcgcctacatcgtgaacaagaatgtgagctgctccgtgctggagggaagtgagagttttattcaggctcagtacaactgtgcctggaaccagatgccctgtccgtcggcgctggtgtaagtcctggagccggggagcgggcggggcgcgcccgggccggggcggtgggggtggggtggggttgctgcgctgggctccagtccctccggtaaatcccttccagatccggtgaaaagcccgcagcggaaaagcgctccgagcgctcgcggggcaccggccacgctgggctatttagggagtgggtgctgcccgagtgagtggggaggatgcgcgcgcctcgggagtgtggggtcgcgggggcgtaggagaggatgaacaaagctcccactcccacttctgttttctccctttcaatgtttgtttgtaacataaggcagctgaatctaattggatccatattgtgtgttctggggcacacagaagattccaaaatgtatactgctaaagactattccgtataggattcgctgagaggtttggctaagtagtgttctaaaacgagtgagttctgtccgtatgtccccataaaac

SEQ ID NO: 335728 - DNA, 768 bp, Homo sapiens; identical to SEQ ID NO: 225574
  chr18:2906028-2906796
  hyper

SEQ ID NO: 335729 - DNA, 157 bp, Homo sapiens
  chr18:3012406-3012563
  hyper
cgctggcgttagaagtggacagagaggctctcagtacaaactgtatctgaacgtgttcctcacaaattaagatctgcaccgggggctggggggctttgagaaaactaaccacatttgaatccggtccacacagcttgaaggcggaggtacggggcaa

SEQ ID NO: 335730 - DNA, 788 bp, Homo sapiens
  chr18:3246866-3247654
  hyper
cggattctgggcggaaaaagataaagtcggggaggactttctctttttaataagattcatcgttacgaattgttctaggcaagcagacctcaggagaaataggcccaagttttgattcctgttttcaccaagtcgcaagtcctaatcgtagcaagaggtgcggggaagagtcgccttccttcctgcatagtgggatccaagtcaggctgtccttgttagccagggtcaaaggggctctgccagggaaaaacgacggcaaatgtttttcaagaggaagtctccagccacttgtgacctgggaaatccgtctgggccaaaaagatagtggaggcttggctgagggccccagggacacacgtttcctcccgtatggagggggcgggactcttaataaaattacactgcacacagagctagcatcaagatccgctcccgggatacgcgcactgctccggggccctcaggcggagacccagaccccgcgcggggcgtcaagcgcaggcgcactaccgcccacaagctggagcccggcttcggggcggggcgagggtcagtcacgtgggcccgcagccctctcctcgatttccctacaaggacttgggccgacgggccccgcccttcgccgtgccctggaatgtgcggccaggcaaagccacaggacggacgcaaccatctgcggaaaggataggggggaggaagacttaacactgcaacaacaggtacaaaaaagaaggaaactcagtaacaggacccagaggaccattatatattgctctatattctaggtc

SEQ ID NO: 335731 - DNA, 2276 bp, Homo sapiens
  chr18:3449180-3451456
  hyper
cgggtgtttacttaatggctagtttctgtttgaaatgggaggagggatcccctagcagggttccaatccgaagagtagacactgttgaccgaaacagacgagcaggcacggcgtggtcaccccttagctataaaagtggccgctgccggggttcggcgactcggggtgtcaggcggagtcttggtgaggcaggcgcgcgcccggccgtccccgggcagagacgtttaaagagcatgtgagcgtgacaagtgtctgtccgcaacgtgtcagatttcgaaactgccttgcaatccagtccggaactcgcagctttagcccgggggaacagacgttcgtttaggctgtgtctcatcattcccccccgccccacccccgccgacctcccactgtcgctgctggaggaagagccccgggaggagaagggtgcgccgcgccgcgcccgcgtgtcaatggcagccgcgcattctggaagaagttggttcttgtctcgaatacttttcctcccgtgccccgccccttgaatcagaggcggctgtctcgtgcggctagagcagggccagtagagttcggggcagctgtcaaaaacgagacggggaggcttttcttcccgggggtggaggagggaaggagggaggtgtccttttttccatctgttgcagtttccgaaccaaacgcaccctcgccagccccgggaagaaaggcccaagggagaaacctggggcgctcggctggtgcccccaccgccgggcgagggatgcgggcggtccgtgcgcggcaggcggaaaggatcgtgtttctggacccggccaccccccgcgtccgcaccgccgcccccgagggacgagtgacagcggccgccgcgctcggtccagtcttcccggctggaaggtgcgggggaggggcggaggagcggcggggcgggagggggacggggcgggcggctgggggcggaggcaggacctcctgtaccttccctcctcgcctctctcactctgacagcgccgaggtgcgccgagcaggagcagggaacaaaggagcggagaggggaggggagagagttgggcgagggagagcccccggccggctgccagaagatcccggcgggaggaagcccaagtgtcacttgaattccacccaaggagcgggcgcctgggatcagagcgtcctgtttagcaataacggctggagcacgtcctacaagttacgggagagtcggctgtgaaggagacgttcgcttatcccctgtgtccccgctcctggcccctccagacccccgccttgcctcgcgctgggaggggagatccagaatgaaaggcaagaaaggtaaggcggccgcgggctgcgcgcaccagaagacgcgagtccggggaaacgtgctggccgggccgcgccgcgcggagtcacttggtggacttttccgcccaggggctctcatgctggagtggcggccgtgctctttgttgaggctgcgtctgaaacggcagcggctgttttcctgctagacacaacacgaggggctgttgtggggcgagcctctccacgctgctggcacgttgtcaagaaacacgctcagcgccttgtttgtgcgcctgcaagtttcattgtctccgccgacaccccacgctcggcccagccgccgcgtggcttctcgctctttctcgcgtgctggggatatggggtccgagtagggaggacccagcccctcgtttttcccgatccggacccaggcggccggggccgcgggaccgccgcggctttgtctgaaagttccactcctaggctccccccgcccccgcccccgccgcccccctactcccagccgggccctagcactgttctttagggatgtggtgtttttacgatcgaaggaatgcgattctggaccccctcatcgccctcgggtgtaaacagctttggaaagctagacttttacaaatccccagtctctaaaagttttcccacgatgaattttggggcaggaggaagagttagcacccagggccagcagcttcaagcggcatgcagtcaaaatgcgtccaaatgtgacaagcaggcttggttgtaagtgcaaagagcaaggctgtcattgtttccacgaagtgttctggaagctttacaactaaaacttgccgtcagtttggtttaaaaacaaaatacaccggagggggacggggggtggagaaaccacacaaaacaccccgaaaggtcagagtgtgaagtcccttttgaagttaacaaaaattgagtccctggctgggaggtcccccgagtgttcc

SEQ ID NO: 335732 - DNA, 365 bp, Homo sapiens
  chr18:3498992-3499357
  hyper
cgggtacgggaagtggggggctgaggggggcccggggggcggctcctgcgaggtggacaactacaccgcgacagtggaagtcaccgagctcgggagcggacgggctcggagggggagaggcagccggcagaggagcggccgggggaggaggggacagatgcttggcggcggcggccgggctgcggggcgctcagagccgggtctgcgcctcggggatgtagatctcgatgctctcggcgctctcggtggccgagttctggcggacggacgcggcgcgcttggcggccatcaggcgcttgcgggcctcctggcgctgcgagctctccagcgagcgctcccggatcagcggcgcggggcccttcgcc

SEQ ID NO: 335733 - DNA, 995 bp, Homo sapiens
  chr18:3879130-3880125
  hyper
cgttcttgctgacacgactcggacttcaccatggcctggtccatgttcaccgaggccttctggtaaacctcccgggcccggctcacggtgagcgtggaggaccaggcgctcttcttcagcagcggggtgtccaggctgaccggcaggttggcgcaggtggagcacttgacgtcgttgttgctccgggaggccttcaccgcctgctcgctgatggtgttgtaggcctccaggaagtactgtgaggccgagcggtcggggcacctgcccatggtcatcacgcccgagggggcgtggtagatgcacatgtcaccatccaggttgtcgtccgagctccaccagcccggggaggtgctgggccgggccttgggctccgcgcgccgctccttgctcttgctgcgtttgccatagcgcgccgcctgcgcctcgtcagggctggccttgcccccgttgacgctgcccttggacggcccctccagggagtgcgacttggtgaagagcttctggaccgagtgcaccaggtggcggatgcggccggggctgtcgctgcggtgctccacggccgtgcgcttgtactgcagggtgtgatagccatcgcggctgagtggcagctgccgctcgaactggtccagcaggttggcggggatgcggttcgccttggtggccagggtgcggggcaccagggcacactcgtccttcagctcttgctgcgaggtgtagtgcctgcgggggaaggtgctgctggccagcgggtcgctgaaggggcccacgcactcagcctggaaggagttccgctgggtgtagtatgggtggtctgcggggtggtgctccactgggctcagcaggtagggcttgcggtcggagtggtgcgacagcgagtcacaggccgagtcgcaggtgaccccgtggtgatggctgcggctgcctgatagccctttcatggcggaccggaagcagccgccagggtcatggacacccggaagtcaggctccagaccc

SEQ ID NO: 335734 - DNA, 975 bp, Homo sapiens
  chr18:4454471-4455446
  hyper
cgcacgggggagttggtccttttccacaatgccaaaatgtcacccaaaaagctagtgcaacaacttgctttgcaaacgacccaggagcctgccgagaaagccctgcggggagcagccccctcctcccctgcaaggtgcatcgggggtggggtgggggtgcgaatttgaccggtggacatgaccgggacaggggaccggtgttctcctcccctcccccttccgggaccctgtcgcaattagaaatccttcccctgcctgggtccccgtggggagccgcgaggaccgcatggccggagaggacgcgctcgcccccgagatcccaggttacccggagggcccgggagtgcaccccgggcggctgaaagggtaaggagcgcggactctcgagccagcggccgggggagcccagcccgcagcccctccgcgggcgagggaagcggcgaccgcgcggcaggcagcagccaggagccacccagcgcgccgcgaccgccgccgccgcgcacgccccagccccgcggcgcagcccggcgttacctggccgcgtcccgcagtccggccctcgctggctgcgtccgtccgttggtcccacgagcctcggaggaaggagagagatgtccccgcgaccaggaccggctctcagcgaggtgacgggaaggactcgagagaggagccgaggcggcggcggccgttcgcgccgcctatgctgccgattccccgaggcggaaggtgtccgcgaggccgtgtcctggagattgcggcgcccgaagcgcagcgctcgcctctggagcggaggctgagcgccgggacgcggcgggctggggctgcaaggctgggctggtgacccgcccctgggtgcatgttaatacggtggggaggaggagtcccgcgcttcctccgcccaaccaccggagccggcgggcgggcggcggccgcggcccggagccagccgctcccacccgccccagctactacggc

SEQ ID NO: 335735 - DNA, 620 bp, Homo sapiens
  chr18:5197028-5197648
  hyper
cggtgtacctggagcgaacaccatgatttcttccagccgctacgcccccagattaagagagaaagacaggcagacggaggatgggaagaaggccggacttggcggggtccggtgcaggagggcgcgctgggcgggcggcgggcggggcggtcagcaccccggacagctcccgccgctagatcctggggccgcagctccagccgccgccgcgcgctctgcctccacaatgcggccacagcggcggcgggaggaggagggtgaatccccgctcagtccatccctcattcctgtgccagctcggcgacgtacactgctgcttagggagcaaagcacttccaccgctttcacgcgacgaaggtcggaagagcaagagagagaaaggtaaacttcccggcaggggacagtgaattgcttttaattacctgctgtggctcgtcgccgtggatattggactgacatttaagatagatttgtcaaaaaaaaaaaactctaagagctttctttactctcgaggatgactctgagttctccgagttgggctggctcgaatagaggggcgggtctgtcaagttaataggtcctggaggtccgtgagtcctctctcgcgagtcccagtcctc

SEQ ID NO: 335736 - DNA, 1485 bp, Homo sapiens; identical to SEQ ID NO: 239603
  chr18:5237298-5238783
  hyper

SEQ ID NO: 335737 - DNA, 762 bp, Homo sapiens
  chr18:5543478-5544240
  hyper
cgcgctcgcccccagcccgaggggcaacttaaaacatggcgccccgggcgggggatttgtgcaaattggcggagaagggacgcggggaccgagtcgccccttcggccagggatcccagggaggcccccaggccggaggccggggctcaggctctgcgcgccggcccagccactactgcgccgcggcgggcggagcgggcggggggcgcggcgcgcaggctcggcccggtgggggtcccggcgagcgggagggcggttggggaccccggccgcgccgggcgcggggctcgggattcgggagaccgcgcggcgccgaagccacgcgtcagccccactgtcccgcgcgcctcgccccaggcctcgggctcttcctccgcacctcgtaaagccgagaccccctcgcagtcccccactccgagaggcggaaaagttacctgggatcagcagggagcccgggcgcgccgcggcgtggggactaggctcgggcgcgcgtcctcggcggcggtgcgcaggagactcgggcgtggggaggaagccgcagcccagggctgctcgccgctgttccccccgccccctgttgcaggagacaccgaggctccgcggagctgcggcgggggcccacgcccagagaccgtgcgaggaaagccaacctcgtcctgcctgccctcccagccgcgggggagggggccaccgcagtacttcaggacagttacatgggcacagcctcctccgtcctggcgcagggtcaggctccgcggacgac

SEQ ID NO: 335738 - DNA, 1838 bp, Homo sapiens
  chr18:5628946-5630784
  hyper
cgccggccaggagctccccggcttctgagcaggacgcgccaaagggagttgggaggctcagcagcccccagcgtcgccttctcgggtgacgtgacgctctctctggagcgcgggcccgcctccgccaagcctccaccgcaggtccttacagccgagccacgggaagatgcaacgccgggcgaggggcgcctcccggattttgaaaaacagcctcattcgcctcgggaacgcctcgatcccccacccgcaccctttggccagatgattttaatcctgggattccgcgttggtcgtgggggtaccgggagctggagctggaggagaggagccggcagcgcggagttgccggggtgcagctgcgcgcagctggcggcgaggggaggcggtccctgcggctccgccgggctgggggaactggctcctgcgcctctgcctcccggaggatcgcactcgctcatccttacacaccacacacacacacacacacacacacacacacacactgccgctagcgccccccacgccacaagccggaatgcggaggtcagagccactgtccacttgaaagcaggaaagcaggggctgaaacgctgagatggaggcggaggctctggcctcatctgcgaggttcgcaccttcccggaaggcccccccctcccccgcgtttccccagggcgagcaaggtctagcttctgagactccgctctctgggctagcggttcgagctgcaggggggcggggacggattcggagggagcactagagagagagcccgcgctcactcctgccctcctcgcaaagaactggccagccccactcgcgtccagcccacaactaggctgccgggaccggggagccagaccccaggtcgctccaactccggcgagggcggggaggggagtgacagcagcaactagcgcgcgctggcaaaagcacagagtctcggaataggctaaacggccggcgcggaggggtggaggcaagagggggcggaggaggagttgcccgagcggagagggatgacgtcctccagggccttgggctccgaggaaccgaagactggtgcgctcgccgggccccgcgcactagctctggggttcgcagaggcgccgcgcccggcttccgcggcagctccaacacagcgcgcaggcggtcgatcccggtcagcttaaaccgggcgcaagccctctgtccccctcaaagcacctctctgctcgtccctagtctccaggtgcccgtctgagagtccctgtcgcctccgggcggacccggccaggcagcccccggtcgggccagcctcgccccttcctcgctttctcccccatcgacctcgagccaagggcaggcggcccgcacccgcgcccctgcccacggggctaggcggcgctcccggcctacgcccggctgccaagaagagaaaggcgctcacctgagtcaccgaagccttcctttggggcccctcccggagcttgttcgcagcccgcaggcacaaccttccttggagaaaaaaagtagcgcaagggcagagagaggtagggctgctcacaggtccctccgcaggggctctttccttcgaattctccggggtccagtctcgggctcggcggcgggaaagagctcctggaggctggaaggggccgccagacccgggctcctcccgcagctgcggtggcggcacctccaagttgccacctgcagcgcgcttcgggcgcctgtgacagcccgcgccgctcagccctcgcgggcccgccctccccgtccgctcgttggctgcgcccggtgcccgggcggtccccgcgctctgccccgccctgagcccgcctcccagccgcgcgctc

SEQ ID NO: 335739 - DNA, 996 bp, Homo sapiens
  chr18:5890386-5891382
  hyper
cgcgtttgaccagctactgcgtccaagaccgactcggtggaggtgccggcctcccgcaggggtgtgtagcccttattgctgctggatgggtcatccgactgggagctcccggagtcccgcctggtggggggcgagccctccagccgcaggggtggcgagggggaggcggccttggccagagggctggagtccgggtccgcactccccggggagggcgggggctcgggggacggcggcgcccggtagtccgggagcccgctggtgctgcggcgccgcaaggccgcgtacctgccggtcctgggcaggcggccgccctgccccctggcggcgcgcgccgctaccgcgccctcgggctcctccggctcccggcgcgccccgcgcatgctgccctctgcgccgcggaggttggtcatgctcaggtcgagctcgcccctcgggatctcctgggagccgcgttcccccggaggcctctgccagctgcagctcgcgccctccgcgtccccgcccctatcgcggcccccttgcaagggcagcagcgcgaaggcgctcagcgaggagtccacgaaggagctggccgtgctctggcgcccccagctctcgggtgggctgcagggcgccggactgctgcagctgctagcggctgcggcggcggtggcagcggcggcccggcgactgcctgccacgcccgagcgctcgcggtagacgctgtacacggcctcggccaggctcgggggctcccgcggacagcgcggggaagaggccaggtccggcggggacgcggcgccccgagggcggccgccgctcggcgccgcggggtgaggaggccacgagcccttggccagcatcgccgccgctccgaaggcgtccccggagccaccgcagcccccgggcttcagctccaggccccgcgactgcacgtagctgaggaagccgttgagcggtatggccccggggggcgccgcggcgggggcagacgacgacgaagaggcggcggcg

SEQ ID NO: 335740 - DNA, 1581 bp, Homo sapiens
  chr18:5894664-5896245
  hyper
cgctgtgctgtgcccggtacccaacccaggtcctcgaccccggcccctcactggcagggcggcgaccccctggcccctggctttggtctgcttattgatgttagctggagtcacatgagtgcagcagctgggagtccgcctctggaaagaagacaggcaggagccaagtgagggcaatcctgaactagctttttctgggcagcgcatcccgtgtagccagcccgggaaaaagcctctcaccgaacaccagcccggggcgcggggactcggggacccgaggggcggggaggggcccccaagggctggggactggcagaattgctcaaaatggcagcactctccgcacgcaagatcgctcacttacccagggagaccgagggaggtcggggccggcgaacgggcgctcgggcgacacaaaggaaccatggagaaactttttcagcccgagccgacggcggagcgcagggacagcgccccggggccccgcatccgagcgcgactcagcagccccgcgggggcgagcgcccgccccaggctcgcagtccccgccggcgctgtggcgggagccatttccaagagtttccaagaagtgtcaggtcctccgcatcccgcatcccgcatcccgcctcggagccctcctctccgccgctcatcctccagctcccggcgtcccctagcgcggcgctcccgggcgggcccctgcggccgcgccgccggccctcgcgcctcttttgtgtggctgcggcgcgccgggctccgccgggtggagttgagcccgcggcggcggctcggggcggccggactggcggctgttgctaagagaccggagccatgacacagggaaattgcggcagggtggcggtcggggcccgcccggctcggcggagtcggggggcgcccccgcccccgccccccgccccaccccctcctccggcgcccccccccacgccgccggccttccccgctcccccgcgtcctccgccgcccgccgcccgtcccttcggaagcgccgattcctcggggaggaggaggcgtgaggggaggcggcggaggcagccggcacggggcgctcgggccgcggggcagggggcgcggggtgcctcctcggcctcggctctccccgccccggggcgccccgagaccgccgcctgcctccgcgggcagctttgttcttctttcctccaactacctgtctgagccgcgggccccagaggccccaaagagaggcccggagggtctccccagcagcatccgaggggcgctctcggggagctaggggccagagtccgcggtccctccgtgcctgcctccctcccctcgtgcctcggtcttttgttgcctctactcctcggcacggcgcagcctgggctctcttccccctcccgcttgggagtttgcagtgtggacgctcggcaagcacagtaagttgtcccccagcgaactcgggcccgggcggagtggagccgcccccgccgggacgggcgcaccgcgggacgcttggaagcctctgccagatgcgctcgcgctccagccccgccgggctttgtgaccagcctgaccgggacccggcagctggggctc

SEQ ID NO: 335741 - DNA, 970 bp, Homo sapiens
  chr18:6729229-6730199
  hyper
cgctagcaggagccccaaaggatcccggccggtttccagtttcctagaagcggggatcacacctccccgcgcactcccgacacatgcgcgcgcacgcacacacaggcgcacacacacagacacacaggcgcgcgcacacaggcacacacatggacacacgggcgcgcacacacaggcacaaacacaggcgcacacataggcgcacacacacacaggcgtgcacacgtacacaggcacacaaacaggcacacacaggtacacacgcacacacagacaggcacagacgcacgcacacacacaggcacacaaacaggcactcacacaggagcgcgcgcgcgcgcgcgcacacacacacacacacacgcactatgcccgcccccactccagcccgtgggcgtggttcccagcgtctgcgaattcgcgcgcccggggcggggcgggcctgcccgggggcccctgacagccgcgggagagagcggctggtcgcacctcgggccgcgccgcccagctgctgacagcctcccggcgcgccggtccatgctggtcccggtctttgttctggggccggcgccgagacatgcgcggctgacgatggaggtggaggactcgggcggcgtggtgctgaccgcctaccactcgtacgcgcgcgcccagccccccaacgccgagtcgcgctgcgcgccccgcgccgcagccagccacccgctcagcaggtacccggagccgctcccaccagggcggcgcagtcgcgctgggcttggggggttcgccgtgcagctgcgccttgtgcctgagcgcacgaccgccgtcactggatgttgtttcaagttttggtggactagatgagtgagcctggggttctttgcattgtctttgactggaggtgggaaacgctcgaaggctccaccagcctgggctgaagtcgttggctagcagagattagcaagcagcaggattgcattcttgatac

SEQ ID NO: 335742 - DNA, 915 bp, Homo sapiens
  chr18:7116852-7117767
  hyper
cgcccgcccgcaaaaacagaaaatgaaaattcgctctgagtttctcttctcaatccttgcaacgcgcatgcaaggtgctcccttctccgctggtccctcgccccggcgcgcccacggtcaatcccgcgcagtgaatgagcgggtttggccacttcgcctattgcacaaaaagcgcgggtcgggaaggcgcatcagtgccctggacgccgcctgcgggtccccctgcccgggacggctggctaggggcgcccttctcgccgcgtctctccccactagcccgcttggctgccaggggccccgaggaatccgccctttcccggccgccgcgacccagcttgcgcagccggacaatgagggcgactcgggagagctctttctccattcatcccccgcgcccggccaacagccccgccacccccgcccgcgcagccggggcactaaaagcaacccccggcgccccgctccgggcgccccgctcccgccacccccagcactgctcgcgtagatggcgctcctgggtcgcgaagtcccgcaaaagccagaggcgaggctgggctttaaccccaaagcccgaggaggttaaagcctaagcctgcaaagagcgggcagcgtccggcaggagcggcgtccccatccagccctccccggcaagcgcgggagacccacgtggccgagacacccactccgaggtggatcaggatgcgcgcccggactccagcagccccaacgcgacgggctttgtccgcggccgcccccgcccgcccgcctgcgggggacagggaccctaggacccgggccgggctcacctctctgccggcactgcgcggcgacacacagcagcaagaccaggagcacgcccccgcgcatctcgcctccgccgccactcggtgggtctggggagaaagccgcgcgccc

SEQ ID NO: 335743 - DNA, 2334 bp, Homo sapiens
  chr18:7566557-7568891
  hyper
cgccttccgtgtactgcctgcggctcgcttcgggcccacacgggacaccgaggcatgatgaggacgcagaacagcagaagcgcgccctgcttcccgggcgccagtgctcggggccagcggcgtgtacccggcgggcccggccgggagcgggctggcgatcgcggggctcggcgctcccggctcccgcgccatctcccggcgcccgccaacttcgctccgcccgcggcgtagagaagctcgcagccctccggagcctcagcgatctcctggctcgcttttcccgcagccgccgagcagcgcaggcccggcgactccgggtgcagctggccctgtgcggtgacatcgccgtccggcgccaggctcgaagccgcctggccgcgcccgcggggtcgcaggccgctggtcccgcccggccgcgctcacaaactactcgcggctcgtgacccgggacaaacttctggcggcggcgcagcctcttccacagtcaccctccccagagccagctaccaaaatagaagacgcggccggggcgaggaggtgggcggggggagcccggtggccgctcctccccgcgcggctgacgcccgcttcggcggcggtagtggctgtggccgcggggccgcccccagccgagctcccggaggcgctcgggcgcgggccggcggggcacgggcgctcacgccctctagcgggccgcggcggcgccgggcggccgtgacgtgagcgctcccttcagccggcctgcggggcaccgccagtcagtcggggagcaagagccccgcgcgcagccggcgcgggctcggtcatcggcgcgccgccgcccggggctgggcttggggctgcctgtggagaggcggcgggcggaacgcgcgcggccacggccacggccaccgccacggccacggccggcagctcgggtcccgggtcccgggcaggggaaggggagaggcggcgagctcagcaaccggaaccgagggaagattttggctccgcgggctcgccctccgctccctctgccagcggcgccagacgccgagtggggccagggacaggggaggaggacccaggaccctgtgcccgcgcccctggagccgctggagttcggacttctgcaactgttggcactttgggggcttggcttagcgctctgctgtttacccgtctctcctcgctgcctcggaaccaaagctcccggccccctccgccctcgcgcgcccacccaccgccgccggggagcggcccggcccgcactcagcaccatgaggggacttgggacttgcctggcgactttggccggacttttgctaactgcggcgggcgagacgttctcaggtaagcgggaccgcctctgccgcccccgaggcgcgcgggccggcgcgggacgcccgggacgccgacagctccctggtggtagagccctaaggctggcgtcggggccgggcggggggcgcggcgggccggacaccgcttctgcctgtgagccgggcgctgggcgaggggccgtggggctggcaggcacccagtcctcgggcgggcggagcggacggaccccgagggcgagctccccagccgggactgccagctcggccgccgtccttccgcggcctgggctagtgctcaaggttgggcggcttgcactcttgagtccctggccggctgcaaaaggaacagcagaaaactttgcttgaagttcccagttgcagccgccgggccgcctggcgtaggcgctgcgcggtccccgccgaccccgagcagcggccgggcccaggccgctggtgttcggctgcgcccgcagcgatcgccgggaactggcggccgctccggcggcggcgatctcccggtgccctgccctccctgtcgccccctgcccggcgcggctggcgaccccgggaggtccccgcggtcgtgcagcgtctgcggagaggctggggggagttcctcgccggtcccagcggtagggcttggcggccgcggagggaagcgggcaggtccccaggccctggccacggccctgcgccccgctgggctccccctccccaccctcgtccccctagcggagcgccgcggccagctgcaacttgttcatccagcccggctgcccgggggtcccaggtgggaaggagaggcactggcggtgtgcgagcaagcgtgtgagtgtgtgcgcgtgtgtgcctgcacgcgcgcgcgggggcgttctaagcccagaggaacccctcacggagaggatctgtggatcggagtcgggggtccggcgtgggggcgaacccggcacgctgtcacaggggtttacaaccaggatgacctttattacctgggtgacacaggtggatagac

SEQ ID NO: 335744 - DNA, 133 bp, Homo sapiens; identical to SEQ ID NO: 239622
  chr18:8608807-8608940
  hyper

SEQ ID NO: 335745 - DNA, 649 bp, Homo sapiens
  chr18:9707862-9708511
  hyper
gggacccagaatgtcgcttgaggatgggacccccgcagacctccacgcgctgccacgcaaacggcctcggccgagagcattcgctttccagatgagaatggcatcttcagggacccgctggtagtggggccaggtctccacagggccggtccagtccttcctacccacccgggccctgcggccaggcggggccgggaggggcggatgccggagggcgctgggggaggccgacccgcgcggggctggtccgagggcggaggcaatccgccggcgacgccgcaggtcccgggtggctgacgccgtccgggggcgttcctgggagctgggggccggcgaggctggacccgacgcgcccgggaggagccggccggcggccacgtgacccaccgcggcggggccggcggcccagaaatagcagcggcggcggttccgcccgcgggcggcgcgagcgaggggcagaggcgagagacgccggcggggcgcgggcgcggcggccccggaggatgctgctgagccccggcactgcctggctgcgagcacatgatggcgatacgggagctcaaagtgtgccttctcggggtgagtcctggccgccacccgccggcggaccccggcccgcgctctcgcgccccttcgctcccctattccc

SEQ ID NO: 335746 - DNA, 824 bp, Homo sapiens
  chr18:9708784-9709608
  hyper
ccccggatccgcggcgacctcgcggggacccccagcggggacggggcagtggcggcgagtctggggccccgagggctttctcctccgcttttgatagtttccttccggcagaaagtttaagttgctcagccaagtcgctgagtgctcttttgcctcctgggggcaattgatttactcacgtaaaacagaaaaataaaaccaaaagcgaacccagccaagggggtgaaagccgagggcgcggccggggtggaaggtgaggcagtgacctgtgcggagcgcgccctgcaaacttccctgctgcgggtgaaagaagctgcctgggaaagtcctccccaccatcactcccctaaagtggggttttctccgcccgaagaagccttaaagcagccagaaacaaaaaagcagtcaatccgtgcggcccggggactgcagacaggggacccggcgaggacgcagggagccgctggcgaaccgcccctgggaattcagataaacgtagggtcgcttcctttcgggggcccactccgcattccagaattccttcttctaaaagaagagccggttctaagggcgttttcagcagccattagcatctggtgtacccgcccgtgtcattggcaaagctggtctcatgaaaaccatttcctaaaaaagggcagcgaaagggtcgcattcttgtgcgaactgatctgtcaagatgggggtacaagaactgtagaaagaggaaatgatttcggtgaggactgaattgtgccagcgtctctaggcttcctctaggctcttgtggaacctccggcaggctcccatcatcggctcccatcacc

SEQ ID NO: 335747 - DNA, 839 bp, Homo sapiens
  chr18:10454624-10455463
  hyper
gaaatatgaagagacgctgcagctgcggtggcggtggcggccactgcagctcagagcggcgcacgcggcggccggggcgggacgcggggccgggcgcggagaagtcggggcgggcggcagagaggccgggacgcggaccgggccggggcgcccacagccgcccgacggcgcccagagagcgcgcgccccgcagccccgcgcctagcccgccgggcatggggcgcgcggcagccgcctgaagccccggcctggcccggccgcacccggccggaggcggagggcagagcgcgcgcccagttgcccgggcaccaaatcggagcgcggcgtgcgggaggccccagagcaggactggaaatgtcctggccgcgccgcctcctgctcagatacctgttcccggccctcctgcttcacggtgagttcccgagggccactcgagcgctcccagccggcggaggcagcccgggcgccgcggagcccgcggaggcgtcgggtctggatcgcggcacggcctacactgtccccttggcggggcgggtccgaggggagccccgcgcctgccgtctcagccctgggagagggggctctgcccactttccgaggcttgggaccgctctcccccagggcgcccggagctctttgctgcgggactgttctttttggaagggtggaagctctcccacgcagacaccttttatgtccagaatccgttgcatccagtccgagggaaactttcgtccgctctgctggattttccaactgtacactgccatgaaatcgccggctctgcgagcctttttccaaaatgccagaatgcagcaggctcttgatgtgttccaagc

SEQ ID NO: 335748 - DNA, 1571 bp, Homo sapiens
  chr18:11148407-11149978
  hyper
ctggcctcccgaatcgaaccccagagcaccagagcccttcactttgttaagaagtcccccacccaggcgcccccctcgtcctcctcaagtgccctcggaaagcggaccagactcacctactgccaggcagatgggcagcagcagcctgaagatgagcccgcacaccacttctgaggccatcgcgtcggtccggcgagtcggagcagaggggcgaggctcgagggtccctaggggtggtgggacgcaaggcccatgcccgtctatggcctctcgccgccggcagctcgcagccacccgagcatcgcctcggcgcgggccgcgacgctctccgccccgagggcacgctcccggggctcttggccgcccctcgcccaccgggctctgggtagcccctcaccaggctcttggcggccacctagcccggcgcccggccccctgcggccggcccatttagtgtgaatcctggatccggcagcggcggcggcttcttcaggggtagctgatgccggggccttggagagggacgctttgggagggtcctgggaggcggcgcggcgagcaaagggggcaagaagggcgtgctgtgctcccgcctggctcccggggcgtcgtttgggggcggccggggagttttctacttggaagcccctctgaagccaccgcgtctcctttgcccggcctcgtctccgctgcccacgcaggctgccgcgctctggcctcggccccggctctcggagctgcccggcgggctccgggtctcgccctccagcccccaggcggcccgcggcggatccccgagaggcagcgcagctcagcccctgcgccccccagcttcgggccggagagaccggggtgggagctgccaggcgcgcagaaccatccccgccaccacggggctcgccttgtgggtccggtgcgcgggcggcgctgcgagtccctccctcactcgaaggaacggcgcgagcgtggggagaaatggagaccagagcgcatatcgggtgagtgggtctcccactccctcctccaccgcctcaatttaaaactcaagagaaaaaccagcgccgtcccgtcgcccagcgcgaccaccgcctgccgccttgcagcctcgccctcgcggcgcagccggggctccccggcggcgcgcgcttctccaccttcaatgaaactttcgaagccctcactcggggacgggcgtgtcccccggccaatgggatggcggctccggggcctgcgcgcgcggagcccgcccctgagcggctggggaagtgagagccttgcaccggcgcggagggcaagcccccacccgcggctcccgcgcctgggagagacccggcctggcctgccagtgggctgcgcgccttggctcgccctccgcgggcactcctgccccactggctcccgcagccccgcggctctgcgtggttctgtcattccggtggtgcaccctggcatccagtccacccggccgggccctgagcttgcccaaacccagggaaccgtttaaggtccgagggaaacgcacaggcccggcaggagagaagccaggggcttggagagtcctgtgcgacccc

SEQ ID NO: 335749 - DNA, 958 bp, Homo sapiens
  chr18:11751872-11752830
  hyper
cgacggctgaggaatagcagggcgcgagccggcccggcaggtgcccatcgtcgccctctgggaccccggtggcgcgctctgtcctccgcgccacgctcagccaccaccccggctgtttgggacccggcacccagccgagcgcgccgccccctcggggacccgctgggcggggctgagcgaggcttggagtgcgggcgaagggacgtggggcgaacccggggcgctgcgccacctcggctgtctccagcggagaccggcgccctcgccccccgtctccgttcattgtgctgtattcatccagcagattttgaaacaattctcgtgtaaaaaggcattttactccgcgcgtcttccttacagccatttagttgggagtttgcggtgggcagggggagggagaagaaacgcctgctctgaatcggaaaacaccgaagagaccagaccatctctttcagcagcaggaaagagaggagccgtcgcaggagccgcacacgtctccaactctctattgctttttgcgcacattcctaacttcctgacgtccatcccagcgggcaggcatggggtgtttgggcggcaacagcaagacgacggaagaccagggcgtcgatgaaaaagaacgacgcgaggccaacaaaaagatcgagaagcagttgcagaaagagcgcctggcttacaaggctacccaccgcctgctgctcctgggtaaggccgaggggcgcgcggcggctcccggccccagcggagcgcacagccaggagcggcgagcgccaggctgggcgggcagggccgggcgagggtcgcgcgcacctctgggccgcggagcccagacggcggccggggcgagctcctccagccaggaacccgcgtgtaggaaatccccgtgctgggggaggaggattgctcagacccggctagtggtgagagatggcagcgatatccggacacagatcacagc

SEQ ID NO: 335750 - DNA, 784 bp, Homo sapiens
  chr18:11947264-11948048
  hyper
cgcgtagactcaggccagccgctgggcctgggcctgtgtgtccctcaggcggcgacctttggcccacttcaggccggccgtatttaccagcttagaggcgccgcggcgttggcgagtcctttttcacccaccccttccctccgttctcaggcttgaacttgaacaggcactcatgactcagcaaacggtacttgatagggttctttacacgtcagtcaggctattttttaaaatcactcttcctggagatcttcaaaccagaagcaccgcgggccctccccaacgggcttctgcttacctccactacgtgatgcagtatggcccccgggaggccgcccccagattctagaggggcttaccccagacacacccgaaggaccacctcgtgacctcagaggaacagccctagacccaggagagactgccagacacccccgtggcagcccgccagggcccagctctacttgtcgcctggaggtgctgcctcccttccacgccgccccagggaatggccgcccctctggggctcctcccaatcccccttcccaggactgacaatggcccggcgccctgctttgggccaggatcggcctcgagccttcctcactagcggccaagagccggaaaccttgcgtctcagattccccgggtctgtgcacccccaccccaaccggtcttcccacccaggccccccctgatgccagctgcgggcctggacctagcccggggccctgcccctccgcccctctcgctggacagcccaggccggcgcccgagggatagg

SEQ ID NO: 335751 - DNA, 747 bp, Homo sapiens
  chr18:12253867-12254614
  hyper
cggcagcttccgcatccctgcagggaaccagcggctcgctgagcctggggctgggctctgggggactccagagctggaggcaagtggcgctcacatccgtctcctcacctgccccacccgtggcctgggtttaaaatccacatacccgtctttccgcggccaaagtgatgctgccaggattggttatgaccccaactgccccgacccccagaagtgcaaaacgaacaggctggcaagtgaccaaaagagacccggggagcatctgggcttccaaggtcctcggtacggcccaaggcagcgaaggacgcgcggctccaggctgcgggagccaggacgaccgggggctcccagagcgcgaagtcgcgatcctcggcggtggagagctcgtgccaaaacgtcctcccctgcgccagtcaggccttcgcggggctggcaggcgggcgggggcggggccgccgcactttaagaggctgtgcaggcagacagacctccaggcccgctaggggatccgcgccatggaggccgcccgggactatgcaggagccctcatcaggcgagtgccccgcgtccccctgattgccgtgcgcttccaatcgccttgcgttcggtggcctcatattcccctgtgcgcctctagtaccgtaccccgctcccttcagccccctgctccccgcattctcttgcgctccgcgaccccgcgcacacacccatccgccccactggtgcccaagccgtccagccgcgccc

SEQ ID NO: 335752 - DNA, 826 bp, Homo sapiens
  chr18:12307275-12308101
  hyper
ggcctgggaggggacgcagaggctaccccggtggtcccagcctgcagcgttcacgtgaggaaacttccgcaaaagccctgatgcatgcacattctgactgcagaggccagagcatcccgcattttggaggctgaaaggctcccctaggataaccttttccgttaacagaggagtccgctgaagcgcagagctaactgaaaacagctagaattaaaatccaagtcacccggccggcatcagcagtcattcctttccaccacacaaaactggccaggaagacggactctggcgcgccctcccaggccgaagcgcatttcttcgctaacgcgcgaggagtaggctgcatagacccggcgcaggaggtgttcattttcggatccagccctgtagtcactttagctaaacccggttccaaaggggtgggagtcgtcggagaggaatggcctctgtatctccggagacggaaacaccaggacgaagaggccctaagaacgtgtgcccggggtgcgaccggggggtggggggcagggggcagagaccctgaaaagctccaccgccgaaccccagggcagtgtcccggcttggctggactgggcgcgggcggctgcaatgctcccgggcgcggcgctgggaccccgcgggccacgtcggctccgctgccccgacgccagggcccgactcgcgtctccctctggcggggcaccacaaggggcagcgaaacggtggtgggggcgggcgccgcgctccttcccgtctcctccccgccagctccgggcccgtccttttccgcccggctcccggcaagggtcccccgactggcgcccgc

SEQ ID NO: 335753 - DNA, 652 bp, Homo sapiens
  chr18:12407715-12408367
  hyper
cgagcgtcgcctcctacgcccgcggcatctgcagcaagcgcgcatcgcgcaccccagggtagcagcgcaggtctggggctgcgccacagccgcgcccgcagagctatttttagccgctgcagccagcctagccaccagacggggtgggcggcatccaagggcgccccgcccatcgaggccccgcccacgccgcgcccggagccgcgcggcccgaagcacccggcccggatcgcagagcccgcgccctgcgccggcggcaatgaagatctggagctcggagcacgtgtttgggtgaggccgggctgagggccgcggtggggccgtccagacgccggctcctgctcccgagcccggctggagcggtccaggaaaggccggacctcacagcgggcctcgcggagatccccgccccgcgccggccgttcccagaccgcaacttcggcgtcccggagagggcacgcgcgcttccccgggaccgcggtctgggcgaggctctgcgccgggtacggcctctcccccggcgtgcgcaggggcctggctgcaggcacagaggccccgctggtggtcgacagccagggcgggggcagccggagcgggggcggccggggcgggggcggccggagccgggggggcggccgggggcctggcgctc

SEQ ID NO: 335754 - DNA, 433 bp, Homo sapiens
  chr18:12658130-12658563
  hyper
cctcgcgccgtccagcgccgcccagcgcccgccccttagggggccgcacgggccgggggatgcacgctctggaggtgaggaccaggcaggagggcctcgcctcgaggcgagatggccgcacggtctctagcccgcagggctctcagagtcgcaggcggtgacgcccggtcggggggcccggtcgcaagggacacacagctgggggcgcaatggtgagggcggcgacgcacggtccggaggggatgcgcggccgggtagggcgtgcagggttgtggggcgtgggggacacgcggggccgggcgcgcggtcggggggcgcaggggcaagagggtgtcgcatttatcagggaagtccccggccgactctggcggggaactgggcgcgccaacccgggtcaccgccctgcacagcgggagaagtcacccgcattgac

SEQ ID NO: 335755 - DNA, 317 bp, Homo sapiens
  chr18:12911091-12911408
  hyper
cgggtggggcccagcgagtgggcgggggcgcgagcgggagcggaagcgggcccgggccgcactgctgccgcgtctagccgcctcccaggctgcctgcgccgcgtggctcgcccccgggacttgccagcagcgagtggggcctgactagctcttcaccacgctccactgcatcggcaagggctggttctgggagaggcgcaagggcatcgacctccgcaccaatcaggtggtggtcattagggcagtggacccggaggaggccgaggacgcccagcaggagaaccctgcgctcagctgtgctacagccccgagtcacc

SEQ ID NO: 335756 - DNA, 928 bp, Homo sapiens
  chr18:13217150-13218078
  hyper
cgcccgactgcacgtctctaggcggctgcccgaggtcccgcggcccgtggtgcacacgcagcccgcgaggtactctgtgctggaacgcgcccccagcctcccgaaaccgcccccggcctgcgggcagcgagccggctcctccgggcgcccctgcagcgtactctgcgctcggcttggagttccccgtgcggccggcggtgggcgcgcgccacgcgggcccgagccctgggcgggagtgcggccccgggtcccgcggcctcggcgcccgcgcgcctcccccactgcccacccccggcctccgggcccgccccccgcaggggtcggcgcagcctgtgagccggggacccctgagcccccgccacggcggccccggtacccgcggcctggccgcgcgccgggtccccaccgcggagtgggaaggaggaggagagactggaggagttggagacagacacagccgcggcgcgcagtcacggctggagacagacggcggcgacggcggcgggaggcgggacactcccccctccggcgactggaggcgggacacctccccggcggccgcagcgccgcgtcccctctctccccgcgctgaggctgcggaccgggcccggcgggattagcaggcgagtgcgttggccctgcccgctccgcgcgccgccgcggccggccggggatcccctgcaagccactgagccgctgccgccgctgcagccagacaggctgcgggtgcctgggaaagtggaagcagggcggggagcgcgggggaggcccgggggtgaggtcctcagctcttaaagaaccccggcgcgccgcgctccccgccggcccgccgcgcgccccctgccgcgccccgcacagcgcccctccccctggccagcagggccggtggccgcggagccgcactgcgggcagtccccgcctccgctcc

SEQ ID NO: 335757 - DNA, 337 bp, Homo sapiens
  chr18:13823935-13824272
  hyper
ccgacccaccgacccgaccgaccaaccaaccaaccaagcaaccatccaaccattcaagagtgtgttcggggggattttcgctcggggctgacgcggttctctggccgctgtgccgtgctgggccactaggtggcagcggaggccgcccggagcgacagccggcggtgcggaggcgggcccggcgcgggcaggcaggaggcttaaagccccgcagagccgcagccgcctagctgggggagaggcccgtccggggctggctctgagcgccgcacggccgtcggatcccggggacgccgggggcccgggctgagcgccgcggcccgcgaggaggagcacc

SEQ ID NO: 335758 - DNA, 728 bp, Homo sapiens
  chr18:13868532-13869260
  hyper
cgggcaaccgcacaagcaagaatgcagcacggagcggagtccaggatgctcagcgtgggcctcggagtctgtgtgcgatcagctggagtccaggatgctcagcgtggacctcggagaccgtgtgggctctgcgctctgcagctgagacacagtcacccgcccgatgggcggagaaaggggcagctttgaaaacaagcgcaaggagatgcatccaaaagacaaccgaacccatcagggtaaggagcgcagcggtggagtgtgagggggaaccagaagggcggccagggccggcggcatgccatgccaggcagccccgcgccaccccggaacactgggacactctcatattcccaaagggacttctccatgcggcgctctgaccaggcatcgccgcaggacgcataacagagagagcgagcgcagggcacccggcccatcagctcttccttcacctgaactgccccggcctcgctgagacgcggattttaaaaccgccctgcacctatgtgctggcagccaggccctgggaacttcctccaaacactcccatgagttcgggatgactagcatcagttttcagctggagagcagacggcaactgaacgctgcgaagtcccacgatggggatgagaggaccagagccccgaggccagtcgcccccctcccgcccatccgcccgcccgcccgccacgcagggctgctctagcgcctgcctcttcctcttccat

SEQ ID NO: 335759 - DNA, 45 bp, Homo sapiens; identical to SEQ ID NO: 239653
  chr18:14450360-14450405
  hyper

SEQ ID NO: 335760 - DNA, 49 bp, Homo sapiens
  chr18:14450819-14450868
  hyper
cgattggcttcccgcagcagcagcccgtcactggggcggcggcgggacc

SEQ ID NO: 335761 - DNA, 120 bp, Homo sapiens
  chr18:15197984-15198104
  hyper
ggcaaaaaggagcggcggcgggggaagaagccgcggcggccgtggaaaaagtcgcggcggcaaaaagccgcagagtagggggcgaaaagacgcaaaaagccgcggcggcaaaaagccgtg

SEQ ID NO: 335762 - DNA, 1478 bp, Homo sapiens
  chr18:18821658-18823136
  hyper
cgagttcacgcttggggctcttcagccgccgtccagtgaacagagaaagcaattgcgcagaggcgagagcaggctgaatgaacgcgggctccaggggaaataatttttcctcctggcttcgcgcgtcagcacactggggtgcagccctccctcacagaagaccccccccccgcacgaccccctgtacacccccgcggggctgcgcgttcgtctgtgcggcggggtttgggaatggaggcgtgaggaccgcgcatcgagggctccacaggctgggcggggggcgtcgttggaggggggtaggggagaaatgcgcgcccaccaccctcacagagggcgagggacccccaaaagccactcgcggacgccgaggcagcgggaaggcgcgaggcggggcggggggagggggcgcgggggtccccgctgcggaggccagggcgggcgggaggggcagcacctgaggaatccgcctccggctgcggcggccgccgcctcgctccgccccggggaactgagcgcgcggaccgcgcgcctgccagagagacgccagccgccggcggcgctagcacctcggagtcgggcggccggagcagcggagcgcagcgcggcgcagggaacggcactgggggtggggagaccagcccggccgagccgagggccaccccctggtcctctgccctcgcgccccgctagggccaggtgagcggccgcggggactccggggcgcgggcaggaggtgagaggtcgcgaaccgggcgcgggagctcgcctgtgaccggcaggagctgccctttggcgggctggacgccctggccgcgcggggaagcgccgcagcggacttttccggagggatgggaagctcagcgggggtgtgagcggagcgcgtgcgggtggcgagggagcgccagtgccaacctgggagccgtgcctgccttccctgccgcctcgcgtcgcccaccgaagggacccggccgtgctgtccgcgcccagaggccgaaggcctgtcaccgggctctactcgctgcctttgtggcgggagcgagacggcccgggggtgggacgagggagctgcggcgcgccgagtagcgcggggtcccccggcggaggcggcgagggggcacctggttcgtctccccgagcccaggggcagtgagggggtgccgggcaggcgggcgggcgacaggtagggcgccgcggaggtggcggggagaggatggatggagttcagcctgggaaagttgagaacgtccagaggtggctgggcgctcgctcggcgtctgtgggtttttttcctcaacaccaaatgtcacttcgtcacgagcgggcgcgcgtgtcttccggccagcatgtccatttttctgtgcatggctgaggaccactcttattccgaatgagacacaaagagttgtgttgacagctgaccctgacacaagcagacagcgagtgaggtgcgccctggccggggagggtgagggagactc

SEQ ID NO: 335763 - DNA, 48 bp, Homo sapiens
  chr18:19577719-19577767
  hyper
cgtcctgtttctacttcgtgagatggcactgactcaccactagtggtc

SEQ ID NO: 335764 - DNA, 313 bp, Homo sapiens
  chr18:19748134-19748447
  hyper
cgaaaatagaaacaaaacaaaaaaccagagcctaaacgctttctaggagaccgaccttcagaaaatcatttacttggatttacctgggcggggggtagggggtggggtcggggtaaagtataaaaattcattctcacaaaaacaacgcctcttgtcctaaagtctccctcggcagccttctggggtcacgtctgtcggaagaaatcctttctgtaagcgaaagggagcgagacatatatcacggctcctgcagcggacgagcctgcggccgcgcgagttgccgctgacagatcggcgctgataaccccgcgac

SEQ ID NO: 335765 - DNA, 2283 bp, Homo sapiens
  chr18:19748747-19751030
  hyper
cgtacatgacgacccgagttaaagttcccaaaggtcagctggggaatgttgtcttgaggttcccgaaaccaccacgacctgagccgtagcatcccgagatagggtcggagaaagtttaaggtcggtctcacacaacttcagggcaaaaagcgcatttgctgtgaaggggctaggcgggggttggggggcgggggggcgcagagcacgttcccccttccttctgggggcgtgctgacccaaggtctggagcgcccctcccgccgcggcggcggcgcgggactgtgcactgccaactcctcccgtgccaaggctccctccccctccctcgtgtgggtgtgtgtgtgcgactgcgggagcgggagggtgcaccgccgctggatgggtgcgggtcgctagccaggtcaggcgttctgtggcctccgcccctcccccggggtccctgggctcggtgccccccgggtggactcgcccccactccggggacagggcttgcggctcagcccacgcccgcaggcagcgcggctctcattgtctgcctgggcggcgcgctcccctcccccctcgccgtcccctccccaccctcttttctctcctcccctcgatccctcctcctcctcttcacctccagcgcccagctgctcgctgagcgcagttccgacccacagcctggcacccttcggcgagcgctgtttgtttagggctcggtgagtccaatcaggagcccaggctgcagttttccggcagagcagtaagaggcgcctcctctctcctttttattcaccagcagcgcggcgcagaccccggactcgcgctcgcccgctggcgccctcggcttctctccgcgcctgggagcaccctccgccgcggccgttctccatgcgcagcgcccgcccgaggttcggctgcttcctcctcgcgcgatctccccgctttcctcccctccacccctactcgtcgcgggcccctggcctccggctctccggccctctccaggccgcggtcggctccgacggtgtttccctccttccctccgggcgggctgaggcggctcccaggctcccgggacaccgcggaccaacttctagtctctttttctctcctcgaagcgcttatctgcgcgcagccttatctccgagttatctcggcgcaaaggggcgggagccggtagttaggcaggcagagaaacttctttcttgctatctagccaggtctgtgtgtgggcattaattttagtgtggtaatctccgatgagccgaggcgatttggaagagcagcctggaggaggccagcccggctgcatttcacctccctcccccactcgctccgagtctccctgtcattcttcctgctctcccatttggggtcgcctcggctctggggcggtctcacgctcccccctccccagcccgttgcgttccccctccttttctctgctctccgctccaccccgctacgtccgattccggaacggtccggcgtttctgctgctggagatgaccgcggggtgggccgggtggcccggccggcgtgagcgcgcacgctggtggctgcaggcgcgggccgtgtctaaggtgtgcggcgccgcggggacgccggtggggctggcgattcccgccccacaagctctccgcattgcctctgctgggaaggacccagactgctgcccccgccctggcgtcccactttccctgggccgagttgcatttctctctggggctcgcgttcgggctggtcagcgcagtccgggaagctctgggagagccaatataggagaacgcggcggtttcgttttcggggacaggttgccttccttacgcgaagggttttcccgtggggaaccctcaccccgaggcatttcgggagaggggcatccgcagagaggcgggatgcggcggtgccgacacgcacagctacttaaattcttttgtgtgtcatcagcccgggggagacactttagggcggaaggaaagcctcagccagcttctgcagatcacccctgggatctggcgcgcgcacggagaaaggatgcggccgagggggtgggcggggaggacgcggggaccggagcggtgcctttgagggagggctggtatcccagcccttccagggccctgtggcggctgcgcaggctcccttcccctcccttattgatctccacgcccggggcagaaataggatctttgagaagtctcaaatgggatctttgagaagtcagatcccatttgaactagaaaaaggagtggaggcgaggtagcgtgcagcctacgctcttgttaacccgtc

SEQ ID NO: 335766 - DNA, 469 bp, Homo sapiens
  chr18:19928416-19928885
  hyper
cgccgtacccacctccctcgctatcaaacaaaagctccaggcattggaaacgtttccccgccgggagcgccagggtccggccgcgctgcggggtcggtctgcgcgcgcggcggggtggtgggcgcgtctggccgcccgggtcttcaggcgcgcagcgacgccggcccgggccgccggtctcagcgcccggctccggctgggcggccccggacgcgccgagccaggctcgcgggggtcaagtccaggttgcggcgcaggaaggcggcgggggaggggcgggccggccgcgccctcaccccctcttctccgcgcccagtgcggaatgatgggccggttccctcggtgtggtatgtctgtataaacatcgttagcctccgggccgacacgtggtgcatttttaatttcgccttacaaattgcggcctcctggcgctggagaagcggtgggggaccttgactccccgcctttc

SEQ ID NO: 335767 - DNA, 1491 bp, Homo sapiens
  chr18:20512643-20514134
  hyper
cgattcttttacaaatcaggagaaataggaatacctactatcggtttgaatctcaaacgaacagccacaagaaaaatggactttttaaaaaaaattatctaacagcatgttgtcccaataaataatgctgaaggagattccttctcgtttcaaatttgccagaaacttcccgtttaacctcagcaaaatacagatcgttttgatctatggcgttaccgcacaaccctgtcaggtcacatcactaaactgcagataacagcgacaaggccgaaaactatgttagacggatccgcgtccataccccccatcagttaattttaactcttcattcggtacaggtcactctacacatgcttccctgcaaaatgcttaagctagacacagtgtacagataactttcacagaaccgcaagggcttgatgctcccccaacagaacggcttgagctttccccagcgcaattcagaaatgctgtggcggtcgccagactcttcgggtagctcccggcagctccgaggtagcgctcccctccccaaccatcgccctccgggatgggccgcaccgaagagcccgctcctcagctagggcacgaagtgcgccgccgcgatgggcagctggaggaaggggcgtgacgcaagtggaactcccgcgtgacgtcgcgcgggctcccgggcggggcgggtccggccgcctccgagcccggccggcagcccccggccttaaagcgcgggctgtccggaggggtcggctttcccaccgaggatttggcactctggtgagggaaaagggcgaaagagaaaagcgagcagccgtcctttcacagcctcagaaagtgctcgcttcccttcgggggctttcgcgaatcccgaggcaatctcggaggcggtgagtaaaagcaatctctttaccccacccggagctctgggtcggagcgactgcttctggtctggagctgcgtgcttggcgaagggctcccggggtaggggtggctcccggctctggggttgtgtctgatgaaataggccgggcccgggctacactcggtggtggtggaccggcgggaggacgagcgctacctcagtactacttctgggtctcccgcgcgggctgaggaagcgcctttcgccgccaagcccgccccgcgcatgcgccgactgcggctcgcgcgcgcgcttcggaggttttttggccagacccgcacgcggaaccggcgcgggcacctggggagaaatggatggagaagggacctggctggaaagcctttgccccgctgctctgctccgcccataagaggacccctgaaatgtcccgtgcagtttgttcaagtcccctgtgtgatgaaatgtgcctctcgccttacccgtgtgagaatacctgtggtgtggcagcgagtattttggtgagcacctgcagtgtagtggtttatactaaggaatacacacaaattacaggcctttgagcccagaatgcaacttgggaggtaagacgtgac

SEQ ID NO: 335768 - DNA, 1025 bp, Homo sapiens
  chr18:20715851-20716876
  hyper
cgcgccggcccagccgccgcccgaacccccccggaagccgcgcatggacccgcggcgccgccaggctgccctctccttcctcaccaacatctcgctggacggccggctgccgccgcaggacgcggagtggggcggtggcgaggagggcggcgcggccaagccgggcgccggcggcgcctgcggcgcgaggactcggttcagcttgctcgccgctgccgagcggggcggctgcatcgcgctcgccgcgccgggcacgccggctgcggggttagccgctgggtccggcccctgcctcccacagccctcgtcgctgccgcccttgattcctggcggccatgcgaccgtgtccggccccggggtggcgcgggggttcgcgagtcccctgggcgccggccgggcgtcgggggagcagtggcagccgccccggccggcgcctctcgccgcctgtgcccaactgcagctgctcgacgggtccggggccgccgggcaggaggagttggaggaggacgatgcctttatcagcgtgcaggtgccggcggccgcctttttgggctccgggacccccgggagtgggagcggcagtcggggacgcctcaactcgttcactcagggaatcctgcccatcgccttctccaggccgacttcgcagaactactgctccctggagcagccaggccagggcggcagcaccagcgccttcgagcagctgcagaggtcccggtgagtatccgggatgcgacgcgcacccaaccctgcgtcccgcccggcgctcccagcctccccgcggtctctgggctacgggacacgggttgctcccattttcccgcgccctgccggatcctgtgctccgggcccgaatcccaaaccacgagggcacccaaaagagggggcgtccccagggagtgcggggttacacgtgtttgcacgagcccagcattcgcagaggagcaccgcgcttgtgcagtgggtcgggaattgggagttgcaggagcccagtagaaagcggcgtccgagcctccccacac

SEQ ID NO: 335769 - DNA, 1230 bp, Homo sapiens
  chr18:21269079-21270309
  hyper
cgactcaacacttggctgggaaatcgaaatgtctttgatgtgagttctgtaggtagtggcagtttcctctgctctcaaccaaattcgtttacaagcctcctttactcttaggtcacaggtggcttttctggctttgacctgagcggtgagtatccagagaggagaacgatctaattaatttctgtcctggcgcctggagggttcgaagatcccaggctcccgttcccgccgcctgggtgggagcccgggaacgcctctcccattccccgcccgcgaagtttgcagcgcgcctcgcgcgggagagacgccgtctgctggcgcgcggctgagcgctgtcagttcctgatccggctggtgcccgctccagccgcggcaggttccagagctgagaggccacccccacgccgcgggcttccagcgcgtggagcaaggggagcggccccggcgccgcccatatccccggctgcgctagtcctggcgctgcaggtccgggaggcgcaggcggagagcggcggtgcccccgagcccctctgcggacggctcaggcgggaggaccccgcgcggctggatggcggcggccgcgcggcctcggggtcgggcactggggccagtactgccgccgacgccgctgctcctgctggtactgcgggtgctgccagcctgcggggcgaccgctcgggatcccggggccgcggccgggctcagccttcacccgacttacttcaacctggccgaggcggcgaggatttgggccaccgccacctgcggggagaggggacccggcgaggggaggccccagcccgagctctactgcaagttggtcgggggccccaccgccccaggcagcggccacaccatccaggtgagggcctcggagagagccggggtgggcgcgccttttccttcccgcgccggccagacacccggagaagggatcgggccctttcctcacgcgcgctagtggctccgggcgactgggaagggcagcccccatccccgcgcgcgagggcccacgacccaggagcgatctcgtggaagcaccgcaccggcaccaccggcccgaggcgaggagggggagcacgcgaggtgacatgaggctgtggtcaggttcgggctggtggaggggaaagtgtgaggctgcgctctaagagatgcaggcgcctcggcccttcccgcctccgtcacccacggagcgtcccgccaggcttgagtcctcgagggttcaggggc

SEQ ID NO: 335770 - DNA, 866 bp, Homo sapiens
  chr18:21851454-21852320
  hyper
cgtccaactattcttggatctactcacatccctggatcaagtctggccgccctccccgctccgtcccccggcgtcctccgtggccccaggctgccccgcaaagccaccgagctgcaaatacacccacctacctgggccagatccgaggaccccggctggcgcgctccaccctgcgctcctcgcaagctccagcgcgaatgcgctcggcctgctcctcctcctcccctccagtcgagccgaggcgagccgatccgggaggcgcgacccagggcggcccgcaaggtctccctaagtcacctttgcgcagcctgcccctggctccggccgggcagcagcgccagccttccccagcgaggtcgggcagaggcgttgcccgccagcggcccaggactcccgcgccgcgcccgcccgggccgcagaggtctgcgctgcccctccgccgccgctggctcggccgcagacccgccctccggggctcgcggggagagcgcgggcgggcggcggcaaggcctgcggcgggcggctccctgcgcgcggcgggcagcgtccgggccgctcctccccttccccagcgccgctggcgggcggaggcgcaggtagggaccgccggggaagcctgcacggccctccgaggagaggtcggggactgctccttgggctctacgtgagtgccgcgccgaggcgcctgcgaggtcctagagctgctgtgcgctcggccctctcctggagacaccggccctggcaactttttttttttcttttttctttttttttttttttaaccaacccgccccttgggaaactctggaaagcaaaggaatcttctctccagtcctgcctgtcacttactccggctcacgctgaag

SEQ ID NO: 335771 - DNA, 2243 bp, Homo sapiens
  chr18:22929097-22931340
  hyper
ggacaggcactaaccgctatcctacttcaactcggaaagttcttctttccaagtgactaggaagaggtttgtcctggtacttcgctcagcgttactttcaagaaagccggggtctcgggcaagtctcgccggcgcgagcctggtccaccgttaccctgacacccgcgcacgcccgtggcgtttcttttttcactgtcgacacttggatctttcaggccctgggtctaggtttcccccagaaaaatgaggggcccatgtgacggaaaccaccagacacactgtgtggagacacatgccaatgattcacctcgttcccgaactaaaacttctgcgctttaggaaaaaagcaagcgttccaatctgcgaggccctcccccaccccgtcccttcccaggagaagaaagaaagggctttgtgtgtgcggtgagggctccgttcatcgagttcaaaaatgcacagcggccgggggccgggaggcgtggggcgccgggccctgcccaccccttttccccgggccggcggcgagtcgggaagctggtgcgggaaccggggccacggggcgccgcggcccggcagccaggaggaagaggatgctgcgccgccggggaccagagggcggggccgggccgcgcggacctcggcgggacccagcgggcccgggcgggcgcaccagccgccctttgtcctccgcctccgggtcgcgggggccgcggccgcctccagcgctggccccctggccctcgccccggttccccgtcctgcccgcgcgcccctcctccggccctcgcgctccgccgcccgccctccccgctctccgcctcggagcgccggacctcgcggctcccctcggccgcccgcccccgatttcctcggaaggaggctcgcgaaggtggaggaggcggccgaggaggaggaggaggccgccacgtgactctcctcgccacattccaacacagccatcagatcgataacttcagggacccccgcccccgccgcagccagctagtgcgcccccaaaatcccgcacgcacgccccgcaacttccctctccaacagggacgacggagagctggaccccaccgcgaaacgcaaaggactccaggggcggcggggagaagtaggggcgaggggcggtcaacttctgggaatggccaagaggggtgctctgaggcccgagccggggtccggtgcccgcggccggcggccggggtctgtttactccggcgacgtgcggagaggacccaagcaggacgcgggcgggcgggaggcggcggccgggaccccgggccacgtttgtcacgagcgggggctgctccccacctccgagatgacttttttcttcttccaaagaaaaggaaaaaagaagcaccgcacggttttgcatatttattctttgcgaaaacacacaacagaaactttttcctccagcccagatgtagatctcagacgggatatttttttttcctccctctccggataatttcgtttctttctctctctctctctttttttttttcggttgttgttgtcttttctcgcccactttctaccgccgccccattcggggatcctcctcccgtcttcgtctccccccaccccgacacctcaccctcactccacctaggggctcagcggggaggggagcgcgcgcgcccccgcactcacactcacactcacgcgcgcacacgcctcgcagccacgcagccctcgctccgctacccacagtgacactcgcggatgggggaaagcggggagcagggggttcctccttacctttgagggatctcggtttcgcttgcttgcggcgagacatcctaaaagcaaacagctgaagttgtttcaattcagccctgaaagaaactatacttcctcgtggccgcgcgcccctcgggccgcggcgcctcgcgccctccgctcggcctccctcgcgccctcgctccgcgctccgctcctcgctccggctccggctcgcgctcgcgcgcggggctcgcggctgcccgagctccgcgctctgcacgacggcggcggcggcggcggcggctgctgcaccaaactttcccagccttcgacccccacccccaatctccaagaaaaaaaaaaaaaaaggaaaaagaaaaaaggaaaggagggaaaaaaagctaaaaaaaaaaccccaaagacaatgtttgaagagccgtcagctacactaaaaagagaaaatccgttactatttccacctcaatcaaaattcacatagttcatgc

SEQ ID NO: 335772 - DNA, 1111 bp, Homo sapiens
  chr18:23806188-23807299
  hyper
cggatgccgcagttttccaagtgcagcttgcccctcccacgtgataggtttctggcatcgcccctccttgctggcgattctggggaagattttaacgctccctggagccgtccccagtgacgtcacgggcgcggctccgctccttggccaatcacgcggccggatcccggggaaacccggggcggtggcggcggcctgggcgcgtgcgcgaggtctccgcgtggctatataaacatggctggcgtggccgcgcggcggggccgtgccaatcgcgcgtagggggctgtgggcactcggggttcgtagttttgaaatttctggcgggggagcagctgcgcagttaggctcgaggtgtgagcgacgaccttccgggagccgcaagtccaggctcccccgcagcgggacccgagcctgaggcgcagggctgaggcagcgcacgtgtgagcgccgctgaggaagctgcgagaggtcgggcgggtgtcgctccgggggcagcccaggctcgcgcggacgagaggaaggtccgggacgcgcgtgtcctgccgtgcagcgggcgcccgtcactgacttcgctgctgcggcccccgcgcctctccccagcgatgctgtggaacccgaaccgcaccggagtcggctgccgcgcgccaagcctcccctcacctctgctcccggaaccgcagcgccaaagctgccgctgagcccctgggggatgcccgccggcctcaccgaacccgccggcgccgctcccccggctgctgtgagcgcctcggggaccgtgaccatggccccggccggggcgctgccggtgcgggtggagagcactccggtggccctgggcgccgtgactaaggctcctgtcagcgtctgcgtggagcccacggcgtcccagcccctgcggtcccccgtggggaccctggtgaccaaagtggctccggtcagcgcccctcctaaagtcagcagcggccctaggctgcctgctcctcagatagtcgccgtgaaagcccccaacaccacgacaatccagtttcctgctaatttgcagcttcctccaggtatgttgataaccctttccagccttgtctgtcggtccagctggcggcgacgggaaaat

SEQ ID NO: 335773 - DNA, 503 bp, Homo sapiens
  chr18:24127691-24128194
  hyper
agcttgcggatgaccgcggccagcgtcaggttggcgctgcgcagctcggggtccttggtgaggtcgagcgtgcggcagtacgggggctcattgaggtagcggttgagggagctgcggatgctgatgagcgacgacttgctgtagagctggccgcttttggagcgggcctcggcatagaaggagcgcagcacgcggcacagcgcccccttgtccatggtctcgaagtccgggctctgcgccttctcgctcaggtactcccggaagatgcgcacggcgtagcgggtggccagccgggtgttctcgctcagccgggcccgctcggggcgctgcagcacgtcggggtccagctcggagccgtccccgggcggcccaccgcgggcccggggcgccagcagtcgcggcggcgcctcgggctccagcgcggcgctctggtccatattgatcatatggaccggctcgggctccagctcctccccggccgagtcctcgggctccaggggctc

SEQ ID NO: 335774 - DNA, 248 bp, Homo sapiens
  chr18:24130266-24130514
  hyper
cgcatcaattgaaacccatccatcaatttgcattttttttttttaagaaagaatgaaagaccaggtctcagggcagtgtgggcttctgagtgggagttgacgatgtctttttctgcagcgaacgctgctggtcctccgcgtgcctgcccggccctggacgccacccgagcttcggggaaaccgcgccaggtgtgaaacaagttagagcaagtccctgcctcgcgggccgcctccggctccttagggaa

SEQ ID NO: 335775 - DNA, 599 bp, Homo sapiens
  chr18:24130574-24131173
  hyper
tctcatccgcccggctctccgcggagaaccgtccgggaatcgtccccgaggtgcggcgcgggaggtggccggctttgttcacaatgcactgcccgccgcacccgccctggacacgtgcagaaaggcgtgctcgtttctccgaggctgcggtgagcagctaagttagttgcacactgggacccccacatacgagctggcacacactagtcacacacggctaattccagagggctggccctttgtcctgggacgctcccaggttttcgggccgcggtgcggagaactcaggtgggtgcccggcaagttacctaccaggggctgttcccccgcgaccctcgccataagcgcagggacccgggggccgcgctggctccgggctgcgctcctggcttggcaggggaccaggcccacgctgcagcctgggagcggagccgccccccaggtctccccacctctgcgggcggcggggtccacccccctcccaccagctcccctccctactgggcgagctgctttgaattgctcgcagtttgccggaggcggtgtgctgggttggacgctccgggaaacaaagcaacccaaaacagctcccagttgac

SEQ ID NO: 335776 - DNA, 164 bp, Homo sapiens; identical to SEQ ID NO: 239688
  chr18:24235704-24235868
  hyper

SEQ ID NO: 335777 - DNA, 750 bp, Homo sapiens
  chr18:24764503-24765253
  hyper
cgatcgcacctggcctcccggtccccctaacttccctcccacctctcccgcagcctgcgcctgagcctgagccaggtcgcggagtttgagactgacgcaaaggaggcacccccgcagcagagatgctcgtctttctgccacacaccctggaggacccgacagactggcagcagaaactaaagactgttcctgccgtcctctttccaacctctgcatgccccaagaggggtctgaccccggaatcctggagtccagggtgccccgccggggcgcaggaaggaaactcaggtagctgacaagttcaggcggccgtccttctccagcgccccctcaaagtcaggatcccctcctgctcccgccccccacctcccgccatgcgtccactgaagtgaagggaagtgggttggaatactggaggtaggggagatagaaaaaggaagaagcctcccgcatctccagcggcgaagcacctggaaaggtgagggcgcacgtccccgcccaccagagcccgctcccggcgcgggtacccagcagcgcgccatcatctctgcccctccagtgccccccagccccaaccccagccccagcgcggttacctcgcgggccgctgccgggcgcttgcaggtgctgctgttccaggagcgcagcttcggaggaaacttccccgcgctccggggcaaactcccgcgcactcctggcagccgtgaggtggctgagagcggagcgccgcgccgggagcggggacagctc

SEQ ID NO: 335778 - DNA, 2849 bp, Homo sapiens
  chr18:25755624-25758473
  hyper
cgtgaagaccacggagcggggtaatccacaccacctgtctccacccccggagcaggcacttccgagctgcgtccgcacttttcggggctgccagctggcagtagagcacctctccccttgccccgagggcgacaggcagggggaccctccgtggattttcctgccccgcggcgagggtgggcacgcccctttcccgcaaccttcgagggaccccacggcaggcggagaccgacttgggaccagggcactgcacccgcccagctagagggtcccggccgaggctgtgtgaagtggcctccaggcctgggctggctggtcgggaggagcctgggggcatcctcgggttggaggcggcggaaagttgggctgcccccgggctgggaacccgcagcgtgcagtggcgagggaacctgcgcccggactggagcaggtgcttcctgccgcggaggagcctcttagtagagattaaatgaaaaggctcgctggctctctcccgagggtatgaaaagtacggaaggctccaggcaaaggcgcccccggggcgcatatagggcacaggcagccggacagagaaaggagcagccgcgtaacggaacttctcgcccgggggagatactaggcgtgagaggccagactcgttctacaggcaggcgctgaccggcagagactcctccgggcaagagggccagattttctttccaggtgggacgaacacagaatattgtgagggcaagagaagaagaaaaggaggcaactccagactgggataaagacaataggacagtagagcccttgagcaccgggaggcgcacgggtgcagggtggggtaaggtggaggcaagtcccgtaactaagacaccagagtgagaattcctactgtaaactcgcgacccatccctgcagaaataaacaaaaaaattggagcaaagtactatgcgaggggcgaaaggcacagaaaactgcaaaacctgggagttatcctgcctcaccctcctgctgcctggggacaccccccgcgagcttgctcggccccgaagaaggagcagaggggacccgcaatccagcccctagagccccgccaggaaaggcgcgagagacctactggccccggcaaccctgccccggcgcccggacggagcccgatgcctgcgcagctaccggccgcgcggcgcggcgcggcgcggcgtggcacctcccttcccgggtgcgcagcccggccccgcagcggcgcggggaacaaagggacccggcgccgcccgccccaccccgcccgtggcccggcccgcggggaccgccgcgtacctgaagcagggccgccagcagcggcagcagggtccgcagcgctcccgctatccggcacatggaggcggagaggggccgagcgaagagccggaggaggcggcggcggcggcggcggcggcggaggaggaggaggcagcggcagcaccaacagcggcgcggagaaacggctccaggcagtttccacccccttcccttcccctcccctccccacccccttcttcgctgctctccgctccccgccaatggagagcgagctgatgacaaatagcgggccgcggagtccgcgggactcgcaccaggagtaataaaacagacccagagatcaaggagctggggagggggcgggggaacagggagggagagcgtgtgagcgtctgcgagtgtgtggaggcggctgctgtggcagcgcaggcggctcggctccggcccggagcgcagcggaagccgcgagggatgcagcggcggggaccttggccggtggaggatgtggaggtggaagtggagcggatggcgctccccaagagctccgccacgcgaggtttcgggctcgtggttttgcttcctccgggtccccgctccagggccgctcggcgcgacgaagacgccggggacagcgccgcggggagggcgctccgggtcgtgcgtgctgcacccacaaagagcagcagtcccgccactccgcgcctccgctgcgtgggggccgaggggcgcttctcggctcctctttccggtcccccggcgagttggagactgttctccggcctcggccgcaagggggtgaggcgaggggccggcgcggtctctcccgccgcggctccgtcccgcgcagctgctgccgcagccgcccctgctgcccgcgcaccggcacccgcccgccggtcctcgccctgcgccgctcactcgcgcgcgccgccctccgtcgccgaccgcgcaccccgctcggcctccgctgcgcgacctgggcgagccgccgccgctctccccgcgctcgccccacgcgctgcctggctgcgcggcccgctcccctctcctattcctcccgccgccgccgccgccctcgcccccgcctccctcctccgccgagcctccccgcccgcgtcgtggccaatcggaggccaccaagctgcggctgtagccggccggatccgcggcagccgcccgcccccgccccgccgaagcgccccgtattttgctgcagcccgcggggggtcgccggagggaagcctagagtgcgccgagcaccgccccggcaggtggaggggctgcgggaaataaaataacttgggcaggaacttgattggtagcaggttcatctttggtccgcggtagggaatctaatggagatgaagaatggtggggaagggggggcggtgtctccttgggagcctaacgtacgcttctttattttgtcattctttggagatgggtaatctttcctggcaggggcagacacagcaaactaaggacgcaggccaagctcatcctagctattgttgtctgaggcgctcgccgggagccacctgcgggcgggggagggcggaggccgc

SEQ ID NO: 335779 - DNA, 284 bp, Homo sapiens
  chr18:28620900-28621184
  hyper
ttctgtgcactttccggtatttaagtctccagatacagcatttaacctaaactcaacggaattattttaaaaaaaaaaaatcttaaacgagtatgtgctagatcaaagctgaagcttcctccgtttagatttacgcgcaccttcttccttgccacagctcgacacccccacccatgccttgccgggaaagctcctggtcttccatggcctctgggagcctcgagcgaatgcgagaaattctgagagcagcacccgtagtttcgttccccatcctcaatcccttc

SEQ ID NO: 335780 - DNA, 1280 bp, Homo sapiens
  chr18:28621489-28622769
  hyper
cgcgagaccagactcggctcactgccgacgcgggtatagacctcgctcccatcggaccccatgcgcatccatggatgcgggtaagtcgcgggtccgcggctcctttctgggcgtgcggaatgaaactctgttgaagcctgaagcttcgcgtgtaaccgcgccgccagagttccgaacacttcaagtctcccgtgttctcagagcatcgtctctaacttcctctcctagaggatttcgtcctgggcggcaggtttccgtagactcgaaaccccaggctgtgctccggccgcgcagtcctccccggagccggagtaagtacgacgcaaccccaccgcatccatcatcccccaccactgtcaccctctacccgcctccacacctcggcagcatccccaaaacacaacacgaccccaacccccattctggcccggtcttcccacactttcgcgcccccggcacatcccgcccccagctgggtggctggcgggggtggaccgcttgggtgagcttctgaataccctttaggggagataccgagaaacccacttctcaggggcagccccaccaagggacccagggacacagccccggctccactcactaacgaaccaatccgggtcaactgcgacccagagctggggagggggcagcccctaaatcccttttcaagtctgtgctttgagctctcagggatcctctccacccaaaggcgccctccaaccaccatcaccaccagctccaccacctggggagaagcgtgaatcccaaccccctgcccaacccgcgacggcgcccgccagagcgcagcgaagcctgagcgcgactcagaattccaacaatcgaacaccttgtctcaaaacaaaaagctcagtccagagtcgacccgcaaacacacgttttctctcctcactcctgcaggcccgaacttggggctgctaccagacccgcagcattgatctgagccgcggttgtcacgtttcggcccgctttgtccccagctccgtgcagcgtccagggcggatccacccccgtccccaccccagccctatccggcgagatctggcttaccacgagggtcagcagcagatgcaggcagacggctccgcgcacggagcgccggggcccagcggcggccatcgggatgccgggcagggccaggagaacgcgggcgccgggagggtgccgagagcgagacctgccgaggtgcagggcgcgggaggtgcttttctcgccgctgcttgtttttaagtgtatttggcctctctcaggcttgcctgccc

SEQ ID NO: 335781 - DNA, 886 bp, Homo sapiens
  chr18:29077773-29078659
  hyper
cgcgctacccaggtcgagccccgccaggaggctccctcctcccgccattctccagagagtagggggtcgggaaggagagaacggcggggcggggcctgccacccacagtccccaacccaaggacgtcacggtcccaggtgcgagtgcgagcgggcgggagtccaccccgcgcctccctcctctgctgaactccccacctctgtaaaagcggcccgggccggcccccggctccattttctcgcggcggccacacctggagccgcgcctttgggttgggctgggctgggccgcgcaaccgccacgggaagacagccctcggggcggggagggagagggtggccgggccggggggaggccggggccagggaggagccgagtgcgcgctcggggcaggcggcggcgcggagcggtgcggcggcgggaggcggaggcgagggtgcgatggcgcggagcccgggacgcgcgtacgccctgctgcttctcctggtaagtgccgcaagcgggacaggggagccaccgccggggagggcgtcggtaggcgaggtctagacctcgcgaccagacttgcccgccgcccttgtgcgcgttacctgcccggcgctccttcctgctgcccgaggggggaaaagggccgggcaggctgcggcgagatccgacctggggcttcggaaaatcctcttggctggagccaggagagtaagttgcgacctatcgaagttgtgttttccttcccgcgtcacccaggccccagcgcccttttctgtggtgtgtgggtgtagtgagccctggggcggggaacaccattgctgggggtcggaggctttgttgagagtctctgggacgagaaacgtggaggcaatagggaacaacctcgcgcttcttccac

SEQ ID NO: 335782 - DNA, 142 bp, Homo sapiens
  chr18:29598295-29598437
  hyper
cgatagcaccgtcttaggagacgcccaatcataggtcataggtcatttttgcagcttattgtgatgacaacagtggaggatggtcttccacttcaccttaaaagcggctgttctctgattatcattaagcatggccacgccc

SEQ ID NO: 335783 - DNA, 180 bp, Homo sapiens
  chr18:29599675-29599855
  hyper
cgttagccgccaagcccctgaatgtactccttcaaaacccagccacaacgtaacaggaggtggcaggctacctgctttacgcacggtctctccaaaccggcggaaattacagagtaaaataactttctcaaaaccgcatagtacttagctaaaactcacagttggtgcaaagccgtggtc

SEQ ID NO: 335784 - DNA, 1929 bp, Homo sapiens
  chr18:30349741-30351670
  hyper
ggccgggatgagggcgaagcggaggcgcttcatgaggtcaggcgcatactgcatgcgggtctcgcggtcgtgctccagccacagcacggacatctggaagagcgccagctccgactccacggggggcggcagcgagtccagcagggcgcgcatctcctcgaagttgagcagcagcacatcctccaccaggtacttgttggccagcttcttggtctcctccaggccgtgcagcgcggcgatcttgcacacctgcttgtagttctgcaccgagatctggtcgttgaggaactgcacgcagagcttggtgacctgggggatgtgcaggatcttgctgaccgacagcacctcctccaccgtgtccagggacagggtcacgttggccgtgtagaggtactcgagcaccaggcgcagcccgatggacgagcagccctgcagcaccaggttgttgatggcccgggggctggtcagcagcttgtcgtcgggggaggaagaaggagtcccgggctcctcctgcggcggcggctgctgctgctgtgacggctgctgctgcggcggctgctgctggtccttgggggcccccaggccgtcctggccgccgacccctcccccgagaggggggtggctggagaagagcgatcggaagtactgcgagcaggaggccagcacggccttgtggcaatggaactgctggccctgggccgtcagggtcacgtcgcaaaacagctgcttcctccacagcaggttgaggccgtgcagcaggttgtcgctgtggctggggtcgaaggtggaggtcctgtccccggatctggacatggcgagctgactcggtgcacctggctttaaaccctcctccaacctggcagacaggggtgggggatgggagggaggggagcagggtggtggagcgggtggggtgtggtcggggtggggaagggtgtggaggggaggggagggcgaagaacaagaatcaaggctcagcttgactccctcctggcgcgctccggaccccgaccctaggaggaaagtccgaagacgctggatccgtgagcgccaccagaagggccctgtctggggtcccggcgccggttctgcgccctgcggctcctctcgccacctcccacacacttcgtccctcactttcctaaaaccaaccacctcagctcggctgttggcagcaacagcagtggcagcagcgacggcaaagtggcggctgaggccgaggcacctcgtgggctcgtgtccatgccgggccagatgaagggaaaggccgggaagtggggagccgggggtgccctgaaagctcagaggcgaccgacggcgaaggttccaggtcaacttgtgcccgaagctttgcttttcgcagttggcccagtttgggggagggggtaggaacaggggcccgaccagcgtgcggggtgtgcgaatcttagctctccaaaagctgggacccccttcgattatccatgctgccccgagaaactcctaggctaatagtctgagggaggagataaagccctttcttctcccgggaaagtgcagcggagcgcggtgaggacccgctcagtggaatcggcagaggcgggagctgtccttatcaattcgagctcatttccctcaacctggccctgcccgcttccccgcttcgcaaactgttggcttccccgtcaccactcagtttggctaattttccagagatggctttaaacctggcaggagaatccttccaccaccgccacccccacccggtggccccctctcccccgtctcgctcatttcaaagcgcggaagttcaggcatcaatctccccttccagcgaggggcggcaccgaggactcagggggaggaagtggggctgcgaggacgcgtttggagagggagccgggaggcctggaggccgggagggattcgtgtgcacggtttcccctcccg

SEQ ID NO: 335785 - DNA, 1515 bp, Homo sapiens
  chr18:31157631-31159146
  hyper
cggtatggcatcgcgtggatccacggtgacggctctttggtcctgcattgtttgagatgctgtaggtggttcaacattgtgttaagttgcacgtacattattagttctgtatccgaagacactggctctgtaccctttcaacaaggctctgggagttcccccagccaagcagagacagggttaaggcagtccaacagaggagagtagtgcggtgtgtgtgtgagtgagtgtgcacgcgtgagcgcacaggacagaggcgtcgaggtgcggggcggactcctacacaagttccaaaggccaccgtgtccgcggctttcggcctgagcgggacagcgggaagcgggtggaacggcctgcacggagtgggcagcgccccaggaatttgggggctgagttggagggagaggggtctcgcgagggtttcagggcgtggctggagtagggggcgcgcggcgagtgtgcacgggtgtgcgcgcgcgagagggcgagtgtgagcgcggcgagtgtgagcgcggtgagtgtgcggccgcgtcgccattccccgtgacgtcagagtgtattgttgtgagcggggccgagcggagcatccccggagctgtcaccgcagcggccgcggcggtggcgcagcgcgagccccgcacgagcgagcccggccggcgccgcccccgcccctggcccgggccccgctgctgccgccgcccccgcccccggcccgcccgccgcgcgccgccgccgccgccgtcgcgcgcccccacccactccaccccaccccctcgctccatccctcccacccgccgccgccgccgccgccgccgccgccgccgccgccgccaccgcccgcgcgcctccccccgcggagcgagtgcgggtcaccgggtcactgggtcattgtctccgcgcccgaaccccgagcaccccgtggaatcccccacgtcatcatcagaaccatcaatgagatgcaaacatgaaagacaagaggaagaagaaggaccgcacctgggccgaggctgcccgcctggtacgtaccgccccccacacgccgcccgcgcctcccgccggccccgccgctcgccccgcgccggtccgcggcggcggagacggccacttccagcccgagccgccgcccgctcgccgggctcctgctctttgttattctgcgggagtgggctcgcccgggggcccctgtgtgtgtgcgtgcgcgcgcggaggggcgcagcgattatctccgggagccccgcgtccgggaccgcccgggacacttctccccgtacttcgctctcggggctctgctgtgccttctccacgggtgaatttccgagcgctcggcgcagctcgacttccctctctgccgctccggagacctttgtgtggcaattaccactccctcccggcccctccaccccccggaatttcatcaataactctgtgcacagtctgtgtgtatgttcggcgtttgtgagttcaaacattttacacgtgcatgcatggtgtgtgtccgacacggacttgtggggc

SEQ ID NO: 335786 - DNA, 510 bp, Homo sapiens
  chr18:31739025-31739535
  hyper
cgggttgctgtttctacttcagcggcggcggctggagcagcgggtacaggtgaggttgccctggcggtgtccatagcaacgctggagggggtggcagggagaaaggcgccctccaccctgtcagcctcctcctcgcctcccccgacctgcaggcgcgctaagcgctccgggcgccgcgctccgcgagggggagcagtgctcccaacccgcgaccctccgcctcagacatcacagttgccgcggcaacggccggaggaggaaggccaaggcttttctcccgctgacgtcccccgccaccagtacccagagtgctggggcctggatgagatctgcgtccgcttcacccgagcatgagcttgggtctctcggaggagcaggagacgcgggctcgaagccgcgggcctgaccctgatccgtggatgccgccgccgccttctcctcccctgggtggtgggggacagggcctgggaggcacggtcacgccgagtttgagcacgtgaccttccaaga

SEQ ID NO: 335787 - DNA, 1378 bp, Homo sapiens
  chr18:31802067-31803445
  hyper
cgacgctgctgcggctccccagccccactggcttctgcagcgtgaggctgagatgcattgggctctcaatgccagtgcctcgcggcgcctgggctagagctttgtggccatgagactagagccaccccagaaaaaggaacaaatacacacaccattcgatagcgcctaaacccatctttctttgttgttcatcttctagctgcggctttatttgtggaagagggaagtgaggaagggaatgggggggcggggaggaggaatctccaggaccttatctacaatctcaacagtcgcggcaacgatctctgggagtgatcgaggcattcgggctgccccgtgcctcccgggcagcgatctaacgataaaacctgacagtgtcctggggaaaaccccacatccaccgctagcgctacattcgggctttatgccaataaggagacactgtagactatcgatcagactcgtctgctctcagagcgtgcggccgggcttccagcctggcctttaggcgcggtggcggcggtgggacacgcgccaggcgcccagagaaggacatgggacaatggcccagcccgaggacgccagacgccgccgcccgacccggggaaggaagctcctgcagccggtccgggaacccgaggcggggagggaggccagctctggaggtgcgctgccgctttaaaataaaggaccacaaagactgtacagtggggaaaacgcgcctggctaatgcgagtggggacgacttggggagggggttgaggaaggtagggggcacacgagccaacggcggctcacggctccccctctctcccgcctctctccttcctccctccccgccgggctgctccggcagacaaataacagaggaaggcgagtcactcaccgtggtcttgacaggcacgtagagcacttgcttggcgccgccgcctcccccgcggacctcgtccggctggcccagctggaagcccttcgatttgacccagaatttaaatttggcgttgtccgtggagctcgactcggagccattgaggagctggacgatccgttcgtattttttacgggtcaccgtcttggtcttgcctgagtccccgtaagtcctgaggcaccagtcctggaactggcggtacatgtcgcgctcgctctccatgttccccgcgctcggccgctggccggatgctcccagcgcacttcgcacctgttcaccctaggctcatgaaaaatgcagccccggccacgttgcagggatgcgaggtcccggccgcagcgggagcctgctttgggtgggggaagggatgggaagaggggaggagggtccggttgggcaccagcaatcaatgccccgtgctaccaagtctggtccattcgtaattgcaac

SEQ ID NO: 335788 - DNA, 629 bp, Homo sapiens
  chr18:31804522-31805151
  hyper
cgaggcccgcgcccgtcccggggagcggctctgccaggaaaacggcccgaccagtgcccggcgcctgggctgcgtccgagcccaccttcttccctcgtcgtcgtctcccagactaaatcccggaaagggaaagcgggatgtttgcgcccaccgcgctgtagctggtcctgacacttgcaaaatggtcagtggctcctgctcggccaggctgagtgtgtgcgtgtgtgtgagcaagggagcgagggtgtgcggtgtgcagggggtgcgctgtgtgtgcgcgcgtctccgggaaggtctcgcggcggctggagccgggactgacagcccgggcggagcgcaggcagctccacacgctaaacctctcgcctctcccctcacccccacccctcccactcccctctccttcccccaccctccccggccccttccaagctctctgattggccaatgggacaaaagtttctgtggagacggctgggcgctgacgtcacgggcagaattgtcccatttagggatcccgggggcagtgcgcatgctgcaggctgcaggttagaggcagaaggaggtagcagcgggcccggcggcagccaggtggcagaaaggagcacgcagcatccaggtggggggac

SEQ ID NO: 335789 - DNA, 907 bp, Homo sapiens
  chr18:32073526-32074433
  hyper
cgcgggggtggagggggtccgtgtgccgggcgaggagtgggcgcgaggccgggctgccgcgctgcccccggccgcccggtgcagaggagcccgccgcggggcgggaggtgcacatgacgcgcagccccggctgcgcagggaccgcagccgcccacggcgccggggcgcggacacaggcggctcggcgctggagcaagggcaggcgccgcgcaccgagcaaagtcaagagtggaagcgggcggagagcgccggcgggggcagggattcgcctcaacgcccactcacggggttcccacctgtgcgccggcgccggccgcggctagcgcgaagcatgtgccgggcgccgcagccaggactgcggcgcggcgcctccccgggcggcgggcggcgcctcaggcccgcggggcggcggtagcggctgctgcaggatgtccggcccgggggcgcggggccgcgcaggtaaatctcccccgccctcgaaggccttcgcagcgccgcagcccctgctgctgccgcggcgccgctcggggggtggctatggcagccggctccttcgcgtcgcgggttgagttgttttcgttgtggtcgctgccctcttggtcatcctctcgggctgagctggtgggaggtggagtgtctacctccattagggatgatactcacgtcggggaacagtctgaggggtactgactgggacatccgcgttgggttcctttgcagccagcggcgtcctttcgtgttgcagtgcactgcggtgcccgggccgatgcctgggtgggagtgggctccgggccccggggacggggggcggcgggggcgggtgggcacgggggtgagtgtcttcggcttttatagcctgttgcccacttcgaagttttctgctggacagagggcaggcgggaggttc

SEQ ID NO: 335790 - DNA, 1823 bp, Homo sapiens
  chr18:32556625-32558448
  hyper
cgtttgcaggtaattaattcacagtgtggcggcgccttttcaagccccctctgcaagccgcgccggcctcctccctctcgagcggggtcaaaccacttagtttatttcacccgctggcactttcttccctgtcacgaattcagcctggcttcctttggcctgagacagcgtcttcaggcgggtcggctcggacctgcccagtggggcgcccacctgcacccgcacccgcacccgcacccgcgggaaggggcggcgctggccggactctctcgggtggactcccggagcggcggcggcggcggcggtggcagactgcgagtcacgtgcgacagaggaggcggagcacggcggccgggtgggtggagaaaacaaagcccccagctgtcagcagaggaaggaggcgacagcgccggagcaggtgagtcaagtgcatttaaagcggtaccgccctggcgcaccccgacaccccctgcactgaagcagtccctcccaggccaggggctggctgcgcctcctcctgccgctgaggtctgcagcccgcggggctcggagcaaccggaaccgggggtccagagtctagcaagaagttgtgcaagggtcggctaggcggtctccgggtgtgcaccccgccgctctcccgcgggccacatctctggttcggtgccccagctctgtgcaccccaggaaagtggagggagggagttggggctgccacgctggcagaagcgaagtggactggttctgaggggtgaggctggggctgtccagggtaggaacacggcgttggtgaaggaggggggctcgcgactgcgcgaccgcggcgcacgaccctccaggctctagctggggcgccggcactgagagagctgggggctctggcaggggctgcgcgcttgggggcagatcaggaagtgcagcgcgctggcgctcgcgcgcttgggagcatcccctggaccccgggcacttccccttcggcagccaccactctcccactccgacgccggccaccatccgcgctcccgggactcaggagccgggtgggtgcaaaaggaagcgggttgttattctgcgcccaagcatctcttctgcagggagccccgggagcgcagggcgagggctactcagcgacttcgcactcggcttagtgggaaattcttcggtctacccttagaagggctatgcggaagccagaaatcccacaaagagccaggagaggggtggacgcggaaagcggtcccctctgaacctggggcgctcgataaagctgattttcagaccccaaaagggctagtgggtttggtcactcctccagtgacttcgtcaatacagtgccaagggcagagccgtaacctcggagaaggggcgctgcagccatttgatcaggagaagcctttgtcttaacccccaagcccctcctgctagtcctcgctgggtcagtagcgctgggagtaattaatattacgaacattagcctttccttcacctccgcaccagccaacactgctgtcccctccctgattgtcttctctatcacttgttcacatctccttttccaaaaaaagaagaacaaaaggaaaatagtgtagacccgctaggcaggaagaggtcactaaaaatactatcgtgctgtcaatgtagaatgaagggttaagcgctcaaacccgcgcccgcgcgcaccgaaacggaagaacttccttgattagcatagtatcgaccctggggccgcgctgcgaggcggaggttcggtcccagctggggtgaagtgtgcagaccggttgcgattgtggtcagacgcagcacctacttctaatctgaggacccgc

SEQ ID NO: 335791 - DNA, 593 bp, Homo sapiens
  chr18:32621215-32621808
  hyper
cgtggtcacgccgcgaccctgtgcgaattgaggcgaggtgatgagttagcgggttgccatggcaacaggctggccacgtgaccagggtgctgctgccggcgctctgacgtcagctgccagagggcggggccgcaggagggcggggcgcgagcgagagctgggagaaggcagtgagcgagcaggcggcaggcacggtccgtgcggagcaggcgagcgagcgggaagacgcagccaccttcctcaccagccagcccacagcggtttgttccccttctcgggagtgcgccaatgcctgggccgacccaaaccctgtccccaaatggcgagaacaacaacgacatcatccaggataataacgggaccatcattcctttccggaagcacacagtgcgcggggagcgttcctacaggtaatggggctggcacgagagcagcgccggggaccgccgtgagggcgcgcggaaatccagcccgttatataatggagcagacactgcctgcgacccctgctgcaggcatgcatttgtgaaggcggttgtgattatttggtatctgtttccatgtgtcatgttgggtttgcattgaggctccgc

SEQ ID NO: 335792 - DNA, 219 bp, Homo sapiens
  chr18:34823778-34823997
  hyper
cggaaagtctctggagcaagcgtggaaggcgagtgaagcggaaggtgagtgaagcgcgcgcagctcccagagggaagcgagaggcgaggatgacggcggcggcggcggcggcgacccgggcgacgcgaccgttcccgaccgacggcgtggcctccaccggcgtcggcagccaggcgcccgcaggtgtggggcgagttcggcctggcccttggggacaac

SEQ ID NO: 335793 - DNA, 820 bp, Homo sapiens; identical to SEQ ID NO: 239724
  chr18:35064995-35065815
  hyper

SEQ ID NO: 335794 - DNA, 936 bp, Homo sapiens
  chr18:35145982-35146918
  hyper
cgtttaaacaggctggaccggttcaagttcccagccagaccaggggtgggggtggcgagtgtgcgcgcgcggaggagggcgcggggggccgggaatgggcgcgctgtgggggcccgcgccacggcgggcggcggccgggggcagggcggcgtggggcggcggccaccgcgcctcccccgtcggcggccccgcgccgtggcgatggtacagtccgagacggcccccggctataaatagcgccaggcgcatggctcttcgggaggcgctgagattccgggcccggcggccgcggggagcgggtgtccgtgaggagccgggcagccggcctcctctctttgccttttgggggttctttttgtaatagcagcaggtgcaactttttgtattttaaaaatagtgatttttattttcgtgtgggtatgtaggggggctttatccaccaagctatgctctattagggcgccaggcgggcgaagcaaaggcagggatggcgggcggggcggcggcggaggtggaatgggcgcttttttcttccatctggctttatttatttatttagactagaaaagcgagccggcttggagggagtccgcccggggatccgagcgcgcattcatcagtgtcgagagaaaaaaagctacataaatatatattatgtggataaatctatagacaagagctctctcgcgcgcgctctctccctgtctctctgtgtgtgtctttctctgtttttttttcctcctcgcacccccaacctgccagagcagccccacatcttcctcccgcccggcatctaccgccacccaagccacctgccaggatggggctgggagctgtcgggccgcgccggggggcagagggacggggagtagagactcggggtccgacccccgccccaacccgcttccgaaggcggaaggtgggggtccccgtccc

SEQ ID NO: 335795 - DNA, 883 bp, Homo sapiens
  chr18:35146921-35147804
  hyper
cggcctcccccgccccggagagcgcggctggtcccccggtggctggcgggaggaaggtaggagtcgggcgcccctgcccgctcgcccgccggagggggaggaaggcgctgggcgcggtggccggtgagccagcgcgggggatggcttgatttgccctcgtctgctttacgggttcaaatagaatatatttttttaatcaccatcaaaagaataaagcccctgaatcgctatctgggttgccgccggaccgagactcgcgcggcgtgcgctgcccccgcgggtttcgttttcggcacctacagctcccgaggtgcgaggctgagtcgttcctgccgtggggaccgggggtcgagccgcccggtccggaccccgccggactccccgccaggcccactggggctggcatctcggctgcgcgggaaagggagtggcaggcgcggagccgggagcagggtccgagcggccccgcctgtaggggtgaatactggtggtgaacttggctggggtagcagattttcacgttaatgatatttacctgcaccccgtcctctctcatgtttgctttttcagggcagcctcttcgcttcagaagcctggcaaattgaaataacgcgcccgctcccccgcgggctgcggggctggggagctggggcggcggggctgagcggctggcctaacccccgccggccctcggctagccactttcgggtttcagggtttctcttttcttgccctcggattacattacgttactagaggatatgtctgcaattttaattaaagaaatgagaccccagctgcctgcaaacccaggccaaccccatttggtacaagcacaatacggagctctccagcgccggaggaggcccggaggcccgaggtt

SEQ ID NO: 335796 - DNA, 2264 bp, Homo sapiens
  chr18:42258983-42261247
  hyper
cgcccagtttcgagagcctatcacagctcacgtctgggcgcgcagtacccccccgacactgctcctgttgtgtcagatagtggcagtgttgagcccaggaatacgcgcggagcccgcggcgatccccgcggccgctcagtcttcgcggcggactccggcgcgcaggagccactgggccgcaagggcgccggggagcgggaggggcgctgggggcggcaaggggtcccagatcccaggccacgaactgttttccttttccccgggcaagagccccgctcccttcaactgacagaaattcactggggcaggggggcgagtggggagagaggtcgctcagggctcgctactggctgcgcctcccccggctctggtctgggaagcggctctgggccctccgggcgagcagcttgggcgccggcgccccctgcgaggaagatcgcggggtgacggtcggtacccgttcggctgggccgcgctgccgctccgatccacctcccttccgcgcccgcgccctcccccttcctttcactaggagtccgggattcggagagggcgcgggaggcaggcacacgggcccgaccccactccagcgctcaccggggacgcgggcgggcggcgacgggacgcggcgggggcgcggggcgggcgcggccatggagcagcagcggcggcggcggcggcggcggcggcaacactagcgaccgcgggcggacgagcgggcgggcagggccgccgggctcagcggaccgaactgcacagctcagcaaaagcgccctcgccctccgcgcgccgcctcctgcgagcccaaacccaccaacattttttaacgctccaacccatcctttgaagaaaagcaaaaaaaaaaaaaaaaaaaaaaaaaaaagcaaaaaaagaaaaagcattgatcggagagacggggatatatatatatatatatatatatatatatatataaaattttttttggctcctgctaaaattagcagggctcgccgcgcgcctgtgtgccagtgtgtgcgagtgtgtgtgcgtgcgggcgtgtgtgtgtgaatgtgattactccaggactcctcgggctccggagacgccattttcccccttgatatctctctccataaatcggtggcgcggcggaggcggcagagtcgggcgggaagcgcggggccggccggggcgcccgccgctcgccgccgcctccgcgcgcccgggggccccggcgccccccgagctagggcggccagctcgcggctcgccgtttgacagatgctcatcgccatggagttgccgcagcagcacctttgggggctcgggcgagcgacgggagccgggatctgagcgagcgccggggccagcggagccggagccgccgggacatgggtgagcacgcgcggcgaccttggcccgggagcccgggcgcccagcctccctccgcgccgcgggcccccgcactcccggaaccgggggcgacgtgtgtgccctgcatgcaaaagttcacgtcgccttgctgggtctttgactttgcacccggcgggaagggggagaccgggccgagggggcgggatgccggtccgggcgaggttgcaggagatgggcgcgattccggcgggccggcgggtgggcggcgatgctggctcaattggagtggctcgttggtggcggcgatggtggaagctttgggctggagggctgggagcttattgagtttcgcctaatctgatctaccccccctccgccccccgccttttgcaccctccctcggtcctgcagccggctggcggggctggcgggtttggcgttggtggagtggactcgggagggggagggggtaaggaaaggggtgggaaggcaggattttttttttctctctttgtaacttgcaggttaagtggagctagagagctacattgtaacctagttggatttttttggggggggaatgtatcagaatctaacgtgtcgttaatagaaagaagaacaggcaagaagtggtccagccggcgaaggttggtgtgtgcttgtgttgtgcctgtgtgttagtctttttcttaaaaatcttaatcaatggatttgagtctctttcttgtgctctctggttttgggactctgaaaagataggaattcccttaaaagcagacgaatgcctttttgaaagcacgcattgtgtgcgtttctagaggagccgtgggcttgggaatgaacggcaggcttccccgttcggtggtttccagtgggaaatcactccggaaagggaacccttcggtatc

SEQ ID NO: 335797 - DNA, 1433 bp, Homo sapiens
  chr18:43913838-43915271
  hyper
cgcgccccgcagcgggccgcagcgattggccgccggcccccttccagccgtcacccctccctccctccgccacccgcgcgcccgcggtccccgctgtcccccgcggttccggcgaggccgcgccgcgctgcgctccgctcccattggctgcgcgcgcctttgtgtggcggcagctgcggccccagcgcctttgaatgtcgagaggggccgggaagggagcctttccatgggccatctgtctccccgccagccgccgccccaccgccgcccgcgccccgcgctccgcctcccgccccggcggctcccgcagccccgccgccgcccgcgcccgcgccccggagccgcgccacaaagggcccgcgcgcagccgccgccgccgccgccgcgcgaggagccaggatggtcctggtccacgtcggctatctcgtgcttccagtgtttggctctgtgcgaaacagaggtatcgctttttcctttcggggtctgcttcggagcgtggatcgccgcaggcaccggggcgggggcgggcgccgcgggcggccgggggctcagggcacacccgcgaggacgcagggcgagcggtggcttccccccaccccattttagggggacccccgagggtgggggcggccgccctcgtgggagcttttgtagtgaagttagggtttggcgaatttgggtcccttcctccccagccccattttttattttttgcggcggacgtggttcccccaaatcacagccccttcccctaatacctagccctgtatgatcgaaaggagaaagatacatgaccgtgtgtgtgtgtgtgtgtgtgtgtgtgtgtgtgtgtgtgtgtgtgagagagagagagagcgcgcgcgcgagagcatgcttggttttctgtggtttgctttttttgaggtatatgtgtgttttgtgttatgtgtgttttgtattcattttttgttcattagtaccgatggctggctagctgggacctgggtctctgccctatcccatgccccagcccccaccctctcgtgggcacttgcacgattttccatcccatccttttttcgtctttaaccctttttgtgcatcgcccttgtgctattgccctgctcaccccgccccccgcaactgtctttgtatgacagttgcatacacgggttcaagatgcttgggcgcgtgtgtgtgtgtgtgtgtgtgtctgtatgtgtgtgtgcatgtgtgcgagtgtgcgcgcgcgcctcggagagtcagacctgcgctgctgtgccctccttgggtccggctggagcggggcgtccggcccttgggtgttgtgctgtgtgtgaggatgaggtgggaagctgcccccacgccaggcctttgccccgggcagcggttgacaaagcagcgggccggcgcgggctttgtttttaactgtgataaatggggtgtgtttgcac

SEQ ID NO: 335798 - DNA, 1197 bp, Homo sapiens
  chr18:44335955-44337152
  hyper
cgatacgattttgagccctccgaccccggagtccaaacaaatggccatagaactgtgggtctggaggacaccgctccgatccatgcggtctctccgggtattaaatggatttatcgtcagcctggttgcttggaattctattctgtccttcatttttcacagcggaacaaagttgtctggaccctccagccagcgctgggcagaagcaagcaaggatgctcttggaaacgcggtggcccaagcctaagcggccatgctcggggctaggagcggaccccacggccactcaccccggggcgctgcgaccgaagctgccgcggccactgccacccgggggctcgccggccggctccgcgcatcccgccctctcaatggactttcttacctcttaatgtagttcctgccatacaggatctgttgcagcaaggtcaccaaggcaaaggcgcagatgaagatgaagagcaaagttcggctccccaacaaatcccggttggccgaggggtccgcgtagcgcatcctggctaccgggcgccgcgggcgcggggtacggggcggccaggcaatgactcgcggggttccggggccccggggggcgcgcggccgacttggcgcctcacggtgcggtcaggcaggcgggggacttcgaggggcaaagtttctggttggcgcggccggagctgggggcatccaagcgtcgcaggcgctggggcggcaagcaggacagggccggtggcagggagctctgccgcggccaggggccttccccacccccgggtacctttacctccaggcgccggtgccgggtagccgccgatttccccgcggaggggagacgccaggtgccacgagccggaggcggcccctcccgccgaggtggcggccaatggggagcaagacccgggctccgtcccctgtgcgccccagcgcgccgcgcatcgacccctccagtccggcgccggatcgcggttgcccagcgcgctgtgccctgccgggggcgggccacgtttgatctccgggcccgcagcaagggatcgcgaaggttggcctccggttctgccgatagggacggggggagggggcgtacaaaacacccgcgcagtctggctaatgataggcgggccgtggggagggggaggggcggagcgcaaaacgccgggtttgaatcttggaattaaaaagagggcaggggctgggcgc

SEQ ID NO: 335799 - DNA, 605 bp, Homo sapiens
  chr18:44337479-44338084
  hyper
cggagctggacttgatggaagggagcatttgcgtgcggcgcgcagggcactgagtcaccatcgtggccgcgtcctcgcgctctcctagcgatttctccggagaaagcggagcaaggtcagccgggcagcccttcaaggacggcgcgccgctcctgcatgctgatggcctgcggggctgcctgcccgtgccccggcgcccaactcctacaaggaagaaattcaggggctccccgcccccgccacagtcctcttccccctccccagctgcaactcggcagccgttcgtcaaagaccctgttgtcaccgagacactgggaccttgtctcatccttggaaccactcgtaaatcttaggtcaggcagccggcagccttcggggaccacagtccccccaaagctttaggaagccagttactacatccggaaagattcgtgcttcagaacgcaagccagggagaataatcacagaaacgcaatgcgaatgtcgtgcctctcagaaattcttagcctgaaataccgtccccaccccccaacccggccaggcgacagtcctgtcatcctaacaccgcagaggctccaagcgctgggagtcgtgtgcccgcggcg

SEQ ID NO: 335800 - DNA, 1311 bp, Homo sapiens
  chr18:44773070-44774381
  hyper
gtccccgagtttcccgtcttcctgcagcagcctggaggagttcaggccgagcgggaacgcgcccgcgacggccggcgcgcggtcccggctgctccccttctccgacggccctcggccctggaggaaccggccgcccccgactaaggggtcgccgagtaggacctccgtctcctcgtcctcttcctcgtcgtcgtcagggtctcgaccttcctcctcttcctcgccctcggggggcttgtggccctccacgtccacctcctgctcttcttcctcgtcgtcctcgtcctcggagctgtcctcgctggggtagcagcagctggttcccccgggagacagaaggcctcggtggtgcgggtgctgggccagagggggcggcgggggcggcggcggcggcggcggcggggccgggtggtggcgctcggaacccggctcgtcgggctgcgggggcagcagcagaagcggcgacggcggctgcggggggtggtggtggtggtggtggtggtgagggtggtgatggtggtggggatgcgtctgggccgagtggggcgcgcccgccgacgccccgtgcagcttggccaggctctccgcgtcgtccttgccgcccactggccggaaggcgctggaatggtggtagctgccaccgcccgctttgcgcccctccagaaggtgcggatggtggggcgccggaacccgggagcccgcggggccagacccggcggccgcggcccctgccccggcagctgccacagagtccgcgggcggcgtggagcccgcgctgcagtccccgccgctgccgcccgggggcgactcgaagagcgcgtcgcgagagccggcgcccccggcaggaggaggtgggccggagcccgggccgttggccactacctgcgggggctgccccggcgggggcgcggcctcggcgctcccagcagcaccgcctggctcagccaggtccaggaaggcctggcgcagcagggccgggctttcgcctagcgcgcagcctagcgccgagggcggctgaggcgggggctgcaggtaggtgggcaccgggagcccgccaggggtccgcggcggccagaacatgcagaagggcggatagaaggcgtccttgcggcccgcgggccagaagaggccggacaagccggccttgggcgccgcgcccgcgccgcctgcgcccgcgccccccagggcctcagcggcggcacccgcatcctctttcttatggcacaagctgaaggcggcggccgcggcagggaaggtgtaggggtgcgggaagagcccgccgcagcccgggaacttctgcaggacgccccc

SEQ ID NO: 335801 - DNA, 644 bp, Homo sapiens; identical to SEQ ID NO: 239750
  chr18:44777662-44778306
  hyper

SEQ ID NO: 335802 - DNA, 599 bp, Homo sapiens
  chr18:44780644-44781243
  hyper
gagaggaggctggtcgagcccgagttaatcaatgctttcctcttcgagctgacatgcattttacacgtcaggactctcctcagccggctaattgattcaaattgttttattggttaaactggtgtcacccattttcatgatctatcaccacatggaggagagcatttccactcccatctccgttccgggcggctgcggttcacccaggccaaggacaggtaaaggagcccagacgcgggacccagaggaaaaccacaaaccgagctggcctcctcataactggagaggcgacgtctggaagtaagaggaggaggccggcacagcagcgcatatgggcttccagctacaaatttaaactggttgaagagaacccacgctcagccgggcctgggcccagtttcctccacctgggacacagtcggtttccgagccggcgttgaactccgcggtataggaggccacaacaaaacccgggtgggaactgtccgcggtgctgacgagatgcatcgttccaaagcacagcgaatcctactgtgttcaagtcgggaagaagcctcccagcatgtaattgagccctagattcggctctgggcgggctc

SEQ ID NO: 335803 - DNA, 172 bp, Homo sapiens
  chr18:44786792-44786964
  hyper
cggagacggggctaggggtgcacccttcgtcccggtcagctcttgcggctgcctacgttccttcacctgccaggaccgggaagttactaggctcgcccgcgggagtcgctgtccgagcttggcagtgctgaaaccgccggcgtgagctagggagctgcgggctgcggaggtt

SEQ ID NO: 335804 - DNA, 822 bp, Homo sapiens
  chr18:44787716-44788538
  hyper
cggtctctcctcgcgccctgcttctcggcttagcttgctcagatccgcacccccccactccccacctcagacctctctgacgccgcctgttggtcaggcagggcagggcgaggagcgcagcgccagccccagccccatcaccccacccttcacccctccatgcccagtggtcgaaggaggacagatatgaggcgagggctggaggcctagtaattgaagtaggaccaggggcaggagggagcaatccgccctgggggcgcgcagcctgggccggcagcttgaactcccttgccagaagggttgtcccaggacgcgcaggtgcgcttctcctgtgccgccctagggcagtccactaggagggggcaccatttccacactttcccggggaacgaccacctgaggtgagatgagaacctattgtgcgtctccaggaggggagctgggaagattggatacggaagactgagcccttctcagcatctccaggaaggaaagctttagggccaaacataggctgctttaaaaaaaaaaaaaaaaaaaaaaagttagtcgaatccgtctcataacgaagtgtcagactgcgtgtcagggagaccgcgggccaggggttccagttggagcccagcgttccaggaggggatgaagaccgagttcggtaaaacagcgtggtattacaaagtttgcctttcaggctccggcctagctccttccttggcaactttgcaagtgccggcaaccctcactggatcatcctacccttggaacttcttgggaagcctcggtttagccttgggtccaccaagacttcggcgaaatggaggc

SEQ ID NO: 335805 - DNA, 927 bp, Homo sapiens
  chr18:44789528-44790455
  hyper
atcgagggagacagcgcaagcaggtcagactcgaccggttcgcttcctcccacccctaacttggcgggatctgagaagaaagttcccgcatgtttgagcgtcctagggcttggataggacagacctcgtaggtccccaagctccagcttggagttcccaaggagaagggaagcgctagtgctatggagcgaggttttggtgaagaaaagggcctcgcgcccccttagtgccgtcgctctggggaatcttctttcgctgggaggatgaatggggcgctcgccgcggctcatggcgccccctaggagcggcaggaaacttctcctgcagggcagcgcgggccgggctccgcctccggaaggcgggcggggagggtagttgctgggggtccctaggccgggccccaggacatctaggacatgccgggggctgtttgctacggcttcatcccggagctcctgctcggggttgccggctgcctctgctggcgtccctcttcccttcctttgcgtaagcggcaactcctccaggaagccaggggaaggacgggatttcctctccacgtagggtagtagatcgcatagcccagccggatcgcccagcaggagtgcagggcgcgcgtcggggtgtctccggcttgtgggtgtgcggttcgaaaccttagctggggtgggggaagggatgtctttaaccttctgtctaccgtccccctcttccctctctcagcctagaggcaggggatgctgcggaatcagactgggtgcaccaaggcggagggccatgccgggcttcgcccttcctgggtgtcccggagtccgttccggagaaaccctggcattgccagaactgggtccccgcactcactcctccataattcgcggcggatcagcgggaggagggcagagggcgggggcgaggcagcttcctggc

SEQ ID NO: 335806 - DNA, 282 bp, Homo sapiens
  chr18:45275529-45275811
  hyper
cggtgtaattgctctaaattaccctcctaacagagaacggcgctcggagccgggaacgcagctgccgccgcccagccctgagccccgcgcttcgcgcccgcggccctgagctctgctgacccctggcggccgccgcgcgccgcgccgtctggactgcgaagggcagccgcgcgaaacccgacgctctggcgccccctggtgtccgcgatgccgcactgacccgcggacggacgggaggcctacggatccaggatggctccttcgactctccccacgcccccc

SEQ ID NO: 335807 - DNA, 607 bp, Homo sapiens
  chr18:45534410-45535017
  hyper
cggccgggagtcgggtctctgccagcccagcgctcggaatggagctttgtggggctggggaagcaacctttgccaatgggaagggggtgtcacagcgcctcattccctcccagcttgcgctcctcggaataatctccaacagcgtgcctagaagcacagctgcttttgtttcgggcgtcggtgcttcccagaatcccggtgcccggacccagccgccgaaccgaccccgccccgccgcgggctttgttccctgcgctgcgcactgcgagcggcggccacgcgggggcgctgggccgggggcgggggccagggctgggggtggggcgcgcccccgggccacctcccccgcccctcccggctcctccccgctcctcctcccatgccccggcccccgcctcgcagctgggctcggactcaggcttagccgcagtctgtgagcctcctccccgcacctggccggccaggccagcccagcctacttgtctcgctgcgcccggctgctgcctccgctccaggggtcggcgccgggacctcctcctccgccgccggcccgcccgcgtctacaccgcacacccgtggcgcgccctccaggggcggtttttctccc

SEQ ID NO: 335808 - DNA, 1179 bp, Homo sapiens; identical to SEQ ID NO: 239758
  chr18:45662346-45663525
  hyper

SEQ ID NO: 335809 - DNA, 796 bp, Homo sapiens
  chr18:45687770-45688566
  hyper
cgggatgagaggaaactgtaaaaccaacggggcggattcacgaaaaattcccgagcgtggtgagggtagagggtgctgggcagcaccccagttcgccgggcccacgctcctccagttgcccggcctgttcagactggttcgcccacctttctctccctgccggccccactcgcctgacctctgagaaagcagaatccgggacatgaagcaaccacagccgctccgcccggccacaagcgccccggactccgtgcctgcccgcagcccccttcctgcagcgttcactcggctgcccggcccggcccggcccgggcgccccgccccagccccgccccgctccggaggcccctcctctatccccgccccttcccgggcgccccgccctctccctccactctgcgcccccgcggcctctctctcctcctgcgggagccatcgccctcctcccgggcgcccctccccgcggccgcagcctgtttcccgggcctctcctccgcattctcacatcgctccagctcgacctccccacccgcccgcctccccgggaggccgcggcccggcgcggcaccgcccctgcccacggttacccggttaccgcctgagaggccggcgcctgcccgggcgggcgggacccgcactgaccccgcagggggcgaggcggggctgagaggggcgaacgcagagccagaccccccgccgccgcaggccgcccacctccaggcagggcttcgtgccagacccggctgtagttatcagctgggtggagggcagtgccagctgcaggcgtccccgaggc

SEQ ID NO: 335810 - DNA, 2659 bp, Homo sapiens
  chr18:45934527-45937186
  hyper
cggccttgcgcccgcgccgcggaaggttgggtaccagcctccacagctttgcagattgcaaagataacgggagctgccgcttcgcttttctttggctcctcctggccttcatcctagtaaaaccagacaagcaaccggaaaaacaaagcagcacagcggccagagacaattcgctttcaacggagcaagagacgtacacaccttgagagaagacgcacgcagttcccgtgcgtgtcgctgggaacagacctcgcactaccccgcgcggcgacaggcaccgggccaggctcggcttcacttgtccgaggcttggaggaactgtgtgcgtgcgcccatttcccccagcttcccgacttgacagcagcaaggatctttgagtcctgcatgagcgacacctcgggcaaggactgtactctgctcagatctcatcgagaggtgctggatcccagcctttccagctcattttccaattttcaagaaaagacagcgcgaagtgagactgcaaaagtcccaggaaaacgtcactcaccaaaacgctcccgcgccttccaggcagaagtgcggtaaaacttttggcagaaaccacctgtggctgccgacgggcccgccccgctcgggcccgcaggcgccgccgagccccgggccgcacgcgcccgcagaagttcctttccagccccgcgcgccacttcgctccgggccgcggtgccagccaggaggcgcggcgcccgctcgctggctcgctctccgctggctctcccctccctccttccctccctccctcctcccgcctcctccgttgcatggctgccgcacggagcccctgaatagccaccgcagccccccgcctcctgcccaccgcgcggagggcgcccctgctccagccggcgccccaaggcgcgcggaccgccggcctcctagcaacggcccccgcaatcgctttccggcgcagcccaagcaaagccacccgcccgccgccccgcgacctcccgaactgcctcggctgccgaggtgctgtggagatcgcgaccccggcagccggcgcccgagcccggcgcgcgaagccgctcacctccgcgcgccgccggccctgcgcgcctcccgcacttggctccgggacgcagtcctggcgtcctccttcgccgccggtgtccgccggtccctgcgcgcccgagcctcgccggccgcgccgctgtcagagtctcgtggcggggctgcgccggcgggtatggagctgagcggcggcagcgggcgagcgggcagctcctccctccccgcgccgcgcctccgccctccccgcgccccgcctcccgcgccgcggctgtcagccccgcgccccgcgccccgcgcccgcgccgccggctcggggggcgcacagggctaaagggcccggatgtgtgcggtcgcctgtcgctcgcgcccgccccctccccgccgcgcggcacatgcacttgctgcgccgcagcccccgcccggctccgctaatttctattttgacagtaactgtggcgagtgggcggcgcggcggggggcgcccgggactggcggaggctgcgggcgggagtcaggacccgacgcggaggcggagtgggggggccgggcaccgccaccaaccgctcggggctccgcgtcttttctctttctttccttttttctctctgcctcctccaggatttaaagggacagccccggcagaggcgagggggccaggcggccgccgtttctccggtctcctgacgccctctgcggcccggccggacccgcccgcacccccagcgcaggcttgggaccgccgggtatttttaggtccacacccgacccggggcagcggtgcggcagagatgggctctgccgacccggggcagcggtgcggcagagatgggctctgccgccccggcgcacggctatttttacagagtccgatgggggaggaaataaaacaactcggcaactgcttttctacccgaaagtcgggagcaaggagtgggggcgagaagttaagtttcccaaatgctctcggcactccagcgagcgcaccaagacgcctagccagcacctgaaaccgcaagcttgccgcaccccggggcgccgaatctcagcgggcaatcgcgctcggcggcgctgcggcccggagtccccacccctctggagccttgggccccgcactccgcaccccacacgccggggagcagccgctggccgcccgtcactccccgggtcggcctggaaggcggccttccgaagcgtccaatcaccgcgcaacaatgccaacgggcgggcccggggagggcttgtccccgccccgtcccgccgggccccgccccctcggagtctgtcggggcaggagaatctcgctgggacgccgagtgctcagcggtgctggaagccacgaagggccagtgcgaggggaggaggaagggtcctggccctggagagggcgtgagcgttctcgggcgaggcgacacttgggcagatgttccctccagctacgggccggggaaactcgagctggctttgcctcctacctttttgcagtccacccctctgcgctccagacagacataggaaccctcgccctccttggtagtacatcggaggcagcaccctcgcacgtcagcgggtcctctccggggctcctccctcagaagcgggaaagtttgtc

SEQ ID NO: 335811 - DNA, 556 bp, Homo sapiens
  chr18:46502500-46503056
  hyper
cgccaggcttggccctcagcgggcgctgtcagagggcgggcccgcgggagcggggcggcggcggcggcggcagaggagcgcagggcgggcggagaccgtcggggtcacctctccagccccccgcggtggccgagccacccgcagttgcgctcgaggcgccgaggcggggtggccgagcgagacccgggccgggcgcggctcgggccgcacagccgcggcggcggctgcagacctgtaaaccttaatgacagcaatcttgcccgtctgcgcctctgactcacgtggtgacccagcctccagtcacccggcggccgccctccggcctcagtttcccccgccgccgaacaatgaagccactgtgtcgccgttcatttctgagcgccgtttcacacgcggagcgccgccgcctccctggggaagggaccgaggcgtccggcttttaattatccccggtgggcgggcgtggggaggccgcgctctgctggataattgaaccctgggactattccctcgtcagcccaagctctttatcttaagccgtcctttcctcttcatc

SEQ ID NO: 335812 - DNA, 1669 bp, Homo sapiens
  chr18:47087075-47088744
  hyper
cgaggtcggaacaggatctgctggctccggctcggtttcctcgcacaggtctctccagctggatcctcgacgctagggaggaaggggcgcgggactgctgtgggggttttccctccccaggcaggggcaggacctgttccgggcgactgcagggttaagggtatcgtcttaaagagccggatcctcccggctggagcgaggctggatggcgggacgcagcctctcagcctctcgtacccgccctgcgtccgcagtggttgttggcgcagccgccccgtcggtgttccgggctcagtccccgctccccagcgccagacgcagactccgggccaagttctccctccgctcgctgctttctgccgcaggacccggatcaataaagggaaggagagccgggaggaaatgatggagaacagagagaaaggagatgcttgatttcactcgccaaggagtgagtgctcatcggcagacactgggctctggccacgcgtcttagactccaaatctcggctcactggtccctttgaggaggtcgcctggtgttcccgtagccctccaccccaccgtaggagagcgcctgccacgagctccgcgcctcgctaagtgctttgctacgtgaactcttagttttcccaacatccctaagccgccgatacattatcacccacgtattgcggacgagagaaccgcctcggagaagctggctggctcgcttggagttttgcagctagtggcggagcgagcattccgagcaggtactgtgcgatcctccagcgccggccgcagctcacagccccttagctccgccgggttattgtgcggccgcgccttctgcacctgttgcggccctcgctaggcgggaagggagggagaagaggaggacaaaggggatgaccaggtggctctcccccgacggactcccggcccagggagcggatagaccactcccagagagagtgtggctttgagccttggagaggatgctctccttctccagggatcgcctccccagcggacgcagagtttcagggaaatgtccgcctccgccacttgggatggcagtggggagaggaggatctgggtgtccggaggagggcagtgggagaaagctggagctgctggagtcgcagctgcctgcggagcgggcccgggaggaagcggggccgagcgtgcggcgtccacgcggtgagtgtgcagcgctttcattcaaactttctccagtctcggttccggcgtcagcaaggtgtgaccaatcagagcccagagacgggaataaattatgcaaatcaccatctggcgatgggtcagatgactcccatacttttaaaaactacctctataggagcgtgacagcagcgagtccttgcctcccggcggctcaggacgagggcagatctcgttctggggcaagccgttgacactcgctccctgccaccgcccgggctccgtgccgccaagttttcattttccaccttctctgcctccagtcccccagcccctggccgagagaagggtcttaccggccgggattgctggaaacaccaagaggtggtttttgttttttaaaacttctgtttcttgggagggggtgtggcggggcaggatgagcaactccgttcctctgctctgtttctggagcctctgctattgctttgctgcggggagcccc

SEQ ID NO: 335813 - DNA, 800 bp, Homo sapiens
  chr18:47339411-47340211
  hyper
cgattcacccggggagccctgaccaccgaggccgagcggcgggctcctgtgcgcagctgccccgcagcaggcgcccgcggcctatggcgccgccccattttttctaatacttggactcgaactagtggggtcactgttaggcgaagaaaggaatgacctccaaggtcacatgcaagcaaactttggtctcaactaaacaggaaattgcaccgaaatcgctgtcgctagcgccttacaagtaagggttttctccttaacccaaacaagcctttcgggctgggtttttatcacgtccgctccaaaaccgaggaggttgagtgaacttcaccccacgaccccgactctccgcggcggccggaagcggaggcctggcctggggagggcaggaccccgaggggcgaggagaggaggagggggctgcgctcacctcggagcagagccatggcggctgctgggtcgtcggcggcgcgggtctgtggtgtgggggacgctgagcggccgctcgcaatcacccagatttcaagagcgtgggtggcgccccgagagccacgcccctgccctttcacctacttcctggggctccttggcggggtcccagcgtaagatggtcctaccccacgcgtagcgctgcccgcctcaccccagcccgagggagcccaggggacggggctcggatagaccacaacgcgccttgagagcggactctttcctcacatcctcatttttagattttctccgtttccaaaccgagagaatttggtttgacacctctcacccatcatatcctagccccgacaggc

SEQ ID NO: 335814 - DNA, 1772 bp, Homo sapiens
  chr18:47719964-47721736
  hyper
cgggcgggtgtcccgggaatcgcatacccacgcaacgcgcgtggacaccacacgcacacacaactctgcatggaggcgtgtgcataggcactgttaaacgtgttttggccacccaagaagacgaacaggaaaaccaggcattggactatccaaaacttgttttcttaaaggtgcatagggcacatgtgaagaaaaggcctttgcccctctcactactgactccaggttgaaactcgaggggtcccgggcggctgcagcgctgccgcgagctcccctggaagcggtggcttgtccctaactttaaccacagcaactgctgcggaacgcgggcgtctccgcccgggctgcacctgttcccgattcggagcacccagcctcacacatcccttctgaccttgaaggcatcctgaaactcacaccctgctcccggttcgactttactccaaccccctccccgcagtcactgaagccctctttgtaccaaagaggccgcgtcaaaacatccatccccagcaaattcacaatgctcttccctggggtctccggagataacggcgcacccctctacccattgcttaccctcactccatccagccgccgcgccctcacgccaggttgtctcctccctctccaccaagtccagaacccccacctctcccaagtccagggttccctgttgtgggtatgcgggaggaaaggacgcctcggaggcgcgccctcgagagccggcgccgcagagcccctggggtggggtccacggcggggacaggggacagcagcgggagcaccgcgggggcccgtcccgcgcacggcgctcagagctggcagggtcgccctgccgttcggggaactcggttggagccgagcccaggcaacgaaagtgaggggcgcggcggggagggggcgacagccctggcttggtgctgagccgtggcgctgcggaacctctaggagccgggtggccggtcagtgcgggcgttcccggaaccgccaaactttctccgccaaccgaagttagggactccgaggacagtgacgaggaggacaccgcggaggggggtctcccgtcacctcccgcctccagtagccgagggagaaggcgaccctgagtactaggtggccccgagcgcgccaccccggccccggggcgcctccctcgcggccgcgctcacctggctgtagagctcgcccaccgacatggcccgggccgggcggggctcgggccccggctcctggctgccccgcggctctcagtccgcggctggcccgcctggcgccatgttcccgggctggcctggagtttctcgatcttctcgctcttctccgacctgccccgccggcttcccgcaggcgccgcggccggctcgctcccggcggcgcgacctttactcccgccgcggcggcgcagctacggccggacaggagttgcgagcgccgggggaggaggccgcgccgcaccactcccctcccaggtgtggggaggaggcgagggccggcgaggagggaggacccgctcgcgtcagagcggacggcccgtgcgccgccgcgcctctgagccctgccggtgcccggcccgacgcgccctcccgcgcccccgctgccacctgggcctccgggccgggggcggggcgctcagagaggagctccgggaccggcgcgggccgccccctgctggacgccgcgcgcgcgcaggcacaggtgcgccccggcgcccgcacctgccctgccgcgctccgcttccacccgcaccgggccccgcggagtccggcatg

SEQ ID NO: 335815 - DNA, 396 bp, Homo sapiens
  chr18:47792569-47792965
  hyper
attcaacccactgcatcaggcgacacccgttcccctcgagaaggccccgggtgggggccgaagtgggataggccaggcctggagtgcggagagatggagaaagctgtagggtctggcagacatatcctgtgcttaccacgatcaccactttgggggtggggcccttaacctcccgctgtacggtgccaaaccgctggctgtacattttcgagtccccttcgggacgggggcggcgtccgccgcgtttcccccaaccgtggcgacctgcgggacccgcttccgcgacgcagaagtctggttgccatggtgcgcctcgcgggattaggggccggtagaggtgggcgggtcgggcggaagtcggtctggtcaccatgggggccgcagacgcctgcactc

SEQ ID NO: 335816 - DNA, 204 bp, Homo sapiens
  chr18:47813485-47813689
  hyper
cgaccctccatcgtggcgcctcacagaccccgcgtaactcactgcggacttcccatcgcggttctccacgcacccctccctgtttatctcatagacccacctggcacccgcacccacccccagtcgcggctgtccacggatacccggacacggactcctcgtcacggctcactacagaccactcaatgtgactccttacaaccc

SEQ ID NO: 335817 - DNA, 693 bp, Homo sapiens
  chr18:49868095-49868788
  hyper
gctggcggcttcgacggccaaaagaatagaaaagagcaaaatgactcatgataaggtccacttgttttgcgggacctcaccgcaagtgtagatgggcactggggtacagtgagcggtcctggcaaagaaggagaggagagcggctggatgagcattcagagagcccttcggaaacgacctttttccaaatccaaaggaaaaacaggctcaggcagagaccgggcgttgagtaggagctccccagttcgtgcctgggaaattaacagggaatggcacatcaatcgcggccaagcccccagcctccccggagtccgcagctccggctttctcttctctgctaagtgctgcatggccaagggttgcgaacgcgagcagaaaatgcgcctctcactgtcgcgagggattcagacagtcaagcgccaaggcagcccgaggctccccaaagcctcgctcggccgcacgcgggcaggaatctgcgcttgcactcgggctcagctcctcatcttcctttggccagagacagagagagcaggcaggaggggtgtgtgtgtgtgcgtgtgtgtgtgtgtgtgtgtgcacgcgcgctgtcctgtgatgagcgcgtacccgcatccccgcgcttagccgctggtgctccctccctccgtctgtccctcccgggccggtcccctcctcccctggctcttctctccc

SEQ ID NO: 335818 - DNA, 530 bp, Homo sapiens
  chr18:52495540-52496070
  hyper
cgagaggagtgtgtttctcactgcagcagttgagtcaccagcaagacttgcctgaggtgagctccgcacatccgcgttgggacttgcagacacgccttcttctcacacaaaccttacccagccccgccgccgcggcggactccgagggtggtgccaccagccctgccactcgcagtcctgacgggcaggggctgcggaccgcccggccttggacccatccggagccacaggttggaggagataagtagctgtccccgtgctcatcgccctgtggagcagatcctgtctccttgctgacggtggagcccgggagttccagggcttgggaaggggaaggaaacctctctgaaatctgacacctgctctcccggcaaggaaacttcgcaggctggtgagttgggaaggcgggctgctgctgctggaacgcgttcccacccacccgggtgctgcagcgccggcctgcgccgtgggaagtgaggcctctgtgtgtgtgtgtgtgcatgtgtgagtgcgtgtgcaccttcgatcgc

SEQ ID NO: 335819 - DNA, 426 bp, Homo sapiens
  chr18:52988851-52989277
  hyper
cgacaataaaacttgtcaaaaatccccctcgcagcccgcattcgcttaccgctttcccattatagtagtacatcaaagagttgccgcccatgcccgggattgtgtatgcgcagtacatggtctcggattcttttttctcctcagtaccactctaacaacttttatttcaaactcgctgtcccttttttcacaacaattccttcagttgcattttcccatatggccgggccaagcgtggtgaatatgcaaagcaggaagagaccattcctggcgggcgggggaggccgcggcgctgctgtcagacgctcaactttgcgcagcggagctggaaggcagcccggccctgatggagctcgaaatcctaatgcatacgcgagatcgattcaacttttccgaggggtttttattagttcctcgaataatgcc

SEQ ID NO: 335820 - DNA, 351 bp, Homo sapiens
  chr18:52989603-52989954
  hyper
cgcagctgcctgagaactcgactcggagaaaggggagggaaaggggagggaagaaaaaaaaaaaaaaaaaaaaaaaaacaccacgtctctgacctcgctcaaaaggagagagggggcagtgttttctgactgcttggtcaacaacctacaaaacggggttgcggaatgaaacagagtagcagtgcggcccgccccgggctccgcgggccccggcctccccggagctggtgggaagcgcggccgcccatgaacttcacctcgccccgccgcagacagccgcatgggcccagagcctacggaggggctggggcgctgctcccctcgctggcgctgggcgccccaagggcgcac

SEQ ID NO: 335821 - DNA, 1837 bp, Homo sapiens
  chr18:53254628-53256465
  hyper
cgatcaaactggtaacatccactataaaaccaaatcagggaaagaaaaaaaaaaagccgctcttcagcgcatcattttatgcaacaggaggtagagcgagaaatgaatggatcacagagaaaagagaaactactgagaacgatccgatctcaactttccccccaccctgcaccccacccccctcgcacactcacactcgcacacgcacacacactcgcacacaccactcccctccgcttttcaaagtagctatcaagaaattaaagatgagcgtctctggagtgaaaacacgtccaaagggggaggggtggggtgacagggttggggggagcggagtggagggtcgggtcctctaattgtccagcaccctaatttgtgaaagaaaggggttataaaaattaaagtcaggcccctggcaaagtcctcggtccctccgagggggcatcaaggggaggggcgggggggctggcggcgagggggagggaagcggcgggaggggaaggggtgtctcttctgggagcgccgggcgccgggagcccgcggcgcgggaggcgcggagccgcgtgcggggccgccgagcccgaaccccgcgccgccgggcgcctccgccccgccgagccccgcaggcgccggtacctaccgcccgcgcgcgagaaggggctctccgtgcaccgccggcgccgaggcggcgttcatgtctaaccgccgccgccaccgccgccgcctgctcctgcgcccgctcccgcgcctgctgcctccccgccgccgccgccgccgccgccactacagatccgcagacacacagccaagatccctgactcttaacaccaactctcttctccggggaggggaggggacggagggaaggggggagggggaaacacgccgaggcgcacggaattgcaagttcagcaaagaaatgggtgggggggctccggcggggagacgcgacttgctccgggtcgggcaggctaggatgcatccccctcgcacccaccccgaggggaaaaaaaaaaaatctcaacacctcccccgcctcgccaaaaaatacaaacgaaaattcatcgagcacctcatttttcctcagatcgtcagttacaatctgaagcctgaacagttcagtttttgcccgttgcatccctcggaggcactttgaaatttattcgagtttacatcccctcacttctttctttctcttactctcgttccctctcactcacacatccacacacggcaaagcaagtttatactaggctgcaaatacacgtgatgcaaaaagactttgccaagaggaacaatatttttctttttcgtctataaatcaagccacattttcctggggagattttcgtttcggtagttttgcgttgggggcgaaatctgaattgcatactttctttcccctcccttttaagtcacagaatagtataactgcaaacttcgaaaaaaaaaaagggcaatttttgggggtggatgttgttttgtttttgcacttgagttcctaggcacgctaagtccctgttcgccagcactgtaagtttttaattcaacatttaccattataggccctgcatgctcttaaaacatactttttcacatcactttttaggataaaatttaagcttcataattctatcgtttcgtaataacaagcgtgctttatccggtatatgcaacataagctattttaacgtgtgtttgaaaaaaaaaacacacattctacaaatcctggtattgctagatgtgcgagtacatacacaaaatgcatgcacacactttttcccattggcaattatttaataggttgtcccttttgttttaataaaacatcgggatc

SEQ ID NO: 335822 - DNA, 377 bp, Homo sapiens
  chr18:53256998-53257375
  hyper
cattgtaatccattcacatccgggaactgcgggcttataaagagaaggagctgcggccgcggctgctcctccagacaatgactgggaaggggcggggcgggagcaggcgaccatagagtggtaaacagagcgcctagagaggcggccaagatggcggtgctggtcgaccacgcctcctccgggagcggaggcgggtggctgttctcgggtaggcgtcgcgcgtggggcggcactgtgggagttcccgaggccgaggtcgttcgcaggccccatttccctgcgctcttattcgtgttgccgcttcttggccgtccttgctctttgacacaaaagtgtagtttcggcacaaatttacaaattaaactccacagacttcc

SEQ ID NO: 335823 - DNA, 1079 bp, Homo sapiens
  chr18:53446783-53447862
  hyper
cgacttaacgtttcaggaatatgaattctatgttcagaaaatttccccacactcttcttcgctggcacattcactgatgtagaaaatgccaggagccccgggggtgtgatgtttccggtggataatgtctcccgttccctgccccggggcccagacagttggtgcttaagcgtctacaatgtagagtttcctgcattttcctcgggccgccatttgtctacttgtcccatccaggacatctccctaaataatctctaagtggaaaaatcacggtcctctaggagatttatccgggaacgaacgtgcgtggggcagttcaaattcctgagctcagatttcgtttcccgcggtcagatggtgcggtcggtggggcccgagggatgcgcacagctgtgcctgagaggtgctgctctcccgccaccgaagtcgctgggaaattctgctgcactgagacattttaatgtcggatgttctaatcctgcgggcaaaaaaaaaaaaaaagtttgaaccaggtactgggcttttgtcacggtgaaccccacccgcgccccgcgccgtcccttcattcactcaggcgaggtggcttggatttgcacctcgttgaagaagcctcccatgcgacatctccgccagcaccccgcgcggacttggctgggcggcggcggggagtcagcttgtcaccgcacggcggccgggaccgcagcccctgggtgcgcagtgcgcctctcgctgcgccctcctagagcgcgggtcccgtgcctgtgcccggcgcgacgcgatctccctgctagtcgggctccgcgtgctccccgcgcttcccgcagcctccgcgcagcccgcagcgccctccagccccgcctcgcggccgcgggaacccggcgcctgcagccccgcccggaaccgaccgccaggcgctgttgccgccggccacgcaacgcggggcctctgcctggcaccagccccaggtgccttgtctcgggtcgtgctgtcgcgcgacactggggacccaacaggccgccggctactcagctggccccgcagcttccctgcggctcagcggcctcccacccaggagaaaa

SEQ ID NO: 335824 - DNA, 278 bp, Homo sapiens
  chr18:54789043-54789321
  hyper
tgtgcgttgctgagcgtggcctgagcccggtcagcggccgggcgccggtggcagcccccggtcccgcggcgaccccggcccaggaaggagcccggtagggggtgcgctttccctggcctcccgaggcgggatcggggccgggctccactcggtgagaggatcctgccagccagctgggtgaaagacccacagaaatcccgaactggctgcaagatgcattggtagctggcgcctttagtcgggttcctacagttttgcagagaagtctatgagtgatc

SEQ ID NO: 335825 - DNA, 1262 bp, Homo sapiens
  chr18:55020285-55021547
  hyper
cgggaatttggttgatggggtgtttggggaagggaaggcgtgggggaggggtgttttggcctctccgagactctttgggccagataactgcgcggtccttccactcctctctctaattctcccttccccctccctgttattttttttttaacccaaagcccctagaagccgctgtccaaatcgatgtgattgcatttctcgtattcttcctcagcatcccttccctcatttcagaaatgggggttgggggaggctttcaggagggtgagggtggagggaaagacggtgtgtttgttcgggagggggcggcgagcagagatggacaggcgtgaggggagcgccctccccgcgccctgtccgcagactccgcgggccgggcccggggcggtgctggcggtttaatggcgcaggcgccggactcccctcgcgccctcctcctttactcccccacgcctatcaaaggacacgcgggtttattctcaggaagcccctggggcgttctctctcaaccctttcccccgcagccaccgccccccaccagctttccgggatttctgcaattcccccgccccctgcgggaagcgagcctcggaagggccgcccaccctcgccaggtcggagtcaccgctccgcgctgggccggcctgtgaaggctccaggcgcagcttgacgccgctctgcgagagcccccgccccgctctgtgaccccgggaactctcccagcagggcctcctgacgggcaggtggcaactacaaagtgccacctgtggtccaagctgggaccgaggcgaggaacccagaggagcctcgcctggaccgaggagcggagtaggccggcggcccccgggggtccccagccaagttataggaagtgaaatcggacgtgggtttgggaaggaagaggttaaggcaggaaccacccccagactttccctgggtctccggtttcctctgccctttctccaaaaacaattctatggggctgcaaaggcgtagcgggtcaggctggcggggcggccgctgtccgcggtgctgattccctggtcctcgcagcgccgcgggctccagccctgcgcccggcgtgcgccctgctctccgcatgacggccattttatggtctctccggcacccggagggatggacaatgcagatggggttccctagttttctttttttctctcgggtgtgtgtgggagcagagggtggaccaaatgagaggggctccgggacggaacggagcccgcacgcgtaccagccgccct

SEQ ID NO: 335826 - DNA, 979 bp, Homo sapiens
  chr18:55102427-55103406
  hyper
cgagccgtcagccaaacctgaaaagtgcggccccgccccctccacagccactggtagcttcccgtggaaggcccgcctcccggggcagctgcggcctcggagtggttgcgcttggcgcccgtcgggcgtggccccgccccaggtccgggagggtaggttggctgccccggcgagcggcagagcccttctggacagctcccgctcacccaaacagaagacgtcggcgccggagcgggctcggacatggcgaggctgcgagccggcccgagcggcggggcccggtgatccctccctccctccccgtcccctcccctctcccgcacgcacgccccgtccgcccccaccccgcccccaccccgggcgagcccgcccgcagcccggggcgcacacccgcacgcgcactcctctccactcactcccgcgcccgcccccactcccgcagccgagccccgccacgcgcgccttgcccgcccgccggccgcccccgccgcccccgccgcccccgggccctgatggactgaatgaaggctgcctacaccgcctatcgatgcctcaccaaagacctagaaggctgcgccatgaacccggagctgacaatggaaagtctgggcactttgcacgggccggccggcggcggcagtggcgggggcggcggcgggggcggcgggggcggcggcgggggcccgggccatgagcaggagctgctggccagccccagcccccaccacgcgggccgcggcgccgctggctcgctgcggggccctccgccgcctccaaccgcgcaccaggagctgggcacggcggcagcggcggcagcggcggcgtcgcgctcggccatggtcaccagcatggcctcgatcctggacggcggcgactaccggcccgagctctccatcccgctgcaccacgccatgagcatgtcctgcgactcgtctccgcctggcatgggcatgagcaacacctacaccacgctgacacc

SEQ ID NO: 335827 - DNA, 934 bp, Homo sapiens
  chr18:55103414-55104348
  hyper
cgctgccacccatctccaccgtgtctgacaagttccaccaccctcacccgcaccaccatccgcaccaccaccaccaccaccaccaccagcgcctgtccggcaacgtcagcggcagcttcaccctcatgcgcgacgagcgcgggctcccggccatgaacaacctctacagtccctacaaggagatgcccggcatgagccagagcctgtccccgctggccgccacgccgctgggcaacgggctaggcggcctccacaacgcgcagcagagtctgcccaactacggtccgccgggccacgacaaaatgctcagccccaacttcgacgcgcaccacactgccatgctgacccgcggtgagcaacacctgtcccgcggcctgggcaccccacctgcggccatgatgtcgcacctgaacggcctgcaccacccgggccacactcagtctcacgggccggtgctggcacccagtcgcgagcggccaccctcgtcctcatcgggctcgcaggtggccacgtcgggccagctggaagaaatcaacaccaaagaggtggcccagcgcatcacagcggagctgaagcgctacagtatcccccaggcgatctttgcgcagagggtgctgtgccggtctcaggggactctctccgacctgctccggaatccaaaaccgtggagtaaactcaaatctggcagggagaccttccgcaggatgtggaagtggcttcaggagcccgagttccagcgcatgtccgccttacgcctggcaggtaaggccggggctagccaggggccaggctgctgggaagagggctccgggtccggtgcttgtggcccaagtctgcgcgccgagtcacttctcttgattctttccttctctttcctatacacgtcctctttcttctcgtttttatttcttcttccattttctctttctcttcc

SEQ ID NO: 335828 - DNA, 1388 bp, Homo sapiens
  chr18:55104759-55106147
  hyper
cgcggggaaccggcggccaggatacaacagcgctcctggagcccatctctggccttggcgttggcgcagggactttctgaccgggcttgaggggctcgggccagctccaatgtcactacctacagcgagggcagggtgtaaggttgagaaggtcacattcaccgctttgggaggacgtgggagaagagactgaggtggaaagcgctttgccttgctcaccggccgtccttgccccggtcccagcgtttgctgggatttgccaggatttgccggggctccgggagaccctgagcactcgcaggaagaggtgctgagaaattaaaaattcaggttagttaatgcatccctgccgccggctgcaggctccgcctttgcattaagcgggcgctgattgtgcgcgcctggcgaccgcggggaggactggcggcccgcgggaggggacgggtagaggcgcgggttacattgttctggagccggctcggctctttgtgcctcctctagcggccaagctgcgaggtacagccctctattgttctaggagcacagaaacctcctgtgtgggcggcgggtgcgcgagctagagggaaagatgcagtagttactgcgactggcacgcagttgcgcgcttttgtgcgcacggaccccgcgcggtgtgcgtggcgactgcgctgcccctaggagcaagccacgggcccagaggggcaaaatgtccaggtcccccgctgggaaggacacactataccctatggcaagccagggtgggcgacttcccatggatcgggtggaggggggtatctttcaggatcggcgggcggtctaggggaacaattcgtggtggcgatgatttgcatagcgcgggtcttgggatgcgcgcggttccgagccagcctcgcacagctcgcttccggagctgcgagctcaggtttccacccccgatcccccgggctttcctcgcaccgctgagcccagcttgtggggtgcactcgaccaacgcccgacagggctggggaatgtgacaggcagcaggttcacccgggcttggggagggggagtttccgctttgacagcattttcctttgccgtctgctggtggattcctattcccagtcggtaatcgccccgcagtgttgatctaagaaggtaaagaaaactaggtttccctgcaaagagcctcccccaaatcggcggactccggatactttgagtggatttagaaatttatgtaatctttctcctttagtttatttttcatcctctcctacagttttctctgatttgctgttggttcggggcaagataaagcagccagtagagagcgataataatagcggcgggaaatgaactggagactggctgacagttcttaacattttgtcatagatcccccc

SEQ ID NO: 335829 - DNA, 593 bp, Homo sapiens
  chr18:55470607-55471200
  hyper
cgggctcggccttctcccctccctttttccctccctagggcggagaggggctggactgcaagccccggggcggcccgaggcggcccaggtccagctcctgccccacgccctccgtgcgtcctggagtcaggtgggcacccctttcagtcttccgagcccagcctacgagcccttgcctcgcccagcctgagacccagttgctgcggctgctcttagctccccgggggccgcactcgccaccacacctctccagcccagcgtcactttcccgctgcccttggctggcttggccgtcaccccgggtcgaggactgagccagcctggaaagctggcggggccgcggcgcgcccgggacctgagctccctcggtaaggggagctgtgtcctcttgatgccaagtcatgtttggggaccggtcaccgaatgcgcgtcaaagttcgccgcgtggagggtgaagaaagaggctgcgcctcaagacttccagaaacgtatcctgtgattgcagccagcaggctttctgccgagtccaaacgctatcgagtttttttgggtttggagtcaaaaggagttaaggtgcggcccgtgaaccacgc

SEQ ID NO: 335830 - DNA, 342 bp, Homo sapiens; identical to SEQ ID NO: 239803
  chr18:56932078-56932420
  hyper

SEQ ID NO: 335831 - DNA, 312 bp, Homo sapiens
  chr18:56932689-56933001
  hyper
cgtggggctggctgatggtggccacggggtcgcgggggaggtccgctcccggcaggctccagctctctgggtcagcggaggtaccccgaggctcaaagagcggtcagctccccacctccccaaaagtgcctgactccgcccttctctcggcgcggtccaattcgcggcgtccttcccctccccgccttcgctatctgagagccccgcccaggccccgcccaacctggttcgcaagagcagaagaggatcccggtctacagacccgcttgctttcctcctagggcgggtcagagcagacgtcgtcggggtttg

SEQ ID NO: 335832 - DNA, 712 bp, Homo sapiens
  chr18:56936005-56936717
  hyper
aggtccgcgaagtgcgttgaggcggccagagggcctctcctcaggcctgaaagtcgcccttctccccgtgcatcgggagcaggcgcgtggccctgaactatgcttggcgggtggctgcaggcgacagggaaagaggggccgagctggggaggggggttgtccctgggagagaggatgcgggtacggtgcggtcggcccggggtcggatcccaagacgttccccagtgcccctagagggcctgccacggcttcccgatggcctggatgtgctccttggctttcagacgcagcgccgcgatgctgctgttgcgcgggtccgcctcgtccagcgggaacttgtccccgaagccgggcccgcacgggtaggagggcggcggcggcgcgagaggttgcaggccggggcccaacggcggggagttcaggaagggcggaggcggcggcggtggcgtgtagctggcaggcaggctctgcgccggcggcccgaagcccggcaggctctgcagcgccgtggcgcccccgcccggcagcggcggcccgagccaggactccagcggcagcgcgcccccagccggcccgccaccgctgcccgggcccgccccgaggggcgacagcgtcgcggagggcggggagcggctgaaggagaggaggggcgagtcctgcagcttcatggaggacacttccagcttctcctgccgccgccacttagcccgtc

SEQ ID NO: 335833 - DNA, 1367 bp, Homo sapiens
  chr18:56939499-56940866
  hyper
aatgcatggacacccgtgaattccgagaagcattggctgcaatttgggcctcgggccctcccagatcccagttcctcaacctgggcgctttacctggacccggacctctggtaggttgaccttgccggccagctcctcgcggctgtacacgtccgggtagtgggacttctcgaacgcgcgctccagctcatgcagctggtacgtggtgaaagtcgtgcggttccgccgatgctttttcttgggctgttcctcctctgacagtttcgcttcgccggtggctggcccgacgggcagccctgggctcggccgtgcctccccgggctccttggggcagtagggtcgaggggctggggcgacgaggcccgggagggtcagatgcactccccaaaacacccttgggccgaccccgcctcgctgtgggcactggccagcccgcctgcgggctccgagatggcccggggaggtccgtggtgagggcggcgatgggtcctaagctttctctgaatgcaaattggaagctcccgccatagacggtccccaaccccgcgcccagttgccttaataaaagttaaggaaggggcgctctcgtctggccaactcctaagctcgggcgcccgaacggcctcgcacagccaggggtgcgcactcaccttcgtactcgggggcgggcgccggggctggcggcggggagggctcggagccttcctcgggcgccttggggcaggcgggccgcgcgcccagcctcctatcccgctccttcgcgccccgggcgccccgctccgccgggaaggtgccgaggatcccgtcgtccttggtaaaccccaggatggcctcgatgctgtgaagtcgcgaggtgctcccgcccgggctgcggagcaggtggccggcaagcgagaagctcccgtcggccatggctggcgcgcagcccggcaggtgcatggggagcgccgggaggcgggagggcgctttggagacggagaggagaggctcgaagccgggtcttcccgagtgcggcggtgcaacccgacgggtcccgaccctaggtcaagctccgcgggcgaagcccgcccgggctgcgcacgctgggggtggccgagcgctcagcccgctgccgccttagtcccagaagtcggaagttcgggctcggggtagctggggctctcggcgctaaaggcggggagccaactggccctcggctcctcccctctcgccctggacccagccccttctctcggcccctccctccacagaggggcgtgtcctcacccggcccagccacagggtcctctagtggccacccctgggccggcactaggaatattccccttccacctcttgatccgttttaagctttacaaacacactcc

SEQ ID NO: 335834 - DNA, 981 bp, Homo sapiens
  chr18:56940873-56941854
  hyper
cgcggcgggatgcctgatgggctcgggaacctggtcgcggcgcacccctagtcctgcctcagtggggccgacgcccttgggctcatctctccccttgcgtttgtctccctctacttcgggcttaccctctcacttcagactaccccctgggggtcacctccctccttggacgcacccctccccagcttcagactcgcccctctagccccctctggctcacctccgcggggccgccaccctggcctgtgccccctggaagcgccgagacccagccgaaggcttcccagccccgcactcgtcgcagtttgaatttcccctcgctggctcccttttcgggacccactcctttcttggctgggttgtacgaagtcccggacctcgcgtttagtttgtccgtctatatctgttgtaactcctcccagtcccctcggacttgagcgccggcagcctccctccttccccgcagcgcccaccccagggccatttatgtccgcaagtccggtgacctctagcgcccgatcgcccagcaggagactgggagccccgagtcggatgtgctgccgggctcaggtcccgcaggagacccacctggagttcctcgctcccgccccttgtcctgcggggagggcgggctcctttactgatgagcagcggtgtcgcactcccgcctccctccaacactccgggccaaggagatggcccagagctggctggggaaggaccttctcccggggaagaggcctctcgcctccccgagggttcaggagtaattggcttgcagttctttctcctttggaccccctcgaggcttccgtggcccacagtgactgatcggccacttggaaagatgattggatagggtgagtgtgtttcacctccagcagcgcggatggacaatggcgctgtgaacgtctcacccctcaaatctgaggcgagacccgaggcgagcgcttggccttccctgaactggtggcctgaacc

SEQ ID NO: 335835 - DNA, 365 bp, Homo sapiens
  chr18:57069721-57070086
  hyper
cggttcggtgttgaagccaaatctcagtctgtgttgtgacactgccattgctgccgcctgcagtaccactgccgcatctgactcacattctagaaggaaggtaggtttgtcccaatgaatgcagcttggggcagctgccttgtggagaggtgactgaggccgctgtgctgaggctccctgggcgattcaactacaccatctgccgtgtcagcttggaactgcaggagacgctagaggggaagacggagaaaggaagggaaacaaagattgatatgaccatatggtctgcatattgagcttgctgtcttttacatttgtgacttagaggaacctgtatcaagaaaatgtcattattcttattccac

SEQ ID NO: 335836 - DNA, 1477 bp, Homo sapiens
  chr18:57363523-57365000
  hyper
cgaaagcagccacccgtgtttgctatgccccactgtttacacccaaaatccaatccaatctccttcacagacttccacacaagtatttcagggagcggcaaccatcctcaggatctcagggcacacaccctagacgcaaagtcagttgctcagtgttgctctgactccgatccaaccaaccctcaaagattcgcaccgcgcggcacgcacccagcaggttccagcgtaaaagctgctccggtcccaagcgcgtctccaaacccctcctttacagcgccgcctccccagccagccccggtgcgcagtggcgaacagcccgcagagcccccaggcttacctgtagcatgtggtgagctcgcctgaagacttcagacacgggtatttagtcgtcgcgattttgctctctgagcagatttctctatgaaaaagtgcagaggaaatgttcgattctcagcgggagagcggaggcgggcagcgcgcgctggggaatccctggcgcgtggggatcgccaggctccccgtcccggcgctctgggcaggggctggtccccaaacgcgtacgcggggcagactccggccacagggacgagccacgcgagggtcacgacgaagcgaaccagctccaggagaaaggaagcggggttcacgagctgtgccagccagtgtggcacccggggggaggcaggaacgcggggcgaagggtatccctgacgcgacccacggatggcagggcgcaaaggctgatacccgggagcggagggaagtgtcgcccaggacagctgagcactctccttatccccggagaagtgagggcgtgcggatcgctgtgggagtgggcgccggggaggaccgcccgcaccccgcgagccgggcgcgcatcaagcaggagctcgccctccgctggggcttgcagcgcttacctgtcgccgtcctccggctcctctctgtaggtccacgtgtgtcccaacgccaggagcagcagcagcggacccaggctcctgcccagctggcccctggcagctcctccccggctcggaggcggcggcaccatcagggaagctcccggcttcttcccagcgccgagctccgtccggaccaagcgtcctgctcctccgcggccgccgccgccttccctcttcccggcagggggcgccggagagcaggggcgtttgcaccacctgcacggggagcaggggtccggaatattatggggctggggggaaaatgaggctaggagttggggtatcggatgcaaacccagcagagaagcaggtaaagggggtacctgcggtgtccggctggcgcgagggccctgaggttcaagttgtctcgtcgggacgttcacgtccgattgacagacttgctggactcggcttggggctgcgccctcgcctcttccctctccctcctctgggagaagcgcgcagggtggggaaagcgggcggttgtttgcattttgcaccagggtctcacgacc

SEQ ID NO: 335837 - DNA, 149 bp, Homo sapiens
  chr18:57365422-57365571
  hyper
cgccgcgcacatcagagctggaaacgcccccccccatcaaatgagacacgtgggggcaaattaattacaggtgctgctacctgctagtgtatgcagccgcgttgataggtaacaagaaaacggaggaggggggccgtaaatcggctccc

SEQ ID NO: 335838 - DNA, 830 bp, Homo sapiens
  chr18:59001027-59001857
  hyper
cgaaggtctccggagagtcgccggcggtgccaggtaacgcagagggctcgggtcgggccccgcttctggggcttgggactccgggcgcgcggagccagccctctggggcgaaatccccgggcggcgtgcgcggtccctctccgcgctgtgctctcccagcaactccctgccacctcgacgagcctaccggccgctccgagttcgacttcctcggacttagtgggagaaggggttggaaatgggctgccgggactgggggagctgctctctggaagcagggaagctggggcgcaccggggcaggtggaggacgtggcgcgctgggagcggggactgcgcgcgcctggggatggtgactggggatccaggagcgcggcttgtgggggcgcttggcacggcttcaccctcgctggccccgcaggcggtggcgcctccctccgcctgcagaggggacagggtggccgcgtccctcgcacagagatgtgcgccgggaaggggaccagagagccaggctccggggaggcgcaggcacctacggggccgatccctggtccgtgcctcgcgccgcgcccccgccggagctcggctgtgggaggagaatgtggtgggtactcgagtccccgccacctgccggacttcgccaactccccggatttcctgtcctcgggccctgacactcccaaggaaagctctgaattgcgctcgctgtttggtttttgcttgttgtagttactctgggggaagagccgggggcaagggggtcaaatggggctaaagtttcagatttgcaaagagaacgttaccgaggactctcaacgtgtccttagcaat

SEQ ID NO: 335839 - DNA, 133 bp, Homo sapiens
  chr18:59500732-59500865
  hyper
cgaaactcctctgcgtttccctctaatggaatatcaatgaaaccacagaaccacagacacacacaaacatgatttcctgaggaagtgattctagggctaacataactgaacacgagggccgtctgttagtctc

SEQ ID NO: 335840 - DNA, 1131 bp, Homo sapiens
  chr18:59560090-59561221
  hyper
cgtttaggaggcaagaggctgacaggcaggaaacacaattgagactgagctttcttcagcctgcagtgaaatacatgcaggaagggttagatacgcgccgcggagaaggaaatccaagcgccctcctgggcagacggggctggagcgggtgcactagggaggtggagcaaggcagatgaggtgtggagggctggcggccgagaagggggcgtcacggctcctaattgtctctacaggataaataaccacctcccccctcctccgcagtctcccccgcccacgagttcccctctggtggcagagcgcctactagcaacagtaagccctaggaaagaaagaaatcggagcaggtggggaataacatcttggggcaaagacacactggcaaaatctaccaggtaacccggtcatatgggaatgcggggcgcctagtcagccgcgcagacaggcacacagcgcggcaatcccgagcatctttctttcgtttgcccctgtccgccacctcatcaagtcaccgccacctcatcaagtcaccgtcacctcatcaagtcaccgtcactctgctttggcgatttctctactctctccagacccaggcagcgctccccaagccatgccccgaccccaggcgggattggggaccgccgcttcccgagcagcgccccacgagtccagctggctttgtcctgccgctgtccttccaggagcaagcgccccaggcgcgtgtgtctgcacaaaagacccccaacatctggcccttcacagcgctctctaatcccgggaggggccctggggcaacttctagggctggagaaggcgcgagacaaggggaccgggagaagatgagccggggtgtgtgcgggccgggggcgcaactggggcgggcgcgcgcgcacgtgcacacccaggggcgcgcgcggcgcgggcacgaggaaagctccctcggaccggagctccagggggcatccgaggactcggccgagcagccgacagcgccgctccccgccgcggccgcccgcccaactccgccagctctcaggagacacgcaactcccgggaccacctcccccgtgccccgccagaccccgcgctcccctccccgggaccctgcggccccgccaccccctccgc

SEQ ID NO: 335841 - DNA, 647 bp, Homo sapiens
  chr18:60985401-60986048
  hyper
catctcccggttgacgctctccacacacatgaccccaccgaactcaaagaaggccacaatcctcccccagttcaccccgtccctgaagagctcctccaccaccgtggcaaagcgtccccgcgcggtgaagggcgtcaggtgcagctggctggacatctcggcgaagtcgcggcggtagcggcgggagaagtcgtcgccggcctggcggagggtcaggtggaccacaggtggcaccgggctgagcgcaggccccgcggcggcgccgggggcagccggggtctgcagcggcgaggtcctggcgaccgggtcccgggatgcggctggatggggcgtgtgcccgggctgggaggagaagatgcccggtgcgggggcggcccccgggggcgcggcgcccacatctcccgcatcccactcgtagcccctctgcgacagcttataatggatgtacttcatcactatctcccggttatcgtaccctgttctcccagcgtgcgccatccttcccagaggaaaagcaacgggggccaacggcacctctcgccccagctcccaccccacggcccccagagaaagaagaggagttataatccagctattttattggatgtgctttgcattcttggacgagggggtgtcttcaatcacgc

SEQ ID NO: 335842 - DNA, 125 bp, Homo sapiens
  chr18:60987974-60988099
  hyper
cgcctggaccttttctagccgtgtatgtgggagtgtgtgtgtcgcctggaccctttctagccgtgtatgagagtgtgtacacgcgcctacacacacacacgttgtgttaccggcgctcggccgcc

SEQ ID NO: 335843 - DNA, 788 bp, Homo sapiens
  chr18:61603405-61604193
  hyper
agcgcaatgcagcgcgcgttcctcctcctgggcgcccatcctcggctgctgcctcttcctttcgggccccgggacctgaccttccttccgggtccgcacagaaggcctgagcgcgtcgcctctaacactggtccagggcgggggaacgcggtgtgcctcggctgccacctcctggtgactaattctagtggacgtggagagcgaaccacagcctcaacaacacctaattctaattacagctggtgatcggtgaggtgacggaaataaacggggcgctatggcgggaactaatagatggtctccttagggtgtatgaggtgtcccttgacccttctctccccgaagtggacatcaaggtgatcctccccccatgacctcctacccgtggcatcctgcgacccccacccccgctgccagcccagtcctcccaggagccctcgaggggagcacggggttggctgaggggatgggggagcttccgcggacacagtccagccccgcagaatgcaagcggcgcagaatccttgaaagagcttccgagtgaaacccacgcccgcccgtggggcggagccctagcaggggcgggcgagttcccgcaaggccagcgcggaagggaagaacacggtgtggggaggcaggggctcaggagggcgccatcagctggtgctcagagcccggaggaaggaactccccccggagttggggggggtggccctagggatgcctcaccggccccatctctccacggagctacgggtagcatcgcccatcgctcctacaccccacgc

SEQ ID NO: 335844 - DNA, 979 bp, Homo sapiens
  chr18:63417693-63418672
  hyper
cggagagatggatgggctgcagcccctcctactttcacccctcttctttattttcctgcgaaggaatccatctgtacagatccgccaggcgggaggtggaggagggtgcgcgagggtgcgcgcgtgtgtgtgtgcgcgcgtggcggccgagcggctccgtcttcgcgttcttttccagtagcccccaccgggtctctgggaggcgccgaagtctcagtggctccctgggccggcctccgacagcgctgacagcaggcgcccgccgcccaccatcgtcgccctcttcccctccctcttcggccccggctccggcgcgctctctcctcctctcctgcgcgccctctcgccctctctctggccgcgcgctcccgctggctccggaccctgcgtctcagctgcccgggcgagccggaggggcccctcgcagtgagcagacgcagcgggcccccggcgcccgaggccggggcagggtccccgcgcaccgcggagtgggctgtgattggaggaggagcccgtgccgggcgggcccgagcgggtgtcgagccggttcctccagtctgccccgcgcgcggagctgcgcgcactgggtccccaagagcccgcgggcgtccggcagccgagcgcacgttctttcggatgcacacgcccgggtccctggcgtctgacgccgtggggagggcagcgaggccccaggtgagtgtgtctgcctgcgcggggctggggaggcgccgctgggcagatgtgcgcccttgctgtgcgcctttggaagcaggactaatcagtgagcggagagcgggcggggatgtccgtgtggagtttcccttggcgtccccaagttactgcgtgttgcagtgagatgtggctctgcaaggcaggacaggcttgtggacggaggcgggggcgtttggcccggaaagccggtgttgacagacaccaggtgcgacacgaggagtagtagttgagggtaagagcaaatccc

SEQ ID NO: 335845 - DNA, 1444 bp, Homo sapiens
  chr18:67067910-67069354
  hyper
cggggagccgggtggggagcgggcctcggggcgcccggcggcggaggcgctcccacccgcgcggagagggatggagcgcgtcttgcgagcgtctccgagcccagccaccccacgggccagggggagggagcggggccggcgcatcagcccgccccccccggcccgccccctccccccgcgccggggagccgcggtggtgcgctccggccagctgtgcgccgccgagcgaggcgccagcccgtgggtgctgccgggggcggcggcgcggtgggggctcccgcagctggcggaggcgcgggccgcggcgctgggctcgcggcggggagcgaaggtgagcgccagaacgcggagggctggcgcggctcgcggcgccgggccccgttccccgtccgcggcggccctgcaggcgaccccgcgtccccaccggcgggagctcggggaagagcgggcggcggcgctgctgctggcggcggccggctggatgcgagacccgcgcagacccggcggcggacggcggctctcgactccggagagcggatcgcggggcgcaggagcccgatcgcgctggccatggcctccaactttaacgacatagtcaagcagggctacgtgaaaatccgcagcaggaagcttggggtgagtggctcgctcggcttgctccttccccggcgctcgttcggcccggctggctgcctggggggggggcagggagaggtgacccgtgcgggtacagggcagagagggacccggcccttaggcggatggcccgcttgttgcttggccaggtgggggcccacacctgccggggggctccgcagacggacctggggactccaggagcgcctgagtccccatcctcgagtgcaccgggctgtcttcgaccgtgcggggaagtcagtagacgaaaggggttgtcagttccaacgaggaacgtgccttggaggaggtttctttgcggtgctatccacgatggtctgttctcaaaagtgtgcgcctttcgggtggaactgctgtgtgtggcgacgctcgcgtgtgtttagaatcaccattttctggtctccgcttcccaagctcaattcgaaattcccgtctgatgccctcccagcgccgcgcgtccctgccggctgtagtttagggcgccttcgccgtggccgagggcggctcccgcgccccgcaagtgctcccctacccggggacccgcgcccgcgtgcaggcaggtgtgtgccccgcgcccgcccgcggtcactgctccgtgacggcaaagttgatggagacctttccctattcttgagagatgcgctgcctggcttgggagggaaaccgtgtagaacccaagggttcaaaactattctagtgaccagacgaggcggtaggagggactcacgggaggcagcgggacaggaggggctgtcacctgggcgggagcagcctagacttgggacgc

SEQ ID NO: 335846 - DNA, 1508 bp, Homo sapiens
  chr18:70210281-70211789
  hyper
cgaaggaccgattccaacgacggaatcccaggcttgggttattctccagctctggtttccagaccacggggattctctctttctcagcggggcggcagcccctgcaggtttctgcgaacttacgcgcccgtctgcacttttgccccgtccccgctcctcccaggaaagcagacaggccatttcaataccagcccagagacacgcagagaagccgccccctcgccgcccacagcctcccattaactcttccagtattctttctaagaacagagaagttggctcttgataaatatccgctgtccgcagccccgatcctacatgatttcccttctctctctccacctcctccacccctcgatctggaccagggagagtcttcgttaaaatccacgcagaaggcgcttgcatgcggaggggagggcaggtcgggggtggttacctggaacatccatgctgggcgagctccgctgtccgcgaagttgctctgcttagagaaaatgaggcgagtgggagctgtcgggaggaggacacggagcgcgaccctgctcccagcgcgtggccaataaccgcgccgccccgccctgccgctttcccgcgccagcctgcgccgcttcaggggtgcaccacgccccgcgcgcccgcttaggcgccgcgcccgggaccgggaaccccgcgtctcgcccggctcagcgccccgcgctgtgcgcccaggtgcctccaacccctgggcttcgcgcccgcaccgctgcctggggcccctcgagctcccgcgctcagcgcgtccgcagcgcggctccctcgcgggtcccctcggccccgcagccccgccagtctccagagggcatagccgagcgctgccgcctccctaggactcggaaccttccctgctcccaagcccgccgcaccctccaacgccccggtcctgctcacccaaacgcccagagcaaaatactcccagacgtctcttttgaaaattagacacccttaaaagcaccggtcgcttctcttcttttagattctttcttttctttccccaattccctccaagtcttaatattgaatggcgtgaccactttcataatgacaggagcgaaaaaaacaataagttaaaaaaaaaaaaaagaagaagaagactgggatggctgggacgaagagagggaaaaaaaaagcttgagaatttgatgatttaggagctgtggttccagagtcccagttggggaactgtccggttcccgcagggctagaagaggggcctccggcccgggtctgtgtgtctgctcctctggacctcggactggtggagcggctggcgcttgcgcttatttattaaattgcggtgtccgcgctcgctcaaaggacccggggagacgcgctgggtttcccagctgcgcctggagctcggctgagggcgcaaacacggacgtggggcgccacctgcgggtgcccgggcctccctgccgcaggctgcggaccggcggactccgacagaagacgggggagtcctggcc

SEQ ID NO: 335847 - DNA, 956 bp, Homo sapiens
  chr18:70534260-70535216
  hyper
cgcactgaaagaccgttctccggcaggttttgggatccggcgacggctgaccgcgcgccgcccccacgcccggttccacgatgctgcaatacagaaagtttacgtcggccccgacccgcgcgggactgcagggtccgccggagcgcggcgcagaggcttttcctgcgcgttcggccccgggaaaggggcgggagggctggctccgggagcgcacgggcgcggcggggagggtactcactgtgaagcacgctgcgcccatggatcatgtctgtgcgttacaccagaggctccgggctccactaattccatttagagacgggaagacttccagtggcggggggaggacagggtcgagaggtgttaaagacgcaaagcaagaaggaaataaaggggggccgagagggagaccgagaggaagggggagctccgagcccacgctgcagccagatccggatgagtccgtcctccgccccgggcgggctctcgctctcgctggccctcagcgccgcgcagccagcagcatccccaccgtgacgctcgcatcacacccgggcgccggccgccaccatccgcgccgccgccgtcaggaccctcctcccgggcatcgtcgccgccgcggggtcgggaggacgcggcgcgcgggaggcggcggtcgcagggcgagccccgggacgccccgagccggggccggggccggggagagggcgcagcgaggtgggggccagtccagaccgacggcagcgacggagcgggcggcggcggcggcgccggcggcggcggggtggctcagtccccagtctcagacgcgccgcgcagcaggtcggagcagcctccccgggaggatgtccagcggcagcgctcctcgctccagcccttggggatcttccgctgaggcattgaaggcaggaagaaggggtccgtcatcggctcgccgggctgcgcgccacctctgctat

SEQ ID NO: 335848 - DNA, 1313 bp, Homo sapiens
  chr18:70535426-70536739
  hyper
aggctgcgcgcggccggcgccccggggctggtgcgcggcagaatggggccgcggcggcggcagcaaggacatcccagccgcgcggatctgggggaggggcggggagggggtgaggacccggctgggatccgcggctcggcccgccagggcgcagagagaggatgcagccgcaaatcccgagccggatcctcgtgccggacggaaggcgtggaagcgggaggggccttcgtgtgaaaatcccttgtggggtttggtgtttcactttttaaaggttagaccttgcgggctctctgcctcccaccccttcttttccatccgcgtaaaggaactgggcgccccctctccctccctccctggggcgcaggtttcgccgcggactccgcgctcagcttgggagacacggcaggggcgcgccccagggaaaggcggccgtaaaagtttcgcggttgagcactgggcctgatgtccagtccccccaccaaattactcctgcaaagacgcgggcttcttgcaattgagccccccacctcgaggtatttaaaaccaccccaaggcacacacggacccccgttcccccgcgccacttcctcctacaggctcgcgcggcgcgttaaagtctgggagacacgagttgcggggaaacagcaccggaagagcccgggcttgtaaaatgcgaatcaatgaatacgaaataagggcaaccgcgaggcagcgccgggaagggctggagcgcgcgggggtgcagggagtccctccctgggcgccgcaacggcacctcctccctttcccggctccgtcccgccctccctcggcctctgcggacgcgacccacgcagaccacagccgagcccgccggaccccgggactacggaagccatcccgtccggccacccacacccgcgccgcggctggggcttgggttggggactgtggcggcgaagaagccggggtaggaagagctaatggcaatggcggggtcgccggggggcggggggtcagcagcagacgctgagctgtgaagactagggtggccccgaaaggccgaggaaaggagaaagggccatgagaagagtctggcgagcgctcgaggccggggggctgcctcccggctctggcccggcctccgcttcccggcacctgctgctggggcgcccacgtgcgcgcggggctgcgcggggcgttgggtgctcgtcgcagtcctgcccacgcctagcgcagcggctgtgagtgggtggaggtctcctgccagtaagttgggatgagggacgatgaggtgacccccaagtctggaagggattcagagtctcacacgc

SEQ ID NO: 335849 - DNA, 122 bp, Homo sapiens
  chr18:74163260-74163382
  hyper
cgggggcggggggggcaccgatgtcagcccgggatggatgtccgcgggtgcaggggggtgacagcccggtcctgcgcacatctccgctgacagggcattcctcaggaggggctggagtgaac

SEQ ID NO: 335850 - DNA, 814 bp, Homo sapiens
  chr18:74844288-74845102
  hyper
gtcagggaggccgccggctgctacctgctcggccacctgctccgctgcctaggttctccctgcgcgtccccagccaagaaagggacccggagtccgggcgtcgggatagctcctgtccccgatcttgcgcccccggctcccgcggggctccggtccggggtcccgcccaggtctccgcggtccccactcggaggggcacagagacaaaggcggcagagcagcccgcccgtccccgagggtcacccaccggcgctgcgctcgttgctccgaggccgaggggcgccgcggggtccaaggccctgctccgcctgcccaggcccgggcaggctggtctcggcttcaagcgcccacgcgcggggtccccgggcagcctgcttcgccttccggggtcgggagacaggggccgccggggccggaggctgcttctctctggcgcgcggcggcggtgactgacggcggcggctccgagggacgggcgcgcacccagctccccggccccgcctccccgggcttcctgcgagccaggtaaacacaggccgatcccgccgggcccgccccacctggacgcggccgccggcgccgccccgggagctcggaggaccccgggcccgctctgcccacgcggaacttggggggcgcacggggcccacgcgcagggtcagacctcggaggggcggcctggagcctcgcccgctgccgaactgggctccgaactgcggcccgtcgacccttcccgttcggaggcttggcctccgaacccaccccgaccccgacctcgacctcgcgggaggggtgccaggccgcatctccccgc

SEQ ID NO: 335851 - DNA, 934 bp, Homo sapiens
  chr18:74962671-74963605
  hyper
cgtgctggcgcgcagcaagccgggcaagccgcggagcaccaccaacctgttcatcctcaacctgagcatcgccgacctggcctacctgctcttctgcatccccttccaggccaccgtgtacgcgctgcccacctgggtgctgggcgccttcatctgcaagttcatccactacttcttcaccgtgtccatgctggtgagcatcttcaccctggccgcgatgtccgtggaccgctacgtggccatcgtgcactcgcggcgctcctcctccctcagggtgtcccgcaacgcgctgctgggcgtgggctgcatctgggcgctgtccattgccatggcctcgcccgtggcctaccaccagggcctcttccacccgcgcgccagcaaccagaccttctgctgggagcagtggcccgaccctcgccacaagaaggcctacgtggtgtgcaccttcgtcttcggctacctgctgccgctcctgctcatctgcttctgctatgccaaggtgcacgccggtcgcggggccgagacgcgcgagggagggcggagggccggtgggggccctggggtctcagtgtcccgcggccctgccggagccttggcggcagcctggccccggtggtccccactctggcggcgctggtacggatctgtgcagagaggcttcctggccgctgctggagcgtgccattggcttgcgcaagaaagttacttggagtctgagagatgctggggaaagtttgcagttcacttcgcatggtccagtagaaccagtttctcctcccctccccttcctcggccctgcggcccttcaacgcccccaggttgcctgggcggtaggtaggcgggcgctgccgcatccttcccggtacagcaaaccccgctcggttccagcaactcttcaaccagatcagctgcgcggggaggttaccgccgcggc

SEQ ID NO: 335852 - DNA, 236 bp, Homo sapiens
  chr18:75362799-75363035
  hyper
cgccgtactttccttcccaatgtttgtgtggagagcacacggttcctgcgtcaggaccctgcaggacgcgggccgaggctcccagctgccggccatgccctcggctcctctcccgacacgcgccagcactgccccctgctggcctcccgggagcactgcccgctgccgcggcgggaggagacccgggaagaagccgggaccgcgagcagctggacgctttctccctggggctcagc

SEQ ID NO: 335853 - DNA, 520 bp, Homo sapiens
  chr18:75612005-75612525
  hyper
tcctggactctgagcaaagccgcgggccttagaccctccccagcctcaggcgagccccagtgccgacacctgctaagagacggtgcattgcgggctaaacccgcagacactgagcggggacgccacttccgacggcgtaaggcacctaaagtagccacagaggaaactgggggtgcaggagctgcaggagccccggcggcctgcaggggcggtggcgcggcgctgggcgcgcggccgctagatggcagcgcagccccggcccggcccgcgggaggcggccacgcgcgggggacgcggggcgcggcgcgctgagcgcgggtgccgaggctggagggcgcggccgggctcccgagtcctccctccgcggcatccttgtctccaccctcaaatgtcctgcaagccaggagcctccgtaggaaccgctgcatttttattttcctctaaatttcacacaggtgaagcctgtgtttgaatcactgagaggagattcaaatgaggttcctgacggggtagctgctcc

SEQ ID NO: 335854 - DNA, 428 bp, Homo sapiens
  chr18:77153122-77153550
  hyper
cgctgtgggccagaatgcaaaactgcaggaacagaacattcgcaggaacagaacacagtcgtattaagtgattttcccgagcaggaagtggcatctggcctgcggttcagtagggggaggaaagggtgggcgcacctgcccctggctggcgcacctgccaggtagccccacgcggcaccgcgtgtgccgagcgcccctgaggatggaaagccccacgcggggcaggtggcacccaccctccgaagacgggacgggatggagcgttgagcttcggggcagctccggcccggcccgcgctggagacgcccgcatctgccaggatggcgtctcatagccctggtgctcacacatgacgccaggaagccccagcaacagtgaccgcccaggctctagaaaatattggacggggtggatgaacacccaagtgc

SEQ ID NO: 335855 - DNA, 420 bp, Homo sapiens
  chr18:77156459-77156879
  hyper
cgaggtcggccgggtctgtgcgcccagggaggggcgcggcgcggaccgggaacggcgtcccccagctcccagcagcccggttccgagcgcgccttctgccaataggtgtctcctctgccccagcgctgagggcgcgaggcgaggccgccgcgggtcccgccgaggaagcggctcgcaggccggcgatttggggacgggcgaggctgggccgtcaggaccacagagggcacgtgggagggaggaagggaggcttccttgggagtgaaggatgccccgtgtcttcctgagcgaggcagagccaccctctggcgccaagatcgcggtttgggggttctgcgccccccacccccaccccgagctcgtggcggcgtctccctcgcgccgcgcccctgaattccccagggccgagcccgtcacgcc

SEQ ID NO: 335856 - DNA, 843 bp, Homo sapiens
  chr18:77159885-77160728
  hyper
ggggctccgcagggcgcgcacgtggcgctcgggggtcaccgttgcagccgctttcccgaggaggcccggattgaaaacttctttaaaaaaaaaacttaaaaaaaaaattccgtcgccctgggcgcagccttaggtacctggtgccgctcgtggggtcccgacgcccctacccccgggtccggaggagcctgcgccgggccgggacccccagggcacaagaggccgggggacccctgcggtcgcgcgcgcgcgagggggcgggggcgggggggacacgagtttatttaaaaactcgtgtccggggagtttatttaaaactcggaagccggcggccgcgagccggttgtttatgtaaacccggaaacgccccggggggcgggggcggggcggggacggggggaggggcgggggtcacgttacgcggaggacgcgcgggcagcgccgggagaaccgaacccctggcggccgcgaccccggctcccgccccggccccggcccgacccgccatgacggggctggaggaccaggagttcgacttcgagttcctcttcgagtttaaccagcgcgacgagggcgccgccgcggccgccccaggtgggtcagtcccggagggcgcggggggcgcggggccaggtcggggtttgggggcgcccaggccccctccgcgtcctcgtcgctccccggggaccccaggagtccccggcgcgcccgggaccgaggggctacggcgggggacgctgcagtgcggggcgtcctgggctcggatgcggttcctccgagcgctcgcggcggggtcctgggggaagagcgcagcccggacacgggcgtggacgaagtggtccc

SEQ ID NO: 335857 - DNA, 587 bp, Homo sapiens; identical to SEQ ID NO: 225689
  chr18:77547934-77548521
  hyper

SEQ ID NO: 335858 - DNA, 1455 bp, Homo sapiens
  chr18:77557780-77559235
  hyper
cgtgctccctccgagtggacttggccccggctccaaacccagccgagggtcggctcgctcctggggacccgcggatgtcgcgagggggcgccgcgccactgaaggctgggacgggggcggtgcgcggggcggcgccggagtccgggatgccggctccagagacgccgcgctccgccccgaggaggccgccggccgggtaagcggagcccggagctcgcggagtctggaccgcaggtaaagttgagcgcgccgtggggccgggggtggggggtccgcggcgaaggagccggggccgcagtgggcggtggggcggggggcgcgggctcctgtctgatggttccgcgcgcagcttcttctccgggtgcgcggtgcgcgcgggcgcgggagggtcgaaggggaccttggaatccccctgttcgggccaagggggcgggggcggctcggggccgggcggggctggtgcctccccctcccgctcagcgcccagagtccgggagtcgaggggggcgtcgggccggaggcgctcgccggtctggccgcgccgcgcgcgtggatggaggtctcggccgcggatcgccccgtctattcgcgctggtcctgcgggagcccgggtgagccgaaggcgaggaaggggcgcgggtctcgggaaaacccgactctcccggcgcccgccccggttcggttgggggcgcacccggctcgcgcggagagcgggcggggtgtgggcgaatgctcggcgcgctgcgcctttcccggtcccccttctccccggagatgaacgccccactcccgctcggacacacggccgcacccctactctgcctcctccgaccagccggggcgcggcccgaattgggggagagaagacccagctcccgcagccgcgaattctgcaaacccggagcccatgcgccccgtcctccggcccggggagctcccagccttgcccgccgagcgcagcccgggtccggactgtggtcactggggacgagaagggtccctcctgcggggctcccgggttcggatggacggagggggcgtccggcaggtgaactgggcccgctccgcgtcccgaacgttcccctaaacccacaagtcccggagaccctggggcattctgcgatttcggagtgaccggtggagcccccgcccgcgcgcctggctcccggggtctccccacacagcaggggctgcggggaccccctctgtcacctcctccaaagggtctgggagcaattcgacctgcctggagaattccaggaagtcctttccctgcgggagcctcatgggtccccccttctctgcctgcagagacctctggcttccgcgtgcgctcaaagtgagcgccgggcagattgtaaataatggattttgacccagctgggagatctcagagtgattaagtggagaggctgttccaccctcagccctgcccaggcagctgggtgaccccgc

SEQ ID NO: 335859 - DNA, 75 bp, Homo sapiens
  chr18:77724415-77724490
  hyper
cggtggcgcccacgggccctcttgagtaaggcggctccgcccaggccgtcccggggcctcggctcggctcggctc

SEQ ID NO: 335860 - DNA, 1040 bp, Homo sapiens
  chr18:78004630-78005670
  hyper
tagatgtttggtaccgagcgggtgggggacgccgggctcggagccggcggcaagtctcctcctggcaggtaacaagcctcctttgcagccttgaaggcgccttggccagggccatcccacggcccgggcccccagagcccccccacggccccgaatccgagcagcccctggccctcaactcgccccggaaaggccgccctcccctccaatgtgtggcgcgccccgatcgcctctcactcgtggaacaaaagagcagctcccgcggagcgggtccagagtctgcccggactgtccgatggccctcggccctctgagcgccgcggctgccgggctttgtgtccgcgcggggggcgggaaggacggccggggtccccagtgcgcgtcccgcggagcggcgcgcggcgcccgaactggaaagttgtcgccggcgcctgtcgcctccacgccgccccagtccccctccgcggggcgccccattcattagccaggagactgggcgcagggccgccggggcgggcggggggcttaccttgctcttgacttccactgcgctgcaatcgtagaatcgcaaggtctgagacttgtgaaaacttcggttcatggtttcggccccggtcagcctcgccgtcgccctcgctcctcaggggccgcagaaagactcccgggggcggcgcccccaggccccggccccggccccggcccgcgctcgcttggccggcgggctgctcccggtgctgcgggcccgagctgggctggccgcgcgcctcagggactccaggggccgcgcgcgggaggagcgcgggggacgccggcgcgcgccgccccacctcccggcgcccgcgcccgcgccccgccccgcccccgagccccggaggacccgcccatatccccgcccacagccccgccccgcgctccggaggacccgccacaccacgcccccacgctgcagctccgcgtcggatcgccagtgggtgcgcgccctcctgtccacaatcccagagcctggggaaaggagcatcgcggccagcccaaggcgtctc

SEQ ID NO: 335861 - DNA, 522 bp, Homo sapiens
  chr19:267137-267659
  hyper
cgcgccgtcccgatggcgccgctcgcgttgctcctttctcggcgccaggatctctccccaggaaccagcgcagatccggaggccacgctgcgctgcgctgcgctgcgctgcgctgtcaggacgcgcagttcccgccccgctgaagggacaccgttttacaacacgccgcgtagaccgtgacagggaagtaaggcccacggcagcgctccctcctcagcactcgcggccgcggacaggacgccttttcctcctcctctcacctggtgaccgggtgtcccgaaccgcggccgctcccgggcgggtcctgaagagaccgtggctccgtcttcccggtcgacgccccggggcgacgagtgcggatccgccgcggttcccgcgcgtgctccaggttgggcgggagccgggcgccccctcgcggcagtcctggggagtctctgaaaatcagcgttcggatgactgcaggccgtgatttcggaaatgtcaactgaaatcgaggccaccatcccgtgccttgatcggaac

SEQ ID NO: 335862 - DNA, 799 bp, Homo sapiens
  chr19:290594-291393
  hyper
cggcctttgttcccgggaccctgcgggaggggggcctcgggatgcccattccgccagtgtggcccgcaaacccgccggacaggtttggttctcctggcctcccggccccccgccaccccgttcacccgaagcctgggacccagccttcatccccagtgtctcccccgcccgagccagcagggcggctgggcctccccgcacgtgcacgggttcgaatcccgccgacgcaccgggtgccaggaccgagggtcagccctctccgcgcgcagcgggagcgcccaccccaggggcggaggcgcggacgtcctgccggggtaacccgcggccgcccccacctcccgggcccgcgtgactcacctcccaggccaggcggggcgggatggaggcgcgcgcgcggcccctccgcacagacttcctgctgccggggcgggggatgctggccccggctccccgggcctctcgcgacccccatccccctgggcctgggacgcggggacccccgagcctgggagggcgcgcgcagtgcggggcgcggagggaggtctggtcctcacgcgaggtccccgcctccagggtcctcggagggacgagggcgcgcagcctccgcgttcccctgcaaacttgcgcgcagccgggggcgtgtccgtcccgggagggtccccccaacacccgggtccccaaggctcttaccgaccagtaagcacagcacgtcgagcagcacgaagacccacctccgctgcatggtccccgcgacccccgacgccggtcccagcgcgtcccgtcgcgtcccggcccggcc

SEQ ID NO: 335863 - DNA, 178 bp, Homo sapiens; identical to SEQ ID NO: 205057
  chr19:460121-460299
  hyper

SEQ ID NO: 335864 - DNA, 1684 bp, Homo sapiens
  chr19:460529-462213
  hyper
cgcacgacgtaggagaccccgggccccaggaccctggcgtcggggtgtagccagccgtgcgcgggtttgtggatgaagctgcccttccggatccactcggcggcggcggcggcgtccccggaccccgccgccccccgcccgccccgcgacccccgcgaccccgcgccccgacagcggctgagcgcgggcaggggacagggcgcggcgcagcggggctcgcaggcgcccaggacggcggccgccagcgccgggacgccccccgggcccgccggctcgggttgggggtccgcgccccccgaggccccagccgcccgcgccgccgccgggccgcggcccaggaagccgcccggggccgcgaacttccactgcggcattcggggcagcaacgcgcagaaggtggtgggcgcctcgggctcggggggcgcggggggcgccgggggcgcgcgcccgcccggaccctgcgtcatggccgcggccgcccgacggagcccgaccgggcgctgcgcctggcgcggaggaagccctcccgctccgcccgctccctcccgccccccggcccggtgatgtcatccgcccggcccagcgcgcagccgcggggggctgcgcccctgggaccccggccctcctcgtcccggagcctggccgcgaggctggggaaactgaggccctccgaggacaccgggcgctggcctggaacccgcagccaaggcgggacggggctttgaacccagaaccccgtcagcgaccctccccgctgcgccccccacccccgcccgccgcccaagttcgcagaaggaccgagctggagaagcttagaaattccacatcccttctttcccctatttcctagtggggaaactgaggccccgggaggcgcggccagggaaaagagaaccccagaccctaaggtcagcccctccctctccgttgttgcagctagaaggtaccttagggtcacccctatttcttagtggggaaactgaggcgcggggaggggaaggggcgcggccgagggctcacagacgaagctcaaacccaggagtgccggctcgggggtggggggggggggcggggctaggagcggagccgggcccctgctctgcggcctgtcccggcctcagtttctccggctgtaactcaggggagcgggctggagggtcgcggcccttcttccctcacttctggggagcccagtcccgcaccagctcatctgagctctgggcctcagcctcccaggccggtcgctccatccccagcctcaacctctccgagaccggccgcaccttccctggcctcaagggtcggttccttctgcaccagaaaacggggtgtcactgtcaccccgggacccagcctcctggcccgacttggctggagctcccctgcacctgccccgccccaagcagggctgattgccgggaacaaagggaggggccgggacgcgctggcaggtggggagggagggaggggcgaggctgcccggagcccgatcgataattcaggggatgagatcacagccggcgccgcccgcggggccggggaggtgggggaggggagcgaggcgcgcggtcgcgatcggccgtctctgccgcggcgcgtgtcggactcagcccctgcgcgtccgcgggaggagcagatcgtgggcgcgattggtcgggctggagccgcggctggacctgcgcgc

SEQ ID NO: 335865 - DNA, 594 bp, Homo sapiens
  chr19:603411-604005
  hyper
cgcaggctcctcggaggaggcactggctcgaggtgtgggcgcccctcgtcccccaaggaagagtgcccggggctggtcccgcaggtgccccggggaggcaccggcctgaggtgtgggcaccctcgcccccaggttctactgggacttcaccatgctgctgttcatggtgggaaacctcatcatcatcccagtgggcatcaccttcttcaaggatgagaccactgccccgtggatcgtgttcaacgtggtctcggacaccttcttcctcatggacctggtgttgaacttccgcaccggcattgtgatcgaggacaacacggagatcatcctggaccccgagaagatcaagaagaagtatctgcgcacgtggttcgtggtggacttcgtgtcctccatccccgtggactacatcttccttatcgtggagaagggcattgactccgaggtctacaagacggcacgcgccctgcgcatcgtgcgcttcaccaagatcctcagcctcctgcggctgctgcgcctctcacgcctgatccgctacatccatcagtgggaggaggtgaggtggggcgggggcggggccaaggcagcaggggc

SEQ ID NO: 335866 - DNA, 199 bp, Homo sapiens
  chr19:660994-661193
  hyper
cgtccatgattaaatatttgtcaatcactgttccatgctggctccctggccagcctgtaaattctgtgagggcaaagaccacagcggcctgtcaccacagagttcctttcactacaggaaggccctccccaggcccagtgacagtcggaggaggtcaaggtcctccgtgtccaaggccacggggcgaggaagtggctcc

SEQ ID NO: 335867 - DNA, 585 bp, Homo sapiens
  chr19:661431-662016
  hyper
cgagacccctgggagacagaggagtaaggcaaggctcagtctcagctccccaaccttcgccccacacccgagatttcactttatttgttcctcctgctggggaggggaagccctgtggcttcagtagagaggaaaccacacctctctctttccactcctgggcctggccccgctctcccgccatgccccaactctagcactcgctcctcctctgtgacccagagacaggcggcttctcctgactccctccagccccttcctgggtctctactcccggggaactgcactgcttctggggggcttggacttctcttacgggtcaaagcgtagcaacagccgggcggctacgtacacagcacagtaaatcctcaatgcctgcagcctcttcccctgggcacagggtggggagtccagacccctccacctcctgcggctgctcccctcaagctggccaagcggctcccgactgagccggctctgccactttcccgctgagccaccacgcgcctcagtttccccatctataaagcacgggtggctcgactaaatcaccactttgcacgtcagcctggcgaagggcaacac

SEQ ID NO: 335868 - DNA, 743 bp, Homo sapiens
  chr19:813409-814152
  hyper
catgggttcggcgggcgcgcgcaggtgcccggggctggcgtcgtcgggcagccccaggccgcggccctccaggctcttctgcttccactcgctgatgagctgcttggagcgcgaggcgtccagcggcacgtggatggtcatgtggcggcgcgcggggtcgtccagcgagggcgcgctggccctgggcagcgtgtggctgaaggtcaccatgttctccttggccatggggctgcgcggggccagcaggtccacgtccacgctggcgcgcttcaggctgcccagcgaggtcttctcgcgggccacgggccggggcgcgccctccagccgccctgggggccccagctcgtcggtgctcaccgacttattctgctgataaaccgagtcgtggccccgctgcgtcagggcccgcagcgcgtccttggcgggggccggggccgcgggcttctctgcaggtggggcctggaagttgcccaccgcgtggcaggcctgtcggggagaggggtctgggggtgaggcctggggctcagagggctcctcccctgtgatcgttggacttgccgcggggggctctggaccgggggtgggggctggcaagctcttgtccagtgggaccggttcccaccccaaggttgctgacccagcacatcgggcaggtctgagcccacgggattctgactccagcattccaagggcgagacacttcagcacccatgccttccccctaagaccccttcgggacccac

SEQ ID NO: 335869 - DNA, 437 bp, Homo sapiens
  chr19:814406-814843
  hyper
cgacccccatcagaacctgccactcaccaggtaggcagcgatgcccgccccgatgaggaagccggcatacacgtccacagggtggctgcggtactgcgtgatctgcgtgagcccgcatacgcccgcggcgatggcaaaggcgaagaccaggatgggcttcagcagcttggtggtgtccgagatgaccgagttgaagtacatctggggcatgggggttggggtcagggagggctccccacgggtcagcaagagggcctgggaagggcagtgaggggccggactcaccgacacatagaccgcggcgaaggctgacagcgtggcgtgctgggacgggaaggtcttcctgtaagaggcgtccagcgtgagccccgcccacctggggaccccagctccagtggcctctctgtgtctctgtttccccgcatgttcaccggggc

SEQ ID NO: 335870 - DNA, 709 bp, Homo sapiens
  chr19:919400-920109
  hyper
cgcacacgtagggggatcagcagggcgggcggacagggcaggctcccaaccgcgcaggtggccacacgcccggctggcggctcccgcaggtctcggtgcaggccacgtgtgccactctgaccgccatgagtgtggaccgctggtacgtgacggtgttcccgttgcgcgccctgcaccgccgcacgccccgcctggcgctggctgtcagcctcagcatctgggtaggtgagtacagctcaggggcctcacgggagaaggcggacacgtcctagtgccctgggcgcccggagccacctgccgcctcggtccagcatctggaaaatgggcgcaatagctctgcctgcctagggccagcgaggctgcagacggggcgcccgggcctttgcagggtggctgggtgaacgcctcccggggaggcacgtgggggaccgctggttccccgagcggggtcttcatcctggcttgtggcacaggctctgcggcggtgtctgcgccggtgctcgccctgcaccgcctgtcacccgggccgcgcgcctactgcagtgaggccttccccagccgcgccctggagcgcgccttcgcactgtacaacctgctggcgctgtacctgctgccgctgctcgccacctgcgcctgctatgcggccatgctgcgccacctgggccgggtcgccgtgcgccccgcgcccgccgatagcgccctgcaggtg

SEQ ID NO: 335871 - DNA, 743 bp, Homo sapiens
  chr19:941824-942567
  hyper
cgtatgtgtgtgtgcacgtcgaggctggagagtgtgtgtccaaaagcgtgcctgcttgggctcgccacgtgtgcgcacgtgtgcccgtgacagacgaccttcctgtgtgcctgagcatttgggagcctcgtgctggaccctgaagcatgaggtcgcggtggggcctattaaccattagacccccggggctgctagagagtggcgctgtctgtcttggtcagcagcgcgcgtcggccgcggggcacagatcagcgcctcccctgcccgccatgggctctggagccagcctagccgatgatggagccccagtggccaccgagctatggacagggccgctgggggtgcacccccaccctctccgaccccgaggagctgccggcagagccctgtccactcttgcctcagtttccctgctggacacaaagggctgaagtccaggtcccttcgatggcccaaattacctgactgtcgatcctgactggggcggtggcgacatggcccccgcagctgcccggcggtggcacccaggggcgtcacccacgagggacgcttgactcaaggtcctctccactggccgccgggagccgggccgggagccgctgcggtgccgacctggtgggtggcacacggggggcgggtgcggaccgcctcttctccgctctgccggctgcacatggccagaggacaattgggggtcacagggttaaacgctgactaatctggccattgaaggcccaagcgcc

SEQ ID NO: 335872 - DNA, 209 bp, Homo sapiens; identical to SEQ ID NO: 239898
  chr19:1444964-1445173
  hyper

SEQ ID NO: 335873 - DNA, 462 bp, Homo sapiens
  chr19:1449921-1450383
  hyper
cggggcacccccttccctcgggggggtttcgccccccgcactcacggcccctgagcccgcgcggaggcccgacgccccgcggccgacgccggtccccgccccgggccgccattggctgttgccatggcaccagcccgtcttcccgcgccctcattggctgtctcacccgcatccctcatcccgcatcctcccccgctcgcggtggtctcgcccagcgctaggagcggcagcgccgcctgcccaggcccggaccgggctttgtccgccccggagcccctgcccgcgccgcggagaccccggagcccgcgcgctccgaggccaccccgggccgggatttccggtggggcccgcggagccgcgcagagggaggaggccccagacccaggcgccccgccagcccagctgcacgtaagcgggtgtgtgtcctcggggaggagggcaggggcgcgacctccgcctcgc

SEQ ID NO: 335874 - DNA, 524 bp, Homo sapiens
  chr19:1455104-1455628
  hyper
cggcgccgccctctgagcccgcccccgctgacttgctccccaggtgtttcctgctgaatgagattgagaaggaggagaaggagaagctctggtactactctcagctgcagggcctgtccaagcgcctggacgagctgccgcacgtggagacggtgagccggccggggagccagggggcagcgcgcccgccccactcagggtgcgggaagcggcgtgggggaggaacggggcctggcccgggcgcccctcaccgtggcccgcccgcctgcctttgccagcagttctcgatgcagatggacctgatccggcagcagcttgagttcgaggcccagcacatccgctcgctgatggaggagcgcttcggcacctcggacgagatggtgcagcgggcacaggtgcggcggtgggcggggtggcgcggcggtaggcggggccctgcgccagtgggcaaatcagagtgcagatattatgggcggggtctggggtaatgggaggagtcttatgcctcctgggttggggggcgc

SEQ ID NO: 335875 - DNA, 884 bp, Homo sapiens
  chr19:1467200-1468084
  hyper
tgccccgagcgcggcgggggcgccgggggcgccggcctccactttgcagggcaccggcggcgggaggaggggccggcgcccacgggttctcgccctcgcggcgccgcggaccaggagctggaactgctgcgggagtgcctgggagccgccgtgcctgcccggctgcgcaaggtggcctccgcgctggtgccaggtcgccgcgcactccccgtgcccgtctacatgttggtgcccgccccggccccggcccaggaggacgactcctgcactgactccgcggagggcacgccggtcaacttctctagcgccgcctcgctcagcgacgagacgctgcagggaccccccagggaccagcccgggggaccagcgggcaggcaaagacccaccggccgccccacctctgccagacaggccatggggcaccggcacaaggcgggaggcgccggccgcagcgcggagcagtctcggggcgcgggcaagaacagagcagggctggagctgcccctgggccggcccccgagcgcccccgcagacaaggacggctcaaagcccggccggacccgcggggacggggcgctccagtcgctgtgcctcacgacgcccactgaggaggccgtgtactgcttctacggcaacgactcggacgaggagcccccggcggccgcgcccacgccaacccaccggcgcacatcggccatccctcgcgcttttacgcgggagcgtccgcagggccggaaggaggcccctgccccgtccaaggctgcaccagctgccccgccgcccgcccggacccagcccagcctcattgctgacgagaccccgccctgctactccctgagctcctccgccagctccctcagcgagcccgagccctcggagccgcc

SEQ ID NO: 335876 - DNA, 594 bp, Homo sapiens
  chr19:1491131-1491725
  hyper
cggggggccgggggcggacaccggcgcggggccggagcatcgcggctcaggctgcgggaaagcggtgcgcgtgcagcggggtgggtgccctggtccgcgggcgagctcgagcagccaaccccgggcgcgtcggggccatggacggcctgaggcagcgcgtggagcacttcctggagcaaaggaacctggtcaccgaagtgctgggggcgctggaggccaagaccggggtggagaagcggtatctggctgcaggtgagccgtcggcgctagcccgtttcgccgacgggcacaccgaggccatgggcctgggggtcgcagaccggactccttccccggctacggggtccggtccggccggtggagcgcgcgaggtgactgggacctcgaggtccgcccgcagcccttcccttgcccgcgccctgcgaccctgctcccgggccacccctctctagcttccgcccctggccgccccccgacgcctccttccgggcgctgggtgcctgccatgccgaagtccggttcttccagttgcccagtggccccagaggggtcgggatgccagtgtcctgcgcgtttcgccgtcccccttccccc

SEQ ID NO: 335877 - DNA, 182 bp, Homo sapiens; identical to SEQ ID NO: 239908
  chr19:1675933-1676115
  hyper

SEQ ID NO: 335878 - DNA, 197 bp, Homo sapiens
  chr19:1718944-1719141
  hyper
cgatgggagcgggggcccaggctgcggtttacactgaatccacaaaaatcaccgaagcttgaaaagtgctcaataagccatcgatcgctctctgctgatcggtgccgccgccgcagcggggctggggggaaaggcggggcgagcagacccaggctccctgcctgtgccccacgcgggaccgcggccctgcatctgcc

SEQ ID NO: 335879 - DNA, 646 bp, Homo sapiens
  chr19:1725428-1726074
  hyper
cgggtggtgggaacgggattggaatcccgactgtggggcccctgcggccacctccaggatacagcggaccccgatgaagccctggcctgggtgctgggggaggctccgcggcgcggtcccgcaggcgggaggcgatgctgccgacgctattgctgccattactattacggagagatggggcggggcgggagcaccgggcccttcccggaagcccttcctgagcttattcagtgcctggggccgcggcgatcgatgacagctgggcgccggccgagccccctccgggccgcgcgggggcgcatgcgcggggccgcgggatcgatcggccgcgctcgggcctccccgcacccgcccgaccccgcccccccggctcgttgcccggcaacctctgcccggcgcgctcccattggctggcggcggcccgggccccggccgcgcgtggtcacttggtcagcgcgggctcggcgtggccgggggcctggctccgggcgcgggtcgatgccgcctcgcatctgacctttcccggcgcggggagggggcccgagaggatggagagagctggaccatcttggaagaaaactttattgacccgtctcttatcttggggacgcacggttccagcggcggggggcgagggtacggctgg

SEQ ID NO: 335880 - DNA, 1577 bp, Homo sapiens
  chr19:1748599-1750176
  hyper
cgctgcagccttgctcgggtcccctagcccggcgcctccgcaaaccaacccaccgcgggccgccgagccccgctccgggatccgccggctgcctccatcccagaagagtgcgcagagaattaaatctagatatttacatgtttaatggctaaaggagcctgtcttctggcagggcagggagggcgctcaggtggtttaactcagcgccgggatcccgctcagctgcgggggccgcgaaccccgccgctgggccgacgattgggcccctccggagcgcggcgcccaacgcgggtttcgttgcgtcggggaagtccgtggcctgcagcgtccagtccccaggctgtcagccgagccctggagtggggcgttctccaggcccccaacccctgatccaggccgttcccctcccgcgcaccctccggcgggggctgcagcccgcgcccctcgccgccaagccccattttcccacagtgcaaactgcagcaaacgaactggttttctcctgagcgcacgctgcggggagacgattccaacggcgtccagtgaggaggggcccaggcctgcgagacggggcgcgttcctgtccccagacccctccggctgcgcctcaacccccagcccggctctctgacctgcatcggtcgggccgggcacagaggaggcaaagcaggcggaggccgcgagaggagagcagcctgacctcccgcctgagcccggacccttcccctcgggcaccctcggacgcccccgccccagcgtgttactttctagatggggaaactgaggcgcggccagggcgatgcggcggaagtcccgcgcccggccgtctcccgcgcctgccagacagagccccgagaagagggcatagaattccctcctctaattgtgtcccagaactctgggacgacggaggccaagctgctgagggaggggacgaggacgcggggccccagggaccaacccctccgctccccggccagccgcggccgcccagcctcggtgccccggcgcaaacaagcgcggtgtttgccgagcgcgaggcgggcggcgcggcccgagagcgatgaggattcgatggagccgctcgccgcggcgggggcaacggagcccgggcgggcgcggggatcgatcgggcacagctgtcgcctaagagcccgcgggagcatccacccgcgggccagagctgcccgggcgccccgcaactgcgggcaggaaatccgggacgtcgggcccgccaggggcgaaaccccaaagtcgcgacacccggggtggggaggtcaggacgtccccacggccaacgtggaaccttcgggagccgcgcgctcagcctcgccgggacccccgccaggccgtaaaagcccagagtctccccccaaatctaaataaaatccccagaccccgcccgaacgaaggcggctggagtccagagggagaactcctgccacacactaggcaccggcggccgggatttggggcgcccgcaggtttcgggggccgggagtgggagcagagcggatctagggctgcggctgggcttgggtggggcgcgcattcattgccatcgtttagtaaaacct

SEQ ID NO: 335881 - DNA, 417 bp, Homo sapiens
  chr19:1751192-1751609
  hyper
cggagtccctgaccctcgtcttctctttcaaaatggatgctttccctgctagaaaagccacacacgcttgctattaaaatgaacacgatcatcaagctgtaaaaaatatatttaaaaggaagcctgcaaaatcccagctccctaggagctcccccacattggcatttgggggaacttccttccaccttgttatcctcccacccgtagagacccccagcccccacctggtctgcgcttcttgagcctgggatgctagcgttttatggcggctgattgatttttagatctcacgattatttttaattatctgtgattgttggagggtgagaatgaggagcgcaggctggggctctgtgcagccacatcccccccgccgagattcagcatctgcacggggagtggggtacgcgactgttc

SEQ ID NO: 335882 - DNA, 2389 bp, Homo sapiens
  chr19:1753216-1755605
  hyper
cgcgaaatcggagactctgggtcgaggcccccagccccacctgggcagagtctgtcctcggacccccgcccgctgtcccccgggtacggcctgccccagcgggcgcgggcgggcgcagtggccagggacgccgaagccccaagtctggccgacttcggcctgcttggtgctcgagtggggccggggcgggcggagagcgaggctgcgggaggcagcggtggcaggagcgggtgggcgggggcgctgacgtcagacccgggcccgggcgccggcggccgctcccctgccacatcctggtggccgcgctcgcagccgggccgggccgtgcgccgcgcagcctggcagcctcgcgcgcagccaccggggagcgggcgggagtcatgcagcggccttgagcactaggggccggcgctgaggagcgcgcgcggcgggagggcagccgagcatggagctgagcctggagagcctggggggcctgcacagcgtggcccacgcgcaggcgggcgagctgctgagcccgggccacgcgcgctcggcggcggcgcagcaccgcggcctggtggcgcccgggcgcccgggcctggtggccggcatggcgagcctgctggacggcggcggcggcggcggcggtgggggcgccgggggcgcgggcggcgcgggcagcgcgggcggcggcgcggacttccgcggggaactggcgggcccgctgcacccggcaatgggcatggcctgcgaggcgccgggcctgggcggcacctacacgacgctcacgcccctgcagcacctgccgccgctcgcggccgtggccgacaagttccaccagcacgcggcggccgcggccgtggccggggcgcacggcggccatccccacgcgcacccgcacccggcggccgcgccgcccccgccacccccgccgcagcgtctggcggccagcgtgagcggcagcttcaccctcatgcgcgacgagcgggcggcgctcgcctccgtgggccacctctacggaccctacggcaaggagctgcccgccatggggtcgccgctgtcgccgctgcccaacgcgctgccgcccgcgctgcacggcgccccgcagcccccgccgccgccaccacccccgccgctggccgcctacggcccgccaggccacctggctggggacaagctgctgccgcccgccgccttcgagccgcacgccgcgctgctgggacgcgcggaggacgcactggcccgcgggctgcccggaggcggcggcggcacaggcagcggcggagcgggcagcgggagcgccgcggggctgctggcgccgctgggcgggctggcggcggccggggcgcacgggccgcacgggggaggcggcggccccggcgggagcggcggcggccccagcgcgggcgcagcggccgaggagatcaacaccaaggaggtggcgcagcgcatcacggcggagctgaagcgctacagcatcccgcaggcaatcttcgcgcagcggatcctgtgtcgctctcagggcacgctctccgacctgctgcgcaaccccaagccgtggagcaagctcaaatccggccgcgagaccttccgcaggatgtggaagtggctgcaggagccagagttccagcgcatgtcggcgctgcgcttggcaggtaggagcgtggcgcgcagggccagaccctgggggcgccggctctggactcccgagcacctagcggggcggcggccgatgcccggggccagcgccccaagccccgcccgtgcgccccggcagcccgggaccccctatcaggaagctagaccgcgatccgcgccgctgcccgtttgtaccgttgccaaaagggagaaagggattgtgccgcctccccgccccccggtcgccgcttctgcccctttcgggagcgcgtaggggttctctagtccttgttagactgctgggaggctccgagcctctccccaagcagccctcagggaagctcattgtgtgtgtgcgtgtgtgtgtgtgagcgcgcgcctgttggggggagctgtgtccccgaacgagctgctgttgtcggctaaggtgccactcccctcctccagagtgggtggagaggggctgttgagcccccagccccgggccacagagctccgagacgttgcggcgggcgcctgcagctcagcagcagaggccgagcccgcgctcatccccccacctgccccagcgcgcgcttctttgtagttcggccccgcgatcgataccccctccctctcccctccggccgctggcaaaggtcacccgagaatggcgggggaggggcggccccggggaccctcggcccgcgccgcccggaggccttcacaccccgacccggcgcccgccccgcgcagtttggtcgtggctcgggtgcgcgcgcccctgccc

SEQ ID NO: 335883 - DNA, 1116 bp, Homo sapiens
  chr19:1757112-1758228
  hyper
cgcaggcgagaagtcccatggggggggggtgggctccccgcagccgggtcagcagcacccagcacccgccctgagtggacaccgcctgcttcgcctgcacctgaccctgcacccaggtgggtgttcgctcctgccgaccccacagccatccaggcctccgccgtcccctttctgccacggggagagttgcagatggggaaacaggctccgtttgtgcctcgccttcctgacttgtgacaatgacaaacagtctcagctctgggagtctgggtttcctgtcgaggaagggagagttagaacagtcgccgtctcaggggtgcgtgggggaaccggaggggtgagcgcagctcctggcaccccgagcctcccgcagggcgctggggcgttgaggatgataaacccggaccacgctgcccgcctgctctctgccgggtccgctgcccacgccgtggccccgccgcgcggccccgcggccgcggggttcacgccgtcaaccttgcgcacctgtcgcgtctcaggtgccctgggggccgcgtctacaccaccggactccgcctggggcgtaagaggtggcgggggcgagggccgcggggtcactaggctccggcccaggcctttagttccggtcgctgcgcaaatgaaaagcggttaagtggcggcaaatcgcggcggttagggggagacggccggatgcgtccccatctccacctaacacggcgacgccccaacgctggtgctcggaaagggaactctgcccccgccccgcccccgcaccatttcaaccccgcagcagaggactcgccgccctttctactccggcatccccattccccgctccgcgagcaccgcgggcctccccaggcctcctccaaggagaactttgcgccccgggtctcccgtcgcgcttgcccggctcggggcgggccacgcgtttccgcaggtgccgagtgtcctgccgggcgccggggccaggacagagacggggacagggagggagaaagacccgcaggtgcagacggagagggagggggagacggggagatggagagagagggaggggtcgcgagacaaaaccagagagtggggagggagagaccgggagcgggagaaacagac

SEQ ID NO: 335884 - DNA, 1088 bp, Homo sapiens
  chr19:1761779-1762867
  hyper
cggcctcagttttccctctgccaagtaggtgctaatgtgagaggggctgagaaaccggcacccctcctgagtcccgagtgtgggcagatgtggggggcgatgggggacccctccgagctaccaagtcatgacctcagagccacagattcacagaagagagaaacaaagactggaagatgtgcctggcacaggctgctggagaggcgtgcccgggtcacaagtgtagacgcacccggagacacgtgtgtagacgcctccgttcacactgggacgagtgcagactgacccaggacccccatccgccctctggcagtcttgagccagcaactcccctaagtggggtgcggggacatctggaagacgccccatctccccctggacgcagtggctgcgccatctggagaccctcgtgctggctgctgggggtcctgcgtgccttccgcgcgcccccagctgcgcccgccagccctccaaccctcctgccctcctgccctcctgccctcctctctgggagtcgggacagaagctgctgggctctcctccctggagctggggctttgggaaggtcgagtagaccctcagtgagtgggatgcgcgagttggggacgctagttgcggggcagcaggggtccacgcatttccaagcgccctttcccgtccaaggacctgctggggggatgactgtgcctcagtttccatcacccagcaaacgccgtcccgcagcacccgggaagctgcggagtcgggctggggccgccgcgttgcgcacatcggtccttggcgggtgtgtggatcccagagcgcgcccggcccccaacagcctgacaggacctggacgcacgtgccccggcgccaggagacccgggacccgggaccacgcgcccgcggccttggagcctcagggtcactggtgcgggctccgcaggaaagcgcagcccccagcaggcacccaccatcccacccccgcatcccaccccaggggaaaccgcgccgcaccaggcgcgagtgttcttcttccttgtctggcgccccagaaccgcggccgtcctgggtgcgctcagctccagcgcagtgggaggacaagacac

SEQ ID NO: 335885 - DNA, 838 bp, Homo sapiens
  chr19:1765525-1766363
  hyper
cgccgcttcacgctgtcctgtgactgtgagtggaggccagctcctggagctgcctctctctggcctcacgcagcagctgctccctgaatggtgaatggatgagtcggttgcaggtccgtgcttcggcgttcattccttcgtgactctcgggactgcggcccggtggggacacagggctctgggtcactgcgtccacttgataaaccaggaacctgatgtccagagaggccagggtgcgcgttcaaggccactcggcccgcagagcccacccgcgtccccatggctgcagtggtgaggggagcagggggaggcagagaggagcccaccctggggctgggcggacatggatgcgtaacccacaccgcaggcttctgcggggtgacacccagactcaccccaagaccctgcacaccctacagctctcacgtctcacgtccacaccgcgagccagctgcatcccacacagggatgtcacaccaagatccgttgcctcatccaccgcccgtccaaggccccacaagctgatgccggttttcccgcccagaactggaacagctttcctaacggtcacaggtttcttagcttctcacttgggtggggtttggatgtgcaaggctgccgacccccatcgtggttgagcgcccgtgcaggcgccacccacccacccacagcacctcgctcagacttcgccctccaccccgccgggacatttgggaagcctcaggcagccccacgcgggcacacccgatggtggacggaggctggcaccctcagcccgcacgcggccaacgtcaggcgcgcgcagaggcacccacgggcccgccttcaggggcgaggc

SEQ ID NO: 335886 - DNA, 113 bp, Homo sapiens
  chr19:1768357-1768470
  hyper
cgggggaggccagacagagaggcggctggtggtggatggggagagggaagcggctggaagagctcaggagcccaggaaggactggcctgcaccgggacatgcctgaagggggc

SEQ ID NO: 335887 - DNA, 226 bp, Homo sapiens
  chr19:1769669-1769895
  hyper
cggcccccctactccaactcacacctctgtcagcggctgtgggggatgggagcaatgacaaagctgctcgcggtaaacagctccgactggatcgatctgggctgtgaggagctgtaattagattgaacgccgggaaggggggcagcagagcctctttttgctgcaatcgacaaaacgggaagttttttcagactctgcctggcccggcccctcccccagcctctgc

SEQ ID NO: 335888 - DNA, 359 bp, Homo sapiens
  chr19:1775063-1775422
  hyper
cgggcggcgtgcgcctcctgcctctccccggccggccacacggtggcgctgtgtcccgctcgcccgcccgcccgccgctcgcccgcagcctgcaagcgcaaggaacaggagcagcagaaggagcgcgccctgcagcccaagaagcagcgcctggtgttcaccgacctgcagcgacgcacgctgatcgccatcttcaaggagaacaagcggccgtccaaggagatgcaggtcaccatctcgcagcagctcggcttggagctcaacaccgtcagcaacttcttcatgaacgcgcggcgccgctgcatgaaccgctgggctgaggagcccagcacggcccccgggggccccgccggcgccac

SEQ ID NO: 335889 - DNA, 1276 bp, Homo sapiens
  chr19:1775741-1777017
  hyper
cgcccagagggcctcgagaaaaaccagggctcactgtgttgtcccctaaagcgggtcaagaagcacatactagaaatataaaccgggtatttaaaaatggaattttaaagaataacccctcctccgtcagatcccctgccccaccgagggaggtagtagaaaacttccttcctccccacccgccccggccccctccccagggacctcagccctttccaaagtcgccaaaaacccacatcaagccggatccttacggtcccccaccctctccaaaaccaaccccacccgctggcaggacggcccctgcggccgagaactgagctgcccctctctgcggccaggattcctcgtgccaagaatcgcctgccttaaagtctggggaggggcctgcggcgggcgcccagcacctacgggcgagcacccttcccaccccatcccaggccgcaggggacggggggctcccacgtgcgggtaaattccagacgcccccgccccgccccgtctgttgagttcactttacctttaggcaccttcgtggagcgcaaggaaggacgcagctccggacacgggagaccacgcccaggctcccaggagaaggggacccggccggagaaggcgccgctggggccgcccggaggagcccctctgcacgggcccgtggagacgcttcctgcgtggaaccttctggaatccaccgcccccctttccgcccgcgtcagggtctgaactgggcttgcaggggggcagcggggttgaacgtggtgttggtttccactctcgccaaagagagaagacgccgaggaaggtggattccgcttgctccattttttgccaaaaatatttacaaatgggaagggtcggaaatgaagatgagcgcccccctcccaccccgcgctctcccccgctcctctcatctggtctgggtgacctccgagactggccggccgcgggatcccaggagcccgcctcctccgggggttcaagatccgagtctagaaggaacctcctccctgaaatccccccactcatcggctgcctcccagggaggaggcggcccccctaccccccttgaaaatgcaaaagacatttctagtgaaatgcccctcccctcccccaggtaaaggctacctcactcaagctcatgtctgtgattggaaaatcacgcctgataccaaagatttctcccaaggatttgtgctggatgacaggattccctggcctgggacccggctcggggccccgcctgccgagtgccaccccttcccgaacctgagag

SEQ ID NO: 335890 - DNA, 318 bp, Homo sapiens
  chr19:1853369-1853687
  hyper
cgggccaggacccacctcttccaagcacccaggagaaggaggggaggccagggaagcagggccgggccaggctgcagcccaggcccggaagagcctgcaaccccggcgggcatgggctccacggccccacctgcaggccagggagggcagcgcagcccaacagccgcagtcgtcgttaagggagagttgattgtcacgtgataccgcaacggccaaagtcagcaaggcagggactggaggcccaagcccggtgccagcctcccctgcagcctctctcacccacccacccagagagggcgagctagggcccccacaccc

SEQ ID NO: 335891 - DNA, 616 bp, Homo sapiens
  chr19:1856948-1857564
  hyper
cggggtggggggggcgaccggggcaggggcgcgcagccgctgggaacacagctgccgcacgtagctcggcggcggcggcggggacatccgcagccccagccggccccgctcacgtggtcccactcccgccggggccagggggcccgggccagggtcgcctctccggcctgggtgcctgccagccccgccccgcgcttggagactgaggcgcgcacatgcgcacgtgggtggcggggcagggggtgcacgggctacccacccacgctgcgctgggcgaagcgcctctgcgaaatgccaggccctgcctcgcacacaatccactcgcagggaggagggtggggtgaacttgtgggggcccagagcgcgctgctcctagccagccgggcccccaggtgcacagccacccagctgctccgcgctacctggccgagacgcagcgccctgaggatgcggtgggtggggacaacgcgggagggcagtgtgggcggggccgcggtggacttgaccctctgactcaggctgggcccgggtgagctcaggacagcctcggaaacaggcaggctcagaaaaatggagtccaggaagtcctggaaacctggcccggccccgtctgagc

SEQ ID NO: 335892 - DNA, 343 bp, Homo sapiens
  chr19:1862256-1862599
  hyper
cggttcccctcgccgccccggggactgcgctaggaggggcgttggtgtagccgaagcgctccaactacgcgcaccttcccgaatcgcccgccaggtaggggtgaacaaacacgccagggaaatacagcagtgtggacccgagcccctcgagggtcctccaatactatgaagttcccccgcccagactcaggccccaacccgcgctcctagcctcgccctccccctcgttaaaatacagagaacgcagagaaaacgtgccgggctccccccatcctggccccacgccaggtgctctgccgacctctggggagaatccgcgcggccaccccggcggcggcgacgc

SEQ ID NO: 335893 - DNA, 341 bp, Homo sapiens
  chr19:1874698-1875039
  hyper
cgggtcagccgagaaatggtattcagcaataaatgtgtcagagtcccaaaaaaaaaaaaaaaaaaaaaaaaaaaaaaacacttctactagacagaaagcgaattttcttaatctgtaaagtgcacctagaaaccaccaccatccacccaacagaaaaatgagccaagaagataaaatacaaatggcttttaaatagtcaaacgtttataataaacatattttccaatctcgaaacgactgtcagtggtaacaatgatcaacgtaacatagatgtaacaggaacatcacgacgttcgactatacttacaggaaacacaagctacagtgaaatactatctcac

SEQ ID NO: 335894 - DNA, 1111 bp, Homo sapiens
  chr19:1978023-1979134
  hyper
cgcttctgtcctgggctagggaggtgggggggcgggggaggaggagtggcagacactgaggcggtgaccacacgggcagggtgcaggtgtcgggatgacttggcaggccatggtgcagtgctctggcaggctgggcccaggccctgctgctgggcagtggtgtcatttggagggtggtccttcagggaccccctcctgcctcctgcctcgggggtgggctggggaggtcggggctaggtgggccctgcgctggcggtgctgatggtctctgtccccgcaggaaagaatctctatacaaatgaatacgtggctatcaaattggtgagtcggcccctccaccccacccccgctgacgtgccccccagggatttcagggcagcgacccggtcccctggtgactcgctcttgtgcccccaggagccgatcaagtcccgggccccgcagctgcacctggagtaccggttctacaagcagctcagcgccacaggtaccgggcggcccgcgggtggggcgggggctgcgcaggggcagggagggggctgccgccgcacgcccgtgcgtctgtcctccgccgcagagggcgtccctcaggtctactacttcggtccgtgcgggaagtacaacgccatggtgctggagctgctggggcccagcctggaggacctgttcgacctgtgcgaccggaccttcacgctcaagacggtgctgatgatcgccatccagctggtgcgcggcgggcggggcggggcggggctcggagggaagagggtggccctggaggggagcgcgtgggacggggaggggcccggccgacaccgccgtgcccccctgcagatcacgcgcatggagtatgtgcacaccaagagcctaatctaccgggacgtgaagcccgagaacttcctggtgggccgcccggggaccaagcggcagcatgccatccacatcatcgacttcgggctggccaaggagtacatcgaccccgagaccaagaagcacatcccgtaccgcgagcacaagagcctgacgggcacggcgcgctacatgagcatcaacacgcacctgggcaagggtgagctgcgcgcgcgcggcggggggcgggcgcccggacccc

SEQ ID NO: 335895 - DNA, 728 bp, Homo sapiens
  chr19:2164931-2165659
  hyper
cgatcttgagtgggcaggattgggctcacccccggagttagtaaattttgtcttcttcatcttggtgaccgttggaaaatgacaggccgggtggaatgttacagaggcaccccaccgggtggttccagaaacccgcgtgcggctcccggggtgcgagtcccggcgtggcccctgaggaggcggggcgcgtgcgtccgcgcttgggaccctctggccacgctccgggctgggcagggcgcgttttcggggaaaagtgaagcaggcgctgtcagcgagcgtgtccggggcgcgagttttggggggcgcgtctgcagggcccggccgggcatccccgcgcgccctgggactcccgcgcgcgctgggcttgtgtcagtttttggaaacgtgctcgctgggggcggggtcaggacgcggagagcgctggggagcccgggctggctcactgccccgggtcggtgcgagtggatgggagagggagcgcagcttccagcctggccgcacgtcccgcgcgcggggctggcggggtagggccctggggctctggcttctctggttgggcagctccgggtgtgcgcctgggcggcctgagccgggatcccgccaggagaggtcctaggacaaaaactgaaagcagaggccgcgcttcagcgccccgaccggtttcctccctcgaaagttcaaactccagaacccttccagcctccacttctctctgttgggctctcatc

SEQ ID NO: 335896 - DNA, 172 bp, Homo sapiens
  chr19:2236299-2236471
  hyper
ctcaggctggggccggcgccaaaaatgtctcagggcgcagacacggaagcacccccagggctagtgcgcctgcgcaccttgggccagccatgccgcccgcctccgctgcgtggcgctggcgacccgtggctgctggcgtgggcggggtaccggttggtaggagagacggacc

SEQ ID NO: 335897 - DNA, 266 bp, Homo sapiens
  chr19:2273764-2274030
  hyper
gccgtgttactggccgcccctagggacctgcagcgccgttcggggcagcagcacttccggcggggtcgtggcctggagcgcttccgggtctgcaaccccgccgtctgcccggccgcagcgccacctgccggccgcatccgggagcgccacccggaaaatcagggccaggcctggccgggaaaccggctggaaagaggaggaaaggaggaactcgaaaagattgtagacttggcgagcgggccggggggatattcagccgtctgagc

SEQ ID NO: 335898 - DNA, 1227 bp, Homo sapiens
  chr19:2289763-2290990
  hyper
ccatagcagggacaggaagacgggttgaaatctttagaaaacgcttgagaaactgcaaaaaagacgcatgctgatgaaaaacagtcctgcggttgggcgtctacaaaaaaaggggaagttctgcctggggagcgccgtgcagccgtccccttcccctccgggaaatgcataggtggacacgcgagcggccggcccgcgggggaggggaggggagggtccgccctggggacccctcagatcatcttcatgttgaacttgcgcgcgcctccctggcccgccgcggcggccggcccatccaccttgcggaaggagtactccaccgagaagttgtttttgtgctgcccgcggccgcggctccacacgaacagcagcacgaagcagaagaggaccacgcccaggaaggtgatgcagcccatggcggtggacaccaggatggtggtgaggtcgagcggcgcgcgcagggccgccagcgtctcgttgtgggcctcgcccggggtccggttggcggccggctcggggcgcacggtcagcgtggcgaagtaggtgtcgttgccgcccgcgttgctggccacgcacgtgtaggtgccgctgtcctgcggccgcgcgtcctggatctccagcgtccccccggggagcacgcgcgcccggcccgcgctggtggccgtcaccggccggtgctggggggtcacccaggccacggtgggcgccggctcgccctcggcgcggcagaggaagcggacgtcttcgcccgcggtggccgtgacgcgctgcagccgccgctcccggatcttgggtttgcggcacacgaagtactcgaacagcacggagtccggcaggtttcgcagcgcgtcgccgcgcacctcggccggggtggcgcaggccggcagccgcccgtcgaagttgagggtcttgcgacgctgcacgatccacagcaggcgacagtcgcaggccagcgggttcccgtccacgcgcagcgtctctagcgtgttcaccgagtggaaggtgctctcctccaacgtggagagcaggttgttggagaggttgagcaggcggatctggcgcaggcccaggaaggcctgcggctccaccacagccagcagggccccggccaggtgcagctcgcgcaggcggaccaggtcccggaacgacccccgcggcaccgtgctgatggggttgtgcgacagattgaggcaggtgaggtgcgcctggtgccgcagcgcggcggcc

SEQ ID NO: 335899 - DNA, 593 bp, Homo sapiens
  chr19:2302470-2303063
  hyper
tgacgtcacctcctcggctctgcgccccgccgtccacaggcgcgaagccggagctggggttggcgaccgagaaccttcctgcctcccctccccagcaaggggcacgtcccaccaggcccggactgcccgtctgcccctgcagggcccctcgctctggtggcgggctcggtgagctctgctgcccggtctcgggagtctgggggagcgcggcgtcgacccctgtggagggaggactcgtgtttcaaggacagagcctcattaccatgcacgaccagccgcagctgaggccgcagaggcctttggcaggggggccgggccggcggcagggacggcgttggcggtggtggacgggagtgggggtctgtcctgaacaggtgggggtggtccctgtgctggcccccgccatgcgatcgcaccccaggactctcctcctcttcctaagccccagcatgtgcctggtgccgcgcgggtgctggaggcacagcggcttccacgcagacgcccgcagcaccacagcctgtgcacggcgcatccacgccctgttacaaatgttccattcaacgccttctagcacattcacagatcgtccgccc

SEQ ID NO: 335900 - DNA, 601 bp, Homo sapiens
  chr19:2461998-2462599
  hyper
cgtgctgttccatccgccaggagcgccgtttcctgcctgactgcgcggccctgggcctcagtcttgcgctctgcaaaccggggtctcgaatctaccccagccctcctgtctcggcgctggggaggggcttcgggtgcccagagccatccccgcgggacccccagggactggactccaagtcccagaaagccccgcgcttcccgtgggtggggcccggggctttccccctcccagcgcgcagtttgggaggcgctgggcaattttcaaattttggcgccgaacgggaggggcggtgacagctgagaccgtggtccccccgggggcacccacgcccaggctgctgctggcagctgcgcccagagcccgaggtctggggcatcccgcaaagctgccccgtccattccgaggggcctcccaaggcaccacacgcgccagggggctccgggcccatttccattatggaaaactgaggcacaggaaggttagggaccggtcggggaatccgcaccaggggcgtagcggaggcgggattcgaacgcgggaccctctttcccccgggagctagaaattagtgaccaattggctgggcgcggtggctcac

SEQ ID NO: 335901 - DNA, 690 bp, Homo sapiens
  chr19:2488431-2489121
  hyper
cgtgaagagcgctgcgggccaagaccctcttgcgcatgtgacgagagcgcacgagtgtgggagcttcggcctgcgctcacaggcgtgtgcgtggggaagtgtttgggccgccgtgtacacagcaggcacgccataaacgcttcttggatggctccatgcgagggaagggagggagggcagagttcaggccctacagggaggaaaagggaggggcggaggcctggctttaggtttgaatctccgcggcttactagctccagcagctcagcaaaagcgtgactcagtttccctcgtccataaaagggaaagccgaatcgccctcccacgtgtcgaggtgaaactagacagtgcactaaggcacttagcaaaacgcgctgccttgagaacccttattacgccttccttccttccacctcaccccctggccagacactctgggggtggagaggggcgctgacccaggccccagacgcccctcccgtccgccctccctagcaggcaggagtcccggctttcccgttccttaaattggataattggagacagaggcgggtgctcgagacggagaaatccccaagtgggcgaaaggcaaggggcctgtcctagtttccctgcactgggggcccccaccctcgccagcgctccctccggtgcgccctgggcgcgcagtctgtgcgctcgggagccccc

SEQ ID NO: 335902 - DNA, 594 bp, Homo sapiens
  chr19:2579151-2579745
  hyper
atgggtgcccccggccgggcaggtccagacgccaaggtctgcacaggggtcacccggacacacctgactcggaccatgtggctaagtttgttttgaaatttcactgccccagcgtaacccagagtccaggccacgcccagcacggctggctcccgtccgggtctctgtgtcctgcagctcagggtggccagggcgggcgggcaggagggcaggcacctggcacccacccagacctgcgccctggccatcaggctgccccgggaagccgggcgaccgggaagatagcagagtcaacagggcgggtgcaggaaagggcgctccccatgcgagcctctgaagccctcggcacacagccctggaggctgggaatccttgagcgttttcctctgaggtctccaagtgtttatggtaacaagaggagggaggagggcgaggggacggccgccgctgggcagcagctccgcctgctggtcaccttcctcggggacatgcaaggacaagctgccgacggaaggggctttggcagaaatgcggggagcaggggacgcacccccacggacaggggcttttctggttgccaaacgtgcagacgac

SEQ ID NO: 335903 - DNA, 561 bp, Homo sapiens
  chr19:2702445-2703006
  hyper
cgaccccctaagcgcagccccgtccccaattccaaccccagcctccagttgcagcccgggtccccagacccagcccccctcctcagccgactccgacccccaactcggtccgcagccgaatccgagctgtcccagtcccctctccgggacgccggccgcgccctcacttcccctggcccggttcgcgggcgcccttacctgcgctcgggccccgcggccgcctcagccccgccgcgcagccgaaccctccgccccggcccgcgagcgctcgctcccctctgcgggggcggggccgacactcggggggcgggccctggcgtcccggcaaggccaatcgcgagccccggctgcgggaggccggagcgggggcggggcgcggggcaggcagcggggtaggctgcgcccaggagagtggggcggggctccgggcgcgggcggggccgggggcggggcgaagagcggctttccagggtgacttcgtgacgtcaggaaggcgcgagtagtttcgcgagttcgaatcccgcgctaggtgagctggttcgaatcctgcatgccagctcc

SEQ ID NO: 335904 - DNA, 688 bp, Homo sapiens
  chr19:3360723-3361411
  hyper
cgactgtgcgcgcgtccctgcgggacggtgttgtgaaactatggctgggctgcgtgtccgcggagccgcgtgtccctgggtgaccgtggggtgtccccgtgtgggtgtgtggcggttggggggggtcgccagggagtggagaactgtcgagtggccgcgttccaggggacagttgggtgccgcttgctgtgtgcgagtgactggcgctgagcctccccctagggaagggtctgccttccactcccggcctcgcctcccccagttccttttttcctgtaactggggactgcctgggcggcggaggaagagcgctccctccaccttttcaaaactctgtccctttatctttcccctacgtcccctccacttcccccagccttcggggtcccccatccgcttggcccgagggggtcctggctggaggttcgggcgcgaggtggcgccgggacgcgatcactcggcacgcagacgtcgctcgccaggggttgcgcttgcgcggggacctgccccgagaggggcggggcggcaggggttccccctccctgagaggccgtggaagtcccgaggggtgggtggttacagcagcacaggggttaggacgggcccgggaggtggctaaggagacccctattatcctatgctggggagagcgtaggggcaccgggactggtcccgcagtcccgcctcc

SEQ ID NO: 335905 - DNA, 76 bp, Homo sapiens; identical to SEQ ID NO: 205116
  chr19:3721511-3721587
  hyper

SEQ ID NO: 335906 - DNA, 1100 bp, Homo sapiens
  chr19:3785511-3786611
  hyper
cgaccgctagtggctgggaagtgggcggtgctggggggtgagtctcggcccctccaagatgcgcctcccatgaaatcctccagtcccacgtgtactcacacgcatacggatgcatgcacacgcacagaaacacacagggctcggacacagctgcgcgcagacaagcaaaggaccacgtccacgtggaaacaggtgtgcgcacacgtccccgcgcatccgcgcgcacaagcgctccacacctgggaacgtgcgcacctgtcccccgcccccggcacacacacagccgccccacactggaacacctgggcgccagcgccgggccactcgggcacgcagggcgctacgcagggccgcgcacacgcttttcggccacacgcgcacagccctccacgtggacgcgcgggtacacacgcccggggctcgtagccgcgcacacccgcacccaggaaaccccagccaccaccacgcggggtccgatcgcctctgagcaccctccgccccagccgcgcacccgctgcgcgcccgggacgcgcacactcgcgcacacaccggcccttcctgcgcacgtcccgggcccacccccgcctagagccctcggggtttccccccaccccggcctcggggtctctccacgtctccccgccgacgtgctcacctgctcagggggcgcccccgagccgcgccccgcgcccgcccccaggagggcctccgcgagccggctgcacaccccgaggcggtcccggctgcacaacttggagcgagttgctccgtttcctcattttgggggcgaagaagggtcggggagtgggggaaagcgggaggcgccgcggcctgggaggcccccgcgggtcctagcgccggccgcactgcggtctcctccgcgcgccgccgccgccgccggcccctccccgccccgcctccgcggcccccggcgcctcccgcgcgccccgggcggggtcccggggcgcacgcgggctccacgcctggccctgacctggccctgtcgggcgtgcaccccccacccaccctgggaagcggggttcttggagcgtggaacgggcgccgccagtgcgcgcggcggggaccgggggtgagggaga

SEQ ID NO: 335907 - DNA, 229 bp, Homo sapiens; identical to SEQ ID NO: 225741
  chr19:3821974-3822203
  hyper

SEQ ID NO: 335908 - DNA, 1632 bp, Homo sapiens
  chr19:4053805-4055437
  hyper
cgtgcatgtgtctgtgcgtgtacgtgtctgtgtgcacgtgcgtgtatgtgtgcgtctgcgtgcatgtgtgcgtgcggtgcagggagagaggcgggaggggtcgtgagcggcggatgctggggcagagagcaggacggcgcctcccccgcggcgggcagctcacctggtgaagcggaccttgcagatgttgcactcgtagggcttctcgcccgtgtgggtgcggatgtgtcgcggcagcttgccggcgccctggatgaccttctcgcagatggggcacttctggaaggccttggctcggatcttcttctccaccttctgcgaccaggccgggtagacgtcgccgtcgtgggcgccgctgaagtacttcaggtagtagtccatgacgcccttgtcgtcggcccgcgactcctcgtcgctgtcccccgccgcggcccccgcccggcccaccgatgacatcatctgctgcagcagcgtgctggccgccagcccgtccacgtcgggcccgtccccgtcctcgccctcggccgctcccgacaggaagcccggagagtcgcccggctcgggggccgcctccgacagcgaggcggcctcctcctctccgccgcggccgtagtggccgttctgcgtggcggccggcggggccaccggcggcggaaagagacccccggtgggggcgtcctcatcccgctctggccacagacccgggttgctgtcgccctcgtccccgtcccccgtcgggggccgctcggccggggggcccggcccatagaagtctaagccgttgcagtcgcccgcggccacggcggccacagcggcggccacggcctccttggtggcatccaggtcatcatcggacgccccaaaggcggaccacgggaagctggcagcggcggcggcggccgcggggggcaggctgttcatggggttgctctggaagaactcgaggtactccttggcgcggaggaggttgcgctgatcaatttgatctacaaggtccagctgcccggcgtcggcgcccgcgtcggccgccaggatctgccggtccaggaggtcggcgcacacgtggctcacggcggggatctccagcaggcgggcggcgctgaggatgtcacccacgttggctgtgctgacggtgagcgtggccgtgtaggcgaagtccatgagcgcggtgagcgcctcggcgctgacgaagtcgatctcgtacacgttctgctggtccaccacggcgcccgacgtgaacagcttcttgaagtactggctgcaggcggccagcaccgagcggtgcgtggggaactcgcggccctccaccaggatcaccacgtcgcacagcaggccctgcgtccgctgctcgttcagcccactcaggatgtcgctgctgtggtcggggaacgggatcccgatggggccgtccacgccgccggccatcttccgcgccgagacctgcagcagtggggaaggagagggcgctcgtgagtgggggtgcgggggttcctgtgcccactgacaagggcccgaggcccttgagaagcagcgttccaccctgctcccccagcctcacattcccacctgcacgtgaaggcggtcagatgtcgcgcctttccagccccagcttccccagctgtgcaccaaagc

SEQ ID NO: 335909 - DNA, 36 bp, Homo sapiens
  chr19:4064382-4064418
  hyper
cggccccgccgataggtgctctcggggccccatggc

SEQ ID NO: 335910 - DNA, 97 bp, Homo sapiens; identical to SEQ ID NO: 205124
  chr19:4064872-4064969
  hyper

SEQ ID NO: 335911 - DNA, 235 bp, Homo sapiens
  chr19:4304482-4304717
  hyper
tcacatatcaccaccaacaccgcccagtgagccccaggcgctggatgtgagggctctgggcgaggccagcgcggaactacatttcccaggcggccgcggcgggtgcgcctgcgcaatgcgcgcggtgatggagcgctaaccgggggcgcggcggcggcgagggctcggcgggccattggctaccggccgcggcaaaggcagcttggggacccagcgtgcgcggggcccgcgggcc

SEQ ID NO: 335912 - DNA, 107 bp, Homo sapiens
  chr19:4432865-4432972
  hyper
cgtgcccggccaaggctcacttctgggcaggtgcgtaggtgctaccctgtcttacacccgccctcatgaggccacctatccccgaagctggccatgccccaagcctc

SEQ ID NO: 335913 - DNA, 238 bp, Homo sapiens
  chr19:4523781-4524019
  hyper
ccacaaggatgggcgcgaagggtcccaccagccagggcagcggcacggcctgcaccaccagctccagcagctcgtccacgcaggcgtgcgcgtgggccacgcgaccccggccctcggccagcgcggccgctggcacgtccctgaagcagcgggcatcagcgaaggcggtctgcagggcatccacactgcgccgcacctcagccaccttctcctgggcgccggcgggcaggccccgcac

SEQ ID NO: 335914 - DNA, 1678 bp, Homo sapiens; identical to SEQ ID NO: 240000
  chr19:5292640-5294318
  hyper

SEQ ID NO: 335915 - DNA, 850 bp, Homo sapiens
  chr19:5339897-5340747
  hyper
cgtgcgcgtctgcctgccagagcccctggggctgggggctgaggctcgcccctgggtggggaggctggaagggggcgccgaggccgcagaagggtggggcaatgcccgagtgccggaggggcgacctcccataaggcaacgacagggcccggagtgttccaggggagacggcgtagactagggggtctccaggggagggagacccggagagggaaggcggcgggcgcagcagccctggagccaccccgcctggagccacccgtcccggctcctctccgctccggggcgcccgcatgccccccatcccccggcacagcgccccctgcctccaggacccgcccggggacccgggccgggcgccgccggggccggcaccggctccgcacacacgcgcgcccccctccgcgcctctgccccgcccgcagcccggggtggtgcagccggcggcgctgggcagcttccaatgccgcgctctgggcgcttccagcccagccccctcccacgccgcggacgaagcccccccagcaccccctgccgagcgcccccagcgcggccccggccctgtccctcggggcattgtccgggcgcagctaccggggcgcagcggctgggcgtgcaactggctgcagccgagcatcctccgagcacaatggccgtgcaggcttccccggcacaaagccggcgcgctgcccactcggctgcctccgagaccccccttggagcgcctgcatttttttttcctctaatccatgattttatttttttttttggctttacctggaggctggctgggctgggctcccccggctctgccccgcttcacatcgtggctgttgcatgggatccgagc

SEQ ID NO: 335916 - DNA, 355 bp, Homo sapiens
  chr19:5536543-5536898
  hyper
cgcccgggcgcaaggaggaaggagagccgggagggcgtacctggcagccaaaagcccagccgctaatgagcccggtgcggcgcgagctatttttagcagctgctcctcgggacgcctaatcgctccggccggctcccgccaggctgccatggaaacgctcgcgccaccgccaggagctccctcccggtcccggccggcgctgcccgcccctcagcccggggccaggatgatgcgtgctgccccccgccaggaaggagccctgcctgccttcccagcactgtcactgcacggctgtgcgatcccgggacatctctgcccctctctgggccttagagggcaagagaggtaaaggcgc

SEQ ID NO: 335917 - DNA, 535 bp, Homo sapiens
  chr19:5567584-5568119
  hyper
gaggccgccttgggcgcccgcctcccccgccgctctccaggggtccccggccgccgcccccgccccaccccaccccgagccccgcggccacctggggtcgctgacgagcagcagcaccgagccgtcctgcaggcgcgcgtcgcgcaccgtctggtggtcgtccagccgccgcgcgttgtagtagaaggcgcgcttccaggagctcacgccctggcccaccagctgggcgcgcaggtcgctgagcgtgtcccgcggccgcacggtcagcggtagcagcagcgcctcgtccgccaggtgcaccttgatgtggtagcgcttccagcgcgacagcccccgccgcagcccctccatggcgcccgcccggctccggctccagctctggccccgggccccgagcgccccgcgcacccgcccgactagcctggccgcccgcccccgccgcgcccgcgctccgcccgcccggacacgcccggcacgcagtgggcaggcccggcccggcggggcggggcgggtgccacggtcccctcaggcgtcc

SEQ ID NO: 335918 - DNA, 717 bp, Homo sapiens
  chr19:5608081-5608798
  hyper
cgccctggaggctctgcatacttcagtcaagtagctgagtggtgtcctgcccctctggccttcctacgtccttctgtttttgtccagagctgagccccacaggtaaggccaactctgtcactcacgcctcagctgaatgtcacttcttcagcgagctctgctgaagctgcctcccaaatctaaacacggcctccccaacacactgacggcgtgctctaatattccttaatacgctcatcacaacacatcatatgtgtttatttcttaaatggtctttttcccgccagactaaaaaatctgtgatgacagtgaccacgtatgtttacctctgcttaatcatcagtgtccgagtgaagtcaacaaagtaactgaataaacaggttattcatggctataagaatttcctaagcccttgctgaacacacagactgttcagagaaaaattgaacagcacgctttctccgggtcctgtccgcttcttaagcaatgaaacattaaccaacacctgatcgggtgacacagacctagacaaaggaacggcttctgtagccagaaaactgtgtcagacagggcccactctgcctggaatcagggcaccctccagacactaaatggtccgaaccttgtcccttggaagccactccccagaggcacccaggagaccagggcagtgccaattgcttaccagaagactcttggctaggcgcggtggctcac

SEQ ID NO: 335919 - DNA, 407 bp, Homo sapiens
  chr19:5686667-5687074
  hyper
cgtgggcggggtggagtctcattgcgtctgggggaagagctctgaacggggcctcgttgaatgggaaccaaaccttgctagatccagggtgtaaggccaaggctgggtgtctttgatcgtagtgggagttacctggggcggagctcgctggaccagcgctctgggtggagctaagctcgggggcggggtttgatcgtttccttggggaggggcctccggggctgaccggcgtttctgggccaggcgggctggactacctcgtgctgaaccacatcggcggcgccccggccggcacgcgagcccgcagcccccaggcaactcgctggctcatgcaggtgctccgctcctccgcggccccggcccgcccctctatctcagggaccggtggtccgttcccttcgcggtcc

SEQ ID NO: 335920 - DNA, 553 bp, Homo sapiens
  chr19:5961947-5962500
  hyper
cgcgtggttccccttgttttccatggccagtgcttactcctgcacagacaccatctccttcaggaagctcccactgtgagaggcgtgcctgccctgctgcactccctcccgagcaggccttatatcctgccacggggcacgcggagaccacggccacagcagctgaaacagcctatcacccagcgtacaccgcatcaacaccctgcaatgagtgtttgaactaggccctctctctgtcattcatctacacaacaccagctgctacgtactcacaaatatttactaagccctcattctgtgcagggcgccacaggaagagtggagaacaggaagctgagggcagacgcttcaggagaaaacatctgactgaaagggaggggcgtgtttgcacttggtgaccaggcactgtggagccctggcactcccagaggggtgtgtggtgacagcatctacccctagatgtaagttctagaaagtggggcctcgtctgttccgtttctctctgtattctcagtgccaaacacagagcctcacacttaacaggcactcaacc

SEQ ID NO: 335921 - DNA, 634 bp, Homo sapiens
  chr19:6530758-6531392
  hyper
cgggaaagagcggcagagagggagaaccagggcgatggagagacagcagggagaaaggaacctggagccgagcttggaaggccggaaacggaaaggagagcgaaaagcggagagagatccgagtggagaaaattccgcagagtcacggggacgaggggaaaggctctgggctgggaaggggcgtggccgcgggcggaggggcgtggccgcgggcggaggggcgtggcctccttttgtagccaagcagctataaaaagcggcgcgctgtgtcttcccgcagtctctcgtcatggaatacgcctctgacgcttcactggaccccgaagccccgtggcctcccgcgccccgcgctcgcgcctgccgcgtactgccttgggccctggtcgcggggctgctgctgctgctgctgctcgctgccgcctgcgccgtcttcctcgcctgcccctgggccgtgtccggggctcgcgcctcgcccggctccgcggccagcccgagactccgcgagggtcccgagctttcgcccgacgatcccgccggcctcttggacctgcggcaggtgagacgtgccccgaccctcggtagctggtctcgcgggagacccctaccgcccctctgggactcccttctccctccc

SEQ ID NO: 335922 - DNA, 944 bp, Homo sapiens
  chr19:6590260-6591204
  hyper
cggcgcgcactggtgattttatttcattttatttttttttactcttaagacttcttaaagaggaagcaggtctgaaccagcggggaacgtgaagtcgagaccttcaaaagaacttcttcgtttcccgaatcgttttcctggatgtcactgggcgcgagagcaccgcgcgcagcggactctctacgctgcaaaggcgcccggcgcggtccccaaagggacccctcccccacccggagcgagtggctggggccatcccgtcctaggaggccccaggaagcccccacgcccagccttgtgaagcccccagcagcctctgagtcagcctgccgggggaacaccagagccgagtcatcttccatttccatgtgtgcctacctttcccatcccgggatctccctgtacctcctggcagggctgcctgtctcgtagcccctacaccgggcagcctggtccccgcctcgcctccctgttctggtctctgtctctgccctaccagatcttcctctctggcctctttgtacccatctcattctgtcttttcggtcacgcgcctctctatgttttcttcccaacttttccatctcaactcaccccaagtgactcgagcggcagctgctgctgagcctgtgcgaagcgctggatgcacaccacgaggcagatcaccaagcccgcgaccaatgggaccaaagcagcccgcaggacgcacccatagggcctgcgccgcaccgagcagcccgaaccctcctccggcatcgccgcggcgatcacctccgctagcgcaggaggggcgatgggggcgcggagcgctgccgagaaggaaggaaggaaactgcagccccctcccggggctcctgggcgtctacttgcttcaacctgtcaggggaccagcctgcccctctctggggatgtccggccggtcgaggggagggacttgagcaattggc

SEQ ID NO: 335923 - DNA, 150 bp, Homo sapiens
  chr19:6768009-6768159
  hyper
cggcagctgtgacgtaaggaggggtacgcttcctccagaccgccctcccggattttccggaaagaagccccatttaggtggcgggttttgtggagagacgtccgggaaaacgcgacagcttccttcagtgacagcacgctggagcggggc

SEQ ID NO: 335924 - DNA, 1037 bp, Homo sapiens
  chr19:7459644-7460681
  hyper
cgttaaccccacaaaacgcccacctaaccctgctgctctccctctggatccccgcaacccagctgtcccctcagagcccccggccctactgacagccaggctcgcattgctctccttcaaaaagccccccaaccccgctgacccgcccctcaaaagtcgccctcaccctcgccgcgagcaccctcccacttcggtgcccgcgcccctctcaaggccgagccgacgccccctcaccacggctcggggagcagcagccccaggtccccgggagcgccccgccctcgagggcacgcctccttccgggtcacgccctctgccccgcctccgaggcgggatcgcgcatgcgctgctctcctcgcgcggcttcccgcttccggctcccagctgctagctactgtggatctgggggggccggacggaggcatcggaggcggctgcgagagtggcagaggagctggcggagagcggcctgcgggcgatcgggccgaggtgaggacggcggcggggcggtcccgaggaaaacggggctcaggagggggccctcggtctcttcagggggtggcctggggcgcgggacccccggggctgcctcgggcctcccgccggctcctgggggacttctccaggcaggcgaacgggtgctggggtgcaggctgctccttcaatgcatggaggctctaggcggcgattgcagggtgcagaggtgcagacgatgcccgcccgctccgtccgagccccagccagtcctggggtgctacggcttactctcctccaggagaggagaggaggggtcacttgggccccagcctctgctcctcgttcaggagcgcccggggcaggaccagggatggaatggaacccaccacaatacccagcaccgtcgtatttcaggcctcccgggagaaccctcacaccccggagcagacagccctccctggcagggagcgtttgggtgcaaaaccgtgagaactatctgtgccatgggttttagtttcttgtataagaactcagttggtgctttcattgcggacgggaac

SEQ ID NO: 335925 - DNA, 112 bp, Homo sapiens
  chr19:7701796-7701908
  hyper
cgtgtcgtcgaggtgtgcacctccagcgacttcgtgctcggcagcgcggacgcacctgcccgtcctccccgccagggactcaacttcctgggcctgggcgagaaccgacggc

SEQ ID NO: 335926 - DNA, 457 bp, Homo sapiens
  chr19:7794836-7795293
  hyper
acatctgagcctgcagagtccgccccgccctgccccaccgcctgaccacgccccctccccctgcgcacctgctcatccaggcccccaacgatcaccaggtgcgcgctggcatctgcgcagtgatcctgcgccgccgcccacgtcgtctttggcacagagaaaaagtagcaggagccctcgaaggacagccacgacgtggggcacggctcgcaggagtctgcggggtggcgagggtcagagaggtcgcgtgcttccaggggcaacgcaccgagaggatgcagtgggtaggggttcggccccgcgggctcaggggtggagacacagaaccaggccaaggtccaggagtgacagggtccgcttacgccctcacagcccgcccccgaccccccgtctcgctcactgttctggagcctcacggcctccagcgcccggaacagctcagtgcggacgtcctcac

SEQ ID NO: 335927 - DNA, 151 bp, Homo sapiens
  chr19:7795528-7795679
  hyper
cgtcagggtcaggacggggtgcatgatcggggtcgggggtcagcactcaggacggggtcggggtcgggggacgcggccagggctcagggccggggtcgcgtcgggccctcaccgcgctcacgcagttcccgcagggcgctctcctgctcca

SEQ ID NO: 335928 - DNA, 85 bp, Homo sapiens
  chr19:8067303-8067388
  hyper
cgggggcccaggacacagcagcggagcagggagagtcgttcagaggagggagcgagcctcacttccctcccacaggctggcttcc

SEQ ID NO: 335929 - DNA, 424 bp, Homo sapiens
  chr19:8115163-8115587
  hyper
cgtgaaggctgccggcgggacaaacagtgaggggtgaggcagggagggagactcacgttggggacctcccccaagtctgggtaacaccgtcttggccgcggcccgcgggttgggaaggtagggggcagtgagccgtagcggagaggctggccccagcccgccacgccgcttccccacgctcgcagccacgcggagccgcgtcctggtccagcctcacccacccagagcaagaggcggaggaactggaacagcgccccggcccgtgggctgccactggccgcagcaacgggacgggtgagagcacctgcccccgacgcgtcttaactgctctggtggggcggggctgaccgtgcaagccccgccccagtctaagcccctcctacaaagcccggccccttaccataagcgccatctgtcaggctcc

SEQ ID NO: 335930 - DNA, 685 bp, Homo sapiens
  chr19:8274278-8274963
  hyper
cgggcggcgcgtgtctgcagctgctccgggtagcccgctaggcgcgccgtccccagccccgccgccggccctcggtgcgcccggccgcctgcacccccaggtaagcgagcaccccgcgccgcgaacaccgccccgaacgccaccctcacggcggtccccggccccgcctccgcggccatggcggccccagcccggcccccactcgcagctgggctccagcccccatcaccccgccggggactgtccccctcggggcttcccatcatggccgtctccccgagctatccgcgctcccccacgagggccggggcgcaacgggtgcccgaggacgcggctgtgaaacgggctggagcgagtaggggcgatcctggcctcgtgacgcgggggaatccggatgtgtgagccgggggagcgccccgtttccccgacgtgccagggctggggacgcagctggggccctggcctcggagtccgcagcccggccgcgtagacggcttctgagaaccgcttaaacacgtcattccaagcccgagctaacccatcaggcggccggggtgaggtggaggtgcccaggcggggataatgtcatttggcctggttggaccagccagcgagggctttttaggcccagggcctagccgggagtgtgtgcggagcagaaaagaggccagcctggctgaaacgc

SEQ ID NO: 335931 - DNA, 689 bp, Homo sapiens
  chr19:8372877-8373566
  hyper
cgcgccttcccacaagcgatgaagtccaagtccacgtgctgggggagtgtcatgaactgacgtgcggtgcagccagtgactaggcgttgtcggtgcgcggcggcggggcgaagcctcgcgaggggtgggagcccgcgctgcggggcgtcactcacctgcggcctgggcagaggtcggggtggaaagcgggctcgcggcggcctccaggcctagtccgaggccgagcagcagcagcagcgccaggcccagagcccctgttcgccacgctccaacctgcgccatccaaccgccgctcatgctgtccccacagcggcgccggccacgcgctgtccagaccgctctcttatccctgcgcacgcgcacgcgcggggttggggcggggcccaagcccctgagttctgcggcgcccgcggctacgcgtaccgtaaatgtcagaatagcagggaaaagagaattagaggcccgtccccactttccccagtgaccagatcagttgaaaggtatggagcccgcttgaagttagaaacttctggggatgggaaggaatttgttggtgttcatttgcattatttcccgttccaaatgaggactgctgcaaatgttactgcctcgtgatcttctttaatatggcagccacgcccctcaggcactccgcatttcctccctcatcccactgcttttgtggcgcc

SEQ ID NO: 335932 - DNA, 111 bp, Homo sapiens
  chr19:8942745-8942856
  hyper
cgtgctgacctaagctcacagcccgaggcctcatgaaccgaaacacggctccctggagggacgcagggcccgtggctggcggtgtccgcggcccacgtcgccccctggact

SEQ ID NO: 335933 - DNA, 405 bp, Homo sapiens
  chr19:9545915-9546320
  hyper
cggcaatcaccgtgtttgcaaaaatcgtgaggaagcgcccttacgacagatcccgaaacggctcctggcccagggccgtcgcagtgacaactcgagtggctttttgaacctggcggcgccaggaggacccgcgcggccccggcggacgcgagcggagcaggcaaggtctctctaaggaggcccctcggcggcctggggcaaaccggtactttcgccaccccttccaccgctggctcccacccgtcatccgacctcgccaaagctgtattaagcccaaacgccaccaggaagaaaacgggtttggcggcgcggagaaagcgccggaaaacacagcagcgctccgtgacgtcacttccgcctccagcctcaaacctggaggagcgctcgggaactgcaacctcagcc

SEQ ID NO: 335934 - DNA, 515 bp, Homo sapiens; identical to SEQ ID NO: 240067
  chr19:10024010-10024525
  hyper

SEQ ID NO: 335935 - DNA, 362 bp, Homo sapiens
  chr19:10197461-10197823
  hyper
cgtaaagggatgaaaggcggggggggggcggcggaggccaaaaccaagggtcaagttcgggccgggagaacggtgcctagagatgggggagggatgatcccgtttccccttcccccaccggaacccccctgtctccatcccagctggagaagagcgtccggcgcctccgggagaagtttcatgggaaggtatcctccaagaaggcgggggctctgatgaggaaattcggcagcgaccacacgggagtggggcgctccatcgtgtacggtgaggctgcaggggtcccgggcctggtgcggggaccgcgcgtgggagcgccgagggggcgtggtctagggagaggcgttgagatcacctccccc

SEQ ID NO: 335936 - DNA, 169 bp, Homo sapiens
  chr19:10207022-10207191
  hyper
cgtggcggccgacgcgcatgcgcagcgccgccagctcgctggcgttggcggcctcgggcgtcgcccgcgtggatgcggggccgctccagcacacagcgcccgtgaacttctgcgggggcagcacgaaggtgtaggtgcagcgcggggcgcccgcccgcgcccacgacgc

SEQ ID NO: 335937 - DNA, 992 bp, Homo sapiens
  chr19:10381056-10382048
  hyper
cgcctccgcggccaaggccgaaaggggaagcgaggaggccgccggggtgagtgccctcgggtgtagagagaggacgccgatttccccggacgtggtgagaccgcgcttcgtcactcccacggttagcggtcgccgggaggtgcctggctctgctctggccgcttctcgagaaatgcccgtgtcagctaggtgtggacgtgacctagggggaggggcatccctcagtggagggagcccggggaggattcctgggcccccacccaggcagggggctcatccactcgattaaagaggcctgcgtaagctggagagggaggacttgagttcggaccccctcgcagcctggagtctcagtttaccgctttgtgaaatggacacaataacagtctccactctccggggaagttggcagtatttaaaagtacttaataaaccgcttagcgcggtgtagaccgtgattcaagcttagcctggccgggaaacgggaggcgtggaggccgggagcagcccccggggtcatcgccctgccaccgccgcccgattgctttagcttggaaattccggagctgaagcggccagcgagggaggatgaccctctcggcccgggcaccctgtcagtccggaaataactgcagcatttgttccggaggggaaggcgcgaggtttccgggaaagcagcaccgccccttggcccccaggtggctagcgctataaaggatcacgcgccccagtcgacgctgagctcctctgctactcagagttgcaacctcagcctcgctatggctcccagcagcccccggcccgcgctgcccgcactcctggtcctgctcggggctctgttcccaggtgagtcggggtggggattgccgtcgggccagttctccgaagccccgggaggaccggctcccgggtcaggtcatgcatgcttaggtagctgtttatgggaaggaggggctagagacagcgattgaaaggcaacagccagtaggttc

SEQ ID NO: 335938 - DNA, 849 bp, Homo sapiens
  chr19:10397603-10398452
  hyper
cgaggaggcggggctgcgggcctccttatctctagagccggccctggctctctggcgcggggccccttagtccgggctttttgccatggggtctctgttccctctgtcgctgctgttttttttggcggccgcctacccgggagttgggagcgcgctgggacgccggactaagcgggcgcaaagccccaagggtagccctctcgcgccctccgggacctcagtgcccttctgggtgcgcatgagcccggagttcgtggctgtgcagccggggaagtcagtgcagctcaattgcagcaacagctgtccccagccgcagaattccagcctccgcaccccgctgcggcaaggcaagacgctcagagggccgggttgggtgtcttaccagctgctcgacgtgagggcctggagctccctcgcgcactgcctcgtgacctgcgcaggaaaaacacgctgggccacctccaggatcaccgcctacagtgagggacaggggctcggtcccggctggggtgaggggagggggctggaagaggtgggggaagggtagttgacagtcgctctatagggagcgcccgcggacctcactcagaggctcccccttgccttagaaccgccccacagcgtgattttggagcctccggtcttaaagggcaggaaatacactttgcgctgccacgtgacgcaggtgttcccggtgggctacttggtggtgaccctgaggcatggaagccgggtcatctattccgaaagcctggagcgcttcaccggcctggatctggccaacgtgaccttgacctacgagtttgctgctggaccccgcgacttctggcagcccgtgatctgccacgc

SEQ ID NO: 335939 - DNA, 1317 bp, Homo sapiens
  chr19:10400300-10401617
  hyper
cggggctcggagtccagcttattatcatggcatctcagccagggctggggtaggggtttgggaagggcaacccagcatcccccgatcccagagtcgcggccggggatgacgcgagagagcgtggtcgcccccagaaggccctgggccatcatgccggcctccacgtagaccccaggggtcgctcactcctgccagctcgccttcaccaaggccaggagcttagcgcacgctcgcctcccgcccccccgccgcctctgccgccgccccctccttggaaaccaagttaccaacgttaaaccaatccccaagcgcaactctgcctcccccacaccccacccgccgcgccgcgcggagccgtcctctagcccagctcctcggctcgcgctctcctcgcctcctgtgctttccccgccgcggcgatgccagggccttcgccagggctgcgccgggcgctactcggcctctgggctgctctgggcctggggctcttcggcctctcaggtaagagccccgctctggttcggggtggacagggcgggggcggagtccctggacctgagaaacggcctcctgtccctcccagctctgccctcgcctcgctcccacgcctctgcccccacctcgagcctgagtcttctccccttccccctcctccccaacacacacccgagccccagcttcctgactcctcgatagcccctacccgcttcgagatcctaggtgttcttccgcacccaacccttcgccctggagacccagtgtctctcctgtccgctccccgggtacctccttacgctgtgctgtgcaccatggtccacggactggcatcttccccactcgcggtccgcgaagactccatctctccaactaccctgactcagaggcgctgttcccgctccacccagagccctggcaaccgggtccctcagctgttcccgcggttccttccatgagcccagccttgcgtcccggctccgtgttcttcaccgggtgtagggtccttcctgatccttgacccagcctcgtctctcctttgcccttgccgcaaacgcactctcctcgtatcccggcattctgccaggaccctgagaactggttcatcccccatcccccatcccgggtccccttctctcagccttgctgtgttcatccaagaacccacctttcctctcctctacgccctccccccatgctttcccgccgctccatcggcgctttggagaccatggctctctgctaccacgtcccagagacaccctcgaggtttagactctgggagtgcgcctttaaaccggaggcctgggcaggacgcgggac

SEQ ID NO: 335940 - DNA, 1802 bp, Homo sapiens
  chr19:10401659-10403461
  hyper
cgccctctgagaacccttgactcgacataggggcgctaagatgtcagggagttggctccccaggctcagcccgcgtttccctgggcagcggtctcgcaggagcccttctgggcggacctgcagcctcgcgtggcgttcgtggagcgcgggggctcgctgtggctgaattgcagcaccaactgccctcggccggagcgcggtggcctggagacctcgctgcgccgaaacgggacccagaggggtttgcgttggttggcgcggcagctggtggacattcgcgagccggagactcagcccgtctgcttcttccgctgcgcgcggcgcacactacaggcgcgtgggctcattcgcactttccgtgagttctgggtggccacgcgcgtactccactactctccctccctcccaggccccgccccctgggtcccagggtcctccccttcaggccccaccttctgttccaagtcccggtgttcaaagagctgcggactcttcccccttgcagagcgaccagatcgcgtagagctgatgccgctgcctccctggcagccggtgggcgagaacttcaccctgagctgtagggtccccggcgccgggccccgtgcgagcctcacgctgaccctgctgcggggcgcccaggagctgatccgccgcagcttcgccggtgaaccaccccgagcgcggggcgcggtgctcacagccacggtactggctcggagggaggaccatggagccaatttctcgtgtcgcgccgagctggacctgcggccgcacggactgggactgtttgaaaacagctcggcccccagagagctccgaaccttctgtgagtgggtgtggggaggagatggggacccagtggggtcggtcggtgtttaggaggtttagaggtagatacatctgaatgctgaccccgacttcaaccctcgccggctgagctgtttccccctccgtgccttgaggatgataatacgataagatagtgcatgtcaagtgcttaggacatattgagcgctcggagttagttcaaacttggttcttcgacccctagccctgtctccggatgccccgcgcctcgctgctccccggctcttggaagttggctcggaaaggcccgtgagctgcactctggacggactgtttccagcctcagaggccagggtctacctcgcactgggggaccagaatctgagtcctgatgtcaccctcgaaggggacgcattcgtggccactgccacagccacagctagcgcagagcaggagggtgccaggcagctggtctgcaacgtcaccctggggggcgaaaaccgggagacccgggagaacgtgaccatctacagtaaggaaggaggcggggtctccgcggctccgaggtgggaccagaggaatgcgaaggcggggcgaagagtgggcgggacctcagtaccggaacaggcgtggcccgaggggcggggcaggtgggggcggagacgtaatcgctggggaggaggagcctgtacagcctgagaggcggggcgccgtaccctagttcgttctcagcaccccgaggattcgggcagataaggggcgggccttgaccggagggaggggtatggtcagtatactacgaccaaatgctccgcccccaggcttcccggcaccactcctgaccctgagcgaacccagcgtctccgaggggcagatggtgacagtaacctgcgcagctggggcccaagctctggtcacactggagggagttccagccgcggtcccggggcagcccgcccagcttcagctaaatgccaccgagaacgacgacagac

SEQ ID NO: 335941 - DNA, 394 bp, Homo sapiens
  chr19:10406003-10406397
  hyper
accttctgtgcccttcagaccggccagtggtggccgaacttgctgcctcgccccctggaggcgtgcgcccaggaggaaacttcacgttgacctgccgcgcggaggcctggcctccagcccagatcagctggcgcgcgcccccgggggccctcaacatcggcctgtcgagcaacaacagcacactgagcgtggcaggcgccatgggaagccacggcggcgagtacgagtgcgcagccaccaacgcgcacgggcgccacgcgcggcgcatcacggtgcgcgtggccggtaagtggcagctggggagaggcggggcgaggtatctgagagggggcgtgacctgggtcttggggcggccggccccgcctgcctccctctcggtcccggtagactagac

SEQ ID NO: 335942 - DNA, 170 bp, Homo sapiens; identical to SEQ ID NO: 240084
  chr19:10406920-10407090
  hyper

SEQ ID NO: 335943 - DNA, 177 bp, Homo sapiens; identical to SEQ ID NO: 240085
  chr19:10443527-10443704
  hyper

SEQ ID NO: 335944 - DNA, 72 bp, Homo sapiens
  chr19:10526996-10527068
  hyper
cgcacccgtcttcgggaacggcgtctgtgtccctgtctgtctgtttctatttccacacgtccctgtctgtct

SEQ ID NO: 335945 - DNA, 988 bp, Homo sapiens
  chr19:10529649-10530637
  hyper
cggtttttgctcggcgttcgcccacgccgggagccccctctggcggggagaaaagtggctgtgggggttgaagaccggcagtcttttttttttttttttttttttttcaaataaggagaagggcgcggggggagggcggtggcaaacggcatcgcgtgccctggggagcccgtgacagggggcgcacgggggcaggggtctggtccccgggtcccgcagcagagcagtttcgcgttcgagctcttatcggcgtggggggggggggcggtgggacacgcgggcgcgtgcactccccccgcccagcagccatccttgggggggttgagggggatgggggcgcactcggatcccgctcgctctctgcttgctcgctcggcgcggcgctgggggaggcgggagcgtgagtcacggcgactcccgatttaggtgccggaaggggggctctgctggcgggggccgcagggaggaggctcgcctgtttactcgcctgaaaagggcacgggggtgcgctccgcggctacctgggaccttcctcagtttacctctggcagaagcgctttagaagaggcagcgatgtatagagcggtgggccggcagctgcggtatccgccacagggtgtcttcctggagccacaagggaaccaatgggacacaccccagaaacaccccagaggccccaggccgaccacacacatacactcacgcacacgcacacactaacatacatagacgtcctccgacactacagtcagacgacagaggccgaatcgcgtgcacaactccgcaagcacacaccgaccacaaacgcatccaagcgcttgagaacacattcacagtccccaggccacctgaaaaaagaccacgtagggatgcacatcctccaaataggtagcacatgtgcgcacacatccttcacccacagacacacacagttatacacacagccaaatccagagaaacgggcagacaacagcagccaaccacgtgc

SEQ ID NO: 335946 - DNA, 1295 bp, Homo sapiens
  chr19:10530654-10531949
  hyper
cgacactgaaaacacagacaaccctcggaagaggccacgtgcgcgcacatcccgccccgggcccgcaccatcactatcctccgacgcacagacaggagatcccacacactctgccgccgcccgctgcaggtaccgcgccggtggcactaggaccactcctcaaaaactgccccccgccaggggtagcggcgaggacacgccaacaccggactccgccctcgccatgatggaccgactgactgacactctggcaaccagtccggtgtctgcttccagatcggattaaccgtttaactccttcgtgcctgtgcgcgccgcggccaagcagggtgctttgaagacagacgagttccagcgccccctcccagcccggagcggggatctgcgtgggcgggaagggcccccctccttaggtagctgccccccgctggcccggacggaggaggaggggggcggcgctgacagccgcggcgggcggggggcggggaggggcgggacggggcggaggagccggggctggcgccgagcgggccgcggaacgcggagcgcggagcgcggagagcgccgccgggcactgagcagagctccaggcgccgaaaggaagctgcagagcccggcccgggggcgattggcccgcagcgcccccgggtctgtccccggggcgccatggccctaccgcggccgggcgcacccgcggggccctgggctcgctggcttgcgcgcagctgagcggggtgtaggttggaagggccagggccccctggggcgcaagtgggggccggcgccatggaacccccgaccgtcccctcggaaaggagcctgtctctgtcactgcccgggccccgggagggccaggccaccctgaagcctcccccgcagcacctgtggcggcagcctcggacccccatccgtatccagcagcgcggctactccgacagcgcggagcgcgccgagcgggagcggcagccgcaccggcccatagagcgcgccgatgccatggacaccagcgaccggcccggcctgcgcacgacccgcatgtcctggccctcgtccttccatggcactggcaccggcagcggcggcgcgggcggaggcagcagcaggcggtaagactccccgcggcggatgcgcgcggaacggatgggcgcgcagggaggaggcaactcgagctgccggccgcagggggcgctaggatgcgggtggggtcggtttggctggcgggggcggagggaattcggctgcgggggcgtctgggacctggcccctggttgtgcgctctacgggaggcttcctgc

SEQ ID NO: 335947 - DNA, 295 bp, Homo sapiens
  chr19:10616223-10616518
  hyper
gagactacgtctcgaaaggaaaagaaaaaaaaaaaagatagatgggatttcgccatgtaagtgaataataaatggaaactctaggcccctggagcctccagggtgaatttgaaagattgaacgtcctggctcagggtctggaaggaatcacgtgtagggctacgttggagttaccccgctaccccaaatccttgttgcgtgtagatgcagttccagacagctcctcaggggggcggcctagatagtccgtgaacacgctgagtggccgaggttgtaaccagcgccttcctggcac

SEQ ID NO: 335948 - DNA, 1068 bp, Homo sapiens
  chr19:10624638-10625706
  hyper
cggcgcaggcccccggaagcctcagccgcgctcgccgactgctgggagccactcgggtctctgccgcaggagtggcgtccgcagcagaccaggcgcaggagcgcgtggcgcaggtcgcggttggtgagcgtgtagatgatggggttcagaagtgagttggccatggccagtcccaggaagggatcggcctgcaggagtacaggacaggtgcgcgccgggcacgccacgtcgagcaacagcagcaggaagagggggccccaacatgccacaaaggccaggagcaccacgctgagcgtgcgcagcaaggccagcgagcgcggcttgcgacgcgcccgggtcgaggtggtccccgcagtcccgggccgtgccggcaggcgccgcgcgttggcgcgtacctggcagtagatgcgcgcgtagagtgcacagatagcggccaggatgcccacgaaggcgagcacgcagaagagcacgtaggccttggcgtagagcggcaagacagtggagcaagcgtccaggcgacccaggcaattccagcccagcgctggcaggagcccgaggagcagcgacacgccccaggccgcggctgccatcgccagcgtgcgcccccgactggagacgggcgcgggccccctgcgcgccatggtgaggctgcgctccagcgcgatggccaggaggctcagcacggacgcagtgagtgccacgaagacgcctccctcccgtgcgaaccagagcgcgggggacagtttcagcgtgagcggccccgacagtaggatgttggcggcgtaggcggcgcctgccagcagatccgacaacgtgaggctgcccaggagcaggaacatgggagcgtggaagcgcgggtggcgtccgagcaccaacaacacggctagattctctagcacgatgaaggcgcacaccgccaggcacaccacggcgtcggcgcgcaggccggcacccggctggtagcgcgcaccgcggagcttgccggtgtagttgtaatgcaggacgatgacctcgctcaccggcgccggccgcagcagccccgactccatgggccgcgcgccccaaggc

SEQ ID NO: 335949 - DNA, 292 bp, Homo sapiens
  chr19:10691764-10692056
  hyper
cgctcaatcatgaaacagcctttgcagtcagccaatggctgcaatactggccgtgatcagcagatggtgagcgagcgcttatttcaaaacgggctgcgattctcttaagtccccacgtggggcgggtttgcgactcccctgtgcatttctcagaagaaaggtcccctaaatgcttacggccagtgagctcgaagagcacgcggtcattgaggcccagccgcagctctggcattcctgacagaaacaccttgagcttgatggtaccgacgatttcgctcagaaggacgctgcc

SEQ ID NO: 335950 - DNA, 136 bp, Homo sapiens
  chr19:10762085-10762221
  hyper
cgtgagccaccgcgcccggcgtctttggcacatttgacgtatcatgtgactatgctacctattaaaaatccacagtaaaatgtaaataaaatagaaaagcagagggtacagcatgcactcatttcttttttgagac

SEQ ID NO: 335951 - DNA, 508 bp, Homo sapiens
  chr19:11144009-11144517
  hyper
cgaggtgcgtgtgctccgcctctgcaccgtcaacagcgtggaggagaagatcctagctgcagccaagtacaagctcaacgtggaccagaaggtgatccaggccggcatgttcgaccagaagtcctccagccatgagcggcgcgccttcctgcaggccatcctggagcacgaggagcaggatgaggtgagcccagcaccggccccgacccctccccagcgtgaatggtggacgcgtgagcggctttcatttttgtttttttaccttttttgcactcttattttttttgcatccctttggagtaaagggagtgtgggctgaacggaaagaggatgagtacttgctttttctttgaagtggtttttttttctaaactgctggtgaaagacgccggattgacagccctggagactgaagtcctctatttatccacagagcagacactgcagcacgggcagcggcagtgccagcttcgcccacactgcccctccgccagcgggcgtcaacccc

SEQ ID NO: 335952 - DNA, 177 bp, Homo sapiens
  chr19:11199850-11200027
  hyper
cgagaaatttcaggaggatctttcagaagatgcgtttccaattttgagggggcgtcagctcttcaccggagacccaaatacaacaaatcaagtcgcctgccctggcgacactttcgaaggactggagtgggaatcagagcttcacgggttaaaaagccgatgtcacatcggccgttc

SEQ ID NO: 335953 - DNA, 146 bp, Homo sapiens
  chr19:11466008-11466154
  hyper
cgatgctaacacgccccgcctccaagatcacggaggccccgccccacggggctatgcaaatgagacgcccggaggccccgcccctccctccacctcggagtctgcgcggcgcggccaggcccggccgaccgcgtctcggtcttcgc

SEQ ID NO: 335954 - DNA, 1181 bp, Homo sapiens
  chr19:11491658-11492839
  hyper
ggaggaggtcagggcggtgggcttgccccgtgattcgccctggctcctcctacacccccgcctggggcctcaccgctaggcgtcagcagcgacacaggctccgaccaggcgctccagaagccgccgaagctcggctcagccatacgcgcgcggacggcgaaggtgtagcgcgtccggccccgcaggttgctcagcacacactcggtgcggccctccaggatctccacctgggggcggaatcagggcgagggacgcgtagcagacaaaaatagatgacgtgggggcgggccctggtggaactgagccaatcaggggaaaggaaaacggtgccctagaattgcaatgggaccaataagagtagggggaggagcccaagaaagctcagggccaatcagagagagagtctctggtacgaaagggcgggacccgggcaatttaatatctgggctagcactcgtagagggacccgggcgctaaaggggtctagggttacgggccggagggagaagaagttggggttcaacaggcttgcgaggacattaggaaagggggtgtgtctgtgggcgtggaacggtcttcagcaccagggtaatgggatgtgggatgttacggaccggccctgaaagcggcaccgggcgcgacctcgagaggcgtggctgggccgtagtcagtggagctttgggggctgggccgtaggggctggcctcaccctctgtacgctccctgcgccgttgccggccgagacgtccacctcgtagcggatgtgagacgtcatgggtgtctcaggcggcgggagccagcgcaacactacgtggccgctctcgtcagccaaccgcgccaccagccccacgggggcgtctaggagcactgcaggcatgggggttggtcaggtgggcgaggactgagaccctctcctccgaccactcctccattcccagagcacttacctacttcattgatgtggatgacacggtgatatcgcggagcgccggaggctgctgtgacgcgcaactctaggggcacgaagctcgacgtgtcggctgtaggcagcgaacaccagaagcgcaccgcaccacgagccgtgggagcctggtgcaggcgacacagcttccatggctcatccctatgcgcccagggaagggagcaggttgggaggggggaccggggagttggcattgccc

SEQ ID NO: 335955 - DNA, 850 bp, Homo sapiens
  chr19:11529251-11530101
  hyper
cgcccactgcacctggcggcctgtgctcggctctccagctccgccctcaactggtcgcttccggccccgcgccacccaccaaaccccctcctcacctggctgcccccggggccctccgccgggctcctgcgctgactgcgctgccgccgcagggagacactgtacaccgcgccgtcctcggtctcttcaccccagtcctgcagcggtgcctggacgcacaggcggactcagggcaccaaaggggcacaggtcctggggcctcagcctccttggccgctcggactcgggccgagtcctcctgctgcatccccacgccccttcccggccagaagctgcgagactagggctggggtcccaggctagtcccctcctcgctgcgggtcccctcctcccaggtcctgaggacatggggtggcatttggggatgtcccagggcccagtctaatagaacctgtctctagctctttctgccgactgcgctcagagactcgcgcccccatccctaagaggaaccagtcgcttcactgggtcaagggccgcgagtccccaggaggggactccagggcaagttcagattgggagcagataccgtccgacgggcgggcgcttggagtttctggacctgcgggtcaccagggatgcggggtccggggatcccttgtccccttaccagggccagctctttgcctgctgtgcgctccatggccggcgcccgtccctctcagtggcgccgctgagtgaggcggaagggccggcgggtggcgggtggcgggcggcgggcagtggccgggcgctgaggccagaggggcggagcggccgagctgctggggcggggcggggcagggcaggc

SEQ ID NO: 335956 - DNA, 664 bp, Homo sapiens
  chr19:11531278-11531942
  hyper
cggtaacatttattgcgcaactctgaggccggggcggacccagctggggagatttactgtgggaacgtctggcccggccccttcctcccctccgggcgccgctggccgcctccgttcccggtccgggccgcgttcagcccctgaaggggccccgtggggcctgcgctagacccggagggatcgggggctccgaagggggccgcctggtgggtgtcaggacgagtctaggacctccgagagcgacggtgcttcttgtgactttcgattaatttctgggaacggatcttgagtgatgcgcgggtcactacctcgttgtcctcctcctcactctcttcgtctaaggggggtggggggatgagcagggagcgatgtgggatccaggtccccatccctggctccccttccctttaccaccccactccacccccaccttggccctgaacagggtatctgacaacctcctgctacccagcttggggccccaaccgcaccccttcatccccccacccatactgaccaaaaaacttgtccttggaagtggcaaggggcagggcgatgcgggtgttgtattcgggcagccttccctctaagctggcgaggaactaagcggggatgggaagcgagagaggaaggtgggcggggccaggggccaccgagaagtcac

SEQ ID NO: 335957 - DNA, 900 bp, Homo sapiens
  chr19:11532739-11533639
  hyper
cgagggaggccattgtgggatggcctcctgaagaaatggccctctgctgcgggcaggataggtcttctgtctcgggctgctccagaactgcagataggtctccgagcttttcggggacagggtgggacttctttcccttggaggcggagcttgagacgggacagggtctctgacgtcttgggcttccttggggagtgagagcttccccagggaggtggggcggggactctgaggaatggggtggggcttcccctgtgggcggggcctctgacgtccgggacagaggatgtggcaggccacgttccctcgggcaagctggtgtggcaggaaccccgcttcgtggctgcgcctctgcggtcccaggagggcctgtcggggcttcccctgggcggggcctaccacagtgatgtggatcagcttgctggccaggtgctccaggctgtccttggccacttgcatcgcccgcaaggcgcgctccagctggtccttggcctcggcgtgccgccgctcctccttcttgagacgctcctgcgcctcggcttgcagtttctgctggctgcagggagccgggaggtcaccccgggggctcagcccgccccgccgccctccccagagccccggtgcctcacctcaccagcgtggcctcccccgagtacttgaggtcttccagctcccgctgcagttgttgcttctcctgcttcagcctcaccaacgtctgctcgttctcgctcttgagcgtctccaactgcgcgaaggtgtcgccctgggccaggaaccgccgcaccaacgactgcgggccacccagccccagtcagagccagggcctagggagcgtaggggcgctccacctcctctcccccaccctgcgaaccctcgcacgcaggacaggtggcctgagct

SEQ ID NO: 335958 - DNA, 795 bp, Homo sapiens
  chr19:11590395-11591190
  hyper
ccccgggatacgcccgggctgccgagtgggaatccgagggctcgggcgaggccgggcccccggggccctgggggcggggcctagatgggcgtgcccgggcgtggccaggcagggcgtggcagggcgggaggggctgcgcgctcgggagctgaccagctccgtggctgctgaaagcaccgagcgcggggctagcggtgcgggcgagcaggcgggcgggccgcgctcaaggtcacctcgcggcccagagccttggcgaggtggggagcctggacctggcctaagggggctgtctcggcctcccaccccatctcccggggggcggagacccgggagcccagaggtgcccccccaacccgcgggccctcctctcccctccccctccccgcagcccgaggcgcccgcgcgaggctgcggcccgcgaagaagcgccgagaaacaaagggacgcggcagcagcggcggcgggcccgcggggcctccgggcgcgccccctcctctcccctccccgcttgccgcaaggtcgacgggctcgaggacgagacgcccgcctcccgggtgcggccgaggcccggggcgcgcgatccgacgccacccgctttcccagggctctcggggacgctttgtcgctttggcttggcccagcaccagtgatcgggccctgcgtttgcctgggcggcctgcggggtctgggcctggatggaggaagcatccttagccgccgcggcccctcccccatcaggcctgctggagagggggcaatcccgcctccagggcggcgtcggacgcctcccgaatc

SEQ ID NO: 335959 - DNA, 745 bp, Homo sapiens
  chr19:11591231-11591976
  hyper
cgccctcagcactctgggcgcggccctgcccactctcaggccccgaggcttggtcctacccccccaacccgggcctagctaggcctggtcctaccccccccgccgcacccgcccaatctccgcggagcctgggcccaactcctccccgtcccgattccctttcggcgacaggggaatacctacagtgaccattcttgtgtgcccggcgggcgcggtccgtgttgaggggggctccgggggtggtgcactcctaggggggcgcccgatgctcacgctggggtcccgcccgggcggcctctggtgcggccgctgcagatgtggcgatgaaggcggcggctccctcgagggccagggacgggcccgaacccggggatgcgcgcgcggatggccgggccccggggtggcctgcgggcggcaggggatggaaagagggagcgggcgcggggttgaggacgccccctgcgcggccccgcggggcccggggaggttgcgcttcccgacagagatcgcggcgctctgcctttcgccgccgcccctcggtcggtcctgtccggtcccgtgtgttcaagtcctctcccctcgcccaccctccctccctccctccggcccgcgctgcgcgctccgcgctctggaccgcgccgccgccgcccccagccctttatagcagcagctgccagcgccggcgtcgctcattggctgcggcgaccgagctccgcctcctcgcggctcccgacggcgcggcagg

SEQ ID NO: 335960 - DNA, 1038 bp, Homo sapiens
  chr19:11592604-11593642
  hyper
cgtgattggtcctcctgactgtggagtcatgctcgctctctgctagggggaacctggcctctctctaaggcgttgggggtggcgcagcctcctttggtgcgcgggcgccggtgcatgtttacgtcggggcgcgggaactagcacacactggggcggggtcgccagggcgtgaggcttcagcaccacagacagcaatccgacagtccggtcgagggcgctgccggcgaggtagcccagaccccctaactggagagcggcagtccccacccaatcctcgttcctgcacgccctttaggctccagactgtcagagagcgccaccagcgaggagagcctaatttgcccaatcaggggcggcccttgagataaccagttactggaagatgccctagagatcgagccaatgggagtgcgcgcaccaggggatgctgccacgcctggaaagggcaggccaatcgcagtggcccgcgcaataggggcggtggcggtgcagatccccgggtggcccctcttgggctcgccggggcgacctggctgcgggcgctaggggccccaagcgatggtctgttccccaccccgtgttcctcccggtttccgtcatcggaaactgagctaggaggggggctgctcctgggcgcgcggaccccgctgcggttcccatggaaacctgccggctccggcagtgcggggagagtggaggggacctgcctcgcggggggagggagctcgcgggggcggccccagcggccggactcgctcatccttgccgattcttctgtccccggctggggtagccccccggtccgcagcaggaactgaggcatagctggggccccgcctcatcccccgaactggtgaggaaccggcggggccaatctgcgcgtggcgccacagggctcccccgggcacgtgcctgagctcgcggctgcggtccccagggtcacgtggctgcggccaccagggcctacgcgcctcgcacgccacctagcggccgcgcctcgctccccgcccctctctctagcggcccgcaggaggcggc

SEQ ID NO: 335961 - DNA, 370 bp, Homo sapiens
  chr19:11689316-11689686
  hyper
agctgtctgcaggccctccacgggaccgcagcctgggagggcaggaggccctgcacctgcggccggtctgacctgctcctcacctccctgcctgcctcctccgtgctgggcgccgccgcgacacgtcccgcggacattcaggagtcccttcagtccctgcgagcgcggacccgggagagagctctcattcaacgctgaggccactggctcacagatctccccgggtcaccctgcgaagtgcttggtcccccccattcccagccctgcagcagcaacaaacgggaaggaagtgggtgacgaggacaggcagagacccctcccacggggccgcccgcatctcacctgccgtcgcggggcgggcgttgcggcc

SEQ ID NO: 335962 - DNA, 705 bp, Homo sapiens
  chr19:11805261-11805966
  hyper
cggaccgtagctccttccacgcatgaaccccgcacacgagtcgggattccccccatgaccctcccgtggcccccgcacaatctggagagacgcggggctgcgggcgcggagctgcccagagaggactcctgcccgggcccgcagtcgccgcgaagggacgggacaggacgcccggggtcccggctgccagcccagccccaccctgcggccgaggggaccgagggccgagctccgccagcggtactccggtccacagagcccggagtcgctggctgggaggccggggacccgccacggccagttccaaccagcccctcctcccgtctcgggatccctggcccctcacgctcaccattttccgaattcctccgtgtcccgggggcctctctgcggctcccacgaccagtgcaggtccctgtgtgacagaggctgccgcagactctccagagtgcctctcagcgacagagacaggagcccagcgaagtggcgtgtagaagacgccgcgggctttttcaatctcgcaccctcttagctgaagtgcgcctgattgacagttcccacgaccccgccccacggccctgattggatagtgcgacagatcccgccccctgacgactgagttacagaagcgatctcacgctggggagtggagactgatgaacgagttcttgacacagcccttggcagggcgggcttcttccctgc

SEQ ID NO: 335963 - DNA, 608 bp, Homo sapiens
  chr19:11877720-11878328
  hyper
cgctgcccgagatcgcttcttccgttactcagtgcccgggggagggacctggcgcactatccaatcagggccgcggggcggggtcgtgagaactgtcaatcaggcgcactgaccggaggagggtgcaaggttcaaagagcccgccgagtcttctccacgcccctgcactgggctccgggttctgtcactgagagacgccctggaacgtctgtggcagcttctgtctcgctgggacccgcactgacagcgggaggcagagggaggaacctggacgccggaagccgggaaatggtgagtgtgtgaggtctggtgtcccgacgcgtgagaggagagactggttggaaccggccggaaccggctgtggtggcaccaggtcttccccgccggcgacaccctggcgcagctcggccctcggttccctcggccgcacgatggggctggggcggcagccgggaccccgggcgtcctgtcccgtccctgcgcggccactgcggccctggccctggaggcctgtctgggcagctccgcgcccgcagtcctgcgtctccccagattgtgcggctgtaaccggcacaggttcgcggcccgagtcactgcaccgagacgcc

SEQ ID NO: 335964 - DNA, 784 bp, Homo sapiens
  chr19:11909173-11909957
  hyper
cgaccagggcgcagggagtgagcttagccttagaaaggctgtagctaggattaatcagccgggctctgcagggctccgttacccagggcttaccctgtcactcagggctgaggggcggagcctggaaccccatccaatcaggggccctgggacggggccctgccaactgtcaatccggggaagcagaaggccgcactcagagtctctgcactcctttgttgctggggtccgttgcgttctgcatccagtccttgctgctccgagaggccccaggtgcctccgccacggctcctgtgacgctgtcacctgcgctgtgacctgctccggagtcataaagaggacgccgggacaccaagaagcagggaaatggtaaagtgcccggcctagcgtccagatacgtggaagaggggctgggtggaaccaacaggatcctgctgtggcgggacccaggcctccgctcgggcgaccccggcgattgggacccgcgtcccccatggcgtggcttggccctcggtccgctcggccgccaggtggggctgggcccgcagctgggaccccgggcgtcctgtcccgtccctacgcggcgactgcggccccggccccggagtcctctctgggcagctccgcgcccgcagcccggcgtcttcccagattgtgcgggggccacgggagggtcatggggggtcggatgtgtcccgcctttcttctgctaaaaattaaactgaggctctgttaacagttaaagagtttgttggagcaacagcgattccgagtgagaaacacc

SEQ ID NO: 335965 - DNA, 820 bp, Homo sapiens
  chr19:11959378-11960198
  hyper
cgagtgcaggaagcagctcgtgtaagcttagagaagctgttgctagaatctgtcagtctggctccgcagggcctgatacccagggcttccgctgtcacttagacgtggggggcggggccgaacattccatccaatcagaggcactggctcggggccctgcccactgtgcatccaggcacggaggatgttgcattcctgccgtcacctttgtcgctgcgagggcggcggttgggatctggcctttccagccccgagagggacctagtgcctctacccagatttctgtcgctctgtcacctgcgctatgccctgctttactcacaggagctgtagagaggaccccggtacatctgaaagccgggaaatggtgcgtgtgctggccgggagtggtgcgatgggggaggggctgcctggaactggcgggacccgggcctccctgtgggcgactccggggtctgggaccgagtcctcctagagctgctcggccctcggtccccgcggccgctggatgtgggtgggccggcagccgggactccgggcgtcctgtcccgtccctgcccgtcgactgcggccttggccccgaagcccttttgtgcagctccgcgcccgcagcccgacgccccagcttgtgcgggggccacgggagggtcatgcgcggatttcgactcgggtgtggatttcgtccgtaggaggagcagcggtctgtggggcccacagcctccactttctcctgttaaaaattatactgaggtacgttaacaaaaagttcatttgaggaaacagccattcacgaatgagaaacacccggtcctggcttgtg

SEQ ID NO: 335966 - DNA, 935 bp, Homo sapiens
  chr19:11998456-11999391
  hyper
cgcccttggaaaagctgtggtcagaatccgtctgtctggctctgcagggcccgatacccagggcttccgctgtcactcagacatggggggcggggcctagcattccatccaatcagaggcattgtggcgggtccctgcccactgttcctccagacactgagggggtcgcattccttacctcacctttgtccctgcgcgggctgcggctgggatccggtctttccagccccgagagggacctggttcctctgcccaggcttctgtcactctgtcacctacgctatgccctgctgtagtcacaggaggtgtagagaggaccccgggacatctgaaagccaggaaatggtgcgtgtctggggccgggtgtcgtgagacgggggaggggctgcctggaccgaccggaaccgactgtggcgagaccctggctttcctgcgggcgactttgggatctgggaccgagtcctcctggagccgctcggccctcggtcccctcgactgctcggtgtggctgggccggtagccgggacaccaggcgtcctgtctcgtctctgcgcggcgactgcggttccagagccctctatgggcagctccgcgcccgcagccacgcgtctacccagattgtgcgggggccacgggagggtcatgtgggtgatcccgactcgggtgtggggttcgtgcttgggaggagcagcggtctgtggggcccccagtgtccactttttctcctgttaaaaattaaactgaggaacgttaacaaagagttcatttgagcaaacagcgattcacgaatgagacacacccagtcctggcttgtggtttgtcaacggaaaaagccaaactatgtaaaataaagaagtttattcggagccgaataggagagaccttggccgagggaaaaacaaccccaagaagcctggagtaagtggtcccgaggc

SEQ ID NO: 335967 - DNA, 617 bp, Homo sapiens
  chr19:12075748-12076365
  hyper
cgctgtcactcagaagtgaggggcggggcctagcattccatccaatcagaggtgccggggcagggccctgcccattgtttatccaggcacagagtgggtcgcattcctgtcctcacctttgtccttgcgcagccggtggttgatatccgctgtatccatccccgagagggacctggtacctctacccaggtttctatcgctctgtctcctgcgctgtgcccttctgtagtcacaggagctgtagagaggaccccaggacatctgaaagccaggaaatggtgcgtgtgcatagccggttgtcccgagacggggtagaggctgcctggaaccggccggaaccggctgcggcgggacccgggcctccctgcgggcgactccagggtctgggaccgagtcctcctggagctgctcggccctcggtcccctcggccgctggatggggctgggctggcagccgggaccccgggtgtcctgtcctgtccctgcgcggtgactgcggccccgccccggagccctctctgggcagttccgcgcccgcagccccgcgtctccccagattatgcggaagccacgagagggtcatgggggaaatcctgactcgtgtgtagggttcgtgc

SEQ ID NO: 335968 - DNA, 775 bp, Homo sapiens
  chr19:12098301-12099076
  hyper
ggctggaatagcagcgaccggctctgcagcgccctgttacccggggcttctgctgtcactcagggctgagggggcggggtaggatgccctatccaatcggggtgctggggcggggccctgccaactgtttaatccgccggaaggagggcgcagcattgccggtcttctcattgcctggctgctagaggaaacccgaagtcgggattctttctttcctgctctgagagggaccaggtccctcctccgtagcttttgtctctctattgcctgcgccgtgtcctggactgctcacgggagttctgcaggagacgccggaatatctggaagctgaaaaatggtgagtgtgcggagccggaaaccccgaggtgggtttgggggttaggggacggtctagtcagaaccgcggaatcggaacgcgggcctccatgttgcgactcgggggtctgaggcccgagttcccctggcgcagctcagccctgggtccccttggcctcagggtgggtctgggcggcagtcgggaccccaggcgtcctgtcgtccctgctcggcgactgggacccctgccccggagctctctctggggagctctgcgcccgcagccgcgcgtctccccaaattgtgcggaagtcgtggagggaatcccgcctcgtgtgtggggttcccagtcgcacgtttcttctgttaaaaattaaactgagacactgttaacaagtaaagagtattttgggtaaacagccaatcatgaaggagaaacaccgggtcatgacttgttaac

SEQ ID NO: 335969 - DNA, 887 bp, Homo sapiens
  chr19:12146030-12146917
  hyper
cgaggcgggatccccccatgaccctcgcgtagtccccgcacaatgtggggagacgcggggcagcgggcgcggagctgcccagagagggctctgggaactgggtgacagtcaccgcgcagggacaggacgagacgcccgggtcccggcggccggcccagccccactgtggggccaaggggaccaagggccgagctgtcccacgggaaatcgggtcccagaccccggagtcgccgcggggaggcccgggtcccaccacagccggttccggccggttccaaccagctcctcccccgcctcgggacccctggcccgcacgctcaccatttcttgcctttcaggtgactcccacgaccagtgcgggtcacagcacaggcgacagaagctatggcagaggcacctgaaccctctcggaggggaaagccaggctcccaacctcagctcgccgcctggagccgggaaccgaggagagcagggccttcgccctccccgatggacactcggcaggccccgcccagcgcccctgattggacgaagcgccgggccccgccccctcagccgtgagtgacaatagaagcccttggtaacggggctctgaaaacgggtttgaccggatccagcgatagattctttaagccagaggtctgtaacctttttagcaccagaaccggtttcgtggaagacagttctcctacgggggcagatagtttcggaatgaaacttccacctcagatcaggcattttatcctcataaggcgaacccaacctagatccctcgcatgtgcagctcacaatagggttcgggctcctatgacagactaatgcctctgctgatctgacaggaagcatatctctggcgataatgcccgctggctcgcccgccagccgct

SEQ ID NO: 335970 - DNA, 988 bp, Homo sapiens
  chr19:12163025-12164013
  hyper
cgggattgcttactccagacttcgcggggttgtgtttccctcagccgaggtctctcctattcggctcagaataaacttattctacacgatttgggtttttccgttaccaaaccacaagccaggactgggagtttctcattcattaatcgctgtttgctaaaataaactctcattttttaacagtgcctcagtttaatttttaactggaaaaaaaaaggaactggggaccccacagcccacagctcctcccacacgaaccccacacccgaggcaggatcccccatgacccttccatggtcaccgcacaatctggggagacgcggggctgcgggcgcggagctgctcagagagggagccggggccggggccgcagtcgccgcgcagggaccggacaggacgcccggggtcccggctgccggcccagctccacccagcggccgaggggaccgagggccgagctgcgctagggggactgtgtctggagcccagagtcgctgcaggggggcccgggccccgccacagcgggttcctctcggttccacccagtccctcctttcgccttgggactccccagcaccgcatgctcaccatttcctggcttccaggtattctggcgtcctctctaaaggtcccgtgaacagtgcaggtcacagcgcagtcgacagagcaacagcagctacggcggaagtaactggtccctctcggagcaagaaagccccagaccttaactagcgcgagcagccctaggagtgaagagagcgggaatgcaacctccccttccctggaggacagtggcagggccccgccctagcgcccctgattggataggggtctagactccgcccccttccctgagtgacagcagaagccccgggtaactgggcgctgcagagccgaagcgactggttctggccacactttccaaggtcagctccctccctccctcccacctttacttcgaatatttgccttcggccaaacttgctcc

SEQ ID NO: 335971 - DNA, 689 bp, Homo sapiens
  chr19:12175460-12176149
  hyper
cggggcctggcgctccacccaatcagagtcgccggggtggggcccggccaactgtttatccgcgggtcacattgccgttcgcctcagtctttggcccctcccgccgggtgaggttggcaccccgtttttcctgctctgagagggaccggttgccaccgccatacttctgtcgccctgtcgtctgtgttgtgactgctttggacgtgggagtcacctgaaagccaggaaatggtgagtgtgagcccccgctgggagtcccgagacttgggggagggtaggcggaggctggttggaactggctggaaccggctgtgccgggacccggacctccccgcggcgactcgaggtctggggcccgagccccgctggcgcagctcggccttcggtccattcggccgccgggtgcggctgggccggcagccgggacccctgggcgccctgtctcgtcgccgcgcggcgactgcggccccagcccgggagccctctctggacagctccgcgcccgcagcccggagcctctccatattgtgcggggccacgggagggtcatgggggcaatcccgccttgggtgtggggctcgtgcgggaggagctgcgctgtgaggccctcagtgccccctttctcctgttaaaacttaaacaggcccggtgctgggaatagaggcgtgagccaccgcgcctggcctagc

SEQ ID NO: 335972 - DNA, 644 bp, Homo sapiens
  chr19:12203028-12203672
  hyper
cgaggcggggagcacggtccaatcaggagcgccggggcggggccctgccaacttttttcggggaaggagacggctgcaagcccgcggtctcttgttgctgtgctaacgaccgttggaaccctctttctggctcttggaacgctcggctctgagaggctccaggtttctccgccagagctcctgtcgctctgtcagttgcgctgtgttcctctctagtcacaagagccttggggaagacagttggaagctcagacatggtgagtgtgtggggccaggcgtcctgagacgggggcgaagggcttcttagaacctgctggaaccggctgtggcgggacccgggcctccccgcggcgactccggggtctgtggggctgggccggcagccgggacccggggcatcctgtctcgtcccttcgcagcgaccgcggccccggacccggagccctctttgggcagctccgcgtcttcagccgcgggtctcctcagattgtgctgggccatgaggaggatcatggggggaatcccgtctcgggtgtagggttcttgcgtcagaaaagcggtggtctgtggagtccccagtcgtcttttctcctcttaaaagttaaaatggccgggcgcggtggctcacctgaggtcaggagttc

SEQ ID NO: 335973 - DNA, 439 bp, Homo sapiens
  chr19:12250827-12251266
  hyper
ccagccgcaccctgcggccgaggggacgcagggacgagctgagacagagggattcgggtcccagatccaggaggcgcggcgaggaggcccagatcccaccacagccgcttccggccggttccacccagcccctcccccgtctggggactccggccccatacactcaccatttcccggcttctgggtgtcccggtgtcctctctagggctcccgtgaatagtgcgggtcacggtgcaggcggcagagcgacagaagttgtggcagagggacccggggcctctcggagtaggaaatctggtatcccgacaacaacctgcatagcaacaaaagtagaagctggaatgggcctcctccttccggacggaccgttggccgggctccgccccggcgcttctgattggacaaggtacaaggccccgccccctcagaactgagtgac

SEQ ID NO: 335974 - DNA, 905 bp, Homo sapiens
  chr19:12266891-12267796
  hyper
cgaatttctgggctgaagcaatccccccgcctcaacctgccaggcgtgacccactgcgcctggccttcaatttagtttttcaggaaaaaaggggggactggggaccccgcagcccaccgctcctcccacacgaaccacacacccgaggcaggattgcctccatgaccctcccgtggtctccgcacaatctggggagacgcgggactacgggcgcggagctccccagagagggctccggggccggggccagggccggggtcgcagtcgcagcgcagagacgggacaggacgcctggggtcccggctgccggcccaaccccaccctgcggccgaagggaccgagggccgagctacgccagggggactccgctctgcagacccgaagtcgctgcaggaaggcctgggtcctgctagagccggttcgagccggttcctcccggcccctcccccgtctcgggacccccggccccgcacactcaccatttcccggcttccaggtgtcctggcctcctctccacggatccctctaacagtccagtcacagtgcgggcgatggagcgacagaagctatggcggaggcacctggtccctctcggggccggaaaaccgagatcccgacctccctttggtgcaagacgcctgggagtcaggaaagcgggaatgcggcctccccttccccggatggacagttggcaggaccccgccccagcgcccctgattggatgaggctccagtccccgtcccatcggtcctgagtgacagcggaagccctgggtaacaaggcccggcagaaccgaaatgacctgttccaaccacagattatctaagcgagctccctccctgcgtcttgctctttgggtatttgcatttcagccaaatttgctccgaattgctagagggggtacc

SEQ ID NO: 335975 - DNA, 585 bp, Homo sapiens
  chr19:12444060-12444645
  hyper
cgaggccgggaccgcagttgccgcgcagggaccggataggacgcccggggtcccggctgccagctcagcctcactctgtggctgaggggaccgagggtcgagctgcgccagggggactcgggtcccagaccccggagctgacggcgggggaggcccacgttcgccgcggccggttctggacggttccaaccagctctttcccacttttgggacgcctgaccctgcacacgcaccatttcccggcttccgggatgttccagggtcctccctctgcctcccgctgccagtgcgggtcccactgtgacagaggctgccacagacgttccagggcgtctctcagcgactgaggctacacagacgttccagggcgtctctcagcgagcgactgagtctagagctgagcgcaggggcgtgaagacgccgcgggctctttgaacctggcaccctactgccagccgtgcgcctgattgacagttctcacgaccccgccccatagctctgattggatagggctccaggtcccgccccctgggcactgagtgacagaagaagcgatcacacagtgctgagtcgagcgggatgaac

SEQ ID NO: 335976 - DNA, 678 bp, Homo sapiens
  chr19:12551198-12551876
  hyper
cgccaaccaggttgaagaccccacgagggagccctctcagcagaatgcggtttcttcacctcctgtcccaggattcacccctcacttccccaccaaccaaggacgctacacccagccgcccccgtccagaccccaaatccctcagggaggcggatctggggtgtcctcccctctcctcctgttaaaccgtttctgctgcagccctcggcgtctcggtgcagtgagtcgggccgcgaacctgtgttggttacagccgcacaatctggggagacccggggctgcgggctcggagctgcccagagagggcgccggggccgcagtcgccgcgcaggaacgggacaggacgcccggggtcccggctgcatgcccagccccaccctgcggccgagggccgacctacgccagggggacccgggtccgtagatcccgaagtcgcccttggggaggcccgggtccagccacagccgattacggccggttccacctaacccctcccccgcctcgggacgccggcccagcacacgcaccatttcccgacttccgcggtgtcccaggtcctaccgacagctcccgctgccaatgcgtgttccagccagacaaaggctgcctcagaacttccaggtcgtctctcagctacagaacccagagccgagcgcaggtgggtggagcagacgccgc

SEQ ID NO: 335977 - DNA, 1081 bp, Homo sapiens
  chr19:12595013-12596094
  hyper
cggtcgtgggtttgagatctggcttcccatacacttggaaaccttgagaaacgagtcctcccttgggaagaaaagagggactgaggaccccacacaacactgctcctcccacgcacgaaccccacgaccgagacgggattccctccatgaccctcccgtgccccagcacaatctggggagacgcgaggctgcgggctcggagctgcccagagagggctccgggactggggccgcagtcgccgcgcagggacttgacaagacgtccggggtcccggctgccggcccagccccatcctgcggccaaagagaccgagggccgagctgcgccaggaggactcgggtccacagacccgggagacaacggcggggaggcctgggtcccaccacagccagatccggccggtttcaacccgcccctctctcccatctcaagacccccagccccgcacacttaccatttcccagactctgggatgtcctggtgttctgtttacctctcccgcggccagcacaggtcctacctccacctgaggcccttcctccacctgagggccttctggggtgaggagaccccagagcggagcgcagcggctggtagccacgccctcgccgtttgcgcagcgcccctccgcccgccttcccggcggcgcccctgattggacattgcactcttggacccgccttcgttgcctgagtgacagctagtagggaagtcgcgtctctaagcaacctgcattcgtccggggtcaggaatctgttcccctgccacggatatttgcgtctaagcagaatttgttaacgtacccggggtcgggcactggtgtcttcctgcagctccttctgagcgcggagacacaagcgtgcacagcgcaggaaattccaggctcagtttccagaaaaaggctctttgtccacagcgaaaaaggacgcccgggccatgccagactagaacggaagggtcagacgctcccagacttagcataaggctgcgaggccattcatggatttctgactcttgtttacaaatacagacacttagagtgacagagtgacctcatcatacctaacaaagagtgactac

SEQ ID NO: 335978 - DNA, 224 bp, Homo sapiens
  chr19:12721448-12721672
  hyper
cgaggggtcgctccatctggaaactgagactggaattcctgcgcatccctgtccccgcatccagaaacactgcaggaagacttccgtgtccgacccgagatccggaacaatttctgcttcaacacaattgtccacggagggcaccagttccgtcccaccggcggaagcgagatctgcctagctactagacctgctgcctagctgtcattcggacaaaaaggggc

SEQ ID NO: 335979 - DNA, 340 bp, Homo sapiens
  chr19:12750861-12751201
  hyper
caccctactccgctcacctgcgacggcagcagccagtccccacgggcggaggggacctcatgcgacattcagcccgcgagattctcagagactgctcgcccgcaacacgcagtaacgatctcaggagagcccatgatggggcggcgcgtgtcgtagccgagaagactctgtcatcgccggcgacctcctggaactctctcttgcggtttgcagccagatcacttcccatacacgcggcagccaagctcaggggatggcatcagactgaccctaggtggcgctcgaacacccgccggacctcaccagacaggcactttccccagtctacaccgcctggttc

SEQ ID NO: 335980 - DNA, 261 bp, Homo sapiens
  chr19:12807005-12807266
  hyper
cgcgcgtacgcggcgtagcgcgcgtagcctccaggtgacatggtcagacacgaggtcgcggagcgcgtggcacacccgcgacaggacgtggagcacgaggcgggcgtccaggtaggagcagatctcgagcagcagctccgggggaaggctcagaaggcccggctcacttacggccgaaaccctggacgcggcccgaggctccgaagcgctcggggacgcggcgggtgtggatagctgcgaggggcgcgagaacgccagccc

SEQ ID NO: 335981 - DNA, 610 bp, Homo sapiens
  chr19:12900128-12900738
  hyper
cgtctgcacctcgccgcagcccttcccgggaaggggctctgggttccctcatattctccccttagattttcaggtcttctctgactcggggagggaagctctcagatgacagagctactctagggaaggaggggggctccctctaggtattctggatgatagtaggatgggacctgcagactaaaacgagagtggggcccctgactcacatgagtgagtggggggtgttggggacggagctccagatctcctggcagaagggaagggcaccccacccgagggaggaggcagccgccgttccagcccgcccaggcgccgggggcgcctcgaggcatcggcccgccctctccgcgccccgtcgggccgggggcgaagtccgacccaggcccgcgggcaggcggggacctgccgggctgggttgggccaggccgggcctggcaggacgcagccccaaagcggcggggtggggcggggccgggccaggcggccgtgggggccccgggggcggcggtcggggctggtcgggactagcagtctgggggcccaggcgcgccctgggacctggcagatagtcgggttccccgcttctggctcggggccccaggacagc

SEQ ID NO: 335982 - DNA, 107 bp, Homo sapiens
  chr19:12912810-12912917
  hyper
cgtgggtaatgcgcccgccgcagactccgcgcacgactccgcctgggagcgcgttgggggccgttggagtccagcatggcgcggaccccgggggcgctgctgctggc

SEQ ID NO: 335983 - DNA, 482 bp, Homo sapiens
  chr19:12946904-12947386
  hyper
cgaatgccctgtctgcagtgtcaactattaatcctgtgcgggagaagcggaatccacttggccgagcggctctgcagctgagattggaggtggcgtctgtttacactgacgccaaagacccgaacttccgccgctccagtttgaccctttcttcgtccctagaatgtttgggggcgctagcgggtggggctgggttccaggtcttcttcgggtggtgcttaaaagccctccaggggcttaccctccaaggccggttacccggatctggacaccctgggctctgtggccagaaaatccaggtcttgatttcgcttgggccattgcagacacgcagccaggtcgactggtcctcattcactccggtcatgcaaagacagagggaaaacctggtttggattatcggtcacccgtggctcgggagggcagggctgccctttggccccgcctatatgtttgtccgttgtacaacggggtgggaggac

SEQ ID NO: 335984 - DNA, 757 bp, Homo sapiens
  chr19:12951477-12952234
  hyper
cggggccatgcttgtgtgggtgtggtcagtcgcagagggacggtcattggggggcggagactcaggtgggcggagactcaggtgggacggacagaaaggaggagtcgtacctgaggggcggggccatcccagatgaagccagaatcgtcttggaaggggccaggctgactcggcaacgaaaaaatttagagaggcggggccacaggcgaaggggcgtggtctccccataataggcgggactagactaaagacaggacatgctgctgtttgcacgccgctttagggaacgagagacctgacaggatttgccccctctttctctcataggcagcagtcccctggacagcccccgaaacttctcccccaacacccccgcccacttctcgtttgcctcctcccgaaggtgagtccctcccctccagggccccagaaccctgggcagaccctccccaaccactgtctgggccgccatctgttctcctcctaattgcacccgagctggggcctgaggggaccagcgagtgccccaaggtctcagcgggaaggagcgcctagccttcggggcggggcctataagaaggcggggtccaatcgccgatctggaacggggaaggcggtggggctccctttgcggcaggtcgaaagcgcgtgcgccctgggcgcggggtcttagtctctccgagccttgctctcctggccaggtgtttccatagcaacaggacggggcagccaagatgacgtgcgcaagcgcagattg

SEQ ID NO: 335985 - DNA, 976 bp, Homo sapiens
  chr19:12995814-12996790
  hyper
cgtccgagcgcgcgaatctccagccgcagccttcccacgtgcaggcgtatggcttctcccctaggggacaaggaagccataagcgccactgtctgcccagtcatgtccccgggtcccctgcatctggccacacccctttactcagcctgggctgggactaggatgaacaaagtgaggcccctagggcacaaaatttaaggaggcactcactctcagaggccagccaagtccaagtcccgccctctgcaacccttcttcccctgtaactacagcgggcgccgcgccctttctcatgtccggggccccgccccctcacctgtgtgcgtgcgcagatgcgccttcaggtgggagctcttggtgtagctcttgccgcaacccgggtgcgcgcacgtgtgcgctgcctgcctcttgcgcgcccacgaacgtcggcctcgcttggatggcgcggtctcggctatcacacctggatcctctgcagtccccccgagtccagtgcccaccgtcccgggtcccaaacaactcaggaaggagggggacgtggcgggaccgggcgcgggtccctggagcccgcggaagagctggaagtgcccttggtactgaggcgccgggtacatcgcggggtacccggacagtagcccgtagggggcgcccgacgccgcaggcactgaaagcccggtccgcgggaagtagccacccgaggagccggcgccgggccccgggtacaccggttgcagcgccagcgccttgggctcgggggccggggctggagccagggctgggcccacgaaggcgtcgggagcccgggctcgcagggcagggcgcacccaacccgagtgatcctccgaacccaaaagcccagccaccagccccgggccgccagcatatgcgcccagagtctcgggcggcggcggatattgcgccccggaggcctcgctgggcgccagagcgcaggtctggggcgcgccaccgggctccg

SEQ ID NO: 335986 - DNA, 1360 bp, Homo sapiens
  chr19:13208374-13209734
  hyper
tggactgctccggccgcgggtctccccgggcgcccctccctggggcccagcacccctcctcgccccatccccgtccgggtacgggggcgcggcaggggtccccggcccctcccccgcagaggtcaatgccaacgaacaaacgtcccctccctccctccctctccgccccgagcgcccttctttgagccagacgccaacttgaccctcaccagcattatcaggagcgcgctcagcaagttggtagtttcctcccccctttcccggcgcccctcccgcccccattcaacatctctcatcctatccccgaccccctccggggaacaccgggaaggctcgacgctccaggacaggaccagccacgcagacaggtcgatttgcccaggcccgcgcccgcacgcacgcacgcacacggccccgcacacagccccgccccaccccgcaaccagccctgtcgactgccttatacacccgcccccgcgctggccggccgacctagtgccttgttctcacccccgtgctggcggagcggacgccgcgctctgggtcccagaggggccgggtggctcagacgacccaccactcccccaccctgaccgtgctgaacagacccccccacacgagagaaaataaaggagcaataaagtcacgagaactttcgtcccccaatcgagagcccgaggggcaccccagccccgcctctgctcccccccaccccacccaccctcggggcgcccccctccccccgcaagccagcctgggccagccccgcttcggcccctcccgggagatccgtgcgcccgaccagcaccagcatcgcggaccgcaaaggccgcccgtcccgtcaaacaagtttcttcttaggctaagaaacgcagtatatacgagtatctctatatatagtactaatggatttggtgtgcttcccccttagcgtccccctccctctgctcctcctccttcagcctggtctccccctcttctctgccctccacccccgtctctgcactgagatacataagaaacaagggtagtttactgtctgttttgttttctgggttttcagtgtcctagcggaatgcaagtaggcagccagcccgtctgttccctctccgccccgccccgccccgcccccgtcactgcgcttctgttataccatctttgcctgactctctccggcttctccattgaatggctaatgtgtatgtgaaataaagaaataaagaaaaacaaacgcgagagcgcctgacccttcgctaacgcgaccgtgcgggactgggtcggggtcggtagggtgcgtccccgacttggattctgcgcctctgtccaagcgccgggagcgcagcagacgccgtcgacgagc

SEQ ID NO: 335987 - DNA, 522 bp, Homo sapiens; identical to SEQ ID NO: 240166
  chr19:13209966-13210488
  hyper

SEQ ID NO: 335988 - DNA, 519 bp, Homo sapiens
  chr19:13213427-13213946
  hyper
cgtcaggccaggctctgctgtctcgcgagggtccggcctcaatgctccaggccccggcgttgggccgcgcctcctcgtgggcctcggaaggccaggatagccgaggtctccgcgtaggtcccccccagggaaagtgagcggctcccgggccggcccgccttctccccgcccccggcggcccggtttcctccctctcacccctggcggcgcagcggccggaggatgctggcccagtgcagataagggccaggctgcctggccgcgcctgataaggagcctggctgaccccggaggaaaccagcgggcggggacctagcagcgcgggcctcccggccccgcccccagccggcgctggcaggactcggtccgccacccctcagggcttcgccttccgctcccccagccactgtagggaccccgggcctctggggacccgggccccagggcagccggggagggaggtgcctggatgcacgcagggggtaaactgaggcagggaagctgcctcctcttatgtcc

SEQ ID NO: 335989 - DNA, 1254 bp, Homo sapiens
  chr19:13265775-13267029
  hyper
caggggctggcagccgctcgctggggccccaagaaccggtctgaccggttaccacgtgggcgagagagggttgggcccccttttccttgcccgggcattccctaactggtggagccccgcctcccccagatttgggggttcccttgaaattgtcctacaactccgggacagggagatcggggctttctgagttgagacaatagtgctaaacacactgccccaagcggagctggggatcgattgcacgcactttgaagccttgaaaggtggtagatctcgcccccaccccctagaccaaactgaatcagctgtggccggggccctacagtatcaggtggagctgagcgggtgagctttgaagggctctttagtccccagttcccgtatcttcctcgaggaatcgttgtgtgtctcaggcagggacgtgcagcctcagtttcctcatctgtgaaatgggcctctaagcagcttctccacccggcattaggtttttaaaaatgcccattagagccctagttattttcttgggtcactccccagctctagaataaccaccccgaaacgagaaagccctttcaatataccccacgtaggtttaagagtggggttgtgggcgttgccccagggcgaagggagggggcctgtcgggaagacaaaggagtcgcaggtgcggggagtggtggcggcggcaggcgccgggaaagcgctcgccccgccccgccgacggctggctctgccgccgcaggcttcccatgaccccaggggaactgaccccgtggccacagggtagaaggaggggcaagccggcctcagaacgtctgctggtggaatctgggagctttggctcccctcccgcccaacccacaccccctttcctctcctgtgtggattgtgaaggagagcttctcaccgttctccagccaagctcgcccccacggctgcctgattccttcctgggaacacgtggggggacttttaaaaggcgccacctactccgagtcctgacccacccaactctcccaggggacgtgggggcactggagccccacaccgcaggcggtagctcaatgcacccgcgtcggagttcctcccccgcgagcgtggcaaggctcagggaagtcccgggcccctggggagggggccttgccgcgcatcctgtcgcaggaaccgccgggcccttccttccgcgggaagcggcttggccgacccccgcccccgcccgggcctcttgggggtttccggtgcccggccacc

SEQ ID NO: 335990 - DNA, 498 bp, Homo sapiens
  chr19:13617096-13617594
  hyper
cgccgccgccgccgccgctgatgctgaggctgccggggctgggagcgcggcggctggagctacgactgcggagacgctccacggcccagcccatcgggcggcggcggctcggcgcctcgggtcgggggctcagaaggcggctgcccgggccgagccggggatagcagctcgggacatcttcctggctgaccccggagaaggaggggcgggaggagggtgcgggggcggggcgcgggggcccggggaggaggggggaggggagagagaagcgaggcaaaaaataaccgaggaaggaatccaggcaatccccagtccacccactccggaaaaaaaaaaaaagagacagttaaaaaaaaaaaatccacccaacgcacaccccctttaagacgcgaacggtttgcaaaggacgccccccccgggacgcagtggaagcttcaaattcctccgaggtccgggtcaggctggcatcttgcaaaaggagtgcgctcggcccattaa

SEQ ID NO: 335991 - DNA, 80 bp, Homo sapiens; identical to SEQ ID NO: 240176
  chr19:13617904-13617984
  hyper

SEQ ID NO: 335992 - DNA, 204 bp, Homo sapiens; identical to SEQ ID NO: 240177
  chr19:13618206-13618410
  hyper

SEQ ID NO: 335993 - DNA, 686 bp, Homo sapiens
  chr19:13983612-13984298
  hyper
cgagagagggcgccccactccagctccagacagaggggtgggaacgtgaccccgacccggggcgggtgagagggcgggctctggggaaagggctctagaaggtgccgggaggcgggaggggggcttcgggagggcgagttagccgggatcgggcttgaggggccctacgaaattcggtttgggggcgtgcccggtcggggcggaccttagtggggggttgggcttcgtgggggcaggacgcagtcccggggcgtctatagagcaggcttttgtggagggctctaagggggcgggccctaagggagctgggctctttgaggactggcttaggggtttggcggtgggctccgtgggagtctatatgggcgggttttagagggagtgtgttctggggaacaggtcaaaagcgacggggctctaaggggcagggcctgggctggggccttggctggtggctccagactgtgggtggggctctcgggggcggggctctcgggggcgcgtcctcgggggctcggccgggttccgttgccaccaccgtgaggggtgtggtgggggggtggttcacgcagctcggcacacttgggggtccctcatctaccttggggttatgccaggcggttattttgggcctcagtattcccctcggtgaaatgccaggggccaggaaattacttatttttttg

SEQ ID NO: 335994 - DNA, 1302 bp, Homo sapiens
  chr19:14073521-14074823
  hyper
cgcctgcacgaagaggccgcgcgcgtcagtccgcgccagcttggccggcggctccagggtctccgggcccagcgcgggtgactcgccgccagccgccagtgagatgtcctgcggcagctcgtcctcgctctcctcctcctcttcttcctcctcgtctggaacacagggaccaagtccggctcggggcggggtggcaacgcccccgggctcctcctcctcccgagcccctccgttgtccgccacccccgggacccgcgccctgggtgggaacacgcctcgcctacctttgtcggggtccagggggttcagggaggtggccagattggcgaactggaggaagaagagaagaaaatgggtgagggtcccgccgcctggcgccccgcccgcgcccccagtggcccgcctcgcgcacctcgcccatgacggcgatgggggtctcgcccttggcctgggctacgcggtgctcgatcaggtagtacatgtactcgtcgtagagcagccggatgaggtggaaggaaccgaagctggcggcgctgcgcagggtcaggtcccggatcaccatggagctggggatggagacggagaggagaccgtcaggccccgtccggcccgaccccctctccccctccccgctgcgatgcgcccgggcctcgcgccagcccagtgactcaggctggatcccgcacagccttcccggcacatgagcccagggccccagcctgcccgcccagcctgcaggctcgggtcgtcgtagaagagcacctgagacccccagggacgcggggccttccctggtgccgcccggacccgatcccgccgcgcgcgcacctgtagaaggaccacttgaggaggaagagcttggcggccttggggaagccggcgctgccctggtagggcttgagcacctggctcaccacgccgtccagccaggccgcccactgctccagcgagttctgctgctgcagcgtcaccttgaagtcctgctccagccgctgcaccacgcggtcctcgcagcggcacacccacgaggcctgctcctggggcacagagggtgggcgggcgcccggggctcagccgccgtcacccccgcctggcccgccccgttaggctgcccctcattcgcccgccccgccccgccccgcgctcacctgcacgttggcgaagtccacgcggttgaggtcgctcagcatctggttgatctgtgcggtgttctgcagcacagcgcgcgccgcctgcgccaggtggttgagcgacgtgtagcgccgcagtgtctgcgcgaaggcgccagccgcggccacctgc

SEQ ID NO: 335995 - DNA, 743 bp, Homo sapiens
  chr19:14584140-14584883
  hyper
cgagagggagcgggaaggagcgtggctcgaggggccggtgcgcccctcaccagcattgggctccagcagatgcacgacaccaccatgataccgacaagctggcccaccatctccacgtcgtgggcgcgagctctgcgtgccgagccgctgctccgagagccgccaaagaaggtggaggccgaagcgatggacgaggcggacgaggcggaggccgagcggggtccgtgcgccccccagcgacgccggctgtcggggcctgaggccgggggaggccgtcgggagcggcgtcgccagcgggcgcgtagcagggccaggccgctgagcgtgttgcacaccagcgcggcgaggagcgcgaccaggccgaggctggcgaagaggccagcaagcagtgcctggcgccagccgcccgggggacccaggccgatgaagcaccacgtgcccgggtactgcagctcatagcggcccacgcgcgccagcggcagcagcgccacggccaaggccaccgcggccaccgcggccagcgccaggcgcgcgcgggcgaccgagacccgcgcggcgtggagcagcggccgcgtgacgcccacgcagcgctccacggccatgccacagcccagcagcagcgggcacaggccgaagaagaccatgcagccgcccaggaagtggcaggccccgccggccggagcgcgccccgcagtgtacagacgcagcaccagcgcgcccgggatcacgtggcccgccaggtc

SEQ ID NO: 335996 - DNA, 38 bp, Homo sapiens; identical to SEQ ID NO: 130969
  chr19:14886822-14886860
  hyper

SEQ ID NO: 335997 - DNA, 324 bp, Homo sapiens
  chr19:15235629-15235953
  hyper
cggggctcgctttcccaccctgcacaatgagtgagctggaagcagcaccacgaggcccctccctctttgactgcccccagcccacctcccattctgtgccccgcaccttgtgcagcagctgatagaagagccccaggcggtgagcggcgcccagcaaggcggccaccagcgtcccgcaggccaggagcaggaaggaggggaataagctcccagcgggggcggcggccgcgggggtctccatgaggtggtacctaagagagaaagggcacttcccagacttgggcgcgacagggaacctctccggaagaaatcgcgccccttctc

SEQ ID NO: 335998 - DNA, 601 bp, Homo sapiens; identical to SEQ ID NO: 225834
  chr19:15288255-15288856
  hyper

SEQ ID NO: 335999 - DNA, 715 bp, Homo sapiens
  chr19:15334122-15334837
  hyper
cgatcatgcgaggaatcccagcccaagcccccgaggtccccgctcccgccctaaaagatgcacgcgccaagcccttgggccagaaaaaaaaaaaaaaaacgggccgggattggctcaggctgggggaggcgggtctacgacgagacacgattttctattggcttactcgccaggactctgcccaatcgacgcgatcgtcttccccagaagacccccgcctccctcccgccggcggccgcggaggcggaagaaggcgcctttccgtcgccctagcaaccgtcagcggatctccgtcgcccgggcaactgtcccaggcctcccgtcagcctttgcctgggcccctccggtcactcggacaaccgctacccgttccggtcaaccatcaacccgtcccccgtcaccccggcaaccatcgccggacccacctacccctggacgccgtcctggtcctgtccgcaggcctcctcgccccaaacctccgccgcgggctccgacgtccgcgaccccacgtctcaggggctccctcctcctcctgcccgtcttctcgcctccccggggcggggggcattgctcctcccctggcaggggggccccgggttggacccggctctgggggtccctgctcggtcgggacagtgggaccgccctgtgctgtggccgcgcgcagccccccgcaggcttcggcgctcgcactcttgcgtgggactgtccaacc

SEQ ID NO: 336000 - DNA, 705 bp, Homo sapiens
  chr19:15342707-15343412
  hyper
ctctctcccgaggcttgaaccgtctcgaccccacgcgaccccgcagccccgatagcgcccccgtgcgatcaccttgaggttcaggaaaccgtgctcacccagcgaggggtcgctcaggcaggcgggggacgcgctccgacggcgcccgcagcagccgcgccggggccggcacagcacgtgcgtgagcgctatgcagccgtagaccgccgcggccaccagcgccaccgagaacaccaggctccacatgaaggcgcgcagcagcttcagcgacaggcgcgacggcgccagcagcgcggtcaccaccagctccggcatgtcgccgcgctccgggaccacggcggcgctgccggccaggggcacctgcagcagcggcgaagcggtgtcagggctcaggggcccatcgcccttggcctggggcccctccgtgccgtcgggatttgtgggacgcgctgaaggaagaggcgggcggctccgacagaaaacagccagagcgcaccactcacctgagtgccaggtaaacacctgggcgcgacagggacaggaaacaagggtagggtgcggaggctggggaggaagaggttggaaaggggggaaataaatgggcggggcctagcaggtcctgtgcggggcttagggccggggcggggcccaggaagactcagcagcgggtgggtgagggtctaaaggcggcaattccgggccggg

SEQ ID NO: 336001 - DNA, 256 bp, Homo sapiens; identical to SEQ ID NO: 240200
  chr19:15344009-15344265
  hyper

SEQ ID NO: 336002 - DNA, 372 bp, Homo sapiens
  chr19:15619223-15619595
  hyper
cgctggagtccccgcccagaaccctgcgggagcccggggcgggatgtccgggggcggacccctcggcacggccgggcggggttaaagggttgggccgtgggacggcgcggtcagatcccaggtagtggcgccggtggatccggatcgagggcaggaggctgagacccgcgggtgagtgcgcgcgtggtgagggctgtaacctgagcgcggccgcggcgctgcgctggaacccgaggctcgcgcggttcggtgctggcggggcaagggcgaaggtctgcgcgcggcggcgggcggggcgcagccggccacggggacccccccaggacccaggacggggctgcatgcccggggcactcgtggggagaggggcac

SEQ ID NO: 336003 - DNA, 477 bp, Homo sapiens
  chr19:15695298-15695775
  hyper
cgaggttcccggcgcgatggggccgggatgggggtcctgggcacagtcagagtccccaccccctcccccgggaactgcatcggccagacgttcgccatggctgagatgaaggtggtcctggcgctcacgctgctgcgcttccgcgtcctgccggaccacgcggagccccgcaggaagctggagctgatcgtgcgcgcggaggatggactttggctacgggtggagcccctgagcgcggatctgcagtgacccaccactgtcaggtctcagagccacccgcgccctcctcaggcacctttgcagattccggggaatcaatctgtgcctgagtcccacagacagccagcagggggcgtcggagaactgcagggatccagggcctggcgaggggaaggcggagtatttctgagccaagaccctgacagcctctctggttgagcacagtggccccgtgctgagggcgggttgtcccagagc

SEQ ID NO: 336004 - DNA, 1472 bp, Homo sapiens
  chr19:16186802-16188274
  hyper
cggggacgtgaccccccccccaggctgacccgttcctcgctctgtcgtccccaggtggaggaggagctgacgcacctccagaagaaactaaaagggacagaggacgagctggataaatattccgaggacctgaaggacgcgcaggagaagctggagctcacggagaagaaggcctccgacgtacgtgtgcagggatgcgggagcccgcggcggggccaggccggagccccggggccgggaaggcggggagagccgcagggggaggaggaagaggaggaggagaaggcggcgcctcccagcgctttctccaaataagtcccgaaaaggggcactttccagcagctgtggccagcggtgccgacgtcaggccctcccccagcggtgctgacgtcggcggtccggccgggtgacctcatcgccccgacggcagccggcccggggggcggggagaggcgggggcggcccccgcgcaggcaaaggcttggggggccggggcgcggctgtgcagctctcgccggagccgagcccagccgagcgtccgccgctgcccgtgcgcctctgcgcctccgcgccatggccggcctcaactccctggaggcggtgaaacgcaagatccaggccctgcagcagcaggcggacgaggcggaagaccgcgcgcagggcctgcagcgggagctggacggcgagcgcgagcggcgcgagaaagtgagcgccccggcctcgggccccgcacccgcagcctcctcccccgcgcgccctcctttcttcccggcttcccgcgctgcccgcccgcgcgcagtcctcgggccgcctttttacgccctcggacgccgatcgccgacccacatccctgcgcccgcagccaggaccccctacttcctccgccgtcctccttcctgggcctgggacaggggagggggcgccgcctccgggtcgggcggggccggccaagcgggaaatggggggatggggcggagggggtgagcgatctccgggtggagaagtggagcggcgggagggggcgtatcgtgcaggctccgactccggggctggcgccggggtcccgggccgaggggaacccgcgaccggacttgtgggggagaatgaggatgaaaacgtggagcttccattgtctagggtttgaccggccgacagggatttcgacgggggaccggggatctggggagggggtcgcactttctcgcctctttcgcggcttcccggcttctgcttgcttccctgaccgttcccaggggcgcggcggcgacgtgtctgctccaggcggcgggggggatggggggtggaggaagttcagccccaagccgcccgcctttctccagctgattcctgcgggaaccggggcggcgggaccctgcctctctccagaaggccccgggaacgctggcgcggggccctgaacccacgatcgtttgagcgcctgctgtgcgcctccgccgcgagtcgcagggccc

SEQ ID NO: 336005 - DNA, 657 bp, Homo sapiens
  chr19:16772106-16772763
  hyper
ctcagttacttcatcgtctccatcctctacctcaagtatgagccaggtgagccggggcggggggctggaggggaccggcagcgggtggcgcgggccggggcagctcgggggtcgcagagaggggaagcccgtgcgtggtggagggagcgagggacaggttcaaggattgcatcgtgggagtaggcaggcgctagaatcgtggggttctctcacgccggggtgagcccgggggagaagcccccaggacgatgaagctgggggaggggaaggagaggcgtgcgcgggtttagaggagggggaacaggtgcttggggtcggggctcctggttgggtcagagctgcaggaacttgggcaaggggcgccggctgtggcgagggtgcaggtgggggtcggtgcatctgttctggccgcgcgcaggtgtgacctccctccttgaccttggcacgcggattgagagcgccagcggagtgtctataagggccactgcgctgggggctgcggtcaggttcagcgaaagtgacaccggttctcctccccactgcaactgcccagcaccctccactcccctcccttcccccacggtgctgaatctccgagcccccacgggaattcttccagccctggctccagatcctttccacttacggagcagaacc

SEQ ID NO: 336006 - DNA, 723 bp, Homo sapiens
  chr19:17007056-17007779
  hyper
cgtcctgctgtaaaggccccggggccacagaagccaggtcatccccgtaggtggaggacgacgaggccggcagccgctgctctggaaggaagggggcctcggtcgggagggcgtggcggggaggggacccaagggccgaggggaggagatccgtggcccagagcagcagcgatggtgtccccgaggctaggcggggggtagggtcctcaccgagggcgcagcagctgggaggcgcgggctccaggggcgcggcctggcggcaggcggcctcccgcaggcggcaggcgctggcgtagaccaccccgtcggagccgcacaccgggttcccctgggcgccgcagtcgtggtcgcagccgcatcgcgcgatcgccgccccctcctcaggggccacggcagggcccgactcgccggggaaccagcctgggggacgaggcaggctcgacagaccccccaccctgaaccttgcccgcgcccccacagaacctgggggtggggaagatgtccctgggtcccgggcccactaccccctcggtgggtcttggggcgcgacagttaatgggaggtcctgagccctggccttatggaatttcacgcaggtatttgcctaatacttacaaaaacagaaacagacttttaaaaagcggttgtaggagagaaaggagacagggcgtcctgtctgggccgccctgcaacaacagccccgtcccctgccgcgcctcctcc

SEQ ID NO: 336007 - DNA, 706 bp, Homo sapiens
  chr19:17008145-17008851
  hyper
cgccgctcgaccccgccctcaccacactgaccaccctcaacccattgcgcccagtccccaccacagtgaccacaccctcactggctcggccctgcccccagtatactgaccattccccagccacttcccttccgcacttaccactcccccagccacgcccctccccgctgaccgctcctccagccccgcctcccccgtacaggcagagcgcccgcccacctctatgctgcgttctcctgactttacgttggcccctcctctgccaagcccccaggggagccctccctggcgtccgagggtgggagtcggggtgtggcaggccgcggtggggggcggcagtggctccgcgcactcacccgggccccgggcaggggcgcgctccacttcgttgcacgcgggtccggcgcacagttcccgggcgagtgggctgtgggtgctgacgttgtagaagcgagtggcctcgaaggctacgggacgagggtggcgggtgaccaagtgcaggcgcgacgggtcagggaccgggccgggccgggggtgcgggcgcgcgggcctaccgggttcgtagtagtcgtacacggagactggcagcgccgacgtcctgcccaccacgcactcccggagagcacggaaccgcacgcacgtcaggcaccggctggggatctgtggggcagcggcgggcgcaggctcgacccgggccaggaggccc

SEQ ID NO: 336008 - DNA, 279 bp, Homo sapiens
  chr19:17137102-17137381
  hyper
tcacacgaagggggcgaggtggggcggggggagctgacctcagcacctttagcttttgggagtccctgtacctccacagagccacttcggaaactttagggcgccccctcctcaagacgattcgggaacaagaggccaggtccagcccagcgcggaggctgtgtggccttgggcaggtcgctgcaacactctgagccagtacccgcgacccccaccccagaaggcgaccgacctcctctgtcgccggaggatactcacggggcctgaggctgcgcggcg

SEQ ID NO: 336009 - DNA, 717 bp, Homo sapiens
  chr19:17392399-17393116
  hyper
tagctccacccactcgagccgggtgccttcgcgtttcccgtttttaaatgagatagtggcacacccggtggcatcctcccacccgggctcttatcggcggtcccagaccctgcttgagcgcctccgggtgtcaagggcccctgaggacactaaagctctcgaaccccgatgtggacccccgtgcggcgcggggcagcctggctgggaaccctgctcggccctggagaggggccccccgagccgaggggaggagcggcgcatgcccacaagccccccgcgggaagtaggaaatcgaccgaccaggcggtgcgcttcggacccagccagggcatgtgctcggaggcccgcctggctcgcaggttgcgggatgcgctgcgggaggaggagccgtggtgagggcggggccgggggcgggccaggagtgggggtctttggccggggtccactctgaccgcggtgtttgcagggcagtagaggagctgctgcgctgcggcgcggaccctaatttggtgctagaggacggcgcagcggctgtgcacttggcggccggagcccggcacccgcgcggcctgcgttgcctcggggccctactgcgccaaggcggggaccccaacgctcggtaagatagagcctgggtccggggcggggtctccccaagccgaagtctgggaatccgggaaggggcgccccatcatcccgggccaggcctcggggctc

SEQ ID NO: 336010 - DNA, 323 bp, Homo sapiens
  chr19:17501236-17501559
  hyper
ggtgcctctatacacgtccccgcagaccccccccccatatgtgtcctccaggccgacgcccccttccggcagggggccgactcaccctcgtgcgcgccgcgccggccgccggcagcccccggagggtccggagcgagagcgcgagcgagggctgggccggggtcgggaccccgagcggggacgcggccggggcactctgcgctgtgggctcatctcggcttccaggacgttactgccgggaagggggaagggggctgtcagcctctggacccctgtccccagacatcgccagccctcatccgccagagcgtccctttgctggg

SEQ ID NO: 336011 - DNA, 1006 bp, Homo sapiens
  chr19:17716524-17717530
  hyper
cggtaccagagccccgggatgtggcctcctccatagggacgaggtttcccccatcccagctcaaaatgccccctaggtgctgggggcgtggcctcaagttggggatgtggctccttccttcgtcgcgcccttgggcgtggcctcccgagagggcggggcatcctccattcctaattccccaaaagggaaagctgagtcaagggcgtaggcgcagcccacccttggcgtggagccccccgagccccgcccctggggaggtcccaccaaggcgcaagccccgtccctccccgcccagcgccctccgcgcaggcgcagtgccgctcggccgaccgcccgcgctaaggcgcaggcgcggcaccgccctcctcggcggagcgcgtgtccgacttgagcttcacgaactccttggccacctcgtcgttgctgcgctgcgagaggattcgcagcaccgtgaggcccgtgtcgtccatgtggatgcggcggccgagcggcagccagcaggcggcgctcccgcgctgggccagctcacgcagctgcagcacggccagccccaccgtgcggtcctcgcgcgcgaagcagtagtccttgacgcacacctgcagctcatagcactcgggacccgcgtcggcgctcagcgtgctgcgtggggaggggcggaacgtgagacaggccacacctactgtgatgccccgcccacggccccgtccccaccgcatttgcgggccacgcccacaccggggtgcccacacctgtcacctcccacgctacgctagccccgcccctgccccgttacttgacctacaaccctgtgcttggccgcgcccacagcagctgaccccgagctgggccacgcccacgcctgttcttcccatttttccacccaccgaaaaatgaccgcatagttttacatccagctcccgcccctcagacaccgccctgcaaggccatgctcccaccctgagatacccgcgcctgtgccctctgccggctgaactgctgcccgcac

SEQ ID NO: 336012 - DNA, 463 bp, Homo sapiens
  chr19:17790882-17791345
  hyper
cgagagtggcgagggggttctcaggagggaagggtgttcgcggtgagggaggggattcgggaagggggatgggcgcagaggggagggtggtatcgggggagaggcttggaggaggaagggggctcagagaaggaacccagtctctctccctgtcttccccggtcagtaaatggtccctgagtcaccgtcttcgtcgtcacatcccgccacctccccgcctgcgccgggttgctgtatcagggtcagcggggcggaagcgccacccttccccagcgggcttcgggtcacacgcatgaggctatttatagcgtgggcgcgcggagggcgtgggaggcgcgccggcggacaggggggcggggatgaggggggtgcccactgctgtccccagcgacgagcgggtgaagacaccgcgtcatgcggcctcaaaggtctttggggcccccagaagcgctgactgatgaat

SEQ ID NO: 336013 - DNA, 560 bp, Homo sapiens; identical to SEQ ID NO: 240234
  chr19:17958346-17958906
  hyper

SEQ ID NO: 336014 - DNA, 339 bp, Homo sapiens
  chr19:17984734-17985073
  hyper
ggaccagtcctccaggtccacggggtacgcacaggcacgggatggcacctgtgcacgggtgtgtgcgtgcggcggggcccccacgtgcaagaatctggcgggcgcggttggcttccggagggaggggcccacctagagagcagaccagggacccgagaggcctcggctcctgggtaaggactgtccaggtgacctcgagtccctccttgcagtacctggagatgcgcttcagccgcgcagtgcggctctgcgggactttgcagtacattgtagccacggtgagtggcctcggccccgccctccgctcagggccccgagagcgtcagccttcactagccc

SEQ ID NO: 336015 - DNA, 106 bp, Homo sapiens
  chr19:18059933-18060039
  hyper
cgggccccgtcatcccctcccccagccatctgccgtcctcctggccttgaacaacagcctgaagtcgagtccgggctaggcaggggaaagcgcaaaggtgcagcac

SEQ ID NO: 336016 - DNA, 500 bp, Homo sapiens
  chr19:18117804-18118304
  hyper
cgatccccatcacgggctgagggtgaccgtgtttgtttatgaccgccccctccacccacacacctcactgaggtggtggaagtctcctgagccaggctcagaggcggacagtcacggcaggggatgggttcagcggcagcgcattacgctgccacgagagggcgccagcgtcccgcagacgacgcagaggcaactcccgctggagaaactccatgcgacttttctttggggaaactgaagcccagagagaggtcacgccgtcccgtggccacaccgcagctgtggacctgggggtgcccgagcgtcccctgcattcagctctgtggcgggacgggggctgaggatgactggagcaggcacaagggctgcggggaaggtagggtttgccagaggctgaaaattgggaagggaacatcatttcgtaggtaccgctcctgggcgaatgcgccgaggcgcgaccgagtgacggtatgtcaagagcaggttgatgacccgggagc

SEQ ID NO: 336017 - DNA, 605 bp, Homo sapiens
  chr19:18118537-18119142
  hyper
cgggggaaacaggcctggaacagtcataggctctctggccctcaactggggcgagagtcccccgccccaaatcgggctggacatgcctcgagtcacgtcaacgaggggcggctggtgagtgattaagccgagaggctgaaggctctgctaggtgacctcaggcctgggccctgcctctgcacctctttttttcctctttacccccggggtccgcgagagaccagctctggcagcctaagggcttcagtttctccccggggtccgcgagggaagggggcagccggcggtgagcaggggcgtttgttattttgctccacgcctgggcagagccacgccccttgtcgcgctattggtggagtcccttcccggggcggggaagagacggtgaccccacccccccccgccctgccgtataaaagcggcgccgacgcacggcgcggggattttctgctccggttggtgagcgcgcctgcgcgttgacggcgattttgcgttctgaggctgcagcgtcggcatcttgagctgccggttcgcgagttcgaggccaggttccgcctgtcgtgggttcgcaccccggacgcgatgctattcgacaaggtgaaagc

SEQ ID NO: 336018 - DNA, 261 bp, Homo sapiens
  chr19:18335415-18335676
  hyper
gctcggtctgcttcgaacaagtccgggtgacgctcgggccgggtcgggcatgttcggtcacgtccggctacatgagggctagttcgggcatctccgactaagaccggccgcgctcggcctgttccgtccgactccagcgggtttagcagcaccgggatgaaccccacggccagccgaaggggcggggcttcttaacccttccctggcccgtctggggtgcgccgtgggcgctgtggtgcaatgggagacgctcttaggggc

SEQ ID NO: 336019 - DNA, 636 bp, Homo sapiens
  chr19:18336722-18337358
  hyper
cgcacagcctgcctgccccaggccggcgagggtcaggaggagacgtgagcctcagcccgtcccactctgggcctcacagctggaaggagacagacggctggtcccctgggcctatatccaggcggcgggtggagacagacggagacagagagagacagagtcaccaactgcgagacaaaagtagggtaaggtagggtagagggagagagatacagagaaagcgagggagaggcagagcgtccaagcccggactccggccccggccccagctgtccctggccttgtccctgtccctgcccttcccacctccacaccgggcgtcccggtgaccccgccaggccctctgtccagcctcaccacagcggatgggccaccgtgaagcgccgctgcaggcggatgctctgattcaccaaaagcttcctgaagagcccgggggagccgcgcggggatccccgaggggagccgggcccggggaccggggcgggcgcgggggggccctgcatcgccaggactgcgtggaggctggaccgagcgccggctgcgcgggaccttttctggacagctgcgggggcggggcccagcggggagggggcaaagggcgcatcggccccgcctcgaggccggcggctccctgac

SEQ ID NO: 336020 - DNA, 554 bp, Homo sapiens
  chr19:18548582-18549136
  hyper
cgcgcagtgaatcccgggtcccgtgcccttctccccgagccgccccgctctccccagcacgcctccttcctcagccccctggtccaccttgagaacgccaccctcgcggctgacgcgcgtcgtccggtactcgtattgcgcctcgatggcctcggggccgtagaccacgtccgggctctcgacgaagaactgggcggcggcctccatcgcggcgggctgggggcccggggtgagcagggggtcagcggggactctaagcggccggggccaagccagcctgggtccccacggaggccgtccctgccccgaaccgcactcaccggcgcagagtcgactcaggcagcggcggcggacagcgcgggctctcgggcgcgcgacctccggagaaaagcgctgcggcccctcccccgccccgcccccttccccgcctctcccgcgctgggagggaggggcccaacgtctggagacccggttcgaggcccgacaacccagagccaccgtggccatcgggtccccgcctggcggaagtggccaggcgtccacgagcgcggcgc

SEQ ID NO: 336021 - DNA, 740 bp, Homo sapiens
  chr19:18714365-18715105
  hyper
cggctggaagaagggactgcaggaggcaggggcagcccagcttcgcagagatggcagccaaggacagggtgatcctggcccccagggaggccccctgaatgccagcgctgccctgcacttgccctcactgccccagatgggcgaggtggggtggacacggttcttgggccggccctgatgattttccggggcaaacttggctcgagggctctgtctcgctggagcctggaatcgcagttgcgcttggggcttggcccagggctcgccggaggtctccgcgtccgtgcgaaggagccggctgagcgggccagagccgaggaggcgggggcggccgaggggggcggggggctgggggccaggggaccgccctggaggtcccaggcagccagccgcccgctaattcggaattccttttgcatgaactcgggtgtgccagcgtctctgccccggcccacccaccgcttcctgcctgggcccccccaacagagtgggaggcacggccaggcctgcccagaccccaggcccctctcagcccttctagagtgggtctcactcctcctgcccccaccacccgccagcttggcctgggcaggaaggggctctctggggggtcctggctggggggcgctgcccctctgccacacccgcctggcctgggccggcgtggctcacttgccagcagctgcagctgccctcccggggctgggcgggggacaccgggcggcgacgggttgtagggg

SEQ ID NO: 336022 - DNA, 68 bp, Homo sapiens
  chr19:18715135-18715203
  hyper
caatctcccacccccttagccccagccggtaaggtcagaaggacactttctcctcccgggatatgggc

SEQ ID NO: 336023 - DNA, 1407 bp, Homo sapiens
  chr19:18715790-18717197
  hyper
gggtccccatctcccgtcccgctggtacctgcagacactttacgacccacccgcctgctggtcaggtgctaagacacaccgtaagtagaaacatattgccgaggtgtgagaatcttttatttaatttcttccccccttaaaggaaaaaacacacttacagtgcccccccaccccctacaccttcgcctgctgctctactggctgaaaacaaagcttggcgctcacagtggcactcacaggcgctgcccaccgcctggcagagccgtcaggggccctgggagggcccgaggtagcccctcacctgaaagccaggggagagccaggctttcagcaagtgcccctagaagatgcccggaccctgccccttcccggaggagccctacaggcagcccgcaaacagcccagcacagggtggatgagcctgggagcagtgtgtgcccggcgacccccggggtggcccgtgcgcctggatggggtgcgtggagtgactgaacatctggggcgagtggtgcctgcctctgtgcccctgggtcgcctcccctgtgggatgtgtgtgaccgtgaatgtgtgtgtcggggatggaatgtgtgtgcgtccgcgatggtgcgcgaatgtgcacctgggatgcagtgtgcgcgagtttgagggcgagggtgacgggccacaagccagtgtgattctttgtgtgtctctgggtgtgtcccagagcgggtctgcatacggagacgtatccttgcgggggtgttccttggatggggggccccagagtgcctgaggccagaagtccctccagggcaggggtcttggcccgtagggcagcgggttcccagtgggccccctcaaagtttgggcccgctggtgcccggactcactggctcccgctccctctccctctcacccactcgctcacaaagattcctctcgctggaggctctccgcccgacgcagcctggctgaaaacggttctaagcgccgccggtggcggggactccgcggacccccgtgcgccgggtcccgcagggggagggcggtggcgccggcccgtggagacacaagtcccccgggaccccgggctgcgcgccaggcggccagagcggcccccctgcagccccgccctccccgtggggctcatccctccgcctgggggggcccgctgggggcccgcacccagcgcgccaaccgcgtgcgcccccgcctgggagcggtgccctgcagtcccaggggcccagagtccaccgaagcagacgcgtgcgcccgccacgtcctggcatgcagagggtctcaggccgcgatccccccagcccccgggggcctggcctggcgccctcggcccagctgcccaggtaacagggcctcgggcgcggaagcaggactctctggacagtggactgcggcgccgtgtgcccc

SEQ ID NO: 336024 - DNA, 956 bp, Homo sapiens
  chr19:18722000-18722956
  hyper
cgttttaagcaatgcccaaaggtcacctcccatcattggcagggctctgccggcttttctttgcttctctccctgtcacctggacagaaccactttgcagtctgagcatcagtttcctcacccatataaaagggcaacgctaccggtacctgtcttatacggttgttgcaagaaaaagtgtttcgttggaatgaatgaaagacagtaattgtggaggggttaggcgcgcgcgggcctctggaattagcatgtgtgggcttgaatcctgactttgccaacgcgtcccggagcctaagtttcccacctgtgaaatgggggacagtattggtcataacgcacagggctgtttcccaaggtgcgggcctggcgcgcgggtgggttagaagcggaattctcctgctggattctggcgcaaactgcgggctggaggccctcgccgccgggtcgcagcggcctagcatgggaggggaggggaggggcggggcggggcgggggaggggccgcaccgggatccagatgttcggggtccgccaggcacagccgcgcctgattaagccacgtgggggccggccgggggccgctgagatgaaagcgcggccgcaggccagagtagggggtgcgccgggcccccacccgggacaccctcttcccaggccgaaacctgagccgccctctaacccgcagaccctgcgaggctgccgccccgtctgcgggggcggagcgtaggtgggggacctgcgggctgctgcgcggcgctgcaggcacctgcgccaggcatgccagcgaaagcgggggcatctttgcagaggatccgggtttagaggggcgtccccactcccttatctggcggagaggaagctgggggtaccctctaaccgagattcggctcctggggctacagtccatcgccctggggtgtgatggttatggaagtcagaagtgtcgctatttgcccc

SEQ ID NO: 336025 - DNA, 199 bp, Homo sapiens
  chr19:18811469-18811668
  hyper
cgcccggaaatctctgggaggaagtatcagcacagcctagcagggcgcctgggactggctctgtgggctggccgtccctctggctggggacacggggaggccgagcgtgtccgcaaagacacgcgagctgtccacctttctgggctgcaggggtctgcagaacctcggaacctcggaggggctctctgtctgcttcagc

SEQ ID NO: 336026 - DNA, 160 bp, Homo sapiens
  chr19:18880025-18880185
  hyper
gcccgttgggcacagcgcctggggcccagggctgggggctgcagctcagaccattggacttttctgcctagggccggctcaggcagacaaaggctgggctttaaccctgtacccacaaaccttcctgactgtccagaccacctgcttgctccagcggcgc

SEQ ID NO: 336027 - DNA, 528 bp, Homo sapiens
  chr19:18899186-18899714
  hyper
gcccaagcccgccccgctccgcccccacccaccttacggcactggcgctccgggcagcgcagcttctcgtccgggaagccgtctaggtcagtgtcgcgaccacagaggatcccgttgccggcccagccaacggcacactgtgggagagtgtaagtgggtgccctggagtggccgccacccaaccccgcctcaagcccagcccgcccgcactcaccacgcacgaccgcgagccatcgcgctctaggacgcagtctgcatgctcgtggcactcgctgggcgagccgtcggggcagaagcgctgtgcgcgccgctggcagccggacgcctggtcgcccacgaagccgggctggcacgggccgcactggaaggagccctgcgccggagccgccggaggtcagcgcaggccgcccgccgctcgccccacctcccgcgatcctttcttcctccccagcgggccttacccgggtgttgatgcacacggagttggggacgcagttatgttgcccggtctcacactcgttgatgtcc

SEQ ID NO: 336028 - DNA, 77 bp, Homo sapiens; identical to SEQ ID NO: 240285
  chr19:19651141-19651218
  hyper

SEQ ID NO: 336029 - DNA, 74 bp, Homo sapiens; identical to SEQ ID NO: 240286
  chr19:19651468-19651542
  hyper

SEQ ID NO: 336030 - DNA, 216 bp, Homo sapiens; identical to SEQ ID NO: 240287
  chr19:19651834-19652050
  hyper

SEQ ID NO: 336031 - DNA, 571 bp, Homo sapiens
  chr19:19729161-19729732
  hyper
cgttccgtttgaaccccatacatcccttcgtcctcgggacccccctccagccctcctcaagcgcccctcgtcagtctggcctccacgccccgtcccctcagcccgccaacctcactgccacgaccctgcgtggcccctgccgagcccgcgggcagcacctggcctgtgcctcgtccaggctctggtcggtgatggccatgatctgctgcaggacgtcgctcgtgtcgaggcgccgcggggcggggggcgatggcgcggggcgcggcggggcggccatgagcggcagggccgggcgggcgctgtgagggtgccgtcgagcctggagcactaccactggcgccgcagccaaccgccgctgcctgagcgccgcgcccgctctcgctcgcgcctaagccacgcccaccgccgctatcgccagccaacccgtgtattgcaccgcctacagacacgccccttcatctccgtcagccaaccggcgccacgcaccgcccccgggactcgccccgaacttccccctctccgggcttggactgggtttggggttgccgaggcaacggcacttctcataagc

SEQ ID NO: 336032 - DNA, 1103 bp, Homo sapiens; identical to SEQ ID NO: 225866
  chr19:19738572-19739675
  hyper

SEQ ID NO: 336033 - DNA, 776 bp, Homo sapiens
  chr19:19843315-19844091
  hyper
cgtttgaacagccacaggaacctgaccccggcagcaaggacctagccaggcttcggttctcacaagtgaggaaacgcacccgtggattcatcgtaaggtttccaaccaagtggtttcttaaacgcacaaaccccacagaccgagatgggatctccccaggaccctcccgctgtcaccgaacaatccggggagacgcggggctgcgggcgcagagctgcccatagagggctccaggaccgggggccgaggtcgccccgcggggacgggacaggacgctggggctcccggctgcgggtccagctcccacagagaggaccgagggccgaactgcgcccgcggtggcccccgggtctgcaaaccccggagttgactgcaaggaggtccccggcctcggccacagacggttccaaccagaaacctcccctcggacactggccccgcacactcaccatttcccagcgtccgggaagtcacggtgtcctccctacggatctgtcagtacctgcaggtcacggcgcgacaaaggatgcgctagagccaccttcggccttcaggagcaggtgaaacgcaatcttcccatgggccaggaatggcgacgtccgcactgcgcaggcccagcgtggcgccgctcacatcttttcagctgaggtcctgattggacagatccaatggccccgcctctttatcactgagtgacagcggagcaggaaggggcgtggttgagctggcctggcttcagtccggcttgtccccgccaggacgtttgcgtttaaacc

SEQ ID NO: 336034 - DNA, 243 bp, Homo sapiens
  chr19:19887245-19887488
  hyper
cgcaccaccccgatgcatactgggattgtagttctgaagctacctacccatgggctgagagcagtaaagagactacaactcccagcataccaggcgcggcgcgcaccgccctgccccttcctctggggttgcgaaccgcccccgagcctggtacaggctgggattgtagtcctgcagccttgtggccgaagggctgggactggccatgagattacatgtcctagcatgctcagccaggcgcgc

SEQ ID NO: 336035 - DNA, 287 bp, Homo sapiens
  chr19:19932106-19932393
  hyper
cgaccttcccgtggcccctgaacaatctgggaaagacctgtgggtgcagagctgcccggagagggttccacgccagggcacagtcactgcgcagggaaaagacaggacaccccggggacccgctgtcaacgcagccgccatgttatggctggggcggagctgggcaatgagaacttggagcgcagattgtggagctgactgccgggaggcctgagttctgccactgccacagccacagccacttcctccccagttccaaccagcccctctccctctctcgggatgtc

SEQ ID NO: 336036 - DNA, 197 bp, Homo sapiens
  chr19:19932505-19932702
  hyper
cggcacagagcagtgaagacgatagctggatctctggcgtcagcgagagacaatgggcccgccaaagccggaagccggaaaccgtcctgttcgctacagctgcgtggctgattggacggtttccagcccagcgtccctgattggataatgcttgaggccccgccccctcaggtcctgagttacagaagacgtgatcc

SEQ ID NO: 336037 - DNA, 773 bp, Homo sapiens
  chr19:19976556-19977329
  hyper
cggctggggaggcggggccttaggcattatccaatgagggacgctgggccggaaaccgtccaatcaggcacgcagctggagcgaaccacatggtttctgggggcctttgtttctcgctgcagcgggagctccaggtttatcctcagtgttctgtgtcctgtgcttatagaggcccgtcctctgtggccgtgtgacctgcaagtattgggagagccacagctaaaccccgggacccctggaagcctagaaatggtgagtgccgggtccaacgtcccgagagaggggagaggctgtttggaacggtgggaagtggctctggcgggactctgcttcctcacagtcagctccacaatctgccgccggagttctccctgcccagctcggcctcagtccccttcagccataagatggcggctgcggtgacatccggggcccggcacagtgattgtgccctggcctggagccctctttcagcagctctgcacccgcagcaccgcgtctctcccagatcatgcaaggaccacgggagggtcgtcaggggagaatcctgactcggttccctgcgggttcatgaatgggaagagctttggtccgtgaggttgttagaaacaagcgcttggtgccgcaaaacaacacaaaacaaaaaactacccagcacttagaaaatttcacaggaaggcatatttacttctgaagaagagtgctgctcgcgtccgacctgatcgcaagagcacacagaagaaaggaaggaaggttttttttttttttgaggc

SEQ ID NO: 336038 - DNA, 118 bp, Homo sapiens
  chr19:20011652-20011770
  hyper
cgggaccttaagaattatccaatcagggacgctgggctggaaacgtccaatcaggcaagcagccggaccgaacagggcggcttctggtttggcgggtcctttgtctctcggtgcagcc

SEQ ID NO: 336039 - DNA, 100 bp, Homo sapiens
  chr19:20011910-20012010
  hyper
cggtccgacatcccaagcgacggggaggggctggttggaaccggtggaaagtgacggtggcgggactcaggtatccccttagtcagctccacaatctgcg

SEQ ID NO: 336040 - DNA, 120 bp, Homo sapiens; identical to SEQ ID NO: 240297
  chr19:20012070-20012190
  hyper

SEQ ID NO: 336041 - DNA, 845 bp, Homo sapiens
  chr19:20149660-20150505
  hyper
cggctggacccccaaccacaaaccgtggctgggtgctctctgagcataaatcactgttaacttcaataagttttcaacattttaaaggtgactcccatagtttttaaacaggagaaggaaaagactgaggacccccgggatcacagcacttcccacgcacaaaccacacacggggtctggactctgccctgaggacgcttccattgtccccgcagtcggggcagacgcaagaacgcgcgcggctcttcccagggtgggctccgggcgggaagcgggagaacggaacgggatgcccgcccagggtcccggctgctggcccacctcgcatcctgtgcccggaggtgatcgacggccgagctgtgcctgccggggactccagtccgcagactccggagctgacagctgggaggccccagtcccgtcactgccggttccggccggtttcaaccagccctgcccccacctcgggatgcgcggcctggcacactcaccatttttcggcttccgggatgtcgtggagtcttagctctggatctcacagcatctgcaagtcagagggcaacagaggctgcgacagtcaccgggaactactagagcagaggatactaagcaatgaagatggaccctgagctctggctggagcgagacaaaggccccgccagctccaggacaccgccccctctaccttggctgcgcacctgattggacagttcccactctagcgcccatgattggatacagttccatgccccgccccctcaggtcatgagtgacaggaggcgtgatctgagaatgtgttgaataaggcaagagttacaggtttttcctgaacccttttctggcgc

SEQ ID NO: 336042 - DNA, 949 bp, Homo sapiens
  chr19:20162601-20163550
  hyper
cgatcccagacccttgagggtctgtgagaaatcaaactttcggcactttggaagtcaggaaaccagcacgttgggggaggcgggatcacagttacttgctgagacaagctgccctggctacgttcactcccgtcaggtaggagaggttaaagaacaggaaggctccccctccgcagggcggaactgctctgaaggcatggaggagcgacgctgaaggtggaggcttcgcccaccatgccgggagctaaaatttcttaaccaatgccggccagcgatggcagggctgcgggactacaatcccagcgcgcacagggatcagggactgtgcgcatcactggaagaagcggcagaacggcgcgcgcctcgctgagctttctgggagatgtagtctcatggcaactcccagccttttggccacaaggctacgggacctacaatcccagcctgtaccaggatcgggagcagttcgcagcactagaggaaggggcagggcggtgcgcgccgcgcctgatatgctgggagctgtagtctcttcacggtttttagccaatgagtaggtagcttcagaactacaatcccagtatgcatgggggcggtgcgtagtcctggaggtaggggctgagaggtgtggacttaccggtgtccaaagcattgctagcagccaattccatgccgccccgttgccagggagagtgaatacagctagggacgtgaagggtaggtctgggctgggcattgaggagggtattaggctaggaagtatacctcacctttgtccaaatcgggtggttcggcctcctctcattggccctatgcagctgggttgcctctctcacccgcacccaagggtctttccagagtgttgcgtcatttccagcccagggagctgccttctttcctaaactgcaatggaaactgtcctgatgtctgagacaatgtccgttgtgcc

SEQ ID NO: 336043 - DNA, 76 bp, Homo sapiens
  chr19:21512126-21512202
  hyper
cgagaccggagctccggctgcagcaagagacaaaggccgcgccaaacccggaagccgccctgtccggtccagctgc

SEQ ID NO: 336044 - DNA, 117 bp, Homo sapiens
  chr19:21541712-21541829
  hyper
cgacgctgggctgggaactgtccaatcaggcacgcagcttgagcggagaggacggcttccgggatgtggcgggatttgtccgcttctttgtctttggctgccgctggaactccgggt

SEQ ID NO: 336045 - DNA, 171 bp, Homo sapiens
  chr19:21542078-21542249
  hyper
cggcctcagtcgccttcagccataagatggcggttgcgccgacagcccggcccccgggcgtcctgtctcttccctgcatagtgactgtgcccttgcctggagccctctctggggaatctctgcacccgcagcgccgcttctctaccggattgtgcagggaccgtgggaggg

SEQ ID NO: 336046 - DNA, 309 bp, Homo sapiens
  chr19:21579832-21580141
  hyper
cgggcccttaaaccgtatccaatcagacacgcagaactgggaaccgtccaattaggcacacatttggagcggcgaggacggcttccgggatgtggctgggccattgtttctctctgctgccggagctccaggtctacccttcactgctctgtgtcctcagcgtgtgtggcttcgtgacctgaagatactgggaaatccatagctaagatgccaggaccccctgaaagcctagacatggtgagagtgctgggtccgacatcacgagagaggggaaggagttgctcggaaccggtgggaagtggctgtggc

SEQ ID NO: 336047 - DNA, 111 bp, Homo sapiens
  chr19:21580223-21580334
  hyper
cgtaagttggcggctgcgccaacagccggggccccgggcgtcctgtctcttccctgcactgtgactgtgccctgcctggagtcctctctggcagttctgcacccgcagcgc

SEQ ID NO: 336048 - DNA, 159 bp, Homo sapiens
  chr19:21688303-21688462
  hyper
cgcttcattctgcccagcaactgatcaccctctgtcactcagggcctgagagggcgggtcttaaacattatccaatcaggcacgcagctggagcgacaggacggtttccggaatatggcggggcgtttggctcttgctgcagccagagctccaggtctc

SEQ ID NO: 336049 - DNA, 176 bp, Homo sapiens
  chr19:21688741-21688917
  hyper
ctgtgctgacagccgggccccgggcgtcctgtcttccctccgcagtgactgtgcctgacgtgtagccctgtctggggagctctgcacgcgcaattccgcagtctctcccagattgtgcaagaaccatgggaggggcgtcaggtgagaatagtgactcgggatgcgggttcatgagc

SEQ ID NO: 336050 - DNA, 240 bp, Homo sapiens; identical to SEQ ID NO: 240316
  chr19:22018454-22018694
  hyper

SEQ ID NO: 336051 - DNA, 254 bp, Homo sapiens
  chr19:22018891-22019145
  hyper
cgcaggtcacagagccacagaggctggacctctagcagcagaggacacagaagaacgaagacgagacgcagagctccaactgcagccagagacaaaggccccgccacatcccggaagccgccctgtcctctcctgccccgtgcctgattggacggtttccagcccagcgtccctgattggataacttctaaggtcctgcccccgcaaaccctgaatgaaagatgtgatcagacgctgggctgaaagaagaaaga

SEQ ID NO: 336052 - DNA, 630 bp, Homo sapiens
  chr19:22034394-22035024
  hyper
cgcagctcctcctgcgcacacaccgagtcgggattctgccccgatcatccgccgggcatccctgaacaatctgggaaatactcggggctgctggtgcagagctgaccagagagctccagacagggtaccgcgcaggaatggggcgggacgcgggaggctcggctgcgggcccagccgccatcttgcggccagaggggcctggggcggagctgcgccagcgaccaggactcaggagcggactgtgaggaggccggtcccgccactttcacagcctgctctcccctctcgggatgcctaaccccgcacactcaccatttcccagcttccaggatgtccgggcatcttagctgtgcgtctcccaggacttgcagatcacagggtaacggaggctgcgacaaagtcaccggggattcccgagttggagaacgcggaaaagcagaggcgggtcccaaggtctagcgggagctggagacaaaggccccgccaaaagccggaagccacggccccctctccaactgcgcgtctgattgggtggttcccacgccagcgccactgattggataaagctccaggacccaccctccctagcgtttgcgcattttatggacagggaaacaggctcaagtaggc

SEQ ID NO: 336053 - DNA, 775 bp, Homo sapiens
  chr19:23257806-23258581
  hyper
ctcatttgttaattagcagtaattgcccgggtcagtgacacctcctacttgagcctctttccctgtccataaaatgcactaatactggggtgggtgggattgggaggtgggtcctggagctccatccaatcagtggcactggtgtaggaaccgcccgatcaggcgcgcagttggagaggagggcgtggcttccggcatttggcggggtctttgtctctcgctcccgccagagcttgggatcggtcttcactgttccgcgtcctctacctgggaaccaccgacccccgcccggcgactttgtcacagactctgttgccctgtgatctgcaggtcctgggagacgcacagccaagatgccagggcaccctggaagctgtgaagtggtgcgtatgcggggttgggcatcccttgaggcgagagcgggctgtgaaacctgcaggaccggcctccccacagtccgctcccgggtccgccgacctcagtcctctctggcgcagctcggccccaggcgtctctggccgcaagatggcggctgggcccgcggccgggacccccagcgtctcgccgcgtccctgctgggcgccctgtctggacctccctgggcagctctgcgcccgcagccccgagtatttcccagagtgcttagggatgccaggcgggtcatcagggtagaatcccgactaggtgtgtgcgtgggaggagctgcgacccgtggggttcccaagctttcctgttattttttttttcttttctttttagacagtctcgctctgtc

SEQ ID NO: 336054 - DNA, 102 bp, Homo sapiens
  chr19:23432614-23432716
  hyper
cgtgaaccaaagcgcccggcctgccataaatttttaatagggggaaagatgaactggaaacgcagcggactaaagcccttcccattcatgaacccgctcccc

SEQ ID NO: 336055 - DNA, 581 bp, Homo sapiens
  chr19:23432833-23433414
  hyper
cggggaagagacaagacgcccgggggccggctgtcagcgaagccgccatcttatggctgaaggggactgaggcccagctgggcaaggagaactcagggcgcagtttgtggagatgactgcggggaggcccgagtccgccacagccacttcccacaggtttcaaccagcccctccctctctctccggatgtcggagccgccactctcaccatttctaggcttccaggggaggccctggcgtcttagctgtggatctcccaatgcttgcaggtcagagggccacagaggctgggcctctaagagcaggggacacaaagcagggaagacgagaccaagcgctccagctgcagcgagagacaaaggccccgccaaatcccggaagccgccctgtccgctccagttgcgtgcctgattggacggtccccagctcagggtccctgattggaaaacgtctaaggcccagccccttcaggccttaagtgacagaagacctgaccaaacgctggactgaatgaagaaagagtgacagcctaagctgcagcgttttcaggcagggcttcctccctgagcttagcccacccc

SEQ ID NO: 336056 - DNA, 587 bp, Homo sapiens
  chr19:23456510-23457097
  hyper
cgtctcaaacaaacaaacatgtttaacaagagactgggagtctcacctgccacagctccttctacgcacacacgagtcggaattctgccctaatgacccgcctggcatccctgaacaatccgggaaatactcggcgctgcgtgcagagctgcccagggagctccagacacggcgccgcagggtccgggcgggacgccggggtcccggctgcgggcccagccgccatcttacggcgagaggggtctggggcggagctccgccagcggagactcaggttggcgacccgggagcggactgtggggaggccggtcccgccggtttcacagctcgctctcccctctcgggatgcccagccccgcacactcaccttttcccagcttccaggatgtcctggcatcttagctgtgcgtctcccagaacctgcagatcacagggcaagaggctgtgacagtcaccgggggctcccgaggtggaggacgtaaaacagcagagaccgatcccaagctgtggcgggagtgagatacaaaggccccaccaaatgccggaagccacgccctcctctccaactgggcggttcctgcgctagc

SEQ ID NO: 336057 - DNA, 120 bp, Homo sapiens
  chr19:23577711-23577831
  hyper
cgcggtgacgcccataaatttttaatagaaaaaaagaggccctgggaaccccacggactaaagtgcttcctattcatgagccagcacctccagtcaggattctcccctgacgaccctccc

SEQ ID NO: 336058 - DNA, 94 bp, Homo sapiens
  chr19:23578015-23578109
  hyper
cacggattgtggagctgactgaaggaaggcctgaggctcgccacagccgcatcccaccggtttcaacgagccccgttccctctctcgggacgtc

SEQ ID NO: 336059 - DNA, 68 bp, Homo sapiens
  chr19:23578240-23578308
  hyper
cgagacctggaaactccggcggcagcgagagacaaaggcccagccacatcccggaagccgccctgtcc

SEQ ID NO: 336060 - DNA, 558 bp, Homo sapiens
  chr19:23598378-23598936
  hyper
cggccacagctcctcctacgcacacacgagtcgggattctgccctgatgacccgcctggcatccctgaacaatctgggaaacactcggggctgcgtgcagagctgcccagggagctccagatagggcgccgcagggactgggcgggacgcgcgggtcattgctgcgggcccagccaccatcttgcggccagagggacctgggacggagctgcgccagcagggactcaggtcggcaacccaggagcggtgaggaggccagtcccgtcggtttctcagccagctctcccctctcgggatgctcaacccctcacactcaccctttcccaccttctggaatgtcctggcatcttagctgtctgtgcacgtcccaggacctgcagatcacagggcaacagcctgtcaccggctggggcgagaggggggcagaggtggaggacgttgaatagcagaaagcgatcccaagctctggctgcagcgagagacaaaagccccgccaaatgccggatgccacgccctcctctccaactgtgccactgattcgataaagcaccagcactc

SEQ ID NO: 336061 - DNA, 700 bp, Homo sapiens; identical to SEQ ID NO: 205335
  chr19:24216104-24216804
  hyper

SEQ ID NO: 336062 - DNA, 99 bp, Homo sapiens; identical to SEQ ID NO: 240339
  chr19:24216924-24217023
  hyper

SEQ ID NO: 336063 - DNA, 770 bp, Homo sapiens
  chr19:28284358-28285128
  hyper
cggggagatcccagctactagaggacgcccgttccaatggcaactctgccaaggcgcctatgagagcctcttggcttttacctggtctgcgagaaatcaaactttgggcacaagtcatgaagccgacaagcccgggagacacagtgtcagaattacaaggtgagatcagccgcccggccaagctatcttctcgctagcaggtgaggcccgtgaacagccaagctccccttggcacggcggaaccgcagtggacgcgtggaggggctccgtagaggagggacctttgcttgggatgcggggagctgtagtctcttatctgcacccagcttgttagttgtacgcctgcaggactacaatctcagcacaaagcaggattgtagggcggtgcggatccctggagggagacagcgcggtgcgctcctgccggccatgctggctggggtggtgtcttaggcggttccagccgttagtcacagggcggccggactacaatcccagcatacaacgggagtggaggtggtgaccttgagagagggcctgtgctgtgcgcgcctcgcggggcatgctgggagcagtagcatcttagctgcttccggccgctggtcgcagggctgcgggactacaatcttcgcatgaaatggaagagagggtggtgcggatagcttgaggaaggtacggataccttgagggaggtatggatacgttgagggaggtacggatacgttgagggaggttacggatacgttaagggaggtacagcagcggtgcgc

SEQ ID NO: 336064 - DNA, 2972 bp, Homo sapiens
  chr19:30015761-30018733
  hyper
gctcccagggaatcctctggcggtgcctccgggaggctggtagccggggaagcaggcacgtgaatccaccgggctgccccaccccaacctgaggtcagagctgaggcgtaggggccggggtaggggcagaggtgccgaaacgcactagctggggactcccgggggaaggagataggagagacccaaggcgagccttaggactcgcccctatgactatgactacgcgctgcgtccgaaccacatgtccaccccgcatttgccttcggggaccagaccgcgctccctcagatggctggggagggagcagactccgggtgaaggctgggggaggtaccgggatgccgagtacgccagagcaggcgggggatgggttccggcttcctgccgcctcggcatctcgctttgcaccgggcaaagaaggggccacgaccggcgaagagcgcgtggagacacagggacccgcgatccaggggcaggaaccccgccccctcccggaaacctcccgggccctgagtcgtgcccggcgctccccaccccaccccacccccgccgcccctgccgtcactcacggccgctgcgggctggctagcgtgtgcgctctccgcgccgcaggcacctgctcgctgggcgctgtgcgctcacttctccctcgcgcactgcagactcccggcgctgccgccgccacccagcgtagtctccggctgggcacagcgttccgcccttctcgcggccccgggcgcccacccatccgtcatggcccaggcctgggccaaacagcggggcagctggttgcccaaactggggtaaggagttgagggctgggagctgcagagaggaccgagggacacacggggagcagggatgagcggccgtctcgagccgtgcagactgggaagaagccagggagagtttgggtgggaggactcccaacccaagcgggtgcggggcggggctgtactccaaccagaaagacggtggtccctccgagcgacccccgaggagagagggggagcgctctggggcgggggcggggcgggctgtggcaggagaggggagggcgggggcgatgcagcggtggaggcggcttggcgcccagccactgaccgccccctcccttcccctcccctccccctctccccgcctctctccggctccgggtccgccacgccggacccgctctccccgcgctgcgctgggtcggacgccaggtctgcgcgccgcggctgagcgcccactcgccctgcggaaagagccgcggaggaaccggcgggggcggctgcgggagccgaaggaggtggcaatcgggagcagaaccagaaggagacagggaggcagaagctcgcggctccgtggcacgcactccctcggccagggatgggtcccggcgcggcccagcccctgcccggcccgccgggcagagactgaaccgcggatccccaccgtcctgtggacgaccggacagagagaggcactgaccgatcgccagcagcctcccggtgggaccgcgtctcctgcacaccccgcgcagcgccccccgccggagccgcaccgggcaagccggcgagggagcggggctgattggcggccgccggcggccaggggagggggcgccgcgcggggccatggcaggctcggaggcgtcctagcccgagccggagccgatccgagcccacgcggccgccgcctctccgctcccgggcccccgccgccaccgcgccccccgcgggagatggaacagcggaaccggctcggtgccctcggatacctgccgcctctgctgctgcatgccctgctgctcttcgtggccgacggtgagcgcgggaactttgctgccgctgtggactcgggggggtctttgctggggccgccaccgagaagaagaagaaagagaacgaaccgggaagcttcgcggtctccagcaatcccgctgtgcagcctgggcccggaggggtagggagaggcgagcggcgaagggtcgccgcagcagcagcgccgcgcccgagtcgttcccagtcccgccggggccccggctgcggaaaggatgcctgcggggagcgggagtaggcgcgccccagccaggctctggcggtgcggccaggggcgggggagaagcacgagtcgcccctgccgccccgccccatccggagggaagcagtaggcagccgatggccggtccctgcctcggccctgcagccgcttccccgaactttgctagcccctccggccgtgcgccagggagcagctgcggggtggggggcacaaggccagccagccagagaccgactgcctcgctttaggttgccccaggcccccgacctacagctggtcacgcctctctctctctccccacccccagctgcattcacagaagtccccaaagatgtgacagtacgggagggagacgacatcgaaatgccctgcgcgttccgggccagcggagccacctcgtattcgctggagattcagtggtggtacctcaaggagccaccccgggagctgctgcacgagctggcgctcagcgtgccgggcgcccggagcaaggtaacccgccgcccacgcggtaccggcgcgcgcccggctcgcgcccggggcggcgaaggctaacccagggagggaagcagcgggcttcactcgcgcagggcgccgccctgtggcgcagcccatcttccaccttcgcatcccaaagcatcttcaaagtcagcagtggttacccccaaacctgtcaattattttgacagcatcgctgttcccaccacctcccagaactccattcacgcccagcccctaaagagccacacctcagcctggtcgcttgctcgtgctcgctggctgcggccctctgatgggtgctgggtagtgaaggaagcccccttggtcccatcaggctctccccgccctctgccactttgaggaccccagggctcccacggctgcgttccagaggccaccagaaaaccgagtaccggaaagcc

SEQ ID NO: 336065 - DNA, 1249 bp, Homo sapiens
  chr19:30019101-30020350
  hyper
cggcaggtgtgcaccagggcagccacccgttggtcaggcaccatgctagctccaaagcccgcttcctcctgggaaactcttggaaagccggacgtcctttgtgccctcaacccccatcccccgggcggtttcggtcctagcctgccggaggagggtgcccttgcctaaaggcggatccgagttcccctagccagaaggccgcgagcctcacgtctctctctccctctttgcattttaggtaacaaataaggatgcaactaaaatcagcgtaagtgtggagcccagcgcgggccgcgggagaccccttctggccgcctcgggtcccgcagctccctcccttagcaagccgcggcggccgcgcatgtggggccgcgcaagtagggcagcgatcgcagccttgcatcggtggctgctcggcgtgtccgggcgccatctgtcgccggttgcagggtcgggttctcttttgtgtaaatcaagggtccaaggcttgagtcccctaattcggctcggcgctgacctgtaaaactccccttggtcggactgcgcgcttagggcctctcgcgcctgccagcctccgctctgcgggcattcctcctagcaccgggagcgcgcggctgctcgccctcgccgcgaccgtggcgccagcttcccgccccctctgccccgccctgagcatctgctctgcgccctccgctgcaaccctttatcctccgcctggattgcgggtctgggtgcggggtgttgcaggcttgcaggggacggggtagggggtggttgtgccaggctgcgaggggcccgggtcatggggttgctaactctgggaggagatgcgcccaagcttcccacctggagcgtagaaaggcctggagatgacgaagcctcctcgtgggctcggttcagaggtgagggctccctgggtgtttgttgagagccgtagagcagtacttcccgaagtccccaccggggcgcaggggaggagcacttcgctggggggcttctggagatcccgcggaaaggcgggttggtagcaggtggccagggagccaggcagcagcctcagcgttgcttgccttcttaagaaagcacagtgttagctgtaaagggcggggtccggtgacagggtggctttccttaggaagcgattcgggcaggccctccgtgctccgggaggtgaggagggccggctggggcgggactgtcggttggagcgcgtcggggcgggaaagacgtggggaagttaaggaacaag

SEQ ID NO: 336066 - DNA, 259 bp, Homo sapiens
  chr19:30165123-30165382
  hyper
cgaggagtgcgtgcggcggcaactgagggccacgggccgcccgcccagcacggagcacgcggcaccctggatccccgacaaggccacggacatctgcatgcgctgcacgcagacgcgcttctctgccctcacgaggcgccaccactgccgcaagtgcggcttcgtggtctgcgctgagtgctcgcgccagcgcttcctgctcccgcgcctgtcccccaagcccgtgcgcgtctgcagcctctgctaccgcgaactggcc

SEQ ID NO: 336067 - DNA, 531 bp, Homo sapiens
  chr19:30713408-30713939
  hyper
cgcgccgggaggtctccccggggacccccactcagcttgctcaggtcctggaggcatgcagagggcgtcggcgccgacagggggagccggagagccccctgcccggccgtctgcggggctcaggcggggcttggcctccgatgagcgcgctgtctctgcccggtgggtcccaccccgcccggccacgcaaagccgtggcagccccctcgcggcagcgcgccccaggcgaagcaccccgggccaccgggagcgcggccctcccgagacgcacgggctccgaggccgcagaagccttgggcctccaggcctggaaggggctcccctggcctggaggccatgggcccggcccagaccggccagacaccgccagggacccccagaacgacgccaggacgcgcgccgggctccgtgcctcccacggcccaggcgaggccggcggctcgagggttaaaaggcgacccccattctgtaggggagaaagtgccttttctccaagtccatatggtcacttcctttcgacctgctcggccc

SEQ ID NO: 336068 - DNA, 206 bp, Homo sapiens; identical to SEQ ID NO: 240355
  chr19:30715560-30715766
  hyper

SEQ ID NO: 336069 - DNA, 3850 bp, Homo sapiens
  chr19:30716181-30720031
  hyper
cgcaagacctatctagttgctgtgaattatgccagggcgacaatggagagcgtttttaatggtacaatgcatttcacctaccagatagggggaggccgagccggggatggggatgtctgctggggctgggtgatgagtatcaatgaacggggcgattctgaaaagaggctgatgaaaatcgagcccgccctgccccggctgggctgggaacagttcgcagggctctgccgagtgggcgagtgaggcgcgcgagcagggcgcccgtcccccctcagccccggaaaatgatcaagtcaatcgtgtgggcatgtttcattattcattgaacacaatcttttacaacgctccgtttacgtgcccgagtttgctcctgacgcccgcgtttcaatgtttaaggtaaggaaaacaaaggtgggggggggatcgcggggcgcggcgcggtgcggggggcgcggcgcgggggggcggcggcgggtgggggggcagcttcggcgtccgggaggtggcaaagtgagtttggactcttggcgcggcccccccgtcccctccccctccccatctcggcgaggcctgccgcccggttccttctcgccccatcgcgattaaaaaatacggtctaattaaatatccgtggctgtgacgttggcgagagaagctgtcagcgggtggggggtggggggaaagaagaggaaaaccgagccggcggctgcggccgggcatcgtatggcgctagagaacttcggcggcgagcgggacctgcgcctgggccgccgcctccccgcccgcggtcccgggaccgttactttgaaaaggagtcccgaggcctggcgcccggcgcgcgatcgggaccccgcgtccagctccggggacccggccggcgccccccacccgcgagcggcccgcgagccactctcaggccccgggaaactttcaagagggtctggggggtggggggagtaaaaaggggagggggtaggctggggccgcggaaacttctgctcaagtgactttccccattttctcctctgcctgggacgggggttcgccttgcgctctttctctggtccgcgctcactgcggggttccggcccctccgcccgtggagagagggtaatttgcaaccttttttttttttcaattaaagttagctgatgcttacaatgtgtcaaacttgcgggcgccgagagccgctgagatctgccattttgtgattgcatcggcctcctgtgccccgggagcctggccaggctgaggccggagagttggtttcagggctgaggtgccagggtccgaacccgcgaccccaggaaaggccgtggcgcctgcaagcgcaggcggcgcccgcagcacctgccccagccgggcctcggcctgggggcccagccgggggccaaagaggaaataaataaataaataagtaacaggttatggagggaaaagagccggccagtcccaggctggagaaatgaggccaatcagagcgaggaagtgcgggcgtgggggctctggaaggcagaggagaggcagggcttgcgcggcgtctgggaagagtgcaatctggggggacgcctcccgtccccccagcgcagatgcatgactggggtaggaatgatctttgctgataagcctttttctgtttgcttcaagacattatttttcgaagatgaattgaggaaaacagtcgtaggcgagactcggggtgtattttaggcaaaaaaaaaaaagttagggttgggggagagctttcctttgatgagtaggaaagtgtccagatctcgacgcgcccatctgttgcagttttgcaaataatttaaaatatagatatctccatatagacggatgtatgtgaagtggaggaaggtcgaaacgcggggaagttagggaaaaagaaagaaaaagggctgggcagagagagacctgtgttgctcactcttcactctgcggagtgaactccggcagggctttctttggggacaggtggaaagttaagtcccccccttttcacttctgtattgtgagtggttcctactgtgtgcctgttggagaacatgtccaccgttcccgagttaggtggaggattggaatgttggggggcggggagcgttggagttgaggacgcagtggccaggggctgggggccgagaaagagcagggcggggtctcagccccgcgtgcgggtggcagcggcggccgggttttgtttgccagatattgttatgtctaacgggtgcctcgccggagacgtgatttgtcagccgccttcgttttcactttagcagaaaatacggcagctgcgaggtgtcccggcctgcggggctcgggcacccggtgcgtcctgggggctgggtcgtgtgcgcgggtgggagccggcggccggcggggccggggcgaggggcgagcgggaggggcggagtgagcgagcgcgcggtacggccctccggttcctcctgcgccttctcccggcagccgccgccgccgccgccgccgctgtgcaatttagcagaaatccgacaggggccgcgtttgctgagcgcatccggcggccgggcagcccgagcgggccgccgggcctggtcggccggtgtagaggcgcggagggggccggcggaggggaccggcggggatgggcgcgggaagcacgcctgaccagagcacgcgccgttccccaaccctggtgtccccggcgagttgggcagccccgcgcgccctgaccttgacgccccagtctccagccagggcttaggtgaacttggggtggggtgtgcgtgcgtgcgtgtgtatgtgcgtgcgtgtgtgtgtgtggaaggggtggtgagactgggaacgcgctgttttctttcccagtttgatactagcaactggatttttactttaagaccggctttgctctctgctggggttgggagggggggcgatcttttcccatcactcacatctttgttcattgttcactgagtggaaggcaggcgacttaaagagacgaaagagaggaaaaaggggtgagagacggagagaggaaaaagaggggggcggccagaagagggaaggagaggcgtggggacagggcccccgcccccgccggggtcgggtttgatggtgaaatagtaaacccacgcacggagggtcgccaggaaagtggacattaccgctttaattaacttcgagatgctccggcggcgggacctggcgtagccgtgacgcgcccccataaatctgcccggcccggggctgctccgagaactcgtacagtagcggcgtcagatccatcccgcgcctcccagtccggagtccatttgcataattggattttttttttttgcctccttctttctccctgaaacttgtttgaaaacccaagtgaaaaccgcgacgatctgcacactcaaaagcaagtgccaagtaagtgccctgcggtggcctcggcgcgccccggggtgagcgcgcaaagccgggagcgaggtgccgcgagctgcgcgccgccccgggccggcctcgcgtgtgggcggctgggcggctgggcggcgggaggacggcctccgcgggctccgggactgcccggctggctgctcgcacaactttttttttttcccccgtctgctgacttttcgggccaggtgaagtgtttgggccacgcgtgtacctgtggcgagactcgggaggcgatcttggggggcgcgcggtcgcagttgggcatcttgcctgggtcgggggcgggcagtcggtcccagtggccgccgctgagggcagagctgcgagcgagcggggccggctgctggtcgcgccgcgccgtaaatgcaagcctgtagccaaatgcttcccccattattctaaggtttgtgtctgcgtgtgc

SEQ ID NO: 336070 - DNA, 610 bp, Homo sapiens
  chr19:30865606-30866216
  hyper
ctttccctcctgcaacttctcggaccgtctctgccctctctcctccagagagggcgagtttcatcctggagggaggccgggggagctgcgaggccacccccagccggcgcccgggcggattgcgagcccccgcgggtccggccgggggagcggagactggccccccgcccgggctggggcgcctgccgcccgcgagccggaagagcgccccattcacgagcaggcagccctggcagagggttaattgaggatcattgttgttggttccaggaggagcgaagcgcctggagatcgggcgcgcgggcgcggctctgggagcgggggaaggtgaggggaaatgggacatgatggcattaataatcgttaccaaagacggtgggagtaacaaaggaatgcgtctccgagacgccgcccagccccggggtgttttctggcgcggtcgcggtgcaggaacgcgagccccgccgccgagcctcccgccgcctgcgttcgttggcgcggcgcccggcggtagtgccaccccgaggccgagcgctgcccccgccggcccgcggctgccagccggccctgcccgcgcccgggccccgcgagcggccgcacttcaccttac

SEQ ID NO: 336071 - DNA, 3365 bp, Homo sapiens
  chr19:31839508-31842873
  hyper
cgccagcatctaacatggacttgacagtcatctgacaatacccagaccctgtgcgctccgggttccaccgctgtgcccagtttgggcccaagaaatgaggaatcaatcgtgttagtactaaggtggccgaggggaccggctcgctcactcgttcgcgctccctggctcggcggacaccaggcagtcccccggcggtcggccgctcggaggacgcggaagatgtcccggggaactcaggtgaccccgcccgccacccacagaaagagccaggccggggttgcttcccattccctctgcagccggagagctgaggaggtagggacctggcgcggctcagcgcgctccgcgagcggctccccaaatgggtgcgagagggaagagggcagagcgcggcggggcgtccggggggcgcccggtacccgaggcgggcgcacgcacccaaacaggagagcggcgcccggagttactcagtgcgggcagaagagcggggcgaggagcggggtcgcgcccgctggaggcgcggggcgagcggaggaagaggaggaggagagcagaaggaaggggaagcggctcgtacctgctgcgcgccggggcgcctgctgcttcctcctcggcatgatgcttctccggcgactgccactgccgccgccgccgccgctgccgggctgaggacagggagggagggggcggcgggcccgcgggggggcgaggcgggcctgctctcagcctcccccccggagagcggccgcccgcaggatgctgctgcgcccaggctctccgcgtcccccccgcgccgcgctccgccgcgaaccccgaacgtgcggagggaagaaggagggcgggcgagggaggctcggggagggaggagcacgggggggaggaggaggcagaggaggaggaggtggaggaggaggaggaggaccgcgctgccggcggaatgggaagtttgacaaatcgctccagaggccagaggaggagggggcggggaggagcggcggccctgcccccccccgccccgtccccagacgaggtgcgcggggttcggggctggggggcggggagagggcgggcagagcggtgggaggaggagcgcgggagcggcccggaccggtactgccccggcccccgcccctaggccgggggtcacggcatccggggggacgcgcagccgccgccgcggcccggggctcggcggtccagtcttctgcccgtggcgcggctggagcggcggcgtcggcaacaggcaagcttaaaggaaaaggagatgatcgtgtcaatcgcccgcccgcgggggcgccgcgcccccgcccccggccccaggcccgcgtgggacccccgccccgccagcgaaaggggtgccgcccctccgcctccgccccgtgcgcacacgcgggggcgcggcgccagccccgccgagcccgtcccggggcgctcgttaccccccacccctattcccacccagcgttcgtccccagccaccccccagctgccccacccggctcgcactcctctccacccgccgactccggagcccccagcgtggtccccgggccggggctggcgtcccccggggaagccagagcccacgggcaggccccctccagggaggaggcgggcgcgggccggggcgggtgggggcagccctcagaccccgcgccacccagctcctcccccaggacccgccgtagccacttcccccaattttttttccccggacaaactttcctgggcccgtcccgggggtcggtgtgggagggggttccttcaagtttcctctcctgactttgggatgatcagggtccctccaccccgcccctcgcccccgggagccgggccgcgccccccatccacggcgcgggccgatcctagggcgggacgggggcgggagaaggaaaccgggctcccctgcccatcccccgccaggggctccccccgagagcctagggggccgccgcgccgtgtcccgcgcccggcctgccggggctgctggactagagggattgattattgattggtgatcggggtcgctgaggctccgggccggcccggccgactggccgcggcaagaaggagctggctgggcggcgtgggcggcggggcgacgcgggctcacttacgggcggcggtgagggcgcgggtgggccggagctcatgcgggcgacccccgggcggcggcggctgagcgggagccggagcccgagcggcgcgggcggcggcgcatcgatgcgctgcgggctcgattgcgtctccctgggccagctctcaggccgggaatggggcggccgcgccggggccggctccgggcgctgccgggcggcggctgctggagcgcgggggcggcctccgggcccactatccccgaggcggccctgcgcccgggcgcgccggctggggctctggcgctctcgcaggccccgaggccgacagtcccggcgagggcgggcgccccgcgctccagcaccggctgcctgagcgctcctggagcagcaaaccccagacttcttcctccttctctccttccttccttccccctccccttatctttttctttttttagtctctttctccctctttttctgccctgtgtcctttttattttttctctacgactgtttttgcaagtttgtttcaaaagttcacagcatgctttcttttcttttagaccgggagacagtgatctcacccacacggtaagatcaaaagtctccgctcgcccagcctgcgggcttgggctgggtccagacgtctcccaggatgcagatgcgccgccgctggcctccccggctataaagccgcctccagcgcctttccgcgcgcaggagcgctcggagttgtggggtacggaccccaggcggggcagggagtccgaggcgggctgcggcggggctctcgggctggcggactcgggggctgaggcgccgtgcgcgttgggtgcccgcggccgcagaggccagaaccgctactcctccaggccggggagacgcggccgtggagcgtgaaacgcttcttgcaagcgaggaaacggtgagttggccgacaccgccggcggcctcaccattctggtggccgcgctgagctcctgtcgcctggaggcgggttgcgccgcacggggtcagctcccgccggctcccagctcaccttcgaagctcccacttaggcgcgcccggtgcggcgtgtgcacagcgcggggcgccgcacacggaagcgtgtagttctccctggtcgcgcttttctcctcctttccatcccctcgctgttcttgcaaacctctgttccttcggccccctcccactgcgggccgcggcctgaactcgggtctccgcgtagccggccgccgccgctgggtcgctgcctggccctccccc

SEQ ID NO: 336072 - DNA, 336 bp, Homo sapiens
  chr19:31847946-31848282
  hyper
cgctgtctcggccaccaatcgggcgccgctttcctgcgcgggcgatggctcctctctggcgcggagggcacccacatttgcatgataaattgaccagactggcggcagccaatgaaatattcaaattaggctgggtggcggtagtaggggtggagtccctggggctgccccttggcgcggcggcgggagcgggcgctaccacctctccgtcagcgccctctggaggcgggacagcgcgggcggccgctctggcccaaaagacgagatggggggttgggggtttgggatgcaagggggtttgggaggggtgatggtggggtctgggtggtgcttcgc

SEQ ID NO: 336073 - DNA, 457 bp, Homo sapiens
  chr19:32715384-32715841
  hyper
cgctccgagggccccgccgggccgccctggcagctggaaaagcgcattcctgctcgcccgaggatgcagaaggcaaccgagtccccgggcggcggcggggcaactgcggaaatcacgcagccagatgaagctcataaatttcccctatgaacaattgttttcatttccctcccatgccactagatattataagtggaaagcaaaacacaagtaaatatgttcattccgctcttgcgatcggtgataaaccggaggcggccgaggccgacagaggtcagcaggccgctcgccacgggtctgcgagcggacactgccaccctccggccgcgcgcgggactgcaccggccccaccgcccggctctcccgcccgctcgctgcccgccaatgttcgctttgcgcccttcgctcaatgtgcgtgcaaattacagggacattcgaaaggacagagagctcccat

SEQ ID NO: 336074 - DNA, 118 bp, Homo sapiens
  chr19:33182525-33182643
  hyper
cgcccttaagcattcctgcttttggtccaagcttcctgcgtgggaatactgcggtcctcctttcaggcagctgtgaatgacaaacggtcgctggctgccgtgacacccattgtcccgc

SEQ ID NO: 336075 - DNA, 984 bp, Homo sapiens
  chr19:33685159-33686143
  hyper
cggcgggcgcgtcacgtggctggcgcagcgcggcctccaggctccgggcgcgggcgaggggccgggcgggaggactgacagacccacggacgctctaccggcggcacccggccgggcgggctgggcgcagcgcggggcggcccggggacgccggggccgggcgggctgcgcgccgcggggcatgggcgcgccgggggtccccgggcccaggccggccgcggcggggctcccggggcgcgggggcagcggcgggcgggggtcttccctggcggccgccgctgagcccccgcagggcccgtgacgccgcggccgatgtggccgcgcgcgccctacgggcctgcaccgccaccgcacaaagacgcctcgggagccgccgcctgcacccgggccgcagcagccacgccagccggagcccgagccctagcccgagcccgagcccgagccgcagccagagccagagccggagccgcagccggaaccggagccggagccgcggggcaggaggcggcgcccgcgggcggccgggcccggcatggagaagcgcgcggccgcggggctggagggcgcgccgggcgcccgggcgcagctggccgtcgtctgtctgggtgagtgggccgcgcgggccgggcaggtccgggtcccccgcatggcagtccgcgccgcgccctgaccgacctcctctccggccgcggcatcccgagccccccaccgcggtggctcccgcgcggagacccagagaggggccagcaccgcttgcccgcctggccccgggcctgggagggcgactctggtggcgcagccccggctcccgccccgctcggagtagcgcccggagcccgggctgagcgctggcaggaggcccttcgtgcaggcggcagccttcaacccggcccgcccgcgctgagcctggagacgagggggccccgggagctggggacaaaggccaggccggctgtcccctgaagaagaaactgtttccggccc

SEQ ID NO: 336076 - DNA, 2468 bp, Homo sapiens
  chr19:33791861-33794329
  hyper
cgggaaggaggcaggaaacctccaaataaaatgacaaggcacgatttgctccccctactcagtaggcattggagcggtgagtttgcatttccaaggcacaaggttatcctaaatactagagttgccgggctcccagctcagccccaagaattctcccctcctcgcagggagaagccaccgcctggccccctcatcttagacgcaccaagtccggcgcagaggaagggaggggacacgcggagcaggccaggctttcaggaggcaccggaatctcctagtcctggctcgcacggctcgggcaagcctcgagatccggcgaccccaaaccactccctgggtccccgccggaggctggcccagggcggtcccacagccgcgcgcctcacgcgcagttgcccatggccttgaccaaggagctctctggcagctggcggaagatgccccgcagcgtgtccagttcgcggctcagctgttccacccgcttgcgcaggcggtcattgtcactggtcagctccagcaccttctgctgcgtctccacgttgcgctgcttggccttgtcgcggctcttgcgcaccgcgatgttgttgcgctcgcgccgcacccggtactcgttgctgttcttgtccaccgacttcttggccttgcccgcgccgctgccgccactcgcgcggaggtcggggtgcgcggcgcccagccccttgagcgcgctgccagggcccggcaggccggcggcaccgagcgcgggcgcggggtgcgggctgggcacgggcgtgggcggcggcgtggggtgaccgggctgcaggtgcatggtggtctggccgcagtgcgcgatctggaactgcaggtgcggggcggccaggtgcgcgggcggcgggtgcgggtgcgggtgcgagggcggcggcggcggcggcggctggtaagggaagaggccggccagcgccagctgcttggcttcatcctcctcgcggggctcctgcttgatcaccagcggccgcagcgccggcgccccgacgcgctcgtacaggggctccagcctgccgtccaggtagccggcggccgcgcagccgtagccgggcgggggcccgtgcgctcccccgggcatgacggcgccgccggggcccgcgggcgcgcccgggtagtcaaagtcgccgccgccgccgccgcccgtggggcccacggccgccttggccttctcctgctgccggctgtgctggaacaggtcggccaggaactcgtcgttgaaggcggccgggtcgatgtaggcgctgatgtcgatggacgtctcgtgctcgcagatgccgcccagcggctccggggcggcaggtggggcgggaggctgcgcggggcccgcgccccggggaaagccgaaggcggcgctgctgggcgcgtgcggggggctctgcaggtggctgctcatcgggggccgcggctccgcctcgtagaagtcggccgactccatgggggagttagagttctcccggcatggcgagcctcggcggcctccagcctgcgcggggcgtcgccgccgcccacccggagaccctgctcgcccgcgcccgcgcacctccgggtcgcgaatggcccggcccgcgccggcccagcttttatacccggcaggccgcgtcgccccctagagtccgaggcggcctctgtccccgggctgcggcggcgcggcgcctgctgggtcctagcgcgcggccggcatggggcggcgaaccagcgcggcacagcgccgcgctccccaggcaggccgcggcgcaacgcccaccgcctccagcgcgcccagcagagccgcggcgctcgctccaagctccgcccccggcccggccgtcgcccccgcgcccacgtggtcggtagcgggggccccctcctcctgcctgccctaggcgcccgtatccagccacggccgggagcccaggagtatcccgaggctgcacggggtaggggtggggggcggagggcgagtcttggtcttgagctgctggggcgcggattctctttcaaagccagaaccaggcctgtcccggacccgcgtcccggggaggctgcagcgcagagcagcggggctggggccggtggggggccgtttgggacgcgcggagaggtcctgagcgcggtggctctgcgtctcctagctctgatctccaggctacccctgtgattccgcgcagaggtacctctcggaggacgccggggtcccatgggcggcgccgcgcagggcgctaggaccccgcggggagcggaggcggcctcggcccgggagcctggaggacctggccggtcgatccgcccgggctggaaaactttctttataattacttctccaggtcggagcgcgcggcttgctaggcgcgcggggccggcgctgttacccggcgtggagtcgccgattttttttcctgcgggaccgcggggccccccagactagcggagctggacgccggggcgagcacggggaggggcgcacc

SEQ ID NO: 336077 - DNA, 2040 bp, Homo sapiens
  chr19:34112312-34114352
  hyper
gaccgaattccacgcgagctgaagcccagggatatcccagaatcttcctcaggatcaatcttccgcctttcaccggccctgcgcccccgcagcatcgggtcctgggcgcgcgcccctgccccgctgtggtcaaggcccgccccggtgacgcctggtccttttcccgggttggcgccgcgtgcgacccaccgaggcagtggcagcactggccgcggtctggagcctagcgtcaggccggagtccggctctcctgaaccgggagaccggcgcagccccagccacgaccgctcccacccccgcggccgccggaccgcgcccagcagcgactctttctgagagcgctgccagaggggccgcgggagccgcagagcgcgcgtgggcgcggcgcccgcgagcccccgggagggccgagtgcatcgctggagcgatccccgcccggcccggccaccgccgtagccgccaccacggcggggcggggcacgggccgggggcggggcgccgggcgggcgcggcgctatttccagcctcgccggaggcttcgctctcacttcgctgggagccttcccggcgcgcaagccggatccggcagtgctgcggggaggagagaggacgaggcggcggcggcagcaggaggtgggggaccgatcgcgccgggggccgaagaggaacgccgccccgcgccctctcgctccccgcacgctccggctgccggccccacgctgctcgcccacagatcgcactgggttccgcttggagcgggcggaggcaccgggcccgagctgggtcggaggtcctctccgccgcctgcgcgccccaagcagaggatccgccgcggagaaccgctcccggactggaggcgcccgcggcctcgggtgcgtccgctgcgccaggtaagtggctgcgcccctgccccacccctgttcccgccctgcgcaggctcctggcctgcagagacgccaggaaggggtcccgagcgggccccggactgcaccgctcgccatccccgccaccgcacgcgaatgggagtccgaagctgcgggcggaggtgggcgcgcggggctcgggtctggttgcactttggggaccggccccggtagcgggaactttaattagactttctctccttggatctcactcgctgccgcgcttctgggaactgccgtccctcgggccctcttggtccctgcggactcccgctccgcctcctggccctcggtgctgcccgcggggaggcggcgtcgggcgctgagcagcgagcgccgagggccaggcaggagcgctcggggcgctggggcttcctggcgcgctcggagccggggctccggacgggttgcggcgggcagagactatgggggaagtttaagtggccttggcttcctacccagcggctccgtcgcgcgcgtccccgacccgcaactctccagggcaccggcctgtgagtgctggaggcgagtgtgcgtgcgtcagcgatggtgtgaaggtgtgtgcgtgcgtgtgtcgggagtgcgggagtcggagcctggggcggctccagggggcggggaaatgatccgtttggccgcgggaccgagccgagctctgacggcggctgcaactccggctaccgactctgcagacccgctctggcctcgctggaggccagccgggccaggagggcgatcacgggttttggcagtgcccgatgctggggcttgggtctgatgtgaccccgattccttctccagtgcgggactcccgccgccctaactttcgcgtacatcttgtctccaggcccgcgaccccgacccggagttgaagcggctgcggcgccctcggctgtgggcgctgctgcccggctgtctgttttaacccagaagtaggcgccgatcctggggctctctgtcctgcagtcgtctccggcgtcccagaggactctgcgtccctgggccactcccgctggctcaggagccgtgatcagctccgttaaggggaacgcgcgtcccggcccctctccatctgcttggcgcgatctggcgcagcagcagagcacgtgggagaggc

SEQ ID NO: 336078 - DNA, 654 bp, Homo sapiens
  chr19:34310910-34311564
  hyper
cggttcagggcccccgaggaagctgcggtttggggcgagccgattgcaccagcagggccgggctgctgctcccggggctgacgcgggccacgccctcctggacgcggacacacccccatttccccgggcccacagagccacgcctggccctgcagccaaacagcgggaaggcagattggtacgagtaggtacaaggccctggaattctcgcccggttgccacacactgcacggagcataattgggggaggttgtgcaactgcccgggaagccggggctcgcaacgagggctctctccaagtccccatcacaggcctccggggagcctcgggacagagcctgacgccaccttcgggtgacatcgatggcctcgctctggcagaggagtagtgtggctctgccgagaactggggagcccgggtccccgcagggccaaggggagggagggctggcggaaggggccgcgcccacagccccaggtggcagcagcggcggtggcggtcccgactggcagagcctaacgagaacagggcctatccccaggggccccgggctggacgcagaccagatctcgcgggggtgggctgggaggcgcccgccagaggccggaggctgacagtgcctttcctatcctatgggtctattgtgggcccgc

SEQ ID NO: 336079 - DNA, 1731 bp, Homo sapiens
  chr19:34972055-34973786
  hyper
gaagcgacccagcgcgaggaccagtccccaaccaacccgctcctagttctgggcgccttccccagcagtcagatgggggcttcagaggccggtgcgcggccacatggccccgggccaggcagggggtcgtggggacgcatctgcgctaggcgcacagtattcctgggcgcgggacgggcgaagcgccgtgggttccaagctgagctgggtcggccctgcagcgccggagagcaaggcggcgcagggaagggagatggggcgggatgtggggaaagctgtcgactgcttggatctctccggcccggatggcgccagctgcctccagctcagcctgcggaaatccgagctcttcccagcggcccgacggcccgggcgccccgcagaccctgggctctccccgcggtgcctccgccgcccgcccctgcgtcctggcccggcctccacgcccctccgaggtcccggcgcagcgcggccgccgccactccccccacattccagaggccgcagcgccgtctccttcctcgcattcctgcccccgcaaaggagtccctccgccccgcgcgaggccgcggcgaggagggggcgcggcccggcgcctgggagcttacattcctccgccgcgcgcgccgccgagcagggcgccgcgtcccccggcccgcgcgtggccgccggaacgaccccggcccggcgccggccccgccccgccccgcgcccaggggtcccggggcgggctccgggcttcgggcggacgatgcggcggcccggccggagcggcggcgggaagcggaggcggaggtgacgcgccagggccggcgggccgggccatgcagcgctccagggcgggcgcggacgaggcggccctactcctggccgggctggccctgcgggagctggagcccgggtgcggctctcccggtcgggggcggcgggggccgcggcctgggcctggagacgaggcggcgcccgcgctgggccgcagagggaagggcagcggcggccccgaggccggggcggacggactgagccgcggggagcggggtccccggcgcgcggcggttccggagctcagcgcgcagcctgcgggcagcccacgggccagcctggcggggtccgacggcggcggcggtggcggcagcgcccgatccagcggcatcagcctgggctacgaccagcgccacggcagcccgcgctccggtcgctcggacccgcgtcccggtcccgggccgccttcggtgggcagcgcccgctccagcgtttccagcctcggctcccggggctcggccggcgcctacgctgacttcctcccgcccggcgcctgccccgcgcccgctcgctccccggagcctgcggggccggctcccttcccgctgcctgcactcccgctgccccctggccgggagggcggcccaagcgcggccgagcggcggctggaggcgctcacccgggagctggagcgggcgctcgaggcgcgcacggcgcgggactacttcggtgagctcgctcggcccggcagttccctgcgcgcatggctggggtccggggttccgagactgcctcgggtaggcggccggatcagcggaggagagcacggggctggctgggggtgcagcagtgcacggggttgggacgaggaaggtgcatcccctggggactggggagcgcaaagggtgagtgagtgcgcctggatccccagcagcggcttcacccctgcctctgggtcccccgacacac

SEQ ID NO: 336080 - DNA, 217 bp, Homo sapiens
  chr19:35168869-35169086
  hyper
cgcggggtgatgacggcgccgacctcttggcactgttgtgagagcgaagtgggcgcgagagcagacgccagctacagttttttttgggttatgtcgtcatgaagccggcgctttcagttgtgcaaccttgaacaaatgggttcagtatctcggaatttcagttttgtcttcattttaaaaaataaatctggtttagaactcgacctcaagcgatccg

SEQ ID NO: 336081 - DNA, 68 bp, Homo sapiens
  chr19:35169531-35169599
  hyper
cgctccggcgagtgattaccagtgtgcttttccattaaggtgtgtgacaggtgccgcaagataagccc

SEQ ID NO: 336082 - DNA, 547 bp, Homo sapiens
  chr19:35454464-35455011
  hyper
ttgcgtctcaacaccgagaacagaagcgtggggggccgacagcgaagggcctaacgtccaagcactcacctgcgcggggtcccgcagcgccgccgctgccatcggagtctgtggtcagagcagggccccacggtgcgggaaaccacggggcgggggtagggggtctcgcaggctgaggctaccacccacctggccgtgccccagacgaggtgtgaccccgggctgagggtcgcactcctagcctcagtctcccccgtgcaaaatgcgcaaggggcccggggcgcaggctccgggggcgccgagagcgcgcagctccgctgggtacccccgttgcaaggggtcacggctggtgcaaaggcgcggagggggtcccggcctcactgtccccctcgcggtccgggaaagccggcggggcagcttcacgggcgtagccccagccgccccgcccccaactcggggtccccagctcctggggactcagcctccccgccgggaaatgacctgcgaggctgcagtgcaggaagttccggcccccaccgtggcggcc

SEQ ID NO: 336083 - DNA, 349 bp, Homo sapiens
  chr19:35531752-35532101
  hyper
cggtggaggtgggtttggctgggcacagcgggcacgtgtgggtaagcgggtggggccggttgtgcgggtggcctatctggggcaagcagccgaggccgactgtgtccggcgtgtggttgagcacgggcaggtgtctggcggtgaccctgcacgtctggtgtttacctggccctgggtctgacgtgggccgcgcctggctgctggcgggacagtgtgttatctgcctgcggacgcttccggccacttggcctgggcctctgcccttagcgctgtgttttcccggccaagccccccatcccccctatctagtgctaggactttctggctccagaggtcaccgcggccgggc

SEQ ID NO: 336084 - DNA, 300 bp, Homo sapiens
  chr19:35581628-35581928
  hyper
cgctgtcccaaccacttaatttattttaacttgcttaaccctcaaagtcagtttgaggtcagtactcttttcggagagatgggtacggagtcctggagaggttaagcaccacgacagagccgagattttaagcactcggtcagggagttgggcaaatgtggcctgcagatcatgtttccttacccgcgctttttctcctccctgcatagccgccacgtgtcctaagcacagcagctaccagcaacgcttggacccgcgccgggtgcagctctgcgtccccgcggccgccctgcctgctcc

SEQ ID NO: 336085 - DNA, 234 bp, Homo sapiens
  chr19:35738737-35738971
  hyper
cgcctgggtaccgaaaccagccactggccagttggcaacctgggggagtctaacgcgaggaagcgcccagggttcccccaggatgcgctttccctcgccgccacctggagacagcagagtcacgcccagcgctgcgcaggctgatcgccgcgccgcgcccccgccctcggtcgcaggtggctcgttccgggaattcctaagcggaaaccggtcccaagccccgcgccttcgctc

SEQ ID NO: 336086 - DNA, 378 bp, Homo sapiens
  chr19:35758216-35758594
  hyper
cgacctcaccccgccgagcaccgccgagtcagggagcaggtctcccacgagtaatggtgggagaagccgggcctacatgcccccgcggagccgcagccgggacgacctctatgaccaagacgactcgagggacttcccacgctcccgggacccccactacgacgacttcaggtctcgggagcgccctcctgccgaccccaggtcccaccaccaccgtacccgggaccctcgggacaacggctccaggtccggggacctcccctatgatgggcggctactggaggaggctgtgaggaagaaggggtcggaggagaggaggagaccccacaaggaggaggaggaagaggcctactacccgcccgcgccgcccccgtactc

SEQ ID NO: 336087 - DNA, 191 bp, Homo sapiens; identical to SEQ ID NO: 240408
  chr19:36334974-36335165
  hyper

SEQ ID NO: 336088 - DNA, 416 bp, Homo sapiens
  chr19:36347684-36348100
  hyper
ggatcccgccctgcgtcccccattcatccgcgtctcagccgcgggagtttctcaacgggaagagggcggagctcccggggggcggacccgggcggggcgagcgggatcgggccctcttggggtctcccagagacccaggccgcggaactggcaggcgtttcagagcgtcagaggctgcggatgagcagacttggaggactccaggccagagactaggctgggcgaagagtcgagcgtgaagggggctccgggccagggtgacaggaggcgtgcttgagaggaagaagttgacgggaaggccagtgcgacggcaaatctcgtgaaccttgggggacgaatgctcaggatgcgggtccccgccctcctcgtcctcctcttctgcttcagagggagagcaggtaccgcacgaggggagc

SEQ ID NO: 336089 - DNA, 795 bp, Homo sapiens
  chr19:36351581-36352376
  hyper
cggcctgtgggtgtggtcaaaggtggccgtggctttcagggctgttgagggtcggggcctggaggggcggggccgggagagcgagcgtggggtattaggaggaggagagtgtggagctggggcatattcttgcgccctagagggtgtggtgtttctgtggggctggctgatcccaggtcagtggctgcattccgccccggccatgtgacccctagtctctttcgtccagttgggccgattctgcaggcaaagccggagcccgtgtccgtggacgtgggggaagacgcttccttcagctgcgcctggcgcgggaacccgcttccacgggtaacctggacccgccgcggtggcgcgcaggtacagccctaaatctgaggcggtggctggagggggaccaggcttccttacaaatccggcttctgacgccccttccctgtcgcaggtgctgggctctggagccacactgcgtcttccgtcggtggggcccgaggacgcaggcgactatgtgtgcagagctgaggctgggctatcgggcctgcggggcggcgccgcggaggctcggctgactgtgaacggtgagaaggcggggcttcctaggggacctggcccgtcctgggatagggagcggacagagggggcaagggctaatgcagtgggagtggcctggaaggagctttacacccagcgggggctggagaccggacctattgaaggcgaggcttttaggagaatcggagtttggaggcggcgtggcctgattgattgaggttagcggagagtgcgctggacagaccc

SEQ ID NO: 336090 - DNA, 595 bp, Homo sapiens
  chr19:36449980-36450575
  hyper
cacagggcccccgacggcgatgctggtgacagcgctccctgcgtgggcgccactctccccgtgctccccgcgcctgcagccaggcacgacggtgtgggtgtgcccgcccggggcagaggagctgcagggctcgcggcaggcggcgctgtgcaagcagcgacgtcgcggcccgaggaagtggaggcggtgaacgcgcgtgggcgcgcctcccgggacacggcgctggctctgcggcgctacctgctgggcactccctaatcgatggtgacgccgtcgctgccgcccggcgaccggcacaaggagtttgcggtggtggcgggcgctgggcccacgctcttgaggcgcctcaagccccctaagcctgttctgctggaccgcgtaggccaccctgcccgctggccccatccattgagccttgaaggcttccagaggcgctgcagttgcagagagcaggagacctatccggcacccgcgtcgtggccgcccatcctgtcgcgctgctggctggcctcagttgtctgcaagcgagaagcaaggcctgtggccacgcgtttggacgaccgccgccccagggtcgctggagtggtctccacac

SEQ ID NO: 336091 - DNA, 235 bp, Homo sapiens
  chr19:36478131-36478366
  hyper
ttcgcgctgagctgcgcgctacctggccacatgcgcgggtgacagccctgccgggagcgctgagtatgcggccagggcttcccgctgagcggcgcctctgagtgcccgcagccgaatgcggctgcttccttgcaggcggacacccaccgctgggcaccgtctggtaccctgcccctgcggcccccgcccccgcgctccgcccctgtgctctcccttgctggcccgcaccattccc

SEQ ID NO: 336092 - DNA, 744 bp, Homo sapiens
  chr19:36736074-36736818
  hyper
ggggtctgttgctacgggtcccctgggctcctttgaatcgctttggcagctccctcggtttagagctacagggttttctccctcccctgagactctaacgcgtgcaccaactcgcgcctagagggcgtgtatgaccccagctcagttctaagccgaggggctgctgccggacattctagggtctgatctggcgggctcgaagggaggacagtcactgcgacccggaaagctccgcgcttacgacgcccacccagaaaatccggatcacatttcccgtggtccaccgcgcatctaggaggttacctgcgtccaggcggtgacttgcgagggaccacctttcccagggtccacggcgcatttaggtggtggcttgctctggactacatttcccagggtccaccgcggatctaggaggaggcttgagatgcagcctcccagcttcgaggctaccacctgcccgaattggtgctttggcagagtctctggtgcccgggtgaatgggttcagggtctcttaaggaccctccgttgacgatgcctcgagctatgacccaccctggctccgtccacggttgtcggggtcccgggctgcttttcttggagggctcggtgccggaggctactcttgagtcccggttccttcgcccagctgcgggcctcgggctactggatccgctgtctcggtttgggtgcggggccttggctcaggcggaacccgaccgggatcgccccgcgagatgcagtc

SEQ ID NO: 336093 - DNA, 794 bp, Homo sapiens
  chr19:36822257-36823051
  hyper
cgggtcactccctcccaggcgtgcaacaaaacacctgcctagaaatcaaaaggcgttttacccgagtgggctgaaaaagccccgtttttacctttaatctggagacaatacgggtcagaggtcaggaaactacatcagcgccagtgcgagcgcccacgagtccggtggacggatgagaaacggccggggggcagcctgagtcccagttcccgccgtggcaatggccaatttcccacccgtggacgcaaaaggccaggactccacgctgctgaccctccagcgtcccatgtccggcaggcacgtggccgaatagcccaagactgaggactcacacttcccactttgcacctggaggccacctgcagaccaaccttgcgccaggcttccggaaatgggagggcgggcttccggaaacggcggccaatgggaaacgtgatcagatgttactaggcagacagtccgtttccaggcaacacagaagaaaggaacgcgctcagtcagcctcaaatagacggagatttcagccaatggatgtgcaggttccctccacattagccaataagaagtgcttggggcctacctgcctacaagcacagcaaaagctttcctgcgcatttttgcgctggaatggctacctgccgcgccaaatcaaaatttacaatcacccttggtgctgtttcctgcactttcttggagatttgcaccaggcgctggagaccctcccacctggcccatgcctgccacccggtgaacaccaagacccaaccttctgcaccaccagtcttgttgtcagc

SEQ ID NO: 336094 - DNA, 842 bp, Homo sapiens
  chr19:36909079-36909921
  hyper
agagctctgggattacagatgtgagccacctggtccggcctagtctgcgcgtttctgctgggagtctttggcgtgcagaaactgaccgagggccatttctctgcagctgggcccggtgtgggcagaggatgctggggtcagtcacgcactccacggccacaacaaccttcgctcatacaatagtctctgcacccaagtcagccgcacagactccgtcacgtcccagccccggccccgtcacgcccacgacacacacacccgggcctgaggcgcgggctcccgcccctctgcgatactgcagtggccccgcttacctctctttaccccctgggccgcagcgcttttcctacagattaccaggaccgacgctccgggccaggactgctcactcggggcgcgaacccgaggcacagcgatgcccgaacggaggaagccgctgccgggtcacgccacaatccccggggcctaacgggctgcgcgcggaggctgctgggagggccgggcgcgctcacggagtgcgcaggcgcggccagtctcaagggtccgctcgctggtgcagcccctgctctgcgtgaacccggagccggagctaggtccgtcccagcgaggctgcgcttcgagtcccttagcgcctggggacggcgcggcagggcctggaggggagcggggacagatggctggcgcgttaaagaggggcgcccgcgaccgcctctctatagtgccaactagggagccctgtgagcgaggacggcgctgcgagtctgtccctggcgcgctcctgggtgggattctttcactgggtgtggctgttgggatttgagaccgtgtgactccggagattc

SEQ ID NO: 336095 - DNA, 207 bp, Homo sapiens
  chr19:36980725-36980932
  hyper
cggacccgtcctactgcccccaggcgctggacagcctcagaaagaggacaagtctgcatggaaagataatcgcacaactgagccttctgggagatgtagttcggagctgggaaggcggttggaccctccgaaagtcatcttaattgctctcacagataagccggtgctgggctgccggcctgagtactgtgcgcccagagtgcgcag

SEQ ID NO: 336096 - DNA, 949 bp, Homo sapiens
  chr19:37063799-37064748
  hyper
cggaaaaaaacgaacaaacaaacaaacaaaaaaaaacaaaaaaacacttctaccccgttcacacttatagttggtcacaacagtgctgtcacacgatcacgtcaccgtagaccagggtcacacgatagaccccgcccctactcaccgtcctgagtccgatcaaacagcacccacggcacacactagggtctccgtctctcacacacacacaccacaatgacgtcgtaaacaatagcactaaccaccatcgtccgcagctcccgcgtacagaggcctcaggctcccggctccacgtggaccgacctcgcccggcagcgcggggccacctcaccgcgagctcctcccgcagcccggcccgggtcacctcgactcgccaggcttaactcaataaccacaacaccggaaaaggaagcaaaggtcgaagttcatccgcggccctgaggcctgtgggaaacgtagtccaacaacgaaagagccctgaagctcaagcggagcccgctggccgcaggggccgcaccacgccccagaccctggagtttccgggtgcgcagacccttgccatcagcagaggctgccgctgcgcgtcccctaggcgcggaagaggcggctggtggtccctgacggcaaggtgaagtcgaggcagtaatcgggaacccaggttgggaggacagaatggggaacaggaagctggggcgagggtggtcttgggggaggtggggggccgcggaattctaggtggcccctgcctcacctctggaaagaaccggaagcccgggccggggagggtgaagggagtcgcggacccggctgctcagccgaggaggaaacccggaccccaggctgagggaggccgaagaaggaactggagggccgggctgggaaggcctgaagcgggtacagcctttaggctggggagggtcgaggggagaactcggagcctgagtcgggc

SEQ ID NO: 336097 - DNA, 1063 bp, Homo sapiens
  chr19:37095634-37096697
  hyper
cgctgtcacaggatcactgataacagcatgacacattcatagtcaccgctcagcgccgtcacacaaacggccccgcccccactcagtcccgcgggcccaatcggggacagtcagggctgtcccgggctgtgcacctgctgtgcacacacaccccctgctgtgcacaccccccgcccccccgggaccatcacaggcgcgcccactcacaccaccacacacggacgcagccacagaacggcacacacaaacacaatcacacagtctccctccccagcaggtgacttgcacacaggcctggggcttctgcctccacaaaccctctccgcgtcccatgaacccaggtcccctgccgtgagctcttctcgcatccagacccgggtcacctcaactcaccacatggaaaacgaacaccaggtcaacggaaaagggagccggggtcctggcagaagcgtagtgccagccgcaatagggcggccgtgggtgcaaacggaggggagcgccggcagctagcaccgcgcggcgactaacgggccgccccggagactcctgggagctcaggcccacgcgcgagtgcgcaggcgcagacgactcaccctgggccgggggtgaggcttggtgggtgccaggggtgctgaggaggccaaggagggcactgggagctccgttccgggagagctgtctaaggacgcggaaccgggtggggaggccagggaggtaaccaagagtccgagccgggcctggaaattctgaggaggaaaccgggaccgcggtatccagacgctccgatctgtacgagccgggcctcgggcgtggtccatgggcgtgaccttgagggtgacccggagcgagctccgcgaagggggattttgcccgttctgatcccgcggaagcgccatcgctggcggcgggtccccgcgcggagcgggcgctgtgtgttcgcgcgcgcgggcgcgcgctgaataggggtggcctcctgcgcccaacctgctgcattttaggtgcttgcctctctttgggatgttgtggccgattgtgtgtgaaaagtgaacggagtagtgttgct

SEQ ID NO: 336098 - DNA, 765 bp, Homo sapiens; identical to SEQ ID NO: 240432
  chr19:37157429-37158194
  hyper

SEQ ID NO: 336099 - DNA, 1071 bp, Homo sapiens
  chr19:37263336-37264407
  hyper
cgcacacaaggtactgcacagacacgcaaagtcacacacccaccccgggacacgcagtccaaccacacagtcaccggttcttcacatccgcacgcacaacgagggtcgtccaggacacacacacccactccgggcgcgcacagtcacaagcgcccacctgatcacccagagtcagcaccacacagccacagtcacagaccacggagacccacggcagccatcgcgatcacacacgcaaactcctctcctcagccctccacacacaaaaggaccggagccggattcctcaccctcagcattctctggttccgctcggggccagcctagccaagttcctcaggactccaaggcgcggcggcagctaaatcggcacagcaaacggtcccgccacctggctaagaggaagccaaaatctcgcgagacgtggcgtcggcctgcgggatcctctgggaaatgtagtccagagcccgactgcgggcttccctatgcctctcatttccaagcctggcttgtttccttttaccgctcctctccaacgaggatcgcagagccctcatgccgagcggctcgctatggggccggctcgcccgctagagtggtcaggcctgattatccctggcagctctgttatctggggtaagacacaggaaaacgtgcttccggttctcggcggaagtagccccgaacggtagaaccgatgggaaatgtagtccagggcagaaaagcggtcaacccagccacgatgcgagccaaaggattcttggctccaagcctggtcctggctgttagtttggaactcatgcacccagatgctaactcgccctcagaatgcagaggggatgaaacactgaccggacaattcaatctgtatatgggtgagtccagggctcagtctgcattgcgcggaaaatgaaggtgaaggtggaggtgggacctgatggtctcgtcccggatagggttgaagaagtgggagaaaaggaatcaaaatcgtggatgggataagattgtgcgcgaatgctctctgggagcggatcgtggccgacgagggcccgaagatgctgccttgtgatc

SEQ ID NO: 336100 - DNA, 604 bp, Homo sapiens
  chr19:37288206-37288810
  hyper
cgtgagccgccgcgctcggccggccccaaacacttcttattggctaatctggagcaaacctgcatatccattggctgaaagctccgtctattttagggtgactgagagcgtctcttccttctgtgttgcctggaaacggactgttcgcctagtaacatctgatcacgtttcccattggtcaccgtttccggaagcccgctctcccgtttccggaatccccgcaggcgctgggtctgcagatggcgtccaggtacacagtggcgagtgtgattccgcagtcttgggctgtttggccaagcgcccgccggacatggtacgccgaagggtcatcggcgtggagtcctcgctttcagcgtccgcggctgggaaatcggccatcgctacggcgggaactgggactcgggctgcgtcccggcccttccacatcggtccaccgcactcgtgggcgcccgcattggtgctgacataatttcctgacctctgacccgtattgtctcgcgattaaaggtaaaaaacggggctttttcatcccactggggtaaaacgcccttttatttctagccaggtgttctgttgcagaacgcctcgaagggagggagtgacc

SEQ ID NO: 336101 - DNA, 146 bp, Homo sapiens; identical to SEQ ID NO: 240437
  chr19:37328861-37329007
  hyper

SEQ ID NO: 336102 - DNA, 529 bp, Homo sapiens
  chr19:37329089-37329618
  hyper
cgcatccactgctcccatcgcgatcgctcgcccccacgctccctcgccggcaaagccaccaactccaaagacattagcacctcactcccctcagccccggcctcgggccctccggagtcattcggcttctgtgtctcggaatcactcacccggccctgcggtcccttgatggtggaaggttccgcgatctttctattaaccctaaagggacagagggctgacaggaagttgcccggggaacggtgcactctgggaaatgtagtccggagcctgggccgtctttaactgccccggacaccgcggtcaccattaacggaccctgcatttgagccccatcccctcgctgggcaaagaccatcgcccacacaccgctcacatctgctgccgagagcttccagaattccaggccgcgtttaggaagcttcagcggaggcatgcaggctgccctacctctgcaaaaggctcccagccctgggaacaggacagtaagcccaggccatcttaggctggaagtaaccttggtcccgac

SEQ ID NO: 336103 - DNA, 476 bp, Homo sapiens
  chr19:37340785-37341261
  hyper
caatctgacccgcacgcggtttctttcactcaactacccagacacccctcatcccaccagcacaagcaggcccaccgcggtctcacacacactcgagccttcctttgcccagtctcacatgcatgactgggatcgcggatttgtccccttccgactccccatgctggttcggtcccagacgctcaggtgccacattggggtgcgctctcccggctcctccacacgctacgcagctgcccgcctcaagagcgtctgcgtgcttccagcgttaagtggaattccaagcagcctccggggcacagttagtctggtcactgcggccagactgccgcctcaggacccagagaacgcagcacactttagttgggcccatctatccccggcgaggcttggactacgtttcccaggagaccctgcggtccagtatgtctcccgaggaggggcggaagcccgggagccgccctctgaggctgggc

SEQ ID NO: 336104 - DNA, 759 bp, Homo sapiens
  chr19:37341572-37342331
  hyper
ctcccggaaggctccgatgggcagctcacctcaaagagatagttttgttggtgccagagtccgcgccaggggaatcgggatggctgggctgtagctttcggcaacctgtcgctttctggactacacttcccagaagcctctaggcccagggcactctcccgcgataactagattgtctcttgaggagtgggcgggatcttcccgcggatttgggcaagcggccttggggctttgtgagatagctagggtcgacttgtgtggattctagtagaacggagctgaccctatccgaacaggcgtaagtgaggcggctcggagcctggcgcgacaggaactcccgacctgtgtgggctgcgtggggaacaggctaaggagcgattgtgaggagtgtgtacggttgtgactgggggcgtgtgtctgtgcgaccgtgtatggaactgtgagggcggggaggaggactttttgtttatgtttgtgcgggtgtgagtagagtttaattgtgaccgggttgggcactgtgtttgcgagtgtgaggttcctggaccgcggttgtgactgtatgtccccttggggtgtgtgtgtgtgtgtttactaccatttgccgaactgtgtgtagtatgccttaattttgaggtttgtggctgcttccgtgtgtgtgtgtgcgcgcgcgttggtgatattgttgatggagggtgcgtgtgaatttgttgtcattgtgaccccaaggtgtatgtcactgggaatttgagagatgcccac

SEQ ID NO: 336105 - DNA, 1029 bp, Homo sapiens
  chr19:37406731-37407760
  hyper
cgtgatcctcctgcctcggcctcccaaacacaacctccacctttcaggccgctccgcccgcaggggcccaaggcgccagctccccatcggtcttcggtatcctcacctaagccctttccagtcatcccggatgggaacttgcagacctgagccagttctcctggggaccaaaatatctcacctcccagatctaagggtcccgccaggagtgacgaaacgttcgaattcctgcgagaaaagtggcaggccaccaggccctctgggaaatgtagtccagagcgggacccacgccgattcctgtcagctcctcgcctgggcccacccgaaacggctgctccctcaactctcaacatccagccgagcctcggagttgcgggtcgccgtagcgctgcgcaatggagatgagcctcccggggaacccggcccaagcctcaccctcacacaggaaagcagatgtgttctggccggaagttgagtggggccgcggggcctgctgggaggtgttgtcctcggaaacgtcgctggcgcggagggatggttcggcgctttaggcgtctgtcacagacctatctgcgggtcgccttcacccagcatctcagaaactgcgcgcgggatgaacattcgggtgtttccggcaggtgacgctgccgagtccccgcagcagggggcgagcaagggactcgcggttgacgggacacggatcctctaaggcccagagtgtcccgagtagcggcagtggggagtgctcagggtacgctaatggtgagtggttgcagttgatgggacaaaaaactgtgatgggagttagtgtgggtgtgtggttgtgtgtgtgagtgtgacggcacgaataatctgatggggtgattgtgatatttggttgcgcgggattatgatgaaatgtgtgatatgtgtgtgattatgattaaggctgtagcgagtgtgaacgtggcgaagtgtgcgtgattgtaatatgtctagtagttcttgtcttgagctggcttttctgtagcatttggcacagttggtaac

SEQ ID NO: 336106 - DNA, 793 bp, Homo sapiens
  chr19:37463952-37464745
  hyper
cggcttcactggaggcggggaactggacatgactgtgagcgccagtgaccgtggtgcggtccaggccccgggtggcgcacccacctctggactacatttcccagggggccccgcggccaaccttttccggccgaagaaggctagtcacctttccttggcgggtgttggaaagcaaagggctggaacgtcccgggctgcggagctcgctgggttgggatggactcgttcagacctgagtgctaggacgccgaagggggcggtgaggcgtcccggcgaggagctggggtcgtctggagtttaaaagacaggtggctctcggagatgtgcgggctgcatgcccacgcttcaccgctaggggaggtcagggctgtgcgatggggaaggaagagagtgtcggggcggtgcagtcgggatgggagaagggtgtcagggccactggcccccagctcggcagagggcagtgtcgggccgcgcgcaggcagggagtgggtgtggtgtgaggctggcgctggagcggtctgggaatgttaggaggtctagggtatcgcggccctgcgtcctcttgtctggactaaaagtccgggcagttctccccggacctggattgtgggcccagcgacaggtgcttggcgatctgtgcccgctgtgcctgcggggctgtggtgggagtcctgtctgcacggtattctgtgtggctgtgcatgtaagtgtgagcgtgtgccgggtcatcgaccccatctttgggaggcctgggagggggcgggacaccctcgctgtacattctggggatacg

SEQ ID NO: 336107 - DNA, 739 bp, Homo sapiens
  chr19:37568997-37569736
  hyper
acctgcctggccggcgggtcccaccctctctcctgccaggggtagaccctgggaccactcagctcgctctcgcaggccctgagcgtctgacgcctgcgcactgagcgcgggcgggcgggcactcccagaaacctccggggcgctgcaggcgggacaagcaggttccacaggccgagcccacgagcccctcgaggggtgagcggcccgggcctcctggcgttctggccggctagccaagcgctggactacatttcccagaggcacggcgtccggagcgctggactacatttcccagaggcaccgctcccggagcgtagcttcatttccgttagtttgcgagatttggaggcctcgcgtggggagagggccgcgtctgtggaggagcttggctccgcacctgctgggctggcgaacccgaaattgggcttggaacccgggagccagatcttggaccctgaactgcacctctgtcaaggtaggagtgtccgggatgccggagcggacacgcgcggagaaagcgtcgctggggttactcgtgtggccgtgtctccggttttgtgtgcaggctacagcctgcctggtattggcgactgcctgtgcatacacgactggacgtgtgtggctgtggttttgtgtatgagcatttgtatgagtgtgagttgtgactctgagggtgtttgtgactgtttgcttacctggctgggatatacttatgtgactgtgattttatgtgtgccgc

SEQ ID NO: 336108 - DNA, 462 bp, Homo sapiens
  chr19:37663394-37663856
  hyper
cgtcacaatcaacaacggacgccacagaaccccatcaccgaagcctgaaaccgcaatcactaactccacaggcaacctcgacaccccctattactggctccacagaaaccccaatcgtgatcaaccaaaatcacctcaaagatttatcggtattggaatatgaaaatactcctgacaccagcggcaaaaaagccttggaagaccacttccacttccggtccgacttctagcacctcccctttgtaggctgttgatatggcgcatgctctgaataaacttggaagccagtttcctcgaacagtcaacagggcgcagacacagcgcacaggttccgtaatgtggcgctgtccggcagagaacatggccgcgcccttatggtgtttattcgcgtgggccgccattttgaaagcatatccattccgtagagcagaggaattggccgctggcagggtttcctagagc

SEQ ID NO: 336109 - DNA, 187 bp, Homo sapiens
  chr19:37708883-37709070
  hyper
cgtgcagggccagcgtcctacggcagtttcactctgagcctgtgtctggatcacggagacgcggggtagcggttcggagtgcggagcagggatgtccccgagctgtgcagctgcaagaacccgaaaaaacaggcgccatcttctcggcgcggtcctactccggactgtatttcccagaggcccccgc

SEQ ID NO: 336110 - DNA, 987 bp, Homo sapiens
  chr19:37957588-37958575
  hyper
cgctggcacaaacgccaagtctcacacatctacacccacaagcacaccctaccttgtatccacagtttttcattcattcaagatcccactgtcatgcacgtttgcacgcaggttcatactgaaagataaaagggaaagcgcctccacgaaatccgcttacggacacgatcccggggccacactcagccagacgaatgtctggcaaatgacagtcacttcacgccagactctcacagtccttcacacgccactcccactgcctcagggaaccacaagcacaggcatcgccccgcccggcgtcctcctccaaagattggggcaccaggaccgcgggcccccactcccacccagcacaaagagtccggcgctcagagctagcggtttcccgaggactcaccaccaagcccgcggacacaggccccgattccacacttaacgctgccaaagtggcagagccggcgcgggctgggacagaggcggcactgaggccggcgctgtcggtggctgagagcgccacaagtctcggtccgttacaccaggggcgacgcttcccagaggcccccgcggctcacccgggcgggactggcttcactgtttgcgcgtcctgagaagcagaccacggtgttccagggctcacagctccgcgcaggggagctcagcctaggttttgcacgagcggcctcccgcgagcccagctctgagagattgggagcgcaacttggtgctgagaagaatcgaatcgttccgctgcttcctgcgccgaactacatttcccagaggccttcgcggccctacttccccgaccccacctgcaaaaaggcacttccttcttacagtcggctggagctgcaggttcgcaaggtccgtgaaggaagcccggctcagtgtgtttagttccgtctttttgggtctctacctgaggctagaatacagcggggtgaaggtggtgagagctccagggccagtgaaggccgggtcagctggagc

SEQ ID NO: 336111 - DNA, 989 bp, Homo sapiens
  chr19:37959780-37960769
  hyper
cgctcccctcccaatttttttcgggtatccagcacaattctaggaattcgcctcccacccattttgagtagacgcgccactagcgcgttcccacgcacaaaccttttccctgcggccaacctgcgattctcaactccccgccctggttgctaagggaggcgcgcagagcgcttgtgcctgcgcacttccacaccagcccgtgtagtgtgacgctgggccccgtccctgtgaccgggccaggctcggagctgcagggaatccggactttcgggctctctggaaggccggggagaggccagtgtgggaggacctggtggggaggaggccgtgttacaaaccctgcgcggagctgcaccgctgctgccagacactgcgacgccgcgaccttttctactccggactacgtttcccagcggaccccgcgggagttgggccggcggcccctttgtgtcctccgggggcggaggcagctgaggcgcttctttccgggcccgtaagggctgggttccatccaactaagggtagcggtgagacccgagtgcagattccccgagccttcggggcaggaaggagatcttccaccagttctgttctgcaggtcgggagtgggctgaggagtggcgtgtgggtctccggaagctcgtcgcaggccatctgtgtgactccggtgcgagtggaggttggtaccgttcagtgcgaggctgtcaccccgtgtgcctgtccacgtcctgtgtgactgggtgcgaggaagtcaatggcaccgtggaatgtgaggctgtgagttgaggcgggagcgggcgactgttcgctgcaccttgttgggccgatacccgcggcttctttgtgactgggttgtgagattgtcgcttgtgatagataccctggtggctgagccttgccggtatgggaaagggtgcccgtgtgaggcagtccatacccatggcctctgactgtggcgtgggtaagacggtggttggcactgtagtttt

SEQ ID NO: 336112 - DNA, 1004 bp, Homo sapiens
  chr19:37997167-37998171
  hyper
ttctttcctcaggtcggcttctcgggcaagcctccttaggtaaaaaccttgctttcaacatttcctttccattatgcgctaagaactctgatctcttcccgctgcggcagccccgccctttccttgcggctccgccctttccgtgaagtcacgcccgtccttaggctgtctctgtctccctaagagcgagtctcttcgctgctctctaactcctagagctggctcagaaagagtttcacattgccataggggagctcctaggagaggctgcacccattgcacgtaagaagcggtaaaaatgtacgcggccatcttaccaggctgccggagacaaagaaagctcagctttgatgtctgggcgccaccatgttggccacaggaggttttggcatctgagatgctgagttaagagcagagacgacatctctgtttagggatccagggacacttccttctccttgtcctaaaatagccttatcttttggtctagcaaagggcttaatcatccgttttacggcacagttttaaacatggccgccccaggtaggagtcaagtgggcgtcgccatcatacctccaattacagctttgagaaacccagaatcctgttcactggaaggttgccgggtggcggctgacagcctcaaagtcgcaattgagtctgcgcaccggccattcaggatgggacgaccttataccgcggtgaggcggcgtggcaggacgaccaatttcagattcagggcgcggatgcagcataaatgggaaggcacggtttgagaaacggtcaaacctgggactagtggaggatagtgagctgccgactacggtggccgactgggtcagctatgggtgcccgtgagggtcaatgacaagggaactgaagggttaagagattcggcgtctgagcctcgcggggcctcagtggtggcggacagaggtttgcgggagtcagtggcacggtctctgaagaagatggattgggagtgtgtgggaatcaataaatgc

SEQ ID NO: 336113 - DNA, 662 bp, Homo sapiens
  chr19:38042137-38042799
  hyper
cgggccgcagccagcacggcctccaccgttttcctatgggccctgagagccctgacgttgcggcagcgccagccgggcacgcgaatgcgcatgcgccaggcgcgcgtcaccaggcgcgacggctgagccggggctcgcgtcacagtgacagccaccgttgcctggggacgggccctagcggcttggcggagctggagccctccctggcagtgcgtcggcgctgggctatggccccctcctctccgggggatcgtcgccttggtcccccgaccctaggagtcgggcagggcagaaccaggctaaagaaacgtccagcgtagcttcaaggatgcaccgcgtgatccctatcggatctccccgacgcgtcaggcctgcctagacggtgctgggagcgcgtctccttgaacgttgtcccgcctgggattgcgaggtaggtaccgcctgcctgtgtgtaccggggctgctgtctccggggaggggcttctggcggacaggagaaccaagcagcctcaggagctgcctgggtgtgtgtgtttctgtgcgagtgttgcatatctctgtgtgtgtttctgtgcaagtgttgcatgtctgtgtgtgtggggggggtggtgtctggtgaaaagaatgtgtctcgtgcggtggagcgccgtttctctgtagtc

SEQ ID NO: 336114 - DNA, 1052 bp, Homo sapiens
  chr19:38085148-38086200
  hyper
cgcacgattctcagctggcttaatgatgtccgtgtcacacgaggagtactgcggcccgggaggggccaagcgctaggagcattaacaggcggcaggtgagcccaccccgcggccgcacaagcgcacacgcacacgtccagggcggaggaacactactagtaacacccgcctccttctagcctccctatcccaaagttatggtgccgattttgtccgcggcaggggctccaggggcacactcataaattcggtgcggaggaacacaactagcagcaccacacccccgccactgccagaaccaaagtgacggtgccgacacccctccgcaagcgcaaggccgacttccataagtaattagccagagcaccgtcccgttcctgtcagcaccgagccccagccaggacaccggtattcccagcaccatacaagaactactttttcgatgaagcaacccaaaagctgcgagcggttcccggtgaggccgcccactcacctggccggcgcagacaagctccgtgcgtcaagacataacagcgtaagtgtacgacgttgcgcagcgacgcgggggccttcgggaaatgtagtctacaactggaaaccggccggatcgtgtctgcgcaggcccagcagctaagatcgggtccggcgctccagaacagaacgatccctgaggctcccttgctcgaactgtgggacttaccctactatggtccgagcctaccctatttcattatactcaagtaacgccccagaaattccagagaatctcacacaaagaggttgagtcttgccgtggtgccttcaggggaatgtcatcccgggctagaagagctgcaaaaggctgtcaggtaaggtctggatttctctctgacagctctggccgtgacgcagtggccacgataccgggttgctgctcaacggggttcggaagtgtgacgcattctttgcggccatgtgtgtgtgtgtgcgtgtgtgtgtgggtctgtgcgcgcgcgtgtccgagtgtcctctgtgggtgcagagtgggtagtggccatgcctgtgtgatgtgc

SEQ ID NO: 336115 - DNA, 1749 bp, Homo sapiens
  chr19:38145560-38147309
  hyper
cggaaggaactcgaatgcatttcacagaaacaaagcagcagcacgaactcacagggaaccggcttttagaagagcagcagcgattcgtttctccttctcaagcgccttctctggaaactggcagggctggggaagcaggcagagttcaggacaccccaggcttttcttgactcgattggaacccaccctccacgcttccctggccccaactaaccgccacctgcatgcacaaatggaaacgacagggcagagggtcagcagtcacccgcgtctgggttcgcagctccgggtacgctgtagttccgcacccggttgcccacgcccgggaccacccactgtgtcttttcggaactgtccagcgtgtcctcctagaccccagacacccaccccaaatctaggtcccagcgttttgcaggggaccttcatcctggggcgttcacctctgacttccctcttgggccttttcgctacggccgagcctaagtggctgaagcgcggacgaggatgcgcggggcctcggtctccaactgcaccacaggccgcacccacgaacctggtccggcacagttactaccgcccgggcctccaggcctcagggctgcagaagctcagtcccgggaaaaaaagcacaccggcctgaggctccacaggaaccttttctccaccttggcccggcctgcaaaacctggcccactccgcgctcttttccctcagaaaagcagcggccacagtggcgcccggctcccagccccagcctcacccgactcagaggatagcccagccctgggagtcagcggcgccagaatacgggagagcgcctgtctccgtcgcgaatgcgctagcgcgcgggggggcggaggcaagtcccgcagctgctccgggccgggaggggcgcgtggggccgggtctcggcggggatagtcgggccggggagacggagccagaggggccgcagtgtccctcgcctcaggcctctacctgtaatggccgccccgtgactgaccagtgccattaaagataatccaggcctgctcccctgtggacactgcggtccaaaatttaaaaaaacaatattccgcctttttatttttcatttggttctcggctcggagacaggcggaggctgcgagccccgccccgcccccagcgacgcctcaccggaacctttggaaatcggcttctgcctcgagtgcgcaagcgcgcggggggcgaacgctggggcccttcagggagcaagggagaagtgtggggccgcacctgccgaggggtcgggaggtttggaggagggtggaggttggctacaggatcccgatggggatggagtgttcaaatctaggcctgtagccgtgaccctggcgtgagttggatggaggaaaccccagtatcgcgagcctggaccaaggcgcggcgcgtgctgcctgtggtgtttgctgagtgacggccgccgcgcccccgcgtacctggaccgagtgcctggccgctggcggagtagtgtttccgtgcacggggctgctgcgtgcgcgtgtgccgttctctagcgggggattaggatggtgccgcagagaaggctgcgcggtggtgcctgactctgacgctggctgtagcgggtctctggggtctttgcggtttgtgtctgcgtttgtgacgtacctgacatcggatctgtgactgtggctctgcctcatccagcgttatttccagaatccttctgatagggcagcgcttctggttctggttttccatggagac

SEQ ID NO: 336116 - DNA, 740 bp, Homo sapiens
  chr19:38182720-38183460
  hyper
cgagtaaactgacgtcctggaagaagcacccttattttcaccattttacagtcgaagaagggaagataagaggcggtgaatccgagactttcattcaggtgacgatccctcgcgggcactcactctcgctcacactacaatcagatcctccatgcggctttcatatactctgtcacactcgcagccagaatcccctcggatggactcttgcaaacctccagccccatcccgggatccgtgcgtcttctacagccaccacttgggccagcgtccaggacgcccaagcgtaacctccccactctaaaccgttaggaatcagtggctggactcaccgcgtcataaaagcataaactgtgacccgatgagtccgcgcactcggaaaacaagagaacgctcccacgtctccgggcgcagcttgtgccagcgactactaggtcagggggcgcagctgagagaattcaagcaacctccccgcaaccggttccgccgcgtttgtgggctggtagcccggaatacatttcccagaggccttcgcggccgacgtgcttcgcgcaggaacgcagccgcctcccgactggaggacgcggtagcggagctgctcaaagcgaggtgctcagccctgggaggctcagggctgcccgaggggcttagtcccagagccagtgctgtcaggggctgagcatgtgaatagggcagtcggaagaccatgtgtgtctgtggcttttaaatacaccccgaac

SEQ ID NO: 336117 - DNA, 852 bp, Homo sapiens
  chr19:38210087-38210939
  hyper
atagaccccacagagcccagcgaagcacgctttacaaaggacacacacggcatgtacaggtcacacaaggtcgactacgcacccctcacagtcccgcaactgcacccacgtcacacaggcaagccggtcctgtcgccgctgcgcggtctctcacgctccccgcctgtctcctagagacgggcccctcctccgcagctccagcaccctagggcctgaggaggcgggagactcgcccggcccgcctgggggcctccgcgctctgagcgcctcctgcagccccactctcaccgccacgcagggtaccacgcgggcggcgggctggggctgcagaggctcccgcagtgacctgcgccgccttcttcaggtggaaccaaaaggtcccggaaccggagccaggggtccaagttttctccgttgcctttgtaatatgtagtccaagccagaacagtcaggaccgcaggtaccggtgagaaatggagtccagaatcctaaaaacctacgagaaatacggcagcgaccacttggaccgcgcctcccacccaccgctcgagccccggagacttctgggagtggccgccttgcctcgagtgcgcatgcgcagatcggccactactgggcccctggcctgaggcttagggtggagttagtgcgttcttagggccagtaggaggcgagtctgagtagaaactgatccaggtagcctcggaagggatcacctgctggatgggtgtgagctcctcagggtggggcgccgaaaccctcatggctcctgaggtagagccggcctccttggtaacacatgggactgggacttttaataccacccgacaggcccagcttgtctcgtcaagc

SEQ ID NO: 336118 - DNA, 104 bp, Homo sapiens
  chr19:38270338-38270442
  hyper
cgccggacgctggctcccggaggttttagttttccctctaccaggagtgtgaagacacagagacttattgcgctggcgaagatggctgaggcgaaggcgtgtcc

SEQ ID NO: 336119 - DNA, 1130 bp, Homo sapiens
  chr19:38701113-38702243
  hyper
cgccccccacccgtcgcccacatctcagtctctctcccagtgcccgtgtctagataccctcctgccctcccttagcgcctctctttccaccttatcgccaccgctgatttgccccacatccaggacacggagccccctggagatgtctgggtctgggatgacacctcctgacacccccgttccccaccccagcctcaggaggggccaacccaccgtcctcttcccagcccttcccttcccccggcccggctcccgcctccctcccggctgcgcccgctgcagctgcagcagcccgttgccagggcaaccacagctggctgggcgggagcccctccaccccatcccccttctcctcctttctggcaaagcagggcggagctgggacaaagccggggagaggcagggtgcaggcaggggaagaaggaggtggatggaggtaggggctggctggtcgcctcacccccaacaaggcccgtcgacccccggtcctccttcttggtgatgccccaaaccagacgggagaacgaggcagtcgtgggcagaggggtcaggcccagtttaatacacagaacaagttaattcacagcagaggcaggcaatagaggagactcggtgacaagtgagggggcactcctggattaggggacatccccccaaaacccaccacctcccccacctgcagtctcagtttcccttttttaaaacccgaacaacaaacacacacaaccacaagaaacaaccacgccccctcactcccccaaaatggccagcgaggggggcgggggccgccaggcctggcggggcgggaggagggagagaaaaggagtccgtggcggagtctgtgcttctcattccagcaggcgctgggcgggggcccacccggccccaccaccgccacccaccagccacggcaggcacggggcgggcacaggctggggcggtcggggaggggcaggaacagagttcaaaaccaaggttcacatcatgcagtatccaccgtgggcaccaggaggggcgggtggacaccacgcccaccgccctgggcacaagaggggaaggcgcccaccttgggtggggcgcgggacggctgcagctccagaaattggggttggggcgcccggcggggggcc

SEQ ID NO: 336120 - DNA, 792 bp, Homo sapiens
  chr19:38719834-38720626
  hyper
cgagctttcagccccggccggggcaggcccggcacctccggagaccctgagggagagatggaggagagggaaacccctacccccactctgggtggggaaacggcctccgccacccccagcccgcgccgcattccttcactgacagcgacaaagaagaggcgcccccgcgaccctggaggggctcccgcccccaaccccagggggcgacagggggtggggacccccggggcaagggttcgcgctgggggcccccattcaactacggtccgcgcgctgcgtccccctcctcagccccagggcgggcgggggaagggctcctggtgggggggtctggacagggggcggggacggcagggacactcacgacttgagcgggttctgaatggcggtggccatggcccgctcggctgggccgcctccggcccggggcgccgctgccgccgcgcgcgggcccagcccggcctgcgccgcccgctctgccgcccagcgcgctacgatttcattcattcttggggctgcggcgcgagcggagcggggcgggccgggggcggggctcagccaatccccgcgcctcccagcgcacgacgggacgtggagtctaggggcgcgcggcggcgcccgagggcgcccctgcccggactacacgtcccagggggcgtcaggaggaccgcgctcccattggctgctggggatacagggaggggcggggctccccccagagcatctttcctccctccctgggagtgctcggtctccaactcgggatctccaccctccaggcaccgcgggcgc

SEQ ID NO: 336121 - DNA, 491 bp, Homo sapiens; identical to SEQ ID NO: 240464
  chr19:38746816-38747307
  hyper

SEQ ID NO: 336122 - DNA, 636 bp, Homo sapiens
  chr19:38754883-38755519
  hyper
cgcgtgtctgccgccccctcctcccaccctgaggccagtcctagagcgaaggccctcctccgacgtcgtcaccaagcccaagggaagggtggcaggtgctcagcgggcagacgccccgccccgccccgccaggttctgttgggggcgaggcccgcgcaagccccgcctcttccccggcaccaggggcgggcccaggtgcgcccagggccggggagcggccgcgcaggtgcctgccctttgcgcctgcgcccagctcgccctgcctagccaggtgcgccccgccccctgcctgcccggccaccttcgggagccgcttccaataggcgttcgccattggctctggcgacctccgcgcgttgggaggtgtagcgcggctctgaacgcgctgagggccgttgagtgtcgcaggcggcgagggcgcgagtgaggagcagacccaggcatcgcgcgccgagaaggccgggcgtccccacactgaaggtccggaaaggcgacttccgggggctttggcacctggcggaccctcccggagcgtcggcacctgaacgcgaggcgctccattgcgcgtgcgcgttgaggggcttcccgcacctgatcgcgagaccccaacggctggtggcgtcgcctgcgcgtctc

SEQ ID NO: 336123 - DNA, 698 bp, Homo sapiens
  chr19:38852786-38853484
  hyper
cgcttgcctggaggctctcgccccgctgcccaatcccttcacggtgccgggcgatccctgcagccgtacgcggacccggtgcacgaccccacctggcgctggtgggcgaacaacaaacaagaccaggtaggcggagcggattgggagccgggaaaggggcggcgcccggacacccctcaccgtgccccacccccggcgctgactctgccccgcgcatccggtaccccaggattactacttcttcttggcgagcaattggcgaagcgcgggcggcgtgtccatagaaatggacagctacgaaaagatctacaacctcgagtccgcgtacgagctgccggagcgcattttcctggacaagggcactgagtacagcttcgccatcttcctgtcggcgcagggccactcgttccggacgcagtcagaactcggtctgcgcgggaccagagtggagcccgaagggcggggcgagggctaccagaatctgggagcctggggggcggggacaccatcggaggggcggggcctgtctgtgagggaggccttaaccccgtttactgcccggagcaggcaccgccttccagctgcatagccaggtggacgtgggcgtggtgctggccgaccccggctgcatcgaggcctcggtgaagcaggaggtcctgattaatcgcaactcggtgctattttcggtgaggcccccc

SEQ ID NO: 336124 - DNA, 575 bp, Homo sapiens
  chr19:38976252-38976827
  hyper
cggagcgcctggacctgcagcgcttccactcgcacaccctgcgcctctaccgcgctgtgtgcgccctgggcaacaatcgcgtggcgcacgctctgtgcagccacgtagaccaagctcagctgctgcacgccctggaggacgcgcacctgccaggcccactgcgcgcaggctactatgacctcctcatcagcatccacctcgaaagtgcctgccgcagccgccgctccatgctctctgaatacatcgtgcccctcacgcctgagacccgcgccatcacgctcttccctcctggaaggagcacagaaaatggtcacccccggcatggcctgccgggagttggagtcaccacttcgctgaggcccccgcatcatttctcgcccccctgtttcgtggccgctctgccagctgctggggcagcagaggccccggcccgcctcagccctgccatcccgctggaggccctgcgggacaaggcactgaggatgctgggggaggcggtgcgcgacggtgggcagcacgctcgcgaccccgtcgggggctccgtggagttccagtttgtgcctgtgctcaagctc

SEQ ID NO: 336125 - DNA, 226 bp, Homo sapiens; identical to SEQ ID NO: 240479
  chr19:39522733-39522959
  hyper

SEQ ID NO: 336126 - DNA, 967 bp, Homo sapiens
  chr19:39574122-39575089
  hyper
cgactggaaatccgggcccccccagttcttccctgcttctctttttgtggcagccgctcctcacgttcaaacagattgcaaaggtttacaggggagaaccctaacttgttccctagacgtcagtttctggagttcctgcattaatacgattaaaaagaacagctgattcttatccagcccttactctgggccgggccctgttatcggcatgaaatttcatgcagcaactcgtttactcctcacaacagcccacggggtatatacgagcatcacctcctttttacaggtgaaaaaacccaaggtccagcgaggttgaataactcacctaggtcgcacagctcagaaagcccactgcaattccgggattctggttttgttttgaggttgccccgggcttctgaggaggggtcagtgggctcagcatggaaaggaaggaagccggaaggctggaggaagatgcagcgaggctggaaaggttggggatcccccggtcctgcacacctgggtacctggggatcgggcagggccaggataggggccggtgtccgtgccctggggctccccagctgatgagtgggcgcctgagggacgagcgcagggttacctgcctgggctctcacctggtggccggctcagaggtggcgcgccggagacgtatcataaccttcctgggtcccccttcccgcgccacgccctggtggggtgggcgggtgggtgtggggcgcccaggcaggaccggccggacctgtgggacccggggccctggctgtctagggaggctgtcaccccgaggcgaccggctcttccggggctgggacggctgtaggcggcaagaggcctcggcacccgcgaactcataaataccggggcggcgctggtggcgggagaggcgcgtgcgggcagccggcgcccccgagggtgagccggggtccgggagggcgtcccctttcccggatggtcccgaccc

SEQ ID NO: 336127 - DNA, 862 bp, Homo sapiens
  chr19:39754820-39755682
  hyper
cggcagcacctgctgcagcacgaggcacagagggtgcactgcagggagaagtgagggcagaggccaaggcgaggagggggccggctcccgctctctctccctctgtgtgtgctgcgcctcccctgtgagcctaacccaaggcaggggactggacgcgtgggaccctctctttggcctccctgacgtccctcaggagcagagatgcgaccgagtgtgtgggccgcggtggccgcgggactgtgggtcgtgtgcacggtgggcgcggcgatccgccagcgctgcctgctctcgcactaccgctcgctggagccccggacgctggcggcggtcaaggcgctgaggaaccgctaagtgagtgaccgcccagcccttgcgccccccggtacactggccccgccgggttcccacacacccgtcgctgacccgaggggtcctgcgtcctagcgcccagcaggcgcctcttgtacgtcagagcccacagttcccaccacgagatccccgcagtccccgtcgtcagcgcgaacgcaggctcagggtcagtcacaaaaggagccctgcagggcggactcggctccaggtcgcgggcgcagggctatgccgggggagagcgggatgcaattcaaccctggttcacgccttcggggagctccctggttcagtacacgacaggcacgaccgtacgctgccagtacccatccacgtccaggaatcccagactgtgcagaggttaggggccctggcgagggggcccagtcgtatgcgataagcgccgcttgtcccgcaggcggaagaggcgctgagttggaggtcgcgcaactgctccgtccgccccaggagggatcctccgcggccatcggtgagg

SEQ ID NO: 336128 - DNA, 624 bp, Homo sapiens
  chr19:39989541-39990165
  hyper
cggggccattctctcagatataaggcttggaagccagcagctgcgactcccgagacccccccaccagaaggccatggtctccccacggatgtccgggctcctctcccagactgtgatcctagcgctcattttcctcccccaggtcagagccaggtgggaggtggcgtggaaagggatgaatgcggaggggaggggtgagtgcgacctgaaggtcctggggaaggagcgtggggcggacgggaagcctgggtcctcccggccgcctcaccctgcgcccgtctccgtcccagacacggcccgctggcgtcttcgagctgcagatccactctttcgggccgggtccaggccctggggccccgcggtccccctgcagcgcccggctcccctgccgcctcttcttcagagtctgcctgaagcctgggctctcagaggaggccgccgagtccccgtgcgccctgggcgcggcgctgagtgcgcgcggaccggtctacaccgagcagcccggagcgcccgcgcctgatctcccactgcccgacggcctcttgcaggtgcccttccgggacgcctggcctgtaagtgctgcccccgggggactcccggtgctggaggcctaaccctgccagc

SEQ ID NO: 336129 - DNA, 274 bp, Homo sapiens
  chr19:39993472-39993746
  hyper
tggcgcgcgtggctggcaggcggcgcttggcagccggaggcccgtgggcccgggacattcagcgcgcaggcgcctgggagctgcgcttctcgtaccgcgcgcgctgcgagccgcctgccgtcgggaccgcgtgcacgcgcctctgccgtccgcgcagcgccccctcgcggtgcggtccgggactgcgcccctgcgcaccgctcgaggacgaatgtgaggcgccgcgtgagtcctgcgttcgaccccaccccgtcccagccggggaccccggccc

SEQ ID NO: 336130 - DNA, 513 bp, Homo sapiens
  chr19:39997624-39998137
  hyper
gcaggtgggtccccggctcccggactgcgccctctgatgctcccttccccacaggcggactctgcctggacctgggccacgccctgcgctgccgctgccgcgccggcttcgcgggtcctcgctgcgagcacgacctggacgactgcgcgggccgcgcctgcgctaacggcggcacgtgtgtggagggcggcggcgcgcaccgctgctcctgcgcgctgggcttcggcggccgcgactgccgcgagcgcgcggacccgtgcgccgcgcgcccctgtgctcacggcggccgctgctacgcccacttctccggcctcgtctgcgcttgcgctcccggctacatgggagcgcggtgtgagttcccagtgcaccccgacggcgcaagcgccttgcccgcggccccgccgggcctcaggcccggggaccctcagcgctaccttttgcctccggctctgggactgctcgtggccgcgggcgtggccggcgctgcgctcttgctggtccacgtgcgccgcc

SEQ ID NO: 336131 - DNA, 1039 bp, Homo sapiens
  chr19:40005601-40006640
  hyper
cgacagctgcggaggcactggggcaatctgtgtgtttctcagcctggcgtcgggggttaagggggcgggaattactcggcgaggtcgggaggtcgcgcggtggaacccgggggccaggtggaactcggtgtaacagagcccccagtggtcgcgccgcgtctcagaacccggtgcgggagacgctctccccgcccaaagagggaaggcgggcgggactccccaaccggcttgccccggtccccctgggccccatgaataaccaggcgcggaccccagccccctcctcggcgcggacttcaacctcagtccgggcttctaccccgacccggacaccgactccactccggaccccgactccggtccggactcggacccccatccggaccctgactccagtcctgactccgtctccagccgggacttcccctctggtcctgactcctgctccagcccagattcccactctggtccccactcccgctctggcccggatcccccgtctggttccgcctcctgctccggcctggatccctactccggtgccgactcccgttcccgtccggaacccaactccggtcccgactccggctcggaccctgactcctccagtccgggtcccagccccagccccagcccagctcctggcagggattcgggccgcgctccccgtcttggactcctacctggccccggccctacctttggatccgcccccggaacctgctccggagctgcctttgttgcccgaggaggaccctgagccggcgccgagcctgaagctcatcccgtcggtctccagcgaggccgggcccgccccggggccccttcccacgcgcaccccgctggccgcgaactcacccgggcccaccctggacttcaccttcagggcagacccgtcggccatcgggctggcggatccccccattcccagtcctgtcccctcgcccatcctggggaccatcccgtcggccatctccttacagaattgtacggaaaccttcccctcctccagcgagaacttcgcgctggacaagagggt

SEQ ID NO: 336132 - DNA, 1046 bp, Homo sapiens
  chr19:40324000-40325046
  hyper
gctgaaaaggcgaccgcctgtctctggcccggccggccccgcggcggggagggcaagcgggacaggaggcccggtgggtgacaacagcagccgccactgccaccgggggcggggagaggaggggacaagggtcagcccagggcacgcgggggaagagtagagcaggtggacgggggaggggcgacacgccccaccctgagtgaccaccagcccctagggacccggcgtcccgccccccacccaggaggccctcctgggcctgctgagaccggaaggcggggcccgactgagcttggcaatcggcacctgccatggcaacaactgtaccattggtcgctggtgccaagagctcagccaatcacagcctagggcagctgttgctaggcgacgaagaagcggcccgcggagctgagcccaaacaaagggcgggagtggggcccggctaccccctcccagcctccctcctgcaactgcttcctcgggcttggccggttccaggaattcaactatgaatagccaggcagggcccgcacctgcctgccacccccctcctctcctcccttggcctcgtgctaagtctcacggcgacgggagcagggcggatcccgtcctgcccacctccctgcgaccgcttgccgccccacccgtccccgcgccgttacctgaaggagcgggcaaggggactcaaactgctcggggagcccgagctcagacctgcccactggctgagggtatccggcggacgcggcaagccagggccccgattacccagtaatgcaaccagcaaaatggcgaccacaacaaaccggcccccccacgccctggactccgcccccatccctccctctccgctcccctcacgtgacccacactgacactccgcctgcgcgagatggccgcttacctgcacgcatgcgcagcgagctaccaatcccacccaagaaccgaaatccaggctgccgctgcgcaaaggcagctagaaacggagcatgcgctctgtgaccgagtgagaatttacccaaccccgcaaaattgaccaagggtgc

SEQ ID NO: 336133 - DNA, 989 bp, Homo sapiens
  chr19:40561486-40562475
  hyper
cgtacgaaatgagaaggaaataaaaggaggaggaatcggtctgagttcgaagctggttcctggggacagatctctgagggacgctgggttctcaacatgtagctgccctcctgggggaccctcaagaggcacttccagctctcatattcccaccccgagtccagatctgcgccttcttgtgcaaagcttcattctcggttcaatatctaacctccctactggggacattttcattcctctgctgcagcctctgcagctttgaaggggaaagacggaggaagcagcaggagcctagtaccaccggcacagtgacactcacacagccccagcaaaacgcactgcgtccacacgccgtcccggtcctgtgcacagggcctcacgcacacactcacacagtcccctccgtcactcaagatcgcgcaatccccatcctttgatgcccgcgcacacgcacgcctaaggatctggcagattccgtctgcgccccgggttcctcctctgagcgcctcgctctcgcccacccgcactgccgggtcggtcaggttcgagtcccagtccacgaagacctcccgcagccaccgatttcttcctaggacgtgaagaccttacccagctaggtcgtcaaccccaggagacaggaagtggaaccgctaattccggtgcggtggcctctgggaaatacagtcctgagcagaaagaacctcagaagtcttggtctatggtctgttcaggttgatcccagcatacattgggggctcctaagggacccgagcctaatggatttgtgggagttccagaccgtggggtgcagaggttgcggccacgggcgagaatccccatctgagaggagcgttgctgttttcggtgcgtcagggtaaattaccttttctctctatgcaaaagaatgcaaatgagcagaacttttaaagaagaatttaaagtaaaattacgtcaaaatgtagctgctttgacctcttcgtctcagatcc

SEQ ID NO: 336134 - DNA, 423 bp, Homo sapiens
  chr19:40948768-40949191
  hyper
cgatcaagagttaattgccagttattcgctcaacagatttactgagtgcctactatattcgaaatctcctggagccctgttggggaacctatgttgagattcttcttcaacagtcgggatatttctatgtcctcttccttaaccgactgggagcgctcccaagagtaggaaaggggcctgtctcattccctctgcccacgctttcagattcccccaaagcgcgccccataggaaaacttgctagaactcagctcagaccaagccccgccccctcggaggtcccactcaatcagaccgcgacactgtaaggccccgcccccccatgggtccttacagagcatccaggaacgccccaatttggcccaggggcttctgggaaacgggggccaacagccgccaggtacacgaattgacgtcgagcac

SEQ ID NO: 336135 - DNA, 155 bp, Homo sapiens
  chr19:40972636-40972791
  hyper
cggggagtgtgcggctgtgtgtgacaggtgcatttgtgtgtgacgccgcgtgggcggtggttaccctattggatttgtgtggtggtgggtgacaccgttccagtgtggacgccgcgtgtgacggcgtgagggtgtgaccccgtgagaccccacag

SEQ ID NO: 336136 - DNA, 153 bp, Homo sapiens; identical to SEQ ID NO: 225933
  chr19:40973006-40973159
  hyper

SEQ ID NO: 336137 - DNA, 576 bp, Homo sapiens
  chr19:41018525-41019101
  hyper
cgacccgcaggtcatctgcaaccgcgtgaaccacgtgcacggctgcctggcggagctgcaggagcaggcagcgcggcgacgcgcggagctggaggcttcgcggagcctgtgggcgctgctgcaggagctggaggaggccgagagctgggcgcgcgacaaggagcgtctcctggaggctgcgggcggcggcggtgcggcgggcgcagcgggcgcagcgggaacagcgggcggcgcgcatgacctgtccagcacagcgcgcctcctggcccagcacaagatcctgcagggcgagctgggcgggcggcgagcgttgctgcagcaggccctgcggtgtggcgaggagctggttgcggccggcggtgccgtcggcccgggagcagacaccgtgcacctggtaggcctggcggagcgcgcggcgagcgcccggcgccgctggcagaggctggaagaggcggcggcgcggcgagagcggcggctgcaggaggcgcgggcgctgcaccagttcggcgctgacctcgacgggctgctggactggcttcgcgacgcttaccgcctggcagccgccggtgacttcgg

SEQ ID NO: 336138 - DNA, 345 bp, Homo sapiens
  chr19:41055104-41055449
  hyper
cgcaggtggaggagtggtaccgcgaggtgggagagctgcaggcgcagacggcggcgctgccgctggagccggcgagcaaggagctggtgggtgagcggcagaacgcggtgggcgagcgcctggtgcgcctgctcgagccgttgcaggagcgccgccgcttgctgctggcttccaaggagttgcaccaggtggcgcacgacctggacgacgagctggtgaggccagcgcaggggcctggggcggggcggggcggggcggtggggcggagaaggtgggcatggggcggggctgaagatggagacggctgagaccctcccactcatacgctgaaagacgcattcagcc

SEQ ID NO: 336139 - DNA, 584 bp, Homo sapiens; identical to SEQ ID NO: 240513
  chr19:41059940-41060524
  hyper

SEQ ID NO: 336140 - DNA, 594 bp, Homo sapiens; identical to SEQ ID NO: 240514
  chr19:41073589-41074183
  hyper

SEQ ID NO: 336141 - DNA, 564 bp, Homo sapiens
  chr19:41105942-41106506
  hyper
gacagcagcttttccgtcctctcccacccaggctccaggaggccagagctctactgaagcggcggcggccccgggggccagggggccggggactactgagaaggaggcccccacagcgtgcccccgctggcaaggccccgggtaagcacatccgcctttcctccgcctggggcgaggggggttccgggccagataaagccgtctggttcccacggtccagccgccgcctacccgccccccgttgtagctcagcacccacccccaggacgaggccccctctagggaccccagcgtccggccgtgcgaggtgagcccgggacaggaccagacacaggccagaggcactgacccgcgggggtggggccgggaagccaggcgtccgggctccccgcggccgaagagggagggcgctggcccgttagaaagctccgccgaaccagcccagacaacaaaagcgattgtgcgggttggcgcctgcctgggcaccaaatgctcaagattgtggggcggctgggggccaaaggcctcctcctgtttcccgaatcttccccctgccctcctccc

SEQ ID NO: 336142 - DNA, 677 bp, Homo sapiens
  chr19:41111117-41111794
  hyper
gcgacgacgagcacggtgaggaaagggtggccagagtcccctccgacccctgtcaagcatttcactttgcccctgaccctcatatttcccgccttcccgagcacctttgcccagctcgccctccccgccttgtctagccccaccccgtaagaacccgtgtagacatccgtttgcccggccgtgcctcccctaggcgtggcatctatggtgagcgtccacgtggagcacccgcaggaggcgtcggtggtggtgcaccaggtggagcgtgtgtctggcccttgggaggaggcggacgctgaggcggtggcgcgggcggaagcggcggcgcgggcggaggcggcagcgccctacacggtgttggcacagagcgcgccgcgggaggacggctactcagatgcctcgggcttcggttactgctttcgggagctgcgcggaggcgaagtgagaggaggcccgtggggaggggcccggagcttgcctccgcgcgggggcgcgctcacccaacacttccccgcagtgcgcgtccccgctgcccgggctccggacgcaggaggtctgctgccgaggggccggcttggcctggggcgttcacgactgtcagctgtgctccgagcgcctgggtaagccccaggacgtccccgaagtgctcggagctggggagtggtgacaacctcacc

SEQ ID NO: 336143 - DNA, 371 bp, Homo sapiens
  chr19:41115509-41115880
  hyper
tacacctgcgcttgcgactctggcttccggctcagcccccagggcacccgatgcattggtgagcaagacggagggcgcggaaggaggcggggcggggggctttgcctggtcaccttgtcaccagccccctccgtgtcctcagatgtggacgaatgtcgccgcgtgcccccgccctgtgctcccgggcgctgcgagaactcaccaggcagcttccgctgcgtgtgcggcccgggcttccgagccggcccacgggctgcggaatgcctgggtgagaaatttgccccacccggctccaggcccaccccagggtctcgctcctgctctcactccagagcctctccagccctcccacgcttcccctctcgggtccc

SEQ ID NO: 336144 - DNA, 841 bp, Homo sapiens
  chr19:41119120-41119961
  hyper
cgccagagagtctgggagtagggcctgggttccagggcaaagccggctggaaaggtggaggcgggaccaaggcgctgtgggaggagcttagaaacctggcattggtgggggcggggttactgcgatgtgggcggagcttgtctgggaggccgggtcccgtgactccgcccaatctcccgcgtaccctagacgtgaacgagtgcctggagggcgatttctgcttccctcacggcgagtgcctcaacactgacggctcctttgcctgtacttgtgcccctggctaccgacccggaccccgcggagcctcttgcctcggttcgtacccgggctgatcctggccccggaaagggtgggcttagggcaggaaaaggcgggacggggagaagagggcgaaaaggggaaaacgagtttttagccggggtattccagcaggatcagggggcagctggtgggagtctcgaggcagtgagggggggcggggcgtggagatgaaagggccgagtctgggtatttggaccgtgattgtaaagaagctgttctaaacccgtcggggggcggtgtttgcagggagggaagtagcgtgaggcaggttggggaaggcgtgagaggcctaggagagccgaggggcggtggaggggtgtggcctagaatgttaggcggagcgggaggtgggccgggccttcggacgccctgtcccgcagacgttgacgagtgcagcgaggaggacctttgccagagcggcatctgtaccaacaccgacggctccttcgagtgcatctgtcctccgggacaccgcgctggcccggacctcgcctcctgcctcggtgagaggccccgcccc

SEQ ID NO: 336145 - DNA, 359 bp, Homo sapiens
  chr19:41190162-41190521
  hyper
cggggtttcaccgtgatagccaggactgccggcctcacgctttttaacaccaacttcaaacgacttgggctggtgtcccagccaggccgcgcacccgcacagcacagcacagcggcccccgtccccctcgccccgccgcaccctgccgcgcccactcaccctgaccgggaagctgcacgtgcccttccgcaccgcgtcctcgtctgcctgccactggtgcgggcgcgacgcctcgggcacgtaggctggcttcctccgccgcaggctctgccgtaacttgttcatggtgcccgccccgtctggtgacacaggacagtgatgtgggtcaagggtgggggtcagaaggtatggagctcaac

SEQ ID NO: 336146 - DNA, 562 bp, Homo sapiens
  chr19:41698802-41699364
  hyper
cgcggggtcaccgccagatgcggggtgtggcaacctccaggcggccaaagtctctgacttccaggttcttctgtttgcttactccctatccgggggcccaaggcgctgtctccgccgcccaagccccgcgtaaacctgggtgacctcggagacatccgttggagcatgagttcccgacatcaggcggcggcggtggtccgggagaaacccggcggcggggagataagcctgcccaggaggcagggggctgggctagctgccccgccccgcgcctgacttcgttggggagggagacgcccggctcccgcccctaactagcccagccgcgcggagcgcctgggagaggagaaggagccgacctgccgagatggaggcgaccggcacctgggcgctgctgctggcgctggcgctgctcctgctgctgacgctggcgctgtccgggaccagggcccgaggccacctgccccccgggcccacgccgctaccactgctgggaaacctcctgcagctacggcccggggcgctgtattcagggctcatgcgggtaaggggctctggggac

SEQ ID NO: 336147 - DNA, 520 bp, Homo sapiens
  chr19:41732035-41732555
  hyper
cggctctggctccgcgcccccgaagccggccggaagcgctggggtggggaggtgcccccggtgactcacgcgggggcaggaatgctgcggtcggaacgggacccggctccagaacccacctccagccccagggcttctccggccggcggcgccagctcccgcgcgctgaccctggcggggccccacgtgccaggtggctggacccgacccaggctccccgcccccactcgggccgcccgcccgggactgtactgtttctcctccgggcggcgcgggggctgcgggcgcggggccttcagggcgcggaggctgcgggagcgggcacctgaccttgtctgggaacggccacctaggaagccgcgactgaggagctcccctaccctcccctttccggcctctgcagactttgcaccattccactccctccgctgacggagaaaaggaaactttgtgtctgcggatggagagcctcccttgccaacgcggtgggaacagaggcgtacacgcacggagcaaacac

SEQ ID NO: 336148 - DNA, 441 bp, Homo sapiens
  chr19:42028298-42028739
  hyper
cgaggctgccaacctgtgagatagttggtccacttgtacaaaaccccctccatgcttcagagccccacaccgctcatcctcccggcccggcgccggccgcggtgatggggtaggcgcggggcctggggcagcctttcccggcccgcccgggccccctccgccggcacgaagccgctttctgcctgcgcgcgccgcagggacgtggcggcccttagaggccgggacagcgggcgcagcgtggagcttgggggccgcgaggcgcgggctcagacatccccgggtaagcctcggcggcggcggccgcgacaacggcaaaaatgcgactgcgaccgcgaccggtctcgtgctcgcgcttccgcggcccggctgctccctccggcgccccggcgctgcctcttcctcgcctgccttccttccccctgggctccccgtttgtttttc

SEQ ID NO: 336149 - DNA, 117 bp, Homo sapiens; identical to SEQ ID NO: 205441
  chr19:42498159-42498276
  hyper

SEQ ID NO: 336150 - DNA, 1088 bp, Homo sapiens
  chr19:42927304-42928392
  hyper
ggaaccctggtccacgaagctcgcattccggactctgctcccaagccgatccgggcgtcagctagtccctgtgccagggtgggcctctcggctgtcacatcacccccttctcacaatggatcatcccgttgtccccgcaagcggcaatgggccagtccgcggacccccccaactccctgtggcagtgggccagtccacgctgtccccactgccccgtaggatgtacgaggttccttccgggctgctgccggtctccgcgcgctcacctttggccttgtcttttcgccaccgccggcgaccgtggctccttgagccctctttggcattcttcgaggccggggccatagcggcctcggcgggctccgttcccccggccaactccatcaattccccgcggtcctcccgcgggggccaattccagccgcgaggccctgcccggagggccaatcctcgctacacactactgtcgggcccccctattacccaatcccgagcttgctcttctctgggtccagctccctaaccaattctggtctccctccgctgccgtgctccgcccccaaccgccagaatttaagatctggctccgccccctaccgcgcattaaagggctcgcggccaacaaaaaggcaaccccgggggtggcgaaaagcgtccttcgggcaggactagtgcggagccccgcggggagcaccccagcagggaagtcccgatcttcccacgtgctgggaagcctcccatgtgctggctcagtctcgccatcccactcaccttcccagggagggatgccctagcacgcggcccggcccgccttttgaagggggaaagtggggcgcctctgagcctctgcctggggtgggggcgggccaggtcctctgccaactcaaagacgaggcggggcgccagcgctggaggcgtggctgtgcctgagagccgttggaggagggagccccgctttccctctcctgtctcctagttctcctattgcgcttttcctgggggatctttctccctctgtctccgccccctaatccatgctcccgataatgagggtgggggatggtggtaggagaacgctcggcgcctgc

SEQ ID NO: 336151 - DNA, 242 bp, Homo sapiens
  chr19:43967267-43967509
  hyper
gctccctcacctgccgtcaaggtgacgttgccgtcgaagcagcccttgtagacatgatcgctggcgttgtagcagctcacgaccggcggcgatgtaccctggcacgcctcccggctcaggcccacacagctgtagcactccacgccgttgggcgggtatgcactctcattacctgcgaggggagccgagaggaagaaaaggtgtcgaaagggttcgggaaccgcagctcgtcctctagcccc

SEQ ID NO: 336152 - DNA, 420 bp, Homo sapiens
  chr19:43967734-43968154
  hyper
cccggcccccacggacctgccgggtcgagcgcccgcgaggtgaggttgagcttggcgttgcagcgatcctgagcgcattgctgcagctggatgaacgccagaagcccgtgaagatccaggccgcggtcattcttgccggggagtcccgaaccgcaaccccgcactgccagcgagaattgtccgtggactagggagagggacaagggcgggattagctgtgggcgtggtctcagatggggcgtggcccagagttgggtagggtctgggaggggcggggcctcaaataggccaacaccacaggaccgacaggcaggaattggcggatggacgcccccaaagagccgctcagagcggaaagaacgaccgaagcagggaggagcggggtcacggaacgggggcggaacctcaaagagctgagtc

SEQ ID NO: 336153 - DNA, 500 bp, Homo sapiens
  chr19:44030452-44030952
  hyper
cggagcagccccgagcctgtaatgtggtccgcgtggcagtgggtattcactgggagagagaggagggacaggtccggagggtacagaaaggacctgggagtcccagcccagatccttctccctcagactcaggagttctgggccccagcttcccattccactgacgctgcagcccagccccgctgggatccatgagtttggtccccggactgaccagcatagagcagccgcagccccagctccttgatcagctgggcatcccgaggcgctgtttccaggactgggtcgatcagaacggcctcccgggactctctgtcacccagcaggtacgtgaaggtgcagctcacaggctcgaacatctgggaacgggggacccaggtgagggcgcagaaccggacttccacccactggaggccaagtagtccagactgaccctatcctcttcctaagatccagaagcagaaaccccagcccactctttccccgggagtcgggagtcc

SEQ ID NO: 336154 - DNA, 387 bp, Homo sapiens
  chr19:44099002-44099389
  hyper
cgctctagctcctcgcagccgtcgctgctgccgcagttcgccggtagcacaaacagatccgcagctcctaaccccgcgctgttcagcagagctgctgtctgatcacgggcctgggcggcagtctgtgaatccccaggacggaggttccgcacagccagtagcggggtccctcgggccagggcggccagcgctgcctctcccagggctggagccaacggttccccgttcccctcgggtccgggcagcaccagtaccagcacgttggcttccgccgcccagggccccggcgctgcgggtgggcagctcagctcgcccagaaaaaggcctgggcccgcagctcttaggctgggaaccccggagtccggccgtccctcgggggcctcgagc

SEQ ID NO: 336155 - DNA, 456 bp, Homo sapiens
  chr19:44302745-44303201
  hyper
gtcgggtgctggcaagagagcgtagatgcacactcaggcagtggtaccctggcacagtcgtgcgggctgcgcactgcgccagagcccgcgcctagcacgtctcgggggttgggatcctagcgcgccaagagcaggcgcccagcggaggccacgccttccccgaggctgccaggcctctcatcgtccctcccggagcccagccccgctctcccgcgcaccttggctcaggttggggagggcgtcatgagtcatgaggtgggcgttgcatttgtcagttgtgcagccgcgcaccaccgagtagtctggcggcagcgcgtccgcgttcgattgcgtctggcccgcaggaggcccggtccagcagcccttccgcaccagggtcaccggcgcgcgataccctgggggcgggatcggggctcgtgctctgcttcccgaaacccttctccctccagtctcagc

SEQ ID NO: 336156 - DNA, 354 bp, Homo sapiens
  chr19:44405817-44406171
  hyper
cgccccgttcacgccctgggtcttctggtcttcagcgcctctcatcctcaccgccggttccattccaaccagggactgtggaagcctccgctgatttctgtggagacgatctactcaccacgtaggggctacagcagctcggacaccggaaaaagatctagagctcgagggtgaccctagcgcggtgacttctgggaaatgtagtccacccggaataaccatgtccacggcgcccgccattctgtagcctatgctcggagggcacatgagcaagagcttgaccatctgtaccgttggttgacttgctctattaagggctatgatttcaggtcgtcctgcgtgtttagaggaggc

SEQ ID NO: 336157 - DNA, 463 bp, Homo sapiens
  chr19:44455276-44455739
  hyper
cgtttactccttgggcattctgggaagtgtcccaacggtcggtggggttgcgggcacttccggtcaggcaggcggatccggggaattctgggaaatgtagtccagacgctctgtggagtcgcgggagctacggctgcgggagttaccctttattctgtgatattttgagctgttctgcgtctcgcaggcccttctgaatttcctggacctactctcggaaccctcaacgagctagcgatagatttagaggaaaggaagcaccgtcggaaagcaaaggtttggaagggtgagggcggcggtttgcgatccccgcggcagagccttcttgcgtttagggctgtcctagcatcccgagggactcggtcctgtcacgtttcgccctatttgggggtttctggggctctcagctcgcccaatccgcatccctccactactggcgcggggccgattcccccggtacaac

SEQ ID NO: 336158 - DNA, 320 bp, Homo sapiens
  chr19:44488115-44488435
  hyper
cgaaacgcctgcgggagtctaattgcccggtcgatgcgcaggaaatttggctcccgcaggcgtttcgcgagtagcttgggaggcgtgggaattttggcccaggcaggaggacctgtgaattctgggaagtggagtccatttgctctgtggagtcgtgggaactttggctcaggcaggcggattcgggggattctgggaagtgtagtccagacgcctgtggcatcatcgacacttccggtctccgagcaggacactgctacttaacaaggtggtttgagccaagtatgtgtcttgcgggtctttgcgaaagtgaaccagtt

SEQ ID NO: 336159 - DNA, 385 bp, Homo sapiens
  chr19:44529437-44529822
  hyper
aagtggagtccacacgctctgtggaggctcgagcacttccggtccccaactgtgacgttgctatttcatttaccacagtagtttgagtcatttccacatcttgcgagtccttccgaacgagtctcctttccttggggctcgcaaccacccaatgatcgattcaggagaaaagaagcctgggcggagagcagaggtttggaggggcgcgggcggggattgccgttccagtcagctgagccttctggcgtcggggggctctgctagggtctcagggagtgggattggcgcggcccggtgtgccctactttgacctcgcttagtccgcctccctcctccctacgtgtgcagcccctttcagtgtggtgtggagtgtcacttaatgtcc

SEQ ID NO: 336160 - DNA, 501 bp, Homo sapiens
  chr19:44711530-44712031
  hyper
cggaagctcaggttactcggaagtatttccgctccaaggagcggaactatggccggtttcccctggggcattctgggaagtgtagtcaggggcccgcgtagcctggggcacttccgcttttggatggcggagctagggaattgtgggaagtgatccggggtttctctttagttgctgggaagttttttcgctctaggagggcgaaaacaagtgtttggatccgctgggaccctccaagttttctcagcctcgtcagggagcaagcggggccctggccctcgtctggaggaaggctagagaagctgtggccagctgggaggctggagttgggagcagtttgtgttctttcctctcggctgagcctcacgtttggagcagttcttgcgtccccgggttgggagcgtcctggatcggttgtcgcttggttagagggtctcctggcgttccgcagccagcctctcccacctacttgccagctctgccacttactagtgttataac

SEQ ID NO: 336161 - DNA, 782 bp, Homo sapiens
  chr19:45004129-45004911
  hyper
cgcgcatgcacgcagaggacagtcgcggaatatacagctgtatcagtaactccatcaaccccggtgacccgaggctaaagcgccacccgcacagataccaggtctccccgctacactcaccaccgcttccagcttcccgcgtagaccctgcgcatgcgcgcatcggacaccaagcgctgccccacgcccctaccaacctgggcgtccgctggcccgcagcccaggctgggcctgtcaccgcctcagtgcctagcacggctctgcggcaggacgaactcgggttaggcaaccccctgccccgattctgcaacacggccgactcgggttaagctagttcggtcccctctcctagtcagcatccgcaaggccgctgggggttaagtctgaagggccgagctgctcggcgacagcaagcgtccgcgcgcgggacaatggctgctcttgtggccgaacccggaagtgcacttgggctcggagagccagaactacaattcccagaagcctccgcggcgcggacggtcagtaggcggggttccggcttctccaaggaagtggggcgggggaccgggccagaagctaagagggcgtcctcgtccggggcccgggggggcgccacacctgtgcatgtgcaggtctagggggagcactaagaccagccgcggcgccgggaggccgaggccagtgcagcgacgcatggggagtcgctctggcgtgacgtcagaatccaatagaaatggcggggaccctttctgggtgccccctgcctgtcagacgctgcgcgc

SEQ ID NO: 336162 - DNA, 863 bp, Homo sapiens
  chr19:45146966-45147829
  hyper
cggcaaccgcgagccgttagtaagttgctgaatctctccgtgtgcctccgtttcctcacctggaatgtgggcgacctcacacaggaagccgcctcttctagtgggcaccgacggagcgagcgcgcgtctgcagcgggactgagcgccgggagagacctgcgcaggcgcaggcgcgcgggaagggccagcctgggtggcccaccccgcgcctggcgggactggccgccaactcccctccgctccagtcacttgtctggagcttgaagaagtgggtattccccttcccaccccaggcactggaggagcggccccccggggattccaggacctgagctccgggagctggactcgcagcgaccgcggcagagcgagcgggcgccgggaagcgaggagacgcccgcgggaggcccagctgctcggagcaactggcatggcccgagccatggccgccgcgtggccgctgctgctggtggcgctactggtgctgtcctggccacccccaggaaccggtgagtgacccccgcgcagtccggtggcccctgtctggctcccgctccgcatccaggccgggtacttgcccccttgggttcccgaagatgacggccccgccgcggcgccacccaccccccatctctgccccggggttggaaggaacacggtgcgagggtgcgagggcaggaccctcctcttggccacccggagagcggtcggagttgggtacagaaattcctcgaaattggcagcaacacgggtcgggcacaagaccctcctctgggcccctcggaaaggggatggagttgggtgaggaaatttcccaaaaaggcaagtgaatcccggaaaatcagcagatggtgacgcatgcc

SEQ ID NO: 336163 - DNA, 272 bp, Homo sapiens
  chr19:45195351-45195623
  hyper
cgggaactaagacgccccccacgcccatccccggctcccaggctctctccacccaagttctgcccaccagggcacactgcttccctctgccacctcctcttcccacgagccctggtacaccctagattctcagggctgtggctccttgctttacaaatgagtaagttggtggcagggaaggaagtgggctgggccatgaccaagagtcactatgattcacggggaaaaccctgccctcccgattcaactctgtgtgcaaaaaggttttgtgc

SEQ ID NO: 336164 - DNA, 999 bp, Homo sapiens
  chr19:45349505-45350504
  hyper
ggccggagccagggtcggcttgactcgggggagcagcgggtggatcctgtgacgtcagcgggttcgaaccgccggagctgagcgagaggccgggggtgccgagccgggcggggagagctgggccgggagagcagaacagggaggctagagcgcagcgggaaccggcccggagccggagccggagccccacaggcacctactaaaccgcccagccgatcggcccccacagagtggcccgcgggcctccggccgggcccagtcccctcccgggccctccatggcccgggccgctgccctcctgccgtcgagatcgccgccgacgccgctgctgtggccgctgctgctgctgctgctcctggaaaccggtgagacgagcggacggccccctgccctcgcgcggaccccctccaaccttaccttccgagctggggaagccgagcaccttccccgcccacccccggctccccgagccccctctcgcgtgcccccttcctggctggccccacagactccgaccccctacacgtccgattctctcgaggagactctgacccctcctttctgcatctctctcaccaccacccccatccttcttaatccaattgcccatcctacgcctgcttgtctgtccccctccccatttctcggattcccgcgccgaaagggttaaatcccaggaaggcctggtgccccctccccaccccgcgccgagtagttcacccggatctgggtctctgtctcctctacccctctcaggaatgtggggaatgttccccccacctaccgcagtaaggtctcgaggaagaggcgagaccacctccctcccctatttttccttcttcccggcttgggcgtctgaggcccggagagaactgaggacaagcggacctgattcgggtcccttggagggctaaggataagagttctggcgacttagggggaagggcctgagctcggagctccaaccccgaacctcagggagttgggggttctgactcc

SEQ ID NO: 336165 - DNA, 555 bp, Homo sapiens
  chr19:45579321-45579876
  hyper
cggggtgctcaccgggatagttcggggtcaacggcgtccacagggtccacgggttccgcgggccgagggcgaggagggcggccccggcgggcatggggccaggggagtggtggggttcgccgccgaaccgccccgccgaggacacctccttcggggagaagggccccagccttggggcctgttggggctgcgcgtctggctcgggcttgagttcgatgacgaggtcctgcatttccatctcgtcgtctgggttggcggcgggcgcgggctctactcggcggggcgcgctgccggccttgcggcgggacatgagtcgcgggccgggcgagcgagcgggcgggcaggcaggcaggcgggcgggcggaggacgcacgagcggaggacgcgcggaccgtgcgcgctcaggtgagtgactgcggcgacccgccgcgaactcttacacgtgctggccgggcccgtggctccgcctaccagggcggggctcatgggaggggaccgagccgccctgctggggccctgacggcggcctaactcaatctaggcagtgtcccgtgc

SEQ ID NO: 336166 - DNA, 1117 bp, Homo sapiens
  chr19:45647694-45648811
  hyper
cgtgcctggttttcagtttttatgtggtgcttaaagcaagccactcaggtacagagactctcagggcgagcactcgtgtgctcaaaccccgggataagagttgccctccttgggggcttcagggcgctcaaggtccaggccctggccaggggcccaggctgtggggggtagggactgactgggtgcctggggagctgggagtggacgggggacctggcatttggggagacttcaggcacaggagggacttcaggccaggcctgcggcagggcaggacggcgccggtgttcacgcaggcgcgcgaaagaaaaggagcgcccgggcctggctctcttcccggcttctttcctgacttggcctcctgggtctcctccgccatcacggcctcctcctcaccctcacaccccctccctccagccgcacactcagagcctggagacgctgaacctgggccacaaccccatcgggaacgagggtgtgcggcacctcaagaacgggctcatcagcaaccgcagcgtgctgcgcctcgggctggcctccaccaagctcacgtgcgagggtagggtacggggccgggccagggtgcgggctggtgggctcagccgggcggccagccgggtgtggggcccgtggccagcccctgcggtgcccccccaggcgcggtggcggtggcggagttcatcgctgagagcccccgcctcctgagactggaccttcgggagaacgagatcaagacaggcgggctcatggcactgtcgttggccctcaaggtgaaccactcactgctgcgcctggacctcgaccgtgaacccaagaaagaggcggtgagcaggggacggtcctgcagccctggggcgggcggaaggccgggtggtggggccggcctgagagccctagccaggcgctcccgccacaggtgaagagcttcatcgagacgcagaaggcgctgctggccgagatccagaacggctgcaagcgcaacttggtgctggcgcgggagagggaggagaaggagcagccgccacagctgtcggcctccatgcctgagaccaccgccaccgagccccagcccgacgacgagcccgccgctggggtgcagaacggggcccccagcccc

SEQ ID NO: 336167 - DNA, 1977 bp, Homo sapiens; identical to SEQ ID NO: 240596
  chr19:45655335-45657312
  hyper

SEQ ID NO: 336168 - DNA, 538 bp, Homo sapiens
  chr19:45888865-45889403
  hyper
gcacttctcgaaggcggtggcgccgtcgctgagcgtggtggcgaagattgcagcgccgtgctgcaccagcgccatgcagatgactgtgtcgttgcacgacgccgcgcagtgcaagggtgtcctaggcgtgggggtggggggttgcggggaacgatgcgtgagaggctgcgcgtccgcccacgggggacccagcccaccgcgcgggtcggggctcaccagccgtggctgtcgggggagttgacattggcacccgcggtgatgaggaaatccacgatagagtagttggcgccgcagatggcgttgtgcaaggcagtgatgccctcctcgttgggctggctcgggtcgttcatctgagtgcaccgggggagggggaagactcagtcccgcggctggcatctgcgatgcccccgccgtgcccacctcccgctcagcagcgctcacctccttcaccgcctgctgcaccacctccagctccccggtcagcgccgcgtccaggaggagcaccagagggttgaggcgcgcgcggcgggccttgcgc

SEQ ID NO: 336169 - DNA, 62 bp, Homo sapiens
  chr19:45907705-45907767
  hyper
cgcccccatccccgagccgaaaagtcgggggagagccgggacacagcctccggagggacccc

SEQ ID NO: 336170 - DNA, 172 bp, Homo sapiens
  chr19:45931075-45931247
  hyper
cggggcctctctgctccgccagaacccagcgggggcaggaccccctagaaggcggcccattccccgctcccgattcatttccttgaagcagaagtgcggtaaagggcccgccgcctgcgatcagtggaattctgaatcggttaacgttagttaagagcgaggggaaaaaatt

SEQ ID NO: 336171 - DNA, 344 bp, Homo sapiens; identical to SEQ ID NO: 240607
  chr19:45931579-45931923
  hyper

SEQ ID NO: 336172 - DNA, 536 bp, Homo sapiens
  chr19:45996048-45996584
  hyper
cggcgccggtggatgggggaggggccaggtcgcctgaggcgggggctaagtttaggcacgctggggggagggggcctccccgcagctgttctggcccgtctggcccctgagtgacagcgctgcctggggccgaggctgggggagggggtcctccctgctcctgggccccaaagtgctggctcgaaggagaagggaccccatgctccctctgggtcctccctatactgcccctcggccccctagccccagcctgcagcgctgcggaagcagatcagtaataaaaatgctccggatgtgcaggagataagggcgagtttggaccccgttccgccgacctcagcccccgtccagcccgttccgcaagcccacctttactccccatatcggctccgagtgagaggctggggacaccgctgcttctcggggattttgcccacttcagtagaacccggaggacaggagtagggggggtggggcccctttggacccagccaatggctgtccacagaggtggggacaattccaaaattggaacc

SEQ ID NO: 336173 - DNA, 951 bp, Homo sapiens
  chr19:46001734-46002685
  hyper
cggtcctggcccgccagctgcagcgtctcctctggaccgcttgcaagaaaaaggagagggagaaggaggggagggaggaagaggaggaggaggaggcggggcgcagggcccccgaagggcctcggtctctgttgacagcgccgcgccgcgcccagcggccgcacgggggtgccgaggcgtctgggggcctgcgcttcggggcgagcgcagcgcaaggctggcgcgcgcgcatggaggatgctcactgcacttggctttcgttacctggtctgcccccgggctgggccttgtttgccgtcctcgacggccacggtggggctcgagctgcccgcttcggtgcacgccatttgccaggccatgtgctccaggagctgggcccggagcctagcgagcccgagggcgtgcgcgaggcgctgcgccgagccttcttgagcgccgacgagcgcctgcgctccctctggccccgcgtggaaacgggcggctgcacggccgtggtgttgctggtctccccgcggtttctgtacctggcgcactgcggtgactcccgcgcggtgctgagccgcgctggcgccgtggccttcagcacagaggaccaccggccccttcgaccccgggaacgcgagcgcatccacgccgctggcggcaccatccgccgccgccgcgtcgagggctctctggccgtgtcgcgagcgttgggcgactttacctacaaggaggctccggggaggccccccgagctacagctcgtttctgcggagccagaggtggccgcactggcacgccaggctgaggacgagttcatgctcctggcctctgatggcgtctgggacactgtgtctggtgctgccctggcgggactggtggcttcacgcctccgcttgggcctggccccagagcttctctgcgcgcagctgttggacacgtgtctgtgcaaggtcctgggggcgtggc

SEQ ID NO: 336174 - DNA, 967 bp, Homo sapiens
  chr19:46144663-46145630
  hyper
cgtccagcttctaaaaactctggccacgcccctcaatattgactccgccctcccagaccttccactgttaccgtgccacctcaagattggtccctccaaggctctggcaccgtccccgcttttgaactagctggccccactctaggttacgacctcgtggcctggggcatgactacatttctcgaccatttcctccctatctctttctgcggcttgacgccgccccagtccttacccttcctttttggcgctacagttgctgctggaggatgtggtccggctgcgggggtcctcacggcgcaccgaggcgaggcgctctggtgacaagtagcggcggacactgctaaaagagagcacacaggtgggggcagagccttctaggccagcaggcgagtgccgtgagcaagcgagattctccctgcaccctctgctgctggagctcaggcaaacaaaccacctctgtctcccacgaggtcttggaagaggctgggggtcccggccttgtgccttacctgcgcccggaggtcgcctccttcttgggagaggatggggacgtggcatagccacccacgcgccgcgggggtcccgagccattaaggggcgtcctggtgggaaggcctttcaagagctgacacactggagggatggggttaggggacagaagagggtgagtataaggaccaggccccggtcctccccatcccacccctccagtctaacggggatacccgaggcagtggtgcctaagcgcggaggcgcccggcccttgggggtgccccgcgcgcgtagcgccgctccctgttcttcgcatgcccgcaggcgacgcagagcatccgccagcgccgcctttaggaccgccagctcgtcttcctgtaactgcagccgctgctccagcgccgacacgcggtcgtccacttccataccgctcgtgcccgacaaattgtcatctggaagacgggggagtgcc

SEQ ID NO: 336175 - DNA, 210 bp, Homo sapiens
  chr19:46148670-46148880
  hyper
cgttgccatagcaacgcccttcgttccagcatccccagctcagctcgcctggcatcaggcggccggcgccgggcccggcgctggggtcatccccaggatgcccagaaaggggggtcgggacaccgcctgccaagccccccaacacaatcctagggccaggattggctgcgcccggatccccctaggtaccgtctggtcccgcccacaacc

SEQ ID NO: 336176 - DNA, 447 bp, Homo sapiens
  chr19:46180191-46180638
  hyper
ctggcccctccctaggccctcgctgcctgccgcacggcccagatcgtgacccagtactgcgtgggtgccaactacacgtggctgctggtggagggcgtctacctgcacagtctcctggtgctcgtgggaggctccgaggagggccacttccgctactacctgctcctcggctggggtgagctccgatcccgtcccccgcccaacccagcgcgcctctcctcggctcccccaactgccctgctggttggcctctgcgggtctcctcccgtctctaggcttctgccttccccaccccgacagaggaattccgcgggtcttgggcctggcggggcccgtgagcgcgctgacagctgcggcggggtgggggggcggggtcggggtctgcacaggggcccccgcgcttttcgtcattccctgggtgatcgtcaggtacctgtacgagaacac

SEQ ID NO: 336177 - DNA, 602 bp, Homo sapiens
  chr19:46379840-46380442
  hyper
cgcctctacctgccacctcgcaggccaggccctctattcctgtcgctgcgccccgccttgccggctgcgtgtcacccccgccccctgccgcgctggctccccgtccgtcccaccagccttgctgtcctgggcaggccggggaattcctcccggttcctggaaaaaacaactggggccgagagaaaggccctcagtctccccaggcacccgcccccctccctcgggcctgggggtctctcccggagtcggccagcccgaggcaggaagccctgcggtttctggcttctcccaggcggcctccggatctggcccccgccccccggccaacagcccaaatattattccgcgggaggagtcggtggtggcgggaggaggcccaggctgaaagaggctttcagggcggccaggcctggggcttcctgtccccaggctcgggcctcaggccgccccagtggggacctcaggtggccggaggggcggggtgttgttgtagggtcctcgggggagggtggggccatccgtcggggtgtctggtggccaccagctctgctggcgtgggcaggtgtgacccccaccccagggacagccggctgatgtccagc

SEQ ID NO: 336178 - DNA, 835 bp, Homo sapiens
  chr19:46519167-46520002
  hyper
cgagagggtcatgggcccaggagtgcacgtctaggagttgatggggtaggcctgagggttcggagaaggtgcggtcggggaggagtctcgcgattgagtttgtcggggcgggcgggaagctgacagctgcctctgtggtctcaggaggcggactccgccggtgcagccgcccccgacgcgggaggaccgggcctcatcgtcccgggagcgctccgcgtcgcgaggccgcggcgccgcgcgctcctcatcccgggagagcggccgcgggagccggggtcggggccgccctgcgcgcccctcgccctcgcccacaggtctgtgcccctgccctgcggtagggaggggacgcactggcgctgccaaggcccgtctccggacctagccgcctcctctcccacgccgtcctaggtggtcgcgcgctccgcttcgaccccacggcctttgtgaaagccaaggaaaggaagcagagagagatccagatgaagtcagtgccccttcctccctcacctgcccctgtccctggcccgtgcccgctcccgggctctcatctctccacgccaccatcagtctccatcccctgccacctgctcgcttctcgccggataccccgcctgctctcccttccgtccgtcctacctcctcgtctgtgtttctgcgtgctttccgctcgtaggcctgtcacctcaggctttcgctggcgtggctgtgacctttaggggcgcagtgacccccttgcctgcaggagttgggcgtacagaccggcgtctcctttcttttttcccaggcagcagcagcggaaccgcttaggcagtgggggaagcggggacggtccgtc

SEQ ID NO: 336179 - DNA, 990 bp, Homo sapiens
  chr19:46907118-46908108
  hyper
cgtgaggattggaggagccacgtggaaaatgctgctgcccggagcccaggtggctgcgctggccagggagaagcccctggttggcggcggtggccgtcactgctgctgctgcttctgcagccaccacggcccaagcatcccccagatggcgtccccttcctctggcttcctctcccgtagcaacagcagtccctgcagaggactctggagtggtggttgcggggtcctaccccgcagggggcaggtgggcgtggcggggagaggcagtagagtcgctcagggtcagctctgacctgtccccgcggtgttcccggccccagcagctgctcagttatttgtcgagtgctgacggtcggtcggaagaaaccacccggactgaggaaggctgaccccagatgcgcctagttgggaatgtgctggaaagatacgccccctggagggagtgcgcccaggaagtggggaggagcgtttgagatcgaaggagtggccgcgtaaaggccctgaggtctcgcaaggaagggtcccggggcgtcccaggccctgttctaggtgcaagaaacaggaacctcctggagcgagcatgcggtggggaggcagggggtacgcctcctacatgaggaggagatccacgcattaggaagtgaggcctgctggggacaaaagtctggcaggcagggccccaggagggccggggcaggagagggtttgcagtcatcgtaaacggggcggcatggaaagccctcactgagaaggtgccaaagaccccaaggaggtgaggggttgcggccggcagatgcctggggaaagcgcatgaccggaagcgcaggaagagccaggttaaaagccccaagccagagtgtgataatatggggctgttaatgtgtgactactgcccctcccgtgccaggctcggtgctggcgtaggggaggcagtggggccaaagaaggccacctgcctccatggtggtcgctgtcgggttggatttccac

SEQ ID NO: 336180 - DNA, 462 bp, Homo sapiens; identical to SEQ ID NO: 240634
  chr19:46916541-46917003
  hyper

SEQ ID NO: 336181 - DNA, 244 bp, Homo sapiens
  chr19:46929942-46930186
  hyper
tcctcctgggtctgcgtgagttttcttcaactccagtaagagatctgcaaaaccttggaatccaggaccgtttccacctcctccattttctgcaaagggcgcaggcgcctggggtcagcctgtggtctccatagcaacggtcggacgcgctgctaggttctggctctgactgcgcctgcgcggctggtcccgcggggtctcccgagtagcggaagatatttgtgggtctttgagacccttcctc

SEQ ID NO: 336182 - DNA, 434 bp, Homo sapiens
  chr19:46931914-46932348
  hyper
cgtggctcccgggtcctgggcaaggctgcaccaaggagggtctaaagatgatgcttcccctttcttggcgtggcctccgaaggtctcacaggccccaacggtctctccggatctgggactgctgatctccctgggacaactgccaacagagtgtcgtaggcgcggccctggcaggcagggaggcgcgtccctcaccgctggcccagaggttgcactcagtgccctgtcgccggactaggacgaggatgtggccgctgcacttgctcccgcggtgacgtcaccgcctccttccgctctgcggcctggcggtctccatggcaaccgctgaagcatccatctcctctgccattggccgactggccgcattgaaatcaagagtctgagggggtcattcggaggtgaggggtcggccaccagccctcagaagcgcccgc

SEQ ID NO: 336183 - DNA, 457 bp, Homo sapiens
  chr19:46974557-46975014
  hyper
cgggcctgacgctccgcctgcccagccgggacttacttggcagatcagcctccgaccgcccagccaggccaaggagacgcagtggaatgcagccgtttcccagtcgctggctccggctaccccggcgccgctgctagaggcagaaagggccaagaaggcgccgtccgcccccgctccggcccaggcgggtcacggggcgtccagactcgatgccgttagcggcgagaagccgaggttggcgtcgcagcgcgcgcctgcgcactggctcccgcaccgccgctcgggggtcttgggctgcgcaggtgccgacgtctccatggcaaccgggcgtgggttgctagggctgagcccggccggcgcgccggcgctgcaattggacctagggagccgggtgcaagagtggcctgttcaggtcgcagagcaagcgggtctggatacactccggtggcgcctccac

SEQ ID NO: 336184 - DNA, 784 bp, Homo sapiens
  chr19:46992624-46993408
  hyper
cggccctcctcgggccccctgcttgccggacttttgtcccccagcaggtctcaccccctaatgcatggatttcgtcctcatctagggagcgtaaccccagcctccccaccgcatgctccctgcgggagggtcctgtttcctgcaccaagaacagggcctgggacgcgccagccctggataaatctcatggactgcgcggatggcgctgagggctcctcccagacagtcgccttctctcccaggagggggcaaccgcgctccgctccacccgtcgccagaggctccacgcgcgggacagacccggctgctgcagcctgtgctggtctctgtgcaccgggacccttccctgcaggatctcaaggcctttacgcggctgctccttcgaccccaaacactcctccccatccccgccggagcactccctccaggaatgagggaatgaaaacaatgtttctttccagcacattccccaccaggcctatctgggatctgactcacccagtccgcgtggttcattccgaccgtcagtcattcaacaaataacagccgccgccgcgtgccaggcacggtgttggggctggggacacgaaggggaaaggccaagccacactttttccctacggagctggccctaagccgctctgccgcgcctctccccgccacgcccacctgcccccatgccgcataggtccccacagccaccgctcagggccctctgcaggggctgctgctgctgcaagcccacggggcgctggggggagtttgaaagcaggaggaaagggac

SEQ ID NO: 336185 - DNA, 825 bp, Homo sapiens
  chr19:46996431-46997256
  hyper
gcaggccccgagagcgccacgaagagccctgctcgcctctgcaggtgcccggcgtccacacacacaccccctccgggggcaacccgggcccccaatcctggtccacttggcgcgtccccatctcggccctgcgctgctgcctcgggcgcccacttctctttcctcctcccatccgggcttcctccgtcgggatcgctggcgcccccggcctgcgagggcccgagaggggaacgtgacgctggcaaaacgcggcccgggcgcgctgtgaagcgaggagattgcgtctgcggaggacaggaagaggggaggggagggcgggggccacaggcgggcgggtgccctgcggggcctgctcgcagcctgggcggcttcttggggggccactagcggcatttagggggcagcctccggccccgacgggccttcttcccgcgcgcggccttggatccagtgggcgcctggcccttggcctcgcctgccctggcatgggccccggcgcccgcgctccccttcttcttcctgcttcctgcggcgtcgtcctgggccgagccccggctcccggctttcttctcgggagtgacgccccggcctcggcctcggccgcccgcgcgggttttgcgggccccggaagcggtgggaggcgcgccggccggagtcaggcccctgggggccgtgcgcgccctcttggcccggggcttcctggatgccctgtcctccggctccgacgcctcgctctcggtgtcctccgactcctcctcggactgttcgtccgaagcctcctccgacccctcgttggaccccatgttctcccgggcggccaggagc

SEQ ID NO: 336186 - DNA, 68 bp, Homo sapiens
  chr19:47040909-47040977
  hyper
cgtgtgttgatgactgcgtgtggagcgcccctgctggacaatcacagaacagcacgactgccctgacc

SEQ ID NO: 336187 - DNA, 203 bp, Homo sapiens
  chr19:47137324-47137527
  hyper
cggagggctcagagcagaacacaaaagaggcgcttgtcgcggaaggggttctccgcggcgggtactggcgtcaccagcgggtcatctttggcatgcgtctcgcagaaagccaggagttccgctgctgcctgcgacacctgcgagcacccgggtggagatgtcaccgccctgcccggctccttggagccgcccacttaggcccc

SEQ ID NO: 336188 - DNA, 584 bp, Homo sapiens
  chr19:47137787-47138371
  hyper
ggccgacacagccccggacagaccgcaggcccagaacccccgccctattccccaccccgacccagcaccttcatgcggtcgatgttcacctccagcttcagctgttccaccgtcttgcgggcctcggcaatcttggccatgttgttggacatggttgcggcggggaaggggttaaaagacgcgcgggagtgggggctgtgggggtaggttaggatacgtctgggtcccgaggtgggggcgagagggcgggccccggtaacaggtgcgagggtggaagggcgcgtgaatggggtggccaggggctggtggagggagggacagatgaaggggacaggaacaagaggagcgatggaggggtgcacggatggaggtagctaaggcaggtggggagagagcagggaggggcgagggagggaaggaggggcgcacagatgggaggctgagacagaaggacagggccacaggtgctggatcagaatccaggtgtcctcacccccgggggcagagcgagagccaggaggggggcccctcccccaggccaattagcagtggctccagggagaactgggaattaagatcgcggc

SEQ ID NO: 336189 - DNA, 347 bp, Homo sapiens
  chr19:47523636-47523983
  hyper
ggctggggctcgcgcgccggggtcttcagggaggaagttgtggtcgtggggatgtggcggtccgaacacgtggcgccatcccgagaggctggggggatccctgggcaggacacaggatgggggtccctgccctctgccccctgcctccttagcccagccgggaaaacagggtgcagatccggggagtcagacaccggggatgggcttggggggcgggtcctcggggcagagggctccgggggctggggcgtgcgtgcctggcccgggaggcgcccgccccccgcccggcttgggcatgcttggcacgcagcgcgcgggccggttcgatccgtatgcgcgccgcgtgc

SEQ ID NO: 336190 - DNA, 83 bp, Homo sapiens
  chr19:47676020-47676103
  hyper
cgccaaaaaaaaaaaagagaaaagaaaaaaagcacatatcttcacggatgacagagttctctaggacttgctctgtgccgggc

SEQ ID NO: 336191 - DNA, 990 bp, Homo sapiens
  chr19:47729541-47730531
  hyper
ccgcgggccacgggcgcgcagctccactcctcggcggcctagtccctggccctggccctggccctggctcgggctccggctatgccagccgcggcgcggagtccttgggcggctctgcgggcgcgcgattcccccccacccacttaccccccacctgcctgtccgcggagcgacccagccgcgcagggcagcagctgccgcacatctggcgggggccgcctgccgccccctcctccggcggaagtcccacctgccgtctaccccacccccagcactcacccgccgctcgtactgtgcgttgaggtcgtccgccatccgccgcagctgggccccgatctcccgggcccactgttcctcctccccgcggactcccggggccgcctgggtgggaccgcccgccagagcccccggggcgctgggcacgggcgactccaggtgctgctccgccagcgagagcgagggctgaggaccttggagaggcagaggggcgcggtcagcacccaccacccctccaggcctcgaggtgtctcggcctgctcccctctttcccagccactgctccccgcctcatttctagtgatcccatcgctagtgagtcaatttctcagcttctcctccacaggcaccagaaagcaagaagtacctggggacgccgctctggggtcacctgtctggccagctacgtccccacggcccttgtcagtgtggaaggtagacggccagagaggtgaccccgggggtggtcaggcttaacgacctctattttccaaaggggccacattttgccttttccatgtgacaggcagggaaactgaggcccgcccttagggagtatcccaaggtcacacagggatacagtgactgaccccacccagatcacaagcctcaggtctcctgccctctcgtgtccaaccacagggaagccacacctccggatgtggcagaggcctagagaccagaaggccagagactgtggcagcttcagagcgc

SEQ ID NO: 336192 - DNA, 287 bp, Homo sapiens
  chr19:47731303-47731590
  hyper
cggctgggcccgccacctccccccgtcctctcccacttctccagttcctccgagtctccagccctctctcttcccggctcctatcaccccgggggcggggcgggcactcaccgtccgggcgcgggcctcggggccggctgcggggacccccaggccagcgggaaccccccagggcggcggtgacggcgggtggggcggtgggggcgcagaggtaggcagcgggcagcagggtgggggcggcgggggcggcagccaggccgggctcgcagaggccgcaggacactgcc

SEQ ID NO: 336193 - DNA, 536 bp, Homo sapiens
  chr19:47742713-47743249
  hyper
gtcctggctttccgcggtggggaaggggtctcccgggtcccctcggtgtggccggccctgcaggccgggaggctggaccggggccgggtgggggctgggcgggggcgcgggcgtccgcagggtccgagcggccggcgcgcgtgtgaaggttaccgcttcccggcggggcgggggccgcgcgctgttgctggggtctgcggggcctgcctgcgcccgcgccccccctccttcccggccagccagtgagcggtacccgccgccgttgccaggggaaactcgccgccccgttacccagcaacaagcctggcccaaccaggcgcgaggaccccccaggccccgcccgccgctgcccaccgcgtgcccaatgccaggcgggcagagccggcccagctcccggagacggcgagcgcgctcattggccaccgccgcgtccgcccggatctgggggagccctcggcgcggggggcggggaaccgggccccggggagctgccgggcgcgcggcctgcaaacctgcgaccggctggggtgataccc

SEQ ID NO: 336194 - DNA, 654 bp, Homo sapiens
  chr19:47776511-47777165
  hyper
cgaactggatgagagacgtggctagacgggggaggggtgctgggccgggggggaggtgggaagactgctcccctccgctgactcagccccttctctcctcagaggcaggccccgaaggccaggagacggcggagatcaccgacttccagagggtgcgtttctgcaaggtggtggcggcccctccgctgccgggggccgctcgctgaccgcgcccgccggaccgcggcctccgcgctctgcactaacctcccaccgcctcgctcctctgtcctctgcttctgccacactccagccaggagagggttaaatctaaggggggaggagccagggtctgcgagccgggcggggccagggcagtagtcgggtgcaggccccaccaacgggggacgtcacggcactgggacggctgggacgcttccgcgttagtctcccatggaggccctgggcggctcgagccagtcttcaggccgaatctcccgcctccaggattgcatccgaggcctggcagccggtgacacttccgaagggcttgaattactcgggcgccagccctgtcgtattaaacgcagtgcttccgctcacccttgaactgtgtttctggagggggcaggctgggtcgctgtgcttggcgggcttttctgtggcggaagaggc

SEQ ID NO: 336195 - DNA, 531 bp, Homo sapiens
  chr19:47922898-47923429
  hyper
cggtgggagtcggggaggggcaggctgtggggggaggagaggaagagaccgcggccctggtgcccccaggcccctcctctcctacccagggctggggttcctgctccgggtttctcagtctccctctttcccagtctctctctccttgtctctctctgtctccgcttctcccgtcctttctctcctctggctctctgttctccgagccccctggacacaccacggaccccctccctggccatctccaggggtcacgtgggaatctggagtctggtcccaccgtaggctctcccctctctgaggctcgattccccctctgcaggatgggcagtgcgctgggggcggcgggggtgggctgtggataacggagaaacagttaagctagagggtgccaggactcagggtcttggctgagtctgggggtccccatgccggcgggctctgcccccgtggctgtcctgcggtgaggctggccgtttaaggcagtccgaggggaagggtctggaggccttgcctttcctcaaggccggc

SEQ ID NO: 336196 - DNA, 551 bp, Homo sapiens
  chr19:47933275-47933826
  hyper
ggtccaagagcaggtgcagccgagtccctagccccgggcgggcggtggggacgagtctctgcgcgaggccctagaagccccggatgtggcagtacgcctccaggctggcgaagaggatgtacaggagccagaggcccaggaagagcgcggtggtggcgagcttgggtccgcgcgggccgcccagctcgccgccgatgtgcggccggcgccggtacagcagcacggcaatgcccacgaaggcgaagacggtgaagagcgtgacggagaaggccagcgtgccagtgcgcacctcgaaggggcggccctgcaccgcccagtacacggcggccacagaccaggcgacgcccaggccaaggaacacgttcaccgcgttggagccggtcacgttgccgatggacgcgtcggcgcactggtcctgcagcgccgccaccttgctggcgaacgtgtctgcgaggcagagacatacaggtcggaggggctttgcgccgccacccacaggggcgggcatccgcctgccccctcccagcctttcccggtcgcctgctttctgc

SEQ ID NO: 336197 - DNA, 98 bp, Homo sapiens
  chr19:47947717-47947815
  hyper
cgcccccgacctcggcgtgggctgtgagctgtccgcggtgctgaaatgctggggccggcgaggagggagggtctcccgagacatgctcctcacacacc

SEQ ID NO: 336198 - DNA, 343 bp, Homo sapiens; identical to SEQ ID NO: 240666
  chr19:47960606-47960949
  hyper

SEQ ID NO: 336199 - DNA, 242 bp, Homo sapiens
  chr19:48229040-48229282
  hyper
cgcccctgtctctccactcccactccaggctacgacttcccggccgtgctgcgctggttcgcggagcgcgtggacctcatcatcctgctctttgatgcgcacaagctggagatctcggacgagttctcagaggccatcggcgcgttgcggggccatgaggacaagatccgcgtggtgctcaacaaggccgacatggtggagacgcagcagctgatgcgcgtctacggcgcgctcatgtgggc

SEQ ID NO: 336200 - DNA, 632 bp, Homo sapiens
  chr19:48901504-48902136
  hyper
cggcgcctgtccctcgctgcatctcctcctctgtgcgtctctttatctcgtctccctgtccctgcgtctcccgtctgtgcctccctctcctccccgtctctcccggcccgggcgctcagaggccgcccggcggggcccgcaggcgatgcgcggcgccggtggcccccgcggccctcggggccccgctaagatgctgctgctgctggcgctggcctgcgccagcccgttcccggaggaggcgccggggccgggcggggccggtgggcccggcggcggcctcggcggggcgcggccgctcaacgtggcgctcgtgttctcggggcccgcgtacgcggccgaggcggcacgcctgggcccggccgtggcggcggcggtgcgcagcccgggcctagacgtgcggcccgtggcgctggtgctcaacggctcggacccgcgcagcctcgtgctgcagctctgcgacctgctgtcggggttgcgcgtgcacggcgtggtcttcgaagacgactcgcgcgcgcccgccgtcgcgcccatcctcgacttcctgtcggcgcagacctcgctgcccatcgtggccgtgcacggcggcgccgcgctcgtgctcacgcccaaggtgcgcgcgaccggggcggggc

SEQ ID NO: 336201 - DNA, 216 bp, Homo sapiens
  chr19:48918115-48918331
  hyper
cgcagccctccaccggatgccccccgcccggaaaagcgctgctgcaagggtttctgcatcgacattctgaagcggctggcgcataccatcggcttcagctacgacctctacctggtcaccaatggcaagcacggaaagaagatcgatggcgtctggaacggcatgatcggggaggtgagggggcggacgggaggcggggaatcttcggggcggagt

SEQ ID NO: 336202 - DNA, 193 bp, Homo sapiens
  chr19:49014628-49014821
  hyper
gccctgctgggctgcgggaagacgcgcaccaggtgacggggcaggacccgcagacagacccctgggcagacagcgaggccgccgcgggggtgggggccaccggacagactgatggcccgacagactcaccggggtgggccggggacgccaggcagccggaggcggagacggccgcaaggaggatgagggcgcc

SEQ ID NO: 336203 - DNA, 460 bp, Homo sapiens
  chr19:49127280-49127740
  hyper
cgcgtgttagagtctctgtctttgcagctaaagacctcctccctcacgccccttttcttttgtgaattcaatggatgagacaggcccactctcccttaacaaagatggcgacaacggcgctgtctatggggccgcgacgtcgtctccgctgcgcgtcggccctcacccacgatggcggccagtctcccgaagcgcgaggccccgcccagctctcggcctctcccgcggccggtccctgcaccaagctcgcgagctgactggctccaccccccgcgccctcgtattggtgcggcccaggccggctgcacggccattggctgagcggatgcacaccctccccccacccctaggtctgatgggggctgttggtgctgacttgcgggaccgcctggaggaggacccggcgtgtgaggagggtgcgggggtcggggcagggaccggagtctaggggactgaggga

SEQ ID NO: 336204 - DNA, 480 bp, Homo sapiens
  chr19:49199703-49200183
  hyper
cgcgcacagctggtggtgacccgactttcctgcctccaccctggggctcctcagaggcttcatggaacccaaactgctggtctcacctccgagccctgccgtcgcccagggagggcggctccgtccctcctgcactccctaatcccgctctgaatcaccgcttctgttctgggtcggagaataaaggtggggtttccaagtgatggccctacgttattgtctgaagctcccttctcctccccagggtggaagtgataatgccgggaatccgggaatcccggggaggtgcaggaagacagcgagctcgaggcagtggggtgcgactgagccggatgtgctgagctgcccggggcacggggcggttggggtagagaaaggctttcagagctgggggacaggacggggccccgggtgagcggagagctgggttatttcacgggaacagctggtgacaaagccggaggggtgtgcggggccggc

SEQ ID NO: 336205 - DNA, 564 bp, Homo sapiens
  chr19:49217005-49217569
  hyper
cgatgccccggttaggaagcaactgcggatggagaaatttggcgtgaactcgggactgcgacctggacctgactggagaaccctagccggattcaacccacaccctcttacctgcgccctccggatcgcttcctgcagctcctcctccagagtcagagccgctgagcccggccctgaggaaggggtcagggctggagctgcagcaggagccggagtgggagttggagccggagccgtccccggggtatccgcggcacgtggaagaggtggcctgtgagatgctgcgctgggcttgacctagagcagccaagagggcgagcgcccataagccatgcccacagggcgcaaccccacccactcgcaacgtgtggctccaccccttgatcctctcgcgacccctcgctcatcaacccctttggcctcgccccctattctttcattggctcctcttctctaaagatccgccccctgttagtctgaaccacgtcccctcgccttcaaggcttcctaccgctggtcctcgcccccacacttcattggctagttttttcgacaccccgcccc

SEQ ID NO: 336206 - DNA, 570 bp, Homo sapiens
  chr19:49242360-49242930
  hyper
gcaggtgctccgcccgccactcgccgcttcccacgcccgccgccgcgggccggcccagagcgtcgcacaaagcgaaggcgtccacgcagctgctctcgccggggccaccgccggggctgcctgctaggccgtagcgctctagcgcctcggccacgagctcgcgcgccgtggagcgcgccgtggccagcacgctcttgtagttggcgcccgatgccagtccggcgccgaagatcttgaggacccccggaggcgccgtggcgcgggtagccagcgggggctcgggggccacgcccgccgccagctccggcagcttcttctcgctggcccagcgctgcgcgccccccggggtcccagggcctcctgcgccgctggaccccgtggtcccggtccccgagccccggaagagctgggagatgcgcttggcgcggctaccggaggctcccccggccgccttgacagcgcccactcgccgcagctccacgtgcggcgggggcggaggtagcggctcgctgctgcggctccccgtgtccgacgaagaagacctgggagtccgccggggaacagagtcgc

SEQ ID NO: 336207 - DNA, 103 bp, Homo sapiens
  chr19:49244884-49244987
  hyper
cggggccagaggccacgcccccggcaggaagccacaccccgtgccccgaaaccacacccaacaggaagtcacgcccccatcgccaaggccacgcccccgccgc

SEQ ID NO: 336208 - DNA, 675 bp, Homo sapiens
  chr19:49255778-49256453
  hyper
cgcttttcgtggccggagcgcaccctccgcaaaggcaggccacatccggccgcccctggaacgccaggcgtccggctatccggcccggcagccctcccctccgcgcagcctgtccggactggcagcgagggcttggggaggagaggaaggagagggcgcggccgggagtctcgcagcgtccgccctcccgggccgggcggatggctggaaggtggagccccgcccgtcacttggcgccgagccccagcgccaggggctaaggcgatggcccctgggcccaccgctccccagatcggggatgcaggggaccgcgccctgcccctccgccccgtcattgacctgcgcgaaggcttcacccagggcaggctacctggcttctgagcagccgcagcatcattgcgtggaccaggagacggagcgcccagttgcaatgctggagccgggaggtccaatccgccgccctctctcttccggtgccagggcttagagtcggcccccgacacctgggtgcttcgagcctggccacgccccagcggctgggcagggcccccgcacctggtcccggcgagtggagcgatcgtccgccctctgccgcgtcctcctgggggatggagaacctgtttgccaggctgccgccggagcgcgcgagggcctccagcctgcaggtgctcccgc

SEQ ID NO: 336209 - DNA, 550 bp, Homo sapiens
  chr19:49467064-49467614
  hyper
cgatttgggtctgagccaggtctagttctgagggtcccaccaaaaaagtcggggagtgccaaggggatgaggtcagcgagtggccccacccccatccgtccccgcgggggccccttcccgcgctgagctcagcatgactcagcagtcgctgcctgcaacaaggaccccagataccggcctggcggggcatctgcagatcccctcggtcaggggctgccccgcctgggctgttcggagcagctcctctgtagggcagggcctgacctcaccccacaccccagtggcttcagctccctgcccagcgcacgggctgcctccatcagggcacttaagtagagtcaaggtttgcgccgactccgtctcccagaaatcaacgtggaccaggcccacttaaaaaatatgcattagtcgaagacagacgtctcgtccataggtccccagactgtttgtccacaacgcagggcttctctttgtgggcctgaaggagcacacgtcaggcaagacacgagggcaacttcagagacactgttcagggccacggagaattctc

SEQ ID NO: 336210 - DNA, 851 bp, Homo sapiens
  chr19:49575272-49576123
  hyper
cgccccgcctctcaccgggccggctgcggctgcagcagcaagccccgtgccgtcgcggtcgtcgcggaagtcaggcagcgtctcgaggcagaagacgacgatggagacgaggatgaccagcacggagactacggcgagcacgcgcgcggcctgagagctctcgggaaactcgaaaagcagccacagctggcgggcgaaggcgcggcggggcagggggcgctcgggcggcaccgggcagccctcgtcctcgcgcaggcgtgccagggccgccgcgcccagcccgtagaaggccacctcttccaggaagacgtcgagcggcacgtgcgccggccgccgcagccgcccaccggactggtagtagtagagcacggcgtcgaagctgggccggtgccggtcgaagaaatactcgcggcgcgcgtcgtcgtagaagcggccgcggcgcgctgggtcccctagcagagtgtccgggaagcggcccagcgtgcgcgcccgcgtctcgaagcgcagcccggccacgttgagcaccagccgctcgcagcagccgcacggcggcgggcaccgcggctccatggcgcgcgcagccccggcgacccgcgaaccgacgtgtggccccgacgcccggccccggtgcggccccgcctcggccgcctcggccgccgccgccgccgccccagcccggtgtccggtgtccggtgtccgcgcgtaaaaatagcccggcagggcggctagggcgcgagggagggggcactgtgaccccggcggggcggagggcgacagggcgaccgcgcgccctctgccgggacgcccgccctgccctgccccgccgccgccgccgcccgcgcctgctctgc

SEQ ID NO: 336211 - DNA, 255 bp, Homo sapiens
  chr19:49646052-49646307
  hyper
cgctgcagctgtgggtgggcatgcctgcctggtatgtggccgcctgccgggccaatgtcaagagcggtgccatcatggccaacctgtcagacacggagatccagcgcgagatcggcatcagcaacccgctgcaccgactcaagctacgcctcgccatccaggagatggtctcgctcacctcgccctcagcccccgcctcctcccgcactgtgagtgtccggcggccaattccagccttcgcttcctcagagcccc

SEQ ID NO: 336212 - DNA, 810 bp, Homo sapiens
  chr19:49652236-49653046
  hyper
cttccgtccccagacgtgatggtgtggtccaatgagcgggtcatgggttgggtgtccgggctgggcctgaaggaatttgccacgaacctcacggagagcggggtacacggggcactgctcgccctggacgagaccttcgactactccgacctggccttgctcctgcagatccccacgcagaatgcacaggtgagctgccgctgggcccggagcatgctgggcgtccccacctcgcagactgcacgctccaaccgccccctccacctcctctttccaggcccggcagcttctggagaaggaattcagcaaccttatctccttaggcacagacaggcggctggacgaggtgggcgcggcaacagctcagagggctctgctcccagcggctcctcgagaggctgagctgagggggcggggcctgactattaatggtcacggttggaggcggggccaggagaggggcggggttaaaggagaggtgagacccggagaggggtggagtcaaaggaaggggcggagtcagacaaggcaggagtccctcaccggctgtccggctcctatacctaggacagcgccaagtctttcagccgctccccatcctggcggaagatgttccgggagaaggacctccgaggcgtaactcccgactcagctgagatgttgccccccaactttcgttcggctgcagcgggagccctgggctctccggggctccctctccgcaagctgcagccagaaggtggggggctcccaaatgcgacagcccttcctcgcttccctagggtggggcatggaccacctcagtagtcc

SEQ ID NO: 336213 - DNA, 435 bp, Homo sapiens
  chr19:49660929-49661364
  hyper
cgcggcctgggacccgccctctccccgcctcccgctttggcgtctccaagactccccgccccccagacctcgccccgccccaggctaggctggaaagtggaggatccggtttgctctgggcgggtctggaagcagagccggcggagggagcgccggggccctgggctgcaggaggttgcggcggccgcggcagcatggtggtgccggagaaggagcaggtgagcgccggaccagggtctgcgggagcgcggagctggggacctcgcctccaggctcccagagaggagggcgctggacacccagattcctgggtcagacggaggagggggatgggagggtccaggttccagggtccagggcatgggggtcgagactcctgagtctggagcgggagggcgctgggggcccggactcctgtgtccgtggggagcgcac

SEQ ID NO: 336214 - DNA, 311 bp, Homo sapiens
  chr19:50016242-50016553
  hyper
cggactcctgggtccgagggtagagcggttgggggcccggactcctgggtccgagggtagagcggttgggggcccggactcctgggtccgagggaagagcggttgggggcctggactccggggtctgagggaggaggggctggggcctgaggggggcggaaggggcgtggcggagctcggggccgggactctcagcctatcaagtgtctgtaattaattaaccaactgagatccagttcaggggtgaaagttcttcaggtacgaggagggcattgttgtcagtctggaccgagcccgcagagcccctcctc

SEQ ID NO: 336215 - DNA, 805 bp, Homo sapiens
  chr19:50316249-50317054
  hyper
cacctgctgacgggcgggggcgccgccgcgactgctcctgcagaatagggggaccccgctggaggccgcgaggcacagcagatgcacagtgccgcccgtcccctcctcccccatttaggactcccaccgcggtccctcacgtggggactgtcagtgcgggtcttggagcatggcggtaatcagagtaactcggcctgtggtccggagccgccagagggcgagatggggagctgattggaagaggattaacttcccgccttcttcacccaactcaaacagaccctcaaaccctattcaggcacctcccccaaacccattaggttctcttccgccctagccggaagtcacggtacccctaacaaagatggcggcaaattgaatttgcaaagctttctagtttctccgaggaggtaaagagaaccaagaagccggattgaagatgatgactgcgccaaggcgttgcctagccaccatcctgtaggctttgatgatttacattctaaacggaaaaaacagctgtgcccggatcaaagattgcgatggtcccaaagcattgcctagcaaccacattccctgtaggtttccagtatatagtagtaaacaatgtgccctactcaaagatggcgaccgtggcggggcgttgccaagcaaccaccattcagcctgatatccattccaaggctgtaaacagctgtgccctgctcaaagatggcggcacgtcgaagtccgagcaccctccttggggcgaaatcgagaaaaacaccatctcccctacaaccttcgagggtggttgagtccagcgatc

SEQ ID NO: 336216 - DNA, 187 bp, Homo sapiens
  chr19:50353790-50353977
  hyper
cgaatgagcgaatccacggaaggccggggagcgacgtgagtggcgagaagcttggagtcgccagggacggcgggcggagcctgggcgccggggctaatgggcggagcctccagggacagctggccccgcccaggccgcgcggggcccgctgggagttggagtcccttgcccacctcgccacgtcacc

SEQ ID NO: 336217 - DNA, 543 bp, Homo sapiens; identical to SEQ ID NO: 240726
  chr19:50393346-50393889
  hyper

SEQ ID NO: 336218 - DNA, 712 bp, Homo sapiens
  chr19:50553779-50554491
  hyper
cggctcctggccacgccctaaccccacccccgctgcctctaaacccgtccccacccctgcagcctcacaggctgccgtcagattctcaagcccctattcctctcggtggcctaaatccccaactgctcggggccacttttcaggccaaaatgggcccaaaatggggagggcaagtgatgaatgtcactagacagtggggccctcaaggacctggcaaatgggggcttggacctcggatcggcctcccacgcgaagcttgctccccaccagcatccccacgttggtggcgacgctgccccggccccacggatacttccgcgcctgtcagactccctgatgaactacccttcccagagtaccgcgggagctcgggctcctgagggcgacggtcctctgatggcagatgcgggagaaactctggcgtcaggcggccctcgcgtggagcacacgaagtcgtggcttattctggcttcagtatgtggggtggagaaggcgatccacgcagctgcgtctatttcctgtggatcaatcgcaaaatacgttctgtaagccccgcccccactgcgtgcgggcggcttttgtctccacggcaaccgtcaactctggaaacgcctgtctttctccatggcaactgtctacgccgcaggctggagctgcccattaccggagcccgtaagcagtatgggtgctggacaaacagcgtgatcgggtc

SEQ ID NO: 336219 - DNA, 666 bp, Homo sapiens
  chr19:50706518-50707184
  hyper
ggtcggcccccccacgccggcccttacaaaggcccccattcatgccttgcgcacaaagcggcccattcaccctggccccttgggcctcccgcccccggccgccccccgcgcctcgctattggtggcgccccgtgcccatcaggcctcggcttccacccccgaccgcgccgcctagctccgcgcccgggccgcgttcttttcccacggctggcacccttcgacaacttctgattggcccagcccgccagccgctctttttgattggcggctcccgtcccccaggggcggggccgtagcttgccgcagcgggcgccgattggcctctgctgctctcttgggggcggggctgtcctggcggacacgcccctctttctccccaggccgaagcctcgggacggccctggaagccggtgagtgcccggggccggcagccctccgggggcggcggaacgggactgagccaggggaagctggagcctgggggctgcgatcggggcccgggagcccgggcaggcggccggggacggcggggaggtgacgcggacactcaccttgggcgcgcagcgggacggcggcgagggaggtgggggggcgggacgtctacactcccccaactccagttgccgccgtgtgcgaggcccggtcggggtcctcgttgtcagcccc

SEQ ID NO: 336220 - DNA, 378 bp, Homo sapiens
  chr19:50708476-50708854
  hyper
cggggtttgaatcccgggaatcctcagccttctccgcggcgggccctcgacctttgccctccataagggggaggagcccctggcgccgccgccgccgccgcccacctggcaacaggctcaacccccgccttcccccggcccccgtcagaggccctgaagctccaggcccgccccgttcccagccgggcaggtgctgggtgacatcagagccgggctcccgccctgtgacgcgacggggccccgccctgcgctggaccgcggaggtcgctgcacctgaagagaacggggattcccgcgccctcaccccatctccccgctccggtcggcgcccccaggtagccccgaggatctgcgagttgagggggcggcgacacaggc

SEQ ID NO: 336221 - DNA, 1124 bp, Homo sapiens
  chr19:50815346-50816470
  hyper
ggaaggggccacgccgacccctccctccctgccctgcgggtgggctgagaagacccgccattagcaccagagttggacgatttgcagacctcccctccccacactgtctccgaaccccgcccccatccctgagagcgccccctcaccactccccccaccagcgacaggctaggcccgccccgcccacatttgagtgagagaaacttattgctctgtgtgtgtgtgtgtgtgtgttggggagggtgagccgcggagctcaggaagaccccccgccattcattcctccccaatcgccccgccccctggcccgtgtccgtgcgttcccggagcgcaggaggggtgcgacatgcgtgtggggggcgcgtcatgcagcgcatgcgtgtaggtgcaggcaccctggcggccggggggaaaagggggagccggacttggaaagagtccctttagctcgctctctccctccccgaatcccacactattgacttgggggatggggtgggaggggaggagaatcacgttttgtagaagtttatcatgattgtggttattttgaaaagctgaactcaaaagctgggtacgtgtggcggactggcgagcagggggagacgttgggaagaggtcagtaccctttggaaaagaccctcaccccctttccccgcctccttcggctttcgtgaaggtcaggggaaacgggggggcttgttaaagaagttgaaccctttggcaatataatcagtccccaccccgtaccctggtgtctggagcccctagccctttgccccgcccccaccaaaacccgccccacccctcacccctgcttcaccagggtttagggtccgagggaaggatgggggggactcaaaatgccccttgcataggaatcgttgcatcgagaatcgtgctcagtgacgccccccatccaccctcgggtggggggttcctgaggccgtgggagcagagggagggaggtggctaattccgtgggaccccggctccaaaaggggggtccgctaaagagtctgggaccggtgtggtctctgggcttgggggaggtagcgcatccttgagccaggataggaggtgggaaatgattttccacccgcgagcgtgacgcggtgaggacc

SEQ ID NO: 336222 - DNA, 668 bp, Homo sapiens
  chr19:50818506-50819174
  hyper
gagtcagtcaacatcgatgagaaagggggagacatcggggaggggggagagactccggattaggaggcaggttggtgcccaccgagcctcccccgccccattcccaccacagtccaccgcccttccccccctccactggtcccctcacctgaggcaaaaggtggggggcagcaaggcgggatggtgggcggcaggggcgtggggaggggctgggtggaatgcatgtgggagcagccagcggagagggcagggaacggtgcggccgccgtagcggggctgggggctgacctagttgtagggaaagagagcaggcagggggtggggtctgcaagggggctgagtggagcgaagctggcagtgcccttggggaatccgatgagaactccaggagcagtgggggggggtggggggggagggaggctcctccagaagattctaaggacggggtcgggggtggggggcggtgaggcggagggctggggagagggacatctttaaagggtccaagaaggctctgagcttctgacgggtgcgggaaggctctcacaggcatctcacagctaatgggactcaagatccagcaacagtgtgtgtggtttctgcaaagcctggggctgcctgcagggttctgcacccccgcagggagctctgtggcttttccaggcaac

SEQ ID NO: 336223 - DNA, 330 bp, Homo sapiens
  chr19:50828897-50829227
  hyper
cgcagagcgcatgcctagttccccgccccctccgagccgggcgcgcggcgctagctgcggcaccgcagtgggggcgggccagccgggccggggggcggggcgcacggcggccagtaccgcggacagctcccccgccgcagtgcgcagccgcagcggctaggggccgtcttaaccccttccgggccggagcctattcaacgcgcagccgcagtgttgctgctttccggcgggaggccaagggccaagagtctaattaactccttccctcccagggcacagggaaaggtgggcacccgccgcagtgcgcagctgcagaggctggacggcgtc

SEQ ID NO: 336224 - DNA, 564 bp, Homo sapiens; identical to SEQ ID NO: 225992
  chr19:50831535-50832099
  hyper

SEQ ID NO: 336225 - DNA, 694 bp, Homo sapiens
  chr19:50832540-50833234
  hyper
cgagtcggggccgccaatgagacggagcgattggctctttctaagagagcagggaggaggggcggggcggggcgtcaagggaggcgggaccggttactactaattgtgttcggcagcactggtagccaggggaaggcggggctagatacgatagagagagaccttactgaactgaaaaaagtgcgggcggggtagagggaggaggggacacatccaagctatttaaagacgcccgactggcctggaggggcggggccaccatgagagaggccgtcctgattgggctgagaaaggggcggagagaaacaaaacagatcgcacgccctcacctaaaacaccgctaggcaggacctggtggggaggagcattgcttggaagagacagggccgcagaaagtagaaacggtccagatgagactgcatggggcgggaactagagatggaggactttcccgcgcaagggggacaggctggactgaaagaggacacgggaagaacaaagacttagactcggtgagaaggtgttgaaacttgagagagtcctggaaacccgagagggtctggataggcctaagggagggagcggggctgaggctccaaggcgggcctggttagtcggggctgggcccggagaatgagtgtccggatggatgagtggtactgaggaaggtgagtggggtcgacaaatagaaaac

SEQ ID NO: 336226 - DNA, 603 bp, Homo sapiens
  chr19:50833813-50834416
  hyper
cgaggcgagaacttctaacgaacgctacaccgcggcggactgcagattggaggaccgagggtagatgaggactggtgaggagggggcacgcaaggaggcagagaggacgggagaggggagaggccaaagcgccaggaagcaccgtcaagactgaggcaatataggcaggaccgataaaaaatggggtgggctaggagtctcagaggtcgggttctggggaagaatggagtgaggggcggggccagaaaaaggggaccgcctcggagcgggccgtccccgccccctgggcggtcgtaggctccgagaggcagagcgcaggctcagggggctggggcggggccagcggctgcggctggggctgcggagggaggaggcggcgcctgcgggagcgaagggggcgggtcagggggctgcgggcgccctcgggcagcacagtttctggcccgccgcttcctgctgcaggtgcggcggctgattcgtatcgcctcccaaccccatcccacccccgctcccgtttctgggtttcttggcgtctctttttctcccttcttgagtatttgtgccgccgtctctgttcccacccctctgagtctccgacccctc

SEQ ID NO: 336227 - DNA, 1274 bp, Homo sapiens
  chr19:50836203-50837477
  hyper
cggttccattcggagccttggtctctggacaccaaaggtgaaaatgtgaggactctctgcctacgatccttcgtcccctaaaaccctccaagtaccttggccccgaaagctcagagtcgaggggaatctccccgctataatctttgggtccctggatcccaagtcccccgtctccaaaactaggattcgggctgtcttaccgcccccggaccctgagccttcgccccctcccccgtactcaccccaagtcgaggcgaggtggggatgggggaatccggggctcgagatggggggaggggtgacccagccccggcagctctgggcagcaagaggctgcagaggggggagtgacatcaccgccggaggaggggcagcaccgctcccccaacccaggggcttcaagctccgcctttatggcggaccccggggtcctggaatgccaaggcagagaggagaaacaggagacgaggtccgagggaacggtatccccgccccttagaacaggaactggtaaacccttaccaattacagccacccccgactgccacctgtggctgccgtcgcgacctgtcgcctcccacgcatgttgtggctgcgcccgcccccgtcagggcgtgaccacggcgtggactacaacgaccgtgatgctccacggagccaggagcctttgacgaaaggcagcgtaggcgagggccttcatgggactcgtagtacaaggcccatcacaagggtgcgccgtggagaaaaggggtgatacccttcgcctccctctcttcctcaactccgtgggtccatgcacaaagctttctcttcaaaaagtacgctctgaaaagaagcaacctaggcaggttcgttcaatggaaatattggatttttactgagtagcgctagctctgctacccggtgcgcatgcgcatcacctgggcggcacccgcggtactgcgcctgcgcggtctcgcgccttcccaggtccgctccgcgagggcgagcgcgcgccagtcccactcgtgcgccgctcttcatgtccccgcggtcgaagacggtcacatacgcccccaagaaaacgtcgccgaggatccacacaggtactggaggcgaagcgatgtccaaggcccggaagccggacaagcagaggcggacgtcaccctgagcaaactgcaaggcgacaaggcggcaactgggtgtccaggccgcaggaaccaccatttccctgggagtccgtgctctctccgcccccaaccccggggacaagaaatgtttctgtggccccttcc

SEQ ID NO: 336228 - DNA, 152 bp, Homo sapiens
  chr19:50979534-50979686
  hyper
gtcatgatgcggagcgggctttatgacgtcacacaagagcgggctcctgatttgtgatgacgtccctggagggggcggctcctggagatcaggccaaaggggcggccccatcctgctgacgtcaggccccaggtgcggacgggtgccagtgc

SEQ ID NO: 336229 - DNA, 77 bp, Homo sapiens
  chr19:51111319-51111396
  hyper
cgcgcggtggcctgcgggctcgcgggagctcacgcgaactcacgcgcgagctcacaagctgcggcggccggctaggc

SEQ ID NO: 336230 - DNA, 641 bp, Homo sapiens
  chr19:51142566-51143207
  hyper
tcccggcaggtctcgcgctcgcgctgctgcggcttcatagacccggcgctgcaggatctgctgggagttgaagtccttaatgcctccgggctgcagagaggatgggattttttttttttttttaaggttttggggggttaagatgctggggtcccaagacgcttcaggggaggggaacgatgtccgggacttcgaaaagccacggagccctaagtccttaggggccacggaatgaggaaacgatccccccgcgctggggatcggtgggcgaggggtgggatacacccaggtgtttcgggacccccttccagggccacgtgcccctcccccggggtggccagagagcgctgcagcgctcccactccccggcccgagatccacgcgcctctgcatctaccccgcccccatgcgccggggccgaccccagggatttgactggggctggggctgtggcaggaggagggggaggagcggactcacccggagccgccgctgccgccgctgccgccgccgccgccgccgcagccccgcgcgccagccgcggtgccggctcggctcctcccctcgccactgtcgcaggtccgcggctcctccccctgcaccccctccttcccccactccgaacccgcggcaagaaagcc

SEQ ID NO: 336231 - DNA, 1519 bp, Homo sapiens; identical to SEQ ID NO: 240745
  chr19:51161302-51162821
  hyper

SEQ ID NO: 336232 - DNA, 36 bp, Homo sapiens; identical to SEQ ID NO: 240747
  chr19:51197476-51197512
  hyper

SEQ ID NO: 336233 - DNA, 222 bp, Homo sapiens
  chr19:51198097-51198319
  hyper
cgccaccgcgggccggggcctgccggccggcccgcaaagcaggaggcggcgcgctccgttacctgtagatgtaccagacgctgcgccgccggggccccagggctggccagctggaggacagcgcggggggcggctgcggcagggagctcccaccggggccgcccccgagacccccgccgccgaccgcagacaaagccatcgccgccgcggccccagccccgg

SEQ ID NO: 336234 - DNA, 1241 bp, Homo sapiens
  chr19:51227641-51228882
  hyper
cagcatgatccctgtctgtccgcagtgggccgcctggccggcctggacgcaggcctgcaccagctgcacgtccgtctgcacgcgttggacacccgcgtggtcgagctgacccaggggctgcggcagctgcggaacgcggcaggcgacacccgcgatgccgtgcaagccctgcaggaggcgcagggtcgcgccgagcgcgagcacggccgcttggagggtgagtccgcggcgcgcggggtggaaaaaaatgagactatctgggccaggaatgggactggttgagaaggtgaccctaggtgtccggggcgggagagttcgggagagctgctgtgtgctagcggacggggttagagagctgggaggctgaatgcagggagcgggtgggcactccagacccgcgcggacccgactggggcagcaccacgccccctacagtccagctcccaccgcctggccccgcccctggcggaccagactctccacctcctggctcccgcggttctgaccacgcctcctcccagccctccccatgagttcctggccccgcctccctccacccccggatgttttgtcctcgcccccttccagactctgaatgcatgaccccgcctccttctctacccggccccgcccacaggctgcctgaaggggctgcgcctgggccacaagtgcttcctgctctcgcgcgacttcgaagctcaggcggcggcgcaggcgcggtgcacggcgcggggcgggagcctggcgcagccggcagaccgccagcagatggaggcgctcactcggtacctgcgcgcggcgctcgctccctacaactggcccgtgtggctgggcgtgcacgatcggcgcgccgagggcctctacctcttcgaaaacggccagcgcgtgtccttcttcgcctggcatcgctcaccccgccccgagctcggcgcccagcccagcgcctcgccgcatccgctcagcccggaccagcccaacggtggcacgctcgagaactgcgtggcgcaggcctctgacgacggctcctggtgggaccacgactgccagcggcgtctctactacgtctgcgagttccccttctagcggggccggtaccccgcctccctgcccatcccaccacccggcctttccctgcgccgtgcccaccctcctccggaatctcccttcccttcctggccacgaatggcagcgtcctccccgacccccagtctgggcgcttctgggagggctcttgcggtgcc

SEQ ID NO: 336235 - DNA, 186 bp, Homo sapiens
  chr19:51324279-51324465
  hyper
cgggctccccaggggcaggtggcctggcctgaagtccaaggtcgaggcccccttcccttcccagcaccctcccgcgcgtttctcgccccgcctcctccttcctcctccctcagttgccccacccagctcccgctgaaaccagcccttccctgtgtctctccagagtggagggatatcctgtggggc

SEQ ID NO: 336236 - DNA, 339 bp, Homo sapiens
  chr19:51416002-51416341
  hyper
cgctctacggatcttgtggagacgcataggtgcgggaaggggggtggggggtgagagggtgccgtagaccgcggagggtgcacggaggggcaggccgaggtcaggactgccgagaaacagcggggactcatcaggggagaggtggtgtttacagccacgaggccgggtgagatcatccaaggagtgggtgggtgtagaccgcggagccggcgcgggtgagggatagtgcccgcaggtgaccgcgacgaggcaggaatgtctctgtgtctctctgtctctcctgggtctctaacactctttccttctccttccttacttctttcccccacagcccacccc

SEQ ID NO: 336237 - DNA, 828 bp, Homo sapiens
  chr19:51520092-51520920
  hyper
cggaccctggcttctatccgttgcaggcaaccacctcctcctagagctcaaggagaatcagcgggagaggagtgacgggcccagaaatgcggaaaaggaccacaccgccccctggcggccacagcgcaagcccggtctctcctcctgctggaaggacaccggggaccgcacctccagctgtgggagttccgagagaccccgccctgcccgctcctccctggaggccgcctccacagccccccgtggcgtcctcggggatggatctcctcctacttgtttccgcagtgcgcggccgtcagcacccaactctggtccaccaggacacccgcgcagtggaacgagaggccgttgaagagcgagacctgccagggctgcgagccgcgcgcgcacggggagccataggcttcggggtccaagcgcgtgtcgttttgggggagcagcgccgcctctgcggctggagaaagaaaggggacggaatcaaagcacggagggcagggtctgggtttggggttggagctgggctgtggcactggactgcgttcggggacgggggacgcagccagaacgcgagggtggtagggaaatattgggggtttcgcgtgcaccgaagggaatgggaggagaagaagcgcgtgaaagtggaaggaagctgggatagggtagcgtggagtaatgagacagaatagggtgggtctggagggcagggactgaacgcagcgcgcctggagagctggctagaacgtcgctggtcgatagaggggcggggattgaacgcggcggggaggtaagggtgcggggatagaactcggggatcggggagaggaaggg

SEQ ID NO: 336238 - DNA, 1262 bp, Homo sapiens
  chr19:51521990-51523252
  hyper
agtgtaaaatggagcggggccgggatggggcggcgtaagaggaggagaaagaacgcggcgaagagtccacggaagagcgaggatccgggtggcagaaatcggacagggcctgagtggggcgggtcacccaggggccgagccagaagaagggcccagctgacttgggggcgggccgtgctccggagcgctgggtgggtgctggggtctcgggggaggagaggtgcgcggggcttggtgacgggaacacattctcctcccgcccgtgcctcccaccggcgcctctccccgccccctgcccccgaccttaccccagagttgcgccatcagcagcggcagcagcttcgccagagcccgggcgccagaggcggcggagaggtggaggtgcggagctctcatggccaggatctgctggggtgtgtgcaggggcgggttaaaacagatgctccgttagagacccccacctcgccgcgctcatccgcccagcctgggccaccccagcccgcaagcacccttttgacctgcagccgataaccccaggggctggcagacgggagattcgggctggaacagcggtaatgggcacaattaccctaatgacgcccctcgcggcatcttcccgtcctccctgtgcccgagtggagcgctctccgcgccccagctaccctggctgcagccacgccgcgcccgaggtttccccctccttcacgcgcggggtggggatccgaggctcggagccagtgggagcctctttctcaacctcacagcggggggacttccgcgtcccgcaggtggagaaaccgaggctctaagccggctcctgcctgtggcccgggggtccccacccatcctctcgcaatccaccccaacccgggtggggtgcaggtagcttcacctgggagtcgccgataggaaggagggaggggacccagacgtgcctctgccctgcctgtggtctgccgctggtatcctctgcccagggacccctggcgggaccttcccttttaaccccaaggagtccggaagcttctccaccctcccctacccccacccccgggctccctccctttccctctgtctaattgtaccgtgggtgaggctggcactcctgggtcccagattcctgctctgggaggggccctggaatacaggcttctcccagtgcccgaaacgcccccttttcatcccttttggaactggcttccgtggggattctccgggtcccggtgccaagaaggcttcccaggcgcggggagagggttcac

SEQ ID NO: 336239 - DNA, 609 bp, Homo sapiens; identical to SEQ ID NO: 240760
  chr19:51568030-51568639
  hyper

SEQ ID NO: 336240 - DNA, 501 bp, Homo sapiens; identical to SEQ ID NO: 226003
  chr19:51830799-51831300
  hyper

SEQ ID NO: 336241 - DNA, 187 bp, Homo sapiens
  chr19:51842647-51842834
  hyper
cgtaactcagccccttcctttccagctccacccacttctgccaggttacttcgccccctcctggattgcactccgagaagcctccccttttcccagatatctccgcccttccttgtggaccccttcccctttctaagacaattctgcccgctttctaaatgacctcgcccctttccctggtgactcc

SEQ ID NO: 336242 - DNA, 244 bp, Homo sapiens
  chr19:51925116-51925360
  hyper
cgcaggtgcggcgtgaggaccgcgtcctgaggagggaggggcgagggccagggtcctggagaggatggagagcccacgagtggctgcagctgagaccccgagggagcccaggaggttttgtcggaagaagggcgatctggaccttccctgaccagcgtctttgtgtcctttgagctccggacctggtcctgggttcctcccacctcgggctgtgctgcagttcaggacgccgcccccagggggc

SEQ ID NO: 336243 - DNA, 445 bp, Homo sapiens
  chr19:52074292-52074737
  hyper
cggaataaaagccctttgacgatggcggcctccaatatcataatccgtatgggtgcggccatgccgtcctccctaccaagtttctgaagttgaatgaaccgcggaataaaggtacgccgttatacgccatgataactgttggcggagcgtagcttcaaaagtgttagtgggcatgcgcgcggttcaacagcgcctacggaaatcctaacgggaatgtaacccaaaccggaagtggcctagagcgaccatttagcttctgttgttaagtggatctaagcctatgtcgcttactggacgctgaagtgattgggaatattagcagtgggggttctgtagggtcaggaaggggcggctggctttgggggagtgatgaggggcttgttgggggtgggggtgcgtgataaagggatttctcggctgaagacgaggctgtgaggtgagtgac

SEQ ID NO: 336244 - DNA, 653 bp, Homo sapiens; identical to SEQ ID NO: 240767
  chr19:52097285-52097938
  hyper

SEQ ID NO: 336245 - DNA, 692 bp, Homo sapiens
  chr19:52207100-52207792
  hyper
cgtaagggtttaaggagtgaggggaaggggtgcgtttagggcaggggagcgagaaggctcgggggcgggctcaaggctcagggccaggactccagggggcgtggtctggctcggggggcggggcttgtaggttactcagtggcaagccggagttgaggcgtttaaacccgcgtgtcccgcagctccggactcaggacttgtcctatttccgagatatgccgcgggccgaaggatacctggcgcggatccggccggctcagctcacgcaccgcgggacgttctcctgcgtgatcaagcaagaccagcgccccctggcccggctctacttctttcttaacggtggggcggggcgcggccgcgtgagtgagcggggtcgggagaggggtggggctcgtgcctggctgacgtgcgcgcccccgcagtgacgggcccgcccccgcgggcggagacagagttgcaggcctcgttccgggaagtgctgcgctgggcgccgcgggatgccgagctgatcgagccctggaggcccagcctgggcgagctgctggccaggcccgaggctctgacgcccagcaatctgttcctgcttgcagtcctcggggccctcgcatcagcgagtgcgacagtgttggcgtggtgagttctggggactccggagccccagcatctagctccccgctgtctcagatcccacc

SEQ ID NO: 336246 - DNA, 521 bp, Homo sapiens
  chr19:52222530-52223051
  hyper
ctgcgccacgcacacgcacctgcgagtcctcaccagcgcctccactgccagccgcccaggatcctccgcctccacctcccgataggctccggcgcccaccgcgcccgccgccgcgggttcccagggctggtggtagttgccgtcccacacgtacgtggcggggtcctcgtcagcgaagacctcgcggaacatgtcgaccatgtagaggtcctcggcgcggttgccatccaccaccatgaggacgcgcagccgcgcgcgcgggtacagcagggcgcgggcggacgccaggcactggcgcaggtacgcggggtcctcctggtaggcggagatggtcagcgccacactgcgcgcggtggctgcatccagcggcccccgcgccgccgccgccacccgccggtgctccaggtacgcgaagaggctctgcgccaccaggtgcgctgaaaggaaggccccgtagaggccgaaggccaggaggccgtagcgatcggaggccagcggcaccccggcggcgtaggcccagg

SEQ ID NO: 336247 - DNA, 246 bp, Homo sapiens
  chr19:52390958-52391204
  hyper
aaacgaactccgagcgaggactccccgagagctccccgcaacacggacctcacgcgctagcgaacaacagaaaaaaaaaagcgcgctctccctgcccctgaaacattcccagaagcccacgcagaccagaccgatgacctgtctccactgctggaggcgagtcagggacccgaagtctctaaacactcgcctctacccgccgccccgcgaaccccacacactgcagacgcgacactcgcaagtttc

SEQ ID NO: 336248 - DNA, 550 bp, Homo sapiens
  chr19:52511228-52511778
  hyper
cgataggaatcggacccacgctaagctcctgaaagaattccactggcgtcgccaaacgctggcgccgacagataccagtccatcaccactgtccacgaacacgcccagccacggacagaatttcctcccccgtcaccacagcgaccacccagtgactgaacttacttcccagaacttggtgggctccggcctcatctctcggcctcctcagtgcctgacggcgactatccagggtcggaggcgttcccagcgtttgcgcagatgcaagatggccgcgccctcgtcgccttggctccatgggggccgccatctttgagtatctgacgtacacaaggcaaagggcgcgttttggcgctggtgaccgggggtgaccgggggtgaccggggatggccgggaagatgaaagagcactgaaactgtcccatttcctggcacctcaacccttcataaatacgggtccatatacagaggctccagtttacacaagacaaaaatggcgtggaggtaaatccctttcagcagctgaatagaaggctaagatggccgcgac

SEQ ID NO: 336249 - DNA, 807 bp, Homo sapiens
  chr19:52531285-52532092
  hyper
aaagggtgactcacaagggccccagacccagacagagtcggactcgtcgctgatttcctcagactcttcatccctacagccaaaggacccgtcattaacgccccgcttcctcagcgactgcgttcaaatacagccccaatcaggacgctccacgcaccatcggtacacagacccacaggccgcgagtccatgcccagaactcgactcacccgagcccgaacctctccagacaccactggcagcgacaaaacgccgcatccacgtccgaaaacgcttcctattcagacgcgctcctgcgcggactccgggaagctgagcggtaaagaccgtgaagcgaggcgaggaccacggagcctgcccgggatcgcgagttcagactgcgggcgccgctctatgaggtcacagggctgcgcccatcgcagcgtttctgacaggagcggccataatggctgtgggaatcactcttagtcacctcagtgcctttctctcttcgttgcaagggacactcaagagtcgggtgcccagccaaggccaacacggcgcagtggcattctattcagcctgctgtggaaaaaagatggcggcgccctttgtgcccattatagctgagagtggagccttagctggagcaccatgggcacggccatcttagaggaaggcagcagccgtacggcagagaagatgctcatatccaggacaatttggaaaaataaacaaggtttgaagaagtcacggtgctggccaggaagcggtcacagagttgccaaaaccagtggtcactgaaagtgttagatttggggatagggc

SEQ ID NO: 336250 - DNA, 867 bp, Homo sapiens
  chr19:52551831-52552698
  hyper
cgcccccgcctcccccaacccccgcgctacctccaccatatagcgccaccaacaacgcagacgccctcagaaagctccctcccaccacgtttccacgccctgacccacacactgacctgactctccttggaatcgccgcgacctcttaaaagctgaacttacttccctaaacttcttccacttctgggcccctcgcccaactccctccccctctaaacctccagagacggtcagccgcgtttccatggagagcggaatgcggccttccggcttttcctcaggaggagacgcgtccgcgccggcgtcgcctcgccgctctgggggcggccatctttgagtacgtgacgtacagaaggcacagcggccgggagacgcggtggacggaggcctcttaaactgtccgatttccagacacctcagccctggcagaaaatggagagcttatcagaggcttgagttcacacaggcagacacggcgtgggggtaaagtcctctgaacagacacggaacagaaataagttagtcttctcctcgcaggggacagtgaacggcgcaaacttctcaaaggccagaacccattattaccacaaaggcgcggcatcccttcttagcggttatgatggctgtgacgtctcagctcaatggaaaattaaagtcacctctgggcacctcagtcactattgtaaatgcgaagcgttttagaagccgtataaaaactgaagcaagagagactagaacaaaaaataagcgagcggtgcgttgcaggtaacggagccagagcccttaggggagagcatcatgggggcggccatcttaggggacgttcggtgtccgtacggcagaacatattctctctgagaagcttgc

SEQ ID NO: 336251 - DNA, 119 bp, Homo sapiens
  chr19:52715152-52715271
  hyper
cgtctactttgcaaacgattgaccgtcaagcccgggtttgagcctgactcactccagaactctggtttatggctgtacacttgcttagatacttacactggcccccaccgcctttgatc

SEQ ID NO: 336252 - DNA, 218 bp, Homo sapiens
  chr19:52800101-52800319
  hyper
ccgaccgcacggtcggcttaagattaactttaatagcaggaattttcctggatctaatcattagccgactttgctcagtcccggcaagagtacagttccgagacagctgagttgctccagtctccttgacaggtctccccggcaaaacccggaaaacagaggcactggaagcgaggcggagggaagcgcaagccccactccgccccgcccccgccccc

SEQ ID NO: 336253 - DNA, 624 bp, Homo sapiens
  chr19:52800380-52801004
  hyper
cccccgcccccgccccgctcggacccctccgctgcgcgcgcagtttcccacaaacccggaagcggatcgcgtggagtgaaggtcacgccgcggcgcgtgagtttccctttgtgtaaattaatctgcgcttcccaactcccccgcgcttctgtacccgggatctgaggggccacacagaccttgaaatcctcgcaccgctccctctaccccgaccaaattcaggcgtctccgtgagagtcaggcggtcgcttccctgtgtgtttaaatcgctcggcggcgggtcctgtcccccgtccttctgccacagggccatgtagtcacctcctgtcgcggagttttcctgtttcaagtccttcagtgatgcttacatccgccccgcacagcgtaaagtcctcccccgctaggcggattccggtctatgcggtcccccaagcctcgcctttgttggccctggagcacagcgctccaatctcaatccaggagaagccgcgtcttctgcccagtgctgggattctgcagacgccacccatctcttgatccagaccctacctttaccctccttgatacggggccccgctactccccaggcctcctcttcccagacaccgcttctcctaaccctgc

SEQ ID NO: 336254 - DNA, 675 bp, Homo sapiens
  chr19:52839404-52840079
  hyper
cggaaaacagaggcactggaggcgtggcctagggaagccccgccccgtcccgtcccggtccgctctctatgctgcgcgcgcgcagttttttgcagacccggaagcggatcgcgtgggtagaaggtcacaccgcagcgcgtcagtttccctttgtttagattcaatctgggcttcccagctcccccgcgcttctgtacccgggatctgagagtcaacacagaccttgaaatccccgcaccgctccctccaccccgtgtaaattcaggcgtctccgtgagagtccggcgctcgcttccctgtgtgttaaaatcgctcggcgacgggtcctgtccccgctcgttctgccttgggccaggtaaacacggattttcgagactcctttccgcttaaaactctttactgacccaacgtcctgccccgcgcttttaaaagtccttaccgcaaggtggattcccgcccggggagcctcccaacctcgcccccggcccctgaagcgcagcgccgcagccccagtcccggcgggggaggccgcgtcctgtactgggtcctgggacccttgagaccccacacttctaataattcagccccacccttttcctccttgatccgggccttcctactccccaggcctccccttcgcagccatcgctactcccgacccccgggtgtggggac

SEQ ID NO: 336255 - DNA, 420 bp, Homo sapiens; identical to SEQ ID NO: 240785
  chr19:52956715-52957135
  hyper

SEQ ID NO: 336256 - DNA, 807 bp, Homo sapiens
  chr19:53030704-53031511
  hyper
cgctctcgcctccacaacctaaaaacagagacgctaggagagaggctgaaagacgcgcaagtcccgccccggccccgccccggccccgccctctgccggttctaaagggcaaggtctcagcgcctcgcgccccgccgctacctcgcccaggccccgcccacctcctcccacctcccgcccaggcctggcttccgtcctgcgcgcggagattaacgcaaacccggaagcggatcgggtggagtgaaggtcacgtcgccatggtgagttttgctctgtgttgcattaagtctccgcttcccaggtccccgccgcttctgtccctgggacgtggggtccccacagacctggaaattctcgcccgtcttccttcgcccagagcaaattgagacagcccagtgagaggccgggtgtcgcttcctttcgggtttaaagtcgtctggaggctggtcccgtcccgggtctgtctgctatagggcaatgtatacactttctattgcgtagtttttctgctcaaaaccttcttctgactcttccctcctcgcgctatttaaagtcttcacccacgaggtggattcttgcccggggcgcacctcccagccacccctcgtcggcccctggagcgtcgcgccgcagccccagtcccagggaggccgcgtcctctgcctggtcctgggatcttgcagaccccatccttctcccaaggcgccgtcccccctcctcccacctccctactcgtgccagagcctgcggctccccaggtctctcctccgcagtcaccgcttccattgaacccacactgggaaggac

SEQ ID NO: 336257 - DNA, 817 bp, Homo sapiens; identical to SEQ ID NO: 240787
  chr19:53073242-53074059
  hyper

SEQ ID NO: 336258 - DNA, 1065 bp, Homo sapiens
  chr19:53104083-53105148
  hyper
cgctcctccctggcctgagcactccgtcccgcatcccaggcggtggccctagggaagtctctgaagctgagcacagggtggactctgcccccaccgccgacccgccctccccgaccccgagtgaatggagaatagaaagggagaggatttctgttctgtcctgtgggccctcagtatgaaatcgtagttctgcccaggcaggactttgcatttcacattctagtttgcatccccgttccagacaattccagggcttttgactcatgcctcagccttcccggccagtctcccttccaaaacccgaaaaacggaggcgctgggctcaagactgactctgtcccgccccggccccgccctctgccggttctaaagggcaaagtctctccgcctcgcgccccgcttccgcctgcccaggccccgcccacctcctcctggaccccgcccaggcctggcttctgtcctgcgcgagcagatcagcgcgaacctggaagcggagagcgtggagtgaaggtcccacggcagcgcgtgagtttctctctgttttatattaagtctgtgcgtcccaggtccccggcgcgtctgtacctgggacgtggggtccccacagacctggaaattctcgcccgtcttcacccagagcaaattgagacttccctttgagagtccggggttcacttccttttgggtttaaaatcgccttgaagctggtgcggtctctggtcttgctgctatagggcaatgtatacactttgtattgggtagttttcctgctcaaaacctttttctaactcctcccgccccgcgctttttaaagtccttacaggtgaggtggattcccgccctgggcgcctcccaccctcgccttcgacggcccctcgagtgcagcgccgtgcccccagtcccgcggaggctgcgtcctctgcctggtcctgagatccttcagaccccaccattgtcttaaggcgccgtcgtcccccacctcccttctcgtgccgggccctgctgctccccaggtctcctctccgccgtcaccgcttcccctgagcccgcgttgggaaggtgtcc

SEQ ID NO: 336259 - DNA, 869 bp, Homo sapiens
  chr19:53140914-53141783
  hyper
cgacacaatcacaggagggtttggataagacgcctgcatcccggaggagctcgttttccgggggctggagctgggcaggcaagaacaccccgtgtcacaggacaggccccgggtacctccccaacgcgggttcaggggaagaggtgactgtggaggagagacctgtggagcagcagggcccgccacgaggagggaggtgggggggagacggcgccttaagacaaggttggggtctgcaggattccaggaccaggcaaagtacgcggcctccctgggactggggccctggcgctgcgctccagtggcctacgaaggcgagggtgggaggcgcccagggcgggaatccagctctcgggtgaggactttaaaaagcgaggggcgggaggagtcagaaaacagttttgagcaggaaaactacgcgacaggaagtgtatacatcgccctacagcagaaagaccggggacagcccagcctcagggcgactttaaacccaaaaggaagcgatatccggactctcatggggacgtctcaatttgtcctgggtgaaggaagaagggagagaatttccaggtctgtggggaccccacgtctcaggtacagcagcgccggggacctggtaagcgcagacttaatagaagagcgaaactcaccgccacggtgtaactttcactccacataatccgcttccgggtttgcgcgcatgtgcgcgcgcagtacagaagccaggtctgggcggggcccgcgaggtgggcggggcctggatgaggtaggggcggggtgggaagccgagagactttcccctttagaaccagcagtgggcggggccagggcgggacctgtgagtctctcagcatcgttcccagcgcaga

SEQ ID NO: 336260 - DNA, 800 bp, Homo sapiens
  chr19:53193139-53193939
  hyper
cgggcacctccccaacgcgggctcaggagaagcggtgactgcggaggagagacctggggagcagcagggcccggcacgaggagggaggtggggggcgacggcgcctgaggacaagggtggggtctgcaggatcccaggactaggcagaggacacggcctccccgggacaggggccgcggcgctgcgcttcagaggccgacaagggcaaggctgggaggtgcccacggcgggaatccacttcgcgggtgaggacgttaaaaagcgcggggcgggaggagtctgaaaatgattttgagaaaaaaaaaaaaaaaacaacaacaactacgcgataggaagtgtatacattgccctagagcagaaagacaggggatgggaccaacctcagggcgactttagacccaaaaggaagcgacttccagactctcacggggatgtctctatttgctctgggtgaagacgggagagaagttccagatctgtggggaccctaggtccgagggacagaaacgctgaggacctgggaaatgcagacttaatacaaaacagcgaaactcaccgccgcggtgtgaccgtcactccacgcgatccgcttccagatttgcgagaatctgcgcgcgcaggacagaagccaggcctcggcgggccccgcgaggtggtgggcggggcctgggccgggtggcggcggggcgcgaagcagagagactttgcggtttagaaccggcagagggcggggccggggcgggacctgtgtgtctcacatcctggctcccagcgcctctgtttttcgggtttgggaggcg

SEQ ID NO: 336261 - DNA, 833 bp, Homo sapiens
  chr19:53237625-53238458
  hyper
cggaggagcgcattttccacgccctggagctccgcaggcaagaataccccgtgccgcaggacaggcccctgggacctccccagtgcaggttcaatgaaagcggtgactgcggaggggagacctggggagcagcaggccccggcatgaggaggaaggtgcggggcggggggggggggcgcgacggcgccttaggaccaggatggggtctgcaggatcccaggacctggcagaggactcggcctccccgggactggggctgcggcgcggcgctcccggggctgaggagggggaggctgggaggcgccctgggcaagaatccacatcgcgggtgaagactttaaaaagcgcggggcgcgaggagtcagaacaaggttttcagcaggaaaactacgcaacagaaagtgtatacattgacctatagcagaaagaccggggacgagaccagcctcaggacgactttaaacccaaaaggaagcgaccctcgggctctcacggggatgtctcaatttgctctgggcaaaggaagacgccggagaatttccaggtctgtggggaccccacgtcccagggacagaagccctgggaacctagttagcgcagacttaatacaacacagagcaaaactcaccgcggcgatatgacctacactccacccgatccgcttccgggtttgcgttaatctgcgcgcgcaggacaaaagccaggcctgggcgggaagtgggaggtaggcggggcctgggcgaggtaggggcggggcgcgaggcggagagaccttgccttttagaaccggcagagggcagggccggggcgggatctgcgcgtctctcagcctc

SEQ ID NO: 336262 - DNA, 661 bp, Homo sapiens
  chr19:53400404-53401065
  hyper
cgttttccaggagttggaactaggtagcaacaccgcacaaggagggaggtggggagcgacggagccttcggacaggggtggcgtctgcaggatcttaggaccaggcagaggacgcggcctcccgggaaccggggttgaggcgcggcgctcctgaagccgccgagagcgacggtgggaggcgcctagggctggaatccagctcgcgggtgaggacttgaaacagcgcgaggcgggaggacaggtcaggaagggttttgagaaggaaaattccgcgataggaggtgtctgcacgaccccactgcagaaagaccgaggacgggacctgcctcagggccactttaaactcgaagggactcacggactctcacccggacgtctcaatttgctctgggttgagaaagaggggccgcaatttccaggtctgtggggactcaacgtccccggtatagcagcaccacaggactgggaagcacacataaaacagagcgaaactcacgcgctgtggtgtgaccttcagtccctgccatccgcttccgggtctatgccaatcagcgcaggacagaggccaggcctgggcgggacccccgagaaggtaggcggggcctggactaggccgggatgagacgcgaagaggtgggcggggcctgaacaaggccggggc

SEQ ID NO: 336263 - DNA, 749 bp, Homo sapiens
  chr19:53426110-53426859
  hyper
cggtgactgcggaggggagacttggggagcaacagggcccggcatgaggagggaggtgggggggagatgacgccttcggacaagggtggggtccgcaggatcccaccaccgggcagagaacgcggcctccctgggactgtggtgtcagcgctgggctccaggggccgacgagggtgaggctgggaagcgccagagcagggatccacctctcgggtgaggactttaaaaagcgcggggtgggaggagtcaacaaacggttgtgaacgggaaaactacgcgatacaaactgtatacattgccctatagcaaaaagaccgaggacagggcagcctcagggcgactttaaacccaaaaggaagtgacttccggactcctaggggaatgtctccatttgctcttgttgaaggaagaagggcgagaatttccaggtctgtggagaccccacatcccaggtacagaattgccggggacctggaggcacagcctcaatacaacacagagcaaaactcaccgccgcagtgtgacttccagtccacgcgatccgcttcctggtccgggcgaatctacaagcacaggacagaagccaggcctccgtggagccaacgaggtgggcggggcctgggcgaggtaggggcggggcctgggcgaggtaggggcggggcgccaggcggagagacctgccctgtagaaccggcagacgcggggcgggggcggatctgtgcttctctcagccgcgtacctagccgctg

SEQ ID NO: 336264 - DNA, 691 bp, Homo sapiens
  chr19:53445362-53446053
  hyper
gggctcaggagaaacggtgattacggagggaagacctggggagcataagggcccggcacgaggagggaggtggggggcgacggcgccttaagacaagactgggaggcgcccagggcgggaatccgcctcgcggtaaggactttaaaaagtgcgggttgggaggagtcagaaaaaagttttgagcaggaaaactacgcgatgggaagtgtatacgttaccctatagcagaaagattcgggacgggaccggtctatggtgactttaaacccaaaaggaagcgacccccagactctcacggggacttctcaatttgctctgggtaaagaaagacggaggagaacttccaggtctatgaggaccccacgtcccaggtacagaagcgcctgggacccgggaagcgcagacttaacacaacacagagcaaaactcacccccgcggtgggaccgtcactccacgcgacccgcttccgggtttgtgcgaatctgctctctggggacagaagccaggcctgggcgggacccgcggggaggtaggcggggcctgagcgaggtaggggcggggcgcgaggcggagagaccttgcccttcagaacagacagagggcggggcgggggcggggccggggcgggacctgtgcgtctctcagcctggctcccagagcctcaatttttcgggttttggaggcgagacc

SEQ ID NO: 336265 - DNA, 1063 bp, Homo sapiens
  chr19:53465713-53466776
  hyper
cggccaccctggggctgcggggctgcaacgctgcgctccaggggccgactagagcgaggctgggaagcgctcttgcccagggcaagaatccagctccgggtgaggacttgaaacagcgcgaggcgggaggacgcgtcagaaagggttttgctaaggaaagtttcgcgacaggaggtgtctgcacggccccactgcagaaagaccggggacgggaccagcctcagggcaactttaaactcaaaaggaagcgactcacggactctcacccggacgtttcaatttgctctgggttgagaaaagaggggccggaacctgcaggtctgtggggaccccacgtcccctatatagcagcaccagacaactaggaaacgcacacgccgccgtgcaactttcagtccacgccatccgcttccgggtctgtgccaatcggcgcaggacagaagcgggacctgggccagatccccgagaggtgggcggggcctgggcgaggccggggcggggtgcaaaggacaaggggcccggcgcggaagagaagagtcttgggctgggaggagtccgcgggggcgggaaaggggcggggcctgagcttttctccatctcgctctccgcgcctctgttttcaaggttttagaggtgaaacccgccagtgaggctggagcagctcagcagtcagggaaatagtacctccctgagaagtcgccgtgtggcggtaattggatccgggaaagttccttgctattgaaatttattttagcaatttaattccaaagcctggaagttgtctacggcaggaatgcaaactagaatgcgaaatgcaaagccttgcctgagcgaaaggtacaatttcatgctgacggtccacagaacagaatagaaatcctctccctttcaattctccattcactggagtgggagagtccacactgtgctcagctcctgagacttccctagggccaccgtctggggtgcggagcagaggagtgtgcttaaacacagcagggatgcgggcggggtggcaggagtctggggtccccgctactcaggaagcaggggcgagaggatc

SEQ ID NO: 336266 - DNA, 385 bp, Homo sapiens
  chr19:53496055-53496440
  hyper
cgagcagcagggcccggcacgaggagggagttagggggcgacggctccttaagacaagggtggggtctgcaggatcccaggaccaggcagaggatgcggcctcctcgggacgggggaggcggcgctgcgctccagggaccgacgagggtgagggtgggaggcgcccagggtgggaatccacctctcgggtgaggactttaaaaagcacggggtggagggagtcagaaaatagttacaaacaggaaaactacgagatacgaagtgtatacgttgccctatagcagaaagaccggggacgggtctagcctcagggcgactttaaacccaaaaggaagcgacttctggactctcaccgggacgtcaaattttgctctggggattagcc

SEQ ID NO: 336267 - DNA, 753 bp, Homo sapiens
  chr19:53496622-53497375
  hyper
aaggaagaatggtagaaatttccaggtatgtggggaccccacgtcccctgggacagaagtcccagggacctgcggagcgcagacataacacaacacagagcaaaactcaccgctgcggtgactttcactccacgcgatccgcttcccggtttacgctaaactgggcgctcgggacagaagccaggtctcggcgggacatggcagggggtgggcggggcctgggcgaggtgggggcggggcgcgaggcggagagaccttcccctatagaaccggcagggggcggggcgcgaggcggagagaccttcccctatagaaccggcagggggcggggcgcgaggcggagagaccttcccctatagaaccggcagagggcggggcgggatctgtgagtctctcagcctcggcgtgtttttgggttttggagacgagacctgccaggaaagctgaggcatgattcaaaagccctggaactgtctggaaggggaatgcaaaccagaatgtgaaatgcaaagccctgcctgggcggaacgtattatttcatgctgacgaccacagaacagaatagaaatcctctccctttctattctccactcactcaagagggagagtccaccctgtgtcagcttcagagacttccctagagccaccgcctgggatgcgggatggagtgctcaggccagggaggagtgaggtcaccacctgctggttaaacacagcagagatgcgggcgcacaagggggcgtgggagggcgc

SEQ ID NO: 336268 - DNA, 1149 bp, Homo sapiens
  chr19:53606073-53607222
  hyper
cgggccccgggcacctccccaacgagggctcaagggaagcggtgactgcgaaggggaggcctggggagcagcagggcccggcacgaggaggagggaggtggggggcgacggcgccttaggacaggggtgggatgtgcaggatcccaggaccaggcggaggcgcggcctccccgggactgggtcggcggcgctgcgctccaggggccgacgagagcgaggctgggaggcgcccagggcaggcggtgaggactttaagcgatgcggggcgggaggaggagtcagtaaaggattttaagcaggaaaatcctgcttaaacgtttaaaaaaccgggaaaggccgtgtttacttggcccaaggcagaaagaccgggggcagggaccagcctcagggcgactttaacccaaaaggaagcgtctccgggcccacacagcaaggcctatttacctgaggtggagggtgcggtgcggagattttaagtccgtagcgacccccgggcatcgggtgtgcgaatgggggacggcgaggcgcaggttgagtctacacagaggaacactcatacgccatggtgtgatgcttgctccgcacgatccacttccgggtctgtgggcaactgcgcgaaggaaagcgaccgagcggcccggggcggggtccgagatgggcggaaccggaaaagggcggggcgttgagagagccgggctgaagcaggggccgccaggcagggaccccagggaaggaacggggaggagccaccggggaggggtggggagtgaccaagtggagggacccgggggcgggccggggaggagccgccggggaagggcggggaggaaccgcgggaagggaccgcgggggaggaaggcgaagggaccgcgggggagggaggcagagggaccgccaggaagggacccgggggagaggcggggctggacgggacacgttagggtctgcgatttcgtgtgatgcccacagcccagcgcccagagccatctgtagtgtcttgtggaacggcgtagatgtttcaaacggtttcaagttaaaagcacagttgtgtaggttattttggaaaccaaactgctttcctcttagaatggaggcggtttatgttgaaagcattttttgctagcgcgtttacccagtaatgttattgac

SEQ ID NO: 336269 - DNA, 712 bp, Homo sapiens
  chr19:53635517-53636229
  hyper
ggtttggggtaagacgcctgcatcctggaggagcgcattttccacggggtggaggagggcaggcaagaacatcgggtgtcacaggacaggccctgagcacctccccagcgcgggctcaggggaggcctggggagcagcggggcccggcacgaggaggagggaggtggggcgcgacagcgccttcagacaggggtggggtctgcaggatcccaggaccaggcagaggacgcaaggctccccgggactgcggctgcagctgcggcgctgcgctccaggggccgacgagggcaaggctgggaggcacccaggacgggaatacacctcttgggtgaagactttaaaaagcccggggatgggggagggggtcaggaaaaggttttaagcgggaggaagaagcaaaaggccggggacggggagcagcctcaaagcgacttcaacccaaagggaagcgactccggacccacactgcgaggcctgtattcacctggggtggagtgtacggggattttaagggccgtatcgaccctggacatcggctgtggaaatgggaaacagggagcgcaggtttaatctacacagagggtcactcacgctcgacgccgtcaccttcacccaacgcgatccgtttccgggcctgtaggaaactgcgcatgcgcggagagaagagcccgggcagcctgaaggaatggctggagtgggcggggtctgcgcc

SEQ ID NO: 336270 - DNA, 456 bp, Homo sapiens; identical to SEQ ID NO: 240803
  chr19:53661431-53661887
  hyper

SEQ ID NO: 336271 - DNA, 500 bp, Homo sapiens
  chr19:53662189-53662689
  hyper
cgagcccgggaactggctgcggaaacggggcacggcggttcgcaagtttaatccatactgagggacactcacgctcggcggcgtcacccgcacccaacacgatccgcttccggaactgcagaaaactgcgcgtgcgcggaaaagagcccgggcactctgggggcggggcctggggagaggcggggtctgcggacgaaacgctggggcggagctggggcggggtctgcgcttccctcagcctgcctagcccgcagtctcatttttcccggtttagaaacgctggagtgttcactatgtccccgggagcaccgttccaatttgaagcagttttaaggtgaaagaatagacttacgtggaccacttatgatagaaaccaaaatgatttcctcttaccaagttgaaaacggtttatgttaaaattgtttgccggcgggttggacccagtcctgctagggagtctgctgcagctcaggaacggggatctgggaatcggggatctc

SEQ ID NO: 336272 - DNA, 635 bp, Homo sapiens; identical to SEQ ID NO: 12600
  chr19:53696029-53696664
  hyper

SEQ ID NO: 336273 - DNA, 605 bp, Homo sapiens
  chr19:53700110-53700715
  hyper
cgcaggctcccacccgccttccttaggtccctcccggccccgccccctgcctgtccaggccccgccccacccttcgcgttttctccccagcccactccctgtgccggtcacgccccgcctaggccccgcccctaggccacctcagtcccctccggccccgccccctgccggtctctccctggccaggccccgccccttccccgcccccagaccgcccagtctccgctgcgagcggttttctgtagacccggaagcggatcgcggggagtgaaggctgcgccgccgagcctgagtttcgctctctctagattaaatctgcgcttcgcagtcccccttcttccatcccccgggtctggaggggtccctacagatcttaaaatgaccacaccgcgccctccaccccaggtaaattctgacgttgctgtgagaatgcggagatcgctttccctttgggttaaagtcgctctaagcctacttcctgaatctggtctttctgctttgcgctaggtaaacatggcctttcgtgtcttttgctgcctaaaatcctttaccgatttttcttcccgccacgcgggagggcacttttttttttaagacggagtctc

SEQ ID NO: 336274 - DNA, 817 bp, Homo sapiens
  chr19:53868340-53869157
  hyper
ggaagggagccctgcgggagggggtgttactttgtcgcccaggctggcctggacccccaggttcagcgatcctcccgccctgcttcctgagtagatgggacctcaggctcccgcgcccgcgtccgcatccttgctgtgtttatccggcaggtggtgacctcactcctcgctggcctgagcactccgtccagcatcccaggcggtggctttagggaagtctctgcagctgagcacagggtggactctccctccggagtgaatggagaatagaaagggagaggatttctattctattctctgggccgtcagcatgacattgtaagttctgcccaagcagggctttgcatttcacattctactttgcatccgcgtttcagacaattccagggcttttgaatcatggatcggccttcctggccatctcgcctccaaaacccaaaaacagaggcggtgggagggaggctgagagacgcacagatcccgccccagcccagccccgccccgccctctgccggtactaaagggcaaggtctctccgcctctacccctacctggcccaggccccgcccacctcctcgcaggccccgcccaggcctggcttctgtccttccccgctcagacgcgcgcaaacccggaagcagatcgcgtggagtgaaggtccctcagcggcgcgtgagtttcgctccatcttgtatgaagtctgctcttcccaggtccccggcgcttctgtccctgggacgtggggtccctacagacctggaaattctcacccgtcttccttcgcccagagcaaattgagacgtccccgtgagagccc

SEQ ID NO: 336275 - DNA, 90 bp, Homo sapiens
  chr19:53934944-53935034
  hyper
ccaggcagggccttgcattttacattctagtttgtatcccgttccagacaattccagggcttttgagtccatgcgtcagccttcctgggc

SEQ ID NO: 336276 - DNA, 1091 bp, Homo sapiens
  chr19:53970483-53971574
  hyper
gctcctgcccccgcgcgcgcatccctcccaccccggcgccccatccagcaggtggtcacctcactcctccctggcctgagcactccgtcccgcatccatggcggtggctttagggaaatctctgaagttgagcacggggtggacttgccctcctgagtgaatggagaatagaaagggggaggatttctattttgttttgtgggccgtcagcatgaaatcgtaccttccgcccaggcagggctttgcatttcacattctagtttgcatccccgttccagacaattccagggcttttgaatagtgcctcaaccttactggccggtctcgactccaaaaccctaaaacaggcgctggagcgagggtgacggactcacaggtcccaccccggccccgccctctgcgccttccaaagggcaaagtctctccgcctctcgccccgcccctgcttcgtcaggccccgcccacctcccaggtcccgcccaggcctggcttctgtcctgcgcgcagattcgcgaaaacccggaagcggatcgcgtggagtgacggtcccacggcagcgcgtgagtttggctctgtgttgtattaggtctgcacttcccaggtccctggcgcttctgtacctggggcgtggggtccccacaaacctggaaattctcagccgtcttccttcacccagagcaaattgagacgaccccgtgagagtccgggggtcgcttccttttgtgtttaaggtcgccctgaggctggtcccgtcccgggtctttctgctatagggcaatgtatacactttctatcgcgcatttttcctgctctaaacctttctctgactcctcccaccccgcgctttttgaagtcctcacccaaggggtggattctcgcccacttcggccggtggagcgcagaaccgcggccccagtcccgggaaggccgcgtcctctgtctggtcccgggatcctgcagaccccacccttgtcttaaggcgccctcgcgcccccccccccccacctccctcctcctgccgggccctgctgcttcctaggtctcccctccgcagtcacggcttcccctgagcccacgttggggaggtgccc

SEQ ID NO: 336277 - DNA, 681 bp, Homo sapiens
  chr19:54023878-54024559
  hyper
cattctgacggccgcgcttccagcgctaaggattcccgcgtagtgagcatttcccagaggtctctggggcatggctccattagggccgtgtgcagttgcctgcagggaaacactgatgggcgcccttccagatacgtcgattcccgggttatgagctacatttcccagaagccctcaaggcaggacgcccttagggtcgcgtagagttgcatgctgggaaatcctgacagccgcttccaactctgtggatttccgggttatggactacatttcccagaggcctctgggtcacggctccatttgcgccgtgtagagttgcatgctgggaaacactgacgggcgcccttccagctgcgtcgaagcttctctggtttcgcattacatttcccagagggccttggggcacagtccaatgaggagcgagccgggtggccggctgaggggcgtgcttcatgctcgcgggatttttaaaaatggtttctcctggatcttatcccaactgcgcctgagaccttgtttcacctcctgatgtgctgggtgtggttaggcctcgagccgggagctatttgcctcccaggaggaagccagggcagggttccgcggggaatggcggtgagggagccactcgggacgcggaggccctaaaatgaagaagcttcggcctgaggcttcgggagcggc

SEQ ID NO: 336278 - DNA, 578 bp, Homo sapiens
  chr19:54385484-54386062
  hyper
cgccgccgcccgtgcctccggctgccggcgcccctgcctttggctcttcctccccactcgcccgctccccctggcggagccggcgcgcccggggtgccgctccctgcctggcgcgctccgcacctggaggtgccttgcccctctcctgcccacctcggaatttccctgtggctcctttgatccttcgagtctccagctcctctcccttccacctgtttcccccaagaaaggcaggatcctggtccctgctacgtttctggggccatggctggtctgggccccggcgtaggcgattcagaggggggaccccggcccctgttttgcagaaagggggccctgaggcagaaggtggtccacgaagtcaagagccacaagttcaccgctcgcttcttcaagcagcccaccttctgcagccactgcaccgacttcatctggtgagggaagggggctgggggactgggggacgaggggactaggggtgcagactcctatcacgccgacccctgtggaaggaagaaggagggggctgtagtcccgactcccaggttctaggatggccagggaacgctgggagcttc

SEQ ID NO: 336279 - DNA, 279 bp, Homo sapiens; identical to SEQ ID NO: 240817
  chr19:54410016-54410295
  hyper

SEQ ID NO: 336280 - DNA, 727 bp, Homo sapiens
  chr19:54411189-54411916
  hyper
gcagagacccagcgcgtccgtgttcaccagagcagccacgcaagctcacatgcacccccaggctcagacaccggggagaagtccttcccaagcggggagatcacagtctggcctcttcttgagagacctagagacctgatcagaggaagagacccccacgccagagcaaccaaaaacagccagaacccgagagcctaggaatcggcgacggaggcacacggcaggcagacgcgccttctgggcctctttcccttgacccacttgagagtctggggagtgccggggaccgtgcagatggactacatttccccgcaggcctcgcggcagacccttcccccaagtgcggctccttgccgccagggctgatgggaaatgtagtctccggtcagggccagaccagtggagcggtgtgccttgtctgtgtgtttggaggggactgagccccaaagcttcgcagtcttccttgcggacccgggcacgtcttcttccctgcagtctcctgggtttccatgacccggtccgggtggatgctggggctgcccctctctccctcatcaccgccgcgacacccccatccagtgcccgcaggccccagcccccgctccgaccctcggcgggcggcctgcccctttaagagtggccccgctgacatcacggcggggggggggggtggcccggctcctggctccgcggcggctgcaggacccgactccgctctgcgcccgcc

SEQ ID NO: 336281 - DNA, 543 bp, Homo sapiens
  chr19:54412564-54413107
  hyper
cggctccgtccgccgagtgaggccgcggccgcggggggtggggggtgggaggccgggagggggccgggacgccgggctccggggcgggggcggggggcgcgggcaccggcgaccccggtggcggcggcggcggccgggggaagcctcggggccggtcatgcggctgcggggcccgcggcccggagcgtccgcccagccctgagcgaggtgagcgctagcggagggtcctgggaggaagaaggggcgcccctcgaggtggctgcgagccgggtttggggcaacaagggacccgagtggctccaggggtggtgagatcctggcggtcgggacgcccgaattcgagcggctatgggggatgcagggacacctgggcctggcgatcccggaggacggggtccgagggtcccggagtgggaaactgcactcctcgcgtccgagtcgcagcgagcgtgggctggggagggcagaggccgggtccctgaggaaggcgaggtacggggcgagggcggaggacccaggcccggccagagcaggatgtgggtc

SEQ ID NO: 336282 - DNA, 53 bp, Homo sapiens; identical to SEQ ID NO: 226026
  chr19:54413510-54413563
  hyper

SEQ ID NO: 336283 - DNA, 318 bp, Homo sapiens; identical to SEQ ID NO: 240821
  chr19:54465293-54465611
  hyper

SEQ ID NO: 336284 - DNA, 948 bp, Homo sapiens
  chr19:54485373-54486321
  hyper
caacgcgggcgagccgggcccgaagcgggacgaggagaagaaaaaccactactcgtacggctggtccttctacttcggcgggctgtcgttcatcctggccgaggtgataggcgtgctggccgtcaacatctacatcgagcgcagccgcgaggcgcactgccagtctcgctcggacctgctcaaggccggcgggggcgcgggcggcagtggcgggagcggcccctcggccatcctccgtctgcccagttaccgcttccgctaccgccgccgctcccgctctagctcccgctccagcgagccgtcgccgtcgcgggacgcgtctcccggcggccccgggggcccgggctttgcctccacggacatctccatgtacacgctcagccgcgacccctccaagggcagcgtggccgcggggctggcgggggccggcggcggcggcggcggcgccgtgggggcgttcggcggcgcggccgggggcgccgggggcggcggcggaggcggcggcggggcgggtgccgagcgggaccgcgggggggcgtccggcttcctcacgctgcacaacgccttccccaaggaggcgggcggcggcgtcacggtcacggtcaccgggccgcccgccccgcccgcgcccgcgccacccgcgccctctgcgcccgcccccgggaccctggccaaggaggccgccgcctccaacaccaacacgctcaacaggaaaaccacgcctgtgtaggggcgcggcgggggagccgaggggcgtgtccggggcgcgtgcgcgggcgcgcgtgcatcgaggctgccggggtcgggggcgcccccgctttcccccgtgagcgcgctggagactgctgggcccgccccacgcccaccctccccgcccccctccccctccgaagcagggaccccgagggagggggcaggggagggagggggccgctgtgagggagcgtc

SEQ ID NO: 336285 - DNA, 546 bp, Homo sapiens
  chr19:55677520-55678066
  hyper
cgcagtccgcagacaggacctcggggctgcccctgggagcgcgccctctgccgctggagcgttggagaacgttagcgccccccttgccaccgacgctgggactacgagctctaaaaggccgtctgctcaggctgggaaggcagacggtgtatcagaccttgcgtgctgggactcactttcagcctgcaggtccagcgccggggacaggccccaccaggacacggagccgaagccgctgccggagccggcaggtgtggtcatcaccctgcggaaaagacattctgggaatcgcacacattgcccgccccgctcccctctcaccgcccctcacttctcgcccctttgcctccacatgataccttgcccacacctttatcctccaaatatcccgggacgccccttcctctctgctcagtgcagcactgtggacccgcggcactccacaaccgctgcccagagtccccgcccttttcgaggaatcaagcaatggaagcatgtgggatgggaccacagcgagcaactgaccaatgagagtgagcgaggccc

SEQ ID NO: 336286 - DNA, 1134 bp, Homo sapiens
  chr19:55690206-55691340
  hyper
cgacccgggatcccagccggattttccagcccgcctgcccgagtacacccgtccgaatcccgcccctcggaatcctggccaggctttctctctgctcggccccccacccccgggtcttgctcacctgggccgtggctgatgcgactggagtcgggaggcgtgtcgggcgatggaggccccggggttgggggctccgggaacatggtggcggggtcctggagtcttttctgcagagacactcaagcaccctagtcccccattcccaccccagacgtcctttgagccccacgcacaacaaagaactccaactcccatgaggcctttgcgcgaacagccgcgcagaaaccggacagccaccgcgagtcatgctgggagttgtagtatcagcctccccgcacttgagagggggtgtccaggacctagttccatcctaaagggataccctcttcctccacggccccacaggcatcccgctgacttctgcctcgtcctcgcccctccgcagggtctgaaccggaagcgggcgaaggcagacgtgggaaccagcagaccgcgttgcccagagcaacagccgggctcctctcaagcggggtgagagcaaagctggttgcccgggcaacgggttgttgccaggacaacgggcggggctgacgcacagacgcggagtcccggcggggcaggctcgctccggggcccaccggtgcctgggaaccccccaatagcccgactgggatcctgaggtcccgcgaggtggggagcgggcagcctgtggtccgagcgcccacagccgactgctccctccgcacctggtcctgggagctgagacgcaggttccctcttccctctccccaattttgctggagggcgggtcgggggctgcccggtgcctgtgctgagccccctcatccttcttggcctgttggtctctccacgcatccgtgctgctctcgtgaccgcctcggtctccacgctgcctcttgaccccacataggcgtcttccctgtgtctgcctccccaacccgcctgtctctcttccctatcgcctggcctctgtctccagggtctctccctctcccctccgcctgcgccccactccccgccctcggctctttgtcttctccatacctgtctcgc

SEQ ID NO: 336287 - DNA, 641 bp, Homo sapiens
  chr19:55865817-55866458
  hyper
ggggaagcgcgggtcgaagggcggcgtcgaccatttccccttggggggctcctgggcttccacatccaacatccacgaaggaggcaactcctgcgagacgggacgggacggggactccgtggggccgagggggcgccctcgctccgacccgtctccccatcctgacccccgcccctgaaccccacccgtcgtgccctcaccagcctgacgttggcggccactggatctgctgtgggatggtcccggggtgccgctcgcttctgagtccgcggggtgcggtcccacccgggtcaggagaaacgcaccccgcggccggattggctaggacgcccgagccccagccaatgggagccgtcgtgcaccgcggggctggtaggggcgcccccaccccaccccttgctcccccgacgccccctcgggggcctgcgcgtgcacacaggcaccgaggtgcgactcgctgagtctcaggctcaagctttaatctctgcgaagttgggcggctccacgggctcgcccccgcccccccccgccccccaatatataaaggcatatccatagttctggtatctaccagagggggcaaatccccccaagcggctttcaacattccgcttcctacagtcggtgcgcacagaaccctc

SEQ ID NO: 336288 - DNA, 419 bp, Homo sapiens
  chr19:55952677-55953096
  hyper
tctcacgcgcagcccgcataatttaaaaaatggacagatggcatcacgcccgagctcaggaccctgcagtggccccatcacacttaggataaacccgggcccgcctacttctcctcacctcctgctgcccaccgccgccagctgcacgggcgcttccctgccctgcaggccaccgagggcctttgcacgcggttcccctgcccaaaacctctcgcccacagatctctgcgtggttcgctccctcccttcgggtctccgttcagaggccttttcggatcacttcctctaatccagcgccctctctctcaacactttccgctgattttcttcacagcagtcatctaaaattacactgcacatgcttacggactgggccactgatagttaatgagcccttaccgtgtgccaggaccctgcac

SEQ ID NO: 336289 - DNA, 185 bp, Homo sapiens
  chr19:56015147-56015332
  hyper
cccgcaggagagtctcgccgcaagcgtcctttcccgccttttttttttctggcgctcagcacgcatgcgcaggcgcggtgggcccgggaatggagggacgggatggggcaggcgttcatctgcctcgcacctcgtgacgtcacaggcgcgctgcgcctcctgattggccagccggcgcatcgccc

SEQ ID NO: 336290 - DNA, 134 bp, Homo sapiens
  chr19:56112791-56112925
  hyper
cgtagaactatgtgtcccattttgcaaaagtcttgattaaggcttagagaagcgaacaccttgcccaaggccacgcagagagtaaagatttgaacgaatgatgtcttgactccagggcccaggctcttaacatc

SEQ ID NO: 336291 - DNA, 396 bp, Homo sapiens
  chr19:56151971-56152367
  hyper
cggcccggccacatcggagccaatggctggtctctggacctcggtctccacatttgctcagccggcaggaacatcccttctcccgccctctacctcggtgggtggccacggccgagcaggcagcgacggcccagtggaaagaggacaaacccttgtgggccttagggcgaagacgtaactttgcttagtctcggtttattggccgatctcttgtcaagcggcggaatcgttccgttcgggaggtgggaggggagcggggccgccgggggcgggcgtcttcagtggaccccacgcctccggtcccctccccgcagggcgctccgcagaggcgaggggtgggagcgccggctccaggcggcggaacctccgcactgggctcgcgcgcttccggccggc

SEQ ID NO: 336292 - DNA, 761 bp, Homo sapiens
  chr19:56159257-56160018
  hyper
cgccacccaatccggggacccccggagactcgccagctctccaggatgggaatttcgtgatgttccctgcctgagcttcggggagggcgggggagtgctgtaaggggctatcgcgcaagtgcagaccctctgcttctgccgcaaacggcgggcctcacctggacccggggactcttcaacgaggggcgctagcctggcccgactgggcgagtccccgcgtccctgcccgttccgtcgctcagttccacgacacgctcccctgccgccccgcctgttcgcgggtgggtgggcgcttccctcggctccccgtgacactttgcagacgctccccggcgccgggcatgggcgccgccgccgtcggtccccgagccggattccgcgagcgggtgggtgagcgcggggggcctcggcccctcggaccccgggcacccgcgggcgggggatggtggccgcgtttgcacccccgccctagtgcatgttcccgctggaatcgttccacgaccgctccccctcccacccgcgggacaaagggcgggggcggggggggcgcacccccacgcgtgacctttccccgtactgcgcacgcgcccagcccccaccaccgggggacggtccgcccgcccacgcgagtgcgggggaggggtgtgggggccccgaaggtagaggaggcagcgcgcacgggctggacctcctcctaccctgggaagttggggcagtttccccctgcacctgcctcttccttaggcctggcagtggcccgc

SEQ ID NO: 336293 - DNA, 509 bp, Homo sapiens
  chr19:56728568-56729077
  hyper
gttccttggctctttttgcccgtatgccgaagagccgggcattgggacgggccatgcggagactagcgaaggctttgaaattcttctcctcgatgatgactccagctttctccttctaggcattccggttgggcatgaccggtcctgtcagccgagcggccagtttcagttcttcagcagaactgtctcccttctcggaggccgagggcttcccggggaagcggatgcgtttggagcggggctccttcagccgccgcacgttggcctgcagggactgcgcctcctcggatccgcagaaatgccggcgtccgggcccccttcttcgcgtgccggccaccctgagctcctccaggcggaggccgcggccgtgcgcaccttcgtgtggtaccgaaccgtggggcagcgcacgatgggccggatgggccccgacgcggggcaggggcgaggcggcgcgccttggcttgcccggcctggcgcctgcggatcttctgggccggctggttgaaccg

SEQ ID NO: 336294 - DNA, 597 bp, Homo sapiens
  chr19:56879397-56879994
  hyper
ttcagccctcagaaggcaaccgcttgattctctgcgcaggcgcagcgttctcaacaccgccaacgggcacaaagccacgcccccacggccgaactcacgcctacgtactcagtcaccagcggaaccctctccaccaggctccgcgtcgaggccctacggggcgtcaatacgcacgcgtactttgtgtcccaggtagctcgtctcttagccatgtacgcctctgcattccggtcactgggagcggggccgtgggggctgcacatgcgcactgcgagtcctcgcctactcccagaaaccacccgggcgcatacgcggtgcggccgctgcttcaggtcggcgggctccagggagacctgggtgggcagcgtcgccgtttctcctttcttgggcagtatttttcccagcgccacgcggaggctgggccattatgaggtttgtgttgcgtcggggcggtccgtctcagaggcgctccggggaggagtgggcggctgaatggccagaggcccagggatccgttcaggtcagcgctggcgtccgggcctgagtttggaggtggcgggtgccttacaagaatgctcgcgtgatcagtgtgttggc

SEQ ID NO: 336295 - DNA, 802 bp, Homo sapiens
  chr19:56904526-56905328
  hyper
cgcataacagtgaatgcaaaacatccgcaatttcagggggtcggagacccctgcgcacccacctaaggggtccatgcacctgggctatgaggctggaagcagaaagggggcgccagaaagcgcacgccgcgagggccggcgggaaatgtagtctcacgccggtaaagccacagagcgacgatgaggcgagacgtctgcgttcttctcaggcctgagacccaaccggcccgggcaccagctcctgctggaccccagagcgcctggaaagctccggaacctctcacctgccgcctcctcgggtccaagtgccaccgcggccgcgcccccggcagcccagggcgcgcttccaccacggtaccggtggattcgccgtgcgcagccggaagatggcgcagacgcacaaagcacaccgatgctgcgccatgatagggccggcgccgcagtgtcttccgggaaacatagtctttaggcgtaaaggcagcagcccggccttgaagccggatctcgcgatgtttcagggtgagccggacgcaggcgtgcctgcgcagtgcgcggaggagtgctgttcgtgtgttcgagtccctgggttgcttcctggggtctgtggtgctgggtgtgctatctgcgtgtgattctctagcgagagattgtgggcgagtgaccgagtgggcaaggggccgtcactgtgtgtgcgtgattttgacagtgtgtggtggtagcttctgactccgcgtgggtcgttgaatgtatgactgggaccgtttagcggtggatacacaactgtgtgcggctgtggaagatt

SEQ ID NO: 336296 - DNA, 806 bp, Homo sapiens
  chr19:56915147-56915953
  hyper
cgacagtgcccgatacagcaggcgctcaataagtggcgaatgaaagacagggcaaggcggagagagaagaaacagaaagggaaagagaaagcccgggccgccagagcgcttaatcacacgtacatcctaccgggcccctctccagctggctcaggctccacactggtcctccagctcccttttctcagcgatggactcacagccccacccggagcgctggagcgcggacgcggtcactgcgcgtgcgcctcaccgcgctggcaccccggcctggcagcctttggggacctgaaccagctgcgcctgcgcaggtggaacgggtggaacgggtgggggagcggacagtcgaacggcctgagagggctcagctggtccgggtgggattctgaaggccagcggaggtgggcttactagggaaaggggcgcagcagtaactacccgcaactgagcggcgggatctgcggccgcccggggccctcggccaacatcccagcatcctctgcgccgcgccggccccggactccatttcccagcggcccctgcggcctgccctagggctgcggcgcctttgtgagcgcggccgccggccaggatcgagccctggcccgggccctggcccagccccggcctccaaggaccgcgccgaaggaggtgcccactggagggaggaggcggtgaggagcgcgggatggagctgacgccgggagcggccatgccaccatgtgtgggaccgtgtgtgacagtgtgtgagaatgtgtgagacattaaggaaccgtgtgtgacaatgtgtttgacagtgtggaatc

SEQ ID NO: 336297 - DNA, 885 bp, Homo sapiens
  chr19:56988132-56989017
  hyper
cgcaaagccactgacgctaagtggcagacagacgcccaggcaagtcacacagtaacccaaggctacaataaacgcccacatcagcctgacactgacacacgcacacactccagaaacacaaatcttcacagtcagcgtcacacacccactcccggcttcccaatggctccattgtttccttcgcgtgggtcacgcagcgatacacatccgcggtcccgacatagctccctcacacacaggcacacacggctcgcctcacacgcggcgccaacttcacacttgggcgcacaagccccgagaaccacagcagcgaagggcgcaaaccccacgccgtggcgggccgagaacccacgcaggcgcgagcccaccgcccacgcaagcacccgcgcagacgcccacgccatcgtggatgcgcaaacccacgcgcgccttggcaggaacgtccacgcagtggcgggcgcgccgcccacgccctcagacacacccacactctcgccagcccccttacctcggtcttcccgggctcagaccccggcggcgaccaccgagacagccgagcagggactcagcgcctgcgcactcccctccgggaccccgggaccgcgcgctgcaccccccttcacacacgcaccacgcatgcgggcgcgtggccccgcccccaaacaaggccacgcggcgtgcgctcacccgcctctcggggacagtaccaccagccccggcctgaggccccgacccctcagcgccacacgcacaagcgcgttcgcacgattggtgcaggcggacgcgcgaggtcccgcgcctgcgcacacccccgaggctggcacgcacaccggtctcctaggggactggcgcctggccctgcttttcatcctctcaggagatcac

SEQ ID NO: 336298 - DNA, 481 bp, Homo sapiens
  chr19:57049638-57050119
  hyper
cggactccggaggcccccaagattgcctttcccttcccggtcggcagtgacgctcccgcaaggagctgacgcccaggcccttagcacctgtcacagccaagcacccttttactccggccctgcggtcccacccctcgccgcaagccccgcctcacccggtctgccgctgcgcctgcgcgactcccagaagcctttggggggtgggtgtgtagtcagagcggcctctgcttccggccacacccaggcccagcgttggccaccacttatgcggcggctgcggtccagggacaagtgagagcgacccgcagagggcaggacggacgggcgttgcataggcccggggccaaaccgtatcttgcaacctgagctccgagggccgccgcatccgtccctgcttgggactacgcttcccagcgggcattgcgccgaggccacgcccggttccggcggcgctgcctgcgcactggaagtgggaagcgcc

SEQ ID NO: 336299 - DNA, 935 bp, Homo sapiens
  chr19:57078365-57079300
  hyper
cgcgtaggccccgcccgcgccccaagccccgccctgtcatggttttcctctccagagggtagccgctacgccttaccgactgcgtttcagtgctgtcccactgctcctgcacaccccacgcctgcgaccctacccaccacggacaggcgctcctgcgagctggaagccagttctctgcgtcctgagcctggcagctgcatctgaacactcggagcctggcgatggcttccagaaacccctgcgccgtgggtcgcttcagtgaaggggcctgtacttcggcgacccagactccgggctgagaggcctcctaatccaaccaggaggaccaggagaggcccaaaaggggacacagggcagtgaccgccaggcttggagaggagccgctcctggcaaagccagcgccctatttctgaacgccgcctccgttccggactacacttcccaggggctattgcagcggaggacacgcccacttccggaaaggacccaaagccgggcgagtgcacgtcccgccggttgctgaggagaagggaggtctgggcggggcagcggccgaggctggactggggcgcggcgggggcggtgtcctggttcctgtgtgggcggcgggcgtgagcgtgcgcgtgtggcctggtggctgtgagtgcccatacgtggtgagcgtgcggtgctgtgctgaggaggggcgagcgcgcgcggggatggcggcccggtgtgtgactgtccggtgcgtggccgcgaatctgcgcctgcgtgcatggcccggcggcgtgcggaaggcggtgtgtgttggaatgagtgaagcactttaagtggccaagagcaggaaacccggccggaggaggcttaccccgttctcccctgtatcgactgcgtagagcccagtgtgggcaaagtcctagagcccggggaagttgcccgggcggggcagcctc

SEQ ID NO: 336300 - DNA, 462 bp, Homo sapiens
  chr19:57106524-57106986
  hyper
gctcagttggctccgctcggctccactcggctgggctcggctgaaaaaagccggggggaggtggcgcgcgcgggtttctgggaagcgtagtccggcgcagtccgcgcaggcgcactgccgtcgggcgggcctagcgggcgcggtcattgtcctggcagagcggcgagccggtgagtgtggctgcggggtcgcgcccaccctctacctgtgccgggggccggaacctggccccggggagggcgcggcctcggggagacggcgtgcaggcccaggtacggggagtgcagggctgggtgctggtccagggcgtgcgggcgcaggagagggcgtgcaggccgggaccgaggtgcgcctggagaggctgagcggccgaggagaggctgaggggaagctgaggggctaaggagaggctgactggaggctgaggggctgaggagaggccggggccagggagggagaggc

SEQ ID NO: 336301 - DNA, 375 bp, Homo sapiens
  chr19:57276614-57276989
  hyper
cgggtgccgggatgtagtgcgcctgcacgccgtctccagactacaactcccagaatgcgcggcgccccgagcgtatttccgcttccggtggcgttttagcgggagatccgagcgtctcggctggtggaaggggcgaggagctttgcagttgtgtgcgagtgtgtacaggtgagtttgtccgtacgcgtgattaagtgtgtgcgtgtgatcaagtgtgggggcgagtgttgcgtgagcaaacctgtgagagggtgagagtccgtccgtgtaggtgagggagctagcaagagtgtgagcgagtgcgaatgtccctacaagtgtgggcgcgtgatgtgtttgaaggtgtgtttgttcgagagggtgtgtgttggggtc

SEQ ID NO: 336302 - DNA, 269 bp, Homo sapiens
  chr19:57610688-57610957
  hyper
cgcaggaacgcggcctagctgcttcagccacgttctcgcggcgccacctggtggccatggaccgccatcgccgctggacgtcagggccgccaggcccagcgagatgtcacctcctctgaggagccttccaggatcgcacccggcacgcgctccacgcctcgttgtctgttcttcggagcaccgaccatgatcacaaatcagctcgctcgctgtgtttcctgccgggtcgctaccgccatgatccgcacgtagtggtcaaggctgaggtt

SEQ ID NO: 336303 - DNA, 804 bp, Homo sapiens
  chr19:57683198-57684002
  hyper
ggggcctgcaacctgctgggcgcaggcgccttgagctgccacgtctgcccttttaccggcttgggtgcaggcaagggaaatgcgtccccgggccggggggcgcgagcgggggtccggggccgcgagctggggtccggggagcgcgagcgggggtccggggggcgggggccgcgggccgcgaggggggcgggggccgcgagggggcggggcgtgcgagggggcgggggcgtgcgagggggcgggggcgcgcgagggggcggggcgcgcgagggggcggggcgcgcgagggggcggggcgcgcgagggggcggggcgcgcgagggggcggggcgcgcgagggggcggggcgcgcgagggggcggggcgcgcgagggggcggggcgcgcgagggggcggggcgcgccgggctcgtcctctccgcggcgctcagtggcagcagggagggccggtgagatgccagagcaaggtagggtcctgtatttggggaccgctgacgtttgggtccccctcccgcggctgttagcgctgcgtggcccgagacctgcggtcgggcggggattaaggctgctttccggagggccccggccgcgtggtcgccctgccagagcggttgatgtcaggcagtgctgggaggcgttgctctccgggttcgcttctctcctgttgtcctaactctgcatctctcccgggtgaatcacagagctgtaaactaaaaatcaaattctaagctcccagccaactgaatggacccctcctctcagctaagagcatggcaaacttaaccggaaacactagttcggccgc

SEQ ID NO: 336304 - DNA, 728 bp, Homo sapiens
  chr19:57702696-57703424
  hyper
cgccgtgaagcgttcctcccgttgttgaacacatgaggaaaactacactacttagaaggctgtgcattatgcgtacggcgggagctgggccaacgacggcctaggacggggacgtttccgacggctcacgccggtgggggcgggacttccgggttgctcgctgcggacgccattttcttctgcacttctgtctggagaggtctgtagccactgagggccccggtcggggccgctttgcaggtccctagtcaggaccgagcaggggagtaggataggaatccccgccgcacctttgtacgagcctgaccccttccgtgggtttgttcctgggtcgccgtcaagctgcggtctctcctcccccgcccttcagccccgcggtctccaggggcggcgccctgggtctggaacgcggttgccaccgaggaggcggcggccctgcgtctggaacgccgttgccaccgaggaggcggcggccccgagcgcgcctggaagccccgggcaaccggccagggtcgggcacaggtggggtccgtcaggccgcccggggctcctctgtcccagctctgcggcccagggggtgacgtgatggcggcagcggtgctgacggaccgggcccaggtgagtggacggtggcttcgcggttgccgcttccttgccagcgctgaggcggtttccgaagtgggtgggagcccaggtatcccctggatttgtcttcgcagtcgtcgttc

SEQ ID NO: 336305 - DNA, 536 bp, Homo sapiens
  chr19:57751590-57752126
  hyper
cggaggggaaataatgcaaggtggaagtcagagtccggagcctggtccagggtctctgcactggccctgaccctggcaaatgtccctgactcctggggctcgatttcctccggccaagaatggacggtctcgcgcttggtccctggcctccgagttgtgcccccaggacagaggcaggtctgagccgggctgtaggcccgctgcgacttttacaccgaggcctgccggctcaggatctgtcccctttgcaggtggtttgtagagaaaaactacattaactacaaggcattgccaggtgcgacggcgggccctggggccaatgatggtccaggacaggggcgtttcctgtgggttgcgaagcttggggcgggacttccggcatttggatgggacgtaatttgggagcgacggttccgtccacgccggctctagggagggggcggtgttccgtggccgcctccctggcggcgctggggaaatgagcaggtaggaggccgacagcgacctccgcgtctcggagcgaaccgtgagcctcc

SEQ ID NO: 336306 - DNA, 869 bp, Homo sapiens
  chr19:57831543-57832412
  hyper
cggggcgaatatccccgcctcctgacctcaattttcctaagctagaaaggacctttcgaccctccgacttgtgcccatagtaaagcggcggccctaagacgacgcgggggtccttgtgcgcacttaaatggagtcggctgcgcttggtgagttcccacacccggtagatgtgagggaaaaactgccttactcagaaggcaccaccccttgcgtcggccgcggactctaggccaatgacgggccaggacacgggcgatttctgcgggccagggcggcggaggtgggacttccgcttcgtcgcgtgacgtcatctccgtgagcaggattggccctggaacagtgtggggcctggaccgctgggtaggcgcgtccagcggcctgagcaggggagggtaatgaggctgttacgcgccttctccgcatcttggcgggagcctgacgccccgcttcttccctaacggggtgttccaccggcgcctgccgaggcctaggcctccgcagccgccctccgtctcctcagccccgacgctgcgcccgctttgtgcgcatttttctctggggaaactgaggctccgagtgcgaaagtcagccgaggtcgccccgcccaggacagagaagggctgggggtcggctgagccgcggcattcccgggccccgctagggctgcagggtctcaggatggcagcctcggcgcaggtgagtggacgaggttttggccttgctgctgctctgctacttctggaggcctcgtgggcaggcagaagccaagacagccacaggatgtttctttgtcgccgtcgtttatttaagagaagtggccgtagcttgtcatttcctttatccgcagtcctgcaatagtgttggcctcc

SEQ ID NO: 336307 - DNA, 834 bp, Homo sapiens
  chr19:57862401-57863235
  hyper
cgagatatcgttttcccagtcttttctccccctccctgcacgacgcctcttggcagacatccgggagaacccgaaaggcgctcgttgcctggttggatgcagggtacaaactacgttacccagaaatctgtgcccagctcattgttagccggcgtgcagccaatgacagcccagaaactgggcgtttcctgctgctctgggctgcaggggcgagacttctggcgtcgccgtcgtgacgtatttttcctatgcccggtccgtgcattctggttgtgaaggctgagttctagagatcgggtcggctttctacgcggctctcgtggaacctagcaaagaaagacagtgaagactgcaggaccttccttcgcgcttttgttacaatccatgacccctgtcgtgggacgggcggcctctcgcggaggtgtctgccggggctgggctcttaccgaggcctccacacacgtcctcttgtccttgtctcccccagaagcagccgccttagtcttgtgagcgtttttacaccgggtagattgagacttggagtgctacactcagcccgagggcgtccagcgcggtggaggcgtggggtttcggctgagcccacagggcacagactgttcatccgcttctcatggcagcggcggtgctgatggaccgggttcaggtgagtgggggcatccctcaagcgcaccccggcctggttggtgtgtcctgggatgttcgctctcatcgcgcacttcagggtgctcactccgtcgcattatgtggaggggttccgctcccctcatcagtggcataaggtgtggaacggactcgaaggcgcaggggcagttc

SEQ ID NO: 336308 - DNA, 883 bp, Homo sapiens
  chr19:57874412-57875295
  hyper
cggtgtagccgttgagaacttgctgtgcttcacaatccgatatcataggtccctcacatttctgtgagtatcctagaccttacttcaagaaaatctggttatgtcgcctttaagagcaacccaagccccgtcctgtccgtggagtccggcactctgtttaccagctcccctgacggtgccactgagcctctatccgccatataaggactgaccaacgctctaaggcaagtccagaagcggtgtcgaaacttcataacccagaagacactgcggttctcggcagcgcgactgacccaatgaatgtgcaggaaggaacctttgcgtgcgtgcgtgcgtgcgtgcgtccgtcctcgtgctcgcgcatcgtaggagggcgggacttccggcgtcctcttgccgtggttgatttgattttctctggtgttttcactagttccggcctttggcgctctatgacgtcaccgaagtgacggagcggaaaagcgcgagaagcggcttggttccttgtacgcagaggcggtagtgacacaggcacaactgacagtggcagaagctcagctgacaaggactggggacggcggtgtccttgtcttgcctttgtcgcccccgcccctctcttccctggctggacttgcggagtccccgccgaagaacccgaggtgggtgccccgtcccaggcccccccccacctccgcccgacccctccttccagtgctgaagcccatagaaggggccctgcaggtcaggccccttgtctcgaagagaggggcgttcctgtgtggggtccccgtatcagctggtttgatgcagcctcagagctcccttcggggatctcaggttcagagcatggaggtgctgccaagtgggccgcgtcggggagccc

SEQ ID NO: 336309 - DNA, 472 bp, Homo sapiens
  chr19:57998890-57999362
  hyper
cgttatctccatctccatcatcatctccatctccgtctccatctccatcatcatctatcatctccaatctccatctccgaagttatgcccacttcctggaagtttggaggcacgggaactacattgcccaaaaggcgcagcgccgcgaggcggcgatccctgaccaatgaaaagaggtctgcccgagcgtgcgacacgcaatgggcgggacttccggcgtctcgtttggtattcactttcgcgactcaggtgaactaacctgcgagaagctggttgtgcgctgaggcgaccagcgccggaaggcacggtggcgactcacgctgttctcgccgctcagaggcgggtctgaggctcggtggcggcgcccagggtggcccgggccctttcctcggtcattgtctcccctccagctctactcacaggctccgatggcggcggccgccctgagggaccccgctcaggtgagcgccgc

SEQ ID NO: 336310 - DNA, 411 bp, Homo sapiens
  chr19:58011085-58011496
  hyper
cgtctccaatctccatctccgaagttatgcccacttcctcgaagtttggagccacgcgaactacactgcccagaaggcgccgcgccgtgagccgcgatgcttggccaatgaaaagaggtctacccgagagtgcgacgcgcaatgggcgggacttccggcgtctcccctcggcggttgctttcgctgccctcaagagaactcagcttgccggaagctggttgttcgctgcggcgaccagctccggaaagcgcggtggggacgcgctgtgttctcgcagctcagaggcgggtctgaggctcggtggcggcgcccagggtggcccgggccctttcctcggtcgttgtctcaccgccacaggctccgatggcggcggccacgctgagggaccccgctcaggtgagcgccgcgtcc

SEQ ID NO: 336311 - DNA, 706 bp, Homo sapiens
  chr19:58038572-58039278
  hyper
cgcggcggactgcggcgtggtaggaactacaccacccagaatactgtgcgccgagcgtgccggggccttagaccaatcattgcccaggaaaggggcacctccgtaagtgcgcaatacgccagaatcttccggcgtctttccggtggtggtcgtttttgctgcctgcgagcgcgtccgcgggctgggcgtttccggctcgctgggtccgggccaggtaactggagccggaaaccggtggaggtggtgtccgcccgcagaggagcttgcctggtctcggtctgagcgtcgcccagcgatttgccaccgcacgcacgccggatcccgggctttaccgcccgcctttccaggccccgccccgcctaaagtcccatggccgaggcagcgctagtgattacgccgcaggtgagagcggagtcctcggatcctcacctgggtcctgaggccccggactggggtcacctgcgtgggtctctgcagttcaggcctcttctccaggacagcgaggagttctgggtggggtcctcagagctgacgggcggtgaggtgaagaagggagagcgttgcgtaccgtgggggctgcacgcgcagagcctgggaggtgcgccggggtcgcgagcattcggaaacttgggggcggacctgtgtctgcagggagcagagagaatgaggagaagaaggcacggctgccatggcagcctgagcaacc

SEQ ID NO: 336312 - DNA, 793 bp, Homo sapiens
  chr19:58070535-58071328
  hyper
cggaaacaacatcctgagcgacgtccccggaccgtgctgtgcactgagacggacacacacacatcacccagggagccgttcaagcttcctcaaccccgggggggggaagagtaaatatttctactttgcgcgcgcaaaaatgaaggacgaggacagtaacgggacttgttcaaggtcgcaggcccgagaaaggacatggttggaagagccacgaggaggactgcggtcgctcctctcacctgtgaggggttccgggaccctaaaagccctatttcataccacaacgccgcgcaccccagaaacggggacgctccccacgccaccgcgggcctgcattccggacccgggaccgcgcgacccccttctaggcctctaagaagcaacggcagggactgcactgaggacgaccctgaaacgccgtccttccgctcgtcgggcccgggacactgaggccgggtggccgcggggagccgagccagtctgctcacctgcgctgcgtccttcgtctccgccatccgaccgttggcaggacgaggccgcgtggggcagctcccacgggctcaaaaccctaccccgggtcctacaacggtgcggaggtgagccccagtcgccctaccatccttcccagcacagttctgagagcgcggaccaacacgccccaccacaaacgtccacgccagcgaggccggaagtcccgcccctgtgtcgcggtcgcctgccacgccttttcctgcgccggcccactgccttctaggtaatgtagtcttgtcccgtaagaggccaggcttggctc

SEQ ID NO: 336313 - DNA, 81 bp, Homo sapiens
  chr19:58090396-58090477
  hyper
cggtgccctccctgagattcacccggaacaagggctaagcggcccgcggagggcgctaggaaaaggcgcgacaccaagagc

SEQ ID NO: 336314 - DNA, 871 bp, Homo sapiens
  chr19:58094913-58095784
  hyper
cgtctcggccccgcctcccgcctctgggtacagtcaaagggctcaggtcagagcaggagcagccgggggcgcggcccccacgtggcctcccgggacacgtgcccacagcgcgacacctaagtcgctcctttcacagaatagccttggccccggcacggcctcgaacgccttgaccccgcaagggaggggcacgaggctcctttgctcccgcaggagcgtcgaatacgtatggaatacgcgtcggtgtggatctggcctcagcttcctgagcctgaatcaatgcttctaatcacgtgggcgctcagccgcgacgggaccacagaaatcgaccagcggcctgtttaaggagcgacaaggcccagccctctcctgcattgtggcgacgccatttccctgcgcccccagcgcggccgcttggcttttgtttgaggtgacgctgggcggcagcatccttccctcagccctggggaccagcggggactacagaacccagaaggttttgtctccagccgcagggatgctgagccaatccgcgctgagaaaagggtcgtttccgctttgggaccaatgggtcggggagggacttccggtatcacttcagtggcggtcatttttgcagcgcttgggtgcatccagaccgtcagagctttgggagcgctttgtttggcgacagtcggaaggcgcgaggggaggggtcctcccgctgaacagtgggggttctaagggtcggcggcggcggggttgacggctttgcctaggtccctccgcccgtagctgtcgggtcccggccccgctctgcccacagactccgatggctgcggccgcgctgagggccccgactcaggtgagcgctgcctctactgggcctcac

SEQ ID NO: 336315 - DNA, 697 bp, Homo sapiens
  chr19:58111093-58111790
  hyper
cggggtcattcctccctgaggtccaggagaagggcgacctctgccagcccaagaagcggtgagaactacattacccagaggcccgtgagccaggttcttggcgtggagccaatgaggctcaggggagggacatttccgctctgtccaacttgtcggagcggaacttccggcgtcctccctgtggcgggcactttggcttgtgtcagttccatccgcgggtgccggatctggacctaggtgctgacagcgagaaggcgcgaggagagtcgttttctcagctgcacagccggggcctgacggtcgccggcggtggtgacagctttgctcttgtctccgcccggatcgtccaccgctcccggcccgctccgcccagagtccgatggcggcggcactgagggccccgacccaggtgagcgctgcgtcctcccggcctcctctgccctccccacccgaaactgagggacgcgtgaagggttttctgcagcccggaccgcactgtccggcacagtgaggcgctggtgctggatctcgtttctggtagtgtggcagggagcgggagagcgacacggtcagggggctgcgcgggcaacagcttggagctgcgcctgagccgggaggctggggagacccaggccggcctcacgcgtgcaggtagcagagggtggggcagcgccgcgctgcattggccccactgagt

SEQ ID NO: 336316 - DNA, 790 bp, Homo sapiens
  chr19:58125385-58126175
  hyper
cgaagccacgccctgacctcagagtctcagggcataatttctcagcgcccctcgcagtaccatttggcctttgcccagcgtgcaggggagttagccgtcaccacggccaagtgcacatgagaactgcattgcccagaaacctgtgcgccgcccggcggcggcactcttaggggcgtctccctgcggacggaagctctctgggcgggacttccggtatcttcctcgcggtggacatcttgtcggctcttaggtggaaccatcggagcagaagctcggggttgctgggcggttccgaggtgacggaagcgggagggtgcgggagaagtcgctgttcgctctgcggagtggctcgccagcgaagaccccgcctgcgcccccggggacggacgaccgcggtgccagggtcccgcgacctgggaccccctcgcggctccgggtggtctacgaactgtgatggcggcggccgcggtgatgggcccggcgcaggtgggtgctgcctttcccagactttcgcccgccccaaatcctgaagttccaaatgaggagcgcctgtctgagtccctgcagcgcaggccccagtgtccaaggcagcggggcgctggtgggtgggggcgagtgtgactggcagaggggcagcctgagcataggtttggagctggactgagcccgtagcagtcgggagcgtgtgtgaaccgtagtcaggcctgcaatgtcgaggggagaagttgctccttcattgcgaggacgataggagccatggcgggttttgaatggtggagggaagggatcc

SEQ ID NO: 336317 - DNA, 797 bp, Homo sapiens
  chr19:58144201-58144998
  hyper
cggggagctggaagaggcaggaaaaggagcacactcgaagtaacgtttattggggaaaaaaaacgcctacgtgtaaatggacccgcacagctcaaacctgtgttgttcaagtgtcaacctacttaagacctcaaacaccgaagcccctcagtcgccctggaaggcagcagacgcagcttcctagcgctcccagctgtctgcacacaaggcgccctccgtcgcagcctgggggagactacattacccagaaagccttgcgtcgagcggcagtactttgatccaatgaaaatccaagacaggggcatttccgtgtgggtctacccccgccccccccagggcgggacttgtggcgtcttcgcagcggtcattttggctgccctcccggaggtccgttctgtctgtcagccgctttggtacgctgcatcgggatcgaagtgacggaccgtgaaggcgcgagagtcaggtctgagggtcgggggcagagccgcccgcgaggccggcctggggatagcgatgctcgggttccccccgggtcgcccgcagctcccggtccagctccgcccacagactcggatggcgaccgcactgagggacccggcttcggtgagcgctgcgatctccgggcctcccccggccgagattcttaagtcccaagtgagaggcaccagctcacgtctctgtagcacagggtcggggacactgaggctcgtgggtggggcccctatttctgacatccgatgtggtgggcagggggacaagggacaggaccggcgcgtgcagggcttggacgggcaacc

SEQ ID NO: 336318 - DNA, 787 bp, Homo sapiens
  chr19:58193143-58193930
  hyper
cgaagtcgccatttccctgcacggggcacagcacctcagaatacaagttcgcagaggtcaaagcagtggacacactccgaagagctccgtggagttttggaaactacattatccagagtgcagagcgcaaaacggcggcggagttgagccaatgacagcccaggatagcaacacttccgcgcacgcgcagcgcgacgggccggaacttccggcgtcctcctcgtggcggtcattttggcctctgtcctgtttgtccagcccgccagtttctgcagtggaggtcgcgactgagggacgggacagagaagtcgcgaaagtgggccagaggttctgcgacaccacctcgggtgagctgcgccaggcccgggatagggactgttgtgttcgaatgcccgccccggtcggccgccgctccccgcctagtccacggagctcaatggcggcagtcgcgctgagggactcggctcaggtgagttgtgcgtcctccgggtctcgcctacctcccccagcagaagccttaaggcccagtgagggatgcctgctcacagccctgcagcccaggccccagtaccctggacaagaaggcgcttgtggattggacccgtttgtgacgcccagtgtgtacggaaatgtgacgggcagttgactggcgcgtgcagaacttggagctgcgactaagctgggggggattcaggagcctggggtccgtctcgggtctgcaggaacatagagtgaggcagagttgcacctgacgaatttgacgattctgaggacactggcagccttc

SEQ ID NO: 336319 - DNA, 815 bp, Homo sapiens; identical to SEQ ID NO: 240885
  chr19:58219952-58220767
  hyper

SEQ ID NO: 336320 - DNA, 881 bp, Homo sapiens
  chr19:58238341-58239222
  hyper
cggtctcctcgtatccatcctcgcagtccccaccccaaactaatgttctcccctgagcaaatttcgagacacttaaaatcccagctaagatcacgtccttctattcaaaaccctcagttaatctcaacgccctcagaatgaagcgacaacttctcagcctgccattccagtcacagttcctcaaactctgctctgtgttgatgagaaccctgtctcccaaatgtttgggggtcagcagcacccccgagcctttacctgcgccgtcccctccgcccgtaactctcccacacccacccacaccgagataggaccccgccccaagagtgcgtcgctgtcctgggacacaggggctgcaggcactttacgattcggagtcggagaaagggtgactgagggcccggaggacgcagcacccacccgcgcggagtccgttagctccgccataggaccgtgggcgcggacagctgccgggagcggcaggcgtctcgatcggggacgcaggcacttccgtccctgcagagcatcagacgcgtctcgggacactggggacaacatctcctccgcgctttcccaacacctccacctgcggcccacacaagcgttacagaaccccggccagggacagcctgacagaaacaaaatgtccgctacaaggaggagccggaagtcccgcccacgcaccccccgcaggcactgaaacacccctctcctgggccctcattgggtatgcaacgtataggtttgtgggtagagtgtggttcccactgagctatccttcaaggcaggggattctcggcctgggctcttgggaaaactcgaagtaggagggccaagttgtttgggaaaagtaacccgagtttcaaagggctgacaggacttcc

SEQ ID NO: 336321 - DNA, 627 bp, Homo sapiens
  chr19:58258088-58258715
  hyper
cgtcgaatgacagcgcgtcagagccaatgagggctcaaaataaaggcgtttccgcggaaacagtataaaggtgggacttccggcgtcctctactagtggccattttgattggtgttgggtgtattttccagtgagagaccgcggagtgttgggtcgtgtagaagtgactgaacccagaaggtggagacgagacgttgtcccgactgcacagaggctgctctgcagctccttaaaggcgctaggcgtgacccgcaccaaggccgggatcgggaccaccgtgcccgggtacctgcactgctcgccccctcctttcgaccccgctttccccacccagtcggatggcggcggccgcgctgaggcccccggctcaggtaattgtggcgtcttccgtgccctcaggtcacctcatctttacctaagtccaaaagcagagaggaagcggcgcctgctcaaggttttacaccctgaacccggcgtcgggacactgaggcgctctctatgggcccccgtttttgacacccgcgggatgcgctcaggagagctacaggcacagggagcggtgcaggcaaaggcctggagatgaactgagccgagaggatcgtaacctagggtccacaggcacctgtc

SEQ ID NO: 336322 - DNA, 781 bp, Homo sapiens
  chr19:58280766-58281547
  hyper
cgtatggcctcttctaagatgggagaccctcctccgcatctggacctggagtcgccatttcctagcgcccctcgcagtggagcttgcccctttcttcggaaagtcggaagaaagccaccttaagcgctgcccatgtctgggaactacattacccagaatccgccctgcgaaatggtaacgtggctgagccaatgaagcttcagagaagccgtgccattgccggggcacgtaaagtcaagccaggacttccggcgtcctagccgtggcagccattttggcctgtcaggtccatccggcgatgctgggtctggacgagctcgggaggagtggttgtggccattgcacacaggcggatctgaggttcggcgacgccgctggtcgcgacccgggacaggacaacgacaggaacaccgccgagcccgcgttccccccccgcccagagtcatggcggcagcagccgctctgagggcgcctgctcaggtgagcgctgcgacctccgggccttacccaccctacccacccagaccctgaggcccctgatcgtgagggccgcctcctcgcgtccctgcagcccaggcctctgtcagggacggagaggcgccggcgggtgggatccctgtttccgacacccagttgatgcggtcggcagagcgagactggcggagggcaaaggcctgcaggcgcgactgaggcaggaggatgcggaacacggggacatcgtgtgtctactgggaaagaagtgtgatacggagttatttctttttttttttttttttgagac

SEQ ID NO: 336323 - DNA, 543 bp, Homo sapiens
  chr19:58446258-58446801
  hyper
cgcctcacacgttgttccctacaggcgcctgtggaccccaggttccatcctcccgggtctgtcctccaggccatagcccgcgccggtccctgtgcctgtcgctctccccaccgcatcccacaggtgtcagaaacaaggacctctcccgcgaacgcctcagtgtcccgacgccgggtccgggctgcagacctgtgaacagtcgccgctctctcgctgcttcaggattcgggttaggatgaggtgacctgagggcagggaaggcacaattacctgagccgggagcctcagcgcggccgccgccatcccgagtacgcggggaaagcactgccgggagcggcgggcgccgttacggggcctaagatctgcctctgtgcagcaagaaggactcttcaccttctgggttcagacaccgcggttcggacccatagctccagcgcctctcacctcacaaaccgcagaaacacacccaacattaaccaaaatggtcgctaccagagaacgctgagaatcccgccactacgttacgtgcgcacacagaaacgc

SEQ ID NO: 336324 - DNA, 911 bp, Homo sapiens
  chr19:58458447-58459358
  hyper
cgtagatttcataaccctttacagccaagggaaacgtagaaagagccaggcctcagagaagagcatctatggcggtattagatgggctcaagccaccccgtagccccatgcctggccttggagccgggtgccctcgcaatggctgtgtcacctctgtgccccagggctcagtggcgcctctcatcaggggctccttgccagtcgcgccctcccttccctagcacaccaggtgttggaaacgggagcccctccggcgagcccccgtgtcctgtcctgggcagcagggccgcgagcaagcgccctcgggggtgctaggactagcgtggggagggcggggaaggcccagaggacgcggcacatacctgggccggggccgtcagctcggccgccgccatctgactctgtgagcggagcggggccagagaggatgtccttattccgggccgggcctgggtaccctgggcgccgccgagcctcagccacgcctctgtgcagcggggaagactcctctcgcgccttctcagtcagtcacggatgatgctgacccagcgctccggggctttctaccaagtaatcagtccagacaaatgccaaaacgaccgccacaaggaggacaacggaagtcccgccgcgaccgcgcgtgcgcttacggaaacaccacctttcggaggcctcattggctgaaggtcgccgtcgcccaacgcaggccattctgggtaatgttcccacaggcgcacggcgggagagtgagggtcgcctccacctccttccggaagtaaaggccaaacccctgtagggggcgctgggaaatggacactccaggttggggcggaggcgaggcttcgttctttcttaaaggagacgtacccaggtttctaccgattgctgtctgccagtgtttgtttggagac

SEQ ID NO: 336325 - DNA, 775 bp, Homo sapiens
  chr19:58545121-58545896
  hyper
cgtgtctggaatgccgtcgttttgccccgcggccccatcgtacatgcgcatccccgcagccgccaccgtctccactttccgcagcagcgtccctgacgctgcgcgacccgttgccaaggcgactggaaccgcggcccgaggtaactggagggcacggcgggggcggggcgctcatcccaggcggcttctgattggcctcggccgcctcgtgcgtcacagccccgcccctgcccgggagtcccgcagcggtgacttgtcaccgacgcccggcgtgatccagcggaccaatggcggccgcccgcggcgcgcagggtgcggggatggggtccgcccgcggcgttgggcgcgctcgccagcccaggggtcgccatgaccgagtggcccaggcccgagcgaagcccgcgcgcggtgagtccgccgcggcccatccgtccctccgcccgccagagcgtccatcgggacgcccacccgggagggtctcggcgccgcgtcggcgggagctggcccgggatcgcggtccaggggcgcgcgtcgggggaggcgggcccgggcccgggagggggcgggccgggccggggttccagagcccatcgggagtcctgaggtcgccgtaggggagggaaggggaaggctagaggccacgcggggcggggactgggggggctggggccgccccttccgcagggaccccgacccctgttggcatccgcctgtccgtttgaggccgaagcccctctacgtacccccattgcccgcccaaacaccgctcggccgc

SEQ ID NO: 336326 - DNA, 886 bp, Homo sapiens
  chr19:58609245-58610131
  hyper
cgcctcccctccacgagcctacacggggtgggggttgcactagttccctacctgcctgcagggcccctcaccgatctggatctcagccacctccggggggacccggcccctgccccgcactccacgcgaagggatgccagaccctcggcctcctggacgcacagcgggggctcgcaccccaaccccgggaacaccctggcccctttccctaacgctgcccactgaggcgtcctcaccgtctaccctgttggggtcgctctctgacccccgcgctgcatccccgggaccgacccacctgctgcgcagctaccccaggccggtcccagccgcccggagccccagtgcgcgatggcggccggcaaactgcgcctgcgcactgggcctcaccgcggactacgactcccacaatgccgcgaggctgtgccgcgcaccggggcgagcaagggagccgtgacaggtgacagtgcgcatggccaatcagacgcgagtgtggcctcccggcgtcccgcccactccggcgcctgcgtcattttgggcaccatggcaacgaagtaaacaagcgggtaaataatagacccctgacagccagagacccggagaaacaaagacggtgagaaacggagaaacaaagacaaaaagacgcgcagaccgggagggagagaagcatgaaggcccacagacgctcgggggcagaccaagacgccctggggtccccgaaacagagatgtacagagtcggacacggaaagggagagaccagctcacggttaagaaaggagggagaccagcccaggatcaagaaagggaaagaccagcatgggctcaagaaaagaaagagaccagctcaggctcaggaaaagagagagacccagagaaaaggagcactc

SEQ ID NO: 336327 - DNA, 652 bp, Homo sapiens; identical to SEQ ID NO: 226051
  chr19:58661655-58662307
  hyper

SEQ ID NO: 336328 - DNA, 984 bp, Homo sapiens
  chr19:58665973-58666957
  hyper
cgacacactcataagcagccccttcctcgtcctttttttccttctgagctcgggaacgtctgctgggggtgagggggactcgcagaccacccccccccccgccccaggcggaggtcgggggccgtcacctggccaggtgtccggggaacggctcgggcggctgacaccgcagtccgcgagaggcgaggaggatccttggactgtgggcaggatcgcaggcagcggaggccctgcccggaaggcgggatctggggacgatccccattcctcccagccgcagacgcggagcccacaggagtccccgcagccctagcccgtgcacccacggcggagccgaggccgcgactccgggcctgttggctggaacccgcagccgtgtctcgggccgccccggtagcggccacccctgagagcactcggccccgttctatcccgcagtggtttggggagtgcaggtcatcactcccacccgccaaggcggacgccggaccctccattgcgcatgagcgcccactgcggcgccgttgctgcgcatgagtgtgcttccaccgcctacatctcccagaaaaccccgcggcgcggcgctccaccgcttccgccctcgggttgcgttagccgcgacgatggcgccccccagtggcagcagggaggctgtgggggtgctgggcgttgcggtgtgcaggttttctgggaggatacctggcgccgaccttgaagggaccccaacgtgagagggaaagacgcccgtgatgccaaggcttgggcagcggacagccaaaatcctgaaaccccgcggtgctccctgtgattcactttccagaggcccctcagtgccccgacgctggcccggagggcggtcgctgactgtcttgagactgaagctcactttcggatcctgggcgttcttgccaggttttttttattaatacagagaaaaccagtggctttgtgacagttagttttgaaactccctgaggagggccg

SEQ ID NO: 336329 - DNA, 1023 bp, Homo sapiens
  chr19:58694209-58695232
  hyper
cgcgacttccgtcttccagtccccctccttccccaaaagttgcgtggactctagccccgcctcctacattctccccgccctccctgtccccgcccctccacccagatggacggccagttaggcccgccccctgcacttccggccctacccgcccttcctcttcccaagggacgtcataattaatcccgcccccaccgccacccaaccaagcatcacccattccagcacttccggcctgacccctgtccagcgcctttcctttctccagcttctgctctgccccaagagtggtcgccttcgtggcagggcacgactctctcccagctcgggtcgccgcccacattagtgtggggccctgcggcctagcgtccctcaccagaggcctccccttgcctagctggaccgccgagggacatcgacgagtatcctcctcctgctgtccccggcttcgcctgccgcccctaaccggccagtcaagatggccgccgctgggtgaggcaagctggcgcgccgcgggggcgtctgggagttgtagttcgggacggcgggctgacgcacttcgccgccggccgacgggcgccattgtgcggcgcgcgccgggtgagtgccgcgcgaaacctgcgtccgtcgggggctgcgctgggcgggtccagaaccgttagttgggggcgagcgcggcctctgcattttccgccgagctcgggtaccctgagccggccgtgcctgcagtcctcccgccgctctgtgggatggggtcggtgacccggaaccccgaggggagacagtgctttcggggcgccgcggtggagagaacagatcgcctccggaagcgtggggtctgggccagggaggcgatcccctccgatgcgcgggacagaggaggctcggtgtcctctcggggaggggaaaactggtcctatccagtcctgtgggagtcctatgactcactctgggcgttttccagtttgggtggacttgtcatttcccgctgagggagccgttcctgggcggaggctgcggtag

SEQ ID NO: 336330 - DNA, 878 bp, Homo sapiens
  chr19:58739694-58740572
  hyper
cgactgagcgatcacctaggacgaatcgcctccagttagcgtgcttccaccttccactcggaatgctccaagcagggcactcccggggctttgtttctatcactaggacgcgtccccacgcccaggctgtccctgagtccctgccacaggcgcagatgttggcgggcgcccttgcccctgagctcccggttaacggccttggactgttctcatggctcagtcttggtctctctccccagcagggcaaggcgccgggaaggcacccgagatgacagcgccgagccccataggcgctagtcccgccctggacgccgaccgccgcctccacagtctcggcttcggttgctggatgagaaccagcgtggcccgtttaagggggaggggacaggcgctgcaaggagcagagccgcgggaagcaactccctaagccacaatgctagtcgcgaacacaggaaaaagctcatcccgccgccgcggggccccatgctcccgccggcaatgactatgcctgtgggagcaacggctaccggcgcgcggccttctgggagttgtttgttgcgcggagcgcgggcacgtccgccggccaccggaagcaccgccattggccggtgcgtgcaggtgagtctggcggcctcaaggttggctcggaggtttcactgttagccgggtgcggccggagcgcaggaccaggccagagccgccccaagtgatctgggcgtgccggagaaacgagcagggcctgcgggggtccctcatgcggcgaggccgagcaagggcaggggcctgatgggatcgggatctctccggcctcagggacggggaaggccggtccagtcaggtttcccctgcaggagcgcccggctgggtctgagcttgtc

SEQ ID NO: 336331 - DNA, 926 bp, Homo sapiens
  chr19:58951200-58952126
  hyper
agggctagccctgccgctgggccgaaccctcacacttccgctgggtgacggtcgcactcaggacctgtcttcccaaatgcaaaatgcgcgcaaggcctctgggcaccgcagggacgaaggctgggtatggagaccctggagacgcgtggcgctggctccactttcgggaacaccttggctcataaaagcagagtaattagccgggcactatggtgcgtgtgaaggcgcggtgacggtccctgcacccactcccgtgccctggtgtggctccagaggcctgctgtagcccaacccaccagcagcaaaatgaggaccgcaatggcggcgccggaagtcccgcctctcaatgacagctcggacttgccactggtccgagctttcattggctcaaggatccccgccgtctatgacgctatttccctatgcccgtcacgctactgctaggtcgttgccaaggtgattgaggaatggcgtttattgcgtcgctgctcaggcaacgcaaactacattatccagaaggaccctcgcggtgcctcagggctggccattggcagccgaggagacaggcacttccgggcggagtgtaagacgctggccaatcacagcctggcagcgggacttccgtcgtcgtcctcggaccatcactttggcatttctcgattttgtctgcttctgaagggaccgcgttgtcaggcgagggacggaatcttggaggctccctgggcccatggaaacaggagcgaggaaggcacgagagtcggggaagttccgccttcttgacatacaagcgcccccaccgcggcgaatatcgcccctgagcccagtgttcgccccccacaacaccgcaccccccttccccaccctgtgccttagataaagccggcccagtgggaccctcaggttgcaccgcgcggaggtgtccgcgg

SEQ ID NO: 336332 - DNA, 523 bp, Homo sapiens
  chr19:59010487-59011010
  hyper
acctggcacgcacacgccatacacgttaacctgttgcaagaagtccacctgcgacaacacgccctccacctcgtgcgtggacacgttctcgcccttccatctgcaaggagggagccggcgcttgtgaccacgcccccgggaaggagaggccccgcctcttgcccccgccccgccccttttggggatcaggaggcccagtcagccccgccccctcgaaaatcgagaagccccgccttcgcgtgagaagtcctgactccaagttccgccctcttacgacaggaaagtcccgcctcttcagcctgactccctctaggatctgaaagcgtccgtggccccgcgccagccccgccccgagaaaccctgcctcggaccggaaggtgtccccgaggcggtcgcggaagtagaggaagccttcgcggtccatggccagtacgtccccggtgttgtagtaaacgtcgcccgattgccgcacgttgcgcaccagcttccgttccgacagctctcgggggccgcggtagcccac

SEQ ID NO: 336333 - DNA, 553 bp, Homo sapiens
  chr19:59049750-59050303
  hyper
cgtcttcagggtggtgggctggagggggcgggccggctagcgaggcgtggccctatgaaggggcaggctgggcgtggaggcggtgactatgccgcggatggggtgggcccagatctggggggccgcgcgcccgggctggaacaaaggcagaggcggggacaaagccccgcggcccccagtccccatcaggaacaaaggccacacccggcccagcggtcgacgcgcccgtgctgcagccacgtgcggacacctgggagcggggcccggggaggcagtgccccgttaccctcacgccccgcccggctagccacctttacctgtgcgcgccttgggagtggcgaatgggtttcatggttgttcgcgccagtcctcgcggcctccaaacatcctccggaagctgccacctaccccgcccccagccgttgtcacctggaccggagacctcacgaccccaggggcaccgcacagggggctgaggcccacccccccggggccagcctcaatgcacccacccaccacgttttcaacgcgctgatagtccctaggcgggttc

SEQ ID NO: 336334 - DNA, 312 bp, Homo sapiens
  chr20:291047-291359
  hyper
gccggcccccaaatccaggccgccctgccccctccggaaaggggagttgggggcgagcgccgaaatctgagtggctctttcaagcctccgttgccatagaaaccggccgcacaggccgatgctgtccattacaccatcctctagcctcgcagccaatggactccgagctccatcgccagaggccccgccccccagctctggggagtccaccaatcagcaggtcccgtgacttagagccctgccctcggcccagggacaccaccaatgcgcttcgaccctgccctccttctcttcggtgtaacaagaagactc

SEQ ID NO: 336335 - DNA, 703 bp, Homo sapiens
  chr20:644483-645186
  hyper
cggtcggcgaaggccttgccgcagtgcgcgcagccgaacggcttttcgccggtgtgcgagcgcatgtgaccctgcagcagccagggccgcgagaaggccttgccgcagacgccgcacttgtggcgcaggttgtgcgtgagcaggtgcatggcgagcgcgggcatggacacgtaggccttgccgcacgtcgggcatttgcgcgccagctggctgtccaggctgcggtgcgtctgcttgtggcggctcaggttcgacgacgtggcgtaggtcttgccgcactcggcgcacgcgtgccggtgcccgccgcccgcctgcgcccccgcgcgccccgcgcgccccccggcgccccccgcgtctcccgagccccccgcgtccccgccgcccccgccccgccgccgccgcgagcgcccgtccgagatgaagaaggcgtccatggagtagctgtcggtcactgccgcctcccctcggaagtagcgcgccgacaggctcgactgcgggctttcggggtcgctgtactcctccggcgccgccggcgggtacgcgggctcggccggggccagctccaggcccggcttctggtccgcatcgtagctgctcgggggcaggcggtgcggggcgtaccctggagggggcgagaagtggaggggcggtgagaggaggcgccgaagagggtttcccgctttgagcgcgtcaccctttgcgc

SEQ ID NO: 336336 - DNA, 383 bp, Homo sapiens
  chr20:656952-657335
  hyper
cgaggggaacggagggaaagcggtcccgagcaggcggggttcaggcacatggggccgcagggaaggggatgcagaggaaagagtgcgcactggccagcggccaccctcccgcctccagtcctctccctctcccccagttctgaagtggccagggtggacgctcagctttcactagagtaagtctcccctcccccctgctcgggctcccactggagccccctgttgggtttggggttcaactttcttcttccagaactggtggggggagcaagtcccccacgccgatgcctggccttgctcggttggtcctgttccggtgcctagctcaggcgggcgctgcaagaggaagtgaaaatcgtccagtaattaattttcctgctgcc

SEQ ID NO: 336337 - DNA, 850 bp, Homo sapiens
  chr20:708554-709404
  hyper
cgggagccaccgcgcccggcgggatattatatttccataaggccctccgggggcctgggaacggactggtgcttgcgtgcggggcttttccactggttcccttccgtactcgggcttcccccgctgttgttactccctcaacgggaacacaactccaccgccgcctccgggacacacccccgccgcgtgggccggggtccgggacgcgcgctcagctcggccccgcgggggcggcgcaggagggaagggggtgcggaccccggaggcgccgcaggaagccctcgcccacccttcccggccgggccgggtccgcagctgacggtgggggtggggagcagacgggcggggcgccggccggcttgggggtcccctggtcccgtccagggggctcgggccgactccgggccagctgcggaggcgggggaggggaccccgctttccatggcagtgccgaggcggcgcgcacaaaggcgccgcgatcagcgcttcatcggttcgagtcaattatctgaggcgcggaggcggcgggcggggcgaggcgattccccggtggggctgcggagcgcggcgccgagactcagaggagggggcgctggggaagcggcttctccgtctcctgctccgccccgggcttcgtggcgaggcgccgtcgccccctggtggggcctcatccattcctcgctcactcgctcgttcacctttttctcaaccttacagcgggtggctctacggtacgagctgagggtgaagtgctgagaacagggcaagcgggccgtacctttaaatgccctgtcgggagctgggcccctctgagtggccaacctcaccaggaaagggcgctcagcctcgc

SEQ ID NO: 336338 - DNA, 717 bp, Homo sapiens
  chr20:1206688-1207405
  hyper
cagacgcccagcggcgccaagaacccggccaagctgacttggcgactcctcgcagcccctgctctggcacgccacacctcagacgaggctttgaaagtagggcgcagcctgagaggccggccggaccccgagtgctgtaggcgggctgggagatgggggccgccgccacccacattcccacacgcacccggcgccggcgcctcacgccgtgttagctcgcggcgccaagcccggagggtcccgcctgaggaagaaaggtcgtcgcccgcagcccagctggggctggaggcgcgacccggggtctcctcgcccgcacgcggaagaaaatgggcgctgtggcctcagtttccctctgtgagcacccggcccggaactctgaggagtcgtctgtggaggagcctttggcgtccccctgcccctgagcgtggccgtcagctcttcccagcccctgcactttgctttcccctccctcacgcccggaagggtctcgccctgcccggctcagccctctctccccacgcccctctcccagggtccccgcccggtccccttccgaccccttcctccctcccttcgctccctccccgccaccgccgccaccctgccctttgcgggccggtttccacggagtggccccatcccggtggcttcacgttgcacgaagtcagttcaatctggagactgaaaaagcctccgggacgtggggcgggagggtgc

SEQ ID NO: 336339 - DNA, 1208 bp, Homo sapiens
  chr20:1783336-1784544
  hyper
cgccagccattgcttgtgcgtcttcgcggagagagaggggggagatgccccggcgctccttacccggctggataagaccctttggggaacttgctgcttcgcaagtcttacttgtgaggacccggagggtttgcctttgaccccgcctgtgaccttaagaaaacccctttctaccctgcgcctgtcccacagctggaagtgataattttaagaatgaattaagcactcggtgtgtgacactgcggcactaagcactttctggactgtgttaggccccattttacagacggggaagctgaggcctccagaggcggagtaacctgctcatggttacaaagctggtcagcggcgggcaggatttgaatccagggttcccggttcctaatcctctgcttttaccacttaatttatcctgcctccaagggctgctgggaaaaaggcggatttcaaaggagaagcagctaaggaaaagctctggaaagggccaacggagcggatattcccggagcccctctgcgagccacgcgcccctctgggaagcccgcttccccctgcagacaggcgctgtgacacgcttgcgccccggtcgaacaggcgaagaggccgaggcccagagcggcgcagggcgagcctggaggctgcgccccagacctggaccagccacggacgccgctcccgccgctccctccgctccgctgcgctccgcacgctggcgccggctccccgaggccccgggcgccccggccgcacgcctgggtaaaaggtcccgaggagtccgcagaagcgcgcccacgcccgagacggccgtttccgccggcctgggaaaggggcggagaagggggtcgcccgggccgcagcgtgccggtccccgccggccgagccgtgtttggggccagtccccgcaccccgcttcttccccacctggggagcggggcgccgcggtaggggcactggagcgcacgatgcaccccgccaacgagtcctttctgcagacggggttcctgttttcatgcaaatgcctttgttagcgcaccgggaaccagggggacggaactgcagctgacgcgggctgcgcgccgcttttccgccttcgcttgattcggcctcaacgacttaaacgcgccgggaacaaaaacgccggcgccgcggaaaccctcaggagcggcacgagaagcgcggctccgctggggtccgcgagaagcggtgcg

SEQ ID NO: 336340 - DNA, 1233 bp, Homo sapiens
  chr20:1874963-1876196
  hyper
cggggagcagccgcgcggccggagtccggaggcgaggggaggtcggccgcaacttccccggtccaccttaagaggacgatgtagccagctcgcagcgctgaccttagaaaaacaagtttgcgcaaagtggagcggggacccggcctctgggcagccccggcggcgcttccagtgccttccagccctcgcgggcggcgcaggtccgggcccggcagggacggggaggggcagagcgggaccggtcggggctggggaccagccgcgcgggcttctgaacgggcacgctgtcggagccggaggctcgtctagtcccgagccccagcgggccgcggcggctcgcggggccgccttcccgggacagcagccggggcccgggcgccggcgcgggggaggacgctgccctccccggccgggcgcgcagctcgcagccctcgctccctcccccggggcgcgcaggcgggcgctcgctcgcagagaaggtgccggcggggccggagccccgaagcctccccgggcggcgggaagacgggaggaggggaaagggaaggagggagggggtcgggctgccgggagggcgggggcagcggccgggactgcgggccgggagcgagcccagccgcccgcgccgtgtggagcccgggcggggcaggtgggcagcggcgggggcggctccgcgcggccgggctcggccgtgctgcccctcgcccctgctcgcgcggtcctctctcccgcgcggtctgtcggtctgcgcgccgcctcgctcctcgctcctcgctctccccctctttctccccctctcgcctctccgtgtctctggctctctgcctggctcccttgggtctgtttctctctcctgccgcctctctctggccgcccctggctttatttctcgcgcgcttggggtctctcccagtctccgtctctccatttctcctggggggcggggagggggggtctccaaaaaccgcggcggcggcggcggccgctccaggcgcccgttccggagtcggggggaggcccagccgggaggggggaagggggggagccttagtcatttccccgctccagcctgctcccgcccgagcgcgcactcacggccgctctccctcctcgctccgcagccgcggcccatggagcccgccggcccggcccccggccgcctcgggccgctgctctgcctgctgctcgccgcgtcctgcgcctggtcaggtaagcacccccccgctccccacc

SEQ ID NO: 336341 - DNA, 160 bp, Homo sapiens
  chr20:2668754-2668914
  hyper
cggggatctgacaggaagtggatccaagtgccggcatcacactctggggcctccggggggcgctatggcccaacacacagcgtggccaagcgcgcctcagcctaactcaccacttcctatctgttttatacggtttgcacccgcttaaggcggcggaggc

SEQ ID NO: 336342 - DNA, 1309 bp, Homo sapiens
  chr20:2731110-2732419
  hyper
gagcagtgaacacacgtggagaggcagtgtagaaccccccagcctggctctatttggccgctggccgagtcttctccatttccatcctcccgccccgccccagctgagccacccacttctcctctccaccccaccgcagtccccaccatcgcgcagccccccgcaccgatgctcatcgagcccttcgagggacactcggtagtgaccctacttagcctccccggagctccagtctaacgcggaaaggctgagcagagaaccgcatggggtgggtggggtcacgcggtcaaggggctgacaatcaaggaaaacctttggtagggagtgcctgctgagcccggctcaaccgaaacccgagggctgagtggggaggttgacctggggaaggaagggtggttgcagaaggaatgataaggaccgatccccagaagtgagtgctttctctttgccgggaaactaaaggaaatccactaagtcaggatcagaggtgaaggtagggctctgagactggtggattaggtcggggccaggctatctgaaaagggcggtgcggggatcaggaaaaggggaaggaggaggagaagggcgtggggagctgggtcagacgcgcatacacacacacaccccttgcacaacgccagggtaagcagtgaacacaacacacgtggagatgcaatgtagaatctggccgctggccggatcttctctacttccatcctcccgccccagcccaagccacccacttctccagttgcttccctggggtgcatgcaaacctctagccttcagatgctgcagagagtccacttgagccgtgataaatggagattgttaagttttttcttttttataataaactcctgatttgaccagatgaaaagagaaaactctccatcgagtcctgcccttaggactataactcatatgtgtatacggtttcccttttttctaatcacaaatgggtgcatgtgtgttcataccaagcgcctagggccgaggacagaggctggctcagtaaatatttgttgagtaaacaaacgaaagaactgaaacttccctgaatctcgctgccgggggtgcctggagttttccgggggacttgggctgggcctggtggagggggctgcagcgaggctctcggactgggcgctggcctgcttttggcgccctgcgtctcaccctgggagtggggggctgcgggggagacgtcctccaaacgccgcccccttccccagctctgaacgagcccaccattgactacggattccagaggctacagaaagtcattcccagacaccccggagacccc

SEQ ID NO: 336343 - DNA, 621 bp, Homo sapiens; identical to SEQ ID NO: 240945
  chr20:2780884-2781505
  hyper

SEQ ID NO: 336344 - DNA, 370 bp, Homo sapiens
  chr20:2785591-2785961
  hyper
cggcacggcggcgcttcccaccaccaccatcaccaagcccggccctgcccctcctctcctttcccttccctcccctactccttcgctcactcacccggctgccacgtcccgtcccggggttacataacccggagagagaagcctgagcgatagcctgcgggctggggctgcggtggaggagccaagggttgatgcactgcctgacctgccctccggctcctcgcccccagcccgtattctcctcggggagccggcagccctgggtctgcccagatccggagatgcccttcccgccctccctccaagaccccctttggatcctgcattcctggtcatctctccagaaggaaggaaacgcgtccagcggtgt

SEQ ID NO: 336345 - DNA, 146 bp, Homo sapiens; identical to SEQ ID NO: 240947
  chr20:2801696-2801842
  hyper

SEQ ID NO: 336346 - DNA, 257 bp, Homo sapiens; identical to SEQ ID NO: 226067
  chr20:2820747-2821004
  hyper

SEQ ID NO: 336347 - DNA, 232 bp, Homo sapiens; identical to SEQ ID NO: 240951
  chr20:3026336-3026568
  hyper

SEQ ID NO: 336348 - DNA, 582 bp, Homo sapiens; identical to SEQ ID NO: 240952
  chr20:3052454-3053036
  hyper

SEQ ID NO: 336349 - DNA, 633 bp, Homo sapiens; identical to SEQ ID NO: 226069
  chr20:3073286-3073919
  hyper

SEQ ID NO: 336350 - DNA, 207 bp, Homo sapiens; identical to SEQ ID NO: 240956
  chr20:3218713-3218920
  hyper

SEQ ID NO: 336351 - DNA, 684 bp, Homo sapiens
  chr20:3220266-3220950
  hyper
cggggacctccgcagggccacgcccgctggctgccccgcctcctgcatttatcccggtagctccggccgcaagtccttctcctcctcctccaggaagcgcgccccgactgactagacggacctccgtgcattccccgggctacgccctcgcccgctgagacggcgctctccgagctcggctgctttgggttttcgctgcgagcctcgccaacttatctgccagcctcttcacgtcctcggccttctatgaggtcaaggtcatggttcgccccctttttccttccccaaatggcccttgcgccctgtcccctttcctggaccggctgcgacccgcccggggacgcgccttttcggggcgcttagtctcctgcgagtagggcgtgtgcgcgtgtgggtgcgcgtgctgcgatgcgatccggcaaatgcagctgacgaacccctggcctgatccacggtggctcccagtagaaggctctacagcccttggaaacggaacacgcagctccgtaaagcgctaaccaacctcccgacccctccggccgccatcgctttccggctcagccgcgctgggacggagtcctcggccactgtgccctaaccatggtagaggaacggggacaggccggggcaagcccacctctgcgaaggaagggcttctggcgcgttggggaagcctcatgcata

SEQ ID NO: 336352 - DNA, 675 bp, Homo sapiens
  chr20:3229128-3229803
  hyper
cggaggctacaccctttcccccgggccagcttccacatctgcccagtggggcatttccccttgtcccacccagcgactggttgacaggaagcagggtgtctatggactggcggcgggcgccccttttcctcacctccctgcgcggccagcgggggcccggggtgtggtcaggtgggaggcccgcgccacgtgcggcaggaaccgcctggcgagtggaacccgagcttgcacggggacagctgatgcctttctggtcgctcctctagagctccgcgggctccggcaaacccccccgttagaacttgcggttccaacgcgcagcgccaaatctggcccttacttgacccgtcagcgcctccagtcgtccccatgtataaagtaggaccgaggagccacctcgccaagctttcactgcgcggaaacgcgcccatcaggctggaaaggcgtggttcctactacagctcggccgcggcaggctggggccgagaaccggcacccgtgcacggcggactaagacgagggtgagggacacgggtgggccgggagagccccgttcccatagccggcttccttgagcccctccccaagttctgggactccccaagttcccaccccgcaagccagtgtggtttcttcagatgaattttattcttactctccacgggctgctccggc

SEQ ID NO: 336353 - DNA, 768 bp, Homo sapiens
  chr20:3653212-3653980
  hyper
cgcactgggcccccgggcgcagcgagcagttgtgagcaaagcagcagaggtcgcggcactcctgggaccagaaaggcaagaagggcccaggtgagggcgcagcgccccagacctgagcggagagggcaagtgggggccgggcgagccgacttaacctggccagggccgcagtcacactcctcgcccgcttccacgaagccgttcccgcagagcgccggcggcaccgggagtccggggtccggggcattggagaggcaagcgccgccccccttgcggaagaaggcgcgcagctggcggcggctgcaggcgctgaacacgcgcggaaacgggtgcctaccggcacggggagggcattgggcatggagggacagtcccccaacccccgcgcttctctgatccccacccctgggcttggctacagccgccagacgcgcagagcccagagaggggaagtaacccgcgcaaagtcacacaacaagcgggacaggggacgatgcggccccaatagtgagcagcccgggacccaaggtggaatcgcgacccgacggtgctcctcccggtgtaggagtaacctcgccaggttactcggaaaataatcttcataccgttgagaatccactttgcctgagcttcttccctttaagcctcataaaccaccctgaagcggacactatgatcattatccccattttacagaagaggaaactgagggacgaccaaagaaacgcagcggaggaagtccccaggactagccgccccgccgcagcc

SEQ ID NO: 336354 - DNA, 730 bp, Homo sapiens
  chr20:3758243-3758973
  hyper
tgctacgggcacatcgtcgatgtcctccctactcctggcgatcccacgcctcaccccttcctctccagctgctgcggtctccgtcgccgaggtgggtcccaggtaagctcccaggaggggcaggggagcccctcagcggcccgggacagattcccccatggctgagggcatggggaactagcctggatggagacgccgccgtcctcggagctgggcggggacctgattctgggggtgtggacagagccaagggaccgccccccaaggcccagcgccgggagatgcaaggccgggcccaaggtgttggacactgctttgggggacaggctaggtctctgcacgtggcttctgggctctggaaagcggtccattctcctgacccggatctccggagtggtaggaggcggctcagtcccgggcctgcgctcctagagttcctgtcccatctcctcccacgctcacccatcccaaggaaggagggcactcgggccccagcaggctcgtgagagcagcgggctccgccctcccaatggtctatccatcggtgggtgggtccggcgcggcgtcggggctctggcgggtacccgggcgtccccgcgcggcccgggccgccgctcaccgctgcttacgctccgcctgctggagccgccgggagaggtcttcgatccgcacattcttgagctggagcaggtgctccaggcgccttaccttcatctgcaggacctaagcc

SEQ ID NO: 336355 - DNA, 687 bp, Homo sapiens
  chr20:4229708-4230395
  hyper
cgggtcccgtcggggtcctgcccaagttcctgtgacgcggagcgcggctgtccgagagcggagctgcctggcccgggcggcggccgggctccccgaggccggccgtggagtagcaccgaagagccggggcccgctacgcgcgcggcgctctgagcgtgcccggcaagcgggcaaagcggcggctccggggccgggcggtgcaggcagcggccactgcggcgctcccaactcggcgcggggggcgggaccgaggaggggcagcgccaggaaggaggagggggcgacccgggccgagagacgggcgccacactccagggtagaagggacccttcgctcaggacaagcgattgtgtcggggtccggggggctgcggcgctggcgcgcgctcgggtcccgcagcagccacccacgcctctccgcaggtgcccaagcccgcgctctcccctagcggtgccctttgcgttccttcccgctcctctcccggaccccctcccccttggccctcagcggcgtccctcttcctcccgccctctcccccgagtctctcggtcactcgctggtgcccttgggcgcgcggtgcgttgaaggcgtgagtcccgggtcttcgggatcccggctttggccgccagagagcagcaagcgcctgggatctgcggactgcggaccggacggcgcagtgccgctgcg

SEQ ID NO: 336356 - DNA, 1405 bp, Homo sapiens
  chr20:4803016-4804421
  hyper
aaaacacgttctaggcgccgggattccagatacctgggaaatagagtgcacgcagctgttgagaggcctcgcgcttggcttctcctatcactgaggcgcagaggtgctgtggacagcccagacccacacggcgcccgaggtgaaacagaaccctcagtctccctatgaggccactggcactctcggctgtccccagagctctccgacttagagctgaatgcaaagtaagcgctcgaaatgcagaagtagccggggccgcccacggcacctgcctcgctcggggcgagagaagacgccaggctgaggtcccagcgacctcaggcaccagctccgaaggagggcggggagaccgcaaaggggaagtgcccggagggccaacggcccccgcgcaccctgcgcccctctgaagcgcgccgcctccccgcgccggggactgggacctgcctctggggaatccgcctagaagacggcggcggactggggtcgggcactctccagggctgtcaggccctccccagccctgcacctgccgcgccgccccacctcgccaggaagtctcagagaccccggggatggggtgggagcgccttcccatcgcgggctcaaaaagaaggaaggacgcccccaggggtcgtagaaggaggactagctccaagccacaactttcttcggacccaaggcaggccggctggggctccgcgcctacacggcccctggcgggggtccgcgcgccccgggagccccgcggctcggggaggaaagaggagacaagagacaggcgaggattacggggctgacccagccggggtagggaccatcgtggaaaaactttggcgaggtggggggacgcggaaagagagcggcccgcgccctgcaccttgcgccgggcatcccgcgccagtgcctcgctcccagtgccccgcgccccgcgccccgcgccttgccttcaccccgggccagctgcatcgcgcccgcgccgcaggaaccgtggagttggaaagtgggggcgccgcggctggggggctgcttcagctgcgcctcggccagcgatcggcgggccgggctcaaatccagccaggctgggcaggcggtggccgcgcgactggggaccgggcgccccgccctcctcgctcccctcctccttcctctccctccctccagccccttggcctttttcagcccctaccggatctgctcgtccgctgtcctctcttttctctcgctcttcatatcactctccaccccttcgccttgccttcgcctttcttcctccccttgtctcctgccccctcctcttctcccctcccctctaggggcggagcttctcccctccctcccagacaatgctgtggctgcgtccccttccccgccagctcgtccaggctcccgccgccagcgattcttc

SEQ ID NO: 336357 - DNA, 1162 bp, Homo sapiens
  chr20:4981355-4982517
  hyper
catctaggaccaaacgaaggagaaaatcctgcgccttaaagtagtcacactcgaaatgtcattttttccccccgaaaggtggcaaggagggggactcgcgaccccccagggaacaggccagaaaggccccggggtcggaggagctgcttctaaaattacttcgcgcagtctttgtagaagggaagaaagcaagaatgtaaaaggcaccctcttgccgcccctcctgatgcccctgaattccagggggcgagacgatgcccgtgcgcaccaccgggggaggggcgagggaagcgaccccaggacgcgcgggcgcagagcccgggaggaggcggcggcagccagtggggttctgggggcgccccatttgcctccccgctgcgcggcctgagggcccgagcgcgctgtggctcccgtggcgggaaggggtgggtaccccgggggcccggcccggccggcagaacggcaggagctgagggccgccgggcatcttgggccccggggccagggtggccggcgggcgcggggtcccgggagatgggtcggggtgggggcgcgcaggccgcgccgcggggccggtgggtgacagcgcgcgggggccgtgccaggccggcctcgtgggcgcggcgagcacctcgcggccccgccggcaggtgcggcccgcaggccgggcagggggcgcggcggccgggctctcacctggctgcagctcgcgtggttcccgtcctgccgccgcgcctcggcgccgcagtgcccgctgcagcctccgcctccggtccccgcgacagccgcctgcaaaatggcgccgcggaggggcgggccgggggcggggtgcagcggagccgcccgcccccgcgccggtctggggcccacctccctccccgcccccgacccctgccctcgggcctccccccggggaggggctgctccctggcacccggcagcgctccccggaacatcccgggcctcgcacccagccgtccccttcccgttcctttcatttccctcccctgcgcagaaagatcgccccccttcgcgacccttcccaccagtcacacctgttcctggggacccacctggcaagcagagcgctggtccctgagtgtcctggtccaggtcccccctttttaccccgcctgccaccgagccctgtcattgctcgagc

SEQ ID NO: 336358 - DNA, 1627 bp, Homo sapiens
  chr20:5296192-5297819
  hyper
ccacatgtgggcgccgcgggatgctgggtagcaaggagatgacccagctgaacaatgcatttggtccactcctgcgaggggaggagaacgccgagggacaggaactgcgcgccagcaaaagacaccctaacctggggtgcgcccgccagctgctttcccaaggtgaaaacctccaagaggcgagatgcaaatcccagtggcgtccacacccggaggtgtcttctctccaggtcgcccctccgtctcatgcgacaccccaatccccgcagcctctgctcagcgtgggaccaagaatggggagtcctacccctcctcggctttccagccccctaacccaagacaagagggcgcgcgcccgggctgggacaggtcccagccgcattttcgtagattgcactccccgcccgggagcgacccgttccagcagcccccttcccgccccatcaacgcggccgcactgtcggcgtctagaggcgacatcctggcaaagacaggaatcaagtcagaaattcaggctctagaagcaaaggctgcggtgcctcctggctggaagaaaacggcgggtgggtggaggatgcggtgcgcgggaatttccccacggacgcttgctgtttcctgctcacctttcaggaaggtgcccctctacctgcaccctcccctgcaatttggagctcgtccgcgagctcagctacccgctggctccctctgcccgcgcccgcacaccacagactccgcttaccgtaccctacccggtcctagagggcccagaggggatctcctgaaaccaactcgcctgcttggagccagccccgacgcatatctcgagagtggcgggaggcaaagcagccggaatgcccgagaaaaaagtgggcgtcagaggcccttgtcctagcgactcccccaccgcaccgactgagtcccgggactgcagggatctaagcccttacctgtctcggcgcctcctttctgtgcgctctgctgctccggaagccggatcgagagtcacagtgtggttgggcgcaggcgggccgctcggttttcacctcgaggacccggacttgcacttgcagagccgctgcgtgggggatgtccctcttttttcctcgccccggcgggctcctccggcgtgtcagggtctctgggttccagctggagttggcgctccggccccacagctctttccagcgtctcggacctgtgcgccccgccccgcgctggactccgccccggggtccccgcctgcctcctagtccaggccaagggtggatgcccagctcccccaccccaccgcgtgctctcgggctggtgcgtccagggcgcgggcaccgtagctccggccgcgctgacgcgagtccccggcagcgggggcagcctctcgcacggatttcagcgccttcgcatcccgtctgaatcggaccacacagtagccgggtttctaccgtgcgcttgggaacagtgagcaccgccctctgccgccagtcgtggcaccgcacccgggtcgcgcgcgcaggaggggagagtcctgtcttccggaggtgcccagtgccagcgtccgcgcccactagaaggtgaccctttcaaggaaagcccggctccgacgagtgcggtgtgggcctttggagatggc

SEQ ID NO: 336359 - DNA, 721 bp, Homo sapiens
  chr20:5891878-5892599
  hyper
cgaagcgggacctcccgcctcccctaccatctcagatctgcactactcccctcggccgtccattctttggcccgcctttcccccacccccgctccagaccctgcacaccaggcgactggactggcgtaaatttccgcccatttgcgtcgccgcctgggggtgctgcttcgtgacgtcagggctgagctagggggcgcccgctcctggctgcccgctcctcccggccctgcggcccccgcctgccctttaaaagagcggggcctgcgccggccgcgccacaccgcggggaccaggaggcacgctggttttccggggccgctccatcgcgccttcctcctgcgcctcgcttctccggtccagccgccatcttcctttccgcacaggggccgccgagcggggccatgcagccaacgctgcttctcagcctcctgggagccgtggggctggcgggtgagtgggcgcggcgggccggtcagcaccgcggacagcgccagcctcgctcttccccgccgctcccgcagccaggctggcggatcccgggagagagggagggttgaggggaaggtttacctcttgcttcgtttcttctcctccctgggtgttttccttcagctcctcccacccgtttgacttggaaaaagctagagggcttcctagcccaaccaggggagcctcagtctttctgtatctgagttttcctctagataggaaggaagaaaac

SEQ ID NO: 336360 - DNA, 1654 bp, Homo sapiens
  chr20:6747996-6749650
  hyper
cgggcccagcggggaaataagaggccagaccctgaccctgcatttgtcctggatttcgcctccagagtccccgcgagggtccggcgcgccagctgatctctcctttgagagcagggagtggaggcgcgagcgccccccttggcggccgcgcgcccccgccctccgccccaccccgccgcggctgcccgggcgcgccgtccacacccctgcgcgcagctcccgcccgctcggggatccccggcgagccgcgccgcgaagggggaggtgttcggccgcggccgggagggagccggcaggcggcgtcccctttaaaagccgcgagcgccgcgccacggcgccgccgccgccgtcgccgccgccggagtcctcgccccgccgcgctgcgcccggctcgcgctgcgctagtcgctccgcttcccacaccccgccggggactggcagccgccgccgcacatctgccgccacagcctccgccggctacccgaacgttctcggggccagcgccgagtggatcaccggggaccgcgaggcacccgcgcgccgcagaccccgcgcgggctggagcacccggcagagcgcgccacagcgccgtggcctctgctgcccgggctgcgccagagccgcggacgggcgcgcagagcgccggggactccggagccgatccctagcgccgcgatgcggagcacctactgcaggagatcgggggcctgggacgcgctggccgaggtgtgatcggaccccaggctagccacaaagggcacttggccccagggctaggagagcgaggggagagcacagccacccgcctcggcggcccgggactcggctcgactcgccggagaatgcgcccgaggacgacggggcgccagagccgcggtgctttcaactggcgagcgcgaatgggggtgcactggagtaaggcagagtgatgcgggggggcaactcgcctggcaccgagatcgccgccgtgcccttccctggacccggcgtcgcccaggatggctgccccgagccatgggccgcggcggagctagcgcggagcgcccgaccctcgacccccgagtcccggagccggccccgcgcggggccacgcgtccctcgggcgctggttcctaaggaggacgacagcaccagcttctcctttctcccttcccttccctgccccgcactcctccccctgctcgctgttgttgtgtgtcagcacttggctggggacttcttgaacttgcagggagaataacttgcgcaccccactttgcgccggtgcctttgccccagcggagcctgcttcgccatctccgagccccaccgcccctccactcctcggccttgcccgacactgagacgctgttcccagcgtgaaaagagagactgcgcggccggcacccgggagaaggaggaggcaaagaaaaggaacggacattcggtccttgcgccaggtcctttgaccagagtttttccatgtggacgctctttcaatggacgtgtccccgcgtgcttcttagacggactgcggtctcctaaaggtagaggacgcgggccagggcccggggtgggtggtgggtgggagggggatttgggcagccactgcggtagagcccttccttacgtccaggccagaagtaaacagacccctctccagtccacgtgcaac

SEQ ID NO: 336361 - DNA, 1595 bp, Homo sapiens; identical to SEQ ID NO: 240990
  chr20:8112347-8113942
  hyper

SEQ ID NO: 336362 - DNA, 1412 bp, Homo sapiens
  chr20:9048369-9049781
  hyper
cggaccggctcaggcggctgagcatgcctagtgcagctgcgagcatggccccagtccccaatgcgcaggtgccacgtctccgggttttggtggccgccggccgggagaaggaggaggcggagtggggaggagggagccctccggagttcgggagcagcacgttgtgagggtccacacaagggtgatgccagaccgaacaccattagggcctgggtgtgagtgtgactcggaggcacctgggggccgttgtagggccgggaaaagccaggaactggctggagcagcaccccagcatcccagggaccaaagtctgggggatttgcatgtctgaggttgcacttgtgggaagactttttggaaccacttaatctctgtggctctgtgtaagacccgcgaaataaaaagaggcagtagtactctttggaagattgttttagggattaaatgaataaaaagcgtttagaacactgcaggacgcattgtaggcgctgtatgggtttatgaaaccgaatataaacaaataagcacgtcccccacccagccaacggctttgggggccccgttctggccagtcctgagcccctccacacggcccacggcgggctgcgggtctcccatccgaggagggtgccgcttttctgcccccgctccctgggttctgcgcccagcgccatcccgtgcgcccccgacccttgggcatggggcacatgccgcggggagccgccagggagaccccagaggagcgcgccgcgggccggcttccccggatgccccacccacctcctcttggcgctgcccaccacctgcctcggctgctcggcccccggctcgcgaggctgcgcccccgacccagtcggcgcccactcctcgccctgcgggctcgcggcaactgggcggccggcccggcccctgcccacccccagcccagcccggcgcgccgcactgggcatgctccgtagcctgggcaggttggggctgcgaggcgacagctcgggctctggagccgggaggcgagaacgaggagggaggctcgggggcaggggaggaggaagcggctggccgctgaggggcggcggggcccggagcgggggacgcgcagggcccggcggtgggcgggcgggtcggcgctgccccgtgggctcgctggggagccacggcggagacccccgccctcaactgaggtaaggaccgcgcggcgcggagacggggaggcggggaggccagggagggggtgcggaggcaggcgggagggcgggactggggtgcgccgggagggggcttggcggcggctctttatggcgaggagggggtggtggcgccgcgccgggagcagtaagtgagctgcaccgccaacaagatctctcacacacagacacacacacgcacacgcacacacgggcgcgcacacacac

SEQ ID NO: 336363 - DNA, 857 bp, Homo sapiens
  chr20:9487140-9487997
  hyper
agtgcccggaggttcggagcgagcactggaccagagcccaagttcccaagttcccattccacggggagatgcggactttaggtggacccggaatggaaggagggtttttgctgcccgcatgcccccagggctctttccgggaaatagaagggcgagtcctttgcttccgcagcgtccggtgggaaaagatgccacgtggcgcggtgcgggcggactcagaggccccaggcgcccccgggaactgccacttactcagggcccgcggtccctggcgaaaacgggcgtggcgccagtgctcagaccgtgaagtggaaaaacggatcataacctcgcgttaaggggaaattcaggtttttttctctgagaaatgtatccttccctaaccaaaatccagcacctagggccacccatccctcggtccctgagcccaccctctccctgcaggcacagctatcccaggttccggcccatcaagttgggaaatgagacgatccatcagtgccaggctcccgggagctgcagctggctccaagtgcgtggccggaggcgtcccccatctgcacgagtccccagagtcacccgggaataactgcgccgccgccgcctccgccgcctgggctcccgacctccgcgcgacccgcgttagctcgcgttgcctgctgtggctttgctgctctgggctacaaggccgggccggcttgggttgagactcccgaggctgcaggcgaggcggtgggtacaaacttccgtagatcctgctgtttctctgaagaagaagaaaaacattggccccggagaattagataatcctggggaagaaatagatttgggcctggggcctgcgggggtaggtgccc

SEQ ID NO: 336364 - DNA, 1204 bp, Homo sapiens
  chr20:9488578-9489782
  hyper
cgccctgaggcgttggaggtaggaggaggtgtgaatttcattcccgcctctctgggcatggagcttagcttagcgaatagggaccctacagagggaacaccaatgaatgagtccaccttctctcctggtcctagggcccgaacccacttgtctccagggctggcgccagccccgcgcacaaacaccgcttcctctgggtaaccgcctggactgcctgcgcgccctcggagcccgcctggttggcagtctctgcttcgatctcctctaagcagaatctattttctgtttggaaaatctcttacaggtcctggggttgtcccaggaccaaactgcagcgaggccgcgcgcccctggccctggaacgcagcatcctccccattttacctggaggctagatcgttggggctcttcgggggaatttccctgggcacggatactgtgctggcggtttagaaaagaaaaagaaaaagaagcgaagcctctgtaacctggtctcctccctctcctcggtttaataccctgcctcccctactagtctccaggcttttctctggacaggggagggacccgagaagcccgcggccagtgatcgccagggtctgtctcgtcgcccatcctccccgccccagagcaaggtcggcagaggcttcccggggcataagaacttcaaagaaagtctcagaggagccacgctaccaggaactttcgtcgccctttaaaattgtcagatagacaagtaaaaacagtaactaactaagggaacaatggactcttgtgacatgtgtaactcttccaggtaccccaacactaaagaccccgtggttcctgtcgccatggcctgaacgtactcaactccagccccggggctgacctctctccctgagctttggagcgggtttggacctagccgttgcaagtaggcatgacttttatcacccatcgctatacccagagcagctgctcgaatgtgccaaggagcccaactcgggtgcaaagcgccgacgtctttcccaggttgaggacatcgcgagccagaggtgcaggcagcgaggcgcccaacagtagaatgcatcttccttcccgcgggcagaagccgtcaagtctggagtccgcagcgggcgcgcgggccagcccagggatactgagccatgagcaaccaggcccacctaccgccgcgccatccaaaggtaacaccacagaccac

SEQ ID NO: 336365 - DNA, 751 bp, Homo sapiens
  chr20:9496745-9497496
  hyper
cgcgcatatgcactcaaaatgctctttgtaaaggtaactccgagcccagcgggcagaggggccgcaggctccgcgtgggtgtgggaagtggcggcccctaggtttaagaacccagacgctgcggggacgattgaagcgcacctccccggctcaacaggaaagccacaacatgtccaagggacctgaggcgacttggaggctgagcaaagtgcagtttgtctacgactcctcggagaaaacccacttcaaagacgcagtcagtggtgagtggaggctggcatggctggggagggagcctgggaactcgcagaacaggcttggagagagaattcctcaaggttttggaaaccgtcccacgctttgaggtcccaggccaagtcttccctcggcttgctctttagggcggaagaggcgggagcgcccatgagtcttctgggtctcaggccttgtagatccgccaggaaccgcaggcgtggggacccaaacgtcacccgtggcctgatcctagataagaagtcccttgaaggcctgtcgttccctggtgcttcaaaacgacctcttatgatttggcctttgaaggaccacggagaagggcaaagctgcattttaattttcttccgcatcctggttttgtttcttatgcgctaaaactgcaagggggcagtgcgactttccttttcagtcaggatgtgatggccttcagtgtctttttgcgcatggcagcatggctcgcacgggatattcagtcatc

SEQ ID NO: 336366 - DNA, 1020 bp, Homo sapiens; identical to SEQ ID NO: 241000
  chr20:9818837-9819857
  hyper

SEQ ID NO: 336367 - DNA, 844 bp, Homo sapiens
  chr20:10198139-10198983
  hyper
gcacgacttctaatcgcatccttcccggaaaagtacaaacagttcctcagacgaggtcccccacctcccacgcgctccccagccctccctccctgcggagagccccgcgacagcctccccaacacctgtgaatcatccgggaggctgccaccgccgagcgatccgcgcaccacccccttcccgggcccgggcacggccagggaggacagttagggttgttgctttataattatcacttttaatctctaatacgaccagcacaagtagcctttgtctccccgccctgatttgagcatccgagggccccccgaggcagcctgcacgggtaccccggggtttgcgcactgagtgaacccccagattcggccgtgtcccagccgtccttgctctgaatcccccacctcctcccggccgtttggacggttccctcggggcgtctgtgcctccgtggggtacccctaagacacccagcatgaaaccccagcaccgactgcaaattccaccgaaagcagagtcatccgtttttgccctcggcaaacaactcaacttcaagcctcgagtccttgcaaacccacgctggctgggctaactccgcttcccttctccttcccccgactcctgcaacagctcagagagcctggctctgacgtagttcaaaataacgtgcgccagcctcgctgcccggctgaccacagcaacgagagccacaagccctcgacgctgcttcgataacatgaagcaatcactcataaaaatagcaacccacgtagcctggccatatatggagctggcgagggtggacggggatgcccctacggaccctcttcggagaaaacaaatcgcc

SEQ ID NO: 336368 - DNA, 735 bp, Homo sapiens
  chr20:10415353-10416088
  hyper
ggagtttcgcagctcgtactcttcacagattagataattcacccggcatttccccatcctgcttctgggttccaggacaaaacttttattctcttttaacattaaaaaacatataggaagttatgttcaaacatggctatttttattaaaatttatccggcactgtgaaagctacctttcctttctcacaatctttcgcaccgaatatatgttccattcttgagctagtcattttccaatgttaagaaaacacaccacagaaaagcgtttttttttctctcggtcagttcaactgcctagcaccgtgagttaccatgatacgttatttgctaatgagagtcattggggtcccagcctttaaaaatagcctgcgtccggcgccatttttgttttgggcccactttgaaagccgcgatattctgaacagaggccatttttcttttgggcagattccacgggccatcgaagtgtttcgctgccatcttaaatcctggctgtggcctcaatcctgcagcgaagctgcccagatcattttgtgtttgggcggcggctgagttcccaaacgcgcgcggagaccctgggaaggaggaagtaagcgcgaaagtgcttcccttaagcttctgaaggttggctgcagttccggctacctgtgtagtccgagtttccacagccaggtactactccgccagtgaccctggacagtaacaaaacatataaagcccgagcccaaacccc

SEQ ID NO: 336369 - DNA, 951 bp, Homo sapiens
  chr20:13976116-13977067
  hyper
cggtgcctgcgcgggtgttaggttagcgcgaggcgtgacctagttgacaggctctgaggtgctgctgtggcggcgtccgcggggctgaggcgggtgggagccggagccgagcgcgggctgagggaggagggcggcgactggagagcggcgagcggcgagcagcgcaggacgcagagcctctttcactttttccctgctgagtgccccctcccacccctcccactccacacacaccctgtttgcccgtgagcctggggaacttgcagcttaaagccagccacccccacggcaacatgtaccccagcaacaagaagaaaaaggtgtggagagaggagaaaggtaaccggcccgtcgagtcctgggggtgcgggcggtgggggttagggtgggggcgggggtcaggctgtgtgtgccgcggcgccctccgcccgagctcccgcctcgcgccctcccggccggtgccgcctccctccggtgtccgtgtgtacacacgcgcacactcgcgcgcactccggcgtgcacgcgccgcccctgggcacctgcagctcgcgcacgtgtgggcgcacgcccctctctgttgccctcggcaccccgtcaccttctcccgaggcggtgctgcgttcgcctcgcttgcggcggggacccccaggcggcagccccgggcgcggcacaagttcctctgcaccgcagctgggacttgggcactgccggcctgggtgtcccgcggacaggtgcccgtcggcgggcgctcaggctgcagctgccgctgtgcctccgcgctccgtgcaccctcatttctttccttctcgcccctgtccccccagcccccgaatggcaaagcgtacccaccatcgggtgtttaccccttgtctaggtttccttccttcgctgccgcagcgtgacttttgaaacctggaactctaggggagccctaaaacgagcgtgttgtcc

SEQ ID NO: 336370 - DNA, 373 bp, Homo sapiens
  chr20:17209340-17209713
  hyper
cttcccaagcctcccgcctctctcccagccaccgccagggctcctccaggtgtgggggcctctccctcctcctaagggcgtaggcagtaccggaatttcgaccccagaagggtctggcgacgagtttgacagaggtctgggaagaggctctgggtccgccggtggcgcgcgggcgggtcttgcggaaaggaacttgttgctctggaaagcgtgggtggagcaggggaaagaaggcgccggcggagggagcaccccgctgtggttttggcccgtggcctgccggctgttttgagagacaccaacacaataaagaagccgaccttccttcttcactcccccccaccccaaacttggcaagacccaggacccaaac

SEQ ID NO: 336371 - DNA, 119 bp, Homo sapiens
  chr20:17919844-17919963
  hyper
cgcccctgccgcctacaggcagaaagcggatggtgcaaggtttccttccaaacggaaatcgcccttcacagagctgagcctgggaattaccacaaagaaacctcacaaagaaaaggtgc

SEQ ID NO: 336372 - DNA, 459 bp, Homo sapiens
  chr20:18039568-18040027
  hyper
cgggtgcgcccaggacaaccggcacagcctcttgtgtcgctgcggtcgccctcctccaggaggtcgtcagacgtgtgccagctgccgggtgctgcgggggcgcgtctggtcagggatgccctggagcccaaggctcacccaacagccagcctcacctgtctgtaacctgaccctccgcgctcccagcctacagggcccgggaatcaacacagcggttttccctgttcccttccgccctgaatggcccttggggacacaaccgcctggtaacggatttctcggcgctactggcggactcgcgcggcgcagggagccggggcgcagctctgccggggctgcgggcgggaccggtgcgcggcgcctctaggtctgccctcaaggagtcaccctctctggactgaactctgaactccagcttttctctaagaaaaaccagctaagaacgaaaaagactttgat

SEQ ID NO: 336373 - DNA, 128 bp, Homo sapiens
  chr20:19186754-19186882
  hyper
ctgccaccagggggcgcaccgccacagcgatcctaggaagagcatctggacccaatcattctgcagttctggggctggaaacctgggcgatgaactgagatgaggagatggacacagcactgtataac

SEQ ID NO: 336374 - DNA, 1388 bp, Homo sapiens
  chr20:19192506-19193894
  hyper
cgggaggcccgcgagaagaggcgaggccagaggctgggcgcgggcagccaagcgcactcgcggcgccccgactccaggtagcacgtagagaggaggctgaagagcccctcggttttccgaaagtttccagcgaatccttcttggtgaagatcggcctctgggaggcagcgtgtgtgcttcccgagagggggccccctgcgccgtccctcttcccctggcacagaagggttgaaggactgcacacagggatccctccccagcccagtctcctcccagcgcgccccctccccgccatgccggccagcgccgggctgtgtcccaggcactgccccccgccaaccctggcccgaccagcctcgccgctgcaggctgccgggagctgcgctagctcatgctcccagctcgctcggtgctccctgttcgctccggcccggccccggcccccatcgcgccgaccatggaataggcgggcggccccgcgaggcgctcctgcagccggcgaggccagagccagtccggggtggctttgccaaccggcggagttggccagcggcgggccctcctaccgtcggtccttccccgctcctcctcctctgccccctccgcccccgcctcccggccgcccccgccgcccccgccgcgccgccgccccaggccgagcgcgggcgcggagcgtgggagccatggcgcgcgaggaggagcgggaccccgagcgccgggaggcggcggcgcgggcgagcggcgaggaggaggaggagggaggggaggagggactgggcgatagcgacgaggagggcgacgacgaggagacgggcagcggcgaggaggaggaagaggaggcggaggcggcggccgggtgggagcgcagcgaggacgcgcggctgctgcgcgcagggctgcctcctgccgctgtccccgccgcggccgcccgcgacaggagcggccgccgcccgccgaggccgccgcccggccgcccgaggatgcggccgtccggcgacgaggaccgcgcgcgtcgccgccgccgccgccgccgccggagggaccttctgctgagccagctctgcttcctggcctcggtggcgctgctgctctggtcgctgtcgagcctgcgagagcagaagggtgagtgcacgctgcctgccccgagtgggcgctgcggctccggcggctcggggctcccggggctgggcgcggggctccttcgggcggcccggccggagccccaggataagcgggctgggttggcggggggagtgggatgccaggcacgaggactccccctgccccacgcagaggcatggaggtggggaccctgagcgccagcagccagcaggcttaggcgtctggccgccctgggaacatttacctgtgcccgcctgtgcgctgct

SEQ ID NO: 336375 - DNA, 78 bp, Homo sapiens
  chr20:19673407-19673485
  hyper
cggcgcgctgaccgacgatgctgagaaattccaccaggtggcgctgcgtccgctgacgctttattatcgggcgaaaac

SEQ ID NO: 336376 - DNA, 729 bp, Homo sapiens
  chr20:19739207-19739936
  hyper
cggagcgcgaggtggccgctggtcccggcagggtcaccgggtgtcctcagctgacctgtgcggggctggggtgagggacagctggagggtgcaggcactatggctcgaggtgcggaggtgcgggtgtgcgtgcgtgtgcaccggacggagtttggtagggacctttgaggagttctacctgcagggctgcctgtggggtgtcaagtgctccctgcgcctgagcgcgcgggtcagacccggtgtcgcacagctttgatccccagcgcggaccccactggtgagtccagccagtgtgcagggcagatgctccgaccggagatttcctcccccgggtggaaaagcaggagggttgttgtgtccgggcagggggcacttgggctgtcgcggtgattgatggctgcgcagcgggcggaggaggagccccggattcctgccgggaagggacggggccactttcccactttgaggcctccccgcccccttctgggcttggcctccacccttggcctgggctcccaccagctcggcgtccacccaccggcggtggcgcgcccctcgaccgcgcggggacagcaggatttgcagaagttcagcttgaaagcctatgatatgttgccaagaaatacagggcaagatcggtcccctgggccctgagaggcgcctgtcttctcagagctcttaaatccctggggctttcctaattccgcagtgtagcggcacttccttgcg

SEQ ID NO: 336377 - DNA, 148 bp, Homo sapiens
  chr20:20343543-20343691
  hyper
cgaaagtcgctgagcgccgagtgcgaggagctgttgattgttttctggttgaaagaagaagtgatgataaggctgggataaagtgagcgccggcaggggcgcagagcccgcagctgtatgctaatgctcacagaaaccaagcctccgc

SEQ ID NO: 336378 - DNA, 1465 bp, Homo sapiens
  chr20:20344271-20345736
  hyper
agaagagggaaaggcggaggagagaggaacggcggtggggggggaggagcacccgccaaccccatagcaagaacgctcgccagggtagaaagtatgcccttgtggaccccaggagtctggctgcctcttcgtcctcctgcggcaggcgaggcggggtgcaggtgtgagtggggtgggaggaaggggaaaggatcggggtcgccgcagcctttctggtcagtttcgctgggttttgtcagttccgtttgagaccgaggcgcacggactagcggccgccagcacctcacaggtggaggacacctcttgcgccccaaggtcaatgtcatcccgatgggtcccgtgccgtcctgactctccctgacctaattctttggttatgactttctcaccttctgggcttcgcctctgccagctttcgccgacgtcgcccttcccgccgcccgcccgggccttcctacccgctctcctccctccctggcccgacggtcccactgaggcaaaaacaaacagccctgagggcacttcaaggagcgtgcagtggccccgacggtactctcggggggataaaagaggtggccagccacgccgtcggcccccggccgaataatgggcgcgcagcagattgccagggggcacttgaaactcgaggggagggaaatacttgagcgcggtccctccccgcgaggacgcacgacgcagcctcgcggatcgtcccttgttcgctctctttcatgcactctccttttgtgtggaattatctaaacgggagatccctggcagctttatgctaatgcgccgaacaaaggcaacggcccgcgggcgggaggcccggaaggtgcctggggccgggccgggcggggtggcggccaggcgggctgcgcgtgtctctcgcgtgcccctgggactgacacaacaacccctcattcctgcaaatacaaagcctctcaccggctcgggtcgggcgcacccggcgcagggaggcgctggtccctccgggcggcgggcactgcagcggtaacgcacggttcctgccggttgtggctcgggggactgagggccgggagtgggggcttctgtgaagccagaagagaagtctgcagcagagtggtgatgaggggcgctgacacctcacccccaacgccgacgtctccaaacgcgataccctctgcggggtgagaatgcgggcccgcccggctcctcccgtgaggccagggcctcctgttctcctagacaccccaaggagccaactcctccgcagaagttccccgcttctgctcttatttccaagcttcgcgctttctacaaactccctgttgccttgactttgatttccagccgtggtgagggtcagagtgaaccccggcgcgctccccgacggcatccccgcacaccaggataggagaaattggagggcctggggcctcgggctccgcagtcgtcggaggaagaacccaccgcggggtcc

SEQ ID NO: 336379 - DNA, 3285 bp, Homo sapiens
  chr20:20347544-20350829
  hyper
cggctccgtgggggctgcgcccagacaggcagcccctttatttcgcagcgccttgattggagcccttgatttagcatctgatgtcaaccggcaaacaaaatgcccgctcggaatgaaaatgcatgaggccgcgcggggaggagaaagccaacttcactggggcgcacgaggccgaccgcgcgtttcgggcttcggccaactcgacccggattaaccgagccttggaccacgcggaagctccgggcggcctgggtcgggccccgccaaagatgccattcccaagcctccaagaacccaaaagttcagaaattcacgttcctctgggaacccagcccagcccgcccgcgctccaatcccgcgctttcgggagactgagaaggccgtgccaattccttctcaaactcgaaagaaaccttctctagccccgtgggcgcgcggaggctgcgagcacaaacatcgccctcggccactgccagaaggccgggccccctgtccacacttggaaccccggggaacccttttgcttggcctcttgggtccagcggcccatccgtccaaggtccgggcggaggccgtccggaccctgctgctctctcggattcttgtttatttcccaaacaccacgcggagccactgcgcctccgcaacgatctcccccgcaccgccccggcgcgcccccgcccccacccaatcagcgcgcacaacttccccctcggctccggctcgcggattgaaccctcctgacatatttggggccattcttctcctttgttgctattttgctagcgacccgcgggtaatccccgcgcgggaggggggcgtgcattgtcgcgctgatggacgggcccatttggcggctccgcgccccccggaggagagacacaaagcccaggcacgtgcgcctccccatagagaagcagcagaccgtgaagggaggcggggccgggcgtgtgcctggaccgggcggggcggcggcgccgggcggggcgaccaggggcgcgcgcgggggccccgcgccctcaggtacatctgccgcacctaccgggcgacccccgagtcccggcccccttttggccgccccatcgccctcccaccctgccaggctgaggagctgcggacgcgctgattggctccaggggaagcgggaggcgagaacaatggccccctccccccgttaaaagggagcggctgccgggcccggggacagggacgcgcgtgcagggcgcagagctgggccgagccgtcgccggcgccacgcgagtcccgcagccgccgcgcccgggcaatgggccgggggcactgagggccgccggggccgagcgcggaggggggaccgagccagtgccgtgccctcgggccgcgccaacatgccccgcggcttcctggtgaagcgcagcaagaagtccacgcccgtttcctaccgggtccgcggcggcgaggacggcgaccgcgcactgctgctctcgcccagctgcgggggcgcccgcgccgagcccccggcgccgagcccggtccccgggccgctgccgccgccgccgcccgcggagcgcgcccatgcagcgctcgccgccgcgcttgcctgcgcgcctgggccgcagccacccccgcagggcccgcgggccgcgcacttcggcaaccccgaggctgcgcaccccgcgccgctctacagtcccacgcggcccgtgagccgcgagcacgagaagcacaagtacttcgaacgcagcttcaacctgggctcgccggtctcggccgagtccttccccacgcccgccgcgctgctcggagggggcggcggcggcggcgcgagcggagctggcggaggcggcacctgcggcggcgacccgctgctcttcgcgcccgccgagctcaagatgggcacggcgttctcggctggcgccgaggcggcccgcggcccgggccccggccccccactgccccctgccgccgccctgcggcccccgggaaagcggcccccgccccctaccgccgcggagccgcccgccaaggcagtcaaggccccgggcgccaagaagcccaaggccatccgcaagctgcacttcgaggacgaggtgaccacgtcgcccgtgctggggctcaagatcaaggagggcccggtggaggcgccgcggggccgcgcggggggcgcggcgcggccgctgggcgagttcatctgccagctgtgcaaggaggagtacgccgacccgttcgcgctggcgcagcacaaatgctcgcgcatcgtgcgtgtggagtaccgctgtcccgagtgcgccaaggtcttcagctgcccggccaacctggcctcgcaccgccgctggcacaaaccgcggcccgcgcccgccgccgcccgcgcgccggagccagaagcagcagccagggctgaggcgcgggaggcacccggcggcggcagcgaccgggacacgccgagccccggcggcgtgtccgagtcgggctccgaggacgggctctacgagtgccatcactgcgccaagaagttccgccgccaggcctacctacgcaagcacctgctggcgcaccaccaggcgctgcaggccaagggcgcgccgctagcgcccccggccgaggacctactggccttgtaccccgggcccgacgagaaggcgccccaggaggcggccggcgacggcgagggggccggcgtgctgggcctgagtgcgtccgccgagtgccacctgtgcccagtgtgcggagagtcgttcgccagcaagggcgctcaggagcgccacctgcgcctgctgcacgccgcccaggtgttcccctgcaagtactgcccggccaccttctacagctcgcccggccttacgcggcacatcaacaagtgccacccatccgaaaacagacaggtgatcctcctgcaggtgcccgtgcgcccggcctgctagagcgcgccctccaccccggcccccgaactgtgccttcgcttggagacccacaaagagagtgcgccctgcactccccgaacccgagtccgcgctgggggagcctcgcccccgcccccaccgggtgaaagtgtcgtctccgcttctctcggtgtggcgtgacggtaaccccatactctccttttgactccttttggaacccccacttttacgttgtgtccctccgcctcccccatggcgcaacaggagtcagtctctttctgtacaagggagaaaagctgtacgcgtttgtctcgtggttggaagcctccccttggcggggagaagctttttttcttgctagtattcgctgtgttcatggtctagaaatgcggtctggtctcgcctc

SEQ ID NO: 336380 - DNA, 2560 bp, Homo sapiens
  chr20:21080357-21082917
  hyper
cgttgtcgtctgctgatgtttaaaagataagaagacatttgtcagggcgggtgcttgaggctctcagaggactccgggagacactgccaaaacgtttccaaactgaatagtcattgggctgccagataattcagaaactatctgtatgagctgtttatcaaattattaaccgcacagatgttgtttggctgaagagcagctgaatcccctctctggcagccgcggagacaaaggtctccaggaataattggagatgtgcatggaatattaaattaatttactgctcttaattcttatgcaaattctgacctccgatggcgcctatcaattaccccgcccgcagtgaaagcgaaagcgacagtttcttctcttcgcttttttttcttttttaagaactcgaaaaaggaaatatttgcaataagcaggcggtagtagcacttcgtagctggaattatttaattgaatcttcaagtttttagggatgcccgtagaggataaaaccccagtgctcagcggagagggtgggaggggtacagggggcggaggaatctgttggtttgactgtacacctgcgggcggcggcaaaatacagccacgagccgggaccagtaatgtcaaataaaacattggcttgtagacggacgcgggccttgggaatcgcgcgagcccagcgttagcccggggtttcaccgaagccggcgattcgaagggagtggcgtttccgcaaactgcatcgctaggggcccggcgtggaagcgcctctgcgcaactttcctccaccgctgcctacaagggaggctctggcttccgtttacttattttttaggagttttaacctttggttcctgcttttacaaccgctaaccccaaaaacattttttttttctttttgttctttgtaaaaccaaaccactatgctgtgcgttcatgttcaactctgttgaaatcccgggtgggccgaaataagatttaattgtctcctgcgtggagaagtgacacccactttttcccctgaattgagcaaacaccagggctttgtctgagcttgtggcttaaacgccgggcggtttctgcacccagttggtgggttgtaagacaggaggtttccaagtctttcatcatgtttctaacaaggaaaaccaaatcgggcccataatgtcatcagccccggcccgacctcgccgggacctcggcagcccgatgatgtcgctagcggccccggcgcagccacgacgcgccgcctttcagctcctcgcagtccccacaaaagccagacaacaatatcaattaatcatgcagcgggcaaacaaggagatttatcccgcgacaaacagccccaccgagagccgctgaatgggcgtgattagcatgtgaaaaggcgagcaaaactccgcggttcaacagctaaagagcaatttgatggggctgggatggggaaattacttgattagcgtccatcggaggagaacacggttacagcccctcggccgggaatccgacaggggaacaaaacgcgctggtaaacgcggcgacgtacagggagcgcgagcgagggagggagcgccggcgagggagggagcgcgggggccgacatcgagaggcaatcggggtgggggcagaaataggggctgacccgctagcccccgccaaaccgcgaccaccctcacctagggctcccgggcggactcaagacttcacccagcgctggaggtcgaccttaatttagagcgctgccccggctctggcccggaaagagagtgacagaggcgcgtgcgggggaaaggcccacccacgctgtccctggagtcccctccagtgtccccagggacgcagtccgcggccgccagctccaggggctcgggccccaggttggagtagccacgctagcggctaggccgttccaccgggtagctccgcccttccttttgctcaggcagctaactttggagccgggcaagacgtgttttcccgctccttcgaatttaaccgcccagtgcctgcctcctggaaaagctgtcacgattgggcttgggcttgggcttggccttggtcaagaaaggtttcctcggctgcgccaccgtggggatggaggtgggagttggaacacagccccctagctgagtgcaggggccagaggctggcgggggcacgcgggggtggttgggggcggagtgcggcgaggggtgagggcgcgaccgccttggggcaggggcggcgatggagtagctccgggctctccacggactcgattggacagccccaggccggctttggatccttggaggcggatacgcaaggccagacctggtggcgtggccagttgggcatcgcggtatcttccccaggcctggagggcagtgctgaaggcccgcggccgaggttttgctttaagtatacttgggcctcgcaactcagctgtttgcgaacagagacctggcgaatcgccgaggagcggcgcggctccgcgtccccacttcaaggccaagtggagagtgaggacacgctgaggccccctgctacctatcatgccatcttaagcgggcaccgactccttacccag

SEQ ID NO: 336381 - DNA, 1107 bp, Homo sapiens
  chr20:21083481-21084588
  hyper
ctgtggtgatgggtgtgcagcgaaccccagctcgccggtggccgctcaccccgctcgcctctctctccctctggactcggtgctgaagccccagtgcagctcgctcctccttctgtcagcagctggacccggaagccctgactcccggcttggcgcctgtgctgagagcggagaaggacgtcgcgaccggcaggcctggagggcgcattggtgtgcagagtgtagcggctggtctggccctgggaaccccagacccgcgaagctggagggcgcactccccggcctcagagccccaaaccggaggcgctgtccaaacgcgccaacgctgcaagcaatgtggcagggcacaccgaaatgcgtgtctcgcacacctgcccatctttccctgctcaacacgaaagcgccttgtggctctaagcgcttccttggggtggctggggctgtgcattttaattccaaagtcaagaggttgaaccatctcaaagttggcgggtggagggggcggtggcagggaactagatggctggatgcctttgcctgcggggtggcagggctgtccctaccaatagccacggctcggggctggctttgtagttatttttccaagttctgcccggtgcccatcatattgccctgaaaagcaaaagaggccgatgcaatttattccaatgggcggtttttaagaagctggcaatttgaaccggctgggtgttatttagtgcaatatgaaatcaaatgatcctatttctcaaataacagtgtctgtgaggagaagtgaatcctctgaaagggtaattgtctgctgatggtgtttcccattatacccgatcttggcctaaatggtgttcggcagcggggcggagagcgaggggtgaaatcaatgtgcgccaactcgcgctctggagacaggaaaaggtagcaccgctggcgtcctggcacgtcgagcgaacaatgccaccccacgcgtcactgatcgactcatcttgcaggtgtccgaaatcattagacttgagtgatcttgtggacgggggtataagactaactgtttttcctttcgcaactttgggaattgttagtctcctggcatcagtcacgcagcagactgac

SEQ ID NO: 336382 - DNA, 1612 bp, Homo sapiens
  chr20:21085683-21087295
  hyper
cggccactgcacctggagcccgaagcaccggacaccaggcgcgccgttctggcgctctgcagggcctctctgggtgaaggaaagcgggcagcctgggttcagcccaccgggtcccctttcgaatgccatttcccagctgaaaatccagccagcacagcctggacgccgagccctctggagccctggtcaggacgctttaattttcaccctcccgctctgggtctgaacaacccccccgtcccccgccccccaccccaaggtgttgtttcctagggtcttctggggacatccctacctgtcgagggcctgccctcctcgggctaaaagttcagcccttcgacagagccatggaataagaggcgactctccctgtgtcccgcaagtggtttctcgaggtacccctctgaggctgcagcccccggagcagacctggctctgcatagcagcaaaagcaaccgcctacctgggccggggcaggactgtgccgcggcggcagggacagtgtgagcgccgccggccccctcacccggcgagggccctgcgctcacacttcttccaggggaaggagtggccacgcctgagcccccctaaacgacctcttcaggagaaaagagtgccggccaggagtccctccagtaacctcagtttagatcgggttttcgcgcctcccctaggaatccggctggaaaccccggagactctgcgcctagagttttgcgggcgtctctctgcctccccgcagcttccggctctcgcaggcttcatccactccctcttcccccggacctgcctgaaccccgccgagcactaggcaaggccgggctctgcgggctggggaaaagaaggggcttggggtggcccaacccgaccgccacctcggcccggcctgcggggaaaccccacaaagtcaaggcgcggggcggggtcggggggatgggatccagagagagactcagaggggcgccccttccccccaggggtctccgaatcctagggactctctaagcccccgtggcagagaaaagaggaatttttaaaaacaaatcttcccttgcctgaggccattttccagccttccacgcgcctttgccggggaaagagtcgatgactcgccctgctcatcggctcagaccagagctaccctgagcccacacctctcctcctctctgcaagacatcccttccgccacccccagtcccgccgtcctcccctctccagacccactgaccttgggaaggcgcagacccaccgctcgccaagcctcgccccgcactgtgcacgggaagagggggctccgcgcgcagcccagtccggttagctggtcggcgtcggcggggctgccgaggtggcgcagagctcccctcccccacgccttataatttaatcacacgcgatattaaattatcaagctgctcattaatcatcacgcgagttattgggactgaacacgccgccgcgtgttttgacagcccagaaccattcgcgggggtcggggtgtgtctgggtttgggggctgggggatgtctagccactctagagaaacactgcgagccccacgcgggctggtggagcctcttgcctggaaaaagatgtggaaacgcgcaggctgggc

SEQ ID NO: 336383 - DNA, 504 bp, Homo sapiens; identical to SEQ ID NO: 241051
  chr20:21372186-21372690
  hyper

SEQ ID NO: 336384 - DNA, 830 bp, Homo sapiens
  chr20:21376322-21377152
  hyper
ccacctcaaagcctcgtggcataatgttacactactcggtttccgggctgtcgctgtcccccgcccccagcaagaggttcacagcctgctcctctctgagaccggttcgttttgaatcgcagtttacacgcgcgagtcggttttcgcatgcctcccccatccgttctagcagtttcttgcagacccttcgggtgcaccaggacctagccccggggcgccctcgctgtcaccacgtcctgccatagagcaggttggcgcccaggacgccgccgctgtactccccggcggccgcgtccagggccgccaggccgccccccgggccgtgcagcgcgggtgggctgggcgacagctcctccagctcaggtgctggcgtcggggccggcggctgcggaccggcctggccgggggtgggcgtgctggcgccgttctggcacggcttgccgtccttgaccagcacaggcaccgccacgcggcgcggggacggcggcggaggcggcggcgggcccaggccgccctcctgctgcagctgctgcgccgccttgtccttggcctgccgtttcatcttgtaccggtggttctggaaccagatcttgacctgcgtgggcgtcaggtggatcatgctggccaggtgctcgcgctcgggcgccgacaggtacttctgctgcttgaagcgccgctccagctcgtagacctgcgcctgcgagaagagcacgcggcgcttccttcgcggagcggctgccgccgccgccgcgtgcagcgggcccagcgacttggcggcgtccgcgatgccggtcagcgaccccatgccggccacattcacgcccgccgac

SEQ ID NO: 336385 - DNA, 976 bp, Homo sapiens
  chr20:21377197-21378173
  hyper
cgagtgagctccaggcccgccgggagccggtccagccgccgctctcttcacgccgcggccgcgacgccgccgggccctcgctgaatcccaagaccccctgaccgccgcggcctccggccccagcacgccccgcgcgccctcggcgggtcccagagcaccacgccctcaacgggtcccaggacgccgcgcgcgttcccggtcaggtcccaggaccccccgcgcgcccagggtccccagaaaccccgcgcgtcccgggccgcgtcccaggacgccccgcgcgcccgctcggccccaggacctcctaagccgcgcgcaccccgtcccgcgcccccgcgcccctcggctgtggcgggaaacgcctgagccgcccgcagccccgcgctcctggcccctctcacttgacgagtagcgtgggtccgggttggcgccgtaccagccggtggccgcgccgccccgcatgccgtccgtgtaggcgggcagctcgcccatgttgcccaggccgccgttgcagtagctgcccatggcgccgtgcgggaactgcgagacgccgggcggcatgtggtaggtggcggccgccgccgccgcagctgctgccgccgccgccgcggccgccgcgttgtgacccgccatggcgtgagaaggctgcatgcccgccacggtcgccgcctgcgaggagggcccaggtggcggcgcgcggtaggcggccgcggcccccaggggcgcccccaggccgggtggcgcgccgtccatggcgccgctgaacttcttgtaggtctcctcgatggggctcaggatgtcggacacggagaagggcgtcgtgtgctttgggctcaacgacatggctcggcgggcagccaggtaggggggcctggggcgcgcgccggcaggacgcggcggccgctcgtcgccgccacctcggccgcggcagctgagcctgtgacgaggagtcggcggctcggcgagccccccgggctgc

SEQ ID NO: 336386 - DNA, 1728 bp, Homo sapiens
  chr20:21485932-21487660
  hyper
cgcggagacatctcgagtcccgcaggtgtctgagctgcgctgcgcgccccagccgggaagccttttcttatccaaccgcgccgccccgcggaaagcctgggtactgcagacgccctcaccggcccaccgacagctggttttgaagcgggggcttagaaaagtaaaggggacagtgtttggagccacgatgcctttgatgtgaggcggttccacccaacaatcaacgaatcaagctggaactgcaggccctacttttgttggggggaggaccttaaggaatgtcacccccttgtcccctaccctctgccccacgcccagcctctcagaaggcaccaggcgtgagtagagtgcgaggcgtccacaccctcgtgtcccttccattcccggacacctttgcaccctagccgaggcctcagcacggagtgagggttgcctggggtgccctgctgtgtgtggggcgttcttgcctcccgggccctgaccccacggtctgggtcggcgaggcgtctctccctggcgtctggactgtgcgcctgccccgcttccaggcgacgaacggcaggagccgggggtccggcgggacccggatccagggcgggcggaaggcgagggtctctccttcccggaacccccgccccggaaacctgcaaccaaaccgggtccctcctccgcatcgctcccgcgctcccgggccgcctccccacgcgggcacccactctccgggccctcgcagcaccgccctctccgcgtccacccgcgcggccgacgccgccaggggccctgagatcgcggagacagcgcgccctggcgcctggtggggccctcccagtggccagagcgctcctggaccagtcggctgtggtctgtgcccaaacacgatggaaaccggggctgggacgggcggtggtacgcacgtggaggagaagaggcatggcgggaaaaccacagccgaacacaggtcgactcgcacctcccaggcacccgccgccgtctgactcgcggctctccccaaggttccgactcgccgccacctcttggcaccactcaccgggctccgacccgggccgcgagtccgctgatgcgcagctgcctccggcggctcccgggctctgcccggacccgcgcgcagagacgctcgggaacgctgggctcgggcgcctcctggcggcggcagcacgcggcacacgctcggttctccggcccgagggggcgcgtggagcgtacgcgggatccgcgcgcgggcctgggctgctggcccacatttccccgcttgctcggatggcggcgctgaggcctattcgcctctttattaataacgatgcctcgggagggaaaaaatagagcctttaaaaatcagagtgcgagagaggagtgtgtgtgtgtgtgtgtgtgtgtgtgtgtgtgtgtgtctcggggcgttggtgaaagcaataaaactcagatcgcttccttggcgagatagcggcggctataatgcgccggggggatcaggggtttatttgcagatcctggataaaagatgatatatcgacacggtttagagtgtcactgcgcttggcctctcagggagccacaagtacatatttcctgaaataccgcccagcacagtatctaatccgcccgccacttaacaccgggaggggaacttcagcagcgcacaagcgcgctcccggtttcctggttctgggtggggagagcccaaatgagaaggatctggtatgcctagac

SEQ ID NO: 336387 - DNA, 1190 bp, Homo sapiens
  chr20:21490458-21491648
  hyper
cgtctgcagcacccgctgggctctgagctagagtcccaagtatttttagaaacccgcgagatagaggagaaaggctcatcctccagttggccaggcttcctaagacgctcccccgcgtggccaagtgtgcgccagcatctgccaaggagatcttcctccagcaacaagggtgggacggaatccgttccccgccggaaagatggatgcgcccttcccgggcgtgcccggggctgtgtgcccacttcccatccggggagctcaccccacccccaaacctctacttcctagcaatccacccagttccacgctcaagggctgacctggggggaccgcacaccctggttcggaccgccgaacgctggagggaaggaggcccgggatccagtccccggagagaggcctggaagcccggaaaggatgggagcgtaagggaagggagaggcatggtttgctgggattgccaaagattctcgctccctggcttcctggggccaaagatcctagggagggctgcagtatcccctccctcccccgagcccagaaccccgcgtacttcccccaagccccctaagccaaagcctcgcgcgccctgaccgttcccacccccagccttagcggtctcctaggtcagcaccagcccgcagattttgaaaaggagtggggagtggggagaaggcagccagtcttaacctcagacccccacccacccactttcttagcgtgaggtaagtcaaatgtaacaaagtgaaagtcatcgagtgtagtggcttcaacagcttctcaggctgaaggagccactcatagatttgggccagcgaggggggtttgctctcctcgcctttgcggctcccgaagtcacttttcctcccgtagccggacgctgccgcccggggttcagacagcgcgcgagaccaggggagatgcgggggagggtgggcggccctgggcttccggccgaccgctcgcaggccggaggccgagcgttctcctccccgccccaatcctaggcgcggggtgcagcctgtggtcggaggggcctgcaccgggagccccgcccgccccagggccccggtacccccggcctccccgcccgagaggaaccgcctgtgggagccccgcgggcggccgggcccggctcccaggcccaggcctccggcccggcgcagtaggacaaacgggagggcagggat

SEQ ID NO: 336388 - DNA, 989 bp, Homo sapiens
  chr20:21492692-21493681
  hyper
cgcctggaaggtggcggctgccaggtcctgggctttgagcgcgtgacatggtttgccgtccctgaccaagacgggcacggccacccggcgcggcgagggcaggggcgtcacctccatacctttctcggcccgggcgcgcttcatcttgtagcggtggttctggaaccagatcttgacctgcgtgggcgtgaggcggatgaggctggccaggtgttcgcgctcgggcgccgacaggtaccgctgctgccgaaagcgccgctccagctcgtaggtctgcgccttggagaaaagcactcgccgctttcgcttcttgccggcgtcccccccgccgcccggggtctccttgtcattgtccggtgactcgtcggccgagggctccggggacttggagcttgagtcctgagggggcgccccggcagccagaccgtgcactggggggagggggagagagaagcgcgtcaggcgtctggaggccgcgcgcagcctgcaccagactcggagcaccctggatcctccgtgcgaccctggacctccgcgcctggcagcccagccccgctgcctttgccatgacccctgccttcctctacgcctgacgaagacgtcgggacctcccagggtaaagagggaaatccgtaggagtgggggctaggggctcgcctttcaaggggctcacatagtgtgggtgagaatttggggggggaagtggcactgaagatcatcgcgggttaagggctccggcgcccttaagcggtttcctctccggcgagacgtgggcagatttttaaaagaaataccccacaatcccagcattgatcggctcggccatttaaggcaggtttttgggggctttcgtttctgctttcgggccttctagacaccccctgcactgcacaaagcgtcctctatgatcgcgcagggggcagggtgagctatttatacccgggccacccgaagcctccccaccctccacccgtacccggacgaggctc

SEQ ID NO: 336389 - DNA, 51 bp, Homo sapiens
  chr20:21495687-21495738
  hyper
cggggagggcggggtaagagtgaggagctccaacttcgtctggggtcggac

SEQ ID NO: 336390 - DNA, 834 bp, Homo sapiens; identical to SEQ ID NO: 241062
  chr20:21495943-21496777
  hyper

SEQ ID NO: 336391 - DNA, 187 bp, Homo sapiens
  chr20:21496993-21497180
  hyper
tgaatcgtcttcctcgaacccattacttttcgtgctttttttttttttttgctcgctttccgtctctgtctttctcagcgccccccctcctccgccctttcacgtgggagctcgtcgctctgccccgtcggaggagggaagttggttctccaggagtcggggaagcgtcgagtttggatccaggggc

SEQ ID NO: 336392 - DNA, 455 bp, Homo sapiens; identical to SEQ ID NO: 241064
  chr20:21497415-21497870
  hyper

SEQ ID NO: 336393 - DNA, 228 bp, Homo sapiens; identical to SEQ ID NO: 241065
  chr20:21498081-21498309
  hyper

SEQ ID NO: 336394 - DNA, 123 bp, Homo sapiens
  chr20:21498563-21498686
  hyper
caccactcccaccctgtcagcgtctgcctgcaccagtttcagctcctggtctcccccactcggcattctttagtaaattctttccaggtaccgtcttgcacccaagcgagttcaatgtcctcc

SEQ ID NO: 336395 - DNA, 361 bp, Homo sapiens
  chr20:21499976-21500337
  hyper
cgccaaggtgcaagcgtttgtcttcattcactccggaaacaaagcgcgttgcaccttcctgctccagcaaggattaacggcgcggacacaaaggttttgtcggagggggaaggtttattttatcttgggttggagactcagagcgtggcatgcacttgaaatcaatggggaaggaaaatgtcacccaatctggtccctgagtgtggcgataaagacgttcaccttaaggatggcatctccaaaacagccccactttggcttcgacttccaatgcgggagcaggggctgcaggaagcagaggtgtcagctctcacgtcctggatgaaagaaataggggaatgcaccccaggagtactacccc

SEQ ID NO: 336396 - DNA, 981 bp, Homo sapiens
  chr20:21502102-21503083
  hyper
cgcctctccagagacctcagtccactgcgcgggccctcagccccggctcctcctgtctgcgactcccaccacttgccctcgtgctcatcaccaccgtcccctcacgtcccagttccgtctgaggagaagcccctgtctccactgggcgccatctccaaattaccttcgggacttctgcctctgtttcaatccccgatcccgagctccctgcgacgcacagggggcgacttacccggtggaggtgggtgcagcggccgccccttcctcaccgcggccccgccagccgaggcgcaaccggccccgggcaatcgggagggagctagccaggcgctccgcgcgcccgctccgccttctactcccggagctgcggcgacagccccgccgcatttcaaggcgcgtctttatctagtactccacctacccggacccccctcgctctgcgcccttcccccaccgcgcgccctaccaggcggggctcaggggaccgcaggcggggaccgccgcgggtgccgcgcccctccctcctcctccgcctcccagccccgcaccttcccagcccctgggacagtcccgctttccctgaccgcaccggaaagtgcgcagcggcgggatcacctggcctcggcggctggtaaaacttttcctgactgcaggcgcgacagaggggccctgcccgtcctcgagtgctcgccactcctgccgtgatccgcaaagtcggggagaacttcggaggcccgcacttgcccacctgctgcgtccggactacgcggcttggggatcgagccgagtcaggacccgggagagcgaggggctcataaccggggtccgccgtgaacccgagctccggcgccgctcggcggcgacgacggtgccccgagacccctctctgctggcaggccgcggtgaccgtgcccggagcgcgttcccgcgccgggcggctgtggcaggaggaccagacagtcagcgcctggcagcgagggc

SEQ ID NO: 336397 - DNA, 1284 bp, Homo sapiens
  chr20:21686207-21687491
  hyper
ggggcgctggggcgcagtgacgggaaccaatgagctgccaactcgcgcgtctccggcgtgactgccgagattgacgtggaggacacgtcaaattgattcccgcacgctgcagcctcccggtcagacgaatttctcccaatcggatgaagttcaccctgggcctggggtcgcgggcgtggagagtgtcctgggagggggcagcagcggcggcggcaggccctggagcgggcggcagcgcgctccgctgccgcgcacagcgcgtctccagcccgcggctgggccgccgcggctctcggctctcgggcgccctccctctatgcctctcacgcggcggcggcggcgcccaagctctcccggactgcgccgggcccagccccggccaccccggccaccccggcgccaggcagctggccggcccgctcgctatgggtaaggggcgggcgacaggcagggctcgggagggctgatgaggtgggtcgggtccgcctgcctcccttccctctcgtccgctttccctgggcgacccagtcctgggtcctggagaagctgcattctcctctgatccccagccttcagggggcagttgagcaagtctgggaagggagtgttccaagtagacgcgctaaaagtcgcgaaagggcacggagggctacaatgcgccgcgctccactccgcggctcctctgcgcccttgcccactccaagccagacccaggcggtttgcccttggactccgagctgtctggggacccacaggtcacctttggaagtgcgcctgggtgcagtccctcgctccgcgtggggacccttggctaacccgccgggtgttttctccccctccggctcactcttgtctggcgcatccgcagagcagacgtatggcgaggtgaaccagctgggcggtgtgttcgtcaacggccgccccctgcccaacgccatccgcttgcgcattgtggagctggcgcagctgggcatccgaccctgtgacatcagtcggcagctccgcgtatcccacggctgcgtgagcaagatcctggcgcgctacaacgagaccggctccattctgcccggggccatcggggggagcaagccccgcgtcaccactcccaacgtggtcaagcacatccgggactacaagcaaggagaccctggcatctttgcctgggagatccgcgaccggctgctggccgacggcgtctgtgacaagtacaatgtgccttcggtgagctccatcagccgcatcctgcgcaacaagatcggcagcctggcgcagcccggaccgtac

SEQ ID NO: 336398 - DNA, 58 bp, Homo sapiens
  chr20:22557951-22558009
  hyper
cgaagtctggtgactgcggcgcagatgggaaaagctttccggtcgggggtggtgggca

SEQ ID NO: 336399 - DNA, 682 bp, Homo sapiens
  chr20:22558241-22558923
  hyper
cgcctttccgcaggcggcggaaagacgcggctggttctgttgggtcctacaaactcgcgtcctccggaattcccgagggcaagcccggcacgcgcgagcgtgctcctgcccgtggaaggggggaaatcggcgactgggttgcagggagaatgcgatgataaatggccctgcgtctgctttctgactttctctcctggacccagctcgtaaccccagaggctccccaacctgcctgccgccaagcacggctgtgcgcaaaaggccaccagccgcttcctgcagccagagctaaggttcactcgcctcttagaaaggcgcggcccctcccctgctgctgcttgatgacgatccccatcgtctcctcggcctgcctgtgtccgagaaagagttgagactggactcgaacccctgcgcgccaaggggagggcgtcaccatgctccggcctcagcctcttcaaactcccatgcaccacgcacatcattttctgctgacccccacactagattctggggccaagggggttccccacaccccaccctccactgttctctggaaacatgctgctctcagatcgaatccccagacccgagccgctcgaggggcctgtgtggcttcctcggggccctaccaaactcctctaactgagctcagagcctaagcggtctgagtttgcaactctac

SEQ ID NO: 336400 - DNA, 970 bp, Homo sapiens
  chr20:22558954-22559924
  hyper
cgaaccccctgcaaaaaaacccaacgccttgagtctcagttggctgagcttaccaccagccaagcccgcccgggcgtccgagccctggaagggagaaggactggctgggggaggggcggtgagcggacaggagtggggtgcggacgctgaggaggggagccgggcgcggtccccgggtgggcgcgctccctacctgcggcggccggcgggccggctggcgggcgggctgcggagcgtccagctcgcggagggaggaggccgactgctccgagccgaggcatccccgcatttatttgagctcaaaccaagcgactgttgactttagcacacaaagcaaagatttcactgcccgctagtttaaaaatgaatattttaccaagatatcgatcagcgttataaaattcagttaagtacaatgggatcctggcaaaaaaaaaaaaaaaagaataataaaggaggggggaggcaatataatatctgtgcaaatttgctgaagtgtgacgtggcatggaaagtttaccctcctggaattcggatctagaatgtttttttcggttgtttacagactttgtttattcacagatcatggttgcttaaaccggcgcgcggaaagcgtggggaaaaaaggaaaaaaaggaggggggagagtctctgcaccccacaatgagtagagttggggaaagcgcgcagtggcgatttgtgagctcgttatctcggaacccgggctaggggagggatttaagcgggaggggggcgtgaaagacacaagaagcacagaaaagcctccgaaagcgcctgctccccgacatcctttttatgtattcggacagaactatatcttatcggccgggatcagtgaaggggggcgcgctaagtagtttaaaacgaccctcgcacaatgggcgtgccatacgaaacatagcaggttagggcagcgctttcagcctccattgtcccccactcggccccc

SEQ ID NO: 336401 - DNA, 1884 bp, Homo sapiens
  chr20:22563363-22565247
  hyper
cgagatgtacgagtagggcggctttgcgtgcgtgtagctgcgcctgtaggtcttggggtcgcgggcgcggctcaggcccgcctgcccgtacatggggctcatggagttcatgttggcgtagggggccaggccgcccatggccccggccgcctgccccccgagcgggctcaggctgggactcaagtgcggccccatgcccgccacgccggccgccccggccgagccgcccatgcccgccatggcgcccgcgccgggggacatccccgccagggacgggctcatgccagcgcccacgtacgacgacatgttcatggagcccgcgctcatgttgcccgagccgctgcccatggcggccgccgacatgctcatgtacgtgttcatgccgttcatccccaggccggcgttcatgttgctcacggaggagtagccctgcggacagagccccgggagggaggcgacagcgttagcaccgcggctggagggtgcccagacctcccacccaccgcccaggcctccgcgtccggggaggcctccggggagccctttcgtccccgatggcccagtctccggactccgagtctgtttcattcagggagagtcatgatcgatcgcccttgggaaggtggcgagcggattgctgcttgggcatgtggcccgttcctagcccttctccacctcgcccagattctagaacaggggtcccatggagtactcccaagccagcaccccaaatacattcccctaccccagagtctccccaaactctcccaccagcatactgagctggcgccgaggcccgaagtccccggacgccacctccggtcgcagcaagcaacctgcgggacaacgcgcggggcgcctcgggctgcctccagcgaagactgtcccgggccccctctgtccggtctccctccagggaccccctcccttgtcccagggaaactgcaaggcagtgcctgtgcggagtgcgggggcggctggaggcactgaacggggcaatagggaaagaaccgagacctgaaccacacgcggctgagctttgcaggcaaaaactttctttctctttgtccactagtctttgactctgcctccacttcagcccccaactcctacccatcttctcctcctcagctccccaccccctcgccggccgacctcccacccctccccagccgcgcgctgccaaacataactctgttaggatagtgcgtggctcggccacgaagaggatttggaggcgccgcaagtcaatatttgatcacaaagttaatattatctcaaggctaacagtgtgtcgtataaaaaagagacccatttgattccaaggagggcggaaaaggcggctgcccagaaaggctggggttgtggggcggggtgggggggtgccagcgagggaagcggtcctgaggttggggaaggagcgagcgccgccgctccacttccccctggaaaagacgagcgcttacctcgggctctgcatagtagctgctccagtcggacggctcgtgcccttccatcttcaccgctcccagcatactggaagccgagtgcatggcagtttaaaatttaacagccacaacaaacgaccagcaatcaccccccacccccaccctcttttaaaaaaaagtcagccaaagcaccgtcccctcctccctccctctctcgcgctccctctccctgggctccactccctctctctccctgggcaggccggaggcggtagttggaagtgggcgggaggtgggggggggcgaggagcggaggaggcccaggccagcgccccgcggtagggagcacccgccgccgccgcgctcacgggctgccgggtggcggctgaggttggcagtgccgagctgccccgaggcggcgggaagcgcgcggcgc

SEQ ID NO: 336402 - DNA, 831 bp, Homo sapiens
  chr20:22565361-22566192
  hyper
cgcggagcggacaagtgccgcagtgacgtgggaggctggtgatatagcgcggcgcgctggcgcgggcctccaatccccagacccggggcagcccatttgaataatcagctcacacctaggtgagaggtagccgcagccggcgctccgcacctgcccctcagcgcctgccgtccgccccaccgccgcggcgccccgcactcctgggcgggccaggggagcgggctgggcgggcgatcgggcacgcgggatccctggtcgagccccctttcctcccgggtccacagcgagtcccctgaggaaggagggacctgggaggaaaccaccctctggggcggctccggcctccagcccccgccccgtctcatcgcgccgggcgcccggtgcgcctgtcggagggcgcgtccagcctcagtgcccggcagatccctatgaaagccggatttatttatgccgggtttcttcgctctcagtgctcattctctgtcaaaacagcaagtccatgacagccaatttgcaaagcgctgtcctatttagaaaaactacgtacacacctttaactcgcccgctgctgctcctgcgaggcccctccctgttacagttcagacccggaacggcctcgggagaagcgcggggcgcacggtctggccgcctcggctctccgactcctcagacaccggccgccagggacccgcagtggggcggccggcgcctggcgcaagcagcccctctagcagcggccgacggttgggaggctgagatttgtctctgatattcaggccggcgtgtttcaaggttacttttcagtcacaaccgaggtgcccacagcatttc

SEQ ID NO: 336403 - DNA, 431 bp, Homo sapiens
  chr20:22567411-22567842
  hyper
accacagcactattggtggccggggtcagggacaccagagagcgctcggcgggggcttccacagtgacagggcgccccctgtcggccgccaggcccgcgggaccgacccgagtcctcatttacccccgcgatcccaaccccgcagctccggcaccggagcaccttctcccccgctctcccagtctctccgaaaacgccttcggggggactcggcctttttggagccccaacccctaggttctgcgcgaacccaaaacggcctcctgcaccctggcgaggttctgggagctccggtagggtagggctggatgacgcctcctagagtctcggagcagccgctcccgcaccctcccggcacgcctgcccatgggaatgcgagcggggtctacggttagctttaggtagctgggagcgggacaccaacgggctgc

SEQ ID NO: 336404 - DNA, 1245 bp, Homo sapiens
  chr20:23029116-23030361
  hyper
ttgacacagcgctgcggacacggactgggctccagtatgcagtcatccacgtcctcgcaccggtgttggtcggccgccagccggtagccggtctcgcacatgcacgagtaggagcccggctggtcggggttgggaacgcagaagtgctcgcagaggtcgttgcaggactgcgtcgcggatgcggtgcaggagcgcccgtctgcctgcagggcggcgccggctgggcactggcagcggggagccccagggatcgcattgcacgcgtgctcgcagccgccgttctccacgctgcagtcccaagcgcccggcgcctccctggcccagtgcccctggaccgctccgggcggcgcggtgcacattagctgtaagccgaggggagccaccgcggcggagctgcccaccggcagcgcctggaagtccgctccgcgggccgcgaacggggtgccgtaggtgatcgagacggcggcagccgcggcgccgggctccacagccagtggcctgcaggtggctgggaagtggaactcgcagaggaagccatcggccttcacttcgcactgctgctcctcccagatcggctcgctgggcacagtggcctcagcagcggagacagcgacgcacaacgggccgcagaggggagccccattgaggtcgagccgtgcccacctgctatagctggtgttgttgtctcccgtaacccactggaagccgcgcaggggcccgaggcgcttggggtcgccgcagccgggtggcagctgcaggccgatccagaggcgccggcggccaacgccgccgtcgccgttcagtagcaaggaaatgacatcggcagccaccgaggagcgcactgtcattaggtggccccgcagtccgtcgcagatctgactggcattgaggaaggtcgcggggcccgggtagagcgcgaagcagtcgtgctcgacgcactggctgccacccggctgcggctctgcgggtgcggggaaccccaggccggccagggccagcgcgccaaggaccaggaccccaagcatgttacccaggcgcgccgcgtgcaggcgccggggaaagcgcgggcactgcgacagggccgtgccggagcagaggggcacaggacgccgatggcgacagcctctcctgtccgtcccagcccagacacttcttgccgctgcgcgcagcccctgcgaggcagcctctgacatgcggatcggccagggctcgagtttataagtgcccggccctccctccctggac

SEQ ID NO: 336405 - DNA, 982 bp, Homo sapiens
  chr20:23030364-23031346
  hyper
cgggaaaaggaaggaagtgcctggtgggaagggctgatgccgcatactcggattgctgggttctctggccgcccttgcgcccgccctcgcgcatgggatcacctcgccgggatgagtaaaccctgccctggcgcagggaggttctcgggcggggccgacaggggcaggcgccagggaaggccagcacccctgtaacaagacgactgtccccgcccaccactcgggcccccacgcgtgcagccctctttcatctcttggtcctcctttctttcttttcatacatgttacagccacttccaaggaaagcctggattgcaagagctctgggaaccggagacttcagagaagagggctttgaatggggagtgggggaggtggtgcacaggacctgcaagacgctgggaggggtgatcggcaccaagggcactttgggaggacctgcctaggacgtggacttccccgaagacaggatcgcaaggagagacagctggatcctgtccgcggccaaggtgcctggctcaggaaaccagcggagcgcgcttggcctcacaggacagtgggtgtggctggggtgacggggcagggtggggaagactggcctaacaccagcgccctctgccccatggctggccagggacccgcgagtccctggacacgcactggccaacgccagaccccatctcatcgggtggggaagtcgcggggacactgtcagggcgccgaagtccggacccggctcagaggcggtggcaggtgaattgctgcggcgccgggtaggggcgggcgcgtgggagcgagtcagcctggccagtttcggcccagcttccgaaggatggtgcttcttgcaccccaacagagtggctggcaaccccccaggggagcgcgcaggatcccagctgatcccacccgggtcggctaaggaggtttccatttcgtccagagtccgaattgatacccacgtgcatagaaacgccacttgctc

SEQ ID NO: 336406 - DNA, 729 bp, Homo sapiens
  chr20:23617984-23618713
  hyper
cgcgctgcggcgcagctcgagctggctcctggaagctgatcttaggcgccgggcgcggacctgacgtgtccgtgcggttccaggccaggccagactcagggcattcccggacacgcccgccaagggctcgggggtgacagcgaagaccgggaacagggtccgggtgagaagcccaggcgccggagaggagcagcacggggtccgggagcagcgcggggggaggctgggacggcggggccggggcttcggaccctgcggggggcggcacgcacctgcttgcgggcgcgcaccacctgcagcgcgcggctgtggtacatgtcgttgctggctttgttgtactcgccgacggcaaagtccagtgcacgccgcacaccctcctcctccacgctggcgtccatggggcctcccactaggcgcggcggcttgccgggactggagccggccgcggggctcacggccagggccacggccaggatggccagcaggagcagcggggcgcgcaggggcccggccatggtcggctaggacgcgggacgcggggagtggggcgcaggcgagaggctggagctagatagagaggacccgctgcgataccgaggcgaggccgtgagccccgcgaggccggcgactgcggttttatcccttccggccttcgccgccccaccccaccgcggcctgcactcccttttccggaacgcctcgtccctcccacctcccttctccctcccc

SEQ ID NO: 336407 - DNA, 971 bp, Homo sapiens
  chr20:24449915-24450886
  hyper
cgcgcgggctgcgccctccttctcttccctgccctcctcccccggggcccgcgcccgctgcctccagcacgcgcgtcggcaggctcggcaagcgaagaggagcggctcgccccagggcgcccctcgcccagcctgccggccaggcgagcgcgacgagagtctccccgcaccccttcctctcccgggggccgagagggttgggctccgccccggcgccgcagctcccgactccccgccgctcgggctgccgccgctgccccgcgcccggcgctcggggcagccgggggcgcaggcggagagcgcagggcggggagaggcgtggggagcagagcggcgctgaggggagggcagaggaggagagagcctggcagcggaggagcagaggcgggcgccgcaccgccccgcacgctcgctcgctcgggagagtcgcgggcggccgcttgggcgcacttgccgggtcaccttgtcccggaggtaagtccagacctcccggccgcgggggcgggcggaggggcccgcagtgggcggggtcgcggcaggggccgcgagctggcggcgggagctggaggctgccctgcgctggcgggtgtcctagtcctggctccgcctcggagcgcgcagacccggcggcggcgtggcgcccgcggtaagtccgggtggtcgccgcgacgagacttgggagacacggggtcgcagggcgggagggggagctgagccggcagagaaaatgcccaggaaggggtcgatgctggcctgggctgcaccttggtgccttgccaccccgggagacgcgaaggggctgctgtgcgaattcgatgggagctggtgagaccgagaactgagagcgtagcggagccaggctgcccagcagggccatgagggcgcgcggcgggccaaggctctgcgggttcgggctgcccctcggagtgacccgaaggagaccagccagggctggtgagccgggcggccac

SEQ ID NO: 336408 - DNA, 751 bp, Homo sapiens
  chr20:24451420-24452171
  hyper
cgttgcacgcagaggcttgggcgcttggcacccagacttcaggtgcgcacagtcctcctgcgacgtcagatgcgctggcgccgcggcgctcctggctcggaccgatgcctgcgccttccctggccacgtcctggtgtttagtgcagcagacaccggccgaaggcttggctgattgggggtgtcgaggggaggggggctgggcgttacacagtggctccgttttctggttggaatcagttggtgaggcgtgcgcgcgcgagtccgtgtatctgtccgtctccctcctacagcccagcgtgtttggtctgagtccaaagaaggaggtggtgtgtgtgctgcgtagacctgcgcctgtggggtgagcagcctcatagcccccagagccggccaacttctccgtgctaggctgcgacctcaagggctgccgcgtcggggatcggaagtggtcttcaaagaggggtctaggtcgcgaaatcctggcagcagccgaagtgaaaaggagctgctaggaggcgggcggggggcagtctgatgtccgttctggcgcggacaggaagaaactgaagtcgaatttttagttgaattgcgtgctctgtgtttggcggtggtgtggcccgttcttttggaggtccacaccacaggtatgaggcctgtgggccctgaggaagcgcgatccccttaattcctccctcccctctctctccaccgcccgcccctttgcaaggagcaagcctgacagtagctgatcggc

SEQ ID NO: 336409 - DNA, 460 bp, Homo sapiens
  chr20:25058288-25058748
  hyper
cgagccgtgcgatcccgggggcccttccttacccaggagccagggcgcgcaggagcccagcaggccgccctcggcggagttgagcacggagtctggcagcgggatgcagtggcgcaccatggccccgtacagcccgtactcggccatcacgctgctgccgccccagcgcttctcccgcttgcgccatttggccctgcggttttgaaaccagacctggttggaggcaggagaagcagaaggcacacagaagagacagtgaagaggggcgcctggaggagcggaggcggcgtcccagggctcggatcttctctcccgagcatgatcccatgctatttctgaaggaaatagctcccgagggccaaccagccgccctcagggagagcgcccaggagcccccagcagcgcccacgtgcggtccggactcacgggcattcaacgcagtagggacacttgtgaccac

SEQ ID NO: 336410 - DNA, 1112 bp, Homo sapiens; identical to SEQ ID NO: 241092
  chr20:25061768-25062880
  hyper

SEQ ID NO: 336411 - DNA, 263 bp, Homo sapiens
  chr20:25064486-25064749
  hyper
cgaccggggtcgcccgcgaatggaaagcctaaggggcgagggcggacgcgggcgccgtgcctgcagccccgggtgccgaccaagtggcctcacctgggacaggtcttggggtctccctcccctaggtctccctggaaggtaggcgatcacgggagtgacagaccccgagtagatagccagtgatccaaagacaccaaaaggccaggcggtaggagcccagcctcagacactctctatagtgaccgcggcgcctcgggaaggat

SEQ ID NO: 336412 - DNA, 710 bp, Homo sapiens; identical to SEQ ID NO: 241094
  chr20:25065019-25065729
  hyper

SEQ ID NO: 336413 - DNA, 870 bp, Homo sapiens
  chr20:25565600-25566470
  hyper
cgcgggtcccgctccgtggggggccgcagccacactggcaggagggaatcctgggcctcgaccagacgccggcggcgtcaggagaaacggcccgcgctgggcaggcggcgggcaccgcgtagctcattaccacggggggccccggccaaggccgcccgcctcaggccgagccttggggctgtgctggacccgggccctcgttcgcacggcgcccgcgccgccgccgtcgggaaaccgggttttcaagcgttcggcccagcgggcgctgtattttagggcgtgacccccgccccgccctcgagggcgaccggaagagcaggcaccacagcagatgcgccgagtctgcgccccgcaccgcgaggagcacccgaggccgcgctcccggagccgggtctggtgactaaggcgcgggtcgcgacgcaggggcggccccggactctcgaccccaccagccgcctgaatgtcccgccggacgcccgggccggctcacctgggaggcgcctccgccgtccgcccgcgcggggccaggagcgcggcaccacccccgtaccgccggccgctctttgtgtctggaggccgcgacgcaacactcctcccggcctcgaggcaccgccccctcggtgtcccggcgcagtgggcgaacagggggcggggcgagcgaacgggagagggggcgggtcgggtccgggattgcggggcggggtgggggcaaggcggcctccgcaaatctcagggcggctctggccagtttggagcctggggtgacccttggagctgacctcgctggtccctgtcggagccctgcgcgctgcggagcttggcggttcgcagctctcggggtagcatcttctggaaacaagcccggaggcc

SEQ ID NO: 336414 - DNA, 1327 bp, Homo sapiens
  chr20:30192854-30194181
  hyper
cggccctcgcctctacccgctgccctgcccggtgccctgccaccgacccacccttgctgttctgaaacccgggtcgtctttccacactgcgagcaggcactagacgagcaggaggctggacctaggagcgcgggtcacgcccccatgccgcccattggctgcttttgaacgttctgagcccgcccctccgggggccgtggcgtgtttataaaagacaagctgtggctccgcactctcattccacgttcttaactgttccattttccgtatctgcttcgggcttccacctcatttttttcgctttgcccattctgtttcagccagtcgccaagaatcatgaaagtcgccagtggcagcaccgccaccgccgccgcgggccccagctgcgcgctgaaggccggcaagacagcgagcggtgcgggcgaggtggtgcgctgtctgtctgagcagagcgtggccatctcgcgctgcgccgggggcgccggggcgcgcctgcctgccctgctggacgagcagcaggtaaacgtgctgctctacgacatgaacggctgttactcacgcctcaaggagctggtgcccaccctgccccagaaccgcaaggtgagcaaggtggagattctccagcacgtcatcgactacatcagggaccttcagttggagctgaactcggaatccgaagttggaacccccgggggccgagggctgccggtccgggctccgctcagcaccctcaacggcgagatcagcgccctgacggccgaggtgagatccagatccgaccactagatcatccttataccgacggggaaacggaggccagagagggcgtgggcgcttgcaccacttccgtcccatccttgcgggtacctggctatgcgggggtgcctaaggagcctggaaaaagcgctcccccgtcgtgcttcctggggaagggggcgttcgctgcgctcggagcggcgtcccttccaacccgccggtctcatttcttctcgttttcacaggcggcatgcgttcctgcggacgatcgcatcttgtgtcgctgaagcgcctcccccagggaccggcggaccccagccatccagggggcaagaggaattacgtgctctgtgggtctcccccaacgcgcctcgccggatctgagggagaacaagaccgatcggcggccactgcgcccttaactgcatccagcctggggctgaggctgaggcactggcgaggagagggcgctcctctctgcacacctactagtcaccagagactttagggggtgggattccactcgtgtgtttctattttttgaaaagcagacattttaaaaaatggtcac

SEQ ID NO: 336415 - DNA, 262 bp, Homo sapiens
  chr20:30196349-30196611
  hyper
cggctccgcggcggcctgggagcgtttccatcagctgggcccgaggaatgcggagctatttaacctgagcatccccaggtgtacggaggcgcctggctgtctggggcccgcagcctttggcacagccgcgctagacaaacagcgcgccgcccccgccctgcccctccgcccccagctgcagccgggcctgggaaccggcgggcgccggcggcttgcataagaggctccgggcctcgcagagggaggggggacagaggccacc

SEQ ID NO: 336416 - DNA, 1247 bp, Homo sapiens
  chr20:30555404-30556651
  hyper
cgaagacaataagaaaaggggacccctcaagatcaaaggaggggatggaacaatatgtgagcactcaggaaactggaaatgagcgttagcatggagtgactgctaaagggttactggggggcccgcccaagtcccccagctcctttcttccaagtcccccacccacccccccgtcagacccaggccactggaggtgaacacaggagaaaaacgaagtggagagaatgggaagggggaggcgataaacaaaaaagaaggaagtgcagtccgaggggagatgagagacagaaagcatggggttggagccccgcgcctccgaggaaggagggagagggtgacctggggtgcgccccgcctcccctgcttccgcattcccgggggctgcccccccttcggccgcagctcaggcgggtgggggcggggcggggcggcgccgaggagaatgaataattgaagtggaggggaggaggaagaagaggagaaggaggaagaggagccgcccgcgcagggtcctccccacgccgcacccccctccgccgcccggaagtcgctccccgcctccctctccgccaacatggccgcgaagtcggatggagcggcggcctcggccagcccggacccggagggggctgccggtggagcccggggcagtgccggcgggcgcggggaggcggcggcggcggccgggcccccgggggtcgtcggggcgggcggcccggggccgcgctacgagctgcgggactgctgctgggtgctgtgcgcgctgctcgtgttcttctccgacggtgccacggacctgtggctggcggcctcctactacctgcagaatcaacacacctacttcagcctcaccttgctgttcgtgctcctgccctcgctggtcgtgcagttactgagcttccgctggttcgtctacgactactcggagcccgcagggtccccgggacccgccgtcagcaccaaggacagcgtagccggcggagccgccatcagcaccaaggacagcgccggcgccttccggaccaaagaaggcagccccgagccgggtccccagcctgcgccctcctcggccagcgcctaccgccgccgctgctgccgcctctgcatctggctgctgcagaccctcgtccacctcctgcagctcggccaggtctggaggtaggagaagcgcaggtggagggacctgagcccgaggagtgggggtggcgaagggctacctgacgtcccagccctgatctgacctttcc

SEQ ID NO: 336417 - DNA, 1671 bp, Homo sapiens
  chr20:30639046-30640717
  hyper
actcctcccctcccccgaccacctcccccagcttgggagtcctctgagctgccaggaagccagggtggttccttcgggcagggaactttgcatggccatggtggttccttcgagagaggaactttgcatggtgtctgaatggagcaggcctgcggaagagaaaccgctgaccacagacctgcctggaagtctcgggccgcggagttggggagggccgggccagaagggaggggtcggagtggtggggaaaagagatcacgatgcttccggggtagggtaaggcctttccagggtgggttggaatctttgaagactgtggcaggaatcccttgataggtggggttaggatctctgaagggcagggttggaatctttggaccggcggtatagacccctgggtattaaaactcttaggcggcgggaggttagatcgcgcaggagcaggagcggtattggaaccctggggtttgtgttctaaatcttagggcagggttagaatccactgaagtgagagttcggatccttccactgggcagattagaatctttgggggcaagttgagtttaaaaatccttcagaggtgggattaaaaatcctttggcggggcggggttagtatcttgggagccttggagcgggtgctggggttcttagacgggcgggttcgaatccctaggagtgggatttgggatcctttggagactggggtaggacgctgggcggtgggatggggaggtgttagggaaagtggagcggaagggatgggggttcgcatccttggtggacgcgttagaagcctcctatggatggtgctaatattttttttctcttcgtggagggtttgggatccttcttgcaggagacggaggttatgaccctcggggagccggttaggatcctggggtggcgtctgaatcttcggggaggtgttaggacacttggggcggagttagcctcgctcagggcgcggctaaggcgcccagatggcctgcgggcgccaccacgtccctggtcccagctcgggagcacatcagaggcttagaggcgagtgggaagggactcagacagtgcaggacgagaaacgcccgcggcaccaaagcccctcagagcgtcgcccccgcctctagttctagaaagtcagtttcccggcactggcaccccggaacctcaggggctgccgagctgggggggcgctcaagctgcgaggatccgggctgcccgcgagacgaggagcgggcgcccaggtgagtgccgcgcacaggggaccgggaatacccggcccgcgaggggtcccaggaggcggagggagcccaggagcctggggagggctggctacgggtgcggctgggggcagcgaggggagacggaacgtcgggggagccgcgggtagcccgggggatgaggggtcgacagcgagtggagggtgccctagggaggggcggcactgttgcggactgctggattcccggggaaggggacgctcgggcccgtgcagtgactttatccaccacttctctgggccgtccaggttccccttcttgggggggggcggggattttttttttaatttaaaaaagaaaaagaaggaagggatggggcttcacagaacccgggaaggggaaggcccttacggttcccggtgggggccgggtcacgccgggttggcagccag

SEQ ID NO: 336418 - DNA, 485 bp, Homo sapiens
  chr20:30777843-30778328
  hyper
cgtcccggacccggccattttccaggctcggagtagtcgccgtggaggccgcttccccgcgcccaggggaagggaaggcggtcccggggcccgctgcggggtggagggacccgcgccccccagcttctcgggcccgggccgcggggaccgtgcgcgcgtccccctcccgggcaaggccgggcggcgggcgcgccgcggcttctggggtccccgccctcttgtccgccatcgcctgcgggagcctctggcctggaggggctcggggcgcgctggcgactgcgggctcggcgacaggggcggctggtggcgggaggacagtgggaggaaggctccgccccacgcgcccccctctcggatgtgattcgccggggtctcccgcagccggggcgagcggcttggaagcccggaggaggggtacggaactgcccgatggggatgcgaccgcgggcgccagacgaactgtccccacattcgttggcgctggc

SEQ ID NO: 336419 - DNA, 570 bp, Homo sapiens
  chr20:30946060-30946630
  hyper
cgactcccaggcgccctttcggtttgtttttgttcaaaaaaaaaaaaccccacactccccctcctcactcttcacacacactcacacacacccacggcagacacgcacgcacccgggcgccgaagggaaagccgcgtctcgccctcccgccccgccgtcggtcctgtctcagtccctcagcagagcgggaaagcggaggccggagccgtgacctctgaccccgtggttatgcggagccgccgcattccttagcgatcgcggggcagccgccgctgccgccgtgggcgactgacgcagcgcgggcgcgtggagccgccgccgcccctcccccaccgccgctctcgcgccagccggtccccgcgtgcccgccccttctccccggccgcacccgagacctcgcgcgccgccgctgccacgcgccccccccaccgccgccgccgccccagccccgcgccaccgccccagcccgcccagcccggaggtcccgcgtggagctgccgccgccgccggggagaaggatgaaggacaaacagaagaagaagaaggagcgcacgtgggccgaggccgcgc

SEQ ID NO: 336420 - DNA, 322 bp, Homo sapiens
  chr20:32307879-32308201
  hyper
cggcccgacggccccactcacacagccccgttccggaagcccttaagcacggccaacgcagcgtggtagcggcgcttgcgcagcagtgcgttgacgactacgagcagagcccttagctgcggcggggctgccatagtgcgggctgcgcgcagggtcggggttaggaactgtaagcgcactgacagccggaggttccagctgcgcgcccacagcccctcggtagcgccgccgactcgtggcgtctataggctgtttctgcgtcactcatgcatggaagaccaatcagagagcgtacttgtctcatgggacaatagcactcatc

SEQ ID NO: 336421 - DNA, 517 bp, Homo sapiens
  chr20:32899337-32899854
  hyper
cggagagggggcggagggcgcacaagcctgccctttggccgcggggctttagcctgccctagcttcagcatccccgctcgcctcccggcggtcctgcgtctcactctggattaactggaggcttcgagatgggatagagaggggtgcaggcgctgagaaagcccgctgatggggatggagccggattaagcagttctgtggagttcctcccttcttgtccaccccgctaggggtctctcctttcccgctgtatccacgcccctccctccaggccccctgggcccacctcgaagtcaccgctgggctggggagtacagaggtgggggacttcttagagaccctgggacagggcccccctctctccctcaatccttctcatcccacgcggctccgctgtgagtcgggcgtcccaggagctgccggcccacccatccgcgggtttcttccgttgggggagccctccagactcgtagaatataagagagcgcccctccctagccgcgggccatctctaagc

SEQ ID NO: 336422 - DNA, 1520 bp, Homo sapiens
  chr20:34188626-34190146
  hyper
gtgagccgggacaacgtggacccctgctgggcctggggaggctcaggttcagctctcccttccaacacctgcatggacacagccagcagaaggcggccgcggaaccaaatgccttggccaacgccttcgttgagaccttgaagactatcccggagccccgcgccggggggcgagccatagaggggcacccaggccgggccgaaggtagggttaaaccccgctgtggggaacaagagaagcgtgttggaggggagcgtggggagggcgagtgctggtaaatctctgcacctcaccctgatctcctccaagtattcgggggtgagggcaggggaggggggctaagccgctctgaaacggaagaagttggccagcagctgcggacgcgccgctgtggaacacgacctggggcgcctccaaaacagctcagcgccccaaggagctggaaatcgcgggagcccggcctcgggggacgcagcctgagccctgggggcggggtcgggattggggcggagctacgggcgatcggccaggcctgggggtcggggaaaggagtggaccggcagtgtcagcgtgtgcacagctgtagaagggtgggactgggctggttactggacaggcggttgtggtcagaattttgccaacggagccaaaccgatggtggggttcacagtctgggggcggcttgaagcagtttgttttgcgggcggaccagccctcctaggcggagcggggtcgcgaggatggggcttgcggttgggaatgggccctatggagccctatggaccgaggcgagtgaggccagatttgccgcggccagaagcgctcacccgcgcggcccggatgggagatccgcctcaggtccggcacgtgcgtagcgagtgccgcgtcgaccaggggcgcgtcgtcccgcagctgcaggcggaggctgcgcgtcagcggcgggaagagctccacgaagctcagctgctcgttccattcgggcgccgccgcctcggcgctcaccgacgtctcgccctgaaggtggcgttaaagacaggagaagggagatcagcgcggagtcggggccggagccgcggcgccgtgggccccggagggacttacctcctgccccaggaaagacacccgcacatagggctccaccaggacgcgctggtcgtgcagggcgcggaccaggctgcccagcagccccaggcgcagcgcgggaagcccctcggcgcggtacaggcgcacgcggagccgcgcccatggcctctcggcgggcaccccgcgcggcaggagcaggttcctaggggagggggcaccgagcggggggggagaaactgggatctcggcccctccccttatccgcgccccacggccacccccggatccatgtcctcctccccacctcaccccggctcacttctcgatgtccgaacagtgccctggggccgggggtagcattggagggggcaggtccccgcgcgccctcacggacaaggtgaccttaatgaaacccttggtcccggcgcgggtgtctc

SEQ ID NO: 336423 - DNA, 534 bp, Homo sapiens
  chr20:34652354-34652888
  hyper
cggagggtctgggtctctgtcacttcttgctgcgtcgccttctgtgagtccttcccagccccctaatcatgcccgcctgagcaagaggatgagaaaatgccgaccccgtagcggggactctgctgctgtgcggggcgcggttcgccgaacccactggccgcttctagagagtcggccccagggccaggacctccacttggcaggcgctggggcgcccaggggcagggccagcgcgggaaaggccgcgagtccttcgaccccctggcagtctgggagccggccgcggctgccatggcaacgcccggaagctgccgggaggggaggcaggcccagccgggacgaggccctgcctccagccaacgctccgcccagaacgaagccccgccccggaacgaagccccgcctccagcaactctctgcccggagagaggcccgacagctgcgacccgactggttctgtccgagcccgacgggccgcgctgacccagcgactgtgcctgactgaccacaggtgccgccaccgcctgataatac

SEQ ID NO: 336424 - DNA, 444 bp, Homo sapiens
  chr20:35201323-35201767
  hyper
cgaggatgagacgggatgacacacacgaagtgccccgcacagcgtcgttgtaaagcgttggctgttttcacctctggccgccccctgtgagcccgatcatgtgctttttgggcttaggtcggaggcggcctcccagattctacaggccattgaggtcgtaacaagcgtctccatcagagcctagtccttaactagctgcgggtaagtgcccggactaagtggcctcagtttcccctcgaagcaacgggaccaatcgcaccgccggcaggacatcttgtgcggggcgcgaagtgacaaaagtcaggatttgcagaagttcccactcggtaacgacccccaccccggcaaggagcacagtaggcgctccggaaacgccctccacgaggagggccgggccacttcctgcccccgagcgggctctccccggcggaggctcccaccgcc

SEQ ID NO: 336425 - DNA, 488 bp, Homo sapiens
  chr20:36531527-36532015
  hyper
cgcagtcggaggcggccggctgggcgtgcgctcgctccccgaagccggggctgggccggagccgggcgagggctgggagctgggccgggtccggggacagcgggcgaggggcagctgccggagccgggcagccaggccgctcagggcaggggacagctggcgccggttctgcggtctccggggcccagatgtgaggcggcggcgcccccggcccgagagcgcacgatgggggccccgctcgccgtagcgctgggcgccctccactacctggcacttttcctgcaactcggcggcgccacgcggcccgccggccacgcgccctgggacaaccacgtctccggccacggtgagttcggtcgccgcccccgcggacttccccaccaaaccccaacccgggccgcgccactccaacttggccgccccggggctcgaaccggcgccagtcgtggcgggcatcccggggcgccccctgccggcgcggtggaccc

SEQ ID NO: 336426 - DNA, 266 bp, Homo sapiens
  chr20:36781092-36781358
  hyper
cggccctttcccacccatcagactgatttcctcccgcagcgcccctgcgctcaccccagcccaacttcctgcctctgcatcaccagctccacagttcccgccccgggatgtgggtcactttagtcactgtgccgcttggctgaccgccactccaacccgccgccgggtgaggccaagcaggaggaagggggccatcccccagaaccacgcttcccattccctgaactctgaaaccttgtggtgtggacgagggtggggacaccggc

SEQ ID NO: 336427 - DNA, 269 bp, Homo sapiens
  chr20:36888952-36889221
  hyper
gtctgtgggtccgcgggtccgtctgtctggggcagccctcggtcccgcctagccctggagccaggggatagggcaggcccggggcaccgaccccggcgtcatctcggaggagcggccggggaggacagggagagagactgagagagagacagagagggactgaggctggagacggcgagagacataagggagccgcgggcggcgcgggtcgggccaccagacggggggcggcagcagaggcggggcggggcggggcgcggcgggacagc

SEQ ID NO: 336428 - DNA, 638 bp, Homo sapiens
  chr20:37274639-37275277
  hyper
cgcccccagaagtcctatccccctgccaaaacttgatcctttctggccaggtcgcctctttcctggtcgcccaggtgcgaaaactgaacgacagtagcagcaggcgcccccagctctgcgacgcaggcctcaagacttggctgcggaggatgcacgcagacagggacaaggcgggggacggcctcgaggcggtgagtgcccccgaccccagacaggtggagaagggccgaggcgacaggagggcacctggggcgcggtgcttcccttcctccaggtccccgctaccgggctgccagcaacggcccagtgaggccaccagggggcgttgcggcgccgtcacggggagcgaggaggcgtggctgcgaaacgagggcttagaagcgggttggggaggggaaatggagtgactcggagacttcccctagaaaccgtcaccgccgccccatttttcggcagcccctggccgagggttgggaaaatgggagtcgctctgcggggtgtgaggtgattggggctgggtgggggatagtagaagggaagagccttccaaaaatactgagtattcctaggaggggtcctgaacacggttccttattaaagtcccgattagagaaattgatgagcgttgaggctgcacc

SEQ ID NO: 336429 - DNA, 1019 bp, Homo sapiens
  chr20:37302482-37303501
  hyper
ggcagagggaatcaggaaagcgatgggcttgtctgaggaacagaaaggacaacgaacgtgtgagtcacactaaggggcgccgtggtgcggcatgaggctggagcctgatcactcggggtcttactggccacggtgaggagtcagggtttcatgcgcccctgcagtcagaaagcatggcccaaccccagtgccctaagtccggaaacattcaaagctggacccagggtagcgggatccggggcctctggggacccgagagggacgttaagttcagggcttcagggtgcagccctggggtcggtacccccagcctccaacccagagctggcagcgctcgcccccttctccgcgcgggccctcagctcagctccctcttcgctccccgtgtccccgcgagcgggagggaggggatgctaggacgccctgtcggcgtcgtcgccgctttccgccattgtttagtcgtgatgctctcattttctctgaatcaacaattttctgctcggctccgcgccgaccggcgaacgcggggcttttcctcgcccgcctgatgacagcagagcggcgcggagcagctggtccggaaggaagcgccaggcgcctgcccggtcccaggcgtccgctgccgcccacccacaccagaccccgcccccgcgcgtcaagccccgcccatccataccaagtcccgcccccacaccctcacccacacaccaggccgtccccaccccgcccccagagccccggggcgccccgcccgctagccgcgcacgcgcagtgagcacggcgacccccggtggtcgggtgtctccgcaggccgaacacgctgctcgcccagctgcggatcattaccgcccttttgttctccgtcgcgcgctcgccccacgctaggaatgcaaactgtaggcgccgccagcccccccttcctgtttccctgggtgggagtgggaagggagttttaaactgaattgtgctcagactcccagcccagtcttcccggagccatccgttccttcatccaatgc

SEQ ID NO: 336430 - DNA, 1794 bp, Homo sapiens
  chr20:37351555-37353349
  hyper
tacttgtgcgctgacgtgagctaatctagaaatactgcagagaaagagtggctggggttcccagggagaaagggcctcgagagaggggagatggggagctgcttccttttttgtttccttcggtttttccgtccgcccccgcccccacttccagtcacagccgctacttctccattcaggctgggactgccaggtggagccctgcggtttactgctcaggaggagcccggccaggacatcagctggggacttacgcagggacccattcagagcagcggaccctcacggagactactacaaagggactaacacaggcacgaacgcaggcaaccccattcgggaacacatacgtaatccaacacactagctctggcacacacactggaatgcgcgcaaaaccacacagacacagaacacacgcggttaccaaacctcattctcagaggccacactgatccaacctcaagcagagtctgatacagcatcggtctttgtctctgggtctctcccttactcgcgctcacacacccgtaccccaatcaacacaaacagcccaagctttcacagcctggaggcggccgtcggagcagggccccagcgcaccgcgagcctctgcttcctccgccttgcagcgccgcgagcccttctttcctccgcgcctggccccgtctgcgcccctctcggcgtgggcattcgcagacccgctaggaggctgacgagaggtgtcctcatagagtcctgccttcttccagacccccaaacgaaaagaaagagaaaagccaacctttcgcctccattctgcacgcatttggagagcggctggtggcgagcgatccgcacaatcgcttccctcgcggcgtccctggacgggcggagagaacccgggtgactgagcctgaggctgagcttccttgggagcgatccatgccagccacttctaccttcaagggggactcgcggccgggtttacgcgcgaaggatgggtgccagggaaactgacttatagacgacccgctccgcgagagactgacaactcagtcctgcgggctttcggggcgcccagaccagtccttagccagaggatctggggctgcacagctcccggaccctggagggggtggtccgggggtgggagactgcgagcatcagcccacgccggccccctcccaccctgcggcggcgaggtgggaagggccaggatgcgagcttagcacctcccctagaaatgcagcacttcgcccccccacctcccctgccctcggcgctccctctttcacgcgctccctcccgcctccttcccaagggcgcccttcttctgcccccagctcacgtctgaatccctcggcgccccctttctcttctcctagccccttcctcacgtcccctgcctccgggtatttcctctctccaatcccccacccccgcaccgcctgattccgaggggcgggagcgcattgggctgcgcacgggtgggggcgccgcgccagcttcgcgtagctgctctgacgccgctgccgccgccgccgccgccgccgccctccgcagcccagctcgcgccccgcggcagctccgcagtgcactagccaccaccgccgccgccgccgctccgccagacctgctgccagcttgcccggtccagccctgagagagcctcgaacgccagctgcgagggtcatgagccagagagccccggggcgccgcgcggagagcaagcggagatagcgactttgcgccccccagccctcgccttcttgcatcgcgttccccgcatcctcgggtccttctgtcctttcc

SEQ ID NO: 336431 - DNA, 550 bp, Homo sapiens; identical to SEQ ID NO: 241168
  chr20:37354550-37355100
  hyper

SEQ ID NO: 336432 - DNA, 553 bp, Homo sapiens; identical to SEQ ID NO: 241169
  chr20:37355881-37356434
  hyper

SEQ ID NO: 336433 - DNA, 1478 bp, Homo sapiens
  chr20:37356801-37358279
  hyper
caaggaggtcatcacggataacctgcccggctccatccgcgccgtggtcaacatctttctggtggccaaggcgctgttgtcctatcctctgccattctttgccgctgtcgaggtgctggagaagtcgctcttccaggaaggcagccgcgcctttttcccggcctgctacagcggcgacgggcgcctgaagtcctgggggctgacgctgcgctgcgcgctcgtcgtcttcacgctgctcatggccatttatgtgccgcacttcgcgctgctcatgggcctcaccggcagcctcacgggcgccggcctctgtttcttgctgcccagcctctttcacctgcgcctgctctggcgcaagctgctgtggcaccaagtcttcttcgacgtcgccatcttcgtcatcggcggcatctgcagcgtgtccggcttcgtgcactccctcgagggcctcatcgaagcctaccgaaccaacgcggaggactagggcgcaagggcgagcccccgccgcgcttctgcgctctctcccttctcccctcaccccgcccccaccagcccagtgcgccctgccgccgcgcttgggaggccaagctttaaacatctctggttcctagtttctgattattcggggatgggggggatgggaggggacagggattcacgatccatcgcgtctgcgtttctgttgtcctttcttttccacaacaccctggttttggggggaggcggggtgcatttgcgggcagggttctctgtccttccaagtggggccccgacactttggttccagtcatcgagggggttgggaagggagggagagggggcgcagctcgcaggcgtggcaacttgaccttgggggaatatttcacatccatccagagctcggaatctacagcgtccagccatttccagcaagagcgcttcccattccggagacgtttcaaccctgcagcgggaaaggctgactgggaaatccattttgggtgggcaatttccttcaacgaagccggaaggcgagaagccgcggcggggccagcttgcctgccggttttcaggaatctaaactctcatcttgtgcaatttatcaggtgtggaactgttctactgtgcgtgtggtgtgctcgtggtgaataagatgaaatgtatatcagaaaaaaatctatctctaatttagagtgcggtacataattatatccgcaaataaagaagagacaaaggcttgcgcggcccggtgtcgggtttgtgtgttcgtaccagccgggatcccctggcgctgggaggcgtgggaactggctcccgccggctgaaaccggagatggtgagcagctgtggttaaagggtccggggagggctctagggagtacaaagattagttggcggcgaggaggctcctcaggtgtgaggaggaagctgaagacggagagtgctgtagcggccccctcagctgccaggtcgaggtttgttcgaatctctcccctgggggc

SEQ ID NO: 336434 - DNA, 2193 bp, Homo sapiens
  chr20:37433723-37435916
  hyper
cgtcagacgtcagcagaggtacgaccacttccttcctccagcgcttcacctcccttctttccagaaagaggaaatgatgcgagtccacaccgcaggccacagcccccatgtctcggccccagcagctgggggacctggccccacagatctgtccccagcgcaaggccagggccggcccctggacctcctgggaagccttcagactcaggccgcgcaggccttcaagctaggaaccctgagttcctggccctggcattcattctgtgtgaccttgagcaggttaccactcctctctgggcttcaggattcccgtctgtcaaatgggagcagggataccgtccttggcttccctctttccatggtcggggtgggggttaggaaaactattttggaggagggggcagcgttaggaaaactattccgaagcctggccacgtcccaaccggtttcaacttcctgcagctcagaagaggggtccccacccgagagcgccgggaccctgtcccgcgctgcctcccaagccggatggggttgagcgcgcccaccccagtcccaggagctcaggccccgccttgggggaggagccgagaggcggcgcggaggctcgcggccgagcagagccagctctgtcgccgctggagcagctgcggctcggggacccacagacacagccggggtcgggagccgcccggggcagggctcgggagagcgggtgagttccccggcggcgccaccaccctccttgcgctctgcggcttcgcagggcgggggatgaggatggggcggggaggtggtcccagcctgctatcacctagctgggggccggggcgctttggccaagggacgatagcttgagataaatgggagtgtggggactctggaaagacgggtaccgagagcgctaggtccgggagtcgggctggaatgggggcgttctccccggcctcgcaattccttgacgaggccaggggagggggcgcattggcaggttgttggctgcggccgtcgtagaccgatcttggggcggggaggtggggtcctcggtctgttctggactcatggggccgccgtctgccgggggtgcaatgccgggcggcgggagccacagcggacaccaaacaacccccccccgcgcactctcccggccgggcatggtggtgccgccccctcgcgtggcggggcttggtcctggcgggcagcggcagggcgcagagagcgctcctgcccgggcgggaaagatccccaaggcaggcgcctccacctgcagacccgccccgcctcaggatccggctgacagcaccagccagcccggggagaccccgcgagtggtagttccccgggaggggcgcgcccggcctctcccagggccccgtgcgccggcggctgggtcccccgcgccaggagcgctcccctctgggcgactccggctcatcgattccggcccagaggagcgcccccgggcgccgaggatgggcggagacgtgcagccgcccctgagaggtcgcccagaggggtctccccaaggtcacccggagtgcccaggctgagctgcccagaccgccccgggtggagagccgggaggcaggcgctcgctgccctcctccttcccccatgtagactcccttcctccgctcccccaccccggcccggcctccagcttcactggagatgctgatgatgcagctcccagcccttggaggataattgagcctgggagagctttgaatctggccctcctgagaccccagggctgcgccgctgccgcgcgccaggcctgggtcccggtgctcccgggcacctcaggagcggagggagagggatgtggcttcatcagcgcttctaggaaccgaaaaccgagctgcctgcgcgcccatgtgattgcatttcacataaagggcccctgttttcactgtcagaagagccccccagctctccgcggctctggacaccaggtgccgcctctgaatcaccctctgtggaggacccggggcccggaggtacaggcgccctttcccgcagggctctccctggaaagggcctgccgatggcggcctcagtccgcaggggtacttccctgtgtaccctgccatttcctgcggctggtgaagcaccggagaaaaaccgtccatctaggaggcctcctccaaggctggtaataaagcttcttagcccagccagcgactagctgtctac

SEQ ID NO: 336435 - DNA, 2847 bp, Homo sapiens
  chr20:39316787-39319634
  hyper
cgtccttggtgaagccccgcaggtggcggttcagctcgcgcacggacatggacacgagctggtcgtcggagaagcggtcctccacgctgccgttgccgcccgccgccgtcgccgaggccgtcgcgtgcggcccgggcccggggtggctagtgggcagctgttgcgccgggctagcggcgctggacggcggcggcgacgcttggtgatgatggtgatggtgcgggtgagcgtgcgggcccagctcgtcgtgggccacgccggcgcccgggtacgcgtggtgcgggtgagggtggtggtgatggtggtggtggtgagcgccgcgaaagctgtcgaagctttgcagcggctgtggcactgggtgcgagccgatgagcgcttccaccgcgtcctcgggcgtcaggttgagcgcctcggggttcatctgctggtagttgctcgccatccagtacagatcctcgaggtgtgtcttctgttcggtcgggctgaagctgggcgacgagggcacggagctacacggagtgctgagcggtgtggaggacaccgagccggctggctgcaggcgtgtgcagggcctgcccggacgctccgcgcgccccagtggctccttcttcacgtcgaacttgagcaggtcgaagtcgttgacatactccatggccagcgggctggtgggcagctctggccccatgctcagctccgcggccatcgctgaagcgaggcgcagccgccgctgccgcccgggaaactttgcggccggccggagcgcgccgagccaagcgcgggggggaagagcggagaagagctggggaggcggggagcgagggcgcagcgggccggggccgccggccaagcctttgtctggggacgcggcggcgcgccggagagtcccgaggctgcctgcaccgccccagagctctgggctgtgcccgcgcagggaccgggccgggtagagtcgggcggggtggagaggcaagcggagcgcgcggtggggctgaggggaggcgtggggcgagtgcccgttgctcgctctctagctctcttgctcttacgctctctcgctcgcagccgctcgcagctcggcggtgcagctgtgctggatccggcggcgccgcagccttttatcgcctcctgatgtcactggggtgcgggggcccgggcggcccggtgcgcgggccaatagctgcacggcctccgcggcccagcggcgcagggcggggcgcgcctgacagctcccccgccccccgcgtcagctgactggcggcccgagcggccccggagcggcggaggcctggcggagcgctggagcggagtgggacggccagcctgggcccacccccgtaccctgcaggtcccggcccacgcacgctcgcctggagtgcgcgccccacctctaggccaaatcaccgctttcccctcctcgcgcactctcctccctcagttccctttgcaccccacccccatcccgtgtcacccccaaggaggctcagaatgagcgccgggacaacgcctcctgggccctttgttcccaagcggcccccgcccagtgggcgacgctctgtgtgtcctcgcggcttctggccgtgtgtgtcgtgcgttcctgtttctggagatctgcgcgtatttgtatgttggggagggcgggctcgaggctccgagagttgtgttcagacccaactcttaacctcaggggacctttctcaggccaagcgagggcccctcctggcgggtgcagtcgcagagccctgaggttcgactccactggccccgccgctccccgcgttcaccccaccgcacaatgttcacagtgaaggcgacgggaaaagcagcagcccaaaggctctgaattcctcttccccgccacacgcacggaatcctgagcccccggagcctcggggccgaggccggcccgggacggtgctccgagtagctctccactgctggggagccggccctgtttttgtttgaacgttttgtaacgattaagcagatcccggcgtcagcccgccgcggagaggctcaaacaggcataaagtgcgaccccaagtggccactgtgcgcaaaggcgccgcgaccgcccggcccacggccggaaggcttggacggcgcctcgtacccagccaggtctcccctacctggcccaacccaagccagcccagaacgcatactatgtgtgcaccagagcccaggacaggttcccctcgagcgatgtacaggtcctcgggtcccgtcttcgtactcagccgcgagcctcgagccgcgagctccgctctggtcgccccgttgaaattccgtgccccagcgttcgggggtgcccgtcggctgctccctgggccggaaggtcctgggcggaggaaggccggtagccaaaagtggaagcgccacagtgaagcggcccagggccaccgggtgagaaacctccccggagggcagacggggagaccgaagcacaccgcactaggcatccagactgggcttgggagccgcgcaccctccctacccagatccaggatggctagaattaacgggttctttctgagacctcggctcaggcgccgaaaccggatagatcgcgaattcgctggacccggagacccgacccgcctcccgcgtcaccttcttctttctagctttgggcgcgcgcagcgaaaggcaggagaggcgcgcactgggtgagtgagtcccggccgctgtctgcgctggaccagcccgactgacctcgcgcgtaggggtcgcgtgagccacaccggtgcagacgcgcctagattatttttaaatgttagaaggtaaaatatttgcctccaattaatctgaaaactctctattctcttgcgccctcggagaggctggggt

SEQ ID NO: 336436 - DNA, 1158 bp, Homo sapiens; identical to SEQ ID NO: 226148
  chr20:39994655-39995813
  hyper

SEQ ID NO: 336437 - DNA, 252 bp, Homo sapiens
  chr20:40321474-40321726
  hyper
cgtctcggaacagttggctgcacaggtcacgtgacgcgcccctagcccggctctatttggctgcaagagcgctctgtcgcctgcctcggactctgtttcccagaagtcttcctggaaactacatttcgcagggggctttgcggcgcctacttcctcctggctgattagatgggactggtgccgttggccggacgtttttgggagcttcacaggctgatggggaagggcgaaacctgctcgattaaaacaacc

SEQ ID NO: 336438 - DNA, 2177 bp, Homo sapiens
  chr20:41817010-41819187
  hyper
cgcctattccgcttccattttagtaccaagcaaggaaggctctaaagcatttccaacggaatgtccttccagcggcccttaacctcagacgcagcttgtgcaaagacgctgtacctccccacaggttcgttcttttgctctttctttcttcctttccttctttcggtgaaataataaatgggcacagctgttgcttagcgatccgaaaccagcctgttcctgcgtcccacgggctgatctcagcctgtccccgcaatcccagccacctcaggccggcgtggttacaccaaaagcaatcggtgctaagaaactttaaggtgattttgaacttggaagtacacctgcagcactcccttctcttccctccgccgctactcttgggggggggggggctcgggggtggaagctgcctgcggtggggcttggtgatgtgtaagaccctggactgtggtgccctccagcacccgccaacgtgcctttaggagcacggcaggcaccacccccccgcccccgctccccctactctggggaactacctctgctcaccgccttcccgtggccaaacccaaatatgagttccccgaacttttcaggagcggacgcgctcacgggtcaaatccactcccctccaagggccttaacacgggcgcccagctacctcggagaaaagccagcgggtagggcggaggtattgctctcggtcatcaacgcaaacatcccctcgggtgcctacagcggcctgcttaggggagcagcgtgttcagagcaaatggagagcttcctgtatctccgaggaaaaaagaaaagccgccgccccggcagcctcggcctgctggggacctgtcctccccactaaaagcgcgcgctgcccgaggagctgcccgggagagaacgctccaccccgggcgtcggtgccgctcctcgtctcgccgccccaaacactcaagtggcagattccgacaagtgggaggcagcaagtggaaatattcgcaacaaccgcggaaagttactccagcccggggggccggcaggaaactgaagcggggaacttcgccaaacgcgggctgccgagggacgcgaggggccgggctcgctggccggggcgcgcggggacactgcttcccgcgcctgcaagctgagacccgggttccggccatggggacccgcgcccccgcgagcccacacaactttctcctccgagggccccgcggctgggggcccgcgcgcatccaggagggagcggggagcccaggggagccgggcgggcgcactcacctgcggcgctctgagcccgggcgccgggcagtggcggcagctgcagcctcaggagcaggctgagggcgagcgcggcgaggctcgccatccgggcggcggcgggcagctcagccccttcccgcgggggccggggccgggactggggcgggcgcggggtggccccgcatcgccggcgcggccgctggctgtgcgcgcggctggctccgctcgggctcccggagccggcgctcctgcgttccaagccgaggcgcggcgcgaactgaggcgggaggctgggcgggggcgggacgcggggggcggggggcggtgtcccccgagtcctaacgccgccgccgttgccgccgccgccgccgccgccgcccgcccgggcgctccgcctcggccgtgcacacaccctcacgcgcacgcccgcgcctggcacacgcccgcggctggcacacgcgggctcccccgcgcaccctctccggggccgaccagctcgggccgctggcacagtcacgcgcgtccacacatcacccccgcacccacacgccgggcagggtcctcgcctcttcgccccgcgccgcgccgcgcagccaagcatcgtctgccctgtgggggcgcaggtacgggggcggtgcggggaggaggaagctgcagcagccgtttgaactcggggtggggaacaggtgaatgggggttcggtggcgagaagagggagggagggagcagccctcgcaactcaagataaggggccaggtgaattgcgaaagcgggtgggggcgtctgcccaaagctggggcaggcggctgctggccagggtctcgggcacaccctgagatgagaatttcatctaagagcgcgcgcgcgcacacacacacaacccactcacactcttctgggcgcatcgctgaccgcgccac

SEQ ID NO: 336439 - DNA, 73 bp, Homo sapiens
  chr20:42136656-42136729
  hyper
agggtggaggctgcgtgtttggagatacgcaatcaattaagagtttttttattaatggaaaggtgtggagggc

SEQ ID NO: 336440 - DNA, 1925 bp, Homo sapiens
  chr20:42543097-42545022
  hyper
cgcacccacgccgcggggcggggactagcgccgcctcaaatatttagggcaagggagtgtcccacttctggggaggggtgccgttcgggcttctctcctcaccgtgggtggcgaaaggcgggacggaaaagcgccgtctggacaggcgcgcccccctcagggatgcagggccgggcgggggacccggcggcggcccagcccggaggaaggacctccacgccccggcccgggcccccgggcccccggccctaggcagcgcccgaggccggaacaatagcgcgcgcgggcggggcgggggcgggggcggggcgctcctctgggcaccgcccccggcccgccccccgcgctcgcagtcccgctcgcacactggctcccacccgccgcccgcccaggcactgcccgcgggagccgccgccgccgccgccgcgcccgccatggacgtccgcctgtacccctcggcgcccgcggtgggcgcgcggcccggggccgagccggccggcctggcgcacctggactattaccacggcggcaaggtaggcgggggcgggcgggggtccccggcgggcggggccggagtcacctggcagctcgggactcaggcgctcccggggtcacacggggccgcgcacatcagccccgccgacgggcacgggcggctcacatcgatcccctcgcggccacgctcacgccctgagttgttgggatcgcgggcagaagtcatcccgacagccacccgtgcgacgacacagtggcccctcactcgcgtccccctgacagcctcgcagtcattcacaagccgtcacagtgacccacagccacacgcaggcggccaggcactgcttacacggtcccgccgtcccacgcaagtcaccctgacagtcacttatacacaacgacacgcaaccactcacccgcaaacagcctcaccgccacagacgagtcacccacagacgctccgatgccccacacaccgtgacatgcccccacccgctgtcacacccaggcacaacgggggacagtcacacaaagaagtcgcccgacagtcacactctcgcagccacaacgcctcacccaggcgcacgctgtcacacacagccacccccctggacggtgagcctcagacacagatcgtcctgacggccacacagtcacacgcggtcacacccagggacggccacacctcggtcatccacactcgcgcgtcgaggtttaacttctcagcgccgcagcacactaattgggcagtttactaattggccgtcactgcctggcggggcctcggattccgagtaggctgcggccaatcgaggcctgtgtcctcccgggagcggtgagccggcgtccctccaggctggggctgtagtgccggacaccctccctcctccatgtttccaggatctatccccccaccccagccaggtcccagctgcgctgcgccgggcgcattcccagtgatggaggcttgcgtgcctggaaccccgaacccgaggcgtcaggtcccactgccgggtctggcccagcctggatgggttgggtgcctctaagcagtccgcgtccccttcggtcgccggagagggaactttcaaacttagttaggaagccagactgtccgcgcgtccgccagtcggtgcgtcggtcccgggccggctggagccaagcgcgggttttcgtcactcggagcccggattgaacagcgcgcgtgggtttcccgcagccctggcgcagacgcgtgggctccgtggcgatgcggggtgagtgcgcgtccagtggctggatcggcgccccccagggtctctccccaacctcgcaggcttttcgtcaggcccctggtagtggggatgaggcaggagagaggcgtcccggcgcggatcccggggcctcccgggctgggcctccctgagtgcgccctcaggccccaggggagc

SEQ ID NO: 336441 - DNA, 929 bp, Homo sapiens
  chr20:42875764-42876693
  hyper
cggcttttctggcgcgggccagggggaggaggagaaaggagctcccgggatcccctcgccccctcccccaactgcccggtgagtaatgacattcacggagcggggagggagggaggagaggggcaggctcggcgaggccatgtgatgctgggcgagagagagccgccgcgccggagcctccttctttcctgcctctgattccgggctgtcatggcgacccccaacaatctgacccccaccaactgcagctggtggcccatctccgcgctggagagcgatgcggccaagccagcggaggcccccgacgctcccgaggcggccagccccgcccattggcccagggagagcctggttctgtaccactggacccagtccttcagctcgcagaaggtagagccgggccgggagccgcctgcgccggtggccaggaagcttggggaggggagccccagggcttgagggatctgagggcggcgaaagactggaggggggaacctggggtttgggggtcccggaggtcgggggacgcaagggttccttccaggactgctcacctgggaagcgacaggccctgtctgggccccaggagcacagttctcaattttaggagcatccattctgcctctttccctcccagaaacagccggtctgttggggtgcggggcgggttgggggggctgagaaaagagacaaaggcgaggggaagggaatgggcactgctgggaaggcggcttggtggggtgggaggtgctgctgctgcggggagggagaagaagcgctacttggggtccagcctcggtagccccctctcagtcgctccctgcacgctgccgtcccggacactgcaggcccccaggtcacagctcctctgcccctctgtctgcgggccgccttctggctagggcttggagggtctgtccccagtcgtc

SEQ ID NO: 336442 - DNA, 323 bp, Homo sapiens
  chr20:43017186-43017509
  hyper
cgagctgtgattggtgatcgaaccgagcaggcctcctctggatttggagagacatagtgcgtctgggcctgtgattggcgggattgctgtgattggtgaagtccctaaggctatctaagtttctgaacaccagttcctgcgttggccacgaggaggagcccaggaagcgcaaagcgcagcactgcggagagtcttggccgcctcctccgggacgccctccggcccagcgcggtgcctgccctgccctgcgccctggggcaaccgcgggatgaggtggggcggcaaagggtgtcagggctcccagctgcggcccgggtggccac

SEQ ID NO: 336443 - DNA, 135 bp, Homo sapiens
  chr20:43104449-43104584
  hyper
cgccgcggggaggcgtcgcacatgcgcgctcctaggcggagccccgcctcccacgccctggatcgtcacttccggcgcgagaggccgggcaggccgggcagggagtgcgggtcggttctgcgtgcgctgccggac

SEQ ID NO: 336444 - DNA, 57 bp, Homo sapiens
  chr20:43374349-43374406
  hyper
cgggcaggcgagtgggaggcggacaggggagcggttcttccggcccccacccgtggc

SEQ ID NO: 336445 - DNA, 690 bp, Homo sapiens
  chr20:43438095-43438785
  hyper
cccaccaagaaaggcgactccagggacaagagcacctgaggtcaggggcacacaccagcgggcggacaagtgtagagttggcgccgccctacacctctctccgggaagagaggggaggaaaggccgtcacctggccggttcccctccgtctgccccaggcgtataagaagcaggagtctggagccccagcccatgagggaaggagaggagagataaatgggggcgctcaaggcctggggcgccgggcaggggtcttgggcagggatcctctggatgtggccaagacaaagatggagaggtaaggtctgcgcgccacctccaatggcggggggcgcgtcggagccccaggggtgggacggccaaagcccagggcttgaagagtgggcacattcaggagactcagggagggtggcaggtcggctccagggacgaggcaaggggcctccaataggcgcgggtgaggagggagatgggtcctggcgacccaaagggcccacctgcgggaaaggtgaatgcagacaatctcggggtccctgggggagaaggccagaaggtagcgcatcctggagaccctggggtcccgtgggtgcggaaggagaccctgggggcgccttcccaggggattgggggtggggaggagggcgcacgggtcggggagggggctaccggacctggatcccgggacacccc

SEQ ID NO: 336446 - DNA, 746 bp, Homo sapiens
  chr20:43438799-43439545
  hyper
cgggccgcgcgcttacctgcgtcctcgtcgtcgaaggagttcatgcacgggaagtagatggcgagcgcctcgaaggaggcggacagactgaggcggctctgcgagcgctccatgcccgcgccggcgccgggcgcctcggccgcggcggcggcggcggcggcgggcggcttgggcagcttggccgccccattcttgacgcggagtacggcgcgcggcgtggtggcggcggcccggggccgggccgaggctccgctgcggggctggcgggcgcggcggggccggcgggcgggccaggagctggcggcgcgcggagcccgaggcgcgctgtgctgctggcggcggcggcggcggcggcggtggcggcggcggtggcggcgcagcgcgctctggtccgcggcgccccccgccggcagcgcgaggcgggcttggagcggcgccgcagccaatccgtgccgccgggggagggggcgccgctgcggggcgtgggagcccggagggcgcgggctgcggcctcttctagcagcccccgggcccggcaggtgcgcgcggggaggcaggcgccgggcgaggttgtctgggccctggtccgagggctgttcccgaccccgcctcggcccccaccctcagccggccgacttgcggagaggccggcgtccagtccctcacccagacaggcctctcccagagacactggcgcgctcggaggggatgcgctcaaagggtcccgcccaggcgggtcggcactc

SEQ ID NO: 336447 - DNA, 108 bp, Homo sapiens
  chr20:43589121-43589229
  hyper
cggagcgtcccgccctctgcgcgtgctcggtttggaacttaggctcccttgcacgcggggcggcagcatgctctgggctccctgagttgctagaacgccgtggatgac

SEQ ID NO: 336448 - DNA, 259 bp, Homo sapiens
  chr20:43729515-43729774
  hyper
cgggaccgtcccggagccacgtccctccccaaaggaggccccttacctgtggtggcacctcccgggcgcctcgcgtgtctgtcccaaagccaccgaggctgggagccgctggctatactcggtctcgcctctgccccgccggccccgccgagcctcctgctgcaggcggccccgctgccctctccttccttcttccttgcctagtcccccgcggctgaaggccgcatcgatcgctgccggaggagggagtgaggccgct

SEQ ID NO: 336449 - DNA, 504 bp, Homo sapiens
  chr20:43922022-43922526
  hyper
gccacagcacgctccgtctggcttcccctcccccaggcggcgcagcaagacccaaaaacggaccccgtggaaatcagttttttttatttttttaagaacacaaacaagaaatccaacaaagaactgagcgcagcacgcggcgagggcgtgccggtctagcacgtgccccttccctcaccacccgctatccccctgacgccgcagtccgcctaatggtccgggcgaggccaactcagctcaatgccggaagcccgccagcgcctccgccccgacagcccaagccggacgggcccaggttctgcctggccccggcgcaccgatggcgcgcaaggggcaccgtccgtggtgccgcgccccagcccgggtctgggccgtccgtggccctcacttctggttggccagctggttctccagatcctccaggcgcgccgtcagctgggccagtgagcggttaaggaggccgttggggttcgccgaggtcccttcactttccctccagcccgc

SEQ ID NO: 336450 - DNA, 213 bp, Homo sapiens
  chr20:43976986-43977199
  hyper
aagaacagcagcagcgcgaacagacgggcgggggccatggcaccgcggactggagaaggcgcgcaggctgcggcgagtggccccgggcgggcgcgccacccatcttataggcggcctaccggccccgccccggcccgcccccgccccgccgcccgcaccccgcccggaattccccagtggaagcgaggcctgcggggcactgcgcccgcccgc

SEQ ID NO: 336451 - DNA, 1360 bp, Homo sapiens
  chr20:44098345-44099705
  hyper
ccccctcccgcgcgcgcggttaaatccccgcacctgagcatcggctcacacctgcaccccgcccgggcatagcaccatgcctgcttgtcgcctaggcccgctagccgccgccctcctcctcagcctgctgctgttcggcttcaccctagtctcaggtgagtggggcggggagaggcccggcgcctagaggggccgagccacgagcgccaggatggagccaggcggaggcgtagcctctggaggctggggaagtgggaattccgggggcggaagtggcggggacccttggagcctagggtgtggggtccaatgtgctggaggtggagagaccactgatggctgcaatttgggaggattctgtgctgaacgcggacactccgtggctgcagtgggctgggggtgggggctgctctgcctcgacctcggaagctccgagacgctcagctgtgcggcgtcccctagggctgagatctgagggccccgacgccaagggttagggagctctcgtactcccaggggtcagggactcctggtctggaagaaggagtctctgggggctgtaaggggactcctagggccagagactgagaattccttggggttaaggtttggagcaggaggtgggcatcctctggggctggcgctacgccccaccctcgactgtcccgggcctcccctcccaggcacaggagcagagaagactggcgtgtgccccgagctccaggctgaccagaactgcacgcaagagtgcgtctcggacagcgaatgcgccgacaacctcaagtgctgcagcgcgggctgtgccaccttctgctctctgcccaatggtaaccccacggcggccgagcgggaacggggcggggccgcgctgggctgggaggaggtgggagggcccgggttccgggaacaggggcgcccccggacccggggacccccgggaaagtcaaggcggttgaaaccagatccgtcagtcctctccctcgcacggcccaggggtagacaaaggcgtcgttgaaacgcagccaagggggggtccccacccctagctgggattcgagtctctggtgcatgacgggcttccgggcacgcacagccgggacattgttccccgcggcctggggacccggggccgcagtttccttctcgaaccggccgaagcctgccctgcgggaaagcccggagcctggggcgctcacctctcctcttggagtccctccctgggggcctcccccagccctggggaaagactgggagagcctggcctggcaagattttccccaattcctctgtccaggcggaaaggaactttacagatttaggaaaatgccccgctcatcttaaagatgtgtaagggagcatc

SEQ ID NO: 336452 - DNA, 489 bp, Homo sapiens
  chr20:44452645-44453134
  hyper
gccgtcgttgttcttgtcgccgtctttcatcagagattcgatctcctcgtccgtcacgtgctccccggaggccctgaaaatctcagccagctcctccgggtcgatgtagccgtctgcattccttcaggtccgagggacagggcagggctcagggccggggcgagctgccctggccaccacactcgacgccccgcttccgcactcccaacacggggaagcttccagcgctgccggccgggttctgactgctaagcccctccctcggctcccgggcccccagcgcacctgtcgaagatgcggaagcactcggccagctcctcctcgctcttccctttcgcgtcctctttcatctggcgcaccatcatgaccaagaactcctcgaagtcgatggtgccgctgcctgcgggcagcaggtggcagactgagcctgagcccagccgctgccgcctctccccaccatcccctgcctccgagggacacccgctcacc

SEQ ID NO: 336453 - DNA, 911 bp, Homo sapiens
  chr20:44642199-44643110
  hyper
gggagggggctttgcggaggggctgcccgtcccttcccgcccactggccctgtgtccaaggcttagagcccgtcctttccctcctcgctttctcaggaagtactggcgattctctgagggcagggggagccggccgcagggccccttccttatcgccgacaagtggcccgcgctgccccgcaagctggactcggtctttgaggagcggctctccaagaagcttttcttcttctctggttagttacctactttccctcccccgcccggtcaatccccatcagtcaaggaggctcaagagaccatcgataacccacgaaacgtcttgtgcgttttagaaaaatacgccccctggcggacgcagtttagcaaacgtaggggcggctgagtttctgccccctcctctccacgccctcgcgtcgctctacccagcgcctctgcccctgggttgcagggactgcgggcacgcgggctaggaaaggcctcgccggaatctccctcctcgcgttctaggagtacgtgctccctctgcgcccccaaaccgacgtgaccctcctcccctgcagggcgccaggtgtgggtgtacacaggcgcgtcggtgctgggcccgaggcgtctggacaagctgggcctgggagccgacgtggcccaggtgaccggggccctccggagtggcagggggaagatgctgctgttcagcgggcggcgcctctggaggtgagcgccgccgcggccgccggcagggggagcccgggcgccgtcggtccgtccgctagccggctcagcacctgtctcctccgcgcctgcccgcaggttcgacgtgaaggcgcagatggtggatccccggagcgccagcgaggtggaccggatgttccccggggtgcctttggacacgcacgacgtcttccagtacc

SEQ ID NO: 336454 - DNA, 232 bp, Homo sapiens; identical to SEQ ID NO: 241219
  chr20:44650232-44650464
  hyper

SEQ ID NO: 336455 - DNA, 588 bp, Homo sapiens
  chr20:44879699-44880287
  hyper
cgtgcccgtgtactcctctaccacgaagaactggttccacacccagccgcgtttgacgcggccggctcccagcgcgccgtcctgccgagctccgggcgccgacggcgagggtgtgcccgctgcccacaggcgccccagcagcgtcggcggcggcggcagcagcagcagcagcagtagcgcgggggacagcgcgactcccgcccggagccccctaccttcgggcctcggcctcatccttggcctgcgcggggctggggcccaggagcatggacgagaggcaccagggcgccgctgcttggtcgcacaacgatgcggcgccgtgtcacatggtggcctcagcgcggccgccgggatgtcgcccccgacggggcacccggacgggcccgcggccctgaacgccgcccagccgcgggggtacccggctggagggggagggggcgcggccgcatccggggcatggacagcccccggggtgcccgcccgcgcccccgtcgccgcgtcgcgtgcggatcaccaggcagcacctggacagctccagagtcggggaagcgccatggttcctgcgcagaaaggatgcgggttggggcc

SEQ ID NO: 336456 - DNA, 1407 bp, Homo sapiens
  chr20:44936302-44937709
  hyper
cgtgcgtgtcgccgcggctggagtcagcctccgggtgtccccggacgcggcacgacctcgcacacacacaccgcgcgcacacgctcgcgccgtgcggtattttcccggccccggaccccgcctctgggaggggccggggagccgagccccgctagcagggttgggggaccgggaacgcctgggtcccagccctcgcgtcagggctgtgcgccaccttcccagccccttttggcgcgccggctcggcccctggcgctgccacccctcggcccgcgggggtcccggaggctcccgggcgcgcggcggacgaggttgtggggacgggtgggagctgcgggcttcgggccgagaggcggctcggctccgcgccggggaaagtttggacgtgggaaactccctccccgccctcccggccgagaggagggggcgcgcagggccgggcgcaggcaccccggctcctcctgcggctggaggctcgccccccgcgccgcctgcccggccgctcccgccggccagggggctccctccctgccgggcagcctcccctcggcggcgatccggccgctcctcccgcggcaccccgcgctcttacctcggggagcggcccggggctccccctagtcctgccgcctcgggacgctgcgtggggcgggagccccggcgcgggcagcgggcgagtccggagccccgcggccgcccgcaggagccggagggagagcgggagcgagagggggagccgcggcggcgtgtgcgcgcgtgtgtgtgagcgagagagcgagagagcgagagagcgagggagtgagcgagcgagcgggagcgagggagtgtgcgtgtctgactggggggaagtgtgcaagggacggatcccttccttcctcccgcagcctctggtggagactcggagaatgcagggcccgccgggcaggagccgcgcagcgccaagccgcaggcggccgccggcccggacccccgcagccggggaaccccagcccccgccccccggatcgcgcccctcctacaccaggaggggacagcctttccctctctcgggcggcccagtcccaggaaaccccccaggggacagtgcccctccctcctccaaccccagatccgcgcgaagggagcgcccccaggagggggaccatctacctcctcgcctggcagctccccaggtggccgcagtttgagaccagagcctatttccccacctgattttactgcgaatagggcttcccatttccgccccctgactactgcgggaggccgccttcagaggagcaggggcgcaggccagggtaggagcaggcttctcgaacagtggccgccccggcttgctgcccagaaaggcaccttgcacagaccagatctgccagttcagaaacagtcactgtgcattgaggtggacacc

SEQ ID NO: 336457 - DNA, 304 bp, Homo sapiens; identical to SEQ ID NO: 241238
  chr20:45279920-45280224
  hyper

SEQ ID NO: 336458 - DNA, 180 bp, Homo sapiens
  chr20:45825086-45825266
  hyper
cgcgttaaaaacgatggaccatttttccctaatattttgagccccatgatgcaagctcagcgcccgagaagctgtgctcatctgcaaccaccagggggcagtgcggccccacagctgacccagccgcccgcaggtgccacttgaagtgggacccggaaagagcaataacgcaagccttcc

SEQ ID NO: 336459 - DNA, 1468 bp, Homo sapiens
  chr20:47443693-47445161
  hyper
cgcccctcctctgagcttcaggttttatcctactccatcaacgcgcagggacgttgggctctggggctcctacggtatgtcctagatgagtggtgcaccgggcgcgtagttattcctgggaaaaagacgcaggagcgccagctcccggcgccgccggggtccccaagcccctgcatcgcggatgtaactaattttaaaactatttgaaaggcggggacggggaagaaaagacaaaagggcagcgcgcgccgcggggaagtggagtgcgggagagccccggtcggagcaggaccgtgcgccggccagggagggaggcgacgcgacagctctggaggagctcggatcccccccgctttccgcgcgccctgcggggcgcccccgaggcaattctccacccacggggaccacggccacaggttgtggggaccgcagcggggcgagcggctggagggaaagctgtccccaagctcccgagcgacactcaccgactgcaagaagcgcaaggtgcccacgtagtccctctcggtgcccaagatctcgttgaggacgcagaggcggaggcgcagctggcgctcggactcccgggcggccgcgcacgggccggggccggagctgggcgccgcggcgccaggggcccgggggtccgggtgggcgcagtccccggccccgtcgccgccgggctcgctgccgctgggcgcctccattctagcgcggccgcgcggcgccggctccttccgtcgcgccgagcggcaactcaggcgtccaggcgccccatcccggacggggcgcgccggcgggccgggctcagcggcgggccgggctcccggcgcggcgggcgggactgggggccgggcggctgggccgggggcggaggcagcgcgcgggggccgggcgaggggcgggagggggcggccctcggggctcccagacggctggccccccgcccccgcgccagggaccgtctgccaagtgccacgccgcgctcggccgcagaggcgctctgcgcgtgcacggggcccctggggacgcggcgcggcgctcggcgcctccgtcggaagctcgggggtcgggcgggagcctccggaagggccccgcggagccgggagtccgaggccgcgcgcacgccgaaccgagcgtaccaactccgcgcccggacgcgtggcgcccccccaacccgcagtcaccgcgggctacgccactcccacccggcacacgcgacacccgccgcgcgcaggctcctgcttgcaggtccggccgctgctcgggccaagtaaacaccgggctgggaaagctcgctgcggagccgctcgggggcaagccagccccgccacgcgcgcctccgcggccccgggaagtcaggggcgaccgctgcctgggcagtgacggcccctctctgggcagtgacggcccctcccgggaacgccgggccctcgcggtgccctcggtgctaccacgaccttgggaagga

SEQ ID NO: 336460 - DNA, 876 bp, Homo sapiens
  chr20:47934774-47935650
  hyper
cgaggaggggtcgggtctgggagcctccgcccccaactcaaggcaggctacacaagatctgtctccgttggcgtcccggtacctagcttgagcccgaccatgggcatgcgtggcgtggcgcgaatcctgtccctgtcgctcgtcctggccgcggtggccacgggggcctgggagcgggggccgctgggcgtgctcttgccctggcagggctccgccgcgctgggccgctgctgtcctggccgtgacccgatgtttgtcgcccgcgggcccccgcgctgcttctgcgaccaagcgtgcggcgcggcgcggcgcgggactgctgcgcagactatacgcgggtctgcccaggtgcacccggggaaaggcaaggcactagcggaacgctcggagcggaggggagctggggcgggggatgagcggaggaagggagcccagcacctagggggctctgggcttggaggggtcacacgagccgagggcggggcgcggcgcttggggactggaagggtgcgccgcggggcagacgggacgtgcagggggtcgcgcgggcaaggagggacgcagacactcaggacctaaaggggaagcactggctgtggagctgcgagccgagaaagacgcgcaggttatgaacctgggtgcgttcatctcgggggacctgaaggagagggactcgtggagagttgaggggtgtttcggaggaggggcgcaaggactgctcacaggacttgaagggcggcaggaaggtggaggattcggcccaggtgcgggacgcaggcggtggaagggaaatgagcacaagaggcgcaggcaggaaggagagcgcctggtgcgagagaggaaggagcgcacccagtaagcggtgtcgggggggtc

SEQ ID NO: 336461 - DNA, 905 bp, Homo sapiens; identical to SEQ ID NO: 241253
  chr20:48099000-48099905
  hyper

SEQ ID NO: 336462 - DNA, 742 bp, Homo sapiens
  chr20:48100303-48101045
  hyper
cagaatggggattgcgcgtcccctcaggcctcagcccttgcctgcctcccaccccgctcccctccagcctggagctgcggagcccgagcagaccaacaggccgagctgcggcaggcaaaccccctgtccgtgtccccatgcacccccacggaaggccgtacgccccaacactcacccccagggcggccgcctcctggggccagggaccgcgcatcgtcccggccgcccgggcgcccccgcccgtgggcagcggcggtcccggggccgggctgagccgggcctaccccggccgggcaggcaactcgcccgggctgcaggcgccgcggggccggggcgcgctctccgaggcggggggcgccggcgggcgccgggggcgcgggggcaggaccgcggccgcgcggcacctcctccacctcctcctcctcctgctcccgcggcggcggcggcggcggctgcctgggcgagatcaacaagtcggggctgagcttcggctccgcgctcgctgctattctgtcccgcacttcggagcgcccggagccgggcaccaaggcaggacggcgccacctgcgggtcggaagcgagcgcggcttaactcctgcctgcccggcccagcctgccggggaggccgggggcgggctccgggatcgggccaaggagacgcgcgtggccgtgcatccctctccacccaggccacctgcacagctggcctcgcgatcccgccttccttcgtcccgtcaacaac

SEQ ID NO: 336463 - DNA, 347 bp, Homo sapiens; identical to SEQ ID NO: 241254
  chr20:48184307-48184654
  hyper

SEQ ID NO: 336464 - DNA, 982 bp, Homo sapiens
  chr20:48598700-48599682
  hyper
cgcctcttaacggtcgccgcgtcccgtctctcccccaccaaagcacacttccctttgcattgtaattatctgtttacttcgtctgtctccctcactggaccagaagctacccttcgggagaggctctgagtgttctgtccggggctgtgccctggccccaggtacagtgccccacacgtgctgggcgctccgtaaacactggataagggaaggaacgggtgctcttggctagctgggccaggctgctttgcaaaaaggccgtggcatttcaagccgccgagagccacgtgcggtgtccctttcctcgcttcctccccagtgatgtgcgtttccctcgtcaatgccacgctctccaggcgccagccgggcggaggaaatttccgccccctcccaagcccgaggcgggggcgggcgtcggaaggtcaggtgtcccggccggcgcgcagcgccagggggcgtcagaagcgctcagaccaccgggcgctgagccggtgggcgcgcggcgtcctgccggggtcccacctcgcagaggcctcgcttcgctcgacgtcccgccccggacagccccagcaccggggacgacccgcgctgcgccagcgaaccccgcctcggaggagtccccgcccgggctctcaccgccacgcggcgcgagcccggccagcagccggcgcacctgctcggggagtggccttcggcggagacgagcctccgattggcgcggaggtgacaaaggggcgtggcagataaggccccgcccctcccaccccccaccacccccccggagtacttaagggagttggcggcgctgctgcattcattgcgccgcggcacggcctagcgagtggttcttctgcgctactgctgcgcgaatcggcgaccccagtgcctcgaccactatgccgcgctctttcctcgtcaggaagccctccgaccccaatcggaagcctaactacagcgagctgcaggactctaatccaggtgc

SEQ ID NO: 336465 - DNA, 183 bp, Homo sapiens
  chr20:48771177-48771360
  hyper
cgtgccaggatcggggctggaacatggtagaagctcaataaatgcttgatgaatgaattaaggctcagccagatgcgtctaatacttcggcagataaatgacagcagcagggatttaccccaggtctaaccgacaacaaagtatgcaataatttctcatagaaattccatacaggcagccggg

SEQ ID NO: 336466 - DNA, 415 bp, Homo sapiens
  chr20:48788897-48789312
  hyper
cgggcgggggcgggggctctttgccttccgatccaagctccgccctctgcagctctgctctgtgtatcccagagctgaccctgcggcgcctttcccaggctcgcgtccggtgagttcctattggccaacgggaggccccggtcggggagcgccccgggacaggcccctgtgcctcccgctttgcggagtgacgcaggccctgggctacagcaaccttaccagcccctccagcttagaggtggcagtggctctctgcggctgcgatttctttctcggagcgtcctccccatcccgttcggcctctgcctccaccgtcgtctctgtaacccgttccctgtgggagagtctctgttgcggtgttcaggggtttcggttttctggctgaacagtgattaacgcgagggaaggcgctgac

SEQ ID NO: 336467 - DNA, 578 bp, Homo sapiens
  chr20:49224900-49225478
  hyper
tctccccaggctggacgggactcacttccactgcacctccagctgcagcttgatggtacccaactccgtgatgtccaccacgatgacctgcggccgcgtcgtgaagaagtcggcgatgtcacacgtcactgcacccacagccagcgagcccaggccccgcaactccgtcacctgggggtgggggctggagggtggtgtctgagccgaacacccaggcaccccagccctgcccccgggccccatccccaccttgatgtccaggttctcatgcagcgtggggatgaaggccttctcctcttcgtcccaggtctggctgtcatctgactcgatccgacccttgagcttccaacgctggcggcccagacgcatgagcacctgtgaaccagcccgagaggggccgcgtcagcccaggtgggtgtccccttgctgtccgcccagggccctccctgccaggcagagccccagctgcaaccctggttcccagcagctcccgtcccccaaagacctggcggggagccctgaggattgaccccagagagtggccgtacctcatagtggtctccgggacagaggcgtgc

SEQ ID NO: 336468 - DNA, 305 bp, Homo sapiens
  chr20:49225991-49226296
  hyper
cgcctccttggggcccagaacacctcctccagcccccactggcccagctctcgatgtccccactgcccggcccagctcttgctgcccctgctgcccagcccagcttggcccggcccacctcggcgcactcgtgcaggctgcggcccagctcctgcaggctctctcgggctgcgcggctcggggggcaccgggcgaaggcccgctgcatgctggaggcgccgtcgcgcaggcggcactggatgcagtagtcctcgtacagctcatccacctgtggtgggcacacgggctggtggcgctgcccacgc

SEQ ID NO: 336469 - DNA, 115 bp, Homo sapiens
  chr20:49435030-49435145
  hyper
cggccatcttgatctcgtccttccctcgagatggtttttattccgcagaggagccaggagtggaccacaaggtggcactctcgggcaccgatgcagggagccgttcagcggggac

SEQ ID NO: 336470 - DNA, 795 bp, Homo sapiens
  chr20:49639051-49639846
  hyper
actctccttcctcccaggatcgggggagaaacctcggcccacagccgggatgcgcccccgccggggtcaccgcggcggcgaacgtcccggacttcgcatcccggtgaccccttgggatgaaccgaagccggacccgcaccttggccgtaacaagcgcgctccacgccgccacgcaccagcggtgactcccgagtcctctgtcgccctggcctccccgcaggcgggtttcgaggcccccgcagggagttcagggccacggccacgtgcagccgcccccgagcccgagtttgcaggctcggggtccggttcgcgctttggtggcgcccggcgaggctgcagcgcgcaaagttcccacctcaagttcccgtcgcggcgtccccgcctcggagttggcccggccgcggcttccgttccccccggctgcccacgggtccggggcgaggacgcgagaggggcctggaagtcgcccggggagcccgctctgcctcccggagccgccgccaaacttcggtcccggggcccggctcagctcccgccctcggagccacggccgccccgtctctgcctcccggtccccgccgggctccgagtgcgccgggagcgcggcgcagcagccgccgagggagggagcgaggcaggaggcgggacggagggaggggactgagcgcggggcggggagaaggggcgggcagccgaaagcgcagcgcctggcctcgcctcgcttcgggacagtggcagcggcgccaccgtcacggggcgtccaggcgcccaatcgggaccccgcaccttggatcc

SEQ ID NO: 336471 - DNA, 59 bp, Homo sapiens; identical to SEQ ID NO: 241265
  chr20:49836919-49836978
  hyper

SEQ ID NO: 336472 - DNA, 732 bp, Homo sapiens
  chr20:50157673-50158405
  hyper
gacaccgatggaagcgaaaacttcattatctgcctaacacagtgtttgtgggaaacatcaggccaccaagcctccttgacaggcttcctccacgagccagtcagcacaagcccttcctacacactagatggaggcaagcccagagtgcgtctggaagctactaacaggcctgccactgagccttcaacaagcattggctgggctgggctgggctgtcaaaatcaggaagcctggttgggttttttgttttttccaagacaacctgctaaccagaaatacacagtgaggttgggcgtgtggccgcttccccctcctcctcctcctccctctaacgaatgctcctgttaaacacgtgaagtgacagataagcattgggcccagcccggggaagtccccagcccccagcaactgagggcagttggaggcacagagtgacaaagttcaggcagaaagagcctgtgtccttctgaatccatgctgcagctgcccctcaccctaccccatcccaccacatccattaggactaagcgtagaagatcacttaatatagctcagaccaatcctcttgtgagtggtaagtgatgggttcagcagcagaacccagggaggaaatgggccggccttataataccaaaggttttaaccctctccagcatcagacagacaacctcttcctcagtttcaacacaaagtccccgtcaaccactgctcacaggaggtgatgggagctgc

SEQ ID NO: 336473 - DNA, 952 bp, Homo sapiens
  chr20:50158723-50159675
  hyper
cgaccgccccctaagggtggcaggggccactgacgcctcccctccctggcacctgggtaggggcaccctccctccaggccccttaggaagggggacggctggagccaagaggactcctgtgcccagtccccaggcctgagcccctggcgggctcaggggccaggccaggggtagcctccaccgaccttcgttcggattcaaatactcatagtcgaagaggatggagaagtcaagctcgtcttgggggctgcccccaggctcgtggcctggggcgtccccgccgtcgggttggggctgccgctcgggggcgttcatggcgcgcagggcgggaaggctgcggggccgggggcgagggcgggcgcggctggctctgggacccctcgcagtggggctggcggaggcggctcgagcggcggggtccctttcctcgtagggacgcacgccgggtccggggacggcgcgcctggcgcagcgggtcctggacgcgcccggggaagctgagcggcggcggcgacggcggcgcgagcttcctgctccggaggcacctgttgcagcccggggaggcggggggggggggggcgtggaggcggggacagggcggccaggccggcgggggcggggccgccaccaggggaccggaggggaggggcgcgcggcctgggctggccggtgccgggaggaaggaggctgtccgcggacctgaccacactgtcccgggccaccgctgggcgctggggcggccgctgtctcccaccctccacgggtgagtgcgacacgcgctgcgcgaaccagggtctagacaagaaagctgccgccactaggacttttgccctaagggacccactggccccacactttttcctgcttttcttctccatggggtggaagggggtatccacccccttctattgcagacccgtgtctccaggcgtctccgtgtgcccacgggggc

SEQ ID NO: 336474 - DNA, 1642 bp, Homo sapiens
  chr20:50383675-50385317
  hyper
cgccgcgtctcctgttccgagcaactgacgctgcaataagcggccgccaccgggaaatgcccagagaggaccagacgcccgaggaagggcggagcagagcggccgcaggccccgcccaacaccgcgctcagcctcccgcgggctccagcctcacctgcgcggcctgtggagctgcacatctccaggccccgccccccagaactctgattggcgggtctaggcgggggccgggaaatctgcatttgcaccagcgcccacccccgtccttcccacccccgcccctcacgcccaggtaagtctatggcaggcgatacgagagccccgcaaacctcaacgcgtcacgctgccatcctccgaacaggaagacggcgaggcgcaaaataccaacccgtcccctcttcccaaatgcagaaaaacccttgcctgttccgcgcctaagctgccctcggggtctcctactgcgggaagggcacagcaggtggcagcccctgtcccagccgtgggattccttccccgaaattgtggggggagaacacaaggggtagtgtcaccaagcggccagtaggagaccctcccaccctcctgcgactgctggttcgggtccaccccgggcggagggggaaggggccaccggagcgcaggtggtctcggcgcagcctcctggggctgggacccaggggcgctgatggggtaccccgaggcgtaggccgcgcccccctaaaagctgagcatatctgggctcccgagtaatgctccaagcgcagagctcggtgtgacactgaccaaattgttacctcagatattaattacggacagatattaattacggaacaataaaacggtgagaaagcacggctgatccgaattccgcgagtgtgtaaacagcactggggcgggcccggcttctcggggtttctaaaggaaggtgggcaaggaggcccaggcaaccgggcgctcgaaccccaaagggccggcatcaggctaggtgccgcccggggctgaagcgcagggaccccctccccacctccccgcctccccagccctgccccaggctcatggcgccgggcgcggcgcgcggccaacctgtcaggcccggccaggctggcccgagcgccgggctccgggaggcgcggacaaaggaaaacacgggcccaggcccactcacccggcgcggggcctgctgtccatccgcttcttctggcgcaccggctgcagcgggatgttgtccgtcatgtcggcggcgccgcccgccttggccgccgcgccccccgcgccgcctgggccgccgcccggtccggcctccgcgccgccgcccgccggcgccgcgccgccccgggggaggaggcggcggcagcgggcgggccgggcccgcagcgagggggcgagctcgcgagcgccgggccacgcgcggagcgcccgcgcggcccgaccgacggacacgggcgcaccatgggcccgagctccgcgctgcgcccgctcgctccgcgccgcgccgcgcctgccacggggggcggccgggccgtgtccgcgccgccgcgaccgctgcagtgtccccgcccccggcccgcgcccgcgccccccacgcgcgcccacccggccacgcgccccccgcccacgcccgccgtgcgcgcaccctgccacc

SEQ ID NO: 336475 - DNA, 1598 bp, Homo sapiens; identical to SEQ ID NO: 241272
  chr20:50720432-50722030
  hyper

SEQ ID NO: 336476 - DNA, 116 bp, Homo sapiens
  chr20:50722093-50722209
  hyper
cgcatgcacattaaagtttgagaaaccgtgtctgcattttaacgagatccccaggtgattcgtttgcccattaaaatttcagaagcgcagctctcctccaactttaatgtgcgcac

SEQ ID NO: 336477 - DNA, 500 bp, Homo sapiens
  chr20:50722287-50722787
  hyper
cgagctcccaggtggcgctgtggctgctgcgctgcacaggctgcgcttttagattcggacttaattggtctgggctgggacctgggcactgggatgtttttttaaaaaagccgtctccctccctcaccacccccatcacacacacaggtcattctgatgtgcatccaagctgagaagcacgacctccactcctggttctcaaccctgctgcatacccaaatttaaattttaaatgaggagtgtctccaactgcagggagaaatgcagattccgaaagttctggattcaggtggccgaggccagaaatgtgtgtttttatatagcacgcgcccgctcccgccccgtgactcgggcgcaccggctcttggaccacacaggagtgcttttggggccaacccggcgccggccccgcccagcaggtgacggaggcgtggtcctcggggggttgagctaattagcgttcatgctcagactggctgggacctcgatgagacccgagg

SEQ ID NO: 336478 - DNA, 932 bp, Homo sapiens
  chr20:51589126-51590058
  hyper
cgctcctgtcctctcgcatatcactcacagacggggatctgacagcagccacaaacctacagtgagtgatcgctctccccccggcacgaatccgccatagagatcggcgaggaggaggaggaggaggaggaagaaaagaaggaggaggtggaggaggaggtggaggaggaggaggaggagggaaagaggagaaggaagaagaagaaaaagaagaaacccactaccttcccaggattgccttttttttttccttatctttacgcgcgagtgtgcctgtggcgcgtgtgcgcccctcgtcccttccatccgaacccgggcttggatgtttaataaagaaatcaagtgtctcaacagtcaccaaaaaaaaaaaaaaccgcaaaaacaaaaccaaaaaaattccaaaagcaaaaacaaaaaagagagaggaaaaaaaattcaaaataaacaaacaaacaaacaaggcagaaccaacctctacttcaaagcagccggcacaagccacccgtgtctgccacccagagaggggggtctctggcccgtggtggaggagttgcaggggggatcgtcagggggacagaggccgagtgacgtcctaggagccaccgggcaagaggcggaggagacccagagaggccagagagacagcgggccccagcgcgcggctcggggctggggcgccagaagtgggactggagcgaagtagaggatgccgaggagaaaacagcaggcacccaagcgggcggcaggtaagagaaacggctccgcttcggggctgccctgtgcgccgagctcctcgcccgccctccttgcccctgggtgcccgggggcaccacccacttaagctttcgggggagtttgcgccgggtgcccttctaataaccccgtcctctctcgccttctctggtctcccaaatcctccccttccaagctcc

SEQ ID NO: 336479 - DNA, 372 bp, Homo sapiens
  chr20:52259577-52259949
  hyper
cgtcactgttataaattagacaagggaagaaaaacctcatttctttgatgatttttttaaagagctttgttttcccacgcataattgttcttcctattcattatgcctttatgtagactttgctttttcctttaaagaatacacttcttatgtaatttgttttgcatttctggaatgaggaacttttctgctcatattgttgttaaaatctagacaacacgcccgtgtgatagatcaccctgagccttggaaggaaatgattcaccacaatactgtaactgaaagtcgtctaacaccagggctggaaggcaggctatgaaccgctgcattacctgcgtgcagcagcaatgggaggcagccagaggttccctc

SEQ ID NO: 336480 - DNA, 976 bp, Homo sapiens
  chr20:52789230-52790206
  hyper
cgcaggtgctgggtgcacagcacggcttttccgtggaccgactctaatctgtacaagagctcagggttgcgatggcacgggagaggggctttggtatccgccctacgtaagaagcttccaaccccagggaactctaactccgcctcttcacaatttccaggcgccgtcaggctcatcaggtctggccgcatgcccaggtccctcggattggactcacaggatcagcagcccgtagccttctttgcggtagtcgcgataggccttccacggtttgatctccagccgctgcgggtacgcgctctcggtgcggtacagcgcttccagcaggcatggcgagcccaggtgcaccgactcaaaggaacccaacttcatgcggaaaatcttgccatacttcttgtggtactccacctgcagccggccgggcacagcgcggtgtcagcgcgcatcctccgccgtgcccgaagcgctttccctcctcccgcctccttcctcctaggggaccggggaccctccctgcccagacgccgaagcgcaccatgcgcccgaggcgcgcatgtcggggagggtttggagcgccactgggagggcggaagagggaggagagagtcaggggcgcgaaaaggggtttaccagggtgtcgtgctgtttcttgagaccccctttccagagaatctgcagcaggctgcccagcagtggccagctggtggggcccggcagggcggccgcgttctgagtctcgccaccagctgtcagcgggcagactggcacctctcgcggctgaggggacgtgtacgccgtagatgtcaccagtctcgggggctgcctcggactgcgcagctgctgcaggaaggcggcaagcgagcggctcttgctgatgggggagctcatggcagcgggggacaccggagcgcgggaaggcaggaggatggggtggggcgaggttggtacgaggtgctagtgggagtcggggcttaac

SEQ ID NO: 336481 - DNA, 951 bp, Homo sapiens
  chr20:53091767-53092718
  hyper
cgcaaaatcggcccttctcggggaaagggcaggggctgaagggggaggcggggtgggcggcggctggaaaaaagtgaaatttcctctcctcctaaaataagtcattggagcgaggagagcgagcgctatctcagtaggctgtgggcgaggtgcgggggtggcgggggcacgctccgggtccgccaggaggggagggatcggaaggggaagcggggagggaaaggtgggtgggaggcgcggggagcgttccagggcggctgctcacgggtggccgcagcccagtgctgggactcgcgcggctcctcctcttagccccccaccccttcctcctctttcctcctcctccttcctcctcctcctcctccttcttctcctccttctcggccgggaggaggcagggctggatccctcagccgccgccgctcctcctcctggcaggccggccgcggagtcagctgacgccggcgctccagcctcgcctccccgcgccgcgctctgcgctccccgaaagtggctgcaagccggccgcccactgtcagggttggggggacagagaaagtgatgtgcgccttctaaagcctcgcccagcgccgccgaagcagcttcacctctccaactttctcccaccgactgcttgtcttgaccctgccctccaccctccccagagccacttcgggtgcgcgctcttgggtaaagggggggtcaccggctgtctgggatggcttccaattttaatgacatagtgaagcaagggtacgtgaggatccggagcagacgcctcggggtgagtatcgatcctctccgtgttgctgttcgccggttcgattgtctctctcttgagccagcatccctggagggtggacggagagtccccggccgcgcgccggagaattgcgcggtggctttctcagccgaaacccgcgtctccggggctgtcactgtaaggccagc

SEQ ID NO: 336482 - DNA, 623 bp, Homo sapiens
  chr20:54578319-54578942
  hyper
cttgctgcctactccgaggcagcggcagtgccagcggtgcctggcacacgaacagtggaacctgcaggcgagatctgacccccggctctgcccccgccctccgcggccacctgcccgatctctgaagagtgtggaagcccggggctctcttgggagagaagcttctctacctgggagaaacaaatcaaacatttatcctgttccgcaaaggtacccagggagcagcctcagcggcacccgcagaggagtctgagcaagggcaccaagatctggccaagagataacgacgtccagggaccaggtgcccttcggctcccgccgacctgttgctcgaaacttgccctgagctctcgctgccgggctctgggctcccaagcctctcccccgccgccgcagcagcctcttttaggggcccggaagaaatgggagccggggctggtgagaggggtaggaagagggacggtagaagtttcagacccaggcatatttgggaaggcgagtgctttacatgattccccatttcccaatcggaccagcttagcctgggcaggcagcctcgtgctgaggtgcctggagaccgcccaccccctaggtgctcgcttccccccgggtctgacctgatc

SEQ ID NO: 336483 - DNA, 366 bp, Homo sapiens
  chr20:54919047-54919413
  hyper
gaagtcttgggctgcgcctccccttgcgcggtcggagccttggcagagcctgcggcgccacctcgtgggcgaggccgcctggtgcaaggtcatccggtgccgggacccgctcctcgccccgccaggacccccgctcacctccaagctggacgcccgcggagccctgatcccctaacgcccgcttccgaggccgagctctgcagccccctgcaaccatcagatccagattgccttcctgcacgagcgcgcaactctcagcctcggagcgtgctggaaatgctgatgggaaccgtttgaatgaccgggcacgggtctgcaagaaactcagctcccaggccagccgtggctcaggaagcctcccacgtc

SEQ ID NO: 336484 - DNA, 4940 bp, Homo sapiens
  chr20:55199913-55204853
  hyper
cgtaccgcttgtcatatacatatgtaaagataatttaaaaccctagggtatacccttttcaaatgcagagtttatagtttccaaggggaggagggcaggggaggagtaaccaggacctttcctgccagtcttccaatcgcgatagctcgttttggctgtgaatttccccccttcccctccccctcccgttaattaaataaacgctggaagcgtgtgtttaccgcacacgactcggccctcggggaactctttttctacgtctctcctactcttaaactcctcaactcacagagggttggagagctggcaccatgagcttccagttcctacgggtgagaaaagaggtgtctgtgtggagggcaggtgcgaccccgggggctagcagagaggagaggctgcgggaggactcgctgcgaagggcgaggggtggcgctgggtgggacgggcgcctggggccgtgcagggtggctcctgggtgctgcccgggctgcctgtcgcccagtactggcgcaggaagacgggtccgcgcagcgtctggcaacagtggcctgctccacgcctggaggcgaccaagttctgagttaaaggcgccgggcttagccgggaagtgtatggcgacccagaacacggagcggagaaggcctcaggggacacgaggctaccgccttagtcctcgggcctgcgctccgagcggttagggtgcgtacggatgggctccgggatgttagtggagaggtgacaggagtctaccatcccacggccaagcgtgtgaggcctccggcgggcgggggtcccccccggggcagggcagggggagagtcaggcatgtctctaacgggctccctagtagaaccgctaggaaagtggccttcaaccctaggcacctttgtggctttcaggtagttgggcgactaaaaattcacttttgcctgctgtgaaatgggacaggtggttgtcaggttagagactgtgcccacgaagtctcgtttggcgggccgggactgacgtggacccgggccctcctcggaagcttgggaacctgtgagcccctcagctcctcgcctcactttgcctgtttgaaaaaaggagttgtttgagaggaagagttaaggctcaaaaggttctaaacgaagagcatgcggcctgacgcggagcgcaaagaagcgagcagtgaactgaatctggtgggactgagaccagaggcgtctgtatgcggcggccgcttcgcgccctattaaagcaatctgttatttacgataatcatttttgtaattattttggagtggctgtgacttgatgtctgtggtgccccagggcatgcccttactggacatagatacttcagggtgccctttgacgccagtgtcggtccagtgggtgccagtgccgcgaagggagggtggcgggcgtgaatgccccctcctcctgggtttgccgcaggccccggcctttccaccttgcttgatcctggcgggtctgccacttactgaggtccctaccggcgctcacgttgtcccgagaggcgggacaaacgtccggcgcgtggcgcggagtctgcgaaagcgctcgggggcctccatcttctgctcgggagtcccctccctggggcgggaagaggagtcgcagatctgcccgaatcttgctctacccgcctggccgccttcttccgtctggggtgggggcaggggtggcggatgactcaggcctggggccgggagccctgtttccaaaggcaccacctcgcgcctctttggaagtggcgcgctgttggggcgctcccgctgttgcagaggcctggtttgcggtttcataggggcgtgggtccagggcttccagggagtaagtgagtttaggctccctagggggcggtagaggggaacccccgacaaccttccatcctcttctccaggcggctgcgaggcctccggggttccagaggggtccccttctgccggtgccggctgtcttgagcgcggccacgcagtccgcgtcttcacgtgggcaaggggcggggacgttggagggaggctgtcttggatgctggagccttcggttcccggctctgctgagcagaaaagttgaagtcaaggaagggttgaggcttcctcacaagggcgcgcgcgtgcctgggtgccggcccagaagccgagaatgtgcgtattggggaagggtctcccgtgccgagaagacagaggatttgttctagctgccttccgtacagagggcgcggaggttgcgctccagttcgaacgcttacccattggaaagagggcagcgccggggtccagggaagctccttgggaatgaatggcctttgccaagcggttccggatcctctgggtcctttgggcccacggcacggtgctgcgcgagccctcagtgcccatcggctcccttcgcctcctgcgtagacgctcccaggcggggaggcatatcggttcctccgggcagctttggctagtgttgctgtgggaaaggagagccagggcctgggatgggggatgagcaccttcttgcccattccgggccccagcgtgcaggaggtaaacttgccagcacagacaagacagcttgttcaagctgcacctcaggccgggtcagagaataaaaccgagggctagaaggcccagaatgtcggacagcccagcggcacccgtcagggagtcccaggcgcccgaaagaggcgccgcacctctggcgagtctaggacccatcttcctggacctgtgctctggagtgcctgcgggcctgggtctaatttctgcttctggcaggtgtccccctcccccgccgctaataccaggagcgctgcttctgcggtaacttattttacccccagaagcctgttttgggaccgaagtgtcagggtcctgtgtgtctttttatgcactgttctccttagtgcaaagccctgcagatatgcttggccgaaaagtctcagtggtttcaacttccagattttgttcccgcgtccggtcggaaaatcacctgggatttggctgctgtctaaggccgggggaaagtttcccttggaggacgcctattattattattttcttttaggcccacctgggtctaaataaatgctaaagttcaaacgaacccgagaaggaacagcgaggcagtggatgccgccattccgtggatgggagagtcatgtctactgcaggtgcggacaccgtactgataggcattgattattgcaaaatcgtattcagtatcaaatagaaatagtcttgtcctctaatccccacagaatgtttaaatccagcccagggagccagttggggcgtcccaacaaatacgccctcgagaattagcgatgttccccttacaatgaaagtcaattgctgcataataactgggccaaagaatttcgttagtttaaattttaaaaattagtattgcactttgctttcaagtttgggtggcaagtaccgaaggggagagggaagcagcgtttgtgtggaaggaagtttcgttttctgtctaaacatgtgggacctgggtgtctacctctccagtcgagagctctctgcaggctctctcccaacttcctgcacctcctcaccctcaccttacccgtggcgctcgggttttattcctgcccggcgcttctttcccagggcgagtagaggcttctgagtgaccggcccgccagaggcagctgcagagccggcgttccgcagggcagggcagggccgggccgctgggctggtccagtgcgcgcgggttccccctggcctcagccagccgcgggagatgccacttcgggcgacagcggcgagacgccgctgtccgcaactcctgggcgggtaggaccgtctgctgcctctgcggcccttggggcagactccccaggagtcccttcctctctcctcccgcccgggggccgggaccgcgctgtgcccacggagggaactgggcgtctctggcgcactggggctccagctgcatgatcccagctcagaccttaagcctcagtggggtgtaggtgggatgggatgtgtttttaggagatgaggagaccccggttgttgagtcgctccccaaatgcgcagtttcttaactccaggtgacatccgtcttttggaggaacgagtgaaggccgtttaggcgaaagaggggtgggtttcagtatttggatcccttcccccagctctgccaatctcaggtgtgtttacggtggaggtgacagaaggaaggcgcgtcgggggacccaggcctcgcaggtcttcggctgtcaacgaggcaccgcccactgactccgcgcttcgtccctcacagcgtggggctcggcgctgcgccaggcccgggtgcggggcggagctaggctgggactggctgggggccgccccgcccggcgcctgggcctccgcgccggcccccggggaggagttatgataatttccttctcattaaggcgctcgggtcccccggctatcgccaggacacactgttcgggcgcggctttccccgtccgcggagcggtcttgacactcgcggcggcagcatctacgctcgcagagccgccgatgcgtgtccagtgacccggacagcaaggcccgcgcgcggcgggggcggcggcagacgcctggtcaccgtgaccccgattttggatttaccgcttgggggctggggggatcctggatttaactggcgactgttttgggggacgccggacgccatgttgtggaaaataaccgataatgtcaagtacgaagaggactgcgaggtgagctggggctccggggtgcagccccgccccgccgaggacagtccgggaggcaggggccactggaccgaggtcggggacgagggcataggagccctggcctctcggtgggacgggatccacttctccggacaccccttagtccatttctgcggggcccctttcctgtatagggccttttcctaaatagcctcccctcgggaac

SEQ ID NO: 336485 - DNA, 1973 bp, Homo sapiens
  chr20:55204896-55206869
  hyper
cgggcgctttcctaagcggcaaacagccctgcttcccgttttctcggaaaagtgccccgtctgcaaccctcagacgtggcttttacgcacgaagtctctgtccaaaggggtcagatgaggctacctgctagcgacaccttggcggacactcctccaaggccggcttgtcacctgccccgctacctcctcggggaagcacgaaaacaaccgaagtttggctttcaaaagaagtgggggctggggagtggtggtgggggtgcccgaggccagatggggccgtaagagctcgcgagtgctccagcctgtcggacaggttgagctagagtttcggagagtgggagggaagaaggaggcggcgagcgggaagaggaagaagacgcaggcagcgctaggcgagctcaggggcgccgggagcgcggagctcgggctacggactcgcgggagttcactgcgcctccgggccctggagggctgcccctgcccgcaggcccgggcgcttccgccaggaggcgacagcgccatgttcctccaggttcccggcgccccgagacccctgggcagatggggacgcatcctttagaaactgagtcgggccgcccaggggcgagggaacgtgcgcgggcaaggctgcccaatttccagggttcttcatgccccctctgcgccccgacgtgcgagaacactgcccttggcagtgcagggcgcccccacttattactcccctcggctgggcccggccagcagggagggccgccctgtgcgcgcgctccctcttcacttcccagggcggcgcagggtggcgggccctgctttccgagcgccgcccgctcggaggtctttgtcccgagggcgtggaagggagggtcccgggggcgggggaggtgcgcatttcccgcgccgcgcactctatccgcgcctgccgcgctgccacctccagcagtccctgcgtcatgggcgggctccacgagatagctctgcaccgggcgtccggctccttcgccccgggctctggctccttcgccccgggctccggccacggacttttctggcccaagacccagggttcggacttggcgcctccaagcgcctcgggcttgggagcagcgcctagaccttcgccgccgggctttgagaactcgttcccccaggtctttcaccagactctcctccctccccgcactctttgcttacaacgaaatcctcggggcgcattgcccccgggtaccttccgaccctgggcaagccccgccgggcggggtgcggttggtcccccggggccctctgcgtagcccggcgatgccggccagttcgcagtagcggggtttcgcactaacggggtctcctgtttttttttttccctccaggatcgccacgacgggagcagcaatgggaatccgcgggtcccccacctctcctccgccgggcagcacctctacagccccgcgccacccctctcccacactggagtcgccgaatatcagccgccaccctactttccccctccctaccagcagctggcctactcccagtcggccgacccctactcgcatctgggggaagcgtacgccgccgccatcaaccccctgcaccagccggcgcccacaggcagccagcagcaggcctggcccggccgccagagccaggagggagcggggctgccctcgcaccacgggcgcccggccggcctactgccccacctctccgggctggaggcgggcgcggtgagcgcccgcagggatgcctaccgccgctccgacctgctgctgccccacgcacacgccctggatgccgcgggcctggccgagaacctggggctccacgacatgcctcaccagatggacgaggtgcaggtgagcggcgctgcggctcctgaccggacctgttcaccctacggccttctgcccccaccccgcactcctctaggctcccccgaacttaagggaattttgtcctctctcccccagaatgtcgac

SEQ ID NO: 336486 - DNA, 777 bp, Homo sapiens
  chr20:55499991-55500768
  hyper
gtgattagcggatccgtgcacctagataatgaagcctggtcgcggttattggcagaagggcccgggcgcgctgtgagaacgctgcaggctcactttgtagtgcggggcctacgcctattagattccaatcagtttcgcctaaaaaggggaggagggcggagtgggaggggggcccagagttaaacacaggaaacaagcgttgagtgtgtgccaataaaaatggtcacaaatcagggctgctgatgtcataaccctgggggtcgggggtcagggggagtgaatgcgcctgaaagggaccgcctgtctgcggccggagcggcggcgggcgcggggggcgacggcgcgcacaatgggcccggagcgcctcattagagacgcgtttgatgcgctcccgtgccccacgggggccctgggcgatgtcaatgggataattacgatgatctaatggccggctcttttgcatgcaggcccgcctgaatggggcgcctggaggctgcattgaggccgggctgtgtaaactgtagggtgcctcgccgactcggagccgcagagactggcggcgggtcaacttggaccactttgcattcacgctttgaataggcggagcgggaggcgtcctttcccgcggccgcctttcagccgagagagtgacagattggaggtcagcggctggcgggacggaagccctcgccgggcagatggacccgctccgggccgcgccggggacccccgccccgcgcacaggcgtgtctacgcggacgggctccgagcgcaccc

SEQ ID NO: 336487 - DNA, 178 bp, Homo sapiens
  chr20:55532724-55532902
  hyper
cgggtgtttactgggtcatttaaccgggtttctattttttaaagtttccttttctacgactatttgttgaccctaattgtttccatgcccatgagatgcgtccctgaacttcctcctgcggcctgtcggtggggccgggtggctccctctaattgcctgtgttcctgccttttccctc

SEQ ID NO: 336488 - DNA, 150 bp, Homo sapiens; identical to SEQ ID NO: 241293
  chr20:55588947-55589097
  hyper

SEQ ID NO: 336489 - DNA, 481 bp, Homo sapiens
  chr20:55839321-55839802
  hyper
ccccaggtgcccagcgtggggcttcagtatcattatttccatgttgacacagcgcccgtgggcgtgagtttgctgtcttgacttggttcgggttttcgcagcaagttacacaagtagaatgaaagcggctcaggaaacagcgctatcggggtgtgttatctcggaaaccaaatatttgatcatcagtcccgcagcgcgctggcgctgccggggggttagtttgagcaagtctggagaatgtgcgcgcacatatggagggggagctccccggccctcgctgcagccccaggctcgcgtcgccggggtcgtcgcggctccagtcggaaaccgggacccccagccgcccccgcggcgtcagctctgagatcccgcgcaacccaatcgccaaaacctgtggtttgcgcgccacacgtggtaaatgctgaaaatagattctgccggcccgggacctaccactaaatacttaaaatagaagactagc

SEQ ID NO: 336490 - DNA, 302 bp, Homo sapiens
  chr20:55841887-55842189
  hyper
cgggacgtcgcggggatgcggctggaggaatcggagccggccctgccctctcggcactcgcggtccggaccaggaaggcggcccgagcaggacgggtgggctgcggaccgcggtgggaaaagttgggggagcgcggaggtggcgcggaaatagaaggcttcctggaagcggtgacccttgagccggtcttgcccctcagtccctgtatccttttaagccagccacgctgacccctccgcgcctccctgaagccgttgccagcctgtctctgcgctcgccattccctccgcctggacctctcc

SEQ ID NO: 336491 - DNA, 533 bp, Homo sapiens
  chr20:55964189-55964722
  hyper
tggagacatggggccgccggagggggggagggattggtgatccagatacccaagggggcccgggggcggggggcgaaggagtgcgactggacccgcacctgggcaaccgcgtctccagcctccacggccctgtcccgcccccttccgggcaggcagaggccccggggctgccctgccgcctgggcccggcccccgcggcagcagccgagcggccgcacccctttgtggggctgtcgtgccgggaggggcgcgggcgaggcgggcccgggcggcgctgggacttgtaggccgggagcccgggcgcctccgggctgaagcccgtggccacgccaccgacgcggctccagcctgcccaggcaacgcgacggctggggacagccttggaaaaactgaaggggaaaccgaggcctggtgaagggatccagctggcgcaaaagcacgcggccgcgcagtggccgcctcccccggcctctagggggcaagtgaaggtcacacttaaatgaaagttttcaaagtcgcttcgaagggcctcc

SEQ ID NO: 336492 - DNA, 410 bp, Homo sapiens
  chr20:56073588-56073998
  hyper
cgcaacccgaatccctctcacttatccatcgtgttgaggagcatttcacaggtcacgccttcatccacttcctctttgactctggctgtggtttctctgcaggcgacaggaaacatctctcctgggaactgttctcccttcgtggtggaagcctcctcagcagcagcttcttgagaaaaagtccaggatgagcaaatttatcagaaagctaaggaattggaatttataaactgtgcaaatatattttggaaaccatcacttaaatttgaacacggcagcaagcatgttagaaaacaatctaattgataagatggtactattctgatctcaactactgccttcagtcagggcttcttagcctcagcgctacagacgtttggggccagagagctgtctgctgggggcagggc

SEQ ID NO: 336493 - DNA, 199 bp, Homo sapiens
  chr20:56725858-56726057
  hyper
ggacccaagcgacgcggcgaaagcacagcgaccccaccctcgccaggtgcagagccatttccgcctccgagtcctgcgttgcctggcaaccggtctcccaggagacgcgagacgctgagcccagggccagagcttgcggggcgcacagagcccccaggcctcatggcgcagaaacctctcagcaccgcggcggctgaac

SEQ ID NO: 336494 - DNA, 431 bp, Homo sapiens
  chr20:56784811-56785242
  hyper
cgtggttacatatttttcaaaacagtgtctactatccaaagatcaacagagcacaaaagtaccaagagtggaaaatctctggtgtataacggcctaacgggaaaggagaaaattggggaatgcaacaggatctgcaattcgggtgggggcggatggacgcggatggacggcccgcctggatccgcgcgaggcgccactcggggagttgatctgcggtctcgcagtgacacctacaggccgccgtggccgcgcacctgcggcaactgcgttcgacagcgccacctggcgggagccgacgccggcaggcccggagaggattttcttcgtgaatccaagacagaggggtggaaagtgctcaggacctctggggtgtgtcctgtgggccgctggggctggggtgcagcccacgaggaagtgtccgtggggtgtgc

SEQ ID NO: 336495 - DNA, 894 bp, Homo sapiens
  chr20:57089453-57090347
  hyper
caggccccgactggcgcagagagtgcagcggctctcatattgcgaggtgacgcgactccctcccgcaggccccaggaagctcctggaggcgcgcaggtgccggccaggtgagactggagaaaggcgcgcagggcgcagcatagcagccgcgtgggccgacccagggccgtagtccccaagggcccttaggggacattagacggcgagctccctcccttccgagctcagccagtttgccgggtgggggagggtggcacctacctcccaaaagcaccaggacgcaagcgtaggggagcatggctgcgggcatcccgtcggggctggcaggaccgcccgccgggcgctgccacggtgcgcaaggggaggcgcgggcgcagggctctcggacggctgcgggcgccggcggccaggctggagtcctgcgaagaagttgcgagggtcctgcgcccccctcggcgctcacacgcgctcagccttcccggctgttgatagttgtaagcggagctgcgcactcataggtccaacttgccagaagaggtggagacagcccccggcgaggcgcgcacacccgcgcagcgcgcacagccccctggtgcagctcctgccattcagacccccagccctcccccagatgtccgtcccctggccgtcgccttccccaaagtcttcgcagtgggcaaggaggcctcccccaagctctggtcccggccaaggcagagcgatgcgctccttgcgtcaaagcgcacccctagccaggccgttccctggaagggcaagcggggcggggagttcctctaagccccgccagtcctgggacccctgaagtttctattcaggtcttccagctactcctggaaaagtcgcgtcaacttggatcccagcaaacccagaagc

SEQ ID NO: 336496 - DNA, 982 bp, Homo sapiens
  chr20:57224597-57225579
  hyper
cggggcgctacgctaagcacacgggctccccgaatttccctccccagggcctctctgtctttggatggcctgtcagcaagtccctgcagcctccagcccggcccgcgcggcgacccagtcccctgtcgcccgaatcttccaccgctgcgaagcgtccccgggcgagcgccctgctctccgcgctgcgcggaagccagagccggtcctcacagtgaactcgcccagccctgctcgcggctctctcgattttatgtgggtttcgttggatgcattttgttatttgcctcaatggatgtttcacattaatttttagttgcacaacgaacgcgcgggaacattctccgtgagagaaaaagcacgggtggggggcggttaccggtgcttcccccggtcgcctgggggtcccgcacgcgccccgcgggtgccgctgtctggctggggtccctgggtgagccgcgggcaccggcttcgcgtctccccgggcgcgactccgctttgcaagcgctcagcacacgggaaaccctcggaaaacacacacgtgtgtaaagtttgttccacgcagaaacaaaggacgcgtgggggccgcttctggggcctcggtcctttgttggaaccccgcaccgcagcccggcccgcagcctcgccccgcaaggggaagccggccctgcacaggcccggggcccggaaggcgccgccgcacagctctgcgcccccgacccgctccggccgcgcgctgggccaggcccttggcctcaagcctcccgggcggctccgggccggacccgggtctccgtcgcgggacgccagcctgtttgtgggtgccgtgctcgggcccgggcggcccctgcccgacgcggccccacggagcccctgcacgaaccccgccgacctggcccggggcggcaagtcgaggtgcttagggcgccctgggcccggccaaccgtggaaaacccggcccggggcacgggggggcgcgggggtc

SEQ ID NO: 336497 - DNA, 304 bp, Homo sapiens
  chr20:57227604-57227908
  hyper
cgccggatcgtagacccaaatccttgcaaaatgaacgactccctcccctcaaagaggagggagttgtgttgttgttttgttttgttttgtttttccgcccgttttcttttaacggccccgcagccctctgtgtggccttgttccctgtgaataattgcctcactgttcttcctgggggcttgcgtttgtgagactcaaggtgctagcctcttcactttccatttcccagacaggaaattaagctttcctctccattcgaactttttaaaaaaagcctgaggaggtatatgtgaaaattaacccc

SEQ ID NO: 336498 - DNA, 301 bp, Homo sapiens
  chr20:57415539-57415840
  hyper
accgagcctgagaccgcccccaccactgagcccgagaccgagcctgaagacgatcgcggcccggtggtgcccaagcactccaccttcggccagtccctcacccagcgtctgcacgctctcaagttgcgaagccccgacgcctccccaagtcgcgcgccgcccagcactcaggagccccagagccccagggaaggggaggagctcaagcccgaggacaaagatccaagggaccccgaagagtcgaaggagcccaaggaggagaagcagcggcgtcgctgcaagccaaagaagcccacccgcc

SEQ ID NO: 336499 - DNA, 327 bp, Homo sapiens
  chr20:57797949-57798276
  hyper
cgaaggaagggagagcagggttttgatcctagttccttggcttctgcaaatcggctgggaccccccgctgagcaagcgactgtcgtcacggcccccgcaccagacgaccccagcctgtggatgatgtttcactgccctcacataaacgccacccagaaatgcaagagtaagaatgttcacgaagaggggaggcaggagccccagctgataacaggaggaggcaggaagggggccttggaggaggtcagaggggggacattatttcagtttcccaggaccagggtgagagatgggggtgaaagaagaaaaaggacaaaacgaggtgcc

SEQ ID NO: 336500 - DNA, 748 bp, Homo sapiens
  chr20:57875361-57876109
  hyper
cgcgcgtgtgcgtgtgtgcgcgcgctctcgtggccttccggcagctggcagctgtcccggcccccaccccaccctaccccaccccacccagccgcgccacgccacgccgcccccgcccctcgctgtcctgggtgcgcctcgggccgctgcgctcctggccagctccccccagcgcctgggaggcgacccccagtgcgcccgggttcaaaggcccggcgaggcagttccagcccctctggggggcggggaggcgacgggggtggtgcagaagccagaaaagcccgagccacagccggccagctccgcgcagggatgggcagcgcgctctgaaagtttatgaccgccgcagccaactcctggccggagctggagacgcagcgagcgatcggccggcctcgaacccccacagctggagggcgaggccagctgtacccggccccagtgccctttcgcggccacaagcggccgtcctcctggtccggtgctccggcgcctgatctaggttcatggagccggggctgtggctccttttcgggctcacagtgacctccgccgcaggtaagcgcacggggcggcgcgcctctcctggcgcgagcgcacacaaaaggacccagggcgggggacccgaggcgcggagaagatgtgcgtcgcggggagcaaactcttgcctgggctctgcactcgtgaagacgcctgggggagggctggggagcagaagcggcgcgcaacgactacccgcacgggctcc

SEQ ID NO: 336501 - DNA, 273 bp, Homo sapiens
  chr20:57978801-57979074
  hyper
cggggcccgaggaagaaggggccagcgggctgttccccacgctgcacccccactctggcgcagcgaagtctgcagatctctgggccccggcgctgccgaagcctcccccacgcgccgcgctcactcgctgcacaacagcgccaccacgaggccgcgggcggaactgccggcagcacagcggtcgcaccccccgggccccccgccggctgtgcggatcccgaatccctgcttggctcggagctgccaggtctaagccgaccctcagagacgcac

SEQ ID NO: 336502 - DNA, 778 bp, Homo sapiens
  chr20:58180008-58180786
  hyper
cgcctcggatgctctgattccacgcggctcgctctaacttgcccccgcgccggccgggcccatggccgcgtcggaggacgggagcggctgcctcgtgtcgcggggccgctcgcagagtgaccccagcgtcctcaccgactcctcggccacctcctccgcggacgccggggagaacccaggtaacgggctgggcgggggcggcgggcgggtcggggaggcccgaggcaggtggcgctgagagcaggaccccgcgaggctccgcgccccgcctgcattcggggagccgcggcaggaacccgcgctcggccccgcggttcctatccccagtctcgcagggctggggcgcctcggagccctttgtccataaaagagctgatttcctgggtagagccgggcgctgcagcttcccctcctctccggctggtgagctctgccgtcccctcgaaggaggcttcctttcctcgggtgctgaccggctgggggaagagaggcagacccgtggccgcctccgcccagcgccggttctgggccattccctccctccccactgccgggccccagctccggacgtccccgcttgggcatctgctcctggaaggcagcgctccgcagctgaggccaccgcgctgagggcttccaccaggcgcctgactccagcggggcctggcgcacctgggcgcgctagcccccggacaggtgtgctgggcagagccgccggcagggagacgaagggcgtgcgccaggacagagcccggtttcgtgacagcgtgtggactcc

SEQ ID NO: 336503 - DNA, 474 bp, Homo sapiens
  chr20:58514041-58514515
  hyper
cgcagcttaggtgtggaggctccaggtggccggtccccgcgcggctcagatgaagtggatccagctctcttcgcactccccgcgaggcatgtgcagcgcgtggttgcgacatgtgaggctgtagtctcggtggtcgttgttgtcccagtactcggcacccgccacttggtagcgcaccgcgaagtgcacgcgggagccgagctccagcaggaagggcggtactggaaagccgaaggtgaaaacgtcctccgtgccctcggggcctgcgggcccgcgccaccgcgccaccgcctcgtgggtactgcgccagcccgagaaagtgtagcgcacagccacctgcttctcgaaggccacgttgcacacgcgcaccgtaccgctgatgccaaggtccgagcaagtgacacgctccaggcacacgagctgccgctgcaggcgctcgccaaagtcggcggcctcgacgggcggcgggaaatc

SEQ ID NO: 336504 - DNA, 107 bp, Homo sapiens
  chr20:58515465-58515572
  hyper
gagctgcgcgcctccgcctccagctcccctgccgcagcgcgccgcagccgggcgtccccgcgcgggcgccggagaggaaggaaggctggcagcctcgtcacgtgtcc

SEQ ID NO: 336505 - DNA, 2254 bp, Homo sapiens
  chr20:59826957-59829211
  hyper
atggaagtgcacactcccaccgcgggcccgggcgggaagtcggactaagaccgcggcgggaccgccccatccagaaagggtgccccgggtgtgggggcggaaaccccagcgctgtcttcagtctccacacccgcgcctttttcccctggaaaacgagcgtccttggcctcttcggccgcaaccgggcggctccagacgtccaggagggcagaggctgggctggtgcggcgcggggggcgcgggcgcgggctctgcgcctttaaggcccgcgtcggcagagcgagcgcaggggccgggcggcggggcggggcctcggcggggcggccgcggcttcacctgcagctccgagcgcgcggaacagaggcgcgggcggctgcgaggccggcggacgcaccggcccgagggaacgcgccgccggccggacttggcctggctcccggagccggggcggcgagcgcggcgggcgcagcggggctggaggctccgggcaggcgcgggggagcggcggcggcggcggcgatcggagcggcggcggtggtctcggcggcggcggcggcggcggcggcagggagcgggctcccggtgccgggcaccgggcgggcggcggggaagatgaccgcgggcgccggcgtgctccttctgctgctctcgctctccggcgcgctccgggtaagttgccgcctcccgcccccgccgttcggaagccccgggcagcgggaggtcgtccccggatcccgcggggcgctcacacacccggcggggctctcccgggctcccccgccgcgctccccgctgcatccagcccggcgcccgcgctcggcgaagctgcctgcggtcggcaggagcgggaagccgcctgggcagcggggagcggcggagcagggtgggagtggggctcggtggaggacccggggagctccgcctgcaccggacccgccgagcctccctcgaacgcccaaagcccgtagccgctacccggagctcggcttgcctgcatggggcaggcttccactggcggagccggcgcgccctccatcgcccgggagccgcgcgccgcgggagttgccgagcccagccccggccgtggctgaaggcgtggggcgcccggcggctgcgggccagggatccgcgagtgcggggcgcctgcccgacctctcctgcccaaggcctgggggtccgtctagcggcgccgctcagttctgtgggtgccggcaggacccgcgctgcgggtgggcggcggggtaggactgcggggcactctcacccccgagccctcggcggggctggagcctgcgtgtccggcggggccccgggggctgggagctgggccgggcttgggccgggaagccggacgccgggcgggcgcggcgcgggagggcgccccgggagggcgagcgggtctcccgctgcctctgcagagccccgcgggccggattgccagctttgctctgcgcctggcgaggtgcgcggcccgcgggggcagagagcgcggcggctccgggggcgcccctgggcggaggcggaggggcggcgggagttgcaggaaccccctctcgtggccgatcggcctcgctgccttctcccgggcagcgctgttgtaacctcggaaataaacaagtgccagcggcgggaggcccgctccgaggccgcggggcgctgggggacgcgctgggcacacgcttcgggcgggcggaaactttcctgggcgagttgagcctcccaccgggctgcgggtgcgatttggagcttcgtggccgatgaagaaagccgcggtttagagcttttcgtaaggaatgaccctgcgtcccgctctcctccctcggtgctgggggtagaggggcgccctccgcggtgccggcgtcgggaagcctggagctccgggctgggggcggcctccggagtcgaagcatgggcgggcgacggcagcgcgcggagctggaggaggcggcgggcgggaggcgccactgcccggtgcgggctgcacccgaggcttcctgcgctcgccggggagccaagcaccgctgtgctcctgctccttcagcggggctggcttcccgcttgcacacactgcctctccctccaccacctcctcctgcctgtcacgccccctcccagaagcttggtcggagggccctgtcgtccaccccatccttccctggccctgtgccatgggctctagacttccccactgagcaggaaaggcgagcgagctccggaggacaggaggagaccccctttccggtcagttagggga

SEQ ID NO: 336506 - DNA, 33 bp, Homo sapiens
  chr20:60639846-60639879
  hyper
cggcgccggcgccgcagccgccgcgccgggccc

SEQ ID NO: 336507 - DNA, 312 bp, Homo sapiens
  chr20:60794658-60794970
  hyper
cgggtcccctggtggggcgtgtgcctgcgggagccacccaggtccgtgttccagtccccgctggcccggccacgctgggcgcccctgggtccccagcggccaggggctggggatttaccgacgaggaagtcggagatggcgaggttgagcaggaagaagttgttctgggtgcggaggctcgagtcggccacgaaggcgagcatgaccagcgcgttgcccagcaccgtggccacgatgagcagcgccatgagcgcggccagcaccgcggtccaggctgccgagaagccgcgcgccccgcccgccgccgccgcc

SEQ ID NO: 336508 - DNA, 911 bp, Homo sapiens; identical to SEQ ID NO: 241337
  chr20:61339790-61340701
  hyper

SEQ ID NO: 336509 - DNA, 805 bp, Homo sapiens
  chr20:61585229-61586034
  hyper
cgccaattagaggggagggctgccctcagcgggccctgccccttgctctcttcctcttcccccacccacgttcatccaggcctgccgggcagggccagctccccagggattcagggcctcctcactggcggctggtttgagtggctccgccttcactacgtccctcccaggctcgatgtttaaaaaggagcccttgccgcagccttcactacgtccctcccaggctcgatgtttaaaaaggagcccttgccgcagccttcactacgtccctcccaggctcgatgtttaaaaaggagcccttgccacagctcttcaacttcctttgcaggcccttattgggtagcgccaaggattctggaggggcctgtgggtcaaggctgccacacgcacgccttttcctagcccgccctcctgcagccacatcacaaaggctgggccaggcgagaacagagctggagggcggcacccacactctccggtttgctgctcgcctggcccggccccgcacagttcccttttctgaatggaggggccatgtgaccacctgtttgctcagccgtggatgctgcttctgcacaggggccgtttgctctagaaagttcacaggaagcaggctgctgggctcagggagtgcagagtggtgggaggaagctgttcaagctgcccaaagctttccggttcttggcacaccccccgtcccccgcgcccccagcaggatggaggattcccagcctggggtcctagtcaggcctcaggtagccgactgtctgggccatcctctccagcctgacatccttgtctcccc

SEQ ID NO: 336510 - DNA, 1892 bp, Homo sapiens
  chr20:61636766-61638658
  hyper
cggggtcttcctgcgcccgcggtccagctcctctgcagacggccatcgtgggctctccgcagggctgcggagtctcggagtcaccgaggtgggaggtgccggccacgcgcgtcctcaggaacagagcactgccctgcagtttagcacgaagggccggctggagcgggagcgcgaggcccactgcaagaggatcaggagccagtaagtccggcttttcttcgtctccacctttcgtgcgcccggggccaggaccgcctgtccggaatctgaccagtgcccgtcctcgccgtggccctgggaccccgcggtggtcttcttttggggacgaacggcagtgcccgaaggatgctctacccacccccgttcctagacttgctgggtcccgacaatacccagtgggtgccgcgagttcccgggcgcagagtccagcgtccggctctcgagctcaatcccgcgccccgacggccttggcgcttcccgctgcgctaaactgtccaccgcgcacaggctggaagcgaagtcgggccccctcctcctggtctgcagggtccctccaggcctttcctgtccgggcagagagacagtcacaggggcgatcggaggacgcgtgcgggagggccgggggcccgcgcggtcacggcttctcgtgacagtgtttgcaaagcgcggagggcgtcccggagaaggcggcgcacttgtcagggcagggccccagggcggcgcctgcggagaaggggcacacagtggcctggccgaagggcgtcaagggcgcggcgtttacgggcgcggccaggccctggccctggttgaggaaggccaccaggcgccgcatctcgtccagggcctgcgcctgcatgaggatatagttcttggcgagcagcagcgtggcgatcttggagagcttgcgcaccgacgggctgtgcgcgtaggggatgacggctcgcagcccgtccagcgcgtcgtttaggtcgtgcatgcgccgccgctcgcgcgcgttgatgctgagccgcagagaccgctgctctcgcggccgccgccgcccgtccgccgcgctccctggcccgcgccgccgccgccgctgctcgaaggcgtcgtcctcgtccccgctctgttcgccgctgctctccgccgcctgagctggggcgcgaggtgcaggcgccgcggggaggtcgccgcccgggcccggagtgccgtagccgcgggccgcttcgggttctcgcgccgccccgtaggcgagacccgcagccgccgccgcgtagccgtggcttagtgccaggtacgcgtcccccgacagcgacttgagctcggccatggccgcgccgcctgggctcgggggctcgccgggtgggcggatgctcatgtgggtgagcagcccccgaggccggcccgagcccgccgctgccgctgccgctgcgatgaggctcccggctctgcgcgtcggtctggcttgcctgcgggtcccagagcctcggcgcccgctgcctcctccgcctcttccttctctcccacctcctctccctcccagccgcgacgcgcagggggcgggctctacctccccctcgcccccgcttcggttttaagccgcggaggcgcccggtgggacctcgctgctgtccaatcaggggggaccgggtgagctcctcttcctggagccgggctccaccagcgccgcaggctcacaggccgggggtgggggctctggaccgaggggcggcgcggggcggcgcggggcggcgcgcgcggtcctggagcgctagtacttgcttctcgactccccggccgccgcctccggccgccccggggattccgccaccaaacgcacgcgtcccaggtgggcacccgcctcggtccgtctttgagtctgaccctagcgcaagagtccctggcgacac

SEQ ID NO: 336511 - DNA, 124 bp, Homo sapiens
  chr20:61664530-61664654
  hyper
ccagcaggacgctgaggctgcgtggcgtttccaccgtgctgcaggaacaagatgcacatcgtgcaggagccgcagagcacgcgtgcagaggtttcggtggctttgccccgcagctaacgtgtgc

SEQ ID NO: 336512 - DNA, 737 bp, Homo sapiens
  chr20:61806216-61806953
  hyper
cgcggcctttcctctttctggaggaatgacaggcctcccgcagaggaggagcgggtggtgacgagggagaaggagcggaaagggaggggttctccacgggttctgttgatttgtttaatcccacgctattcggaggctttcacggatggcggacaagagggagggggagggggtgggggtctcggcccgtgtttcctcccctcctcccgctcccgcccccgccggagccacctgacccgtagcgaagttgccggccccgctgcgcgccggcctttgtgcgcaccgaggcggccgccgggaaccgggagcccgagctggcccggcagcgccgccgcccccaccttcgcgccccttttcactcccccactgtccccggagctggcaaataaacaaatccacaaacaaattatccgtgtgctccggagaggcggcggcgtgggcggcggcggagagaaggcgccgggcaaggcgagactaggcccccgcggagcgggggaagcacagaccccagcccgggcccggcagcagtaagttgacttttatgaaacctacgaagctcgcggggccaccgaaaaggtccccaccggagcggactctgcggggcgggcggggcagaggctgcaggcgggctccccttcccgcgcggctcctaccggccggctccgcccccaagccctggacggcccttcccccagcccgcctggctgggggccgctgcacaccgggggtggaagtgg

SEQ ID NO: 336513 - DNA, 2790 bp, Homo sapiens
  chr20:61808112-61810902
  hyper
gggaggctccggacggtgaggcttggggaagccactgatccctggccctagagggccagatcgggggcgccccaaggaccctatcgagctggcagtgactgcagtcgggccgtggagtgtcgcctgtgattccgtggtccctacgggcaagagctcccatcccggtctgaaactgtgagaaccgcaagctccgatgggggcggggaaggacgacctttaattcccaccccactgtacggagcccagcagggccatccgcaggaggccggcgggacccttgcctttctcaggactgagaggcttggaggaccgcggtgtgagctgcgcggcagagtgcgttctgcaggcgccagacaggagacgcgaacccgcggtcagggcccgagtgcgggtgcgtgtctgcgggtgccgctgggctgcgtgccggcgaggcgtgcgcgtggcgaggcgtgcgcgtggcggggtgtggctagaggtgtcaatgtgcagctggaggggctgcgcgcgtgggtgcaggagggccatgtgaggggctggagtgtgtgggagacaggcgtttccttgggtctccgtgtggccgccgggcgcagggcacggtcgagggcgctcgatggctgagtccgcgtgagccgaggagcgcgcggggcgggacgcggtgcgaatgcgcgggaggcacgaggcgcgcagtgcgtgtgtgcgcgtgtgcgcggcgcgcgtgccccgcagttctcaaggacacctcggggaggcagcggcggggccggtgtccgggtgacgtcaccgcgcgccccagtgataatcggccggtgccggagcggagcgcggatacgcgcggaggcaacggcgacggcggcggcggcggcgggcgcggggacagttgcatcggggccgggccgggctagcaggagctgggcgcctgcagcgtggaccccgtggacactcggctcgcagccggcctgcggcgctcggggacttgcctggctcccttctcggggttcccgcgcccttctccgcccagggcagcagcgcgcggggcccccgggagccgaagagcaggcgggaactggcggcggcgcgggaggcgcagggagcggaggcggcagcagcggctcccgccgggactggtaattacgctcggggccgggccggggcgagccgggcaagcggcctctctgggtctccccgtctttctctccacgaacagctcgagcgccttctcgcgggcccgctgcgcgcggagaggacgagctcgctgggttgtaaaaagagacgagttttcatctttgagcatcgagattcgttcttttaaccgcattcggtgcgcgctcctgggtcggcacgggcagggcgacggcaggggaaggcagctgcggaggagctcgcgccgcccagtcggagcggttctgcgcccctcggagccccgcgggaggcggccgggtgcgcacgcgctcaccacccccacccccggaatccgtcttcgcgattcccgggcgccccagctccaggaacgcccggagggacgcacttgggggcccactctctgccgcggaaaggggagaagtgtgggctcctccgagtcgggggcggactgggacagcacagtcggctgagcgcagcgcccccgccctgcccgccacgcggcgaagacgcctgagcgttcgcgcccctcgggcgaggaccccacgcaagcccgagccggtcccgaccctggccccgacgctcgccgcccgccccagccctgagggcccctctgcgtgttcacagcggaccttgatttaatgtctatacaattaaggcacgcggtgaatgccaagagaggcgcctccgccgctcctttctcatggaaatggcccgcgagcccgtccggcccagcgcccctcccgcgggaggaaggcgagcccggcccccggcggccattcgcgccgcggacaaatccggcgaacaatgcgcccgcccagagtgcggcccagctgccgggccggggatctggccgcgggacacaaaggggcccgcacgcctctggcgtcgcggggcgggtgggggcggccgagggcggccgaggggggagcctgcggccggggccaggctgcggccagccggcccccggccacgtgtgtccgcagcgcggagcgcccaggcgcccgcagagggcggcggggcccgggagacaaagggagggtccacggggagcggcgggcgggtgcgtggggcggcgggctagggtgcggcgctgtccgcggtgctggcggcggggcggcccccgcgggacgggagggcggccaagtgcggccctcgcccccacagcgggcgccctggacagttgccacggcaacgtgggaggaggtggggcagggtctgaggtcaccgctaagtctgcccttcctcgggccgctgcgccgcggggcggggcggaggcggcgctcgctgtggccccagagcagcccccgcagcccaggaccaggcttgcatggggacgggggtctgcgtccgcgtccagggtccaaacgagggcggtggacacgccggaccgcatcccgcccccaaagccggctctgggctgtgcaggaccaggcacgtgagactccgcagcccagggagaaaatgacaaatccctcccccgccgccatctgcagccgcagtgacacccactcgggtttgctgcaggggttttttttctgtccccggaagccagcgccacctgctgacgcccggcaccgcctctgcgccgcctcccccgcgcccatcccaggccccggctgggctgtgatgccccggtaacagtcagaggac

SEQ ID NO: 336514 - DNA, 165 bp, Homo sapiens
  chr20:61862298-61862463
  hyper
caaccatcccaaccaaactctgcatcgttccactagctgatcgcctgccggagtctcagtgtgctcttctgccggcgtgctccccctgatggcctctcgacgtccagccgcttgtgtgttctgccaatgggctcctctccgtgtccagggcttaggtgcctgccc

SEQ ID NO: 336515 - DNA, 834 bp, Homo sapiens
  chr20:62103142-62103976
  hyper
gtccccgagagtcccggagagtccagacccagcgctgccgccgtccctccccggccggccctttgttcggcgcagaggccgcggggaggggcctcccaggctgaggagggggctggggcggccgcacgtctctgtcctgcgggcctggagcccccaccccgacctgagcggccccgaccccggaatccttcctgcccgcgcgctgtacaatcgctctccggtctcggcccagcactcccgccggggagcgccggccccggacccagacccaggggcagggagccaaacccgccgcagccagcctggccggggtcgccgatggggtcgccgatgggggtcgccatgggggtcgccacgggggccccgccggccactcacacgtaggcgtggtagatgaacgcccagccgcgcggccgctccagcacgttgtagaggaaattctgcagcttgcggtagaaggcgttgcgcttggggggcttcccggcgcccgcgccgcccgcgcgaggtttgctgaggatgctgccgcgcttgggggcctcggagccggcgatcagcagcgccccgtcccgggtggagtcgggcgcgccggggtccagccccacgaagcccaccttcagcttcttctccccgctcgggccggggtatacgccgccgttgcgcgacttctgcaccatggtgcctggcgggaggcgccccgggtcgggctcaggctcagcgggggcggagcgcggggggcggcgcgggccccagcccaggccccccggccgggagccgcatggccgaggcggcggttccgcactcctgccgggcttgggccgcgcgcggagacgctgc

SEQ ID NO: 336516 - DNA, 218 bp, Homo sapiens
  chr20:62127516-62127734
  hyper
cgtcggggtcctgggacgccggccccctccgtcgggaccccacacccagaccctgccccccagggccggcctccgcacctgctccgaaatgggcgcggctacgcaggtccaccagcaggtggcgcaagggcctgggagtcgctcgctctacgagcgaagccgccagatgggataaacccctcccgggcgagggctcccctttatctgaagctgcggac

SEQ ID NO: 336517 - DNA, 394 bp, Homo sapiens
  chr20:62185051-62185445
  hyper
cggggccttgctgggcagagcccgcggcgggggaagccgcccctctcctctgtccaggcgctgggtggtccatccgcctggtcaccggccactgcctctctcccaaattcctccgagggattcccgaggagtgcgctcggactggggggttgagcaggaactccctcccagtcacccgaggctcctgcgccccgcccgaagccgggggtgcgtggggagtggtgcgcccgcggaagggctccgggacgggaaccccccttggagcctggctcttggaccagccacccgccgtggcccctcagtcggggacgcgggcccccagaagtctggggctctccaggaagcgaagcggatggaagattactcggctcggggtcccgggtccccacccccg

SEQ ID NO: 336518 - DNA, 389 bp, Homo sapiens
  chr20:62273400-62273789
  hyper
gccccggccccgccccggcccctgcccgctccgagctccgccccggccccgcccccgcaccttctcgcgcagccgctcgcgcagtgcggccaggtgtgcctcgcggatctccttgctgagctccatcttgtagttgagcttctcctccgcctggcggctgaagttgttattctcctccagcgccttgtgcagcacctcgcgctcgtgctcgcgccgctccgccagctgcttcagcacctgcgcctcctgcgtctgtgcggggccggcgggcgcgcgtgagcggcaaccccgggccctgcccggccggactcctccctgctctccgcctcccgcccagcgcccgctcgcctcacctggcgcctccacctgcccaggcctcggtgggcgcc

SEQ ID NO: 336519 - DNA, 622 bp, Homo sapiens
  chr20:62368779-62369401
  hyper
cgggagacgcaggagccccgcagccgcgggaggtgcagatttggggctgccaggtggcgccaggtccccttggccagcccccagcgcccctttcttctgtccccagggcctcggcttcacaggatggggctgccagtgtcctgggcccctcctgccctctgggttctagggtgctgcgccctgctcctctcgctgtgggcgctgtgcacagcctgccgcaggtaggtccctcagccgcgttctgtctggggcctcgctgcggctgccattcacagcccagcgcgggaaggggctggaggcaggtccgcgcacccagctcggcacgcgcgcctgcaccgggccttggacccgaggctgacgaccccgccccccgccccccacctctacccccaaggcccgaggacgctgtagcccccaggaagagggcgcggaggcagcgggcgaggctgcagggcagtgcgacggcggcggaagcggtgagtgccaggctgtcccggggaccagggtggggtccgcagggcaccgaccagccttcctcgcccccagtccctactgaggcggacccacctctgctccctcagcaagtcggacaccagactgcacgagctgcaccggggcccgc

SEQ ID NO: 336520 - DNA, 144 bp, Homo sapiens
  chr20:62371942-62372086
  hyper
cggagacaccggccccgacggaggccaggtcagggccccaggtttgtaattaccagccacccccaagctcttcagccctggaggagctgagcagaaatgatcgatgactgggagtccctacacctccctccaccgcagttcctc

SEQ ID NO: 336521 - DNA, 1004 bp, Homo sapiens
  chr20:62383197-62384201
  hyper
gaagccccgccccccggtgggtctcccggtggagctcggctcctgcaggtccgctccggaacctgctgactctcctgcgattcctaaactggcagcgatgctccagagcctcttccgccccgacagcagccccacctctgcccggagcccggggcgcctccactgcctctcctcacacagctgcccgccgcgagctccccctgcaccctgcgcctcggggtgggcgttccaggactccccgaacccttggggccgccccgctctgggctgcctgtgccccacccgcctcactggttgatctcacccacttgagatgccctcgccaggccttttttggcaaatctgcctccctgttcccaggctgcctttttctattatttcctccccaagcaaatccatccactccacacctgctacctgacaacgacctgccagtgctgagctccagggtgggcgcggtgggtgcagacaggtcggcaggcacaaggacagggttctccctcccgaggcagggcgggggcgggggggcgcagaggtggctgagggttgggggctccaagcagagcgagctgagtttgccgaggcctggctgccttggcggccagcaggtgagcagggtgggccgaagcctctgcaggggccatgtggcccagccacacccaggaggccggggcagagcagacaggggcccggggcggatctccctgccctgctgtcgtcccccctgtgcagagtggacccggtgtggggtccggggcggtctgcgccctcatcaggacccgcctgcccggacatcgtggccacgcgcagcgcgcggcacgcggaccctccccgcactcaccagcgtgtggcgcttcatgtgctcgcgccgcgtgaacttcttcccgcagatctcgcaggggtagggccgctctcccgtgtgcgagcgcatgtgtcgcttgaggatgcactggtgcatggccgagaagctgcagtacggacacttgaacttcttcctgatcacc

SEQ ID NO: 336522 - DNA, 376 bp, Homo sapiens
  chr20:62384603-62384979
  hyper
ggtgtccgatcagacgcctccctggaggcagagaagaaacaaacactgtggagtaatacggacccaaaagtgtgcaggcgaaatgggagatgtgggtgcaactcaaagtcctgggctcttcttgctggacgccggagaagcagccagacccatttaatcaagttcttttcccccaaccctgagacccaacgtcactcagtggcaggaactccacaccaccatctccatggtgcgtgccctggggccaggctcaaaaacctgggggaccctcagcacgcccagtgccgttatgctactcaggcccagataccagcacgtcagacctgggcatgggccactgagagagcccggagcagccacgtccacgggaccctac

SEQ ID NO: 336523 - DNA, 655 bp, Homo sapiens
  chr20:62461248-62461903
  hyper
cgatacaattaaaatgcccgtgagttctcggcgcacaggtgtctgcgcccaggccgcgcgctaaacacgtttctaattagcatttctttaaacaatgctgatcacaatcttgccaccgtaatccactccaaatgcatcgttgagattgcagcacggaaagcgagagaggaaattcgctgcgaatctcaaactttcttttgtttatatttcttcgctgtcagaaaatatccgttcttcgccccatctggtctgtaccctggctcctcggtccagccctattgtgtgtgcttcgttaaacctacaaacagtgaatctgtcagcggggccaggggaaccccaactagcaggagccctccctctggcgcagagaattccccgtttgccttagggattgagttgtcagacaccggctcgcgctcccccgcgaaactgacatgtctatttacagagaaacaaagacgcggctcgcagcggaccccgcttcctccgcgcgccccgtccgccccgcgcgccccgagccctccgcgccccgagccgccccgccccgaggcccctgcgccccggttcggccggcgattaagatggagaccaggccggcgcccggcgtccggggagacaatgaccccccggcctcagggcgccgggacccgcccgc

SEQ ID NO: 336524 - DNA, 399 bp, Homo sapiens
  chr20:62463400-62463799
  hyper
cggcggccgcgcgtgggtccctcccgtcgtgttgtctgcgggggacgaatggctccgggagggggcgggaaccagcggcccgggcctcgccccagcccgtgtgcagccccgatccgaacggcctgggacgcgtctccaccactcggcgcccggactctgcgcgtcgcttctcgcctccgccgtcctcagccctcgggcgggtagagtgggaagcgcggccccgcattcctggccggcctgcgcaggggtaaaggccacctcgcttcctctccccgggcgcggcgggaagggaggtgagcctgtggccggcagccgcgcgagggagtcgagcccggcccggccaaccaatggggaggcgcccgggccgtccagcctgcctccctgcgggcccagcgcagc

SEQ ID NO: 336525 - DNA, 339 bp, Homo sapiens; identical to SEQ ID NO: 205912
  chr20:62495239-62495578
  hyper

SEQ ID NO: 336526 - DNA, 981 bp, Homo sapiens
  chr20:62600653-62601634
  hyper
cgcgactggcgccccggatgagaaggggcttcggccctcccgagcccagcggggacacagagccctcgcggggagagggggctccgccgcgctgcgcgcaggagacgccagcagcgggtccgccgcgtaggccgttcggcccgggaccccggcccaggcctggcgcgcgggtgagcgcggccagggacgcgcacctggggccagcctcgccacccacctgtcacctggggccgggagcgggcgcggggcgcgggcctcggcctggccgggcagggccgatcgcgggcgcggggtgggggggcgaaggcagtgaaccaaaatggcgactttttctggagaaggaggaggcaggaagacggcgccggcgcggggcgcgggggctcgggcgcggcggggggcgggggggctccgggcccggccccctccttggcctgcgcgcagggtcgagatccggggcgcggtgggcgccggggctgcggccagaatgggtccggggcgcggccgggcgcttacctgcggcgcccagcggggctgcggccgggccgggccgggccggggcggggggcgcggggcgcggggcgctgggtccgggcggcgcaggctgcgcgccgcgctgcgcacatgcgcgctcccgcccctcccacctttgacagttttactgcgggggggagggggcgaactctcgcgttattcccgcggccgctccgcgacggggagggggcggggagggggcgggggcgggggcgggggcccggcgctggcctgtggttcccccgctccgcggttccgcccccgtcggccgggcccgcagtccagagtagccggttctgccgtcctggggcgggggacgttttttggacagtggggtaaactgaggcccgataggggcgctaggcactgcccggagtccggcgcgcacggattgaggcgacctgattccgccgcatcctggcccgcgcggcgagtgtggtctctgggctc

SEQ ID NO: 336527 - DNA, 877 bp, Homo sapiens
  chr20:62680286-62681163
  hyper
cgccgcgttcagctccttccacgctttgcctgcgggccgtgggcgccagtgagtggaacgccgtcgggcgggtgggcgccgagccctccgtgcgcccgggacgccccgcgagggtttggcgcagcccccgcaccccgcggcccgggacccctgccccccccgccccaccccggcccgagccccccccgccctctcccccttctctgccgccctcccgccgctcacccagcatcttgctgagcaccgcgttgtgcaggtccgggttctgctgagccagccgcttgcgctcgtcctttgcccacaccatgaaggcgttcatgggccgccggatgcgcgactcgtctgccgcctggcgttccccgcggccggccgggctgaggccatagcgccccggctcggggctgcgcgggggactgcgctgcgggctgggcggcgaggcgggcgcggcgggcgcggcgagggcggcggggccggcggcgaggccgcgcgtgtcagcggcggccccgtgtcccggggcccatgcacagtcgcggcgggcgggcgggtcgtcctgtgcgccgtagccgggcggcgatctctgcattccagctgggcgcggcctgggcggaacggagcgcgggagcgcggcgggcgggcggcgggcactggggagccgggcgcaagggcaggccaggccgggagggcggatggcggtggggacggcggtggcctcgggccgggcgggcgcccagatatagcggctcagggccaatcggcggcggggcgggcgggcgggggcgggtcggggccgcctcctccccgggggctccctttcttctcaggccgggcgggattccgctgaggcctcccccgcgcacagcccccccacctcccccgc

SEQ ID NO: 336528 - DNA, 1015 bp, Homo sapiens
  chr20:62694230-62695245
  hyper
gggacagcaaggcccgaagcaggaggagagaagggagcagattcctgggcctcctggggcccggtcgctccgggatgtctgagctctgggaggggcgtgcccggggcgcctccctcgcggggtattgtgggatcacgagtcactggcgacggtgggtcaggactacacttcccaggaggctgtgcgcgccgcgtggcgcctgggagttgtggtccagagcgcgggcgcggcgggcgcggcaggcgggcgcgtggactacgcatcctaggatgccgcgcgcggccgcggggccgagggtttgaaccgggggtctgtcgtccgcggcggggctgcgtcggctgcggcgggtgtgggaggtggcgacggccggggccggggtcctgcccggctgcggaggcgggcgcgacgggcgcgggggtcgctgctcctgaggcgatgatgggcaaggaagaggagattgcgcggatcgcccggaggctggacaagatggtgaccaagaagagcgcggtgaggggcgcgggccgccaggaccccgggaaccccgccccgccgagaccccgtcgagcccgccgacccccgttagggccggaagacgacctgaggggcaggacgagacccctccccggcagagactaaccgggacgcaggggagacccccacccgtggccgagacccctgccccgggccagccctgccgttcactcccgcaaccccggcagaggccgcgatcaggcctggaccttgtcccgggagagccacccgctctggactcagacccctccctcgcccgcagtcacaggctccgcacccttccctgtcccttaactccagacccccagcctggcccgtcgactccttccttggccctgtcccgcctctcggagcccccggggtgttcgggcctcctctgcgggccgcgccagccccttgccttcctccatcccggcctgggcatcctcacaggccgagccccgccccccaactcagccctctcccacgctccgtctcttacagc

SEQ ID NO: 336529 - DNA, 877 bp, Homo sapiens
  chr20:62733396-62734273
  hyper
cggtttccttccgtgtgcaaaggggaccgcagaaccctctttgtggggttgtgggggaaggctggggcgcccgggagggtcccgggtcgcgtccgacctcaggaaggcggggcttcagcagcggcctcggaccctccctccagggggcgctgtgggctcacgcgggcccagccttgggccccggggcgctgcggcgggaaccgcggtgactagcggggtcttaaagcgggtggcggggccgggctctcctgggaccaggagcccagagcgtggagacgtggcgggctgagccgctcagtgcggcccctgccccgcgcccaccccgccccgtgtcaggaggtccgcggagcgggaggacccgcctcccggggagagctcgcccgcccctccctcccggctggccgcggggcggtctgcagaccctttggccgtgccggatctgcctggtccccggggagaagacgctgaggatcccattgctggtctgtggatggggacaggagacgcccgaggtaagaaggggtccgggttctttggaggaatcctggttggcgccttctctgcagcagagacgcccggctggggccggagggcaaactgggggcagggtgggagacctcggccctgagggctgtaggggctcttgcctgggcgctccttaagctcccccgccccctccgccccccaccccgcggtgctcactctcagtcctgccttgcgcacattcccacgcccgggcctctcctgcccgcccctcgttgttcacttgctcattacgcctcacacctggctctgccgcgggcttggagcgggtgtctgggaaacacagtctcacttgtctcctcaaggggctccggggcaccgtaacagcgtgcag

SEQ ID NO: 336530 - DNA, 668 bp, Homo sapiens
  chr21:15588309-15588977
  hyper
cgcccagccctacgccaggcgagggagcagtgcggtgggcggtaccccaagtccgctgggggcgtggccctggagccatgcctcgcccccagcgcgcgctcccggcgccggccccgccccctcacccaggcggcgccgtaaagccggagaaggggcggggtctcagctcctacttcattctacggccgagaccggaggatgttccctgctcaggaggaggccgacaggaccgtgtttgttgggaatttagaggcccgagttcgggaagagattctgtacgagctgttccttcaggtaccgtctctgggaaggggcggcggaggggcggagcacgtcgggccggaaacatagcgcgcacctggaccacccggagcccggcccccttccgtcccatcctgagcaggggttttaatttcgtttcctcttggcgcacctgtctccaggtgagcggctggggagtgaaatgagggcgcgttccccatccccatccgcgctgcagagtcctggggttgggcagggacgtggttccttcaacccccgtttctgattaagggcttcccagaggctgcctgggcctcgggtgtgcgcgggcagaaccgaaaacagcctggtcactgttctccgtcaagtagtaagcacgcctgacatcccccaaaaggagaggggtc

SEQ ID NO: 336531 - DNA, 205 bp, Homo sapiens
  chr21:15755917-15756122
  hyper
gtttgtgttctttcgttttaattccttttaaagcgcgttcgtttgcctgagatctagcttctagatggcgttcctatagcctcccggagccccagccatcctccgtagaagggtccctgccgcagtgcggggcctgagggaagtcggctctggcgtccgtgctccaacgctgggagcagccctgaaactccagtgaccctcagcc

SEQ ID NO: 336532 - DNA, 292 bp, Homo sapiens
  chr21:18984005-18984297
  hyper
cgcacggtgacgtcatcctgggacctcgtcaccgcggcggctgctcctcaagttctactttgttccacaaggctcctctgctcacggctgcgtggataaaacccaaagggaatccagaatcaagctcggcctcgcaggagtttataacttttgtacttttccctcccttgtaacgaaaagctaatcgcaaacgtttctaggaacacatttttctcctgatagacgttcccaaggtggagggcgcgagaagactggcccgtggggtgaggagccccggcccgacctcagcggc

SEQ ID NO: 336533 - DNA, 1103 bp, Homo sapiens
  chr21:22369907-22371010
  hyper
cgtaaggtgccgctcccaacagcaatgggtcgagatgtagaggaaacactctgtacgttatttttccgcccaccctttagcgcctgaggagacagacagtgtagactttagggtacaattgcttcccctctgtcgcggcggggtggggagcgtgggaaggggacagccgcgcaaggggccagcctgctccaggtttgagcgagagagggagaaggaggtccacggagagacaagaatctccctcctcccacgcccaaaaggaataagctgcggggcacaccgcccgcctccagatcccccattcacgttgagccggggcgcgctcggggcggtcgcctgcagtatcagtatcagcatcagcatcagcatcagcatctgcatgagcatcagctcagctcagctcagctcagcatcagctcagctgtcctgaggcagccggcggctgtgaaggagctccaggctgcccccatccccacgcccttctcggctcagggcgtgcatgaacctgcggatggccggcgggcgagtggcgccttcgcgatcgcggccgcccctctaggcggaggcaccggggaccgaacccgtgacttcgagctccactgcggacgaatcccgggaccgcgcgcctcgcggaagagcggccgccgtgcagcgcggagggatacgcctcggccgcacctcccctcgccgcgcccccgcccccgccgccctccccgcccggctctgctgccgccgcggcggccgctgctgctgctgcttctgccgccgctgccgccgccgctgcctggatatagtgcggcaagagcggagcttgcagtcactttgcgaggaggagcgcgcgggctgcgggcggctggggcaccgcgggagcggcggcggcggctctagcagaggcggccggggcagcgaaaggttctctctccagggctggacttaataactttgaaactgtccaccggtgtcacgtcctgaacatgagcctcctcctctccttctacctgctggggttgcttgtcagtagcgggcaaggtaggagtgtggcgctttattgcatttactttccctcccccttccacccggccaagagaggcaaagagggaggc

SEQ ID NO: 336534 - DNA, 608 bp, Homo sapiens
  chr21:26934226-26934834
  hyper
cacgcaatgacccacgagaaagggaaaggggaaaacaccaactacccgggcgctgggctttttcgacttttcctttaaaaagaaaaaagtttttcaagctgtaggttccaagaacaggcaggaggggggagaagggggggggggttgcagaaaaggcgcctggtcggttatgagtcacaagtgagttataaaagggtcgcacgttcgcaggcgcgggcttcctgtgcgcggccgagcccgggcccagcgccgcctgcagcctcgggaagggagcggatagcggagccccgagccgcccgcagagcaagcgcggggaaccaaggagacgctcctggcactgcaggtacgccgacttcagtctcgcgctcccgcccgcctttcctctcttgaacgtggcagggacgccgggggacttcggtgcgagggtcaccgccgggttaactggcgaggcaaggcgggggcagcgcgcacgtggccgtggagcccggcctggtcccgcgcgcgcctgcgggtgccccctggggactcagtggtgtcgcctcgcccgggaccagagattgcgctggatggattcccgcgggcagaggcagggggaaggaggggtgttc

SEQ ID NO: 336535 - DNA, 1443 bp, Homo sapiens
  chr21:27011435-27012878
  hyper
cgagtcttgattgcttttttttttctcgagttcgaggcggagcccgcgaaccccatctcctcagagcgccaccccctcagcttcgcccgttgggcagaattttccaaatatctccacccctaggctgaaaagccagaaagaagttttgagccaacgaggggaagaaaggagttggggcaaaacaggaggcgtttccctacccgcatacatccccgtccccgagacacccaatccccccacccccagcctgcccgcgcctcccgcccccagctcctcgccctggggacagctggcagccccgcgcggaccagacacaaagccgatcaatcccggaggcgtgggggcggagggacgacccgccggggctttcccgggcgctgctctcctcctgctgccccctcgctaggacccggcggacgcctcgtctggttttcacgccctctagcccctacccccacacccccaaaacagaacagacccccatccctgggctggaggacccgcctcttggcagccagctgagaaggcgccccggggagggggaaactgacatcccatctagagccgtccctcctcttcctcccctcccgactctctgctcctttcccgccccagaagttcaagggcccccggcctcctgcgctcctgccgccgggaccctcgacctcctcagagcagccggctgccgccccgggaagatggcgaggaggagccgccaccgcctcctcctgctgctgctgcgctacctggtggtcgccctgggctgtaagttgctcgggttcctctacccttcctgcctggaccagcctgcccccaccctccagccccccacggggcgctggctgacagtgtctgggcggctctgggccgaggtcgccgcggggcgtctgaccttgcgcccaggcgagcgggaaacccagggtgcccgcgagcggacgctgggagcaagggagcgcgaggtcgtgggtttcttgtgaattgcgtctgattttgtcagttctagatacagaaaattaagggttcccactagcaggttctcatctgtttgcaaagttggggtaagttttcagacagagggacgtgattcgaatgcaaaactcactacccactggtaagatgctaagaccccaagaaagatggcatcactgggaggcgggcgccggccacactttgagtccccggggagggggcagcgtccgcgtggtctgggctctgtagcgtcccagctgagccggcgatatgcagcgcacttgtggggcggaggtggagggaattcgtggctgctgagccagaattacttttatcctctccacctgcacatctacattcacttagagaagtctggtctggggactctagccagctgctctgtcctcaggggacatccaacgggacgattgttagaaagattcagaagccacatgatccagtagctggggagac

SEQ ID NO: 336536 - DNA, 873 bp, Homo sapiens
  chr21:28215838-28216711
  hyper
gtagcaggaaggaccggcagtgactttcaacagtgcttgagagcagaattatggccgcgagagggagtgcaaactgggaggcggggcaaacccgggaaagacctcccaagcaggttctgcgaaggggccccaccgccttcagcccgcctgggtcagccttataagggggaaaggggacagaagtctgcagaacagagatcctagcgtagccgctcagggtaccttcccaggtcaccattgctcctctgccctctccacatccgccctcccgtgagcgcaggatgcacgcacaggcagcggttacaaaactcagcgcaacgttgcaacccgcacaaaaggcgcacacaaaatcattaaaaagaaatacacagagtggaaagaactcgcacaagctccaactcgctaaaggtggaaggagtcaggttacaaactctccctccccggcctaaatgctttgctttagtttgcagaaaatcgtttgtcagtttttttcttggttattcattattcgggcaaatgcaagtatgttttctagctgagttcaccaatccaaacctcaaaccacattcctccactccaggcctccgttctgtccgcggacttatgatcctgcctgccagcaggagtctaccctgaagtcgcgtgggatagataaagtgaggagaggaggatgaatggacagacaaacgagagcaattcttctacctgtgggctgtcctacgccttgcagtgccgggtcctgcggcgaccactgagccccttcgtcctcgccctcagtcccttcgtcctcgtcttcggtctccgctttcccagtcggccggggctcgtcgtccacgaccccgcacgtgccgccgacgtcgccctgccgattcc

SEQ ID NO: 336537 - DNA, 463 bp, Homo sapiens
  chr21:30374936-30375399
  hyper
cgccccaaagcagcatctggctggcctgcgagatgcccactggggaggcgagtccgcagcttaggactcaagcccggggtcggaagctattgccgaaatccgaaacgcagcgctcgcagctgcagtgacgcgacctgctcataagtccccgtgctcacagcatcccggcaacttacgagctagtgcttccgggtcaccccggcccaggaaggcgcacgcgcgaagcatagcgagcttcactccgcactcttaggctgcgtgtgaggcctgcgagtgctcgggagctgccgcggtcacaagagaaagcctagctgtcaatgacagccccagagcatctgggcgccttgcgatacccgggtgtctgtaggcagccaggagacacttccaagctgatctggaatctttcctcgcccagctctgtccctcgcagggatggcaaaggacattacgacctacatccctt

SEQ ID NO: 336538 - DNA, 233 bp, Homo sapiens
  chr21:30670777-30671010
  hyper
cgggcacgcggcgactcggctgaattagggcgtcctgcagctcccgaggcgaggaggcgcttggcctttccgttccgccctcagaagggagaggagaggtggtcctcgagtgggagtcagttcaggatgcgggctgtgccacgcgcggaggtccggggaccccaccgccgcctcctcgaggcccgccccgccccttacgacccgtccctgcaaccccccgcgtgggcttccgg

SEQ ID NO: 336539 - DNA, 436 bp, Homo sapiens
  chr21:32716048-32716484
  hyper
cagcgggacagccccgggcaggacgcatcctgggtgggtgacgtgatcccgcagtctcctccccgaccccatatcccatacaatgatcctcgcttacagaagtcaagggggaaagatgacgctttcaaagcccgaatctctttaccctggagccagaaccagcgtcgccgccgtcccctgcagctcagccggcaacgcgcgccgagcctcggggcgcagcttggagacgcgcttgctcgttctgggaaggggcacgggacgcacggttccccggccccagctgcacagctcagctcggggctctcacctatcctcgttcagagccacattcggctgcctcccctgaccacccgacacaaagagattcgccggtggaaagaatcgatttcaaaattcaagctcaccgctgctcaacaaggcgcgcacgtttctcccc

SEQ ID NO: 336540 - DNA, 1800 bp, Homo sapiens
  chr21:33244741-33246541
  hyper
cgaagagaggcgagcgccggtccacctcctgcaatcacaggcatcatttcaatggaaggcaaagaaggtgtaagctacaagcagaggcagcaaacgccctggttcctacattgctgctgctactattactgctgtggctgcgcctcctccaacacagccaaccaggctgcgtgcgagcccgggcagacgcctggccgcctccccaccctttcttccagccatccatctatccttccacccccggtccagggggccctactgtgtggcggactcagggccgggcacgcaacccgactcacagtccacggagttcgagagccttcccccttccccccgccccgggtgggtgcggccagtgggggatttcaccgccgaaaggtccagaaaacccaagcccagaatccgggcaagaggcgcagccggaggcggcccgacctgggcggcccgggagcgcgcgcctccgaggccgcgcaggttctccctgtctggcgctcaggtggcttctccgtccactccgccgctcccctccccgggccctcccctctccagcgagggtcgagtttgactgtggcgcgcggggaaggaggggctactagggatttgaaagtgcacgggctgcggagtggagctcgcatctgttcccgccgcccgcgagcggattaaatttctgcaaattcaaactgaatggggctttcttctgctgccttccagagggcgccggcagcccgccgcgcgcttctctccggcgggagcggccgcccagcgcacggctaggagcgatcgcgggagcccgacccaagcccgtgcgggccagacggcggcggcgaggcggaggctgcggaggcacccgggctcccggacccaggcacccggaccccgggacccaggcgccgccggaccgcgccccaccccgcgcgcccgagcagggcgactgtcattagcttcctggacgggacccggggcgggatcctggtgtcctgaaaggggcccgggcgaccctaagaggaagaacttttgggggcggggtccccggtcccgcgtcccctgggcagccgctattgtctacgcgcctcgctgggcggcgcggggggcgtgatcgcggcggccccgggctctgggtgcggagacccaggcggggctgggcccagggcggcggcgggagaagccggggaagccgaagagcctggggaggaggagctgcgagcgcgggagacgagcaggagccgcgcgggccgcggcgagcgcgatgccggcggcggcgggggacgggctcctgggggagccggcggcgcctgggggcggcggcggcgcggaggacgcggccaggcccgcggcggcctgcgagggaagtttcctgcctgcctgggtgagcggcgtgccccgcgagcggctccgcgacttccagcaccacaagcgcgtgggcaactacctcatcggcagcaggaagctgggcgagggctcctttgccaaggtgcgcgaggggctgcacgtgctgaccggggagaaggtgagtctcccgggcgccgtggggctggggcacaggggcgggagtcggcggccaggaccccgcggggagcactgcactgggagtcccagtgtgcagtcccgggccaagcgccttccccctccgcccggctttcctgttgggttaaaacgcgcgctcagcatctcgcagcctttcccgaaggcggcctgcggtccgctgcccgggggttgggggcttgggaggggacggccttgccccgggaagcgtcccgcgcggccgttctgctcgtggaagggcgccgcctggcgacacta

SEQ ID NO: 336541 - DNA, 646 bp, Homo sapiens
  chr21:34392428-34393074
  hyper
cggtggagcgccctatccaggtgcgccgccgcaccatggatcaccgcgcccggtcccgcagtcccgccatggcctggggaggcccgaagcccggggacagtggccggcccatctccggctccgcggacccccggctcaggcgggagggcaggcgggtccctgcaggcccccagggagcccgggagcctctctctggcgtcattcagtcccggggcaacctgaagcgcggtagatattggagagggggcgtctgttggggggacctggcgtcattactgatggctagcagggaggagggaacgggttgtcacctcggcctcataaggccgtgagtgagtagtccagggcctcttcaggcatttttgaaactggattaactaggggggaaattgtagcactgaagccaccgtgactgtcttttgcgctgtgtggaaactccggtaaaactctttgggcaacagtcttatcaccagctcttcaacgtgtgcagcccttctggtcctgtccctgttctgggccccaggaatgcaaagcaggtccaggcactgtgaagaccctggcggtggaggaagaggcttcccggctgtggaggaagccagacccttacaacacaagacgagaaccagacctgcgtgggggagctctg

SEQ ID NO: 336542 - DNA, 1315 bp, Homo sapiens
  chr21:34395050-34396365
  hyper
gcacatgtttggtagccaaacgctgtcattcacgaccaggagcgatggctgcaatgcctttttctttgctttgctttccggtgccgggagccttgcctcccgccgccacccctggtcagctctgcgcaagaacgtcgttctgtttggcagccaggccgagacgcagcctgaatgtgagcaggaactcggagaagggaagggagagaatcagaaagaaggcccgggagggacccgggaagcagtgggaggtctgcgccctggagccccgcgagagcccgccggtttggcacgggctcctcccgggccgcccggcggtccaacaaaggccggccccgacacgcacccggtcttttgtgggagagaaacacaaagaagagggaaaaacacggaggaggccaacagcaccaggacgcgggggccaaccaggaactcccggagccggggcccattagcctctgcaaatgagcactccattccccaggaaggggccccagctgcgcgcgctggtgggaaccgcagtgcctgggacccgcccaggtcgcccaccccgggcgccgggcgcaggacccggacaagtcctggggacgcctccaggacgcaccagggcaagcttgggcaccgggatctaatttctagttattcctgggacggggtggggaggcataggagacacaccgagaggtactcagcatccgattggcaccagggccaagggagcccaggggcgacacagacctccccgacctcccaagctactccggcgacgggaggatgttgagggaagcctgccaggtgaagaaggggccagcagcagcacagagcttccgactttgccttccaggctctagactcgcgccatgccaagacgggcccctcgactttcacccctgactcccaactccagccactggaccgagcgcgcaaagaacctgagaccgcttgctctcaccgccgcaagtcggtcgcaggacagacaccagtgggcagcaacaaaaaaagaaaccgggttccgggacacgtgccggcggctggactaacctcagcggctgcaaccaaggagcgcgcacgttgcgcctgctggtgtttattagctacactggcaggcgcacaactccgcgccccgactggtggccccacagcgcgcaccacacatggcctcgctgctgttggcggggtaggcccgaaggaggcatctacaaatgcccgagccctttctgatccccacccccccgctccctgcgtcgtccgagtgacagattctactaattgaacggttatgggtcatccttgtaaccgttggacgacataacaccac

SEQ ID NO: 336543 - DNA, 217 bp, Homo sapiens
  chr21:34397567-34397784
  hyper
ccatctcctagacgcgcgagtagagcaccaagatagtggggactttgtgcctgggcatcgtttacatttggggcgccaaatgcccacgtgttgatgaaaccagtgagatgggaacaggcggcgggaaaccagacagaggaagagctagggaggagaccccagccccggatcctgggtcgccagggttttccgcgcgcatcccaaaaggtgcggctgc

SEQ ID NO: 336544 - DNA, 1345 bp, Homo sapiens
  chr21:34398016-34399361
  hyper
gcccattggttgtgcgcagggaggaggcgtgtgcccggcctggcgagtttcattgagcggaattagcccggatgacatcagcttcccagccccccggcgggcccagctcattggcgaggcagcccctccaggacacgcacattgttccccgcccccgcccccgccaccgctgccgccgtcgccgctgccaccgggctataaaaaccggccgagcccctaaaggtgcggatgcttattatagatcgacgcgacaccagcgcccggtgccaggttctcccctgaggcttttcggagcgagctcctcaaatcgcatccagagtaagtgtccccgccccacagcagccgcagcctagatcccagggacagactctcctcaactcggctgtgacccagaatgctccgatacagggggtctggatccctactctgcgggccatttctccagagcgactttgctcttctgtcctccccacactcaccgctgcatctccctcaccaaaagcgagaagtcggagcgacaacagctctttctgcccaagccccagtcagctggtgagctccccgtggtctccagatgcagcacatggactctgggccccgcgccggctctgggtgcatgtgcgtgtgcgtgtgtttgctgcgtggtgtcgatggagataaggtggatccgtttgaggaaccaaatcattagttctctatctagatctccattctccccaaagaaaggccctcacttcccactcgtttattccagcccgggggctcagttttcccacacctaactgaaagcccgaagcctctagaatgccacccgcaccccgagggtcaccaacgctccctgaaataacctgttgcatgagagcagaggggagatagagagagcttaattataggtacccgcgtgcagctaaaaggagggccagagatagtagcgagggggacgaggagccacgggccacctgtgccgggaccccgcgctgtggtactgcggtgcaggcgggagcagcttttctgtctctcactgactcactctctctctctctccctctctctctctctcattctctctcttttctcctcctctcctggaagttttcgggtccgagggaaggaggaccctgcgaaagctgcgacgactatcttcccctggggccatggactcggacgccagcctggtgtccagccgcccgtcgtcgccagagcccgatgacctttttctgccggcccggagtaagggcagcagcggcagcgccttcactgggggcaccgtgtcctcgtccaccccgagtgactgcccgccggagctgagcgccgagctgcgcggcgctatgggctctgcgggcgc

SEQ ID NO: 336545 - DNA, 382 bp, Homo sapiens
  chr21:34401198-34401580
  hyper
atcggagtctaagccggctttcctctattttggtttatttttgccacgtttaacacaaatggtaaactcctccacgtgcttcctgcgttccgtgcaagccgcctcggcgctgcctgcgttgcaaactgggctttgtagcgtctgccgtgtaacacccttcctctgatcgcaccgcccctcgcagagagtgtatcatctgttttatttttgtaaaaacaaagtgctaaataatatttattacttgtttggttgcaaaaacggaataaatgactgagtgttgagattttaaataaaatttaaagtaaagtcgggggatttccatccgtgtgccaccccgaaaaggggttcaggacgcgataccttgggaccggatttggggatc

SEQ ID NO: 336546 - DNA, 927 bp, Homo sapiens
  chr21:34442192-34443119
  hyper
tccttcaacagccccgcttgccttgaaaaggcgcccttactccgctcagggggcctgtcccgcgcggctggcacaggcgctcacaataacctcctaaagcggtgccagccgcacctccgcgcggccccggcacaagcagccaatgaacacgcggctgcgcccggcctcgcgcctccattggctgcgccccgccacccgctgccccgcaggttcccaagccgggtttaaaggggtagggcgcgggccagggccccaccatcgtttccccgcgcgcaggtccgcggggaggggcggcctgccgaccggcccaccccagggcgttcctgaagggcgtcctcggccgcccccaccgcctcccagatgtactatgcggtttcccaggcgcgcgtgaacgcggtccccgggaccatgctgcggccacagcggcccggagacttgcagctcggggcctccctctacgagctggtgggctacaggcagccgccctcctcctcctcctcctccacctcctccacctcctccacttcctcctcctccacgacggcccccctcctccccaaggctgcgcgcgagaagccggaggcgccggccgagcctccaggccccgggcccgggtcaggcgcgcacccgggcggcagcgcccggccggacgccaaggaggagcagcagcagcagctgcggcgcaagatcaacagccgcgagcggaagcgcatgcaggacctgaacctggccatggacgccctgcgcgaggtcatcctgccctactcagcggcgcactgccagggcgcgcccggccgcaagctctccaagatagccacgctgctgctcgcccgcaactacatcctactgctgggcagctcgctgcaggagctgcgccgcgcgctgggcgagggcgccgggcccgccgcgccgcgcctgctgctggcc

SEQ ID NO: 336547 - DNA, 872 bp, Homo sapiens
  chr21:34443630-34444502
  hyper
cgctctcacccagcacatctctctccttgtccctggagttgcgcgcttcgcggggccgatgtagaacttagggcgccttgccgtggttggcgcgccccgggtgcagcgagaggccatccccgagcgctacctccccggagcggagcacgccggctcccagtactaggggctgcgctcgagcagtggcgggggcggaggggtggttcttttccttctcctccgccagaggccacgggcgcccttgttcccgccggccaggtcctatcaaaggaggctgccggaactcaagaggcagaaaaagaccagttaggcggtgcagacggtctgggacgtggcagacggacggaccctcggcggacaggtggtcggcgtcggggtgcggtgggtaggggcgaggacaacgcagggtgcgctgggttgggacgtgggtccacttttgtagaccagctgtttggagagctgtatttaagactcgcgtatccagtgttttgtcgcagagagttttcgctcttaaatcctgggggtttcttagaaagcaacttagaactcgagattcacctttcgtttccctttccccaaaagtagcgtaaccaacatttaagcttgcttaaaaacgaaaaccaaccgccttgcatccagtgttcccgatttactaaaataggtaaccaggcgtctcacagtcgccgtcctgtcaagagcgctaatgaacgttctcattaacacgcaggagtaccgggagccctgaaccgcccgctgctcggcggatcccagctgcggtggcgacggcgggaaggcgctttccgctgttcctcagcgggccgggcccttgaccagcgcggcccgcaggtcttccttctcgccgtcttgcagtt

SEQ ID NO: 336548 - DNA, 313 bp, Homo sapiens; identical to SEQ ID NO: 241419
  chr21:34481909-34482222
  hyper

SEQ ID NO: 336549 - DNA, 936 bp, Homo sapiens
  chr21:34602440-34603376
  hyper
cgagcgtcgggtcccagagccgggcgcggctggggcccgaggctagcatctctcgggagccgcaaggcgagagctgcaaaggtaacgcagcgtggcggggtcgcgggagcggagcgcgtggccagctgactggagggaaaacgccgcctccctgcagcggttcccggaatcccctccggttccctctcgctctccccgactcctcctcctcctcctgccctccctctgcgtcttgagtatgcggctagtgcgcccttcctctctcccggggccgcacctgcgaccccaggacccctcccgggccctgtcctgcgccctccacgcgtcgcccctgctgggagtccgctttcgttgcacccctccgcgtcccaccccaccccaccaaggatgcccaggataccgggcatttgccactgcaagatgtgagtcgttgctaagtttgagggtcacattcctccaggtccaccccgccttgcaaaaccggctcaccagctgggtgctcaggttcgggatctccagcccgcccccttgaggtcccctgggattagcccccctcgacctgcgtcagggtcacagactgcagccggggctggagcggcctacacccctccggatccgctgcgtggaggcaggagggggaaggggcgaggggacgtggccgcggagacagaagggtgcaccctcccagggtcggagaggggagatactgggaagatactccgcgaatatggagaggcgatcggcacttgcatttcaaccctgagcaaatcaatccgttacacgcagtagcgagttgactccatcagcccgtttatttggttagcgatggttatattgactctgagtattcccacctcctttcttttaacatttttttttttatttccttgttttgtttagcaagaagtcttagaaacgaatatagcatgcttgggc

SEQ ID NO: 336550 - DNA, 1901 bp, Homo sapiens
  chr21:36041404-36043305
  hyper
gtgggaagcagacgcgcaatcggggagaagctccagcagtggaggaagagtccagggagtttcagctgggcagaaggggcgcagaggcttggggccaagcggagtttgccctgcgggtcctgcgcaaggccccagtgccccggctaaacctttgccgcaggatcccggagccggcgtccttcaaggagcacagagggccccgtagcacgccccttgcccagcgccaccgacccttaagcagcgtcaaggaaggagtcccgatcaaggacagggatctgcggccatggccgaggccgcggagccggagggggttgccccgggtccccaggggccgccggaggtccccgcgcctctggctgagagacccggagagccaggagccgcgggcggggaggcagaagggccggaggggagcgagggcgcagaggaggcgccgaggggcgccgccgctgtgaaggaggcaggaggcggcgggccagacaggggcccggaggccgaggcgcggggcacgaggggggcgcacggcgagactgaggccgaggagggagccccggagggtgccgaggtgccccaaggaggggaggagacaagcggcgcgcagcaggtggagggggcgagcccgggacgcggcgcgcagggcgagccccgcggggaggctcagagggagcccgaggactctgcggcccccgagaggcaggaggaggcggagcagaggcctgaggtcccggaaggtagcgcgtccggggaggcgggggacagcgtagacgcggagggcccgctgggggacaacatagaagcggagggcccggcgggcgacagcgtagaggcggagggccgggtgggggacagcgtagacgcggaaggtccggcgggggacagcgtagacgcggagggcccgctgggggacaacatacaagccgagggcccggcgggggacagcgtagacgcggagggccgggtgggggacagcgtagacgcggaaggtccggcgggggacagcgtagacgcggagggccgggtgggggacagcgtagaggcgggggacccggcgggggacggcgtagaagcgggggtcccggcgggggacagcgtagaagccgaaggcccggcgggggacagcatggacgccgagggtccggcaggaagggcgcgccgggtctcgggtgagccgcagcaatcgggggacggcagcctctcgccccaggccgaggcaattgaggtcgcagccggggagagtgcggggcgcagccccggtgagctcgcctgggacgcagcggaggaggcggaggtcccgggggtaaaggggtccgaagaagcggcccccggggacgcaagggcagacgctggcgaggacagggtaggggatgggccacagcaggagccgggggaggacgaagagagacgagagcggagcccggaggggccaagggaggaggaagcagcggggggcgaagaggaatcccccgacagcagcccacatggggaggcctccaggggcgccgcggagcctgaggcccagctcagcaaccacctggccgaggagggccccgccgagggtagcggcgaggccgcgcgcgtgaacggccgccgggaggacggagaggcgtccgagccccgggccctggggcaggagcacgacatcaccctcttcgtcaaggtaaagctcgcttccctcaattcttaggacgacccccttccattcgaggtcttggtcatctcagatcccagagggacgcgcagggaggaacccttggtggtatcctgattgtcatcaggcgcttccatgcgcgggcggtaggcgggacagccgggatttcccggagaagagtttccagggcatttgcgggaggactcaatggtttggaagcaaagactttgggggtgggggcgacggggagtgc

SEQ ID NO: 336551 - DNA, 881 bp, Homo sapiens
  chr21:36163875-36164756
  hyper
cgtatataaaaataaaaaccacccaaatgcaaatacgcattttgcaattgataaggtgcggaaaaattaaaaataagaattagatgccaaacagggcgagttgcatccctcctctccccccaccccaaccaaaattccacactctttggaataaacaacttggttaaaaagttaagtcaagggtataaaatctttctttttattcacagcattgctaaatcagaagcattcacagtttccctccgggaatcttcctgtttgctttccagcgcgtcccctgggtgctggggccggcggacaccctcgaggtgcgtcgcctcggacacctccgcgagggccggggcgccagcagacggcggcggcgtgggcttctgggcgcaggaggctgcgcgggcctgacctacagcgagatcctggccgtcgggcgccctcggccccaggacggtggccgggcccagggcccgggatcccggcgggcttgtcgcgaacaggaggcccgcgcgcccggaggcgaaggcggcggcccgcggggcccagccgggccaggcctggcgcctcagtagggcctccacacggcctcctccaggcgcgcggagggcgccatgttggtgggggagttgctgtggctgccctcggcctccaccacgtcgctctggttcgggaggctggggttgagcagcgcggagccggtggaggcgttggtgcagggcggcaggatgcgcggcggcgagcgctcgccgcccaccatggagaactggtaggagccggccgaggcgccgtagtacaggtggtaggagggcgagctggcttggaacgggcctccctgcgcttgcgacgagccggggtagggcggcggcaggtaggtgtggtagcgcgtggcc

SEQ ID NO: 336552 - DNA, 130 bp, Homo sapiens
  chr21:36206762-36206892
  hyper
cgagggttgggcgtgggggctgggtggtgtgggctgaccctcatggctgtgcgccgcagctgctccagttcactgagccgctcggaaaaggacaagctcccgggcttggtctgatcatctagtttctgcc

SEQ ID NO: 336553 - DNA, 353 bp, Homo sapiens
  chr21:37528267-37528620
  hyper
cgccgcgccccctgcgccccaaacgtgtgtggagggcttggacgtggtccagagggaaaagatggggtgaaccaggtgccgcgcacccttcgaggagcccccgcttctccgtttctgtgagtgactccaaagcacctccgagggccgacacacgcgcggacgaccttgggcgggcactgaccaatgtccccttccactcggttgtgtcgggggtccccaggtgaggcgcgaacgccgccccgctcacctgtacgaggcctttcccggagcagcccggctacgaagcgacacccatggcggagaagctaaggaagactcccgctccctcacaccgcggctgaggcgactgaacc

SEQ ID NO: 336554 - DNA, 237 bp, Homo sapiens
  chr21:37757666-37757903
  hyper
cgggggcggggcctgcggcgcgcgggaagcggcgcgcgctgcgcgggaggtgacggtgcctctgactgtccgggtccctccaggtacggcttccctggcccgggcagctccgcggctcttttggtcgcgtcggtccgggccagaggccctcgccgagggcgggcccctgggccccgggatagctccggagcggcgcgcgttggggcggcggggccccgtccacccccggccccgcgc

SEQ ID NO: 336555 - DNA, 1608 bp, Homo sapiens
  chr21:38064301-38065909
  hyper
cggcgctcctcccacggcgacacctccgtgctctttttgcttgtatttattcaaaaattagatttgtcaataacgcagggcctggcaaataggaggacctctccaaaattaaatgcaagattgaacataggtctctcacatcataataaagcggtttaatttggcttccaccgggggagcggaatagcacttgcccagcccctttgagccctgcgcacactcgcaccaccgccgcctctcccacaaagagaaaagccacgagaagggtcccgactgtgcaaatctgtgtgccctcccgaggaaggcgcccgagggctcactctgcctggttcaaaagcttgtgggagagaagcacccaaaagaattccgttgtcaggttaaagtctttgtctatactcgcaggatgggaaggacgatggtgcaatcaccgagattattttgttttcgtcctctaaaaaatgaagaggggactggagtcgggaccaaaattattggcagaccgcacggtttgcagtcaccctgaagttaccagcagccgatgctgtgtccagggaaaatattcttgagctggaaaacgtgctaatttaaagtctttcgtttcacacgaaaatgtgctgcactctttgactgctcaggaatttgctctagcacctagaaggaattctggcttagggcaggggcgagggacagtggagggcgttggaccttcttccgcaatcgggaccactccaggtctccccggagaaggctgagtctccagcgcgtggattcagatcaggactctgtctaagtaggcgagagctggggataccgctgggggctttggcgaagctaagaaagcactggcttcttattctcaccagacatctcaacacccacgtgcgctgggtcccgcagtctctcgcccgccccacgcgggtcccagccctggtccttactccccgcgcgggaagaatctggggagggtgggggcggagaggcggctgatcggagagtgggagggaggatgggagatgggcagaggctgcccgcatcagggccaggacagacgtccgcgcggccccaggcactcacttgagtgtcacgcaagtcaccccaacaccgcacaagacagtggcggggtgcgcaccgaggcccctacctggggggtgtgcgcgcactgaacgaccccttctccaggtgcgcgagccgctccggcggccgtgcacactgcgcccccttccgcccacctgcctggcctgcgtttctaaccacgcgggcggtcccgagacttcgcgcaaaaggcaggaccgcgactcccaataatgatatcttcgaaataaccccctgctgagccggcgcccagggccgggggtagagtcccgagtcccttttgcggaattaaggagacctctggcgaccggggagcctgcccctgtgaccgctccagcagcccctgccgcgtgcgtgcccgagtgtggcccgcagctcccaaagcccaggtgtgtgtggcctagggcggggagagttggcgacccgggcccatcaccgccccagtgccaccgccccagtgcctgaccagatggggtgcggtccctacgcccggcgtggccccgccgccgctcagat

SEQ ID NO: 336556 - DNA, 229 bp, Homo sapiens
  chr21:38065955-38066184
  hyper
ggagcagctctaggccgtgggcttcgtctcctcctcctggaaggaatgaatgggctccccgacacacacctctcagaaaactcacctttcacgctgaccttcaaaagaaaagaaagaaagaaaaagaaaaatccgctcgaagcgggaaaatgtccacgcccggatttggggtggacacgcgccccggcctggctggaggggccaacccagcggggcccgcctgcccgcc

SEQ ID NO: 336557 - DNA, 762 bp, Homo sapiens
  chr21:38071764-38072526
  hyper
cgagcaggaacggggctccggttgctgcaggacggtccagcccggaggaggctgcgctccgggcagcggcgggcggcgccgccgggttgctcggagctcaggcccggcggctgcggggaggcgtctcggaaccccgggaggccccccgcacctgcccgcggcccactccgcggactcacctggctcccggctcccccttccccatccccgccgccgcagcccgagcggggctccgcgggcctggagcacggccgggtctaatatgcccggagccgaggcgcgatgaaggagaagtccaagaatgcggccaagaccaggagggagaaggaaaatggcgagttttacgagcttgccaagctgctcccgctgccgtcggccatcacttcgcagctggacaaagcgtccatcatccgcctcaccacgagctacctgaagatgcgcgccgtcttccccgaaggtgaggcctcaggtgggcggccggggacgctggggagcccggcggccccggcccaggcgggaagcgcaagccagcccgcccagaggggttgccgcggcctggcgtccagagctggggcgtctgagggaggttgcgtgagggtcttcggcttcggcgctggcttggggcgaggggccagggccttggcggcccaggcgaccaaaccctctcctggtccagggctgggtgagggcgaattacgaattgttccaggggcaggcagtcccccagcccgcacggccagcgagttctttctggttttgttc

SEQ ID NO: 336558 - DNA, 836 bp, Homo sapiens
  chr21:38073275-38074111
  hyper
cggccaggcacctccgagcagcaggtctgagcgtttttggcgtcccaagcgttccgggccgcgtcttccagagcctctgctcccagcggggtcgctgcggcctggcccgaaggatttgactctttgctgggaggcgcgctgctcagggttctggtgggtcctctgggcccaggagctgggagggctgcgccggcctctggagccccgggagccagtgccgaggtagggagacaacttccgccgcagggcgccggacggtcggggcagagcaggcgacaggtgtccctaggccgcagggcgcttccatagcgccatccccaccaggcactctactcgaaatcggaaagctcgaccttttgcgttcgcctctgccaagcctgttatttgtgctggccgctgggtctggagctgcgcttctcggcccctccccggtggagcgcagagggctggtctgcaagcgcggcctccagccccgcggctccccggcccaggagccaggcgcgggctgacccgggagcacccggcagcggagggggctggaagcggaccctaggcctctcctgtgccacccggccctaccgcgcggccgcggggcgctctcctctcgggcgcagcggtccttcagcccagggcaggttcctccctttcctactcggaacgtggcaaagataccccagtcccagcccctccagctgagagctgttgcccaaggtcgtcgctacttgtccgctcaatggtgaccccttggcagagaactagggatgattccactccggttgatgttttaggggaaattaaaagaacattcggttttctgagtctccttccggggaggc

SEQ ID NO: 336559 - DNA, 560 bp, Homo sapiens
  chr21:38076683-38077243
  hyper
cgtagattttttacaacgctttccccgtctctgctttgaagcctgccaggctgcagctggggatccaggagggaaagcccgcaggcgcagaggggacaatccgggaagtggtaaaggggacacccgggcacagggcctgtgctttcgttgcaggcgaggaagtggagcgcgcgctgcagattcagcgcggggctagaggaggggacctggatccctgaaccccggggcggaaagggagcctccgggcggctgtgggtgccgcgctcctcggagccagcagctgctggggcggcgtccgaactccccaggtctgcgcacggcaatgggggcaccgggccttctgtctgtcctcagaatacgtaggatacccgcgggcgacaagccgggccaggctaggagcctccttccctgcccctccccatcggccgcgggaggctttcttggggcgtccccacgaccacccccttctcacccggtccccagtttggaaaaaggcgcaagaagcgggcttttcagggaccccggggagaacacgagggctccgacgcgggagaaggatt

SEQ ID NO: 336560 - DNA, 227 bp, Homo sapiens; identical to SEQ ID NO: 241444
  chr21:38077461-38077688
  hyper

SEQ ID NO: 336561 - DNA, 890 bp, Homo sapiens
  chr21:38080009-38080899
  hyper
gcccagggcgttcccggggaggctgagagacccagggtgctctgggtgactgcacggcgactcctcgggaacccactcgtggctgcccgcttggaagggctttgcggccccgggaacgatctccaggatctccacggctggtcaggttccccgtccctcgtatcccgcgctgcccgggggctcctgcctttggttcagtgctcgcggcaccaccgcactcaggacggcagtggggggctggggctggggctgggcctggcccagcgtgggttggggcgggggacgcgccagcagcgcccgcagctcgctccgcaggggtcgcagccaggggtcgggagctaggctcgtgggccgggagacgccgggcgcgttgtcctccggggaggttggggtgcaggcggtgcaccgaccctcgccatctggcgctgcagccaccagccacggcgcttagtggagggtctgcggccaggctcccggcggaaagattccggggagggctcgggggttgtcccagcccgcgctaagcgccgcagcctcgcccggctttcctgcttcctcggactgtgcaggggaagcctggggtctcgcggggcgcagcagtcaggtcgagggtgcagcaggaggggagtcctgacgggcaggtccctctttcccctggtgcgcaacactggttggtagcttttgcggaggtggtgaagaagggcaggaggcctgttgagcggaggagtccggggatccctaattatgtgacaggagaccctttccagttcggcctgtggcccatccctctctcaccgccggcagattggagtctgctctcggggagcccccaggtaaacccctcacagggagaaggtttcggattggaaggaggaccgcgctcgtggggc

SEQ ID NO: 336562 - DNA, 913 bp, Homo sapiens
  chr21:38119724-38120637
  hyper
cgtgtattacttaacaggcattccacctgtttccctgctttgtaacgcggctcctggaacatttcaggtcgcgtcctgagattggacagcacggcctagactaaggcgggggagggcgacagcgaccccgcgggtgcagcgcgtgggcggccgaggggtggtggctgcgcccggggcttgggggtggggtggctgcggccgcgccccttgctgccctctaacgtgtcgcctgtccccgcagcgcccgccgccgccgtgcgcaggttcggcgaggacaccgcgcccccgagcttcccgagctgcggccactaccgcgaggagcccgcgctgggcccggccaaagccgcccgccaggccgcccgggacggggcgcggctggcgctggcccgcgcggcacccgagtgctgcgcgcccccgacccccgaggccccgggcgcgccggcgcagctgcccttcgtgctgctcaactaccaccgcgtgctggcccggcgcggaccgctggggggcgccgcacccgccgcctccggcctggcctgcgctcccggcggccccgaggcggcgaccggcgcgctgcggctccggcacccgagccccgccgccacctccccgcccggcgcgcccctgccgcactacctgggcgcctcggtcatcatcaccaacgggaggtgacccgctggccgcccgcgccaggagcctggacccggcctcccggggctgcggcgccaccgagcccggcaaatgcgcacgacctacattaatttatgcagagacagctgtttgaattggaccccgccgccgacttgcggatttccaccgcggaggccccgcgcgccggtgccgagggccgaggagcgcccgggtccgggcaggtgaccgcccgcctctgtcctgcgagggccggtgcgacccagtt

SEQ ID NO: 336563 - DNA, 293 bp, Homo sapiens
  chr21:38382182-38382475
  hyper
cgccaatcctcacccctagcccggagcccgctctttgcagagcccagctggttgcgcagagcgaccagcgccagtctgtgctctggtactgtgcaccgccctgggttccctgcagtccaccgacgagagctgcccagcgcagggaaggaacgcttcttgctcaacagcgccctcgcccgacaaagcaggacaattccccagctcccaagccctcttctgtatttctcaaaaatgccattggctggagtggcggtgaagaggactaacgcctggtgacctgtaccagggctccc

SEQ ID NO: 336564 - DNA, 903 bp, Homo sapiens
  chr21:38592864-38593767
  hyper
cgctataacgaggtaacatacagcacttagaagacggcctgacccagaataacactaatgttcacatggctgcgagtctcagaccaaaatcaatagccggtatctactgaaactgcagcaaggcgaaaccacgggaatggcgctccgttgagtagagcaacgcacagcacatcacatcgcatcctccgtagcgggaggctctggcctcaccgcagcggcacttcccggaagagcccaggatattcggggacccgcaccggacaggcggcccaggccccctggcgcccagctggccgccctgttgcagctctcatgccaagacctgcgcctaacggcagggattccggcggtcatcatttattcttggcgctaagctgccgcttctcttttttatcaccacagagtaacgcagaccccaccgtttccttccattctgagccaaccactccagcagccaccggggcgccaggttatgctggggctgcaccacccggcccgaggcttttgaagccacgcctgagcgcggaggatgggcaggatttgccccgtgaactcccgcgcacgcaggctccgcgcgaggcccgggcgcccgagcggcgattccctcccctatcaccagctccagggtggtgccccccggctgtggagcccagaccccggccgtccagcagcgtatagacgagcccatgtctgcgatgtaactgcaccgcgctggggatccacctcccgccagggtgagggcgccgtcctccagcgtatgctaggcaggcgcgccccgccctcctggtcacgtgaccacgcctacagccgaagaggatgggaaaatgcggccctgttcctgaacaggaagcggaagcaggaaggaactgagaacaccagcatctgctgccgccctgaatcagc

SEQ ID NO: 336565 - DNA, 358 bp, Homo sapiens
  chr21:38936052-38936410
  hyper
gggccgcgagccgccggcgtaggccgctccagctggaagaccccaccgctagggttccagggggctgcggacgcttccgaggggcccaaggcgaaagaacgcagcccgcttgtcggccacgtgaccgtccccgtccgcgtccgcagcgaccacgtgactgtgcgtccgcggcgtcgattgactgggagctccctggccacgccctaagcgccagccccgggcttcggggggcggtgctgctgcggttgccatggcgtcttccgagcgcgcaggcgtgggcccagagtagcttttcgggtatttgctaccggctctcggtagggctggtcacctttgcttgctgagcttcgcgccctgc

SEQ ID NO: 336566 - DNA, 198 bp, Homo sapiens
  chr21:39047626-39047824
  hyper
cggggatttttccgcgagtggctgcattggctttaagaaactgcgccgggctgggcagccgacgcaccgctaggtggcgcacgcgctcgctgcgtctttcagggctgcaggtacggtgcgggtttctggtgcgctgaccgcgctggggatgagcaccactgtcatcgcggggaccctcgggctgcgcctctgcccctc

SEQ ID NO: 336567 - DNA, 1188 bp, Homo sapiens
  chr21:39288093-39289281
  hyper
tggggaaggggacgcggggacccgagagcacggaacgcctcgcccaggtggacgccagctcctcgcctgcgagcagctcagcgcaccgcttacctggctgcggacggggtggcttcactcaatcatgatctcctctcttgaaacggagcaagactgaacaattcactacacgacggatggcgagggaaggaaatgcaaaaaagaaaaggaaaagaaaaaaactggaatcagatggtcaaatttcacatcagcaccgagaggctgttaggagactccattctgctcgcggctgctccggctccaggtccggcttcccggcgtccgcgggtctccacccctccgcccgcccagcctctccagccaggtgcggccgtctccggactggctccctctggccgagcgcggagagcagggctgggcgctggggccaagggaggggcggaggggcgcgcgtttgggcagggacgggggagggagactgggtggaatgaagtggggaaagataagagtggcagaagaaaaaaaaaatccccggttaggagaaaagtggtggaccacgcagagagacgtcatgaaatccgcagattcaatgaatgctactcaattccagccgactggctgagccccgctggcagcgcacgaagcgacgcggctccgagataaaagcgagtgcagcgccgcgtgctggggaaaaagccgcacagcgccggcgcggtccgggaggaaggggcgggggcgagcaggacagagccacagacccagagacgcccaccccgccgcccatgccagctagcgtgtcagcgcgtcgaggaccgggcttggtgggggcgggctgggcacaaaccaacgtgcatcccccgccactggaaacgtgggtgctccatgctgggggaatcttttgggtttcggtccccgaccccccagtcccaacctttctcccagtgccactaagtaagttattcccggagaaacgcctggaaagcaggaaagagccgaagctcggggagcagttttgtctgctggttgtaggggttcggcttttagggttttgtgagataaggaaaaagaggctctgggcactgcctcccaccgggctgaaatccgtgagaggcagccccggcgcgggagccggagcctgcaccgcccagagggggcgcagcgagcggccgggacggaggggaggggccc

SEQ ID NO: 336568 - DNA, 627 bp, Homo sapiens
  chr21:40032286-40032913
  hyper
gccgtccctcccggcgctggacgccccacctgtcccggcgccgtcggaagagccctgcagagtgagcccctagggccaccccgctgccttcctccccgtccccgcagccgctgtagccagcgtgggagccgggcaggtcgcgtggggcgctggacttaccgagaggttagcgccgccgtcgggggagggcgtgtcccgcacgtgtgtgtccgcgcgtgtccgcgcccgcgtgtgccagcgcgcgtgccttggccgtgcgcgccgagccgggtcgcactaactccctcggcgccgacgggctcagcccatggtgtgggcgccgggttcagggaggctccggctcccgccaatcgcggagcagggcggccgccccgacgcgcgacttgcgaacccggagtgcgcgccgggggcggggcagggacgcgtgggcgggaatgcacgcgcgtggccaggtgcgcgtgggtgcgagcgcgcgggagtcttcgagtgcgcgcgtgtccgtgtgcgcgtgggtgtgggtgtgctcgcgtgtccgtgcgcgcgccctcggggccaagagcgcgggccgcgcgggcaggtttggacactacgcgccctgctcgggtttaggacgcggctggcggctcc

SEQ ID NO: 336569 - DNA, 616 bp, Homo sapiens
  chr21:40032974-40033590
  hyper
aggagcagaggctgggacggccggaggagagagtccggccccagcaggaaaggaacccagcacgcgactactggaggggcgaggagcaagggaaggaccagaggggaggagagggggtcaggggagggaaagtgtgggagggggagccgcgggggtgcgcgctcctcctaactcggggtcgcttttagcgagaagtgatatttttccagcctcattgaaaaccgttgcaaacattgaaaatagtaaaagtgaaaacggttgcgacactaagacgtttataaaatgaccgcggactgccctcgatgctgatgagaactgggacgacgtcgcgcagagcgtccggagggagaggcgcggtgcccgggacctcggtcgtggggaggagccggatacagccgccgggacgcggggatgccgagggcaccgcggcctggtctgaccgacgcacgcggtgacagccgcccttgggagacgacggcgtctgcaaccagcagcctccaaagggtgcagccaggaggctcagcttgtccgcctccggggctcggggctaagccccttccagaagttttcgtttctacgcgaattccgaccgcaaaatccagcttacctgagcgcc

SEQ ID NO: 336570 - DNA, 506 bp, Homo sapiens
  chr21:40105869-40106375
  hyper
cgaaaatatctgtcatcgtcactttacagaaaatggaaaaggatgaggattgcacaaaaactagaaattccatcccgggtgtttttcctcctcagcaacgggcacaggtcgttccagttttggccaggcggtggcgctcgaggcaaacggtgtcatgaaacggtcactggatgcactgaccctgaagatgctctcaaagcacgagtccgttcatcagagagtggacttgacacccatcagaaacattcccggagtgcgttggtgtgaaggtgcgaggagagtcggggaagcatcccgaagccctgctaggcgaatgggtactgctgagattacagggtcagcacaaagcagaatacaggacccgaaaataacagctgcaccggaagaatacttgaccactgtttaagaaggaatttgacgaagagcagtcaccgagtgcagccctgggccggctaaaggaaaagaaaaaaaatcactcaactgccgctcggcggcgggaatgccag

SEQ ID NO: 336571 - DNA, 629 bp, Homo sapiens
  chr21:42688559-42689188
  hyper
cgccagcgacctcagagctcccgggcacagcccggggcacagccccgcgcacctgccccgcccacgcccgccccgcgcacctgccgggtccgcacctgccatttgcccgactggccgcgcacccagctggcccgcccctgcccgacacgaccgctgcccgccccttgccttcctgacccaggggctccgctggctgcggtcgcctgggagctgccgccagggccaggaggggagcggcacctggaagatgcgcccattggctggtggtgagtgcgcccccgcctcggggcgagggtaggggcggggaaggaggaccccaggggaagcgtcgctccccaaccctgcctgggacccgccacgcttagcaaaagcgggagggctggttcttggcgccgaggctggtcttagacctgggatcaggaatgcgggaagcgattccagagggggcgaacagcgggggtttccagcagggttccccgaccctgtttccccgcgctcgccaggcctgttcccgccgccccagccggggtgcatgggattagggaggaacctggaatgtaacactgtaacattttacttggaaagtagattggtggggagcgcaggcacagccccgcacccccaccccc

SEQ ID NO: 336572 - DNA, 1759 bp, Homo sapiens
  chr21:42878725-42880484
  hyper
cgtagcctttgtaattttccatgattcgggaggttctcgcggctgggagctccgtgaggtcaggcattgccttgggcgcgatgcgctcatctttcccgcgggaccactgcacaggttcgcacggagggaagggctgcgcagcctcgaaggcgagccctgggtgctccctgcccacagggctcacctcgggccgccgtgctatcctttccttcccaaacaagccaccaggattcctcgtgattagggctgccaccagggcgttctgaacaggattcagggccaccgcgctgtgctctacggcggagcgggcgaaggccctcctctgccacaagcgctcagggctctcggcgcacaaactttctggacatggggcagtttttcagctggacccgtgctcgagcagagcgcccactgccagactggagcacttgaccactcagggtgccactgtgccgagccgggcaggacaggatgaggtggaccgaagcgcccaggtgccccgccttccccccaacccggcacggagcgcaagcggaggagccagaccggctcctcccgggcgggttcctgccggtgccgggtgtccaggaggccccggccctgatcgccgccagcgggtcgccgcaacggggcctgagtcgcgagcagtccctccccgagactgactggccgttcgcacctcgcccgggggccctccagcagcctggcccagcggtccccgccgcgccggccgtatcgttcccggcatctcagcgagtttccagtttctccctacctcagtagggaaccaagaagcagaaggagttcaggtaacactgcgggactgcagagatttcccccaaacaaagaagccaaccgacagcactcccagtcctcctccccaaagagaaaaggcgcaccggtgctcccaggcgggggccgtggagggcaggcggactaggagccagctttggggaccccgggggactctcttccaccaactggctagggactcgcaggaccacctgccccaacctcgcgatgccaagccaacaggggcggcgagggctctcggccgtgcgcaaggggtcccaggcgcccagcactctcccagcaccccgggaggcgccctgcccggctggccccagcgctcgaccctcgggcgcactcacctgccgcgccgcgctcctcacacccgctttcacctccgggcggggcagggggcatcggcgggtcccaggcgcccaggttcccctccccagcccggaccccgagccgggaccctggtaccggcgccgctcacctgccgcgctccaggcggcgctccccgcccctcgccctccgcctccgcctccgcctcctgcttagctcgcgcctactcggcccggcccgccctggctctcgctttaatctcaggaggcggtgtcccagggtccagggcgacacccccaagcgggtcgcgggtcaccctgggcgggcgggggcgggggcggcgggaggaggcgtttcccaagggaagtccgggacgggttccctgcctggctcaaccccggctgcggagggacccataagggactctggggcgcttcccgggcccggccacagcggccaacctgcccctctccggtccgcggcgcagcgctgcccgagggctcgagtttgggttaaggaaggggattctggggagcgctcctggagtcctgggtgagcccccggagctgctacctcacgagctcctgtaggcggccggccccgtcttggcctccggggaacccactgt

SEQ ID NO: 336573 - DNA, 1057 bp, Homo sapiens
  chr21:43186325-43187382
  hyper
gaggaagcgctgggcggacggatcaacaccccgggccccgtgccggaccccactgccaggcccgagccccggagctccaccgcgcaagcgccgggcgcccgggaagcctcgcccgagccaagccgaagcttccgaccgaaataattacagtcttacaccaatttgtgttccaacgtaaattactaagtaagtcgaacggaggctaactccactcacaaagcccagaggcccacatggcaatttttctaagccctgcgcagaccgcagcgccccggtgggtcccgggcgggccggacgcgcctcccaagggcgcgggtccgaggcgcaaggcgagctggagaccccgaaaaccagggccactcggggagtgtcaggaagcacgactgggcgccttaggacgtccgggcagacgcggcccccgaggagccccagaggagccccagaggagccgcctgacccggccccgacgtgcgcgatcgagcccgggctcgccaaagcccccgcgcccctccggcccggacaggccgagtggacattgtcggagccccgcggcctcgccggcaattggtttcccccccgaagctgctccgggggtgagttcgggagagagaggcaggaccccgggaccagagcaccccgaccccgaccccagcccgggccccagccgccccagcgccccgcccgggccgctcacctgtcgtcgacgtgcaggctgggcgagcacttgatggccagccaggtcttccagtggacatggcgcaccttgtacacctgcccgaagccgcccgagcccaccttctcccagcccgtgaactcgcccgcgtcgaaggtgcgcagcagcgccagggcccatggggtcccgccgtcgccctccatcgcgcacgtctagccagcgccgcggcggctgcccaggtgcccaggtgcgcgctccgccctgttacgtcacttccgtaggtcgtcccgcccccaggccccgcccacttacccgccccccgggcgccctctctgccagcgcccggtgactgcggacggatgaatagacgctgcgggtcactgc

SEQ ID NO: 336574 - DNA, 312 bp, Homo sapiens
  chr21:43188170-43188482
  hyper
cgcaacggtgagtgaaggcttatttttggccacaggagattaataatgaagacaggagggcggagctaaaggagagggtattttaacgacattaactgtgtttttgtgttagtaactcggaaagagagaggctgccccaagtcagcgcattgaaagccgcagacctagtgtctccaggctcccccttccaaacgggcgcggaccttctttcatagcctgtagcggggagccgcgtctccccactgcctccccactcccatccggccgctctttggagggaactcacacatcccaacatgacgatgcttgctc

SEQ ID NO: 336575 - DNA, 603 bp, Homo sapiens
  chr21:43188777-43189380
  hyper
cggcacacagctccgcagctgggggtgactaagagcccacaccacgcaagtaataaaacgctccaatttcatttatttaatcatctgtgtgcttcatttgacaaatatttatggagtgtctgctgctagctcagtgcctggtgcctgggactgaagaccagagccccctggagaccaaaagagccagctcccagctgtgagcagatcgggtccaaagatcacgggctcggcggcaggaacctggtttggtatccggctcctctgcggactttgaagtgctttaccgattcacatgacaactggtaaaacgaaaacaaacacctttccaggaattgtgaattcgagttccagaccctctgggattccgggagcgcagctgctatttatgttaacagtcattggtcccaggctggtgaggttagaatttccaagtataaaagtaatttagtttcgttttaaatacattttagggccaaagaaaagtggaacgatttaaagaaaaagatgaaatgaataatagggcaagttgggaggtggctgtcctgaggtttcatgggacaacattaattaacctcatgaagtgcctgcatggacaacgtgccc

SEQ ID NO: 336576 - DNA, 93 bp, Homo sapiens
  chr21:43430373-43430466
  hyper
cgaggcagacgccgggcccctttccgctcacactcggctcgcgcgcgccgcagccgccgctgccgctgtgattccatccatcttgaatttgac

SEQ ID NO: 336577 - DNA, 1401 bp, Homo sapiens
  chr21:44494624-44496025
  hyper
cgccgccgtgagcggagcagcaccttcctccgcgggtcgcgggagtcacctacgggaagggactctccgtctggcacaggccctgtctggcctggggcgcgcatgctccgccgccgaatcttccagaaagccgtggacccgaggccccggcagacgcaggcggcccagcgccttgcttttggcccctcgcctcgccctggagccctctctcgcaaggtaagggactgccgggaacgcagatcgcaagccgtcggggctctgtagaactcagaggcgctcggcggaaagctcgccaggcgacccagacccgaacccgcgggctccccaagacaacagcgccgggcggccggatgcacgtgcgtcccgggaaggcgggttcagctggcatcgcctggccggttccgttcgctccttaaaccacaagacccccttggggtcacgacgttcccggggcacccctgcactcgcgcgccagcactcccggaggggcctggggaaggccacgcgcacggagagcgggaaactcctctaggtttccaggtgggagatccagaccctactgagacccggaaaccgccggccactccgcctccggaagcgacactttgggacaaagctggggacaagtaagcccagaagatcctcgggaagccgagaatttcgcgctccgctctcccacccacgctccgcctcccgcttgcatcctacagctcagctgcggtctcgcctggggctcagggaagtgaggtcccaggaaaacctccatcccccgaacgcaacctgggcagagccccgcgtccctcccccagcgggcacccacctcgcgtgccgcccgcgcaacgacagcgtttaccgccaccccacacggtccgccaaaaagggcgatttgcaaacagccatttcccatccacaatgcagcgaactcaatgctgggcaccgaaacgtgcatctcccccggattcccaccccgcgtccctgctccacgctccaggactcgccgccagtggggtccactccgccggcgcgggggctggggtgggagcccggggccacgtgcacggccagcccccatcttctgggcggtcaagaccgcaggcgtgggcgccggtggggcgggggtcttgggagaccctgtctcgccgcctttcggtgcagatgatgcaactctgggcggaggcgcggagagggaaaccgggacccagttgagatcctctgtccagagaggggagcgagtctcggtggggccggatctcacctggacggatacatggaaaagaggggcgagcggctgccccgactgcggcgaggcggagacggcgaccccggggtggcggcctcgcggggacccacggcgaggggagcaggcgggcggtgattggcggagaggcgggggcggaggcc

SEQ ID NO: 336578 - DNA, 442 bp, Homo sapiens
  chr21:44847478-44847920
  hyper
cgcggcctgcgttcgtccagactcagagcctcgggacgtgcgggggcccgggggcctcgcgggctcgcgcgtggggctggcggcgcggatgccctggggcgctgcagaccccgagaggccgcttgcccgcggggacgtcagccgcttttgctgttaaaatctgaaatgttcagcaagttagaaacttgaaacctaaggaagcgtgaccggccgctctggaagcccccgccgcgcggccggtcccggccccggccctcagcggcgctggcgtctgcgcgtcccggggctgcccccgcagcatgtggggctgggaccctcttcccgcgcgggccccgggcggacgctgcgggcggtgacggagccaggccggccgcctgggtaggggacgggggcgcgggaccacttgcttgcccgtggccgatgcctcatccgaacggaaaac

SEQ ID NO: 336579 - DNA, 844 bp, Homo sapiens
  chr21:45148316-45149160
  hyper
tgctctcccctggaacgcctggaactagggtggtcaggctggggtggaggagctcccctggaatgttccagagcttcccccactcctgccgttctgagtcaccctgcctccccggaggaggaggaggatcagctgagccgccgcgctcacgtagtgtctggctgtctgcctgtctgcctcgctgtgagcagagtgggatgctgccgataaggcgcgcacgtgggccctgggaggagcccgaggcagccactcccgcacgtgggcaggaggagggctgctcacaccaccggccgagggaggaggactgcgggctgcgcctgggcaggggatgagcttgtgtcgcgggcggcagggggaagggagtcggagagctcctgcggtccagccggatgactgatgaggttgaaagcacttccgctgcggcccccgcaggaagttcccaggaggaagttgcgaccctttctaagccatcccactggcctggactctgctgggattattttgaccccccagggcagagtgtagccatctgactggctttctctctcggcaggagacggggcgcacgcctgcaggtgggggagccccaatacgtcacacggatgagcggggcaaagcccagccccccaccccgcacccgcccgcccgcaatcctgccccctggctgcggcctccgcggctcttcccaccccggctccgctgggtgcttggcgcttgtttacggagttacaccttgcggtagaggctgagcaggagcttgtccttcagacttcccagcggagacagccaggctgtcctgtggcagcagtgggtttgtcagaggccgggggctttggccagggcc

SEQ ID NO: 336580 - DNA, 599 bp, Homo sapiens
  chr21:45875419-45876018
  hyper
cgcgggcgcggtcgcaggggcagcggggtggccgccgcgccaggcgtggagctgggtctggcgggctccgagaggcccgggagcggcgcgcagagcagcctccggccgccgccgcgcaggtaaagcccccgcccagccctgggagcgtggattcccacccaccccatgaccatccccccgccgcgagtgctggggtctcgggggtcccaggttccgggggtcctagggccggagggtctaaaggctggaggtcctgggggtccgagcctctcccggccggctccgcgcgcggccccgccgtccacgcccagcgcgggccgcgcgcacagggcttggcttctctgttttctcggtttccttcttcaggcagttgaaagaaaaggcgcggttctgtgcccggtgcgagccgcggctcctttagggctggcagggaagggcttgctgggttatgacagtttttaggggttgtcggagtcagccaggcgttggctgctggagtagcccctggcgcgcgagcgcccgctggtgcccggccacgtgcccagcttgacccgcgctccaggttcgggagaagctgcagccgtcaccgtcctcctggc

SEQ ID NO: 336581 - DNA, 595 bp, Homo sapiens
  chr21:46126021-46126616
  hyper
cgaggcctagtgcgagcacaggtccccccagacccttcccagtgcccaccaaccggcggcctaggccaggtagaactggcagcgcctcccctgctgcaacaccaggctctggtagaaacttcagaaaacatgcaccggcaaaaccaaggaagggtggctgcgtcccgggttcttccgcgcagctgtgtgtacacgcatgcacacacccacacgcacacacccacgtgcacacccccatgcacacgcacccacttgcacgcccatgcacgcacacacgcgcgtgcacccatgcgcacgcacccatgcacacacacgcgcgcacacacccacgtgcgcacccacatgtacacacccacgtgcacacacccacgcgtacacacccacgcgcacacaccgctgtccccagccgtgcagaacgatcctccctgagtccccggctccgacccacacgcagcactcgctaaacgcttcccacgcagtcgttttgctgggttgcgcttcacccacttctcagagggggcggccgaggcagaggtgtcggggatcgagcagctccgggcctcaggggtcgccccgccaccgttttcctttccca

SEQ ID NO: 336582 - DNA, 85 bp, Homo sapiens
  chr21:46126914-46126999
  hyper
cgtccgcccctgcccggctttcctagcggaattggcgccggcatcagttgggggttgtgggatcagtgaggaatcccgtggggtc

SEQ ID NO: 336583 - DNA, 193 bp, Homo sapiens
  chr21:46294044-46294237
  hyper
gcgtcccggacggcggtcccaagcgctgctcacgctgctcttaagtgagccctggacgaggcgcggtgggccctcatagtccgcgccggcgccctcgctccacaccgcggcgtccggccctgggctcccgccgatgtccgcgtgggacttttaggggatttgtttatttttgtacgttaaccacactagaaac

SEQ ID NO: 336584 - DNA, 1563 bp, Homo sapiens
  chr21:46351328-46352891
  hyper
cggacaggcggaaccgggccatcagccgtccctgcgcacagaggcgcacagattggatccggcctcgcagtcccaggagccaagaggggaggcacgcgtgccggttctcggaaattcattatgggaatgtgcgcgttgtggagatgctcagaccgcgaacagtactgcgggaacccaaacgatcatttttaaccccagacgtccctgaaccaaagccaaagtctacaggtcactggggcagaggccgcccgaaaccagctgtcccctcccggcctaggcgcgccaggtccccgcccagccggggcgatcctttggtcggacagtgaggttgggagcccaccgcacccaagtgccgccgcatccacccggcgcaggcgacccccgacgggcagccgctcaccttctcctggccccgggcttcaggaaaactgcctggaggtggccggggtctccctagcggaggctgggcggcgggcttcgcgcctgcctcagtctcccaatccgtggcccgggggatggagcccgctgcgcgcagaggctgcggcaggtcccagccaggtgccctggaacgtggctcctccttccctgaggcgctcccctgggcacgaggatgggtctcgaagcaggaggaagccgccttccctcacccgctgtccggagctgctcagccggtgcgcggagcctcccccgccgcggacaccacgatccgacccccaccctgaccccgacccagacccccaccgcccgaccccggccgtattccgttgcgtttgctccctgccagctccggggccaccactgagcacgcgctgtgagtaggcgcttcctggagcttttcctgggggtcctcagaaaaacccctgccgtccccattatagagatggggaaactgaggctcaggaaggccagagcttgcccaaaacctgcggtccgcggcgggcagggattccacgctccgagcctggccgcctccctggggcgcgtgaagggagctttccttccccgggaaaggccggggccagagacccgcactcggaccaggcgggggctgcggggccagagtgggctggggagggctgggagggcgtctggggccggctcctccaggctgggggccgccagctccgggaaggcagtcctggcctgcggatggggccgcgcgtggggcccggcggggcggcctcgggaggcgtccaggctgcgggagcgggaggagcggccgtgcgggcgccagcgccgtgggtggaggtcgccgtccctcctgaggggcagccggtgcatttgggacccgggagcagagcccgcgcctccccagcggcctccccgggggtctcaccgggtctcccgagagcggaggccccggctccgcagaaacccggggcggccgcggggaagcagcgccctcaggcgtcggaggagcccccagaaggacctcgcgcctccccgccgggctccgaccgcctgggttcggtgcgggacggcccaggccgccaggacccccaagcgcagctcagtctgcggggcacgacccagaggccagcagcagaggacggggccggggcc

SEQ ID NO: 336585 - DNA, 122 bp, Homo sapiens; identical to SEQ ID NO: 241504
  chr21:46438729-46438851
  hyper

SEQ ID NO: 336586 - DNA, 98 bp, Homo sapiens
  chr21:46686353-46686451
  hyper
cgagcgcttcgcgcagctgagggcaggaggctgagagctcagtgcgaagcctccccacagcaggcttcctgggctgcggagacagcaccgccaaggtc

SEQ ID NO: 336587 - DNA, 678 bp, Homo sapiens
  chr21:46800406-46801084
  hyper
ccgtccgtgcacacacgctcacctcgcacccagcgtccgtccgtgcacacgctcacctcgcacccagcgtccgtccgtgcacacgctcacctcgtacccagcgtccgtctgtgcacacatgctcccctcgcaccgagcgtctgtccgtgcacacgcttacctcacacccagcatccatctgtgcacacacgctcccctcgcacccagcatccgtgcacacgctcacctcgcacccagcatctgtccatgcacacactcccctcgcacctagcgtccgtccatgcacatactcaccttgcacccagcatccatctgtgcacacaccctcacctcgcacccagcatctgtccgtgcacacacgctcacctcacacacactcccctcgcacccagcgtccgtcggtgcacacacgctcacctcccgcacctcccgtggaggcggcatccaggcagggaagcaaggacactctgcgtccattcctctctctaaacaccaaggcccccgcaatccgaggaatatatttgacagaaacaagaaaaaaggatgaaagtggccaagacaagccgatcccttctatctgttttcaggaacatgattttgtggccccaaactccttgaagcccgatgcttccacctccctcccactccactctcccccgacacatccgtccagctccc

SEQ ID NO: 336588 - DNA, 214 bp, Homo sapiens
  chr21:46801338-46801552
  hyper
cgctcaccactgccccctcccaagcccagcgtctaggtctggttcaccctcgcgaggtcgcctggcccatgtctggctacctgagctggccactgctgaggcaaagcccacccggctgctgttctggaagtggctctggaaagcccagctcctgtgggtacaggatcgctgagcgccaggcatgggggccacagccaaggcaggatcgctgagc

SEQ ID NO: 336589 - DNA, 804 bp, Homo sapiens
  chr21:46825149-46825953
  hyper
cgccgaggtgaggccggggctgcgggcaggggttgggggacgccaagatgcggctgcgggggtcgcgggggtcgcggggctcggccgggtcctgcgggggtcgcgggggtcctgcggggtctgacccgtgcctgtcccgcgcaggtgcccctggccatggccgcggcggcggcgcctcctggacgtgctcgcgcccctggtcctgctgctcggggtccgcgcggcctccgcggagccaggtaagacccgggcgggacgggaaggttcgcgccggtgcccgccggcctcgccgccctggctggggtccccgcccggctccctcacccccgccccggccgctctgggttcagccccggccctgcccacgcgcgcaggaggcgccggagccggacggagcggggcggggtggccggagtcccgcccattcattctccccgcggggtccgggccgggaggggtgcgcggtgcgagcggccggagtccccgcgcggggaccgaacctccgcggccggcggggtcgtcggtgccgggagggctcggggcggggccgcggggtctcgggagacgcggcctctgtcgccgtcacggcctcgtccccgcagcgccgggtcccgggactgaccgcgggcggaaggcggcggagcgcggggcgtcgtctccgcgtttccaacctgttgaggctcctcgccgcgggccgggccttgtgcgcctctgtccccgccgccctcaggcctctgtccccgcgcccgccgtggtgtcgggttgcgcggtcccctttgatgccaaccgagcgccgcgcggtcc

SEQ ID NO: 336590 - DNA, 804 bp, Homo sapiens
  chr21:47062148-47062952
  hyper
cggtgacccggcagcccctggcgctcgcgggaggcgggcgggcgcggaccccaggctttagggcgcgattcctgcagctggctgccggcccgaggttctggggtgtctgaggtctcgggcggggcgaggacgtttctccggctcagcccccccacctcctgccctgccgccccccacacccagctccccacggacgccaagaggcgcctcccaccccggcgaggacccgcggggaaacggggcccaggcgcggcgactgcggaggacgcgcctcggccccagcgccctggtcctcggggcgtccggctgcccttgcccgaggccggggcgggcgctcagcgccgcggaagaaacgcccgggcggggacgcacagcgaggcgggctccgcgggaagtaccgggaaaacggcgcggagcggaacagcccggagccagcccagagaaagggcggcctccccctgcagcccccggggcccagcaacgccccgccccaggccacggcacgcgaacgccgggcgggcggaggggacagggcggcgggaccagcgcggggcgggcagcgtctgggcacaggctcacgagccgctcggggcccctgcccgccgggcgctgcggccccagcctccgggccggggccaggcccacagagaacgggaagcgggcgctgcagggggaccttcggggttgcggcacggctgggaattcaacggccattcccgtcccgtcgggcccacccgcccgcccgccaaatccccgcccaccgcggatccgccccgtccaccaaggtctcgctcaccaacggcc

SEQ ID NO: 336591 - DNA, 1138 bp, Homo sapiens
  chr21:47063293-47064431
  hyper
ccactactagtgaccggcccgcccgttcgaggccccgcctcctccccgcccaatgctcggccccgccccgcgcgtcattgggccaggtccccgccccgcccccagccccacccccgcccctttgactggagttggctttttccagagaactttccgggctcggattggccgcgccggttgatgttccgccctttcattggcccgcggcgcccgctttcgcgagcctgcccttgggcgggggcggggccggcggcggcgcgcggcgctagattggttagcggcgcagaggggcgggcccgcgccgcgcgcagcgctcgggctggagcgcctgaagccgcgaccgccgcctcagccgcctcagccgcggtcgccgccgcttcggctgacttaggctccgccgccgcctcctcacccgcctcgccccgaccccgcccgggcctcccggcctctccccgccggcccgcgggctcgccgtccggcgcagggcaggtgagtgagcggtggcgggcggggtcggggtcgggcgcccttgcgggttacggggacccagtccccgacggaggccgagtgacggggcgaccccgggccgcggcaaacttcgcccgagccggggcgggcgggggtcccgggctgggtcgcgccgtccccgaccgccgccggcgcctgcggcggcccggggcagcgaggggactcgcgctccctcaaggtgcggtcgccaggcctggcccgcccgcctccgccccctccccaaattcggaagttgcggcgggaagccgagaacgtctcggatgtgggtcagaaaacgtctggactacttgaggcttcagtttcaaaacggcacaaatttcatctcttgattgagaagagatctggggaacaccccggagcggccgcggcggctggagggcggcggggcggggcgcggggcctcctccccctggacggccgccgggagagcgcggcctcacccctcggtgaccctgcggagagccgcgcgcgggcggtggggcgcgcgcaggtctctcttgttgctcgctgtgttttattttaattttgggggtggttagaacgtgtttcttattgtccccacacgtgttctaattggaagtcttgtttcgtgaaagagtttttttctttt

SEQ ID NO: 336592 - DNA, 606 bp, Homo sapiens
  chr21:47518044-47518650
  hyper
cccgcgcctcgggccgtcgggagcggagcctcctcgggaccaggtgagcgcctcccggaccccgcaccctggaagccgctcggcccgcggggggtgaccccgagtcctgggaaggcggcggcggcggctccgtccctcgggtccccgggaagggggactccagccccagggacggcggggggctcggcgggttcggggctcctcctcgcggggctggggccgcgcctgcccctgtggctccgcgtctctgggtccgaccctcgggcgcgcgacttggggccacctccccgcggcctcctctggggcggagccggcctgggcggggtgggggggtccctgtctgcgcccgagctcggtgctgggacccccgctcccgagacgaccccggcaccgcacgccccgccaggccccgcgtctgcgagcggttcgggtccggctccggcccgcggggaagacgccccggctggctgggacctccgggggcgcagggcctctccccgggccggacggaaggggcggcggggcggggggaggaggggctttcggtgcccgagggcgggactgggcggggaggggacgcgggtggccccgacgccccatcgctgc

SEQ ID NO: 336593 - DNA, 271 bp, Homo sapiens
  chr21:47649462-47649733
  hyper
ccgcgtagcttcgccggggggagtggggtaggcgcggtgaggccgtgggcccccacacctggcggaccacaggggccagaagccctggagccccgccagggaagggctgcgtcgctggccaggaccgagcgcggtagagcctcagctgctcacggggtcgctggagttgggggtggccccaggagaaattaaaggtgaaaagccttagcagcagagggaagaggaagatggaggcagagcgagtgaccgaacttggaagggacagccgggc

SEQ ID NO: 336594 - DNA, 1094 bp, Homo sapiens
  chr21:48087109-48088203
  hyper
cgtgatgcaggtgagcaatgatgcagagggctctgtgcgcctggcgggctctgtttgcctgctgggctctgtgcgcctgctgggctctgtgcgcccgggaaggtgcggccaccctcacgcggaaggcggccagcggatcccggtgcgcgcagctcccagcgctggggttccagcgccccgcctcttcctatagcaaccagcgggacctgccgtcccccggggcaccccgaggggtctgcgcccgcttctttccgaaacgggaaggcgctgggggctcggcagccagagggacgggttcagggagcgtccggtgagcctaagacgcgcctttgccggggttgccgggtgtctgcctctcacttaggtattaggaaccgtggcacaaatctgtaggttttcctctgggggtgggcggaggctccaaaccggacggttttctcctggaggactgtgttcagacagatactggtttccttatccgcaggtgtgcgcggcgctcgcaagtggtcagcataacgccgggcgaattcggaaagcccgtgcgtccgtggacgacccacttggaaggagttgggagaagtccttgttcccacgcgcggacgcttccctccgtgtgtccttcgagccacaaaaagcccagaccctaacccgctcctttctcccgccgcgtccatgcagaactccgccgttcctgggaggggaagcccgcgaggcgtcgggagaggcacgtcctccgtgagcaaagagctcctccgagcgcgcggcggggacgctgggccgacaggggaccgcgggggcagggcggagaggacccgccctcgagtcggcccagccctaacactcaggaccgcctccagccggaggtctgcgcccttctgaggaccctgcctgggggagcttattgcggttcttttgcaaatacccgctgcgcttggacggaggaagcgcccacgcgtcgaccccggaaacgaaggcctccctgatgggaacgcatgcgtccaggagcctttatttactcttaattctgcccgatgcttgtacgtgtgtgaaatgcttcagatgcttttgggagcgaggtgttacataaatcatgg

SEQ ID NO: 336595 - DNA, 1284 bp, Homo sapiens
  chr22:17082231-17083515
  hyper
cggtgaggtcagcggcggcggcgcgtccgcgggcggcgggagcttcgcatgcgcggagcgaggcccgtgagtggcagcggcggcgcgcggggggcgggcgaggggccgagagtgggggagcgggcgggggccgtcgaggaggcgttgtgtgggcgcgacggctgcgagttggggaggtctgtggtgcgggtcgccccgggggatccccggcgcgggcctcgcgcgacggccacggtcgcgcggcgtgtgtggggggtccacgcacacccgcaaaacttcctcctcccctgctccgggagagcgagcgagcgtgtgtgagagcgagtgtgaggagcgagccgcggcccgacgcccagcgccgccgctggagcagctgtcaaaacttcgccgccgcccgggccccgcggcccgccctccccgcgccgggcccctttctcttcctgctgcgggcggcccgggggaggggccgcgggcggagaccccggaggccggcgcccctcacgccgcccgcccgcccgctccccgcccggcccctgcgcgcgtgcgtgtcctgctcgctccatgttgccgcctctcccggtacctgctgctgctcccggggcttcgggaaatgcgagagtctgagccggggaggaggaacccgagcagcggcggcggcggccgcggcggcgggagccccccaagaggaggaccgggatccatgtgtctttcctggtgactaggatgtcgtcggaggagaacaagtgcgtggagcagccgcagccaccaccccccgaggagcctggagccccggccccgagccccccagccgcagacaaaagacctcggggccggcctcgcaaggcgcttcccctttccagagagccagaaagaagtaagttgagtgcgagggagccaggccgggagccagcggcggcgccgggccggagctgccaccgggcgcccgccccgcggcctccacgccttggcgccccccggcgggatgggggcggggcgggcccgcgggcggcggcagctcccggccccggccccacgcccctcggtagccgcccgcgcccggcctcccccgctccgcgccgcccgcccgggctcccgtcggcgcccggcttcgcacactttacttttcagtcgggccttttcagtgggtcttctccgcgactcttcttttggagaaatttctcgtagccgcgtcttggcctagctggatcattgagaaaacaagcccggagcgcgcgcaggtagtccccggacggactccgagcgaaccgccgagccgtgggcgct

SEQ ID NO: 336596 - DNA, 1539 bp, Homo sapiens
  chr22:17849492-17851031
  hyper
tccctccgccggggcgtgggggtctcctcccctccgagcacagtccccggcttcccgatttcctctgccccatccccccgccttccaagcacattgtgctcactcttccaggcagctctttcagcggccgggcagtagcagggttccgagcccgtcttctccggggcggtcacacgtgtccattccctggggttggggatcgctcttcccgcttggctgctgattggtgcctccccctaccccacccttcccgccgctctccagcctccatcctacttcgttccagctcaatcagccccaccgccttcttccctcggagaaaaaagccacttcagagctccttgggcgccgttctcggctggaataaaagcgttaagaaacaggtggaaagcacttcacttctctaggcttcatatttctagggtggacagcccgctcctgctccggctctgccctcggcatcaataataactgaactcccacacgtgcacgtttctgtctctagcccgaccgaaaggaccaccccgcgggccctttaaaaggacgcgaccactcaggccaagtgggggtgggagagctcctggccgtcctcccttgggaaagtgcttcaactccccagtcccaaagtcctggagggcggagggcgcctcgtgagagttctcgggggtgcggcccgcgccccctgggtcctgcggatctgggcccgggggcgcgcgccccgcccctccccctccctggcggtgcagctgtccgggcgggggtggggcgggggccggggcccgcgtgggattaactaggaccggggcgggagtcgaccgcggccggcggggagggctagccccgctctggcgggcgggcgcgtggcaggggctcccggaggccccgagctcccgggaggcgctccggccaacttcgggccggtggggaccgggcctgggcgcggggctctgaaggtgtggaaggaaagtttgggactccgttattcttccacagcgtccttcctcccgtaatatccagcctctttatcgcggggctcgggagcccttggagttgatctcgccaccattatccccccgggcgagcgcggaggacgggctggccattctggccaggccggaggtgttttccagcccggggctttgtgataactgggccgaaacccgagggtcctggagcgcggcgggtggcgggagcttgcggagcgcggcgcactcggcggccaggcatcggccagcccagcggcagccccctttctcctatttttatttttatttttggaaggagctgagaattagtcgattggttggcaggttgaattgccttctcttctatggcaatatgtgtcgtgacttttcaccttttgcctttggacaaaggtgaatggcaactgcgttggtcagtttttgttttctgttctgcggatgggttcgccgacgcagtaatcaaaattagagccactcttttggaagagcaaatcgttgttgttgcctccccagccccacggatcttactttgtgccattttcgggttgattttaac

SEQ ID NO: 336597 - DNA, 783 bp, Homo sapiens
  chr22:19510794-19511577
  hyper
gcagcagccaagacccccagcgtcttggaggggaagcgaaatcctcagtctgacacccgctctgcctatggaaacagcgccgcgcacagaaaaggaaacttcattccgtctgttaagggcagggccgggctagtggcaggagaaggtcagctgcgggcgcaggcaggagcggatccaggagccgcgtcggggcgcagagccggacgttccgaggagcctgcgcgccgcgctacccggcggaagccgcggtccatgcggggctccccaggcttatccaacgcctcgcaggcgtggctggcaggaggggcccggccgtgcccagcgccctcagacgtagttcttcttgtcgtagtcgccggtggccgtgggccgccgcggcgctgagtacttcacggggaagctgaggtcgggacggccggtgcagacccaggcgccgcagcacaagaggcagccgcctaccatgagcagcgcggtggccgcccagccgatgtacagcgctgcgcccagctcgtacttctgcgacacgggcacagacgggtcgtaaaactcgcggacgacaatgttggcgaaccagcagagtggcacgagcgccagcagcccgcaaaacaggtagagcacgcctcccgtgagggccacacgcgccttggccgggcccggggccacgcaggtggtgcactgcgcgcccgccagggtcacgaagagcgcaacgaacgccagcagcacggcgctcacggtgagcgcccgcgccgcctgcacctcggtgctcagagccagcaccgagtc

SEQ ID NO: 336598 - DNA, 650 bp, Homo sapiens
  chr22:19706043-19706693
  hyper
gcccagtcagggggatggctcggtcggcctcgggggtcgacgatcccccgggtaggcgacgtgccctgtccaggcctcacttcccgcgtccgcaaaacggggtggacaacgcagcctaaggcagagccgcgccaaggtccctcgctgtcgccgggctctggcggcctgaccgggcctggggtccgagcgtgcccccgggcctgggggggtcgccgcgatggactcgctggcagcgccccaggaccgcctggtggagcagctgctgtcgccgcggacccaggcccagaggcggctcaaggtgcgtgtgtggagagggcggaacgtgggtctgtgaccccgcgggctccgggactcggcatggggtccccgtccccgcgcgccacggcccgccagcgcctaggctcagcccttccctccgcagcggcctcgcaggtccgcggccccacggtggggcgacgtgccctgtccaggcctcacctcacgcgactccaaaacgcggcggagaatgcggccgtgggacccctccaggggccccaagggtctgcgggggctgggcgcctgggcgcgcgggcgggggaggctcggcgccgcggtctataaataggcgctgctccgccaccgccgctgccgccgcccccgcggctggatcc

SEQ ID NO: 336599 - DNA, 898 bp, Homo sapiens; identical to SEQ ID NO: 241532
  chr22:19711135-19712033
  hyper

SEQ ID NO: 336600 - DNA, 776 bp, Homo sapiens
  chr22:20791329-20792105
  hyper
cggctcctcgacgctcgcctgggtcaccaccctcccacccgcgcccgctctaagacgcgaatctgtctttccaagtctggcttgctccaggacctccccggctagcaccgctcctcctcccctgaccttcctcctcactcccactcccggctccagtcggactagtgcggggctttagcacatgcagttcctttggcttgaatgcccttccccagcttttccccgtggacttcacaactcggtcaagggtccctttttccaggtctttcctgatatcccggacaacgcgtgtcatcccctgggtgcccacggcactccatcctcccctcaggtgacttctcgtccagggttccctgggatgcactgtcgtggcccatggccgaggctgggcctggaacggagccgcgctggctagggagccgaaggggcccacacttggcgtaggaaggttccggtagccccctcccaatgcccggcgccgccacaccactgcccagagcgtccctctcgccccctcccccagccaggccggctcctacccgggagcacggcacacgttgcggccgcgagggttcagttcctgaggcgccacggtgtccggcagcatccagagcagcagcagcagcagcagcgacggcagcagcggtgacggcggccccccggctccccggcgccgcgccggcccggccccccggggccctgcgccctccatgaggcgcggggcaggcgcggggcgggcacgggcgcgggtgcggccgcagcgagagcggccggaa

SEQ ID NO: 336601 - DNA, 713 bp, Homo sapiens; identical to SEQ ID NO: 241545
  chr22:21319195-21319908
  hyper

SEQ ID NO: 336602 - DNA, 557 bp, Homo sapiens
  chr22:21368234-21368791
  hyper
cgccccgcagagggctacgtgccctgctggacagaggtctcctgcctcctcggcggcgccagcccacctcccacaacccctgcgggagaagcccccaaggggaggagacgggcctggcccctgccccgagcaccttccgtctctaggtcggagtctgaatcggccttgggaccctgcttggcttcggggacccctgcaagacgtccacaggccgccgtcgcctcttcctcctgctttttatcctccccagacctctggcaggaaccgctcatcgttacgcccctttcgcagcctcagaccctgaggcggagaccgcttggcgcctcacttagagcgcgacccggggatgtgggcggagtctgcggctgcgctgaccaatcgagtgtggcgtccatcgactggcgtctgccacggcaattagcgacgcgctcccccgcggcggtcgccccggcaacccagtgctgtaggttgccgtagaaaccgtggctctcctgcgctgaggctcctcgcctgagaggataaactgcacgcgccacgggctatgcactgggctgggc

SEQ ID NO: 336603 - DNA, 489 bp, Homo sapiens
  chr22:21386510-21386999
  hyper
cgagccggacccggaacaggagccgcggctctgcgtcggggcgggtgtggcccaggcagccacctggccacagacagacagtggcggctacatacacccccgcccctgcacccgtggccaggctggggtatccgcgcgccaggcggaatgcaggggcgccctgggcccgcacacctccccatgtccgacacgccgctgctgctagagcctgctccgccgcgcccccgtccccggacacctgcgccttcgcctgttcttgggcctgagcccgtcccagtccccgtccccgcaggatctgctgcaacccacctgctgctgccgcagccgctgcctccgctctgagcactgagcccgcccagttcgccggcgccgagcgcagggcccgcccccatcccaggccccccgcgcggccccacccgctgccacacacccagatatttcaccctgcccactctgcccgacctcgcaaggtcgttaccggagctcacc

SEQ ID NO: 336604 - DNA, 467 bp, Homo sapiens
  chr22:21399942-21400409
  hyper
cgatgctggaaccgcctaggggaggcagggggataaacgcagcaaggcgcccaatccggtgcatggtctgtggcgcatgcagtgtatcagcccgggcgaggagcctcagcacaagccggccacagtttctacggcaaccgacaacaccgggttgccggggcgaccgccgcgggagagcgcgtcgctattggctgtggggggtgcctgttgctggacggcacattcggttggtcagcgcagccgcagactccgcccacaatcccgggccgcgctctgggcgcggggtcaagctgtctccgactcagtgtctgagactgcgagagggtcgtaaccatgaggggttcctgtgagaggtctggggaggatgaagagcagaaagaagaggctatggtggcctgtgggcgtctttcaggggtccccgaggccgagcagggtcccgaggccaattgggactccgacctggagac

SEQ ID NO: 336605 - DNA, 1145 bp, Homo sapiens
  chr22:22005779-22006924
  hyper
cgaagggtaggcgcttaatgaatgcttctccgcaaagtggatcacaatcacgaagaaaccaaagcttacacttccgttccccatatctcccacagatccaaaagaccacggggcccaggacccggtctccatagcccagccatacccgggggttttcaggaaagcctcactcgcgtcctgccgggcgatccggggtggttgagttgggaggggggctaccccagtttgtaagcccaccacgtccaaatatcccatccaggaggcgcagagagcaacctcagcatgcataacaaagcagcccgcggccgcgttcacagcaggcttggcgggggttcgggaatttccacagggtctcggcctcccccactgtgggctcgcgcctggcgcccctcaccgggcttccaagcgctcttgtcggtgtcgctagaaaactcgcagagattggagctgagaaaaggcgggcaaagttccttttgataagttatgaatggggaaaaagtgtttgtagaactcattgttaaaaccacggagcccgagactcggccggcgccgggccaatcggaacccggaggctattttgaaatctctcccgtctcagccaacaggcatgcaggaggcgaatccccgcgccagcgccggccaatgagcgcagcgctatgctaaggagtcgggggcccggcccctccgactgtcagcgggttaaagatggagccggcaggcgaggggccgccacgaggtgcagggtcgtctggacggggacccgggggcagacgatggccgggatcctcttccgtctaaccctccgcgtcctgaccgggccctgggcggaagggatgtctgcgtgagtcagctgtgtctgaggaggggatcctgggctgggctgggcggccctactcggcgggtcaggcggaggggcgcggccgggatcccgggggccctctttggagcagggaactctagaagggcggggagcccccatcctctgctccactctgggcctccaggcagaagaatatgttagaaaagaatccagagtgtatctagtgcagggcaaggggccagggatggagtcgtcagctagaaggggcgcgtcgtcccggggtggggccgccctttttctcctggagccgcgggccgagtcaggg

SEQ ID NO: 336606 - DNA, 321 bp, Homo sapiens; identical to SEQ ID NO: 206066
  chr22:22012021-22012342
  hyper

SEQ ID NO: 336607 - DNA, 354 bp, Homo sapiens
  chr22:22292773-22293127
  hyper
cgctcccagggaatgcgggcagggagccagggcggagggcagaggacgagagcgaggaggagagcgcgggcacccactgatgctggcggcctcgggtattcgctttctctctcttctcccaccttgttccttttccccggatgcacgcatgcactagtaatgccgaatttagaacaacagggaaaggaaaggaaatggcaaaggaagggaaaggaaatggccgacaggaaatggcaaggaagggaaaatccactgcaactctgctgcctgctggcctgtccagggacaactattcagctgggtgggacgttgctacccccttgtggcacccctgctgcagcctgcgattcttac

SEQ ID NO: 336608 - DNA, 821 bp, Homo sapiens
  chr22:22862472-22863293
  hyper
cgacagcgacgcagtaaatgagacaagacgctgcggtaggggagagagacccatacattcaaatgccttaaggggtctgggcctacaggtctccagaactggggagggcctggggttacaaagcagttttcagatttttaaatacattgagcgccaaaagagaccccgcgggggcgatgggggaggggagcgcactgggagccaggaaaggccccttctccaggaggcccgggcccagcccgggggtgggggcgtctgcgtgagggagtggaggctgatgtaaaagtggcgcccgctgagattagggaagggggtgtgcgtgaggggatcgtgggacctggttctgccctgcactcccccacagaaagcggctgtattgcaaaggccgctccggcagcgcacggccaagcgcggtgtcgcgacccgcagggctgcggctcgccatgaaatccctcaagtctcccctcagggaacgctgaagccgcgccacgcccccgtccttaccagtccggatcagctgctgttcgcgagctgccggccacgcaccagccccggaggcgctcccggggcacagccggcggcgactacgcctcctcaggcccccggcgccgccgacgcgcacgcctccacacgcgcgcgtccagtggagacctgcgattggctgccaggtgccggcgcgagatcggcgcggctccgagctaggagcatgcgcgcgctctgacgcccctggtggcgacggctggacgcggggttaaattgagaaggaggagggcagcagcaatacccctgaggccttgaaaggatcttgggttccggatcac

SEQ ID NO: 336609 - DNA, 1258 bp, Homo sapiens
  chr22:24180529-24181787
  hyper
gaaggatacggtcataaggacgcccccgaagagaaacatgaagacgaagtcggccgtgcggccgcggaaggagccctcttccagcatgcggcagtagcggaacctacggcgtcggtataggaagtgccaccaggcggggcctcagtttccccgtcccggcctctctcccagcccggccggcctgccctccacccagcccgtgtccgcagggcgcaggatacacgaagagcatgttgaagaagaagctgaatcccaggggcccgaagaagaggaagttggtgacgagcctccagacctacgggggacgggcggtcaggtgcggggtgggtgggtcgggcccacaggtgcgcggcgcggggcggcctcacctggaacttccggaacacaaggtgcgggttgaagtagagttgaaaggggctgaggagctccagctgctgtggaaccaggggccagtcaagagctgcccgggagccacgccgtaaccatggcgaccctcacccctcccgccagaggctgtaaccaaggcgacgtccggtccgcccggccgcttaccaccgcggcggtggtgaggacacaggctgcggtgtaagcccgcgtcaccgccggcacctgcaggaactcggccgctagtccctgccacgccattgaaccttctcaagcacgcgtggcccagccagcaacgcgctctttaacccgcctcccagccccgccttcggccaatccgcatccgaggcgctgcgcgccccaggctgaaaagagagcccctgagcccgacagccaatggaaggaagaagagggaaattaggggcggaaagggagagtgggcgggtagaggctggtggccaatgggcaggcgccaaggttgagcacgtggcggttgttgtggctgcggtggtggcgcgggagaacgtgtggccaatgaggaactggtcatttcgcggctttctaggagaggaccagtagcgtggacccacgacaccacgggggcggggctaagatcgtatgggttacaggagcgaagacccgagcaggcgaggcaaaactggaaagggcggggcgcgtgggcggggcgcggagtgtggcggctcagaccgtgctggctcactaactgacgacctagccacaacgttgtcctcgctgccagcccaagacaggcccacctaacccacagcagggaggcattcgggaatgtgtccaaacctccccaaacgtccagggccccactcaaatgtgccggccgctgtcggggttcttcccc

SEQ ID NO: 336610 - DNA, 1396 bp, Homo sapiens
  chr22:24551715-24553111
  hyper
gccaatgccatcccggcctgccgcactcctggccacccctacaccatgctctctggggccccacagcttcctgcagtgagagctgcacccactttgcccggcagcggtccacagcccgccaccagcggccagtccagggaaccggagaggattggccggcaaaagtcagttgcgctcctgggcccgcttccagtagagtgccggcgccccgtccggccgcgcctgccccgccccggcccgccgcgagcgagagagcgaacgagcctccgcggccatggcccggcgctcgccctagctccactgcacagatgccacggcggagccggcgggtaggaacttggcgggggcgggggccgggactggggccgggactggggccggggctggggctgcgcaaccgcttcgcctccgctgcccgtctgggtctccactttgctggcgcttttgctcaatcgtcccctggtgggctctggcggccgccccccgcctcggcgcaccaggcgcagcaggaagcccgtgggctgtggtttccccggcgcccccgcggaggaaatcggccggcggcggggtgctgcgcccccatgcccagggcgggctggcacccggttcagcgtcaggtgggcggccaagccggcttgggcggcggcgcgcgggggcggcaggcgctggtgaagcccgcacacgcgccagcgcatccagccctaccaagccccgggctgggagctggctcgtgggggcgtgcgctgcgcgaaagcgaaagccgcccgccagagcaactttgcggcggaaggcgccgacgaggagctgtgccgtgccgctcttggggatggtgagctggccgcccggccgggtgggcagcgcgtccgggcgcggtgcttcgctagctataaataggtgctgtgcggggacaggaagatggttccagccctttacaagcaccggcccgttatgtgcgctgggctaggaccttgccccgcagcggagtgggaggagtgaggttaggggtaacggttgcatgggatggggggtgggcacatagagcctacagcagagttggcggcggggctctcccatgcacttggttgtttgtcgtttctgcttttcccgggagggggaagggaggaacagcccggcagttctggggaccttagcgctccacgtcttatttggcaggagaggctggaaacgagcgggcgccagctgcaggcaaattgcaggctttcccagcccttgtctgcagagagaatcattacctgtggatggcgcggggaatcccttgccctcagtagccccgcctggagagacaggaccgcgttgtggggggtggggtgtaggagtgggcggaggccagggcgcccctggtggcctgtgtacaaccctgcggccagagaggccc

SEQ ID NO: 336611 - DNA, 646 bp, Homo sapiens; identical to SEQ ID NO: 226342
  chr22:24819901-24820547
  hyper

SEQ ID NO: 336612 - DNA, 1541 bp, Homo sapiens
  chr22:25348202-25349743
  hyper
cgcgaggaggcgccagcaccgcgcacagaccttgcccgcccccgggccggcaccagcagcccaggcaagtcagtgggcccacatttatggagcgcctcctgaaatcctgggttgcattaggctctcggggtcgccggctgggcagcgggtcggtgccggtggcgggggatcctggctggtgactggggaacatccagggaacgcgggagggtacccggagcaaagttcccaattggacagagcggggtcgggcctcgaggggcgggagcgcttccggcaggggtgtccaagcgagtcgtgacctctgacccgccggagaggtcccaggcccaggcgccactgcggactcgggtcctgcctgctctgctcccctccgcgcaggcgcggccggcggcagttcccatggtgacgggggcgcgtccccgctcgaggccccgcccccagcaggctaggctgcgcggggctgcgggctcccagggcaggtgccgcgggctgcgggcaggtggcggcgcggcgcgggctggcggtggctccacggtaggttgcgcagcggctgcgggcagtgggggccggctggccgcctcctgtccccggccgacgaggtagctgggggtgacggcggctggcgagggccgccaagtttctgcccggccgaggccccgggagaaaagttggcaaagttggccggggaagaggcggggagccggaggatttccccagactccgggtctgcagggagggaggatcccggtttgggagccggggaatccgtctcccgagacttgagagtggatcccgcgggaagatcccgcacagggcaaccaatggatcacgtgccacctggttggcgacttgggagtcgatccctggaggggatcgggcgctggaggcctggggtcccactggatccccagtcaggggtgacggcgaagggtgattcgagactgggagcgagaggatcaatctcctcccatgccagcctgagccttgggaatggattcagagagatcccgtggctaggagctgagggatcgctggagatctgggttactcagcctggagctgctagggtctggacatttgtgcgggttggaggccccggaggtggaagtgggaagcaagggcggcgagcgagacggaaccctggtcgaggggagcccggaggacagcgcggtggttcggggggcgtgagaggggcggcgcgcggggcccctcggacgcggaggctccggacacgtcctctcggcctggcctgcgccccccctccgctcgtcttcccagggcggaggcgccctgatgggattaagcctcagtccccctgttaccaggcaggcccgcgtggtccccgccccgatggcggcgcggcccacccgggctcacgggtggggccctcgggatgggaagcggctcgttgacccccacccgagcctgaccttttcacaccctgctggcacaaactcgcctgggagtggggacgccgcgccttaaaaccctgctgtttgtccagtcccggagcaggcgtgtgacctccaccgcgcgac

SEQ ID NO: 336613 - DNA, 1251 bp, Homo sapiens
  chr22:25678186-25679437
  hyper
cgaggttgggggcccggcccgctgggcgctgttcacaggtagcttggaccagagcaggggcttcatcattacctgcggggacaggtgggacacatgcatttccggggtcatcccagacctcctggaggatgctgattgatgctgtcccgtttgagaactactgtgtccaggtagcagaggcctccccgatgccccttgagtagtgggcacggggcccagggcttctctggatgagctgggcgggcatgagaacgcatggagctgggggcaggaggtcggagcagcgaacgaggaggagaaggagtaggcggaggccgaaggagaggtgggggaggaagaagaggaggaggaggagtcccttgtggccaccccgaagggagggagggctaccgtagagacttggtcgagaggcgcgggacaagcctggccgctgggactgtgcgctgaggtgcaccgaccgtcgggccgcgagctccccgcagaccctcgcggaatgagctggggggcggcgcgcgaggcggcggagcggaaggcgcactgcgaccccggcgggctacagcctgcggcgcttgcagggcgctggtggggcgcgccgagcaggggctgccctggggctgccccagtcccaccaggtcggggctcagctggcggcggcggcggcggtggcggcagcgcgtcccatccgggtccgagtaaccgccgccgccgccaaaactcgccaacgtggcggacccggaggctgtgctggcagatgccagttacctgatggccatggagaagagcaaggcgactccggccgcccgcgccagcaagaggaccgtcctgcccgatcccaggtaccagctgccccggcccgcgctggtccccacgccgccgtccccaagcggccgtcagcgacctcctgcgtccgggagggtcgggcattgagtcgtcgctgtcctgggtgcgggtgacaccgcggaactggcgatgcggggccggcctccccgttccagtctctgaaatggggcatcggatggccggtgggggggactccgggagagagcgctccaaagtgcccagcgcggcgccctgcgcgcagcgagcgccccagggaggggctggttatgacttggctggaccagctccatccctgtcgccccctccccccggccctgtcctgtcctgtcccatccccgtggttcttcctgttgcattggtgtggtccctgtgggctcgttgcctgtcactcctttgcgctccttcttggtc

SEQ ID NO: 336614 - DNA, 661 bp, Homo sapiens
  chr22:25816892-25817553
  hyper
ggagagacttggttgggaggcgccaaccgagctggccgctgggactctgcacccaggtgcgccaacccttgggcgcacgctccccgcagaccctcgctgaaggagcggtgggcggcgcgccgcgaccctggcgggctacagattacaccgcttgcagggcgctgctggggcgcgcagagcggggctgccccagggtggctcccccaggttggggcgcggcgggcggcggccgcgggcgcgcgtcccatccgggtcccgagtaaccgccaccgccgctgccaaagctcgccaacatggtggacctggaggccgtggtggccgatgtcagttacctgatggccatggagaagagcaaggcgaccccggccgaccacgcctgcaagaggaccgtcctgcccgaacccacgtaccacctgccccggcccgcgccggtccccgacgccgccgccccctgcggccgccagcgaccccctgcgtccgggagaatcgggagctgagccgtcgctgtcccggagcgggtgacacagcggagcgggcgatgcggggccggcctcctggctccagtctctgaaatggggcatcggagggcgggtggggggcactccgggagagagcgctccaaagtgcctggcgccgcgccctgcgcgcagctagcacccca

SEQ ID NO: 336615 - DNA, 1521 bp, Homo sapiens
  chr22:25959837-25961358
  hyper
cgagaccgaagatcaggaagctggaaattccccccagcttcggtgtttgggctgtatctcgcttttccacttccctaaatcaccctcgtggtgcgagtgtgctcgcagcagatgctccctaattgtctcttgtattgaccgtaaaaccctaacgacaggaatactctctctccttctatttctcaacaccatttcaacacccaaactaaaacctctcacctgagtgtaagggagtggtgaccttcttaagcggagagctcttccatcagagggctccctaagggcatctctgttcctagccggggagccgtcaccccactttgttctgcttagcctaagacacgcaactttttccagcttttactcttcgctgaattctcacggtggggttggggggatgttcaggctcaggagcgaggttgggggcccggcccgctgggcgctgttcaccggtagcccggaccagagcaggagtttcatcattacctgctgggataggtgggacacatgtatttccggggccaccccagacctcccggaggatgctgattgacactgtccagtttgagaactactgtgtccagggagcagaggcctccccataaccccttgggttgtggacgtctggcccagggcttctctgggtgagcggggcgggcatcagagcgcgtggaacctggggcgggaggtcggggcagtgaaggaggaggagaaggaggaggcggagaccgagggggagggaggggaggaggaagaggaggaggagtccctcgtggccaccccgaggggagggcgaccgtagagacttggtcgggaggcgccggcccagcgaggccgctgggactgtgcactgaggggcgctgaccgttggacgcgcgctccccgcagaccctcgctgaaggagcagggggcggcgcgcgtgcgcggggcgccgggcggcgcgcgagggggcggagcggggaggcgtgctgcgaccccggccggctacagcctgcggcgcgcgcagagcgctagtggggcgcgcggcgcgcgcgcggggcgggggcgcgcggaggggggggctgccccggggcggcccccccaggtcggggcgcggcgggcggcggcggcgggcgcgcgtcccgtccaggtccggagtaaccgccgccgccgccgccaaagctcgccaacatggcggacctggaggctgtgctggccgatgtcagttacctgatggccatggagaagagcaaggcgaccccggccgcccgcgccagcaagaggatcgtcctgccggagcccaggtaccagctgccccggccggcgccggccccaagccgccgccccctgcggccgccagctaccccctgcttcctggagggtcgggcgctgagcctccgctgccccggggcgggtgacacagcggagcgggcgatgcggggccggcctcgtcgttccagtctctgaaatggggcatcggagggccggtggggggcaccccgggagagagcgctccaaagtgcccggcgcggcgccctgcgc

SEQ ID NO: 336616 - DNA, 1160 bp, Homo sapiens
  chr22:26565123-26566283
  hyper
ctggaaaatggtccgggtgctctccagcctggcctggccaggcagagctgctgggagcgtcagcagggagagaaaacgctcggctcccaggacgcaaggggaattggcgttaaactttgcagggccgacgggccggcggccagaggaggcggctggcacccccggcgccgccgcggcccctccagctcactgcccgctcgcccgccccctccctccctgcactcgctcggcacagactcggccccagccccctccctcctcccgctcgctccacgctcgttcgctcgctcgccggctcctcctcactcgcccgcccgcgcccggcgcagctcggccagagcgaccgcggggctgagcgcgcgtccgcccagggggctccggaagctgccccggcccgcggcctcctccctcgctcccgcttcccctttctcgctcaccgccgccctccttccccagctccctcgccgtccgcccgccccacagccagcggctccgcgccccctgcagccacgatgcccgcggcccggccgcccgccgcgggactccgcgggatctcgctgttcctcgctctgctcctggggagcccggcggcagcgctggagcgaggtaagcgccccgaggggcggggcgggcagggggcaaagttgccgggagagcggggcagccaggggtcggggctgaccagggcgactcaggcaccacccgccgggatgggaagcggtggtggctgtccaaaatcggggctaggaaccgcacgtccccttggcccgggctgatgggagtgtggaggcggggatgtgttgaaggactcgggcgcttccctgcttcggctgcgggctccctttcggtcttccccggctgcggggctgattctcctttgcagccaaagaggttctccttggagtggggtcgcctccaaaccccaaattcccggcgcttctctgcaaccgcacccggggctaggtgccagataattatcttcctctccgggagaggacaggaaggggggtgagaagctgacccaccctgcaactgaggactagactcaaacagtgcatttgccgctccccccgacaccacagaaacccttgactcctttggttcaggctaccccgagggtctgtgttcctggatcgatctcagccaagcgtcaggatacc

SEQ ID NO: 336617 - DNA, 1160 bp, Homo sapiens
  chr22:27053098-27054258
  hyper
cgcccctggtccgcggtcgcgcgcagcccccgcgcctctccagccctgagctctctgcggcctaatgtggacgggcaagcgttgccatgacagcgccgcgggtggggatgcgggaggctgagcgcaccggccagctagcccctttgtgcggcgggggctgcggagtgctccctccaagaccggttgcaccccgctttcctggccaggactctgggcgcgggtaaggaggggttgggtgtgaggttgtaggggcgcaaggaggcgggaggagggtggaggtgagggccgggggtggggcgcctccgcccgccagccgctcccgcattaaaatttcatgggcgctgcagcagctacaaagacgacgccggctgcgctcgcgggaccagagggagggaggctgcggacgagtgcggggaggagtttgagatgggaggcgcttgcaggggctcccccagttctgcgctgtgagccggggcacaaagagccctctgcactagcgccgcaggaccgcggacccgaggtaagacgtcgccccatcctagaagccttccttcccaagtgtccttgtcccctaacggggaacagcctaattccccaaggctggggtcgagggtaggtcccagagtcccagggctgggttcagggatgcaacgccgcctgaagtgtcccgcattggatggatgaagaggctttacagcctgtaattctcaaacacagccaagactctggctgggatggggggtgaggtcaggcaaggggaggatgctttaggagtccagtgcgaatggggatcttgcaatcatgattatgagggggaacaaagaccctttccttccgacgacacaagacacaatttgggaggtggacccgcggaccttctcggtccaccaggttagcaattaactggccaagccacgggcagagccagagggtctcggaactggaggtgggggtggggcggtggggcagggtccttgagctccccttccctcatactcagcccgcccccgacccaaccccccgagcctgccattccttcacttcccagatgtccggcgtcaaatttggctccaaaaggatggagagggctggtaggtaacccaccctcgttgaaaacaacagtgacatcagtttatggagaggttactctacgcagggac

SEQ ID NO: 336618 - DNA, 617 bp, Homo sapiens
  chr22:27068622-27069239
  hyper
cgaggggggcgtatcccacgaggaaggcaggagggggcgtgcccctcaccggaaattagcagaggggcgtgtcccacaccggaagtcagaaagcggagcctttcttacaccggaagtcaatgaagcgggtctttcctacgctaaaaaccactgagtggagtatttagtacacaggaagtcggccagagaaacatttctcatatttgaaggccggaaagagggacatttctgacaccggaagtcagtgagaggactctttcccacacaggaagtcagctagagagccgtctcccctctctggagccgagagaggccggtttcccccaccgtaagtagacgtggggccgtgaccggaagtccttgggaaagatccgtcccattcccggaagctagagggcgttagttgtcgggttgaaaaggggtgtggggaggggaagcagctttaccccgggctcggagtttgcaggagagagaagtggggagcaagaagtgaacctcaggggctcacagggttcccgcagatgctcaggccggccaggaatgcatctctggctctctgttcccacggacgtcactgcctcagccagcctcccccagagcccgccagccgctaagcc

SEQ ID NO: 336619 - DNA, 716 bp, Homo sapiens
  chr22:27299034-27299750
  hyper
cggcccttgctcctttcctgagcggctattttgagagcgatggaggggagagggtattagattcctgaccttgaggtcggggaggggagggtgatgctagtggtggacgaaagacttgaagataatgagaaattgcatcaactttacccaggctgtttctgggtctagaagcaagcaaaaataaggcgggagcgggtggggggaagaaaaagaggcatttattttggagccgtatcggaagcacaagtgtcatgggctgaaaggccgccttctcctgcgggctaagggtgtgggcgacagctcgcacattcaaataagggagcgattacacggcgcttgcttctgaagacggatttcctggtagggggagcgggcgggggggctgggccggtgtaaaggggacggcaacattaggctttggcaagttaattagggttcaggagtccagcgagcgagcagggggagaggctggatttgcataaatccatttacataatgttcttcacaaattgtgcagccagaaggcagggagggggtggggagggaaagggctggggagggggaggtggttagacgcccgaggcagccgccgccaaagggggaagggcgaggcccgagatgggacccgctcctccttcgccgcttcacctctcccctgctcttgtctgcaccagggccacccctgcctatctcggccgtcacctccattctgggcc

SEQ ID NO: 336620 - DNA, 679 bp, Homo sapiens
  chr22:28197306-28197985
  hyper
cggcagcgggtgcgctgcgttcggcgcgcagcttcgcggccacgtccgccgcctgccgcttctgttctccgccgttgggtgtctgagttcgccggagtctccgcgcaccgttgcaggcgcgggagggcagcgagacgaggggttgggtcgctccaaggctccggttccctgcctccgcgctgaggtgcttcgcgagtccctctcggacctgagggaggggggcgtacgcgggtcggggggccacgccgggcgagcaggctaaggcgttcccgctgcgctctcagagcccggaatggggggaggggggcgcgggggcagctctggggggtctgcgcacccctctcccgactagcgggggggctctgcgtggggcgttccgagggtctcggctcccctctctgtgtctgcctctcgcccagcgccgggagaagcagcaacaagttttgcatttcagcaatcaatttcagccattacatttgcaccaatcagcgccgcccaagttccgggctcggggcggggctcgctcttaaggtggtccggggtcctggctgccgaagcccccgccacgaacccgcactaccccagctctggggtcccctgcgcccgcctctcctcggggtccggcgtcagtgcgctgggggcgcgccccggcctccgggcgcatcgagctggagagggt

SEQ ID NO: 336621 - DNA, 86 bp, Homo sapiens
  chr22:28198204-28198290
  hyper
ggggtgaacactccgttctccgctagcggcgcccaagttagccggccctgggattttcttggagggtaaagcagacggggaacctc

SEQ ID NO: 336622 - DNA, 253 bp, Homo sapiens
  chr22:28200773-28201026
  hyper
cgtgtatgcgccggcgtgtgcgcctccacagtgtgggcacccctgcgtgtgcctgtgtgtgctttcgcccgcaaggtcccgcagtgtttctttggaacagacacattgccccctagcgctcagatgaattcaaagtccccgcaggcgcagagccgggagcagtaggagcctcagggccctccacccgccagggctttctccatcctcctccctccccaggtccccctccgggggcactgagtgtgctggcaac

SEQ ID NO: 336623 - DNA, 1336 bp, Homo sapiens
  chr22:28838056-28839392
  hyper
cgttatttctgggaccaatagcaatttattttgatagaaccgctggatttttttttttcttgagttctcaacaaaggagccatattaggaaataatctcgcaaaaagcaaagtgccccctcccccttttccccatgatcgattcacacacgctggtgcacgctgacacgcacagacacacgcccgtgcacaatggccagcgcaggcaatcgcacgggcccacgaggcctcaggagccccgcaggctgaaggcccggctatggccagccccaggcgctcaggcaggaggcctctcggcccgccgccccggaaccagctgctgggctggtgtgctggggctgctcgccccccagcggggccctggggaaacggctgccagcggctcagagccttttaaccccttggggaaataggtgttataacaccacctgcggggcctgtgtcaggggtgcagcctcaaatccactcccgccccacgccccgccatggggcaacacctagtaggtcttggctggctcctgcaaagctaatcgtgtcgctgtctgcacaggacttctaaagcaaacgggtgcttccgagctgtcacccctggggctccaggcatatcatgaaggaaaaacttaaagggcagtggatgcagaccagatttggtaactcgtccctaagggactgatgcaagtcccaaaggaaccagggctgtttggaccagctggcccagcaaactacggaaggggtggagagacctgaaggtaaccgccccgtgttacccttccccgggttgggctttggggccccattcccctctccaggacacttaccttcttccggggctgccatttcatcatatttgtaaagccgatacgtggaacatcaagatgttggctgggggctgggggcagatgcagggcagcgacgactgcaagtcatgctgcctccctcccaccccctaattctttcccatattcactgcgaagggaaaagccccaggagagtccagtcttttcgccttcagttcaatgaaaagtatccccaaaccacgaacacacttcccaccaggctaggaagtcccagcagccaccggcgtactcctgccagagcggggcattttcccggccggcgcctgcaaaaggagcctgtagcagggggtctccaagctggctgcagagaccctccctcagagaagagactgagaacgcgggctgctacagaatcccagccgggcttctaccatccaaaccccttttggcgaattctcctcttctcaaaaaagattagacaagcaatcaaaccctcacgcgcagcctggagcaattcccacaattctgggtgtatttctc

SEQ ID NO: 336624 - DNA, 869 bp, Homo sapiens
  chr22:29075313-29076182
  hyper
cgctgggcgcattaggcgctgactgtataccgacaccccccaccccggtgtgcgcaggccaacacccatacacaccctcacacacccacacacatccacacacactctcgcggaaactgagccaggcaggcggcggaccaggtcccgccgcctcacggctcgcggctgggatcgaacccggactgcgagacgccttccgcctcgcaggcgctcctctgccgctgaggcccggcccggctcccaccgccggagtttcacaaagaaagtctcccggcccgagcccctcacgcactcaccggcgccgacgccggcggcgactctggctcccgccgccttcggctccttgcgggggtcggcccttgggtcggctcgggcgccggcggcggcgactgctccatccccacggggcccgggccgcgtccgcctcgagctaacggtcccgccagctaggcgcgcgcgccggttccgcgcgccatgttcccgccgtgctgcgcgccgccgcggcgcccctcactgcccccaaaccgcgcgcgcgcccccgcgggcccacacatgcaccgcgcacgcgcgcgttcgccgcgccccctccccgcgcgccccgcctcgcgccctctggagctggccgctgttcccagtgtctcgcccacccccgccgggcccgtcggactcggcgggtgagcgcgcggttcccggctccgcaccgccgcctgcctctctgcagaccaccccggacccgacccctcggccatttccccacactgccgctttcgcttcccccacgacgcggggcctgggacgacggtctgggccaagaggaacttccccgcaagaagtgtcgagttaaggacgctactaagggggcgggatcg

SEQ ID NO: 336625 - DNA, 571 bp, Homo sapiens
  chr22:29426301-29426872
  hyper
cgccgcgacccggccgcggactccagcctctaaagtcgggtacctttaattaggagaaattaagtggggctgctacatattttgagaataagtaacactatttaaacttaggcagccttaaccactaacttaaccgctgaattctcgctgctacatgtctcctaaatagatcagcataatcttaactaggacttaaaatgcatcatcttcgttccggaactcagaacctgcagccgacgggagcctttggaggcttaatgactttaattatggcgagaaatatcttctcccggtggggaggggcgcggccggtggcgaggagggcactttcccgggtcggagaaggccggatggcagcccgccccgaaagtcccggcccgctggattgggggttcgggggtggggggaacatagagaagcagggctggtggaggggaggagggaccctgcagggcggtacacgacgggtgggagtggggaggaggagggctcctggcgcggggaggagccgcgggaggggggatgttggccgcagggcctcggagttctgagctgtgtttgtggcttcagc

SEQ ID NO: 336626 - DNA, 485 bp, Homo sapiens
  chr22:29467406-29467891
  hyper
cgcgggctctgggagtggataagggggtggcgcccgggggttgagggggcccaggggcgagtgtacccaaggcgtgccggtcccgcccagccgcgctctgggtgcggcgagtctgcacactggtgcagatgttcccgccgccgcgccgggcgcaggtctgcacttgcaagcccgggaccagggacttgaaagcgcccggcgcgccgcctggacctgccccgccgggcgtcaccgctgcgctttaggcgggaactgtaggaaaatcccctctgcctggcgggagggcgggggaggaggacggcccacgaccgaccccgggtgcggcaggggaagaccttgccggggtcggggcggggggaggcgggcaaagggcctaccacgctggggccgaaagtttaagcaagccgcgcgctctctgatccctaacatcccaggctgtaggataagcagtactgtctcatccatttctggacgttgcgttgggc

SEQ ID NO: 336627 - DNA, 210 bp, Homo sapiens
  chr22:29550509-29550719
  hyper
cgcccgcccagctcccgctgcggcagagcccccagccgccgcctcctgccgccctcgcctttcctgcaggagccgtcccagcgcaggcttgctcaccagcgccgccccgtggtaagactgcagatctgcggaagaaggccagccctgaaccgcaactgctctcaagcccttccattacagttacacggattttttgcccagcgcggtgat

SEQ ID NO: 336628 - DNA, 196 bp, Homo sapiens
  chr22:29876679-29876875
  hyper
cgagctgtacgagcgcgaggtccgcgagatgcgcggcgcggtgctgcgcctgggcgcggcgcgcggtcagctacgcctggagcaggagcacctgctcgaggacatcgcgcacgtgcgccagcgcctagacgacgaggcccggcagcgagaggaggccgaggcggcggcccgcgcgctggcgcgcttcgcgcaggag

SEQ ID NO: 336629 - DNA, 291 bp, Homo sapiens
  chr22:30642437-30642728
  hyper
cggcgccccctccctcgccgccaacctgccgcggggcgtgcggtgcttgggaccatgtgcccgcgctcgctccgggccgccacccagcgcctccggtggctgcgcgggcgccccaagtgttcgtgtgtctgcggcgggtgggcgtccggctcgcgctgccaagcgccccaagttgccgccgcgccccgcagcggggacgcgaagccggcgcggggcgggtgtatttacctgccgccaagaccttcattatgggctgcacttcagagggccttggaggaaacctcagatgcc

SEQ ID NO: 336630 - DNA, 770 bp, Homo sapiens
  chr22:31090200-31090970
  hyper
cgaacgatgtcgtcactggcagcgaagcgccttggcatgaaccgtaggccagctggctcaggaggtggaggcggtgaggcggccacttggggccaccgcttctggcggccgcaggagcgacccacagacaggtaatggctgccatggggggcggggcgtcgtctttagcctttagcgcccctgtgcttcgtgcgcatttcgtggcctctgggtgccgtacctgcttcccacccggctttcctgggtggcggagagcgaacccaccccagcctgggttgggggagggggcgtcggcgcagggtcccgtgggcagagctgcgctgggagctggcgggctccgcattcatcattgttcctccagcgcctggcacggctgggccgaagcagagaccgtggcctgaagcgcgccatccccttcggagttgaccgaccaccaagctcttccgcccacaggtgttgtcagagctccttccaccggccggacctaggaaggacccagggtccaaacatggcccgaggctggccgagagcacaacagccggcgggcgctgacgggcacggagcgcacgggaccgcggaggaacccgcgcgcgcccccgcctcgcgccgcgcgcacgtgactgcgcccccggccccgcccccggcctgccccccgcccccactggccgctcggccgcgcgcgggtcggccggctctatggggaaagcggcggctccgagccgaggcggcggctgtggcggccgctcccgcgggctctcgtcgctgttcac

SEQ ID NO: 336631 - DNA, 703 bp, Homo sapiens
  chr22:31198444-31199147
  hyper
cgtggaccatccgagggcccctcccctgctgggtccaggcaaagggccggccctctccagcctcgattggggcgcgatagcgcccttagtgtcgtgtcgggttccaggccacgctcgggcattttaagaggctgaggtgcgccttccgctgcccgcctgcgtcccgccacggagagctcgcctttatctagccctctgggcgagagaagaaggctaatcccagcctgggacaaggctggctgaggcgtgccggatcctccggggaccgatcggtggcctcgcgcggctctcatcgctctccgagcagtgctccagggggcggagggagcctcctcgggcggtggggaggaggctggaggaatgaggacgcagcacggcgcgcccttgcagcgctcaggctgacgggcgggcgggcggagcgggcgcacggctcctctaggtccggctgctctctgagctcgcgggctggacgctgtccgcggtgctgaagcggcgcccgcggcagggaggcggacccggagccgccgggcagcacacacccaatcccgggaccgccctcctcccaggctcggagaggcggtggcagccggcactgcacccagatggactgagagcgcggcggcgggaaggcggcggcggcggcggcagcagcagcagctgcaagagccctcgcagcctcggggcaggacccacgtccacaccc

SEQ ID NO: 336632 - DNA, 840 bp, Homo sapiens
  chr22:31480666-31481506
  hyper
cgccacctccctctcttaagcgaggctcgggcggcgctggaaaagagttttggagagaagctggagcagtggttgaatctctgggaaaggacagatgagaacctgccccggtctcgggatcggtgcctctcgaagtctttccgaccccgggagcggctcctccagcacccggcgcccgccattactgcgccccgcgcgccggcccggcccccgctggcctcgtggcaagaacgggggcgtcccgagccgggctcctccccgcggggccgggccatataaggaaaagctaggcccgctccgcccgccctgcgccccagcgtctggccgatttggggacgcgggcagtcgcttccggccccggctcccgcacattcttgaggattgggccggggatgggaggaatggggacgcctggggacttgcacgccgcgtgcccctccaccacccgccgggacgccctctgcctcggtcccgagttcgagttcgacctccgccactcagctgggtgtcctggggaccttggtttcttccctttagatccggacactgaagcaggcggtagcgggtgtcttcctacctggctaccccttcggcgcctagcgcgaggcagggtgggcgaggcgagggcggcgccctgcgagggagggcggtcgcagaacctgcgggccttcagcgccccctggcgaggcttccctccaccgccggcgggacccccatgggcaaccgggggagctgggactgaaagcctggagagccccctccgttgtgctgttggggagactgaggcccagtgagacctcagggcctgccaggcgttcccaacagcgagggcagagagta

SEQ ID NO: 336633 - DNA, 441 bp, Homo sapiens
  chr22:32571858-32572299
  hyper
cgacttggggagggcggacggcaggaaacgcgggaggcgaaggcgaggctgctcagcggcggctcgggatgcctccagcaacggggactagccctgcgcgcccggggagggggaggcgctggcgctgtgacggccgcggggagggccaccttcccagcacacgcacacatacgcccccggccctcagccgctccggctgccgctgcccgccgacagctgacctccaggcaccgcagcgcccgggaacagccatctgggaaccgcgaccgcgcactgacacacgcagtggccgccgccgccgccgctccgccaagcgctgcctgtagcacctgcacggtggtttggaggggaaggtctgggcaggcgaacgttccacgagggcgtcccagaggcatctgcagcctccgctctcctgttctgctctggcgcccaccagcccct

SEQ ID NO: 336634 - DNA, 224 bp, Homo sapiens
  chr22:33192959-33193183
  hyper
cggcagccacgaacccagacgggatgttgactgagagctttgtggccatggcagatgggaggggtgagcttcacccactcaaaggcacccgcaccccaccgatgagtgtggaattgtgctctcccgccctcgcagtgagacgaccgaccaggactgcaggctgagcaaatgggtgttctctggcttatagcgccccctagcaccagccagcgggatagagctcc

SEQ ID NO: 336635 - DNA, 855 bp, Homo sapiens; identical to SEQ ID NO: 241646
  chr22:33197432-33198287
  hyper

SEQ ID NO: 336636 - DNA, 607 bp, Homo sapiens
  chr22:33453892-33454499
  hyper
cggcgcagagcagaggtccggccgctgcggttcctggtttcccgcaagctcttccccgggccgggcgctgggtggaggcagtcttaggatccacagtcttgcgcgcccccggctcccgggcccggcagacggcccccgcacgccgatctgtctgtcccagggaccggcccagggccccggcagcggcagcctggggagacaccgtggtgcgcggctccttgcctccctccctgcccctccgtgcgcccgcatcccgcggacacagagccggagctccaggggacgcagcccgacgcgagaacgcaccagcagcccccgctcgaggtggggtctcccggctgtcagaaaccccacaaagtctactttgcggcgccgcgccgcttaccgtgcgagccgccaggaactcggcgcccggtggtgcctcggcgcggcgcccgccagtcgatccgctccgggtcccgggagctcagcctctgcccctcaacgcgcgcgagcgcccccgcccggcggcccggcctccccgcgccgcggcgccccattggctcgggcaacgaggcccccggacggccccgcccacccgcgcccactccctcgcccacgcctctcc

SEQ ID NO: 336637 - DNA, 789 bp, Homo sapiens
  chr22:34316250-34317039
  hyper
cgagccaggggcgccccgcatgggcaggggcctgggtcagcctcgggttgggtccagggagcgaccgccggggccgactccacctcccgcgctccaagccgattcgtcccttcagggcagggcctgcccgcgaacagcccggcgagacgagcgcggccgcgcccccagcttcgggcgcccgggctccggcgcggcggcggggcaggagcagactggccgggccgggcgccgaacgcggcggcgcggggggggctgcaaccggccgcggcgcgctctcccccagggcctgcgccgcccgcccgcggctccgcgggaaagaagcgccggaaaaggcctcgccccggcctggggcgcggggccgggggcgcggggctaggggaggcgccccgggaaggtcacgggagcggaggcgcggcgagtggatcgcggcgcggtgggtgcggggagccgaggcgggcggcccccgccgccgggagcgctcgccggccttggccgccgccgccgcctccgagatgcgccggcttcccggagcgcccggcgctcggagctgggcggccgctgcagccgccgcgggcagccgggcgccgctggccggagccggcgcgcgatccccgcctcccgcgcccggccaggagtgggccgccgcgcgggaaccggcaggggcgggcgctggggtccgggctccgggctggccccgccgcctccgcgtgcccagagcgccggactcgctcagcagctgcagtgactgtgtgtctgtgtcatgtctgtgcagccgggggggaccgcgag

SEQ ID NO: 336638 - DNA, 316 bp, Homo sapiens
  chr22:35420072-35420388
  hyper
cgagggcacggacacggtagaatcccaggtggaagaaggcaaagtgggcgggaggggagaacttgcatgttttaacctttttcctgcacccaaccccgccatccggacgccaagcttccagtcaaacctgagaccacagctccccctggcggtcagcgcgagcccgcaccgcggctctcctgtgctcacgcagccctgcgcggcggaggtggctggaaatgaatttagcgtcagcacagttatttaaattgttttaattaatcacagattgagcagtaaatgaaccactaagtggagagagcgcgcgggagcaagc

SEQ ID NO: 336639 - DNA, 196 bp, Homo sapiens
  chr22:36847902-36848098
  hyper
cgtcgtaagcctttgttccccaacagggggaagtgaaccagcacacaaggcccttccgtcctgcggagctcactgccttcctcagctcctggcccgcacttccgaccacacactggggacacaccctcgggggggccccaccccagcagctgcccatgttcacacctcttcagttatttcaaactccgcctctctc

SEQ ID NO: 336640 - DNA, 850 bp, Homo sapiens
  chr22:36901811-36902661
  hyper
cgtcttaaaaaaaaaaaaaagcgaaataccctttttcgtccattcctcccatacctactggccaatcaaggtgtgtggttcgtgtggggaaggtcccagcttccgcaggtgagctctggcaccggccttacctgcactgatgcacctggcccttctggtcagttaggatgaagtagtggccattccaggcctgtcggtccttgtccagagtgacgtgggcgatggtggtgttgtactggacacggagccccagcgtgtccgcgaagtcacccaggtagcgcaccatgtcgcgggcgtcggggaagtaggcacgcgagtagtgtctgaagagcagccgggggtcgtggctgagcagagagttccagtcgtggcggaggttgaactcggcgttagccttgcccgtgtaccgcttgttgatgctgatgagcttgcggtgccgcgggtagcgtgtgaagaagctgccgggccgcggggcccgctcgaacactgcgtagtcgcgtccagcgcgctgcaggaagtaggccatctgcaggcccgcgggcccagcgcccagcacgcagtagtcccggcgcgggggcaccgacagcgctgggtgcagggcgatggccaggagcagccccgggggaccccacaacggggccgcagcggagaggcccatcctgcagcagatcagaggggtaaggcctcgcacccggcccggcggctgggagacacgaggcccagaaagaggcggggcctgcgggaactctcactgcaatctgggtcacggccaggcccagaagccgtcctcagagctcatttgcccggactccaccgtttcaagctgggacttggggctccccggaatccc

SEQ ID NO: 336641 - DNA, 104 bp, Homo sapiens
  chr22:37252563-37252667
  hyper
cgctgcggagcggggactcggctgctgatcgcggcgccccctggcggtctgttcccgtcaacatttagattaagcgcagagccggttccgccagggaagtgcgc

SEQ ID NO: 336642 - DNA, 820 bp, Homo sapiens
  chr22:37730493-37731313
  hyper
ctgccggaatggagcagaaacgtctcggctgggaatcgaacccagggtcagtcagtagcggccgcgttttaggacccggcggtgcaccgaagacccggcggaacggcgcgcaccccgggcccagagctcattagccgggcgccgcgggggccttcattaaagctcagcgacgcggaggctgcccgcggcggccccgcctgggcgctccgggctggcccggacctgcggcgtcggcccaggagcatctggaaagggggcgcgggcggggatcggtaggaccgcctatgctcagggactgtcacccaccccctcccccaagccaaggagtagcggggaaggggggcgagtgcacccaggtattggggggagcatcaaatcggagtggagggggccggtgtcaccgagctatccccaaacctcgaacggccaaggccgagtcacccccgccccacccccacacactatgcacccatttcacagatggcaggtcctagctcagagggttagggcaggcccagaaccgcatcgccatcgcccgttcgcaggcctgattgagaggctggaaacgaggatgggcagggagtgaggacctgtaggctctgccggagaacttgggcgtgggcggagcggggcatccaggaagaagcccccaccccagccttggatagggtagtatacgatagggggcgtaaagaagggtcatgggctccggtggtcgcaggtcccaccggcaaccgccagggcgggggcagcaggagcaggaacctgctcgcctccgcatctcgtcggctcccctctcccgccagactcctgtctctgc

SEQ ID NO: 336643 - DNA, 743 bp, Homo sapiens; identical to SEQ ID NO: 241684
  chr22:38220618-38221361
  hyper

SEQ ID NO: 336644 - DNA, 805 bp, Homo sapiens
  chr22:38476997-38477802
  hyper
gaaggcgacgagggcgccgtaggagcgcgcgcgtgcgctgctcaggtctgtgagcccattggccagcagggccaggctgaacagatacgggacgtgcggccgcagacgcgccaggcccgccagggcgccgcacgccgggcgcgccacgatgtccacgaagcccacgatggacagcaggaaggcggcgtcggtgtcgggcacgcccgcgtccttggcgtagttcaccagcaggatggcggggacgaagagcccgagcgccatcaggaacttggtgacggcgtacacggcgaaggcgcggtcggtgcacactgccaagtccagcaggcgccggcggggccggaccctgggggatgcctcgcgcagctgcagccccgcaccgtcagcctccgcctcgcccggagcgtccccggcgcggtcgccggcgctgtccctgcgcggtcgcgggcccggcccgggcggcggcctcatgacagccccgcaggcgcagcagtgcagcaggagcccgccgagcagcaggaagccgccgcgccagccgaagcgctccagcagctgctggccgagcggcgacagcgcggacaggaacacggggctgcccgccgccgccagcccgttggccagaggccgccgccgctcgaagtacagccccagcatgatgagcgacggctggaagttgagggccaggcccaggcctgcgggcgaggcggtgctgtgccggggtccccggagagcccctccctggcccccacaggagggaggggccaggcccgggaacccagcagatccgggaacccagccgagggacttc

SEQ ID NO: 336645 - DNA, 163 bp, Homo sapiens
  chr22:38966006-38966169
  hyper
cccctcagagtcttcgcacgctgttcgtttttgccacttacccccctcgtacccacagtctccccgagattttcaaggtgaagcccctctgccccgcccgacctcctcagctgacaggattctaactcgggcctagaacacggagcctggagacccgcgcgcc

SEQ ID NO: 336646 - DNA, 542 bp, Homo sapiens
  chr22:39549067-39549609
  hyper
cgaggcgcagcccctcgagttgcaggagagccgggacccaaaaggcttcccaccgtgtccggacgtcgcagggccgaggtctccctaatccggccttctccgcggcgcagtttggccagtgtctccacgtccgtccacccacccctccatccgcccttccatttgtccatccacccgaccctcggtggtcggtgcccagacgcacgggtcagacgcgggcgctgcctcgagggctcccgggccgggccctcgttcgcggcaggagcggccgcggtggagctgaggtcccccggggacggattttgccgccgcgctgccccagccttccccaaacccgcgtgtactgggcgctaggtgcttagtgggggctcaaccatttgtggcacgagacgaactcttgattccccaccccccttcctttttcgctaacgcgcctccattcctcactgggagcccggcgtcgtccctgctccttcctgtactgaccccaacttctgtcgctccggcatcccctcggggactcgggtctgcctgccctcacc

SEQ ID NO: 336647 - DNA, 1120 bp, Homo sapiens
  chr22:39852944-39854064
  hyper
gcccccgcgcaggccgccccgggccgtgggccggcgcacgcacggtcacaggaggggcgcgcgcacactcgcactcacacacactcgctcgcacacgcacacactcgatccagcacgcgcgggcggcgcggggcggcggcggccggagtctgcggtgcgaggcgcccccggcccggcgcggcggcggagcccggctggcgggggaggggagggggttgcggagggggcggggtgggggccggagccgcttgagccggcgggagcgggcacccctgcgcgccgcgctcggcctcgcctccgcgccccccgcgcgcccgccgcggtccctcccccgcgcccgtccgctcgccgggcccccgccgccgccccggggtgcagccgagcggccgcgccgggtccccgggacggggtggaagtgggggtggggggaggggatcggggccgggccggggccgcgctgcctgcgatgccgggcgcccgccgcagccgctgccgccggagcccgggatggggcgagaggctgcggcggacgccagcatctccccgccggggaccccgggggccgcggagccgccgccgccgctgctgccgccgttgctgagacccagcgggcgatgggtgagttgaccccggcgtcctggggggcgccgcggcccctctatccccgcgctgcccgccctcccgcgctgcgcttggcgccccccgcccggctccgcggcccactccccgagcgtgaccttagggggcgggcgcgggcgcactggggctgggggcccggaggccgcggtgggggcgggatgccggggaagccgctcggcgcgggccccctccccctacccgccgctcctccgagctccccggtccccggagggcagagcctcagcgcccgaccccctcccacggccgggcgggggacgtccccgaggcgcggggctcgagccgtgctttgtgcgcggcaccccccagcctccggcgcggctcccccacaacctccggcgcggcgcggggctggggtgggaggcctccgcgcccgccttccccacccccgaccccagactgcggcggcggcagccgaggcccaagcgcagtcgggggctgggcgggtgcgggggctgcggcc

SEQ ID NO: 336648 - DNA, 180 bp, Homo sapiens
  chr22:39941870-39942050
  hyper
cgcagcctcttccctcaatcctactgaactccttcctgggagaggttagggcgggaatcgccaccttccagggcacggagaggcgaagcggaattcagcaccacggacagcagcccggcgcgcagttggcgtgcggttggctcaggaagttattctgtaggttttgtaggtttatgaccc

SEQ ID NO: 336649 - DNA, 267 bp, Homo sapiens
  chr22:39953450-39953717
  hyper
cgccgccgtcagtctgtctgtcgcctccacgcctcccccctccagcgtcccgcgcctgcagctttccccgaagacatttggtgtcagtataaggacggcttttcctcgcacgcagcgcggctcggtctcgccgccgccgcacgtccccgcaccgccaggcgctcgggctcctccgcagcccccgccgcgcgcagaccccgcgcttcgagccctgagccggaggcgcgagcagagccgaggcaggcgagagaccggcctcagccccgc

SEQ ID NO: 336650 - DNA, 307 bp, Homo sapiens
  chr22:39953971-39954278
  hyper
tgggggtccctctcgatcgccggcttcgggtggggacgcgttgtccccgcgtctctaacctggacgaccccccgcggccgggccacgtccatgccaaggtaggtgggggctgggtgggtggggggaaggaagggagggcttcgcttcgatgccagtttcttggcgcgttggcttctctcttcactggggcatttatttatttatttctggggatcgatcctccccacccgcgcgtacccgtcaggtgagccccccatcccgcgccttcggggccatgccttgggaggaaggacaggaaactttgacc

SEQ ID NO: 336651 - DNA, 332 bp, Homo sapiens
  chr22:41418641-41418973
  hyper
cgtgcccgcggtgggggcagggagggacgcgcagcggagtctccgggctgcacgtgcaaggcctcggggagggtggagctctggcttcccgagctgcgctcgctcccggcttccgccgaggtgcccggggcgccggcctggagcaggcgggggtctgggtgcctgggctgcggtcgggagcgcctccgaagaagcactcggtgcctgccccgctgggagcgcaagcattgttacctatcagcgccgcacttaacagttgttaatagcagtaagccctcactaaattgtcactgctggcagaccgcagtaactcggtctgacctcaagcaccc

SEQ ID NO: 336652 - DNA, 172 bp, Homo sapiens
  chr22:41593094-41593266
  hyper
cgacttctcccgcaccgcggccgcaatccagcccggacactctgagggctctctctgagctgggcacggtcctcgctgctcggccgagtgcagccccctcacctcagtgcgactgagacaaagcaagggtcccaccggcccctgtcccctccctaaggcgcgccctcagggc

SEQ ID NO: 336653 - DNA, 427 bp, Homo sapiens
  chr22:42353611-42354038
  hyper
ctccctctgggtgggcgggacagggagcacctctgctggccctcaccacgctgtgtctccgcagccaaggccgccgcgatgccgcacttcctggactggttcgtgccggtctacttggtcatctcggtcctcattctggtgggcttcggcgcctgcatctactacttcgagccgggcctgcaggaggcgcacaagtggcgcatgcagcgccccctggtggaccgcgacctccgcaagacgctaatggtgcgcgacaacctggccttcggcggcccggaggtctgagccgacttgcaaaggggataggcgggcggcaccgggcgccctcccccagcccgccccgcccgcccagcccggagacccccaaggcagagggaggccggcctgttggccctccacgctatccctctgcagcctgggccctccc

SEQ ID NO: 336654 - DNA, 709 bp, Homo sapiens; identical to SEQ ID NO: 241748
  chr22:42679429-42680138
  hyper

SEQ ID NO: 336655 - DNA, 130 bp, Homo sapiens
  chr22:42896458-42896588
  hyper
cggcggccctcgggatgggtcctgccagggcgcagagatggcggtggaaaggcggggcgaaggcggggcgtgaggcgtggaggtgtggcctgactggggcggggcggggcggggcggaacagcctagaag

SEQ ID NO: 336656 - DNA, 518 bp, Homo sapiens; identical to SEQ ID NO: 241752
  chr22:43115856-43116374
  hyper

SEQ ID NO: 336657 - DNA, 601 bp, Homo sapiens
  chr22:43659511-43660112
  hyper
cggctcggggagcggcagtgaaggctgcagacggcgaacacgcacagggcaacctccttcccccgggacacaccggcctcttgttccaagggaggactggctcaatcctgaccccgtccactttaaatacgggtatgcagcaacacagaatagatttaagaacacaaacaccctgctagttgtaataaagacaaaaacgtctaaagttaaaaatcaaacaaacaaatggaaatgaggaagcctgcattttgcccggcactgtaactcctggtttcacctgattttgcgactcatatttcctcaccttgattttctcactaatcaatcaaattgttggaatgacgcagagtctaactaagcaacgagttagcacggaaagcgctttcatgctgctgccctgcacagaagctgcaagttcacacggaaagaccctttccgctggctcgattccaaaacagcatcagcgcctgagtcacacagatagtggcgtgcggtcaacgcttaacagccggcaggggtggaggctgatttgcagtatttaccaatttacgtgggataaatacgccagccacggctaatttcaaggtaccagggagatgtc

SEQ ID NO: 336658 - DNA, 546 bp, Homo sapiens
  chr22:44208018-44208564
  hyper
gcgcgtggccaccccgaatacagccttaccgggaacccctcctcgattctccgcctagctgggccggcacccgcgtgcgcggaccccaagccgcggggtctcagaggggctgcccattcggcgtctctaggacgctgttgcccgagagacgacggcagtcgctgactggagaatgagcctacgcgcctggcaagaagctgagctgtgattggtcaattggagataaacgaggagggggcggggccaggtcagtcccgcgcctccgctcccggaagaaatttccgccggaagtcccgttctctggggagcgggaaccctggcgacccgtgtcatgggagcgggtttctgttacgtgggctttagcgcgagctgggcggtcggcccggtcccaccgaactgcatagggccgtgtagccgggggaagtcagccccctgctctgagaagcagactctgcatctgtaaaaggctaagcgtgcccactggggcctgtggtcaggattggctgcagtgaggtccgcaaagcccctaccgcatcctgcgccttc

SEQ ID NO: 336659 - DNA, 571 bp, Homo sapiens
  chr22:44258003-44258574
  hyper
gcagaagccccgggcgcgggcgcggcgtctacgcggccgcgctgcagggctggggcatggcgtggcgggcgcggtcggcgcggggctcaccggacttggggtaggtgacgatccacacgtcgctgggccgcaccgggaagttggcgatctcctccatcttcccgcggcagaagggcggcagccgcacgccatggaactcgaagtacttgctctcgaactcccccggggtgctgggggtctcggcctcgctctccgccatgccgccgccgtcgccgtcgccgccgccgcctcccggctcgcagcccgcacgcgcccgcgcccgcgcccgcgcccgcgccccgcacacgctcgcgccccaccggcgcgcggcggcagctccgcaggcgtgacgtcatggcgccgccgacgcgcggcggaggctccgcgggtatgacgtcatggcgccgcccggcacgcggccgcggcgctgcacgggcgtgacgtcatggcgccgcggagccgcgtcctccccgccccgcccccggccggggtcacccacccgctgccggggctgacagagaccctggcccgc

SEQ ID NO: 336660 - DNA, 950 bp, Homo sapiens
  chr22:44419839-44420789
  hyper
gacctgattctctccggctttcaggacgtcctgaggctgcacccacgtggcaatggtgtctgtcgcgctgtcgcctggatccggcaccactagcggagccgagcagagcccagggctccaacgcgtagggaaaaggctgcgccgctcccggggtggccccacgccccttctctgagcttgagcggcggcgcgggacggggacggctctggccgggaccagcaggcctcgggcatccgggacgccggggccgcgctccaggccaggggcgggggcgggaccggggcgggggccggcggcggggccgcgccctcggcctctccccggggcgaccgggcggctccacacgcgctgcgcccgccgccggccccacgcgcggcccatgtcctccgcgccgcgctcgcccaccccgcggccccgcaggatgaagaaggacgagtcgttcctgggcaagctgggcggcaccctggccaggaagcggagggcgcgcgagggtgagtgcgcgcccgcgcccgccgacccccggggacctgcccggcggtgcccgccctcggccctagagccccacgaggccgcccccgccctcccccacgcaccccgcccggcccacgcggctgcgcgaccttcgggacaggccaggcctttgacccaggacccgtaaacaacggccgggacctggcgcgtggggccgcggtggcctccggagtctgccaaacgcgcgtgcgggcgcctgcgcggcggggacctcgggccaccgtgcggggcccgcgcctgctctgcctgccgggtgttcagctcttccctgggccagcggcatagccagccgcgcggggtgaccgttcattccatgagcagtgacgctcacgtgtgcagggcactctgggcagacacggcctgggggacccactactgggtgttgcgcgggcgccctgcagggtgcggggctcagggc

SEQ ID NO: 336661 - DNA, 966 bp, Homo sapiens
  chr22:44726971-44727937
  hyper
cgcgtcccggcgcggtgcgccccgaactgctctcttcggaacccagccccttcctctccaaggttcagcgaccccgaccttggtgagcgccggcgcggaccccagtgccgaacaccggctgtcccgcacggttcctgcccccggacccttccccggtcgtccccagcccctttctaaagagccccggacccccgtcatatgccccttacccgcctctcccaaagcgcccacccttcaccccttctccggagccccgcgccgcagaccccgccccccactcgcccagaccctcctccgccaggagctccgccccggcccctttccccgccgctctcggaccccggcccaggcgcgcccctcccccgcgcggcccccgccctgcccgccccggggctcagctcacctcgtgcccgccgcccgctcgttcctcgcttcgtagccgggagccggcgcccgcgggagccgcctgctggggtgcgggggctgcccacgcccccgcgatgcccctgccgccgccgcaacagttgtccgggttctgggggctgcggggacgcggggactccgggctccctgatcggcgctcggaaggcgcccgctcctaggcgcgccgggcgcggcgcggagctggggccggggccggggctggggctggggccggggctgcagctccggctcggcgtccggctcggggtccggctgggggtccggcggccggccgcatgccccgtcgccgcccgcggctactcggcggcccgcgccgcccggccgcccgccggccccgagccccgcgccgcgcccgccgccgccgccgccgcgctcatgctcgccgggccccgcgctcgccgccgccgccgccgccgccgccgctgcccacttcactctttggcgctcgctccgcgccgcgccctctgctgccccctcgcccgggctcgccgagctcccgccgccctgcccgccgcgtcctgc

SEQ ID NO: 336662 - DNA, 642 bp, Homo sapiens; identical to SEQ ID NO: 206164
  chr22:44893741-44894383
  hyper

SEQ ID NO: 336663 - DNA, 915 bp, Homo sapiens
  chr22:45064150-45065065
  hyper
ctccctccccgctccgcccgcggctggaccccgatccccgggacagggactgagtctgaccgtctgatttgtcctcccggcttctagcgccccgctcaggtcggggcttggggagggggcgctctctggacgtttgcggcccgccgaggggtggggtgagggcgtcacgggccgatccgggccgccgggtgacccgggacgccccctgccccggcgggcgccgcccacagcctgcgcagtgctcaggggcggaggccgggagggggcccaagcgccagccccccagctccggcggacccgggtgggcgtgcccgcggacccgcttgccgcacttaggcgagtctcccctgcagcgccccgagtccctgggggctgcggcggctgcgggcgcccccgcgcgggcccgaggggcgggacgcggcggagcggggcggggcggggcctccgcggccccctcccccggccccgggctccggctccggctccggctctggctctgcgcggtggcagcggcggcggcggcgcggggaccgaggtgagcggcggctacgggtccggaggcccggccggagaggggaccgggtggctggggttggggggcggcacgcgcgaccctgcggaagggggggccccggggcggtgccggcggagcggcgcgcgcgtgtgtgtgcgcgcgtaggtgcgcgcgcgcgcgacgccgactgcggggccctagggtggggtaggggtcggacggaatctgcggggcaggggcggcccccttgggtgaaggtccagcctctcccaccccagcctcccgggacctcccgagctcgttctctcccagcctctctcgctcgccccccgccccgcccccttccctctatctctgagtttgtccgcgtctctgtgggtgggtctccgtccagccgcccc

SEQ ID NO: 336664 - DNA, 1220 bp, Homo sapiens
  chr22:45097777-45098997
  hyper
cgtgtgggcgcgaccgcagtgctgggcggggggcgggcgcttgggcttgggccctgcgtcctgtgcgtgttggtttcctgtgggcacgtggggccctcggaagaggggaggagggtgagcacgtcctcagagggcagacccagcgaggcgtcgtggcagctgcggccgcggagacgccggctccgcctcttgcacacgccccctcgcctgaggccccgccccgcccgcgatgcccccgcccccttccccgccccgccccccggggcgccgagacccgcccctgggcccgcccccgggtccgcccccggcctccgtttgcgccgggtctgtgctggccgcgcgcctggcgctccacgctgagcctctccgtgcaatgattaacccggcggggcggccggcgcgggacccgagacggaggcgcggggccggggcgggaccccgcaggaccgctcggcttcctgctctcgccggagtttccgcgtagagggcgcatcgccggcccggggcccttggtgcggcgtggcgcagggcgcggcgtggggcgcgcgtgggcgcggcgcaggcggcccgggtcaccatgaggactctccgcaggttgaagttcatgagttcgcccagcctcagtgacctgggcaagagagagccggccgccgccgcggacgagcggggcacgcagcagcgccgggcctgcgccaacgccacctggaacaggtaaggccgcgccctcccggccacccggaggccctggagccgggggaggggacccctgagccgtccgcgggctaggggccgccccgagccaggaacgctgccgaaggcggcgcggcgcttcacagtttgcaaagaacttgccccgccggagtggtgcgggcctggaggaaagttcagtgcagcgtggttccagaacccagggaagggagcgaggcccgccagcgcccggggctggcccagaagcgcccggcgggtgggcggcggggtgggccgggaagccgcgtgcccgcctcctacccggggtctttccacgtctccactgcggtgctcgtgacaacctgggaggctaacggagcaggaagtatttttcccattttgcggctgagcacgggagcctcggggctcagtgggtgggtcgcgcaggcttcctgtgtctctttaagctcccttcggctttcccttgagaggccccctgtcctccagctgtcagcagggggtgcggcagctgc

SEQ ID NO: 336665 - DNA, 812 bp, Homo sapiens
  chr22:45148213-45149025
  hyper
cgtgcgggacggggacgcggcccagccgggaatcggggtgcccagggtgcgatgtgcgaggggctcctgagcgcgtgtgctccgcccgaccccgccctgtccccccgacacacaggtggacccagggtcagctcgtgcacctgggaaatggctcccgccgggtagcaggggcggaggggcggggctgggcggaggggcgggggggcggggcctgcccgggagccacgtccggggaggggccaggtgagcggcagacccggcacgcaggtgggggccggcggggtccgtggccaggtaaggcgggcggcggcgggagggagcgcgcagggaggaggccgtgctcggggtgggggggtgcgccgcgggggctcccagggcgtgtacggggacaaggggccgctggccgggtagggacgcccaggcgggcgcgacgccacgtgcggccggggggagaccctccggccggcgcgcagcctccgggtcccctgtgggttctagactccctctcccttcacctcctttctttcccgcccccccacactcccctcctctgctttttcccctgtcctgttccttctcaccccgcaccgccttccccgccctcgcctctctcagcctgcgttttggtctggtctggccggacggtgtcagctcaaatgttccttttttgcttccgtcctggggtctcaggttaggtcgggtcagcgcctgggggaggcacctcccccgcccccacacaccccaaacctacaaggtgggtgaggtcattcccgtttcatagatgagaaaacggaggccggggcaggtgctgc

SEQ ID NO: 336666 - DNA, 782 bp, Homo sapiens
  chr22:45402901-45403683
  hyper
gacttcgccggggccgcgcgccgggcccccctccggcgggaatggaagcttccactcccggacgggggcgcgcggccgggggcgggggggccgcggcaccaactgaaaagggttagcgcatttgtcccaagccttcggtccagcccggcggcccagaccaggcgcgggccgcggcactgccatcttcctttcagcaagcccggccccccccaaaacccgccactcgcgcacgccccctcccatcactttttaactttaaagactcgacacgaacgcccggcctccgaattctctctcgccagggtcaccggcagccgccccaacctcgtccacgtctctcccctacgccagaaaatcccccgggggagggggcgtccgatccggcggcccgggctggggtgggagcgcgggggcaggcccgggcgggggcgcgcgggggcgggcccggagctgtccaagtttggcgctggcggctgcggccggcattccgaaggaaacgcgatcgatggccgggggcgcggcgcgggcgggggcggggcgcgaaggagggagggagggggcagcggagggagggaggggcgccgccgcccccgtgcccgccacagcggtgcccccagcacgccattggctgcgccgctcaaagttctcggctcggggctgcgcggggaaggggcgggtgtgcgagcgcggggaaggggcgggtgtgcgagtgcggggagggggcgcggcgggggaggggcagcggaggaggggcgggagccagggggcgggggcgcgcggcc

SEQ ID NO: 336667 - DNA, 2874 bp, Homo sapiens
  chr22:45403686-45406560
  hyper
cgggctctggcggcggcatctgttcgtggtgctgaaaccccgagcgctgagctcagcgcaactaagtcacaatggacaacttttcctccccggagggggcccggaggggggggagcggtcgcgcctccgacgcgtgggagcttctcaggtgtccccaactacacctaacgcccggagcccaaagttggagcagaactggggagtcccgggggcgcgtttcttttgttccccgggagctggcgtcaggttccaagaataaaaagtgaagctagggaagtggaaggtggtgggggggagggagcctcgaggaacgatttcaaaacgaggtttgccacggaacccagaaatcgcttccaacgagtttggtgtccaggcccccacggccgcccccctccgcccccatggccgcctcagcgcaaagcgggggactccgagccgggagaaatcgccacgttccaaaaacatgtccaccacctcaaaatggacgccgggccgcgcgctgccttttaagtgagctcctctcttcggcccccgcagggcccggctctccctgccgcctccgagaacccggctctttctttccaggaaaggggaggggtggggaactttgagaactggagacagacccctctgggagtctgagcgtgcgtcgcccaggctggcactttttagggcgccgccaaagtgcccagccaccctcccgccccatcccagggggggccgcgatcccatcgcttacttgtttgtcgctgagcgcggcgatccgcggctgcctttcgtggagctgcttcttgaggtcgccgttctgcggaaacacggaggagcgggctcaggcaggccacccggggtcaggtgcaccccagcaccgcgggccgcggcaccccccgcccggagccccacgggcggggccggccgcagcgcaccccaagtttcccgggccgcgtcctgcacgcgcggcggccgggcagtgccgcgcggggccgcttacctgtggctgccgcctcatcggggcagctcgcggggcggggcgggggccgaggccacccggcggcgcgccccgagccgtgcaagtttgcaggccggggtgcgtgtgcgagtgagtgtgagtgtgagtgtgtgccgggggaggggggaggaacaaagagccaagtaaacacggcgagtccgtgtcgagcaaagctcataaatattcaagtcgcgtcctaatctccccaacacacacacgcgcacgccgagccccgctcaggctccggccgccacgccgccgctcgccagcagcgatcgccaaaactacttctgcacaccgggcaggttcgcccggggcgcgggggcccgaggggaggccggaagggggcctattcgcactcccctccccgggaccggctcacgaaggggccccctccaggcaccctcccagtcatgcagaccctacatcgcttaagagaagactccaggctcgggtcccacgcgtcctcgatcccgcaaactgtgcaggacagcgccaggggcaggcggaggggagcccagaagggggtccgcgcgtgtgctcactccctcgccccccgcccccgggcaggctccagcctggaagacccagagacccggaagagaggatgctgggctcgggtcccccgaccccctcaccccgcaacacactccccggccccgggcccggcccccggccacctacctggtggcgcgcgagttccacggcgagcgcctcgggccggctctgcagctccatcccggcaacttgggcagcactttgcgctcactttggcccgggctcccgggaagttgcgcggctccgcgggggccagagcgggcgcgggcggacgcggcctccgggctgggttgggggggacacgagccccctcccccacggccgaaagggaagggggctggcgaaggggaagacaggcttccgggcgccgcggcgccgagccctcggctgccccaactcctcaggctgcccggcaagttgcgccgggtccccgggctgccggcgcggcccggagcatggcccccccggcgccgggagccccgcgcagccccgcgcgcgcccgcccagccgccgccgccgccgcctcctcccgcgcgagcctcccgcgggcagggactatatttcctccggcgcgcgcgcctggatctcgttgggcctcggcaaagttgtgcctcggcacgatgctaattcggcagtgcccggatggagcgggccggggcggcggggggcggtgccgggaccctcagcccgccgcgccccgcccccgccccgcccgcgcctgcgcactgccgccccgccgcggcccggcaccccgagcggagaacaaaagtggcggtggacggggacgcacggtcgccggctccggggactgctcgggccgggcgctcggagaggacgactgcggagtcatcctctccgtccccgggccaacccggggaacgcggcgcccccaccccctgcgccgtgtaacgccgggatcaggacactttccgctgggaggctgcgagtccgtgtttccatttctcctcaccctggtcctcggctccctcctttcccccctcctccgcctccctctgatattttatttaaattcttccgtcccctcctgtccataccagcgccgcgacttgggggattaaattagtcgcgtcgccacattcccccgccgcctgatggcctccgtgttgtttaaacagcaagaaaattgatctcttggctcttcctttaatgatttttttttacacgattaaactctcaacagatgtcactggacattttaagactcttgttaagagtcgtaaacaggcccggtcaatgcgacctaaaacaattataattacagctgcggaggtcgcgtttcagaaccccca

SEQ ID NO: 336668 - DNA, 684 bp, Homo sapiens
  chr22:45898544-45899228
  hyper
atccggcccgaaggcgccccctctgtgccccctccggggaagtctgggatccaggccctcgcccccagccgtgggcgcgcgcccctcgcagccggggtccggggagggagggtcccggcagggggcgccggggagggaggaccaggagacccgcggccccgcctccgccgcgccctcctcccgggcgggataattgaacggcgcggccctggcccagcgttggctgccgaggctcggccggagcgtggagcccgcgccgctgccccaggaccgcgcccgcgcctttgtccgccgccgcccaccgcccgtcgcccgccgcccatggagcgcgccgcgccgtcgcgccgggtcccgcttccgctgctgctgctcggcggccttgcgctgctggcggccggaggtaggggcgtcccgggtccgccgccccagcttagggtcccgaccccctcggcctcgcgctccctgcgagtttcggaaccacggggactcggagtccgtgcgttgccctgcgcggcgcccccggactgtcagcgccgaggcctcggcgacgcccccctcccccacggccagctccggtcctcatctcctccccggcctggggacttgtttcaaaaccggattcccccacccctcaaacacaccgtcctaccccagtcctagcaaatccagccggctccgggggcc

SEQ ID NO: 336669 - DNA, 967 bp, Homo sapiens
  chr22:46262413-46263380
  hyper
tgctggggaggtggagacagcgcgctcccgagccctggaccactccctctgccccgcgcggggccgagctccacggcacgtgctttggcttggaccgggaaggcccgcagtcccacagtgcccggggaggacggtccgcgccttccacgacttcgcgccgcccgcgtggctgcagcgccgtggcccggggacgcgaggccacagcccgggagcgaggagcgcgggaggaccggcctgcctgtgcccggcaaagggggcccttccgaggcgggctcccttccccgccgctcccgtaagcgcgggagccagaggaccccagacccgccgcggcccaccccaagccccgatcaagtcctgcagcgcgggagggacccctgcaggcgcggggccagacgggcgacaaagcggcggactgcgagggccctgaggaagccggcggcgcggggtcaggagcaacctgctattcgtagggtcaggagcccacgcgtccccactgcggagggcggggtcgcagccaggcctccccgtttctagctgtgcggcctggggcgaggtgcttgacctctcggggcctcagtttccttctctatgaagcggagctgatcggccgcgtcccggggctgctgtgacagtccaaggcgagaacagcagctccgcgccgcccctggtgctggagaaccgctggggcctcgggagagggcgcggcgcggcggagcggccctggcagccggagggcgcgtgtggccagggccgatcctgcactgccctctgcgggatggcccggcccagtcctcgacccccagcacctccgccgcccggcctggccaccacctccgctccacgcgcccaggccgctcccgtcgcgggtctcggagattctcccgcgcccaggggtgtcccgcagccccgggcctcagcacccagcgctcccttctccacgacgacaatgaggcggaccctccccagc

SEQ ID NO: 336670 - DNA, 1448 bp, Homo sapiens
  chr22:46367044-46368492
  hyper
cgcagggagcgggaaggcagcggctgccccctctggccgcgtcaggcgaccccggacgtggcccgcgtgtaaaggagggggagggggaagggaagagaaggggagggagagcaggctctgaggtttaatcagtagcatccagcttaaattcccccaaacggcggttccataaatgaaacttctttttaagtcagaggccagagcatatgcgtcccattaggaattcggcgaagccaccactgcgcgccccctgggctcactgggctggactcggccctgcccggagcttctcagagccccgtgggctctgccttgccgggcacacacacgcgcgcccacgctccgcgctctcccttggccgagacaactgggcgaacgcggccgccagcacgcaatgcgcgtcctcctcgcccccaggtgaggactcggcaggggcagggatcaggctacccagcgcggcaggaaggcgcgagaagccgcagcgacttcggggtacagtccgggcgctgtccggtgaagcgcggcgtgcacgtgcatgccggtgtttgcacgagggagcgggtgtgtgagtgcggctctcccaagtgtggcatggtattgcgcgccgcgtgggttaatatggggaggggtcccccgctggtccaggactctgctgggacgcgcagggaatctcggcgccgctcgcgtgcccgcgggccctcgcgctgggcgtgcacagcctgctctactcccgcagtcgagccgctctcaggccatcctttctttgaccccagagccaggacttctcactgccgtagctgcccgccaagtgctccacctcggcagcttaggctggcgaggcgacctaaagtcccccggctcccgcgcgcgacggtcacccggtgccccgcccaggggcctcgctgccgcgttccctgcccgcccggttccagcgctggaggcccggggggagcccacccgcccaccccgcacgccgcccgcggcactcacaagtagctgccgctggacaggaggagaaagatctgcgggcaatagacggagacgagcgcgctgcgcggcgacagtagaagcatggtgggccggcgtgcctggcggggctgaacaggctccgcgggccgggcgcctgggccagctgaggccggggtccccgcggagctccccgatgcagggcggcggcgctgggcgctaggggccgggtctcgtgggcccgggcgcagttgtcgcccgtgccccgccgctagggccgcgcatggcgctgggtctggggcagcggcgggagctggggctggagtgcggggcggggacccggccgggggcagcgggcgcgccttggctgcggtctggacctccgtccgtctgtcggtgcgaaccggctctgtcgctcgctctggctcacttctccaagtctcccgaggcgcgcagctgccattggacgggccgcccctaca

SEQ ID NO: 336671 - DNA, 485 bp, Homo sapiens
  chr22:46658634-46659119
  hyper
ggcctgcaacatcacgcgcgcggggccgtctgtggggcactcggtgcgggccacgaagccctgctggggccgcgggcctggcgcggcggagcgcggggagacgcgggccgcgggggaggccgggcgggcggcgccgggtccgagcagccgcaggcggaaggcccaggccaggcgcccgggcgagcgcggcagccgcacggaccacgtcagggagaggcggccgccgcgcgcggagagctgcaggtcgacgagcgcgagcgcgggcgcggccggccagggcaggcgttgggcgctgagcaggacgcgcaagtcgaggcagtaccagcgccgcccggtcccgccatgggggaagcagaggctgccgcggccgctcaggacagcgccgcccgcccgcaccgcgctgggccgcagactgaggagggcgcggccgccgcgcaccccgaggcccggggcgcccctgaggaggccaccgggcgccccggaga

SEQ ID NO: 336672 - DNA, 1268 bp, Homo sapiens
  chr22:46933492-46934760
  hyper
cggctgctgcctgggcggtgcgcttggcccgcgcccactccgcccgcgctctccccgcccccggcccggccccgccccgcccccggcccagcggcgtattgttcggccccggggggagccggctcggaggtgcgcgccgagaggatcgctatggagacgcgagggcgcggccgggacggggactggggccctactccccggaggcctccccacccagcctcccggtggggcggggccgaggcaacagggccgggaaaggtggggctggggcccccggtggccgctacccgtggggcggtggctccgcacctcgggctcggggccgcggctcagagcctggctccccaccccggcagaacagatccacggagaccgccgccaggagtgccgcgcgggtaggacccgggggcggaggactggggccgagaggccggggagcccccccccacccattaaggactgcggaggctgtcgaggagggttacccattttacagcaagacgcacggaggctaaaatgcttcaccccgactaaaactccctggactttgaagcccaataggcagctaccggatctgcgtcccacttggtttaaagcgcaacttttaaatgaaagaagaaaaccccggttgacataagggatttggagaggacggcggaggcgcgctcatctcccgcgtgcggcccgacccgagcgttcgcggacgcatcgcggaatccccgagcgtccggctcctcccgaagcgggttgcggggaaggcggggggctgcgggtcctggaagctgcctggggcaagcaagcacccgcagggatttagagctgtgccacagcccctgcccagcctcctacggaggacagcggggggcggggggcagagaccttagagctttcagaaaagtgacacacacccccgcctcctgcggggaaccacggggggccgggggcagctttaggtttgcgtgacgggtacacctgcctccggatggggcacagggataaagggggtggaggcttaggacttggcgaccccccgcatgggcggggctttgggactgtgccaccagcggctgggaagggcgcgcactcccttggtggcgctcggggcgccggagtccagtgcagcccttaggcctcccagtggtcggggacggtaggtgggggtcgcctcttctctcctagaagggcttctcctggggccggtcggagcggtgggggtgggagtaatgcgcagtcacccctagaacgggtctttttggcaagggagggtc

SEQ ID NO: 336673 - DNA, 224 bp, Homo sapiens
  chr22:47199296-47199520
  hyper
cggcggttttctctcctgtgggccttgttggagatctcgcttctgctgtgggagctggggcccggcccccaggagctgaggcggggagggcggttggttcttgcgacccggccgtcagcgttcagcgtcgccctctagtggccaggtgctgtctttgcagcctgggcttcatgaccacagcagggcacgttggccttgtgggtggggggtgcttacacttgcgc

SEQ ID NO: 336674 - DNA, 994 bp, Homo sapiens
  chr22:48885701-48886695
  hyper
cgggcgctcgagcacttcggggtcggacgccccggcccgagcctcccttccctgactccccggcagggcccgggctccaggccccgggtggcgcggcccgtccctgcccggcggtcggagcccagccagcggcttcccggccgagatgcgcgctcaggaggcagccgcaggtcgcggagggcgggcggcgctgccggggtgtctgcggagcgccctccccgtgcctcagcccgggacaaggggggaggcggcggccgagcccggagaggagctcttcaggcaggagcccagcctgggctcggaggagcagctggagcttccgctttcccgggaaacgggctcgtcaggcgccttctggaaagagaagcgaagtgagggatgggatgcccggagggggctcgccgcggccgcggacgtttctcgggtcgtgtctggggcccgagctggtgaccggcgggactggcgcgggcgcgggctggggtggtgcgggccagtgggcgcccgggcgtgagctgagggctggggtagggggtgaccgccgcgggctccctgttgcctggagtgaagggtggggggtggcctgtgcccctgccgaggctccaggcgggtggaatgaggggtggttggagtcccgggtgcagactccagcctcggcgctggggagggtgctcagcatcccggggcacgttcgcggctggtggggtaagtgggggccgctcagcgtcccgggcacaggctctggccccagatggcgcgggctggtcggcttcagctccgggagctccgggcttcttgtcttcagcgggagaataggacgggtgctggggagcacctgtcatggagaattgccatgggcgcgggaggtgatggaaaaatatggattctttacaaaaaaaaaaaaaaaaggccagcaccgaacctccctccacagacaccacctcctccagagccccgggcctccaagctcccagtccgatctgatccttccgctgtc

SEQ ID NO: 336675 - DNA, 1448 bp, Homo sapiens
  chr22:48970901-48972349
  hyper
ccgctggtcgggcccggctggggcggtacctgggcctggggtttccctgtctctcctggggccttgggtgcgagggaggctgggcgccactcgaggccccgcgtccggtctcccgcgccagcagggccggctctgcagtgaggcccctgcgcacctaggtggagcccgacccgcagttttcggctgggccggccccacctgacccgccggcgcgccaggcgggggcgctgcagggcggggtccccggggtccctcgcggcccagtgcgcatccgcggctccgcggccgggaggagcgcagacggcggcgggcgcgggccggagtccgaggctgcgcgggcccggccacctgggccggcagcgactgcgccgcgctccccctcccgccgcctcccccgaggagccggcgccgagccgagcgggcgggcgcgcgcctccaggccggagcagcggcgtcccgcgggcggcgaggcgcgcagcgtcgccggccccacctgtaggcgcggcagccaccggcaccggcaccgacaccggcagcggcggcccagcgtgggcagcccaggggcgcggtgggcccggacctagtcccggccgcggcggcggaggcgcgggctgctgggagcgcagaggccggcaccgtccggtggggaccggcccgccagccccgggccgcgcaagttcgatcgccgcgggctcggccgggccgcgcggaccccggcggcggcgatggtgcggcagccccgcgcccggcgcgcagccccggccccgagcctggcccgccgcggcggcggtggcggcggcggcgcggcggccccctgagccccgggccggagcgagcgcgggcggcggaggaggcggcggcggcggaggaagaggaggaggaggaaggcgacgccgagcagcgggcggtgggggccgacaggcggaggagggggccggggccgcgccggaccccccccccccccgcgccgcccggccgttgcgcaatccgcggcccgccgtccgggccctgctggcggtgcggctccgggggcggcggcggggctgattcatggggccgcggcggccgccccccggcgccccgcagccagcgatggtggccgagtggtcggagcggcggccgccgcggcccgagactttctgctaacctccccgcccccgcccgccccctccgcggcgcccccctccccccgcccgctcccctcccccctgcccagaaagacacaaatcgcctcccggagtggcgcctccagtcgcggcggagcgcggcgttggcggcggatggagggcgcgagcgggcggccgcggaggctgcacccggcggggcgctgatgcggcgcctggaccttcgctgcgcgacttcgggggcgtcggccgagttgggactccgcgatgcagctcctgaaggcgctctgggcactggcaggggccgcgctctgctgcttcctc

SEQ ID NO: 336676 - DNA, 425 bp, Homo sapiens
  chr22:50170525-50170950
  hyper
cggtgtgtgatgaacccttccccgggaggttggccagggtggggctccacacagggcaccatgctccctgagccggagtccagtccccagcagtcgagccctaagacgctaaccaggaggtgtggagagccatggaggcaggtccgggcgactcaccggctgcgatcctggccgccttggcgtagttcccattctcgatgcaggagatcagctcactgcggtcctccagcgtgtgccgtcgcacaagagccggtttgccccgcccacatttgggcgcattaaagcttcgggaggaagagcagagggagtcaggcgccccgcccctgccttcagcctcactcgggcttcgtcccgtgagctgtccgccaccaagctggccacgcatcctgcctgacacccccgcggccagacgggcctgtgggtgc

SEQ ID NO: 336677 - DNA, 397 bp, Homo sapiens
  chr22:50453240-50453637
  hyper
cgcgcccgcgctgggcaccagatgggaggaaacggggtgcggagaccctgggcggcgccgagactcgtcggacgaacgcgggaaggaacgaaccagcgtccgcccgggacccgggctggagccttccccagagcggctcggagggtccggagcgggtgcgggggtgctgggcacgaggttcccaagaaaaccacggcgaggacgcgggttcaccacaacagcgctgtgttctcggcctcagctccgcgcaggtttccacggagacgcgcgtggctccgggtcgtcgtcctggtccccgcgccggtcccgactcacggggtccgcgggctgcagctccgcccgccgagccgcacgaaggacgcgccctgcaggaccgcggcgcagaacgagcggcagc

SEQ ID NO: 336678 - DNA, 683 bp, Homo sapiens
  chr22:50496696-50497379
  hyper
cgtggcctcgggctgtgcagcggcggcggccccggggcgtggggctgcgcgggcggcggggggcgcgggggcgcggggagctgcggcgtgcggggggcgcgggccccgacgggcagcagtcatcagcgcttgggctgggcccgggttggggtccgggtcccgggctgctgtcggagcaggcgcggctgcggggtcggcggcgcgggacggtgcgcgccatggtgtccgccgggggagggcccgagtgtagccccgggtcacgcgctgcggccccgcgcccccctgtggaggtcacactccatcccccaccaggtcacaaagacccgcgggtcacatcctgcccctccccctcgggccccccaggcccgccaggccttctcgccctccccggggccctcatgccgccctctgtccctgggcccttccccgacgcgaggctggagcggcggggtgaggaggccgcgggcgctgggctcctcccgggctgcgcgctgcgggtcctggcggatgggggcgacggggtgaccgtatcagcgccccccgtcctgcggcggaacttgggagggccttggtatccgcagaaccactcgtggggtcccacgccgctgccccccggggggttctgagcccacccaggtccacacggcccctgtcgtttccccccgcaccccgcggatcacccc

SEQ ID NO: 336679 - DNA, 774 bp, Homo sapiens
  chr22:50623263-50624037
  hyper
cgccagcgccaggtcagccaagaacccggggtcgtggaggaggaaggaagtcgtgggcccgggatgcgcggccggaccattgcaggagagcggggcaggcggacggcgcagcagcttgcgggcagcgagtcgtctgcatgcggcggcgaagcgcccgggcccccgtccgcgccggtgcccgcagcgcgcagcaacttggccgccgggtcccggccgccccggtagaggctgggtacagcgagggggccgggcgcccgggcaggacgggcgcggcgggtggggcctggccgtctccccctgccctcggggccgaacacgcacagcgagagtctagcgtcggcgtggctgcggccagccgggtccccctggaggcctccggacgatcggaagtgactgagcgtccgggtccgtgaggccgggggtcggcccgccctaagactcccacctggtcccggttctccgtccgctaggctggccgcggggcccctggggcccgaccttcccggggtgccccaacctgcggcaaggccgaggtcccgctgaggcatgagtcccgggtcggggaccgctctgggccgacccccggaggacggactaggccgatccccagagggaagggggccaggccgaggccatggcagcgcgttccctgatcccgtgttctcggctcctcgcgtcccactatcggctgtccctttcgtgcgggactgacggctcacagaacagttacatttcaatatcattcgactgaaaaccatcctgtggacgccgtgc

SEQ ID NO: 336680 - DNA, 275 bp, Homo sapiens
  chr22:50690042-50690317
  hyper
cgaggggggcgaggggtctgcagggcaaaggccacgaggcgggaggagcccgcggggaggcaggtggcgctgcggccggctcagggcggtggtcgtggctgcatggaggcgcagcaccgcccccgaggtttaaggagggagtgagtccggttctagctccaagaagacccctggcccaagagcagagtcaaggtcggtggaggtggggacactggaccggggttgcggtagcatggtgggggactgaggaagataggaggcacgggcacagccac

SEQ ID NO: 336681 - DNA, 348 bp, Homo sapiens
  chr22:50982557-50982905
  hyper
cggcctcccacctcgaggcgatccgacacctcggcccaggtcgcacttttttgcccgttttgatcccatcctccaactgcggccacagccggaaatgtagagaaattcgcgctcctggggccggcggggctggcgctggctcacccgctccccgggccctcccagtcgccaggtttgcgctcggagcccaggggctgcgggttcacagttcgcccgcgagtcgctgtcaaccctccaggcgcggcccgggggcgctcgcgcgcgctgccaacggagccatccctgacgcgttctcagtctacggcagaaaacgccagtcggcgccggaccgtgactccagggtttcgc

SEQ ID NO: 336682 - DNA, 636 bp, Homo sapiens
  chr22:51042115-51042751
  hyper
cgctatgctcacccgccccggaggccctcagaggtgaggggtggtgggcccgcggggcgcggggaagcgggggaggagggcagggaggatggactggctgctggaagaggcctgggtggtgcagagagggtgaccccacctccctgcccagcagagctcccgggccccctccctgccacggacaccgggcccggcggggcgcagtcgccagtgcgcccgggttgcgactgcgaagggaaccggcctgcggaaccccctgcgccaggggggacttcgccctcctcagatcccggcatcgaggctgacctgagaagccgctcgagcggcggccgcgggggacgtcgcagcagccaggagctgtcctcgcccggctccgactcggaggacgcgggcggcgccgcctggggcgcatgatctcgtccatctcggagacggagctggagctgagcagcgatggcggaagcagcagcagcggccgctcctcgcacctcaccaactccatcgaggaggcctcgtcgcccgcctcggagccggagcccccgcgcgaacccccgcgccgccccgccttcctgcccgtgggccccgacgacaccaacagcgagtacgagtcggggtcggagtcggagccggacctca

SEQ ID NO: 336683 - DNA, 555 bp, Homo sapiens
  chr22:51111996-51112551
  hyper
atcaccccctcccgcgttgccacgacaacgcgtaaaactaaaattcacttcccagtcgcaggtggagactagtagcgccccctcccctaggcccttccccgtaggtcgcgcccccatcccgccgtcgctaaggtgacggggagggggcgacaggcgttggatccggaccggccaggggtccttggggggaagtccggagcaaactccccaaactaggctggcgtgggggagccgcgccgaacacgccagggcgcggtcgaaagggttaattcggagggcctctcgccgaggcggtgggaagggccccgggccctccccggtctggaggtccccgtggtccgacccccaggcctggggcgggggggggtccccgccatctcctccaggcccgaagctgggggtcggtggagtgggggggagaagccgccacctccggaaattaattgtttttctttccccttctcgccctaccttggtcttcgtgccccgacgcggcccccaccccagctccgggaccccttcctccgccgcacccgccccggtggtccgcggatg

SEQ ID NO: 336684 - DNA, 622 bp, Homo sapiens
  chrX:2815904-2816526
  hyper
cgcgtcataaatcccagcccttatcttgaacaagagtcaaagaccggacttgaaggcatcccccaagataaaggtaggccctctgcagggcagctgtaagtcagctctcctccacccctctggctggccccctccttatccgagtcctgcttccttcctctttaaatctgcagacaatgctgcttctctgcaggtctctgcatattccctcagctcacagaccggctgcatacttggtattttcagggttaggtttgcaacacatgactggggaaatgcatgaaaaggaaatgatgcaagaattcaccgcggacacctttaggtgagaaggagatgtgacaaaaagtctctgcctggccaaaccgtagccaggctcctgaagcccctcccaggcccggtggtgcgtttccttatagaattagatttcagcaaagtaccggctaagtcagtttggcgagaagccaccattcttgatatcatgttcctcgtcgtccaccacccctggttgatgtttaacccccttggctggctttaacaagccaggttggtttagccaggacccgcttcacctctgatgtttccttttagtgctttgccatctgtacacccgctgcctgccccc

SEQ ID NO: 336685 - DNA, 831 bp, Homo sapiens
  chrX:2846679-2847510
  hyper
cggggaacacggccgtgctggaaggcatcgagctggggggttgggggcgggacggggtgcctcttaggaagtggggcgggcaaggctacgcttcgggggatggagccttggggcgggacggggcgcgtcttagtggggcagagcggggggcgcggttcggggcgggtcttagggagcctttgaaggccgaatccgggcagcggtgtagctgggcgtggaaggcggaggacccagcagggcgtgaccggcccagtttccgctccctccgggtcccggccagccttcctccgccctcccttcccttcctcctttgttctctttccctgcccttccgccttcccttcagttcggtctcctccacccgcccttcgtcccctcagtcgccccccatccctgggctctgctgtctggcgtctttcccgggcacagaacgcgcctccagctacattttggagactacaaggcgccggacacaaccacgccctttacaggggcccaggctcgcccggggcgcccctcgccgtgctcgcgaccccctccccaggcccccaccctaggccttagtatgggccgcgtcccggggtcccaggcacctggcggcgggcgcggcgcgtcccctccgcgcggcggatcgcatggccgagcgctggcccagagcgcaggaccttgccctgcgcactccgcgcccgggcgccgctagtgccaaggcttccgccctctcagctgcgggatctgggccgggcgcccgcccctccttcatccgcgtcatctcctggctctcgggacctccgggacctgcgcgtggaaacaggttttcccaggtcgtcacac

SEQ ID NO: 336686 - DNA, 124 bp, Homo sapiens
  chrX:7895483-7895607
  hyper
cgcaggtatgtgacgtcatcgcgccgacgaaggcgcccgctaggccccgcctgctctatttaaacttctggactcaacctggccgctagaccggagcgtcctccagcgcaggcaaggattcctc

SEQ ID NO: 336687 - DNA, 1793 bp, Homo sapiens
  chrX:8698837-8700630
  hyper
tgagagaagagaaaaataagcggaggatttcagagctcgcacgctcgacagggctggtacaggcagcagctgcactcgctcgcgctgagtccggaacctgctctcgtgcgcccacccgcacccggagcctcgcgcaagtcccgcgggggtccgcgccacagggcagagtcccggcaacccgctggagccaagcgcgcggctcccggagcctcccacacaagcgcgcgcgcacacacacatactccccaccctcaggctgaaagaacctacgttcggggtttgggggacggttcccccgggactcgttgaggagtatccgaatacggccccgccaaatcccctgtccccggcacttcttccctgacgctctacgctagtccagggcaagaccttgaatctttggggttccgaattgaggcgcgcacagccactcgcacccccaacacgcgcatacacgcaccctggaacacgacttggcacaagtaccctggctggggctccaagggtgggcagcgagctctgagccctcagagagtgaaaaccatctttcaaaagagacaaagtgtcggcccgcgggcacctgcggggctggggctcgaggtgaggtccccaggcgcagccggacgcgcctcccagactccctcccagtgccccggagcgcctgggactttgcgggagtcgccgcccgcccggagtctcgcgcactccaattcccgggaaaccgccacatccacacacccactcccagcatccacgactctccctccccagggaaatcgcctttggtttcctgctgggaaggagggagttggggcaagatgtctcgggcttctttttcttttcaggagccgggaagaggctggaaaggagagttccagcaccccgactgtaagatccacgcccaggggaagccaggatcagccggcggcgctggccgagaactttgcgagcccaggctgggaggcgcgcgccccggtgcgcccacgccgcggccgcagccccagaaagaacccgggcgggggcctccccgtacctggaagtgctggaagaaggcggagatgcgagtgatctgcaggctcaggcacctggaggcgcagcgagcgcgctggacgctcccggcagacagcgactcgtccagccgccgcgcagcagccgcgccggggccggccgccaggcagccgctggaggccgccagccagaggcagagggtcaggaccgcgccgggcaccccgggcaccatggctgcgggtcgagggcgagggcgagggcgccgggcgcgggccgaggctccctgctccgcgccggggctgcactgctgaggaccaggcagacgccgcgactgagccggaaagttcaatccttcaactccggccggaccctcctcgccgacctccctcccagctcgccctcgaggggtggggtgagggggacaggaggccgcaccattggctggaaggcgtgtgagtgacaggggggccgggcgcagggcccatgggccggtctcgtcagctgcgagcccgggcgctccgggggagggcgacgccgagcggctttccacgccgcgcaggtctcgaggggcccagctcccacgcaggcgcctctcccgttcgcaccaaccgcttcctgcccctcccaccttccccctccgtccaggtaaacgtcggtgtgagcaggtccaggcctgccaggaggggtgctcccttcagcaggagggaagaggcctcaggacccccaggggcgtcccacctgcctggggattgaccccgcgcccctaagtggcttgctttctcccc

SEQ ID NO: 336688 - DNA, 1591 bp, Homo sapiens
  chrX:9432830-9434421
  hyper
cgtgggggagcggggcgggcttggtagggacgctggtcccccgaccgtgggacaggggctgggttgggacgcgggtccccactaggagccgcgggggaggggcagggccggagtccctaccctcgtaggggaggggctggttcgggacgcggctcccccggggcgcaggggcggggccgggtggtacgccgggtcccctcccacggccgtgagggaggggccggcggcgggggcggacccctggcggtcctcctggctggggtccgcgcgctcgcggcagctccccgtggaggtcactgtccgtgccagtccctcccgctgtcccgccctctcccgctgccgccgccgccgccgccgcgcccgcctcagcgcccccactccgcgcttgggagcgaggagccgccagcgcccccgccccgccgccgccgcagcgccctcaggccgccattcgccaccgaaactttccagcgcccgcgctctctccgggactcggcggcggcggggcgggggcggcccgggggcggcgcgcggctgctccggggcgccgggccctcttcggccgccgcacggccgggactcggaggctgccggctggagggaggttcggagcgcggccgggcgcgcggcgccgccacaagttgcgctgctcgcgacgaggtgagtgcgcagggctcggcgggccgggcgcggggtccgcaaacttctgcggggaggcgggtcccgcgctgaccctccagggtccggccggcggctcggggcgcccgaacgctccacccgcccctggaactcctgtaggtgcaggtcgccaactgtccccgcggcgctcggactggggtgcggcgcgctcccaggagcctgaacaataccccgaggtggccgctccccgaagtgccggcgcgccttgcggggagagacggaggtcggcggggggctcctttgttttggggagggggaagtggccggtaagtttagggaagcgctcggcttttcctccggtgcccctttgtctgccgattcaggggcttgctgggcaaacctgcgccaccgcgggctccggggaccggggtggagggcggtggcgggatttccccgctgttggggagaagagccccattcatacccgggacgcgggccggccctcccggacccgggtggaagcgcagcctcgcggagtggggcaagcggcgggcgaggtggcgcgggccccgtgtctgctcagtttctgacgcgcagaaactgtcaaggaagtcgggagccccagtcctccgcccatctccccggcctgagcgcacggctgggctgggggcacccttggcccgtcgagggtctgcagagcgccgcccggggagagcgcagacctgttgctgctcctgggctctgacggggcgggtggggtgggtctcgcagatcctgggccccggccttgctatccagggggaccttccctaacgatgggaccggtgctcggagtggagtatggggagtgcgccttcgggagtcggcgctggccggatatgtgacaactgtgggtcgctggaggcccgcctgcgctgggatagggcctggacttcacgtgcgtcgcctgtgttcc

SEQ ID NO: 336689 - DNA, 483 bp, Homo sapiens
  chrX:9753679-9754162
  hyper
cggacccgcgcccggctcaggctgctggggggcgcccttcccggctctctaagtccagagtgtgagtgcgcgcagggccgcgcgggacgggcggtccctctgccccggggcagcggccacagcgcgggcaccagggcctcccgcggcgcttccgctctcacctgcgcggcagcccgcggtgcgcgagaacaaagtgtgggcgccggcgggccgcgcgccccgagacggaggaggccggagactcccgccacgccaccccgcgcccatctcacctgccgcctcacctgcccggtcctggcctccaaccggcgggcgggggcgcccagagcttcgaagcactgcagagctctggcgcgggaggaaaggcccgacctggcgccggggcctccgcccccgtcctcgcccgcgctggctccgccagccccggggcgcgcgctcctcgaccccgaccccgaacccgctgaacggcgcgcgcgcctgagc

SEQ ID NO: 336690 - DNA, 1047 bp, Homo sapiens
  chrX:13706949-13707996
  hyper
cgtttgactagtcgtttttatcattgtaatcacgacatcctgtgactgtgctcatgaggtctgtttatttccactttacgtaaacttttcaaaatgacagttatttcgtactcgctgtcgcccgaacgcagacgggaggacacttcaggagcaatcgacccgaaggaaaagcacgatccaggccccgcctgcctcggctccaccttccccgcgcccgtcccccagggtctcggccgcgggaccccgccttccaggccccgccccgctttttccctggccccgccccggcccgtcgccatgttgttccctccgcgctggacgggagcagctggagcgggagcctggctgcgctaccgcggctgcctcctgctgtgcaggtccccgaccctctctctgtcctcattgcgcccagacgggccggcccagagctcccgggtcgtctttcgtgtggccgcgaggtgagcgggactcgggactccttcgggaccgggcggagtgcgcgggtgtcggggtctgagggggcggctcgggcctcgggcagctggggcggggtgcggtgcgcgcggggctagcgcgggtcacaaggccgccccgggagagaggacggctggttgtctccctgcctcctctctgacgcaggaggaaagacggtccccacacccttggggagagggactcacagaaacacacacaaacactggagaaagggagatacaaaagcccggacacccgtgcacatacacacggagaaatacacccggtcacctgggaacacacgtacacgccagcctttcccccaaccactccgggacacacatccacagaccccaaaccaaatcctacacccgaatgattaatgtagggaaaacaaaggcgctcccatgacttgattttggcgacctctgaagttccacctagcagaacgtgtttgctcgatgtcttacgaccactcgggtgaggaattcggaaagtaaagccaatcttagaggctgcaggcgttttgggggcattatctgattcagacgctggctaacgtttcacaatcgc

SEQ ID NO: 336691 - DNA, 958 bp, Homo sapiens
  chrX:13752377-13753335
  hyper
cggctccaaaaggcaacagtgcagccgttaagaaaccctgggttagctgaatgacccagtgaaccgcgaaaccacagcccccgagagggcggacgtctgcaggtggaagggctgcgcggatgagccagcggagggctggcaggtccggcccggccaccccggggaggggtggaggtacaggaccaacatccgcgtcacgcaggggctacgaagtcctccagggactcaaaacacccgccccccgccgcacttgctccattccctacctgcagtgggaggccgacaacggaaacgcaatgtcagtttccgcggaagagacccgcgccccgaacctgtagccagaacgccgaagcagttctcgcgataccctgggatgtgctctcgcgatacgtaggcggagcttccggccggtgctgggcaaccaagctcatgcgccgtagctcttcagctcgggaaggctatatttagcaggtttccggaagttgccggactggctgtgaggcggtcctgcctcgctgccttcagtccctagtgtctgggtccccgccctccagccgcctttgagtcgtgcctgggtcctcgcccttgcctcagaaccgcgaagaaaggaagctcgcgtgtttgctagaaaacctagttgggagtgcgaggcagagaacgttcagcacctttgttcctcccgaaccctcgggacagaggcagggttctgagggcagggattccccctcgtcttggccccaccgcccgggctgggcactaaactcgggccgcggcggggcgagcgaggcgggctccggagggagctgacgcctgatgatggcgcaggtagacacacctgccccttctcgggcggaaataaagtcttgttttgtgttcgttaaactttcgccgctaggcctcttatggcttccccggaggccactggtctgttttcagacgttcacgttccctctgcccc

SEQ ID NO: 336692 - DNA, 1084 bp, Homo sapiens; identical to SEQ ID NO: 241839
  chrX:13955972-13957056
  hyper

SEQ ID NO: 336693 - DNA, 145 bp, Homo sapiens
  chrX:14048163-14048308
  hyper
cggcaggcgtgggatggctgcgggtggcggggccggcggagagggagctgcaccgggcggggcactgggactgtggcgggcacccgcgccgggggtcggacggtgcttctgcaccggcgagataagggtcgcttctgcaccgccc

SEQ ID NO: 336694 - DNA, 373 bp, Homo sapiens
  chrX:15511311-15511684
  hyper
cgctgcggtagcggcacctggagccttagcggcgggggtgacgcgaagagccgccgggagcgagtgcagggagggcaggttaagagagtgtgggtccagtagcctcaccgtgactcagcgcttcgcggccggcggcctagaggaggcgggaggcgggagtctacgggtctcggaggccctggggctccgccctcgggaatgtcactccactctcgctccgccctacgcctctcccaggccagcttggcggccctttggcctccctgcctctcgtgccgggaagagatgctcactcgggtaatttaggcggcacttgctgtgctccaggaggaaatgtgtggcccgggcaggtgctctgatcggcgctccggtc

SEQ ID NO: 336695 - DNA, 678 bp, Homo sapiens
  chrX:15755988-15756666
  hyper
cgagggaaagtcactttttagataaggctctgaagccccaggtctagtttcaatccactaatgcggccagcggcgagcaggaggagggaggattggtccggcgggggcggggccagagcagggctcagaggcgtggcccaggctagagggaagagcccagggggagcgcagaggcggggctaggagggagcaggggtgaatgggggcgtggcccgggcgagaggggcgtggctgtagctaaaggggtgtggccagggtggagggcagagactggcacagtttggttgggcgtgaccggggcaataagtacggacgtagtggggcgtggatctgccaggtgggggcgtggcctccattgaggggcgtggccctggtatgtggggcgtaacagggcacgagggggcgtagcttcgatggccggacgtgcaggctgcggatccccgtaggcgagcgagcggctaggttcgtgatctggagagacgctcaggtaaggacgggtggccgagaggagtggggggcgaccagggacaggccgatccagacagggccgtgattcttcccacgactctccgctctggcgcaccgggttccggagctaggagagctgttgatcctgcgagtattgtctgggtcccggcagggcgcccgggagtactgagtggggcctaatggggtgtc

SEQ ID NO: 336696 - DNA, 980 bp, Homo sapiens
  chrX:16729957-16730937
  hyper
gtacggggaaaacgcgggggtcgttgtttaaggggtgcactgggaccggggagaggacagaaaggccatgttaccggcgctgatcaccagcctcgcagacccccgctcggggcttcacttccgccaacgccatctcagggctctcctggctcccgagggccgggagaagtggggatccgggtgcgggcgctggcgcgggcggaggcgggaagaagcgcgtcccggggacgcgcgggacaggctccaaccgcactgggcacgggccagcgttccccagtccccgcgccacacccggcagccgaggtctgcgagcgcggggctggcggccggacccgactcagcgctgggcagggagccggcgccatcagagagcggacaaaggagcccggccccacaagtgcaccggggctgggggtgcagggcggagaggccctggggacgagggatggcccgggcgccgaggccctgggggtctgggacaggcccagaagggaagttacctgcgcggtggtggtagcaccggggagggtggccggtgggcacggcgggctccaccccgcggctggcctggcgctcacctgtcgggctggggaaggggtcgctgccggggctgtccaaagccgcccccgggatcttcccaccgcccacacgggcctcggggtgcgcggcgccctcctcgcccaccttcccctctcctccctgctgctggcccagctcactcacgctggtgagcttggggtttgcacccgggtttgtgcaatggtccaaaacaagcgcctaaaaagtgattcctccagcacaggcagctcccgtcaccctccgctctggacgcactgggccccaggcctcgcccagcccggggaccgctcctccctcccgtggctcactttgcaaaggcacttcgagtgcgcgggtgaactccacgcttcccggggaaccccggcttcctggcaagccgagaccctcgctcgggtcctccc

SEQ ID NO: 336697 - DNA, 218 bp, Homo sapiens
  chrX:16805210-16805428
  hyper
gcagtaagataaccgcgcgggagccggggtgtgcttggccccccttcccccgcccccctgcgctccccgccactgcgcgggcgggcaggcgagcgggtgagtgtcgcagggccggtgcgagcgggacgctcggcccccgggacctagaccccggggctccgagggcttggctgcacgtggggccggggatggatggggaggcgatgctggaggacctc

SEQ ID NO: 336698 - DNA, 726 bp, Homo sapiens; identical to SEQ ID NO: 241846
  chrX:16887884-16888610
  hyper

SEQ ID NO: 336699 - DNA, 187 bp, Homo sapiens
  chrX:23801086-23801273
  hyper
cgccgctagcgaatcccacagcgcgccccgctgcccccacttttgtcctccgggttcacacgggcgcccggaagagagggtggtgcctgggagaggaaacgatgcgccccggggccgcggcctcattggatgagaggtcccacctcacggcccgaggcggggcttctttgcgcttaaaagccgagcc

SEQ ID NO: 336700 - DNA, 596 bp, Homo sapiens
  chrX:39680206-39680802
  hyper
cggcttggagcgggcgtataaattaaccgggggccgcagagtgaatacattgcacgcggtatttattatgcggccggacctccgaggggttctccggctcccggacgtggcaaatcttgtccggagcgccgctggccgcgctgccaagggctaggacgagaggacccgtggcggggggcggggggcttctcctccagtcctcgggagccccggggcagcccgcttacagcggcggcagcggggagggtttaggcgaggagagacgcggccccgggcgccgctcgggctaggggccgggcggggagggcggggcggtgggagcgggcggcgcgcccggccccttagcattccgccggcgcgcccgccatcgccgcgtgcgcccccgcgccccgctgtaattaccccgattaccaaatgaatctcgcgcttttgtgctcgccgggcggtgggtgcggggaggcagttctaatagttgtcattagggccgggggaggcggggcgccgggggctgagggtgggagcgcgggggtgggggaggcccgccattccctcgctggctcgcttgttcgctggcggtcccaggcggcgcgcaggcc

SEQ ID NO: 336701 - DNA, 304 bp, Homo sapiens
  chrX:39871661-39871965
  hyper
cgcggccaggaatccctctgcccgcagctgccgcggaggggttgagggttaaacagacaccgggcagaggagcgagcctgccggctgcggccggcgcggcgcggcgcggggagaggacgggagggaagagggcgcacgctacctagcctcccgacgagaagacgtctcctccccacgtcaggccgggctctcgcccactcggctggccgcctctgctccctggcctctcaagtctcagcggaaagaaacgtagcggctgccaaaagcaccccactccttttattgtccccataagcctatacac

SEQ ID NO: 336702 - DNA, 507 bp, Homo sapiens
  chrX:39873113-39873620
  hyper
cgagctggcccacttggcacggaagggcaggcaggccaggcgacgcggcgcgagattccacagctcccgctccggaccgggggaaatcctggagtgccagagagcccggggagggggcgctccgggagcctctccttgaaaggcgggatgctttccccgttcctcccgcgcacgtgtcctcagcagagcaggcaagcgctgcgcgcctggggctgcgatcctcgggtgacagcgactgagagcgcgccctctccacccccacccccgccgtcgccgcctctcctggggagctccagtctccagggtgcgctcggggcaggccccaagagccagagaaacggaaaagtgccggggaggcgattaggaagagaagacattaaaaagcccagccctgaaagacaggcagccgagctgaaaaagacgcctgcgaacccccaccccgccgcccctcgcctactgcgcccagacggcccctccttgtcccggctgagcgcacccacccccggc

SEQ ID NO: 336703 - DNA, 793 bp, Homo sapiens
  chrX:39873680-39874473
  hyper
gcgcgcgcgcgcgcgctcgagtgccgggagggcagttgcgaaacgggctcttggctgcagcgcggcataatggaggtggctggaacaatgcgcgctttgtgcgcgcggggagttgttttccacccgcctcgccccccttgctcgggccgtatggcactttaatctccgccacgactcggcacaaatgcacttgtgtcctgcgggtcactgggggccgtgcggctggagccgcccccaccccgacccccgcggaacccaccgccggctgccccatcttccttcctgagcaccccccaccaccacctcaattcccggcgtgggccggtgagctggcgtggaagcttccgggcccgccggccacttttattttccgtgaagacggcccctcccccgctccacgagcgcgcgcgcgcacacacacacacacacacacacacacgccgcccgcaggccccacactcaccgccctctctcgcctagcctctcctcggcccgcctccgcccccgcccccgcccccgccccgcgctccggactcctgcgaacaatagtaaatgtcaacagattccgcgcggcgagtgtctgactcggccgagataagggtgcgcggttggccccgcgctcctcgtcgccgcggggggagcccaccctgaccccggctggaaggaaccggctgtgactaaacccgtgccgggagaggggggcgggagggcagggcaccagtcccagctcggtggggcagcctcgccaggagaccaggccctgccccgcccccaccccacttaacccgttgcc

SEQ ID NO: 336704 - DNA, 223 bp, Homo sapiens
  chrX:39921413-39921636
  hyper
cgctgcagaagggtctcgccagcgttcttattgacaataagtctccgtgcttccggcggcatagggcgagactgggtggtctcctgaggggaacttgagcatggcagctgtgtggactgggaggctggtagcagttgctgcaagcggtcgaagggctttggctcctgcttggctggtgacagatcatagtccgaactgggctccggccgctttctgaatctcc

SEQ ID NO: 336705 - DNA, 301 bp, Homo sapiens
  chrX:39922006-39922307
  hyper
cggcattctccacgtagtattcccctgtcagtggcaatccccgcctggactcctgagggatcaagtgtttggttttgcacagtctcttcccggatggcttctcgctgttgtcggtgtatttctgcagcagggaggcagcctggcaatcctcttcttcgtctgcacacagcacatctgtcttctggttttctttaattttctgctgtttggcaggcggcctggaggctggtgcgcagcttggctgagcctgctttttgccgcctgcactggtggatgaaagactcttcatgggcggagagcc

SEQ ID NO: 336706 - DNA, 863 bp, Homo sapiens
  chrX:39931611-39932474
  hyper
cgttgctcccggctgagctgactggaatctgcatacagttcggtagtgacacatttgaatcggtcacccacgtaacccgctgagttggcgattctctttgccagcttagatggcttcggtttcagaactttgccatcatttgattcagcctcatcagctccatctttggtataggtgggggtcacatccacacttggtggggcactgcccacacaaaatggtttgggatcctcttgggttttaccaaaagttacagcagggccatcgctccccagaggtggctccaggaatggagtcgagactggcaaccctaggttctctttgttggtacctgccagaacactgtccttgcttacggtgaagactggctgtttgaaagtataagtttcgtggaagtcactgatgcgccccaactcctctctcagggcgatgaaatcacggtgctgctgcagggccggctcaactgagggcttggggggctcagcgctctggccaacactctctgctgcaaagctgggtttggacacgtttgtgtcagttttagcatctggttcttctcggagaaggtctacgtagacaagcttgtcgcttttgacaacagtcttcccttgattccagttggggttcggctttaggttcttgtcggtggggacatctggatgtaacttggtgctgctagtttccaaaatctcggaaaaccgattccggagggttgggtcctcgtaacgggctctctcatgggaccgggatctcctctctggtttctcctctttagtaatctctatgggcgtgtgtggtatcaacatgggatgcaccatgcccaaccccagggcatcttggtaggtcacaaactctggacggcc

SEQ ID NO: 336707 - DNA, 892 bp, Homo sapiens
  chrX:39933533-39934425
  hyper
cgagtaggtgtctgcagcaggctgggtgggaaggtggactcggggtgacggccgaggcgaggggggcaacaggagagctgtgtcccccggcaggccactggtgaccgccttggcagagggaaccctgggctgcttactgttctggatgtgaggataggcgtgggaatcaacaggattcccagggctgacgcccatcttccacgggaggcttttgtctgcgcaatggacgagaggcgggatggctggggaggccgaaggtgtcgagagcctcatgggtgatgccaaggacgatgggatgtggggaccgacgtagtgaggtggcggcaggtagagaaagcgctccccattggtgcagactggagaatacagcggctgggccaagctgtaggactgctgaggtagcaaggccttgtacatgttcagtgaatacttatttggcgagtcgaggaaagggtagatggctggcgtggcaccctccatgtaaggattgacccagggcagccgcagataactagcaccattgatgttgagagggctctgtttgtcgctggcaggcctgtccaagcccagcgcttctgctgtggctacagcacttttttgtattccaggcggtgttttgtatatagcactgaagccatttgggggttttccagagacggcagaagcctccactgtctcgggtgtattcggtttgaactgcatctctggatttctttccgaagaaaacccaaggccacctagagtgcttgtggcagcctcccgacctttctctgagcccagtccacacaagctagaatagacgatgtttcccgggacccgcagcccttcccggatcaggccagtgcggtccatgctcagtgctgccaggccatcgatcctatgggccgtgctc

SEQ ID NO: 336708 - DNA, 1027 bp, Homo sapiens
  chrX:39953610-39954637
  hyper
cggcccgcacggttcacggcggacagaacccggggagcgtgacggtgcctgcggggtgggggtagggggcccacaggcactggccgctccgagcgcaccacgggtcctctccagctccggccccccgcgctcccaccagcccggctgccggggcacagtcacagctccgcgcgctgggcagtcctatttttatcttgtctaatcctaaactgggcggggagcacaggcgtcgtgcttagagaacaagagataggcgcgggaggcggggaggagcagccaggcagcgacgcgagcgggagcgagttaaagacacagtggaggcgaccgcgggcaggaagaaagagcgggctgcgcgggcctcgaggcgccgcacgcaacgcgccgccccgcgaagttacactcgcttccccgccgtccctcgctaccggcccctccccacttcccagcggcgctccccgcagcctggacagcgaggccccggcctgtgtgggaggcggaggccaggacggccctgcaaagggctggagagaatcgctaatgagctgtgcagcccattgatccggagaacacttcctaattaactctcagtcacctactggtgacagcgcctcaaaggacagcgctggggccagccgagccccagccgcgacttgccggccgggcgcctgctgcccaaaacccgcgcgctcccctaaacaccccaaggcaattggtgtgcgtggcggtgtatacccgcacactgaaggccagcctcggattaaacctggatggcatattaatcatcgccttccccccccactccgctctacgcgctgaaaccctgcccaaaataaacacgaaaaccaacactgcaaaacccacaccagataacaggtcgagagaggagtgggcagggtcaaggaacgagcgtattccctaagtgtccacgtacaggaatctttgaggctgacaattaaaatgccttccacgcaagcaattctgttggcaaaaccgaacccaacacttcgtaaggattgatttcggcccg

SEQ ID NO: 336709 - DNA, 3660 bp, Homo sapiens
  chrX:39954918-39958578
  hyper
cgcgttggtttctttttaaggtttgtttctaaatacacataaccctcctccttccttcttcgctcttccattccccccacccccaccctccagacgccggcggcgcgcgccctggcgcgcgggcactcacagcctctagctggagatcgcggactttctggaaaagattcattaacagcaaattacgcctcgcccggccacggcctacacgctgccagactcgtccgtctccgggaccccgggaagggcccactcgagcgtgcgagcggcgggaagcccgccgggaccacgcgtgacttcggccgccctactccacacacggtgccccaaggctctctccgtaaacagcaggcgctcgtcaccgccgccgcgagcccccgagttggcggaggctctgcggcgcagccgcccgccggctccgagcgcgggccccgcggcgcctcgccctccccgccttggccgaggatcttgccccggtgcgcaagttcctcttcgcctacagcctccttgccacacgccctccgagtgggaccaacttcctccggccgcagactttcacacgcccatcagggctacccaccagactccccattgcccagcggagggcccaggtctcgcccgcccccgccctccctccacgacgctgcccccgcacaagcacattctacacccacccctgggggctcataacttaaaacctacgctgaacatcggggagggagaggagggggaaagcgggagggggatcgcagattataatcttaaaagaacatttacaaaacaaagcgtctgacctggctggcgggcgggccaagtcggaaccccttgctctgctcgatttcttagtagtttttttttttaatccacgtgattcgtgctttggggcaagccaagaaaaaacgggactcccctcccgagttgcgcggcagcggcggcaggtcgagctcggctcggcccgaggcactcgccacacaccctcgcgcacgcacacgccgacgttccacttggaggaacgaccggcccccggagaggcgagacgaggcggcggtggcggcggctgggggtttttacagttctttcccgagtcgaaaaagaaagcagacggcaacccgctgccctccccttcctgctcgcgagctaacgccgaacccagcttcccagcttccagcccacctcccccccctccgcccgactcgcggcgctcagcggcgaccgcgctcccgcgcacagacacacacaggctgcaaacttccactctgcgaactccctgctctcctcctggcccaccgggaggcgccaggcccccagccgcgccccctccctccctggtgcccacgcggggccgcttaggttggctgcattttaaataacatagctatgaaataaaaacgaaagcgagccaagcagccaaagggaagcgcgaggcaaaagcttcgcggggtacgctgcgggagggggccccgggagagggggccgactgcagccctcagcgcgcccgcccgcccacccgtccgcggtctcccgggggaaaggtgttccgggcactgacctgaaatccccggtgggggagtaggcagggagcctgcgatccggctctttgaagttttcccccaagcggactcgaggcggcgagaaggagcggggggcggttgggtgggtggagagagatatgaggggtggggggggttggcgacgttaacgagcggagaaggagccgggccggagaagcgcggcgagcagcaaagtttgcggtccccggctgcccgcagcccgctcgcggcgccgcgctcactcgactccctcgccgtctgctggcagccggctgccctcggggtcggccccgccgaggggtgggctctgggccgggtgggggcggggcggggcgggctcggggcctccgggcaggtggcgacagccccgtgcgatcctccgggctcccgcagctggactgggcttggccgagctcagcagctcccgcgctgccgccgccgcccgcgctcgggcaggagccccagcgccatgttgacggttcgccgcgagcgcccgctcgggctgggtgtgtgtgagtgtgtgtgagtgttggccaagtcgtccctgcgcggcgacagcgcggcttgggctctccgcccggcggctcgcgggctccccctccgccgccgccgcccgcctagctcccgctctcggtcgcggtctgggctcctgcgcgtctcccccgcagccgccgagctcggcccgcgttcagcgaggagcgcagctctgcctcaccttgccgctgggagcccaggctccgtctgccgccgcacgccgcgatcccaacgcgtcccccctccctggttccctcctcttcctcctccccctccctccgcccgtcctccctcccgcccgccctacctccctccctcccaacagccgcctcccctccccccgcaggcgcagcgctcgggcgacagccgcccgcccgccgccgcctccagctctcgcaagtttgagctccgccagtctccgctcaccctccgctgcggcgcctccgcggcggggtttcgggaggggtgattccccaggaaaggtttgcccgagtttccccggccgtcatcgatgcacggcccggcacgttttggcctctctggatccgaaccccggaccacttgggtggcgccccccctcctcgtcccccggcctcccctccccagctcgggccgagttggctgcgcacgcccgacccgggcgcacgtcctgggcgagccggagaccgacttgggcggcggcggcggcgagggctgccggcagagccagagccgaagggatgggggcggcgggggcggctctcccagccgcgcgccgagactcccctcgctacccagaaggccagtggaggaccgcaattaccataaagcgcctcgcactccgctcagccaaagctgtcaaaccccagcggcagcagccgctgccgccgcctcttgccaccagcgctgcgctctcccggcctcgtcccctccgagacccagcggagcgtggcctgtgtgctcccgtgctcacccccaccccagtttgccccttcctcccagaggagccctttcccatttcggtgttaaaagctacctgaaaacaccaccccaggcaacggtggccgttccgcctgaactccgcgcccgagttccccggacgtttcaattgtgtgggaattgtttggaggtgggggaaggggggagcagcccgtggaggcaccgggaggcgtgtggggggcggtcggcgagcggagatccgcctgtatttctcccggttctcgagcattttcacggtctgtacctctgatggttggaggggctgcccaggcccctcgccccggcgttgggagattatctcccgcgttttattttccttgacagggagcaacttttggcttacaccgttcgccccataaatttccactcggtaacgtcgtgctgatcggtgcttggcggcggcgtacagcctgcgcccgcagcagttcaattcaattgacacgtattgagcttctccagcgcacccggcgcggctctgggcgcggggggagggcgggggcaggcgggagggagggggaagcggagaagcgaggttccggcctccccggagcgcaaagcctcaagggcgagccgagaagccctagttggtgaagctggc

SEQ ID NO: 336710 - DNA, 948 bp, Homo sapiens
  chrX:39963967-39964915
  hyper
cgcggacggattgtccctggggagctgaaaccgcccagcggggaaacccctcctctcgcccttccccgaaaagcttggccgcggtctaagctccgagcaagcgggtatccgctgacagccgggcctcacgtaaggcccacacgcgtcccattagtcagcccgagttcccctcgggcgagccgcctggcgcggccccaaggccgggctcaggcggggagagggtgcggggccgcagcgagctgcgggcggaggtgcgggctccgcggagcccggccaggctcggttccgcgttcctgggcccgcgggtaagctgagtcggcggggcaggccgctccctggctggcgccggggcgccaagctgcgcttcacgtgcccgccatatcagcagcagcggcggcggcggcgaggagggggtgctgggaggcgcgcggccgttcccgcggggtctccggaccccgcctccccgcccctccccgtgggggctgggccgagaccaccctgcggcccccatcccagcgcaagccgaaagcggcgctgccagacgcagagaggctcctggggcgccgttccgagagccgcgcggcggcagcagccaggggagggtgctcctcgcggccgccccgccgccgccgccgcagtcacggggaccggaagccctcgcgccgccccgagcggcctccgctggccccagggctgttccagacgagggctggccgcgcgtcacccctgatccctcctcgccccaggcgaccacccgggccctgcggtatcccggtgtaagccgagaggacccttcctgcggtccgatgagatgtccctgtccctctgctaccaccataagcacgcccccccgcaccgctcgcagctccgcagctgggaccggaggggcgcggagccgccactccggccgggcaggaacacctgctcccaggccctgcagctgggcgc

SEQ ID NO: 336711 - DNA, 1315 bp, Homo sapiens
  chrX:39965257-39966572
  hyper
ggagtaggtcatggcggcaccggtactccacccgcccccctccacgtagggacgtagggtcggctgcggggctcggactttgccactccacctagggaagggccaatggacgctccccgtctcctccgtgtccggaggagatccggcggcggagctgacctgcaaggcttgccctgcctcacccaccccccacctccgtcccaccctccccgactctcctggcccagggcccggcccgggaaggcgttgttttgccagcgggagccgagcgagtgcacagagaaaagcctccctactctaatgagagtgcacacagcgctgcagcgaggaggatgattacccggcgggcggggggcgcgggctcgggccgcgggcggcgtgtgcggcggccccgcgggcccggagtccccgcctgtctggctgctaatcgcacgctttctgctgttacggaggcaggcgggagccggcggccgagcccagcgccgacgactcggcgggtgacacggaaacatggcgcagcgcccctcccccgcccgcgctcccgcctcccgccctccccgcgctcccgcctcccgcctcgcacttcctcccgcccgcgcggcttttgcagttttaatgctctgctttcggcctggcaccattacgctagcagccgcttctccgcggccccgcgcgtctctttcccctttgttttcggggtctatagaaaacgtttgcttttgtcccgagctctcgttaaaccaaacttgtggtggcaacggaaggcggtgcaggcggggaggggtccggggattttggcagtagccggccagagcgtggtggaaacttctctcgctgggttctccgctccctcccactccccctccccaacacagagccgccggcctcccgacgcttctcccttcgcccccgagaggccccagtgctccaggaaggtctgggccacagagactgtgaccaggggtgaagaactcagagtgcgtgtctgtgagccccgaggttttggcactcgatgaccttgctccctgcagccccgacttacctctttccctttggtcattcggggctttgtatcagtcggtgaagaaggggagggaagagaaagtgtttctttcgtgcgtgtggtttttattttaaggatttgttggaatctgtcacccccaactgcacagccccctcccgtataggatctagggcgaaagcggggaaacgtcggatttagggggaaagggtcgggtcagaaacctagccctggaggctggatcgtactctcctggcgggctcagccacacttggtcggcacgcggggcggggc

SEQ ID NO: 336712 - DNA, 898 bp, Homo sapiens
  chrX:39968299-39969197
  hyper
cgcacgattcgctcggcggagcgctgcgctgctgggctgggagggcggcggggaggaggagagacgagggggcgggaggcgaacccgggctgcgcgccaagaggcccggagccgcagattagtcaccgctcggctctgcgctcccgggtgcgcccgggaaccgggagggcaggcgtcggccccgctcagccgggctccccggtcctcggcgcgggtgcccccacccccacccccgcgcgctcctggcgcggctggctcgactctcggggacccgcgcagccgagatccacttgtcaggtcaagggcaggacagaaactctgcaagcggagtcttgcttgcgaacaggaaatttctccttgatgaggtgctgcccctcccccacgccgggcttcaaaacaaaactccagagcgggcggccaggtacccagcctcgctcgccatggccggcgacctccgctcctcggccccggccccgggcggcggagccaagccaacagagccggcggacggactcggcgccggccccgcggagggcgccaggctgccaccctccggggcccggacggggtcggcgggggtgcggagccccggagcccccgcgcctccccaggttctacagccaccgagcggttttgcggagctgcccgaggccgccgggtcagcggctccccggagggcgtggggggcggggaggccgcgcggcgccgccgactcggcgaatcccgctgcgggagcccgggagggctgcgagctcggcctggcaaagttcctgtggaaactccatgttttgaaactcctgcggcgtcgcagaaggagggggagaggggagcgcgggaagcgcgcgggggcggtctgcacccgcctctccccgccggggagtgggttccgcggcccccc

SEQ ID NO: 336713 - DNA, 648 bp, Homo sapiens
  chrX:40005424-40006072
  hyper
cgctctccgcacggtagcctgatccatctcgtgggcgcggaggcggggcgcggggctccgctcccgcggaggcgcggagccggggctggggagcccggtgcctccccccacggccctgaggtcctccctgcgcccccactctgtttaacccccaggtggggagaggaccccgagactgcacacagcgcgcccggggccctgccggggcctgagcgggcgggggacagtgtccgggaggagggagggccgagaggctgatttaaaggttctcaccgggaagcgagcgaggcacagacctgagagccgccgcgcggtgaaatccgaggagctctcttggcgaggaggggctgtcagaggccatttatctctcgccagagtggaggctcagctcccacaccgcccgcgagtaacaatggcagcgatcagcagctctgcacgcgcttcagtgcatgaatggattgcggaagatgcctgcgtccgctccgctcaggaggctctaggagcgccccctccccgcccgccgcgcccgcccccgtggcctccctaggccctgcgggcgcctcggggttcgcaagctgggccctgcggcgcgatcactctcacccagaacccccgccgccgttcccagggccttggcacctcgccacc

SEQ ID NO: 336714 - DNA, 3141 bp, Homo sapiens
  chrX:40012149-40015290
  hyper
cgagagggcgggaggagacagggagacttccgcgggaggccgatggtcaaagtggggggtgaaaccgctcagggtgaccgggctggagacccaggaacccgattcggcgcgaaggtgccgcgcgagttccagcgagcagcctgcccggccaagtggcgcctgcccagccgtcggccgtgccagcttcctgccctgcccaggaccgcggagcagtcggggacgccgccgcaggctggcccggaatcgcaggacagcggcggggggagggggtagccaggccgcaagtaaactcgcactagagctttctgcacacctccgccctagagagggggcccggacccccggtctgtgaggcgtcggctttggccttccaaccttggggtgcgcgaggaagcaaagacccagggggcacccccaccctcgcccaaggcccgagggtgggggacagctgaaatgtctttggtcttgtttgatgaccgcttggcggatctgctcccatccgggttctgccgttccgagagtgccgggtcagtgatacccaggccggtctgagcaggcatgtggatgagcaaaagcaaatctgtcgctcctccgaccgccacccctcacttaacctttcctgcatccaaggaaggggagggcacccagactctgccccaccccccgcggggcgctccctctgcctcggaagctgagactaagagcgagggttttccccctttcccctgggctcgctgggtttctaacttcctctaaacctccctcctcgctccgaaaagccccgaggagaggagctgagaggaagcacgccgctagtgtgcaaaatgaagaccatgtgtgaggacggcggcatcagagtgcagccgcgggggttagggggtggcaaaggcccccgcgcggccggaggctcggggccgcagcagccagtgcctctgctctgcgttggggactcggagccgcagcgagaggcagtggagaggcagggctggcctcgtggcgggaggcgaggagggggtgcgagggctgccgcgccgtggggggcagggggcggggacgcagccccggcttcctgggccgcagctgcgaccgagggcgcaagagcagatcgtgctctgcggcggtggcggctcgggcccgccgctctagcagctgagaatcaacaaagggaggcggcgggggaggggcgccaccgagcgttcgctggctgctctggaataataaaaaataattaataatgataataagagaaaaatcccccggctttcatggctctgggtttccgtgtggctgcagcgggaagcgcgctgtccttgaggcggcctctctcgcctggcctgcccgcccctccccctcctcgccccctcccctccccaggaaccgggaagagaaaggtctgcagctgacaaatattatccattctccccatcgatcgcggagtgtacagatgtgagcgcttgatgtgcccgcggagcggcggatcctccctgctcgctcgctctcgcccaggctccgctcgccgtccccctcctccccctttgttctcctcccctttccctctctttaaatagatttcagggcgctgcctgttggagagcagctggcgatctctcccgagagagggagcgagcgaagcccgaggtgccctgtcaccagcctcccctcccccacctcggcttttctctacgtcccccccaccccacctttctccagtttccaaaatagaaaacaccgggaacacccacgtccactgcaccgcgagcccctgggagcctttggacccctcgtgctgttccttgtgtctgtgtctgtgcagaggaagggcagtgcagggaggggacccagggccgcggcagaagagccaagggtccggatctttccctggcagcagcagggacgcagcgtgggtcacgctaacagggtacagtttacccattagggaaagtcggcggagacggccctgttattcctcttttgcagatggcagattaatccggcagcacccggcctcaaagggaccggctgctcggcaaagggttaacccgtcggccggtaatcgtggacacgcgcgcacacacacacacgcacgcgcgcgcgcgtcctctccgcctgcccgagcgcccgccgcggcccgcagtgcgcccggggctgggggagtagctgcgggaggggagggggtcgggggaggggcggggcgggcttaaccaggccgctcgactgagccggggccacctcgccgtctgtcacttaaatgattgtcctccgctccgctcagtgcggtcagtacgggctgttaacaggcagttgcaatcagtttccgaaaggtcagccaaggtcctccggctctcgcagacggaaggcattacgaaaccgcttttgtatctgcaggcactttagaaaaagaggcgagaaggggcgcaccgcagtgccgcggctgctgcgaccgggggagagggtcgggggctgcggagcagaggagtccgcacccccgcggccagggtcaggcggcgtggatatcacccgcggagtgacccagggcctccgggtttcggtggggaagcaggaagggggtggggagcaggcggcaagggaaggaggagtgggaggaagtgggagaggcgtcctggctcctctcctcacccagccaacagcccacacccggacccagacgggagcgggcggccttggacgcgaggagaccccactcggactctcaggccctcctggcgcctggaagtagggagggggtgtgggggggggaaagaccctcgccgagcgagcgagtcccagcgcggtgtctgaagacgctgctgccgccgccgctagaagtcgtccatcagcaaccagtccaacctgccagtgataatgtgcgatcaacaccaaatcacccccgccaggcgcgatccatcatcgcagcgcgccgcgggcccgcgtgaggctgactcgcggctggggtggggagggggggcgcgcggagcaggaggcggtcgcccagcacacccggactctccgcgcacctcgctgcccctcctggaggcctgcacccaggcgctcataactctccaagttccccagctacagagcgaaaacccagtggctccgagttctgggcacagctcacttaggaatccgcgcgtcctccgc

SEQ ID NO: 336715 - DNA, 552 bp, Homo sapiens
  chrX:40017448-40018000
  hyper
gaagtggcaggactggccctcggggtccccgtgggtaaaggaggagcggcttcgcgccctgggacagcgcgcgccccggctgacacggggctgtcgccgcttctcccccggacgcgggcggctgcgcaccggccgccatcttggcccggctgcgcaggcggcgctgcccccggcggtaggaccgcggagccgcaggctgggccggggctgccgcgcgggcgttcccgggctgccggggggcgctccctcccgaggcccccctccccgctgcgggccacgctgacccaggtcggggacgatggggcggccgtccctggtgaaagcgtggcctgtagtgtcgcccctcctcgaaacgctggagcggattttaatcctgagaaacgacctctggttcccggactcccgcgatggtcaacgtgttatcgcttctcccgcgcaccccagaactctgtccccagaggcaacctgccgaggcagctgggggtggggggcgaggcctacccaccgttcacagggcgctgttgaggccagagaggatttgagagttaccac

SEQ ID NO: 336716 - DNA, 1261 bp, Homo sapiens
  chrX:40030835-40032096
  hyper
cggatggaaaccgaggcacgcagccctcgaccccggccaggcgtggagtaggggagcagggggtgccccgcgtgggcgcaccctaagaaaccagtgcggacatggcgagcgagaccagagcgcagttgtgtgtggtttttccccaggtttttattcttccagccctgtggaaaggaggagagccgcaacccggagagggagccggaaagaaacacttaatcaccggcgtctcgctgctcgtcacgcgaagatggcagcggctcccctgggtttcaaggttccgggaaaggcgtgtgttctgccttaaggcgcgcgggctgatgcgctctctccctcggctcggcggccggctccggctcacagagcctctctcaacgccggcaagtgcagccgggccgcccagcccccaggccagcctggccccctctgggcctggggttggcgagggcagctgggcgtctgcgctgcccagcccagccgcggatccatggggtttcgcgagctgaaagtaaaggcttgagggagtggggacacccacaccgacccgcggcacgcaggggagtcaagctgcggccaatgcaagacgagcagggtagactactactagcggtggccggaggctcagccaccttcgcgggagaggggatttaccgccaccctcatccacgcgcaggccccaccgcccggtcctctcctctgatccccgggccattgcgaaacacggagcgaacaggtcctcgccagcagccgtcatttcccgggaagatgggaacccacaagcctgactgtgcttcctaaggatactagcgtgcgcgcagaccttggggggaaagagggcagcgcggtctccccgacccggactcttccctggcgcagcacacaaccgccacgggcttccgaagcgcccgagcggggaggaggaaggaaaagcggaggcccgggaggcgggctgcgcgcttggaagccgtgtgtgtttatgtgtctgcgcgcgcgccctggccggacgggtgttgaggggagagtgatcgtgagcaacccggaaccagcagtcccaacctggactgacgaactgggctctccagtcctgggccgtggggctccatgcctcgggctggcgggacaagcggcggggagcccggagcttcggagccgccgccgggcatctagccagctccgcgggagaagcccgggggcgcgtcgggagccaggggactggtgtgaactagccgcccccgcaggcggacgtttagctccggcaccc

SEQ ID NO: 336717 - DNA, 281 bp, Homo sapiens
  chrX:40033593-40033874
  hyper
cggcccctacaagacgctcccagccagcctccggaacaaacccgcagccctaaatcagaattccagttctcgagcgccacccggagagttcacatttcccctcctccgaggccgcgtggtgcgcaagaaagagcccgagggcggcggcagcacacgtctgggcagccccctccccgtacccagcagcgtgtacgcaggaaaagaaaaagccaagagaaaaacgtggactgtaaaagccaaaacgcagaaccatctactactaactaccgacaaccccaggc

SEQ ID NO: 336718 - DNA, 2334 bp, Homo sapiens
  chrX:40034239-40036573
  hyper
cgttttctagcccgagaaggggcaggcggccctcatggcgcctccttcggcggtttcctggcgaagcgcccatcctccccaagcaccaggaacggaggccgtccatattaatactcgcgggcagcctgttctgacctatactgtcattttttccatcggtcgggatcgggctgggggtggggtggggcgggggctctcctccgaggggctcagcacggatcgttgggttttccccggcgaacttaacacggaggcaaaaggggcagatggaaaccaggccccggctggccccgcgcgcgtaagcgcggcactcagcagctcgacgcaaagccagggctggattttcgcggcccgggcccggcggccgcccagcgcccgcgcgatcctctctccttcgggttgagcaaacgtggtcgcctaattccgcccgggagacagcagctgtgcggcgagagggggagaaaaaatatcgcaacttttccaacagaaagtgtgtgcgcacacgagaggtgaaggcccaccccgattctgtgcacgtatcgacacagcatctaatcagtgtcactgccaggaatacgcttccgcggcgggcgacaccgccgccctcgccaacctgcaggagggaggggggatgcaaatggcgtctcgcgtcgtcctagactccgcgcagcacccgctaccgcgactccaagcagacgttgcagcaaactggggtgcagcgtctggggacgcgaacgcgcaggcggcccgagcggtcgcagggaagaggaactagcaccactccccgctacgagaccgttccccgcccccacctccggaagagccgcccttactcgactggggtgaggggcgggaaactttgcaagaagactgttccgcgccttccccgcgtggcacctcagaagaacgtgggtgggtttcccgtccgaggccagaccacgctaccctacttttccaggtttcggacctgaacctcgtggactacgggagggagagtacatttcgggccactgcggggggcggagggacaccaaagacaggcgtcttcaagggttctggcagatggccaagtttgtgtcctttccctcccacgctagagtagcgcacgccactttggggaagcgtgagaccgttcaccaccggccacgaggccaccaatgtcttccaggtggggccgatggtttgtctgcagcactcccttccgccttgcggtcctcgcctggctcccacagtcctggggagcccccagagctagcccgcgtcttccctcgcccgctcttccgggggaaagggaggctgtttgtgtggtgtgtagccccgctccggcttgcacccccgcgagccacctcgcagccctccccggcctcggcctcacggatcccctcccggagtagccccgcgggcccccccgccatgcgtaatggggcgcccctgggacgcaggcggggatggcggttccggtcgttccgggatttgcgtgcaagaagaaaacaaggccggcgactacaagagcggcgactccattcttggggttcagacgccctcgcagcctccgcgtcggttccgctctcgccccgggagcccgcttccgtgtccctgcccccgccccccaacgattcctcgtccggcccgtgccgcaccacgcggagctccgcgcgccctggctcccacaccggtccctccataactcgcgctcctccctcgctccgggctcggggagccgctcgctcccagcgcccagagtcagccggttccaccttcggctgcgagagccgccgccccgcgccacccccgcccggcccggcccttgtcccagcccggctcccccgccagctgcgccgccaccgccgcacgtgacccgcccccgtcgcggcttccgctgagctgcctgttccggggcacaaacaatttttgctctgacgcggggtctctcgggggccctggcgtcctctactccctgctccccaccccaccccaccccctaccttccgggtaggagaactcaaaacaactcgctgaccttcgggccgaccagctccgtcttccactgactccagcattccgttcaaacccagcagccacggcttctaagatttcactccgctctgggctgggggggagggggcgagttctccgggagggggtgtctcagatcgaaagagccacttcacgctctttctcctcctccgaggtgagtttttagactatttggaggccttggggaaacgcgagcagccgcgtgcaaaggagcccccccgccttctccccgcacatgcagccttgtctagtgtgacccgatttccagggtcagcagcagagggcctggccagcttc

SEQ ID NO: 336719 - DNA, 170 bp, Homo sapiens
  chrX:40126403-40126573
  hyper
cgggacgcgcagccgcccggcgcagaggaagcccgggacgctggggacaccgcctggagcctccgcgcatagcaccggggcgttttttccttccagctggaggcttcccatttaacctctaaggtgccagaagatccggatccctcgcgggcaggcctttggctggctcc

SEQ ID NO: 336720 - DNA, 205 bp, Homo sapiens
  chrX:40506434-40506639
  hyper
cgtcgcggtgggccccgcatcgcggagggaacaggacacttgcgctctgggtctgggacaggaacggggatgaggaggggtggggtgggggcggtggtcaaggccccgagccaggtgctcacctggcgggcgcgagggctgcaccgtgagccgccgcggcagacggcgcggggccccaggccgggggctgcggcgagtaggccgc

SEQ ID NO: 336721 - DNA, 203 bp, Homo sapiens
  chrX:40595088-40595291
  hyper
cgcgtgggagtgaggcggtacctgtgagcgcgcgggagagcggaaaagggagccgcgcgccgccggaaaccagggtgagggctgagccggagtcgtcaccgggaacgtcagcagttgccccgcccttaccctcgccgctctccctcccgcctccgccccctggcgttgtaaaggcgacaatttgcccagagaaatccaccatc

SEQ ID NO: 336722 - DNA, 264 bp, Homo sapiens
  chrX:41112874-41113138
  hyper
cggcgctctctctgccccggttctatcacgcgcatccgttaggaactaagcggcacctgcgcgaggctaggcttgttgacatatttcttgctggcggcgtcctctcgcgtggagcacgactgcgcaaagcgccgacagtcccccgagcgaggacggcagcgagactccgaagcccccttagcaaccaagccggtgccgctgcccttgcgccgggactgcagccgggtcttccgaagtgaggatatgctgccctctagaggccgc

SEQ ID NO: 336723 - DNA, 42 bp, Homo sapiens
  chrX:44202877-44202919
  hyper
cggcaggcagcggcgcctcccggccgtgttgtttggccccca

SEQ ID NO: 336724 - DNA, 198 bp, Homo sapiens
  chrX:68758240-68758438
  hyper
cgacaccggccgctgggtggcgctgtggctcctcctacccaggctggaggcaccagggaggcggaggcgcagccgcggaactgggcctggcgctagggtccgtgggcgcctgcagagcgggttcttcctcgtcggttcctttctcccacttcgcgcgcttctcccgcgttcaggcccgttcccatccctaacccggcc

SEQ ID NO: 336725 - DNA, 1881 bp, Homo sapiens
  chrX:71525285-71527166
  hyper
gtttgcggacagctcggctgccctcctcgccgcatcccagatggagccgcggaaccgggggcggccgggagcatcccttgcacggcgggcgcgtgcacccaggccaccggggccctgagcgtccgttcccgcaagtgctgtatcaggaactgatcttagagacaggatggacaggcaggaaggggcacggggtgtcggcctccgcggcgagtccgcactccggcgccggctgctgccactctcgcgcctgatcaacacttactgagcgcccgctgagcatccgacgcggcagcaggctgagcctaccccctagccaagccgcctgcggtcagtgctaaaaccccgctaggagaagagtgagagaggctcggagaggtgcggtaacttgcccaaggtcacagcgctagaaagtggcggagccgggattcgcagccaggtctctctgactccaagtccggtgctctgcgaagcagggactcggcgcgcggctcgccagcccgcgtttatagggagaggggtgtgcgcgtgggtgtgtgtgtgtgggcgtgtgtcgggggaggggagggctgaggtcgactgggcagtagaggcaagttgcccaaattcgctaacttccatcccgcaattccgctgaactcggcccgaaaagccccctcttgcctcaattccccgaagtaaatctgagctttgtgcagctccggagccagagcgtccagatgcggtccgggagattagcaaagtcggtggaagccaagctggagaaagcgcgggcgcagggagaaaaggtgctgccgtctccccgggagaagcgggcacccggccccgctggccggcaggggggcgcgctggcaagcgaacccgagcgctggcgggcgggcgggcgggcggcccctcgcccccagcagagcagctttccaacagaaagcaagtctccccagaaccctccggcccgcctggcggccgcccactccccatacccgctccacgggagtcctcggccccgccgcccagcccggcgcccagcccggcggcccggcttacctctgagaagccgcctgccctggagagagggaagcgcggagctcggtgagccgcaagagaggcggcggagcccccagcccctggcacgcacgccgccgccaccgctaccgcgaaccggtcgcgctcagcgcccgcggccgcgccgttggccacccgaccccggggcgcctgggaaaagcccgcaccgcgccgcgccgccgctgcaccgcacagtgccgcgccaagcagcccctgaccgagctggtgcccgcccgcccgcccgcagcttcggcgccggactccggggcggtggcggtggcggccaccgcgctcccttcccggcgctggggacccggctctcaagcccccattgccgcccggagagccctgacgcacacgcacacggcagcagactggcctcggctaggaatcccaggaaggacagaccctttttttccctttttttttctcccctcaatttccacgtctttataaccggcttagggcattattagcacatgtcctggctcgtgggcgagttggtggcaaaatctgaactggatactcacggagggcccgcgcgggtgctgtgccgtccgctgctctcttcctcctcaccgagaactgcccctcgccggcggactacaagagggcagccgggcagagcgagcttcctctcggcagctcagcggtgccccttctgcagctttgccgccgggcacatttttatagcagcggctggcgtctgtggccctttaaaggcgctcgagctggtgcagtcaccgcggatcgtgtgaaagcaaagggccggctggggaacggagtccacgcggccacgcgagtccggcagccctgtggacc

SEQ ID NO: 336726 - DNA, 293 bp, Homo sapiens
  chrX:95940048-95940341
  hyper
cggagaaagatggagcagcccggggcggcggcgtcgggagcgggaggcggcagcgaggaacccggtgggggccggagcaacaagcggagcgcggggaaccgggccgccaatgaagaggaaacgaaaaacaaacccaaattggtgagtgctcccgcagcccccgccggccttagggacagggagagccccgggatcctcctgccattgaacacgggggcacccggggccccctcccaaggatgaccgcgacctcgctgtgcaactcggggagccgctaaaggagtggccacgcc

SEQ ID NO: 336727 - DNA, 393 bp, Homo sapiens
  chrX:102862914-102863307
  hyper
cgggcagcgggggagcagcgagcgggcttccgcgagccggagaaggcacaggcctgtcccgggtcccggcaggtcagtgtgaaggtgggcgctgccggcggaaccacggaaggggtggaggtggctggcagtaggagtagggaggggcggagaaaggatccgggagactggtgaggagggggaagcggagcggtcggaggcaagggcgggggagcctggcccgccttctcgacgaccccctgcactgagccgtccatccattttagtactggaaatggagtacgggggggcaaccccgcagtgcaacagtgaaacgtagacatattctggaaataaccgcctctcacaatctgctcccatggaaacatctgacctccgcaaaaacggggtggc

SEQ ID NO: 336728 - DNA, 286 bp, Homo sapiens
  chrX:110924337-110924623
  hyper
cggccattacggatttccgcctccctcacagaaggcagtcactgcaacgtgcgtggcctcagttgcgtcatatccggcccttgcgatcagggcttgaggaacccgcgccatgaagtgcgtgtttgttaccgtagggaccaccagctttgacgacctcattgcgtgtgtgtcggcgcccgacagtctgcaagtgagtgagggaggcgagcaggcggcggcttggctcgccacccgccatctccggccatactgccagccgcgttagccttgcctgaccgtcgcgctc

SEQ ID NO: 336729 - DNA, 329 bp, Homo sapiens
  chrX:123094093-123094422
  hyper
cgcggctcgatcgggtccgcggcggaagcgcggccaaacgaatgagtaagtcaggcgcgggcacggcaccttgtttaccccactcggcggcgcgcccctgcgggcgcctggtttgcgggcggcgtcggagacgctgaacccgggagtcagtcggccacgattggtcggtgactgggaggaggacgctgggtgggagggctgggagccaggcgttgcagtggcaactctctgccgctagatgccgctccctcccaacgggagccgggcgcgggttcgtggccgacagatggcgcctgcgcgttccattcgcctccaagtcgccgaagagc

SEQ ID NO: 336730 - DNA, 198 bp, Homo sapiens
  chrX:123094505-123094703
  hyper
cgccggatccgaccgccactttcaaaaccccccaccgctctagaaccgcgggagcttccgtccctgagtagaattcgagggtgtaaagaagaggaaggggaaaaatatcttgtaccagcccaggggtgaagaagcccccggcctgagaaagaaggaggagtgggggaggcgaacagtctcgttgctgcctctgtgtac

SEQ ID NO: 336731 - DNA, 856 bp, Homo sapiens
  chrX:129146935-129147791
  hyper
cggcagttggaagtggcagcaatgcccggggggcagacccagatggcagtgctacagaaaaacttgggcacaagtcagaagacaagcctgacgatccccagccaaaaatggactacgctgggaacgtggcagaggctgagggcttcttggtgcccctgagcagcccaggagacgggctcaagcttcccgcatctgacagcgccgaggccagcaacagcagggccgactgctcctggactccactcaacacccaaatgagcaaacaggttgactgctcacccgccggagtaaaggctttggactctcggcaaggtgttggagagaagaatactttcattttggcaactctgggaactggagtccctgtggaggggaccctgcccctggttaccactaacttcagtcctctgccagcccctatctgtccccctgctcccggttcggcctctgtgccccactctgttccagatgcattccaggttcccctctccgtccctgccccagtcccccattcagggcttgttccagtccaagttgccacttcggttccagctccttcccctcccttagcacctgtcccggctctggctccagcgccaccgtcagtgcccacgctcatctctgactcgaaccccctttctgtttcggcctcagtcttggtgcctgtgccagcttctgctcccccttcaggcccggttcccttgtcggctccagctcctgccccgctttcagtcccagtttcagctcctcccttggctctcatccaggctcctgtgcccccttcagctccgaccttggttctcgctcccgtccccactccggttctggctcccatgccagcatccacgcctccagc

SEQ ID NO: 336732 - DNA, 116 bp, Homo sapiens
  chrX:129171389-129171505
  hyper
cgtgacaatgctggctacacagccctgcatgaggcttgttcccggggctggaccgacatcctgaacatcctgctggagcacggggccaacgtgaactgcagtgcgcaggacggcac

SEQ ID NO: 336733 - DNA, 155 bp, Homo sapiens
  chrX:133507341-133507496
  hyper
aagggcgctccgcgagcccgtctctcctcgaatgaaaggaaacaacctccggcgacagagccccgctctcaggcactgctggagaaccgagaccgacttctttctctttaccctcattggcgcttctctcctgcagtccgcctctgggccctgcc

SEQ ID NO: 336734 - DNA, 715 bp, Homo sapiens
  chrY:2655227-2655942
  hyper
cggcagcatcttcgccttccgacgaggtcgatacttataattcgggtatttctctctgtgcatggcctgtaatttctgtgcctcctggaagaatggccatttttcggcttcagtaagcattttccactggtatcccagctgcttgctgatctctgagtttcgcattctgggattctctagagccatcttgcgcctctgatcgcgagaccacacgatgaatgcgttcatgggtcgcttcactctatcctggacgttgcctttactgttttctcccgtttcacactgatacttagagttacagctttcagtgcaaaggaaggaagagcttctccggagagcgggaatattctcttgcacagctggactgtaatcatcgctgttgaatacgcttaacatagcagaagcatatgattgcattgtcaaaaacaaggagagtgcgacaaaattgaaaggtgccagagttcgaaacttattttactatccaaaactcacttctaccagattctttgttacgttaacttttgtaatgaaacttgcatttctccgccctcaacaccccctcaaccccgcccaaccagcctaccccctagtaccctgacaatgtattcattctcaagcaaaacatggtaattcagtaacgttgactacttgccctgctgatctgcctccctgactgctctactgctgtcctgaaaaatgcgaatttgacttaatc

SEQ ID NO: 336735 - DNA, 166 bp, Homo sapiens
  chrY:4869597-4869763
  hyper
gcgtagcgataaaacggctcttttttttttcgaggaaagtaatgtaccttttaaaagaggttcatcggaaaatgtgactttttaaaagcgagcagccgcaaacgggtgcattttttagactttagaagagcggagcggcagtccgcccgggttgcggctgggactc

SEQ ID NO: 336736 - DNA, 244 bp, Homo sapiens
  chrY:7140850-7141094
  hyper
cggttagctgtgcaaggatggctcggcctggtccccctaaaaatgtgtccgttctaacttagaggccgctttggctctcagaaagcccccctgacctgaggactgagggactggagaccgctttcagtcgcagaatcgctgagatccctcaaaacaaaggcgtttccagtttgaccccttgctgctcaatgtgtggttggccaaccgacagcctggggcgccctggttgcgggtcaggggagca

SEQ ID NO: 336737 - DNA, 237 bp, Homo sapiens
  chrY:14532909-14533146
  hyper
cgcctccctccccaagcctctcagctctacgtccccgcccccgtctgtcctccatactgaggcagcctccgtctccccgtgcccactgcgcctggaccacctgtactcctcagcactcggcgcctcggctcggcccacccacccgcaagcgccgctagcctatccctgcgccccgcacccctccccgcctttgcttttgggcaacctctctctgacctccagctcccagcgcctctc

SEQ ID NO: 336738 - DNA, 338 bp, Homo sapiens
  chrY:14533316-14533654
  hyper
cgatcccctgcaccccgctgcagcccccgcacctcttccggcgccctggctgcctctgcccaaagccggcgctgggggcccggagggcagcgattggcctctgtcctgaagcccggccccgcctccgcccagccctggtaggcgcgggtcagctcctcagccctgcagcccctgcccgcaagcccgcgcgcctcctggtgtccagccccagctaccaaggagagagacccaggaaccgccagtggctgcgctccacgccggcgcccagcccctcgcccaccgcggcccccttggcagttggcggtttctaggtttggacatttaacctttaattggcc

SEQ ID NO: 336739 - DNA, 215 bp, Homo sapiens
  chrY:15863195-15863410
  hyper
cttaggaaacaaagcgtgtggaactaaaggaaggtaggacgcccctggcggtcctgaggcctctttggtcctgctaaagagagcacccctgctggcaggcgtgggcctgctcacacctggacggagaggggaggtaggaggggcaggaagcggttggtgcggacggggaggcgactgcgtggggtcttccgacatcacccttcagctgagtgtcc

SEQ ID NO: 336740 - DNA, 459 bp, Homo sapiens
  chrY:15863656-15864115
  hyper
ccctcgcatccgatcggcagccatggtgcccgaggtgcccggcgcggtcctgaccctctgcctctggctggaggcctcggagggctgcctggcggccggccccggagcagctgctgctcagctgctggacgagtcgctgtctgccgggagcgtcctgcgcgcccgctgcgcctccaggtgcctaagcttgccaatcatacgcatctctgccttcttccagcacttccaggttagtggagactcccgcccgccccgggttctttctggtgctgcggccgcggcgggagtgcacccgggcgcgagagtgcacccgggcgcgcgccgaccagcctaggcgcgaaaagttttcggccagcgcagcgagctgacctggcttctcctgggcgtggatcttacagtcggggtgcttaaatcgtgttttccagcctcctcccggctcccgatacgaaaaagaagccc

SEQ ID NO: 336741 - DNA, 1398 bp, Homo sapiens
  chrY:16635744-16637142
  hyper
cgcgctggaaaccccgcgtgaagatgaaatgactgtagctccgtgctgctcctccaaactcgggagcggtatccatgcacccctttcccgtgtgtgtgggttacgacgtgggtgggagtggtgaggcaagccgcaaaagtggggtagagctggtggttttgcttcttcggaagcctttgagtgtggcctggaccttagatgggggtgcagggcggtttgccgctgccaccctcggcaccatctctgaactgcccgcttttccggaggagcggaaaagttggaagccgaaaagacaggcgcccggagccctggtctaggtatcaggtgatccggagccctagtcggtgcccactaagaacaccccttctcccatcgggggttcggaggagtgttaagcctgcgggtctgccagtccctaaggtagggatgggggaggggtctgaggaatccgttccaataggcacaccatccccacagccctagaaaaggcaaccaccacccgctccttcctcccgcaccatcccatctcaaggctctctgctgacccgggccgatttcatctggtctcttctcccccgcttcccacctcccaattcccgcgcagctcggctccgttccctcccactcccctaggcggaactgaaagcgaagatcagccaagagcacagtcggaggcggcagagacggtggcgggtgagctaggggctgtgagacgaagcagggagagagtgaacttcagccccgtcccctccccactgccacggctggggcaacccaacccgcgcctgaagcggcttggcttgacctgcggaagcgcgggccgggatggcgtggggagagggaggtaggtgccactgggctgcagatgacgagtgggttgggggcttgctgtgggacaagaggttcaggttccggcctgcgccttccactccgcggtggcgctctctgcctgcggttttccaggaggccgatctaccccagggacactctcatccttcaggcggtctcctggacgccctttcctccccttgcctcccagcctgacctggctctttcgcccctcggagaaccggtaggttggggtccctcggcgggggtctagtgagccgagtcgcgagctttgcgcccccggtatctaggccccgtgccgcgcgcaaatccgggcccaggcgtacagttctggagcctagtcgccgccagacacagggccctttgtacccggaggagcgggagcgggagcgggggcgtcagggcaacccttgcaccccagaggcctgcctaggaccaccctgggaacaaatgtctcgctcggaaaacgaggtgaacccggaggatgtcctacgcatcatacccctccccttcttgagaaggctttttctttttttctttttttttccc

SEQ ID NO: 336742 - DNA, 584 bp, Homo sapiens
  AC211344.3_7702-13588:3943-4527
  hyper
cgtcactgctgcaaccacagggcgccagcctcccgcatccctgagtgctggtgctggagatgccgcctccgccggccaagcgctgctgctgctgctgctgctgctgctcgcatgggccgtgcatgccgctttccgttccaagttgggcaggtgctgctgacagggaagctgagggcgtctgcctgcaccgccgttggcagcttctccaatgcaaggcagacccggcctcctaaggaggggtttctccaggaagttaaggtgcttagacggtgaagaacgaaacggcccacaacagtccttctatttcgctgctttgtacaaacaccgttctgcccacacctcaccttactgccctcatagtgcagctgagccttgtagaggtgaatccccactccctccagggcccagcccgcagcttatcagcaaccgccaggaggcggggaggcgtccactcttgctgcgtcgctttcctggttgtaaagctcgtgggtgaacattgcaaacttaaccagcaaaaaccaccggagataaaataggaaagacaaaggaaagaggaggaacacgcatttaacacacagcatctc

SEQ ID NO: 336743 - DNA, 522 bp, Homo sapiens
  AC241851.2_88-34049:15074-15596
  hyper
cggcgccgcggctttttgcggctttttgccgccgcgggtttttcctgccgcggcttcttgcccccaccgcccgggctttttgcgccgcggctttttgctgctatttgtccctgccaccgcggcgttttgcccccgcagccgcggctccttgccccctacgcggcttcctgcctccgccaccgtggctttttatcaccccagccgctttttgaaccccccgccgcgggtttttgccgccgcggcttcttgcccccctcgccgcggctttttacccccacagcggcggctttctgcccctgcctctgagggtttttgcggctttatgtccccgctgtcgtggctttttgccgccgcggcttttggccccctccgccgcggctttttgcggcttttggcacccaacgccgcggctttttggggcttttggtccccgccaccggggcttttttcccccaccgccgcaggtttttcccgcccctgctttttgcccccgccaccgcggcttcttacccccgccaccgc

SEQ ID NO: 336744 - DNA, 88 bp, Homo sapiens
  AC241851.2_88-34049:15853-15941
  hyper
cgctggcgccccgggctctgctcctgggccgctgcagcctgcatagagcagcgctgcgctcggccgcgttgggagagaagaaggaggg

SEQ ID NO: 336745 - DNA, 732 bp, Homo sapiens
  AEKP01168736.1_1-4752:1854-2586
  hyper
cgggctggccggcgcggctgcgctgaccggggcgctcagctttgtgctcctggcggccgccatcggcacggacttctggtatatcattgacaccgagcggctggagaggactggcccgggggcgcaggacctgctggggtccatcaatcgcagccagcccgagcctctgagctcccactccggcctctggcggacctgccggggtaagggtgcaccccgtggctgggagctgtggctgcgaacgccccctgcgcggtgccctgctcccttgggacctgttgcttggcgcgcactcctcccccaagtccctaaaatacaatgtctagggactcggggggaaggtgagcagaaggccgggactgcgaaaacccttccgagaggcacccggctgcgatcccaactgctctagctctccccgcgccctccccgggtggggcacttagggtgagcatgggggcaaagccgcagacgagggtgctgcacagaactccggggtcctgcacccatggattcctccgtcctatccagtgcagagcccgtgcacaccgctgatgaaccccttcaggctggagaacgtgacagtcagcgaatcgagccggcaacttctcagtgagtccggggagggtgaggatggagggagcgccccggtcctagccgtgagttctggagcctttcccaaaacagccgggcttcggggcctgcggagagggcggctggggtggcctctgacag

SEQ ID NO: 336746 - DNA, 111 bp, Homo sapiens
  JH636052.4:789300-789411
  hyper
cgacggctgccttccgctcgccgccccccggttttcccggctccgaccctatcctctaacccgtttcctgcttcagctgaccacattgttttcctggatgtgtcccgtgcc

SEQ ID NO: 336747 - DNA, 445 bp, Homo sapiens
  JH636052.4:1361757-1362202
  hyper
ggggggggagggggggcctgcgaagcacaggaaaacttgtcttttcgttgtaacttccgcttcgttactacaagttacgcagctgagcttcccacgttagagaaaatgacagaacagcacacttgaaatgaaatagttgagtcgggtttaaaagccatttcagtaaccacaatatctgccctgccacataaataagattgcacctatctccgccccgccacagctccatacgcctcaccctttaaacgcacagtcacttgccccagcaccactccagccaatccccaaccaccccgagccctcctagccctaacacacagctgggactctcatgtccagccagtggtcctggacttgctcctacagcgcgggaaatccttcgtggcgaagcagcagcccctgcgctgcctcatctacatagaaacgccctatcggtgatgtcacc

SEQ ID NO: 336748 - DNA, 523 bp, Homo sapiens
  chr1:896874-897397
  hypo
cgtgcgcacaaagtggtgctggcctcctgcagcccctacttccacgccatgttcacaagcaagtacccgcctgggcggcgctgggggctccgtgggtccctcgggtcagctcgtgtaacccgctgtccccgcagatgagatgagcgagagccgccagacccacgtgacgctgcacgacatcgaccctcaggccttggaccagctggtgcagtttgcctacacggctgagattgtggtgggcgagggcaatgtgcaggtgagggctccctcacccggatcccggtgtcccccgaccctgtgcctccctcacctgcctctcggtgccccgtagactctgctcccagccgccagtctcctgcagctgaatggcgtccgagacgcttgctgcaagtttctactgagtcagctcgacccctccaactgcctgggtatccggggctttgccgatgcgcactcctgcagcgacctgctcaaggccgcccacaggtacgtgctgcagcacttcgtggacgtggccaagacc

SEQ ID NO: 336749 - DNA, 248 bp, Homo sapiens
  chr1:897754-898002
  hypo
cgacagcctgaacgtgccttcagaggaggaggtctaccgagccgtcctgagctgggtgaaacacgacgtggacgcccgcaggcagcatgtcccacgggtgaggcgcggccgcggggggctcccacagcatccaggagggcatgcaggtggctgagggcctggtgcaccctgaccttccccgagttcagggactccgtgggggtggtgcccccacctgtctgaagaagaatccatcacacaggtggtac

SEQ ID NO: 336750 - DNA, 619 bp, Homo sapiens
  chr1:898245-898864
  hypo
cgcacacgtccccggcgctgcgagggggccgggcctgtgctttttgctgtgggtatggccccccgcccgtttccctcttgccctgtgccttctactccccaccagcacaagcccaccccacctgtgccggtcaggtcctgacctgcccctccgcccctccattcaggggcctctccaggagcctggggtgtggcccagcagtgggatccactcacgagtcccgtctccacctgccctccccaggcggcgggagcctgtttgccatccacggagactgtgaggcctacgacacgcgcaccgaccgctggcacgtggtggcctccatgtccacgcgccgggcccgggtgggagtggctgcggtggggaaccggctctatgctgtgggcgggtaagcctggaggctggacttgggtcgggtctggcacgtgcccgccaggccagtcttgacctgcagtggcttaattccgctagctatgatgggacctcagacctggctaccgtggagtcctacgaccccgtgactaacacgtggcagccggaggtgtccatgggcacaaggcgaagctgcctgggtgtggccgccttgcatggactcctgtactcggccggcggctatgac

SEQ ID NO: 336751 - DNA, 878 bp, Homo sapiens
  chr1:913466-914344
  hypo
ttcccccgcaaccccgggaaccacctgccccgcacacggccgccccgggaaccgcctgcctccccctccaaccccaggaaccgcctgccccaccctaaccctgcacactcttggcctgggaactgcctgccccgcacacgcccgccccgggaaccgcctgccccagatacatccatcatgggacatgtctgtcctaagatacatttgtgctggacacgtctaccctggacacgtcttcccgaaacccctctgtcatggacacgtcttcctgagaactggttgccccgggaaccgcctgccccgggaaccgcccgccctggacgcgtctgtcggagtcacatcgcccccgtgcttcttctgcctgagatttgggtgacctggttgagttgggccagtttgggggaactgccagtggaggccccgtgttctggtctgtaaagcatctcccagaggacatcagtgtgagatgggcctcgtagagtgcctgaccctgaaggtagccaggcctgggcgggaaccctgccagaggctgggggagggacgccgccgtcacatgggcccgaacacagggcaacggcggcgcagagccaaccccctgaacaacccgggtgcttggactgggccgccccatctggactgtgtgctgggatgactgggggctggtccccaggctcccctgctaggggatgacccaagcccggcctgcccggcccctgcggccccctgcttggccaagatccctggacagtgtgtgcctgggatctggacgggctgtgggatccgagagcacgtacctgcccgtctaagagccaggtggagccgctctaccacggctggcttgaggggggtcccaggccccgccccctcggaggccgacc

SEQ ID NO: 336752 - DNA, 371 bp, Homo sapiens
  chr1:942328-942699
  hypo
cgccaagtcagccctgcacctggcccgggcctcggaccccgacggggctcacccacctgagatcaccctggctctgcgggaaggcaggaagctttggcatgatcctccacgggcgaggatcacgtagagacgtgtagagacgcgacgaagcacgaagacccgtgtttgacgggttgccaggtgcctacatcagagctcattaaattacacattaaatagatgcacgtgtgtgtgtcaagctcccctaattcaagttgtagaaaatcagactcagagttcttacactcgggggtgttttagcagctgcgcctcaagattctaaattcaaacgcacacggaataaaacatttcggtttatcgccaggcgcggc

SEQ ID NO: 336753 - DNA, 372 bp, Homo sapiens
  chr1:1024267-1024639
  hypo
cgctcagtcctaccagggtggagctgcgctctcccagcactgggggcagcctctgtctcccggcatctcctggcacagggctcgggcgacttcagcgaggctctgtctgagagtctctgccccggaggccgaagaacggagtccacggcagggagccaaacaccagcgcagcactgtccccagaagtgcccgctgcctccccgagcggagacgtgacctggcttggggccgcacgcagggggaagcgtatccaacaccgcaggcccggcccctccccacgcgcgccagacggtccccaccctgcgcctgtgcatggggccacctcggcccttggacttcacgacccgctggcctggcccctccatgggcacc

SEQ ID NO: 336754 - DNA, 1186 bp, Homo sapiens
  chr1:1047017-1048203
  hypo
cggctggggcagtgggtagaccacacccacgctcaccgtaactccagccgcccaggcagcagtaactgaaaaggggaggcgggagggtccactggcgggtttctcacgctgctgaacctcggtaaacacagccccgagggctggctggagcttccactgcatccgtgtagctaatgctggtcatcttcgtagcaagcaaaggaagccaacgtgaaacgtagctttaagggcccaataagaactgtctggggcctctctacctaaagatccctctcgtgctttgatagaaaacaaataccgcaaaccccttgatggggtgtaaaggagacatccccctttgttgacatgcatggtagtcgctgcccacctacccgtgggctcagcacaccggagtcgggcggttgccgtaggtggctcagcagacgtgagcagggcaggatcgggcccatccccccaccgggaatgtcaggccaccatcaggtgatggtcaggtggctgttaactgtctaaaagaactggttgcacccagcgccagggaaagacaggctcccaatagctagaaaacacatgaaatccggtgatgggcagcttcccgatacgatctcaggaactgggcgagttggctcaagcgtgtgcactgagaggcaaaatggcggcgtgtaaccgttctatgaccttctagggacgtttgacaggtaacggaagaacgcctcaggtgagcatgggcactactccagtgaacacacggcgcacggtccctccctccagtgaacacaacgcacacgctccctccctccagtgaacacacagcgcatgctccctccttccagtgaacacacggcacatgctacctccctccagtgaacacacggcacatgctccctccctccagtgaacacaacgcgcacgctccctccctccagtgaacacacagcgcatgctccctccccccagtgaatacacggggcatgctccctccctccagtgaacacaccgggcatgctccctccctccagggaacacatggcgcatgctcccgcccaagtactagcaagatgctgcatgggtggacagcccaccctgaagaaggatcaggggagaaggggtgcaagaccccagaagcctgccaggctataaaaccccaagtcaaaaggtgaaaccgcacacctgatctctcacatcgccc

SEQ ID NO: 336755 - DNA, 308 bp, Homo sapiens
  chr1:1049863-1050171
  hypo
cgcaaggcagggagcagctgggaggtatctcaggggttcccgggatgctgcctgtgcaccccagggctgaggtgactgcgtgtggaaacacctgcctgactggcttttaggaggagtactgggggcgggatgtgtgtcaggaaaacaacgtttctgtataattcataaacatgtatgttaaaaacaacgtggccatgacggatcctggctgaatgcaaacggggaacataaacctgagtaatcaggcgcatcactgaacatcccaggcggccgcccctaccctggggctcaaaaccggctccctctgc

SEQ ID NO: 336756 - DNA, 489 bp, Homo sapiens
  chr1:1096415-1096904
  hypo
cgaagcccccagaccgggccctttgcccctcctgccccccggctctccctactgcccagagcctccgccagcacccagggacccacgtccacctcccagagcggccctgcccagggtccttccctgccctccacgattctccgtggcccttggagaaagagcagcttctccccaggctctgcccccagcccttccaccccagagcctctgcccagacgtcccgtcccatcccggggggctgtcacgcttccgccccacctctcgcccattcccggacagtcacagccgtggaacaacgcagcgtgtggacacagccccagggaagcttgactctgcctggtccccatggcgtgcggtggctcaccagccgcccccatcgctccatgaaatctgactacacctgtcccaaaaatcaaccagctcccaggcaggtcccgccgtgcagggggccaagggccacacctgggaccagtgagtgaggcggcgtgc

SEQ ID NO: 336757 - DNA, 286 bp, Homo sapiens
  chr1:1145591-1145877
  hypo
agggacacagatgtcgcttagacgcccggggtgtcttccctgcgggaagcctgcagggctgctcccgccttgttcccgagctgtggcctcgggcgtgactggcgctcgggagcaggctctgtgctgctcgaaggataccccactcccagacaccagcttgagaagattcccgcacggccggggacggccccagggccttgggagcgtctgtggacacctgtggtgtgggccgaggagctgggagctcatctgaacacgccagcactcgcgcatccacgctgctggc

SEQ ID NO: 336758 - DNA, 360 bp, Homo sapiens
  chr1:1152902-1153262
  hypo
cgtgcacgctgcgcgcgtagtccaccagcttgctgcccgtgaagaactcgctgtacttgagcacctcctcgggctccaggtggtggttctggttctcgtcggcgacggcgatcatctgcttggcctcgttcagcgcgttgtactcgttcatggggtccatgtagctctgcgggcgagcggggcacaggtcagcgtcgcctttccccctccgagctccgcggccagccgcacgaagtggctatttaaggtgcctattggctgcagcgggagtgtgggcacgttctggaaggttcccgaagggaggcggcacaaatgaaaacacagggcagggagaagccgggggccccggaaggcctgccc

SEQ ID NO: 336759 - DNA, 557 bp, Homo sapiens
  chr1:1160633-1161190
  hypo
aggtcttgagaccccggctggtgcgtttgccggaggcatccccgagagtagggtgccctggccccttgcctctatgctccgctcaggggcagccgcggccacgttatgaggtggcaagcaggccctcgtcaggcaggtgtggcctctgggacctgggccaggcaagcttcgagggtgcacacaccgcaggcacggctcagaagcactgggcagagatcctcatggaagaaggccaggctgccgctcacacgcgcccctccctcagcagccgcagcagcccagaggtggacgggcctgggaggcaccctcagctccacagtccccaaaacacaccggctggggacggggccacccgggtggccatgtggcaggtggggcacctggtgggtctcacgtggacacgtgcatcctcgaatgctccggtcacgctccacacgcgccacagacacaggccacacgctccacacgccacagacacgggccacacactccacatgccacagacacgggccacacactccacacgctctacacactccacagacacagacacacac

SEQ ID NO: 336760 - DNA, 1171 bp, Homo sapiens
  chr1:1168275-1169446
  hypo
cgactactacctgccctacgcgctgggcggcggctacgtgctctcggccgacctggtgcactacctgcgcctcagccgcgactacctgcgcgcctggcacagcgaggacgtgtctctgggcgcctggctggcgccggtggacgtccagcgggagcacgacccgcgcttcgacaccgaataccggtcccgcggctgcagcaaccagtacctggtgacgcacaagcagagcctggaggacatgctggagaagcacgcgacgctggcgcgcgagggccgcctgtgcaagcgcgaggtgcagctgcgcctgtcctacgtgtacgactggtccgcgccgccctcgcagtgctgccagagaagggagggcatcccctgagccgccgcggcccggccctccgggacacctgcttcacccggcggcgccttggggcaggtgccgagcgggcgcactacgcccgggccccaaggcccccgtcccgcagccacgcttgtggtcgctgcgtcccggtctgcgtttgggagacccctgggggttgccggggcagcgcgccgtgtccaggtggaggtgcccgttcctggacctcagcgagcctgagccgggcccggccgcacgctgacccccgtgctgtccccgaccggctcacggggctgggctccgatcttccgtgtctcttatcagtggcgtttctcacgtctgcgtctcagatctaacgtggtttcacatcaatccgctttcatgggattttggtctctgtccagtgacttcgtggtaaatgtaactcagtgtttgcttgcgacttatttataaatattgtaagtttgtgtcgatgagtgtaagttggcagtgcgcacgtctcggtttttttacatgatttaaggaaagacttttatgtcagaacttggtgcctgtaccgtcaaccccgctgctgcccgtgtttaaacgcaggagaactttaaaactggccatctatcttttcagtgtacaagtcactgaacccattgtttctttctgaagagactttcctttcaaggcttcccatgggtccgcgccacacagggccggtgctgctttatttcagactctgccccaggttccaggaatccgaaccccggagtgctgacgcggttccccaacttccgccttaagaaaacaggaccagccggcaccaggccc

SEQ ID NO: 336761 - DNA, 365 bp, Homo sapiens; identical to SEQ ID NO: 330647
  chr1:1181916-1182281
  hypo

SEQ ID NO: 336762 - DNA, 367 bp, Homo sapiens
  chr1:1194390-1194757
  hypo
cgcgtgtgtgcgtgtctgagtgtgtgcatgccatcaggacgcacgtgtgtgcatgtgtgtgtgcatgccatcaggacgcacgtgtgtgcatgtgtgtgcatgccatcaggacgcacgtgtgtgcatgccatcaggacgcgtgtgtgcgtgtctgagtgtgtgcatgccatcaggacgcacttgtgtgcatgtgtgtgtgtatgccatcaggacgcatgtatgtgcgtgtctgcatgccatcaggacacgtgtgtgtgcatgtgtatgtgcatgccatcaggacgcgtgtgcacgtgcgtgccatcaggacgcatgggcgtgggcatgtgtgtgcgtgccatcaggacacgtgcatgcgtgtgtatgc

SEQ ID NO: 336763 - DNA, 189 bp, Homo sapiens
  chr1:1200473-1200662
  hypo
cgaaaactgggaagaaatgaagaagtcatcctcttcctgagacagagcccagcagccttggggcggctgagagaagatgggatccacgtggcccatagcgcaccccacaggccttttctgggaaagcagtcttctctcggggaagggagagacacctgccgaggacctgccaggggctctcgcactgac

SEQ ID NO: 336764 - DNA, 32 bp, Homo sapiens
  chr1:1206802-1206834
  hypo
cgcaggtttaacgaaagttcatggacagccgc

SEQ ID NO: 336765 - DNA, 483 bp, Homo sapiens
  chr1:1234784-1235267
  hypo
cggctgccaactcctggtgactggtggacccgtccccaactcctggtgactggtggacccgtccccaactcctggggggctctcccctatcccaaaatagccactcctgcctgcagccaacctctgcccgggatggtggccggggctgctgtcccacaggcaagcaaaggccccgcaaggagccagtgactgaggccacagaggtgaccaccgcctcaaaaggagatcccagcagcggccccacccacacgtgcccctccactgcacacatcaaagggagcagccttggtcccctagagagggtgtgggcagggcaggtgggagacaggcaggaggaaggggcggggagggtgtgccgggcatggggtgaggacgcaggggcctcccaggcgcctggtgtgcagggagccggctgcgcggcctcacccgctgctggatggcggcgtgctttcgctccatctcacgcttttccaccgcagagtc

SEQ ID NO: 336766 - DNA, 724 bp, Homo sapiens
  chr1:1239027-1239751
  hypo
cggctcccctctccacggcctgttgccccctctttctcagcccatgtggggctcatggacacggctcccccctccacggcctgttgccccctcccctttctcagccccagccccagccacaccaaggctcagcccacacagcagctgtccccgtgtcaccagcccagcagaggggacgggcagccaccgtgggtcggggactcaccacagcccagcccctcccagatgggacgagactcagggccagccacatgtgtgcatgtgacatgtgcaccctggaacacacatgctaagacacagggaccaggacctggagcaccacacgcatgctccacatatggggggtgtaagtggcttagtaaggcctggagggcgagtctggccatgtggccatcccaagcttggccgggcacagggcgctccaggcccgcccttcaccttgtccagtttggcctcaatctccaccacgtccgtctccacctcgtcaatggtcgccctaaagcaagaacggggctggctggggtcacctgcagcctcagccccctcggggcttcacctccccccgcacctccctgaggggctccaccatgggaaggggctttcaggaaacaggctgggagacagacgcctgcctgctacgggggcaggactgggaccaggttcagtgcacttccccccgcccccccaaccccaggcaggcagaggcagccgctgctgtgccctc

SEQ ID NO: 336767 - DNA, 269 bp, Homo sapiens
  chr1:1246145-1246414
  hypo
cgtgggcggctctgggtcacaggtacggaggatgacggctgtgctggtgggtcacgggcggctctgggtcacaggtacggaggatgacggctgtgctggtgggtcacgggcggctctgggtcacaggtggctctgggtcacaggtacggaggatgacggctgtgctggtggccgtggggctgggggctttggcacctgcccaggtgaagacgattctggagagccaagatcccctgggcaagcaccagacacgtgtagccccagcccac

SEQ ID NO: 336768 - DNA, 607 bp, Homo sapiens
  chr1:1247740-1248347
  hypo
cggaagttctgtggggcagggacaggtcagtgagcgcagcagcggccctcccccctccagagaccgtcctggcactcacgctgtccttcatgatcagggtgccgtgcaggagccgaggcttcttggcctcagggagcagccctgcggaggaggtggcaggagccatcaatgtgagggccgctcccagccgcctgccccgagcaccctgccctgccctgcccagcccgcataccctgcgccatctcccgcttcagcagccccagcgagatgcctacggggatgctggggcttgtgggcagcgtcaccgtctcgccattggccggcatgtagcagttgacccctggaccccgggggaagagagagcctcagcccaggctgcccgtgctgacccgaggtgggccccacgccgcccgcccggctgcctacggagctcctgctcgatcttctgcttcaggaactccatcttcttggcctcgccatgcaccagcagcacgctctccggctctgcctggcccaccagctgcatgatgcccttggcgtccgcgtgtgcgctgaatgacatgtactccacctgcatcttgacctccagctacagaggccacggggc

SEQ ID NO: 336769 - DNA, 116 bp, Homo sapiens
  chr1:1253130-1253246
  hypo
cgttgtttgcaaagtgcagagacaaaatactgtcaacctaaaatcttacacacctaagggaaaaaaagtcctttaagaacgaggataaagtaaatccatttgcaggcaaataaatt

SEQ ID NO: 336770 - DNA, 125 bp, Homo sapiens
  chr1:1271746-1271871
  hypo
ggccggacgctctcgccagctgctccccaccccactcggtgccgtgtgatccgattcactgccactgcccccagctcccgccgcccgacgctccttctcacggcccggggcccggcggctgctcc

SEQ ID NO: 336771 - DNA, 369 bp, Homo sapiens
  chr1:1354536-1354905
  hypo
cgcctggggcaggtccccctcaggcatctgggccacctcggcccactgcgtccgcagagtggggctggcccctcggctcagcagaagccccacggtaggcccatgccctcgctctgcagccaggtgtaggggggtctttcggagccagccggtagcatccacctgggcacccctgtccagcaggcagccggcaacctccacgtggccttcccgagaggcgtgatgcaggggtgtgaggcccagggtgtcccgcgcatccacctcggccccctgggtgaccagcaactggacggcaagcaggtgtcctcgggcggcagccctgtgcagcgcagagcggccatgcctgtccctgatgcctgggtctgcccc

SEQ ID NO: 336772 - DNA, 183 bp, Homo sapiens
  chr1:1491949-1492132
  hypo
cgaatgcttttttggcaaagcacagaggctgcacaaacagaactcaggaacccctcgaaaaggtctcatggccatctctggagctgctgggcacccaactgtaaccgtggcctcaacacagagccacacaaggctcaggccagctctgggggggtccaccatggccttgcgactgcaggcacc

SEQ ID NO: 336773 - DNA, 137 bp, Homo sapiens
  chr1:1492373-1492510
  hypo
cgtaatttacattttaggcatgaatgattttctaaaacccacgatcagagtttctctgggaatcggcgtctggcttaggaacacattcatttgtttgacaaataccttcccaaaactattttaaaacacagctgctg

SEQ ID NO: 336774 - DNA, 276 bp, Homo sapiens
  chr1:1502409-1502685
  hypo
cctacggacatacacgtgcctctgcaacatggctgcctgcaggatgcccactgccggccttccacagccacaaaagaacagacaagtagaataatccatccatggggcaggacaggccatgcggctccacgcgcacctccgaagatgagtagaggaagcaaaagagcccaagggcaccctgctgcgccaccacacacgtcacccacacacacagagaagatgtgctcatctagtgtacgtgaaacacctgagtcccctgaggctgatgacagctgc

SEQ ID NO: 336775 - DNA, 572 bp, Homo sapiens; identical to SEQ ID NO: 247371
  chr1:1562213-1562785
  hypo

SEQ ID NO: 336776 - DNA, 725 bp, Homo sapiens; identical to SEQ ID NO: 330652
  chr1:1713574-1714299
  hypo

SEQ ID NO: 336777 - DNA, 80 bp, Homo sapiens
  chr1:1717283-1717363
  hypo
cgctacccaagcgtgtagagccgcgcgctgtactgcttccgatatgtgccacagagcagcaacgagaagtggacagagcc

SEQ ID NO: 336778 - DNA, 268 bp, Homo sapiens
  chr1:1910184-1910452
  hypo
cgcgtcctgctgagctgttaggtttgtggatttgtcactgcagcgatgggatacgggtgcagtcagggaagcctcagagcaggccgggacacagcaccagcgccctgccgtgggtcccatgtggccaagcggggtgcacacaaagcctcttcttcgtgctgagctgggcgtgggaaggcatcatgtgacgaggctgcacagaacacgtgtgtcgtgctgagctgggcgtgggaaggcgtcacgtgacgaggctgcacagaacacgtgt

SEQ ID NO: 336779 - DNA, 310 bp, Homo sapiens
  chr1:1974777-1975087
  hypo
cgcagcgcaggagtggcagggcccgtctgcagtgcaggagtggcagggcgtgtccgcggtgctgaccggttggtcttgggccctggcgctgtgtccccgcacaggtctcgggagaggttctccactctgagggcgtgtccagtccagagaaggggacgcgcggcgtgttccccagtggtctggaccctggggtcccgccccatccctgccctgcccaggccctgccccctgctggtgtgtgtccctggaccaggcatggagcgaccccggccctggtgtctcatccacagaatagggtcatgattctcac

SEQ ID NO: 336780 - DNA, 1441 bp, Homo sapiens; identical to SEQ ID NO: 330654
  chr1:1981183-1982624
  hypo

SEQ ID NO: 336781 - DNA, 289 bp, Homo sapiens
  chr1:1986115-1986404
  hypo
cgccacttcaccgctggcaccgtcgaggtctgggggcaggtctgactggtttcctttaccttagtgaagccggcggcctgcaccgacccggctcgcgcccatcccggggtcacccacatttgggtgaacttgaacgagtgcccgaccaggtaacgttgccggacctcccacaagagggcactttcttttctcccattttgtcctcattctttccagccaggtaggtcgcgcttttttctctgtgcaaggaagttgatggtggtcatttttttttttttttttttaatac

SEQ ID NO: 336782 - DNA, 739 bp, Homo sapiens
  chr1:2013460-2014199
  hypo
atattaaagcaggcttgatccgggctgccgtggttccgatcgactccgaataggacaccacacagtcgtgccaagaaggcgcctaagtgtctttccacacggccatccgagggcggacgtggtcaggggtgctggacgcgtcagacgggttctttgcagcccttggcagcgtcgcccgctctgtcccgcctgttgtgtgcgccttttccctgctccagggctgtgtatttggcaagagggaggctccgtggcacgatcacacgtgcaggagctgggggctgccagagcggctgttcaagatggacttggcaaatcacctctttcaagttgccggctacccggctgccgtagacagagtgaagtctggtagtttgtgtttatttatttatcttggccagcagagagaattgagtttgcatggagactgtaatttcattctgtgagtgtaagatcacgtccgcgttcctagcgaccggttttgtgatgtgggcagtgccgtgctggtaaatgctctgtgaggaaggaacgatggtgggatttgtcactcagtcgatttccctggtgtaaatgctcccaccacggccgatttcaggctgccgaagtggaggggttcagtgaaggtggagttgggcaagggcgtacacggtcggcttctgagagttggtccccccgcccaaccctcccctggagatgggatgtcaggagacctggttccatttgtttttttgcctgagcgtcc

SEQ ID NO: 336783 - DNA, 547 bp, Homo sapiens; identical to SEQ ID NO: 206427
  chr1:2025646-2026193
  hypo

SEQ ID NO: 336784 - DNA, 72 bp, Homo sapiens
  chr1:2103120-2103192
  hypo
cgaggacctgccggactgtcttccgcagcagcggcgctgttctgcactcctaccacaacgtgccatggctcc

SEQ ID NO: 336785 - DNA, 330 bp, Homo sapiens
  chr1:2125181-2125511
  hypo
cgggcgctggggcagggacctggcgggggattccaggtgccctcctgccccgtgaagcagccggtaggaacggcccgggccccacaggtccggcggaaagggtgtccaggaaaaggtcttgggtccgacagtgaagacttcagtgggctccgggccgcacctgggctcctgcaacacagagttgttgggccttgcccagcgatggctcccgccctggaaaccccttcatcgctaagatgggcccagtgggcacacctgtcctgggaaggcgggcagtgaaggcacctcgtgatccaggatcagctccgggctcaccgtgcgcagtagctc

SEQ ID NO: 336786 - DNA, 207 bp, Homo sapiens
  chr1:2141579-2141786
  hypo
cggctcacctgcctgcctcgtgcccagacctgcgagtgtgcctgcccgtgtcagacagaggcgagttgggacttcacacctgaaatcaagcgggagggtaggaatgtgagcctcgaaaccaccttctttctgtatcgtttctgggagtggcgatgtcggccagtgggacacctgctgagggtcctcttttcccatccgggtgctggc

SEQ ID NO: 336787 - DNA, 221 bp, Homo sapiens
  chr1:2142332-2142553
  hypo
cgcaagctggcgattgctgcgggggacctgggcctgggcttagcgactgctgcccctatccagatgcctgattgggaccagggtgtggggccgggccctgcagcgcctgtcttgcccgggctggagccctagagctgtgcgacctggggccagggtgttctgacagactcactctcaggggctggatgcccttgggcaccacggcgggtgcctagcagacc

SEQ ID NO: 336788 - DNA, 90 bp, Homo sapiens
  chr1:2170949-2171039
  hypo
cgttggcggcacctttgtacggggacacaccctggacctgaatggagtcaggaagggtttcaacctggatggcccgcgtgccggggaccc

SEQ ID NO: 336789 - DNA, 574 bp, Homo sapiens
  chr1:2239631-2240205
  hypo
cgttctaacacccgcggcagctgcacgcgctcacagaaggtggaggttacttgcccaggtacagacgacctcggggcagtgacgagcaaagaccagagactgctgagccctcgcatctgggtggcggaattgcctgcggggttttgcccttggtttactgaggggggtcttggttgctgctgaagccccccaccccttctaaagtgcaatgcaaaagggacatcatgtatatgcagcgtttgtttggaattttctttgcttttgttttctttgcggttgttctgtgtgcatggattccacacctctgccgtaggtagatccgtcagcgggcattattaccgtgtcttgtaaagggtcggttttgttatgcaacatgcagaatgctgtttttagccttgttttaccagagttgttttttttttcagttatttcttcaagggaaactaaatgatttagttggagcaaagctttaagtgtgttggcgtgcttctgtgtggctgtcctgtgtcgccaggtcgaagatcacagtgaggtagaggccctgccccatccccagggccgccaggcttgctcc

SEQ ID NO: 336790 - DNA, 474 bp, Homo sapiens; identical to SEQ ID NO: 247443
  chr1:2257929-2258403
  hypo

SEQ ID NO: 336791 - DNA, 332 bp, Homo sapiens
  chr1:2263174-2263506
  hypo
gtaacaaaggcgcgcgtttctcccgcatgcgccgtccttcttatgtaaccactgccgctcctctcccgcggctgcgcctctcccgccgctgcgcctctccctcgtgcggctctcccgcccctgcgcctctccctcgtgcgcctctcccgcccctgcgcctctccctcgtgcgcctctcccgcccctgcgcctctccctcgtgcgcctctcccgcccctgcgcctctccctcgtgcgcctctcccgcccctgcgcctctcccgccgctgcgcctctcccgccgctgcgcctctcccgaaattacaggctggtgtgtcacttttcatctttgtc

SEQ ID NO: 336792 - DNA, 405 bp, Homo sapiens
  chr1:2265957-2266362
  hypo
cggggctcccttgggggagcaggcctggttttgggctgcctgtcccaacacgacgagagggccctggctgtgtggccgtggagccggcaggaggcaggggaagtggccgctggtcacagatgtgtgccccgaagagacgacatcatttgaacactgaacactccgactccgcggccaggtcgtcctgggattgaaacaatcctagtccaacgacacttaactcgaggacagtgcgagccctttggctgggaggcccaggctgggagcagacgccgacccctccgttctctcaggtggaaaagaacgaaagccttctttctgctgaaataagacgttccaacatcaccctcagcgcggaggttgccacggttctggagcgaagtggaggtgccgccctgggcgttc

SEQ ID NO: 336793 - DNA, 839 bp, Homo sapiens; identical to SEQ ID NO: 247447
  chr1:2267138-2267977
  hypo

SEQ ID NO: 336794 - DNA, 1246 bp, Homo sapiens
  chr1:2275775-2277021
  hypo
ccggtgagcacactcgacaaggtggtgcggcgagctggctccgagcgtcccccacagggccacattctcactattggggtggcaggaaggcccagcgaccaggagcatgtgtggggtctgggaaaggcctgggggacggggtgtggggtgcaggagccccaaggccgatgctgctgaggaggccaggagcggggaccgcacagacggcagttcctctggaggggggtcccgtgtgggccgggctgtgcaaaggacacactggtccctgctggcctctcagggcaagcgtgaggaccctggcctgctccggcctccttccctgggggcctcgtccctgcgctgcacagatggggcccggccgccccagtgggaagggaaagggggagcgctgtgccaactcacaggctctacgagccacaacagctgcctgcagagcctgggggcagggctgaagctggccatggaggaccttgggggccacctccaccttccagcagcaaatgccaagtccccgaatgcagaattctgccagagggagcatgaccgtctctctgttggcacaaagcgagagcatcaaagacagcgtcagcccccgcgagggtccacgcatgctcacactctgcgctcatggatggccacacacaccctgaaaacggcgtcagcctccgggagggtccacgcgtgctcacagcactcatagatgaccatatgtgccccgaagacagtgtcagcctccaggagggtccacgcgtgctcacgctctacgctcatggatggccacatgtgccccgaagacaacgtcagcccccgcgagggtccacgtgtgctcacctgcgctcatggatggccacatgtgcccgcaccctcgcacaggcatgggcggtccccaggctgccacactcagggtctgtctgtgccccggcacctccaagccattccttccaccaggccagggccaggcctggacacctgccacctaccacccgctggggcagcagccacgcactcccccactgctccctgttggcggccaggcatgggccggccttgttgggggacacaggacaattcggggcacttgtcttgcctccgtcctccttggagagcctcgggctcaccctacgtggctctgaacaacaagggccaggctctgcaccgggggaccccctgccctgccagccggaccctcaggccgctcagagggccagtcccagcacctgcccctcgccagtggacacaggctgcc

SEQ ID NO: 336795 - DNA, 706 bp, Homo sapiens
  chr1:2303837-2304543
  hypo
cgtccgcatcttcactgcttaagaacctgctgcctgtttctcttttggaaacgttaggtcatctccccctggagatgcttactcttggcaatttccccgtggtcctgcagcagctgaacgttcaccgagaagggagacccttgggccacttccatcacctccggacccaagatcacgatcctcgtagcttgttctgggagaggacagagtgtggctttagcggtgactggcatggtcccccacccaccccatggctgagtcagcagtgggcaccccaggaaccgaccagagcccagtgtggcagctggaacacaagcacatgcgggggccgaccctccgcaaaccaccttgcagagcagcgacctgggcagtcgtccacactcagaccgtgaggctcggctctgctggcctggagcactgtggaatcgaaccaagtggaccaccggggccacggagcatgcaagagacacaagtgggcggtgtggggctgttgggttttcctgcccgtggaatgttcccgcacgtcttcccgctggtcgggatttaggccctgcattccctgcatctgagtcagcaccctgaggtgctggacctgggactagggcaaggcctggcaagggtgggtccaccggctggccagtgcctcctggcagccagggccgcccctgctccaccggggcctgcagggcatcgctgtgggtggtgt

SEQ ID NO: 336796 - DNA, 93 bp, Homo sapiens
  chr1:2330473-2330566
  hypo
cgctcaggtgcccgggccacccgagcctgtggtgtagcttgagcatgtgcttcttgagaaaagcctccttttctgctgcgctccttgtggggc

SEQ ID NO: 336797 - DNA, 302 bp, Homo sapiens
  chr1:2331318-2331620
  hypo
aggttaccttttcccgtagccagagggttccacaggcagctcactgtggtgcacagagaccgccgggactctaatgccagcatcgggtcgggtcaggctttgggcggccttctctggtttctgaggagctgtgagctgaagtgttcctggtgcttcgtgctccactattggaagacttacgcagctcctgggcctgcctgggccaggtaggggccctgagttcatgcctgactggccagccccaggcgaggaacaaacaactgcattccaggacgtggtggccattgagggaaaacccacac

SEQ ID NO: 336798 - DNA, 35 bp, Homo sapiens
  chr1:2331916-2331951
  hypo
cgcccgggttccacggtcagcgcatcctcggcccc

SEQ ID NO: 336799 - DNA, 470 bp, Homo sapiens
  chr1:2359894-2360364
  hypo
cgtggactgcatctgtcctgcatggggtcctgcgtctggctcgcccggtgccgtgctgtggggcccacgccaacggctgacctcatggtcctccgtggcctcgcctaggcttgcggcagccgacgtggcgttgttgcctaattaggttggactgtgccagccccagcggagcccacgcccggcccttgcgccggcagacgtgtcggggcacggctcctgcactcccactgccgcaggaactgctcaggaacctgccggtctccggctgggacggtggctggatcagctcaagcctccagggccctgaggctgaggggctgagtgctcattccagccgcctcggggaacccgggctgggagaccccatgcctgggggtgagcctggagccagggcagtgcggtgagaggctccggagagagggctgggcaccaccaggcttgggtgaggagggaggcctctggtcgagagc

SEQ ID NO: 336800 - DNA, 807 bp, Homo sapiens; identical to SEQ ID NO: 330655
  chr1:2374848-2375655
  hypo

SEQ ID NO: 336801 - DNA, 202 bp, Homo sapiens
  chr1:2377213-2377415
  hypo
cacacacggattgccgtaagccgcagcagccaggtctgacaatacgagttgtaattggattttaatttttaatgtccacaacacatgaagagcttcggaccaatttgtgtatcttctgttactctgcgcctaataggaccgcttcattagctgctgtcgcacccacagtgccgtctgtccgggaacggagggagcctggccc

SEQ ID NO: 336802 - DNA, 238 bp, Homo sapiens; identical to SEQ ID NO: 247478
  chr1:2428212-2428450
  hypo

SEQ ID NO: 336803 - DNA, 149 bp, Homo sapiens
  chr1:2437281-2437430
  hypo
cgtcggagcctgcgccaggcccagaagacaccccaagaaaagacctggcctgtcctcagagggctgagctggacaggctcccagggtaggctgcaaagcctgctcctcaggacgcaggccctaaccccgggccacaggccccccaaccc

SEQ ID NO: 336804 - DNA, 1819 bp, Homo sapiens; identical to SEQ ID NO: 330656
  chr1:2460612-2462431
  hypo

SEQ ID NO: 336805 - DNA, 162 bp, Homo sapiens
  chr1:2483785-2483947
  hypo
cgcttagtattgtcctggaacctgcctccgaaaaggccgtgcgctcccgcctgggatcctgctgctcctccgccggccgccccgcacacgctccgctgcctctctgggctggctcagccgttgcatgttcctgcgtgtgcactgagacgtccaccctggcac

SEQ ID NO: 336806 - DNA, 255 bp, Homo sapiens
  chr1:2520320-2520575
  hypo
cggcctccggggtgccgtgactgcctgcccgctgctacaggtggtgataaagtgctcctgcatttcgtccagaagtccccaggcgactacgtccccaaggagcacatcctgcaggtcctgggcatctctgcggaggtctgtgccagcgacccgcctcaggtgagctgggccttgggggcgctgcctgccagcccacgccctgcccctaggtcccctgggaggagcactcggcttggctgggagctgagccacagc

SEQ ID NO: 336807 - DNA, 152 bp, Homo sapiens
  chr1:2520950-2521102
  hypo
cggaggcgctgggtcgggatgccgaacctctcctgatccgccggcagcaacgagccattaaaactgcagttcctgaccacgcactgcttcgcaggctccgagccctgcatcctccacagcccccgccttgctcactgttgggccctcagggc

SEQ ID NO: 336808 - DNA, 181 bp, Homo sapiens
  chr1:2537671-2537852
  hypo
cggcgcggctcgtacgtagatgatgtgccggctggagttctggtcgtcgttccagatgaagaggtcgatgaggacgcgcctgttgaactgtgagttcatcagcgccagctgccgctccagctcccactcgagtcctggggagacagtgccccgcactggagactggcgggccctggggccc

SEQ ID NO: 336809 - DNA, 719 bp, Homo sapiens
  chr1:2716559-2717278
  hypo
cgggggcagctttcaccctggctctgcaggggccatgccgtcctcctaccttggggttcgctgccggtgggatgggcctcgagggcccggctgcatgctgccaggcagtcctcaaacctgccgctgtggagcagagcttcaggtgacagggtgtcactccgggtgcccctggggtccagagccgccaggagtcgctggccaccggtctcctgctggccggcactgtgcccagcctccgggtgccccgagaggtagtcctggagggcactgagcagcgcggggaggtggggccgctggtgggtgcgaatgaaagctaccgtccggtcggcgctggaggcgaaggcctggagataggcggccacaccatccgctgcctgcaccccggacaggacccaggcgagggcgcgggtcagccgcagctccaggacttgctgtgcatgagagtccagcagggcgctgcagcgttgcaccacttcttcgtgacgcccgcgggccagcagacctgccagcaggtgcaggatggcggcggggtggtccgggcagagggcgccgaggaaggcagaggccagcgaccctgtcagggagaccactgccatgccgtcccagtggatggcggggatctggctgtccccgcggcaccaggactccagggtggccaccaccgccgccccccgagcctgggccagggcagtgcgcacactctgcagggctgagggggc

SEQ ID NO: 336810 - DNA, 304 bp, Homo sapiens; identical to SEQ ID NO: 247496
  chr1:2725609-2725913
  hypo

SEQ ID NO: 336811 - DNA, 215 bp, Homo sapiens
  chr1:2726383-2726598
  hypo
cgagtccgattccttggatccggcctggatctgcctgagcgagagcctcctgggagtccagagcagcaagtggagaactcgctctgagaagcgcgtggactccctggcgaggccgtggccccagctgaacctatggcctgggttccaccaccctcacctcccactgctccttggtcacagtgggcccagcaggccacagcacggcattacgggac

SEQ ID NO: 336812 - DNA, 204 bp, Homo sapiens
  chr1:2726837-2727041
  hypo
cgtgctcctggactgaacgctgctaccgtaacttcatcagcaccctccaggcgaggaccacgtgtccagcccctgctgtgcacacgactgagggttgtcggttccccgagctcagctgaactccctcctgccagctagccgtccccatcgcccggactggggaacagtcctcctggggatgccgcactcctctccatcattctc

SEQ ID NO: 336813 - DNA, 620 bp, Homo sapiens
  chr1:2846750-2847370
  hypo
cgtgcacacacatacatgcaaacacatgtgcacacacacacgtgcgcacacatgtgcacgcaggtcccagcatgtgggcttcttccgtgggcaggcacagaggtcgggtgtcggcccagaggttcatggaggcgctaatgagcggctccgggcccgcaggagatgcggctcacacaggtcagatttcggatggatgatgaaggaaatgagggccaggccagcctctggttacagtttaggaaaaacacgaggcgcccttctctagttcaaaaggcagagagaggcagacccaggagctaggggggccggacgggattccagtccggtttcatctccggatgccctgggaacccgcctggcgtagaccgggtgggggcggtgcagacaggaccctggagaacagggctgcggtgcgcagcagggggtggccccggtcacacagtgtcccccatggaggggcctcgatggccgggctgcgcatggcacgtgtcgtgtgtggatccacagcagggccgctgcccccacccagcgccagccgggaggttgggaagtgttagcgccaggagcagctttcagctgaaaaatccccagtttattaactttgctccagaagccagggc

SEQ ID NO: 336814 - DNA, 511 bp, Homo sapiens
  chr1:2850546-2851057
  hypo
cggccagccgggctctaacatgtcctcaactttcaggaaaccagagcctccgagtaagtatcagatgagttgctaatgttggaaaaaaagcgagaaacatgcttgggggctctgttttacggctgcacttgaagtcggaatctgcgatcgtaacccaatgctggcctcgccaacgtgttttcggtattgtcgggataattgaaagtccagacaaatttggctatcagggctccaggcagcggaatcccatggtggcccctggtgtgatgagctcgccgaggccgtctcaggtcctgcgcccaccacggtcttcgggagcagctgtcggctttgcaaaagccccaggactttccgggtggacatggggggcttggctttgtcaccgggacctcttgaaaggcagccggtcctgggcctctcatctggccccgcacccttcttggccaccgacgtggaaggcagggcgccctgtggggtgagcagggccatccgtgcctcggggtctgccctc

SEQ ID NO: 336815 - DNA, 215 bp, Homo sapiens; identical to SEQ ID NO: 247513
  chr1:2918443-2918658
  hypo

SEQ ID NO: 336816 - DNA, 727 bp, Homo sapiens
  chr1:2938633-2939360
  hypo
cgagaacttcggcgtgcccgctttctacctgtcggaccaggcggtgctggctctctacgcctctgcctgtgtcacgggcctggtggtggacagcggggatgcggtcacctgcactgtccccatctttgagggttactccctgccccacgcagtcaccaagctccacgtggcgggcagggacatcacggagctcctcatgcagctgctcctggccagcggccacaccttcccctgccagctggacaagggtctcgtggacgacatcaaaaagaagctgtgctacgtggccttggagcccgagaaggagctttcccggaggccggaggaggtcctgagggagtacaagctgcccgacgggaacatcatcagcctcggggacccgctgcaccaggcgcccgaggccctgttcgtgccccagcagctgggcagccagagccccgggctctcgaatatggtctccagcagcatcaccaagtgtgataccgacatccagaagatcctctttggggagattgtgctgtcggggggcactaccctgttccacgggctggatgaccggcttctcaaggagctggagcagctggcctccaaggacacccccatcaagatcacggctccccccgaccggtggttctccacctggattggagcctccatcgtcacctctctgagtagcttcaagcagatgtgggtcaccgccgcagacttcaaggagtttgggacctcc

SEQ ID NO: 336817 - DNA, 129 bp, Homo sapiens
  chr1:2999275-2999404
  hypo
cgcagcaaggagaggtggggtgcgcttcatctcagctgccccagggctgagctcagctttgcccgctttgtgcggagtccaccgagggggcctgggggacaggcgagattggaaagcgatggggccggc

SEQ ID NO: 336818 - DNA, 156 bp, Homo sapiens
  chr1:2999791-2999947
  hypo
cgcaggggtcgggtctcctggctgcgccccaccaagcagcaacctggcggctgggccccggaactgcacatccctccccatcatagccctgtcctggactgggcggcgcgctcatttcaaggcagtgcggccatctgggctgggcctggcgctggc

SEQ ID NO: 336819 - DNA, 584 bp, Homo sapiens
  chr1:3000551-3001135
  hypo
cgcgagagaagagaacaggacccttgttcggagagatgtccctgggtcttggcagacccacacgcttgtggagggagcgagaggagaggtggctggggacgaccgaatcccagcgctgctgtgggctccctggaggagaaagggccttggtgtctgctgggccagaatgcaggcctttcactcctctccttgcctgggactgcggtcctggcgggccctggggcgtctgggggcctgtacccctcgggtggggcaggttgggctggagccccctggatctggtgtcaggcagacccagaggcagggcacaggggccgcctctggccctttcaaagggacattcgatctgaagcatggggcccagtaagaagattccagggaacacagtgctgatggggccgaaagcgctcggcggccggagagagcctctccacagtctgtgctctggcacgaggccctttgtgggattatctgcccccctgggaggcacggaatgctgggggcgaggggccacagcaatattgagcttgcatgggcccccgataaagcggctgcttgctgcagttgctctgtcgccgaaattc

SEQ ID NO: 336820 - DNA, 205 bp, Homo sapiens
  chr1:3008438-3008643
  hypo
cgggggtgatggacagttcgcaggtggtcagatgcgagagaattcacatcgcagaacctgccaggaaaatcaatgggaccgtgaggactgctaggtttgggaggcccgcgttagccccaggacggcttcatggggaggggacgcaggtccccatgtagaggataagatggagccagccgtgggtaagggtggaccacgcaggatc

SEQ ID NO: 336821 - DNA, 512 bp, Homo sapiens
  chr1:3032644-3033156
  hypo
cggcaggcgtcaggttgagtccttggggttcagggaggtcaaggtcaggcctagcgtgggtggtcatctcaggggcagcactggtggccgttgaattgttccttaccggggagaacaggtggcagggagggatggttccagaccccatggcacccgtgtctctgcagtgtgtccctctcatggggggacagtaggcagagctccccggctgccctgcgccggcgtgctcactccgcggtgcgtgcttaatacccacagtgtgagaaccgagagccagggccaatgacgggggggacgcgggttcacgggtggcctggagacgtggcaccgtacctccctgctcccttcctgtgagaattttgccctcaagatggcagcccagcctggatgcccagaccccattcccaagccgcaggtcctggtctgggctctgtcactcggggacgcgcctgcttgtctttccccggctggggcagtgcctggtctgctcagcccttcctctctccccgccc

SEQ ID NO: 336822 - DNA, 122 bp, Homo sapiens
  chr1:3037185-3037307
  hypo
cagccccctgggagcgggaggatgcctgcccttgcgtctctgcgctggagcttctgacacctttcgcagtgaaaggcagggtggatagtcggtgaggagagggtctggaagcggtgggcctc

SEQ ID NO: 336823 - DNA, 145 bp, Homo sapiens
  chr1:3050813-3050958
  hypo
cggagcgccattcagctgggggacggagcttccctggaacatagtgccccgcttgattcttgaagagaggacgtggacagcagaggagacgcaggcctggggacggacagttgggcagcaggcatggcacgggcatgggctgggc

SEQ ID NO: 336824 - DNA, 373 bp, Homo sapiens
  chr1:3052594-3052967
  hypo
cgctttgtccgggagccacaggacaccaggctggggcggggctgggggcagaacgctcctccagcagcctaggagccacccctgggaagaaagggggtctcgggcagcctcgccatgggaccaccagctttgggccttcgttacaggggtgatgctgccccgctgatagggttgggggcctggggctgcagcgtagctgaagtggaacctgcccagcctgcacttcccagctggccagccccgcgcgatgctccggggtctcggcgaggcacgccaggcactgagtcctcagacccgctgtccggggacctctggtgtcgtccattttacagacgaggcagtggaggcccagaaagatggaccgacagtcccc

SEQ ID NO: 336825 - DNA, 671 bp, Homo sapiens
  chr1:3111118-3111789
  hypo
cggcaactggccactgtctccccaccacacgccaccgtctccccaccacacgccaccgtctccccaccacacgccaccgtctccccgccacacgccaccgtctccccgccacatgccaccgtctgatcgccacacgccatcgtctccccgccacacgccaccgtctccccgccacacgccaccgtctgatcgccacacattagggcttggtattctcagtcccacgttttatcatctaaacgccaaaactcgttcctggcctgccctttctctccaaggttcccagatgcacgctccactgcccacaccacccccacggttgagtgggctcggccccgggacgtggcctggctctgggcacctctgctgctccactctgcgtggagagttctgcgtgaggccaggaagctttgccgcgcttccccactcaggagcttctggatgtttctatggaggcctcacgtctaaaaccgtgagcgcaccggccagtggatgctctgaggagtgttcccgtggagccagcaccgggcagctcggcgaggcacacagcgtcgggatttggagagagacggggccctgtgggatggtgcggagcctgaggccaccgtggggacagggatgcagagaaacccatgggcctcggcgttgctccgggagaagccggcagtgcc

SEQ ID NO: 336826 - DNA, 680 bp, Homo sapiens
  chr1:3114432-3115112
  hypo
cgcgtgaacctcgcactcctcagggggcagtggcaggtcccactgccctcccgccaggcctgctgctggtcagagcttctcctgtggcaggaattctcatgggccgggtcatcagctggggtaggaatgtgctctcagggtgctacgggccaccttggcctcaaccagagatgagggtgacgcaactgctcacaggcccgctgaggggcagcgacctgaggacaactcctgtgggctgcctgtctctgctgcctcctgcacgcgggtagaatctgctcgggtcaggggcgggcactccatgcgttctctggacccccgagctgcagtgtggctgggttgctgtggttgaaggcacctgccttaaggggccaggtcggcgcagggcagcgtctctctggggtgaggagtttatctgagtgccttagagaaggccctttggagaatggctgcaagccggcacccttgctgcatggagggtttgttctgcgtggccttggctgggcctttcctgtcgtttgggacatatgtgagtagaattgcctcaaagtgactattctcactcagctgccaggatgccgtgagtgtgtctgctgtgcaggggagcgtggtctcttcttgcttttgcagctccgggcccacctggagtgcttggcgtggcactgggccgtggccttctggga

SEQ ID NO: 336827 - DNA, 128 bp, Homo sapiens
  chr1:3124802-3124930
  hypo
cgggatcttgttccgacctttgcttaaagcagtttccccactggctcggttcacgtgcgggcagcgattctctggccctgcactgtagggtgtttagtgtgcccgaggccaccccgagtgatgacgac

SEQ ID NO: 336828 - DNA, 185 bp, Homo sapiens
  chr1:3125908-3126093
  hypo
agctccgacgtggccggtcccgactggcacacctgccccgagtcacctgggacggactgcagccagccagctctcccttcttcctggggaggcctgtgaaggtcgcgtgaatgcctgtgtcccccgggacagccagggaggcaggaggccaggcctgggtgtggaataggcctcgctgggaggcc

SEQ ID NO: 336829 - DNA, 187 bp, Homo sapiens
  chr1:3172404-3172591
  hypo
cgtggccgcaccgacacccgaagccaaccccgtggccgcactgacacccgaagccaaccccgtggccgcaccgacacctgaagccaatcccgtggccacaccaacagtacagggtggaacgagctccgcctctcaggggagggacaggattacgtggcagagagcaggtatgtggcacagtgacagc

SEQ ID NO: 336830 - DNA, 873 bp, Homo sapiens
  chr1:3182342-3183215
  hypo
cgctctgtcctcaccgcccagaccctaggagcccccagaccctgcctcagtgggtcgtgcccaggtccttcgctctctatgatccctttacggtcgtgcagtgctccccagggctccgcactgctccccagggttccttggtgcgtgtctcataaagcccaggagggcgaggccaggcccagcccccaactcaagggccgccctccagcctagcgacgccacctggcccctctttccattaagtctccgtcgtcttgagtccatccagggcggtgtgcggccggtcgcttagtcagcaagaaccctgtgagctgcagtcatcataaatgcatatttaataactattttcttcctggggaaaatgtgctgcttcagaagttcagaaatgggcttcgctcttcagctggtaatgagaagttaataaaagtgggattttgtgcaacgctggccctctgacatcttaatctttattaaagagacgtaaacttccacggatcgggcgggcctgcctggcacagccggacgccaggagagccgggcaggggtggcccaaggccggccgagcacccgtaatccaccagagaacaatgcgcgccggagccttttcgccccgagagcccctcgcacttacctcagtagacgcgaattaattctctccccctgagagccccagagagactggggaggaccgagcggttcgcatttgcaaagctcttaatcagtgaactgcgttggaggcattgctgctccgctcctccgacgaggagagggccccaggggcaggagccactccctggatctcagacccgcttgtctcgcaggcgggaggcacgggcctgcaccctccgccgctcccacgctccagcagaccac

SEQ ID NO: 336831 - DNA, 164 bp, Homo sapiens
  chr1:3193780-3193944
  hypo
cgtggccggccccatgcctctctgtgcacggctggatcttgcaaacagtcgagtcctggctgctgcgccacccggggatggcatcgtctgtcacacgcttcactctccctgtggcgcactggcatccaccatgcccacctcagaggccaggaggcacgtcagcc

SEQ ID NO: 336832 - DNA, 473 bp, Homo sapiens
  chr1:3195292-3195765
  hypo
cgagaacttttccagtgtgactgctggcctctctggcagacgtgtccaaactcagaaaacctctgctgctctgaccacagggaacgtcagaggggacggggcagcggaacaaagcacaaagcgtccctgcgtcctctcaacgtggcccagctcctgcagacactcagcgagccgtggcctctcccatcctcccacgcttccctccggccggccctggagatccgtggagccacacggtgccgagcgcggcgctggccgtgtgctccgtgtctgtcatcgtcagccctgtccacctttggggcaggggcagctgggctggctccagtttctctccatgtcaactttgcaaaggaaggaggtggatgcagaagctgccaccaatagccacgtgggcagctgtggccccgagtccggggatgcagttggtcatcaggagcctcgaagcgtcgctcaccatgcctggaaagaccggc

SEQ ID NO: 336833 - DNA, 97 bp, Homo sapiens
  chr1:3213732-3213829
  hypo
gcccctccaggtcccggcgtctccttggactcacattaccagcatttctgtccatttcgggtgagacccgaagcagcgagaccctatccaggtcaac

SEQ ID NO: 336834 - DNA, 550 bp, Homo sapiens
  chr1:3228695-3229245
  hypo
cgtgtgaaatgggatgtgctgctgggtttaaatgagatctgactccaaagcacagagctcggcctggcccatctcgggccctcagtggacatccatggcgccgtcagcatcctcgccccactgggttattcccacgctcatcctctgaggaggagcagcccagcactcagcggcctgcaggctggcggggttggtagcagcagcctctcactgggccggtgacatgaggatcactgggacaggcacgggtgtggtgggaccacagggccccgagggcagcaggcagcccccagcctcctccgaggtctgtcctggaggctggccgcccacccgccggctgcacctcacagccgctcctccccagcctgctggtgtctgacgttggcatcccctctgtgggatacatcaggagcccatccggatccggggccggcaggtggggttcccgggatgggttgggagttcccagaagtccggtgaggggctttcggaaagggaccgtgcaccctcctgtgcagaacccggcctcggccaagctgcaggctctgac

SEQ ID NO: 336835 - DNA, 223 bp, Homo sapiens
  chr1:3277485-3277708
  hypo
cgggtgccgtcccgcggcgggaacgaggcaggtggctggcggccggagtctatgcactctcgttttctcggcggagccacttgtgtgtgctggagcgaggacactgactaacaacggcggcagtgtctgcggaacagcgttccattgagcgcaggaaaggccttttgaagtggggacagttttaagaggcagcattcctcgcctcacatttcggctctggggc

SEQ ID NO: 336836 - DNA, 1247 bp, Homo sapiens
  chr1:3321132-3322379
  hypo
cggccacggcagagaggaggtgggcagggagacaccagcatgtgctctgatccctcggcagcgtggtgggggctccgaaggggcactgggaacaagctgtatggttggggtcccctcccgggcagagggcaggtagtcgggccccgcagtgagcctcgtcctctgcgcagcctggagcagcacatggtcatccacacggaggagcgcgagtacaaatgcgaccagtgtcccaaggccttcaactggaagtccaacctcatccgccaccagatgtcccacgacagcggcaaacgcttcgaatgtgaaaactgcgtgaaggtaacctgcggggcggccccgtctcagccccggggcagcaggaggctgcagacgggcgcccgcccccgtgctccctacaccccctggtccaaatgtagatggagtgcggcagagtgggtaggaggcccctgcggtggctcgggcccttccgtgtgactaggaaggaaaggaagtctcagggaagaccgtgtcccccaggtcagaaggatcagggccgagaccagaacccaggcccctccagagcgcggctcctgtcctcccgccggtgtggaaggaagaggctggcggggctgagccgagcctccaccccgagcccgccagggtctcagcaccacagctgaaaacgctttctgcagccctgtctcacgcagcctcagttcaggaattgttcttgaggaaagcagccggggaggctctgcggctcacttaaggccctgcagcgggtccttgctacacagagacctgtcccggcctgcttggtgcagactgcaacgtggcaagagagacaggcagggccctgccccccacagccggttggtccgccagccagaaccaggccaaggcgggtgtccaggcagggcacgcgccaacggcatccgtctccccaggtgttcacggaccccagcaaccttcagcggcacatccgctcgcagcacgtgggcgctcgggcccacgcctgccccgactgcgggaagaccttcgccacgtcctccggcctcaagcagcacaagcatatccacagcacggtgaagcctttcatatgtgagtggtcgcccagcctggccgcctgccctccgggtgcgcggatgccgtggcggtcgggccgaggtgggccatcccccaaggtctcccccgatccgaggggccccagtttgttcataaagcactcatggcaggttctgacatctctgccgcgtgcagcctggtcc

SEQ ID NO: 336837 - DNA, 588 bp, Homo sapiens; identical to SEQ ID NO: 330659
  chr1:3325196-3325784
  hypo

SEQ ID NO: 336838 - DNA, 947 bp, Homo sapiens; identical to SEQ ID NO: 247567
  chr1:3328319-3329266
  hypo

SEQ ID NO: 336839 - DNA, 152 bp, Homo sapiens
  chr1:3331040-3331192
  hypo
cggggtgggcggctctgtggagcgggtggctcggcggggcgggcggctcggtggggtacgtaaccctctgtgctgttgtccagcagggtagaaaagcggaaggtcacagaccccgtgggagccctgaaggagaagtacctgcggccgtcccc

SEQ ID NO: 336840 - DNA, 766 bp, Homo sapiens
  chr1:3342039-3342805
  hypo
cggggcacggggcaggggcgcgggctcccttccccccaccctctgtggcccggcctgccatgcagagccggggcctgcactgaggagcgcgtgtgccccttccaggtgtaagtactgcgaccgctccttcagcatctcttcgaacctccagcggcacgtccggaacatccacaacaaggagaagcctttcaagtgccacctgtgcaaccgctgcttcgggcagcagaccaacctggaccggcacctcaagaagcacgagcacgagaacgcaccaggtgggccacgcggggtggggcagcccccagagcacccacacgggcaggccccacagagggggagggggaacagcaggggagtgggcgccgggcagggaagagggccacagactacccctcaggaagccaacaggcacccctcaaaccgtggtcattaaagagaacctcgtgctctccggtgtccctaagaaacctgcctccctaacagcaccccaggtgtaccccgttcgcggttggtttgccccacggagggaggggtccagcgagaggccgccccctgatgctcccgcccctccgcagtgagccagcaccccggggtcctcacgaaccacctggggaccagcgcgtcctctcccacctcagagtcggacaaccacgcacttttagacgagaaagaagactcttatttctcggaaatcagaaactttattgccaatagtgagatgaaccaagcatcaacgcgaacagagaaacggtaagaaaactatcgc

SEQ ID NO: 336841 - DNA, 234 bp, Homo sapiens
  chr1:3343491-3343725
  hypo
cactcatgcacacacgtgtacataacatgtgcgtgcataaacatgcctgcctagatctacacacacgcatatgcacacatgcaagtacatgcacatggacagtgtgtgcacatacacatgcgtgacggacagccgtgtgcgtacacctagagacacatgtacacgcatgggcgcacgtgcgtctagacacacagcagcagaacgatggtggaattcggatccaggaatgtcggc

SEQ ID NO: 336842 - DNA, 327 bp, Homo sapiens
  chr1:3344507-3344834
  hypo
gtcagacccatgagcgccacaggccaggccttacctacgccccacagccccgtccccaggcacaatcccctaagctgcagctcccagagtaaggccaggcgaggaacaagtgaggattcatcaatggcatccttgccggggtgggcccaggaccaggagcgtgtgcggaggctgaaccacctggaggacagcaaggcccccctaccccgagctagggtgcagcccggccgcactgcaggagacccaccaggaccccgagctagggtgcagcccggccgcactgcaggagacccaccaggaccccgagctagggtgcagcccggccgc

SEQ ID NO: 336843 - DNA, 870 bp, Homo sapiens
  chr1:3349863-3350733
  hypo
cggggagaatccgggtcttagtccctcttgttccttctgccccctgtggcccagggcaaggttgagccaggccagggccacgggaggctgggaacggacgaggcttggccctgctggccggggatggcctgtcctgcccacacactcacctgcctgtccaggatggcctgccctgcccatctgctgcctgtctgggatggcccgccctgcccacgcgctcacctgcctgtctgggatggcccgccctgcccacgcgctcacctgcctgtctgggatggcccgccctgcccacgcgctcacctgcctgtctgggatggcccgccctgcccacgcgctcacctgcctgtcctgtgtgtgtgtcatcccctccccgccaggcatatgcaatgatgctgtccctttccgaagacactcctctccacaccccctcccagggttctctggacgcttggttgaaggtcactggagccacgtcggagtctggagcatttcaccccatcaaccacctctgacgggctgggcagccgggggccggtggccagagcgagggcaccagccacgaaggacggaggcgggcggggccccggagaaccctgtccctgcgtgtggccactcctcagcatcctccccacccaccatggttcattccgacttttccaatggaaactcagatcccaaaagtccctaaagcagtcgtagagtctcaccatctccaaggattggtcttgagaacactgttcagtgacggccatgcaggtggccgtccaaagacagccaacggagctgcctcgcagaatcagccagtgggcaggtggacgctctgctgagacagaagctggtggccactgccgggtgcccgcgtggggtcgc

SEQ ID NO: 336844 - DNA, 561 bp, Homo sapiens
  chr1:3351144-3351705
  hypo
cgccctgggctgcaggcctgcccgaggctgggatgggaagtgtgcctgccctcgtgtgacatggaattggtgtcaggaccgccacgtggccttcagaggaatccacaggtccccacccaagatccctcaattatatggggaagtcgagggcctgtggcttggatccgccatgcagagatgtggccgggcacccatcttccttccctcctctgtccctgcctcggccaccccacgcgggaacccagcgccgtcctctgaaggcagggccttggccacgtcctgggtctcccacctcccacctgaccccagcggctccggtgtcctccacgtggctgccctggggagcaatcccagcggatcgctccgggccaccaagccgcacctgtgcctgagactccggatggacgacacagtcgtcacgtcgctcttcctgcgggttcttggcgagacacagcttgagaacagaagggcgtcgggggaacctgccgcaaggagcagagacagcacagccccccgggcccagccgcctccctctcttgggacgcaacttcttccccactc

SEQ ID NO: 336845 - DNA, 168 bp, Homo sapiens
  chr1:3361098-3361266
  hypo
cgttgggggcgcagacgcaggggactgactgcgatgggcacggcaagacttctaggggtgaccgacgcgtcctatatcacgaccgtggttacacaggtatacattcattaaaactcacctcgctgtatattttaaaaggatgattttattgcacgtaaactgtgcctc

SEQ ID NO: 336846 - DNA, 87 bp, Homo sapiens
  chr1:3377848-3377935
  hypo
cggcaaggccttggtcactgcggcgcagacgcaggcctcacaccggccaggcctgttacacgctttgcacgctttacacttcccacc

SEQ ID NO: 336847 - DNA, 353 bp, Homo sapiens
  chr1:3379762-3380115
  hypo
cgtggctccccgcgtgttagagacgatgccgccttccagccccaggtcccggcacccccacagcctcggcccccggggcacgaggagccatggcccatcgtcctgagcacagagagcccggcggccctcaagctgggcacccaacagctgatccctaagagcctggctgtggccagcaaggcaaagaccccagcccgccaccagagcttcggggcggctgtacttagcagggaggccgcccggcgggaccctaagctcctcccagcccccagcttctccctggatgacatggacgtggacaaggaccccgggggcatgctgaggcggaacctgcggaaccaatcctaccgggc

SEQ ID NO: 336848 - DNA, 337 bp, Homo sapiens
  chr1:3385485-3385822
  hypo
cggaaaaggcaggaggtaaaagggccctgggcgggagggctgtcccccatggcctgggccatgcaacacccggggaggggcagcagccacggtggcaccacccagccatccctctgcggccacctccagtgccaggccctgtcacgctgaccagcgcctcacacagccccgggctgtgcttccacctgcgccaggccctgacggagccccttcacgtcaccgggtgaatcctcggagtccaggggctgccatcacccccttctctgacaaggacgggggtcgttgcccagcttcagccggctcataaggcacccagccaggggcatccagggacgtc

SEQ ID NO: 336849 - DNA, 390 bp, Homo sapiens
  chr1:3389586-3389976
  hypo
cgtggggcccgaccaccaggcccgtggcaccctcctcacccctccttgccttcaggttcttcgaggacctggagcagcggcacaaggcccaggtgctggtcgaggacatcagtgacatcctggaggagcacgctgagaagcacttccacccctacatcgcctactgctccaacgaggtctaccaacagcgcacgctgcagaagctgatgtgagtgggcggccccgaggcccgcagggtggctcaggagcatcctgcaccctggtctcccaaagcacattcctgctcccagcccagcttctgcaggtcctgcctgattttggtacaggctggccatgcagagcctggaaggacagccttgtcctcttgcagaagcagcaacgccgccttcc

SEQ ID NO: 336850 - DNA, 206 bp, Homo sapiens
  chr1:3408566-3408772
  hypo
cattcacacactgatgcacacgtaacacacaggcactggcacgcacaggtgcctgctgcctgtgcaggactgcgtgcgtggactggcacgcacaggtgcctgctgcccgtgcaggactgcgtgcgtggactggcacacactgggtgccacacacatgtactggcacacatgcacacacaccctgctgtacgcactgttgcacgtgc

SEQ ID NO: 336851 - DNA, 238 bp, Homo sapiens
  chr1:3425542-3425780
  hypo
cgtccccagcctctgattggatggcagcctagcccgaggggtcgctggctgctggccctgcgagcaggagcccccgggggctgggcccgcgctcaccaaacttctctgtgagcgtgtgttcgccccgcaactctgcctcttcctcatcggccccgacgtcgtcatcctggaagagttgcggcagctcgtcctggagcacggcaatgtggggcaggggccgcacgaaaggcagctcgcc

SEQ ID NO: 336852 - DNA, 617 bp, Homo sapiens
  chr1:3435632-3436249
  hypo
cgtccagaaatggagcagggagggaaacgcccgccaccccccttccatggaccaggctaagctgaccccacaacccacaccccagcaaggcccccacccctggccagggccagatcatcctgcccagcgcccgcctttctgggtggtcagctcggcccatgcttggctgcagtggtccagacccactggccaaggtgacaggtgggtccctatagacaagtgctagcagtgccctattggcctaccaggggcaccgtgtgctttagggagtggcaggcagcagctggaccacacacatggaatgaaggaggccagacggcgggggccaacaggggcactcccaggtgggagctgcacggcgcaccatgggcacccaatgcccgcagtgcttgcaccgccacacgcgcctactcgctgctgagcgtcagctccgacctgccctcctgggggaggccccgacccagggctgcgtgagcatcacacgggttcagcttctccagagcgtttaggaaggcgccttacttgtcaccagagtcccgggagggcaggcctggtctatatcgacagggcagcaacccactgcctacgcagtgcccggctccagcacaccaggcggc

SEQ ID NO: 336853 - DNA, 415 bp, Homo sapiens
  chr1:3552676-3553091
  hypo
cgcacttaatttccttatatagaaattgacaaaatctcaacagctctatcctggaaatgcatgaaatccctgtagagctgctgctggggctgcaccgccacagatgccagcgtcagtgcctggccagcccccaagggcggcttggtctccccgcgcctgcactcgtgtgcacactctccccctcacctttccttgcctggccagcccccgagggcggcttggtctccccgcgcctgcactcgtgtgcacactctccccctcacctttccttgcctggccagcccccgaaggtggcttggtctccccgcacctgcactcatgtgcacactctccccctcacctttccttgcctggccaggctcactcctttagacccagctcagacaagtcccttccagagcactgcctggatccc

SEQ ID NO: 336854 - DNA, 1216 bp, Homo sapiens; identical to SEQ ID NO: 330660
  chr1:3567217-3568433
  hypo

SEQ ID NO: 336855 - DNA, 659 bp, Homo sapiens
  chr1:3606857-3607516
  hypo
cggaccaccgagttccccgcgcagggggcaggtgcgccccacctgggtgccaagggaggcgacaccatctctcccccttggggtggcccagccttgcctaccatgatctccagggccggggctcagccctcatgcctgggaacagaggctgctttacggggtgagggcctggggccccccgagccttccccaggcaggcagcatctcggaaggagccctggtgggtttaattatggagccggcgctgaccggcgtccccgccctccccacgcagcctccttggtgcggtccaacacatcaccgggcaagctgaggcctgccccggacttggatgaatactcatgaggaataaaggggtgggccgcgggttttgttgttggattcagccagttgacagaactaagggagatgggaaaagcgaaaatgccaacaaacggcccgcatgttccccagcatcctcggctcctgcctcactagctgcggagcctctcccgctcggtccacgctgccgggcggccacgaccgtgacccttcccctcgggccgcccagatccatgcctcgtcccacgggacaccagttccctggcgtgtgcagaccccccggcgcctaccatgctgtacgtcggtgaccccgcacggcacctcgccacggtaggtgt

SEQ ID NO: 336856 - DNA, 207 bp, Homo sapiens
  chr1:3646542-3646749
  hypo
cgagccgttgcttctgagcaggagtcacctacagcccccgtcctacgggccggtcctctcgcccatgaacaaggtgcacgggggcatgaacaagctgccctccgtcaaccagctggtgggccagcctcccccgcacagttcggcagctacacccaacctggggcccgtgggtgagtcccttgggcagtgcgggcccacgggcagggc

SEQ ID NO: 336857 - DNA, 190 bp, Homo sapiens
  chr1:3659512-3659702
  hypo
cgagggaagctactggcgagaagcattggagggttctgggtcacagggaaccacgtgacatggacacagatgccacaacgctgtgcattcccccaaaaacgcagatgcccacctgctctctttagggaagccggagaggccgccgggaacaggcagtgacggcggtgatccagtggatcctccccagggc

SEQ ID NO: 336858 - DNA, 746 bp, Homo sapiens; identical to SEQ ID NO: 330661
  chr1:3663338-3664084
  hypo

SEQ ID NO: 336859 - DNA, 392 bp, Homo sapiens
  chr1:3680096-3680488
  hypo
ctgggacgcccagacgctgcctgctctggtcagtgagctggagcaggggcaggtgtcggcagcctcacccaggctggcagagccctcccagctgccgcagtggcccggccctctccttctgtccctcactgcccctgcttgctcctgctcaccgcctctgcctctgtgcccaggagtgattgcgtctttacaacaacaagtggatttccaagaaacccagctgcgaaagatcaatacggaaaatgagacgctgcagaaggagctccgagagcggaggcagcagctacaagccatgaccgacaaggtggccgtgcgctcagtaccggcctccgctccatgagcatgggccccaggcttcattaacccccggcagctcggggcaggcgctgccc

SEQ ID NO: 336860 - DNA, 95 bp, Homo sapiens; identical to SEQ ID NO: 247622
  chr1:3683723-3683818
  hypo

SEQ ID NO: 336861 - DNA, 225 bp, Homo sapiens; identical to SEQ ID NO: 247623
  chr1:3684032-3684257
  hypo

SEQ ID NO: 336862 - DNA, 125 bp, Homo sapiens
  chr1:3697578-3697703
  hypo
cggataattcagcattgccgcatagaaacctccgcaaaaccggccaaacaaacgcggacaggcggccctggcgtcagcgcacgacagtcacgtggggaggggcagtggccaggtcggccttggac

SEQ ID NO: 336863 - DNA, 877 bp, Homo sapiens
  chr1:3700211-3701088
  hypo
cgcacggtatggataaaatgctgtgggttgggctggcatttatgtctgtttcctaatggctagtttatatcctgtcctgtcccatcctgagggccacccgccccctgtggaatggccaatacctccgctcctaacaccttccacttccctcacgtcagggccatctagatgacagactggttccacaacgtctcctttggaaagagaatgctttctttgtaccctgttaagaagcttctgggttctggtagcattaggcggttcctgaggagcacagactaactcagctgaggccagcatgcggcactcccccgggcccggccccaccccaccaggcacgctgcccacctgtgcaggcccgacacactctgccgcttcttctgcttcctctgctcctcggcctccagctgcagctgccgcaccagctccttggccttggcttctttccgccccaaggggacaatctatcgggcagaaacccacaaactccactagggtcacagccacagaactcgcccatcgtgtcgattacggccttaagcctcaatgagccctcccgactcccgccctcattcatctctacagcaggcagggagcatcccacgggaccacgcagcaagaagctgcatgtgggctgccactgcagcgtcccggggagacctgacgcccaaacacaccgatcctactgaggcagggcttaaccttaaagccagctcatgcacaactgtttccagaggtctgccatcctcagaaggccaaaagaggagagaaaggctgagcagccgggacctcgtgcactccacagattcaacagcccaggacagcacgacacagcaactcaccctactgccaaccccacgcaaacggttttactatc

SEQ ID NO: 336864 - DNA, 307 bp, Homo sapiens
  chr1:3705404-3705711
  hypo
cgcgtgccctctgggagagaatggggcagtctaagcagcagtgacgcctgctggggaagaacacaaggcaggggctgagaccaagcccagctgctgggcactacctgagccacgcgtccatcggatctaacagaactgccacaattctgtgcttctcagcacagggtgggctgggctgggatagacttgttggactggtggctccagcccagacctcccttccggccccacatgggacgagagccaatctactcctggaatccaggtggcctcacaaagtaccaggagccgtatcaccaatgctgtc

SEQ ID NO: 336865 - DNA, 214 bp, Homo sapiens
  chr1:4037053-4037267
  hypo
cgtcttggaggacgcgggaggaaagcacgcccagcggacaggagccatcacgcggctgcgggctgctgctgagaacctggcgtgggccaccgtcgtcagcagcgtggaggtaactgacgaccttggccaagaagttgggtggcagcgtggaggtcatgctcagagtgagtgggcgcaagagacggtggcgggagagggagtggagatcataggc

SEQ ID NO: 336866 - DNA, 64 bp, Homo sapiens
  chr1:4659133-4659197
  hypo
cggcagtcccacgggaacgcaaggccctccgggtggctgagtcagtatgctctgtgagaattgc

SEQ ID NO: 336867 - DNA, 339 bp, Homo sapiens
  chr1:4673912-4674251
  hypo
cgggcaagcctccccatgaagagacgatccaggtgcgacacaggaggtgcaaacacagcgacatgcattcccgcgtttaaaacacatgctccgccgggcatgcggacgagagcatctgcctggctcgggtgtggcagaggggcaggatctccaggagtgaccaggctctacggaggacggagggccctgagggcagctggggagggcaggcatgggggaaaagggacaatgtgagttaagccctctgagtgggaaacagtgactcgttgtaggagtgtgtccggtctgcagctgggactgaggacttcctaggctgcaggggagaggcggcgtgaccac

SEQ ID NO: 336868 - DNA, 2349 bp, Homo sapiens; identical to SEQ ID NO: 330663
  chr1:4714352-4716701
  hypo

SEQ ID NO: 336869 - DNA, 270 bp, Homo sapiens
  chr1:4726576-4726846
  hypo
cggagaggggcccgtgaatcacgggaggggtgcggagaggggcccgtgaatcacgggaggggtgcggagaggggcccgtgaatcacgggaggggtgcggagaggtgcctgtgaatcatgggaggggtgcggagagcgggcctgtgattcaccagagggttgcagagagaggcccaagaatcgcgggaggggtgcggagaggggcctgtgaatcacgggaggggtgcggagaggggcccgtgaatcacgggagggatgcggagaggggccc

SEQ ID NO: 336870 - DNA, 344 bp, Homo sapiens; identical to SEQ ID NO: 330664
  chr1:5772056-5772400
  hypo

SEQ ID NO: 336871 - DNA, 706 bp, Homo sapiens
  chr1:5918390-5919096
  hypo
cggcatcgccgccccccacgaggactgggctccatgctgacggagggccgggatcagggccggagaactcacgggacatggcacctgtccactccagcccaccagctcctcccctggcccactcgaccccctgccctggcacagccctgcaggcccctcgccagcctcccctgccccgctgcccctttgcagggcccctgccactccattctctctcagctgcctcctacgcagagaggcccgatctccaaactaaagtccctcttcacaccatccccctgctcccctcagaccctcagcgccgcccgacagaccgtgacgggtccccatgtgatcatctgggcccccaagaaagccaggtactgggcgggcagcatccatctcccccggccagggggacctctgtctacactcgggttgaattgagggcgtgaggagcacgtggcaaatagagcttcgctggctgatggcgtctctcttgccaaaggccaggccgctttctcctcgtgggcttgagggatgcccctgtgtcctccagcccacaggctagcctggtcccgtccagaagggcacacgctgcctgctcctcgagcctgggcggcacctcctgcatctgatgctgtggttccctcctgtgccgtgggggtgacaacgcagacgtgagagcccggtaggctggggtggtggccacgttaccaaagcacct

SEQ ID NO: 336872 - DNA, 204 bp, Homo sapiens
  chr1:5950824-5951028
  hypo
cgggatagcgcccgctccttccaagcagacagacgctggaagcgtgactcgtcccatgagggacgcagcacccactgtgcctgtccttccagagagccgctaccttcatctggacggcagcagatccgatgagcagcagggagtctccgtcccagacgtcaatctgcagggtctgcacggccaggtagcgggcaaagcagcgcc

SEQ ID NO: 336873 - DNA, 212 bp, Homo sapiens
  chr1:6046186-6046398
  hypo
cgcatttgctaacagcacattttgttacctgcctaattaccggtccgtccagccacttgaggacacactggaatgccgtggattccttccaaggctggcgcgctctctgtgggtggggagggacaagcacgttttgggtgaagatcctgtgccagtcgttcatcctgcccgcctgagggtcccgtgggcttcccggatgatctgtgccagtc

SEQ ID NO: 336874 - DNA, 896 bp, Homo sapiens; identical to SEQ ID NO: 330665
  chr1:6052426-6053322
  hypo

SEQ ID NO: 336875 - DNA, 187 bp, Homo sapiens; identical to SEQ ID NO: 247683
  chr1:6131662-6131849
  hypo

SEQ ID NO: 336876 - DNA, 696 bp, Homo sapiens
  chr1:6148944-6149640
  hypo
cgactccacacggcatttgctgaccctgtttttgcgtctaacattgcatcgtaaacgttttttgggaggggccagggtgccaaaaccgctggtgacatcacacgcggtcggcctgttttccagggcggagacggagcggggcctgtccaggaagcacataatcgaaggtgaggacgcgctcgggcacctcagggcccccatacctgtgggatcatcctcggaggccaaagtgatggcagcacagggcccgacccccccagttaacccactgagggcccaatcccggggcacccggtgctctggcctgaccttctccttccacccaggtagcacagcgggacgctgcagagaacgagggcagcccggtggctgagcacagaccacagaccagcctgggtttcaatccaggtttggccccacactggctgagtgggtcttcagcaggggcaccctgccccatgcctctgccacagtatctgtgcaatagggacagtaagagcgcacccggcgagggtggctgggatgcctgcagcgcccaggagaaggtgccacacagcccggggctcagcactcgcaggcaccggagcaaggcaccggggtgtctggctcttgctgtatctttattgtcttcatgcctttcctgtccgtgttcattttcttcgaggtaatagatcattccattgaaaatcacctggc

SEQ ID NO: 336877 - DNA, 128 bp, Homo sapiens
  chr1:6166330-6166458
  hypo
cgaggacggctagatatctgtcaaaaaaagaggagagccgggcttgcctgacgttggcagcagcaggcaggccgggcccggcgggcacccgtgtgcatgctgcccggagcggacgggcacctaccggt

SEQ ID NO: 336878 - DNA, 360 bp, Homo sapiens
  chr1:6171654-6172014
  hypo
cgggatgacagcggcggggagcgggcgacacagcaatgccgaggatttctagccaccgccagaagtgaggaagattgaggaagaacgaggaaggcttcccccggagctctcagagggctctccccgaggtccacggaggaacgggcaagtccctgcccagcccggcctggccaaggatacgtcacgatgcccgccagcagccagtagtcatggcgccggtgccagatgtcgtagattttcccagaggatacagcagcccgctcctcgttctgccacagcgtgtgcaactctgggaaacaagccaaggtgagcagggtgagaagtgccccagctctcacgcacaggcaggcttggagagcc

SEQ ID NO: 336879 - DNA, 224 bp, Homo sapiens
  chr1:6281676-6281900
  hypo
cggctaacgcagcttcctggtttaggaacattttccccggtcgtatcaatcccccaggttggtaaatgaacagaagggatgaataaagcctactttttaggctcaaggagcagctcgtgaaggggtggcaggtgcgctgctgccttgttttctgtcctgctaagaggctcaccccgcgacctcttctgtaaactgccactcagcagcggcctgcaagccctcac

SEQ ID NO: 336880 - DNA, 342 bp, Homo sapiens
  chr1:6284796-6285138
  hypo
cgagtcctggttatcctttacttacactctggcctcgggggcagtggcgtgtggcctcggtcctccccaggtaactctggagggcgctgtggaatattgctgtgatttgccccttactcgtctttcacccatgttccgccttgattcggcataaggacagactgctccagtggggccttgggtcctcaggccttctgaccgcttggtcttgagtgacattccagaagagtgactaatgacataaaacgattaagaaaatccatgtggcagcggccaaccggaaacagttttgtcccaggctgcacagggtcggaggccccaaggtcaccggggccactgccc

SEQ ID NO: 336881 - DNA, 519 bp, Homo sapiens
  chr1:6331654-6332173
  hypo
cggagcctgtccgccatccgctgtggcctctccgccatccgctgtggcctctcccagcagctgcaggcctgggttaattacctcctcctccacacccacccaggactgcaccagcctccagcagaaagcagccggaagtctcaaataatgagatcattgtggagagtcataaacaccctcaccaggggctcccctcacccagcagcaccggctcagactccgaaagaactgcccccaagtggggccaagaaaggaggcgtaaaggccaacgggaggctgctggcggaggcagggagatcgtcaccacaaaggggagaaaaggcattgggacttgggcctgggtggtggcctctcaggagcccctcctgcaggcacggagtgccgtggtcccgggacgctcggctcacagctcttgtgccggagtgtggacatggcggtccccaccctacaacaccaataatgatcatagctgtcacctgctgagtgcccactgtgggctaggcctgggccagaagccgc

SEQ ID NO: 336882 - DNA, 362 bp, Homo sapiens
  chr1:6333795-6334157
  hypo
cgcacacgggcgcagcggtgcccatcccagggcgagtgcagaggctgcgcgcggccaccacacagtgcttccgcccactcttttgctagtgaaattctctgggagtaggtgcggcccctccctgccagcaggagcctgtggcaacggggtgtctaggatgtcgaggcagcagagaccctagggccctgccccgtgacaaaggccccacgtggggacctctttctctgtcctacatcctgggaccggacctctcttcttgtcctggtccggcctggacacggtcaggaatggccacctctgctcctgaggcttcttcgagaggaacggggcccatgcgaggaccccaggcccctctgcacacc

SEQ ID NO: 336883 - DNA, 304 bp, Homo sapiens
  chr1:6345513-6345817
  hypo
cgtgctggccgtcacctgcccacggggcagcacagactgattccgcccttcctgctaattcctccatggcgcagccatgtgctgtcattcctcccactgggtcagagcctggaccatccaggctgccggccaaatcatgaccatgcccacaggtccctccaccaaatgtggaggcgggtgaggctggtcatgcatcagagagctgaagacagcgtgtccaggtggctctcgggagccctgaacctgacaggaaaggcagaggcagggcccgacaagcactgcctgcagacctggcgtgtcacac

SEQ ID NO: 336884 - DNA, 125 bp, Homo sapiens
  chr1:6347184-6347309
  hypo
cggcacaagtgcacggggaccaggtgcagtcactccgcagtccagggcaggcctcaaaggtggctgtagccgcatgtaatcaatgagggtcaagcttcatcactcacactcgaggccctgacggg

SEQ ID NO: 336885 - DNA, 261 bp, Homo sapiens
  chr1:6391374-6391635
  hypo
cgggccctgagcccagtgacccgtactccggtaagcaggccgtgcgaagatggaggcagaagcttcagtgacgcagcctcagccaagggacgcctggagccacccggcgctggagacgccaggagggatcctcgcctggggccaatggagggcgcagggccttgcccatacctttgcacttctggcctccagaactgtgacagaatcaacttctattgtttgagagctacccagtcagtggcactttgtcacagcagcccc

SEQ ID NO: 336886 - DNA, 2006 bp, Homo sapiens; identical to SEQ ID NO: 330675
  chr1:6507073-6509079
  hypo

SEQ ID NO: 336887 - DNA, 116 bp, Homo sapiens
  chr1:6623403-6623519
  hypo
cggtgccggcggccacagggccgtgaatgggcttgtcattacttgtatattgggtaaggctggagatataggagcgtaaaagttgtactatgcgccgtgtcagagtgttttctgtc

SEQ ID NO: 336888 - DNA, 35 bp, Homo sapiens
  chr1:6707164-6707199
  hypo
cggagtttcgctcgtccaggctggagtgcagtagc

SEQ ID NO: 336889 - DNA, 318 bp, Homo sapiens
  chr1:6711983-6712301
  hypo
cggcgcagccccccgccacctgcagagcaccgactgcggtccggtgtgccccccacccccgcatgcactgccgactccttttcattttcatcctgcgccaaatgtctcccaggtcactggggcggtcctcaggagcctgatgttaaagcccagccgcggttccacacccgcacagccttggaagtcacagctgagcctggctgccgtgtttactagtctgggtgactttcaagcaactcttcaatgttaatttgatgcagctcaatttgctcggcagaactggctgttaaatggccaccaatcagtgaaccatcacgc

SEQ ID NO: 336890 - DNA, 555 bp, Homo sapiens
  chr1:6713809-6714364
  hypo
ggctgggaatgaagcgctttcttttttaagtggctaattgcatcctttcataaataaagatgagaaaaaccctgggcagactctcattccagctgcttggtgtgctgtgcctcattaactcgagcccttgctgtactcggagaggtggttgtgtgctttacctcaatggactgggatatgtgcattttattaatttcaatctgcggaaagctactgccggacacatcttcatactcctcatcatagcgatcaaaaaggtcggtggcatctactccaacgctgatcgttccctggggcagaaaaacaagccgtcagcagaacgggtggtatttgtggaatgaaagacaatgctacacttcaacagccagctcgctttaattgaacaagtcatttgacttcagggttcactgggtttaggtaggacactccaccaggaagcccacaaagcatgaatgtcacagtccgaaccaaactgcagagcaccacagacgtccagagctagaaaacatcatttgaccaggagagccggtccgcatgtctgcagagcaatgacac

SEQ ID NO: 336891 - DNA, 105 bp, Homo sapiens
  chr1:6738127-6738232
  hypo
cgtctcccatcaaccccctgctccgcttgctcccgccccacacctgggttaaaaattactggttcggtccatccctcttccgttttacttgacaggttagggaac

SEQ ID NO: 336892 - DNA, 111 bp, Homo sapiens
  chr1:6750366-6750477
  hypo
attcatttgacagtcgcatatccactgctatgtcaagcatttccatgcactcccacttcattcccacaaaagctctacgacagtaaaactgtctggattttctggatgaac

SEQ ID NO: 336893 - DNA, 1601 bp, Homo sapiens
  chr1:7723202-7724803
  hypo
cgtgggacggcccccgggcttggggtacgtgtccaagggctgagagtctgtggcctgcctggggtaccgggcctggactttgccagggaccccagccgctgtggggcaggtccaccacggtcctagctctgactctcttttgtgtgtgcatgtgtgtgtgcacatgtgtgcctgcgtgtgcgtgcgcgtgttgtgttccgatctccgcaggagctggcggcagcgtgcatcacaagtgtaacagcgccaaacaccgcatcatctcgcccaaggtggagccacggacaggggggtacgggagccactcggaggtgcagcacaatgacgtgtcggagggcaagcacgagcacagccacagcaagggctccagccgtgagaagaggaacggcaaggtggccaagcccgtgctcctgcaccagagcagcaccgaggtctcctccaccaaccaggtggaagtccccgacaccacccagagctcccctgtgtccatcagcagcgggctcaacagcgacccggacatggtggacagcccggtggtcacaggtgtgtccggtatggcggtggcctctgtgatggggagcttgtcccagagcgccacggtgttcatgtcagaggtcaccaatgaggccgtgtacaccatgtcccccaccgctggccccaaccaccacctcctctcacctgacgcctctcagggcctcgtcctggccgtgagctctgatggccacaagttcgcctttcccaccacgggcagctcggagagcctgtccatgctgcccaccaacgtgtccgaagagctggtcctctccaccaccctcgacggtggccggaagattccagaaaccaccatgaactttgaccccgactgtttccttaataacccaaagcagggccagacgtacgggggtggaggcctgaaagccgagatggtcagctccaacatccggcactcgccacccggggagcggagcttcagctttaccaccgtcctcaccaaggagatcaagaccgaggacacctccttcgagcagcagatggccaaagaagcgtactcctcctccgcggcggctgtggcagccagctccctcaccctgaccgccggctccagcctcctgccgtcgggcggcggcctgagtcccagcaccaccctggagcagatggacttcagcgccatcgactccaacaaggactacacgtccagcttcagccagacgggccacagcccccacatccaccagaccccctccccgagcttcttcctgcaggacgccagcaaacccctccccgtcgagcagaacacccacagcagcctgagtgactctgggggcaccttcgtgatgcccacggtgaaaacggaggcctcgtcccaaaccagctcctgcagcggtcacgtggagacgcggatcgagtccacttcctccctccacctcatgcagttccaggccaacttccaggccatgacggcagaaggggaggtcaccatggagacctcgcaggcggcggaagggagcgaggtcctgctcaagtctggggagctgcaggcttgcagctctgagcactacctgcagccggagaccaacggggtaatccgaagcgccggcggc

SEQ ID NO: 336894 - DNA, 212 bp, Homo sapiens; identical to SEQ ID NO: 221217
  chr1:7764990-7765202
  hypo

SEQ ID NO: 336895 - DNA, 155 bp, Homo sapiens
  chr1:7842602-7842757
  hypo
cgtcaactccctgggtggcagggactttgggccactgttctatccgctgggattccaagcgtccctacccagatctgcacgcaataaatgcttgctgaacgaatgcagtttgacaaaacccagcttcggaggagagcaagccaacctagagtatc

SEQ ID NO: 336896 - DNA, 108 bp, Homo sapiens; identical to SEQ ID NO: 330679
  chr1:7843510-7843618
  hypo

SEQ ID NO: 336897 - DNA, 177 bp, Homo sapiens; identical to SEQ ID NO: 330680
  chr1:7844224-7844401
  hypo

SEQ ID NO: 336898 - DNA, 1245 bp, Homo sapiens; identical to SEQ ID NO: 330683
  chr1:8085555-8086800
  hypo

SEQ ID NO: 336899 - DNA, 460 bp, Homo sapiens
  chr1:9402333-9402793
  hypo
cgatccctccgtgagaatgaagaaatgcaacccatgagaagaggtttgcgtagtgacaagtccagaaactgtgtgcatcagcctggggcacccctagctgtgggcagaagctccatggtgcagctcatagtggcagtcaggccccagcgtcaaccgtgggagagcacggaggatcccagtggcttgtcaattcgctgatagcagaaggtagggcctttgccagtttggagctgcctcagggtgttgacctgctcagtgagaaagtaggcgcctaggaatccaaacgtccctctcccgcctcatcctgccttgttcccagtgtagtgatcaccctgacatcggttctcccatgtcctcatcccccgccagcccgcggggtcatcccctccccagaccacagtttgggcccaggggtctggggcacacatccgagatgcaggcacacatcccggactcctcc

SEQ ID NO: 336900 - DNA, 39 bp, Homo sapiens
  chr1:9654089-9654128
  hypo
cggcgcccggtggcgctgtcctaatgccgagcactgagc

SEQ ID NO: 336901 - DNA, 1351 bp, Homo sapiens; identical to SEQ ID NO: 330685
  chr1:9711649-9713000
  hypo

SEQ ID NO: 336902 - DNA, 89 bp, Homo sapiens
  chr1:9725455-9725544
  hypo
cgcacgccgccatgcccggctaattttttgtattttggtagagatggggagcgctcacaagctcttgccgtagctctggtttacattcc

SEQ ID NO: 336903 - DNA, 223 bp, Homo sapiens
  chr1:9795925-9796148
  hypo
cgagcgctcggtgttacctgcacgcctctgccactgtcttcgaggacctgcaggtccagcccctccttgcaggtatacagacagtcgatcaccttcttatccgcgagtttcccggaacggagagttaagccagccagattgcctcggaaaaactgggtcatgtgcaggtcgccacctttgggtcaggggagaaaaggcgaagtcaggcgtgcaacccagcatc

SEQ ID NO: 336904 - DNA, 125 bp, Homo sapiens
  chr1:10091859-10091984
  hypo
cgtcagcggcaaaatctggaatttcatggtactgttactttgatcgctcaacttagatttatattttataaatatatatatacatacatatatatatattttttgagatggagtcgcgctctgtc

SEQ ID NO: 336905 - DNA, 367 bp, Homo sapiens
  chr1:10495109-10495476
  hypo
cgcccctctgcggagggagctgcagcgtgtccacggtggtaattgcttgcaggtgtacacagaatggcaggcaggggttttcatttgccgcatttgttccgagtaagacgcactccttggaaagtgggtgacttgctttcagctgctaaagcctcagcttttacaggtgatttatgctccgctcttcaattagtaccgcaggtaattgaaaacaattgcaccaaattgcttttatgaagcaatttgaatgacgaaggcctgaaagggcgaaagtgttctaatttgctgccacttggattcggtgccagcctctcccacaccccttacttttcaccttgttcccgttagctctttgtttctcgggtgc

SEQ ID NO: 336906 - DNA, 81 bp, Homo sapiens
  chr1:10591549-10591630
  hypo
cgtaggaacctttcacaggcaatttaatcttctgagcagcgcacgtggagcagtgcggcgctggaatggggtttcgggccc

SEQ ID NO: 336907 - DNA, 350 bp, Homo sapiens
  chr1:10676484-10676834
  hypo
cggccgtgttgtgacgttccttcccagagttcagaacgctgctgattttccctctccccctttctcccagatgagcagcacactgtgggggcgccttccggatagctctccactggtgctgtgatcgccttccccgctggtctgtgtcccacccacgcccctcctgatgacagatccttcggggggaggcagagcacccgccacgtggcctggagatggccgctccagaaaggtgttcgcagtggagacggggctctcccgcgtgccttggaggatcagatgaggttgtggacgtgggagcactttgtgaactgggcatgggaaagagtgaaggtggaaactctccccac

SEQ ID NO: 336908 - DNA, 378 bp, Homo sapiens
  chr1:10680904-10681282
  hypo
cggttcttctccctctgaactggtgcccccttcaaatcactgactgtatacaagcaccaagaagaatgtgacacgaacgccagagtcctcagatgaatgccctggctgtaatgagcagtaggcactgtcacatggccacccatggagggcctgtggcctgacgggagcgggagggcagctcggcagcccgccttagcgtgggcactcacacggagctgccacttgtagtttctacgaagctctgggctctccgctctgttttaaaaagaaaagaaacattgcaatatcagtcacaatggtaacaagagaatttctaaagcatctgctcagtttctcgaaattaaaaaaaaaaaaaaaaagaaatggtaaaaagccctc

SEQ ID NO: 336909 - DNA, 71 bp, Homo sapiens
  chr1:10692421-10692492
  hypo
cgtggaggagaaacggacagaaacctgggcccggaggccttttgcccctgtgggtcctgagcaccgaattc

SEQ ID NO: 336910 - DNA, 181 bp, Homo sapiens
  chr1:10692798-10692979
  hypo
cgggggacagctgccctgacctcaccccggaccagctccctcggtccccggggtctgtcccggctcctccggtaactcgctggttctgccttgggcaggggcatctactttgggaaggacaggggacctcccttggtgtttgcgactcgcaggacaggccaggaggcgggggagttgcctt

SEQ ID NO: 336911 - DNA, 409 bp, Homo sapiens
  chr1:10707636-10708045
  hypo
ccaccatcggcccacgcgggctggcctgctctgggacaggcagtgaggtaggagcagcagcatctttggctagaaggacatcacccgatggccatgccccagagaggctggggacagcagcaccatccgcagtgaggaacagggcctcctagcgcccttgctagcacctactcccgagacgcgaggggaacgcgggactcccggctcatcgagggactcacttctcctggaactggaggaatccgggtttgacctggggcttggcgttctctagagaagtcgttgccaagggcgaggcgggcaggtgaggcactgacgctgggatctgaggcatctggggtatggtggaagccagctgcttccaggcgagcagggtgggggtggagggcacggaggccgggctgggagc

SEQ ID NO: 336912 - DNA, 134 bp, Homo sapiens
  chr1:10713965-10714099
  hypo
ctccgtgtccttggcgcccagcagcgagggcggcagccccagcgcgcccgaggagcggatgtgccggcgctcatgcttgcgcttgtgagaggtcatctggctggtggaggtgaaggtgaagccgcagccggcgc

SEQ ID NO: 336913 - DNA, 1313 bp, Homo sapiens
  chr1:10719300-10720613
  hypo
cgccttctcagccaaccacaggcctgcattcagcacccatggcagcaggtagagaaagcctgtcatgggcagatggggtgtgctgtcatgggcagtcccggtgtgcatgctagcaaaaggcagagcacacttgtgcctgggagtgtgggcgtgtgtgggtggcgtgtgtggggggcgtgtgcgaggtgcacgcgcaggtccaggagcgggggggcgctgcaggagggctcacgcatggttctgtaggtgcaagagtgaatgtgagtgcggcgcgcacctgtgtgtgtggaagcgcatggatgggagcctgagtgtgcacgcgcctggatgcacagtggatgtgtataaggtgtgagcggcaggtgtgtcctcaagcacgggcaaccctggtgaggaaggaggcctcctgtctagtctggctcctggctctgggcattgtggggtggggagcgccttacttgacagtggagacggtccccgtggtgatggagtctgttttggagaaggttgacttcaggtactcgggagtgttgaaggacagggaggcaggaggctctggccctggcccgggggcgctgggggcactgggcacgctggcgaggggtgcgggagccaggctgggggtgggcggaaccttggcggggcctggcttctggatgccccggacgtcgtacttggaagggcgccccaccttgcctgtcttgaaggcgatggccccgcccatgtcggggctgccctccccgggtttgaagaggtgcaggtacttgacattctccaggtcgtacttggatggcttcttgtaggtgctcccgttctggggccgcagattctcgccggtcttcagtttttggatgaagaagtcgtacttggaggcccgggctaccaggttctgcatctggacactgctgtgcgacggcaggggcaggatggtggccttggtctccaggtgggccgtgctgctgggcagccgcaggccgggcagggtgcccaccacctccttgcccacccgctcctcggtcttggtgctgggggccggccaggagagctgctcgccagccttgagcttgcggatgtactcctcatacttagagaaccgcgcccgcttgctgagggtatcctcggaggtgggcagcatggaggaggtggctgcctccggggtggagcccgcgtgcagcttctcaaagctgatcttcctggccagctcgtcccgcgtgttctggtcatcatagccaaacatgccgaggaactcggtcatggtggaggccgcgtagtcccgcagcgaggaggcctctcctgcagaggaggatgggggc

SEQ ID NO: 336914 - DNA, 812 bp, Homo sapiens; identical to SEQ ID NO: 330689
  chr1:10854235-10855047
  hypo

SEQ ID NO: 336915 - DNA, 259 bp, Homo sapiens
  chr1:11020521-11020780
  hypo
cgtgccctttaagtcgccaggaggaggctatatttagggcccgtggacattccgcaggagctcgggcagccttcactgggagcaatcgctaatcactgcattgagtttacgggtgcccctgggcacacttaacccagggcaatgaatagttattgcgcggcctcccgctcggggcctgtgggcacacttaagcgagctcgcagatcgctgcgagcagggcacggctcgggtacacccttgggcaccctgcgccatcagc

SEQ ID NO: 336916 - DNA, 123 bp, Homo sapiens
  chr1:11091195-11091318
  hypo
cgtccatgtggaggaagaggtgtgctgcctttcctagagaaagggaatttgaaaccacccagagctccttagcaccctcatgtcaaatataagaaagatctgcggccgggcgcgatggctcat

SEQ ID NO: 336917 - DNA, 237 bp, Homo sapiens
  chr1:11131824-11132061
  hypo
agggcctctgggctcgctgtgctgtggctccagaactcttctctaggtcactgcaggtctcgtcaatgtcgcattcattagactgccttctccaaccaccaacgagacagctacagcacctccagcactccccaccaatctctctgcacagcacctgctgccatctgccaggatagatactgattgcccaccatccctcagcagaagggaagccccacaggggcttcattcatcgcc

SEQ ID NO: 336918 - DNA, 54 bp, Homo sapiens
  chr1:11139786-11139840
  hypo
cgggcctgctggattaaaaggtgcatttcgttgatctgctgccgcacaaggggc

SEQ ID NO: 336919 - DNA, 267 bp, Homo sapiens
  chr1:11141000-11141267
  hypo
cgggaatcaaaattgtgccctgggctctggaaaatgtttggctcttttcatgaatgtaaggagcaaacctaagaactagaacctggccagacacagagcccaagtgtcgcggtctgtgtgactgcggctgaggtgtaccttgaggcagatgtccctgctccgttgccacaccacctgcagctgcaccggctgcccgttgccgcgctcccacatctccagcctcattttgtcatagatatatagcaggtaatgggtgtcatcccgggc

SEQ ID NO: 336920 - DNA, 1333 bp, Homo sapiens; identical to SEQ ID NO: 330691
  chr1:11538713-11540046
  hypo

SEQ ID NO: 336921 - DNA, 568 bp, Homo sapiens
  chr1:11596382-11596950
  hypo
cgcccgaacgcagcgccagtggcgtacgctggaggccgtgcggcacgtgggcgtggccatcgtctccagtgccctcaccacggtcatcgccacagtgcccctcttcttctgcatcatcgccccatttgccaagttcggcaagattgtggcactcaacacgggcgtgtccatcctctacacgctgaccgtcagcaccgccctgctgggcatcatggcgcccagctctttcactcggacccggacttccttcctcaaggccctgggtgccgtgctgctggcaggggccctggggctgggtgcctgcctcgtgctcctgcagagcggctataagattcccctgcccgcaggggcctccctatagcccgggacgggctctggacacttgcacctttggtcccatgggtgggggacaggagctgcttcccagctcgacttcagctagctgtgtccccaggcctgggcccagggcgccctgcgggccagcgtggaggctgacacccacacagatggtgtggaccatgctgccttgtggagctgggagttggagacagccgccaccccacaggcc

SEQ ID NO: 336922 - DNA, 217 bp, Homo sapiens
  chr1:11856166-11856383
  hypo
cgaactcagcactccacccagagcccccagcctgtgcgaggacggtgcggtgagagtggggtggagggagcttatgggctctcctgggcccctcacctggatgggaaagatcccggggacgatggggcaagtgatgcccatgtcggtgcatgccttcacaaagcggaagaatgtgtcagcctcaaagaaaagctgcgtgatgatgaaatcggctccc

SEQ ID NO: 336923 - DNA, 112 bp, Homo sapiens
  chr1:11982519-11982631
  hypo
cgtcgtctcctctcaaaacacttgtgcgcgctctctggtgtcaagggctgagggcatcaggacacccattcctgcccaggcctcaccccccctcgccaggctagccccttcc

SEQ ID NO: 336924 - DNA, 143 bp, Homo sapiens
  chr1:12030713-12030856
  hypo
cggtcacctccaggacaaccgcatccagggtggctacgagaacgtgccgactattgacatccacatgaaccagatcggctttgagcgggagtggcacaaattcctgctggagtacattgcgcccatgacggagaagctctacc

SEQ ID NO: 336925 - DNA, 796 bp, Homo sapiens; identical to SEQ ID NO: 330692
  chr1:12123218-12124014
  hypo

SEQ ID NO: 336926 - DNA, 1035 bp, Homo sapiens; identical to SEQ ID NO: 330693
  chr1:12226892-12227927
  hypo

SEQ ID NO: 336927 - DNA, 142 bp, Homo sapiens
  chr1:12241609-12241751
  hypo
cggtgcacagagcatgccacgcacctctccatatgcacatagaccctctaacctaagtcagcgccccttctacaaggccggtgtccagcacacctgggaaaggggacatttctggccctttcctctcagaagtcgcctgctc

SEQ ID NO: 336928 - DNA, 717 bp, Homo sapiens
  chr1:12251334-12252051
  hypo
cggggcaggcggtgggagaactgtgcccacgtgagggttgaggaggtggtgcgtgggagagtggtgcgcatgctcgtgctgcgaggagcaggactgcggggaggagcgaaactgctgggaagagcgggactgcggggaagagcgggacttcggggaggagcggcactgcggggaggagcaggactgcagggaggagcgggactgtggggaggagcgggacttcggggaggagcgggactgcgggggacgagcgcgactgcgggggacgagcaggactgcggagagtagcgggactgcggagagtagcgggactgcggagagtagcaggactgccggtcctgcccctggactctggccggtgttgtgtgtgccccatgctgaggcggtccgccagcctcctggagatccgctgtctgagagtgctgggctgtctgggagggcagcgtgggtgtggcggaggcaggcgtgaccgtttgccgccctctcgctgctctagaccaggtggaaactcaagcctgcactcgggaacagaaccgcatctgcacctgcaggcccggctggtactgcgcgctgagcaagcaggaggggtgccggctgtgcgcgccgctgcgcaagtgccgcccgggcttcggcgtggccagaccaggtacggggtggggctcaggtccttggggacgcccatgggcctctcctttgtagacatccttgcagtgtcac

SEQ ID NO: 336929 - DNA, 311 bp, Homo sapiens
  chr1:12304451-12304762
  hypo
cgtaagaaagcactacttcaagccctggaggagaaatggaaggcaaggcagagatcttctgggccataagagcagttgtggtgacacgtgtaagatgagcaagaacactagattgagctaatgctgactcttgtctttgtagaatgaccgccagcagaaaggggagtcctattggtattcagttaccgcctccgtagttacaaggattgtggagaatattgaagtaagtcctgctgacttttataaaagtatcaacgtgaaagggatttctcaggtttaaacgtgtttctcctcttagtttctcatttctc

SEQ ID NO: 336930 - DNA, 174 bp, Homo sapiens
  chr1:12460147-12460321
  hypo
cgcattatgaggccccactcaagcgtaaaaatgaaaactgagccactggtctgtttttgtttttgctttgctacctttccatggccgtaggtggacaatcagctcattggtaccacgcagcccttcatgctctatgtgactcccctgagcaatgagaatgaggtcatcgagacc

SEQ ID NO: 336931 - DNA, 174 bp, Homo sapiens
  chr1:12573235-12573409
  hypo
cgggaagtgatgctgatttggagagagagaaggtgcacgtagtcatgtagggtaacgggaaagggaataggccacagaagcatggtatgtttgccgggcgacattaaggacccatttgacgttgatgaccgtgaatgtacagtggaatcgggcagcctggctgtattcttgtcc

SEQ ID NO: 336932 - DNA, 186 bp, Homo sapiens
  chr1:12630214-12630400
  hypo
cgatttgggtgtcacatcctctggggaagcgtcctgggctcaccttcaggcttctcctcgtacaaccggagttccgacgcttccccagcaagccctggtgtagtccccacccgtttacttgtcaagcctgtgggggccttcatggcgggtatttcatctctgatccccaggccctcacatgggccc

SEQ ID NO: 336933 - DNA, 315 bp, Homo sapiens
  chr1:12638803-12639118
  hypo
cgctgactcccggacagtccagcagccccagggtcaggctctccatgaaggcgaaggctgacgctttggatgtgcagtagtcgatggcaccggggatggcagacagtgccagcacggagttgaggcacacgatgtggccattctgcagctccagcatacgtggcaggaaggccttggtggtctgagggcagatggggtgtcagggtggagcagccgcagctctgacaacccctccacctttctttcggggagaacagcccaccccggacacacatgatgctctagggcccgagccttcctgcgagggagagggcc

SEQ ID NO: 336934 - DNA, 1141 bp, Homo sapiens; identical to SEQ ID NO: 330695
  chr1:13839543-13840684
  hypo

SEQ ID NO: 336935 - DNA, 714 bp, Homo sapiens; identical to SEQ ID NO: 221239
  chr1:14026482-14027196
  hypo

SEQ ID NO: 336936 - DNA, 121 bp, Homo sapiens
  chr1:14114676-14114797
  hypo
cggcgtctactcagcccacctggcgtctgttcacttgtttctatttgacagtaactgaatatgtgctcattccagttggatttctatgtagagggtggacgtgtagtcagacaacggtgcc

SEQ ID NO: 336937 - DNA, 184 bp, Homo sapiens
  chr1:14125492-14125676
  hypo
cgtggtgagtcagagctgctgggtaatgtgacttagtcagctggatcaaagggtaacaaacacaagcactccaggcaaacacagaggtctccgccacttacttcgtcactaagtccggcatgttcaccattgcctaaggaagaacagagaattaagaattgtgaggccgggcgcggtggctcac

SEQ ID NO: 336938 - DNA, 1852 bp, Homo sapiens; identical to SEQ ID NO: 330699
  chr1:14924521-14926373
  hypo

SEQ ID NO: 336939 - DNA, 121 bp, Homo sapiens
  chr1:15102346-15102467
  hypo
cgggccaccgggtccagtctttacacttgaaggcgtcacaggccctttcctacagcggtcgacacccaggtctcttccacatggaaccaccatagtgagtgtggtcctgcgtgatcactgc

SEQ ID NO: 336940 - DNA, 167 bp, Homo sapiens
  chr1:15178306-15178473
  hypo
cgccttctcatagcagtcatcacactgtgtagcgatcgctccactaaccacccctgcaactgcaggtcactgggggagggacctagtccagctcacccggaatcctcagggcctagacatggagacccaggtcctccggaagagtttgtgagaggaatgagaaatgc

SEQ ID NO: 336941 - DNA, 296 bp, Homo sapiens
  chr1:15194468-15194764
  hypo
cgcatatgcaggcattggatacacaggcatcacaaacgtgggcatcacacaggcatggcatcgcatagcatggcatcacatacgcacagcattgcatacacaggcatcacatacgcacggtatcacatacacaggcattgcatacacgggcatcacatagcacggcatcacatacgcagccatcgcataggcgggcatcgcataggcaggcatcaaatagcacgcatcacatacgcaggcatcgcatacgcaggcattgcaaacacatggcatcacatacgcacagccagggctgc

SEQ ID NO: 336942 - DNA, 220 bp, Homo sapiens
  chr1:15283890-15284110
  hypo
cgacagacgttaccgagtgcccgtgatgtgtcgcgcagtcactgtttccagcgctgaagacccaacagtgaaggagacgaggcaggatatgcgattgggccccgctctcggatcctgtgtccaccaagcacgccgctggggagcgagtgagcctccacgtcactacggggttttgtccgggttgcctgccgtgctgttgacgctggacaggagcggagcc

SEQ ID NO: 336943 - DNA, 383 bp, Homo sapiens
  chr1:15374975-15375358
  hypo
cgagcccacatgagcctaccgttgcccccgcaggagcctcccctccatggccagagccagcgttgatccttggttgttggtcctgggtcgttgatccttggtcgttggtcctgggtcgtcggtcctgggtcgctggtcctgggtcgtcggtcctgggtcgtcggtcctgggtcgtcggtcctgggtcgctggtcctgggtcgttggtcctgggtcgttgatccttggtcgttggtcctgggtcgttggtcatgggtcgtcgatcctgggtcgtcgatcctgggtcgtcgatcctgggtcgttgatccttggtcattggtcctgagtcgttggtcctgggttgttggtgctgggtcgttggtcctgggtcgttggtccttggtc

SEQ ID NO: 336944 - DNA, 187 bp, Homo sapiens
  chr1:16058899-16059086
  hypo
cggatgaccgcctctttacgtgccatgaggattgccagaccagcttcttccgctctttgggcacagccaagctgggcgacatcagcgccgtctccaccgagccgggcaaggagtactgcgtcttggtgagctttgagtgggggcggggctgcaaggcctgcagaaggaaagctctggctgctcaccc

SEQ ID NO: 336945 - DNA, 125 bp, Homo sapiens
  chr1:16270113-16270238
  hypo
cgctgcagagcgccggggtctgcaaactgtcgctggcagtggatgcacacgtagggcttctccccgctgtggatccgaaggtgccgcttcaggttccctgtggcgagaccgagggcgaacctggc

SEQ ID NO: 336946 - DNA, 514 bp, Homo sapiens; identical to SEQ ID NO: 206736
  chr1:16464269-16464783
  hypo

SEQ ID NO: 336947 - DNA, 645 bp, Homo sapiens
  chr1:16474862-16475507
  hypo
cgtcactcaccctggcaggcatcctccaccttctcgtagcctgcctggcacaggcactgcccaatgggcaccagccactcgccatccactgcacagtgcatacggggctcttcaccccccggtggcaccacggcatggtccacacaggtgccggccacagtggccagggaaggtgcatcagagccggcgatggtctcagggaagtgggccaggccctgcagcagctcggggcacttcttgtagtagacacggacggagagcagcgccacacaggcaccgatatcctggaaggccaggtagaagcctttgcgggtgagcggccccacggagcgctcctccacgttcagcttcacgtggcgtgcctcgaagtcgctgctgacggtgatctcatcgggcgcaatggtgtcaatcttggtgaacaggcgcttctggaagttggtgccgtagtccaggtccgactcggcatagtagaggttgaaagtctccttgcaggagctggcgccaccagggaagctgttgcagtcacgtacagtaaacttgagctcaatgaagatacgctcagcctctcctcggtacacccagttggtgcggagccagttgtcctggtcgccagacatcacgttgcacacggagtacatgtagatc

SEQ ID NO: 336948 - DNA, 418 bp, Homo sapiens
  chr1:16534331-16534749
  hypo
cggcccaggcaccctgacggcctcaggcggccggtgagtgggcatcgcccacccccacccccacccggcatctggctgccctcagggcccatgggaggagctggtaccttcccgggctgctccggtgcctgacccagagatgagtgcccgggctgctgaattccgccccaggcgcagagaagagtgcagccgggtcatcagctccgatgccgagaagcgcctccgctcaggaccttcgaggctcactcgggtggacccagacaactccaccctgggctcctctgtgctcagggcctgctcttgcactacctggccaggctctaggaagacagcgtgggcctcggggcagccggggacctcttcacgctggtacacccgcatcttgcgccctagggttgggggcaaggagtgagagcac

SEQ ID NO: 336949 - DNA, 148 bp, Homo sapiens
  chr1:16640899-16641047
  hypo
cgcctgaacgtgaatctttaatcctgcatttactatccgtgtaaataagttaactgtgtttcactcagttctgtcatctataaaatgcaggatcttctagtcagagtttgctgtgagaatgtaaagcagttacaatagtgcttgacac

SEQ ID NO: 336950 - DNA, 193 bp, Homo sapiens
  chr1:17292904-17293097
  hypo
cggcgcagtgtggatgggcggctgagcggggtccaggcggagctggcgctgcaggaggagagtgtgcggcgcagtgagcgggagcgccgggccacgctggaccaggtggccacactggagaggagcctgcaggccaccgagagcgagctccgggccagccaggtgggcaggagctgagggccagcggggcgac

SEQ ID NO: 336951 - DNA, 44 bp, Homo sapiens
  chr1:17294741-17294785
  hypo
cgacaagcggcgcctgaaggaggttctggacgcctccgagagcc

SEQ ID NO: 336952 - DNA, 491 bp, Homo sapiens
  chr1:17736189-17736680
  hypo
gcgagcgatgtgctcgcccgagagtggatctgctgcggccagttggtgccatctgtcatcaagggtgaggacagccacccagcctggccagcaaccctgtgcactctctcctgcagaatgattgttacctctcaaacaaatcttagcgtgagacaccaggaaagccagctgagatggtaaacaagacaacccaaacagactgcgatgatcaaaatcatgaggagtgacataccactgggtacggacacgtccccgagctggcacagctgcccccactcacctgctctgagaaaatgccatccagagtctttacctcctgggctgcagtggaagacttgggcttgtggtccccgtagccctggcgaagcaaacaagatgttcgcaatcgaggatccatgtggctcagtccacaagtggggaatcacggcaacatttcctggcccccactaaccagaagccagtgatgatgccctctggcccatgacaagccc

SEQ ID NO: 336953 - DNA, 310 bp, Homo sapiens
  chr1:18023481-18023791
  hypo
cgggcaggcacacgagcccatgcccgatagccacgtgggccgagagctgacccgcaagaagggcatcctcttgcagtaccgcctgcgctccaccgcacacctcccgggcccgctgctctccatgcgggagccggcgcctgctgatggcgcagctttggagcacagcgaggaggacggctccatttacgagatggccgacgaccccgacatctgggtgcgcagccggccctgcgcccgcgacgcccaccgcaaggagatttgctctgtggccatcatctccggcgggcagggctaccgcaactttggcagc

SEQ ID NO: 336954 - DNA, 247 bp, Homo sapiens
  chr1:18026186-18026433
  hypo
cgaatggagcccgttaaatcacgtcacggagaaaacgactgactttgctacttcagtgaaattatcacatcagtcaccagctcatctcccatgcctccgacaacagagcgagggagggtcgggggcgccgcgaatggctcctgagacccactgaggacgtgcatcacatgtgagtggaggcctggccttagatattgataagagtaataatacccagagcgctccgggtgcctgagctcctttcgtc

SEQ ID NO: 336955 - DNA, 745 bp, Homo sapiens; identical to SEQ ID NO: 330706
  chr1:18434105-18434850
  hypo

SEQ ID NO: 336956 - DNA, 779 bp, Homo sapiens; identical to SEQ ID NO: 330713
  chr1:19043069-19043848
  hypo

SEQ ID NO: 336957 - DNA, 132 bp, Homo sapiens
  chr1:19436878-19437010
  hypo
cgtaaccggagctcccagcagctgtcctccttggagatagaatccgtcagcagcagcatttcatactgcaggctacttgcctagaaggcaatgggaagagacatgagtcaagagggtcagctccggtccagc

SEQ ID NO: 336958 - DNA, 34 bp, Homo sapiens
  chr1:19518000-19518034
  hypo
cggcccctcgctctgacatctttttcttcacaac

SEQ ID NO: 336959 - DNA, 215 bp, Homo sapiens
  chr1:19659439-19659654
  hypo
cgccttggcaggttctgttttacctgttgaacgagacactgtatggggaagtgacatgcgcagtgcctggcccagtgctgtgcacacacgctgcttcgcttcctcaggttccggggatgggatgggacagaaaagctggttgcttagctggtggcgttctccagcaaagcagaagggatggtcctggcagccctgtgccgagcactggaccccgc

SEQ ID NO: 336960 - DNA, 487 bp, Homo sapiens
  chr1:19676386-19676873
  hypo
cggctcggtggcaataccaacccaccaaaaacagaaccatttgtgcactgcatatattattacatccttataaaagtggctgccggaaggaaaacattttcatgtgttgtggctgcagatgttccacgaggtggttccaatggcgtctgaagccggagcctggcccgtgtgtccccagcaggcgcctctcctcctccccatggccctaacacaggcaagtgtttggaagctggcagcctttcccccagaggggatgtattacacctcccactgccacgtggcatcttctagcgcgacccgcagggcgtggccctaaggcatgggccccactcaccggcgctgaggccccgcagctcctgtgctgcagcccgagaggaaagggcctgggcttgtctaggcctccatgtctttgccttcacctcgcactaaataaacaaatgtacacaaaaggcctagagcgggacttgccagaatggcagctctcacc

SEQ ID NO: 336961 - DNA, 263 bp, Homo sapiens
  chr1:19711526-19711789
  hypo
cgaggtgacggaaagagagaggagagttgtgtatctgacagagctgcgttcgtagatcccttaccacagagaccctcccagccctcaggatccccatcatatgcgcaccctgtacactgccctccgcaggactgaatgcaattataatagaacagttgtttttgaacaacatccctctcccgttagactggaagatccatgaaggcagggggcctttggtccgctgctctatctctcatgcttgtgggtggcactcttcaaac

SEQ ID NO: 336962 - DNA, 120 bp, Homo sapiens
  chr1:19720405-19720525
  hypo
cgcctgccagggccacacacaagaggacacttccaggtccagcctctctcctctttaagaagtcacttggcgctgagggccatatttttttgttttgttttgtttttgagacgaagtctc

SEQ ID NO: 336963 - DNA, 110 bp, Homo sapiens
  chr1:19767182-19767292
  hypo
cgtgcacccaacgctactgacttactccagttcatcctgaagacagactattacagtaaaagccatgttttaaaaaagttatagctgctaggccgggcgcggtggctcac

SEQ ID NO: 336964 - DNA, 65 bp, Homo sapiens
  chr1:19774229-19774294
  hypo
cggctcactgacgccatccgacccagccccagcagctcgcaggccacactgctcctctccgcctc

SEQ ID NO: 336965 - DNA, 342 bp, Homo sapiens; identical to SEQ ID NO: 330719
  chr1:21563161-21563503
  hypo

SEQ ID NO: 336966 - DNA, 120 bp, Homo sapiens
  chr1:21568244-21568364
  hypo
cggctccaatgtcttccttcaaagaggccacgctctctgcctacaggtcacgaagtcctggaagtactacaggatggtgagaaaatctccaaaaggagcgagggtctgatcgatctgacc

SEQ ID NO: 336967 - DNA, 518 bp, Homo sapiens; identical to SEQ ID NO: 248121
  chr1:21573388-21573906
  hypo

SEQ ID NO: 336968 - DNA, 253 bp, Homo sapiens
  chr1:21573936-21574189
  hypo
agcaaaggaaagagcttgggcttggcgccatctgacagcgcaccgggcagagagtcaagcggagcctggcgggcttttgtcagagatgctgtaggtagaattctaaggagtccaacaccaaaatttaacctgaaatggaatgaggatgcaatgagaagatgcagcagctgccgctaccattcagcaagcgtctcctgtgtgccaggagccgtggcaaatgattgatgcatatgattccacctggtcctcacgc

SEQ ID NO: 336969 - DNA, 179 bp, Homo sapiens
  chr1:21610561-21610740
  hypo
cgtgagtcagggcaccgatctgcttccaatggccgctggcctcggctgagtctcttctttgcatccctgtcgcacctgcccagcctccttcatgggactgtggaggggatccgtgagatgaggtcacagcatggggagatgtgactggtttcttacgtttcttttggaaatgaggtccc

SEQ ID NO: 336970 - DNA, 110 bp, Homo sapiens; identical to SEQ ID NO: 248126
  chr1:21690439-21690549
  hypo

SEQ ID NO: 336971 - DNA, 108 bp, Homo sapiens
  chr1:21889603-21889711
  hypo
cgtacaacaccaatgcccaggtccctgacagtgccggcaccgccaccgcctacctgtgtggggtgaaggccaatgagggcaccgtgggggtaagcgcagccactgagc

SEQ ID NO: 336972 - DNA, 195 bp, Homo sapiens
  chr1:22003573-22003768
  hypo
cgaaacgagaatcgggctttaggtcataccctttacctgtttttccctgtaccaagtgagaagggtggcaatgcaaaaccattcaatacaagcatacgtttctttgcaactctgcctactatgggtgggagaggccccaagcccagggtttcaaagagtacaggagtggcctgtggatgcagattccgattcagc

SEQ ID NO: 336973 - DNA, 189 bp, Homo sapiens
  chr1:22023693-22023882
  hypo
cgaccactggcgagacactgcctgaggatagtttagctctagccctgaatctacataggcaactgagtgattctaagattcacgagaaaaagttaagtgcacatgtgagttaaaaagaaaaaaaaaaaatgaaacccgatgaaacatttttctcagtctcgactgttgaaagaaaaggtcaggccaggc

SEQ ID NO: 336974 - DNA, 242 bp, Homo sapiens
  chr1:22191349-22191591
  hypo
cgatgtagcctggcgggcagcggcactcctccacctcgagggcgcggggtctgtttgagggccccggctgggcgacctccaggctgactgcgctgatgctggccgccagcggcacggaggagaacgtggcccggatcaggagctcatccaggtcggccagtgccatcaggaggtgctcgcgtgtggccggctgcccatcgggccggcgccagaattcctgggttgggggtggcaacgtgggc

SEQ ID NO: 336975 - DNA, 457 bp, Homo sapiens
  chr1:22777390-22777847
  hypo
cgtaactgtcagggacagaaaaagtggctgcatgtcagtgacagggtgactgtgttcagtgggccagcgcggaggtgactcagtttgttactgctggatctgatttaaatgtttgtgtaaggaagggtggcaaggggacgcttcaacagggaacgcatagtgtgtgagaaggaaaatgagcaaaagaaaagctaggactaaatcccaaagcccctaaatcccaaaattgggaggtgcgagaggcaggatcaggatgcctccaggatgccttcagcccactgcgccccaccagcgccaagcctgtcccacaaagagtgcgggctggggacgcggctcaggtcgcctctccgcctcgcacgtgaatgtgttgttttggaaaaacgaagccttttgtgttcacttccttgccctcctttgaaacaaaatcctaatcctagagctgccggagcgagactgc

SEQ ID NO: 336976 - DNA, 182 bp, Homo sapiens
  chr1:22927361-22927543
  hypo
cggctgagcccagcgctgatcccctgcaggtcatcagctctgtggaggaggggtaccgcctgcccgcacccatgggctgcccccacgccctgcaccagctcatgctcgactgttggcacaaggaccgggcgcagcggcctcgcttctcccagattgtcagtgtcctcgatgcgctcatccgc

SEQ ID NO: 336977 - DNA, 160 bp, Homo sapiens
  chr1:23411446-23411606
  hypo
cgcacagagtatacggaaacgagggagctttattggttacatattgtactgcagagccaacagagagcattcgcgccagaggatacatgcagacaggcagctccaatgatacacatgcacccaaggagccctgagccactgctttgccctggtttccagc

SEQ ID NO: 336978 - DNA, 185 bp, Homo sapiens
  chr1:23693488-23693673
  hypo
cgatctcaaaaacgtggaggcaaagaaaggtagaatccttacttacctagtgagacaacatttccataattctcctgcataacatcccggtaaaggtccctctgtgcagcgtccagaggtctccattcttcccgggtgagatacatggccatatcttcaaacgtcacaggtgcctgaaatcacac

SEQ ID NO: 336979 - DNA, 177 bp, Homo sapiens
  chr1:24119126-24119303
  hypo
cgccgccccgatgtatgcaggcccccgccgtggagccgtgtggtgtatgtgtggtaacaccatgtctgtgcccctgctcaccgatgctgccaccgtgtctggagctgagcgggaaacggccgcggtaagggtcccctttcacccacggccagacactgtgggagcagctggaggacc

SEQ ID NO: 336980 - DNA, 380 bp, Homo sapiens; identical to SEQ ID NO: 197392
  chr1:24126329-24126709
  hypo

SEQ ID NO: 336981 - DNA, 240 bp, Homo sapiens
  chr1:24434944-24435184
  hypo
cggggaccctgtggctcccacctgctgcggaaggtccgcctccgcacagaggagcccatgcgcaggctgtgctgccgctcctccttctgctcctcctcctgccggtgctccagcctgtgaacctccatggcctgggggggccgggggtcccccgcacctcccaagctgtgcggcagagtcatggttacgagagcaacaacctgtgaaggccaaggtccacggtcattccaccaggtgccc

SEQ ID NO: 336982 - DNA, 358 bp, Homo sapiens
  chr1:24712899-24713257
  hypo
cggcagctggagctggccagcggcagcttgtgaggacaactgttaaaaattccaaaatgttgctgctggtggcttgaagttggccacggtggcagtatttatgtcacaaaaacgggcagatgctacatctcagcacttttcttcgaggagggtaaatggtggttgaccagcacaccaccgccttcgtgcaacgcccaagtaggtctctgggagggaaatgtcaagcgttctcctgtgacttctagaggtgggcggatgccaccctcagagaggcctttcgcctgtgcaaaaacagttcctgcgactgacattctgtgacttggatgaatttagcctctcagagcaaatcccagagaac

SEQ ID NO: 336983 - DNA, 247 bp, Homo sapiens
  chr1:25070663-25070910
  hypo
cggggctgcgtgtagcacctaggtgattctgatgcacactcaaatttgacaggtgagccggggggaagaaatgggtgtgggcagtggggaacaagatggacaacgacttggaagtccttagtggcctgcaggcactgagattgcagttcaagatcttgagctttgggagttgttactctccaagggctagctcagagcctgaaacacagtaaggtttcataaatatttgtgaatatgcgcccggcgc

SEQ ID NO: 336984 - DNA, 1983 bp, Homo sapiens; identical to SEQ ID NO: 330730
  chr1:25255291-25257274
  hypo

SEQ ID NO: 336985 - DNA, 164 bp, Homo sapiens
  chr1:25854484-25854648
  hypo
cgcccactagagtttttgtgttgtcacttcttgtggactggtctgtctccccggccttggaaccctttgagggcagggcgaagccgggctacctctgctcctctctgcagccccaggccctggcgggcaggcagcatcaggtgtccagcccgtgcgctcttgcc

SEQ ID NO: 336986 - DNA, 249 bp, Homo sapiens
  chr1:25919205-25919454
  hypo
cgctctatatccagcacctagaacagcgcctggcacctaagcaggcatttggtaaaactgtgccaaatgagtgagtgcggacagcgtcctagtccttcaccagccccctctcagcagcgcaggcaactggcccagctgtgtctcccgcacgggccggcgggcgctgtgatggaggcagtgcaggatgccgtgtgagcccgaggaaggacttgcagccctgctgaggggacgaggcgaggcttcttggat

SEQ ID NO: 336987 - DNA, 211 bp, Homo sapiens
  chr1:26087011-26087222
  hypo
cgcccgcaccctccaggggagctaatttggcctgcttcactgctcaccaccaggacagtcgagagtaacgcaggtacaagcacattcctgtccccgtaatggacttcgttaacataaatggatatgaaatctgacgtggcaaagccaagtgctgtcacctggaaaggaaggtctgcctgcagaaaggtggctctcccgcactcccggcccc

SEQ ID NO: 336988 - DNA, 807 bp, Homo sapiens; identical to SEQ ID NO: 330733
  chr1:26662538-26663345
  hypo

SEQ ID NO: 336989 - DNA, 36 bp, Homo sapiens
  chr1:27056297-27056333
  hypo
atgaccatgcagggccgggcgcagagtgccatgggc

SEQ ID NO: 336990 - DNA, 88 bp, Homo sapiens
  chr1:27058003-27058091
  hypo
cgacgctctcccagcaggctgcgtatcctcagccccagtctcagcagtcccagcaaactgcctattcccagcagcgcttccctccacc

SEQ ID NO: 336991 - DNA, 247 bp, Homo sapiens
  chr1:27183370-27183617
  hypo
cgctgctctctgcctctccaggaatggcctggggggagccaggcacccggcacctccacctgcctaacctgtggcccatctgccaccatctgtgcctacagggtctgccccccagcctgcccggcctgtgtgctctctaggacccccatagggggcaggggctggcctctttgccccattcccgctccatgccggccagagtgtagaaagccataacgcagccatcagcacaataatgtgactctac

SEQ ID NO: 336992 - DNA, 603 bp, Homo sapiens
  chr1:27189675-27190278
  hypo
cgccgcccgcctgtgtgtccccagagccatggagagagccagtctgatccagaaggccaagctggcagagcaggccgaacgctatgaggacatggcagccttcatgaaaggcgccgtggagaagggcgaggagctctcctgcgaagagcgaaacctgctctcagtagcctataagaacgtggtgggcggccagagggctgcctggagggtgctgtccagtattgagcagaaaagcaacgaggagggctcggaggagaaggggcccgaggtgcgtgagtaccgggagaaggtggagactgagctccagggcgtgtgcgacaccgtgctgggcctgctggacagccacctcatcaaggaggccggggacgccgagagccgggtcttctacctgaagatgaagggtgactactaccgctacctggccgaggtggccaccggtgacgacaagaagcgcatcattgactcagcccggtcagcctaccaggaggccatggacatcagcaagaaggagatgccgcccaccaaccccatccgcctgggcctggccctgaacttttccgtcttccactacgagatcgccaacagccccgaggaggccatctc

SEQ ID NO: 336993 - DNA, 256 bp, Homo sapiens
  chr1:27220862-27221118
  hypo
cgcttcatgccgttcccattcctcaccccggtcatcgtcctaaaaggcagggagaggtgatttgcctgagcttcctgacctcatgccccgagggagggaagctcagggcacaggaggcatgtgtggctagcctcagcgccattccttcagatttctccaagaagcagcacatatttggcccctgaccaacacgtctccagcccgataattctcaacagtttgctcctgtccccacaagcctgactcacctctgcgc

SEQ ID NO: 336994 - DNA, 497 bp, Homo sapiens; identical to SEQ ID NO: 330735
  chr1:27332484-27332981
  hypo

SEQ ID NO: 336995 - DNA, 211 bp, Homo sapiens
  chr1:27628358-27628569
  hypo
agcagagacaatagcgcagagcagtagaaatgcctcaggcttggaatgtggggcctcggttccaaatgcagctccaccacctgactgtgtggccttgaagaaagcacagcctctctacctacctgcacaaagagcacgaagccctgcccagctcccctcagtgtgctggagaatgaactgggccatcggagtgtggtctgtaaacgtgaac

SEQ ID NO: 336996 - DNA, 196 bp, Homo sapiens
  chr1:27844793-27844989
  hypo
cgtcgactggactctggccaagggcagggactgtgtggcactgctcactgctgtatccacaaggccctaaggcataatgcctggagcctcaatccatgatcggtagggaacgaatgaatggctaagcctgttggggcaggtgtgatagtttgagtgaaagtgacagggtctgcggtggcagcgaggagagaagaga

SEQ ID NO: 336997 - DNA, 258 bp, Homo sapiens
  chr1:27875550-27875808
  hypo
cggtaggcggtggggcatagccggcgctgtgggcgctgctgggtgaggcagggaggctgttgccactgccataggcgaagctgcagtccttgctgttagcgcagtcctggcctgtaaagggcttagttggggcgaatacgctttgtccggccccatagccgccgtactggggcaggtaggtgttggcaggcgggtgggtggtaggtgagcgggccatggctgagggcgggggcaccagcttggggaaggtctcggctg

SEQ ID NO: 336998 - DNA, 592 bp, Homo sapiens
  chr1:27875852-27876444
  hypo
cgtcctggtgggaaggtctggcgcgcggacaggacaggctgaaaggaggggtccgccccagccccgctgctacccactgccactgggctggccttggctccccggctagggaaggtggccaggccccgctgggcaggcagggcactggtgggtggccctgcataggtgcccgatgccttccgggactctgggcgagaggctgagagggcaaagtccaagagatcggaggagtcatccgaatcgagcagcgagcgaaagtagccggtgaagaggttttggcgctcctggctgagctcggtctggcctgagggtgcacccgtgctgtagtagctgccacggcctgaggctccactctccagcccagtggaggcaaaggcccgggcctcggtcccctgaaacccacagtttcggccagcttgtccgcctgggtgcccatggtgaggggcccagccaccacccttatccccggcccactcagcacctgcctccccaaagcctgggccactgggcacctgctctgggaacagagtcccattcttccgggaccgtctcttgcgctttggcttcccagtcacagcgtctacctcccccc

SEQ ID NO: 336999 - DNA, 698 bp, Homo sapiens; identical to SEQ ID NO: 330736
  chr1:27901989-27902687
  hypo

SEQ ID NO: 337000 - DNA, 202 bp, Homo sapiens
  chr1:27921349-27921551
  hypo
cgtggggtgcaggcggagcacagaatgggtgcagggttgtgactagctgaggctgtctttgtgtacaggtgtggtatcggggtgtttggagaggtgtaggggtgtccctgggcccttaggtggctgaggaaaagtaccggagctgagactgtctgggaagcggtggggccgggccattaggactgcctgtcgaggaggtgcc

SEQ ID NO: 337001 - DNA, 315 bp, Homo sapiens
  chr1:28293280-28293595
  hypo
cggaccccagctccgagtggctgtaccgggtgacggtggccaccatcctctatttctcctggttcaacgtggctgagggccgcacccgaggccgggccatcatccacttcgccttcctcctgagtgacagcattctcctggtggccacctgggtgactcatagctcctggctgcccagcgggattccactgcagctgtggctgcctgtgggatgcggctgcttctttctgggcctggctctgcggcttgtgtactaccactggctgcaccctagctgctgctggaagcccgaccctgaccaggtagacggggccc

SEQ ID NO: 337002 - DNA, 134 bp, Homo sapiens
  chr1:28887889-28888023
  hypo
cgggaaacaaccagataacaggtaggtacaaagtcatgtctagacagacataagatgtgtcactgtgcctgtcactgccatataggaggaggggagccggtttggctgcacttggttccctcctgaaggacgac

SEQ ID NO: 337003 - DNA, 120 bp, Homo sapiens; identical to SEQ ID NO: 248303
  chr1:29463501-29463621
  hypo

SEQ ID NO: 337004 - DNA, 86 bp, Homo sapiens
  chr1:31474705-31474791
  hypo
cgcgtatgatagcagtgcttatcaaactttaatgtgcatacaaatcatctgggtagtcttgtcaaaatgcagattttgattcattc

SEQ ID NO: 337005 - DNA, 91 bp, Homo sapiens
  chr1:31863044-31863135
  hypo
gtgtgttctgggcacgcagcgggcctcatttatgacttagttcaacattacaaaccttcgggagccccaccctccttctctgagagttgcc

SEQ ID NO: 337006 - DNA, 405 bp, Homo sapiens
  chr1:32742000-32742405
  hypo
cgtggtgggaggacgagtgggaggttcccagggagacgctgaagctggtggagcggctgggggctggacagttcggggaggtgtggatgggtgagtgtggcctccaggactgcctgggaagaggggaacgggaggggccgctgaggtgatgagagtcccaggacagctgcctggcgactttcccactccttcccttccccgacccagggtactacaacgggcacacgaaggtggcggtgaagagcctgaagcagggcagcatgtccccggacgccttcctggccgaggccaacctcatgaagcagctgcaacaccagcggctggttcggctctacgctgtggtcacccaggagcccatctacatcatcactgaatacatggagaatggtgggtgctacccgagtc

SEQ ID NO: 337007 - DNA, 314 bp, Homo sapiens
  chr1:32826720-32827034
  hypo
cgagaggagtgaagtggcgtaggttgaaaggcggaagggcgggcccctaaggctgggtccaaacgaggaggctgcggaagggaaagtgttattggactgggcagagcagctggtgggcccgacggatagacatacactgccagcccggagtggaaagaacagtttgtgctgtgctttattaaaatgtgcatcattcttttattttaaaatgtgcatcattgtctcgtgctcggcgcatgcgacctcagcgtggtggcccgctgggggcctcgttcccgcccagctcccgcggagccgcagggagcaggcgcact

SEQ ID NO: 337008 - DNA, 62 bp, Homo sapiens
  chr1:33016544-33016606
  hypo
cgagactccgtctcaaaaaaaaaaaaaaaaagccacaaattaccaccgtacacacccagtac

SEQ ID NO: 337009 - DNA, 169 bp, Homo sapiens; identical to SEQ ID NO: 221295
  chr1:33438469-33438638
  hypo

SEQ ID NO: 337010 - DNA, 413 bp, Homo sapiens
  chr1:33441518-33441931
  hypo
cgggagggtttcaatagattctgccccgcaagcttcccagccacctttctcatacctacagctcatggtgtgtcgccctgccttaaaccccacactggctccccgtgcccgatgagagagcatttagatccttcataactaagactcaccttcaccctcaccagtcccaccgcctccttgcacgggagaccccatccctctggacccggggcccttccagggatagccatcacttgcatacttgcgactgctcttgctgtagggtcccctttccccctttgtgaacctagcgaattcctagaccctacttaattataataaagcaacagagggtagaaactggcactaaaatgccgcttagcaaaggtcacaaaggtgaaagcctgcagaagtcaagcaggagagagaaatac

SEQ ID NO: 337011 - DNA, 167 bp, Homo sapiens
  chr1:33741930-33742097
  hypo
gtcctcttcttcccgcagctggacaacctggttctgattaacaagatcaaggagcagctgatggccgagaagatcaggccgcctcacctgccgcccacgtcggcctcgtcgcagcagccgttgctagtgccgccggcacccgccgagagcagccaggccgtcatgtc

SEQ ID NO: 337012 - DNA, 328 bp, Homo sapiens; identical to SEQ ID NO: 330755
  chr1:33772745-33773073
  hypo

SEQ ID NO: 337013 - DNA, 847 bp, Homo sapiens; identical to SEQ ID NO: 330756
  chr1:33896040-33896887
  hypo

SEQ ID NO: 337014 - DNA, 2399 bp, Homo sapiens; identical to SEQ ID NO: 330758
  chr1:34628644-34631043
  hypo

SEQ ID NO: 337015 - DNA, 1656 bp, Homo sapiens; identical to SEQ ID NO: 330763
  chr1:35394588-35396244
  hypo

SEQ ID NO: 337016 - DNA, 138 bp, Homo sapiens
  chr1:35650183-35650321
  hypo
cgctcagtacgctattggaacagtaattaacagttcattataagtagttgatgtccatgtgtgttaagtaaatattttagaaggttccgtagtcaacgttcgtcgatacaatcaccaatgagtcgatccacaggtacc

SEQ ID NO: 337017 - DNA, 145 bp, Homo sapiens
  chr1:35664741-35664886
  hypo
tcttaagatttatcaagttactttacctgtatgttttgcctcagggcatttgcacttgctctttactcagcctgcagtgttctccccactcgccccgccccggctctttgcacagatatcttttcttaatctttttttttccttc

SEQ ID NO: 337018 - DNA, 229 bp, Homo sapiens
  chr1:36025968-36026197
  hypo
cggcggcggatcttcgatgctgtcggcttcaccttccccaatcgtctcctgaccaccaaggaggcgccggatggctgccctgaccatgttctgcgggctttgggtgtggccctgctggcctgcttctgcagtgaccctgaactggccgcccatccccaagtcctgaacaagattcccattcttagcaccttcctcacagcccggggggacccggacgatgctgcccgcc

SEQ ID NO: 337019 - DNA, 83 bp, Homo sapiens
  chr1:36640437-36640520
  hypo
cggtgccccccactggctcctgccgggcccggccctaatgccgtgtcttttccccctccaggtgggagcaggtgctccgtgtc

SEQ ID NO: 337020 - DNA, 130 bp, Homo sapiens; identical to SEQ ID NO: 221306
  chr1:36788084-36788214
  hypo

SEQ ID NO: 337021 - DNA, 1420 bp, Homo sapiens; identical to SEQ ID NO: 330767
  chr1:37499288-37500708
  hypo

SEQ ID NO: 337022 - DNA, 1454 bp, Homo sapiens; identical to SEQ ID NO: 330771
  chr1:38510073-38511527
  hypo

SEQ ID NO: 337023 - DNA, 908 bp, Homo sapiens; identical to SEQ ID NO: 330772
  chr1:38511531-38512439
  hypo

SEQ ID NO: 337024 - DNA, 701 bp, Homo sapiens; identical to SEQ ID NO: 330773
  chr1:38512644-38513345
  hypo

SEQ ID NO: 337025 - DNA, 217 bp, Homo sapiens
  chr1:38953081-38953298
  hypo
cgtcaatacaggatggagctccccagacggtgctggctgttgagtgctgcagcgagtgcgatattggccctttagatttcacagacaccctctccaagtacaaacacacactcacacacacacagacacatgcgcgcgcctactccatcgcgggctgcgtggtgtgtgcagtcagcagccgtgtggagaatgtgaaatcacacctcgctctccttcc

SEQ ID NO: 337026 - DNA, 548 bp, Homo sapiens; identical to SEQ ID NO: 330774
  chr1:39043984-39044532
  hypo

SEQ ID NO: 337027 - DNA, 481 bp, Homo sapiens; identical to SEQ ID NO: 330775
  chr1:39874757-39875238
  hypo

SEQ ID NO: 337028 - DNA, 1016 bp, Homo sapiens; identical to SEQ ID NO: 330776
  chr1:39956640-39957656
  hypo

SEQ ID NO: 337029 - DNA, 93 bp, Homo sapiens
  chr1:40030094-40030187
  hypo
cgactctctgagtggtagtagggaggccacgagaggccggagcattaccagttggagccagatggcgaagagttggacgaggcccagactggc

SEQ ID NO: 337030 - DNA, 229 bp, Homo sapiens; identical to SEQ ID NO: 221325
  chr1:40149563-40149792
  hypo

SEQ ID NO: 337031 - DNA, 130 bp, Homo sapiens
  chr1:40771005-40771135
  hypo
cgtgagccaccgcgcccggcgtgatcatttatttcatgtctatttcttccattaaactataccctccatatgaagaggagactcatagttgcaagtgtttagtgaatgtttatgcaatgaataaatgaac

SEQ ID NO: 337032 - DNA, 334 bp, Homo sapiens
  chr1:41281568-41281902
  hypo
cgagctgctgtccttaaggtcaccacgaaacatgaatataaataaagccacatagaaggtgacttgggccacacatagggaggcaagcatcgggagttggcagttctgaaggggggatagtggggtgcgggaatcagaggctccgtagagctttgtagcatttgtgttcctgtaggcgtggacgatgagcagagtctcgcaggcacagacatgaggtgttctgcgtagcatgcaccgtgccagcaacggtgcagaggtggggagactggggacatctgggaaggctggcgggtcagtacacagagatgtatttccagagaagcctgttccctcc

SEQ ID NO: 337033 - DNA, 914 bp, Homo sapiens; identical to SEQ ID NO: 330783
  chr1:41326954-41327868
  hypo

SEQ ID NO: 337034 - DNA, 120 bp, Homo sapiens
  chr1:41451907-41452027
  hypo
cggggagtctcccaagagaggccatttgagctgagaggccagtcacagcgagagtggaatgagaagtgcggaggcgcagggctacgaaggcgtggttggtccgggaatggaggggaggcc

SEQ ID NO: 337035 - DNA, 306 bp, Homo sapiens
  chr1:41485949-41486255
  hypo
cgggctgccagctccttgaggattaggtgctcctccagggccgtctgcaggcgccaggggagggaggccagggtgtccctgtggacagtcacctgcaccagtgcataggccttccgcggccgcctcaccacttcaatgtgctcccgcgccaccggcatctccagccgctccagggtgtctcgcagcaggcaggcaagcaccggcactgagaactgggggttcagatggcccacatagagagtgtgcgccgagggagcctcctcgaggtcagagtactccgtcagggactgctctgcgggtagctcc

SEQ ID NO: 337036 - DNA, 462 bp, Homo sapiens; identical to SEQ ID NO: 330784
  chr1:41832027-41832489
  hypo

SEQ ID NO: 337037 - DNA, 33 bp, Homo sapiens; identical to SEQ ID NO: 248451
  chr1:41991669-41991702
  hypo

SEQ ID NO: 337038 - DNA, 169 bp, Homo sapiens
  chr1:42633144-42633313
  hypo
cgtgtgtgtatacactgaggtgcgtgtgtgctgaagtgtgtgtatacactgaggtgtgcgtgagtgctgacgtgtgtgtatacactgaggtgtgtgtgagtgctgacgtgtgtgtgtgcactgacgtgtgtgtgtgctgacgtgtgtgtatacactgaggtgtgtgtgc

SEQ ID NO: 337039 - DNA, 166 bp, Homo sapiens
  chr1:43310153-43310319
  hypo
cggtggttattataaggaattggctcacgtgattatggaggcggttaaatcccaagatctgcaggataagtcagcaagatggagtcccatgagagctgatggtttagttccagtctgatggcagcaggcttgacgccaaggaagagatgatgtttaattcaagtcc

SEQ ID NO: 337040 - DNA, 160 bp, Homo sapiens
  chr1:43842627-43842787
  hypo
cgtagagtatgccatgacaaaacaaagtctgaaggactggtggtcagtgtggcgggaagagaggcaagcatggcaccaaagagctccggttttgatctccagtgaattacacacagccacccacgaagaactgagcccgacctagcaagcacagacaagc

SEQ ID NO: 337041 - DNA, 856 bp, Homo sapiens
  chr1:43888937-43889793
  hypo
cggccctgccttgtggtcctgcataagccactggacaaactgctcatcaggttggtacagaggtgtggaagggcgtggcttagcagggtatgagtggtacagaggtgtggagggcatggcttagcccggtgtgagtagtatagaggtgtggagtgcgtggcttagtggggtatgagtggtacaaaggtgtggaagggtgtggcttagcggggtgaggtgtggaagggcgtggcttagcagggtatgagtggtacggaggtgtggaagggcgtggcttagtggggtatgagtggtacagaggtgtggaagggcatggcttagcggggtatgagtggtacagaggtgtggagggcatggcttagcccggtgtgagtagtatagaggtgtggaagggtctggcctagtggggtatgagtggtacagagttgcagaagggcgtggcttagcggggtatgagtggtacagaggtgtggaagggcatggctcagcgaggaatgagtaggtcagaggtgtggaagggtgtgacttaggggggtatgagtgatacagaggtatggaagggcgtggcttagcgaggtatgagtaggtcagaggtgtggaagggtgtggcttagcggggtatgagtggtaaggagtgtggaagggtgtggcttagcagggtatcagtggtacagagatgtggaagggcatggtttagcagggtatgagtggtacagaggcatggaagggcgtggcttagccgggtatgagtggtacagaggtgtggaagggcgtggcttagccgggtatgagtggtacagaggtgtggaagggcgtggcttagccgggtatcagtggtacagaggtgtggaagggc

SEQ ID NO: 337042 - DNA, 148 bp, Homo sapiens
  chr1:44132677-44132825
  hypo
cggctttaaccatggttttaactgtgcggagtctaccaattttgctacccgtcggtggattgagtacggcaagcaagctgtgctggtaagtctgcttgatttctttctataacaccatgacaaaaatgagcaaattctggttagatac

SEQ ID NO: 337043 - DNA, 251 bp, Homo sapiens
  chr1:44170222-44170473
  hypo
gccatttctgggcacgtggcagcagtcgctgatctcccagctgaggggctgagcactggaatgctgtggctgcactggccccagtccatagaggggtcaactatgctggctggactggctgccttgttcctggcctaggacttagcttcataactatcacctgcaccgactaggctgaggtgctggtacttgccccaacccctacttttgtatttatatgtgtgtgtgtgtgtgcgtgcgtgcgtgcgtgc

SEQ ID NO: 337044 - DNA, 187 bp, Homo sapiens
  chr1:44351032-44351219
  hypo
cgtctcctccttccccgggtccttctcacgcactcacacacaccctgctgaaacctgatcctgaggctgcctcgcgtgccggggtgctggcggggctggcgggctggggcctgtcttttggagcctgccccaccctcccctgctaccccctaggccagggcaagcaggtcaggcgtcccacaccccc

SEQ ID NO: 337045 - DNA, 117 bp, Homo sapiens
  chr1:44584407-44584524
  hypo
cgagggcggcgcagggcgggacgggtggggcctgaccccgccccttggcgcagctgtaaataggtaaatagaaggtgattgtggcgtggcgatgtaccgatacccgcctgcgacgcc

SEQ ID NO: 337046 - DNA, 370 bp, Homo sapiens
  chr1:44717932-44718302
  hypo
cgcacacacgcttcccttcccctgggctgctgcaatttccatgcacagggaagcaggtgccgagctgctcccggctggctctcccctctcgtggctctgcccgccttggctgctgccccattagcttagtggccagccatctgcgacgggcctgccgcatagccctgctgtaggtgcggcgggtggccccctgtgtaacagggagctttgccattagcgcctttaatattctgacacctcagcgcagcctgctattacatgcaaacactgatcgccctgtgaaattacattgctgggcccgcgaaatggaatcgtgtataatcagcctcctccatgcactgtcagtcccatcacaaacacggcgcccggc

SEQ ID NO: 337047 - DNA, 542 bp, Homo sapiens
  chr1:44726788-44727330
  hypo
cgacaggcctcgacttgaaaagggtgctaaaagcaatgatgtctccaagtgtgatgggagatatttgtgtctgctttacccttggctttttgctccggttcaggtaggagcggggtgggccggctggcagatctgagagcgtggcacgccccagcgggcagggcgcacagcgcggaggaaggcgcgagtcagtctggagtgctccccatttatcaagctcacgcaggccgccagccgagcgagtctttctatcattacacctctcaaaatccgattcataccactaatcctgccttcattctcccagattaataacatctctttcaaccttcacagtgtgataaatagacaaagagagaacaaaaggagagacagaagagagagaaagagctggagcaagtccccataatagagagagctgagaaagaggagagggaaaaaaggagagcgaacgagagcaggcagcggccagagactgcagctaccttagagagccgctctgaggagagctggcggctgcgccccgctatgcgctccgctcc

SEQ ID NO: 337048 - DNA, 1616 bp, Homo sapiens; identical to SEQ ID NO: 330789
  chr1:44872033-44873649
  hypo

SEQ ID NO: 337049 - DNA, 1137 bp, Homo sapiens; identical to SEQ ID NO: 330790
  chr1:44883116-44884253
  hypo

SEQ ID NO: 337050 - DNA, 361 bp, Homo sapiens
  chr1:44971165-44971526
  hypo
cggctggcccgcagcagggaagccctcttgcctagctctgcatggactgctcgcttgcctgagtttgcattatttatttaatgtcttgtaccgtaaataatggtaactttatggttattaggaacgggttaaggtacatgcgggtagcaccaggctgccttcaaaaggaacagtcctggcataaaatgttgcgataattgcttcactgctgagtgttggtctttattttgtgtctgatttgtcccttaagccagcgtaacattctccccacggcaggagaatgcagagagcaaattgaagggctgagcatgaacaatgcgacatggcgcactgctgggtttttcttttttcctctttcttc

SEQ ID NO: 337051 - DNA, 335 bp, Homo sapiens
  chr1:45087586-45087921
  hypo
cgcgcatgaatgtgcgagcacagatgtggcaagcgtagtgggggcagcaggcagggagggacaggaacagggatattaatgtttctgaagtggatctgatttgatacgtcttgttccattgtcagcatctgtttagcagggatttgtaatactttgtggctctggatcactcatgcttagcgcaggatgtggccttgcataccaattttgttattaaacacagtcctcgcctcccccacagcccatccatcacctcccaccccagcccccgcctgctctgagccgcccaccatatttcagggcccagctcccgcctgcctgccgcgcccgatgcc

SEQ ID NO: 337052 - DNA, 554 bp, Homo sapiens
  chr1:45106068-45106622
  hypo
cgcctgttgggaggggtgaggagaggtggcaaggagcaaggcaccttctgtcccccgtggcaactgatgggatttaatcgccttttggaacacaattgttaagctaggacagagggagtgcaggcagaaggagcaagtatcaatggttttaaacggcgtctgtctctctgcgtctctcctgacgtgaggcagtgaaacgcgttatcgaggaggcccggaaagtggctaagtgcgtttgacacacgccaactccctgcctccacactggataattgcattgtcaactgttcagcgaggtggcaggtgacactgcaggccgattgattgtcccgcatcgcagctccccagactgtcagctccccaatcgatggcgtttacacaagacaccgtaactgcatctgtaactaattccagtgtaaaactcgccggaagctgctgcccctgccctccgtgttggagagcacaggcccctggagggccccgagacgtttcctttctccctgggctctggttttgttgggagcagcaggtgaggaaatcgatgcctccttttt

SEQ ID NO: 337053 - DNA, 221 bp, Homo sapiens
  chr1:45112018-45112239
  hypo
cgttgtggttgatcagtttatctcggccggggccgcgagtgctgctggcatgatgtatgggccgcggcgcagggcccggctgcccatgaatcaccgcagctgctccgtgtcagcgccggagcgggccgtatgggttctgcgcaaccagcttgtggtggggaggaatgacgtatggatgtttatttaataattctctcctactccagctgagcagggcgggc

SEQ ID NO: 337054 - DNA, 56 bp, Homo sapiens
  chr1:45156613-45156669
  hypo
cgcgcccagtgaagcttcttgaaaaggttgttgaggggcggggcgcggtgactcac

SEQ ID NO: 337055 - DNA, 174 bp, Homo sapiens
  chr1:45268631-45268805
  hypo
cgctgctctgcgggagccctccctttgagacggctgacctgaaggagacgtaccgctgcatcaagcaggttcactacacgctgcctgccagcctctcactgcctgcccggcagctcctggccgccatccttcgggcctcaccccgagaccgcccctctattgaccagatcctgc

SEQ ID NO: 337056 - DNA, 93 bp, Homo sapiens
  chr1:46111798-46111891
  hypo
cggcgtttccctctcttttcggcattggtgatactcttgagagcaacaggtaggatgttcacacacaccattgtggcagcgcgaaacaatgcc

SEQ ID NO: 337057 - DNA, 267 bp, Homo sapiens
  chr1:46500322-46500589
  hypo
cgccagtaccgctctccacggcgcaagtcagcaggcagcatcccactgtcaccactggcccacaccccttctcccccacccccaacagcttcacctcagcggtccccatcgcccctgtctggccatgtagcccaggcctttcccacaaagcttcacttgtcacctcccctgggcaggcaactctcacggcccaagagtgcggagccaccccgttcaccactactcaagagggtgcagtcggctgagaaactggcagcagcacttgcc

SEQ ID NO: 337058 - DNA, 268 bp, Homo sapiens; identical to SEQ ID NO: 330797
  chr1:46632677-46632945
  hypo

SEQ ID NO: 337059 - DNA, 108 bp, Homo sapiens
  chr1:46744609-46744717
  hypo
cggagccgccggatggcttccctggctgtgactgcatcctggtccagccagttttggaagaggcgcaggtgaccaaaggctccacggccccagcgctccagccgcttg

SEQ ID NO: 337060 - DNA, 597 bp, Homo sapiens; identical to SEQ ID NO: 221344
  chr1:46913766-46914363
  hypo

SEQ ID NO: 337061 - DNA, 137 bp, Homo sapiens
  chr1:46921732-46921869
  hypo
gcagccaggcccccgagtgtgcgccgtgtaaagtgacacatattcatcaccagctcgtggcgccggcgccgacgctgatacaatattagtgttgccccccctttcggagcccgctccgcccggctccccgatggcac

SEQ ID NO: 337062 - DNA, 209 bp, Homo sapiens
  chr1:46963465-46963674
  hypo
cgcctgtggcgggagatccgccgatctgcttgcttaatgaaatataaagattcttttaaccaatgtaagcacaattcgacagcttgtgaaacgcggccgcgccgtgatggatggctctcctggctcgccaggaattgcggggcggcaccttttaaatatataattgattctgtttggagtgtgcagtggactgagcccaggcagggccc

SEQ ID NO: 337063 - DNA, 71 bp, Homo sapiens
  chr1:47033326-47033397
  hypo
cgcggcttcatccagaccacaatatatatgctcttgaatacacacatgtatatacacgcagagctgtgaac

SEQ ID NO: 337064 - DNA, 360 bp, Homo sapiens
  chr1:47035276-47035636
  hypo
cgattcccgactagaaggcaaaagcctggcccaggccacgggaggcacttcactaaagaagaaaaacctgagctccagcaagctcagtaacttcatcagtcacctaattgaacgagaacccagagcaactcagtccaggctgcacaaattgagtagcactgctctgcagctcgctgcactaaaagtggaagatattttccattacagcaagtgctcccacagaaggatcacgagccacacacggagccttactctccaaataggcgcccatggcccagtcgtcccttagcctaagaactcagagagccaggctgtaataatggggctgccgtgtgagcacagcagccatcgagctgctcc

SEQ ID NO: 337065 - DNA, 297 bp, Homo sapiens
  chr1:47041013-47041310
  hypo
actggaagcaattgcggctaataacactgaatactaggtgtgtgtcctggaggcaagcagcaaataattacttgccctccctcttgcccataaatcacggggcagtatttacattgcctggagaaaatggaaacatctgtcaaatggacttggggcctaacatgggcaccgctagaccctaactgctaagcgctgcttaatgaaacggccgcgttcctggccactgtagcacttgtggccttccccggtgagcactctctgtctgcccgagtatttcagtgctctgccaacaaggtc

SEQ ID NO: 337066 - DNA, 428 bp, Homo sapiens
  chr1:47685397-47685825
  hypo
agggccggctccatcggcggcaggcagcatggcaggatggaggctgcgggccgtgtgtttgggcgcgggctcctccgtgtagctgtccgggctggctgccccatccagggagctgccgcagctggagttgggggaaagcacgtcttgcaggaggtcatctgggggcgcgccgccccctcccccacctccacccccaccagcccccaccacagggtccttgccagtcttggcccgctgggtgccctcctcctcctggtcattgagcagcttggccaagaagttgatatacttcatggccaggcggaggatctcattcttgctgagcttcttgtccgggggatgtgtggggatcagcttgcggagctcggcaaaggccccgttcacattctgctgccgccatcgctcccggctgttggtgaagatacgcc

SEQ ID NO: 337067 - DNA, 543 bp, Homo sapiens; identical to SEQ ID NO: 330809
  chr1:47910467-47911010
  hypo

SEQ ID NO: 337068 - DNA, 511 bp, Homo sapiens; identical to SEQ ID NO: 330812
  chr1:48190715-48191226
  hypo

SEQ ID NO: 337069 - DNA, 428 bp, Homo sapiens
  chr1:48459812-48460240
  hypo
cgagcacgggcacaccacggaagcgcacgtccctctctgtgagcgagtttaccatgagcatcacccagacgggcctcttgcgctcccagttgcccgcgatggcattgaataggtagtcagcatagagccccttgccccgctgagcgggcgtcatccaggagggcatcatcaacttcacgtagtccaggtggcgcttcaagcgccagtaaagctcgtggggcagcacgtcctgcaggttttccccgtgcggcagcagctggcagctggccagggccgagatggtgtaggggtctgtaaggtccagctcaaagtagacacgggtgctagcctggaaggctgccttggagttgtccgggatgaagtcccagacgcgggtgtaggggacgtgaatagtgccaaacaggtaggccggaggatcacgccgaatc

SEQ ID NO: 337070 - DNA, 951 bp, Homo sapiens; identical to SEQ ID NO: 330813
  chr1:48462221-48463172
  hypo

SEQ ID NO: 337071 - DNA, 38 bp, Homo sapiens; identical to SEQ ID NO: 330814
  chr1:48463421-48463459
  hypo

SEQ ID NO: 337072 - DNA, 929 bp, Homo sapiens; identical to SEQ ID NO: 330817
  chr1:49242191-49243120
  hypo

SEQ ID NO: 337073 - DNA, 931 bp, Homo sapiens; identical to SEQ ID NO: 330818
  chr1:50798667-50799598
  hypo

SEQ ID NO: 337074 - DNA, 268 bp, Homo sapiens
  chr1:51439584-51439852
  hypo
cgagattgccaggagactgctacttagaggtgctaatcccgatttgaaagaccgaactggtttcgctgtcattcatgatgcggccagagcaggtttcctggacactttacagactttgctggagtttcaagctgatgttaacatcgaggataatgaagggaacctgcccttgcacttggctgccaaagaaggccacctccgggtggtggagttcctggtgaagcacacggccagcaatgtggggcatcggaaccataagggggacacc

SEQ ID NO: 337075 - DNA, 379 bp, Homo sapiens
  chr1:51763206-51763585
  hypo
cctcccgggtcacccttgtcctctccctttcccctgcccctgacgtggagacaccaagtcccggtgactttacctcccgtctcactctaggatcctgctggccttgccctacggctctcattatcggactgccaccatctccacaccgtctccctgttccaggctacccgggatgtctttctgctgtcctggtacacattgtctcctatctccctgctcccactcctgtcccctgcaagccatttcgcacactgacctttttaagtcagatcatgtcagttccttctggaaatctggttatattccatcacactcaggagacatctcctacaatttccttgacacctgcagcactccagccacacgacggcctcagggc

SEQ ID NO: 337076 - DNA, 189 bp, Homo sapiens; identical to SEQ ID NO: 330827
  chr1:52081941-52082130
  hypo

SEQ ID NO: 337077 - DNA, 1279 bp, Homo sapiens; identical to SEQ ID NO: 330828
  chr1:52194847-52196126
  hypo

SEQ ID NO: 337078 - DNA, 108 bp, Homo sapiens
  chr1:52659468-52659576
  hypo
cgcacgcgcgcacacacacacatgtgtccaaggaggcatatacaagggtgttaatgggagcattcttggtaatcgttgaaaaataggggaaaatgtaaatgcttattc

SEQ ID NO: 337079 - DNA, 52 bp, Homo sapiens
  chr1:52879577-52879629
  hypo
cgccggagaagctaccgagacttggacaagccccgtcgctctcccacactgc

SEQ ID NO: 337080 - DNA, 725 bp, Homo sapiens; identical to SEQ ID NO: 330830
  chr1:53067880-53068605
  hypo

SEQ ID NO: 337081 - DNA, 599 bp, Homo sapiens; identical to SEQ ID NO: 330831
  chr1:53098674-53099273
  hypo

SEQ ID NO: 337082 - DNA, 153 bp, Homo sapiens
  chr1:53238160-53238313
  hypo
cgattacaccgatctgtgaaggagtaaggcccttcttggccagtttgtaaatctgctccttcacgtcgtcagatgtcaacttcaaccaagtggggaagctgcgtcgatagggtaaagccgactgggacaggcccttctcaggagcacgcatac

SEQ ID NO: 337083 - DNA, 895 bp, Homo sapiens; identical to SEQ ID NO: 330833
  chr1:53308366-53309261
  hypo

SEQ ID NO: 337084 - DNA, 923 bp, Homo sapiens; identical to SEQ ID NO: 330835
  chr1:54203443-54204366
  hypo

SEQ ID NO: 337085 - DNA, 933 bp, Homo sapiens; identical to SEQ ID NO: 330836
  chr1:54204376-54205309
  hypo

SEQ ID NO: 337086 - DNA, 238 bp, Homo sapiens
  chr1:54408693-54408931
  hypo
cgactataatttttactctcagtggtgctcacaaatggaaaaaggatttaaatttctttttttttacacctcctggggcgtgaactggactcaacaaatgcacattttaagcaggaagactttggagagacaaggactttcgttcaaagtaaagattttaaatttctttcatccctgaaaacgtccaagaaaagtcggtaagagatcataatctatggaagaaggcaaagaaatctac

SEQ ID NO: 337087 - DNA, 206 bp, Homo sapiens
  chr1:54474577-54474783
  hypo
cgctaggatttgattttcatgtgaagggttatcagtgccattccagccagccttccatgctggcctgagtggcccactcagggtccgggacaggcatactcatcggaccagtcggagcagtgctgtacatggtcgcggcagagatgcctcggtatacagtcgcagtacttgaagaaggttgaaggacagcgccaccacccagggcc

SEQ ID NO: 337088 - DNA, 119 bp, Homo sapiens; identical to SEQ ID NO: 248620
  chr1:54694092-54694211
  hypo

SEQ ID NO: 337089 - DNA, 148 bp, Homo sapiens
  chr1:55066953-55067101
  hypo
cgtgtgcgtggaggcctatcgccaggaggctgagacccaccggcgccacatcaacagtgcctttatgacctttgtggtcctggacgcagatgaccagccccagttgctgccctggattcggccccagcccggcgtaagtgggaccagc

SEQ ID NO: 337090 - DNA, 207 bp, Homo sapiens; identical to SEQ ID NO: 330837
  chr1:55352463-55352670
  hypo

SEQ ID NO: 337091 - DNA, 164 bp, Homo sapiens
  chr1:55620065-55620229
  hypo
cgagcttcccggcctattcgtccaatcaggctcaaaagcttctgtcttactctatcactctcagtctcccagctctgtagaacggaaaagacacaggaattgcttcacgatcaaactggcaaaatatgcaaaaattttaaacttgagctaaaaacattaacaac

SEQ ID NO: 337092 - DNA, 983 bp, Homo sapiens; identical to SEQ ID NO: 330839
  chr1:57110528-57111511
  hypo

SEQ ID NO: 337093 - DNA, 711 bp, Homo sapiens; identical to SEQ ID NO: 330840
  chr1:58715252-58715963
  hypo

SEQ ID NO: 337094 - DNA, 211 bp, Homo sapiens
  chr1:61601555-61601766
  hypo
cgcattttaaatctgaaagaatatatgtagtctcccctaccccagctttttttaagtagcaagggctattgaaaaaaatcagaaccctccgcttacgctcgcatacatgtagcttaaaatatatgttgcttattgaaagcattgtttaagttgaactcacgagatatactacatcatgtaatatgtctgcatttgtccatgcattcttttc

SEQ ID NO: 337095 - DNA, 49 bp, Homo sapiens
  chr1:61716891-61716940
  hypo
cgtacaaataaaaatttcactggaaagggaactccgtgatctctttact

SEQ ID NO: 337096 - DNA, 92 bp, Homo sapiens
  chr1:61833628-61833720
  hypo
cgtctcactttgtccttcgagtaggatcaagcgctcagaagcagagcgatgtatacgtttgtcgaacgaatgagcgttgctccgcttgcatc

SEQ ID NO: 337097 - DNA, 391 bp, Homo sapiens
  chr1:61913163-61913554
  hypo
cgcgaaaccccgtcgccactgcattttccgcagcagagccatccactgcactgtctgggctccacccagaaaatccggcagtgccatcatgaccaaatagataggaactctggacaatttcatcgggtcattgtccccttaatctccacgctgcacctcagatctcaagcagcttccgtggcgcaggctcaatttaatggatagaatctatttttcatgaaaaagcaggaaataagctgtctctttcataaaaagatttacaaaatgtaatcattgttgaaatattccctttgaactgccgtgtccacgggggtctccggctcccagagtcgtgcttcattagaaccccgtcataagcggctccagaagggcaggtacgctggtggtgccc

SEQ ID NO: 337098 - DNA, 819 bp, Homo sapiens; identical to SEQ ID NO: 330846
  chr1:62207675-62208494
  hypo

SEQ ID NO: 337099 - DNA, 765 bp, Homo sapiens; identical to SEQ ID NO: 330847
  chr1:62784150-62784915
  hypo

SEQ ID NO: 337100 - DNA, 524 bp, Homo sapiens; identical to SEQ ID NO: 330848
  chr1:63539443-63539967
  hypo

SEQ ID NO: 337101 - DNA, 1668 bp, Homo sapiens; identical to SEQ ID NO: 330851
  chr1:63787903-63789571
  hypo

SEQ ID NO: 337102 - DNA, 718 bp, Homo sapiens; identical to SEQ ID NO: 330860
  chr1:67773109-67773827
  hypo

SEQ ID NO: 337103 - DNA, 73 bp, Homo sapiens
  chr1:70710367-70710440
  hypo
cggtcaagaagcagatcgagacggcggtcacattctaagtctaggagtcggcgacgatccaaaagcccaaggc

SEQ ID NO: 337104 - DNA, 59 bp, Homo sapiens
  chr1:78463740-78463799
  hypo
gagccaccgcaccggcctctgtttgactatctttaaagctcttaaaacgatctcatttc

SEQ ID NO: 337105 - DNA, 817 bp, Homo sapiens; identical to SEQ ID NO: 221390
  chr1:78511528-78512345
  hypo

SEQ ID NO: 337106 - DNA, 706 bp, Homo sapiens; identical to SEQ ID NO: 330881
  chr1:85358571-85359277
  hypo

SEQ ID NO: 337107 - DNA, 897 bp, Homo sapiens; identical to SEQ ID NO: 330882
  chr1:85462482-85463379
  hypo

SEQ ID NO: 337108 - DNA, 155 bp, Homo sapiens
  chr1:85743342-85743497
  hypo
cgactatccccagaccgtattttaactactatggcgctgtgtaagaagcaacctgagaagtgtggatgaaaagctacaggtagagccctgggcccaagacggtggcttggacaacatgctaaataaactataaactagatggtatttgaagctac

SEQ ID NO: 337109 - DNA, 77 bp, Homo sapiens
  chr1:86277780-86277857
  hypo
cgctctcgttctctgttttgcccattatgaactcggtaataatcgaattcactgaaccataaaattgaatgtatacc

SEQ ID NO: 337110 - DNA, 100 bp, Homo sapiens; identical to SEQ ID NO: 248716
  chr1:86860849-86860949
  hypo

SEQ ID NO: 337111 - DNA, 1156 bp, Homo sapiens; identical to SEQ ID NO: 330887
  chr1:90098160-90099316
  hypo

SEQ ID NO: 337112 - DNA, 750 bp, Homo sapiens; identical to SEQ ID NO: 330888
  chr1:90308855-90309605
  hypo

SEQ ID NO: 337113 - DNA, 134 bp, Homo sapiens
  chr1:90400255-90400389
  hypo
cgtgaagttcactgatgtggctgaaattcctgcctgggtgtatttgctcaaaaaccttcgagagttgtacttaataggcaatttgaactctgaaaacaataagatgataggacttgaatctctccgagagttgc

SEQ ID NO: 337114 - DNA, 1493 bp, Homo sapiens; identical to SEQ ID NO: 330893
  chr1:91182654-91184147
  hypo

SEQ ID NO: 337115 - DNA, 287 bp, Homo sapiens; identical to SEQ ID NO: 330900
  chr1:91195118-91195405
  hypo

SEQ ID NO: 337116 - DNA, 202 bp, Homo sapiens
  chr1:92001241-92001443
  hypo
cgaggcgggcgccgcgccggcagctagggggaagtcggccaacaattgggccacctcctcctcttcctcctgcttggacgacggtcttccgcctggactgtggagcctcgccgaccgttcgtcctcacagccaccccatgggcaaccagcgcggtgcaggctcattgtgtctgcgacaggcagaagccgagcgggtcccaac

SEQ ID NO: 337117 - DNA, 4450 bp, Homo sapiens; identical to SEQ ID NO: 330905
  chr1:92948158-92952608
  hypo

SEQ ID NO: 337118 - DNA, 584 bp, Homo sapiens
  chr1:94047877-94048461
  hypo
cgtgctgggcgatgaccttggggtcgttgttggtgaacagttcttttgcacgtttcaacattgctgtttccaggggcttattctcagggggaaggaactttgactcaaactcgttgggcctgaaggaggagacagtctccaggaggggcgtcacaaactcgcccttgtcccactgccccttctccatctgagctgccgcaggttcccaaggtctttccctgtcatcatcatcaaggatcaagtagttgacgccagagttccggggacctggcgcctcattctgcttggctgtgagcagttctgtgtggcttccctgggcacatgagggtagctttgctcccctgccgcagcctgtggcaaacgctgggttcagttcacagtagttggcctctgagttgagccaggcagagggagacgagggaaccttgaggaacggcaccttgcagggcttaggcgggggcttagggcacagttgactgtctgatcccctcagcgcctccccagccctggcgtctgaggagaccctccgaaccactgctgggctcagggcaggctcgcttcccgtcctgaacacaggtgagttt

SEQ ID NO: 337119 - DNA, 37 bp, Homo sapiens
  chr1:94354617-94354654
  hypo
cgaataccgcagtagccacagcggcacccactcgtgc

SEQ ID NO: 337120 - DNA, 244 bp, Homo sapiens
  chr1:94495968-94496212
  hypo
cgcgtaggcacttacggaagccacccttccttcaggcagcggttgccaaagcctggcttattcaggaggacgtctgcaagtaccgtgaactgctcactgcctggttcatccatgctagacagagtgagacatgtgactgggacagagcaggcgcgtgccaacatcatgcaactcagagcctttactggatagctgctgtgtgccaggtatgtattggaggcaccgaatgctgccttgggatggc

SEQ ID NO: 337121 - DNA, 1080 bp, Homo sapiens; identical to SEQ ID NO: 330907
  chr1:94702434-94703514
  hypo

SEQ ID NO: 337122 - DNA, 1121 bp, Homo sapiens; identical to SEQ ID NO: 330912
  chr1:99126875-99127996
  hypo

SEQ ID NO: 337123 - DNA, 168 bp, Homo sapiens
  chr1:100928315-100928483
  hypo
cgctggcttcgagcactatgacctcttcttcatagatggcagcacacccagtgacaacatcgtgcgaaggttcctgaacatctgtgagaacaccgaaggggccatcgccgttcactgcaaaggtgtgtgcaaggcctcggtggtggtggctgtgcttatcgaaggggc

SEQ ID NO: 337124 - DNA, 1289 bp, Homo sapiens; identical to SEQ ID NO: 330913
  chr1:101004540-101005829
  hypo

SEQ ID NO: 337125 - DNA, 1534 bp, Homo sapiens; identical to SEQ ID NO: 330914
  chr1:101701719-101703253
  hypo

SEQ ID NO: 337126 - DNA, 1194 bp, Homo sapiens; identical to SEQ ID NO: 330918
  chr1:107599205-107600399
  hypo

SEQ ID NO: 337127 - DNA, 1902 bp, Homo sapiens; identical to SEQ ID NO: 330919
  chr1:107682642-107684544
  hypo

SEQ ID NO: 337128 - DNA, 2283 bp, Homo sapiens; identical to SEQ ID NO: 330920
  chr1:108506290-108508573
  hypo

SEQ ID NO: 337129 - DNA, 741 bp, Homo sapiens; identical to SEQ ID NO: 330921
  chr1:109203593-109204334
  hypo

SEQ ID NO: 337130 - DNA, 109 bp, Homo sapiens
  chr1:109772100-109772209
  hypo
cgcggagcggataaagttggaagcagagcggtttgagaacctccgagagattgggaaccttctgcacccttctgtacccatcagtaacgatgaggtaggtggctgtgcc

SEQ ID NO: 337131 - DNA, 280 bp, Homo sapiens
  chr1:109839458-109839738
  hypo
cgcactggttttcagcaaagacacggaaggcataggagttgccgatgatgaggtcagagacgatgcagctggtgcggtgatagtgctccagcaccgtgaaccacagctgcggggccgaacatgatgccagaaatcagccaccccatgtggagctaccagaggcctgtcccaacatgccctcttccaccctccttccttcccagctggcctcaccccggattttgtgtcagccttctgcaccgtgtatcccagaagtgctgtattccccgtatcttggggc

SEQ ID NO: 337132 - DNA, 87 bp, Homo sapiens
  chr1:110167965-110168052
  hypo
cgatccctgccgggccccgccccctgcctcaagcacttcccgctcgacctgcgcacgtctatggatggcaaatgcaaggagatcgcc

SEQ ID NO: 337133 - DNA, 229 bp, Homo sapiens
  chr1:110170726-110170955
  hypo
cgtcctgcatgaaccagaagcatctgctgcgcttcatcaagcgggcaatgaagcggcacctggaggagatcgtgcacgtggagcagggccgtgaacagacgctgcgggaggtctttgagagcatgaatctcacggcctacgacctgagtgtggacacgctggatgtgcatgcggtctgtgccagtggcgtgggctgtgggactgagtcagtcaggggaccaggagtcac

SEQ ID NO: 337134 - DNA, 115 bp, Homo sapiens
  chr1:110305380-110305495
  hypo
cggtaacaggcctgaggtcacaaatgaacgtttaatagagagcaacccagatctgtccgattgcaagcttcgtgttttaatggtttataaacatgcctctgccgctgggctgtgc

SEQ ID NO: 337135 - DNA, 1278 bp, Homo sapiens; identical to SEQ ID NO: 330928
  chr1:110626374-110627652
  hypo

SEQ ID NO: 337136 - DNA, 1201 bp, Homo sapiens; identical to SEQ ID NO: 330930
  chr1:110692968-110694169
  hypo

SEQ ID NO: 337137 - DNA, 83 bp, Homo sapiens
  chr1:110726680-110726763
  hypo
aagcacgctgtttccgacgatcagtgaggcaattatacaagcctgttttttctgtttttgttggttttttttgacggagtctc

SEQ ID NO: 337138 - DNA, 1205 bp, Homo sapiens; identical to SEQ ID NO: 330931
  chr1:110753530-110754735
  hypo

SEQ ID NO: 337139 - DNA, 243 bp, Homo sapiens
  chr1:110771992-110772235
  hypo
cgggctgcctaggcgagggaggcccttccctcaggaagcctctgcccagattcagtggtgactcccactggcggcacctggtgtcccttctgcgccccgagctgcagcatcgctctccacgctgcttcctctgcttctgcgacagttcttcttccctctccctctccctcaaactcccagccctgcctctgagtcacctgccattcccacccagcctctgcgctctgtattcctgccagaacc

SEQ ID NO: 337140 - DNA, 1267 bp, Homo sapiens; identical to SEQ ID NO: 330932
  chr1:111216715-111217982
  hypo

SEQ ID NO: 337141 - DNA, 142 bp, Homo sapiens
  chr1:112084812-112084954
  hypo
cgtttagaccagcttaatgaaacagacatccttcgcgtactgacggaaacactggcggcacatattgaggccgtatttcaggatcagacctgccggttcgaacacacgcgacaagagcaaagaagttaaaagagaagtgtct

SEQ ID NO: 337142 - DNA, 142 bp, Homo sapiens
  chr1:113059805-113059947
  hypo
cgcacctgctggcgtgcactctcagatttccgccgcacaggtgattacctgcggcgacgctatgatggggctgtgcaggtgatggccacccaagatggtgccaacttcaccgcagcccgccaaggctatcgccgtgccaccc

SEQ ID NO: 337143 - DNA, 818 bp, Homo sapiens; identical to SEQ ID NO: 330937
  chr1:113498720-113499538
  hypo

SEQ ID NO: 337144 - DNA, 1489 bp, Homo sapiens; identical to SEQ ID NO: 330938
  chr1:113932580-113934069
  hypo

SEQ ID NO: 337145 - DNA, 326 bp, Homo sapiens
  chr1:114522990-114523316
  hypo
atgctgctgagctgcgggacttcaagaacaagatgctgccactgctggaggtggcagagaaggagcgggaggcactcagaactgaggccgacaccatctccgggagagtggatcgtctggagcgggaggtagactatctggagacccagaacccagctctgccctgtgtagagtttgatgagaaggtgactggaggccctgggaccaaaggcaagggaagaaggaatgagaagtacgatatggtgacaggtaaataatctgaaagcaggcccctaactcttctcagaaccgatattcttccttccttgcttcttactctttttttc

SEQ ID NO: 337146 - DNA, 1221 bp, Homo sapiens; identical to SEQ ID NO: 330939
  chr1:114695957-114697178
  hypo

SEQ ID NO: 337147 - DNA, 75 bp, Homo sapiens
  chr1:115261262-115261337
  hypo
gaagaaccattaggcgaggagcactggcatcatccagagtgatattcttcaagcgattgaccaaccgatcaggtc

SEQ ID NO: 337148 - DNA, 803 bp, Homo sapiens; identical to SEQ ID NO: 330942
  chr1:115880147-115880950
  hypo

SEQ ID NO: 337149 - DNA, 1132 bp, Homo sapiens; identical to SEQ ID NO: 330944
  chr1:116184428-116185560
  hypo

SEQ ID NO: 337150 - DNA, 457 bp, Homo sapiens; identical to SEQ ID NO: 248841
  chr1:116213986-116214443
  hypo

SEQ ID NO: 337151 - DNA, 118 bp, Homo sapiens
  chr1:116219361-116219479
  hypo
cgatgccgacctcagccagcacctggtatacttggatctcgcaggctgctgctggaggttccgagtagctgcctgtaccaggcctgccccagtcaattcattagcctttcagtaagac

SEQ ID NO: 337152 - DNA, 996 bp, Homo sapiens; identical to SEQ ID NO: 330946
  chr1:116381152-116382148
  hypo

SEQ ID NO: 337153 - DNA, 200 bp, Homo sapiens
  chr1:117630364-117630564
  hypo
cgaatgaaacgctttgcctccactccttctcccaggttaatttttttaaacctgcttcaagaatcttttctggaccactcccttcccaccttcccccggtttggttgaatgcctctgccagcaccttgtgcttacataagttatagcactttgtttcttcagcagacgttgagtatccactatgggtcaggtgctgtttc

SEQ ID NO: 337154 - DNA, 144 bp, Homo sapiens
  chr1:117918966-117919110
  hypo
cgcttattatgtaaccatgtcatgtgaggcgcattaggtgatcacccatgtgagtgtgtgcttggcttggagccactatggtctgtgaaaggtctaattaccctgctaacgtggtacaaaaggctcgcgccaaggctcgctcac

SEQ ID NO: 337155 - DNA, 204 bp, Homo sapiens
  chr1:118163688-118163892
  hypo
cgtcacagattttgcttgggatccataacctaggagtgctttgtaggatgatctagatagcctaggactttttaacgctgttcagaggcacttttgtcttcccctccacgagtactctgtagcgagcaatagagcgctcatccccagattggtcctgcagagcctgctgtgatcacatactcagcccgctgctttctgcctctc

SEQ ID NO: 337156 - DNA, 199 bp, Homo sapiens
  chr1:118166377-118166576
  hypo
cgctgaagaagagagaagcaagtacgactacctcatgatccttcgcagggtggtgaacgagagcaccgtgtgtctcatggggcatgaacgcaggcagactctgaacctcatctccctcctggccttgcgtgtgctggcggaacaaaacatcatccccagtgccaccaacgtcacctgttactaccagccggccccttac

SEQ ID NO: 337157 - DNA, 109 bp, Homo sapiens
  chr1:118172998-118173107
  hypo
cgtcgttgccacccgggacctctagggttccagaagtacacttctaaacgagcggggattctttttctccttcactgtccgagtagtcgcctgggcgggatagtaatgc

SEQ ID NO: 337158 - DNA, 301 bp, Homo sapiens
  chr1:118173578-118173879
  hypo
cgcccagaatctagggagctggagcctgtcgggaggcttggtttcataccattcctcacccagctcagagcaacgcaggctacctgttctggccatgactggatcacaggtctcccagctcagggcattttcaccacagcaggccatcccagggccaccttttacttaggaagtttccgaaaatgggaaatgtccctaagggaaaggcatgagaagctggagtcgctgcctttctttcgggtgcttccctggaaaaaaggtatccgaggctatagtgttcgagagagagagagatggagac

SEQ ID NO: 337159 - DNA, 131 bp, Homo sapiens
  chr1:120321259-120321390
  hypo
cgtagctggttaagtggtggtgccagggactccggactcctactctcgtgaaaactcttgtgcctgaaaattattgtaaaatatctggaattattattattatttatttttattttttgagacggagtctc

SEQ ID NO: 337160 - DNA, 49 bp, Homo sapiens
  chr1:150935078-150935127
  hypo
cgaaattacggttacaatccttctcctgtgaagcctgaaggacttcgcc

SEQ ID NO: 337161 - DNA, 369 bp, Homo sapiens
  chr1:150941408-150941777
  hypo
cgaacgatgaggaagagcaaggccaggggcagcgtgatatagagatctgaggctttggcgtagacacgtccatctcggtcttctagatcggcccaggtcaagttcacaggcagccacagacgttcccaccagaagtaatcatacaaggtctggagcatcctgagtgaggggcaaaggggagggcatcaagagggagtagctatggaggaagagatagatgaataaaagttttcaggatgtatcaaaaggagaagggggcagagagtcgaactctagatccctatcctggctatgtagccttgggcaaatcagtttcctcatctgtaatacggtggctttccagttttaacatttactgttaggccggcc

SEQ ID NO: 337162 - DNA, 68 bp, Homo sapiens
  chr1:151373761-151373829
  hypo
cgaggcccgcgacttagtagaacgctgcatgcgagtgctgtactaccgagatgcccgttcttacaacc

SEQ ID NO: 337163 - DNA, 271 bp, Homo sapiens
  chr1:151378250-151378521
  hypo
cgccgggcatggggagtcaggtggtgccgcagcatgaaacgcacagcccactcataggagatcttaaaccccccttccaaagaacgtcctattttggtggccttctggaacaaggtctcctcatttacaggtagctgttgttcgcgctgggttagcacccactcagccagtttctcttctgcctcaaagctcagatatttgccctctagattctccccctgggaggcctggaaacgtcgaagccaacggcgaatacgtcgctggggatttc

SEQ ID NO: 337164 - DNA, 77 bp, Homo sapiens
  chr1:151597643-151597720
  hypo
cgcgcttttgcccagtgttaaatttttggacgtaggtgctttaaaaatactggtgtaggccaggcgctgtggctgac

SEQ ID NO: 337165 - DNA, 648 bp, Homo sapiens; identical to SEQ ID NO: 330961
  chr1:151693837-151694485
  hypo

SEQ ID NO: 337166 - DNA, 181 bp, Homo sapiens
  chr1:151699304-151699485
  hypo
cggtccatcttttagctctgtttattgtatctccctctgccccttgaattcatggttaagcttactcaggacattgtggggctgcatatctcccaccattcgtgggccggccggcatgttcttcatctttgcctcttgcccctggcttgagatctggttcagtgaaaatgatcgttgaggc

SEQ ID NO: 337167 - DNA, 369 bp, Homo sapiens
  chr1:152192964-152193333
  hypo
cgtagatccatgttgtccctggctagaggagtgacctgagccagaaccatgcttactatagccagaggactgtcctgagccagactcatgttgcccaaagccagaagtctggcctgagccagactcataatggccacggctgtaagagtaacttgagccagacccgtgttggccgtggctggaggagtgccccgaaccggacccatgtcggacgtggctaggagactggcgagatccagacccttgtcggccgtggcccaaagactgacgggaaccagacccatgctgaccatagctggaagacgaacctgagctagatctgtgtcgttcacccctagatgactgtcctgacctagagccgtgttgtcc

SEQ ID NO: 337168 - DNA, 298 bp, Homo sapiens
  chr1:152733117-152733415
  hypo
cgccgctcccagagctgtggcccgcagccctcctggggcgcctcctgccctgagctgaggccacacgtagagccacgtccactcccaagcttctgtccaccacggcgtcttgaccagtgtccagagtcaccactgcagcgatgtccacctcctgctccacgtccacgtctgcgcccagaaccatgcataagtctagaaccacgcccgcgtcctctaccacgacaactttcagaaccttgtttgtatccagaaccacttccagcactacgtccaacaccgcggccagttccccttcctc

SEQ ID NO: 337169 - DNA, 457 bp, Homo sapiens
  chr1:153540038-153540495
  hypo
cgctccagactcggcctgctgctgcgtgtcccttaaacacaccggcacatgcaactagtgtggccaagaccctcggcttgcgctgacccctctgttcagaacgtgcccacacatgcccatgccctctatcctgctgaaatccaacccccccttcaaaggccactgcagggagccttcccagggcccaaccggattcagtgtctacctgttctgtcctgtacaaagcgccccttttgcccttttcgtgtgtacttagagaattctgattttgactgaatcacctgtgtacttgttttctctcagcctcacccccacatggtgagctcaccggtcttactcatttctgcatgaggtaagggtctcgcccacaccaggtgccaaccagtgcttacggctaccacatggcaacaggggtcactggaggagtgcttaggagcaagggagtccttctcacccc

SEQ ID NO: 337170 - DNA, 976 bp, Homo sapiens; identical to SEQ ID NO: 330966
  chr1:153651442-153652418
  hypo

SEQ ID NO: 337171 - DNA, 48 bp, Homo sapiens; identical to SEQ ID NO: 248946
  chr1:153937100-153937148
  hypo

SEQ ID NO: 337172 - DNA, 193 bp, Homo sapiens
  chr1:154179803-154179996
  hypo
cgggaacttggatggatacagtctgggcctgctgggccagatgttccgagggcggcccggcaagcagcctgtcttgcacattgcaactgactggcttaatctacggcaagagtccttcagctccgtcacagagtactctccaatgtgttatagttatccttaaagctcttcaattcaaggaagtgcttggcac

SEQ ID NO: 337173 - DNA, 936 bp, Homo sapiens; identical to SEQ ID NO: 330967
  chr1:154297543-154298479
  hypo

SEQ ID NO: 337174 - DNA, 1133 bp, Homo sapiens; identical to SEQ ID NO: 330968
  chr1:154474305-154475438
  hypo

SEQ ID NO: 337175 - DNA, 286 bp, Homo sapiens
  chr1:154685569-154685855
  hypo
cgttaccgtctggtccttgctagcatgcttcacagccgtgcaaactcaagcccaacctcaggagtccctcaatgtgcagctcataaaatgacacggaaaaggtttagtcagctcattaatttcacgcagagacacacctgagcgatttcacttaagaaacaaacaccaagtttcaaaagcccacaagacataccggtagattgcaaatgaaacaaacttgagcctaggtatttttgaaccaagcagaaatttttctttgcttgcctggtcccgcgctgtccagtgc

SEQ ID NO: 337176 - DNA, 223 bp, Homo sapiens
  chr1:154931252-154931475
  hypo
cgtcacccatcgttagcagccaccagctgccccatgccctcacggatgtagacagactggatctccttggtcttgaggcagagatcgcaggcccagacggcagaagcttcagtggtcagcagcccataggcgctctcagtcatgcctgtgcactcacggtggaaccatttctggcaggaggcctcacacagaatggcatcctggtcatcgttcacctcactcc

SEQ ID NO: 337177 - DNA, 167 bp, Homo sapiens
  chr1:154954406-154954573
  hypo
cgtgagtcaccgcgcccggcctttttttctttttttcaattgagagaactcaagcaatcctccctcctcagactcccaaagtgctgcgcccgaccaagggttttgaagagtaaaatttggcaaggtgtggtttaccagtcctacaaagaatgaattcggcccggcgc

SEQ ID NO: 337178 - DNA, 207 bp, Homo sapiens
  chr1:155012870-155013077
  hypo
cgatgggcactatttgcagagggaagctgagcgggtttgagaaagtgctggttatacagggaggtgaccaaccagggcctctttctccagggccagtagccaatctgcgacacaatctcaacaacgtgatcgcatcgctgggctgcaccgtggagctgcagatcaacaacacccgcgcagcttggcgcatctccacagcccccttac

SEQ ID NO: 337179 - DNA, 107 bp, Homo sapiens
  chr1:155160940-155161047
  hypo
cgttgtgcaccagagtagaagctgagcctgatgcagagcctgaggccgaggtgacattgtggactggaggggcggtggagcccaaggcgggcctgttgtccggggcc

SEQ ID NO: 337180 - DNA, 333 bp, Homo sapiens; identical to SEQ ID NO: 330972
  chr1:155161748-155162081
  hypo

SEQ ID NO: 337181 - DNA, 903 bp, Homo sapiens; identical to SEQ ID NO: 330973
  chr1:155164146-155165049
  hypo

SEQ ID NO: 337182 - DNA, 80 bp, Homo sapiens
  chr1:155311726-155311806
  hypo
cgagaaatcttttttgggagtgagcttcttggggaagtgatcaaaagcatagggtttggtgcagacaggatagcggttcc

SEQ ID NO: 337183 - DNA, 463 bp, Homo sapiens
  chr1:155911574-155912037
  hypo
tgctgatgatgctccgatgcctgtcaaattcctagccctgaggctcatggttgccctggcctatgggcttgtgggggccattggcttgctgggaaatttggcggtgctgtgggtactgagtaactgtgcccggagagcccctggcccaccttcagacaccttcgtcttcaacctggctctggcggacctgggactggcactcactctccccttttgggcagccgagtcggcactggactttcactggcccttcggaggtgccctctgcaagatggttctgacggccactgtcctcaacgtctatgccagcatcttcctcatcacagcgctgagcgttgctcgctactgggtggtggccatggctgcggggccaggcacccacctctcactcttctgggcccgaatagccaccctggcagtgtgggcggcggctgccctggtgacggtgcccacagctgtcttc

SEQ ID NO: 337184 - DNA, 153 bp, Homo sapiens
  chr1:155954283-155954436
  hypo
cttcctcccccacccgcttcacctagatcaggttcccaagctgcaggtgcatgtgacgctattcctgagggcgggcagtgggcagcagggagagagggcggggtctaagcagggcagagctgaagaatttaggagccatgggaacagagcacc

SEQ ID NO: 337185 - DNA, 79 bp, Homo sapiens
  chr1:156010523-156010602
  hypo
tgagccaccgcgcccagccagtccacagaatttaacttgggttgcacctggactggacaccacctagtttagctctctc

SEQ ID NO: 337186 - DNA, 136 bp, Homo sapiens
  chr1:156030708-156030844
  hypo
gctcattagttgggggaccggccctcaccacagattccagaagcccagcaatgcacactcagccctcagtgggctgtctctgaaggtcctgtccctttttcgcttcccccccgctggagctgcttctcccgcttgc

SEQ ID NO: 337187 - DNA, 282 bp, Homo sapiens
  chr1:156047227-156047509
  hypo
cgcggtagggcacccgcacacggatggtcacctggccgggcagagcaggagccacaccaaaggcggcgcctgacttgttgcgggaggcacggatcatggagaagtgctccgctgctgagatgatttcccgccgggctgtggccacgtcctcccgtcgccctgtcaccatgaacactggttcctcgcccctcaccggtgtcttgatgtaggtgttggtcttggccctcaaggccttaatcttgcagcctgggatagggcggggaaggagagagacaaagaaac

SEQ ID NO: 337188 - DNA, 467 bp, Homo sapiens
  chr1:156255276-156255743
  hypo
cgttcccggatccccctggctggcgggacattgaaccagagccccctgagtcagaaccacttaccaagctagaggagctgcccgaagacgatgccaacctgctgcctgagaaagcggcccgtgccttcgtgcctattgacctacagtgcattgagcggcagccccaagaagaccttatcgtgcgctgtgaggcaggcgagggcgagtgccgaaccttcatgcccccccgggtcacccaccccgaccccactgagcgcaagtgggctgaggcagtggtgaggccgcctggctgttcctgtgggggctgcgggagctgtggagaccgtgagtggctaagggctgtggcctccgtgggagccgcactcattctcttcccttgcctactatacggggcatatgccttcctgccgtttgatgtcccacggctgcccaccatgagttcccgcctgatctacacactgcgctgc

SEQ ID NO: 337189 - DNA, 701 bp, Homo sapiens; identical to SEQ ID NO: 330978
  chr1:156357856-156358557
  hypo

SEQ ID NO: 337190 - DNA, 1526 bp, Homo sapiens; identical to SEQ ID NO: 330979
  chr1:156390054-156391580
  hypo

SEQ ID NO: 337191 - DNA, 933 bp, Homo sapiens; identical to SEQ ID NO: 330980
  chr1:156405338-156406271
  hypo

SEQ ID NO: 337192 - DNA, 265 bp, Homo sapiens
  chr1:156432033-156432298
  hypo
cggcattttgcagatgaggaaacccaaggcatgaagcctgactcctgtgtgctcccacaactaaggctagcacccacagccttaaccatgcttcatggattttaggcgttcataggcctgtctctgccatcgtatatggcccctcacactccgcgttcgcctctgcagcacctgggctaggtacagagaagcagccacaccctgttcggaggaagccaagccggatctgctttcctccacagccgctccatctgccccagggcac

SEQ ID NO: 337193 - DNA, 187 bp, Homo sapiens
  chr1:156553606-156553793
  hypo
cgagaacggctggtggccaagctggcagacaccgtgaggacgcgcttggcccaggtggggctggtccagactcacaccctggtgagatgacacctgagacaaggagatgggggtggagagaggttacccagagaaggggttggtggtaagcagagacgctgttccctgggatgctgcgcgcttggcc

SEQ ID NO: 337194 - DNA, 811 bp, Homo sapiens; identical to SEQ ID NO: 330982
  chr1:156593638-156594449
  hypo

SEQ ID NO: 337195 - DNA, 128 bp, Homo sapiens
  chr1:157458788-157458916
  hypo
cggacactgattccattcctgcttctaccgctaagctctgtcatccagcagatcctcaatggcctcatctggaaaatgggataatacttcctctgcagggttgctgggaggactaaatagatagaaga

SEQ ID NO: 337196 - DNA, 145 bp, Homo sapiens
  chr1:157678824-157678969
  hypo
cgtcgacgaaggtctagttctgtgggtagaagaaggagctttagcctttccccaagccgccggagccacacccccagccgccagagaagatcaaagtctgtggtaagaagacgaagcttcagtatctcaccaatcagattaaggc

SEQ ID NO: 337197 - DNA, 567 bp, Homo sapiens; identical to SEQ ID NO: 330991
  chr1:158150571-158151138
  hypo

SEQ ID NO: 337198 - DNA, 211 bp, Homo sapiens
  chr1:158669657-158669868
  hypo
cgtaggtacatgagagtcacactgccaaagaagagcgaaaagacaatgaagtgagagacacacgtggaaaatgctgtgcggcggcctccagctgaatgaatacgtagaattacagccacaataccatcgtaggacatgaagatgagcatcacagctgtaataatctccactgcatgaatgacatccactacctgaatcatgacgatggctc

SEQ ID NO: 337199 - DNA, 73 bp, Homo sapiens
  chr1:158710971-158711044
  hypo
cgtacggtgggtttatgtgcagatttgttacacggggattttgcgtgaagctgaggtttggagtacggatctc

SEQ ID NO: 337200 - DNA, 139 bp, Homo sapiens
  chr1:159869545-159869684
  hypo
cgcgcccggcccaccagtgctttttcccacaccacatccacaatctttggtccacagaggccccgctgtaatggcaacggggagagggttggggcatccctttctccccaactcctccgctcagcgcgctccacatttc

SEQ ID NO: 337201 - DNA, 187 bp, Homo sapiens
  chr1:159931971-159932158
  hypo
cggcaaggggaacagaggatgggaggcaaagggaaaacatggggtagagggataattttattgccaatgatttcgttttaagagtggagatgaggctacaaagatggactgcaggcggctcactgggggtatatagacctactgagtttataagttatgcactcaagaagtttacctttggcccggg

SEQ ID NO: 337202 - DNA, 733 bp, Homo sapiens; identical to SEQ ID NO: 330995
  chr1:160370125-160370858
  hypo

SEQ ID NO: 337203 - DNA, 86 bp, Homo sapiens
  chr1:160878353-160878439
  hypo
cgagaacaggtaggagacaactgaacccctcctgatgatgaaagacctgtcgttggagaatcgaccagcaatgatagcgatgactc

SEQ ID NO: 337204 - DNA, 287 bp, Homo sapiens
  chr1:160953524-160953811
  hypo
cgattttttttccctttttttttttttaatgtagagtgtctcgctctatcgcccggtggtgcagtgccaaagatcataactcacggcaggctcaaactcctgggctccagcgggtctcccacttcggcctaccaaagtgctgggattacagtgcgaaccacggctccagggacaataactgcaatattaaagtaactgaagcttcaggcccccgtccaaggtcctgtacccaattttgtattttttcttaaagagatcctcaatcggtgccgggctcagtgactcac

SEQ ID NO: 337205 - DNA, 146 bp, Homo sapiens
  chr1:161007602-161007748
  hypo
cgtagttgcgagccctgtggagacaaagaagcgtgagagactgacaggaatgacaggcagtccccatcacctcccagctagcagccacacctccccgtacccagtgtatccaagactccgggccagctgcgtggcctggaggcccc

SEQ ID NO: 337206 - DNA, 158 bp, Homo sapiens
  chr1:161367435-161367593
  hypo
cgtgtatacacctgggaaattatcaccgcaattcgggtctgatttacacgttaggcacagttcatagggcctactttttttttttttttgagacagattctctctgttgcccagtctggatctccgctcactacaaccttcgcctctcaggctcaagc

SEQ ID NO: 337207 - DNA, 164 bp, Homo sapiens; identical to SEQ ID NO: 249076
  chr1:161367787-161367951
  hypo

SEQ ID NO: 337208 - DNA, 678 bp, Homo sapiens; identical to SEQ ID NO: 331002
  chr1:161369566-161370244
  hypo

SEQ ID NO: 337209 - DNA, 835 bp, Homo sapiens; identical to SEQ ID NO: 331003
  chr1:161409868-161410703
  hypo

SEQ ID NO: 337210 - DNA, 175 bp, Homo sapiens
  chr1:161450371-161450546
  hypo
ggtagaattcttgcctgccacgcaggaggcccaggtttgattcctggcccatgcagcacgccctcccattttggtgctgcagcagcaccaaggcgtagctgcgttcgcctctgccgcctccttacactcggggcacgtgagcttgtcctgcactggctgcgctcccacgcatgac

SEQ ID NO: 337211 - DNA, 903 bp, Homo sapiens; identical to SEQ ID NO: 331011
  chr1:162039148-162040051
  hypo

SEQ ID NO: 337212 - DNA, 55 bp, Homo sapiens; identical to SEQ ID NO: 331013
  chr1:163378364-163378419
  hypo

SEQ ID NO: 337213 - DNA, 245 bp, Homo sapiens
  chr1:163392854-163393099
  hypo
cgccagtggtattgtggtattgccggcccccacctcccgcacagcggtgcttcacggaattcctgaggcgtactgggagcaccggcacagccgccgccatttcccggcaggggcacatgggagcgacagcgaggcgtcagggccggaagtgtccctgtctttgccctcgttggctactgcggggcaggctgggaccgaggctgtgtgcagaggcctttggtggctgcgcacgttggggaggggac

SEQ ID NO: 337214 - DNA, 132 bp, Homo sapiens
  chr1:164604732-164604864
  hypo
cgacaggcgtttgtcggacaaaatcaacactaatcaacatttattcgtctcttgcccttgggtctgaggcgcgcgcgggctgcgccattctcccgctcgtctcgccacgcttttcaccctccatccagcctc

SEQ ID NO: 337215 - DNA, 293 bp, Homo sapiens
  chr1:164637890-164638183
  hypo
cgccttaccttccccaggcgcagccaacacttgacatctttttatcagatgagcttggcactgccaggaccggctcctcgcgccaatgtggcagcagccacagcccctcagcttgttagactgaaagaatgtgccgttttaattaatgatatgtaaatatccttgaatgggccgcatttgcatattaagagagatttgcggaatctgcggagtaatatattttaattaaggattaattaaaaataatgggaatttcatttcgcctggcagaatccgtttagattttagcacac

SEQ ID NO: 337216 - DNA, 295 bp, Homo sapiens
  chr1:164761703-164761998
  hypo
cgctcccttccctgtctttttctgtagttttgagtatccgaggagcccaggaggaggaacccacagacccccagctgatgcggctggacaacatgctgttagcggaaggcgtggcggggcctgagaagggcggagggtcggcggcagcggcggcagcggcggcggcttctggaggggcaggttcagacaactcagtggagcattcagattacagagccaaactctcacagatcagacaaatctaccatacggagctggagaaatacgagcaggtaaccagaaccacctggggctc

SEQ ID NO: 337217 - DNA, 515 bp, Homo sapiens
  chr1:164768766-164769281
  hypo
cgccaaaactttgagccacaggggctgaaagggacgtctaccacaaactatcctagttttctttatttgcacaagtctctagaaaagcccacgtggcctaatgtcatagacttgatgcgtgttgaggcttggaccctcaatgacggtgttgattgtcctgccattccaggcctgcaacgagttcaccacccacgtgatgaatctcctgcgagagcaaagccggaccaggcccatctccccaaaggagattgagcggatggtcagcatcatccaccgcaagttcagctccatccagatgcagctcaagcagagcacgtgcgaggcggtgatgatcctgcgttcccgatttctggatgcgcggtgagtctcccatggggctgtcctgccctctctgggagtccctgatctggggctggagtccacagccgctgcccccttcaggctctagtttcaccccatcaacgctgaaccaagtgataccctgaggatggttctgcgagactagatgggccatc

SEQ ID NO: 337218 - DNA, 956 bp, Homo sapiens; identical to SEQ ID NO: 331015
  chr1:165204497-165205453
  hypo

SEQ ID NO: 337219 - DNA, 73 bp, Homo sapiens
  chr1:165711421-165711494
  hypo
cgaacggcaatatgttcagaaactgaataatgccctaaaataaagaattgttcagccagagaccttaattatc

SEQ ID NO: 337220 - DNA, 2034 bp, Homo sapiens; identical to SEQ ID NO: 331018
  chr1:166134181-166136215
  hypo

SEQ ID NO: 337221 - DNA, 238 bp, Homo sapiens
  chr1:167096217-167096455
  hypo
cggccttggctaagaagagacaacggaggctggagctgctggagagaagccggcagacgctggaggagagccagtctatggcaagctgggaggcggacagctccacggccagcgggagcattcccctgtctgcgttctggtctgcagacccctcagtcagcgctgatggggacacgacgtcagtactgagcacccagagccaccgctcccacctgtctcaggctgcaagcaacatagc

SEQ ID NO: 337222 - DNA, 81 bp, Homo sapiens
  chr1:167221039-167221120
  hypo
cgtaaaataattcagctcactgtattttttgtttcttcgttatatctttttttttttttttaaacagagcctcactgtgtc

SEQ ID NO: 337223 - DNA, 246 bp, Homo sapiens
  chr1:167393552-167393798
  hypo
cggggaaagaaagacttccagcttcttacctctgcgtgcatgggcacgtgtgcattgctcagtccgcaggaggtctcactccgcaggaaacgctctcctcccgcataagtctgtacttccatcccctcatctgtggtagtagtgaaggctaggtgagtaagcgtgggctgttctacccaccagaagtccaggagctgttgtatacctcatttctaactcgtgaccgagtgacttgctttaactttc

SEQ ID NO: 337224 - DNA, 204 bp, Homo sapiens
  chr1:167430239-167430443
  hypo
gcgctgtgagcattcgcctatgacgtactttgcgtggatcaaaggccccacaaagcctgccgtgcctgcagctgccacgctggggacatgctggggacgtgggcgatcgtgggctgagaggcagactgctgggctgccgcctcccatggcagctttctcccatgggagggagttcaccttgcggcttccaaactcagccgggcc

SEQ ID NO: 337225 - DNA, 200 bp, Homo sapiens
  chr1:167486836-167487036
  hypo
cgctgctcgtggtggtgacttaaccaggcacatcgtctcatctgccccgtgttctgtcaatgccgggccctctggctgggctagatggccgcctaaggggcaggctggggtgagtcacggagcctgggatggtgcgtcacccggcagtcccaggcgtgggtgtggggacagccatgacaaggctgagcctagacacggac

SEQ ID NO: 337226 - DNA, 740 bp, Homo sapiens; identical to SEQ ID NO: 331020
  chr1:167599123-167599863
  hypo

SEQ ID NO: 337227 - DNA, 59 bp, Homo sapiens
  chr1:167823388-167823447
  hypo
ctttagccgagtccagtgagtcccaggcaatgttaagttcgcttacaatctggaatatc

SEQ ID NO: 337228 - DNA, 222 bp, Homo sapiens
  chr1:168150755-168150977
  hypo
ccatataactttctgtgacaaattgccgattggtgcaaaagtaattgcggtttttaattgcaaaaccgcaattacttttgcaccaacataatacaatatataattatattatatataaagcagtcagcttcaaactggggcccccatgtaatttacttacagattctctaagcgatggctgtatacatggagagttttaagggaataaaattccatatctac

SEQ ID NO: 337229 - DNA, 39 bp, Homo sapiens
  chr1:169096476-169096515
  hypo
cgaaagaacgaggagactttaatcatgaacgaggagagc

SEQ ID NO: 337230 - DNA, 142 bp, Homo sapiens
  chr1:169838031-169838173
  hypo
cggaagcagctggcgtcaccacaccagatgccctcacctgaagaagtcatgagatagtaaggtgcagagcgctggccgacattttggaatgggattcagcaaagttgagtgcaaggtctgttgaaagctggagagaacatcc

SEQ ID NO: 337231 - DNA, 116 bp, Homo sapiens
  chr1:171452992-171453108
  hypo
gcgcccggccatacgtgtcagtcttatgaccttggttaatgtaatttcatctgattgctgaagttgttctccattgctcaagacagatgatttggctgggcgtggtggctcatgcc

SEQ ID NO: 337232 - DNA, 247 bp, Homo sapiens
  chr1:171554936-171555183
  hypo
cggttgagggttgagtgtctcttaccgaaatgcttgggaccagaaatgtctcggatttcagattggtttttttttgtgtgtttgcgtatacataatgaggtgtcttggggcgaggggcctgtctaaacatgaaattcctttgtttcatacatactttatacatataacctgaaggtaattttaagcaacattttaaataactttgtgcatgaaacagaagttctgacctcacttcgactgatccgtc

SEQ ID NO: 337233 - DNA, 181 bp, Homo sapiens
  chr1:171570080-171570261
  hypo
cgggaaacgaggcagacaaaacctgggtagttaaggggctacccgaggcagccccttaggcggcttaggcctgctgtgtggagcatccctgcaggggactccagccagcctgagtgaagccatccgaagagcgatcccaggtagagaattgccccggtggaacgcctcgccagagcagtgc

SEQ ID NO: 337234 - DNA, 1563 bp, Homo sapiens; identical to SEQ ID NO: 331031
  chr1:171810215-171811778
  hypo

SEQ ID NO: 337235 - DNA, 425 bp, Homo sapiens
  chr1:172357767-172358192
  hypo
gcaaggcccacatccggccgaggaccagctcctgccattccctctcctggcccccactctggggctcctccagtcccattccgtccaggcccattacctcctttccccagcagcagtgactccttcggagcccctccacaagttccatctaggcctacgagggccccgcccagtgtcccaaggtaaggcatggagcagaaattgggggggtagtgcgccttggttctcttctcatagaatgacagacaaaatttatttgaaagagaaaattgcaaagatcttatcgtacgtgtttgcagttttcacaatgaacagagactataggaaaattgccaaccctgttatgccatttaaaaatcacttgtgatcattgaaatttctcatttatcaattggcacagactaaataggactaaagaacactcc

SEQ ID NO: 337236 - DNA, 72 bp, Homo sapiens
  chr1:173993051-173993123
  hypo
cgttgtttatttttatctcgtcaatatttcaattaaaaatacgttaaaggacagatagatgcagtggctcac

SEQ ID NO: 337237 - DNA, 333 bp, Homo sapiens; identical to SEQ ID NO: 331034
  chr1:175048476-175048809
  hypo

SEQ ID NO: 337238 - DNA, 350 bp, Homo sapiens
  chr1:175355012-175355362
  hypo
gaaacctcttgcttccttctcgcggtgtctatgacaaggccaatgctctgacacaccttgcctcattcctaatactcctcttgctgtgatgacaccaccggttggctccacccctctttccctccttgtgcgtctctcccccaccgcagccttacctgttgtgaactgagtggtggcagaatcgctctcgttggtccctcggacggcactgactgacacctcgtatcgggagccaggccgcagggcctgcactgagtattggctcaggggaggctgcagccggaaggtggtcctcccaccttccccgcccaccaggccatatttcaaaagaatgaaatcgactttggctc

SEQ ID NO: 337239 - DNA, 238 bp, Homo sapiens
  chr1:175365710-175365948
  hypo
gaggatgttgctaatgacagcgtagacgctgatgttgtaggtgagacctggctccagctccgtgatggtgacaccactccaatctccaggcacccgctgctggagctggaggccccccagggccgtcggctggtaagagatcacatattccgtcactgccatcggcccgtcccattccagctcaatggacctgtcgctgataccagccactcgcaagtcctctggaggggcaactacc

SEQ ID NO: 337240 - DNA, 403 bp, Homo sapiens
  chr1:175372314-175372717
  hypo
cgcagagcccctcctcacattgtcctcgcccactgcaggcattcagacactgccgctggccgcagtcctcaccaacgtagccctcctcgcataaacaggtaccgttggcacatctccccttccccgaacagtccccagggcacctcagttccctgcagtcctcgccagtgtagggctcttcacagacacactccccgtccacgcagagcccccgggagctgcagtctgttgggcaccggagttcggaacagtcatccccgctgtactcgctgtcacagatgcactggccatccacacacaccccccggctggagcaacccagcgggcagtagggctccgagcaattcttgccaaaccagccttcgttgcagatgcagccacaggactcaaagctaaagttgcc

SEQ ID NO: 337241 - DNA, 384 bp, Homo sapiens
  chr1:175375048-175375432
  hypo
cgatgaaccattacctgactcatccccccaaaatcaggttaatgtatttcaaactggctatgcagtgtagaaaatccctgaactgaatccctcggggaagaactgcatttagatcttagagacatattaaccggcagctacagactaggacacttttttcctttgaccgtgtgaagagatgccggggttttgctgggagtgcgttttcgctggaagtgcattggtccttcttgttcactctccctctctgctcagccctctccttcccctcctgagaccacgctgcgagctcccggactctacctgtggcagcactttcttggcagcagttggcgttgcactggtctcgcagcaccgacacctccctctccagcatctcgatcc

SEQ ID NO: 337242 - DNA, 111 bp, Homo sapiens
  chr1:175957595-175957706
  hypo
cgaaactcatcactactaattagaggcaatgcagtttgctggttaagaatgcaggctctggagccagactgagttagcacgttcatctgtcggccaggcgtggtggctcac

SEQ ID NO: 337243 - DNA, 1424 bp, Homo sapiens; identical to SEQ ID NO: 331039
  chr1:178062419-178063843
  hypo

SEQ ID NO: 337244 - DNA, 205 bp, Homo sapiens
  chr1:178531644-178531849
  hypo
agccaccgcacccgacctctactttttagctataatgatttgcaagggcaaaaatttcacggtacaaggagctttcttttgaaacaatgagtaagctcttcacaagtaccaacatgtcgggaaccgtaaacccttgtcgcgggggaaaagctagtctaactgtatcctagaggctctaggttcaggctgaacggaagtacatgtc

SEQ ID NO: 337245 - DNA, 156 bp, Homo sapiens
  chr1:178994188-178994344
  hypo
ggcacactaagtttgcgctttagtatatggtgaataaatggatggacacagtggcggctctgtataagtcagctgaaagcaaacaaagggaaggcagaatctttcattcacacgatttatccgcgcccactgggtgcactacggtcgggcattggc

SEQ ID NO: 337246 - DNA, 62 bp, Homo sapiens
  chr1:179333937-179333999
  hypo
cgtgagccaccggccgctgatggtattctttcctgagggcagattttcacgccagaagcccc

SEQ ID NO: 337247 - DNA, 43 bp, Homo sapiens
  chr1:179835828-179835871
  hypo
cgtgcccgggtgcccaccacctagttttattggtttatacacc

SEQ ID NO: 337248 - DNA, 1090 bp, Homo sapiens; identical to SEQ ID NO: 331041
  chr1:180123493-180124583
  hypo

SEQ ID NO: 337249 - DNA, 296 bp, Homo sapiens; identical to SEQ ID NO: 249209
  chr1:180235627-180235923
  hypo

SEQ ID NO: 337250 - DNA, 67 bp, Homo sapiens
  chr1:180478120-180478187
  hypo
cgcaggcacgcagcgctggactggttgaacagctccgcccgctgccctggcacgggatccaccaggc

SEQ ID NO: 337251 - DNA, 75 bp, Homo sapiens
  chr1:180892057-180892132
  hypo
cggaccaaccagctataaatcggggttcccactgttccttccttgggtttaattttataggacggctcacagaac

SEQ ID NO: 337252 - DNA, 211 bp, Homo sapiens
  chr1:180919554-180919765
  hypo
cgaggtgaacggggccaaggtggcagggctgggcttggctcacattaaggagctcctggcccactcagagagcttgtcaatccgtgtcctgaggcagagacctgtcccacggtgacccagaagtgccgctgccctcactgtcacggcctcggaagccctgaagcactcagggtggttggcaggaacgtgctgcacagagctgctctgtggc

SEQ ID NO: 337253 - DNA, 161 bp, Homo sapiens
  chr1:180925259-180925420
  hypo
cgctctctggctgtgggttggccaggtcggagtgctggaccctgaggaaaggggctgcggggactggcgctgatatgtgcccatggagccagggcttaacagctgccctgccagtcctggagggtatccggagctctcctgtggctgccaggctgcctgcc

SEQ ID NO: 337254 - DNA, 192 bp, Homo sapiens
  chr1:180945775-180945967
  hypo
cgccgatctggaaggcaggacatggggattagctctcacagggactccacattccccaagatacagttatatggaatttatggcaccctttgaagcagaaaaggggcagaacgtgcaaatgacggggccatgatcttacacctgcctaggtgcctgatgctctaatgctgctctgttcttggcctgcacttc

SEQ ID NO: 337255 - DNA, 222 bp, Homo sapiens
  chr1:181382625-181382847
  hypo
gcgggggcctcatcgagcagcgcgacatcatcaaggcccacgaggcgcacaagatgcagagcaccccgcaggcccggcgcaaggaatgggagtgagtatggcggggacgcgggggcgggcatggctggctgggcctgaggtcggggtgggttcctggagcggatgggccccgtgaggccgccctggagggtcgggagatgctttcgctgtgctgcgactaac

SEQ ID NO: 337256 - DNA, 121 bp, Homo sapiens
  chr1:181765823-181765944
  hypo
cgctcagggggcagggagcggggacgatcaaaagagcgaaagcatcttctctctcctgatgtctcccgctgcaattcagaagagcgagggacccaggctgactgggagtccccagagcgcc

SEQ ID NO: 337257 - DNA, 336 bp, Homo sapiens
  chr1:181767556-181767892
  hypo
cgacacgcgggcagcatctctccacctgctgatggaagcgaggagggctccccgctgacctcccaagctctggagagcaacaatgcttgcctgaccgagtcttccaactctccgcacccccagcagagccaacatgcctccccacagcgctacatctccgagccctacttggccctgcacgaagactcccacgcctcagactgtggtgaggaggagacgctcactttcgaagcagccgtggctactagcctgggccgttccaacaccatcggctcagccccacccctgcggcatagctggcagatgcccaacgggcactatcggcggcggaggcgc

SEQ ID NO: 337258 - DNA, 110 bp, Homo sapiens; identical to SEQ ID NO: 331048
  chr1:182361452-182361562
  hypo

SEQ ID NO: 337259 - DNA, 854 bp, Homo sapiens; identical to SEQ ID NO: 331049
  chr1:182583799-182584653
  hypo

SEQ ID NO: 337260 - DNA, 867 bp, Homo sapiens; identical to SEQ ID NO: 331052
  chr1:184005520-184006387
  hypo

SEQ ID NO: 337261 - DNA, 151 bp, Homo sapiens; identical to SEQ ID NO: 331054
  chr1:184722819-184722970
  hypo

SEQ ID NO: 337262 - DNA, 388 bp, Homo sapiens
  chr1:193149436-193149824
  hypo
cggtggcgatacctgcctgccttttcttttgctgcgttggcacaggcattgtgcttattttgttgtaaatggttccagtattttatcagttcactaggctggaactgatgagaggtaattaggtggctgtatttacagctcgaataagagactcgccagtgattgaacacaaactcattgggagggggtacaggatcaattctcaacttggcaagacagatccctacatatacatcttccaagtgcaaacggcggatacctaaagaaactttaaaaatcttttctgccagatctccagaaaaaacataaccagttccagaacagaagacaggataacgctcacttgggtagaggtctggtggcatgtaccacttgctatctttgtttc

SEQ ID NO: 337263 - DNA, 334 bp, Homo sapiens; identical to SEQ ID NO: 249263
  chr1:195732354-195732688
  hypo

SEQ ID NO: 337264 - DNA, 146 bp, Homo sapiens
  chr1:197191306-197191452
  hypo
cggcccgctccttgttgccctgcactgcgcggccgcagcggcaccatgattgtgtttgccgtgctcctgtcgttggtggcgggtgtttgagggaacgagtttagttcttggtctgttattttcagaaatggaaattggcctatacc

SEQ ID NO: 337265 - DNA, 1190 bp, Homo sapiens; identical to SEQ ID NO: 331061
  chr1:197887294-197888484
  hypo

SEQ ID NO: 337266 - DNA, 255 bp, Homo sapiens; identical to SEQ ID NO: 331068
  chr1:200379717-200379972
  hypo

SEQ ID NO: 337267 - DNA, 135 bp, Homo sapiens
  chr1:200971336-200971471
  hypo
cgcggttgttgatggcatcgatggcctcctgcatggctttcacccgcagccgcagggccccattctccttctgtagcatggcattctctcggaacagatcactatagccctcagcgccatcctctcctatcactc

SEQ ID NO: 337268 - DNA, 329 bp, Homo sapiens
  chr1:201194921-201195250
  hypo
cgtgacctccctctgccgtctctcctgaagcatgcccgcaggcccctgggcccatccacctgcaggagaacgtgcctgggacggtgacggccgagtgggaaccctctcctgacgaggcccaggatgtcccgctgcactacgcggtgttcacacgctcctcagcgcacggtccctggcacgaggcagccgaccgcatccacaccaaccgcttcaccctcctgggcatcctccccggccacgaataccacttcagggtggtggccaagaatgagctgggggccagcaaaccctcggacaccagccagccctggtgcatcccccggcagcgc

SEQ ID NO: 337269 - DNA, 114 bp, Homo sapiens
  chr1:201797440-201797554
  hypo
cgtgagccactgcgcctcgccacaccctgcatttttaacacctcactggagcgctcatcctctccacctgctccgctattcaggagcggctctgcaccgtaggccatttcccac

SEQ ID NO: 337270 - DNA, 130 bp, Homo sapiens
  chr1:201851151-201851281
  hypo
ttagttagcagtcacgggaaaattccccattctcacggggatttagactaggtcttaaccatactttaccaagattccagtagcaaagcacccaaaagtaatcgcaataaaattccaatttttgtaggcc

SEQ ID NO: 337271 - DNA, 44 bp, Homo sapiens
  chr1:202009839-202009883
  hypo
cgtaaaccaccgcgcccgaccttctttcacttttttcacacttc

SEQ ID NO: 337272 - DNA, 213 bp, Homo sapiens
  chr1:202531802-202532015
  hypo
cgaaatacttcttagaaaaggcgcaaactacccctgagcattaccttctccccactactttgttctcaaaaccaatttttatctttaatattatctcccacaggttggaatcgggaggtagtaatcctacaaccagtgattcttacggtgaccgggcttcagcaagagcccgtcgggaggcccgggaggcccgcctagccaccctgaccagcc

SEQ ID NO: 337273 - DNA, 126 bp, Homo sapiens
  chr1:202933745-202933871
  hypo
cgccggcaatcattcccagtttcttcgccactcggggttctggtggagatttcttgttgggctgaatgttaaaatgccctgagaggtcaggtgaagagagcagtggaagaataaagtcaatacagc

SEQ ID NO: 337274 - DNA, 160 bp, Homo sapiens
  chr1:202995171-202995331
  hypo
cgacacaattcactgaagagcatactacagatgtagtatccggatatcaagtttccccacttaaaaaatgggtgcgatcaaaggaaaagcaaggaacgggcaggagagcaagcgtgaaaggtgacaaacttgacaattacaaggccgagactaaggccaa

SEQ ID NO: 337275 - DNA, 302 bp, Homo sapiens
  chr1:203134410-203134712
  hypo
cggagggcggcggtggccatagccggctgctggatcctctccttcgtggtgggactgacccctatgtttggctggaacaatctgagtgcggtggagcgggcctgggcagccaacggcagcatgggggagcccgtgatcaagtgcgagttcgagaaggtcatcagcatggagtacatggtctacttcaacttctttgtgtgggtgctgcccccgcttctcctcatggtcctcatctacctggaggtcttctacctaatccgcaagcagctcaacaagaaggtgtcggcctcctccggcgaccc

SEQ ID NO: 337276 - DNA, 101 bp, Homo sapiens
  chr1:203298362-203298463
  hypo
tatcatacctgtatccttaccgcatagatgtgtcagggaaagaaatgtcatagaagtgaaagcactttatattttctgggttaaaaaaaaggtgtggcgcc

SEQ ID NO: 337277 - DNA, 289 bp, Homo sapiens; identical to SEQ ID NO: 331081
  chr1:203598471-203598760
  hypo

SEQ ID NO: 337278 - DNA, 72 bp, Homo sapiens
  chr1:203690606-203690678
  hypo
cgtgagagcaagtgcacaggtcaggaataagcgcagcttcacctcccagtgcttgctgtgctcccgctacac

SEQ ID NO: 337279 - DNA, 189 bp, Homo sapiens
  chr1:204124923-204125112
  hypo
cgagggggccgactcgaacctcacctgaaatacatagtccgcgctggtgagcgtgtattctttgcctcccaggtggaaagagatgtcggggagtgtagggccctcgttacacttcacgacatactggggtggggggcaaagagagccttcttgagtatggaagacgtctcagcagacaaggagtcctgc

SEQ ID NO: 337280 - DNA, 156 bp, Homo sapiens
  chr1:204197190-204197346
  hypo
cgaggcccagcccctctcaccagacagcatgcggcccctgcgggaggcctcggtcgccagggcgcaggagatttcaatccgcttctcctgctcctgcagctggctctctgagtcctggggcacgtccacagagtccccctcgccgatgggcaccac

SEQ ID NO: 337281 - DNA, 370 bp, Homo sapiens
  chr1:204197954-204198324
  hypo
cgttcagggatgaggactttgtctggagtggagagctatggaggggctggggtcaccacctctgtcccttcccagagtctcccactacagcccttcctggctccactcacctccttattgatgtccacgtcataatgctggggctctagctccattttgcgaagccgggcaatttcctcccggggtgtctcgtaggcatgcccgccaggctcctctgcccgcagggctgcctccaggttggagatgtctacctcatggatgctgcggtggcggcgcacctaggggacagcagcatcgtgattgcaccatggctacccatgcctccaggcagctctagctatgccctgtcctcgctttcccttcccagctc

SEQ ID NO: 337282 - DNA, 154 bp, Homo sapiens
  chr1:204199556-204199710
  hypo
cggggactggggtcgggggccgggctggccgggagctgcaggctcctccgcttctccctcatggagccactctggtgccgccgcattcggtcaatctgctcctccacgctcatcttgaccttcccctcgccaggaaacacagcactcttggggc

SEQ ID NO: 337283 - DNA, 383 bp, Homo sapiens
  chr1:204226544-204226927
  hypo
cgaggtggcagccgctcaaaacgggcactgggtgagcggacaggggagtaaatgcgggcacggctgtaggagccctggctgggtgagcggggcacagagtgggagcggggctgcagggacaggcggcgcagggagctagaggcggcatccagctcatcataatagactggctgccgggaggggcttgggatccagacggtggcatcctgccgcccgtagctggcgggctccttccactctcgcagctggtaggcagggccacccccattgcggaaggcatggcgcttgtcctccagggcccagggcgggctgatccgatcataggccggcatggaacagatgctctccggccgcactcctggcgggtagtactgataatcatc

SEQ ID NO: 337284 - DNA, 277 bp, Homo sapiens
  chr1:204228369-204228646
  hypo
cgccggcatgcctcacctccgaaggtcttcaggcgggggtaccccccggcgcagattcacccactgctgaagctggttcatggagctcttgcgctgggcaattttgtcagggttggtgcgtggtgggaaactccgccggtgtcccccagtctctccatcctgagacgggaaagctgtgctccctggccggcttggggagtggtactgccagccattgggctgggcaggctgttccccaccccctggcactcttgggccctcggggtaagggctgccc

SEQ ID NO: 337285 - DNA, 494 bp, Homo sapiens; identical to SEQ ID NO: 331083
  chr1:204347108-204347602
  hypo

SEQ ID NO: 337286 - DNA, 588 bp, Homo sapiens
  chr1:204530924-204531512
  hypo
cgtgatgaagatgaacatggttcctgttctcctgtctagggaaactggttaagcatgtaaatattagcatagtgaatgttttgttgtgagactacatgctgctatgagaaatacagaagggggacgtaatgtagccaagagcttctgaacaacctccgggaagagatgagctgagattaaaggaaggttaggagttaggagaggaagggaaaagtgccgtagttaggaggaaacatgccaaggtcttgaggtgagaaaacagtggcatctgggaagaactagaaagtttagtgtcgctgaaagcatggacagagagagatgagtgaattgaattgcctgggcatcctgggaacgggaagacaccctgatggcagggaacccgcgcctgcgctttcggggtcaggtccaggtctgccccgccagggctgaagccagctcctggtggggctgcagtgaggcggaagaggtgggatgctgctgcctggcggtgctgcggcggcagacctccacgaggaggtcctgggctaccgcggggtacacaggcgggcggaaaagggggagcagagtcagggggcagttgggaagctc

SEQ ID NO: 337287 - DNA, 241 bp, Homo sapiens
  chr1:204531595-204531836
  hypo
cgaccctgcttagtttccgagatctggcgtgttcagggtggtatggccgtagacactaatggtggtgcctggctgcctcttcaagagcccggcccagccacgcccgcccgactccaggcgtcactgccaccccagggtcgtggggctcggactggggacccctgagctgctcgcctgcggtcggactgctctccccttctacgcccaagcaccgccggtctgccctgctgcgccttccacc

SEQ ID NO: 337288 - DNA, 137 bp, Homo sapiens
  chr1:204537877-204538014
  hypo
cgggctccgcacaggccaggagctgtcacaggagctaaagcagggattcctgtgccatctccggtcccttctggatctgagattcaggaattctggggctgtgattccttgaaggcagagccgggaacatgaaaacc

SEQ ID NO: 337289 - DNA, 80 bp, Homo sapiens
  chr1:204540741-204540821
  hypo
cgatggcttctgtatgcatctgctctttggattcttttttgagcggtcgtaacatcttactagttcccttattaatcgac

SEQ ID NO: 337290 - DNA, 75 bp, Homo sapiens
  chr1:204913459-204913534
  hypo
cgccgccctgggtccatgcagccttcctcctctgcctcctcagtcttggcggagccatcgaaattcctatggatc

SEQ ID NO: 337291 - DNA, 171 bp, Homo sapiens
  chr1:204948556-204948727
  hypo
cggcagcgttaactcagccgtcctccggctgtccccgtatgtcaactaccagttccgtgtcattgccatcaacgaggttgggagcagccaccccagcctcccatccgagcgctaccgaaccagtggagcacgtgagtacccgagggctgccagagaaggctccggaacccc

SEQ ID NO: 337292 - DNA, 313 bp, Homo sapiens; identical to SEQ ID NO: 207413
  chr1:204955353-204955666
  hypo

SEQ ID NO: 337293 - DNA, 368 bp, Homo sapiens
  chr1:205038784-205039152
  hypo
cgcggataacttcctgtcccccttccacgcacccgctgccccttacgcgaatccacgctgcaggcgtaggcgtccagggccgctactcttggcaaaggttgggtggggccagggaacgggcagggacacatgccgcggaccctcgcccatgccatgctcttgcccctcagcccatgtcacgggagtaccagaacggagacggcttcggctacctgctgtccttccgcaggcagggcagcactcactggcagaccgcccgggtgcctggcgccgatgcccagtactttgtctacagcaacgagagcgtccggccctacacgccctttgaggtcaagatccgcagctacaaccgccgcggggatgggccc

SEQ ID NO: 337294 - DNA, 225 bp, Homo sapiens
  chr1:205245793-205246018
  hypo
cggggtggtgacagcagcgatgcccgccagacacagggcctcccaggagagcactcccgccttggtccccccataccccaaggctcgactgtccggatgaagcatcctgggcccagcggtgccacctcagccatgcgcctgcctccaggcagccatccactaagctggctctgattccaaaagccccagaggtgatcctgagaggtctgggtgcccagtctcggc

SEQ ID NO: 337295 - DNA, 292 bp, Homo sapiens
  chr1:205273331-205273623
  hypo
cgggacttcttgagcgaatgctggcgctccaggccaggggtggtgcttcccccaccaggtgcatgctgcttgaagaagctgcacaccttggccccattctccaggagggggcgggaggaacgccggagccagtcagccatggaggcgcgggcagagtcactgccagggtgcccaccctcatgcggagcctcctgctctcccactcgggtggcgtagccccagttgacccaccagtgactggccacatcctccagggtggcccggcgggtggggttcaccatcaacagccacc

SEQ ID NO: 337296 - DNA, 898 bp, Homo sapiens; identical to SEQ ID NO: 331085
  chr1:205312591-205313489
  hypo

SEQ ID NO: 337297 - DNA, 481 bp, Homo sapiens; identical to SEQ ID NO: 331086
  chr1:205399716-205400197
  hypo

SEQ ID NO: 337298 - DNA, 857 bp, Homo sapiens; identical to SEQ ID NO: 331087
  chr1:205424702-205425559
  hypo

SEQ ID NO: 337299 - DNA, 889 bp, Homo sapiens; identical to SEQ ID NO: 331088
  chr1:205425562-205426451
  hypo

SEQ ID NO: 337300 - DNA, 95 bp, Homo sapiens
  chr1:205631157-205631252
  hypo
cgagtgccgaatcgctgcaccagccggtccatgaccagagagaagaccagggagatggcgcactgcaggaacagccccaggctgcccatccgaac

SEQ ID NO: 337301 - DNA, 817 bp, Homo sapiens
  chr1:205631783-205632600
  hypo
cgcaagcagagatgttccacacccatgagaagccgtgtatgcagatggggtccatccccactttcctgacagagaagtcggggccaggatggagaggcaccagcccagacacagccccgagtgtcgtctctggtgggcggctcccacaccagcctctgctggctgccaaggccttaccttcatcatagtgtctccgggcctcggtgcccggctcagctctgggcacgccctggtacagcccctcgcccacgaaatccgtgtaaaacagcgtgaaggtcatgagtgccatccagctgcacagctcagccacgaagagccggcgcagggtgcggggcatgcggcagcacagctggtgcagccggggaagcagggcgcccaggttccggaaagccaagcgggcccggcatggacagcagtggggcgacaaggagggggccgacagcccttctgctggctcggtggggcccagcgctgcctcctcagccaccagcagtgtggctgctacgcaggtgaggaagatgagggtgagcaggccaaagaggcactcctcctgggtgcccaggtagggggccagggcactggtgtcccagtcaatggcaggcaggaggtagcccaggcagcccccaagactgatcatgaaggcatagacagagtaggcctggcgacagtggtccgggtcccggaagaggtcagagagcagggcctccagtggagtgaagcacacctggccacagaagtccagcagccccacgcccaggatgagcagtgccagctccaggggcctgggatccgggcacagcagccctgctagccagcc

SEQ ID NO: 337302 - DNA, 256 bp, Homo sapiens
  chr1:207195396-207195652
  hypo
cgaggaagcttgtcacggctctgtccttggtaggacaggcgcttggagctctgctcctgctccaggtcagccagcttgcctacctggatacctgcaaaatctttccccgtgcccagggaggccgggcggggccgagaattacgtaagacactgggcgagatcttgtccaagaaggagccctttcccagagaagtgctggttttggggctggcatctttctcagttgaaaggtagctgctcagtcccacgcctgagc

SEQ ID NO: 337303 - DNA, 560 bp, Homo sapiens
  chr1:207200605-207201165
  hypo
cggcggaaaaagtctcatttgcccagttgctctctaaggtcgtcccatcctattctctatagagccagggctgactcaggcagaaagcacccactggtgttgtgaatcactccccaacaatgaaagagaaggtgcagtgagccaggatgggtggcaggaaaggatagggcagggcagggcagggcaggtgtgcagagagcagaccaggttgcgggagggagagtattacgtacagatccagagcgggtggaggtgctgctcatcatgctgtcacagctgccgacacgggtcacgggttctgagccagtccccgctggccacagctccctctcgggcatcacccgaaacaaggtgcagggatggcaaagggggcttctagaggggaagcgaggggaagtgaacaatgtcccaagccgggcctgaaaagagaagaatcaaagccacacatgagccgaggcttcggcaaggctctgcccaggccctgggcggcatggcgggaaggacaccaagcaagcagagagctggaaggggggcatgaacagccactgcccgacaccccc

SEQ ID NO: 337304 - DNA, 92 bp, Homo sapiens
  chr1:207240948-207241040
  hypo
cgtccagcctcgcaccatttacctttgccggcatggagaaagcgagttcaatctcttggggaagattgggggtgactctggcctctcggtgc

SEQ ID NO: 337305 - DNA, 793 bp, Homo sapiens; identical to SEQ ID NO: 331090
  chr1:207669309-207670102
  hypo

SEQ ID NO: 337306 - DNA, 110 bp, Homo sapiens
  chr1:207936524-207936634
  hypo
cgtccggcctcccacctccagctgcaattgcattctgacctgggcaagtaggaacacgtagtggagatcctgatggagacctgagccaggcgtcccggagtgctggccag

SEQ ID NO: 337307 - DNA, 632 bp, Homo sapiens; identical to SEQ ID NO: 221560
  chr1:208084078-208084710
  hypo

SEQ ID NO: 337308 - DNA, 1077 bp, Homo sapiens; identical to SEQ ID NO: 331095
  chr1:210110997-210112074
  hypo

SEQ ID NO: 337309 - DNA, 221 bp, Homo sapiens
  chr1:212330215-212330436
  hypo
cgggtattccggtttcctcccacatcccaaagctgtacccgtgatgctcattggtgtgcctcaatggtcccagtctgagtgagagtgggtgtgtgtgtgagtgtgtcctgcgataggatggtgtcctggccaggatgggttcctgccttgtaccccaagctgccgggatgggctctggcaaccagagatcctgaactggaataagcgggtaaatagtgatc

SEQ ID NO: 337310 - DNA, 164 bp, Homo sapiens
  chr1:212605109-212605273
  hypo
catcctcattcctccgcatttatgcacctgatcctttgaccaaagtgctcttccctctagaccgcctccttcgcctcctgtagatttttatgcaaataccctgttctcagtgaggccttccctaacctgcctatttaaaatgaccatccccataaccgggcacc

SEQ ID NO: 337311 - DNA, 785 bp, Homo sapiens; identical to SEQ ID NO: 331097
  chr1:212873467-212874252
  hypo

SEQ ID NO: 337312 - DNA, 456 bp, Homo sapiens
  chr1:213030005-213030461
  hypo
cggtgtctggcacataccattcaatacaagtttggtacctggaacccactgaatatgcatgtccagtaactattaactacatgtgttggtgcaagggagaaggtcgagcaaccggatctgctccatcatagcccgtctcagtcgcttcattcaagtcagcggggtgaggttgaggggattccaacttcacaagggcagatttctcatggactctctttctctggttgtactggaacactttctggcgttattcctctgctgggacagcatgaacttatgaaacgtggtcctgtctgccctaaagccagggtctcaccgacaaggacagcgatgctggggcgagaaataaagttcgtcctgggcctgcgtacggtacagcgcccttgggaagcccttgtggagttaagggtgatgcccacttctttgtctccctcattctgtttcggtggctctctc

SEQ ID NO: 337313 - DNA, 119 bp, Homo sapiens
  chr1:213189715-213189834
  hypo
cgcatcctctgggtgcccatggaactgaggtaccacagaattttgcaattaatgttgcggaagcacagccatagctctcactttaaaatgtacgtgtatgggccgggcgcggtggctca

SEQ ID NO: 337314 - DNA, 279 bp, Homo sapiens; identical to SEQ ID NO: 331104
  chr1:214453844-214454123
  hypo

SEQ ID NO: 337315 - DNA, 311 bp, Homo sapiens
  chr1:214637813-214638124
  hypo
cgtgctaagaataacaggattcttataaacacatcgtcgcttaggccaaaaaacacaacagatgccaaaaaacagatggctggtcccttcggtgagttctccttcacatacccaacacgcatgcacgcgcacatgcgcacacagacacacccctcttacctctcgcagctccagcctctgggccacagcctccaggcattcttgccctgtgctttccaccgacagcgtgcactcgataacattgctgtccagcaggcgaatccgtgtgacaaagcagttcttgctcaggacgttgtagcgccgtgtccggc

SEQ ID NO: 337316 - DNA, 157 bp, Homo sapiens
  chr1:214809726-214809883
  hypo
cggttggagctgccctttagttctgattgatatcttaattcgatagagtgtcagtttagcagcagggaagcaggatcaggacacggtagatgggagtataataactacaacaggttctgtcttattttaatgatgaaatgaacgcatatacatgaac

SEQ ID NO: 337317 - DNA, 592 bp, Homo sapiens; identical to SEQ ID NO: 331107
  chr1:216774207-216774799
  hypo

SEQ ID NO: 337318 - DNA, 564 bp, Homo sapiens; identical to SEQ ID NO: 331114
  chr1:219347007-219347571
  hypo

SEQ ID NO: 337319 - DNA, 1082 bp, Homo sapiens; identical to SEQ ID NO: 331115
  chr1:220101064-220102146
  hypo

SEQ ID NO: 337320 - DNA, 388 bp, Homo sapiens
  chr1:220132090-220132478
  hypo
cgccaccgcaaaaatggtgttcccaaatgctcccacaacatctgcccgaagaaagccgtaagtgctcttcttgtgctgttttatgttactggcccttacaccaaaaaaacctatgatcatggacacaaagtgggaaaggacggcaaaagcatcggaggccaaggagagggagttgccaacgtaagcgatcactagttccatcacaaagaggaggatgctaacgacgcacatgaggattaaacggaagcttcttccggagtatcgccccatggcgtctcggtgccctggcagttcctctccctttcttgggaaggctgagctgctagggaagcagctatagattcagtgattacaactcctgggtaactcttcccttcagccctccggc

SEQ ID NO: 337321 - DNA, 944 bp, Homo sapiens; identical to SEQ ID NO: 331117
  chr1:220701527-220702471
  hypo

SEQ ID NO: 337322 - DNA, 807 bp, Homo sapiens; identical to SEQ ID NO: 331119
  chr1:220921368-220922175
  hypo

SEQ ID NO: 337323 - DNA, 1868 bp, Homo sapiens; identical to SEQ ID NO: 331121
  chr1:221051890-221053758
  hypo

SEQ ID NO: 337324 - DNA, 591 bp, Homo sapiens; identical to SEQ ID NO: 331123
  chr1:223936605-223937196
  hypo

SEQ ID NO: 337325 - DNA, 63 bp, Homo sapiens
  chr1:224300452-224300515
  hypo
cgttaacacttttgaataatttatgggcccgtcatctagcgatgtctacctcaaacgcaactc

SEQ ID NO: 337326 - DNA, 234 bp, Homo sapiens
  chr1:224345162-224345396
  hypo
cgtgactgttctcaggcgtgaaatttctgagcttcgcaccaaagtgcaagaacagcaaaaacagcttcaagaccaggaccagaaactgctagagcagacccagatcataggtgaacaaaatgcacggttggcagagctagaacgcaaactacgagaagtaatggaaagtgctgtaggaaattcctcagggtccgggcagaatgaggagtctcctcggaaacgaaaaaaggccac

SEQ ID NO: 337327 - DNA, 64 bp, Homo sapiens
  chr1:224368640-224368704
  hypo
cgtaagcctccgcacaccttttggactggtgtgccagttcacacatgcctgtgatagcaactgc

SEQ ID NO: 337328 - DNA, 884 bp, Homo sapiens; identical to SEQ ID NO: 331125
  chr1:224803454-224804338
  hypo

SEQ ID NO: 337329 - DNA, 597 bp, Homo sapiens; identical to SEQ ID NO: 331127
  chr1:225117220-225117817
  hypo

SEQ ID NO: 337330 - DNA, 380 bp, Homo sapiens
  chr1:225597858-225598238
  hypo
cgtcctcctctcaagcagccttggaggcaggccatgctcccctcactttgtgtgcaagaagccgaggctctgacaggtcactcacccactcaaagccatctgactccaaggcctcggctcttaaaattaattacctcattccagagagcatccaccacatagagaagctggaaactattaactaaaatcatggccaaggatggaacagcgcggtcctgtattttcatttcagccaaaagcatcaccaagttaataaccacctgaaacaaaaggggaaagtatatagcctcaaagcacctccccagagaccttagcactacaaaggcatgagtgagcttcacagctgagacacctggcagacgccaccgtaactcctaccc

SEQ ID NO: 337331 - DNA, 936 bp, Homo sapiens; identical to SEQ ID NO: 331128
  chr1:225614356-225615292
  hypo

SEQ ID NO: 337332 - DNA, 191 bp, Homo sapiens
  chr1:226062794-226062985
  hypo
cggtcagttttttcctctgagtttgattcccctgaaggcaggccccgcaggccctgcaatcccccagcagagagcatgcatgcaggcagcaaggcaccacgagaacctgtgctcgggctggcttggcctccgtaagctgggacacctcagcaagcttgtgtccaatggcaacctcagggctggactaagcc

SEQ ID NO: 337333 - DNA, 282 bp, Homo sapiens
  chr1:226077130-226077412
  hypo
cgttctctgcaagaggctcagttcccccagctgctggtaagtggacctagagtcttgttccttgctgcaaccaaacaactgacaggaaccagaatggctcaggcaacgccagggctctaagggccaatccagtctgcagggatgagcatccgggcccgtgctcagagggtcccggggcctcatgagatcctgagctggtggtccccagttgtgaaaccagatttcccactgttctggggggaccttcctaggcaagggagcctaggagcatttagttccaac

SEQ ID NO: 337334 - DNA, 180 bp, Homo sapiens
  chr1:226163170-226163350
  hypo
cggaaaacaacagcaaatgattaaagataacgttgtttgttgaggacagaagtaataatgttatgggatattcagcaagactaaatgatttattcaccacctgtacagtgaaaactgaagctaaatctgagaattaaggaatcagaaagaacagggcgccgggcgcggtggctcacgtcc

SEQ ID NO: 337335 - DNA, 54 bp, Homo sapiens
  chr1:226311830-226311884
  hypo
cggtgtgcggatgctgatcagcccaccgaatgctcaccactgaggggctgcagc

SEQ ID NO: 337336 - DNA, 886 bp, Homo sapiens; identical to SEQ ID NO: 331130
  chr1:226411104-226411990
  hypo

SEQ ID NO: 337337 - DNA, 1039 bp, Homo sapiens; identical to SEQ ID NO: 331131
  chr1:226736491-226737530
  hypo

SEQ ID NO: 337338 - DNA, 335 bp, Homo sapiens
  chr1:226826337-226826672
  hypo
cgagccgctgcagcagcaacacacaagacagaactttgtcatgaacttgtacaacccacactcctggactcggagacagctcgccagctcttgctggcagggagcagcgtgacctcgggcacacaagatggggacaagcaggtctacccacagcaggtctgctgtgaagatttgctgcacgcttggcatgacacctggcagacggcgggcactgttctctctctcagggcatgggaaatgctctctggagctatggggccgatggctaagggagagtcagtgagtgtccgccaagcttccccgcctacccgccgcacgccagggacaagcacatc

SEQ ID NO: 337339 - DNA, 311 bp, Homo sapiens
  chr1:226827405-226827716
  hypo
cgggcagaaactgttctcacccacccaacaccacagagcaggcgagccccatctgaacctggggcagggccagtggaggcacccaggtgtccacgtatggcgcatggaggtggcgtgcacagcagaggggagcctgccctgtgcccagacacaggagaacgcagagggtggcgctgacatccccaggcgagtgaacagtggtaggaaaggcccggaggtgtgaagggcatccaggctgaggatggaggagcatgacccggggctggcctgtcctgggtgcaacagcagggccaagagagagggtcggcctc

SEQ ID NO: 337340 - DNA, 421 bp, Homo sapiens
  chr1:226829329-226829750
  hypo
cgcctggctttcggtgccaggcaccgtctgggctaaatggagagtcctcggcagagggctgacagctgggcagggctagaagccactctgctctgaggcctgagccccctacacagccatcccgcctgaggaataggctgatgtctccaaatgtctggccttggggcgggccacccacattctgagcctgtgcctggagaagcttacagcttccaaagggcgctgagagaagccaagccccctgaggtgggcacgggtggggcccgaggctgccctcactcgccggcctcaccttgattccctcgatcctgaaccccagggtggccgtggagctgatggtctcccgccactgcatgtaccgtggcttggtcacagcccgctgtgctttttcctcctcggtgggggcctcggggtccacctc

SEQ ID NO: 337341 - DNA, 188 bp, Homo sapiens
  chr1:226908290-226908478
  hypo
cggaacatgcctggcacataataggcacttctgaaatcattgctgctattatttttattattattgtgcatcctaagactgtttagtattttttacagccgtaccacctgttaattcatattgaactggtagtaaaattataactcccagtgaatttcaaaagaaatattggccgggcgcggccgggc

SEQ ID NO: 337342 - DNA, 2262 bp, Homo sapiens; identical to SEQ ID NO: 331133
  chr1:226924738-226927000
  hypo

SEQ ID NO: 337343 - DNA, 63 bp, Homo sapiens
  chr1:227750844-227750907
  hypo
cgcaccggaatgcgcctcccctttccacccgccagcattcccaagcacgcctcggcttctgac

SEQ ID NO: 337344 - DNA, 408 bp, Homo sapiens
  chr1:228081860-228082268
  hypo
cgcaggagaaggggagcaagtggggcggagtgactgcatcctttgggtactggcatgggacaaggtgggtgcccgagagccctggagcacagatgtctgtgcacggctctgtgcaccagcccaggtgcagggtgtccacagtgcaagagcccacaagcacacaaccacaataggtgttcgcacacgagcccaggatgtgtggtgcctgcaggcatgtgcccaggacccaaggtgtccacaaacgtacccatgcccttcacatggactcagacacagggtgtccacgatgcaagcatccacgcacgtgcccatgccacatgcacacaaccatgaagggtgtccatacacaagccccggacacatggtgcttgcaggcatgcgcctgggacctttggttttcacgaacgc

SEQ ID NO: 337345 - DNA, 252 bp, Homo sapiens
  chr1:228083414-228083666
  hypo
cggaagtgcaaaggtcagtcctggaggcggcgagttggcagtagcctgagggtaggacttgcgtctccctgtgtacctgccgcctccaagttcagatgcactggccgttctcgctggggccatgagccaggcagcacccggggcccggcaccccaggcctggactcctgggcctctgctcgctccagtttccggcacctttcccaggaggggctctgggtgagtgctggccctgtaggtccctcggcctgtc

SEQ ID NO: 337346 - DNA, 581 bp, Homo sapiens
  chr1:228109246-228109827
  hypo
cgctgcgtgcactgcctgcactccacatagcagcaccaacgcacctggcactggcagggccttgtcaccacccggctctgtgtgttatggccgcggccacagcagatgctctcgcagttcttctcacggtggcacctacggccagcggtgcccggggagaagcggccagccaggcagaagctaggcgagtcatccaggtgcaccagctctggagtgcggggcagcgggtcgctgccacctgcccccgaggcacggccccgtggtggggagatggcacctgcctcgccggcagcttcattggtggtgctgcccaccttgagtgccgtctcatacttgtgcttcagatgcttgcccacctcatggaaaggcgccaactgccgccagcaggtccgcaccgtgcatgagcctgacacgccgtggcacttgcaggtggtctccaccccagccttgatcacctggcagaagggtgcgggagggagggcagtgtgagggctgtgcaggtgggcccagtgagcagaccctgccctggacccccagagggaccccacacccccacccaggcccaggccctgccggcgggc

SEQ ID NO: 337347 - DNA, 162 bp, Homo sapiens
  chr1:228111872-228112034
  hypo
cgggctcgcagatccttgcttgaccgtctgcccaggaattccttgacgaacttgctgctgtacttaaggttgtctccgcagcccccccactgccaggcctcacggttctccaggtcgggtgcctcatcgcaggtacagcgctccatgcggcccgcgctgcac

SEQ ID NO: 337348 - DNA, 264 bp, Homo sapiens
  chr1:228112950-228113214
  hypo
cggccacactcacctcgcttgagcaggctggcccggtagcggccctccagcgtgcagttccagcgctcaaagcggaactggaactggcactcgagcgcactcatgctcacggcctccaccagcgtctctgccacgcccgggtcccggcggcacatgcgccgctgcttccgctccagcttcagccggtcgcaggccttgtagtgcgcctgggcagccgcctctggctccagggtcagcgggaggatggtcaggggctcgctgccc

SEQ ID NO: 337349 - DNA, 1280 bp, Homo sapiens; identical to SEQ ID NO: 331135
  chr1:228195275-228196555
  hypo

SEQ ID NO: 337350 - DNA, 330 bp, Homo sapiens
  chr1:228280981-228281311
  hypo
cgtaccaagaggccctggaattgagggtgggggttgctgtggactctttctccctcttaggaaactctattgggtctccatctgtcacagaagcagtaaatgatgtaggggctgccaggtatagggtcctgtggggatgctggaacatgccgaggcaggacgtgccagccaccctctgcccatatgtgcagcagggccacagatgtgcttgtcggtaggagagaccaagctgtctgtgtgccgatgtcttgacacctgagacttcaggttcacccatcctggttctgccattccattgcagggtggcttccctcctttggggactcttaa

SEQ ID NO: 337351 - DNA, 203 bp, Homo sapiens
  chr1:228361379-228361582
  hypo
cgatggcttccctgggctggaacaggcaggtctggttctcagtggctgtgcacaccgttcccctgcggggccctgcccatccctgctcccacatccagcggactgttgtcatttctgccctaggctctgggactactccggatgatgccctcgggcaggctattgcagttctgccagtccctgggcaaacagggtctgtctgc

SEQ ID NO: 337352 - DNA, 217 bp, Homo sapiens
  chr1:228459748-228459965
  hypo
cggaggttatgtggtacaaggacgggaagaagctgagctccagctcgaaaatgcgtgtggaggccgtgggctgcacacggaggctggtggtgcaggaggcaggccaggcggacgccggggagtacagctgcgaggctgggggccagcggctctccttccatctgcatgtggctggtgggtgccagggttaggcaaaatggaggtgatgctgagtgtc

SEQ ID NO: 337353 - DNA, 829 bp, Homo sapiens
  chr1:228461610-228462439
  hypo
cgccgcagcaagcggcatgagacagccagccagggggacacccacaccctgaccgtgcatggcgcccaggttctggacagcgccatctacagctgccgtgtgggcgcagaggggcaggacttcccagtgcaggtggaaggtgagccgggcatggggcgtggggcggggactcctccagacacctctgtcccagagctggacaggggcgaagctggggctcaagtctggtctgttaagagcccggctgatgtcccctttgtgcccacagaggtggccgccaagttctgccggctgctggagcctgtgtgcggcgagctgggtggcacggtgacactggcctgcgagctaagcccagcgtgtgcagaggtggtgtggcgctgcggcaacacgcagcttcgggtgggcaagcgcttccagatggtggccgaggggcccgtgcgctcactcactgtgttggggctgcgcgcagaggacgcaggggagtacgtgtgtgagagccgtgatgaccacaccagtgcgcagctcaccgtcagtggtatgtaaggggtcgagtgtccctatccagggcagcctcctggaggaggcggcctttggtactcctgcagcgtaagggctctgccagtcctgtgcgcccgcctcttaagcagtgctcctgtctgcagtgccccgagtggtgaagtttatgtctgggctgagcaccgtggtcgcagaggagggcggcgaggccaccttccagtgcgtggtgtcccccagtgatgtggcagtcgtgtggttccgggacggtgccctgcttcagcccagcgagaagtttgccatatcacagagtggc

SEQ ID NO: 337354 - DNA, 339 bp, Homo sapiens
  chr1:228473703-228474042
  hypo
cgtctgtcctggggagcactgctggccaagcctgcccaggacggtggggcccctgagcagtctgtgcctttgcaggccggagagtgcacatcatcgaggacctggaggatgtggatgtgcaggagggctcctcggccaccttccgttgccggatctccccggccaactacgagcctgtgcactggttcctggacaagacacccctgcatgccaacgagctcaatgagatcgatgcccagcccgggggctaccacgtgctgaccctgcggcagctggcgctcaaggactcgggcaccatctactttgaggcgggtgaccagcgggcctcggccgccctgc

SEQ ID NO: 337355 - DNA, 347 bp, Homo sapiens
  chr1:228504414-228504761
  hypo
cgcctggagatcctggagcctctgaaaaacgcggcggtccgggccggcgcacaggcatgcttcacctgcacgctcagcgaggcggtgcccgtgggagaggcgtcctggtacatcaatggcgcggcagtgcagccggatgacagcgactggactgtcaccgccgacggcagtcaccacgccctactgctgcgcagcgcccagccccaccacgccggggaggtcaccttcgcttgccgcgacgccgtggcctctgcgcggctcaccgtgctgggtgggtggtgggcgagcttttccctcccctgcaggtcgggtctggggcgcgccccgcctccagagcttgcgagtgc

SEQ ID NO: 337356 - DNA, 998 bp, Homo sapiens
  chr1:228528433-228529431
  hypo
cgcaacaaggcgcggaacagacagaactgcgcgctgctggagcaggcctatgccgtggtgtctgccctgccacagcgcgctgagaacaagctgcacgtgtccctcatggagaactacccaggcaccctgcaggccctgggcgagcccatccgccaggttggggagggccaggggccggggccgggagatgcatgtgatgtgggtgggtattggggtgctgggggcttgtatctggggctgccaggaggtggcggtgtgtgcatgagttgggcagagcactgggtacctgggtggctgtggggcctgcaccgctgggcaatctggcccaccacaggctgaccgcagcccacaccctcccccagggccacttcatcgtgtgggagggtgcaccgggggcccgcatgccctggaagggccacaaccgtcacgtgttcctcttccgcaaccacctggtaatctgcaagccccggcgagactcccgcaccgataccgtcagctacgtgttccggaacatgatgaaggtctgcaggctctgggctgctgggcggggctccctgtccctcagcgccggggtggatgccagtggccacacctgcagccgctggtccagggtggcctgaatgtttcctcgtcgggtcccacatctgttgaggatggtcagcccgtgtccccctccctgtgctgacaccctcccccacccacagctgagcagcatcgacctgaacgaccaggtggagggggatgaccgcgccttcgaggtgtggcaggagcgggaggactcggtgcgcaagtacctgctgcaggcacggacagccattatcaagagctcgtgggtgaaggagatctgtggcatccagcagcgtctggccctgcctgtgtggcgtgagtgtccaccttcccgggggcccaggtggctgagccaggatggggcacccggctgcagccgcacaggtccctgcctgggtgggtgtgaggggtgggctcgttcctgggacaga

SEQ ID NO: 337357 - DNA, 618 bp, Homo sapiens; identical to SEQ ID NO: 249613
  chr1:228558792-228559410
  hypo

SEQ ID NO: 337358 - DNA, 369 bp, Homo sapiens; identical to SEQ ID NO: 331139
  chr1:228644877-228645246
  hypo

SEQ ID NO: 337359 - DNA, 600 bp, Homo sapiens; identical to SEQ ID NO: 331140
  chr1:228645306-228645906
  hypo

SEQ ID NO: 337360 - DNA, 118 bp, Homo sapiens; identical to SEQ ID NO: 331141
  chr1:228646027-228646145
  hypo

SEQ ID NO: 337361 - DNA, 568 bp, Homo sapiens; identical to SEQ ID NO: 331143
  chr1:228646866-228647434
  hypo

SEQ ID NO: 337362 - DNA, 1547 bp, Homo sapiens; identical to SEQ ID NO: 331146
  chr1:228870708-228872255
  hypo

SEQ ID NO: 337363 - DNA, 128 bp, Homo sapiens
  chr1:229038524-229038652
  hypo
cgatcggtcgatcgatcatttattttttatcttgattacaccagataagctgaggattttgcaggtaagcacgtggaagctaaaggccagcaagacttggttaggaatatcaatgcgtcctctctcac

SEQ ID NO: 337364 - DNA, 129 bp, Homo sapiens
  chr1:229160222-229160351
  hypo
cgcctctgactctctatggccccgggcaagtctccaggtctccattgcctcacctctaaagtgaacgtagagtctagaacgtaagccagtgcgtgctgacggtccccacaccgcactgccaggggcctc

SEQ ID NO: 337365 - DNA, 109 bp, Homo sapiens
  chr1:229606426-229606535
  hypo
cgggagtggtggttcttgagaacaatggcggctgacagcttttcggcatgctcacagagcaacagtcgagtggccatcggtgtccctctaactggaaaactgcctagac

SEQ ID NO: 337366 - DNA, 273 bp, Homo sapiens
  chr1:230256241-230256514
  hypo
cggctttggggaacactgtgttccatgtctaagtggagtcccgggcctctcccctccagtgtcgcctgtgccagctggacacgaagcagcagatcagtcatgaaaatggctgctcagctccgatctgcccttccttccgcaggactcagggacgcacagctccccagggctggtcacccaaacaacagcattcctttctcctcggcctctccccaggctgcttgggagagaaaacttccctcatcctcctccgcacacactaaatgccctgcc

SEQ ID NO: 337367 - DNA, 262 bp, Homo sapiens
  chr1:230266303-230266565
  hypo
cgtgagtcacgtggtatcaggaacaccgggccctggggaccgacccctgtgtctcccctaagtaggatgctcccatgcaggagcagaaggacaagcagcccggagctgctgcccggctgtgcccaaagtgggatttctgctgatcaagagtctggaatttacactccagcaggtttggaagtctcggcgacagctcctgtatgttcagtcaagcttggctgaccatggctaaaccactttaatgagtttatgggacaccagc

SEQ ID NO: 337368 - DNA, 85 bp, Homo sapiens
  chr1:230272610-230272695
  hypo
cgaagagccggccgtctgtgcattttgcttttcccgcagttcagccgggactctgcttcacggatgctttcacctcacggacagc

SEQ ID NO: 337369 - DNA, 219 bp, Homo sapiens
  chr1:230308302-230308521
  hypo
cgaatggttggactgcacagtgccctgcacgcatagattcgatcaatagtgcctaaggggcttgctcatcttccagccactgtacctcctcatccccacggcgcctttcctcctccactcccctgaccacttgcctttggcaactgagccaagaacacttcttatttttttcttatttggatcagagacagattatactgggaatattctattaacaac

SEQ ID NO: 337370 - DNA, 248 bp, Homo sapiens
  chr1:230346868-230347116
  hypo
cggcagctcgcggcgtctcataaacatgcgccgctggcctcctgagattcttgtgacggaaccgctgctccatggtagagctggcccgagcacccactcctcccgcatcaatttgctgcccaactccaactctgtatgccgcaccacagggtcctggtggaggagatgggaggccacacggggtgtcacaggtggggacaggcgcttctctaggcttagctgttctggctttgttggcatttgtggcc

SEQ ID NO: 337371 - DNA, 223 bp, Homo sapiens
  chr1:230379488-230379711
  hypo
cgcctacagcttcgcagagtgcttagaacattgcccggcacctagcaagtgccatctcttgcagctcgcagagcggggcgtgctggggaagctgtccctggggccacctctctgctcttagtgagtagggcaggttagcccagcaggcttccaggctcctgtgggagagggttgtggctaggaagcatacagggaccggtggggttgtcagagggtgatccgc

SEQ ID NO: 337372 - DNA, 537 bp, Homo sapiens
  chr1:230404024-230404561
  hypo
cgtgtagggttgggtgaagcttacctctggtctgtggatgacaaaacggacgaggtgcccacccaggttccgtactgtctgggtgttgggcctcttgtgatccctggccagcctcacctccgtgtttaatctctggagttcccactgtcactctgcagtgttctgatgatttatggaaggttggagaggtcactcctttctgtgtcagcgcctctgctggaaagcgacacaccttacgctacagcacattaaacagaagcgtgtgctcaggccccggccgagagagttcgtcatcagagtctcgggccccagcttcatcccctgtgcgtcaggctctgtgactggctcaccccccgccagcattgcaccttaattaccgcacagctagtaacacgagacagagtctgggccctgtggaggtggcaggtctacgggaaccaaagactttgtctgtgtagctgctgcctgtgaccctcctcacctgccctcaggaggacagcctgtgtcccgccttcagggctgtggccctcacccccc

SEQ ID NO: 337373 - DNA, 189 bp, Homo sapiens
  chr1:230529557-230529746
  hypo
gagactccgtctcaaaaaaaaaaaaaaaaaaaataataggcccggggcccgccagtccacagcctgattagaaacatgtggcttcgcaaggctctccctcactggctccccgccctagagtccgccacacctgccccggcctggcatcctctgcaggcttccagctctcccactcttctggctcattcc

SEQ ID NO: 337374 - DNA, 89 bp, Homo sapiens
  chr1:230821556-230821645
  hypo
cggcgggtccttgctgggacctcggattgcagtgctgccctttctctggggacagcgtgagtaacagacactcaggtaaaccagtcatc

SEQ ID NO: 337375 - DNA, 184 bp, Homo sapiens
  chr1:231037680-231037864
  hypo
cgcatggcaaacacactaggcaacattcaagagctatgacaggcaagtcacttctcccacctgagcccgtttgtcacctaagtggggataatactagcacttatctcacaggcctcttcaaaggattaaatgagtgaaacaatgtacaacacttagaaaaaattggccaggcgccgtggctcac

SEQ ID NO: 337376 - DNA, 464 bp, Homo sapiens
  chr1:231038126-231038590
  hypo
cgggattaaaaaaaaaaaaaaaaaaaaaaaaaggaaagaaaaatgccagccgtagtaagtgcttaaaacacattagctcccgaagggccccaaaccctggagacagaagcatccggttgcaacccctcatccctcgagaggtggcagcaagccttatagggaagcccaagcccaagcccagtgtggcatagaatagagcagggggcccgcagggagcctccacaatggcaggagttctgcacgctcagtaccggtagcccagggctctggaggtagagaagtctgcggaccagccggaggaggccgaagaggcagcgcatgcgctgttggccagcggacccgagcgggcagaggtcaatcaacagtagacgctgtacccactgaggcttgctgccctagcacagggagcatgagctaaacctcagtgcggaggatctgggcaaaggcccgagggtggccaagac

SEQ ID NO: 337377 - DNA, 118 bp, Homo sapiens
  chr1:231046066-231046184
  hypo
cggaagagagcggtgctgcagccaaggcaaaccagggcagggcagggctagcactgcgcactgtgtatgctgccaagctcggcttaaacccatggttttcagaaggtgctggagagcc

SEQ ID NO: 337378 - DNA, 173 bp, Homo sapiens
  chr1:231122207-231122380
  hypo
cgcaactcttctattttatcttctcagagtttccaaatgttatgcgtttgaattgtagccattccagtagtccccgttctctttggggtatatgttccaggacccacagtgagtgcctgaaaccacagatagtatggaacccaattaccatccatcggaacacgtttctgttc

SEQ ID NO: 337379 - DNA, 1334 bp, Homo sapiens; identical to SEQ ID NO: 221615
  chr1:231175065-231176399
  hypo

SEQ ID NO: 337380 - DNA, 1900 bp, Homo sapiens; identical to SEQ ID NO: 331151
  chr1:231296814-231298714
  hypo

SEQ ID NO: 337381 - DNA, 124 bp, Homo sapiens
  chr1:232104144-232104268
  hypo
cggtaccctgagcagacgtaccagtcacagtaattaatataaaaggtgtccttcctcttgaggcatcacttttaaagcaaaaacaagggaggctgaggcaggagaatggcgtgaacccgggagg

SEQ ID NO: 337382 - DNA, 966 bp, Homo sapiens; identical to SEQ ID NO: 331152
  chr1:232765040-232766006
  hypo

SEQ ID NO: 337383 - DNA, 175 bp, Homo sapiens
  chr1:233085208-233085383
  hypo
cgtcattcgttggccggaacacttgcagtggtaaagtgagacggagaagctatttaattctttgcaagaggagatctttatacactttggtgtgaaagtaaagagggaaaactgggcgtcctatgcatggctgaggacgggaagcctgcctacaccagtggttctcaaccctagc

SEQ ID NO: 337384 - DNA, 115 bp, Homo sapiens
  chr1:233601764-233601879
  hypo
cggaggtatggagggagaggcccgggcgggaaccagggctgtacgtgaagcttgtggcgagcccgggttccggctgggtgcaggctcagtggcccgcagtcggagcggccggtcg

SEQ ID NO: 337385 - DNA, 1282 bp, Homo sapiens; identical to SEQ ID NO: 331154
  chr1:233749409-233750691
  hypo

SEQ ID NO: 337386 - DNA, 53 bp, Homo sapiens
  chr1:233799555-233799608
  hypo
cgaatcgcttttcagttggctttttttttgcgggggggtggggacagagtctc

SEQ ID NO: 337387 - DNA, 1271 bp, Homo sapiens; identical to SEQ ID NO: 331155
  chr1:234040262-234041533
  hypo

SEQ ID NO: 337388 - DNA, 454 bp, Homo sapiens
  chr1:234724591-234725045
  hypo
cggttatgaggattaaatgacccgacagaggcaaaacagctttgtaaaccataaatcattttgttcggagtcaacaggatgactttttcccctcacacaatttagaattatgtacctgttgaggtagcaacgccctcgtttaatcccagccatgtttggtccccaaatgcctctctcactcgcccagagtgatactgaggccacaaaaagctctgctgttttttttttctcgtggtctttctcaattccaacgtggtacacaggtacctggcgtgtgtctgctcagacagtggatggcccttgttcaaagactgatgggaacacctagtgtacgaggtggcgccggggccgcccacaccaacaggccgtgtgctcccatctcactgtgcacgaggaaccggtgtgcttttcggccaggctgcatcaccctccctcccttggctttctgtgtgac

SEQ ID NO: 337389 - DNA, 186 bp, Homo sapiens; identical to SEQ ID NO: 331157
  chr1:234736252-234736438
  hypo

SEQ ID NO: 337390 - DNA, 184 bp, Homo sapiens
  chr1:234795462-234795646
  hypo
cggatgctctgatgagtgagaatgagtcacccgctcaggcctctttctgcttaagcagaggtaaaggtccagctttgtaatagccggagtgtgaggatccctcgcactgatctgcccacaatgggccgccggcaggcccagagaccctcaagtctcatcctcagtggtctaccgagctgtgcac

SEQ ID NO: 337391 - DNA, 520 bp, Homo sapiens
  chr1:234844970-234845490
  hypo
cgttgggacgtgaactggtgacgtgcctggagctaagatggctctggccctgtgtggagaatgggttgaaggaacacagacgcagcagcagaaccggtgagttttgcctcagggaaattcacattcaaggggacaatcatctcagtctgaagggtacccgggagtttgacaggtgaagagacctctttcaggcagagggaacaaaataagccacagtaagtatgcttggacctgcatagaagtagaaggaagatgaggggtgactgaaaggaagagcagtcaaagatgaggcggggaagcaagccgactgggtgtcaggagcaggctcagggacttgggcttggccggtgagcagtcaaggtgcacagagctgttcctgggtagcgcctctcatggtgccgctgactccaccggggtgaccgctgtgcccggggctgctggtcaggatgcaaaagcactttagagtgaaggtcacctcaggcaacaggcaaaacagacggggctgaagtgagcgcctttc

SEQ ID NO: 337392 - DNA, 104 bp, Homo sapiens
  chr1:234868862-234868966
  hypo
cgagggttccgacagtgggctccgccgaccatcactgccgcaagggatgctggtcacctgcctcagcaacacccctggtgtgcagttcaccggggagccccatc

SEQ ID NO: 337393 - DNA, 146 bp, Homo sapiens
  chr1:234881099-234881245
  hypo
cgcgtattgtattcctgttgtatattgtacatgtaatgcatgctagctgccatttagaatggaaaagcatgccctcaccacagtcaggcccacattttgctttccgtgttaaagagagaaatggcgtaacgtgctcgtgaagaggc

SEQ ID NO: 337394 - DNA, 57 bp, Homo sapiens
  chr1:235267164-235267221
  hypo
cgctgcacatttagaactcaaacccaagcccctgcttctaaaaaccgtgttcgttcc

SEQ ID NO: 337395 - DNA, 89 bp, Homo sapiens
  chr1:235325391-235325480
  hypo
cgatctagcgagacttattctctacagaaaagaaattagacgggcaccttcgcgctcggcgcctgtagtcccagcactttgagaggctc

SEQ ID NO: 337396 - DNA, 1411 bp, Homo sapiens; identical to SEQ ID NO: 331159
  chr1:235811934-235813345
  hypo

SEQ ID NO: 337397 - DNA, 399 bp, Homo sapiens; identical to SEQ ID NO: 331160
  chr1:235813668-235814067
  hypo

SEQ ID NO: 337398 - DNA, 109 bp, Homo sapiens
  chr1:235872480-235872589
  hypo
cgacacgtagtcagactctagagcctgccgatggatgaggataaaaagacgaggatcattacgcgcccaagggggaaggttgacgtgattaacccgttcaccattctga

SEQ ID NO: 337399 - DNA, 134 bp, Homo sapiens
  chr1:235955204-235955338
  hypo
cgatggggaaaactctctctatcagcctctttcttgctccgtgaaactcgtgctcttctcaataaacccatggccttactgtttaaaatcccaggatacttttgtgatgaaacaccgttgcttaaatttggagc

SEQ ID NO: 337400 - DNA, 499 bp, Homo sapiens
  chr1:236156658-236157157
  hypo
cgctgtggcaggccccactgggtatttacaccctacacgtgtgtgtgttgggtggggaaggagaaagaagagggtaagagaacagagagggtgaggaggagaggaagcacggggaggagcggggtaagtgagagggaagaagggtgcagcaggagcgggtggggctggagccagtggaacagttcaagctttaggtccagcagaagagcaaagagcgtgttcagcaattccggtcccccgaggtccttctcaggcacacgcccaagcacggcctgcacccacttacacgggggcgtcatcccgggcctggtcctggtgccctccacctcgcggccgtcgcgatccacgcaccagcagtagccggtgctgccgtggcactgggtgggcgcgtagtgcccgtgcgcatcgcactcaggaacgaacagccccggaggaatgggtcgctgtgggtctgtcgcccccgctgccccgagaatgtgttctcgctcgtgctggcacc

SEQ ID NO: 337401 - DNA, 71 bp, Homo sapiens
  chr1:236187380-236187451
  hypo
cgcccgtctcctcggaagccgatggagcactcgcaggtgaactgtgtcctgggaccagggcgacaggccgc

SEQ ID NO: 337402 - DNA, 145 bp, Homo sapiens
  chr1:236274591-236274736
  hypo
cgagcagatccacgccaccattgagcgggacagctacgcacagattttgaggaatgtgggtggcatcgtcctggccaatgcttgtggcccctgcattggccgctgggacacgaaggacatcaagaaggggaagaagtacacaatc

SEQ ID NO: 337403 - DNA, 694 bp, Homo sapiens; identical to SEQ ID NO: 331162
  chr1:236444211-236444905
  hypo

SEQ ID NO: 337404 - DNA, 998 bp, Homo sapiens; identical to SEQ ID NO: 331163
  chr1:236558377-236559375
  hypo

SEQ ID NO: 337405 - DNA, 786 bp, Homo sapiens; identical to SEQ ID NO: 331164
  chr1:236849524-236850310
  hypo

SEQ ID NO: 337406 - DNA, 128 bp, Homo sapiens
  chr1:237052581-237052709
  hypo
cggggcaagtacccgaatcgaggctttcccaagatatttaacgacaaaacagtaggttagtgcagtaagtccttcctttctgcctctgatattcaagctgtgggattgtgactttgaagaccggaatc

SEQ ID NO: 337407 - DNA, 1508 bp, Homo sapiens; identical to SEQ ID NO: 331165
  chr1:237205156-237206664
  hypo

SEQ ID NO: 337408 - DNA, 2065 bp, Homo sapiens; identical to SEQ ID NO: 331167
  chr1:240254939-240257004
  hypo

SEQ ID NO: 337409 - DNA, 298 bp, Homo sapiens
  chr1:241051980-241052278
  hypo
cgcgcgttgagaagaggtgctatcaactttcccattttgctgatgaggcaatttaggctggatgagaggacgagactgagtactactttcttggtggaggcgacagtcaaagccaggcattagaccggaatcgactcagttaaccactaggctgtgtgtgacagctggaggttagggaacgcggaggcagagagagggaagcagcgggtgcaaagggcagagctacttcggattttatgacggtcaaaggcctcaatgaagaaagaggtaacatttgtttttgttttgtttttgagac

SEQ ID NO: 337410 - DNA, 1229 bp, Homo sapiens; identical to SEQ ID NO: 331169
  chr1:241519651-241520880
  hypo

SEQ ID NO: 337411 - DNA, 756 bp, Homo sapiens; identical to SEQ ID NO: 331170
  chr1:241587098-241587854
  hypo

SEQ ID NO: 337412 - DNA, 1492 bp, Homo sapiens; identical to SEQ ID NO: 331171
  chr1:242687211-242688703
  hypo

SEQ ID NO: 337413 - DNA, 120 bp, Homo sapiens
  chr1:243479828-243479948
  hypo
cgcacagatgccgtcctgccacgaaggctcttagcctttctggctgctccgcccgccgctcgccaagtgaggacagagggtctttctctggggtgtgctttatttcatatgtgctcagcc

SEQ ID NO: 337414 - DNA, 650 bp, Homo sapiens
  chr1:243637544-243638194
  hypo
cgtgagcatggagttaatgaagctttcacccatctcctcctctcaaccgtcatcccggtttaatcctctccttctgccaaagtccagaggccctgcgagcccccgtggagtcgcctgagccagatgctccgcacccagcctccccaagccccggccggctgccctccaggtgcgggctccaggccctctcgcgcggcttcgggactcggccgagcccgggcctagtatccagagtcgaagcagccgccgggaggtctgggtgggcagggaggccgagaggacggtgcaccgcccggcagcgctgagacctggccgcctaggccaccctgcccggcgagggagaggggtgtctcctgcctggagcgctccgcggtggcccgagagcaggtgctggcgtgcgggaggcgcacgtggagccctgcggtctgttccacctgcagaggcacaattgcccagcgtggggtggaaggcaggctgggagctcccgggacgcggcgtggcagcgcagggctcggctagatgcgctcctcctcggactggttgagtaagggaggaggctcgtcctgaacgtgcacagccgctcctaactccgtcaacggaatttcactcaactccgagactgaagcattttattggcagcatttagaatc

SEQ ID NO: 337415 - DNA, 307 bp, Homo sapiens
  chr1:243652455-243652762
  hypo
cgcggcgcaggtgggagtccttgggcgggcgtctacaggtggatcttttatgcacctcaacaggccggctttctcacggatcacatcggttagcagtaagctgggagggaggtcccgaagactgtgctgggcacagtgcaggacccagagaagcggagccatgggcccgtcctggtgagggagttaaagtccgtgcaggtgaacagaccccggcccgcgaatcaacgaaccacaccgagtgccaagttgcgccgtgcaggctgcggagggtgcgagagcagggagaagcgggaggacggccgtgggc

SEQ ID NO: 337416 - DNA, 836 bp, Homo sapiens; identical to SEQ ID NO: 331173
  chr1:244012299-244013135
  hypo

SEQ ID NO: 337417 - DNA, 631 bp, Homo sapiens; identical to SEQ ID NO: 331175
  chr1:244080520-244081151
  hypo

SEQ ID NO: 337418 - DNA, 106 bp, Homo sapiens
  chr1:244200750-244200856
  hypo
cggctggctgtggagggtagagggtggctgcgtccccaaacagcagggcccagcaagagggaaaagccacacaccttctctgaggggccccccaaaaaatgatcgc

SEQ ID NO: 337419 - DNA, 45 bp, Homo sapiens
  chr1:244815271-244815316
  hypo
cgggatctggcctctgcctacctgcccagctcatctagtaccgtc

SEQ ID NO: 337420 - DNA, 45 bp, Homo sapiens
  chr1:244857971-244858016
  hypo
cgtgtgcgtcttattgcgacgctttccaaacgatgatgttgcctt

SEQ ID NO: 337421 - DNA, 871 bp, Homo sapiens; identical to SEQ ID NO: 331176
  chr1:244893344-244894215
  hypo

SEQ ID NO: 337422 - DNA, 487 bp, Homo sapiens
  chr1:245032185-245032672
  hypo
cggcctatatgcagttatcgtataccaattatacctccataaagctggggaggttgggggaggaagacaaaagaattcaggcctgcggggaatgatgggagtgggtaggagaggagagaggggagagaggaaaacacagatcaccagcagcctcgtgggtggttttgtaaaggactttggcttttgctttctgctatggactgaacgtttgtgtccccacaaaagtcctgtgttgaaacctaatcccccatgatattaggagctgaggcctttggaggcaacgaggtcatgagcgtggagccctcatcaatgggattagaaaatttatacagagctgaagagaccagcgttcgtgtcttctgccctgtgaggacacagcaagaaggtgccctgggtggggaggcgggccctcaccagtcactgaggcgctgggcttcttagcttccagaactgcgaccaataagtgtctgttgtttataagctactc

SEQ ID NO: 337423 - DNA, 270 bp, Homo sapiens
  chr1:245254429-245254699
  hypo
cgcgtgccttcaggacagggcggagacggaggaggaaaggagtgtggtgatcctcggaacatcagcagacaggctgttgatgataggaacacattgcagcggggaaggaggatggctgagatatgaaatacccttcaaggtggacgcatacccaggggcatgtcattcggtggcaggggccagcacggacatgcagcactgaggcgtgtgctagcgcccagtgcgtcgacccaggcacggacttgtttggagcatacaggacagctctgc

SEQ ID NO: 337424 - DNA, 753 bp, Homo sapiens
  chr1:245499151-245499904
  hypo
cgaagggaaaggagggtcccacgaagggaaaggagggtcccacgcagggaaagaagagtcccacgcggggagagccccatgcagggaaagagggtcccacgcagggaaaggagagtcccacgcagggaaaggagggtcccacgcagggaaaggagagtcccacgcagggagagtcccacgcagggaaaggagggtcccacgcagggaaaggagagtcccacgcagggaaaggagggtcccacgcagggaaaggagggtcccacgcagggaaagaagagtcccacgcagggagagtcccatgcagggaaagaaggtcccacgcagggaaaggagagtcccacgcagggattgctgttccactctgcatagccgctgggctttctgctgcacggatgccatctagaagaagcaccatccactgttctcagaaagaagagagaggaaggagacaggagtgcgtagagtgagtgggccatcagaaaaaggactgctctggggatgcaggagacccgcttgtaggatttaggggcaccgtgcaagacaggggtcatggtatgcgggtgcctccgactggcggctgcgtggtggatctggccacttggtgaaggtcgcagtgaccttgatctgctctggggagggatgctgttttgcctttcttcacgcacgtggaatcaggactagctggactggcaggaaaaggttctctctggaataatggtttgcttctctgcaggctcgtgcggcggctcgtgc

SEQ ID NO: 337425 - DNA, 365 bp, Homo sapiens
  chr1:245530148-245530513
  hypo
cggctgtgattcacgacaaactccaggtccccaacaccatccggaaggcatggaacgaccgggacaaccgctgtgacatttgcgccactcacctgaaccagttgaagcaggaggccatccagatggtgctgacgttggagcaggcagccggcagtgagcactacgacgcctcgccctgctccccgccaccgctctccaacatccccaccctggtggggtcccggcacgtgggtgggctccagcagcccagagactgggcctttgtgcccgccccctgtgccacctccaactacacaggcttcgccaacaagcacggcagcaaacccagcagccttggggtcagcaatggggcggaaaagaagagc

SEQ ID NO: 337426 - DNA, 268 bp, Homo sapiens
  chr1:245772586-245772854
  hypo
cggaaaggatgattccatgcagaacctgggcatcattccctgtgccatctcttggctcttcaagctcataaacgaacgcaaggaaaagaccggcgcccgtttctcagtccgggtttccgccgtggaagtgtgggggaaggaggagaacctgcgggacctgctgtcggaggtggccacgggcagcctgcaggacggccagtccccgggcgtgtacctctgtgaggaccccatctgcggcacgcaggtgattgcttctgaagcctggctc

SEQ ID NO: 337427 - DNA, 585 bp, Homo sapiens
  chr1:245848541-245849126
  hypo
ggcgcgcgggcatggcaccccgagtggcccacgtgcgggaggccaacgggggtggctgtcagtagcctgtgtcgtcaggggccttcaccacttgccgcgcacagctgggctcccggggaaactgccacggaaaggccaccacattaactgccgtctcactcacagtacacatccagctcgtccggcggggagagctcctgcgaagaaggccgcatgcgcaggcccacccagctgagacccttccacaccagggccacggtggaccctgacttccccatcgctcacctgtccagcgaccccgactactcctccagcagcgagcagtcctgcgacaccgtcatctacatcgggcccaacggcacggccctctctgacaaggagctcaccgacaacgagggccccccagactttgtccctatcgtgccagccctgcagaagacccggggcgacagccggcccgcagaggcaggagaggctgcagccggcaagtcagaaagggactgcctgaagtgcaacacgtttgccgagctgcaggagaggctggactgcatcgacggcagcgaggagcccagcagctttcctttc

SEQ ID NO: 337428 - DNA, 202 bp, Homo sapiens
  chr1:245855725-245855927
  hypo
cgggattgagcttggtccgggagggtgcttacatcgggacaggcagagagggcgcagggcatcgaggctgaggcagggatgggactgcaaactcccagcggcaagagcctggcctgtgggcgacacagcgagattaactcaaggagggaccgtcccagcaagcagagcaagacgctagcaaacgcaagccacagtcacaccc

SEQ ID NO: 337429 - DNA, 531 bp, Homo sapiens
  chr1:245925703-245926234
  hypo
cgcacattaggaaatttcctgcacgttgtttttctgtcaggactttcacacagtaggcccttgataaggatttgctgtaccttgctgattcgactggctgacaagtacccccagaccagaaaaggaaagttctccctgaggctgcaacagacggtgcggtgttcttcccccgcctgggtaaacatgccagacatgataaaaagaacagaatagctgagtgccctcagggaatcctagtgttactcccgttggccacacgctgactttatttagagatcaagtaaaggcgctatggctagcattcggcgaaaatgagcactgtggaatctggcttttaagaatcccttcggcatttgtcatttctcttaggtccatgtgggcggctgccagtgttttgggatcagccggcccctggacacgccctgagcaaccctgacgcccgatccttccaccgtcactcttctgcacacaagggcatggcggcccagagggtcctgttaaagtgtcaagcgcttcctatgatacccgcac

SEQ ID NO: 337430 - DNA, 255 bp, Homo sapiens
  chr1:245986537-245986792
  hypo
cgattgcaaaatccatttctccttctctgtccctgcttctctgcccttcccccaagctttcttgctctctgccacacgtgcgtgtgcacacacacacgcgcgctcgtgcttgctcgctctcgctctctctctctcttttctaaggctccaggcatccgtccctggagaagtgcaccttgggaaggcgatgaaatgaaagaagggcacatcctcctttaaccccaaacatctgaagtcagcgccgcgcactactgc

SEQ ID NO: 337431 - DNA, 105 bp, Homo sapiens
  chr1:246160284-246160389
  hypo
cgacgtcgctggtgcggaacaccatgacgtctgtgtctagggtatgcgcatatgctgcgtttttccgcaggtgcctcgcagtctgctctggctcttagggcttcc

SEQ ID NO: 337432 - DNA, 215 bp, Homo sapiens
  chr1:246310270-246310485
  hypo
gttttcttgttaatcggcaggcaggcgtgacagtgttcggcagaggacaatctgttcgagaataattagattccccctcgcttcttgcgttggtggcggaagcacccggagtatttacaatacaccattttgcttccatccgagtccatatgttcgctggtcaggttaaaactgaggctgcatggcacatttttcactgtaaacaacgctgcccc

SEQ ID NO: 337433 - DNA, 760 bp, Homo sapiens
  chr1:246310727-246311487
  hypo
aatcaggacgtgctcggtggttgtaattccatctattgatggcagctgctgctgcaacagggaggccggctagggctgcacactccatggaggcggtgggagcctcacccattctgggttggggcaggggctccgtgggtgccactgcagccacccaaatcgtggctgcagaccaggcttcctgctctatggagcaggcaggcgccccgccttcctgggtggggctacagctgcccaaactgatgctggagatcggagcttccctgtgctcttggtgggggccgggagcagacaggatctgccctccagggtagagctgcagcctccctgctgcggctgcagacctgggcttcgcgctcaatcgagcaggcaggagccagggacaagagggagccccacctttactgagttggtggagcgtgaactccgcaggtgcagacctggcatctctgcagcctgcaccctggagggcccgggaagacccgccccccacttcatccctgcaggctcgggggtgtctgctcccgcttcccagcccctctcctctccagatgcctgctctgatctccgaccggggttggggccgagcccggggcagcaggaggcagagagattcctgggtggaaggcggcagtccccgtaaggcccctccttcagaccagggagggcctgaaggctgggggccaggatgccagtccgggaccggagtggggacttgtggtgcctcgtctgggtgcacatggaggaccatgggccaatc

SEQ ID NO: 337434 - DNA, 186 bp, Homo sapiens
  chr1:246324319-246324505
  hypo
cgccatcagacaagcgagacgatgccatcagacaagacaggtgttccagcgattgctctaggtaagcctcattctctttgttcactggcagcaccaccccgctccaccctgcgcctcatttgcagagtcctctacaaatgaacatgcagcctgcctggcacacctggcacagctcacctgcatgcc

SEQ ID NO: 337435 - DNA, 95 bp, Homo sapiens
  chr1:246324810-246324905
  hypo
cgatggtctccttcatgttccccagcccccgtctatgcctccaccttggtatatcatgctctattgtaattattaatttacttttctttctccgc

SEQ ID NO: 337436 - DNA, 182 bp, Homo sapiens
  chr1:246330213-246330395
  hypo
cgatacccactgaaggcagctgctctcgggtgccccttcccacaagccctagcgaccatcaatctgcactccgtctctatggattcatctactttgaacatttcatacaaacggaatcacagagcatgtggcgtcttgtgtctggctcccttcattaagcataatgtattccgggttcaccc

SEQ ID NO: 337437 - DNA, 88 bp, Homo sapiens
  chr1:246655176-246655264
  hypo
cgtgatggatcaaaacgaaaacaagaccactctgtaatcatgtctgaacgcaactctgttcaactaccgatgtgctccctggctggac

SEQ ID NO: 337438 - DNA, 298 bp, Homo sapiens
  chr1:246930862-246931160
  hypo
cgaatgagctggcaggtctaatgggggaggcggcgtcccagtctgtgttgcagcagcattctcatcgggggtgcgcacaccatcgttactgtcgggcagtaactgccgcttgccttgccgcagtaggagggaaatctcaccttccttccacatactgtcttgagcctttgctaaattaaactgcactttttgctatttttgcctagtttttcgccaatctacactgattttggactgttacctaagttgaaaaataaaaggttgtcaatcgaatggtggtttaatgtttggacctgcc

SEQ ID NO: 337439 - DNA, 87 bp, Homo sapiens
  chr1:246931791-246931878
  hypo
cggctgtgaaattagaaagcagtacaggagcaatagagcccacgactagctgcacatctgaatcacgaaacagtaacaggttcctcc

SEQ ID NO: 337440 - DNA, 636 bp, Homo sapiens; identical to SEQ ID NO: 331177
  chr1:247170868-247171504
  hypo

SEQ ID NO: 337441 - DNA, 209 bp, Homo sapiens
  chr1:247348636-247348845
  hypo
cgggatacaagggtacactgtggtcctgcaggaattcacccaccaattcatcttcagaagctactcccaaaggcttggagactgcctcagaggctggggctcggaggcggggcaggggtcaggcgtcaggccttagtgccttctgctggggtcggcgggtgttttctctttttactgtatttaactacattaatcgtgctcagtatttc

SEQ ID NO: 337442 - DNA, 225 bp, Homo sapiens
  chr1:247542074-247542299
  hypo
cgctagcatcacgtgcggccaacctggccacgagctgctctccccgccctccccgcacacgtgtcccttcagggagggagaggaaggtcatgacctggctgcgctgctcgccccacacacgtgtcccttcacggagggaggaggaaggtcgtgcgatgcaggtgttgctccttgcgtcattccctgagctccctttgtgtgtcaagcaatctgggcactgggtac

SEQ ID NO: 337443 - DNA, 248 bp, Homo sapiens
  chr1:247614695-247614943
  hypo
cggtgtcagcacacgacagcttgatcacggccggcacctcacagaaaaagttgttcagcacctgccgcccgcagaatggcaattgcaccgtcaggaccacctgcacgaaggagttgccgaagccactgagccaggccagagccacgagctgctgacagagagcacggtgcatgagaacggcatagtgcaggggcttgcagatggccacgtagcggtccagggccatggcggccaggacgatgcactcc

SEQ ID NO: 337444 - DNA, 1005 bp, Homo sapiens; identical to SEQ ID NO: 331180
  chr1:248020330-248021335
  hypo

SEQ ID NO: 337445 - DNA, 265 bp, Homo sapiens
  chr1:248027980-248028245
  hypo
cgatgtgatccacggtgtcacctcaggagaaagtggaaatgcagaggcagcgcttcagattggagtttgagaagcatcgtggctttctggcccaggaggagcaacggcagctgaggcggctggaggcggaggagcgagcgacgctgcagagactgcgggagagcaagagccggctggtccagcagagcaaggccctgaaggagctggcggatgagctgcaggagaggtgccagcgcccggccctgggtctgctggaggtgaggcc

SEQ ID NO: 337446 - DNA, 204 bp, Homo sapiens
  chr1:248074847-248075051
  hypo
cgggggggacgggatgatattagtcccaatgtcgcagagggtgtacaccgcctctgtaatatccacgggggaaaaggatgatacaattcccactatcgaagggggtgtacccccctgttgtattgttcctgatatccagggcgtgaggaaatgatatcactcttaatatcgcagggtgtgtacaccctcacgttgataatgttc

SEQ ID NO: 337447 - DNA, 741 bp, Homo sapiens
  chr1:248099374-248100115
  hypo
cggggtgcagaagagtctcagccagagtgatgtgctgggcagcgtccaattttaccaccctccgcatcaggtcaaacagctgcacgtgctccagagagtcttggagcatgtcactcttcagacgtttgcagttcttcacatatgggctgtcagagctgttctcatcccaaactaggccccatttgtagaaatatttctgcttcttggtacaggagatcacgcgtaatgggatgagccgtagggtcttcaacatcaccaggcgctcttggttttcacaggtctggaagagtgtgaaacctggtagtacttaaagagaaggtagcccatgccctggacatggcaggggcgtgtccagcccagatcaaggatcagttcaggcaggcgacagtgaccgtggtcaccatggcgatgtggtgcccacggtcagaggtggcattggggaagtcagccactcggacgctggtgctcctcactgacttctcatcgctcctgtgctcgctgtagacggtgtttaactcagaatccacatgcaggatgttctcggttttcaggtgtgcgtgggtcagccggttctcgtgcagaaatctaagggtgtggcagagctggtgggccatgtgccagacatgtgggaggggaatggctggatgttattctccttcgggaactcaagggttttcctgcccaggagctcaaaggtgatatgcatggaccgcggagggtgaaccagtcacaccccaagac

SEQ ID NO: 337448 - DNA, 132 bp, Homo sapiens
  chr1:248328627-248328759
  hypo
cggctccagtcctcagggggctccagtcctcaggagggcgctccagcacccgtgactcgccaggctccgtctgagacccgtgctaggctcgctctgtccctgcgttccctcgcctctctctccagttgtttt

SEQ ID NO: 337449 - DNA, 399 bp, Homo sapiens
  chr1:248469372-248469771
  hypo
cgaggtggatctgtcggttggaaactagtttctaaaacgccttctgttccgcatgcgtttattctcttcttctgcacagaatttgctccgtggtgagcctggagatgtctctggatggggacagctccattcccagctacttctgcggggctggtggcgcagagatgggcgcaaaggctgaaagtcgcaagtcctgtgcttctggagttcaaatgcttcctttccagcgggtctccttgcgccatggggccgtgctggggtgaatctggggaaaacaacaggagagggaggccagggaacgcagggatggagggagcctaaccacggactcagacggagccaggcgggtcgcgggtgctggagccgcctgaggactggaaccccctgaggacaggagcc

SEQ ID NO: 337450 - DNA, 109 bp, Homo sapiens
  chr1:249212391-249212500
  hypo
cgaagcaggcggttggagactgagagccgcttcgatatgattgggcactggattatccatcaggacaagaggacccggtgtgccctctgccactcacagaccaacaccc

SEQ ID NO: 337451 - DNA, 569 bp, Homo sapiens; identical to SEQ ID NO: 331184
  chr2:263894-264463
  hypo

SEQ ID NO: 337452 - DNA, 97 bp, Homo sapiens
  chr2:272137-272234
  hypo
cgttgcccggcaggtaccgtccttggacttgaagttgtgtgttttgtgtttcagtgggtcattgacagcggtgctgtttctgactggaacgtgggcc

SEQ ID NO: 337453 - DNA, 1236 bp, Homo sapiens; identical to SEQ ID NO: 331185
  chr2:287626-288862
  hypo

SEQ ID NO: 337454 - DNA, 346 bp, Homo sapiens
  chr2:314858-315204
  hypo
gccccgccgcagggctgtgaggccgccgtgggactggttccaccgacactggaggccaggcgtgggccctccgtaaagtcccccgtgtgggattacgggacaggcggcggaaccccagtttaaccctgggtgtgtttgggcacgcagccatgccgactagaaggacctgagatggattcggttcgcggggaacggaggtgccctagctcccgttcacgaccgcatcttaaaaagcaaagtgagccagtttttcgcaaagatgatttcactggatttccgcgtttagcgtcacgatatgggggcctccgagcgcctctctgggcttccacacaatgggccacatcac

SEQ ID NO: 337455 - DNA, 248 bp, Homo sapiens
  chr2:318873-319121
  hypo
cgggtgtgtgtgcacgggtgtgcatgtgtgcgggtgtgtgtgcgggcacgtgtgcaggcgtgcgtgcaggcgtgtgtgcaggcgtgtgtgcatgggtgtgtgtgcgtgtcgtgtgtggccctgtgtgtgcgggcgtgtgtgtgggcgtgtgtgtgtgggcgtgtgtgggcacgtgagtgtgggcatgtgtgtgcgggcatgtgagtgggcgtgtgagtgtgtctgtgtgtgcgcacaggcgtgtgtgc

SEQ ID NO: 337456 - DNA, 425 bp, Homo sapiens
  chr2:319186-319611
  hypo
cgtgtgtgggcgtgtgtgtgtcgtgtgtgcacaggcatgtgtgcggccgtgtgtgtgtggacacgtgtgtgtgggtgtgtgcggaaacgtgtgggggcacgtgtgtgtgggcacgtgtgtgcctgggcacgtgtatgcgggtgtgtgtgtgtgggcgtgtgtgcggatgtgtgtgtgggtgtgtgtgggtgtgtgcgtgggtgtgtgcaggcgtgtgtgcaggcacgtgtgtgcgggtgtgtgggggtgtgtgcgcgggtgtgtgcaggcgtgtgtgcgggcacgtgtgtgtgtgggcgtgtgtgcaggcagaaagcaccaagatgtaaacagctggcgctcacttgtgcaccaccaaagctagaatgtttcatctcccctggtggcttagtaagtgacagaacagcaccaagatgtaaacagcc

SEQ ID NO: 337457 - DNA, 295 bp, Homo sapiens
  chr2:364121-364416
  hypo
cgggtttgaacggctggtctcccagctgatgatggaacccgacttacagtgttagagataaaagtgaacgggtttgaacggctggtctcctggctgatgattgaacccgacttagagtgttagagatgaaagtgaacgggtttgaacggctggtctcctggctgatgatggaacccgacttagagtgttatagatgaaagtgaacgggtttgaacggctggtctcccggttgatgatggaacccgacttacagtgttagagatgaaagtgaacgggtttgaacggctggtctccc

SEQ ID NO: 337458 - DNA, 349 bp, Homo sapiens
  chr2:502892-503241
  hypo
cggtgggcaggaggcccttgccactgtggcgccaggagactgggtaaggcgcccaccacagggctggggatctcaggggcgtctgaagaggaagagctggctcggggcgctcggggtagcacagccacacatccaaccacggcgcgagaatcaaggtgccagaatcacaggacgcgggaatcacgggacgcaggaatcacgggacgcgggaatcacgggacgcgggaatcacgggacgcgggaatcacgggacgcgggaatcacgggacgcgggaatcacagggtgccggaatcaagggacgccagaatcacggggcgcgggaatcaagcttctccataaatgactgac

SEQ ID NO: 337459 - DNA, 352 bp, Homo sapiens
  chr2:582796-583148
  hypo
cgtgtgaggaagaagctccaggcggcggcagccagcgtgtgaggaagaagctccacgcggcggccagtgtgtgaggaagaagctccacgcggcggcggccagtgtgtaagaaagaagctccacgcagcggccagcgtgtgaggaagaagctccacgcagcggccagcgtgtgaggaagaagctccaggcggcggcggccagcgtgtgaggaagaagctccacgcggcggccagtgtgtgagaaaagctccacgcagcggccagcgtgtgaggaagaagctccaggcggcggccgccagcgtgtgaggaagaagctccacgcggcgcttgctcagggaatcctgctccagggc

SEQ ID NO: 337460 - DNA, 161 bp, Homo sapiens
  chr2:817641-817802
  hypo
cgtgacatgacggctccaaagcagatgcctggtggacccgcggagggagcggtgaccgggcgccaggtgcccacgtgtggctgtggctcagcggcctgcaggctgggcttggccctctgacagggatggggccgtcccccggtccgaccacctacacactc

SEQ ID NO: 337461 - DNA, 152 bp, Homo sapiens
  chr2:875867-876019
  hypo
cgaggccggtttcccgtcgggctgcaaacggcagagcacgcggccctgtcccgggcaggctcggctccaggtggaacccgggacacgtgtacgtcctcagtggggcctccgcattccacactcgagcacatttgaaccccggacacctttac

SEQ ID NO: 337462 - DNA, 1223 bp, Homo sapiens; identical to SEQ ID NO: 331187
  chr2:945451-946674
  hypo

SEQ ID NO: 337463 - DNA, 147 bp, Homo sapiens
  chr2:1282750-1282897
  hypo
cgcgcgaatcacccctctgtcagtgcgtgaataaccgctgtctgtgcgtgaatcaccccctgtcagtgcgcgattcacccctctgtcagtgcgcgaatgacccctctgtcagtgcgcgaatcacccctgtcagcgcgcgaatcaccc

SEQ ID NO: 337464 - DNA, 291 bp, Homo sapiens
  chr2:1482094-1482385
  hypo
cgagtcaccgtgtgtgtctgttgcaccaggccctgtggcggcctgggcatcgtgtctgcagtcctagccgggagcctgcagggaggtgcgcgtcagtcctgttctaaaggaggcactggagccttgtccgaggaggcacaggggctgtgtgtggcaccggctgcccccgggcaccatgcgcccctgccgctttctggccttcactgcactggggtccaggccccaaaggtcagagcagagggtctgggaagcctccatgcgctgggtgttaacccttagttcctgggtggc

SEQ ID NO: 337465 - DNA, 230 bp, Homo sapiens
  chr2:1488408-1488638
  hypo
cgaggccttccagcagtacgtgggtccctatgaaggctatgactccaccgccaaccccactgtgtccaacgtgttctccacagccgccttccgcttcggccatgccacgatccacccgctggtgaggaggctggacgccagcttccaggagcaccccgacctgcccgggctgtggctgcaccaggctttcttcagcccatggacattactccgtggaggtgagtgagtgc

SEQ ID NO: 337466 - DNA, 91 bp, Homo sapiens
  chr2:1520228-1520319
  hypo
cgttataccgcgtcccttacagcccaccttgcgaacctttcccgccccggtccgaggcctccagggctccctgggtcctgtggtccactcc

SEQ ID NO: 337467 - DNA, 237 bp, Homo sapiens
  chr2:1543326-1543563
  hypo
cggagtccgcaagggtggggcggtgacggtgcactggactttgctggcggtgctggaatggctatgcggagggcgctgtggtgcggggactgcgctccccaggaggacctcgggagttgtttgtttgtaggtattacagtattgtctaacgttgccgcgttgacacagggtcacgggaagccacctccagggcctgtggtcctcttcaggcaggcggggcggggaatgctcaggacc

SEQ ID NO: 337468 - DNA, 238 bp, Homo sapiens
  chr2:1647077-1647315
  hypo
cgccaagcagtcaccaaaaccagggatgaaaaaggaacagacatggtgcccctggcacgcaccttcacagcagtcctgccacacccggaggtctaccctggggatctcgtcacagctgccgtagccgtgagggaactccgccaccctgaacacgtcgctctgcacccgggtgatgttgtccgcgttgtcgcataggatcctggccagcgacgtctgcttgatctgagtcagctgggcc

SEQ ID NO: 337469 - DNA, 232 bp, Homo sapiens; identical to SEQ ID NO: 249984
  chr2:1651997-1652229
  hypo

SEQ ID NO: 337470 - DNA, 247 bp, Homo sapiens
  chr2:1688962-1689209
  hypo
cggacacctgcagccggagggcccccaaacgcagaccatccctgccccttgccccgggacaggtctgtgctcagcactccgcgcacgaatgggaaacgtgagggaaggaaaaactggagcaggaagacaaggaaaaccgccgtgggcgagcatgacgggcgggcacctgacgcgcgggtcccgaggaaggccgaacccgacagaatccctggagcctcgtctctgccaggcagtgtgctgacagggc

SEQ ID NO: 337471 - DNA, 211 bp, Homo sapiens
  chr2:1709564-1709775
  hypo
cgacctgggatgcaggtgcggctgcctatgacctgggacgcagggtgcagggcacggctgcccacgacctgggacgcgtggagtgtcaccagcccttttggagagtttcccgcgtggagtgtggggctacaaggagcagttctccgtccattacggcctcccccaggcactccaggccctgccgctcaggcatccatgtggcttggacacc

SEQ ID NO: 337472 - DNA, 1216 bp, Homo sapiens; identical to SEQ ID NO: 331189
  chr2:1747628-1748844
  hypo

SEQ ID NO: 337473 - DNA, 279 bp, Homo sapiens
  chr2:1771840-1772119
  hypo
cggccactcactccagaagcccgtccaatccgcaaccactcactctttccaaggccagcgctccgatgatgctgtagcctcagtcccggcctctgtcaaaggccctccagcccctgacgccaggccacctttgagctcctcttctaagcgccccctttagtatcttgcacacggctgtccccgtgtgagcagctggtgtgagtagagcgtagggagcttatttggcaatctcttcgatgatccttgtgcgtgtctaatgacctgtgtttggcacacgac

SEQ ID NO: 337474 - DNA, 559 bp, Homo sapiens
  chr2:1846385-1846944
  hypo
cgcccccgccccaccctctggctcctgacctgcctgcaggtcgctggggctctgaggccggcgtgggttgacctcacgtccacccctgcaccccactgaccgctgcacaactgcgcggatgccccaaaattagactcatcgtccacgtcaccaacccaaagccccagtccagcagaccgggtgcgtccttgctgagttttgcttccctcaggttccgttgatgtcacacccaaggcctctcctcgtctgtccagcttccgcttccaggcgcttccgcttccaggcgcttccgcttccaggcgcttccgcttccaggcgcttccgcttccaggcgcttccgcttccaggcgcgcggtgctagtaccggcccccgggctgggaacacctccaggccagcgctttagcatcatccgaggctctccgcttcctcagggggacccgagttcttccacgcgactcgtaggccccgccatcctcgctgggctctccctgcaacccttgccgccatccttcgggctggccgatgtccctgccttgtctgtggctcgttcccagctgc

SEQ ID NO: 337475 - DNA, 604 bp, Homo sapiens
  chr2:1863600-1864204
  hypo
cgttggggacagcgcgccggatgagaggggctctgggaaaggggacccgggccgcgctggtgacaggtctgtctccactcctgggcttgttttctggggattctctcgctgcggtttggctgtttggggagcacccaggggctgccacggcagcgtcactgtccatgctgcatgcagtttgtctgtttcccgaccatgcagcctaggactcttcacttatccctctgtgttgatcatgctgccctcgttgccaacactgcgaaccgctgcagggccgaaaggcgccccaagtacatccagcaataggctcctgtccagtgcggcagaacgtacctagcacatcctgacgtcccattcacttaacgggatgtgtccatgggaactgctgccagagcacatgcacgtccagcagcagtggagcggctaagcaagaggctggggccgccggagccagtattggggttggactcggaggacccatgcaaaaaaaaaatacaaaaggtgactggtgcagctgacgcaaggcaacagaaacgccaccccagcctctcgccctcgcgtggaagagtgagtttcatccagggcctgacgcattcaaaccaca

SEQ ID NO: 337476 - DNA, 444 bp, Homo sapiens
  chr2:1895697-1896141
  hypo
cggcgtttgccccatacagctgccccgaaagcgccgcgtgtctcggtggctgggtccgcggcccggcctcccccacccgccaggtggctccacctgcccaggcgcgcgtacccgcgtggcgcacaggtcctgcggcttggtgctcaggttctgcggcatctcgcggcagcgcgtggacaggttgaggatggcggtggccgccatgtgggccgcctccatgtcgtgcgtgtagtcgaagctgctcttgctgcacgtgctgctggcgctgctgcccccgccgcagctcaggttgctgctgctgctgggcgcgtagctgctggtgctgctgctgctggggctggggtccttgcagtaccgcttcgctggggagacagggacagggatgactcaggccccggccgcagggcacacggcagacagcacacggcagggcctgcccgcccc

SEQ ID NO: 337477 - DNA, 590 bp, Homo sapiens
  chr2:1940969-1941559
  hypo
cgactcccctgacccccacatcgactctgcctcagggcggcctccatgccttgcccagagcagctgcagccatcatttcgcacatcaagaagttcctaacgtccgcggccatcagatcgcacatcaagaaggtcctaatgtctgcagccatcagatcgcacagcgagaaggccctaatgtccgcggccatcagatcgcacagcgagaaagccctaacgtctgcggccatcagatcgtacatcgagaaggccctaacgtccgcagccatcagatcgtacgtcgagaaggccctaacgtccgcggccatcagattgcacatcgagaaggccctaatgtccgcagccatcagatcgcacagtgagaaggccctaatgtccacagccatcagatcgcaagtcgagaaggccctaatgtccacagccatcagatcgcacactgagaaggccctaacatccgcggccatcagatcgcacatcgagaaggccctaatgtccacagccatcagatcacaagtcgagaaggccctaacgtccacagccatcagatggcaagtcgagaaggccctaatgtccgcggccatcagatcgcac

SEQ ID NO: 337478 - DNA, 799 bp, Homo sapiens
  chr2:2189479-2190278
  hypo
cgagtcccgcgttccttacgtgaggcggacgcagccgggcctcccagacgcccgcgttccttacgtgagggggacgcagccgggccttccgggccttccgggccttcccgagtcccgcgttccttctgtgagggggacgcagccgggcctcccagacgcccgcgttccttacgtgagggggacgcagccgggccttccgggccttcccaagtcccgcgttccttctgtgaggcggacgcagccgggcctcccagacgtccgcgttccttccttgagggggacgcagccaggccttccgggccttcccgagtcccgcgttccttccgtgaggcggacgcagccgggcctcccagacgcccgcgttccttccgtgagggggacgcagccaggccttccgggccttccggagtcccgcgttccttccgtgagggggacgcagccgggcctcccagacgcccgcgttccttacgtgagggggacgcagccaggccttccgggccttcccgagtcccgcgttccttacgtgagggggacgcagccaggccttccgggccttcccgagtcccgcgttcctttcgtgagggggacgtagccgggcctccccgagttccgcggtcattatgtgagggggacgcagccgggccttcccgagtcctgcggtccttactggttaactgtagtcccgcactgttaatgtttttcgttttttgaagccaagatagcgtgctcaccgcaaaagaaatatggacctcgatgaacagataatagggagaatctcatgcacccatcctggaattac

SEQ ID NO: 337479 - DNA, 114 bp, Homo sapiens
  chr2:2193568-2193682
  hypo
ttctcaggaccgcacggggagaagcagggttctcaggacggcacggggagaagcagcgttctcaggaccgcacggggagaagctcgttctcaggaccgcacggggagaaggagc

SEQ ID NO: 337480 - DNA, 465 bp, Homo sapiens
  chr2:2575361-2575826
  hypo
cggcagatggcggggccagcacctgagatatcccgttcccctgctatgctggagagggccatggtatgaagtggggggcttcacactgcccccggccctgatctgggaggcccttccaggcgaaggcggctcccggcttccccttcctgctgcccctcttcctccccatgcccgcctctccccccacgcctgcctcctccctcccgctcctcgctgcctcctcgcctccaggccacagtttctgtagctgggtcttcagacttcagaagtgtccttttattgtaaagacttcagtggtttcctagaaagcgccggattttcgagctttcttcctggcggggttgctttgtcctgcgcgacagcaggagttgtgggcggccgctgcaaggcccgcgctggccccgtctcccttcgcaggtgtcgaaccaggagtcacctccgcatctgcgcagcagcgggcccggc

SEQ ID NO: 337481 - DNA, 276 bp, Homo sapiens
  chr2:2673043-2673319
  hypo
cgaggagtcagggcccccgaatctctgggaggacgcatcctaggggatttcctccacggtgttggaattgaaggacttaatgacgtcccttcccatgcgcacagtgtcccaggcacgtgcctcagcctcacatgccggggcacagggctgccctgcgaggtgggaggaagacctaggtgaggacccggagccaagggctttcctgaccgtgaaattgcaggtgaggacctggagccgagggccggttctagctgctccaagcgcccgagggccaac

SEQ ID NO: 337482 - DNA, 176 bp, Homo sapiens
  chr2:2696901-2697077
  hypo
cggtctatcctgggagaccccgagcaacagtctctcttcaccgtggctcctgccggctccctgactagcaacagtctctcttcaccgtggctcctgctggccccctgactactggtcctcataggcgctttccagacacccacaccttctcgacaagccagtgcaatcagctgccc

SEQ ID NO: 337483 - DNA, 110 bp, Homo sapiens
  chr2:2705311-2705421
  hypo
cgtgcacttggaaattttgcctccccacacccgtacgcgcaaacccacatgcaaggtggagagactccgtcgcatgtcccgagtctgaggacatgaccggagcggagtcc

SEQ ID NO: 337484 - DNA, 249 bp, Homo sapiens
  chr2:2737154-2737403
  hypo
cgaggccccaagagactgcatcgcactttcagtgctgtaagcaagtgcgtagtttggatggaaagagaggaagactcaggaaccggcagctgagaaccaccgcacacgcgtgtgcgggcaccgcgccgccccctgctgagaaccaccgcacacgcgtgtgcaggcaccacgccggctgctgcgagtccagtctcgctcagtctcttgagccagctggaagcgtgtgtggcattgaggggtccacctccc

SEQ ID NO: 337485 - DNA, 228 bp, Homo sapiens
  chr2:2769802-2770030
  hypo
cgaagcgccacggagtccctcagtcaattcctggcatgtgagcaggaaaagggagcacagaggaggagatgcgggggagccattgcaagggcagcctctaaagcctttctcggttggagtccctgatgtcacgatgagtcgctggtgccattggataacaagagttccacgctcaaggaccgcccctccaggcctggtggaatcagcagtcacggctgactgccctgc

SEQ ID NO: 337486 - DNA, 440 bp, Homo sapiens
  chr2:2797217-2797657
  hypo
cggcaccacctcctgcctgcaaaaccatgacagccctcggacagctcccagctccagcatctcctccctcagtcccgctgtgtcactgccactcatccagagtgcaaatctgatcaccgctcgctttaaacactcttcagtaacttcccattttctttcataaatacggcagattcccagccaggctcaccgtggaagccccctggctttgcgcctctccccggcttgaaggcctcggttcttgtcactaggaccaactcctggccgctcactgaagcacacctcatacacagccatccccgtgatcggcagattttgttcctacgaatctacctacttgctaaaatccacttgtagcctccacatgaggtgcacttgcagccatctgtggacgcgaacagagcaggattaatacttgagtcgcccgaggcacagtttct

SEQ ID NO: 337487 - DNA, 379 bp, Homo sapiens
  chr2:2854244-2854623
  hypo
cggggaagccttcctcagggtttctgcagaagccctgcccactgccccctgcagagagccatcctgccacagagatgcgccccagatgcgtcctggatggatcaagtcactgcgtgtcagggaacggctcctctgctgctcctgatgcctggccacccgtcccggtccacccctcgcgaggaaggccaggcctccgctcctctgcggagcctttcaggaacatgaggccgcctgtgtcagccatcagggtacccaccggcgctgctcatccacctgccacccccacctgccacttactcctagcacaagcaggtgccccatgaatcccgcggaatgagttatttcaggatccgcggaacacacgtaaccagaccccccc

SEQ ID NO: 337488 - DNA, 392 bp, Homo sapiens
  chr2:2893376-2893768
  hypo
cgcactgtgcagagaagcgagggactggagctcagaaaggaggcgctttggacaaaacccctgaaaacgtggctcggagcaggcagaagcccccgtggagctgccaggaccctgcagagccggccactggaacagttctccccccgacgccgattgccatcaaggttggtggataatgcttatcagaaagaatgttccccaatctgatcataatggatgcagtgtgctgtgtcgaatcacgtcctctttcctgattgcggataagaagaacgtgactcaatcagagcatctgagcagctcagagctaagcagcctcagcaagcacagcatccctggcccggcctcctgcacagcccggcagaaacgccaccaccagtctagaggccggtccc

SEQ ID NO: 337489 - DNA, 92 bp, Homo sapiens
  chr2:3294552-3294644
  hypo
cgtcggtcatctgggtctttcgcgaatcaaccagcactaattgccatcagattgcatgtgtcagcacacacagacagcgcttccatcacggc

SEQ ID NO: 337490 - DNA, 163 bp, Homo sapiens
  chr2:3321063-3321226
  hypo
cgcacgaggtgctgaccgagctgagggcctactgtgtgcctcgcacgcggggtggagcatggagccccaggagcgcacaaggtgctgaccgagctgagggcctactgtgtgcctcgcacgcagggtggagcacggagccctgggagcgcatgaggcactgacc

SEQ ID NO: 337491 - DNA, 42 bp, Homo sapiens
  chr2:3349551-3349593
  hypo
cggatgcacatgtaggaagggaatgcggccccggggcaccac

SEQ ID NO: 337492 - DNA, 530 bp, Homo sapiens
  chr2:3352473-3353003
  hypo
cgatgcaggtaccgggcattttccagggaatcaacgactgaaaggagcgaggacctgaggcaacaccaggagctattaacccttcccagccaccactccccaggagagctggagctccagagtgagggatggcggcttccgactgtgcaggaggagaccagactccgttgtcacagaaggcaggggcagggctgcagtccacagccagtggagccttcccggcgtctctcctggtctgtgcacatgcgcacaggcgggctgctcgcagccggaaccatggggcccaggctgttcaggatggagctgtcctgattttcaggacatctcaccccagagacacggcatggcaacagcacgggtgcaccctttccacgtgtgtctgtacaaaagtgtacacttcaggtgcaagagcatacccatggcacatgcctcagagctgaactgcaaattcaaaggagagggaagcgagcagagagaggcagacatgcaggtttcagtcccgattctgccacgcaccagctccacactgc

SEQ ID NO: 337493 - DNA, 93 bp, Homo sapiens
  chr2:3372645-3372738
  hypo
cgatcttaacgaccctccgtgttggtcttttatttgcagttgcagtactgccctttatctttcaagtgtcattaccttcactcagcggtcaac

SEQ ID NO: 337494 - DNA, 485 bp, Homo sapiens
  chr2:3418353-3418838
  hypo
gctctgccgtgtgtcggcccgtttcctgaatcctcaggcatcagtgcctcacagagctgtgtgccagcagtgtcctcacagagctgtcaagcgtgtccatgccgtgccgcttgtgcctctgccccgcgagggacaccattccccgtcgttgacgtgcattcctcttgttcatcgtgcgagactccccacccctgtgccaccggtctcggtgtctcccacactggagtgtccgtatttcataaacacacgtatgtgtgcatgtatgtatttcttatggacatcacgtacgttggcccttcatatctacaggttccgcatccacagattccaccacccgcagttgggaaacacagtgaggtatgcacagcaacctttcagctgtggttggttgaatccacgcgtgtggaacctgcagatacggaggaccaaccaaggacttgagcagtcatggatttggtatcccaggagtcctggaaccggtcccc

SEQ ID NO: 337495 - DNA, 289 bp, Homo sapiens
  chr2:3469110-3469399
  hypo
cgcgacagcccccggtgacaggcaggaccccgccgttgcgatgcgcacagctcagaatcccggcccgactgcagtcgggagagcagccgccccctggcagccgagcaccgcgtgctggtttccagcttccccgccagctcctgcgtcagcgtgtcctctctctacaccgcgtctgtatacacttgtgctcttctacacgtgtgaaacccacagtgctgttctcagctctaaagtacgttgggtttttcttcccacaggattatgtgctggccgtggaggcgtatcattc

SEQ ID NO: 337496 - DNA, 314 bp, Homo sapiens
  chr2:3582036-3582350
  hypo
cgccctgctcgccaagtcacaggtggtgggaacggttgagctgtgacacccttggggctctgcggttcctggtgtctctgagttttgggtgccaccacgttcccctcatccagacaccggtgcccaaggcagaagcgggttgcggcatgcccggcccaaccgccggctgagcgcggatcctgtggcaagcgtgggatctgggccggggtgcaagccgagcacagcccactgggccgaatgtgcagagtatcaccagcagtgatccttgggccgagtgaggccaggcaggggcgccagcggccatggaggtctcc

SEQ ID NO: 337497 - DNA, 370 bp, Homo sapiens; identical to SEQ ID NO: 331191
  chr2:3751023-3751393
  hypo

SEQ ID NO: 337498 - DNA, 1034 bp, Homo sapiens; identical to SEQ ID NO: 331195
  chr2:7005163-7006197
  hypo

SEQ ID NO: 337499 - DNA, 670 bp, Homo sapiens; identical to SEQ ID NO: 331196
  chr2:7057762-7058432
  hypo

SEQ ID NO: 337500 - DNA, 247 bp, Homo sapiens
  chr2:7073094-7073341
  hypo
cgatgcatgcaaacagagaggtgctttattgaagcgggacaagacctctattcatagtaaagtcaaacaaaccacgcatgtgaaaacctccacttatagcggctgcataagcttaactgcgcagagctatactgctttttgaaatactaacttgcaagttcagcaacagctaagaaaacaatcctagacttggaaattgaaagattggaagagaagtggagggattcctttggaaccctttacgtac

SEQ ID NO: 337501 - DNA, 257 bp, Homo sapiens
  chr2:7164418-7164675
  hypo
cgatgcttccagcatagccagtgctcctgggtctcccgtgggatccgtttgtgcagagtcctcacggcgtttctcccacagtgctgctttcaaaatggaagaagatgacgcgcccatcaagcgctgccccaagtgcaaagtctacatcgagcgagacgaaggctgcgcgcagatgatgtgcaagaactgcaagcacgccttctgctggtactgcctggagtctctggacgtgagtacggccttcagcttcaccttgc

SEQ ID NO: 337502 - DNA, 557 bp, Homo sapiens; identical to SEQ ID NO: 331197
  chr2:7571105-7571662
  hypo

SEQ ID NO: 337503 - DNA, 154 bp, Homo sapiens
  chr2:7907371-7907525
  hypo
cgtagcctagtgcttctgaggaaccgcagacccctaggcaggagccaggagaagaccgccaagcacggcgaggccggccgtgctaccaaataaggcacctctcctgcagggagctgggacctaagggactcgcgctgggcacggggcaggcggc

SEQ ID NO: 337504 - DNA, 84 bp, Homo sapiens
  chr2:8647920-8648004
  hypo
cgtgattgttcaattcctaatgtacatgagcataatcactccgcaagtgccgcaccgctttcacacatgtgaacagctagagcc

SEQ ID NO: 337505 - DNA, 246 bp, Homo sapiens
  chr2:8658301-8658547
  hypo
cgggagtgggaagcactccatccgggccgagggaggagtcatttcccagctccagtcagcacctgtttctccgcctctggcccatggtaggaagggagctgccaggcatcccgcccttgaggcctctgagcgaacgagagctggttcacaagctcggaacctggaggctcagaatgcggcggctgctagctgtgtgacaatggacaggtcactgaggtccctggcaatgggtgggaggtcgttagc

SEQ ID NO: 337506 - DNA, 171 bp, Homo sapiens
  chr2:8713198-8713369
  hypo
ctagatgccaacgtcgggttctaccgctgactagctgcgtcttggccatgttatttcacttctttgtgcctcagtttcctcactggtaaaatggaaagaacaagaagaataatgtctacattatgagagcgttatgccatttcagtgaggtgatacttgtgccagctccgc

SEQ ID NO: 337507 - DNA, 225 bp, Homo sapiens
  chr2:8735939-8736164
  hypo
cggcagcccgaatgctcatgcgttccagagcattctccaggaactttctcattcatccctccacacttttctgcttttcaaaataatgctggtacagggccagacacacacgcatgccacacacatgcactagactccctacaggctcacagacacacaccagtgcacacactgcgcgttcctctctgctgacatctgagcgaggcaggttcacaagcagccagc

SEQ ID NO: 337508 - DNA, 141 bp, Homo sapiens
  chr2:8833988-8834129
  hypo
cggggggtttctgtctcctgacggggccctgactggtaccccaggctccatgagagcaccgtggacaacaggagcagccgaacacgcagaatctgcgggaaggggaatcgggcagtgggtgcggcccgtgcaaaggcccgg

SEQ ID NO: 337509 - DNA, 549 bp, Homo sapiens
  chr2:8834468-8835017
  hypo
cggagcaaggcagccaggggcccagtgcgaggagaggagaacggacaggatgggggaggcccatcacacccagcctcacaggccgcgctaagagctttggcctttactttgtgtaaactgggaccttggagagctttgcgcaggagagtgatggaaccaaactatttagcagccacatttcttttaatgtttctcgtttataggttacacatttgttgttattattattgatttaataatactgtgtcaagataaagttgtcaaaatcacggcacccaaacttcacattataaaattttaatcacaacctgttttatcacaatcgctttgcagcaacggaaattattcgtagtaattattaagttggtgcaaaattatttgtggtttttgccatcacttttaatggcaaacgccgcaaataattttgcaccaacctaaatattataactaaggaaacgaatagaatggtgtgcatcagaggtacctccgccagtgcttaccccgtttgttatagagggacgggttgtccctgctgcttttttatggagc

SEQ ID NO: 337510 - DNA, 179 bp, Homo sapiens
  chr2:8849887-8850066
  hypo
cctgccgtccccgcctttcctatgccctttgtccttgtaggttgacgcctgtgtcagcagagagaggaaagagacgcaggcgatcattctcccgtccttacgtggcagacagggttatttgcgtagattgaccgagatgagtgtcctgcactctgaagaaccttggtggctcctccttc

SEQ ID NO: 337511 - DNA, 210 bp, Homo sapiens
  chr2:8860527-8860737
  hypo
cggactccgttcctgtctaccagtgaggctgctgtgactcgaaggaagagccaagaggaaggagccggggaaagctggggctgccttggctgagcacgtgttttatgctctccaccaaccttgtctacgagggaagatggagacaaatgctgcccaggcctgcgcagccgagagtggtggacactgggggaagccggtaccgcggtgtgc

SEQ ID NO: 337512 - DNA, 46 bp, Homo sapiens
  chr2:8868792-8868838
  hypo
cgcactgcacagcgctgctgggcgctagcatgctgtgggcacaaac

SEQ ID NO: 337513 - DNA, 257 bp, Homo sapiens
  chr2:8870193-8870450
  hypo
cgcatctactctcctaacagctcaggacagccccgtcacactactgccagccctggtgactcactttgttggcaatttttaaagccctcttcattatgtacttcctactcttcagaacctctgtgataagcaatacccctgccatacagaacgctggatctcggtttactcagcctctccctgtagcgtcacaggctgtgcactcacctaggtgagcccctaagagcagggtttgcttctgcttcacctaacgccac

SEQ ID NO: 337514 - DNA, 314 bp, Homo sapiens
  chr2:8978041-8978355
  hypo
cggatccaggagcgagacctctgcctttcgcggggcctgtagttcacactccttccaggtctcccagcacctcccctcacctccttcagcctccacattcctaggccttgctgccaacaagcgtcaatcttgatttttgaaaaggtccaaggatgattacgacgtgcgtaggttgcgaaccatcgaaaagcacccaccaatgtgtcaacctggcaactcaggaaaaagccaataaggagcctgacttcatcagaagttggtgcggggtggggacaatggctcactcctgtaatcccagcattttgggaggccaa

SEQ ID NO: 337515 - DNA, 348 bp, Homo sapiens
  chr2:9078588-9078936
  hypo
cgtgtttcatgctgccgtgtttcattccaccacgtttcatgccgccacattttatgctgccacgtttcatgccgccacgtttcatgccgccatctcatgccgctgtgtctcaggccacatttcatgccgtgtttcatgccaccgtgtttcatgctgccacgtttcatgccaccgtctcatgccactgtgtctcatgccaccacatttcatgccgtgtctcatgccaccatgtttcatgctgtcacgtttcatgctgccatgtttcatgccaccgttgtctcatgccgccacatttcatgccgtgtttcatgccaccgtgtttcatgctgccatgtttcatgcctccac

SEQ ID NO: 337516 - DNA, 90 bp, Homo sapiens
  chr2:9135660-9135750
  hypo
cgttttggcgagtacatgttaatgtgttaaatataaacattttttaaaaatacattccattttttttttttttttttgagacggagtctc

SEQ ID NO: 337517 - DNA, 208 bp, Homo sapiens; identical to SEQ ID NO: 331198
  chr2:9143658-9143866
  hypo

SEQ ID NO: 337518 - DNA, 782 bp, Homo sapiens
  chr2:9236530-9237312
  hypo
cggcccgcagagaggcagggttttcccttggtggcacaggcagacacatacccggccccacagtggtctcctccatctggggtcccatcagagccatcgctccctcctggagttccgctcagtggcctgccccagggggcccccgcacagccacagggctgtgggaagggaatggtccaggcaggccggtcaggccggctcccccagatcccttggctccccccaggagctggcttctcactcctcacagacaacaagggcgctatgagatgtcatcagagatgccaccaaacaccacaggcaagggacccgtcactcagcccgggctgctgaacgtgctgaggcggctctgatatgcccagaaagtgcccaagcaggtgacacttgggccaggacaggcacacggagatgacctcccactgcctccccaaggatgaccctgctactctgactgagagggtcttcaggtcaagggcggggagggtggcaacagacaccaaagccgagggctctgagcaggctcagaagccgggtgtggagcgggagggtgggggcgcagtggcaggggctgctgcagggccagctgtgccagcaggggtgggggcaggggctcagcggagccggagtgccaggagctaaagaccacccacgccctcttctcggagggcgagcaggccagggagagcgacttaagccacatgaactttcccattatccctgaaggagcggggttcttgttggtattctacctgcacagctgcgtgagacgcagatatggaaaa

SEQ ID NO: 337519 - DNA, 234 bp, Homo sapiens
  chr2:9245045-9245279
  hypo
cgagactctgtctctaaataaataaataaaggaaaggggtacggagacaagcagcccaaccctatacatttgtccccagggtctctacaaagaggcaagctgggactgaaatctctcccgagtgtggaagacggacgggagcagcagccggacagcacagctcaaggccgagaggctcactgggtgactcgggccgctttggggtggctgtgagaagcgaagggaggctgactc

SEQ ID NO: 337520 - DNA, 147 bp, Homo sapiens
  chr2:9289953-9290100
  hypo
cggtttcttgtctgtgtaatgggatcaatagcgcctcctccaagacgccatggggacttgctgggataccgtgtgagggcctcaggccgatggcatgcagggagtcctcagtgcccgggacgcgttgactgttccagcagccagtgc

SEQ ID NO: 337521 - DNA, 217 bp, Homo sapiens
  chr2:9481656-9481873
  hypo
ctgattaatatgcgcggcacgaacagtgttagcggtgttgtcacatgatttcaccacttactttgtgcagggctttttttctcccccaaatcaatagacgtatttcttggttgtgcagttgagtctcctgacaggtttatttttagtctttcacagagacgctgtacaggtgagcagtatttctccacattccttccacagcattgttctcagcaac

SEQ ID NO: 337522 - DNA, 372 bp, Homo sapiens
  chr2:9609477-9609849
  hypo
cggttaaacagccctattgtagaaggtgggtgttgctgaccagggacttgactacaatagttctgttggcggccctgttccctggggctctacaagaatagaaaacccgtgtggccctggactggccccgctctcccacgtgctgcagtcggggtgcagaatggaagttcacattgctgtggctggtcctcaggagccgtggggagggcagtctgcgggaggctgcggcccttccactggactttcactctggccttcttccctgtcctcctgacaccactcctcccgcctcccctccctctccctcacctcccacaaacacaccagaactattcaactctgaggaacaggagtatgagacagcttccattc

SEQ ID NO: 337523 - DNA, 201 bp, Homo sapiens
  chr2:9720456-9720657
  hypo
cgatttcatgatgatcttgacatctacacagtggtgtcacttaacaggagtatgttctgaaaaacgcctcgttaggcgacttcatcgttgtgcaaatatcacaggatgtacttacacaagtacatggcagagcctactacacacctaggctatgtagtaaagcctatattcctaggctacaaacacgtacagcacgttacc

SEQ ID NO: 337524 - DNA, 123 bp, Homo sapiens
  chr2:10047588-10047711
  hypo
cggttttaaacatgctgagacaatagccgcccctcctcaacgcctttaaaggtgaccaggtagcctctggggctcggggaaagctttcggcaagtatgtcacacacaccctgcctgagtaagc

SEQ ID NO: 337525 - DNA, 300 bp, Homo sapiens; identical to SEQ ID NO: 207797
  chr2:10150735-10151035
  hypo

SEQ ID NO: 337526 - DNA, 176 bp, Homo sapiens; identical to SEQ ID NO: 331199
  chr2:10151695-10151871
  hypo

SEQ ID NO: 337527 - DNA, 166 bp, Homo sapiens; identical to SEQ ID NO: 331200
  chr2:10152421-10152587
  hypo

SEQ ID NO: 337528 - DNA, 530 bp, Homo sapiens
  chr2:10152958-10153488
  hypo
cgtgtgtatgggcaggtcaggtggacaggactgaatatgggggggtcaggtgggcaggcgtgcgtatggtcgggtcatgtgggcaggcgtgcttatgggcaggtcaggtgggcaggtgtgcatgtgggagagtcaggtggacaggattgaatatgggcgggtcaggtgcgcagacatgcgtatggccgggtcacgtgggcaggcgtgcgtttgggcgggtcaggtgggcaggggtgcatatgggcgggtcaggtggacaggcgcacgtatgggtgagtaagatggacaggcatgtgtgtgggagagtcaggtgaacaggattgcttatgggctagtcaggtggacaggtgtgcgtatgggtgtgcctatgggagagtcaggtggacaggattgcgtatagccggatcaggtgggcaggcatgcgtatgagcgagtcaggtgggcagacatgcgtatgggcgggtcaggtggacaggcgtgtgtataggcaggtcaggtggacaggcgtgcatatgggtatgtgtatgggc

SEQ ID NO: 337529 - DNA, 645 bp, Homo sapiens
  chr2:10153562-10154207
  hypo
cgtttgtatgggcgggtcaggtgggcaggagttcttatggtcgggtcaggtgggcaggcgtgcatatggtcggtttaggtggacaggcgtgtgtatgggtgtgcgtatggacgagtcaggtgggcaggcatcctacaggcgggtcaggtgggcaggcgtttgtatgggtgggtcaggtgggcaggtgttcttatggtcgggtcaggtgggcagacgtgcatatggtcgggtcaggtggacaggcatgtgtatgggtgtgcgtatggacgagtcaggtggacaggcgtgcgtatgggagagtcaggtggacaggcatgtgtatgggcgagtcaggtggacacgcgtgcgtatgggcaagtcaggtgggcaggcatgcgtatgggagagtcaggtggacagccctgcgtatgagcgagtcaggtggacaggattgcgtatgggcaagtcaggtggacaggcgtgcgtatgagtgagtcaggtggacaggattgcgtatgggagagtcaggtggacagccctgcgtatgagcgagtcaggtggacaggattgcttatgggcaagtcaggtggacaggcgtgcgtatgagcgagtcaggtggacaggattgcgtatgggagagtcaggtggacaggcgtgcatatgagc

SEQ ID NO: 337530 - DNA, 116 bp, Homo sapiens
  chr2:10154879-10154995
  hypo
cgtacgggcaggtcaggtgggcaggcgtgcatacgggcaggtcaggtgtgcaggtgtttgtatgggcgggtcaggtgggcaggcgttcgtatggtcaggtcaggtgggcaggtgtt

SEQ ID NO: 337531 - DNA, 225 bp, Homo sapiens
  chr2:10155175-10155400
  hypo
gcgtatgggcgagttaggtggacaggcatgtgtatggacgagtcagatgggcaggtgtgcgtatgggtgtgcgtatgggcgagtcaggtggacaggattgcgtatgatcgggtcaggtgggcaggcatgtgtatgggcaggtcaggtggacaggattgaatatgggggggtcaggtgggcaggcgtgcgtatggtcgggtcatgtgggcaggcgtgcttatgggc

SEQ ID NO: 337532 - DNA, 166 bp, Homo sapiens
  chr2:10155780-10155946
  hypo
cgtatgggcgagtcaggtgggcagacgtgcatatgggtgtgcatatgggtgattcaggtggacaggcgtgcgtatgggcggctcacgtggacaggcgtgcgtgtcagcgtgtcacgtggacaggcgtgtgtgtgggcgggtcaggtgggcaggcgtgtgtatgggc

SEQ ID NO: 337533 - DNA, 375 bp, Homo sapiens; identical to SEQ ID NO: 250205
  chr2:10156255-10156630
  hypo

SEQ ID NO: 337534 - DNA, 649 bp, Homo sapiens; identical to SEQ ID NO: 331201
  chr2:10183604-10184253
  hypo

SEQ ID NO: 337535 - DNA, 255 bp, Homo sapiens
  chr2:10306818-10307073
  hypo
cgccctgttccctatggcgcaccagctgcttggatgctcccacgcagcagtgccttgtcatcacattctatttgctgagcggcgatggaacaggccctgcgtccccgcctgtgtcctaagcactccacaagcatgagcgtgtctagatggtgatggtttgctcatggtctctctctcagagcttttaccctggcggggttgggagcgtggcaatgggtcaccactgaccctgttaggaaacaagtgtgtctgtac

SEQ ID NO: 337536 - DNA, 126 bp, Homo sapiens
  chr2:10328941-10329067
  hypo
cgctgcggagagagtggtgtgtgtcttcctgtgtcctcctaggagcttctgtctgagaagtcagaagtcatgagttcccagtcctggccgcatttggaggctggatcattggagggaggcgccggc

SEQ ID NO: 337537 - DNA, 614 bp, Homo sapiens
  chr2:10334473-10335087
  hypo
cggggctctgggggtaaggccttggtcctgccgtgcctcctcctggctcatctgtgacacagaaatgacagttcctactccccagcttgtgcgggcccaaatgggatggggtgtgtgtgtgaggactggggcctaggcctgtgcagggcaggttgtgttactaacgtccccccgtggctcctgggctaacggtgcacttctccgtcctgcttcactgccttatggcacgtgtccatttccccaaccaccggtgggccccgggtggcttggccggcctggtgtcccgtgcccagcatgggctctggcccaagttagcacttgctgcctaagtgcctctgccttttactcacctccatctggagcgggctcagtggggttcctgctggggctctacgggggcatccagactttgccctctgaccagccccactgtcctgtccttccctcccctgcgtcctcatctgtcactccttggtcacagccgccccctgactttcctccctgcctccttggcatggtgggaaacatgcgagttccatttctgaggctgccttgtgcctgatcttgggcaagttgcttgctagacctctcggcgtctccgttctcagcggtgc

SEQ ID NO: 337538 - DNA, 172 bp, Homo sapiens
  chr2:10344656-10344828
  hypo
cgccagccctgctcagcgctgtgcccagccctgggtgcagggaggtgcggtttgctctcagaggagcagctagctgggagcatccgaggccattagggacaggacgctaatgcatcggcgccccattgattctgcctggcttttgtgaacacgtctgcgctgactaatttgt

SEQ ID NO: 337539 - DNA, 510 bp, Homo sapiens
  chr2:10512203-10512713
  hypo
cgttgcttacacgttgggtgcacagtgaatatgtatcagtccagcgcttttcaccatctggtctggttttagtgttgctttatttctggtcattcctcaatcggggctaaagatcagaaaaatcgcatctccaggtcctgagccatggcgaggaagctgggtggtgccctgtgctgtgtggctaaggtgggggacgagggttgtcggtgggggaagccccatgggggccccactggagtcataggagcgaatggagcacccactccatgccttctgtcaattacaaagcacctattatgtcccggatactgtgtccaacacagtggacacattgatgggtaaggcataatccccccccaggagctcccagttggattgaggaggcagacaggcgagcgtatggctgtgacacacccagcaactcccagttggatcggggaggcggacaggcgagcgtatggctgtgacacaggggggcaagtggcgtcaccaaggcagaacccagcagcc

SEQ ID NO: 337540 - DNA, 203 bp, Homo sapiens
  chr2:10517952-10518155
  hypo
cgaggggggccaggcacgggggagggtattcaagggcggcaagccaccaaggggacggggcaggcacagggagggcatttcagagagtgcaaggaggcggcgaagatgctggttgagggcacgggtgaggcggggaggcgtttcgactttggactgaaggccttaattgaccaaggcggtaatttccagtcctgtgacctcac

SEQ ID NO: 337541 - DNA, 473 bp, Homo sapiens
  chr2:10566948-10567421
  hypo
cgagcggcccctggacagttgcagagaaacacaggcttgtcgtgccgtttaagctttgcttgcaagagtggatgccccgcaatcgttcctgctctcccgggccccgggcctggggcatgcgttgcacctgcccagcccggtggctgcgcctccctcctccacctgaccaacgcgacattcctcccctcacgcctggcccggtcccttccagggcaactcccagggatgtggtgacatgcagggttcaagtgttcttggttccaggcacctcccggctcacggggagctcagaggtccatgccgaggagaccaggcaggacctcccgaggctgcgccccggccggcccatgcgttttgtgatcccaagtgactctgtgggaagggtggggacgaggcgtcgggagggtatacagggagcccctcccgtgcatggctgcccccccgttcattttctccaccacagccgcttgcac

SEQ ID NO: 337542 - DNA, 80 bp, Homo sapiens
  chr2:10580386-10580466
  hypo
cgtctcacctgtcctcctacctgtgtgtgggtggacccactcattgttctctgagaatcagagcgagctatacgggattc

SEQ ID NO: 337543 - DNA, 213 bp, Homo sapiens; identical to SEQ ID NO: 331202
  chr2:10587836-10588049
  hypo

SEQ ID NO: 337544 - DNA, 619 bp, Homo sapiens; identical to SEQ ID NO: 331203
  chr2:10588876-10589495
  hypo

SEQ ID NO: 337545 - DNA, 131 bp, Homo sapiens
  chr2:10600737-10600868
  hypo
ccagtcgttggagtcagccacgatgaacggcgtgcgggctgatgcgggagccacacaagcccgtatgcacagaaaagaatgacatccacagccgagacagcagcaatgagggcacatgggaaggatagggc

SEQ ID NO: 337546 - DNA, 291 bp, Homo sapiens
  chr2:10666473-10666764
  hypo
cggctccccgtcccgcctcctcccaccatgccccagaactagcaccccctgagcacttgcttgagccacggtgagatccagaacccggccggagccaggcttcggccaagccgcggccacgctgccatctgacaagcccggggcctgtcccaacaagactgaggcccgtgtggagacaactgcacagtcgtgaccggttgtcctgacagacctgctagcacctcccgaggctgggagggcgctaaggggagctggcctgcctgcccgcctgctgcgggcggcacctccggc

SEQ ID NO: 337547 - DNA, 198 bp, Homo sapiens
  chr2:10742503-10742701
  hypo
cgactgtcgaccatttcccatgatccaaacagagcctaagatacggccaaaggtcagtaaggaatagggattagcaaagcccggatactccaaaaatggaaaacccatttaaaaatgctatcaggtttctagtggaggtgacaatatcaatcattctagcattatgtcccacagtacaattaccgcagaggtcataat

SEQ ID NO: 337548 - DNA, 440 bp, Homo sapiens; identical to SEQ ID NO: 331204
  chr2:10862070-10862510
  hypo

SEQ ID NO: 337549 - DNA, 127 bp, Homo sapiens
  chr2:10925012-10925139
  hypo
agtaaaccaggactgctgcccgcacagcttccctcccgggcactcacctcgccatccctgccgtcccaaggctctctctcaacgatggtagggaaagccccgcctcctacaggtgccgtggagccac

SEQ ID NO: 337550 - DNA, 270 bp, Homo sapiens
  chr2:11965015-11965285
  hypo
cgcgtcatcattggcctgacagcagagagaattgagaagcatttctcccctgccccaccccggggctgacatttctaagcaagataggaagggagcactttctaggctaggagttgggtgcatttgtaccgtgaaaagcattcctcagttgtggcttaatgccagttacgacgctgcctttccggcctgctccagcaagtagctactggttcacgtgcagtttggggctgtgaaacctaggcagaaggcggctgtctgagggctgtcccc

SEQ ID NO: 337551 - DNA, 640 bp, Homo sapiens; identical to SEQ ID NO: 331207
  chr2:12857962-12858602
  hypo

SEQ ID NO: 337552 - DNA, 1979 bp, Homo sapiens; identical to SEQ ID NO: 331209
  chr2:14773829-14775808
  hypo

SEQ ID NO: 337553 - DNA, 426 bp, Homo sapiens
  chr2:15307089-15307515
  hypo
cggcagatacacatgttgcttctgggaacagcattcaactccagatgctttttctgctaaggagcagggccacaggtggccctcacacccagtgctgtgctgcgcggagggctgtactgaaggttctgaaggcctggtgagtccccctcacggccagaaggagagacccggcttcggcttcatggccggcctcccgcaggtgtctgcccagctcctctgcatcccagcgcccttgctggaggctagccaagaggtggtcaacaatacgtggatagaagggagtggagacacacttcaccagcagcttggcatccaggagcagggaaagaagttcttggtcacaattggaatcattcaccttcaagaaataagacaggcacagcgtgagggggtgtttgctttgttcgcctcccccttggatccctc

SEQ ID NO: 337554 - DNA, 98 bp, Homo sapiens
  chr2:15783084-15783182
  hypo
cgtctttctgcccgtcccccgcctcccgactctcacctccttggaggcttacggggctctgtataagtttcccacaaaaaatccgtgctgctgggtgg

SEQ ID NO: 337555 - DNA, 763 bp, Homo sapiens; identical to SEQ ID NO: 331210
  chr2:16081810-16082573
  hypo

SEQ ID NO: 337556 - DNA, 431 bp, Homo sapiens
  chr2:16124561-16124992
  hypo
cgtctccatggcgacgggagcagctgctctgttctgggccttggctgggctgtgcggggcggcctgcccgcctgtctgcctgcccgcccgcctgcccggccgtgggagctgccagcgccttgccctcccgctgcccacaggccctgccaggctgggcgcaagaaagcgtgtttactaacaccatccacacggctccctgggcatggtggctctgcccagaagatgtcaggccgagggcaccgggaggtgggcctggagccaggctgtctgcagcccggagagacagtcccggccggctgctgccctggcctgccagtctctgggcgagcgcaggcactgggggttaagaggcccccatgaggccctttctgaagtgaacgttcccttcctggaatgccttgccagagcctctggaacgttccagccccagc

SEQ ID NO: 337557 - DNA, 646 bp, Homo sapiens; identical to SEQ ID NO: 331213
  chr2:17719770-17720416
  hypo

SEQ ID NO: 337558 - DNA, 108 bp, Homo sapiens
  chr2:20456213-20456321
  hypo
cgtagtgatgctgaacttgctgtatttaaactgtcttcactgtgtaaatcatccgctaatatttatcgggcggtaactaacatgactaattcagaattacacacttcc

SEQ ID NO: 337559 - DNA, 235 bp, Homo sapiens
  chr2:20574714-20574949
  hypo
cggatgaaaagacagtcatttggcagcgaggagcaagcgacgggcctcatcctcactctcgcccggcttgtcctgggccctcctgcggccctaggaattgcctgagggacaaacaaagtggacaaagtcgctgacagacctgagttactgccttggtcctggtgaccctgctccaggcagtccatctctgtctgcgatccattgatcctggcgccactcctggtgcttcattatc

SEQ ID NO: 337560 - DNA, 889 bp, Homo sapiens; identical to SEQ ID NO: 331225
  chr2:20646879-20647768
  hypo

SEQ ID NO: 337561 - DNA, 2006 bp, Homo sapiens; identical to SEQ ID NO: 331226
  chr2:20865462-20867468
  hypo

SEQ ID NO: 337562 - DNA, 843 bp, Homo sapiens; identical to SEQ ID NO: 331227
  chr2:21022199-21023042
  hypo

SEQ ID NO: 337563 - DNA, 411 bp, Homo sapiens
  chr2:23546914-23547325
  hypo
cgaggtggccaccagtcaccaggcgttctcaggattctctttcagtttgagaggccacccttatttggataaacatgcgtaccgaattcaagaggcactaataccacggtgcgatgaagtgaaaaggcaaacacgcggagtgccagatctcccaacacaaacatggtcccaagcctggcgcacctggattgggcttgggatttttaagccaacaaatggggtgggagacagggaaagagagggccgggaagaaaaaccacaggctcccagaatccaaaggaaagtggcatcctcacccgatgagcagggtctggcacagggctgagcacatgacagccagtaagtctctgctgaaggatgcctgaaatctgcgcggttctaccaccgaaactaatcccgactatgtctccc

SEQ ID NO: 337564 - DNA, 314 bp, Homo sapiens
  chr2:23785024-23785338
  hypo
cgggctctgtttccctgtgagaagccgcctcggcccaccgagatgtcccggcaccatagccgcttcgaaagagattaccgggtgggctgggaccgccgcgaatggagcgtcaacgggacgcatgggaccaccagcatctgcagtgtcacctcgggggccggtggcggcacagccagcagcctcagcgtccggcccggcctcctgccgctgcccgtggtgccctcccggctgcccaccccggctacagctcctgctccctgcaccaccggcagcagcgaggccatcaccagcctcgtggccagctctgcgtctgc

SEQ ID NO: 337565 - DNA, 321 bp, Homo sapiens
  chr2:24584025-24584346
  hypo
tagtcacactccgccgagcagtaggaagactctgtccccatagagcatagcacgacgaagctaaactttcctccccacccctcgccaagggacaggcgaagctcctactcagaatttgtctcttttctcccctcccggttcctggtctcctcacaaaagaccagacttcaactcaagccgccaccgtatcccaaaaccccaaaggtttgcccttgacaagaagcttcttcaaggggaaaggctttcttttgattggggtgagggaggagttagtgtttcctaatgaacgtaaccaaatgtcggcctggcacagtggctcac

SEQ ID NO: 337566 - DNA, 242 bp, Homo sapiens; identical to SEQ ID NO: 331230
  chr2:24714925-24715167
  hypo

SEQ ID NO: 337567 - DNA, 495 bp, Homo sapiens
  chr2:25044265-25044760
  hypo
gtgaacctccccacccgaattgcctcagttgtcctgagcctcatgtctctcctggtggtgggccaggcccctgcatgggaagggagcctgctgcggggcaggccagctgggggtgctcacctatgcgcagcatgaagttattgaaggactggttgttgatgttggtgagcgtatccttcatggccagcgcgaagtcggccaggtcagccaggtgctgccagcgctctctctcggacttgtcttcctgtgccaggggaccgtggagaaagtgtcaggggccgctcactgcagcagcctgctctgctgccttccctggcagtgttctgggggtggattccctacacctagatgttcaaggccttacttttcctcccacaaaggagtcgcagccacgctagctctgacttgccactgtgacaaagttcacgtagcaggtctaggcaaagactgggcaattgagcagaggagacggacctgtgagtctgaccacgaggc

SEQ ID NO: 337568 - DNA, 185 bp, Homo sapiens
  chr2:25047277-25047462
  hypo
cgtgccacgtgctcaggcaacatgttggtgaccaaggcctcgttccagcgtcgcatctcatagacacgttccttctggtcgtggacctcaatcttccacaagaaaagtgtccgtgccagtttttctacctacagacacagacaaggcgaggcatgtgctctaagctggccactggatagaaggat

SEQ ID NO: 337569 - DNA, 252 bp, Homo sapiens
  chr2:25075413-25075665
  hypo
cgtggcaaagcccggcctcagagcaggcatgagtggccaccgtgtactcagaaagtactcaactgggctgagcgtgagaggcctgatgccaggacagccccggacctcgacagaggcctgctgctccccaacacccccagcagacgcctgcctgcctctccacggccaggagccgctgcccgaggacccgagctgccaacgcccgcggaaacttgggttgccctcgtcactgccacacagagtggccgagcc

SEQ ID NO: 337570 - DNA, 743 bp, Homo sapiens; identical to SEQ ID NO: 331233
  chr2:25391013-25391756
  hypo

SEQ ID NO: 337571 - DNA, 455 bp, Homo sapiens; identical to SEQ ID NO: 221692
  chr2:25438912-25439367
  hypo

SEQ ID NO: 337572 - DNA, 93 bp, Homo sapiens; identical to SEQ ID NO: 331235
  chr2:25464444-25464537
  hypo

SEQ ID NO: 337573 - DNA, 101 bp, Homo sapiens
  chr2:25623195-25623296
  hypo
cgcactgtgcaaatgcacctcgtctcaaaagcacagatgggctttatgttcagagaggcaggcccttctccatggagactgctgaacactccgctcaacgc

SEQ ID NO: 337574 - DNA, 160 bp, Homo sapiens; identical to SEQ ID NO: 221708
  chr2:26395433-26395593
  hypo

SEQ ID NO: 337575 - DNA, 116 bp, Homo sapiens
  chr2:26524687-26524803
  hypo
cgaaagggaatggcagtcggagtcgtaactcagctgggctcttagcatcggccggtaacacacttatccaagagactggacttggtggccttaggttggccccactgcctcagggc

SEQ ID NO: 337576 - DNA, 35 bp, Homo sapiens
  chr2:26688538-26688573
  hypo
cgtggagtaggtctgggcgatgccgcaggtggcgc

SEQ ID NO: 337577 - DNA, 446 bp, Homo sapiens
  chr2:26986225-26986671
  hypo
cggaaggcacggatttttggagactggagaacccaagcgcaaatccctaccccactgctcaccagcaggttcttaagcaaatcactctgcttcgctgaatttactgtcctcagctataaaatggtgtcctcggcaactggagctagatgccttcgccactttgctgaaagatatgaactgtgcccaaggtgggcggtatcagataggagccccgaagtggaaacgtccagcgtgggaatctcctctctacagggtccccaaggaactcccggcaggcccacttcagggctcctttctgacaccgcccagctcaacctctcaaaacgattcacaaaatgctgtaatagccacgatgcaccctcactgcactgtcccatccgccccttttacaaataggaagacccaaagataaaaataagaaaccaaggccaggcgcggtggttcac

SEQ ID NO: 337578 - DNA, 99 bp, Homo sapiens
  chr2:27007597-27007696
  hypo
cgtgagccaccacgctcggcaagatggagtttcgccatgttggccaggttggactcgaactcgaactcagtggttccgaacaacttggcctcccaaagc

SEQ ID NO: 337579 - DNA, 862 bp, Homo sapiens; identical to SEQ ID NO: 331242
  chr2:27070281-27071143
  hypo

SEQ ID NO: 337580 - DNA, 206 bp, Homo sapiens
  chr2:27303557-27303763
  hypo
cgtacagggaggaataaagaggcctccttctgcctctgccaggtaccgccgcttcctccgccctcgctaccgtgtggcctacaagacagtgaccgacatggagtggaggtgctgtcagggttatgggggcgatgactgtgctgagagtcccgctccagcgctggggcctgcgtcttccacaccacggcccctggcccagcctgccc

SEQ ID NO: 337581 - DNA, 424 bp, Homo sapiens; identical to SEQ ID NO: 331245
  chr2:27308893-27309317
  hypo

SEQ ID NO: 337582 - DNA, 135 bp, Homo sapiens
  chr2:27433190-27433325
  hypo
cgctatggtctcgcatctctccagaaagagggcggccaaaagcaagagctagctgttgtttcactacaactataacatgccaaggcacaaacagcagattgtgggacccccccccctttttttttggagacggag

SEQ ID NO: 337583 - DNA, 771 bp, Homo sapiens; identical to SEQ ID NO: 331248
  chr2:27484883-27485654
  hypo

SEQ ID NO: 337584 - DNA, 226 bp, Homo sapiens
  chr2:27668586-27668812
  hypo
cggttttccaaccctgtgcccttaccggtacatgctgcttagctgggagtggcacctcaaagggaatgtctgtatcctgaaaatcagagtggtcaaggccatctagagtcccttcctcgattgcctgcagtagagtgggcaaccatgaactaggcacagctcgcgactggcaaaaacctccaccctcggggcacagcttccctactcacatcggtcaggtccaaaa

SEQ ID NO: 337585 - DNA, 338 bp, Homo sapiens; identical to SEQ ID NO: 331249
  chr2:27938267-27938605
  hypo

SEQ ID NO: 337586 - DNA, 225 bp, Homo sapiens
  chr2:28065720-28065945
  hypo
cgggatatcggaaatgctactcatgtttttttttttaccctgtttgcaaggttttctaacattatcaagaaccacaagactgtgaatctcacagatggaagaaagaatattttacgacagaaagagtattgctttgcttaacttaaaaggttaactttaattaagacagcgataaaagcttttatagaaagaatgacaaatatgtataattacctccactcctgc

SEQ ID NO: 337587 - DNA, 725 bp, Homo sapiens; identical to SEQ ID NO: 331250
  chr2:29033285-29034010
  hypo

SEQ ID NO: 337588 - DNA, 1182 bp, Homo sapiens; identical to SEQ ID NO: 331251
  chr2:29337909-29339091
  hypo

SEQ ID NO: 337589 - DNA, 1227 bp, Homo sapiens; identical to SEQ ID NO: 331252
  chr2:30143623-30144850
  hypo

SEQ ID NO: 337590 - DNA, 1380 bp, Homo sapiens; identical to SEQ ID NO: 331253
  chr2:30453530-30454910
  hypo

SEQ ID NO: 337591 - DNA, 1529 bp, Homo sapiens; identical to SEQ ID NO: 331255
  chr2:31360231-31361760
  hypo

SEQ ID NO: 337592 - DNA, 75 bp, Homo sapiens
  chr2:31550134-31550209
  hypo
cgttcttgcgctagaaaatttctattttgtagagagattgctatcgcacacttactacaaaggaccgacgttatc

SEQ ID NO: 337593 - DNA, 34 bp, Homo sapiens
  chr2:32367753-32367787
  hypo
cgtgcccggccagaaatcgaaaatttctagaaac

SEQ ID NO: 337594 - DNA, 284 bp, Homo sapiens
  chr2:37035304-37035588
  hypo
cggagaagcataaatgtgaagctgacaccagagatttaatttctccctatgaatttgcttagcagacagctttccactaacgcaggcagggactcagctgagggagtaggactgagtccagcgataacccgggggcttcgcctcagtgagtggccgctgggtgaaccgagatggaagaacacggtaggagggctagtgcagaaaacaagggcctgcttgcttcttcacctgccccgggggatcaagcctaatggtgacactggaggatttgaccctgacgtggc

SEQ ID NO: 337595 - DNA, 125 bp, Homo sapiens
  chr2:37287740-37287865
  hypo
cgaccttccaaagttacctgccaggtaaaagaatcgcctcgggccttctcagcttccaattcctttaaggaacgtgggaaaacatttcgccacaataacaacatcttgggcagatggtaacgaac

SEQ ID NO: 337596 - DNA, 810 bp, Homo sapiens; identical to SEQ ID NO: 331258
  chr2:37899247-37900057
  hypo

SEQ ID NO: 337597 - DNA, 203 bp, Homo sapiens
  chr2:38742658-38742861
  hypo
cgcaggcgcacacctccacttgttatataaactgtttgtgtaagttcatacttgacttggagccacagttgtctgtaaaaggtataactgccctgttaacactgcgcaccagacacatggctctggggctcggctcgcctgaaatggcttgtcatggtaggcgcgcaggcgcccagagaaagagcgagcgagtcagagctgtc

SEQ ID NO: 337598 - DNA, 287 bp, Homo sapiens
  chr2:38762353-38762640
  hypo
cggtccaggccttggccagggaagcatccatggacttgggcgttcgttgcagaatgttcagacaggtctggatgaggggtgaggccctgccttggaggggctgccctccctctgtggcacggaagccctgctgcctgtgacaggaggcgactgcacctcacccgcggcctgtatgctgcaggacccagcgaagagcttccttagcttgcagctgtgcagacactaggaaagggagcacctaccagggagatttgccttcttggtccggtagcaaatgcagtcccgcc

SEQ ID NO: 337599 - DNA, 224 bp, Homo sapiens
  chr2:39186687-39186911
  hypo
cgcaggtggtgaggagggtcagggcttccacgcggggtgatgacagtccctggcccgcaggccatttcccagaagctcagacaataccttcgggcctccgctcgacggactgccttgtccactctccgcctgggaacgggggttcgtgggagcgccttagtggaagtttgtggagctcgggaggtggcatgcacaggcgcctcggagcgcggccccgaggggcg

SEQ ID NO: 337600 - DNA, 119 bp, Homo sapiens
  chr2:39188224-39188343
  hypo
cgtttctatgttgagaatatggaacacggtgcgccagcctactccacttcttcccggcagcattcttgcttgtagctagggaggaggcaagttgccctagctcaaggtagactcgctgc

SEQ ID NO: 337601 - DNA, 199 bp, Homo sapiens; identical to SEQ ID NO: 331262
  chr2:39663585-39663784
  hypo

SEQ ID NO: 337602 - DNA, 250 bp, Homo sapiens
  chr2:39944194-39944444
  hypo
cgtatgatttgaaccggctcccaaagctaatttatagcctgcctgctgatgtggaacatggttacagctggtccatcttttgcgcctggtgcagtttaggctttattgtggcagctggaggtctctgcatcgcttatccgtttattagccggaccaagattgcacagctaaagtctggcagagactccacggtatgactgtcctcactgggcctgtccacagtgcgagcgactcctgaggggaacagcgc

SEQ ID NO: 337603 - DNA, 761 bp, Homo sapiens; identical to SEQ ID NO: 331264
  chr2:40678936-40679697
  hypo

SEQ ID NO: 337604 - DNA, 1609 bp, Homo sapiens; identical to SEQ ID NO: 331265
  chr2:42274305-42275914
  hypo

SEQ ID NO: 337605 - DNA, 1341 bp, Homo sapiens; identical to SEQ ID NO: 331266
  chr2:42720186-42721527
  hypo

SEQ ID NO: 337606 - DNA, 160 bp, Homo sapiens
  chr2:43408183-43408343
  hypo
cgctgggtgccgcaggtacaatggtgaacgacacagacccaatccctgccctgggagagtgaatcatctagcaacggagacaaatattcaatacacacccaacgcatagttagtgagtattgcagagagtgaagggtgcgatgggatcagatttcccagc

SEQ ID NO: 337607 - DNA, 70 bp, Homo sapiens
  chr2:43413645-43413715
  hypo
cgcttctaacagagtcccaggtgacgcccatctgacactcggagtctcatgggaccgagaagaccttagc

SEQ ID NO: 337608 - DNA, 1704 bp, Homo sapiens; identical to SEQ ID NO: 331270
  chr2:43451134-43452838
  hypo

SEQ ID NO: 337609 - DNA, 138 bp, Homo sapiens
  chr2:44126077-44126215
  hypo
cgaaactcgctgccccatacctacccccgcaccacccgccgctccccgctacctcaattctaaagacatttctagtttgatctggcatctttaaaaccagtaacctaaaatctaccatccagtccttgtcctgcaacc

SEQ ID NO: 337610 - DNA, 178 bp, Homo sapiens
  chr2:44497628-44497806
  hypo
cgcagcaaagaaagaatgaagcaacaaaagaacgaaagcagctctctcggctttcggctcggaggaggccaaggtgcaactttcttcggtcgtctcgaatccgggttcatccgacaccagccgcctccaccatgccgccgaagttccaccccaatgagatcaaagtcgtatacttcac

SEQ ID NO: 337611 - DNA, 686 bp, Homo sapiens
  chr2:44553759-44554445
  hypo
cgctgtgccagcccaaaaacatttttcttagagtagcctatggcttcacacctcccccattctataaacagtagagacagagcgtactcacctccaaagtcaccgctctcaccagctctggattagaattacacaatgctcctgcaagcacccctccagcactgaaagcagtcagggttgttagacttggctgagaaaagccttggccatgaagcgtcttaatgcaagcctctaaatcagcaaggccattgagttttttagttaggcggccatcagcgtgccactggaggcctaactcaccaccacctctgaaattgaagggcaaaaaagttttagtggaaaaaaaaagttaatactgtaggctggggtcagcgaactacacctggaggcctgttttttgtgtggccctggagctaagactggtttttgctttttaaaggttgagtgaaaacaaggaatgtgcaacagaaactgtacgcggcctgcaaagcttaaaatgtgactatgtagctctttagagaaaaaggtttgccaactcctgatatagacaatccagaattgattcaacgaatatattttgagtgcctgcccatttatcagggattaagtacagaccttaaaagtagaaacaaacgaaaatcccctaccgtggagaagacagtaattttgtggggtaagaaaacaac

SEQ ID NO: 337612 - DNA, 354 bp, Homo sapiens; identical to SEQ ID NO: 221734
  chr2:45029730-45030084
  hypo

SEQ ID NO: 337613 - DNA, 881 bp, Homo sapiens; identical to SEQ ID NO: 331286
  chr2:45240827-45241708
  hypo

SEQ ID NO: 337614 - DNA, 134 bp, Homo sapiens; identical to SEQ ID NO: 250554
  chr2:47200521-47200655
  hypo

SEQ ID NO: 337615 - DNA, 156 bp, Homo sapiens
  chr2:47598322-47598478
  hypo
cgttattcaaatgttagacatgtagtttgatttcagtttctcttaactgtggaataaacaacttggctgccgtctctctctctctcttttttttggaaacagtgtctccgtctgtcgttcagcctggagtgcagtggcacatttacatgtcactgc

SEQ ID NO: 337616 - DNA, 73 bp, Homo sapiens; identical to SEQ ID NO: 331292
  chr2:47656947-47657020
  hypo

SEQ ID NO: 337617 - DNA, 759 bp, Homo sapiens; identical to SEQ ID NO: 331293
  chr2:47747991-47748750
  hypo

SEQ ID NO: 337618 - DNA, 2379 bp, Homo sapiens; identical to SEQ ID NO: 331294
  chr2:47796765-47799144
  hypo

SEQ ID NO: 337619 - DNA, 42 bp, Homo sapiens
  chr2:54343989-54344031
  hypo
cgactggctattttaaagagcaggcgtacgagctcaagtggc

SEQ ID NO: 337620 - DNA, 229 bp, Homo sapiens
  chr2:55289053-55289282
  hypo
cgagaccctagcaaggcaaacacacaaaaacggctggacgttgagagaagcacattggcggaggaacacacaagcggttggatttcgagaggacatcaagagcacgtcaagagcacgtcaagagcacacggacaggcactggcacgccggcaggtcattgaccggcagaacagagtttggccagggctgtcagagaagagtcgggccgccaagcagcccgacttccagc

SEQ ID NO: 337621 - DNA, 61 bp, Homo sapiens
  chr2:55391637-55391698
  hypo
cgagctccttctaagcgcgtgtttacgatggctccgactcatgccttaaaaaaaaaaaatc

SEQ ID NO: 337622 - DNA, 121 bp, Homo sapiens
  chr2:60598584-60598705
  hypo
cggctccgttgactccccacacccaagacccacagccacaggacacgggcttctctggtccacttagccctcgtcagcgccaacagttctaatgattccagggtccttcgatggccctccc

SEQ ID NO: 337623 - DNA, 430 bp, Homo sapiens
  chr2:60706396-60706826
  hypo
cgtggggactcagcctatggacacctggcctctgcgggcacagcggccacacaccacggtgggacccggagaccattttttgttttgagtctctctaagactgcttgggaaatgaggtctctcaggtctagcatttccacgcagtcccaaccatgaggctgaccagaggccaccaacgtcaagctctctcaggtctactaggaacaggaaagaataactctcccttaacaagcccctcaggctgaaatccttttgcttccagggcctcaaccttctactgctgggtagaaagccccctctgtcaccggcccacagatctcagctgccatcgcactcaaaccctgtcaggcggtggagagtgtggacggcaggctgacgcggtttcaaagaggccgaccaggcaagaaccgtcctgtactcctgccccagc

SEQ ID NO: 337624 - DNA, 1067 bp, Homo sapiens; identical to SEQ ID NO: 331305
  chr2:60783811-60784878
  hypo

SEQ ID NO: 337625 - DNA, 128 bp, Homo sapiens
  chr2:61074853-61074981
  hypo
cgaacacactcgcacacacgtgtgcacacacgcttgctgttattattaatcttgtttattgcttgttttcctcaatagaacgtacatggcatgagcgctgcagggtttttgtgatttcagttcactcc

SEQ ID NO: 337626 - DNA, 424 bp, Homo sapiens; identical to SEQ ID NO: 331311
  chr2:61175661-61176085
  hypo

SEQ ID NO: 337627 - DNA, 90 bp, Homo sapiens
  chr2:61505031-61505121
  hypo
gctttcgcttggttctcattctttttttgcctgccgccatccacataagatgcgacttgctcggacttgcccggacttgccttccggcac

SEQ ID NO: 337628 - DNA, 66 bp, Homo sapiens
  chr2:62116634-62116700
  hypo
cgcgcccacccggaggtgccctcctttaactccggctggatctatccgcgaggtggggtgggcgcc

SEQ ID NO: 337629 - DNA, 37 bp, Homo sapiens; identical to SEQ ID NO: 208008
  chr2:62497692-62497729
  hypo

SEQ ID NO: 337630 - DNA, 92 bp, Homo sapiens
  chr2:64538788-64538880
  hypo
cggtgtaattagaagctgcaagtggatacacatgagggcgtaatacctgccgtcacgcagctgagagcgctcggggcactctggaagaaagc

SEQ ID NO: 337631 - DNA, 125 bp, Homo sapiens
  chr2:64835519-64835644
  hypo
cgaagtgagctgttaaaagtcaccatctaaggagctgtgctggggatagaacacgggtggctacgccgggcatggtggtgcgcacctgcagtcctggctgctggagaagctgaggcggaaggatc

SEQ ID NO: 337632 - DNA, 582 bp, Homo sapiens; identical to SEQ ID NO: 221779
  chr2:64836250-64836832
  hypo

SEQ ID NO: 337633 - DNA, 99 bp, Homo sapiens
  chr2:65251127-65251226
  hypo
cgagcccctaagtcagggcaggcatgctcagggggcagtgctaccgccggagctgctgtcgctgatccttttgcggccacctgcttgcaactgggaagc

SEQ ID NO: 337634 - DNA, 951 bp, Homo sapiens; identical to SEQ ID NO: 331322
  chr2:66660936-66661887
  hypo

SEQ ID NO: 337635 - DNA, 126 bp, Homo sapiens
  chr2:67626117-67626243
  hypo
cgaagtgccgcgtggatttttatgtgaaacaagcatttctgttacggttcaggtaattatctctgggaaaaaaaattatcttggactataaaagttagtctcagctatttgaccttggggtcttac

SEQ ID NO: 337636 - DNA, 163 bp, Homo sapiens
  chr2:68486689-68486852
  hypo
cgtttgcatgtcctttacttctgttgtttccacgagaagaaaatactctgaacattgcgctattgtttttgagcaagcctgttctctcttttgcctgactctggacactgcataattgtttaatggcgtaaatggaatagcttaattctaaaagatccttggc

SEQ ID NO: 337637 - DNA, 1030 bp, Homo sapiens; identical to SEQ ID NO: 331327
  chr2:68546319-68547349
  hypo

SEQ ID NO: 337638 - DNA, 505 bp, Homo sapiens
  chr2:68672378-68672883
  hypo
cgaaaacccacaccaaaatcatcaccagcgtgcacatctgttcccttgttgagatttaatcactgaagagcaggtggaagccgtcctgaacgaattaccccatgtacctagaagcctcttcccaaatcaagcagtgatcacctcactcataaacagagcacgcacccaaaggttttgcttgatgtattttgagactagtttcacgtgttgctgctaaacgtttccagggagttgcaaaagttaatccttatggatcggtgattgaaatacagtgacatccctgctgctctgcagtgtgcgcaaaggtcaaatcaaaataacaaacacgcacgacgtcttcgatcaccttcctgtaaaaccgggtttctagccggacccatgtcctcacagttcctgaatcaagttcaccgtctgtgcaagcgccacctgacagagctccctgcgacactgaaacgcgtttgggcacttcccacgtgggaaccactcgccacgggcacctcctgag

SEQ ID NO: 337639 - DNA, 122 bp, Homo sapiens
  chr2:69928507-69928629
  hypo
cgtgtccctcccgctagcaaacaccattctattttctatctgtatgattttgactactctggctaccttgtaaaagcggaatcatttgtctttttgtgactggcttatttcacttagcgtaa

SEQ ID NO: 337640 - DNA, 205 bp, Homo sapiens
  chr2:70165952-70166157
  hypo
cgcccttcacaccgcgcatgctcattcccccgacgcgccgcgtgtggatgggagcagtatttctcactttaaaatggacaccttgatagtgtgtctctggggttgcacagctcatcaaagttccaaattgtttgttctcacaaacaaaacggtacaatctatttttgtgcgatgttcttgggacctcgctgtgttctgctatctc

SEQ ID NO: 337641 - DNA, 224 bp, Homo sapiens
  chr2:70224820-70225044
  hypo
cgatggcactgaaccacagatgagcaacagaatgacctggggaggcatttaaaatctagatcctgactcagttgatctggccgggtcaagcatgtgtatttttgcaaaagtgccccaggtgattctgacacatactcctagttaagaaccacggttacggccgcctcttcctcatcgttattaataacaagagaaacaacaattgacattttttgtgcacttac

SEQ ID NO: 337642 - DNA, 620 bp, Homo sapiens; identical to SEQ ID NO: 331329
  chr2:70351179-70351799
  hypo

SEQ ID NO: 337643 - DNA, 280 bp, Homo sapiens; identical to SEQ ID NO: 331330
  chr2:70369049-70369329
  hypo

SEQ ID NO: 337644 - DNA, 889 bp, Homo sapiens; identical to SEQ ID NO: 331332
  chr2:71503428-71504317
  hypo

SEQ ID NO: 337645 - DNA, 125 bp, Homo sapiens
  chr2:72310184-72310309
  hypo
cgcgggctgaggcttgcacacagtcagattcccgcgcagcacgtgcacaggtgtgcccaggggcgagcggtgtttgaagtgcttgggacaggatggtcggaggaaggcgtgcgctgagcttgaac

SEQ ID NO: 337646 - DNA, 346 bp, Homo sapiens
  chr2:72359340-72359686
  hypo
cgggtgggtcttgggttagactgtggcgctcagcatggcctccgtctccggcaggatctcgttctggttggagtccaggccaaagaacttgacgctgaggccatccacggggtgcaggacggggaccaaggtgatgcgggggaaggtccgtgtggccagctcaaagcggctggtgctagccagctccaccgccagcaccttcaggaacagcttggccaggtgcttgcccaggcaggtccggacaccgccaccgaacgggaggtaatggaagcggccatccttgtcctcgctccgcgcctggctgaagcgatcggggtcgaacacgttcacgtctttgaacacgggc

SEQ ID NO: 337647 - DNA, 943 bp, Homo sapiens; identical to SEQ ID NO: 331335
  chr2:72374248-72375191
  hypo

SEQ ID NO: 337648 - DNA, 695 bp, Homo sapiens; identical to SEQ ID NO: 331337
  chr2:73052644-73053339
  hypo

SEQ ID NO: 337649 - DNA, 1976 bp, Homo sapiens; identical to SEQ ID NO: 331338
  chr2:73143917-73145893
  hypo

SEQ ID NO: 337650 - DNA, 133 bp, Homo sapiens
  chr2:73493622-73493755
  hypo
cgcccccacctccacggcccaggctggcgctgggcgtgctgccacagctgctgctgatgacctgcagctgccgctcggcacggtcagcccgctcaaggagctcctcaatgaactgctgcagccgcagcttggc

SEQ ID NO: 337651 - DNA, 944 bp, Homo sapiens; identical to SEQ ID NO: 331344
  chr2:73520107-73521051
  hypo

SEQ ID NO: 337652 - DNA, 477 bp, Homo sapiens
  chr2:74152840-74153317
  hypo
cgctccagtagccattaacgccccaccctggttatccttaaaaaattcgattaaaaaaaaagttcttaatatataaacatgacctcagccatcctatatatacatcaacataagaaaaaggtcccgtgctttttatgggaacagcttcaagacaggtatcccagcccccggcccctccccagcccccttgcaatcagatccttgtcttctaaaacctgccacacctaagagcgctgcctgaaggccggtttggcctgttgactcctggttttgactgttggtgatttaagcgattggaactggaagcaccatttgacaacattttgtaaatcattacttctgaggttgttatgacgacggggtgtggcagtccggcttcacctgtggcagcagcttaggtccctgccctcctgcagagcacacttcaccgacagcaggactcaggttttatacaagtctctactcgccattgcttac

SEQ ID NO: 337653 - DNA, 228 bp, Homo sapiens; identical to SEQ ID NO: 331345
  chr2:74211299-74211527
  hypo

SEQ ID NO: 337654 - DNA, 218 bp, Homo sapiens
  chr2:74327579-74327797
  hypo
cgcagaaccacttcagctccttcaagtacagcggcaacgcggtggtggagagctactcggtgctgggcaactgccggccctccgacccttacagcatgaacagcgtgtactcctaccactcctactatgcacagcccagcctgacctccgtcaatggcttccactccaagtacgctctcccgtcttttagctactatggctttccatccagcaacccc

SEQ ID NO: 337655 - DNA, 998 bp, Homo sapiens; identical to SEQ ID NO: 331347
  chr2:74425444-74426442
  hypo

SEQ ID NO: 337656 - DNA, 186 bp, Homo sapiens
  chr2:74454119-74454305
  hypo
gaggatccagagcaccgccaggcagaggatctgcaccagggtgaagaggtggatccggcgcagcggcacgtgccgcaggaaggcatggtccggctggtgcttggctggcatcaggaagagcttgcagcgttcccagaactagggggacagcgggggctcagccaggcagccagaccccgagggccc

SEQ ID NO: 337657 - DNA, 659 bp, Homo sapiens; identical to SEQ ID NO: 331351
  chr2:74740635-74741294
  hypo

SEQ ID NO: 337658 - DNA, 1488 bp, Homo sapiens; identical to SEQ ID NO: 331352
  chr2:74741301-74742789
  hypo

SEQ ID NO: 337659 - DNA, 786 bp, Homo sapiens; identical to SEQ ID NO: 331354
  chr2:74781700-74782486
  hypo

SEQ ID NO: 337660 - DNA, 1884 bp, Homo sapiens; identical to SEQ ID NO: 331355
  chr2:75060920-75062804
  hypo

SEQ ID NO: 337661 - DNA, 111 bp, Homo sapiens
  chr2:85280296-85280407
  hypo
cggagcgccagtccatggaaagcgagcgtgcagaccgcagcctgtttgtccaagagctccttctgtccactttagtgcgtgaagagagctcatcctcagatgaggatgatc

SEQ ID NO: 337662 - DNA, 104 bp, Homo sapiens
  chr2:85356682-85356786
  hypo
cgtgagccactgcgcctggcccttatgatctttttcaaccacttaaaaatgtaaaaaaagcggccgggcgacgtggctcacacctgtaaaaccagcacttgggc

SEQ ID NO: 337663 - DNA, 839 bp, Homo sapiens; identical to SEQ ID NO: 331361
  chr2:85360795-85361634
  hypo

SEQ ID NO: 337664 - DNA, 104 bp, Homo sapiens
  chr2:85776352-85776456
  hypo
cgggcaaattattttacctctcagcctaatgtaataatgcaggtaacactgctcacgcggtgtgttgcacatagcaaacacttgggaacagttagctattcatc

SEQ ID NO: 337665 - DNA, 74 bp, Homo sapiens
  chr2:85819578-85819652
  hypo
cggtgtttgagatgagtcaggctgggagggttccacggcaggtggtatagaaagagagcagacaaggccgggcg

SEQ ID NO: 337666 - DNA, 198 bp, Homo sapiens
  chr2:85871996-85872194
  hypo
cgtttgtgtaggacagtttccttaacctcacagcctttgtctgattattccggctttattttaaccattaacagaaatgtggatctgagagaatacttgtctgaagaagtacaagcagtacacaagaataccacctatgacctcattgccaacatcgtgcatgacggcaagccctccgagggctcctaccggatccac

SEQ ID NO: 337667 - DNA, 95 bp, Homo sapiens
  chr2:85878703-85878798
  hypo
cgtgcgtgcgtgcgtgtgtgtgtgtgtggtggtatgaggtacagccacctgtcttggagaggatattttgacataactctatactgttgacttcc

SEQ ID NO: 337668 - DNA, 453 bp, Homo sapiens
  chr2:85890530-85890983
  hypo
cgctgctgttcccggcctgggtggtcacggacatgcagaggtggcactcagagtctcgcggcagccattctcctgtcggcgaccctggagatgtgagcattagggggaaagcaggcaaggccaccctacagaggtgtttggtttctgtcctccttggtgcattgcagtgggaccacagagggagagggtcatgcagtggcagggtagggggaggaggagagcaggcattgggctaaggagtgggcagtgggctcacttgggccagcgctgtcatccatggagcaccggaggacgaggcggcagaccagctggggcagcatgcggcccagcagcgtgtcgagcaggatgacggagtagcgctcagccaggcactggcagatgccgcccgccaccagaggtaccacgcggcacacctgggccactgccacagctagcgcaccctggggcgggggc

SEQ ID NO: 337669 - DNA, 64 bp, Homo sapiens
  chr2:86914559-86914623
  hypo
cgaaaatgaaaagttttctctctcaataccattagtcaacgtattgatgatacatgccataaac

SEQ ID NO: 337670 - DNA, 1054 bp, Homo sapiens; identical to SEQ ID NO: 331362
  chr2:87017505-87018559
  hypo

SEQ ID NO: 337671 - DNA, 86 bp, Homo sapiens
  chr2:88591078-88591164
  hypo
gccactgcactccagcatgggcgacagagcaagactcagtaaataaataaaacaaaaaaagcatgcacgcacaaagcaacaaaaac

SEQ ID NO: 337672 - DNA, 1736 bp, Homo sapiens; identical to SEQ ID NO: 331366
  chr2:88751286-88753022
  hypo

SEQ ID NO: 337673 - DNA, 69 bp, Homo sapiens; identical to SEQ ID NO: 250776
  chr2:88990234-88990303
  hypo

SEQ ID NO: 337674 - DNA, 747 bp, Homo sapiens; identical to SEQ ID NO: 331367
  chr2:89064675-89065422
  hypo

SEQ ID NO: 337675 - DNA, 1248 bp, Homo sapiens; identical to SEQ ID NO: 331371
  chr2:95690867-95692115
  hypo

SEQ ID NO: 337676 - DNA, 247 bp, Homo sapiens
  chr2:95941663-95941910
  hypo
tgctgcctgcccaggtggtgcggtacgaggcgggctacgtggtatgcgctgtgatcgcgggcctctacctgctgctggtgcccactgccgggctttgcttctgctgctgccgctgccaccggcgctgcgggggacgagtgaagacagagcacaaggcgctggcctgtgagcgcgcggccctcatggtcttcctgctgctgaccaccctcttgctgctgtaaggcgctgcccagggcccgggtagggc

SEQ ID NO: 337677 - DNA, 1410 bp, Homo sapiens; identical to SEQ ID NO: 331372
  chr2:96011320-96012730
  hypo

SEQ ID NO: 337678 - DNA, 248 bp, Homo sapiens; identical to SEQ ID NO: 331377
  chr2:97203334-97203582
  hypo

SEQ ID NO: 337679 - DNA, 701 bp, Homo sapiens
  chr2:97427378-97428079
  hypo
cgcatcgtgcagaactgtggcaccgagaaggagaggcgctatgcccgcaagattgagcccatccggcgcaagggcaactaccttctctgctcgttgctcctagggaacgtgctggtcaacacctccctcacaatccttctagacaacctcatcgggtccggcctcatggcggtggcctcctccaccattggcattgtcatctttggggagatcctacctcaggccctgtgctcccgacatgggctggctgtgggtgccaacaccatccttctcaccaaattctttatgctactcaccttccccctcagttttcccattagcaagctcctggacttttttctgggccaggagattcgcactgtttacaaccgggagaagctgatggagatgttgaaggtgacggagccctataatgacctcgtgaaagaggagctcaatatgatccagggtgccctggaactacggaccaaaactgtagaggatatcatgacccagctccaggactgcttcatgatccgcagcgatgccatcctggacttcaacaccatgtcggagataatggaaagcggctatactcgcatcccggtgttcgaagacgagcagtccaatattgtagatattctctacgtcaaagacttggcctttgtggaccccgatgactgcacccccctcaagactatcactcgcttctataaccaccc

SEQ ID NO: 337680 - DNA, 278 bp, Homo sapiens
  chr2:97435378-97435656
  hypo
cgactccttgatggagacgaagagaaccaagggggcacgctattcgggagcctccttggagggtcagatggggtgaagaccatgcacagactgtgggatgggaccttaggctgtggggtgcccagcgagagcagcctcggacaagtggtgcccgaaggcagctttgcaccggttctccgtcagccctgcctggtaatagcctcaatatggtgatttgatctcaagaagctgcctgggggcaggtgtatctgagagtgacaggagctggttaatactcc

SEQ ID NO: 337681 - DNA, 182 bp, Homo sapiens
  chr2:97437988-97438170
  hypo
ttacacaccccatgcgcgcacacacactcatacccccacataggcacaggcaggctctactcccacccgtgcgcacacacactcatacccctcacataggcacaggcaggtgctcacacacacgtgcgcacacacactcatgccccccacgtaggcacaggcaggcgctcacacacacatgc

SEQ ID NO: 337682 - DNA, 158 bp, Homo sapiens
  chr2:97530642-97530800
  hypo
cggtcagccccgctgggccagcagggctcccagggcccaccgctgtgagactcggtaccttgcagacacgggccacacgagccaccacctgctcggcatagcagtcggactccactgcccgctccctgaagaagaagtagaccttgtcgtcgtccccc

SEQ ID NO: 337683 - DNA, 434 bp, Homo sapiens
  chr2:97544651-97545085
  hypo
cgccttgctgacccgaggaggcagatggagagatgggagccgaaggttttggctgagcgtctgcacatctcgcctccatcctcattcctgccaactgcacactctcagcagtgaaaacaggacgcaggcctgctccatctggcccgagaacaatttgatcttgaggcacccctggactcttggtacccattcacttatgggatacgtgcttgctgtttagagaaaccgagccatggggagcatcccagggcgtgaggctccagaagggatgcagcctgccctggattcccaactgctgcccgcaggtgcgcccctccactcagagggccctgctgccttgtcctctcggctctctcttcatgtctaggatcaggaggtggcagatgaccagccccgaggacgagtaggggtgggagaggcgggctctagaaatg

SEQ ID NO: 337684 - DNA, 200 bp, Homo sapiens
  chr2:97545395-97545595
  hypo
cggctaaggcccacgggtggtctgactccacaggctgaccaggtggccttgcacacggcaggcagagaagacacagtgggggaaaccgaggcgtgcctccaggagagctgccctggggtggggaagacccaacctctctgaagcccagctccctctgcctgccgggtccctgcagcggcctgtggacgcccgagttgccc

SEQ ID NO: 337685 - DNA, 305 bp, Homo sapiens
  chr2:97576055-97576360
  hypo
cgccgtcccaccggggagacggcctcctctgcacagtgaggttggtcatgcagcctcccacactctcttaggctttaacccccttcgacgaccaatatttgattccaaatgaaaaactgttctccttgacaaagacggcaaaagcaaaatacgaattgtgtagtgttgttccgtctgcatcagggctaacgttttactgtcagccccaaaccgcactccttgcttcaaaagtaactacacagaaactccttttatggccttcggcatttcccaacaacactcccgctggtccacgccgtttgtcc

SEQ ID NO: 337686 - DNA, 439 bp, Homo sapiens
  chr2:97587010-97587449
  hypo
cggcaccccatgggctacaggaggacaccgccttccccttgctctcgccacccagcccgcacaggggagtaagtgggcagtcacggagatcagggacattccgatgacctccaggcagtgccatccccacccagggcactctaggggccaccttggtccctagtgatgaagctgtatgaggaccaggctctgggcgtctagtaccttccctggccactcccggatgttctccaggagcaagaggagaagctgctggaggtcaactttgggcagcaggcggagccccacgtccaggctggtgcggcacagcagctcaatcagtcccatgaggttctcatcagtgtaggcccccggctgggcctgggcacacagcgccagaaactggagagagaaaagagggcaggggtggccagggcatgggggaacgggagagtacttc

SEQ ID NO: 337687 - DNA, 249 bp, Homo sapiens
  chr2:97589058-97589307
  hypo
cgtgtccgataacacagtttctgtagcatccggcccacagccagcacagtgcctgccatggtgctgagctcgccggagattctccgtgatgctcctggaatttagctgctgaatgggtctgaactgtaagccgagagtgccctgcatgaggcaggcggcttgactcaccttgtagatgtggcccaggctgatgtccaaggcaatctcttggggagcgtcctgctcctcattctcattcaggccagcctc

SEQ ID NO: 337688 - DNA, 723 bp, Homo sapiens
  chr2:97651764-97652487
  hypo
cggccgcgcagtggcctgtggagaggagggcccggctcacgtcggaacccgaaccacgcggggtcgcaggaacctgaaaagcgccagagtagcccggcggccgcaccggggctgacctgcaaggcctggaccagccaggagtcccagggaagtcgagtgctctctgagcgctaaccacgcgcccctgcggttcctcggcctcagtttccttacctgtaaaatggagccgctgatcctgcctcctgagttgtggagcgaggcccgcacctggaagccttggccacatagggcgggaagggcagggctccggggtgagggagggtggcgggaattcgcacggcctcagaggacggggccagctagccgggaaaggaagcaggagcaggctccccaggcggcgcagtgggaggaccccaagagttgcgtccctagatccagggccgccaacgtggaacctaaagatccagttctggggattgagttccgactccaaaccaagcggccagctcacagccgccgccgccgccagctggggagctcgccggccaagtgcgcaccctcttcctgttagccctccacgtgcgcgccctcttcctgctcgccctccacgtgcgcatccacgtgcgcgggaattggctggcggaagctcctgcccccaggcagtcctgggtcacgcgcacttgtagtagcttgcatttaccaagacagtgagacagtggcctg

SEQ ID NO: 337689 - DNA, 434 bp, Homo sapiens
  chr2:98350752-98351186
  hypo
cgcccctagagtccaccctcatgtggcttcatggggcacccacagctgtggccaggagtgtatgccagtgtgtgcgtgtggatgtgcaggaacacgcatgggcacccacctgcttgtgcatgctccagggacggcacccttgtctggggcaggtgcttgtgggggctgaggctgccttgctccccacacccctgcccctgacctgggagtgtaccgctgtgtgtgcccagcacgcataacgtccccagacaaaccgcggccgatgcccatggacacgagcgtgtatgagagcccctacagcgacccagaggagctcaaggacaagaagctcttcctgaagcgcgataacctcctcatagctgacattgaacttggctgcggcaactttggctcagtgcgccagggcgtgtaccgcatgcgcaagtatggccgcc

SEQ ID NO: 337690 - DNA, 313 bp, Homo sapiens
  chr2:98377007-98377320
  hypo
cttgagaagccttccgtctttctagcggttagtggtggtctaccgtacctgtctgagccatcgctgtcaacaggagcgtgtgaaatgccaaggctgctggagaaacctgttttgtttgaagaaactttagcaaagccattcccacctgtaacaatggacgttcaatcaatggaaggcacattaggacagaggtcattccaccaggcctggcgcctggcgtggcaggtctctgaagcaaaggcactgacctgggctcttgtcgtagccagccgtgactgcagcaaaagtggggttgccgttcttgcccgggagc

SEQ ID NO: 337691 - DNA, 572 bp, Homo sapiens
  chr2:98408820-98409392
  hypo
cggatctccggcagtgggagatgattacctttgctttttggcaatggcgatggaggctgctctgtaaacacttctagggctggggagtcatggtggtcgaagtctttgtccatggcttctatgagactggtgatgtccgagtcctcggaactgtgcctcgcgctgctggcacgttctgggtgggaagggtgtgcgaggggggcgggagacagcctttcaggctgcggctcctggggctgaggcactggcggtggcagaggaggctgagggtgctgctccagcgggctgtgggcatggtgctggctgccgtgctggctctgctttgcccctttggactttctgcccgctgtatgaccttgagtcactgtgttcgaatctaagacaagggggcttgttttgttagcagactgtgaagaagctgcttgagcagaagtcctactagaggtacttgaactgtttttggctctgacgttttccacgtcagctgagtttctattgctgtgactgctgtgtgggtggaccgatgggccacactgcttatgactcccggcactgggtcgggatgatgaacc

SEQ ID NO: 337692 - DNA, 163 bp, Homo sapiens
  chr2:99097200-99097363
  hypo
cgtctccagtcccttgcattgctggcagcctcagaccggagagcactgaatcttccactagcctgtcttcttgccagctgcagccccagggcgcgtgtgtccgtctccgcagccaaactccccctgtgctggcctgtggagggtgagtggggggcagggtgcc

SEQ ID NO: 337693 - DNA, 273 bp, Homo sapiens
  chr2:99136319-99136592
  hypo
cccccggtaggtcacgttctttctaaatgagagcatgatttctctccatcaccgtccccatggtttcttacaagtgctccttttctcagggctactgccactttagtggactagggctcggtgccagcacttcccgggtaatcaggcgtggtctgaccgaggatcaagaagcacatcatcaccaatgacatcatgacagcaagagagcacagccctcgccatggtgccagggcccgtgcaatgcagcgggcttccaccatcgacgtggcggcc

SEQ ID NO: 337694 - DNA, 62 bp, Homo sapiens
  chr2:99798661-99798723
  hypo
cgtaattgtttcagggtccaggagttacgtgcctaattattaacagtaacttttactttatt

SEQ ID NO: 337695 - DNA, 850 bp, Homo sapiens; identical to SEQ ID NO: 331383
  chr2:101033445-101034295
  hypo

SEQ ID NO: 337696 - DNA, 134 bp, Homo sapiens
  chr2:101696603-101696737
  hypo
cgtaagcaaaatgactttatttaaaacagtaagagcctggtgacagtaactccataatagaaaagaaacgtgaaccgcagcaccccgagcgtgaccgaaaacaagtgtaacaactcgcatcgcctgacctcagc

SEQ ID NO: 337697 - DNA, 231 bp, Homo sapiens
  chr2:102486147-102486378
  hypo
cggactactcctcatccagtgaggagtcggggacgacggatgaggaggacgacgatgtggagcaggaaggggctgacgagtccacctcaggaccagaggacaccagagcagcgtcagtccccggtctcttttagagcggatgagagtattctctcagagcctgctttccactgggacctagttgttcctagactattccgtgaccccatgagcacttactatgtagttctc

SEQ ID NO: 337698 - DNA, 143 bp, Homo sapiens
  chr2:102683385-102683528
  hypo
cgcatctttgccgacatttgttcttgcccatcttctaaattttagccgttctgataggtgtgcagcactcgcttgttgcgttaatttacattcccctttatcacagtgtattttaattatctgcttaagagtcagtctcaccc

SEQ ID NO: 337699 - DNA, 519 bp, Homo sapiens; identical to SEQ ID NO: 331387
  chr2:102758965-102759484
  hypo

SEQ ID NO: 337700 - DNA, 1258 bp, Homo sapiens; identical to SEQ ID NO: 331390
  chr2:105458975-105460233
  hypo

SEQ ID NO: 337701 - DNA, 752 bp, Homo sapiens; identical to SEQ ID NO: 331391
  chr2:105460811-105461563
  hypo

SEQ ID NO: 337702 - DNA, 2369 bp, Homo sapiens; identical to SEQ ID NO: 331392
  chr2:105468471-105470840
  hypo

SEQ ID NO: 337703 - DNA, 173 bp, Homo sapiens; identical to SEQ ID NO: 331393
  chr2:105471040-105471213
  hypo

SEQ ID NO: 337704 - DNA, 414 bp, Homo sapiens
  chr2:105719504-105719918
  hypo
cgatagctgattggctgcaggagagctgggggcgggtattcggtatgagatccacaggctgctgggaatgcaaagagccaggaagacaggaagaaaagttgatgggaggaggaggagacaccagaggggtcggctcgggtttcaggtgttcggggccacctcatatgagatgcttgaaataattggactgtgactcaggcgacgggtcagcctgctgacagatttgggaggctgctgcgtggaaggggaatttgaaacgtgggctggatcagcacggaggattgggcagggagaaggccaaggctcaagtggagaaacagccatcaagtttaaagtaggaaggagggaagagccagcaaagggggtggtgagcggtgataggaagacagcaagccaggcacagcggtcagggac

SEQ ID NO: 337705 - DNA, 884 bp, Homo sapiens; identical to SEQ ID NO: 331396
  chr2:105760109-105760993
  hypo

SEQ ID NO: 337706 - DNA, 200 bp, Homo sapiens
  chr2:105987680-105987880
  hypo
cgtgaaggtgttttttagatgtgactaacatctaagtcagcaagcttcgagtgcagcacgttacccacgtatcagggccgggcttcatctaatcggtagtgggccttaggggcaaagactaaggtttccctaagggcaactaattcttctcaagactgcaatagacacaccctgcctgagtttccagcctgccgccctac

SEQ ID NO: 337707 - DNA, 353 bp, Homo sapiens
  chr2:106016109-106016462
  hypo
cgggaaaaccaaagtgagctgggagcgtgcctcccacattccaagcccgggccctctgcgtgacgctgacgctgggtagggacagatggcactgttcagcattgtcgcagggagagcacaggttgagcccatccctgggagagggtgcgtcgtgatggaaacatttgctcctgagcaggtaaccggtccacttgcagaaaccggtggacgatgagtaggtggaccacaaaggcgtcctcggcactttgggggcaggtgtattatttttaacattcggggcagctcataggaatacatcctccagagaaggcgggaagaactccgtgattgctttcttttaattgatactctcc

SEQ ID NO: 337708 - DNA, 290 bp, Homo sapiens
  chr2:106730126-106730416
  hypo
cgtatctaatgtttgatccactgcagaacaaacgtgcactttctgggcacctgagggcagggagcctggggcgtgaggacctgggctctgcttctcactgcgcccatgtgtccgccgttcccgctccaccgctcactgcccaggcctgccactgactcggtcgcagcaagactgggaaagaagcagtactcacctgaccgcctcagtgttctaagactgaagcacaggcccagtggctgtatttggtgccagttatcactaccagctgaaacagttcttttttcaatttc

SEQ ID NO: 337709 - DNA, 35 bp, Homo sapiens
  chr2:106742088-106742123
  hypo
cgatgtggaggccaggagcagacgggcaccgactc

SEQ ID NO: 337710 - DNA, 486 bp, Homo sapiens
  chr2:106959115-106959601
  hypo
cgcttcacgtgctccaggcagagacgagctcaagagcctctggtctctgctgcgggtggcgaggggcggctggaacagcatacttcagtcgttccgtgtcagcctccacccctggtagcaccagagcctcccaggcgtccccgcagtccgagccagccttagcacccagcgctttcttgctgtcgcctggttgttcccgcggcggccgagctcagcacctctcacactccctgcctctcgaggactctgcttgttcctcatcacagcacggttgctctcgcacccaaggcggtgtccccccagcgcctcaccacgatcgcggcagagatctcctgcagggcgtccgggccttgggaaggcatcgccatctcccgcagcgccctcccggactagcgcagcaggctggcatcgcttcctgaggtttggccccaagttttacggcttaatgaggcacataaatagataaattgtcttcatcacgtcagc

SEQ ID NO: 337711 - DNA, 188 bp, Homo sapiens
  chr2:106959841-106960029
  hypo
cgtggtccccacggaagcggtgagaacgcacctggccggctcagccacacggcacggtggcctaggccctgctgcgggctctggatccagcggtcacggtttcactgagagggcgcctcccaggggctgctccggcccagggcagggcattgcaggggtgatgggacagccctgcttttgagaggcgc

SEQ ID NO: 337712 - DNA, 717 bp, Homo sapiens
  chr2:107459644-107460361
  hypo
cgtccgcacgcgcgcgcggctccgcagctggcacagcagctgtgccctgctcagcccggcctcccgcttcccgcggaagcgcaccccgtgcttgttggcggtcaggtaatccttcatcgccttctgcaggcgcgggttcagcattttggaagagacgttccccttccagagccggtacaggaaggccctggacatggaggagtacagcctgtcgccgtcgtcgccctcctccaacacgtggctccttctctgcctccggtgcctcttcttcacccgcctcctctggacctgtgcagccggaaaagccccctcccgtgggcctggctccccgggggaagggaatcccaatgtcccctgagtgtggctgtgccaccctggctgaccagcagcaaaaaagtagtcgtcatcctccgggtagaaagcactttgagattttctccccacctgggatgaaaaaaactctttatgttcaaacccatcttgggactgggcccatttctgcaggtctccaggccccgcatgaaaggaaccggctgggtgggcgcggggcagcgcctggcgtgcgtccaggcccccaggcggggagggctcatgtgcggcgcccatgatggcccgctgcttcccctgcaccggcaggagcctcctggtctccaggaaggagagggagctgggtacaggctcagcggggttgctgtcggtgaagtagatgaaaatcag

SEQ ID NO: 337713 - DNA, 156 bp, Homo sapiens
  chr2:108085842-108085998
  hypo
cgcgggcagccagtaccgtgccatgtgcctgcactcctcagcccttcggcggttgatgggacttgggaccgggctcagcggagcaggaggaggcgctggtcggggaggttcccgcgggcgtgcaggagcccacggaggcggaagctcaggcatggc

SEQ ID NO: 337714 - DNA, 765 bp, Homo sapiens
  chr2:108160861-108161626
  hypo
cggacgtgaaaccgagtggagatggaaggagacgcggtgcactgagaagcggatgtgaaactgagtggagatggaaggagacctggtgcactgagaggcggatgtgaaactgaggggagatggaaggagacctggcgcactgagaggcggatgtgaaactcaagagagatagaaggagacgtggcgcactgagagccggatgtgaaactgagggaagatggaaggagacctgacgcactgagagccggatgtgaaactgaggggagatggaaggagacgcggcgcactgagagccggatgtgaaactcaggggagatggaaggagacctggtgcactgagaggcggatgtgaaactgaggggagatggaaggagactgggcacactgagagacggatgtgaaactcaggagagatggaaggagacgtggtgcactgagagccggatgtgaaactgagggaagatggaaggggacctggcgcactgagaggcggatgtgaaactcaggagagatggaaggagacgtggcgcactgagagccggatgtgaaactgagtggagatggaaggagactgggcacactgagagacggatgtgaaactcaggagagatggaaggacacatggcgcactgagagccggatgtgaaagtgagtggagatggaggcggggcgcactgagaggcggctgtgaaactcaggagagatggaaggagacgtggcacactgagagccggatgtgaaagtgagtggagatggagacggagc

SEQ ID NO: 337715 - DNA, 72 bp, Homo sapiens
  chr2:109260013-109260085
  hypo
cggcctttagggcagacaccgagctagccagttttttttttcataccccagtggtagcgtttgagttttttt

SEQ ID NO: 337716 - DNA, 72 bp, Homo sapiens
  chr2:109335080-109335152
  hypo
cgtgaaccacagcgcccggcggaatgcgtggattttggcataagacggtggttctggaaccaatcccccgcc

SEQ ID NO: 337717 - DNA, 561 bp, Homo sapiens; identical to SEQ ID NO: 331398
  chr2:109647974-109648535
  hypo

SEQ ID NO: 337718 - DNA, 205 bp, Homo sapiens
  chr2:110011299-110011504
  hypo
cgcgagacgagtctgcaccaacttgcagagtgaggagctgggaaagtgtggctgctcctaatgggtgcacgggagccgccgtcccgcacaggcactggcaggcgagggcatcctgtgaccgtgggcccacaaggatgtgtgtggccggtgagggtccttctgattgggatggcaccggtgccaaattcaggcccagctttatgac

SEQ ID NO: 337719 - DNA, 340 bp, Homo sapiens
  chr2:110015134-110015474
  hypo
cggcgctgtggccagcgtggccccaagtcccactttaagcagctcaggggcggtcagtgcctttcagcggcgtgtggatggcaagaagaacaccaagaaacgccactccttcaccgcgctcagtgtgacgcacagatcctcccaggctgccagccacaggcattccatggaaattagtgctccagtgttgatcagctccagcgatccccgagccgcggccaggattggagaccttgctcatctgtcgtgcgctgctcccacccaggtaacatcccgcgggccagggcaggcatccctgggttctctggggttctatcctcagctccgtgttcagtgtccc

SEQ ID NO: 337720 - DNA, 211 bp, Homo sapiens
  chr2:110016729-110016940
  hypo
catatgcactcccacgcacatgtgcactcatacacatggcacacacatatacctgcacacccacacatgtgcacttacatacaccgccatccacatgcacacctacacatatacacatgcacgcacatatacacatatacacctgtgcacatatgtgcacttatatgcaccccttccacatgcacacacatacacatgtgcacacacatgc

SEQ ID NO: 337721 - DNA, 132 bp, Homo sapiens
  chr2:110017061-110017193
  hypo
cgtcccttccacatacacacccacacatacacccgtgcacacatgtagacatttatacatgcgcacacacacattggtggatacacacctgcacgcatatgtgtgcacacacacaaacgctggctctcatcg

SEQ ID NO: 337722 - DNA, 452 bp, Homo sapiens
  chr2:110021654-110022106
  hypo
cgcctcaacttcagcgcatgccaggagcaaccgatgacacccctctttccgcaaacctgcttccccttctgtattccatctgttcctcaaggagtcaccactgtccttaggtgccctgagctaacactcttcgtcttcgctaatacccttcgtcttccccaacactgactccctgcccctgagttccctcctgagtcccttggaaggttctggggagccttcagactggcccttggttgcctctccagctcccggcagcactgtccattcccgtgagcctgtgcagatcttctccctgcgcaccacgctgctctggccctggtccatttctccccgaaactgccgtagctaatcccttcccacctgcccatgtcccttttgctgcccctcagcatggcattctacctaccaggcaacacacagacacatacctgtgcagaaggctcctgccc

SEQ ID NO: 337723 - DNA, 73 bp, Homo sapiens
  chr2:110022456-110022529
  hypo
cggctgcacatcgatggctggggagaggacacagctgcggggctctggctgaaggtgtccagggcgtgcagcc

SEQ ID NO: 337724 - DNA, 124 bp, Homo sapiens
  chr2:110028510-110028634
  hypo
cgagcctcctgacaccgagccctgtgggttgctttacgttggactcacgcagggcagtcggtggatgccggcacagatgggatggtgagccttcggccgccgtggtccacgatgcgtgtgctcc

SEQ ID NO: 337725 - DNA, 146 bp, Homo sapiens
  chr2:110048964-110049110
  hypo
cgctctacgcctacaagccccagaagagtgacgagctggagctgcacaagggagagatgtaccgggtcctcgagaagtgtcaggatggctggttcaagggggcgtctctgaggaccggggtctctggggtgttccccggaaactac

SEQ ID NO: 337726 - DNA, 848 bp, Homo sapiens; identical to SEQ ID NO: 331401
  chr2:111490011-111490859
  hypo

SEQ ID NO: 337727 - DNA, 121 bp, Homo sapiens
  chr2:111929192-111929313
  hypo
cggccccccagccaccagcaccccggggtcccgtctctgagctgcctgctggactatgcaacaggcgcccaccctccagcatgttctccttgtgctaaattagccagggctggtttctgtc

SEQ ID NO: 337728 - DNA, 617 bp, Homo sapiens; identical to SEQ ID NO: 331405
  chr2:112656507-112657124
  hypo

SEQ ID NO: 337729 - DNA, 482 bp, Homo sapiens
  chr2:113103038-113103520
  hypo
cgcccgttttcgaatccatttggcacctccttcgcctaagaatttgcttttccaggcgtcccctttctgttccgtctctgtactgcactaacttcacctatacacaggtctgtatcctcctgttaaaaccactgaccaggactgccgcttctgggtgcgatacagtaacaggcattggattcctcctcttccctcaaacaactagaaagctggaggaaataaacgacgttactgttaggcattggataataggccatgaaagatacggatctattaaaaaaagaaaactaatcaggtaagctctgcaatcgccccagctttttccctgtagttccattcttgaccacagagcagggcatcccgggcagagcgcagctgcgcagcaatcttgctaaatggagcagaggtggagatgagaggagcaagggcagctgcgtgggagcactgccgaggagagcgctggcaggcacagaactccagac

SEQ ID NO: 337730 - DNA, 682 bp, Homo sapiens
  chr2:114736479-114737161
  hypo
cgcagtaacgctgttccctgcattggatgaagtgctccccaccaaactctctcaccggagagggtgggatctgcgggctccctgggtggcttgatttcgacaccctgtgggctgccttccactctggtactttcctctgcctgctgatgcttgaaattccttgaaccggccacacacacctgctttctggaatcagaacactggaaaggcttcctgggacgggagaagagtgatttacattcctgccgaggtgtaaagctgcggatggcaggttctctcctgagaaccggcttcaactaggaggaggaggttggaagcaggaccccgagctgacctgttgaccaggagaggagtaagcagaagggaggcaggagcgggcggaggagagaaggccggggagccgggatgggggtcaccgcccccggggagccgggatgggggtcaccgcccccggggagcccggatgggggtcaccgcccccgcccccgtgatgccgagctgaaaaagacagtctccaggtaggataatccgtcacactagatgcatatagcttcatgcaagaagagcgactgttgcgctgtcttctaccccctttggccgcgatcccgtgacaatgccggcatccgggcaccaactggcttttgcgaaccgctctccgctccccgcccggattccgaagccc

SEQ ID NO: 337731 - DNA, 1278 bp, Homo sapiens; identical to SEQ ID NO: 331409
  chr2:115918676-115919954
  hypo

SEQ ID NO: 337732 - DNA, 56 bp, Homo sapiens
  chr2:118736298-118736354
  hypo
cgcgctggctcacgcctgcaaagtgctgtaatcccagcactttgggaggctgaggc

SEQ ID NO: 337733 - DNA, 846 bp, Homo sapiens; identical to SEQ ID NO: 331415
  chr2:119613031-119613877
  hypo

SEQ ID NO: 337734 - DNA, 871 bp, Homo sapiens; identical to SEQ ID NO: 331418
  chr2:119914969-119915840
  hypo

SEQ ID NO: 337735 - DNA, 769 bp, Homo sapiens; identical to SEQ ID NO: 331419
  chr2:119915856-119916625
  hypo

SEQ ID NO: 337736 - DNA, 533 bp, Homo sapiens
  chr2:120005222-120005755
  hypo
cgccgtctgactgccccacttttctcccgcaggtgcccatctgcggtgaccagccagaagccaagcgtgctgtctcggagatggcgctcgccatgggcttcatgcccgtggacatgggatccctggcgtcagcctgggaggtggaggccatgcccctgcgcctcctcccggcctggaaggtgcccaccctgctggccctggggctcttcgtctgcttctatgcctacaacttcgtccgggacgttctgcagccctatgtgcaggaaagccagaacaagttcttcaagctgcccgtgtccgtggtcaacaccacactgccgtgcgtggcctacgtgctgctgtcactcgtgtacttgcccggcgtgctggcggctgccctgcagctgcggcgcggcaccaagtaccagcgcttccccgactggctggaccactggctacagcaccgcaagcagatcgggctgctcagcttcttctgcgccgccctgcacgccctctacagcttctgcttgccgctgcgccgcgcccaccgctac

SEQ ID NO: 337737 - DNA, 119 bp, Homo sapiens
  chr2:120754234-120754353
  hypo
cggagggacggtccaaaaaggaacacgaggaatcttttggcagtgacactgttctgttttgatcatggtggttttatgggaatataaaactatcaaaagtaactcaattggccgggtgc

SEQ ID NO: 337738 - DNA, 37 bp, Homo sapiens
  chr2:120973504-120973541
  hypo
aggaatcatgtctttctaactggctgatgatatggcc

SEQ ID NO: 337739 - DNA, 650 bp, Homo sapiens
  chr2:120973785-120974435
  hypo
cggccctgctccactccagcactgtagttgtagcagttttcctactcatccgtttctactctttaatagaaaataacctattcatccaaacctttacattatgtctaggggctattaccaccctacttacagcaatctgcccttcagcgccaggggaatgcccgacagctaccttctcccccgtgaccgccgggctccgtatcctgggcgagccgcccggctccggatagcaggaaactggggagggctccggcctcgcctcgtcagccccggagccttcaccaatcccgggcccggaaagaccacgcccactgctggccccgcctagcacctgcgcaggtgcagtctccacctcaagccagctgggccttatgatagtcaaaattggtattaatcagccacacctagcattccttcacatctgcatccacgccttttaaaaagctatattatttatatgttcaggctccattatccataacctcaatgatgaacaagatatccgtaaaataggaggactattcaagactttacccttcacttcctcttcccttattattggcagccttgcacctacagatatgcctttcctcacaggcttttactctaaagaccttatcatcgaaaccgcaaatacatcatacaccaac

SEQ ID NO: 337740 - DNA, 523 bp, Homo sapiens
  chr2:120979888-120980411
  hypo
cgacaatcgttatccaactgatagccatggtcacgtgtgttctccgctgctcggcaaccacatccagggaccgcaggaacaggagggaccagacgatgtaatagaggacgaccaggcaaaggaacgacatgaggatccacaggggcacaaacaccaccagccacggccagtgaataatcctgtccagctttagggcgatgaagatgaactgcaggatgttgaccgagcacaggatctccagctccagcgacctatcgtgtcgaaagccccagacgcaggcagccacggacacgggggacacgaagaagagaggcatgaagaccagcagccagaagtgggtgcccctctccaccctgtcgcagaccaggacttcgaacatgagcagcagcaggtggatgcccacagcgatcagcatggctttgaactccacacaggcctctccctcggtgcggtagcgagggttgcgggcccaaacgcccgcgcccacggaggcgcctgcgacgactagaagcttccacagcca

SEQ ID NO: 337741 - DNA, 223 bp, Homo sapiens
  chr2:121108610-121108833
  hypo
cgtggacgtggcccctgcccactcacctgcccgcctgcccgcccgcccgcatagcacttgcagacctgcctgaacgcacatgacatagcacttgccgatctgcgtgtgtccagaagtggcccttggccgagcgccgaactcgctcgccctctagatgtccaagtgccacgtgaactatgcaatttaaagggttgacccacactagacgaaactggactcgtac

SEQ ID NO: 337742 - DNA, 56 bp, Homo sapiens
  chr2:121444217-121444273
  hypo
accgtccagcctgccgcagcccattctttgatgatcatttcacctgctgtgcgcac

SEQ ID NO: 337743 - DNA, 210 bp, Homo sapiens
  chr2:121549384-121549594
  hypo
ctgtgactttaatgcggtgtgcacgtgtgtgtgtggcctgcgtgcaggtgtatgcatgtgtgtggctgtgtatatggtttgtcggcgtatgttctgtgtgctgtgtgagtgtgtgagcctgcgtgtgtgtgtgcatccatgtgtgcctatgcgtgtgggtcctgggcacgcatgccgcacgactgagatcacagcagaggtgagaacacc

SEQ ID NO: 337744 - DNA, 325 bp, Homo sapiens
  chr2:121742106-121742431
  hypo
cggaagcatgtgaaaacggtccacggcccagatgcccacgtcaccaagaagcagcgcaatgacgtgcacctccgcacaccgctgctcaaagagaatggggacagtgaggccggcacggagcctggcggcccagagagcaccgaggccagcagcaccagccaggccgtggaggactgcctgcacgtcagagccatcaagaccgagagctccggggtaagcggagctgggcagcccagccacgcaaggcgactccatagccgtgcccagggccaccccttgccacggttgcgggctctgccctaaggcccccctctaggggcacagc

SEQ ID NO: 337745 - DNA, 140 bp, Homo sapiens
  chr2:122010702-122010842
  hypo
cggccatgacactggccgagcacagccatgcccactgggtcagactccgtctcagccattaggaaggtctctggtcacatgccagtgaacacttcttgaccatgccaaaccccagtgctgctcatggtgacgcgctggac

SEQ ID NO: 337746 - DNA, 231 bp, Homo sapiens
  chr2:122011463-122011694
  hypo
cgtgccaacacagtgggcccaaggtgacctcccacccaactcacacagcagcacaacagcaccatcccaaaagccacgcagaaggccaccacccacagtcacatacaggctgacgagcgaggtcacacaggctgaactgacctagggcacaagggcatttctctgcctggccgacatcactgctgggcgtgggtggaagccaggacagcgggctatgagaaggcgcgggtc

SEQ ID NO: 337747 - DNA, 248 bp, Homo sapiens
  chr2:122094622-122094870
  hypo
cgcaggcatgcaggggagcccggctgctctcagcggctctccagctcatctcgggattcgaggctgaggctttctcctgcttctacctttccggggagccactgttctcactgatcagttgaggaaatggagccgatgagggaggcccctgctcacatggcctccaggagcgtgggtgggattctagcccatgcgtctcacctcccaccttgtcaccgcacacacggcacagcaaccagctcccaggc

SEQ ID NO: 337748 - DNA, 189 bp, Homo sapiens
  chr2:122104584-122104773
  hypo
cgtatcagcccaggtaacactatacataccttgctccctgtgagctgtgcaaggtgaggtttcaggtcttctccgattacggaataaattgccactaagcaaaacacgctggccttacgcacactactttcggtgttgtcataaccctagagagccagaagggaacacgaaaaggaaaccagatcaaag

SEQ ID NO: 337749 - DNA, 317 bp, Homo sapiens
  chr2:122187647-122187964
  hypo
cgctgggactgtgaaaccactttagcgcgactgcggccccggttatcaggtgtagaggcgacgttggtggcactcccagagctttgccgtcttgtgcggatccgacctggaggacacagcaaaaacagtgtttcacaacatttccagtaagtgccacctcctcaagaaaagaagccatgccccaaaagaggggcactgaccagccaactacatggggagcaacagcttctgtgagcagatcctccacacgaggtctgccacgtctccctgtgtgtgcatgcgcacatgcgcatatgatccacgcacaactgttctac

SEQ ID NO: 337750 - DNA, 1016 bp, Homo sapiens; identical to SEQ ID NO: 331431
  chr2:127413347-127414363
  hypo

SEQ ID NO: 337751 - DNA, 66 bp, Homo sapiens; identical to SEQ ID NO: 251081
  chr2:127423250-127423316
  hypo

SEQ ID NO: 337752 - DNA, 264 bp, Homo sapiens
  chr2:127428888-127429152
  hypo
cggagggagagccagagcaggtgcaagcatgcgaggcaggcttccctgagcccgacagccagggacaaccagctaacacccaagttcagaaaacagtgctttatcacaggcacgagcacaggggagcaacctctccacgcacggggccaggtgtcagctgtgcacttgcatgcttccttattggaacctctccctaccgggaggccatcattagatttggagatggagcctcgggggtcaatgtgtgtccgtattcttccagtc

SEQ ID NO: 337753 - DNA, 283 bp, Homo sapiens
  chr2:127435252-127435535
  hypo
tatgtgttgcctgccgtaatccttcgctagggatgagcacacgagggtccgggaggggtgcttggagttgggacccagagcaccaggacttactgtcaaatctctctggcaccaaaacgcatgctccctatgccacctatcaggatgcacccttaaagcacttttaagatgctttttggaaagagccatttgttggtgtgcatttgtcttcaccactgccccaaacatagctgtccaatattcaggtgaaaatgtcccccatcggccgggtgcagcggctcac

SEQ ID NO: 337754 - DNA, 314 bp, Homo sapiens; identical to SEQ ID NO: 251084
  chr2:127438526-127438840
  hypo

SEQ ID NO: 337755 - DNA, 748 bp, Homo sapiens; identical to SEQ ID NO: 331432
  chr2:127534437-127535185
  hypo

SEQ ID NO: 337756 - DNA, 278 bp, Homo sapiens
  chr2:127801072-127801350
  hypo
cgcagccgaggaggggctcagccgtctaccctgtctccagcggaggagcttctgagaccaggagcgggggccgtcgggtgagcattcccctggaacacgaaggagcaaacctgcccggctgcattccgccctcccgctgccctaggcccgctataggctggataaagtgaaccaagcaagggtcccagaaacgtcacacgtgaactcgcccattcacactcacccattcccatgcacactggccattcactcagccattcacacgtgcacacattcgc

SEQ ID NO: 337757 - DNA, 936 bp, Homo sapiens; identical to SEQ ID NO: 331435
  chr2:127863367-127864303
  hypo

SEQ ID NO: 337758 - DNA, 264 bp, Homo sapiens
  chr2:127895379-127895643
  hypo
ccattccttgaggccgcctcccatagagccactccgcacgcgtgggggtgtgggcacggcctaccctgctggccacaggacagagtgctgggcacatctcctcagccgcgctcgcagacagctgtcttccaagttcagggtgggacgcaggtcactggtcaccaccactcgcccagcagacaggctgagcctagttatgcagcagcaccagccagtgaggaggaacacctttgagaacatcctgtcatgaaccctcgcccaaac

SEQ ID NO: 337759 - DNA, 164 bp, Homo sapiens
  chr2:128127780-128127944
  hypo
cgcagcgcaagcacaggcttgtcagggcctcagccgctgactctttatacaccctcctcagtgtctgtgggcggcccagtcccctagcccactctttcactggcttcctgtgtctgagttcatttgttcatctgttgttcagccagggtctgcgggtcggaccc

SEQ ID NO: 337760 - DNA, 621 bp, Homo sapiens
  chr2:128158437-128159058
  hypo
cgggcgcactcccgccagtcgcaggagctggctccacccgccccttctgatccagtgtcccgcagtcctgcccgcttcaccgccctcgcctagcccccgcgggtggtaaaagtccagcccggcggagcgcccctgcctccttccacgcccctggcctgccctgcgcagctacgcccagcccgcgtccatcccggaccatcctgttgaaggcagtcccctggcacgcagggctgggagctcttagctgaggatggaaccgactgcaccaggagccgctgggaggaaggccgaggggcgcagaggagaggcaaggaaaaaacagcagcccaagaatcgggcctccctgttacagcaggagtcgcatctatttatatatgttatgtcttattgctcagcaaccagctctcggccggggcgtgggccgggaagaggggtctcctggtgcagcgggttggcgtgactcatcaccgccgcgcactctggcctctgggcctaggttaacagactcccgggtttcaggctgggcccaggcggccaggccctccctgctgaggaatctgggttggggcagtgccagctccctgcttctcacctggccacagaaggggtagcgggaggagc

SEQ ID NO: 337761 - DNA, 103 bp, Homo sapiens; identical to SEQ ID NO: 331440
  chr2:128459399-128459502
  hypo

SEQ ID NO: 337762 - DNA, 197 bp, Homo sapiens
  chr2:128583666-128583863
  hypo
aaagtgctgggattacaggtgtgagccgctgcgcgtcaccaccaatccattttctccaggacctctctctgtgcagagagctcttctctttcacctattaaacttccactctgaacctcactctttgtatatccgcatcctagtgttctgtggctttagacaaggaacctcgagtatttacccaagacgatgatatc

SEQ ID NO: 337763 - DNA, 154 bp, Homo sapiens
  chr2:130512142-130512296
  hypo
cgctttaagtgatcacgtgccttccgaatgccaggtgcggcgcccgctctgcgctgctcgctgcaactgctcccaccctttcccagggcgggtgctccactgcgccattcccctcaatccagggatttaacttcagcgaggctgggagcgctcc

SEQ ID NO: 337764 - DNA, 93 bp, Homo sapiens; identical to SEQ ID NO: 251125
  chr2:130669924-130670017
  hypo

SEQ ID NO: 337765 - DNA, 429 bp, Homo sapiens; identical to SEQ ID NO: 221869
  chr2:130737208-130737637
  hypo

SEQ ID NO: 337766 - DNA, 121 bp, Homo sapiens
  chr2:130948042-130948163
  hypo
gagaaacaaaggcagcgctgccctcgggggagcattggccctggcggaacgcagcagccgcgaaggatccagccagaggatgccacgccagcccagcgctaccaggctgcccaaggggggc

SEQ ID NO: 337767 - DNA, 139 bp, Homo sapiens
  chr2:131486975-131487114
  hypo
ccactacctgctcccggctaacatcctgctctcagacctggcctacattctcctccacatgctcatctcctccagcagcctgggtggctgggagctgggccgcatggcctgtggcattctcactgatgctgtcttcgcc

SEQ ID NO: 337768 - DNA, 1548 bp, Homo sapiens; identical to SEQ ID NO: 331445
  chr2:131720733-131722281
  hypo

SEQ ID NO: 337769 - DNA, 174 bp, Homo sapiens
  chr2:132269055-132269229
  hypo
cggaggcgggtgctgcgctggcccgcggctgctgggactgcaattgtttggattttcactgaccgtgctttgtttttgtttttttctcctcactcctgggctcgttctcattgctttctttctctctccgcttccccctcccgtgtctggtcctatctctccccttccccaccc

SEQ ID NO: 337770 - DNA, 268 bp, Homo sapiens
  chr2:132270135-132270403
  hypo
cgggggagacgggctgtgctcacagccagtgatctgtcccgttcacctgggaaggagcacacatgattgaacaggaatttgagcacaagatgagaaaatgtgttggccccttagcgctggtgggctggatggcggccacagcacacgggggcacctcattccgcaggagccactgcagaggagaggaggaacctgagggcttgtgccagggagggaggacagtgtccagaaagcatctggcaaaccccatggtgggaaggtgaccagc

SEQ ID NO: 337771 - DNA, 295 bp, Homo sapiens
  chr2:132301071-132301366
  hypo
cgcgacctcagtacgtaaagcatgctgaggcggtgtcaggtcattttaggctcttcagtttcgcgtttggtatccggcatggctgccacctgtttctggctggagcctcggacactggctcactgcagttggtggtgtcgacagagcggtaggagggcggcgggcagcaggagcttctcctgctgggcaggaagacgagtagaagggagcggcaccgaggcatgctggaggctggagcctgagccaccccggctcgcctcgctgcggttggtggtgacctcggacactgcagctc

SEQ ID NO: 337772 - DNA, 483 bp, Homo sapiens
  chr2:133174960-133175443
  hypo
gaggcctgcagctacgctacgctgctgcacgtgctgacactcagctttgagcgctacatcgccatctgtcaccccttcaggtacaaggctgtgtcgggaccttgccaggtgaagctgctgattggcttcgtctgggtcacctccgccctggtggcactgcccttgctgtttgccatgggtactgagtaccccctggtgaacgtgcccagccaccggggtctcacttgcaaccgctccagcacccgccaccacgagcagcccgagacctccaatatgtccatctgtaccaacctctccagccgctggaccgtgttccagtccagcatcttcggcgccttcgtggtctacctcgtggtcctgctctccgtagccttcatgtgctggaacatgatgcaggtgctcatgaaaagccagaagggctcgctggccgggggcacgcggcctccgcagctgaggaagtccgagagcgaagagagcaggacc

SEQ ID NO: 337773 - DNA, 74 bp, Homo sapiens
  chr2:135293582-135293656
  hypo
cgcgcccagccttgtttgtatgttttacattgtgtgtgtatatatatttagacggagggcgcacgcgtatatac

SEQ ID NO: 337774 - DNA, 1410 bp, Homo sapiens; identical to SEQ ID NO: 331451
  chr2:135475603-135477013
  hypo

SEQ ID NO: 337775 - DNA, 3442 bp, Homo sapiens; identical to SEQ ID NO: 331452
  chr2:136873862-136877304
  hypo

SEQ ID NO: 337776 - DNA, 930 bp, Homo sapiens; identical to SEQ ID NO: 331454
  chr2:137522848-137523778
  hypo

SEQ ID NO: 337777 - DNA, 878 bp, Homo sapiens; identical to SEQ ID NO: 331455
  chr2:139537357-139538235
  hypo

SEQ ID NO: 337778 - DNA, 1005 bp, Homo sapiens; identical to SEQ ID NO: 331457
  chr2:144694306-144695311
  hypo

SEQ ID NO: 337779 - DNA, 2594 bp, Homo sapiens; identical to SEQ ID NO: 331458
  chr2:145273332-145275926
  hypo

SEQ ID NO: 337780 - DNA, 919 bp, Homo sapiens; identical to SEQ ID NO: 331460
  chr2:145281302-145282221
  hypo

SEQ ID NO: 337781 - DNA, 185 bp, Homo sapiens
  chr2:147344900-147345085
  hypo
ggacaagcgacctcgctctgtggccagtgagttgtttctgattcggatgatttttgtccctcggcgcgtgcccttgctccccgcccccggctgcgagacccccggcccggcactcgctctcctcctgtcacgaaagggtcgcggcctgtagccctgtgggcagccgtgccgcgatgaaccccagc

SEQ ID NO: 337782 - DNA, 186 bp, Homo sapiens; identical to SEQ ID NO: 331461
  chr2:148602743-148602929
  hypo

SEQ ID NO: 337783 - DNA, 169 bp, Homo sapiens
  chr2:149525294-149525463
  hypo
cgtgcttccgattttcctaacattagctttgtcttcctatgcctcagacttcttttgtcccctggaatctaccccggggaatcgtagttaggaggaaggggtgatagattttatacacagaatttctgagactttgtgacacttcctgtgtatatcttagaataggtac

SEQ ID NO: 337784 - DNA, 2098 bp, Homo sapiens; identical to SEQ ID NO: 331462
  chr2:149632592-149634690
  hypo

SEQ ID NO: 337785 - DNA, 767 bp, Homo sapiens; identical to SEQ ID NO: 331464
  chr2:150186920-150187687
  hypo

SEQ ID NO: 337786 - DNA, 170 bp, Homo sapiens
  chr2:152295736-152295906
  hypo
cgggatggaagaaagtctgaataggagtggactcatgccgtccaaacccgtgtcgttcaagggtcaactgtacttagtattgttgatttagaaaaaataaatttttacagctctctgtatagtcatctctaaaattacatgcttagaaatacacccttctagccgggcgc

SEQ ID NO: 337787 - DNA, 120 bp, Homo sapiens
  chr2:152681239-152681359
  hypo
cgaagttgtgtgcaaatgtgcgtgcgtgcatgtgtgtgtagaactaactctggcactagataatcttgttaaaatccaggtgtgtgtgcgtaggagaaataactccggcactacgtaatc

SEQ ID NO: 337788 - DNA, 703 bp, Homo sapiens; identical to SEQ ID NO: 331469
  chr2:153192142-153192845
  hypo

SEQ ID NO: 337789 - DNA, 1244 bp, Homo sapiens; identical to SEQ ID NO: 331471
  chr2:155553956-155555200
  hypo

SEQ ID NO: 337790 - DNA, 459 bp, Homo sapiens; identical to SEQ ID NO: 221907
  chr2:157292163-157292622
  hypo

SEQ ID NO: 337791 - DNA, 1811 bp, Homo sapiens; identical to SEQ ID NO: 331475
  chr2:159313069-159314880
  hypo

SEQ ID NO: 337792 - DNA, 125 bp, Homo sapiens
  chr2:159528162-159528287
  hypo
cgctcttctctatgctgggcttgcagcagcagacaggtcgcatgacagccccacccgaggtagcttacgttccatgggtgaggtagacgcagacaaggtgccaaacgaacagaaacgcgtggagc

SEQ ID NO: 337793 - DNA, 126 bp, Homo sapiens
  chr2:159994731-159994857
  hypo
cggtttcgcctgaaattaagaagcagggtatgttttcatttttgttaagtgtctcgggagcaggtgtagttcacgtctgtgggtgcatggtcttgcctgaagatagccatgatgttggtggatgcc

SEQ ID NO: 337794 - DNA, 741 bp, Homo sapiens; identical to SEQ ID NO: 331477
  chr2:160760627-160761368
  hypo

SEQ ID NO: 337795 - DNA, 703 bp, Homo sapiens; identical to SEQ ID NO: 331478
  chr2:161264043-161264746
  hypo

SEQ ID NO: 337796 - DNA, 746 bp, Homo sapiens; identical to SEQ ID NO: 331480
  chr2:162271679-162272425
  hypo

SEQ ID NO: 337797 - DNA, 1024 bp, Homo sapiens; identical to SEQ ID NO: 331482
  chr2:162274764-162275788
  hypo

SEQ ID NO: 337798 - DNA, 707 bp, Homo sapiens; identical to SEQ ID NO: 331483
  chr2:162280181-162280888
  hypo

SEQ ID NO: 337799 - DNA, 854 bp, Homo sapiens; identical to SEQ ID NO: 331487
  chr2:162930102-162930956
  hypo

SEQ ID NO: 337800 - DNA, 1297 bp, Homo sapiens; identical to SEQ ID NO: 331489
  chr2:166649934-166651231
  hypo

SEQ ID NO: 337801 - DNA, 2180 bp, Homo sapiens; identical to SEQ ID NO: 331490
  chr2:168148871-168151051
  hypo

SEQ ID NO: 337802 - DNA, 1368 bp, Homo sapiens; identical to SEQ ID NO: 331491
  chr2:169312417-169313785
  hypo

SEQ ID NO: 337803 - DNA, 205 bp, Homo sapiens
  chr2:170282893-170283098
  hypo
cgaacctgaagttgccagtgtgaagcccgtgagtgtgcagtgaaccgcagagaaagcttcttggtgagttgagtttgtggagtggcccagagccaggcgggagcgtcagtaccgcgcactgttaacagcggcccgacaaacccagcaaatgcagaattggccaggggatccccgaaagaaccaatccttccccagccctctcacc

SEQ ID NO: 337804 - DNA, 140 bp, Homo sapiens
  chr2:170551744-170551884
  hypo
cgtaataatgctggtaagtatggaataattaagaaaatatttgaagacagaaattagtttgtgcacatacagcgctggtaggtttttggaactataccttaaaaagtgtcaagaactgggggccaggcgcggtggctcac

SEQ ID NO: 337805 - DNA, 127 bp, Homo sapiens
  chr2:170569589-170569716
  hypo
cgtggtacctgcgatgggggcaccacgtgttctcccattagccagccccacccatcatagacactacgagtcagccagggggcaggcttgccatgggttttgcgacaccccctgtccaaagcctgcc

SEQ ID NO: 337806 - DNA, 133 bp, Homo sapiens
  chr2:171730981-171731114
  hypo
cgaaagtcagcaaggaagcaaggacttcagacctaccgctgcgaggaactggattcggccagcaacctgaatgagcttggaggcacgtctcccagcgaagcctggcaatgggagcccggcctcgggagcatgc

SEQ ID NO: 337807 - DNA, 98 bp, Homo sapiens
  chr2:171815760-171815858
  hypo
cgtgcccggccccagatgcgcttctgattttaggcgatagttgacatgtctcttcaagccccagtttctcttcgacattttaaatctttcctcattac

SEQ ID NO: 337808 - DNA, 704 bp, Homo sapiens
  chr2:171822495-171823199
  hypo
cgctgcctcctcactcactgtggatgtgacgccccccactgccaaggcccccaccaccgttgaggacagagtcggcgactccaccccagtcagcgagaagcctgtttctgcggctgtggatgccaatgcttctgagtcaccttaactttgaaccattctttggaattggcgtggtatatttaaccacgggagcgtgtctggaaacgcaaactatcattaatttcatactagtttgtaccgtatctgtaggcatcctgtaaataattccaaggggaaaactaaacgaggacgtgggttgtatcctgccaggttgagtggggctcacacgctagggtgagatgtcagaaagcgcttgtattttaaacaaccaaaaagaattgtaagggtggcttgctgccaggcttgcactgccgttcctgggggtgtgcatcttcgggaaaggtggtggcggggcgtccactaggtttcctgtcccctgctgctccttccgtaagaaaatgaaatattctatgcctaatactcacacgcaacatttcttgtactttgtaagtcgtttgcgagaatgcagaccacctcactaaactgtaaacggtaaagagatttttacttttggtctccgtgagtcgcatctctactaaggtttacacaggaattccacctgaagacttgtgttaaagttctacagcgcgcactgttaactgaac

SEQ ID NO: 337809 - DNA, 45 bp, Homo sapiens
  chr2:172367066-172367111
  hypo
taaagtccagtttacgtgacaccatacaaagtcactgtgtaacgc

SEQ ID NO: 337810 - DNA, 163 bp, Homo sapiens; identical to SEQ ID NO: 331500
  chr2:172378960-172379123
  hypo

SEQ ID NO: 337811 - DNA, 77 bp, Homo sapiens
  chr2:172411075-172411152
  hypo
cgtaaatacgcttggccttctgatcctggtgttcggggccctcattttttggatagtcaccagaccgcaatggaaac

SEQ ID NO: 337812 - DNA, 5715 bp, Homo sapiens; identical to SEQ ID NO: 331517
  chr2:175196982-175202697
  hypo

SEQ ID NO: 337813 - DNA, 81 bp, Homo sapiens
  chr2:175431799-175431880
  hypo
cggctttcgtttcttgccagtttgctgggataacttttggtcgtttgtacatatggctctggaggtggcaaatcggaaatc

SEQ ID NO: 337814 - DNA, 1341 bp, Homo sapiens; identical to SEQ ID NO: 331522
  chr2:175546713-175548054
  hypo

SEQ ID NO: 337815 - DNA, 1853 bp, Homo sapiens; identical to SEQ ID NO: 331525
  chr2:176944127-176945980
  hypo

SEQ ID NO: 337816 - DNA, 2263 bp, Homo sapiens; identical to SEQ ID NO: 331529
  chr2:176956345-176958608
  hypo

SEQ ID NO: 337817 - DNA, 1050 bp, Homo sapiens; identical to SEQ ID NO: 331543
  chr2:177042492-177043542
  hypo

SEQ ID NO: 337818 - DNA, 1676 bp, Homo sapiens; identical to SEQ ID NO: 331544
  chr2:177052673-177054349
  hypo

SEQ ID NO: 337819 - DNA, 995 bp, Homo sapiens; identical to SEQ ID NO: 331545
  chr2:177502170-177503165
  hypo

SEQ ID NO: 337820 - DNA, 794 bp, Homo sapiens; identical to SEQ ID NO: 331546
  chr2:178257227-178258021
  hypo

SEQ ID NO: 337821 - DNA, 336 bp, Homo sapiens
  chr2:180886599-180886935
  hypo
cgcggggtcggtgtataataccccccgccgcgatgtggggagtgatatcaccctctctcaccctggatattacgaacaacctcgcggggggtggtggtccataatatccgggtggggggagaggctgatatcactccccacatcgcgagggaggggatgtacaccgcccgccgccacgcgaggtggttcgtaatatccagtgggggagagggtgatatcacacccacatcgcggggggtgggagggcatgtacacaggatattatgttggttgaggttactgactctgaggcaaggcggccagaatatgtaccttggctctgccacttactgcccc

SEQ ID NO: 337822 - DNA, 1772 bp, Homo sapiens; identical to SEQ ID NO: 331552
  chr2:182321357-182323129
  hypo

SEQ ID NO: 337823 - DNA, 1312 bp, Homo sapiens; identical to SEQ ID NO: 331560
  chr2:183902312-183903624
  hypo

SEQ ID NO: 337824 - DNA, 1535 bp, Homo sapiens; identical to SEQ ID NO: 331561
  chr2:185462268-185463803
  hypo

SEQ ID NO: 337825 - DNA, 1026 bp, Homo sapiens; identical to SEQ ID NO: 331565
  chr2:191044992-191046018
  hypo

SEQ ID NO: 337826 - DNA, 202 bp, Homo sapiens
  chr2:191796739-191796941
  hypo
ttttaatatttgttcgtcctaaattgaagtttaacttcttgcatactgtgtagatggatatgtaaatggaaaaggattatcatattagtgagagaccgtatgaagcctcaaaagttttataagtcactgtagatgaaatatttttttccaccgtgtttaatgcaatattcctaataatcttacggtcctatttgtttgttac

SEQ ID NO: 337827 - DNA, 1293 bp, Homo sapiens; identical to SEQ ID NO: 331569
  chr2:192109730-192111023
  hypo

SEQ ID NO: 337828 - DNA, 1461 bp, Homo sapiens; identical to SEQ ID NO: 331570
  chr2:193058995-193060456
  hypo

SEQ ID NO: 337829 - DNA, 64 bp, Homo sapiens
  chr2:196411561-196411625
  hypo
cggcaagcagtagcaagatttattgcaagaagcgaaacaacaaaccttccacaacgtggaagac

SEQ ID NO: 337830 - DNA, 1350 bp, Homo sapiens; identical to SEQ ID NO: 331571
  chr2:197457198-197458548
  hypo

SEQ ID NO: 337831 - DNA, 86 bp, Homo sapiens
  chr2:198276053-198276139
  hypo
cgtaagtattccacaggatgtgtaatgtactttatatatttgttttaaagttgggagctcttggccgggtgcggtggctcacaccc

SEQ ID NO: 337832 - DNA, 105 bp, Homo sapiens
  chr2:198456572-198456677
  hypo
cgagcccacgcccatctggaactcgccctggcttgcaagcactgtgcgcagaactggttcctgccccgtgcctctccctccacgcctctccctccacccctccct

SEQ ID NO: 337833 - DNA, 897 bp, Homo sapiens; identical to SEQ ID NO: 331573
  chr2:200320451-200321348
  hypo

SEQ ID NO: 337834 - DNA, 389 bp, Homo sapiens; identical to SEQ ID NO: 331574
  chr2:200321661-200322050
  hypo

SEQ ID NO: 337835 - DNA, 213 bp, Homo sapiens; identical to SEQ ID NO: 331575
  chr2:200322457-200322670
  hypo

SEQ ID NO: 337836 - DNA, 66 bp, Homo sapiens
  chr2:203129282-203129348
  hypo
ccgaaacagctcctcgtttctctcaaagtgaacatataattcatagagggttaacaaaataatatc

SEQ ID NO: 337837 - DNA, 119 bp, Homo sapiens
  chr2:206830607-206830726
  hypo
cggggccttgcaagtctcggcagatttccctgaccttgcgtgccaaggcagaaggtgagatggcaaacagatgcgcgcttccactgagagcgtgcatgtgtgtgcgtgtatgtgagtgc

SEQ ID NO: 337838 - DNA, 110 bp, Homo sapiens
  chr2:206896324-206896434
  hypo
cgcagcacttgcgggtgccccagatggcactttacccctaggactggcttaaaatagtggagtgatcatcatggccgatgagaggcaggactggattgcagctccaactc

SEQ ID NO: 337839 - DNA, 1264 bp, Homo sapiens; identical to SEQ ID NO: 331585
  chr2:207139040-207140304
  hypo

SEQ ID NO: 337840 - DNA, 1829 bp, Homo sapiens; identical to SEQ ID NO: 331586
  chr2:207307406-207309235
  hypo

SEQ ID NO: 337841 - DNA, 118 bp, Homo sapiens
  chr2:208688685-208688803
  hypo
cgaaacaccgttccacatgacagaaatcaacacttgtctgtttacattaaccgagcagagcttagtcacccatcactggattcgacctcgagcagacagctctacctgactcagggtc

SEQ ID NO: 337842 - DNA, 322 bp, Homo sapiens
  chr2:208696086-208696408
  hypo
gagcaccacgctgccggctgaggcctggccatcccagcgagagcatggagccatcgcatagggaaacgtagggcttccaatcagaacacctgtgtcaaaccacaaatcctttgtagctgagtgacagtgggcaagttactacttaagttcttggtgctttggttttctcatttgtaaaatgctgctcacggtgaaccccttcctattcactgggttgctgtgagactaaaatgagaaatatacttttaagtggaaggactacgcaaaggctgcgacgccgcccctcacaggtgactctagtacccgtctccttgacacaggc

SEQ ID NO: 337843 - DNA, 234 bp, Homo sapiens
  chr2:209224972-209225206
  hypo
cgccccacttgttctcccgccttctgcgtgagcagcccctacggggtctcctactggtccctaggaactttcgccacacccggagcggcggcctccccgagcccctcggggccccttccctggcagctgggatgagggcagcgtgctcctcgcaggttacttggtcctgaggtcctccctcaggcgctgggcatgcctggggcgcagaaccgcagctctgggccagacccggct

SEQ ID NO: 337844 - DNA, 636 bp, Homo sapiens
  chr2:209225236-209225872
  hypo
gctcccggggccctgccgccctctcgctcgctcggggctctggagtctggcgggccgcaagccgcgctgccggctctacctggctttgtccatccagccacccaccaagcgccagggtaaaacagcacccggaagcagtcgtcgcctgctgccaccaggctgccttctgtggtgaaggtgggggccagggttgcaaggccctcctcttgttggcatcagccaggcacgcagtgctgtcgtggctgacccaggccgtgaggcacccgctgactgagaagccaacctgagcacccagccgcacctaccgctggcctcagacatcagcaccccaaagggtatgttggagtcccatggtggaggtgccggccgctcctccacgcacttgatgtataccgaggatcccatgcttgacgtcgcagggggcattagccaggagcacgttgctgggatgccagtccaggctgaggatggtggagccaatgggcttcttgatgtacttgcacacccaccagttattctcccgctggaaataacagatggcgatgacacacagctgccgcccacagcaaacttgtcctgtgggcccagcacacacagcaggcagtgggtgcgggcttaccctcctggcccgtcagc

SEQ ID NO: 337845 - DNA, 67 bp, Homo sapiens
  chr2:216179504-216179571
  hypo
gcacccgaggccaagattttgtaggggtggaaaggtgtgatcctttgctctccatcgtaaacgtcac

SEQ ID NO: 337846 - DNA, 185 bp, Homo sapiens
  chr2:216274340-216274525
  hypo
cgacacggtgtcggaagctgagacccaggagaccacaaagctactggctgtgatttcggtcacagattcagaagtggccacaagaggagaaaagggagtcgtctctcctgtcacggtgttgcctagagagtcacagaaaggggaaagtcagccttcagtcatctagaaaatttaccgtcctcgtc

SEQ ID NO: 337847 - DNA, 502 bp, Homo sapiens
  chr2:217528438-217528940
  hypo
cgttggagctcgctagcgatgcagaatttccagctctccagggacctactgcatgggaatctgcattttatcaaggtttcctggcgcatatttgaagttgcgaagctccacccggcagcgcatgggtagctgcaaggggtggctgctcagtggacgccgggttgagggacagaaggaaagttgctggctgcgggctcctccatgctcttctcctctctccccagtgcaagatgtctctgaacgggcagcgtggggagtgctggtgtgtgaaccccaacaccgggaagctgatccagggagcccccaccatccggggggaccccgagtgtcatctcttctacaatgagcagcaggaggctcgcggggtgcacacccagcggatgcagtagaccgcagccagccggtgcctggcgcccctgccccccgcccctctccaaacaccggcagaaaacggagagtgcttgggtggtgggtgctggaggattttccagttctgacacac

SEQ ID NO: 337848 - DNA, 1116 bp, Homo sapiens; identical to SEQ ID NO: 331599
  chr2:217558872-217559988
  hypo

SEQ ID NO: 337849 - DNA, 180 bp, Homo sapiens
  chr2:217674486-217674666
  hypo
cggcactgtgcgcatgtaacacatctcaaccaatctgctcaacgaccagcaggcatcgtacgaccccgtgttgcagacgaagaaactgaggcgcaaggaggttcctcggcttgtatgcctgggtgtcatgtatgagccaggccgtctaggtgagtatggcaggcagctccctgtgccccc

SEQ ID NO: 337850 - DNA, 239 bp, Homo sapiens
  chr2:217674965-217675204
  hypo
cgacgctctggtgtgggcagcccgagaggtgatggggtttcagtaaatcatggcggggagttcaggccaccgccggagtccagtgggtagggctctctacggccggaggtggctgtgggggagacgggcgggaggcccagaccggcagggagctttctgcagggaagctggaaggatggtggggccggtaacccaacatggggcccaggagcgggagacatggccggaggggcggcgag

SEQ ID NO: 337851 - DNA, 181 bp, Homo sapiens
  chr2:217691004-217691185
  hypo
cgtcactccgccttcaaatctcacctccttcctgccatcagctcgcacctgtgctgtgcacctgcctcacaagggctctccttgagcccactctcaccgctctccatctgttcctcactcagtcgtcagggtgagctctttatcctttccttcattcaaaatctcccaatggcttctcgtc

SEQ ID NO: 337852 - DNA, 93 bp, Homo sapiens
  chr2:218678441-218678534
  hypo
cgaagacaccttcatggccagcccgtacgcgcctcggaaggagtgactgtcgcggatgatgaaggcccccggctcctggtccttgaggagcgc

SEQ ID NO: 337853 - DNA, 839 bp, Homo sapiens
  chr2:218682490-218683329
  hypo
cgctggcgacaggcgaagacaccttcccattgatggtggcatagttggggaggctgcctgcccggtctcccactgacatccttcgcttctctggcaaggctggtgttgggctcccttgccggaaggctgcggagtctggtgacggggaggtggcagggctgctcaggccagggtagtaggcaggggagacagggaaggagggcgtggaaggagcctggtagccagaggcactgctctgccgggacagtgtgggtctccgatcctccggggtagaatagccaccataggccacatgccggtccaagcaggggctgccgggaaccacagatccagaccctccgaggtgacggcccaggctggggcttccagggctggctattgcattgctatgaagaccggaggccaggttgccttggtgagccccagggtgccggcccaggctgggactccccggggtggtggccactttgttgtggaggccagaaacctggtagacccctgctgggtgccgacacaggctggggctccccggggtggtcgctgcactgctctgggggctggagacagtgctaccatggaagccagtgcctggtggacccatcatctggtgatggctcaaactgggactgctgggggcagccatgctgggattgatggcccgccagccgaagccaggactagggggagtgttggtgcccactgttctgtggcgcgcctgagggctcccaggcaccgtgtggacgccagccacactgaactgagctcgagcctggctttccggagaggagctgaaatgctgaagtgagtagtcggggctgctgtagctactgcccacagtc

SEQ ID NO: 337854 - DNA, 138 bp, Homo sapiens
  chr2:218686231-218686369
  hypo
cggaattgaatgcggcctgggaattataggtcactgggctccccacaggattcagcgcgcaggacatgtgccctcaatgcaccttgatgaactggtttgcaaggtaccgccatctgggtatgctttctgcctgtccac

SEQ ID NO: 337855 - DNA, 267 bp, Homo sapiens
  chr2:218694781-218695048
  hypo
cgatttgcgctgtccacagaaggactccaaggggaaggccgaggcccaccctgcaaaggaccccaaggctccgaggcatagttgagtccccggctctcaggagcctgagcccctcgcagcccctgtgcccagggctctgtgggccaagtgtcaagcaggagtgtgctggctggtgagaggcagcccccagcccccttctactgatcccccgtggctcagtgtccctggccatgccgacactctgagtgggaggctatgcccagctgc

SEQ ID NO: 337856 - DNA, 282 bp, Homo sapiens
  chr2:218697833-218698115
  hypo
cggtcattcatggaataaccacgaagcagccccagcccacaggtacgcgcatgtttaaccaactggtgcagcggaggcgcaggtgggcccgtgaggaggtgaagcggacgagaggaccagacagggcaggagctctctcttggttcctcccttgttcacctccagctcctgaattcctcgttcccccagttcctgggcaattgggcccttctgctgaggcagatgagtgggcgacgctaaagccaggcaagtcttttgcttcctgagagaaaaattccacac

SEQ ID NO: 337857 - DNA, 79 bp, Homo sapiens
  chr2:218700747-218700826
  hypo
cgccctccaggattgagagcgatggtaagagccagctccggggagacacactggacaggggagcgaaccccagggctac

SEQ ID NO: 337858 - DNA, 288 bp, Homo sapiens
  chr2:218704299-218704587
  hypo
cgcacactcgcacaccctgcaattctgggagctgtagccctgacacagaccgatacatgtactttggcaaagcactgctgcccaccacccctggatcacgtgacgagtaccctggtgtcaggcttcatgatgtgcctcctctgcaccccccagactggccactgccaccctcacagacccagctcttctttccagtcttccgatttccaaaagactggattcctcaggtccaggtagcagggctgggtgtccgacagcatgcctggggctccagaagcgaggggatcc

SEQ ID NO: 337859 - DNA, 1042 bp, Homo sapiens
  chr2:218712694-218713736
  hypo
cggaggctggctccaggtccagcatcagcatattgagtgtttcgatggactgttcaatctcctgctgggaggctgctcgcgggaactcagggagactggggatgggggtctctgccaatggctgagggctgggcctgctggctacaagactctccaagtgggctctttcctgctggcgtggaggtgggcgaggctgctgctgctgctgctgctgctgctgccacgaattcagtcccctttgcacagcctcccggctgcttccccctcggaccggagctgggggcagctggggttcagcttccgaaaaggattgagagcggaacataccgctggggtcatgggcatagtgggaggtggtcactggctgtggccaggctgggtggggcccctccctctggtagccagctaaaccctcctgtgcagagtaggagggccgcatgggggccgtgtggccagcatgggcaggccccgcccggctggcagactcgtaggggtagcctcctccattgaccataggctccatggggtaggacttgtccagaccgttggtcagtggggacagggcctctgggtagcccccctcactggtgttggtgaccccgtccagagaagagagtgtgcccatgctgcccgcactgtgaccatcctggtttggcaattcatcgtccaggatgtctgtctcccgctcagatgctaacgccccaccattgacatgaacctgggctgggacaacgtggcgtccagaggagggcacagccgagccccctgctgggcgggacctgaggtgctgggtgtggtacatggcgccttgcttctctcgctctaagccaaagccactcagcaggcggtccagctcccgcttctcctggggactcaaggcagcagtggcactggaggccccggggacaggctcgtcggtcttgtcggtcttggtggaggctgtggagttgcccgagtcgctgctcacagaaagcgtgtgttccacgtggttgggggtggccgacagtgtaggacgtgtggcattaacagccccggtgctgcc

SEQ ID NO: 337860 - DNA, 171 bp, Homo sapiens
  chr2:218765473-218765644
  hypo
cgaatgctgaggagtgcaccccactgggctggtgccatccacactgagggcacactcaacagttactgaatcaatggaaacacacttcactttgatacactcgccaacacaagagaaaccccaggaggagaatacgactgccaccacaaaaggagcgatgagagtaatggc

SEQ ID NO: 337861 - DNA, 302 bp, Homo sapiens
  chr2:219145053-219145355
  hypo
cgttcctcacgtgcatctgtggagggctcctgtgtgcccagcccacgccactgggggttcactggggggtcacgatgtagtggggaagccaggcaggagcaggtatgggcatccactggggcagccagccagggcagaacaggggatggggacagagggtaggagaaaaggagggcggcagagcgcagtttgtgcagcagcagggatagaggtgaagacagggatctgcatcagcctcacagaggcaggtgtgcaaagggtgtgcgtgactgtgcaggacccatgcgcagatccgcaccagc

SEQ ID NO: 337862 - DNA, 669 bp, Homo sapiens; identical to SEQ ID NO: 331600
  chr2:219232221-219232890
  hypo

SEQ ID NO: 337863 - DNA, 312 bp, Homo sapiens
  chr2:219255979-219256291
  hypo
cgccaccgtggccgtggacatttaccagggggtgagcgcgggtgggtggggagggcgtgacccagagaggctccccgcctcgggcagggccaccggtcctaccacactcgtccctgcagggcgtgatcctgggctgcctgttcggccccgcggccctctacatctgggccataggtctcctggcggctgggcagagctccaccatgacgggcacctacgcgggacagttcgtgatggaggtagggcagggggcgggcccaggagggcaaggggtccaaggacagcaggcacactactgggggctagaactcc

SEQ ID NO: 337864 - DNA, 149 bp, Homo sapiens
  chr2:219294031-219294180
  hypo
cgagaccaggagcggggagggcgcacctatgtaggcgtggtggacggagagaatgaattggcatccccgaagctgatggaggtgatgaaccacgtgctgggcaagcgcagggagctgaaggcggccgtgcccgacacggtggtggagcc

SEQ ID NO: 337865 - DNA, 1020 bp, Homo sapiens; identical to SEQ ID NO: 331601
  chr2:219735657-219736677
  hypo

SEQ ID NO: 337866 - DNA, 427 bp, Homo sapiens; identical to SEQ ID NO: 280644
  chr2:219748349-219748776
  hypo

SEQ ID NO: 337867 - DNA, 707 bp, Homo sapiens; identical to SEQ ID NO: 331603
  chr2:219757371-219758078
  hypo

SEQ ID NO: 337868 - DNA, 807 bp, Homo sapiens; identical to SEQ ID NO: 331607
  chr2:219824277-219825084
  hypo

SEQ ID NO: 337869 - DNA, 2248 bp, Homo sapiens; identical to SEQ ID NO: 331610
  chr2:219845565-219847813
  hypo

SEQ ID NO: 337870 - DNA, 860 bp, Homo sapiens; identical to SEQ ID NO: 331611
  chr2:219857682-219858542
  hypo

SEQ ID NO: 337871 - DNA, 1342 bp, Homo sapiens; identical to SEQ ID NO: 331612
  chr2:219866310-219867652
  hypo

SEQ ID NO: 337872 - DNA, 333 bp, Homo sapiens
  chr2:220080617-220080950
  hypo
cggcagcttctcaggcggggtctgttctcttcctcccacgggcccctatccctgcttctccggctccaccctcccacatgccctttccactggggcggcacctgagcagccctgtgacactggatgtgccccgatccgcgatccgcagcacctcccctgtgcggcgccccaggtgccagcgcagtgagagctcgtgcaggtgggagaagatgagcagctccacccgccgagacgtgaactgctgcacccggatccacaggaaggtgcgcaggttgctcacgaagcctgcagggagccgggggacgcctcagtagggcctgggagctgagggac

SEQ ID NO: 337873 - DNA, 542 bp, Homo sapiens
  chr2:220150664-220151206
  hypo
cgctgacgctctctcctgtcaccccgcccctgctctctccccagatgtgttctgagctggatgccgggttccagaatcgctgcacagttccaacaggacagcgccttcccccatgcgctgggaggggaccctccatttctccccctcacccatgctgagtgtagagccggggcctgggtggcgggtgggggccgggtgggaggtggcagtagtcttagcctgtgcactctcttccttgggtgtttggtgctggctcctggggactacaaatcccagagtgcggtgtgcccggcctcatttctgatagatcccgcttgggggaggtggtgtatggttacggagctgtgcatcttgggacatgtagtagcccaggtcggcttgtcactcgctgtgagatggggagattttgtcttttgatttatccctgtagggctggcagggttgtagatgaagggggaatgatctgagccttggttcccctgacacgtcttgctagccccagggttagagtgggcagggcagagccgcgcagcacctgggag

SEQ ID NO: 337874 - DNA, 113 bp, Homo sapiens
  chr2:220316370-220316483
  hypo
cgctgcgcagcgagggccgcctcctcctccgggctgagggtgagcggcacaccctgctgctcagggaggccagggcagcagatgccgggagctatatggccaccgccaccaac

SEQ ID NO: 337875 - DNA, 1192 bp, Homo sapiens; identical to SEQ ID NO: 331615
  chr2:220348591-220349783
  hypo

SEQ ID NO: 337876 - DNA, 280 bp, Homo sapiens; identical to SEQ ID NO: 331619
  chr2:220378995-220379275
  hypo

SEQ ID NO: 337877 - DNA, 360 bp, Homo sapiens
  chr2:220427099-220427459
  hypo
cggggagctgggctgggcccacacctgtgacggtgacagtgaaggaggccgactcatcgtcaatttcacacaagtactcgccggagtcctcgagctggacagcgggcagcaccaggcggcggacagtgtcttccttctgcaggagcagcgcggggctctccaccacctcctctccatccttggtccagcgcacctctgcccagggccggcatagctcacaggtcagcaccacacgctccaggcgcacggctgccacatacaccttgccgctgggatacacgatccacgaggagacgtctggaggacagggacagccactgccgggcatgaggggtgtgccctgccgtcctccctgacccc

SEQ ID NO: 337878 - DNA, 119 bp, Homo sapiens
  chr2:220428140-220428259
  hypo
tgagggctgggtggcgggcagcaccaggcggcgatggggcccctcattctccagcaccacgaagtcactctcctccacctcctgcccgtccttgtaccaacgcacaggggcgtcctctc

SEQ ID NO: 337879 - DNA, 1040 bp, Homo sapiens; identical to SEQ ID NO: 331621
  chr2:220435309-220436349
  hypo

SEQ ID NO: 337880 - DNA, 2230 bp, Homo sapiens; identical to SEQ ID NO: 331623
  chr2:222435997-222438227
  hypo

SEQ ID NO: 337881 - DNA, 3019 bp, Homo sapiens; identical to SEQ ID NO: 331632
  chr2:223169338-223172357
  hypo

SEQ ID NO: 337882 - DNA, 863 bp, Homo sapiens; identical to SEQ ID NO: 331634
  chr2:223183542-223184405
  hypo

SEQ ID NO: 337883 - DNA, 419 bp, Homo sapiens; identical to SEQ ID NO: 331635
  chr2:223185036-223185455
  hypo

SEQ ID NO: 337884 - DNA, 153 bp, Homo sapiens
  chr2:223753488-223753641
  hypo
cgctttgtttgcgacgctttgtttgcgtatccaagattgccatcttttaatgaagtagatgtgatggaaaaaggaatatactttgtccactttaatagtacgcctcactttgttttagacatgtctgtgcctgcgtctctttgagggatatac

SEQ ID NO: 337885 - DNA, 372 bp, Homo sapiens; identical to SEQ ID NO: 331638
  chr2:224808923-224809295
  hypo

SEQ ID NO: 337886 - DNA, 1535 bp, Homo sapiens; identical to SEQ ID NO: 331639
  chr2:225906071-225907606
  hypo

SEQ ID NO: 337887 - DNA, 337 bp, Homo sapiens
  chr2:227841945-227842282
  hypo
cggcaagctccccctccctttagttttgcatttaacacagtcttgccttcatgactgccgcctcctttttttctgtaaacacaaatatgaagtgtatttgctttgcttttcagccttgtctgccccactgagtgtccgaaatagccggctggaattcatgagaatgttacgtcttcagatgtttataatccaaaagaatcccttatggtttttaataataaaacaacttagatgtcggtattttgtgttggaaaggcgagcaaagttcacaatgcagcaattacaatgcagtgcattatgtataatttgtagcctgccccaggagcaatggtgaacc

SEQ ID NO: 337888 - DNA, 794 bp, Homo sapiens; identical to SEQ ID NO: 331643
  chr2:230578412-230579206
  hypo

SEQ ID NO: 337889 - DNA, 128 bp, Homo sapiens
  chr2:230795444-230795572
  hypo
cgacagtgagatgccgtctcaaaacaaaaacaaaagagagatgctttaccccttcgccactgcacctgagaacctcagcccagctcagctgtgctggagccctcctcgaggtgtgctgtggttttccc

SEQ ID NO: 337890 - DNA, 131 bp, Homo sapiens
  chr2:231676894-231677025
  hypo
cgtagcctttcctagcactgggacctgaaaccggtttctctccttggcgttcttaaaggagagtcaagttacagtatcatgtagtggacagtcattgccgtggcattgcagtaaataaaatgctcaactcc

SEQ ID NO: 337891 - DNA, 441 bp, Homo sapiens; identical to SEQ ID NO: 331646
  chr2:231902096-231902537
  hypo

SEQ ID NO: 337892 - DNA, 54 bp, Homo sapiens
  chr2:231977489-231977543
  hypo
cgtaagacgatttagaagaaaaaggatttcttttatacataatttctgaacatc

SEQ ID NO: 337893 - DNA, 177 bp, Homo sapiens
  chr2:232283630-232283807
  hypo
cggggccccgggagtcgcaggcaccctgcctggacgctgttgtggggcctgaacgaagttcactgctgccggcgcccaaaagcgctcgctccagctcctgcacctgctcaactgtgtgctccctttcacgagggtcggaatgcggtggatctgagagagtggagtctgatcccgccc

SEQ ID NO: 337894 - DNA, 500 bp, Homo sapiens; identical to SEQ ID NO: 331650
  chr2:232479181-232479681
  hypo

SEQ ID NO: 337895 - DNA, 612 bp, Homo sapiens; identical to SEQ ID NO: 331651
  chr2:232526742-232527354
  hypo

SEQ ID NO: 337896 - DNA, 2062 bp, Homo sapiens; identical to SEQ ID NO: 331653
  chr2:232790030-232792092
  hypo

SEQ ID NO: 337897 - DNA, 117 bp, Homo sapiens
  chr2:232850673-232850790
  hypo
cgtctagaacaagtcgggtaagctggcttgctgagtcgtctggcttttattttttgcccatgctggatgcttcagtccgctcctggtgcccttggacatcagactctgggttcttcc

SEQ ID NO: 337898 - DNA, 257 bp, Homo sapiens
  chr2:233198455-233198712
  hypo
cgctgccgacggtgaggctgtgggtggtgccagccttccaggcctggctgggcagctctgggcttgtcaggctctgacccatcccgtcccgcagatggcactgtacttctgctcggggctgctgcaggacccagcgcagttccggcactacgcgctcaatgtgcccctgtacacacacttcacctcgcccatccgccgctttgccgacgtcctggtgcaccgcctcctggctgccgcgttaggtgaggggtgcagtc

SEQ ID NO: 337899 - DNA, 887 bp, Homo sapiens; identical to SEQ ID NO: 331654
  chr2:233283264-233284151
  hypo

SEQ ID NO: 337900 - DNA, 1185 bp, Homo sapiens; identical to SEQ ID NO: 331655
  chr2:233351605-233352790
  hypo

SEQ ID NO: 337901 - DNA, 1557 bp, Homo sapiens; identical to SEQ ID NO: 331657
  chr2:233497794-233499351
  hypo

SEQ ID NO: 337902 - DNA, 147 bp, Homo sapiens
  chr2:233986790-233986937
  hypo
cgtttgtttggatgttctgtcctcaggcatccgaaggcgtctccatgaggttcttcaccaagctggaccagctcatcgagttttacaagaaggaaaacatggggctggtgacccatctgcaataccctgtgccgctggaggaagagg

SEQ ID NO: 337903 - DNA, 135 bp, Homo sapiens
  chr2:234206672-234206807
  hypo
cgtgacactaaggtgtgccttcaaaagtgaatgggctgtactcctccgcatggctttttctctcgtgtcctgctttaataagtcctgcttacgttagaaattcctatttttcatctaaaaaactttggaaatccc

SEQ ID NO: 337904 - DNA, 995 bp, Homo sapiens
  chr2:234372729-234373724
  hypo
cggacctcacccccctgggcctcgcgctgatcagcagtgcacactctccatttctctctccctccctccgcctggagcagcagctggatccgcctcagaaggagcagctggggagtgctcttgccgagatggaccgacagctcaggaggctggcagacaccccgtggctctgccagtccgcagagcccggcgacgaagaggtatgtggctcatagggctgtgcctgggtctcccggacatggtggctctcgcctgaagtgcctgtgttccttgtgacccgtgtggctctgggatcaagatcgtgtcgctccggcagcccctgaggggccttctccagacttcgctattaaaatgctctttaaggcagggagggacagcaggtaggaaggagttctgggctgggattaagagtgccccttgaggaccagggacctgttgtcctctgaaacagaactgcagggcttcctggacagtgggtagaaggaaggctgagcccagccccacagcctcccccgagggtggagatgtatcatgggataaatggcagccttttgggatcccgctgtggacagggcgcagttggtgtgcgccactccccactcacactctcttcctgtgtgaacagaaagactccagctcgtcgcaggtctgggagggacccgaggacgcagggcatagcggaccctggggtggagtcacattcttctgcagggagtgctggctgaaggagccctggagagggccgtgtctggacaaggacaaaccccagcctgtctcttggcttccctgcttcagagatagaacacagaggggccctgaggaaagctcatcttgggcagtacagttgcagaaggcaaataactgcaagacgccaaacctgggcacccctgcccagtggggtttgtgagacctgtgggcagcagtaaggcgaggggacagaggtgggcagctgcacaacagcaccctctttccggggccctggggcgttttttgac

SEQ ID NO: 337905 - DNA, 399 bp, Homo sapiens
  chr2:234737283-234737682
  hypo
cggcccagttctgtaccaggagaagctgctgaagccggcagctttgctgctggagaagggtgccgaccaggaggaagacgaggccctgcgggtgctgtccctgcgcgccctcggcaacatggccctgggcgcccccaagaaggtactgtgcctggccctgggcccaggtcccgggagctgagggtgcaggccgggtgccctggtcagcctgggagggagggtgcaggctgagggctgcccatgcccctccaggtgaagcagtaccggaaggtcttgctggagaagtgcctgggccccctgagggagcccgtgagcaacagcgtgactgccgagggcatggaggccctgaccaagatcctggctgagctccgggaaggggatgtggggtcctctttcgac

SEQ ID NO: 337906 - DNA, 321 bp, Homo sapiens
  chr2:234751574-234751895
  hypo
cgcatgtcgttgcactacacgacacaaaagccagcctgaaaggggctccctgacagctaaatctggggttacttgagcgtcaaattgcataccggcaatggattataacatgtgaatcaaagaacaaaaagactccatgaattcctactgatcctaaaaaataaaaataaaataaatcaaagcatgagagggaactacaggaagcaaaaaaaagaaccagaggggagatagctcttttgagcagaataatgccaactgacgtgtgccaaggaacggcagagacagaaacaacctgggcggggacctccacccaggcgatcc

SEQ ID NO: 337907 - DNA, 1710 bp, Homo sapiens; identical to SEQ ID NO: 331662
  chr2:235859955-235861665
  hypo

SEQ ID NO: 337908 - DNA, 350 bp, Homo sapiens
  chr2:235950041-235950391
  hypo
cgaatagcactggcaacatcttcgatgagcttccagtcacaaacggactccacgcagagccgccggtcaggcgggacaaccccttcttcagaagcaagcgctcctacagtctctcggaactctccgtcctccaagccaagtccgatgctcccacatcgtcgagtttcttcaccggcttgaaatcacctgcccccgagcaatttcagagccgggaggattttcgaactgcctggctaaaccacaggaagctggcccggtcttgccacgacctggacttgcttggccaaagccctggttggggccagacccaagccgtggagacaaacatcgtgtgcaagctggatagctcc

SEQ ID NO: 337909 - DNA, 412 bp, Homo sapiens
  chr2:235961011-235961423
  hypo
cgctctgcacatcatctcttttctcccgtgaatcctggcagtgatcgatttcaggggacatttggtagtaggccagggaacatggagaatagagagcccatggccattcctgcgccgtctgctggaattctgcggggagcagagcctgccccactccctacactgtctcacgctgtgtgcctcttcctctgcaggccctactgaagatggactgccagggcctggtggtcagactcatccaggactttgtgctcctgaccacggctgtagaggtggcccagcgctggcgggagctggctgagaagctggccaaggtctccaagcagcagatggacgcctacgagtctccccaccgggacaggaacggggttgtggacagcgaggtgagcagcggctgagcttcgagctcacc

SEQ ID NO: 337910 - DNA, 1935 bp, Homo sapiens; identical to SEQ ID NO: 331663
  chr2:236402218-236404153
  hypo

SEQ ID NO: 337911 - DNA, 216 bp, Homo sapiens
  chr2:236452983-236453199
  hypo
cgttgcttacgaggttctgagtcccgcagggactggctttcttcctctgtaggagtttcctaccatgtaagttttagaaggaaaggatactctttggggcctcagcggtccccttaggctgagcatctgaaccttcccgtggtccgtgtggctggaaggaggcttccatcgctggaaatccatttctcaaggcgaggagccagccgggccgaccac

SEQ ID NO: 337912 - DNA, 172 bp, Homo sapiens
  chr2:236459184-236459356
  hypo
cgactccagactcagagttgatgagggtctgcaggcgtcggtctgggagccacagacaggtgtgtttgccgcagaggtgccgagggcccagcaggactgtagcacaggatcagcaccatccacacctgaggcgtggggatctccgggcatgatgcggaatgtagtgacgatc

SEQ ID NO: 337913 - DNA, 168 bp, Homo sapiens
  chr2:236603384-236603552
  hypo
cggggcaagtcctgctgtcactgcacagctcaccttgtatatgtggggtgctcttctcctctcctgaggagttatgggtgattaggaagcaaacgcgtctcagacttggagatcaaatgaagagaggctgtgtaagcaccaggatgcatggggggttccggcttcttc

SEQ ID NO: 337914 - DNA, 640 bp, Homo sapiens
  chr2:236648390-236649030
  hypo
cgtctggagggcctcggacactttcaggctgggatggggactctgattttttgcttctcaggcactgatgtggttcagacccaggattctaggagggaaggttcccgtcgcaggggagggaatcagacgtcgctctgggcggcagtggagctggcaggcagcctctgggctctggcagcattgtcctctgggtccagcgatttggggtttagacagggtttctggacggcatctgcacagaggagcggaagacaagagctgggaaccgatgcgtgccttccctctttaaaacaagagtttcgaatccccatgagggttccctagcgtggtctcagagcccaggatctggagggggacgtctgtcattggagaaggcagaggagccagggtggaatccttcccgctgcccagcaggagcagggctggcctagcgggccgggctgggcactgcagcaaccttgtaccatcccctcctgagagcatcaggggccgggacgtccaaggtagcaccaggcccctcatgcccgcaccccctcctcatggtcacctctgttcctgcagggtcccggtggtctcccgctaaccccgcgtggtctctaacgcctcctgtcagccgctgctctgctgtctccacccgtgc

SEQ ID NO: 337915 - DNA, 160 bp, Homo sapiens
  chr2:236672645-236672805
  hypo
cgtgcgtggctgtgacccgtgcgtggctttggcccgtgcgtggctccggcccgtgtgtggcggttgcccatgtgtggctgtgacatgtggaggcgaacttccacggcagaagtgccatgcttccgtaagctcttccgactggttggtaggcgcttttatc

SEQ ID NO: 337916 - DNA, 181 bp, Homo sapiens
  chr2:236675966-236676147
  hypo
cgttagcgtctgcagccttgaatcgggaggcaggttgggcgcaggcttctcgtgcgcaccagcgagcacccgggccaagcgtggaggctctgcgggctgggggtccggcccacaccatcagcctctgtgcagccgttgctttttccgttgaccaaagccatgaccttacctttatgcagtc

SEQ ID NO: 337917 - DNA, 366 bp, Homo sapiens
  chr2:236685979-236686345
  hypo
cgagactctgtctcaaaaaaaaagacaaaagtgatttcctgagctgctccgagctggagacagaaccagcagacatgggacagaagaagaattacaggtgtgaagcgcccgtgtggggctgattcccacctgcctcctcgttatcagcaggcagccttgcgtctgcctctgggagcagaaaccgttgtttcaccagcaaattacgctggctgtactcgccatgtcctgttgccatagaggacgagtcacagctgtctcacctgcacccctccaatcgccttctcagaatccgacgctggtcctaagtgccttcagctgtcacctgagcacgttcaagcctcctgcccagcaccttcctagagcacc

SEQ ID NO: 337918 - DNA, 137 bp, Homo sapiens
  chr2:236722564-236722701
  hypo
cgggccactcagtggccggactctcctcctaccgcccccgggtgaattccacgtcacccacatcgttctgccattggtggcctgccagagtctgttggtgtgttcttctgccggtgtgcttctctcgacgcccagcc

SEQ ID NO: 337919 - DNA, 131 bp, Homo sapiens
  chr2:236791021-236791152
  hypo
cgcttctgcccagtggtctctttggtcggcagggtgttcttctcctgcgtctccgttttcttcagcttggccctattgaagctggcgattccccccacgtctggtttgtctgccattttcttaaaacaatc

SEQ ID NO: 337920 - DNA, 317 bp, Homo sapiens
  chr2:236801881-236802198
  hypo
cgcgggtgtgccatgtccatcataaggaagcgccgtgtctgtagcgtgggtgtagcgtgtctgtggcgcaggtgtgccgtgtctgtggcatgggtgtggcttgtctgtggtgtgggtgtgccgtgtccatcataggggtgtgctgtgtctgtggcgtgggtgtagcgtgtctttggtgtgggtgtgccgtgtccatcataaggaagagctgtgtctgtggtgcgggtgcaccatgtccatcataagggtgagccatgtttgtggcgtgggtgtggcatgtccacgagggtgcaccatgtctgtggtgcgggtgtgcc

SEQ ID NO: 337921 - DNA, 348 bp, Homo sapiens
  chr2:236826196-236826544
  hypo
cgctctccgccgtgacagggaccggggtaataaggagagcttgattaacgtggtgcacttgggggagagatgagaggcttcacgtggtcctgttcgggggaggcaatgaggcaccggcggctctgttgctgctcccggagattaatgaggcctaagagtgcattaggaacagtgacaaaggtttgatctaatgggctcagtcatttttcctttgagtgacagacgcacagaagtaattggctgtgcagaatggcagctcattggcggtacttaaggatacattatccccgttgtgtggcccgcagaggctgtttatcaaaactgctcacactgcagacgcggagtcgc

SEQ ID NO: 337922 - DNA, 544 bp, Homo sapiens
  chr2:236839051-236839595
  hypo
cggcctgccggatcgcggtgtctctgctaagactcgctgggtcttttgtcttcacttccactcgatgttgcggttgcggttgggttgcgtctttgtatagggttgttcggtgcgagccatctgtggcatcgggtcccttcacattgctttgtcaggcaccatcaagattggcgtcccccttttattcctcccgaatagtttctgtctggcgcttccgtttgccatgcaggcaggacaggggctgctctcggtggtaaggtgcactatgtgccagcgtgtgggtcccatagactaactcgcgctggtttctgtggtctgcagtccgcggtggtgttcacctgacttgtttattcctagggaatgtcactagtgcatctgggtctcagatggcaagcggcatcagcctggtctccttcaacagccgacccgacggcatgcaccagcgctcctactcagtctccagtgccgaccagtggagtgaggctacggtcattgcaaactcggccatcagcagtggtaagagggggctcagccccacggaccc

SEQ ID NO: 337923 - DNA, 96 bp, Homo sapiens
  chr2:236840424-236840520
  hypo
cgcagacgccaccaagcagaagccttaaaggaagacatctccaaaccaagccgggagacgcggagtcagcgaggtagctccacaccatagcggtgc

SEQ ID NO: 337924 - DNA, 64 bp, Homo sapiens
  chr2:236897051-236897115
  hypo
cgcacctgcttcagatactactcagaatttcttgtccttaaatgccacccccaacccccgcccc

SEQ ID NO: 337925 - DNA, 211 bp, Homo sapiens
  chr2:236949342-236949553
  hypo
cgtttctcccggggtgcttacgccttgtatttgtgtcttcctccgtgcccagtcccggctgacgagccagagcgaggccatggccctgcagtcgatccggaacatgcgcgggaactcccactgtgtggactgcgagacccagagtaagtgtgtgcggtggtagcaggggctggcgctgtgtagctggagaccacatggtcccactaggccc

SEQ ID NO: 337926 - DNA, 139 bp, Homo sapiens
  chr2:237018173-237018312
  hypo
cgatcagcagccttggaaatgtcctagtcagcggcagcgtcggtgctctggaccggcagccatgggaatgtcctagtcggcagcagtgtcggtgttctagaccggcagccgtgggaacgtcctagtcggcggcagcgtc

SEQ ID NO: 337927 - DNA, 389 bp, Homo sapiens
  chr2:237032665-237033054
  hypo
gctgccccgacgagcgcttcgtgctcatggccacccctaacctgtccaggagaaacaataaccggaacaacagcagtgggagggtgcccaccatcatctgaggaacagccgtgcccgcctgctcgccgcacctgggacgcggcagcctcgccgcattctcgctcagaagtcgcagcacgtgagtcccgtcgcatcccctccctcttcctggtggccacctccctcccgcccacccactctcaccccaaacaaaatcacaaaacctggacatccctcaaggggcgaagaggcggccgggagactgcagaagtggctccttttcataaactcccctaaaccacacacaggagagagcgacgggcctcggccctttgatgatagcacatggc

SEQ ID NO: 337928 - DNA, 173 bp, Homo sapiens
  chr2:237542540-237542713
  hypo
cggaggcaggagcaccgccttataatagcagctcccaactaacatgcagggcgacttcgggctggcctcccaatttctctggtcgatgtcctcagctctgaggtcggggctggcggggcggcggccgggtcgatgtcttcagctctgaggtcggggctagcggggcggcagcc

SEQ ID NO: 337929 - DNA, 137 bp, Homo sapiens
  chr2:237999682-237999819
  hypo
cggtcacaggccatgtgccttttcccagtgttttacagcgggttgattggcaggactgggcttgggaactccttactcgttcagcaagcattctcttgtgcaccgtcgggtccgtagttttattccttcccggagcc

SEQ ID NO: 337930 - DNA, 615 bp, Homo sapiens
  chr2:238280432-238281047
  hypo
cgtgatgggcgtcagcagtttctgctccaggctgggcagctcccggaaggtgctcaccgagaacacatattcggggctcagcgagatcttcaccagctcctcctggtctgcgttcctggcgatcgtgaaaggggccacgccaaactgcttgagctccaccgccgggtcgtccacctcatcgtcagactttccagacgagatgaggaccaggaactgcgggacgccctcttcaatgcggctccccaggggcctcttgaagatgttcctggacacgtactccagggcattgcccacgttgatctgccgccctcccttgggcctcagccgctgcaccgcgttctgcacttcatccttgctggaatgggcgttcagcaggaactccaccttggggtcatcgctgaactggatgacagccacccgggtggtgtcaaagcccacgtccaggtagtcaaccagcctctctatgagggtgcgaacgtactggaactcaggcccggcactttgggacccatcgatgagaaagaccacgtccctcttgccaccaacacctgcgaaacaaatgtgagcatggcttcaccttcatcgtcaccaaattcttagcgttcatgagccacc

SEQ ID NO: 337931 - DNA, 226 bp, Homo sapiens; identical to SEQ ID NO: 331671
  chr2:238617178-238617404
  hypo

SEQ ID NO: 337932 - DNA, 158 bp, Homo sapiens
  chr2:238625990-238626148
  hypo
cggaatggctctgagcttctgcttctcttcgatggtgttttattccttcatcgcgtttgctttgaaggcatgagcagcctgttggagggggcgtgaaggctgctgggccggctttactgtcctgctctcccccgaggcccttcacctggggaagcttc

SEQ ID NO: 337933 - DNA, 336 bp, Homo sapiens
  chr2:238793972-238794308
  hypo
cgcctgcccctgcccggaggcctggccctggagcccacccacctccctgaggcctgtcgtgagcatcaggagctcccagtacagcatctggggctgcctcggtgccctcgtgggtttgttcatggcggtgtccgccctggaacttgccacatgcccacgagcactgggacccctctgtgctctccctggtggctgtggtgctgtcatccctgtgtgtgctggtggaatagcgtgggctccacggaaaggccctcaggcgtggacaggacagatggcagtgcccagcacagccaggtctcagaggatccaaaggcgagcattgcccaggccgaggcc

SEQ ID NO: 337934 - DNA, 34 bp, Homo sapiens
  chr2:238934785-238934819
  hypo
cgccgcccccgcccccacccctgcccggctgccc

SEQ ID NO: 337935 - DNA, 45 bp, Homo sapiens; identical to SEQ ID NO: 251705
  chr2:239006885-239006930
  hypo

SEQ ID NO: 337936 - DNA, 267 bp, Homo sapiens
  chr2:239074309-239074576
  hypo
cgtcctgtacctgcaggtgagtgcggcaggcttgggcatcgaggggcaccgcctgggcatggccacgggtggctgggtgcagaagggtgctgttagatgctcaggatcactgggtcgggtgcagcaccctcagactccaggcctgggagagggtccaggacatgccaagttctcactttggtctgggcgcagccaggcttcaagtcctgatctccttcctccaaacacagcccttccccgagggcacctgcccgcttgagcagctgc

SEQ ID NO: 337937 - DNA, 145 bp, Homo sapiens; identical to SEQ ID NO: 251716
  chr2:239079153-239079298
  hypo

SEQ ID NO: 337938 - DNA, 61 bp, Homo sapiens; identical to SEQ ID NO: 208613
  chr2:239082212-239082273
  hypo

SEQ ID NO: 337939 - DNA, 98 bp, Homo sapiens
  chr2:239083093-239083191
  hypo
cgtgtgagagagcactccgcaaatgccacggctgcgcatgggcgtttaagatcaccacggggctcccaaatcatggaccaagcaagttcaggagatgc

SEQ ID NO: 337940 - DNA, 34 bp, Homo sapiens
  chr2:239096420-239096454
  hypo
cgtcatctcccgctcagcagggctgctcaaccgc

SEQ ID NO: 337941 - DNA, 108 bp, Homo sapiens
  chr2:239188890-239188998
  hypo
cgagcccattcgccggtgagccactccaggacagcctggtgagaggcggggctcatggagaatccacccacatcagtgtctggagaacagcagggccgactagacctc

SEQ ID NO: 337942 - DNA, 193 bp, Homo sapiens
  chr2:239316302-239316495
  hypo
cggcgcaggcactgccacgcccttggccttggctgttggcttaggcaggtggcctgactccggcctccctctcccacctgcttggttggattcaagagtgctggcctcaccttgtcatcagagcatacgtgcagcattaggtggaaagtgcgaagggcagccctcagcacacagcacacggtgcgctccaggc

SEQ ID NO: 337943 - DNA, 448 bp, Homo sapiens
  chr2:239800534-239800982
  hypo
cgtgtgggaagattgggctatgtaggacaagctgtatttgtgcacctgcgcaaggcgggaccactgaaatttagccctggagttcgttcacggagccgctgaccacttatcccttcctcttcagcatgtgcttgccgctgagccatgcgggtgctgtgttctctgttatgtgccggtgtgtggactggaacccgcctgcagcagccactcccacctgccctcgggaccctgactgtacatgggctgagccaggcaaccaccggaagggtgagtccttccccaggactcagcgggtgagagactccggctcacctcacggcggaacgcagacacctgagagcccgcaagcctcaggacagagagaaacagaggtccaggtggaaatgcggaggcggcacgaggagggggccctggcctgggagcacgtgcgctgcaccacgtgttaccc

SEQ ID NO: 337944 - DNA, 450 bp, Homo sapiens
  chr2:239888414-239888864
  hypo
cgtggctccccgtccctccggtgaccaggtgggcactggctcctgatggttcgaagccccggtcagcccccgccatccctaaactagtgacttccacttgcgttctcccccagggtcttcggggcaccccacgggagagagcacctgcaaggaccataacacgtgaggctgtgctgagtcctacgacaggcaggaacttgtacttggcccccggcgacccgggcgatttgcgggtcttcctcttggtttaacgaaggctctagcccggttccggagcccaccaagacgctgaagccatcagttcttggcttgcatttctagagccacccgtgtagttgcgagacagtgagaaagttcgcccgagttgcaatcctgcccgtgcctctgtctaggagcgactgtggcttcgggttaagcctctgtctttacctgtagtgggagatgtctgct

SEQ ID NO: 337945 - DNA, 314 bp, Homo sapiens
  chr2:239949585-239949899
  hypo
cgaggaccggcacgcctatggaggggacgccataactccaggccaccaagcccttcccctcactgccccagaagagttttaatctttaggacaacgcaatcagaaccagatgttcccccaaacaggggccgggccaaggcgcgccctacacacagcgccgctgagccaacagagttgcgtcttttgtctggcgtggtggcccacgctgcgcgcacagccagggacccagctgccgacaccttgtttccccccaggcatgttgaccacaaggcacagagccacgctcgggtgggcccaggcgcagcatggggctc

SEQ ID NO: 337946 - DNA, 97 bp, Homo sapiens; identical to SEQ ID NO: 251745
  chr2:239957317-239957414
  hypo

SEQ ID NO: 337947 - DNA, 902 bp, Homo sapiens
  chr2:239969842-239970744
  hypo
cgcacgggcagaaaccagagctgggagggcaagtaacgcagtctttatttacaccacaagataacacgttgcgtgatgtggtacagaatactggactccagtgaagtggaaagaaggtgaccgtcagaagaggatatcattggtcggtgaaaatccacccacacaaaacaagacaagaatgagaaaaccaaacacaaaacctccaactccactgagcaaaagaaagaaccatcgggcacgtccagacaatccaagagaaacggattaaattacagaggtgaatggtggccacggccagtgcgcagctcacggcgggcgcgaacaggcatcaggtaggttacagtgtcgttacaacttggttttctaccacattccgtaagaagctcttgggtgagtaaggttcaagccccctgtatagatagatagatagatagatagatagatagattatatatgtttgtcattctcatcaattggaaaatagcgcctccactatggagcacacacggcaaaaaaaacaaacaaaaactgttcgctttctttttctttcaatagcagacttttaatcaatgccagagacaaagtgaggccgagctaagaacacgctcagcttcgttacaatgaagaaatggtttcctttcgatgcaaagtataattgtaaaccacagtgctcgcacagttcacgactgcttaaagtgaaatcttagccatacatcacctaaaagtaattaaaaagtcaacacagctgtgcggaaaaggggactctttcgagtccgcccagttctcaatcagaataaaccgtcacaaggccagtgagggcgggcggcgctcgcctggcccgtggaaggagataaaaggaaacaaacaaaacaaaacaaaacaaaattcctccaaatcaactc

SEQ ID NO: 337948 - DNA, 811 bp, Homo sapiens
  chr2:239973912-239974723
  hypo
cgccgggctgcagcccctggccccggagatgacggctggtgcccgtgcttgaggcgtcaggccagctcgcggtgccagcactgccaggctcggctggccacaggaaactgtcccaccgattcctgctgtttgttttttcttaaggcattgttcctcagacttcagaaaacccagccacaaaaatccaccagagcaataaaaaaaaaggcacaaactcgcatcttccgatggcttttgagaaactcaagccagctcccccagctcacattcctgtttctgtccagttttgttttctttaaaggtccctctgtcccccacccgggtgcagaccccccgccgcacaccgctatggttcacagaggcgggccacagccgtagaaaacgtcctctttaaaaaaaaataagctacaagatgagtcgagtggtttacacagagactgtggagttgtgggtaataaactttaagcaccagttttaatcaagtttgttttgtattattagatctttgatatttgttttctgtgcctcgtgtcaactgaattcggcagctcggccgcctgttgccacaggctcctttcttccacggcgtcccttgcgggacccgccagagtgtgcttggcttccgcgtgtccgtgtgtctgcgcgtcgccggcgtctgtcccgtgttccctgtgaggctgccacgcccaggcgtgcatgtgcgtctcgagacctgtgggcctgggcggcagaaaggcttcccgtggctgttgcacgctgggtgtccctgggtgctccaagagagccccacggtgggacgcaggcgtgacac

SEQ ID NO: 337949 - DNA, 161 bp, Homo sapiens
  chr2:240061326-240061487
  hypo
cgtcccgagtccgactctagccgtaggacacaggacaaacgcttcgcactgacctccgccgggatgctggggacggcgggcgcgataccgttctccgcgctgacgctcccggagctgttgttgggtgagctgggtccggagcctggggcgctgctgcacgc

SEQ ID NO: 337950 - DNA, 150 bp, Homo sapiens
  chr2:240165146-240165296
  hypo
tggataaattaacattctaaagtgtgtttggtggggggttgctgacatagacaaaaacaatgaaaccgctgtgactcaagagtagtataggtcacacctcactgtgcacaccccactgtgctaacagagctgcttttcagacacgggaac

SEQ ID NO: 337951 - DNA, 457 bp, Homo sapiens
  chr2:240167455-240167912
  hypo
cgagcctgcccccaccttctattcaatatgtctttcctgagcatctgctgggtgatctacctaacttgttccttcacgaatatcccaacagtcttcagttcatccccagcccctatgtgttcaagcagacacacacgtctggttcacagctcagcgagcaggccctgagcgtctgggaacgtgagagtgagcaacgcagaggcctggccccggcccagcagaaccggcaacccacactggctgcctgcgtccagtcccgccatggggtctgcctggtgccagcacctgcccagacacagggcagaggagactgcaggggggtgtccagctgctctcacgtgccaggccaggcttgctaacacctgtggcttagtcgggtgatagggacaaaacgtgcaaactgagcccgctggacacgcagactcagcaggcaggcagagcccggtggggaggcaaa

SEQ ID NO: 337952 - DNA, 383 bp, Homo sapiens
  chr2:240168801-240169184
  hypo
cggcaatggctggagactagctctgcggtctgctcgtggataaccgcgctccctcgctgccgggccacccgcacagccgggcaaaccaaaaggcccactttttcatgctgtacccaccacttctgtttccccgcaggcatcctactttctaaactaacaccttttcactcccgagaattctaacaaatattatacaattcctacccgcatctaccctccacctggacgtagaacccgtgtgggaggcagtcctgcagggtttggggtggaatatcccccctgtcgagtggagacgaggctgacatgaggagtgaataaacgaacacagataaagaacgaggcacacagtacgtgcggggcgagagactccctttgctcctccc

SEQ ID NO: 337953 - DNA, 288 bp, Homo sapiens
  chr2:240213554-240213842
  hypo
cgggagccgccgattacatttgcatgaaaatagaacctttgtttgcaagagttcccgctccagtggatccctcctttgtctgcagcacagcaactgatggggcaggatgctggtgtgtgcacacagcccagctcaggacagccacgccaggggctgcgcgcacggcccagctcggcccagctcagcccagctcagggcggccacaccaggggctgcgcgcacagcccagctcaggacggccacgccaggggctgtgcttgcccatcgtggcaaggcaggcaaggggac

SEQ ID NO: 337954 - DNA, 471 bp, Homo sapiens
  chr2:240226690-240227161
  hypo
cgcgctttcttccagccggcctggggcatgtcaggaggcagggcctgtactgcaggctctgtgttcttagacagcctttgcagggggcagaggtgcccactgccacatgggcacacacaggaggctcaccacgtttcttcaaatgcagatgacaaagcagcttgagtaacacaaatacggccacactcatctgaggattgctgctgtgttttctaactgcatggccatgaccaagcagtcggttttcatccaggttggtagtcaggtttctgaaagcgatggcagtcgcctcagggctgacacggggagtctgcttggcacaccttcaccctcgttacattttctggacaatggtagggaacattccttactccgctggcctgtcagcttggctaagcctggtgcaagtggctcgctgtgggtccgcggctccattacgggggagtctgggtcatctgtgagcccaacagc

SEQ ID NO: 337955 - DNA, 744 bp, Homo sapiens
  chr2:240270283-240271027
  hypo
cgtgggctttccgtccacactcccggtttcatgccagggactctggcttcaaggcagaggctctgtgtcctgacaaacgcatcctgccctgccacagcgcatcccctcagggagggtgtggagggctggccgggcaaggggcgtaaggctccagggcctcctttcaaaggagagcccttccaggctaagtcaatccaggttcttccctcaggccgctcacatcattagaaatcgttctttagagcaataaaatcccaacagttaagcagctttgacgtcagagaaccagggcctggctctggcaaagttcagcgggaacagcaataaaaccgtaacacaaaactcacccagcagcagaggactttcacagaacacaggagaggaaagccacacacactgcactagaagggcacttcatcagcagggcaaagccaagtcacatgacaaatgtgagagggggcccatgggcggctggactcccccagcccggcctgcccagggagtgagggcggcacgggcacccacaccaggccacacaggagcagggcccccatgccagatgggcaggcaagggtgagccaggcaggcaagagtgagccgggtgggcagggcgaaggacagggccagctagcagaggacggcacgagagacacacggagggaggggaggtgcagccaggtaggccccgaacaccacgttgccaggactcggctcctcggctcaaggaaaagggacagcggttcc

SEQ ID NO: 337956 - DNA, 94 bp, Homo sapiens
  chr2:240316127-240316221
  hypo
gcctcctcacacgccggggccctgggcgaagcggctggagaacaagctgcacacacctgccttggccttggcacaacagtcgcatttgccactc

SEQ ID NO: 337957 - DNA, 80 bp, Homo sapiens
  chr2:240319796-240319876
  hypo
cggaggaaagcccggccacagcctgtcgccccgctgcctctcagcaacggcagttctctcggcctctgcggctccttcgc

SEQ ID NO: 337958 - DNA, 155 bp, Homo sapiens
  chr2:240567524-240567679
  hypo
cgtatgcattgatagtgtggtcctcgtgtggccgatagagttgcactgtggatatatcaagcgtgtgggtctttcgcctgctgaggggcgtctgggctatgccagcgtttgaagttgggaatacgctcagactttgtgactttaccttgcagggc

SEQ ID NO: 337959 - DNA, 743 bp, Homo sapiens; identical to SEQ ID NO: 251810
  chr2:240658161-240658904
  hypo

SEQ ID NO: 337960 - DNA, 106 bp, Homo sapiens
  chr2:240672200-240672306
  hypo
cggcgcttgtccctgggatctccctgggcagggccaagccaggcgggtcattctcctgggagcaccgcactcattcccaggctctacctagcggcgctgtccggac

SEQ ID NO: 337961 - DNA, 174 bp, Homo sapiens
  chr2:240690358-240690532
  hypo
cggtggctcggcaaagtcagtccctcacacatcctcgatccaggtcccgcacgtgccccggctctgaggtttagcctgttggctgatggggggaaaggtgtatggggcctttgtcgacagcacatatgccgggctgtggagtggggcccagggtgcctgcgagtgtctgcactc

SEQ ID NO: 337962 - DNA, 339 bp, Homo sapiens
  chr2:240700344-240700683
  hypo
cgccagcatcccctcggggcctgggaacagcactgcgagccggccgcacctgtgctggaaatcgccctcaggctgccgagtaattagttccacggttggatgcaggcccgtgctgtgacttgaagtcagtcggcgtggaacacatttcccatgtcgaggctgggcctgaccacccttctcacggtaaaggaggaagaaaattgcttctttgatggcatttgtgataggctggaaagcgcacagtggagtgagccaggaggcgctggctgggttcccacactggccgccgtcagcacccatcttgggagggaaaaaggagggaccacctcgtgtccccac

SEQ ID NO: 337963 - DNA, 225 bp, Homo sapiens
  chr2:240725299-240725524
  hypo
cgatgtagcgtcattatcctggcgatgtagcatcgttatcctggcgccgtagcgtccttatcctggcgccgtagcatcacagcacacctttccccggttcaccacctctgttgccagcggccaccagggaggacccttcagtgctccagcagcagccaaaacatgttaccgcaaattcttaacaagattcaggaggaaccaatgtggttgtctcgcaggcttgac

SEQ ID NO: 337964 - DNA, 117 bp, Homo sapiens
  chr2:240809618-240809735
  hypo
acctgggacacctgtcactccgatggagaatcctggacacgcagcctcacctgggacacctgtcactccgatggagaatcctggacacgcagcctcacctgggacacctgtcactcc

SEQ ID NO: 337965 - DNA, 296 bp, Homo sapiens
  chr2:240906462-240906758
  hypo
cgtcataaataacaccgatgtgccccctctagatttatgtgcttgagataaatttctagaaatggaactgcttgcttaaggaaaaacaataaacagagcaatagatgctgacgcagccatcggaatgggttgaatttaataacgccaagatgctgctccagatcattatgctgctgcttacacttcggggctgattcagagccttggtttctcgttatgaatttataccaggctcttggccttttactgcctcatgcatgggtcggcaaactgtagcccacagatcaaatctcgcc

SEQ ID NO: 337966 - DNA, 100 bp, Homo sapiens
  chr2:240928864-240928964
  hypo
cgcggatatggatcgtgctcttcccagtccactgacattgggatttgcagtgcaggctgcaactcacccgctggttcccagcgaaacttacacacgcctc

SEQ ID NO: 337967 - DNA, 213 bp, Homo sapiens
  chr2:240930596-240930809
  hypo
cgggatccatgaatcatgcttccacagacagccacagagctgcgaacctgcggcaagctgaagatgagtggacggtaggtatagcgtcaggagcgtcctagtaaaaaccgcgtcgctcatacacggttagtgatccaataatgcaaatgcccctccaagaaactgctgccaggataacaatgatcgtttgctttcctaagtgtatttatgtgc

SEQ ID NO: 337968 - DNA, 110 bp, Homo sapiens
  chr2:240965878-240965988
  hypo
cgattgtaaaacagtgggaatgcagctgtgtaaactacggccggttctatggatgtttctataattgaagaattgctttttgtcaaaaatacggattcccggtccccaac

SEQ ID NO: 337969 - DNA, 224 bp, Homo sapiens
  chr2:241157285-241157509
  hypo
cgcctttccgcacctgctgtagtccaaccacacgggcactgggcggtggccttgatctcagtccccgttgctcacggggtctcagatcccacctgtgaggggctgtgctgacccgaggccccttccaggacccgcggggttcacaattcaagtgactcaggccctagaaggcttgtaccatacaagtgcaggttgacgccccatagcagggctcacagctttgc

SEQ ID NO: 337970 - DNA, 114 bp, Homo sapiens; identical to SEQ ID NO: 251842
  chr2:241262543-241262657
  hypo

SEQ ID NO: 337971 - DNA, 244 bp, Homo sapiens
  chr2:241286564-241286808
  hypo
cgccgccagccctaccggggattcaggtgagtggccaagagcctggctggacttcacggggtatccagccgcggcacaggcagtcaggcccgccatgaagtggcacttggggcaacccgcagagcccagccaaagaaagcacgtgtttcggtgagaagcgagtgtggttgttctgcagggaaagaaaccctcccgggcgtgcagagcagatgagctcactgaacaattcgggggtgatttcagc

SEQ ID NO: 337972 - DNA, 172 bp, Homo sapiens
  chr2:241373330-241373502
  hypo
cgtagacagtgacggggtaactatagagcctcaggccgggttaacctcaagtccagcttcctaggcccaggcagccctgcctgatcccgcagtgcgtgagaccacacagagagagagcgggatcgtgggcccaggctcctgaccgtgctggataaggtgtgcaggcagccac

SEQ ID NO: 337973 - DNA, 784 bp, Homo sapiens
  chr2:241380567-241381351
  hypo
tccctacagcaggacggggggcatacctacctggtggccgaaccgcagggctgcacatcagacctcggaggagagcttagtgggtgtctgagcatgcccatgtctgttctatggcatccatgtgcatggcacaggtgtcagccatgggctggcactagacaggagacgagccaggggaggggctcacccgaagccacactggtcaggtctggcctggggccccacatctgccgtgcccgggccagtgagaggctggacgccttttcttaagccagaccgtcctcacagggcctggctcagttatttcagatcaagactggacccgtggtggaggctggggtgggcactcctacatgcggggcctctgcccagccctggccctgtccagtgtcgacgtgcccagagccctgagccggcctggatcttgccagtcgccagcacagccctgtggggcccgggatcttgcccactttacgtgggggctccagacaggagccgcctgcccggagcctgggctcctcgctgccgtgcctgtggtggcttttctttgtctgggaacaggcctgggcaggtgccctgagccgcttgaagtctcctgacggggtggggggtgcagtgtagggtgttgaggcttgggccagggaagcgggcggttctccctccacctccaggccccacacccaggcgggagcacgcagcagccaggtgttgggtgagggctatgctgaggagcagggcccagagctgcagcctccttggctgcccttggcccgccgtgggtggc

SEQ ID NO: 337974 - DNA, 443 bp, Homo sapiens; identical to SEQ ID NO: 222057
  chr2:241393136-241393579
  hypo

SEQ ID NO: 337975 - DNA, 781 bp, Homo sapiens
  chr2:241541936-241542717
  hypo
cgcccttcagccgtgttcatgattgtctcctggcctctgctgtttagaggtctaatgccctccgcccccggcgagccaaacccagtgatggtggttcctgccaccagcttcctgtggcaccgctgccactcccgccaggctcctggggcaccgccaccactcccgccaggctcctggggcaccgccggccactcccgccaggctcctggggcaccgccgcccactccctccaggctcctggggcaccgccgccactcccgccaggctcctggggcaccgccgccactcctgccagcctcctgcggcacagctgccactccctattaaccagcatggcacaggtgagcggtgtgaccttggtcttcccagggaaccagtgcttggcagctcacaccacacacgcctacgcctaccctccaccagccacagcagttgtggcatctctaccctgcccagcaaaagtggaagtgttgcctgtgccgctaggaacctccaggtttgctccacctccaggggccttgccagggtgtcaaacctgtgtctcgggacactgctgttaggtctccagcttccctatcaggcgcctcagcacccagtcctaccagtgctcccgcctcccgtccccagctggctgggcctgcagccccctcctgtgccccgagctggccgggcccgcagcccactccctggtcactggatgttgctgacacttcactcggtcagagccctagcacccaaggggggccagggcctgacgggggtggagcgaggggtgggccgc

SEQ ID NO: 337976 - DNA, 40 bp, Homo sapiens
  chr2:241543513-241543553
  hypo
ccctgggaacacctgcggggagaagcgcccttggcctggc

SEQ ID NO: 337977 - DNA, 298 bp, Homo sapiens
  chr2:241689824-241690122
  hypo
cggcctttggcccacacgcacctgagatggcctggacggccacgcggaggaagcccttcacctcgcccttctcgctgacgattgccacacggtgtaccaggggaacggggtacagcaggttgctcaggtacacgaaggccctggggagaagcagaggcggcggtcatgggccacccctccacgcatgttctgaacggcagcggtggcagcatggcctggctcacgacacaacatggagctgcaaagcagagggaagccgccggacaggacagccaaggccaggacagcaagagcgggc

SEQ ID NO: 337978 - DNA, 135 bp, Homo sapiens
  chr2:241697789-241697924
  hypo
ggaaccaggggaagcggtcatagaaggggtctccgccggtcaccacgttgtcacagtcctcgatgacactggagggcacctctgcagcgcggtcgtacatctcccgcatcaggtccagacgctgcctgcagggac

SEQ ID NO: 337979 - DNA, 827 bp, Homo sapiens
  chr2:241721648-241722475
  hypo
cgcttcctctcagggctccccagccctctccatgtccgaggggctcctccgcgcccctttcagctcctcccagggcccccacgccccccgggccacactttcccacctcggtgtctcccagcagcccccgccccaggccctgccgtgaggccgccccggacgccctccgtccccgcaggcacaggcaccgcacggggcctcccacacccgctttcttccttcccgggatccacccccacgtcccccatctcccagcgcactcactgcccgccccgcccctcaccacagggcgccaatgcagggcagacaccgccaccagcctcccgcacctgccccggggctgaaggaagccgcttaccttgttgggtccggagtcctgaaaaggaaaagacagagagaggctgaggcccggagcgaagctggcgcgggctgtgggggcggaagagcaggcggcccggctgcctcgccctggccatgactcaggctctaccaccccgtggtctcctagacagcagctcccccaggcagggtccctccagggccgcccttcccgggcccaggcctgggctgcctgctgcacggggccaactgtggccatagccccactttacaggcggggaaactgagggtcccgggagaaaccagggcccctaccccttctccagcatgtgacactctggccatctccgggctctcccttgaacctggccacctcccagacacagggcccggaaacgagggtgacaggggcaggatggggcgccaaagaccctctggggttctggctatggaagccgggccgggccactcaccatttcagccagggc

SEQ ID NO: 337980 - DNA, 433 bp, Homo sapiens
  chr2:241724232-241724665
  hypo
cggggggggggacgtccacacctggtgccagtgtaagtgtgaggacactacccgccctgcacaggccagcattgggcctgtccttgtgctgcccccactggcctgaccaccacccctaccctgaccaccagccactgcccttggtggcaccgcctgtgaggccactcactcaccttctccgtggtgatattggtctctgcgtcatggcgcttctgggtgaagatgatgttgaagacggcgtgggagcgactgctggtctcattcatgttggtggccgccacggtcctgaggagcagaaagccacgcacggttacccctcgtcctgtggccgggtgcgagatcgccggtggtgccagccctctgaaccaggtcatcggggggggcagttcccccagaccccaggggccgccctgctgggcctggcactgatggc

SEQ ID NO: 337981 - DNA, 103 bp, Homo sapiens; identical to SEQ ID NO: 251881
  chr2:241865150-241865253
  hypo

SEQ ID NO: 337982 - DNA, 204 bp, Homo sapiens
  chr2:241989256-241989460
  hypo
gacccctgcttcaacggaggctcctgcgatgcccatgacgactcctacacctgcgagtgcccgcgcgggttccacggcaagcactgcgagaaaggtatggcgggcaggggcgtccgggccggcgtcagcaccctggagagcgcccgcggtccgccgtcctgcttctctgctgtctctctccttgtttcgcgaattgctgacctc

SEQ ID NO: 337983 - DNA, 715 bp, Homo sapiens
  chr2:242004407-242005122
  hypo
cgagggggtcccctctccctagagggcccaacggtctccaagggcagagcgtctggccgctgcttgcccaggccccttccctgaggaacagggaggggataaaatcccccggtgggcttgaaacacggtcacacattcaaaagtgtgaccctcctggaggtacgtggccagggacaaagaaggactctgccagcgatggctgtgtcaggcccaagagccagacccggctgagccgccgacgggagccaggcatgcatagctaacggctgaccagtcccctccccttgttttgacccaaaccctgaagagctcttcccaccgacggccctcaagatggagagagtggaggagagtggggtctctatctcctggaacccgcccaatggtccagccgccaggcagatgcttgatggctacgcggtcacctacgtctcctccgacggctcctaccgccgcacagactttgtggacaggacccgctcctcgcaccagctccaggccctggcggccggcagggcctacaacatctccgtcttctcagtgaagcgaaacagtaacaacaagaatgacatcagcaggcctgccgtgctgctggcccgcacgcgtgagtgtccccgagcctggccgtccctgcccagcccctgcccctcgagggcagcgctggccccggcacctgcagggcggctgtcatgccgtccaccctcctagttcttgc

SEQ ID NO: 337984 - DNA, 352 bp, Homo sapiens; identical to SEQ ID NO: 251891
  chr2:242009176-242009528
  hypo

SEQ ID NO: 337985 - DNA, 163 bp, Homo sapiens
  chr2:242148773-242148936
  hypo
ggagtactggaagcggaagagcgccacgctggcctaccgctgggactgctctgactacgaggacactgaggtgagccacccccgctggaccacggtcacacccggcgagggccgccactgagcaccggctcccttccaggagaggcctcggccccagtttgcc

SEQ ID NO: 337986 - DNA, 339 bp, Homo sapiens
  chr2:242169887-242170226
  hypo
cgcagcacgtactgtgcgctcttgcatgaaattcccacccacagaggacgagctcgccaggcagctgtcaaggagatgccctcctaatggccaccgtggcagtgcagcctcacacaggccgtcgcctgcactgacccgtggtgtccatgaggacagttccactgccagccctggggttgtggcctcatcatcttgaggggaaggccatgccctgctctttcttctggccagccaggtgcccccggtgagagaggattctcacccactgtgcttccagccggctcaccttgaattcgtccatgattttgcgaatggctttgccgcgggcaccaatgatgc

SEQ ID NO: 337987 - DNA, 131 bp, Homo sapiens
  chr2:242190665-242190796
  hypo
gtcaggcctaaacaaacgctacagttaaccaaaaccaaaacaaaaccgtaaaagcaagtttatggtgtatgtgtggttcaagtagtgcgcaaaaaggtcactttgtgcctacagactctcgtcgctgtcac

SEQ ID NO: 337988 - DNA, 82 bp, Homo sapiens; identical to SEQ ID NO: 331676
  chr2:242269474-242269556
  hypo

SEQ ID NO: 337989 - DNA, 131 bp, Homo sapiens
  chr2:242277184-242277315
  hypo
cgggagcggctgaagaaaagggtgagtgaggctggcgtcctgccctccctctgggtgcgactcgggggcatggggatgaagaaaggagtgtgttcccacgctcagtctgctcaggtgtcgggaggcagggc

SEQ ID NO: 337990 - DNA, 477 bp, Homo sapiens
  chr2:242350123-242350600
  hypo
cgggagccatcgcccctggccaatttcttttttttattgttcacatcagagtgccttagtgtgttcagcacttcctttgcgctctcccatgtgtgtgactcagtctgctgagttggtttatcatctgaccttcacttggtgactgtttgtttcatgaaaggccttttgtgactttgctgtttcgtgaccgccttgcgttttgctcactgttgggtcactgccacttcccagggctcatttgctgtcttgctgtggagacatgtctatgttacattcagagaacatttggaattgatctctgtcttattttgaactctcttctagatacttgtttgccttgcaacttaagagagacctgctggaagagcgtttgacctgtgctgacaccacagcggcccttctcacgtcccatctcctgcagtgtgagtatctccccgccagcggggagcattcactgaccatggcacagatataccc

SEQ ID NO: 337991 - DNA, 373 bp, Homo sapiens
  chr2:242436371-242436744
  hypo
cgggtgtcacccaccctcggggggctgtggctggatcagcaggctgcccaggacctggacccgagtggctgcttcccgctggggcctccacatgggctggggccaacgtccctcgaccgtgctcctccctttgccgtcctcaggcaggccctgccttcaccacctctcacccacatcctccatcctccctccccaggctccaggtggggctcctggagggcacacctgggcccaagcccgctggccacgccctgggcacacagatcctggctgtatcacatttctgaggacggtgctgactgcccatcagcaggtgacgttgatgcagggtcacgtgactaaccagggcggcacctgcccggggatggacccc

SEQ ID NO: 337992 - DNA, 326 bp, Homo sapiens
  chr2:242440848-242441174
  hypo
cgggcacagcaccagcagggtccccgcctccccacaacaggcacctttaggtaggagccaaagtagcgggtgatgtaggggctgtcgcactgactgaggacagtgatctcctgctggatgtcctcgatctcatcctcggcctcctccaggtcgatgatcttgatggccaccacctcctttgtgtggttatcgatgcccttgtagacctccccaaacgagcccttgccaatgcggtcgagcttggtgaagagctcctcagggtccactcgagagtgctgtggggccagggcggggacagagggcagacagcgccggtcacaagaggc

SEQ ID NO: 337993 - DNA, 1106 bp, Homo sapiens; identical to SEQ ID NO: 331677
  chr2:242498020-242499126
  hypo

SEQ ID NO: 337994 - DNA, 624 bp, Homo sapiens
  chr2:242523762-242524386
  hypo
cgctttggaaaacaaacatcagcagataaaaaaaaaatgtacagcctacgcaagtgataatattcaaaatcctcagccataaaaataaaggccttttatttggtttttctatgccagtacagaaacatctggacaacactcttgagcctgcagaggctcacggccacacccacttctgccgcagggactgtctgttgaggagccgaaccgttgaggcacagtagccaggccctcccgagggctccagaagctctaggtttacggggtcaccttcttgtaggtgacgtgaagatgctgagtcattggctgtgtcgtggttgccatggagaccgtctgctcaagtttgccttcagaattcagcctgaacttccgggtgatctgagcaggagaatggaacaaagatagcttagttttatcttcaaaagattcaatcaatgcctgtgcgcccactgcatgccacacactcatcacgggctgtgagccaggcagtggccctgccagaggagggtagacacacagcccagggcccctgggcatgtcacaatccaggtgcccttcagctgcctccagaagaccaccaggggaacacagggattgtttatttagaagtcaccttttttgtcg

SEQ ID NO: 337995 - DNA, 175 bp, Homo sapiens
  chr2:242554503-242554678
  hypo
cgcgaaaagaaagaagccagacaaaaacgtatatattctatgattccaattagatgaaattcgagaccaggcagaaaggatggagggtggggaatctgaacggtgacggggaggggcttggaggggagtgcaaaggagaacctggaccgctggacgtgggtgtggctgcacaagc

SEQ ID NO: 337996 - DNA, 276 bp, Homo sapiens
  chr2:242566832-242567108
  hypo
cgcgaacacgtggttcatagacgtgctaacaatgtaccctcaaggaatcgctgctggcggagaagaacactacgtccacagaacgccaccgggcactgcctctggagcgtggcttcaacccacctctgaagcccactggcccgcatccttcagtttggggaacctgcccaaaagcagacactggctagcgagctgaatagacaagtgtgcggcgctttccacataaatccctaaagaatgacccaaagagtctgtcactgaagaacaaatccacac

SEQ ID NO: 337997 - DNA, 373 bp, Homo sapiens
  chr2:242572260-242572633
  hypo
cgctggccaccttgcagagaaacccctcctaacgggaagggaacatgggtacgcgaggctccggtactgaccgcggctgggcgacagcaggctacttggataggggacgctcactctcctcagctcatccagcttctcctgtagcttccgcacctggctgtcggagcggctgaccctctgccgcaggctcttcagctcgccgttcttcttctccacctgctcccgcaggcagcacacctggctcttgttctgccgggaggagaagcagtaggagtgcagtgagtcgatgagcttgcaggcccctgacgccgacaggatgacctcgttgatggacatggggctggcgtcgctgtgctcgctctgcacggcttcc

SEQ ID NO: 337998 - DNA, 222 bp, Homo sapiens; identical to SEQ ID NO: 251927
  chr2:242599563-242599785
  hypo

SEQ ID NO: 337999 - DNA, 181 bp, Homo sapiens
  chr2:242602207-242602388
  hypo
cgggccgggcgcggtggctcacgcctataatcccaacttcaaaaccaataaagtgggccgggcgcggtggctcacgcctataatcccaacttcaaaatcaataaagcgggccgggcatggtggctcacgcctataatcccaacttcaaaaccaataaagcgggccgggcgcggtggctcac

SEQ ID NO: 338000 - DNA, 567 bp, Homo sapiens
  chr2:242616820-242617387
  hypo
cgttccgggaaacgaaaagctgcgtgaccagcatcatctgcaggcacagccagtcgggctggggcgagaccctcggccctgctctggaggaggagctcaagggactgaagctccgcgggccgtggccacaagcgacagtgctggcgcccgacgtgccagaagccctggctgccgcctggaaagaggccacgtgggcagcggtgggcacgggcgactggagtctgggagagaggtaggggctgcggtcgggaggagcagaggcggccagcctgcgagtccactgggaggggagagtccagcgtcctgggagcagagccagacctgggactgctgagattgaaggaggcaggactgaagggagaggcagcacacagcaccctcctgaacttagatggccaggtgctgctgcagggcccatgcccagcgagaggccgcaccagaggacacagtggcaggaacaggctggcgctcgtgtctgaagaggggctgaggatgtggaggattgcgcagactctcacctgacccaccagacaaagcgccaaatgtcaacatttagcaaaactcatc

SEQ ID NO: 338001 - DNA, 691 bp, Homo sapiens
  chr2:242617764-242618455
  hypo
cggaaacggcagcagctttgctgacacaactgtgccagccaccacggtgtcatcctgagccacttctccacgcttcctagtgtgcaattctgggattctcaccttccagttcaaagtcgtgtctttcatgagctggtggaaacaccggagcgcccgctcctggaaagccccgttctcatagcgctcatggccaaacgctccccgcttggcagcatccgccagctgtaactggaggaacaggaccaggtcgggtttgggaaggcccacgtctggctgtttacaccaatctagggaaaaattctgccaagaaagaacccaacagttaaagcttagtgtagtctaggtttttgtttcgaaagtcgtaaaaacaggaaaaaatgaggggacatttggtgaggtaccaagatgtgagactgtttatattgtggctcgtttaatttttagaacctcaaacgtgtcggtttctccagtgtcacctttgtttttcctttgtaaacagacaagtggacagaaaagtaggtagatagaacggctgccagtccccgccacccacagcccaggccccatggaggccctcccagcacagctacaggcctgctggccaggagcaaacagtctatgtacagaacccctggagacccccggcctagaacgcctgcagcacagagcagctgggtccggacacaggcac

SEQ ID NO: 338002 - DNA, 101 bp, Homo sapiens
  chr2:242618731-242618832
  hypo
cgtccacgagaacctcccacagagcctgcggctctgtcagctgatccgcacagcaggaagaagcaaaggaatcatgagtcttgtcctccttattatacaac

SEQ ID NO: 338003 - DNA, 726 bp, Homo sapiens
  chr2:242664623-242665349
  hypo
cgaccttgcagggactcgccgccgcgacctcagtgtggcttttacaggactccccccgagcatcagcagggaccccggcggacgtgggcgggcgcgcgtgagctcgggctgcccggccgggcgtgcgggcggggacatggtaacctggtccacggagggcggccgccaccctcgcgtagctttcctgtggttttccaggactgtccggtacagcccgggctccgcgtgccccgcccgctggagcacctgccaccgaggcgcgcgtggggccactgccgtggcggcggctgccctcctcacactcggctccgcgccgcctccggccaccgtgcgctcccgcgtggggcgcctcggatgggcccgggagggctgggggctcttccctggaggaagcggcctccgcttcgctggcgccgcctttttagcttggacttcagtcctccctcggggactcacctccggagtaaacggctcttcattagcttggagtggccgcaggtcccgtgaccagcacccgcgagaccctgtgcgacagctgggctgatgctccgtttctctgggaattggtgattttttactgtgaagatgaaattaccctaatagcatgaagatcgtgggtctgtgtgtccgtgaagtgagtcccgtctgccaggagctgacgaaccacgaatgcttctgcctgtgctgtgcattcccaggcccgcagctcccggtcgaggggactcc

SEQ ID NO: 338004 - DNA, 159 bp, Homo sapiens
  chr2:242713983-242714142
  hypo
cgcccgcctgcagtgtcggctgaagagggtaacgtgcgtgcgccccggctgctcccggctgctcccggctgctccccggctgctccccgctgctcccggctgctccccggctgctccccggctgctccccgctgctcccggctgctctcggctgctccc

SEQ ID NO: 338005 - DNA, 432 bp, Homo sapiens
  chr2:242735082-242735514
  hypo
cgcagaagtggcccaatggcagagcaggagctccgctctcagtgtggggcctcgtttgggtttgggaaaacatgtcctctctcacgaagacgtgggtgtctccagcgggaccctgatcccgcgtggggcgcatggccctctctgctctgcggcccctctcgctctcctctctgtgcctgggaattctagtgtttactgggccttggccgctgggagcctcttcaaggtggttccattttgacgtaaggactggaggggtgcattgaagaattgtagagtgcaggtgaagggagggcctggaagctcctgtcccgtctcctagaagcgtggctgtggtggcactggcattggagtctgaggtgccgcgtgtgccgtgaggatgaagtgtgagaaattttgggaggtcctagttctaccatccccagtgtcttc

SEQ ID NO: 338006 - DNA, 442 bp, Homo sapiens
  chr2:242766046-242766488
  hypo
cgacgttctctttgtctgactttctgctcctgccgcgtgcgcagaggggcgaggaggaagcatttgcgcatgcgcagaaggctcgctccacgccacgtgcttcaagcgcgtcgttccgtttagtatgaaataaaggcccgcggggtggagaacgtgtctgttttccagatgtggagatcaaggcccggcaagtcctctgttgttgacggttctcaggtggtagaaacgatctcgcagcgcacctgcgtggcttccgaaaccgttgtctcaagcgtgttccacttgatgtgattaaaaaagttctcgtggccccaagcacctgctttacctgctcagaccagagtgtcgttccgtcccattcattccgcagctttccccgaacgcacacaagtgaaatgtaaatgtcagtgtgtgtgtatctatctcccgtttctcccaaagc

SEQ ID NO: 338007 - DNA, 130 bp, Homo sapiens
  chr2:242793077-242793207
  hypo
cggtcgcccccaggcagctcagcccctggacggcctgcaatggcctgcaccctgcctgcttctcctgaggaaatgcgctgacccgggctcatggtggagggtctgcagaacactggtggccaaggaagcc

SEQ ID NO: 338008 - DNA, 114 bp, Homo sapiens; identical to SEQ ID NO: 251959
  chr2:242815160-242815274
  hypo

SEQ ID NO: 338009 - DNA, 368 bp, Homo sapiens
  chr2:242832886-242833254
  hypo
cgtcccagccgaaatgttcaccgtgaatccggcaacctgtggagctgatttccatttctaaggaatgaggggggatggggaagaaccccccaggacagcaccaacagtccctgcggggacctttcccggacacccggccttctcggcggtgaggcaggtggcggcaccgacaggcccgggggggacctttcccggacacccagcctcctcggtggcgaggcaggtggcggcaccgacaggcccggcggggacctttcccggacacctggcctccttggcaaggcaggtggcggcaccaacaggcccgggggggacctttcccggacacctggcctcctcggcgaggcaggtggcagaactggttccac

SEQ ID NO: 338010 - DNA, 324 bp, Homo sapiens
  chr2:242833525-242833849
  hypo
caggagctcagaccccggcatcagaccggcctccgcagggaggagctgcggtgcccaggccaggccaggaagcaccatggcccactgcctgggcctcacctcacgaacgccaagcactgtggcgggcacaggcggagcctggcggcttcacgcccacaccggcagctcctccctcagcccctcgcccgccgctcccaagtccggcagttctggagcacgggaagctctctgggggttgctgggcagcaggacctggtctgagatgactgagtctgcccaggtcttcacgcgcctaactgagcgtgagcgtgtctgagtcttacc

SEQ ID NO: 338011 - DNA, 382 bp, Homo sapiens
  chr2:242925474-242925856
  hypo
cgtccacaatctagtggatgaatctcaaaagatacttcgagcaaaaacaccggacagaagcgtccgtgccagccccgcaggctgcctgtgtgccaggctatcccgtgccatctgatccgggagaagcaggactttcttgcacaggtactcagcgctgtggctgtgggaggagccgggagggccctggcgtgggtgggcttggggaaactgtaggagctggaaatatttcatatcttatttggggtgttgtttacaggggaacttgacaaactcatctaatggtacaatcgagacatctgtgtaaataaagtgtcaaaaatcatcctgctgacatccatgctccccgccccacggcacttcccggccctcagccctcccgtgc

SEQ ID NO: 338012 - DNA, 250 bp, Homo sapiens
  chr2:242933420-242933670
  hypo
cggtttggatcgtatccctgcccacgtcccacgtggacgtggaatctccagcgttgaaggcggggcctggtgggaggtgattggatcacggccggcgttcccacaaatggcttcgcaccgtcgcctccgtgacgccctcgtgacactgagtgagcaagttattgtgagacctggtcgtttgaaactgagttggggcccagctcagcgggcacgaccctgctctgggccacgcttacgcgcttgttcctaa

SEQ ID NO: 338013 - DNA, 32 bp, Homo sapiens; identical to SEQ ID NO: 251972
  chr3:3167655-3167687
  hypo

SEQ ID NO: 338014 - DNA, 1949 bp, Homo sapiens; identical to SEQ ID NO: 331682
  chr3:3840349-3842298
  hypo

SEQ ID NO: 338015 - DNA, 191 bp, Homo sapiens
  chr3:4347767-4347958
  hypo
cgcactctaccctcaaggtgtttacaactgtcacgattagcttcaatattcctgccgtgcgtgtgtgtgtgcgtttgagactattctataaatctgtttccaatcttgagtcatatttttctttgccatatccaagaacaatctgtaaaactatgtgcccgacgtatttttttaattaactcactttaagc

SEQ ID NO: 338016 - DNA, 798 bp, Homo sapiens; identical to SEQ ID NO: 331683
  chr3:4909962-4910760
  hypo

SEQ ID NO: 338017 - DNA, 521 bp, Homo sapiens; identical to SEQ ID NO: 331684
  chr3:5018754-5019275
  hypo

SEQ ID NO: 338018 - DNA, 58 bp, Homo sapiens
  chr3:5165843-5165901
  hypo
gcgcctggcctcctattgtaatattatgattttttgcgcttggaatgactatctttcc

SEQ ID NO: 338019 - DNA, 801 bp, Homo sapiens; identical to SEQ ID NO: 331686
  chr3:6902463-6903264
  hypo

SEQ ID NO: 338020 - DNA, 223 bp, Homo sapiens; identical to SEQ ID NO: 208732
  chr3:8595841-8596064
  hypo

SEQ ID NO: 338021 - DNA, 911 bp, Homo sapiens; identical to SEQ ID NO: 331689
  chr3:9956773-9957684
  hypo

SEQ ID NO: 338022 - DNA, 405 bp, Homo sapiens; identical to SEQ ID NO: 331690
  chr3:9993730-9994135
  hypo

SEQ ID NO: 338023 - DNA, 58 bp, Homo sapiens
  chr3:10011425-10011483
  hypo
cgggcatggccatggctgctcccgtcatctgctcctgcatcattcgtgattggtcagc

SEQ ID NO: 338024 - DNA, 110 bp, Homo sapiens
  chr3:10131952-10132062
  hypo
cgcatgcttttcccgtcttctaggcatacttttgttgttttcttccgtgtgatgatggctgaactagagaagacggtgaaaaaaattgagcctggcacagcagcagactc

SEQ ID NO: 338025 - DNA, 208 bp, Homo sapiens
  chr3:10541012-10541220
  hypo
cgtgacaaccgggaagatgggtgctcagctaacccttggtttacggaggagcaaactgaggcgaagtcactggttcaaccacacacaaccgaacgcacatgactgaataagcaattcccctcccacgcattacatgggaaaacaaaaagcatttgtaaagtgcttgcggacacattttagcgattagtactattatgatgaacatttc

SEQ ID NO: 338026 - DNA, 97 bp, Homo sapiens
  chr3:10638636-10638733
  hypo
cgagtacgcgtgcacacacacaggcacacgcacacgcaggtgcacacgcacacaggcacacacgcacacaggcacacacccagacacacacaggtgc

SEQ ID NO: 338027 - DNA, 216 bp, Homo sapiens
  chr3:11578015-11578231
  hypo
cgccaccacacacctagggaggatgtttgtgttccacggaggtcgccacccatctgttttcagagtaaacgtttgtgtgagcgcactctggcggggagtcccgagagcggaccctcttgccactgcacccataggtgcggaacgaacctgctgccccgaccctgcggctccgaccggggccgagcagcgaaggaccaccctggtctggtcacctac

SEQ ID NO: 338028 - DNA, 250 bp, Homo sapiens
  chr3:11581157-11581407
  hypo
cgtcttaagctatattcgttttctcttatgaatttaaaaaataaaatctattgatgcgcatacaatcaaatatatgtaaaagtgcacatttctgagctttgagaaacgtactcgcttgtggaaccagcacagttcggcgacatcgagcaggtctgtctggcctgtcctgccctgcacagccgcctggaggttcacctgcatcattgcgtgtgtcagcgcttggtgcctttctgtcgctgagtagcgtctc

SEQ ID NO: 338029 - DNA, 546 bp, Homo sapiens
  chr3:11655438-11655984
  hypo
cgaatctgctccaccaggagccggcgacgtcatctcagagcagctgcctgactttctatgactgtttccacatgtgtgaaaatggtagtgtgaacccacacacaggctcagagcgatacccggcacggtgccgcctcctccccacacacactctggacttacaggctttcttccatgcacgtttctccctccctagaatgtgttcagaagccctctctgccaatgcatactcatctgcactttcaaaacccgacttgagtgcctcttgtcagcctcagccccaagagcaccccttttggtgccatctacctgggctgagctgcctggcagcgtcccttgtgacgtgctgctggctccaactcaaaaactactcatttctcagcaacaccattgtgtgctaccgccaaacaggcgatcttgctctctgcagtaggttccagtccagaccctgaggagtaagatggtggtcccggaaaccagttcaaatttctcactggcatacagagtgctgaaggaaggctgtgtataggccccccgattctgatc

SEQ ID NO: 338030 - DNA, 76 bp, Homo sapiens
  chr3:12586167-12586243
  hypo
aactctgtctcggggaaaaaaaaaaggtataatcctttcttttgctttctaattcatcctttttgtttatgctagc

SEQ ID NO: 338031 - DNA, 129 bp, Homo sapiens
  chr3:12596394-12596523
  hypo
cgggaactaaattgacaggagactgagacttttcactttacgcttttaaaatatttgaacataataacgttcagatcgtgaatgtattccataaagaatgagataagctgaattttaaaaataagtggc

SEQ ID NO: 338032 - DNA, 79 bp, Homo sapiens
  chr3:12605281-12605360
  hypo
cggccagaatcacctttctttttaagcttgattgtatggatagaccacatcttgtttatgcattcgtccattagcgcac

SEQ ID NO: 338033 - DNA, 94 bp, Homo sapiens
  chr3:12626586-12626680
  hypo
cgagttgggtcctttcgcaccagcacagacttacctgatctcggttgttgatgtgagaataaggaagctcccccgtcatcagttcatacaatac

SEQ ID NO: 338034 - DNA, 33 bp, Homo sapiens
  chr3:12743274-12743307
  hypo
cgagtagttgggattacaggcatgcgccaccac

SEQ ID NO: 338035 - DNA, 370 bp, Homo sapiens
  chr3:12976966-12977336
  hypo
cgatgcggtagtgcctcttgcggatgacatcgttgctaaaggcaggcgagtcccagctgttgcgggcctccttgtggtaggtctgcttgctgagcgtctgctcccgcaggctgtcacgggacgatgactcggagctgcagttgatggtatcgttggagttggacgtgctgttgatgctgtcattgtcaccgtctgagtagtccgactcagacttgctctgccggttggctgagccattgatggccaagtggctgtccaggggcctggggggccggggccgcaactcaggctcctcccgggggaggctcttgggggcgccgctgtggggaccatgcttgggactgccctgctgcccgccaaggctgcgctc

SEQ ID NO: 338036 - DNA, 797 bp, Homo sapiens; identical to SEQ ID NO: 331697
  chr3:13324131-13324928
  hypo

SEQ ID NO: 338037 - DNA, 240 bp, Homo sapiens
  chr3:13367336-13367576
  hypo
cgtcacggatcccacggcccgggccacagccacacccgtcttggggtcgatgtggaggatgctgttggccgaggagctccaggttcctgagaggcctggagaggaagcacaggtgtcagccccctttccatagctggacactccagtcaaagcccagctcacctggatgacaggccagcttcctcgctggctgccgctacccccatgggggctcactcagcagcctcaggagacagccac

SEQ ID NO: 338038 - DNA, 549 bp, Homo sapiens; identical to SEQ ID NO: 331699
  chr3:13590435-13590984
  hypo

SEQ ID NO: 338039 - DNA, 788 bp, Homo sapiens
  chr3:13611739-13612527
  hypo
cgcgtgcgtgccggtgtgcaccgtgtctgtgtgtgcacacccagtactgacaggcttcctttctgattcccccagggtcttacaggagaggggaccgtcctgggctggcctggaccatggtgctgctctgggagcctgcaggagcctggcttgctctgggcctggccctggccctgggccccagcgtggccgcagctgcccctcggcaggactgcacgggcgtggagtgcccgccgctggagaactgcattgaggaggcgctggagccgggtgcctgctgtgccacgtgtgtgcagcagggctgcgcctgcgagggctaccagtactatgactgcctacagggtggcttcgtgcgcggccgcgtgcccgccggtcagtcctattttgtggacttcgggagcactgagtgctcctgcccaccaggcggcggcaagatcagctgccagttcatgctgtgcccggagctgccgcccaactgcatcgaggctgtagtggtggctgacagctgcccacagtgcggccaggtgggctgcgtccacgcgggccacaagtacgccgctggccacactgttcacctgccgccctgccgggcctgccactgccctgacgccggtggagagctcatctgctaccagctccccggttgccacgggaacttctcagatgccgaggagggtgaccccgagcgacactacgaagacccctacagctatgaccaggaggtggccgaggtggaagcagcaacagccctggggggtgaggtccaggcgggtgcagtccaggcaggc

SEQ ID NO: 338040 - DNA, 206 bp, Homo sapiens
  chr3:13679108-13679314
  hypo
cgccagcgcgcatcacgcactaccagctcaacttccagacgggcctcctggtgcctgcgcatatcttccgcattggccccgcgccagccttcacgggggacaccatcgccctgaacatcatcaagggcaatgaggagggctactttggcacgcgcaggctcaatgcctacacgggtgtggtctacctgcagcgggccgtgctggag

SEQ ID NO: 338041 - DNA, 632 bp, Homo sapiens; identical to SEQ ID NO: 331701
  chr3:13936742-13937374
  hypo

SEQ ID NO: 338042 - DNA, 150 bp, Homo sapiens
  chr3:14386858-14387008
  hypo
cgaggagctctgaaagagcagcgggtgcagcggagcgcatggaaggcaccactgcaatgttgacacgctgcctccggcctcctccattccacgtacactgaaggcaccgccacgatgctgacacgctgcctccggcctcctccattccac

SEQ ID NO: 338043 - DNA, 92 bp, Homo sapiens; identical to SEQ ID NO: 331702
  chr3:14443834-14443926
  hypo

SEQ ID NO: 338044 - DNA, 578 bp, Homo sapiens; identical to SEQ ID NO: 331703
  chr3:14443998-14444576
  hypo

SEQ ID NO: 338045 - DNA, 191 bp, Homo sapiens
  chr3:14514245-14514436
  hypo
cgattcggagaagggacccacatttctgtgtgagctgatcattgtctgggccatcgtaataagttgcaagtgcccaggagaagcctacgccacactcaggattctgtgctccctggagcgtgcgaggggctgggcattggctccctcccgtgctttatacaccgcacaggccgggagcctcgctcaaaccc

SEQ ID NO: 338046 - DNA, 802 bp, Homo sapiens; identical to SEQ ID NO: 331705
  chr3:14851851-14852653
  hypo

SEQ ID NO: 338047 - DNA, 53 bp, Homo sapiens
  chr3:15079942-15079995
  hypo
cgatgtcctttcttttttttccggccctttgccagtttccaagttttgttagc

SEQ ID NO: 338048 - DNA, 264 bp, Homo sapiens
  chr3:15123770-15124034
  hypo
cgaacaacttcccaaagcattctccagaatctgcaggagtgtacataacaaacagccaaatctgcctaagaaattagacccaagaccagacagcgcgaatcacctcgtagagcttcacgatgtcaggtgtgtgctccttctcatcaatctgctgctctctcttgagcagcgtgtccttgcagtgtgtacagcagcggatccggtcatcgtccttctcatccaggaccgagctgacactgctcatgctgctgatgctgcctcggc

SEQ ID NO: 338049 - DNA, 1895 bp, Homo sapiens; identical to SEQ ID NO: 331706
  chr3:16553609-16555504
  hypo

SEQ ID NO: 338050 - DNA, 927 bp, Homo sapiens; identical to SEQ ID NO: 331707
  chr3:16925426-16926353
  hypo

SEQ ID NO: 338051 - DNA, 337 bp, Homo sapiens; identical to SEQ ID NO: 331708
  chr3:16926666-16927003
  hypo

SEQ ID NO: 338052 - DNA, 102 bp, Homo sapiens
  chr3:18462342-18462444
  hypo
cgggctcccgttctgctccaggcgggcaatcttggctggtggacccttcggatcactcacattgttagacatttctgaatgttctttcccctgagttgcctc

SEQ ID NO: 338053 - DNA, 269 bp, Homo sapiens; identical to SEQ ID NO: 331711
  chr3:23957838-23958107
  hypo

SEQ ID NO: 338054 - DNA, 400 bp, Homo sapiens
  chr3:24160995-24161395
  hypo
cggttccttggaggctgagtctgtggggggcttagtgtcgaggaggggccagggcttgtacccctgttcatggaggagcaacaagaacggcgttgctggcacagagcgaaggcctggcagtccaccccaggcctgcactgcacactgaagagctgtcgcccggggcacaggtgaggggcttcgctgggctgaggcatcaacaggtcaagcgcgtcattgaggaccgaggctctagaaaaagctctgaggcggcacgtggtgttttgagcagaatcataaagaagaaaacatcttacttttttcattgtttctggaaatactgcacgtctaaattgagcaaagtacacttgagggtcacacacgcacgcgcatacactcacacgcacacacgccccacacc

SEQ ID NO: 338055 - DNA, 989 bp, Homo sapiens; identical to SEQ ID NO: 331712
  chr3:24536360-24537349
  hypo

SEQ ID NO: 338056 - DNA, 293 bp, Homo sapiens
  chr3:25728357-25728650
  hypo
ccgccgccagcaccggacccggagccgccatgcccaagtgccccaagtgcgacaaggaagtttacttcgccgagagggtgacctctctgggcaaggacttgcctcggccctgcctgaagtgcgagaatgtgggaagacgctgacctccgagggccacgctgagcacgaaagcaagccctactgcaaccacttgctatgccgccatgtttgggcaaaaaggctctggccggggtgaagccgacagccacactttcaagtaaatcgggtggtggagacctcatccttggccgctc

SEQ ID NO: 338057 - DNA, 1664 bp, Homo sapiens; identical to SEQ ID NO: 331719
  chr3:27762351-27764015
  hypo

SEQ ID NO: 338058 - DNA, 243 bp, Homo sapiens; identical to SEQ ID NO: 331723
  chr3:30648808-30649051
  hypo

SEQ ID NO: 338059 - DNA, 155 bp, Homo sapiens
  chr3:30713687-30713842
  hypo
cgcggcatgtcatcagctgggaggacctgcgcaagctgggcagctccctcgcccgggggattgctcacctccacagtgatcacactccatgtgggaggcccaagatgcccatcgtgcacagggacctcaagagctccaatatcctcgtgaagaac

SEQ ID NO: 338060 - DNA, 123 bp, Homo sapiens
  chr3:31494150-31494273
  hypo
cgttgcgagctgcagcggtgatcgccgcggcaggcccagaagtgtatcctgactcgtaaattgacgaagccactggtgctgcaagtgttcttttggggtagtgtctgggatccggtgcaagtc

SEQ ID NO: 338061 - DNA, 239 bp, Homo sapiens; identical to SEQ ID NO: 331724
  chr3:32279487-32279726
  hypo

SEQ ID NO: 338062 - DNA, 1095 bp, Homo sapiens; identical to SEQ ID NO: 331725
  chr3:32433054-32434149
  hypo

SEQ ID NO: 338063 - DNA, 328 bp, Homo sapiens
  chr3:33216338-33216666
  hypo
cgtgggcacgcgaaggtggcccatccctgggctgcttacctttcccacaggcctgcaccaggccgtaccactccccacagctgttacatagcaaggtgaaggcggtctcccggtggcccatgatgtggcctggggcacacacgtacagcagttcatcccccatttccaagccggtgcggccctgcaggatggtgtgtgggaacgaaggcgggtctccacacggcttctctgaggagaaggaatcacagttagcttttccaaactgtgcggaactttttcagcctatgagaaaacagacttaaaacacaactctcccctgccgcccacc

SEQ ID NO: 338064 - DNA, 1054 bp, Homo sapiens; identical to SEQ ID NO: 331728
  chr3:33259728-33260782
  hypo

SEQ ID NO: 338065 - DNA, 92 bp, Homo sapiens
  chr3:33437677-33437769
  hypo
cgcttgcactgcttgcagcttgctgctgcccttgcagcactgtgctgcttggctgctcccggcagacatagatggttaaacggggtctaacc

SEQ ID NO: 338066 - DNA, 123 bp, Homo sapiens
  chr3:33689123-33689246
  hypo
cgagtgcagttgtgcttcaataaaattttatatacaaaaacaggagggcagatggttttgatccgcaagcaacagtttgccaatctctgctctaggctaactactaaaagaagagtaagtagg

SEQ ID NO: 338067 - DNA, 173 bp, Homo sapiens
  chr3:33818924-33819097
  hypo
gaggttgcagtgagccaagatcacgccactgcactccggccaaagtgcgactctgtctcaaaagaaaaaacaagtaataactaatatttattgagttatttaatgttccaggtactattataaacactttatgtaaacaattatgtaactttttttttttgagatggagtctc

SEQ ID NO: 338068 - DNA, 191 bp, Homo sapiens
  chr3:33841159-33841350
  hypo
taagaacattttttacgattttatagttaaacatttcttttgcataccttgttaatctcgttttctccgtatagtatattctacttgtttcacaggagaatcacaattgtattccaatccaagtagcagaaacccaggctaaactagcttgagctaagaaaagacttattctgccgggcgcggtggctcac

SEQ ID NO: 338069 - DNA, 137 bp, Homo sapiens
  chr3:36984260-36984397
  hypo
cggtctcctcatactctgggagagcggcggaaacagaacctgcagttgccccataaagctggtcagtcggtcataaagtgaagttaacaatttatgacccgctttaaaaaaaaaaaaaaaacatagaatgggccggc

SEQ ID NO: 338070 - DNA, 1122 bp, Homo sapiens; identical to SEQ ID NO: 331731
  chr3:36985571-36986693
  hypo

SEQ ID NO: 338071 - DNA, 1420 bp, Homo sapiens; identical to SEQ ID NO: 331732
  chr3:37033979-37035399
  hypo

SEQ ID NO: 338072 - DNA, 119 bp, Homo sapiens
  chr3:37438337-37438456
  hypo
cgtgcccggccttcaaacttattttattagtcccataaactctaccatccctcctgtttctgtagttgaatccaatgctgttatctgaagccagcgcctcacttttctacggagtctgc

SEQ ID NO: 338073 - DNA, 916 bp, Homo sapiens; identical to SEQ ID NO: 331733
  chr3:37493509-37494425
  hypo

SEQ ID NO: 338074 - DNA, 306 bp, Homo sapiens
  chr3:38032151-38032457
  hypo
gtgaatgcctagcccgctgagcactgtgtggtggggtgtgtcctgcagggcaggagctaggattgagttacagtggtggggaccaggagtagggaggcagagactggccccgtgccaggcctagcactgcccacaggcagggcgaaggcgcgggagcagtttccagcaggtaggcctgggcagagagttggggggcgggggtttccagggaaccagtggggcagagtgggctattcaagtcaagggcatagagcatagggtcccagggctcagggccacagagcctccgcggcagaattgggaggc

SEQ ID NO: 338075 - DNA, 603 bp, Homo sapiens; identical to SEQ ID NO: 331737
  chr3:38080628-38081231
  hypo

SEQ ID NO: 338076 - DNA, 205 bp, Homo sapiens
  chr3:39185671-39185876
  hypo
cgcagatcctatcgcagtgacagccacaatcctcccgggattggcgcagtgcctgcagctcccgcttctcctcccgatcgatccttcgcacacctgaagccctcagcagagctcgacgtcgccgggctgggtagggctgtaggaagctcacttcttccaaccggccacctgccacagcgactgccaagtcctcctccacagaggc

SEQ ID NO: 338077 - DNA, 167 bp, Homo sapiens; identical to SEQ ID NO: 331742
  chr3:41240162-41240329
  hypo

SEQ ID NO: 338078 - DNA, 173 bp, Homo sapiens
  chr3:41289162-41289335
  hypo
cgttccatgcattcctgctctgcgcatcaaagcccctgtgtgacagaaggaatgcgtttgaacttggcccacccctggctgagtctaggctagactagtggggccatgctgcgcccccgcacacagcaggcccagtgaggctggaaaggacaaactactggcagagcagcatc

SEQ ID NO: 338079 - DNA, 242 bp, Homo sapiens
  chr3:42190950-42191192
  hypo
cggggaggcatggcagcgttttacttgacgttgatggtgctgtgaagtccattctttcctctgcaagactactgactatgcagaaatttatcgaagcggattattatgaactagactggtattatgaagaatgctcggatggtaattatggcccctgcaaaacagagccgggatgtataggggtattgtctccttctgggtggggggtgtcctgaaacctttaggggagacaggcggctggc

SEQ ID NO: 338080 - DNA, 140 bp, Homo sapiens
  chr3:42222621-42222761
  hypo
cgtttgtgtgctggaagccttccgcatccttcaggtgctctggcagtcccttgccatgcctgagccatcttcattattatgctgtgtgcttgatttgtttgcattgaaatgtgcgtacaaaatgcggctaaaggccgggc

SEQ ID NO: 338081 - DNA, 743 bp, Homo sapiens; identical to SEQ ID NO: 331744
  chr3:42814273-42815016
  hypo

SEQ ID NO: 338082 - DNA, 275 bp, Homo sapiens
  chr3:42905954-42906229
  hypo
cagcactacaggacgtcgggactgggcatttccttccaacatggccgccactgcctctccgcagccactcgccactgaggatgccgattctgagaatagcagcttctattactatgactacctggatgaagtggccttcatgctctgcaggaaggatgcagtggtgtcctttggcaaagtcttcctcccagtcttctatagcctgatttttgtgttgggcctcagcgggaacctccttcttctcatggtcttgctccgttacgtgcctcgcaggc

SEQ ID NO: 338083 - DNA, 674 bp, Homo sapiens; identical to SEQ ID NO: 331746
  chr3:43147038-43147712
  hypo

SEQ ID NO: 338084 - DNA, 164 bp, Homo sapiens
  chr3:43655477-43655641
  hypo
cgttcaacttagactagatacacagaaaaccccaaggtttccaatcttggatatgggaagaataactatgcgtgaaaaaaatagcaaagttggaaagaatgtctagtttaagggaacaataaagtgttccgcagagtatctggggacacgcatcaaaggtcaac

SEQ ID NO: 338085 - DNA, 4891 bp, Homo sapiens; identical to SEQ ID NO: 331748
  chr3:44036214-44041105
  hypo

SEQ ID NO: 338086 - DNA, 219 bp, Homo sapiens
  chr3:44945281-44945500
  hypo
cggtgatgaagatgtctctggcaattttggcgtatttatctctaactaggtttgggggtggtccggggtggggcccgttcccaatttgcggcaggaatttccatgtgtggacggatgcctggatgaagcgaccggatctgcccaagggctacgacggctggcaggctgtggacgcaacgccgcaggagcgaagccagggtgagtgggtggcaggaaggc

SEQ ID NO: 338087 - DNA, 1217 bp, Homo sapiens; identical to SEQ ID NO: 331754
  chr3:45186931-45188148
  hypo

SEQ ID NO: 338088 - DNA, 255 bp, Homo sapiens
  chr3:45719334-45719589
  hypo
cgtgtttgcgctgtttttctctggagttctcaagagttggtgacttggaaggccgcttctgcaaggcaagtctcaggaacccatgcaggtacatcgcttgcacctgtttttagcttatttaatgacgggcttttgggaagagctgcccgcatactgagagacagcttcttataaacaaggagagtttttgtgtgtgcgagatctctaagccagcgtgggagggagcgcctcaggataagttattatattcatttc

SEQ ID NO: 338089 - DNA, 114 bp, Homo sapiens
  chr3:45750569-45750683
  hypo
cgtcgtaaatttatgtgttttatttgtcgaagatagctatgctaacttagcagggctgttgtgaagattaaagggaatctttggaaaatacctggcacacagtaggtcataacc

SEQ ID NO: 338090 - DNA, 742 bp, Homo sapiens
  chr3:46009350-46010092
  hypo
cgcctcaactctgctagctcctcctcccaggagctcgtgtgggccagcaactcctgcagccgtcgccagagctggtctgcctcctgtcccttcccagacaactcctcctggagtggggccatctccttcaccaggcgctccaggctggcccgggcatcctctttcagctgaagctccttgaccagctgttccagttgggcactctgctgtctgttgacctcctcgaccttggttctctccctttctagggcttgaagcttctcccctagctcctgcatctcctgggccgcatcactgggaataggttcttgccggccctttgtgtctgatgccgtatctgccttctgctgagccatggctagccagcctgggaagctggctaaatgctggtttttcttgtccagtgagtcccgtgtggcctcaagctcctgtgccaagggctgcagcatggactccagccgccgcagggctgtgtggtagtcctcctccttctctgctgctcctagctccaggccctgcaggcatgtctgcagctccttcacagtgttctgggtggcctgggtgacctcccactgcttctggagctcagctaccaagcaagtgaggcgaacgttgtcctccgctgcagtgcgccccctctccctctctgtctgcagttgctccccttgctggctgacagctgccctcagctcctggttctctctgtccagctgctgcatgcgctcccgtagctgcttctccc

SEQ ID NO: 338091 - DNA, 81 bp, Homo sapiens
  chr3:47239328-47239409
  hypo
cgagaccccgtctcaaaaagacaaaacaaaacaggcagggcacggtggctcacgcctgatcttgcggtgagctgagatcgc

SEQ ID NO: 338092 - DNA, 732 bp, Homo sapiens; identical to SEQ ID NO: 331755
  chr3:48693398-48694130
  hypo

SEQ ID NO: 338093 - DNA, 190 bp, Homo sapiens
  chr3:48698266-48698456
  hypo
cgccagtgaggctgtcgatggcaaagtgtccacggctattgccactgatgatgttgtagtgcaccaatccgttggcgtccttgtcccggtcagtggccgtgacgcgcagcacgactgtgtgggggcgcacatcctcgcgcacctgcgccacgtagcgcttctcgctgaactgaggagcattgtcgttctc

SEQ ID NO: 338094 - DNA, 1694 bp, Homo sapiens; identical to SEQ ID NO: 331756
  chr3:48698890-48700584
  hypo

SEQ ID NO: 338095 - DNA, 122 bp, Homo sapiens
  chr3:48703720-48703842
  hypo
cggcctgccctgttcttcttagacaaacttgctgggctaaaatctaaccccgttaaaatagactatttacgtattgtttgcctctagcgcagcagaacattgctggagaaaaacaaacaacc

SEQ ID NO: 338096 - DNA, 114 bp, Homo sapiens
  chr3:48731397-48731511
  hypo
tcagcaggtgccgacgagcgccttacaaacgactggctgaacacctttcctcccaggcctctctgccccagcatcactcaatctgctcagtcctcgactgctgcaggggaatgc

SEQ ID NO: 338097 - DNA, 121 bp, Homo sapiens
  chr3:49034180-49034301
  hypo
cggaccggtaaaggttaatcaggtataattaagtctgtccggggttcgacaaacagcatcttgtccaaggtgagcatagcccaaggctatgtgcctgcccggagactcagcttggggttcc

SEQ ID NO: 338098 - DNA, 97 bp, Homo sapiens
  chr3:49662414-49662511
  hypo
cggagactggaccccaaggaacccctgggtaaccagagagcagcttccccaactccgaagcaggcttctgctaccactcctggccatgagagccccc

SEQ ID NO: 338099 - DNA, 555 bp, Homo sapiens
  chr3:49720264-49720819
  hypo
gtgtcttgcaggtgcgtggtggaggctggctttcctttcagcagtgactgcctgccagacctcagcgtgtgggctgagatgctggacaaatcgcccatcagatacatccctcaggtatgcagccccctccttgccctgtgtgctgcccatccatccagaatccagggcccagctcaacacagctccccactcttccccaaacacccaggtgaagacaccactgttactgatgttgggccaggaggaccggcgtgtgcccttcaagcagggcatggagtattaccgtgccctcaagacccggaatgtgcctgttcggtgagtgcagcatgaaggccctggcagctggtgggcaggtgagcacaggaggaccctccaaccttaaatgttgctgactaatccctacaggctcctgctctatcccaaaagcacccacgcattatcagaggtggaggtggagtcagacagcttcatgaatgctgtgctctggctacgcacacacttgggcagctgaagccctgccattctgcatgagctgatcagcctgtgccacacttc

SEQ ID NO: 338100 - DNA, 324 bp, Homo sapiens
  chr3:49755502-49755826
  hypo
cattgaggcccctccggcctggctccagaaagactacgtgcttgtggacgctggccttgcggctgggtgcgtctggcggtgtggtgctgagtactgaggactgtgcgctcagctcttggagcgggctgggtgtttggggccagcggcggcagcggcaggcacggcggcagcagcggcagggtggggcgaacaggtagagcagcacgagcacaaggcccacggcacagcccagcagtgtggtgaagcctgtgttgaaagcctcgggctctgggcgcggaaagtgcacgctcacgttgtactcgtgcgtctggttgtggtgcaggc

SEQ ID NO: 338101 - DNA, 691 bp, Homo sapiens; identical to SEQ ID NO: 331762
  chr3:49906737-49907428
  hypo

SEQ ID NO: 338102 - DNA, 787 bp, Homo sapiens
  chr3:49939702-49940489
  hypo
cgcctgcccccccaccgcgcccccagatcccctcagtgatggaagggaagcagcctgtgttcagccatgtgcatgcagctcacaagtaagggccccttctttcagcttaccgggttggggcaaaaactgggcgactggaagaagtcgaggcctcgccggaggcctggatggactggggattcacaacagcgctccacaccctcatcaattagtgtgtccagcaggtcaatggggaaggcacagacgacagagttggggcccacgccaggaccaccatccttgccagtcacaaagaccccaaatagtacttcctggccctcggcgatgctcagctcagtggcaagttgggcacccactggagcggagtgggccacccgcagcacagggtagggctgtccgccttctggggccccccggcgcctgcgttttggagcaaatctgcagtcgaggaccagctcccgatagtcacccaactctggctcagtggcgctaagccgtgccaggcgtgtgtgcagggcactaggatcatctgtcacgctggccggctgtacagtcaggaagtatacgaaggctcccgtgtggaagctgtgcacgtattcaatactgtaggagacaagatgcttgggcagcactgacaacgccacaaagcccggtgcgaatcccgaggcgtcagccttgagacgcctgatagacactgagcgtgggctgaagctggcagccacggctgcgtccagtgaggatgccacgtagaaataggaggcctggccttgctcaaccacagttacac

SEQ ID NO: 338103 - DNA, 143 bp, Homo sapiens
  chr3:50144939-50145082
  hypo
cgcgtcagcgctttctctgtagctagtacggctattgctgctgctcagtggtcatccacccaggtaagatcgaggatctttttgctcaaggtagtgtggtggtggtgcccagattcacagacgtgacctctcctgtggtactc

SEQ ID NO: 338104 - DNA, 681 bp, Homo sapiens; identical to SEQ ID NO: 331765
  chr3:50374299-50374980
  hypo

SEQ ID NO: 338105 - DNA, 320 bp, Homo sapiens; identical to SEQ ID NO: 331766
  chr3:50375233-50375553
  hypo

SEQ ID NO: 338106 - DNA, 455 bp, Homo sapiens; identical to SEQ ID NO: 331769
  chr3:50604957-50605412
  hypo

SEQ ID NO: 338107 - DNA, 62 bp, Homo sapiens
  chr3:51623983-51624045
  hypo
cggggaattcatgttcagcatttttttctttgtttttcttttggagagagtctcacctcgtc

SEQ ID NO: 338108 - DNA, 318 bp, Homo sapiens; identical to SEQ ID NO: 331771
  chr3:51990320-51990638
  hypo

SEQ ID NO: 338109 - DNA, 145 bp, Homo sapiens
  chr3:52415754-52415899
  hypo
cgcatcagccgcaccctacgccaggcgctgggcaatgcactcctgctgggcgtgggtggcagcggccgcagctccctcacaaggctcgcctcgcacatgtgagcgcctccagggcgtgctgggcagtgggcggccagggctggct

SEQ ID NO: 338110 - DNA, 232 bp, Homo sapiens
  chr3:52440854-52441086
  hypo
cgaggccgatacgctccatgatgacccgccgggccttgtctgtccactcctcgtcctccccccagggccctagtggagaccaagacaaggaatcagcgagaaggaaaccctgagtttgggcaggccaggagtgggaaggaagacagagaagagcagttgagccagggaatcaggagctggtcgggcaatatggtgtagggtgaaaccccagccagagccgggtgtcggtacc

SEQ ID NO: 338111 - DNA, 535 bp, Homo sapiens
  chr3:52552592-52553127
  hypo
cgtgccgcacgcagatctaatgagcaacctgtcgcaggtatgcagcccccagagcgaggctgggcagggctgggtgctctggtggtggccctgcgtgggctgaggcggcagtcagggaccccactcccctcgcgactctgctccaggatgagctggcccggattcgtgcgcatcgccagctggtgtttcgctaccacgtggttggctgtcggcggctgcggagcgaggacctgctggagcaggggtacgccacggccctctcagggcacccactgcgcttcagcgagagggaggtgagccctggccctggcctgccccgctccatcccgccccgccccgcccctgcgcgccattgccccaggccccacggcccacgcagtcaagaaccccacctcccctagccagggggcgcctcctgctgagtccagcccgggactccgcccttgacctgggcctcgcccactgctgtgggcctgtcctgcccagcgcccttgtgtccttccgaggactgagccccgccccctgccctgactcc

SEQ ID NO: 338112 - DNA, 846 bp, Homo sapiens
  chr3:52899918-52900764
  hypo
cggtggggggacacaaaccgtcacatgctttacacgttgtctaaccttcctgctctcacctactgtacacatggctccattttctttcattagaggctacatggcatcccacagtgtggctgtgccatctcatttactctatgagctgctgccgcgaatgtccctgccatgtgctacctctgcctgtgtgggcccatatctgaggggcagattcctagaggcacacttgctacatcaaaagctatgtgcggcttattctgtggcgccgctctccacagaggctgtgccaactcacactcccactaatagcacgagtacccattcccacattcttgccagcatggtgtactagcaaaccttctcactctgacaatttgatcgctgaagaggctgtctcagcacggctgcggcgtgcacccatcaggccacttgggtgccagggcacctgcggggcttgccaccgtctaccgccttgaggggcctggcagggctcccagtcccaccccatctcacctgctctctcctctcggacatgagcccagagcccctccttttccccatgctcacgccctcccctgaggataccagggtgtggtggtgctcactctcccagaagtttgggcagtgctactggtgccacacaataggacagcaattatggatgactcaactctacctgtcgacttcacacagcacccaggtcaccgactgctcacttaacgctatgttgtttggttttccacacgccactctcacttggcatgtggagggcggggaccaggcacccagctcgactgtcctcctcagagcccgatctgggctggcgctccacgtggacccactgac

SEQ ID NO: 338113 - DNA, 1217 bp, Homo sapiens
  chr3:53032404-53033621
  hypo
ctcaaaaaaaagaaaagaaaagaaaaaatgtagatcaataatattattttgctgacgcattggagaaagtaaaggctgggtgcagcttcaagctgaggaccacccaccatgcccccatcatggtggttcccctaggtgctgaagggcccagccatagctctcgccctcgcagggtccctccagggtctctgctgtttcctacctaggggtgactgcagccatggctaagaaagcgccagcgcccacccacctgggccaatggactggttctgctcgtgccacgctggttctgctcctcgccatctcggcagttcagaaagaaccccaacgagcttgtgatctcccgggtcctgtgggcgtatcaacagggggccagccctgtccctcaaccctggggagctggtgctgccgatcgacctgactggcccacaacgtcttcagctaccactgcaagggcctgcggggtgacggctgtgcagcgctgctcgcctagctgttgatcgcctggctgttgatgggctggcacccgcagagctgccctgccggccaccgaccaccatggagggagcattcagctggtgcgcgagctgggtactaaactggctctactgtgagccgccctcggcccctccatctcctcttaccccttgtcatccatgcgtaagccggggacgcccgaggacatgctcttcacccaaggcctgcgccggcgtctgctgatcaagggcccagtacaaaggccgtcatggagatccaggccttcgccaacagcggcctgttctggtgcaagggccagccgggcagcccaaggacctcacgactggctgctgggtcaaggcgttcccggggtgaaggtggataagcagaccaccaagggctcctggaaccctacgtgaaggaggccaagcacagccgtggacaccggcctgaaggctgggaaaggagccgacgccccacctcctctgaccaggcctgcggggaggagccacccacgcgccacagcaagtcctggacctggccctgcattccagggtggggcagggaggctggattctgagagagctgcttccggattgcgttggggtagtcaaggagctcgggacatcgcaggggaggcaaaaagccttggccagtgctcttttggtgtatcccttcagcttccagaggggaagccacaccctgatgctatgttcaaacgctccagaagacaggagttc

SEQ ID NO: 338114 - DNA, 199 bp, Homo sapiens; identical to SEQ ID NO: 331773
  chr3:53195788-53195987
  hypo

SEQ ID NO: 338115 - DNA, 571 bp, Homo sapiens; identical to SEQ ID NO: 331774
  chr3:53527829-53528400
  hypo

SEQ ID NO: 338116 - DNA, 157 bp, Homo sapiens
  chr3:54237704-54237861
  hypo
cggccaaactccgtctcatcccgctggtcagtggcctgcctgtgtgctggcatctgtcggtgtgctgttctgccgacgtgcttcctcgatgtcctctcgctgtccggccgcttgtgtcttcttccgctgatgtgcctcttgacgtctggctgcctgc

SEQ ID NO: 338117 - DNA, 506 bp, Homo sapiens
  chr3:54660189-54660695
  hypo
cgataactgcgcaggcgcggaccagagagctcttttctgaggatccggcaagatggcagaagtagagcagaagaagcagaccttccgcaggttcacctaccgtggcgtggacctggaccagctgctggacatgtcctacaagcggctgatgccgctgtacagtgcgcgccagcagcggcggctgaaccggggcctgcggcggaagcagcactccctgctgaagtgcctgcgcaaggccaagaaggaggcgctgcccatggagaagccggaagtggtgaagacgcacctgcgtgacgtgatcatcctgcccgagatggtgggcagcatggtgggcgtctacaacggcaagaccttcaaccaggtggagatcaagcccgagatgatcgaccactacctgggcgagttctccatcacctacaagcccataaagcacggcgggcccggcatcggggccagccactcctcccgcttcatccctctcaagcagtggctcagctaataaaggc

SEQ ID NO: 338118 - DNA, 356 bp, Homo sapiens
  chr3:56718095-56718451
  hypo
cgttcatcaacgttttcctatagtaaatgtatattaaagaaaaaataaacttgcggtcacattaaaaaatacacagcaggtcgtcgctctcccataaagggaacaacttcatagttaagagccctttacatagtggtttctaccttatcagtataaactatcacgggttatcgtgagtacagccaatatttactgagtgctttctacgtgctagacacggactggacaagtgatttacgtgcattgtctccatttaatcctcacagcaacagacatgaggtagatactagtttgcagaatttgaaagaagcgttgcaagacactggacaaattatggtaaccgaagatttgaaacc

SEQ ID NO: 338119 - DNA, 203 bp, Homo sapiens; identical to SEQ ID NO: 331781
  chr3:57261363-57261566
  hypo

SEQ ID NO: 338120 - DNA, 261 bp, Homo sapiens
  chr3:57679351-57679612
  hypo
cgacagagcgagattccgtctcaaaaaaataaaaataaaatatatgaacgcataatggtgacggtggctaacattgaacgcttactttgtgccagttgatatgccaagtacaagtgcgaatacttacaaatattaccttattgaatcttcacataatcgcaaataagtagactatttatttctttttacagataaggaaatggaggtcctggaggttacatgactagcccaacaagtatgacaactccgatatcggcttgc

SEQ ID NO: 338121 - DNA, 111 bp, Homo sapiens
  chr3:57679987-57680098
  hypo
cgaggtgtcacgcctgtagtcccaggttcttgggaagctgaggccggctaagttcaaggaggatcgcttgagcaggagttccaggctgcagcgcgctatgatcgcgcctgc

SEQ ID NO: 338122 - DNA, 142 bp, Homo sapiens; identical to SEQ ID NO: 252374
  chr3:58136697-58136839
  hypo

SEQ ID NO: 338123 - DNA, 1484 bp, Homo sapiens; identical to SEQ ID NO: 331783
  chr3:61546692-61548176
  hypo

SEQ ID NO: 338124 - DNA, 792 bp, Homo sapiens; identical to SEQ ID NO: 331798
  chr3:64673134-64673926
  hypo

SEQ ID NO: 338125 - DNA, 1440 bp, Homo sapiens; identical to SEQ ID NO: 331799
  chr3:66024122-66025562
  hypo

SEQ ID NO: 338126 - DNA, 435 bp, Homo sapiens
  chr3:66452230-66452665
  hypo
cgacctgcgggagtcacctgtcaaacctcccatccatctcctggccaacccagccaacagctccaaaggcctggttagcgcttgccaaatcaagtggcaggtactgggggcaatgctcacatgggtccttgtactcatgtccttggaagtagccgcgacatgtgcactagcccccgcttcccacccacacacacaatgagttccactgcaggcccggcccccacataggcagggatggaggctgcgctcacatcagctctgcaagatcccccaaacatgccccttcccatgtgccctgtgtgggactctgcccctccctccgaggaatgccatggagccagctggaaccactgggcaggaagtcgcatacccaggtcactaactgctcctctctgcctgtaatttgggatccagaaattctcccttccctcccgc

SEQ ID NO: 338127 - DNA, 1570 bp, Homo sapiens; identical to SEQ ID NO: 331800
  chr3:66550318-66551888
  hypo

SEQ ID NO: 338128 - DNA, 1076 bp, Homo sapiens; identical to SEQ ID NO: 331801
  chr3:67048291-67049367
  hypo

SEQ ID NO: 338129 - DNA, 261 bp, Homo sapiens
  chr3:69230152-69230413
  hypo
cgggctgtgtccctgatccttctgcccagaggcccgctggtaccagccacgcaagtgctcggcaactaaggccttgtggatgtttttggtgatgtgctccgattttgcagcagccttccttggcagccggagagttgcatatgggttatggggtacccggtcgacctcatcttcgtgaaaggatctgctgtagtccctctggcgctcatatccatagtgggctgaggaccggtaggaagggttgacactatactgtccctc

SEQ ID NO: 338130 - DNA, 710 bp, Homo sapiens; identical to SEQ ID NO: 331803
  chr3:69434926-69435636
  hypo

SEQ ID NO: 338131 - DNA, 1217 bp, Homo sapiens; identical to SEQ ID NO: 331804
  chr3:69590941-69592158
  hypo

SEQ ID NO: 338132 - DNA, 778 bp, Homo sapiens; identical to SEQ ID NO: 331805
  chr3:69788429-69789207
  hypo

SEQ ID NO: 338133 - DNA, 213 bp, Homo sapiens
  chr3:69937621-69937834
  hypo
cggtgccttaattagccacatgttctttttacctcctgggaaataagtacgggataaaattggggatcaagccgtagacgtacattgacttagcacacgccgctaagtaattcatcaaggaatgttggtaattagtcctgcctctttcaactcttggcttattttataaaaccggttgatttaaaataatgcctgctgatttattacccacac

SEQ ID NO: 338134 - DNA, 264 bp, Homo sapiens
  chr3:71036199-71036463
  hypo
cgctggtactaactatagattgtcaacgctcaattaattttcacacagtgactccaagcaaaatcaaataaaggcagtgtacctttaaattttacaaatcttaaaatcaagaagcaaagcactgtctccattttgaataatcagttaaagctactaggagaattttagaaacgtaagaggaatatgaccgttaaagagatcgatttattacaaggaaggaggtccaagacaaacttttaggttcagacacgatccttctgcttc

SEQ ID NO: 338135 - DNA, 1710 bp, Homo sapiens; identical to SEQ ID NO: 331806
  chr3:71113110-71114820
  hypo

SEQ ID NO: 338136 - DNA, 229 bp, Homo sapiens
  chr3:71187313-71187542
  hypo
cgcagaatggtgacgctgtctggagaacacacgtggaggaagaagcgaatgcttctaattgcctcaaaatgggatttttaatatttaggaacgtaatgggatcgggaaataagaacacttccaacatcctttataaataagcctttacaaaatattgttagctgttaataatacatcattatcaaaaatggaaagtcatgaatacagtgcatgtaacctttgtattcac

SEQ ID NO: 338137 - DNA, 1326 bp, Homo sapiens; identical to SEQ ID NO: 331807
  chr3:71630573-71631899
  hypo

SEQ ID NO: 338138 - DNA, 792 bp, Homo sapiens; identical to SEQ ID NO: 331809
  chr3:71834320-71835112
  hypo

SEQ ID NO: 338139 - DNA, 45 bp, Homo sapiens
  chr3:72420279-72420324
  hypo
cgcgacaccacgacacgattaatggcattaacagcgccggaggcc

SEQ ID NO: 338140 - DNA, 178 bp, Homo sapiens
  chr3:72618825-72619003
  hypo
cgcacagcctgccttataagctgctttttaaatttaaaatatcgtgaacatctttccatgtcatagctgtgggatgttgaccaagtcatttcacctctctaaagctccatttcctcctttgcggaatagggggtgtactgtgagaatcaatgaccaggacaagtgttctgtgcttagc

SEQ ID NO: 338141 - DNA, 63 bp, Homo sapiens
  chr3:72703941-72704004
  hypo
cgtaaacactctcggacccatggcaaattcggcttggcccatccctaccacatattttgaagc

SEQ ID NO: 338142 - DNA, 72 bp, Homo sapiens; identical to SEQ ID NO: 226535
  chr3:73045503-73045575
  hypo

SEQ ID NO: 338143 - DNA, 81 bp, Homo sapiens
  chr3:73045605-73045686
  hypo
ctgaattctcacagcaactgcatagggcatcagtaccagtgcccttactgtacagatggggaaaatgaggctcagacaggc

SEQ ID NO: 338144 - DNA, 69 bp, Homo sapiens
  chr3:87297469-87297538
  hypo
cgtttcggtatacattttgtttctcagttaccttattctttttgagtgtctgatttttgagacagtctc

SEQ ID NO: 338145 - DNA, 1410 bp, Homo sapiens; identical to SEQ ID NO: 331820
  chr3:98619774-98621184
  hypo

SEQ ID NO: 338146 - DNA, 510 bp, Homo sapiens; identical to SEQ ID NO: 331821
  chr3:99594790-99595300
  hypo

SEQ ID NO: 338147 - DNA, 55 bp, Homo sapiens; identical to SEQ ID NO: 252467
  chr3:101230981-101231036
  hypo

SEQ ID NO: 338148 - DNA, 464 bp, Homo sapiens; identical to SEQ ID NO: 222190
  chr3:101497830-101498294
  hypo

SEQ ID NO: 338149 - DNA, 95 bp, Homo sapiens; identical to SEQ ID NO: 331824
  chr3:101498512-101498607
  hypo

SEQ ID NO: 338150 - DNA, 1081 bp, Homo sapiens; identical to SEQ ID NO: 331825
  chr3:105087465-105088546
  hypo

SEQ ID NO: 338151 - DNA, 196 bp, Homo sapiens
  chr3:106362774-106362970
  hypo
agggtgcgctgggtcccccagcactgccggcccaccttcaccatgctcgaaatctccccgggcctcagctgctgcctcgcggggcaggactcgggacctgcagcccgccatgctggacaaccttccctctgccactgtgggcttgcgtgcggcctgagcctctctgacgggtgccaccccctgctcccccgcgccc

SEQ ID NO: 338152 - DNA, 69 bp, Homo sapiens
  chr3:107520023-107520092
  hypo
cgaggtcggggagacgcggagcagtactccagaaatgcctgccgtgtctgcgttctttagcctcgctgc

SEQ ID NO: 338153 - DNA, 91 bp, Homo sapiens
  chr3:107530308-107530399
  hypo
gccacttgggtgaacgcttctggggtgcgcttctgggactagtgatcagaacacaccatctttccctgaactgggacaaaactgtggaagc

SEQ ID NO: 338154 - DNA, 838 bp, Homo sapiens; identical to SEQ ID NO: 331831
  chr3:112930382-112931220
  hypo

SEQ ID NO: 338155 - DNA, 1176 bp, Homo sapiens; identical to SEQ ID NO: 331832
  chr3:113251180-113252356
  hypo

SEQ ID NO: 338156 - DNA, 230 bp, Homo sapiens; identical to SEQ ID NO: 208990
  chr3:114070278-114070508
  hypo

SEQ ID NO: 338157 - DNA, 686 bp, Homo sapiens; identical to SEQ ID NO: 331834
  chr3:115377294-115377980
  hypo

SEQ ID NO: 338158 - DNA, 137 bp, Homo sapiens
  chr3:119535947-119536084
  hypo
cgagctccgcagcatcaatgctcagcacacccagcggctgctgcgcatccaggacatacacccctttgctacgcccctcatgcaggagttgttcggcatcacaggtagctgagcggctgcccttgggtgacacctcc

SEQ ID NO: 338159 - DNA, 1275 bp, Homo sapiens; identical to SEQ ID NO: 331841
  chr3:120626737-120628012
  hypo

SEQ ID NO: 338160 - DNA, 83 bp, Homo sapiens
  chr3:121500635-121500718
  hypo
cggcgtgcatcagtgagttcttggagtcctcgccaaggagcaaatagtttctttttcttacggcacttcgctaggaatttaag

SEQ ID NO: 338161 - DNA, 75 bp, Homo sapiens
  chr3:121563939-121564014
  hypo
cgaaagaacaaagagtttgtggaataagtgactttacgtagtaaatcatagtataatgaaaaatgggatgggcgc

SEQ ID NO: 338162 - DNA, 326 bp, Homo sapiens
  chr3:121637776-121638102
  hypo
cgcctctgtctgggccttgctctggcccactgggctcgctcagcctgcgactggactgggcatgtagcgagcagcttctgtgttgggtgcggcatctagacaaggggaacacggtggcgcccaaaaactcggagatgctagcaattgcagagtcctaagaggtgttatagctcctgctcagggagtcccaaggtctgagcccccagaaatgttacagctgttcactcctgtagttcaacgagcaggagcatgttacaactctctcctgtagtctagcgagcgggagcgtgttacggctcttttattcccgctgcccatagcttggc

SEQ ID NO: 338163 - DNA, 247 bp, Homo sapiens; identical to SEQ ID NO: 222201
  chr3:122296549-122296796
  hypo

SEQ ID NO: 338164 - DNA, 341 bp, Homo sapiens
  chr3:123049663-123050004
  hypo
gcaggtcagtcagtcgctcgggctgtggacagtcccagggagggagacggtacccggggggtggacacttacgagatggcctcgatcatgtccatgcccatctccacacagcagtgggcgtggtcagcccttgcttcaggcagccccgagacgcagtaataacaatccccaaggatcttaatacgtaaacagtgattctcctggaaagcaaattaattttacaaattaaaaatagtaggaaagagaagtgggagggaaagaaacgagaagcaaaaagattcaccccgtgcctggaataacttgccttttagggcagtgagcgcaggcccacgccggaactc

SEQ ID NO: 338165 - DNA, 981 bp, Homo sapiens; identical to SEQ ID NO: 331845
  chr3:123167275-123168256
  hypo

SEQ ID NO: 338166 - DNA, 816 bp, Homo sapiens; identical to SEQ ID NO: 331846
  chr3:123168265-123169081
  hypo

SEQ ID NO: 338167 - DNA, 1298 bp, Homo sapiens; identical to SEQ ID NO: 331847
  chr3:123751655-123752953
  hypo

SEQ ID NO: 338168 - DNA, 167 bp, Homo sapiens
  chr3:124281735-124281902
  hypo
cgggccacagcagtgagctgaccatccaggtggggcagacggtagagctgctggagcggcccagcgagcggcctggttggtgtctggtccgtaccaccgaacggagcccgcccttggagggtctggtccccagcagcgccctgtgcatctcacactcccgaagcagc

SEQ ID NO: 338169 - DNA, 360 bp, Homo sapiens
  chr3:124515276-124515636
  hypo
cgcactcacagaaaggcccatagatcttgccaaactcgctctcgaagcaggagcactggttgcagctgcagtccccacgcccgctgcacagtggcttgccctctgcctcccggcacaggttctggtacacgctctggttctccccatcctggcactcgcacctggtgcccaggtagccggggctgcactcacacaggccgcagacataggtcccgctcccgttgcacctggcgctgttgggttccagccccacgctgcagccgcacgtgcagttgtaggtgacccccacctccaggctgtcccggaatcccaccggccgcagggcaaacacatgctccgtgtgtctgctgggacagcttc

SEQ ID NO: 338170 - DNA, 435 bp, Homo sapiens
  chr3:124716572-124717007
  hypo
cgacttgcactggcacagggcaacgccgtccaggtcagtgcagatggaggtgtctttgtcacattcgggactcttccgcttgcacaagctgcccgctggaatggaaaaacaagacagtgaaacaaaacaaaaccttctccacttcaaaccttaaaatctcctccacttcaaagctcatgtgtctgcatgaactctctatttcaagaggctgagaacagttttccgaaaagtctccacagagcaacactcctctcaggagtccatctgtactgccttctgccactccttctctgatcagccgcaggctgtgcaccagtgttccccgttgaaaacaccctcacagcgtgccacggacccactgagaaacgaaattggaataaacaggccctgttcactcctctggtgctcactgcaaatacagcccttaatggcccc

SEQ ID NO: 338171 - DNA, 601 bp, Homo sapiens; identical to SEQ ID NO: 331849
  chr3:124773769-124774370
  hypo

SEQ ID NO: 338172 - DNA, 224 bp, Homo sapiens
  chr3:126090337-126090561
  hypo
cgaggagggcctgggtcgcaacaagcaggacacgccccacagtgagcaatcacctggctcaacctgcgggtgtcttccggcaatgcaagcatcacaccgtcatgctcgccggctcctgcggtggtgtgagccctgggtgcacagcttcttgctccattccatgcacctctgccctccttctatgaagcgagggtgcagccatgcagctaaccatcctgacccac

SEQ ID NO: 338173 - DNA, 159 bp, Homo sapiens
  chr3:126261836-126261995
  hypo
cgcccaccctggcaaggacagctgcggccaaggacgaaagccctcccttggctggcctcacgatggggccgtcccgggagccaggtgggagctgccttccactgccatcgggtctcctctcctctcccacgcggctggccctacccaggcgccaccttc

SEQ ID NO: 338174 - DNA, 187 bp, Homo sapiens
  chr3:126472179-126472366
  hypo
cggcagcaggagctgtgccgtccttttgcccacctggaggctgaggaggaggggcactgaggcactcgtagctgggtgcagatcattccaaagacattccaggagcatgctgcagcccgcctgcatgcctgccatagctgcggcttgtagaccggccttggggtggagttctctgtaaacattggac

SEQ ID NO: 338175 - DNA, 174 bp, Homo sapiens
  chr3:127326124-127326298
  hypo
cgctgccaaagcctctgatgttaaggtcttaggcacatgtaatgtgcctttgtacttgagcgtccctgtaaatgggctcatcgccatcgctgtggtggcgcccaggccccttgactgccttgctgctgtggctgttggctgtcctcttctcaccgctctgcagtgcagttctgc

SEQ ID NO: 338176 - DNA, 775 bp, Homo sapiens
  chr3:127394412-127395187
  hypo
cgcccaggcttgtttttcttaatagtccctgccatcgttaggtagtgggttgattgtcctgcctcactagagtataagttcagcaggacagggacctgtgtctcgttcactgctgtgctccagtgtgtgggacaagcccagccaccaagtcagctctccgttctgtgttgtctgtcttccgtgtgagtgagtatgtgcctgtgtgagtgcacacagacgtgcccattcgcctagcccttgactgggagggtgttggggtcagagtgggcccagggtaatttgggaaggcatcgccagagattcggagccccatgtgtgggaaggtggggaggagggacagggagattagaatttcccccaggccccttccctgctaactggtgagccctgcctcccccaggagcccgctgcgaggccaacaccttcgatggtgagcgctgcctctatggggcactgagtgaccccatccgccgggctctacgcgattacaagcaggtcacggcttcctgcaggaggcgggattactatgacgacttcttgcagcggtgagccagggcacacgaggggtgcagcatggggtgcggtggccctggtgggtgtggcgagtctgctctgactgtggcctgcactgggttctgagtgctccgaggaatggggtggggctgtgccaagtatcctccctcctggcttgtccctccccaggcttctagagcagggcatccacagtgacgtggtctttgtagtacacgggaagccattccgggtgcatcgctgc

SEQ ID NO: 338177 - DNA, 143 bp, Homo sapiens
  chr3:127395778-127395921
  hypo
cgcaggccctcatcctccccactgcccccaggccgcctggacattggcgtagagcatgtgagtgactgtgagcgcctggccaagcaatgccagctgtgggacctgctcagcgacctggaggccaagtgcgagaaggtgtctga

SEQ ID NO: 338178 - DNA, 154 bp, Homo sapiens
  chr3:127505560-127505714
  hypo
cgctcacccgtgaagtggggataatcctaacaccaccgacctcagagagcaatgtcgcgaggtaaataaggaaatgcggatggggcaggggtcttgcctgggctaatgaaagccccccatcgctgtccactaggaagccatttgctccgatggc

SEQ ID NO: 338179 - DNA, 274 bp, Homo sapiens
  chr3:127534744-127535018
  hypo
cgcccaaggaccatgtagacgtcaataaggaagtatttgctgaatgaatcgctgctttggatcctgggagaggagagcaaggagccgtatggggtagccacagagctgcatgcgaggggcgctgagcaggagccaggccgtcctcacccctgcagagactgacagagtggggttcaaaatggccacttgaagggacaataagctgtgtgatttagctgaccccagggagcatctgcgctaaaccagctggctggtgatgcgggaacacctagtc

SEQ ID NO: 338180 - DNA, 424 bp, Homo sapiens; identical to SEQ ID NO: 331854
  chr3:127633987-127634411
  hypo

SEQ ID NO: 338181 - DNA, 1002 bp, Homo sapiens; identical to SEQ ID NO: 331855
  chr3:127794271-127795273
  hypo

SEQ ID NO: 338182 - DNA, 61 bp, Homo sapiens
  chr3:128004552-128004613
  hypo
cgcccacgctcccttagcccattcctgtccagcgtcaggccagtcccacgttcctggagcc

SEQ ID NO: 338183 - DNA, 217 bp, Homo sapiens
  chr3:128056326-128056543
  hypo
cgccctctctcacaggaaggctcataaacacaaggatctcgctcaagccccggcacgtctggaatctcagctcggtgctttgccaggtatgattttgccacaaggggcatttcttttccagaatctgatgcagtcactctcttcagagcggctgggcgtttatctggacctgtcacaaccaggtttctcagcagctcctgtgctgggcactgaggac

SEQ ID NO: 338184 - DNA, 766 bp, Homo sapiens; identical to SEQ ID NO: 331857
  chr3:128273890-128274656
  hypo

SEQ ID NO: 338185 - DNA, 175 bp, Homo sapiens
  chr3:128340992-128341167
  hypo
cgcccgacacttactctgtcgcacagatcagagccctctgtcttcagcctggactgcagcagtgcaatctcactggtcaaggccttgtgttcagtctccaggctcttcttgccactgttgagggtggagatgtcccgggattgcttgtacctattgacggtctcgtcaaagtgac

SEQ ID NO: 338186 - DNA, 1201 bp, Homo sapiens; identical to SEQ ID NO: 331860
  chr3:128720064-128721265
  hypo

SEQ ID NO: 338187 - DNA, 185 bp, Homo sapiens
  chr3:128737561-128737746
  hypo
cgccttcctgcccttcaggcagtccctccccggtgatttctctgtatcttcttgttgggatgtgttcttgcgaagtgagtctttcgggtctgtttgcaccccattggcggcgttgtggcacatgtctcactgtgcctctgactccccactcggcgctggagttcccaccccaaatgttgttctgc

SEQ ID NO: 338188 - DNA, 130 bp, Homo sapiens
  chr3:129231161-129231291
  hypo
cgttcagtgtccatcgtcctgaaactcttttcaacatctccaggttcctgctgcacagcctgcccaaggacaccccctcgggcatctctaaagtgtatcctttctcttatccctcctccgtcccaccacc

SEQ ID NO: 338189 - DNA, 334 bp, Homo sapiens
  chr3:129290351-129290685
  hypo
cgtgggctcccggccaatgtggtggacggccatggacacattctgcaccatgtggaaacgctcaccagccactgtgatggtcctgccgccactgcgggggacagcaaaacctatcagtgcacctgcagccccagagagcctgggggaagggcggggtgccagtctcacctgacagggctgcggcggggactgatggccgtgatgaccgggttctgcatgtaccagaaggtgaggttgccgtgcacgcagccccgacgctcgaagcgcacacacacaggcaccggagccggcagggccccctcaggcatggtgcaggcgatgctggtatctgtgc

SEQ ID NO: 338190 - DNA, 1542 bp, Homo sapiens; identical to SEQ ID NO: 331862
  chr3:129693123-129694665
  hypo

SEQ ID NO: 338191 - DNA, 439 bp, Homo sapiens
  chr3:129982901-129983340
  hypo
cgagggcttccacttgaccacctatggcaaccggaagcagatgcagagacatgtgcgcgaggcttcagcccgccccttacagggaaccgccccccctgggccacgccctggagtggacgctggagaatgtgctcctggcagcccctcggccgcggaaggcacaagtcctcttcgccatcgtggccagcgagacaagtagctgggacagggagaagctatggactctgtccctggaggccaaatgcaagggcattaccctctttgtgctggccttgggtccgggtgtggggacccatgagctagccgagctagccgagctggtcagtgctccctctgagcagcatctactgcgcctacaaggggtctcagagccagaggttaactacgctcagggattcactcgggccttcctgaacctcctaaaaagtgagcagtcccc

SEQ ID NO: 338192 - DNA, 412 bp, Homo sapiens; identical to SEQ ID NO: 331863
  chr3:130064466-130064878
  hypo

SEQ ID NO: 338193 - DNA, 216 bp, Homo sapiens
  chr3:130424529-130424745
  hypo
cgaatctgataggtggatggtaagattgtactacttaaaaccggtattactggttttttattttggacagttgtcacttctggaacctacaaaacaaatagaattctaactatttacgtcgtaagcaaagtatatttgaagacagaagtgtatgcatgtttttatctataaattataacagctttttgtcctcattaatgtaccaattttaaaatc

SEQ ID NO: 338194 - DNA, 92 bp, Homo sapiens
  chr3:130460761-130460853
  hypo
cggtatcgatgggttcttggaaactgcaactttaagtacaacaacgtacaacaaaaccatttattttctcaccatttcattataatgaaaac

SEQ ID NO: 338195 - DNA, 400 bp, Homo sapiens; identical to SEQ ID NO: 331866
  chr3:132756116-132756516
  hypo

SEQ ID NO: 338196 - DNA, 1011 bp, Homo sapiens; identical to SEQ ID NO: 331867
  chr3:132756962-132757973
  hypo

SEQ ID NO: 338197 - DNA, 569 bp, Homo sapiens; identical to SEQ ID NO: 331868
  chr3:133748382-133748951
  hypo

SEQ ID NO: 338198 - DNA, 91 bp, Homo sapiens
  chr3:134080498-134080589
  hypo
cgcagctcctcttcggctcgagctgcccggccctgcgcattgcccagagcctgctccagcagctcggcacgccgccgctggtcctcgatgg

SEQ ID NO: 338199 - DNA, 728 bp, Homo sapiens; identical to SEQ ID NO: 331870
  chr3:134369513-134370241
  hypo

SEQ ID NO: 338200 - DNA, 775 bp, Homo sapiens; identical to SEQ ID NO: 331871
  chr3:134513748-134514523
  hypo

SEQ ID NO: 338201 - DNA, 833 bp, Homo sapiens; identical to SEQ ID NO: 331872
  chr3:135684610-135685443
  hypo

SEQ ID NO: 338202 - DNA, 120 bp, Homo sapiens; identical to SEQ ID NO: 252674
  chr3:136582949-136583069
  hypo

SEQ ID NO: 338203 - DNA, 342 bp, Homo sapiens
  chr3:137717579-137717921
  hypo
cgcctccattacatggtccgttcctgacgtgtacaccagcctctcagagaaaactccatccctacactcggtagtctcagaattgcgctgtccacttgtcgtgtggctctgtgtcgacactgtgcgccaccatggccgtgactgcctgtcagggcttggggttcgtggtttcactgattgggattgcgggcatcattgctgccacctgcatggaccagtggagcacccaagacttgtacaacaaccccgtaacagctgttttcaactaccaggggctgtggcgctcctgtgtccgagagagctctggcttcaccgagtgccggggctacttcaccctgctgg

SEQ ID NO: 338204 - DNA, 1058 bp, Homo sapiens; identical to SEQ ID NO: 331884
  chr3:138066795-138067853
  hypo

SEQ ID NO: 338205 - DNA, 307 bp, Homo sapiens; identical to SEQ ID NO: 331888
  chr3:138679271-138679578
  hypo

SEQ ID NO: 338206 - DNA, 787 bp, Homo sapiens; identical to SEQ ID NO: 331889
  chr3:139258152-139258939
  hypo

SEQ ID NO: 338207 - DNA, 79 bp, Homo sapiens
  chr3:139352994-139353073
  hypo
cgtcgcggaggcacagtaaggaaggcgacccgggaaggttaagtgccgtcactgcagatgtaacgtgcaaatgctcatc

SEQ ID NO: 338208 - DNA, 1750 bp, Homo sapiens; identical to SEQ ID NO: 331890
  chr3:139653430-139655180
  hypo

SEQ ID NO: 338209 - DNA, 1495 bp, Homo sapiens; identical to SEQ ID NO: 331891
  chr3:140660238-140661733
  hypo

SEQ ID NO: 338210 - DNA, 1718 bp, Homo sapiens; identical to SEQ ID NO: 331892
  chr3:140769466-140771184
  hypo

SEQ ID NO: 338211 - DNA, 505 bp, Homo sapiens
  chr3:141174174-141174679
  hypo
gtgctcgacatctgcgtgagtgtggtgagtggaagagcatcaggccatgtcccaggtctttccaaatcagactccattatttctgacattcctcttcctaaagaccagaggtaggaattcagggccgccattttcgtcgtctcttatcacgatgggaatcagcgttctctgctgctgctcctgctgaacacgacgacattccagccaccgggaactgctcgggactcagtatcattctcagacctaggcaggagcgttccgtgcttgccctcctccacaggtgccccgccgcacggggcaaagagtctgcagggccaacagggatgtgcccccgcaatgtccacgccatccccagagaccgcattctggtacccagaacctgagaattccctgcagactttcaaggcctgttctggccgcttccttgccagtgccacacccctggggcagccaaagggcagctgtttgcaggggttgtggaccgagtttgtgatggagtttcagc

SEQ ID NO: 338212 - DNA, 81 bp, Homo sapiens
  chr3:141495392-141495473
  hypo
cgggcaccggtgcagatcgcccatctccacggcagaggtgatcgtttccagcgcagcggtgcaaagccaaagggcacccac

SEQ ID NO: 338213 - DNA, 147 bp, Homo sapiens
  chr3:141622422-141622569
  hypo
cgcacgtgcacatttcataagttttattttcttttacaggtttgatcttgctcttctacctagttttttatgggttcctggctgcactcttctcattcacgatgtgggttatgcttcagactctcaacgatgaggttccaaaatacc

SEQ ID NO: 338214 - DNA, 356 bp, Homo sapiens
  chr3:141656829-141657185
  hypo
cggtgcgggcccagcaggcaggtgacagccgcccttgcgggagtcatccttaaccaagcagtttcagaaatgtttcttgagaaactgtttccggaagtcccggagcctgtgttgcccattgacaagccttgtcggtctcagaagacagactccgggggtctacatccagagacccggctgaggactgaagcccggggtttccaagcggctgccttctccgtcctgcagcagggtgcgagtcaaccgccctggctaagggagcaaggaacccccgccatgctgtgtcccctccccccattccccgaatgcccgtctgttcaaagagggtgagaggaggggggaataccaactgctcc

SEQ ID NO: 338215 - DNA, 33 bp, Homo sapiens
  chr3:141664320-141664353
  hypo
cgtgaaggaactcagtactgaaacgtgatcccc

SEQ ID NO: 338216 - DNA, 185 bp, Homo sapiens
  chr3:141868994-141869179
  hypo
cgcggaaactgcacacaccccaaatacccgtacacttggttccatatgaaaagattttgttcattcgttcgtgccgaagttaaaaaccccgtgtgaacagcgcattaaaacgattagatctttctcattttactccagtcaaatcttatagatcttctatatgccactttgtttgtttttgagac

SEQ ID NO: 338217 - DNA, 68 bp, Homo sapiens
  chr3:142103585-142103653
  hypo
cgataatcgtcaactatcgtaaactatcaactcataatcaagtgtgtaaataaactttaaataaatac

SEQ ID NO: 338218 - DNA, 152 bp, Homo sapiens
  chr3:142537613-142537765
  hypo
cggcaaaaagccaaattcaactagtaaggtatttcagctacgctaacaccaggaagctggactgagtggttagatcagccatgtcccgctctgcagtgctgtaggtctgttgtggtttcaaatgcctgctatgaagaatgcaccgcgttaac

SEQ ID NO: 338219 - DNA, 1240 bp, Homo sapiens; identical to SEQ ID NO: 331896
  chr3:142681817-142683057
  hypo

SEQ ID NO: 338220 - DNA, 43 bp, Homo sapiens
  chr3:142683691-142683734
  hypo
cgggcgcggtggctcacgcctgtactcccagcacacagatcac

SEQ ID NO: 338221 - DNA, 2370 bp, Homo sapiens; identical to SEQ ID NO: 331897
  chr3:142837817-142840187
  hypo

SEQ ID NO: 338222 - DNA, 744 bp, Homo sapiens
  chr3:142895557-142896301
  hypo
cgagaaagggggcggctcagcagcagcagctgcagccgctgcagcctctggtggtggcgtgtcccctgacaactccatcgaacactcggactatcgcagcaaacttgcccagatccgtcacatataccactcggaactggagaagtatgagcaggcatgtaatgagttcacgacccatgtcatgaacctgctgagggagcagagccgcaccaggcccgtggcccccaaagagatggaacgcatggtgagcatcatccatcgaaagttcagcgccatccagatgcagctgaagcagagcacctgcgaggctatgatgatgctgcgctcccgtttcctggatgccagacgaaagcgccgtaacttcagcagacaggccactgaggtcctaaatgagtatttctactcccacctgagtaacccatatcctagtgaggaggccaaggaggagcttgccaagaagtgtggcatcaccgtgtctcaggtctccaaccggtttggcaacaagaagattcgctataagaaaaacatcggaaagttccaagaggaggcaaacatctatgctgtcaagacagccgtgtcagtcacccaggggggccacagcagcaccagctccccgacacccccttcctctgcaggctctggcggctctttcaatatctcaggatctggagacatgtttctggggatgcctgggctcaacggagattcctattctgcttcccaggtggcatcactccgacgctc

SEQ ID NO: 338223 - DNA, 322 bp, Homo sapiens
  chr3:143316169-143316491
  hypo
cgctggcgtccagagaaagagagagccaaagctgtccttcttgcagacagacaggagggggccaaaacacagctcaggcttgtttgtgctcaaagagagaaagttaagctgttgaccctgaaggcaagggagaactggcctcgcaaccttgcgtgggggtggccaattcaagcagctgagacagagcggacagcgtaagaaaagctgctcaggagagaggtagtttaagaaagctgttgatgagagctgctgctgaataaaaccatattcacccgcctgtggccccccgagggttctttctgctcatccacccactcccctc

SEQ ID NO: 338224 - DNA, 856 bp, Homo sapiens; identical to SEQ ID NO: 331898
  chr3:145878430-145879286
  hypo

SEQ ID NO: 338225 - DNA, 203 bp, Homo sapiens
  chr3:148705325-148705528
  hypo
cgggagatttcctctttgaactccttgaccgaggctcgatcgcagatcacaatttcctccttgtccttgggggtcttgacggtgacccgaatggggggcctcgtctcggccccgctcggctccgccatgccgccgccgccacccggccgcccgccagcccgcccggctcctcctcctccccgctcgcccggccggcccggctc

SEQ ID NO: 338226 - DNA, 216 bp, Homo sapiens
  chr3:148804777-148804993
  hypo
cgtggggactttcgctccaaattttcatgttaagcctcagcgtatgcatgagacacaacgagtttggaaaatcttaaatggaacttagagtcccctccccacctctttttgttatttttaaggaaaattttcctttcttggtgcaggaaacccatcacatgtttattacagctatgggggcgtttgcctgaaatggtggacgggaccattttcccc

SEQ ID NO: 338227 - DNA, 106 bp, Homo sapiens
  chr3:149360184-149360290
  hypo
cgacaagcaaaactctgtcacacacacacacacacacacacgaaagtacgaatacccaaatataagttggatgatataattttgtaagagaaatccggccgggcac

SEQ ID NO: 338228 - DNA, 77 bp, Homo sapiens
  chr3:150187009-150187086
  hypo
cggcgtgagccaccgcgcccggccaacatgcaacaatacttctaagcaaggcgatacagatcagcaactctggtgcc

SEQ ID NO: 338229 - DNA, 141 bp, Homo sapiens
  chr3:150237458-150237599
  hypo
cgccactttaggtagctgcagccatgcaaaagtttgatatcaaagtatctgaaaagcatagcattcaccagttgtcgaagcaccgttccgggacttgcagcatcagcttcacttgagaacctgttagagatgcacattctc

SEQ ID NO: 338230 - DNA, 72 bp, Homo sapiens
  chr3:150237910-150237982
  hypo
cgtgatccgcccgcctcggcatcccaaagtgcactccaggttttaattacctctcgggtgattgtggtgcac

SEQ ID NO: 338231 - DNA, 2364 bp, Homo sapiens; identical to SEQ ID NO: 331914
  chr3:150802803-150805167
  hypo

SEQ ID NO: 338232 - DNA, 72 bp, Homo sapiens
  chr3:150848450-150848522
  hypo
cgcggctcttccttcacctgtgggtgcacatgggcctgctcccttgctccactgtggtctctgcccagacgc

SEQ ID NO: 338233 - DNA, 124 bp, Homo sapiens
  chr3:151112517-151112641
  hypo
cggcgctcaggcgccatgatgcagccgccttctcttcatgcaatcacatcgcagcagcagttgatacagatgaagcttctgcagcagcagcagcaacagcgacttctcaggcaagcccagactc

SEQ ID NO: 338234 - DNA, 48 bp, Homo sapiens
  chr3:156396587-156396635
  hypo
caatgaaagttttacgatttgaacaattcatatgtcagttcaacgtgc

SEQ ID NO: 338235 - DNA, 124 bp, Homo sapiens
  chr3:156543180-156543304
  hypo
cgatactgctctgcgtcatttaatcacttctctaaatctataggttcaattaattttctttgtatttacttaatcttattttattcaatagcaaaccagtctctttgcctgctacagagccatc

SEQ ID NO: 338236 - DNA, 514 bp, Homo sapiens; identical to SEQ ID NO: 331932
  chr3:160167477-160167991
  hypo

SEQ ID NO: 338237 - DNA, 123 bp, Homo sapiens
  chr3:168608983-168609106
  hypo
cgaaagcagatttggtgccaacgaagataattatatggacaatatttacaagaatgttttctgttagtgtggctttcaaataacatgaaagtacatgctcccgagccgggcgcggtgactcac

SEQ ID NO: 338238 - DNA, 950 bp, Homo sapiens; identical to SEQ ID NO: 331941
  chr3:169482182-169483132
  hypo

SEQ ID NO: 338239 - DNA, 820 bp, Homo sapiens
  chr3:169539913-169540733
  hypo
cgtttaaagaacatcagggtcctctacctggataagaacaacctgaggagcctgtgcccggcgctggggctgctgagcagcctggagagcctggacctgagctacaaccccatcttctcctcctcccttgtcgttgtcagcttcctccacgccctgcgcgagctccggctctaccagaccgacctgaaggaaattcccgtcgtcatctttaaaaacctccaccatctcgagctgctcggactgaccggaaaccacctgaaatgtctgcccaaggaaatagtgaaccagaccaagctgagggagatctacctgaagcgaaaccagtttgaagttttcccccaggagctctgtgttctctacaccctggaaatcattgacctggacgagaacaaaataggtgccatcccagaagagatcggacacctgacggggctgcagaagttctatatggcttctaacaaccttcccgttctgcccgcgtccttgtgccagtgtagccaactgtcggtgctcgatttatcccacaacctcctccactccatcccgaagagcttcgccgagctcaggaagatgacggaaatcgggctgagcgggaaccgcctggagaaggtgccacgcctcatttgcaggtggacctcgctgcacctgctctacctgggaaacaccggcctgcacaggctgcggggctccttcaggtgcctggtcaacttgcgcttcctggacctaagccagaaccatctgcaccactgcccgctgcagatctgtgcactgaagaaccttgaagtcctgggactggatgacaataaaataggacaggtac

SEQ ID NO: 338240 - DNA, 104 bp, Homo sapiens
  chr3:170588570-170588674
  hypo
cgagaccacccttggcagcgtaggcatagggagaacccgtctctacaaacaattttaaaaaaaatggcccgcgtggtggtgcgcgtctgtactcccagccactc

SEQ ID NO: 338241 - DNA, 1387 bp, Homo sapiens; identical to SEQ ID NO: 331942
  chr3:170625831-170627218
  hypo

SEQ ID NO: 338242 - DNA, 191 bp, Homo sapiens
  chr3:171362739-171362930
  hypo
cgccggttgaaatgtctccttcgaaccctggcagaagtggtatcacgacatatacccggtatttctggttttccctgcaaaggtcagatgcagagaaattcacccaaaaaataaaaggtagtatcaattttagatgacagccaagcagttcacatggtttttgagattgagtgaatggcttcctacaacac

SEQ ID NO: 338243 - DNA, 83 bp, Homo sapiens
  chr3:171976039-171976122
  hypo
cgacatagactcacaggttctggttatgataccgaaagccagtgatgagggcattattcttgtgcatttgtctttcagagttc

SEQ ID NO: 338244 - DNA, 111 bp, Homo sapiens
  chr3:172727365-172727476
  hypo
caggggaggctaggctctttcgcatgcccttaggatagctgcagcagccgcagtgctcaggagcagactacagaccgcacctctgctgctgctcgccaggcaagtcccacc

SEQ ID NO: 338245 - DNA, 98 bp, Homo sapiens
  chr3:176897153-176897251
  hypo
tgttgtactgacataattctcgtatttaccaattacatatgagcctattccggatacagacacacgctggagcacaaccaagtattcttttaacttac

SEQ ID NO: 338246 - DNA, 75 bp, Homo sapiens; identical to SEQ ID NO: 331946
  chr3:176915778-176915853
  hypo

SEQ ID NO: 338247 - DNA, 99 bp, Homo sapiens
  chr3:177238893-177238992
  hypo
cagagcgagactccgtctcaaaaaaaaaaaaagtccttgcaaaaacttgtctcagaaagggaaaaaaagtgagatacaaaggtagttagagcagcggtc

SEQ ID NO: 338248 - DNA, 1102 bp, Homo sapiens; identical to SEQ ID NO: 331947
  chr3:179168676-179169778
  hypo

SEQ ID NO: 338249 - DNA, 97 bp, Homo sapiens
  chr3:179377859-179377956
  hypo
cgatttaattgtacaattcagtggcattaaattacattcgcatggaaacattttaactcgttttaattgtacaattcagtggcattaaattacattc

SEQ ID NO: 338250 - DNA, 114 bp, Homo sapiens
  chr3:179391556-179391670
  hypo
cgggtgagacactcttagacttgggccgagttcacctagccctagacaagtgctacctaaagtgtgtcagctgactgggctgagagatgagtacaacactaagagtagtgtttc

SEQ ID NO: 338251 - DNA, 1235 bp, Homo sapiens; identical to SEQ ID NO: 331948
  chr3:179754092-179755327
  hypo

SEQ ID NO: 338252 - DNA, 924 bp, Homo sapiens; identical to SEQ ID NO: 331950
  chr3:180397104-180398028
  hypo

SEQ ID NO: 338253 - DNA, 581 bp, Homo sapiens
  chr3:180546449-180547030
  hypo
cgaccttcgctcgctttctgggccggggcctggtgagagtcagggggccggggcccctgaggcagagaaaactgttcacgccttggaggagagtgtccacttggctcccagggccggcctgcacagcctgcagcgtctccatggccttctcctgctgccgccgggcctccaggccctccacgtcgggcgggtagcagtggccacgcatcacggtcacctgctgtccctgggtgatggcccggctccggcagctgtgcagcgcgtggtcccggcaggtccaatacgccttctcccccacggccttctcccgcttgtagaggaacgactcgtgcaccaggaagctatccccgtagcacgtcctcaggaactcaaggggccgggcctgtcccaggcccaggatcgagcacttcttgggcgtcaggctcagcagctacaggattcggggtccgtcgtcgtcctccgggccggcttgctcagcactagcccaggggtgggctctggctccggctccttggggcactgccacaggccccccctctccagcggctcctccactcggcttccagagccctcaggacccc

SEQ ID NO: 338254 - DNA, 1710 bp, Homo sapiens; identical to SEQ ID NO: 331955
  chr3:181429601-181431311
  hypo

SEQ ID NO: 338255 - DNA, 1627 bp, Homo sapiens; identical to SEQ ID NO: 331961
  chr3:181444347-181445974
  hypo

SEQ ID NO: 338256 - DNA, 114 bp, Homo sapiens
  chr3:182656917-182657031
  hypo
cgatacacgagttgggatgcctaggtataactcacacacataaagtaaatacccgccaggatggctgcaataaaaaagacaagtattggcaaggatgtgcagacacggcagtcc

SEQ ID NO: 338257 - DNA, 51 bp, Homo sapiens
  chr3:182800469-182800520
  hypo
cgagagaacgagtgtggccagggcggtggctcacgtcggtaacgccaacac

SEQ ID NO: 338258 - DNA, 45 bp, Homo sapiens; identical to SEQ ID NO: 252917
  chr3:182815989-182816034
  hypo

SEQ ID NO: 338259 - DNA, 807 bp, Homo sapiens; identical to SEQ ID NO: 331968
  chr3:183165026-183165833
  hypo

SEQ ID NO: 338260 - DNA, 237 bp, Homo sapiens
  chr3:183209981-183210218
  hypo
cgggctgtaggcgtacagcgctctcatggccccacctgaggagagggaggaaacacggtgggcatcgctccatttttctggtttcttccctcttaaccactaaaattcaacttctgattaggccaagtctaccctcttgccaagagaaacagtcgattgatggctctcctgaaagccagagtgggtcctaggggcagtgagttgccagcgctggagacaccgcgacacaccgtttac

SEQ ID NO: 338261 - DNA, 217 bp, Homo sapiens
  chr3:183217407-183217624
  hypo
cgcatgcaaactccacccacttcttattctcactctccagctcatgctctgttagcgggagcttggccacctccaggcggctgcgcctcagggggtccaggcaggtcacctctgccacaaaccgttcatccttcgtgcagccgccaatgatcatgaacacctcagactggaactcatgcatcctgggcttggtgcgttccgaaatgatctggaaatc

SEQ ID NO: 338262 - DNA, 117 bp, Homo sapiens
  chr3:183275024-183275141
  hypo
cggtcacaagtacagtcatgcccagcacaatgacatttcaatcgatgatggactgaatatacaattgtggtcccaaaagattataatggagcatataaagaaacctgacggccgggc

SEQ ID NO: 338263 - DNA, 140 bp, Homo sapiens
  chr3:183419820-183419960
  hypo
cgcttaccgaaatgctcttcatccttcaagaatcaaattccgactcatccatgaagtgaactccagccttcgaaagctttttttccccctaactactacagaacagatgatatggaaacaatctgcatcaggccagccgc

SEQ ID NO: 338264 - DNA, 313 bp, Homo sapiens
  chr3:183643336-183643649
  hypo
cggtacctgtccctgggccagcaccataatcctatcggagcctagaaccgtgtgcaggcgatgggcaatggtcagcatggtacagtctgcaaatgcttctcggatggtctcttgaatcaataagtctgtctctgtgtccatggcagctgtggcttcatctaaaatcagaatctgccagagaagcagaggagaaagaaactcgattaaattcctttagcattctggttaatctagattttactaaaatgtatttcatttaagttttacactatctattgttttcttttctttcttttttttttttttttgagac

SEQ ID NO: 338265 - DNA, 157 bp, Homo sapiens
  chr3:183648011-183648168
  hypo
cgtcattatcacagaactctagtgagaggacagcaggccggcaccgcctcattcctgctatctgggcatctctcgatctcctgggagattctgacccgccttgctctccagcgcctcttgccctttgcacggcgtttttcccgcttggaacatgctc

SEQ ID NO: 338266 - DNA, 195 bp, Homo sapiens
  chr3:183703570-183703765
  hypo
cggcagtccccaccggcgtcaccaaaaccttggatcatcttggtgtataaatgtcagcatcagctggctggcaggtaaaaacaaacagaacacaacaacttgactgtgtttcatttgttctgattatggctaccaaggttcggtgaaacccgagcagggacaagaaataaaaatgccattttatttggggagccc

SEQ ID NO: 338267 - DNA, 122 bp, Homo sapiens
  chr3:183728816-183728938
  hypo
accgtgcccggcccaaactcattcttaatatctccccaatctccttttcttatgtccacgaataggtttaaatccttaccatcaatcccagacaccccaatgcctccctatcttctagaaac

SEQ ID NO: 338268 - DNA, 107 bp, Homo sapiens
  chr3:183891953-183892060
  hypo
cggctcgttcatgaaaagctgtagctgacctccgggaagagtgtacagtcatggacttatttgtgaaaaggtttagtttcttccaagtagtcgcctccttcctcccc

SEQ ID NO: 338269 - DNA, 90 bp, Homo sapiens
  chr3:184018053-184018143
  hypo
cgtctcttgatcaggagaaggatacatccctgtatcgaccagcgctggaggaattgcgaaggcagattcgttcttctacaacttccatga

SEQ ID NO: 338270 - DNA, 52 bp, Homo sapiens
  chr3:184042674-184042726
  hypo
cgaggacgcctgaaggaagagctggaagaggctcgggacatagcccggcggc

SEQ ID NO: 338271 - DNA, 124 bp, Homo sapiens
  chr3:184057066-184057190
  hypo
cggctgaaagcattatttgcaggtgacacttgagatgggccttaagtgatggcaagcattttttcacgtaaggatggcattcttggcccagaggaaagctgagttccttttcctggaggcaggc

SEQ ID NO: 338272 - DNA, 146 bp, Homo sapiens
  chr3:184059878-184060024
  hypo
cgtgaccaagcctaccgccatggcccagggccgagtggctcacctcattgagtggaagggctggagcaagccgagtgactcacctgctgccctggaatcagccttttcctcctattcagacctcagcgagggcgaacaagaggctc

SEQ ID NO: 338273 - DNA, 177 bp, Homo sapiens
  chr3:184225995-184226172
  hypo
cgcatcaacacacacagccgcagcagctgcacatagatcaacaggccatccgtgcctcgaacacctacatcaacggccaaggccttggccaccctgcccagctccgtgcaccgctagttgccttggtggatcacagccgctccacgctccacaggaagaatcccaaacccggtgacc

SEQ ID NO: 338274 - DNA, 939 bp, Homo sapiens; identical to SEQ ID NO: 331970
  chr3:184278877-184279816
  hypo

SEQ ID NO: 338275 - DNA, 801 bp, Homo sapiens; identical to SEQ ID NO: 331972
  chr3:184321783-184322584
  hypo

SEQ ID NO: 338276 - DNA, 180 bp, Homo sapiens
  chr3:184459063-184459243
  hypo
cgggagctgagaaagaagcagaggcctctttggtggaggaatcccggcaggccggcaagtcccaacaggccgatgttgggctgctgcaggcagacagtgagtcacctgggtccccgctgcttacaggacagagccagaataatgacaataataatagaggtccacggtgctgttattaac

SEQ ID NO: 338277 - DNA, 292 bp, Homo sapiens
  chr3:184626085-184626377
  hypo
cggtcctttgccggacttgcagcaggggcaccctgtcttcttggcctgctgcgctcagccccttgtgggagggagcacatgagcaagccagtgtgggatccggctggccactccaagtgctgacacaggaacaagctccatgtgaggcccgcggtcttgaggggaatgcagcagcacccagacaagggtgcccacgaccctgaagccccagatggggtgttagtgtgctaattagctcttttagttttaccatccatagcctgatggacggcagcatgttagcagctcggtc

SEQ ID NO: 338278 - DNA, 276 bp, Homo sapiens
  chr3:184784966-184785242
  hypo
atcttctacactgccggaattttctcactgttaacaagttttgcaaaggtggtttcaaatggatgcgtctatatcacacctgaagatagttacagtcaatttccagcttcacggaattctcccctgcgcctttttcttccctttgagcctccaggattgctcaatcgttcccttgggcaagacactgggctggctgcggtgaacacaaaagggagccgtacacagccctgccctcaggcacctgccggctggggaaggacacgttcagcaggaaac

SEQ ID NO: 338279 - DNA, 842 bp, Homo sapiens; identical to SEQ ID NO: 331973
  chr3:184870185-184871027
  hypo

SEQ ID NO: 338280 - DNA, 70 bp, Homo sapiens
  chr3:185271311-185271381
  hypo
cgagagtgcttgcaacactaactcaggcttctagtggtctgatgagcttaaaaatcaattaataagccgg

SEQ ID NO: 338281 - DNA, 393 bp, Homo sapiens
  chr3:185360808-185361201
  hypo
cgagactctgtgtcaaaaaaaaaaaaacaaaaaaaacccactgttttagacataatgctattgtacacttaatacagtgtaaacataactcacatgcagtgagacactaaaacgtgtatgactcattttattgcaaagttcgctttactgtggtggtctggaactgaacctgcgacgttcctgaggtatgcctgcacttactagtgagcttcccgtggaggcgtgaagtgcctcttcccggaactgccgggcatattatcctccccctttcctccacttaaaaagcagctttgcctggccaggcttgcagttccttaaggatagactggtcttctctagcttgacatgcagtcgatccatccctctagctccgaggttcggaaacttcagtgc

SEQ ID NO: 338282 - DNA, 270 bp, Homo sapiens
  chr3:185363069-185363339
  hypo
cctgcagaagccctggggggcgggaggcggggctcggtggttctggcaaacctggctgaccttccccgcccctcctcggcccctggggttctcagggcctcggcagagtccctggccgcctccgcagacttctcattcctcagatggtctttggtttgctcccgatctggctggctgcgtttggtctcattctgtcaggtgttggaagggctacattcatccgttgttttgctggtgcctgtgggagcctcacttgctgcgctgtgaggc

SEQ ID NO: 338283 - DNA, 129 bp, Homo sapiens
  chr3:185365800-185365929
  hypo
cgcctaaagcgcagtgtgtgccctggagcgccgactgcattctggagacggggaatcctttgattccacaccgcttcgttctttcgtataaagctgactcattacatctagaacttggttttgaattcc

SEQ ID NO: 338284 - DNA, 477 bp, Homo sapiens
  chr3:185374988-185375465
  hypo
cgctgcctgggactgagagggaacaagggccgtgggatgagaggaggtggtagaagggccacagggccgtcaggagcagcctcaccttgatagaggctccggcgaatctcgccagctgtttgatgtgtgcccccttcttcccgatgatggcgcccacagcctgggttgggatgaagagattcacaatctcctgctctggatactgggagggcgagacaagaaagaagacatcattccaaccaggctttctcctccaggcactcaacaggtaccaagcaccttaccatgaaccccatggtgggaaggccccgccacccaaggaaatggccaaaatggtgcacaggatccttctgcggcctgcggctctgcaggtgtgaagcctgaggaagggacctgagcacaggcagcgctagtgataatcaagggcatcctcctcttgagcttctcaatttgttggattccaaaagctgtctgatc

SEQ ID NO: 338285 - DNA, 243 bp, Homo sapiens
  chr3:185407229-185407472
  hypo
cgcagcgggaaatcaatctgtctggcctgagaagtgcccccaggggcgtggccttgctcccgggaagagtggtccccacgctgggctcgctgagggggcgaaggggagctcacctcttcatccgggatgtaggaaatcttgaaggagtagttctcaaactgatgcccgcttagcttctccatggctctgaaatgcagcaggacaggggagcttcgtcagaaaccaacatcaagaaagaccctc

SEQ ID NO: 338286 - DNA, 98 bp, Homo sapiens
  chr3:185441721-185441819
  hypo
cgaagcgggtaagcaggttcggtctgggcaatcccagggaagccgaaggagacaaatccagcgccagactatgcagagacaaatttcggtaactctac

SEQ ID NO: 338287 - DNA, 248 bp, Homo sapiens
  chr3:185445861-185446109
  hypo
cgttacgtatacctgaactatgtttgcgattcacacaaaataaagaattgaccaggaccaaccccagcctatgagaggcaaagttactgctgcccgctttaccccaccctagagcgccctctgatccacactctcacactgccttccagctttcccacggcgccagacccttgctgctcctgggccccttccccttgctcccttcatcaggcgctctccgctcctccagcccatcagcgccttgactc

SEQ ID NO: 338288 - DNA, 139 bp, Homo sapiens
  chr3:185643252-185643391
  hypo
cgattcccaacatgacgcctgcgagtagacatgggagaatggctgtggctgtgccgtctacgataatctcgactgtaagacctgctacgtgatcgtctatgggagcgggagcgagaccgtgaccgggtataatgccttc

SEQ ID NO: 338289 - DNA, 1571 bp, Homo sapiens; identical to SEQ ID NO: 331975
  chr3:186078710-186080281
  hypo

SEQ ID NO: 338290 - DNA, 90 bp, Homo sapiens
  chr3:186442824-186442914
  hypo
cgaatgctgattgcgatcattaatgctgtgtttttgtctgctctttgttaagccgagggccctgtggtgacagcccagtacgactgcctc

SEQ ID NO: 338291 - DNA, 139 bp, Homo sapiens
  chr3:186697410-186697549
  hypo
cgtaatagctgctcctaagaatgcaacgtgagctgaattcaaacatgaatttggagccagtacctgaatatgtgggttgttctatgccaccgggccccctgcctgtttaatttctccttcccctgctgccaaggcttcc

SEQ ID NO: 338292 - DNA, 334 bp, Homo sapiens
  chr3:187443068-187443402
  hypo
cgctctgctcacctgcccgctctgctcacctgcccgctctgctcacctgcacacggggactgagtgggactttctcctgcccgctctgctcacctgcccgctccgcttgcctgcccgctccacttgcctgcccactcctccgcttgcctgcccactcctccgctcgcctgcccgctccgctcgcctgcccgctccgctcgcctgcccactctgctcacctgtacaaatctggctccgcaggtttcgcatttgtagggcttctctccagagtgaattcgagtgtgggttttcaggttggctggccggttgaactgggccccacagatgttgcaac

SEQ ID NO: 338293 - DNA, 2866 bp, Homo sapiens; identical to SEQ ID NO: 331978
  chr3:187455297-187458163
  hypo

SEQ ID NO: 338294 - DNA, 1949 bp, Homo sapiens; identical to SEQ ID NO: 331983
  chr3:192126247-192128196
  hypo

SEQ ID NO: 338295 - DNA, 796 bp, Homo sapiens; identical to SEQ ID NO: 331985
  chr3:192232553-192233349
  hypo

SEQ ID NO: 338296 - DNA, 522 bp, Homo sapiens; identical to SEQ ID NO: 331987
  chr3:192635635-192636157
  hypo

SEQ ID NO: 338297 - DNA, 134 bp, Homo sapiens
  chr3:193391768-193391902
  hypo
cgcgaggtggcaacagctggcccttttactggagcttgtggggattagagagtcgggctcgcagcagcgtgctcggcctcttgcctctgttgactgttctttattgtttgatgcctgagcatctcccagacagc

SEQ ID NO: 338298 - DNA, 383 bp, Homo sapiens
  chr3:193419624-193420007
  hypo
cgcgtcaaaagcattgttttcttatcctgttggtggagtgaggcatttggacctggatgctctccccattgggcgccccccgttggtacgtttcgccagctgtgtactctatgattggctggccttttgatgtgcaggtactacaagttggtcacaaacttgtgtacaatgggcctgttctggttcatgtgaaaatcaacatccttttttgtgttaccgggtgacaggatgctacaatactattagcatttgcaaagagtgtgctctgtccaagggtgtaaccacaggtcgtgtgctgctcactttgtgtttctctattatgtgagagacacaaagaagctgagggctcgcaaaggcctgtcaaatcttgtaatgtggcgctc

SEQ ID NO: 338299 - DNA, 346 bp, Homo sapiens
  chr3:193455077-193455423
  hypo
cgcgctgttggcaggaatgtttctttcctgggtgtcaatacaagcccagggtcatttttcagcatttgccaatcgctgtaattgcacaggcccgagtggctctccagagaattcctgccgttcctcattctctcctcctggactgtgctctatagatgcaccccaggccatggatcatgtttttcacataacccgttaattactaaagaaaacaacccagctttcaacctgattagcccagattaatggccagcagcgggtttcacgcgcctgcacaatttatcactgaaaagaactgtgtctttaatgatttagctacctggccgggcagggcttactccaggcc

SEQ ID NO: 338300 - DNA, 370 bp, Homo sapiens
  chr3:193586985-193587355
  hypo
cgctgcagcttgctagaggccttctaattaacctgcgaagaaccgtctgcaggcccccagtccggtgttcactcgttcattcattcgctcttcactgggtgccctggcactccaagcctccagcgcacacccagccctaaccttgaccagggtgctgagcacgaggagccccaccctgagccaggcctggagaggcgcctttaagcgcaggtcctgcggctgctgacaggtcatcagagctgggaccaaagacccgccgggaggctggcagcctaggtcgcttcccaagctctccgggcccttcccttcggcggctaatttccacttttcataaggatgtgttcattcaggggactaggagcagaggcgc

SEQ ID NO: 338301 - DNA, 181 bp, Homo sapiens
  chr3:193588155-193588336
  hypo
tttatgccaggtcccgcatgaacagtggtagatctagaactcaggtgctacgctgtcggcctgctgttggtctgcggagctactatatagctgttgcgtgactcagggaacacctggggcgtgactgacaggtggagaagggtcaaggtggttggagcccaagcgtggataagacagcccc

SEQ ID NO: 338302 - DNA, 351 bp, Homo sapiens; identical to SEQ ID NO: 331989
  chr3:193852659-193853010
  hypo

SEQ ID NO: 338303 - DNA, 620 bp, Homo sapiens; identical to SEQ ID NO: 331990
  chr3:193858590-193859210
  hypo

SEQ ID NO: 338304 - DNA, 74 bp, Homo sapiens
  chr3:193903180-193903254
  hypo
cgctgaggcgcgatgaatgagcaaccagccctttccctgcctcttgccccagagatggcactgcaggcggtacc

SEQ ID NO: 338305 - DNA, 175 bp, Homo sapiens
  chr3:193922622-193922797
  hypo
cgaaactcgcctggacaagtccaacttcattcttttcagtacgactagctcctgtgcgctgcagaagactcgggctgatctgaaagcgcctctcctattcgagactctcaggttttaagtaggtcttccgcacctgcagatgaaaaaagatgtggctattattttcctcgattac

SEQ ID NO: 338306 - DNA, 296 bp, Homo sapiens
  chr3:193969977-193970273
  hypo
cgaaacacactgctacatggggctggcccatggatagccgcgcacctcagagtgagcagtgccagaagccaggtagattgggggtggagggctgggggagagacatgaggcaggaagcagttaggcaccaaagcaggagtttctagaccttcggtcaacaaaaattcaaggagcacctgcttgcgctaagtgctggaaatgcagtgatgcgtaaaacacagagcccgcttcgtggaacttagcatcaagagagaacacttgacatgcagacaggcaatgccagtgtcgtgggatgc

SEQ ID NO: 338307 - DNA, 152 bp, Homo sapiens
  chr3:194048766-194048918
  hypo
cggtgtggctgaagccagcagaaatgaaaagtcctctggtacctccccttcaaacagctcacactcatgcgggtcactgtggcacggcgccctcacacgcgcatccgcagagcgcacctgtcccagcgtggccaagaccgcctctttcaccc

SEQ ID NO: 338308 - DNA, 324 bp, Homo sapiens
  chr3:194048948-194049272
  hypo
agtcacccctggataactgaggacttgcctgtcaagtatgaaacatttagcacgtacagtcctttgagtggaattagagtggaagagtgtaactcagcgtgtaagagttgcctgctgctgctttgaacagagggtaattgcagcagatgccttcagcccctgctcttttcagcagccactgtacagggcggttccaccccatctcccacctcccggcccagctctctgatgtctctgcccggtggcgttccccgatgcccctttgcctgagcgccgaagcgtggggagtggaagctggcggtgggagccggtggaggcatgcgc

SEQ ID NO: 338309 - DNA, 142 bp, Homo sapiens
  chr3:194061709-194061851
  hypo
cggagactcagctcccctccgcccctacctgtcgcctggtcaggccccagaggcccccttccccagctcctgtatgcgctgctactagggccctgctgcccgagcctcgatagacacggtgagccgcagagaaccgcagctc

SEQ ID NO: 338310 - DNA, 456 bp, Homo sapiens; identical to SEQ ID NO: 222314
  chr3:194208088-194208544
  hypo

SEQ ID NO: 338311 - DNA, 85 bp, Homo sapiens
  chr3:194374282-194374367
  hypo
cgacggagatggaaaggtgaacacagggaggagacaacgaaagcctttcagttcagtgccgtgacagacaaccatcgagggtggc

SEQ ID NO: 338312 - DNA, 296 bp, Homo sapiens
  chr3:194786359-194786655
  hypo
cgggccggggtgtgatctgttggcgggccggggtgtgatctgtcggcgctctgtgatctgtcagcggcctggggtgtgatctctcagcgggctggggtgcctgtgcggtgatctgtttgcgggctggggtgtgagctgtcggcggtctggggtgtgatctgtcggcggtctggggtgtgatctgtcggcggtctggggtgtgatctgtcagcgggctggggtgcctgtgcagtgatctgtcggggggctgaggtgtgatctgtgggcgggctggggtgactctgcagtgatctgtc

SEQ ID NO: 338313 - DNA, 60 bp, Homo sapiens
  chr3:195093160-195093220
  hypo
cgcctccgacctcagcacctgggagtcccggagacgatcactttagcacaagacctcagc

SEQ ID NO: 338314 - DNA, 97 bp, Homo sapiens
  chr3:195172966-195173063
  hypo
cggggggcaggctgcaccttgtgagaaccttcttgctggtggggactccgtggcgtccccaaggtagggcaagggatcacgtggtgagaggctgagc

SEQ ID NO: 338315 - DNA, 526 bp, Homo sapiens
  chr3:195536308-195536834
  hypo
cgcccttggtgactgcttttcctgccaaggccctggtcatgcccggtcagatgtgtgggtgccatctcccagccacgaccatctcctctcctggcccagctccacttggtccccttagcgacgcaaaggactcagcgctccacgacatgcctagcttcttcgggtcgtcatggagacgcccttgcacaccaacagtccttcactccttctccgggtcacgcccccgtgcttttccacgcccaccccaggtcttgcccctctgcgctcctctccacagaccccacttcctggctccacatggagctgagtgtccagctggtacccagcacatttgggctcagctttaaatcacagatttggaaactcaagaacttgggcgtcaggaggtccaaccgttcaccactgctttttacacaggggaccggggccctggggagacacggggcagggcctggtcacaggggccagaacagttcacggcaaagacttggccctggggctcctaaatccaagctgcctccccggc

SEQ ID NO: 338316 - DNA, 264 bp, Homo sapiens
  chr3:195586992-195587256
  hypo
cgcgccaggatcacgagagccgcctctaacccacccccaaaacaacaaaaggatgcgctctggccttgccaacttcagtgcctgggacaagccggctcgtgcccgccgcctcggctgcagggccctccacctgcagcgctttcgtccctacctggcgttcaccgttctcacccatcacatcagcacaacgtgaccttgtggggagccacctcctctgctcccaagacacctggtgcgtaacgattacagagcacccgtcctgcc

SEQ ID NO: 338317 - DNA, 54 bp, Homo sapiens
  chr3:195597381-195597435
  hypo
cggccagagggcagacactcctgtcccgcaggccacgatggagggcctaagaac

SEQ ID NO: 338318 - DNA, 393 bp, Homo sapiens
  chr3:195597835-195598228
  hypo
cgctgtgtggggttctggtgtgtgggggcccgctgtgtgggttctggtgtgtgggggcccgctgtgtggggttctggtgtgtggggcccggtgggtgaaggcccctgctttccacgcctctcagggcagaccagagtatcagaagtcagcaggagaagggctgcagaggccaggggcctggaatccccctgcggccagcagagaggcttggaggcctggcgcaagaagcttcggggggtggggggtggcatcccggaagtgactgattctgcgtgtccttcccagatgcccctcggtggccttatcctcttacataggagacagggcctctcccaggtatggagtgagctccgtagagtactgtgtggtggggaggcggagctgccacctaac

SEQ ID NO: 338319 - DNA, 2308 bp, Homo sapiens; identical to SEQ ID NO: 331993
  chr3:195599104-195601412
  hypo

SEQ ID NO: 338320 - DNA, 906 bp, Homo sapiens
  chr3:195602336-195603242
  hypo
gctccccctcgggatggcgcccacgcacactccaaggcagcttcatcccaaggctccagtgggacttccaagaggaccgtgtcacttctcgcagcccacacgcacccgtgtgaggctcagtgtggccgaggcaccagcagtccagaggggactgaggccagcccttccttccaggcccgccctgtccgcgccctctctctcccgccatgaacaggccggagtccccgtggccatgggagggccagggctgctacccggccgtgactgaagcaggggcggatgaggacttcctgggggagcaggaaaagggcccaacacctccgcatgaaccttctacctcctgctgcccccgggcctctggtcaacatctctggggtagacaagatggaaaacagaggccggtgctgagaactgcctaaggctgccccagctctggaaatctcagcaccacgttcccgtccgggccgaaggtagtccagaaatggctcaactaatgccggacattctgttcaaaacgcccgcccgctcttctccctaggggtcccaggcgcccaggcctggagggataacccggatgcctggctcccacccaccacaggaagccgaggctccagggccagaccaggccaaggacccgcaatggattccaacacccgctctgtatgcggaacaaaagtgctgccagccaccccttcctccaaacgagcccctgggaaagaccagtcatcatttgtgtctccaaatctagacacagcacgaaacatctaggtgtctcccctctgcccacagcctggtaccctgagaaggactgagcctagactcagtcagagctgcggcaggtggcctcccagactccgcaccaggaaacaaatactggacacagcttcgcaagtgggaagccacggc

SEQ ID NO: 338321 - DNA, 685 bp, Homo sapiens
  chr3:195603862-195604547
  hypo
cggctttccagctcgtggaggtggacacggtcatgaggctggacttcgggctggaggccctgccaggtacttccaggggacccccccacccttaatcttcctatttccagaatgctccccggagcgccacgcttgcaatcccatccctggcccctcagctccaaacctgcagactgtttgcctcctgtccccaggcctctctttctagaaccttctgcattcttccccagcataacacccctaaccacaggccctgcagtctcagtatgtcattcctattcccagaccctgggcccaagggtgagggagccgggcctgggaaggctcggggtgtcggggccacagcggtgcaggtcacactccacacagccccccaggtctcctccacccacccccaagaggcacaggattgcaccgaaggccgcagactccaaaagctgcagtgcaggtggaagaggctccctgggaagcagccctagccccatccttgcctggcctgagtcaggagctgcgagcacaggggatttcctccacttcactcttcttcctggtcctcaatactgcccctgcctcaaaggtacctgaaacctgccctgccccagccagttgctcagacaccctggggatcagccagcacaaggcagggccagcagtggtggggcctcagggcaggcgctagaactgc

SEQ ID NO: 338322 - DNA, 277 bp, Homo sapiens
  chr3:195637231-195637508
  hypo
cgctcggattcccagcggcggggcagcctgcaggccctgttcccagcccacagacccatgtcccagcccaaacggaggcagccctgggcagcgggcgcgtggagcccaagggctcagggccactcagcccttgttactgtccctcatctagaaaatggatgtaataacaaaacagttcacggtaggtggcaagatcagacacatcggaaactgtgtagggctggctctttctgcgctcacactgtccagcaatgggccccagggacttggccagagc

SEQ ID NO: 338323 - DNA, 253 bp, Homo sapiens
  chr3:195640380-195640633
  hypo
cggagagccatggctacaacttgagcaagtcaaacacgctgtgattcaggccagggagatgagcgtgggtaaagaacactgtacgaactagctcagggcttctggaactgtgtgcggctgaatcaccggggcatcttggtgaactgtaaattctgattcagcaaactgggaggagggcgctgagatccagcatttccatcaagcttcccatggaccacactctgactatcagggccttcgatgcagacagtct

SEQ ID NO: 338324 - DNA, 188 bp, Homo sapiens
  chr3:195648737-195648925
  hypo
cgtcacccaggaacacggctctgatcaaggaattcaagaacccaacagaaaaatacagaacagaaactactgcgataaagctctaataccttgattggagtgacagttactcttacatttttcaaaattcataaagtttacatttaagatctgttgcggggcgagggggcgaagcgggggagagcatc

SEQ ID NO: 338325 - DNA, 473 bp, Homo sapiens
  chr3:195750601-195751074
  hypo
cgcacctgccaaacgcaacagcctctttcagcgtcattaaaatatttcaacaggaggactgagtttagactcaacctgtgttttctcccctggaaaacgaaggtttcatgaagcaaggaaggtctttactgtcctcatccgaaacgctgaggcatctgtgatgtctgctgtaagtgccaccaggctctccgctgaaatctcgcaacgggaaaatagagaccgtagattctgcttttagaaaggggagaatcagaagtaatgtggaaatgccatgtcctcgttcataaacatcttcttttacaaattccacaagtttagttactttgggattaatatgggcttatcttaaagtgcgtttattaacttagcgtgagttgttcaaatgcattctggatcctgagccgacatccagcaatgctgagtgtgcgcctgtgtgagtcaccagccctgatgagcctcaggttattgtgttc

SEQ ID NO: 338326 - DNA, 76 bp, Homo sapiens
  chr3:195855364-195855440
  hypo
cgcggtggctcacgcctgccattgcctgttgtccccgtcctctgtggccctcttggcttctgtatcactgtcacgc

SEQ ID NO: 338327 - DNA, 295 bp, Homo sapiens
  chr3:196069909-196070204
  hypo
cgggtctcgtaaggctagcgttgggactatctcttcatttccatgtggcgagcctcctagggcaacagaggcacggtcgctgccatgaaagcactgaagcttcacctctttgagacgtgttaataaccgcggagtgtggctctactggagatggagctacttgctgttactttgtcggtgatgctcctagggaggagcaaatgggagtctgaggacataaatgacgaacagggcctgggctgagaaaaccagtcatgccacaaaaggcttcctgaggctgaaagatttgggagac

SEQ ID NO: 338328 - DNA, 106 bp, Homo sapiens
  chr3:196263362-196263468
  hypo
cggggttccccttttacctcgttgcactcctgagagcaagatgggtcaccagcagctgtactggagccacgcgcgaaaattcggccagggttctcgctcttgtcgc

SEQ ID NO: 338329 - DNA, 1063 bp, Homo sapiens
  chr3:196386796-196387859
  hypo
cgcatcagccgcggcgccttccaggagcaaggtcacctgcgcagcctggtcctgggggacaactgcctctcagagaactacgaagagacggcagccgccctccacgccctgccgggcctgcggaggctggacttgtcaggaaacgccctgacggaggacatggcagccctcatgctccagaacctctcctcgctgcggtccgtgtccctggcggggaacaccatcatgcggctggacgactccgtcttcgagggcctggagcgtctccgggagctggatctgcagaggaactacatcttcgagatcgagggcggcgctttcgacggcctggctgagctgaggcacctcaacctggccttcaacaacctcccctgcatcgtggacttcgggctcacgcggctgcgggtcctcaacgtcagctacaacgtcctggagtggttcctcgcgaccgggggagaggctgccttcgagctggagacgctggacctgtctcacaaccagctgctgttcttcccgctgctgccccagtacagcaagttgcggaccctcctgctgcgcgacaacaacatgggcttctaccgggacctgtacaacacctcgtcgccgagggagatggtggcccagttcctcctcgtggacggcaacgtgaccaacatcaccaccgtcagcctctgggaagaattctcctccagcgacctcgcagatctccgcttcctggacatgagccagaaccagttccagtacctgccagacggcttcctgaggaaaatgccttccctctcccacctgaacctccaccagaattgcctgatgacgcttcacattcgggagcacgagccccccggagcgctcaccgagctggacctgagccacaaccagctgtcggagctgcacctggctccggggctggccagctgcctgggcagcctgcgcttgttcaacctgagctccaaccagctcctgggcgtcccccctggcctcttcgccaatgctaggaacatcactacacttgacatgagccacaatcagatctcactttgtcccctgccagctgcctcggacc

SEQ ID NO: 338330 - DNA, 317 bp, Homo sapiens; identical to SEQ ID NO: 253211
  chr3:196388384-196388701
  hypo

SEQ ID NO: 338331 - DNA, 93 bp, Homo sapiens
  chr3:196434743-196434836
  hypo
cgcggattattctttaattgttcagcagctctggtgcaatctgggagagagaagaaaactatataccacatacgtaccacgtacatcatatac

SEQ ID NO: 338332 - DNA, 299 bp, Homo sapiens
  chr3:196728433-196728732
  hypo
cggaggccctgcaagagccagagaaccagtccaggtcgaagaagggcgcggggggcctcactgactagaggatgagagtggtccctgactggctcttggagaatggaatctgcccttctcggtggagcaggtaggcctttgagtgcctaacaaaacgaaagaaatcggcagcagaagtttctatcagggtccaagcctctgcatgtgctggcttgtttggctttattttagaaaccaaccaacatgtttcattagcactgacacagcaggggtcccctgctgccacctgacaatccagc

SEQ ID NO: 338333 - DNA, 464 bp, Homo sapiens
  chr3:196754412-196754876
  hypo
cgccctctgagcagcgggtcctcctgaggctcccacctcctggcctgggcccggcgggaggcaagctggcctcgtggccagggagactcgggagatcctatcggccgggcctggcagggcgaggtcggctcctttcctggtgaatggggctgttgtgtgctccctcctgagtcacagccctcttgtctggcagggtggaagggagaggactcaccgcgatgagctggacgcagtggtcggcggaggtgccccggacgcagaggagggagggctggatgcccgcttcccggaaggcctcgctcatgttgccgcacttgtgctgctctgggtccgaggtggcgcaccaccgcacctccatgccaccgagcactgcgggcaggggaccgtgaggcccggctcccccgccctgcccagccccggcccaccatggagggtggctccagcagttctgtgtgagcccattc

SEQ ID NO: 338334 - DNA, 298 bp, Homo sapiens
  chr3:197327055-197327353
  hypo
tagtcataacctattttcagctggaaaccagaaaggctggttctatgtgcagatggcaatgctgaggtttagaggtaaaacacccacctgaagtgaatagaggctggactggaacccaggatggctcacctggaggcggcgctcccatacggcacccggcagcctgttttgtacaggaacaatacttgccttcctccgcaaaaaacaaacaaacaaacaaaaaatgcaggggttgaaaagaaaactgcctgagctgaaaagttttgttgttgttgttctgagacagggtttccctgtc

SEQ ID NO: 338335 - DNA, 95 bp, Homo sapiens
  chr3:197330132-197330227
  hypo
cgaagatcttttttcatgtgtgagataataatagaagatattcctgagagttttgtgtatttttgtgtattttccttgcttgtggatggaagcgc

SEQ ID NO: 338336 - DNA, 307 bp, Homo sapiens
  chr3:197582093-197582400
  hypo
cgtggtctgttcgcattgctgtgtattccacaaccttcatttcctttgagatggataaagcaccttttaactgggcggtcttataggtgaatacaatcatcacactctagagttttagtttaagtgaattggcctaagaagcgaataataagttaaaaatgtagacaaatattgagagcctccgacgatccaaacacttaccaaaattatctcatttactcctcgcagcaaccttaagagtgaaggttaaacttatcacctttttacaaatgattactgaggcccagaatgtgacttgtccaatgtc

SEQ ID NO: 338337 - DNA, 79 bp, Homo sapiens
  chr3:197612493-197612572
  hypo
cgcgccccatctcgctccaccacaagcgcctttatatactcaatgatgggtggaggaaaagggcccaagggctcacacc

SEQ ID NO: 338338 - DNA, 282 bp, Homo sapiens; identical to SEQ ID NO: 253260
  chr3:197685522-197685804
  hypo

SEQ ID NO: 338339 - DNA, 1383 bp, Homo sapiens
  chr4:512572-513955
  hypo
cccattgtctacaccgtcggggatcctttttcctaaaacaaaatggggtatgtgttctgacactgaaatacgttttagaacccacagccaggcccgtgcagtccctcggtggcgtccagtctgttggaggctttgtgcccacccggctctctcagtgtagtgggaccggctttttctcacctctggacttttgcacatgctgttcccatcagcttgatgctcttcctgcagttttttgcctggcgaattcctgggtaccgtttacatttcagcgtaaacatcagaccttcctggtccagcgcccactcccaatccaaaatcagttcctccccattaccaaaaatccctcattgataccctctacttttccttcctgggaaacttgtaattacagctgtaatgcagtcacagtttgtaattacgcttgtgtgcgtgcgtgcgtgtctgtgagccctactggatccaagccccagcaggcaaggattgcacctgcttgctcgccatgctgtgtctcccctggcacagcgcctggcacagtgcctggcacgtcgtccacgctccatggatatttgtttcgatgcatgcacaggtgcacccccatagctttgtgactctctgataggcggtggggtgtggacacaggcgtccccccatccagggtggtaggtgtagcaatgaaggatgccagccctggaaccagactgcctgagtttcatttgcagcttttacccactggcactgtggcccaggtgcgtgactcaccctctgtgtctcagttgcctcctctggataacagttctgatgctcatccctgcctcatagggtcattagggaggtgaaacgagcgagccgcctagtgttgctggctactggcacttagtgcagagcacctggtgccggcagcagtggggtgggcctgcaggcgtgtgggttcatgcttagggacttggtgcctgcagcagtggggtgggcctgcaggcgtgtgggttcacgctcagggacctggtgccggcagcagtggggtgggcctgcaggcgtgtgggttcatgcttagggacttggtgcctgcagcagtggggtgggcctgcaggcgtgtgggttcacgctcagggacctggtgccggcagcagtggggtgggcctgcaggcgtgtgggttcatgcttagggacttggtgcctgcagcagtcgggtgtgcttgcaggcgtgtgggttcacgctcagggacctggtgccggcagcagtggggcgggcctgcaggcgtatgagttcatgctcagggacttgtgccacagcaccctggacctcagtggcttgagcgcctgtggcagctctttcactgctgtgatagcaggcctggggcatgcagagccacagggtggggc

SEQ ID NO: 338340 - DNA, 76 bp, Homo sapiens
  chr4:529368-529444
  hypo
cgcgctgtggcctctccgctgagcagtgaggctggagggctcctacgtcctcccatgactgaaccgtcgctctcgc

SEQ ID NO: 338341 - DNA, 1811 bp, Homo sapiens; identical to SEQ ID NO: 332001
  chr4:568266-570077
  hypo

SEQ ID NO: 338342 - DNA, 201 bp, Homo sapiens
  chr4:617098-617299
  hypo
cgccctgaacctactcacctacaatcacgacgggctcctggggcaggacaaagccacaggtgaggaacgcggtgctgcgggtggaagctgctgtcacagtcgtgttagggtgagtggactatggccgcagactgtgggctcctcccagccaaccctcactcccgctagcgccccaaatcttcagtccagcaccccttcccc

SEQ ID NO: 338343 - DNA, 398 bp, Homo sapiens
  chr4:619513-619911
  hypo
cgcggcctgcgaggacgggtgcccgccggactgcgacagcctccgggacctctgccaggtggaggagagcacggcgctgctggagctggtgcaggatatgcaggagagcatcaacatggagcgcgtggtcttcaaggtcctgcggcgcctctgcaccctcctgcaggccgaccgctgcagcctcttcatgtaccgccagcgcaacggcgtggccgagctggccaccaggcttttcagcgtgcagccggacagcgtcctggaggactgcctggtgccccccgactccgagatcgtcttcccactggacatcggggtcgtgggccacgtggctcagaccaaaaagatggtgaacgtcgaggacgtggccgaggtgggtctgtgcggagcctcagggaggc

SEQ ID NO: 338344 - DNA, 241 bp, Homo sapiens; identical to SEQ ID NO: 253273
  chr4:628235-628476
  hypo

SEQ ID NO: 338345 - DNA, 868 bp, Homo sapiens
  chr4:628566-629434
  hypo
catggcagtgaacaagctcaacggcccattcttcaccagcgaagacgaagatgtgagtgtggggggcacctgggcagccgcgcgtctgcctccctgcctgcctgcccgcccgcctgttctgtgctgcgcatccacctctttacctgcctgcccgcctgcccgtgtgttctctgctgcgtgtctgcctccttacctgcctgcccgcgtgttctgtgctgcgtgtctgcctccttacctgcctgcccgcgtgttctgtgctgcgcgtccacctccttacctgcctgcccgcctgcccgtgtgttctctgctgcgtgtctgcctccttacctgcctgcccgcgtgttctgtgctgcgtgtctgcctccttacctgcctgcccgcgtgttctgtgctgcgcgtccacctccttacctgcctgcccgcctgcccgcgtgttctgtgctgcgtgtccacctccttacctgcctgcccgcctgcctgcgtgttctgtgctgcgcgtctgcctccctgcctgcctccctgcccgcctgcccgcgtgttctgtgctgtgcgtccacctccttacctgcctgcctgcctgcccgcgtgttctgtgccacgcgtctgcctccctgcctgcctgcccgtgtgttctgtgctgtgcgtccacctccttacctgcctgcctgcctgcctgcgtgttctgtgccacgcgtctgcctccctgcctgcctgcccgtgtgttctgtgctgtgcgtccacctccttacctgcctgcctgcctgcccgcgtgttctgtgccacgcgtctgcctccctgcctgcctgcccgcgtgttctgtgctgcgcgtctgctgggctgctgggctccacgtgctcatctgcacatc

SEQ ID NO: 338346 - DNA, 496 bp, Homo sapiens
  chr4:650874-651370
  hypo
tgtgggggcctccccgccaagcattcggctgtgtgcgtgtgctcatgtgtgtgcggtatgcatgcggccagggagaggacgacaaagggcccccccgggagcaggagcctctgcagagcacccgggagaccccacacagaagcactgcgacaccatggtggcagccccaggacctgcccgccgagccacggggcctggcacacaggcacatgggagggggcgcgccgggagcgctgagcgccagtgacactgccatcccctccagtccctgacacagttcctgggctggtcagtgatgaacaccgacacctacgacaagatgaacaagctggagaaccgcaaggacatcgcacaggacatggtcctttaccacgtgaagtgcgacagggacgagatccagctcatcctggtgcggcggggcaggacgtccaggggtcacccaggggtcacggctgtgtggcaggggcaggtcgtccaggggtcacccaggggtctc

SEQ ID NO: 338347 - DNA, 501 bp, Homo sapiens; identical to SEQ ID NO: 332004
  chr4:657350-657851
  hypo

SEQ ID NO: 338348 - DNA, 325 bp, Homo sapiens
  chr4:717901-718226
  hypo
cggcagaaagactcagggcagatggtggttgtcagccgggagggggcacggagccctgggggtggtcaggcccacgtggccttgggacgagagcgaagaggtgggatcggctgcgggagacagggaagtgggtgacaaggaggctcaggggctacagcaaaggccccggaggcttttccacacccgagtccgtcctcggccatgccagccaggtcaggggctcagtcctgtgggccaccacagccggccgcacaggcagggaaggtgaagctccacggagcaccctggtggacagcggtgctgtgggggccatggaccagaaggc

SEQ ID NO: 338349 - DNA, 334 bp, Homo sapiens; identical to SEQ ID NO: 253281
  chr4:738133-738467
  hypo

SEQ ID NO: 338350 - DNA, 175 bp, Homo sapiens
  chr4:757757-757932
  hypo
cgtgcgactccagctctgcagcatggcgcactggaaaaggcagaaccatccggaggctgcaggggcttgaggagggtagtaggagtgggcgggcacagggctcctgggcggcgatgctgctgtttgtccacctgtggctgtgccaccagggcgacctgacatccgctctggactc

SEQ ID NO: 338351 - DNA, 444 bp, Homo sapiens
  chr4:759725-760169
  hypo
cgggacgtgattcctcagcacccttcccgatgaagtaggtccttctcgcctccacccctgctaagcaggcactgtgcgttcttgtgtcttccagaaggcgccgctcctgctgcactacagacccaagatggacttgctgtgaatggtgccacacagcgcccacagactgggccctcgcacccttgggtgctcccggccgccgcgcttaagaacattgcctctgggtgtcatgtggaccagacttctgaatagagaatatttataacttttgtatgagagagaattcacactcaacaagacactaccagcaccacgtttacagaggatgaaaacacttcacagtctcccagagccgatcgtcctctcccccgccccaccccgtgcttcagccttgcagggagagtgatgctccaggcaacacggttctgagtcaccttctgacac

SEQ ID NO: 338352 - DNA, 289 bp, Homo sapiens; identical to SEQ ID NO: 332005
  chr4:819440-819729
  hypo

SEQ ID NO: 338353 - DNA, 387 bp, Homo sapiens; identical to SEQ ID NO: 253293
  chr4:829599-829986
  hypo

SEQ ID NO: 338354 - DNA, 123 bp, Homo sapiens
  chr4:859220-859343
  hypo
cgagtggacgtaggggcaccagcaggcggagcagctcgcaggccaggctgagaacaagcatctgcgcattcccatccaaaagggtttgtcaggaccccactttctgccgccatccccacagcc

SEQ ID NO: 338355 - DNA, 268 bp, Homo sapiens
  chr4:905682-905950
  hypo
cgaacccttacaattttagacgtcagagcggaagatgagggagagagcagtggacgaccgagagaaaggcagacagaggcaggaggagctgcaggagagggcggggacaaaggcaggcacaccggccacacacacctgaccacagcgacaccaaagtccatcccgcgcgtggcaggaggaggcagggccctcagggggctgtgcgcagggaggctgcggcgtggctgtgtccacccgaacccacactcaggcagccggcgggctctcc

SEQ ID NO: 338356 - DNA, 2243 bp, Homo sapiens
  chr4:955057-957300
  hypo
cgggagaggccagccgagcagggaccagggacgcccaccctggacctggccctggggcgggagaggccagccgggctcagcggggaccggggacgcccaccctggacctggccctggggcgggagaggccagctgggctcagcggggaccggggacgcccaccctgggctcgcccgcccactcggccggcggctcaccatgtgcacgacgcccgtcacgcccacaacctccagcagcccgtcgtccatgcgtggcttctcaaacctggtgtcgctgtcggagccccacaggtcggcccccgagccccagctgccgcataagagagcgggcacagaggtgtaggtgcaggcaggacgagggctgagcctgcccatggccccgccgggcagagcctctggggagccccgcccgcgagcacctggggatgttgatgaagatgaggccttcaatactgggcagctccacctcctgccgctccacctgcagccggatctgcttgtgcaggctccgagagtgactgatcttctgcagccccacccgcacgtacacacccttgttgtgcagcctgcaggacggggcaggtcacccatcaccaggggaagccctaccccgccttaggcagcctccgggttccggcccctctgcctgttcctgctgggggacctgagggaggtatgccgttgacaggtggtagcccctgcggctccggtacctgcttgtgaacttgccaggctcctcttcccgtgcctggtggaagtccaggctcagctccgcgtcgatgccaatgccacagtagttactcatctgcacgatctggggacagggcgttcatctcccaggacccggccgccctcaccaggccccctgagctccccaacagctctgccggcaggcagagacaagagcaaggaccaccctggcaccaagccgagcacccaggagagggcagcatgggcaggtcctggccaggctctgtcgccagctggctcagcacaatccccagcagtggctactttctgtgtctccctcaactgcccgctttgcagaggggatgatgcgggcgcgtacacccgagtgtggctgggaagaggacgcccgttgtgacgcgtgtagcggggtcatatgcaggagcctggaaggcaccccacgccgggctgccctgtaccttggggggctctgcgtctgccgtgtcgttctctgcactgccagcctcgtgggcatccagcaggatggtccagcggtccatgagcacggcgtcggcctcgtccacagacagcagtacggagaacgggtcctcgccgctgtagcccgccccccagcggaggactcgaccaaggtcattccctgggacacaagcagacacagagcatctgtccacacccacccgcccatcagctgggtgcagaccccaccacgaggacagccagcccaggcctcggcaaaagctgcacaggaaggggtagaccctgaggccccctcctcggctgcacggctgagcccacctgtgcccaggggcaggatggccacagaaggctccgggcaggccagtcggtaccgtgtctcctccagggcgccaagcacccagcccacagtgccatcgccaccacacaccagcacccggaagcagggcacctgggagaacaggtggagcctagcgggagacaggaagtgtcctctaccagctgcgggcgcagcccatcccccacccaggctgcctcttccaagtgcccgtcctggccgtgtggaggacttcaaggtcccagcacgggatccccgtggagctcctgccggccgagacagctgtggcagcctcctggggcccttcccgcccctgctgctgccctggaccaggggtcctgctggactcacccgggaagaggacctccgttggtcaggtcgaagacctgatgagggttcagtagcttccggaagctgcagagcaggtctcggcccttgaggcctccactcttggggttcacgaacacaaggaggggacagctgtctgggggcagcttcgcgtgctgacagacagggggctgggttaggatggggacccaaggtggggtgtccccactgctggggttgccaggcagtgcccagcccccaaccctgagcccacctggcttggaccagccccctccccaggaaggcgtggccagcaccctcacatctgaggcctcacacatgagctgcgtggtcaccccatctcgctgctggccagcagggcggcactgaggacagcc

SEQ ID NO: 338357 - DNA, 315 bp, Homo sapiens
  chr4:968846-969161
  hypo
cggtgcaaactgcagctggcttctgaggaaaaactgtttaaggacatacctttctccatttaggagacagtggagagcatcaaaaacatcttaaaaaggaaaaccctcatctaccatttctgccagaactttctgctttctgacgcacacgttaattaaaatggcgggcaaagcatccttccagcaaacactccacggacttcctagaacgtcctccaaagccaccagcagcttctcgctgaaggggccttaaaactttgaatccgctctccctctccctctccctctccctctccctccacggtctccttccac

SEQ ID NO: 338358 - DNA, 339 bp, Homo sapiens
  chr4:1008588-1008927
  hypo
cgggccagccgccccgtttccatctcggggccccactcctggaagggaaaataaatcactgtccccttggggggagggagggagccgtgaacaaagtcgcctttggctgggcctggaaacgccgaccgcagactcctttatccattgtgcgggaatcaatgggcctccgggctccctttcagccgcaggccccgcgctgcggccctgtcaggggaaatgttggtttttccccagtcgtggcctccagcccctggcttgcccagccctggcttgcccagccctggctcaggaactgcggccgtgctgggagaggcgggctgtgcccgcagactggacccc

SEQ ID NO: 338359 - DNA, 849 bp, Homo sapiens
  chr4:1015893-1016742
  hypo
cgaggtctgtgctgggccgtgggtccccttttgaccgcccccccggctccggaccccaagcccctcctcgctgactgttcctcggtcccacccgcaggccccccaaagatggcggacaaggtggtcccacggcaggtggcccggctgggccgcactgtgcggctgcagtgcccagtggagggggacccgccgccgctgaccatgtggaccaaggatggccgcaccatccacagcggctggagccgcttccgcgtgctgccgcaggggctgaaggtgaagcaggtggagcgggaggatgccggcgtgtacgtgtgcaaggccaccaacggcttcggcagcctgagcgtcaactacaccctcgtcgtgctgggttagtcgctgctgcggtcagaggtcatgggctgggttggagccaggcaggggtgtgcaggagggcggacggggacacacctggggcccgagagtcagccagcccccggcagaaagccttccttcggtgccctgccccacctcagctggctgcacctctgccaccatcccccaggtatcctgtcccgttcctgtccccgtcaggctccagcctcggagccttcctcccagcggagggcggagggtggagggcgggagccgaaggcagtggtcccacagaagggctggggcccgaggccttggcagggtgtgccggccgtcggctgtgactttgaggctcgggtttcggagttcagaggagccgccgggatgcgtggcctttctgttctcttctgcgcctggggcccgggcgctgggcttggacaggtgtccagagagacacgccctccatacctagggacccggcaccccgcctgctcc

SEQ ID NO: 338360 - DNA, 363 bp, Homo sapiens; identical to SEQ ID NO: 332006
  chr4:1036245-1036608
  hypo

SEQ ID NO: 338361 - DNA, 258 bp, Homo sapiens
  chr4:1093389-1093647
  hypo
cgcacaatccccaggaaaatcacaaacgaatgttttcttttcgtatttaatttttaaaaggggggtgtgtgcgccacaatggtacagtaacgaggatacatagttaaatctcacagcgtgactgaaggcctttgctgcgtctgacgtcatcatggcagagggcgtaaggaatggaggaaatcaaccctggtgcagagcaatcgagtccacaaggtccgacggcgcaagcggacacgggtacccctgtgcgggatccac

SEQ ID NO: 338362 - DNA, 493 bp, Homo sapiens
  chr4:1204224-1204717
  hypo
cggagagggcagggagcagaggcctcagtcatgaggtggggctgtcctcggcgtgggcctcgagactgggagccactgcccatacccaagagacctctgcgagcactggggtgcagagccaggtaggagggggcaccccaccaaaggcagcagcccccccccgcttctttctgctttatatggggcagggagcaaggggaggttgacacttggcggatgacgcggcagggtctggacacttggggtggcaggataacccacctgcatgcagggaaaggcttgggatggaaacatcccgaggggacccgggttccccagcacccgctgcagcccctcctcgtactacctggacccgctgcagcccctcctcgcaccgcctggacccgctgcagccccttctcataaatgagttgggactctgctgatttgcatggaccacgcttccaaaagcagctctgagaaaccaggaggctgggattttgaagaggacgcc

SEQ ID NO: 338363 - DNA, 449 bp, Homo sapiens
  chr4:1205845-1206294
  hypo
cgcccacaggacggacgacgacaagcgacacgaggcccagcgctgccccctcccgcctcctgacagcccggaccagtctctgcagtgccagggccaccacacagatgcctcctccacacactctggtccgagggtttccgggccctctgcccaggcgccgaggctggagagctcctcccgggctacaactggtcactggcgtggtctctatccgcctcgggcttgacggtttggccaggagaaggggcgtggggcgggtgggccacagggggcaggccgtgggacagggacatggcgctggggacgataccttccacagcagctgggatgccagtgggggccacgcccaccacgcccggagggtacctgctgggagagggtccatccgtgaggcccacctgtaggcggcctggccaggccccacctgccctcctagcatcggcagcacc

SEQ ID NO: 338364 - DNA, 144 bp, Homo sapiens
  chr4:1214821-1214965
  hypo
cggcctgagatattcgtaaacaagaaaaaacaaaaattttgaaattatgaaaatatccacaatgcatgtcgatctgacaagaacctgacgcagaccacgtgagggcttcgtaaccaacacgaaaaagacggccggaggtgctcc

SEQ ID NO: 338365 - DNA, 411 bp, Homo sapiens
  chr4:1215113-1215524
  hypo
cgcccctgcctgaagaacagcgactccttccaggcgaaacaatgtcctgctctgggactcagaaattccactcctaggtacaaacccaagagacgtgagtctatgtgcacaaaaaagacgggcagaaatgtgttcacacaagttttgtttgtaatattagccaaaaacttacaaaatgcatcaccaagagtctggagaagcaaatcgtgctgtgttcacgtgatggaaccgttatcagaaactgctgggtcgtatgaaaacacaggtgagacccagaggcatcaccccgactgacgggaggcggacacagaaggctgcgtgcccgtgatcccacctcggcacagctggggaaggccctctgctctaggaagcgggacccgggtcctcgcagggtcgtcgcggggccgccac

SEQ ID NO: 338366 - DNA, 464 bp, Homo sapiens
  chr4:1225310-1225774
  hypo
cgctcctggtggcagctggctcttgggggtcaggaaggggcccgccaagcccacctcctgccatgcagttctgccacctgcttctgtgctcaggactcgacgtcgcacttacctttccagacctcgtgcacaggggtggcttactctgtgaaactgctgctcacatcaggtcaccatcagggcagatgtttctctacgacacgcagccacatgcaggcccagggtggggctgggctgaagaccgcaggtttcagatttccagagaaactgccaaagcaccatcgagaccggcacggccgtttctatcccacatgaagggccaggcccaggctccctcagcacggctggtgcagggctcagcgcaggccaggccaggggttaccggcggtgcctgctgcacctgtgagaacccaggaggcgcaccccggttctcatacaccgctctgtctgtaccaaacgccacc

SEQ ID NO: 338367 - DNA, 306 bp, Homo sapiens
  chr4:1254365-1254671
  hypo
cgccctacatgcctcttacccaactacgtgtccaactctgctgaaacccgagctaacacagcacaggctgcccgccgctgccctacacgcctctcacccagctagactcgcatccaactctgctgaaccaccagctaacacagcacaggctgcccgccgctgccctacacgcctctcacccagctagactcactgtccaactctgctgaaccaccagctaacacagcacagactgctcgccgctgccctacgcgcttctcacccggctagactcgtgtcaaactccaagcagactggtgagacagc

SEQ ID NO: 338368 - DNA, 126 bp, Homo sapiens
  chr4:1282405-1282531
  hypo
gagagtggcagacacgatgcgaaccgtgaaaggacgcaaagagtacagagtgcatgcttccatctctataggaaggtcaggaacgctgttacggggagcagggttagaatgatggggatatagccc

SEQ ID NO: 338369 - DNA, 442 bp, Homo sapiens
  chr4:1290582-1291024
  hypo
ggaccccactgcctcgagacgctcccatcactcggctcccgtgacaccatcctctgggctctccccacccctcgctgcatgtcctcacttgcctatgctgtcttctctagtcttggaggccttttgttttatgtcaccagccagccctccagaggttgtgtggcttcacagacggtctccaagctcctgtccccacactgctgccctccccaggcctctctccctgaggccatcccgtgtagtcacctcccggagctctcttcgcatgtctggaaggcagttcaaagatacgataccaggcgcaaaaccaaatgccgcatctcggccttggggccccagacgagccccagacctgccttactaagccacccttcccaagtcagttgacagcgatgtcccccggcacttgttcagtgacagccgagaactcggaggttttctc

SEQ ID NO: 338370 - DNA, 550 bp, Homo sapiens
  chr4:1299071-1299621
  hypo
cgctgcactaggtgagcccggccctggtgagggtgccttgtgagtggagcctgcttgtgctgctgtgccccgctgcttccaggcggcgcggccctccgtctgattgctggaggactcttcggtgtggacacaccgtggtttgtttacccatcctggtcaatggacaattggaactgtggtgaacaagcattcctgcacctgtatgtggatattgtatgtccatttttcttgggagtggaatggctgagtcatctggtaggtgtctttaccttttaaagaactaagcgctttttccagaaggatcatcagaactgctgccagcaagagtccaggtatcccggctccaccagcatgtggtggcggcctcttgacttggaactgttcttctgggtgccggggttctccagagaaacagagccagtggcacccacatgtgtgtgtgcgcacgcgtgtgtgggagtgtgcgtgcgtgcacgtgcgcacgcgtgcgtgtaaggagctgtgtcacaaagaattggctggtgcagttatcaaagctaagtcccgagcc

SEQ ID NO: 338371 - DNA, 663 bp, Homo sapiens
  chr4:1317015-1317678
  hypo
agccaccgtgcccggccgagtaccgacttttgtagagaccaaaagaagcttaagaaatggactcctaaaggacaaaatttaaacctgcttattaaaaggcattgtcaccctaggggcttgcagaaatgttttaacttatgttaacacttctgcctccattagcaaaacttttctgtcttctaaactgagcgctgctttaacctcaccctggctgagtttggcagggtgcacgcagttaccagccaggagtgacacactgccactcagggccgccaaaacaagcacgaagcaaagacgggacgaaaaagtagagcggctagtagctcccctaaagagagtttggaccttggtatggaaaccctaaaaggaaagccagaattggtatgtaacctgcggccccactacacagtgccagccccacactccctcccagagagccggcacacacctcacagtgggaactctgccagggctgtttcctgtggatgtcagagggaagataggttcttggtgctgccaggatattcctgcaagccctaattacctgccggacagtgttgctggagggtgttggaggcttgccacgagcacacgacctgtctgaagctgctgtggggacaggcagggccaggactcggggccctgaatgcatgcctgggggac

SEQ ID NO: 338372 - DNA, 55 bp, Homo sapiens
  chr4:1323674-1323729
  hypo
cgcaggagcttcccgtccacctctgaactcacggtccacatggcgctggagcgtc

SEQ ID NO: 338373 - DNA, 129 bp, Homo sapiens
  chr4:1326104-1326233
  hypo
cgcacctcccgccatcccagccccacccagcaggtcggcttggagtgaggcgattactttgtacctagactctgacataaaagctgttagctcagatttttcaacttaaaaatgcaggccgggtgcagc

SEQ ID NO: 338374 - DNA, 167 bp, Homo sapiens
  chr4:1326509-1326676
  hypo
cgcaaacttaaatgtgccaaaatgttgttttttagacatgcaagaaagcacttcagccaagcagaagggagccagctggacgaggtgcgccaggccatgggcatgctggccttcccgcccgacacgcacatctccccgtacaaggtagggcgtgcgtccctggggtc

SEQ ID NO: 338375 - DNA, 249 bp, Homo sapiens
  chr4:1330895-1331144
  hypo
cgagctcccgtgtgctgcacttgcgtggtgtctggatggtcggggtggggccgtgttgaggggcctcggatgcgtcgtgcagccttcactctgggaagtggcgcgcttcctctctcatcatctcagaggccgccatgggcattgatctaaaagcccgattttgatgtgttctggcagccggcagattaccattcagaatagttttcccgtgtgattaccaagaaccttgcctgtgactgactctgtccc

SEQ ID NO: 338376 - DNA, 2013 bp, Homo sapiens; identical to SEQ ID NO: 332008
  chr4:1331690-1333703
  hypo

SEQ ID NO: 338377 - DNA, 268 bp, Homo sapiens
  chr4:1336770-1337038
  hypo
cgcacgttgtaaaatcaactcatcagtgtctgctgaacactgtaaaaagtgtgctgggattgtcactggaactgcagtgaacctatcatccctatttggggacggtattagtttgctcggctgccgtaacagaagaccacggactagcgggtttaaacaatggacatttatttcttcacggttctagaggagatgctggcagggttggctcccggtgaggcctctcttcccggcttgcagacggcccccttctcactgtgtacctctc

SEQ ID NO: 338378 - DNA, 299 bp, Homo sapiens
  chr4:1338566-1338865
  hypo
agcacggcaggtttagaaaacggatggggggtgttgagccagggaggtgagcgggtgcagaagtatttgctcagggtgagacatgagcagtggctggaaggaggcaaggaactctgtggatactggcagaagcttcccggcagagggatccgctccccagaggccgtgtggcagcaagagcaggctggagaagtcaaccggtgggatgcagggggcagcaaacacaggccacgacaggttttgccttgccctgggatgggagccgtcggaggattttgtgtagaggaatcctgtgatcc

SEQ ID NO: 338379 - DNA, 983 bp, Homo sapiens; identical to SEQ ID NO: 332011
  chr4:1399981-1400964
  hypo

SEQ ID NO: 338380 - DNA, 276 bp, Homo sapiens
  chr4:1541591-1541867
  hypo
cgggcggcagccgtggtggccctaggaggccaccctgcccgagcacccgcttggccctgcggccgccgtcaggcctcagatgtcttacatattaatttcccgctgcagaacatttgccgagcgcagctcaaacccagttagctggattgatgaaggtggcaaaaggatacgacacacgctgattccaccttttcagcttcgattagctccggccgggagtctgtccccgtcagagctccatcacgcggccggcggagaactggggagggaccggcc

SEQ ID NO: 338381 - DNA, 502 bp, Homo sapiens
  chr4:1556818-1557320
  hypo
acagagtcaacaagcgtggaccgcctgcgggctccgagctgagggagaagcacacgccgcccctgccctgtgagctggcgttccaggacagaatcggatatcaaacgagcacacggataccaagtaaaggccccaccgtcacacagcagccgccgctggaaactgagtttggtgggggaggggcctctctgcccagggactgagaccctgggatggtgacaaaggccagcaccgggtcccacacggagatgacgccatttaaccctccccaagacgccagggaagaggcgtccttgttcgtccattttacagaagagtacactgaggcctccagacgctggtggggacctcccaagccaggctccccatgtctctttctgggcctccgaccaccgttgatcagagaagcaaatctgttgggagaaatctcggagccacagagccctggcagggtgctcctggtggggaccagtccgggctggcccgacacttcctgcacgcc

SEQ ID NO: 338382 - DNA, 819 bp, Homo sapiens
  chr4:1577791-1578610
  hypo
gggtttgatcggcccgtgcactggtgagagcatgctaatattggctccaataaagagcaaatcagggccctagtcgacgcgtcttatcacacagtcagaactgatggctgcagaagtcataaagatcccatttaatctcgcgcctatctatcacgcggctgccttcatcctctttgtgccggggtaatatgtgctcattacaaaagcaaaacagatctggcatgaataaacgcaggatgaagtgctcactcggaaagtgacagcatgatcagtggcggcagtaatcgcagagaatcgcgggctaaattattccataaccgtgatttgaggggacagcccagagcaccccacagctgcctgcagcacagcgacgtgtcctgataaaacatccttcccaatttacggggccgcgcttgactaatctgcctccgcgcgcacactgtctaatcatgccatcagcaccgcgagaaggggctcaattgggactccaatgaaaggagattggaaaactaccctcaattgaaattacatttgtaaatgaggcagagttttctgttcagagtgtgaacgttacggtaaatctgctccagaaagtcgaagaggcggcagcggtgggcaggccggggacgccgcaggggcgactgggactgtgccccggctggggccagggtccacattctggagaggtgcccggcaccatgctggcccctggggacagccccaggagaggagaggggctgtggcggaagcccggagagttgggcctagtttgtcagacatcagacttcacttcccactctgtaaaatggggcgcagggc

SEQ ID NO: 338383 - DNA, 333 bp, Homo sapiens
  chr4:1687132-1687465
  hypo
gggctcggtggccacgtcccacagtggacactgtgggcagacagatgcatggaggccggctggttccgggaataggctatgggtgaggccatgcagcacccctggggctggatgctgggggaggcatcggggctcccaggggtcaggctggggcctcccaacaggttctgggcctggtaaggctagtccggtgcaggctgcgaagccaggccagctgacaccaggactggctggagtcagcctcacctgtctggaagagtgggagtcccagcggggctggggaggggagaagggctggagcaggcgtccaggccattctcttcgctggggtcc

SEQ ID NO: 338384 - DNA, 329 bp, Homo sapiens
  chr4:1738699-1739028
  hypo
cgctcagcctgcagtgggtaatgaagcgtcaccgtgctctcccggaaggacaagcagccacgtgggatgggcaggtgagggaggggggcacggagcagcagagaggccgggcatgctggatgcgggtctgcgttttctaccactaccctgacttgagtggttttaaactaaaaagcaaagagcccggttagcttgtccacatggtcctctgtgtcctactcaacactgggagggcctagtgactgaggctgcctctgcttggtggcagcatgcacggtgcaaatgagactccctcaggacgtccgcgggaagccaagcttgtggagttc

SEQ ID NO: 338385 - DNA, 222 bp, Homo sapiens
  chr4:1791229-1791451
  hypo
cgcctgccctgggttccaggtctccaagcctcggcctccctgcccacctccctgtcgggaaaggcggcagctgcctgcccggagtgctgtggggaacaggcggtgtggatctgagactgtgctgggaatgtcctctctgccgaaggcgcctctgccattttccgagtacctgcaagggagacgcaggagacgcgggtgtgagcggggccatgggcaacctgc

SEQ ID NO: 338386 - DNA, 211 bp, Homo sapiens
  chr4:1791547-1791758
  hypo
cgccagggctgggctgggccgggccgtcagccgcacgcgccgcttgtctcggcccctgcctcccatactcaccttcaggggggacccctgggtatgggcctcaggaggtgggtgggggtgcagggggagtgggtagggaggtgtaaaccggagtccagcagatgggaagttcctgtccggccggcacctgcttggagcctcctgcacatgc

SEQ ID NO: 338387 - DNA, 842 bp, Homo sapiens; identical to SEQ ID NO: 332012
  chr4:1796303-1797145
  hypo

SEQ ID NO: 338388 - DNA, 490 bp, Homo sapiens
  chr4:1807117-1807607
  hypo
cggccaggtggtcatggcggaggccatcggcattgacaaggaccgggccgccaagcctgtcaccgtagccgtgaagatgctgaaaggtgaggagggggcggccaggggtgcagagcagggctgggggcgccgccgccgcctgacacaggccccccgctccgtgcacagacgatgccactgacaaggacctgtcggacctggtgtctgagatggagatgatgaagatgatcgggaaacacaaaaacatcatcaacctgctgggcgcctgcacgcagggcggtaggtgcggtagcggcggtggtgccggctgggcggccctcctgggcctggcagcccgtctgaggagcccgtgtccccagggcccctgtacgtgctggtggagtacgcggccaagggtaacctgcgggagtttctgcgggcgcggcggcccccgggcctggactactccttcgacacctgcaagccgcccgaggagcagctcaccttcaag

SEQ ID NO: 338389 - DNA, 304 bp, Homo sapiens
  chr4:1814436-1814740
  hypo
cggctgatgtcacggaagccaccaaaggcacccaccagagccttccccacctgcaaagcccctgcagcacccggagggcaagctggcttttggaggccatgcggagtccagggcagaggggacagtgggatgggctgcctgttgcagtggctgttcacgtcaacagtgctcagccaaggcagtgaggacgaggatgagagccggggcagctgactgggcccgcgatgccgctcacaggagaggcgtctgcacacacctggcaactgcaagacttgttctcaagggtaagtacacttggacaaac

SEQ ID NO: 338390 - DNA, 118 bp, Homo sapiens
  chr4:1827219-1827337
  hypo
cgagtggcctttcgaggctgatgtttcccttgagcccgtgccggcctggcaccaggccaatattcacgcacctgcttcagctgacccctcaggcggtcttccgtgacgcccagggccc

SEQ ID NO: 338391 - DNA, 212 bp, Homo sapiens
  chr4:1902464-1902676
  hypo
cggcagtgccaacgggaagactccgagctgcgaggtgaaccgcgagtgttctgtgttcctcagcaaagcccagctctccagtagcctgcaggagggggtcatgcagaagtttaacggccacgacgccctgccctttattccagccgacaagctgaaagatcttacttcccgggtgtttaatggagaacccggcgcacacgatgccaaactgc

SEQ ID NO: 338392 - DNA, 58 bp, Homo sapiens
  chr4:1911667-1911725
  hypo
cgttaaaaaaaaaaaaaattatttatcatgcttgggatttatggaccagtttgaatcc

SEQ ID NO: 338393 - DNA, 262 bp, Homo sapiens
  chr4:1960102-1960364
  hypo
cggccagggctcagtgactgagccccaaacacgtagatcctgtacctcagagagcaagatggcggggcggcaggggagcttgccagttctgtgtttattccagtgagctcgagagccccagcaggaggaagtgcagccagggcagggctctgtgagagctccaggcccctcagggctgcctgcgctcagagctggtgcggcaagccgcatccccaggagcctcgtggccgttcctgacgagtgtttgtgataagtgtgtgcc

SEQ ID NO: 338394 - DNA, 63 bp, Homo sapiens
  chr4:1960880-1960943
  hypo
cgctttttctctcttcatcttacaatggcctggctggatacgtgtcagctcttgttcatcagc

SEQ ID NO: 338395 - DNA, 572 bp, Homo sapiens
  chr4:1977009-1977581
  hypo
tcttctcccagggacggagctgacttttaactacaacctcgattgtctgggcaatgaaaaaacggtctgccggtgtggagcctccaattgcagtggattcctcggggatagaccaaaggtaaggctgtggcgccctccttccccccaggctctgtgttggcattttgcactcctggagacctgtgtcccccgtgaacagcggcttcctccaggctggcttgttgccgggacaggtgggagcaagttccctgctgtgggctggggaggatggctctcaacaaaggccagtggttaagagttcctcactgaacgtgtttcctggggctgccagaacaatgcctcacagacgcgtggtttcgcagttctgggtgtgggcagggccgtgcgccctctgaaggttccttgggaggctctttcccaggcctgtctcccgttcctggtggcggccacagtccttgctgctccttggcttgtagcagcaccgcccaaccattctccctgcgaacatgactgttgacttgcccttcttataagagcactggtcctgttgacttagcgcctgccctgctacc

SEQ ID NO: 338396 - DNA, 390 bp, Homo sapiens
  chr4:1986329-1986719
  hypo
cgggcagggtggggcaaagcagctggtttatgtcttggagctcaagctgaacagcggggcatctgcccccagcagattctggctgaggcagaagggggacaacagagatgcaggagtgagaaccgcagccctggcagcgcccgtgggcaaggtcatgtcctggcaggcagcttggctggttccaggctggggccagcagactcacctgggggcgtctcggagctggggatgtaggaggaggcgggaaccacgctgggcgtggagggaaggtagctcgtggagggcagcgcaggctcattgttcagggacccaagtttctggaacacagagtttaaggttccttccagaagaggccatgcttccggcatgtgctaacacatggcccgaccc

SEQ ID NO: 338397 - DNA, 1377 bp, Homo sapiens
  chr4:1993659-1995036
  hypo
cggcatccggtgccctcccagcagcctcccacctcccagcagcacccagtccactgggcctactcttccaccggtgcgcagatgcaagaaaacctgaagggtgagaagccggggccaccactgctcccgcagaaagcctgcgggtgggaaatcctggggatgaggggcgtagagcaggcaggtgcccggcacagcagagcgcaggagcagggtggagtcacctgccgcgggggtgtgtgcctgggcagcagggggtggggcctgggacctggggcagcacccgtgacagctgagctggtgcctagtcaccatctaggcagggacggctgcctctgggtctggacggcgctgggagttggcgctcgtggagcctggaggtggccccgggatctggagtgaggccagggccttggggaggccatgggcgacgtgcgtggaggaagcaggcgcaccccgtgctccctcaatacctgggaggccagatccatccacaccagggcctgcttcggccacataaaccccctcccacgaggaaacgcagagagccaggccatggcgtgcctgtgcctctgccatgcgcccactgggctgctcacagtgtgagacagctgggctggctggcgctgggggtgaacaacagcgccctgccctgtccagacgccggggctgaaaccccagccccaggccttcctgacacccactccctgcgtcaggcgccagagacccgtcctacgagggctgcggccatcacgtccccgcgagcgccgcctcctggtggcctctgagtgggaggaccttccagcgcttccctcactgtcctcatgggcttcctgccctgagggaagttggctcgaagggcagagatcagaggtcgtgccaggggagcctgcctgctgccaagcccctctgcatctgccctgcaggacacccagctgccctcaggagtcaagaaccccccgcgtggcccagccccttctgttccttgggcaaccagggagggtgtcgccccggccgctgaccctgcgccccgggccctcactcccgacgcccgcccgagctgagtgcgcgatgcggcagaagatgctacgtggctgcaggaagcgctgcgcacacgctgcctctggcagccgcacagcccggctgtttccagccagtgcggcctctccacagcagccccagggaaaccctacgcctgccaagaggcaagcgcgcggcattttataaaaatggtaaggataaaaaaagtcggggatgttaatttaaaacaaaaaggaccactgttgtggagtcaatgttttctctccagaacgcgcatgttgaagcctggctcgctctactggggcttcttgtaggaaaacgcttggctttcccgggcgc

SEQ ID NO: 338398 - DNA, 849 bp, Homo sapiens; identical to SEQ ID NO: 332013
  chr4:2042167-2043016
  hypo

SEQ ID NO: 338399 - DNA, 1173 bp, Homo sapiens; identical to SEQ ID NO: 332014
  chr4:2060920-2062093
  hypo

SEQ ID NO: 338400 - DNA, 249 bp, Homo sapiens
  chr4:2066058-2066307
  hypo
tcgccatagcccctcgcccttccccacctgcctgggcggcttgccacctgaagagtggcatcttggaccaccgcggctgtccatgacgctgccctgcccgccgccactggggaaggcccagccttgctcaccaagcacagaacctctgcagcagatcccggggccaggctccggccccgcctgcggccccagcgccactgcctgtggaggccccagctggccacggcgctgctttgctccgcgcatgcc

SEQ ID NO: 338401 - DNA, 213 bp, Homo sapiens; identical to SEQ ID NO: 253452
  chr4:2305614-2305827
  hypo

SEQ ID NO: 338402 - DNA, 215 bp, Homo sapiens
  chr4:2459766-2459981
  hypo
cgttcccaaagagccaggaggcaccgccgccctcttctgcactcccggcctgaggcgcccagccgtctccctgtgccatggtctgacgctgtggctgcgcggggagggccggtgtggacgcctcttttctctctttgctcattgtctggttgactgagacgggaatcttggtattttttggtgcccactttcttcacctcatatttctacacaac

SEQ ID NO: 338403 - DNA, 206 bp, Homo sapiens
  chr4:2460373-2460579
  hypo
gccctgggctggggcgggaccaggcagggaagccggagcagccccactcaccgtggcaggtccgctgtctgggcagatggccaagctgatgctgcagcgtgcagagagacggctccgggaggacaggtccaggaaggagctggtggagcaggtgatagaggggcagaagaacgccaaggcggcccagacgaagctcgcgaagggcc

SEQ ID NO: 338404 - DNA, 96 bp, Homo sapiens
  chr4:2514675-2514771
  hypo
cggatgcccgcgctaaggcagagtcaggaggccagggacgggactcttgtaggggataggggccactcacgtgacagggtataataaaatgtttgc

SEQ ID NO: 338405 - DNA, 120 bp, Homo sapiens; identical to SEQ ID NO: 253463
  chr4:2524746-2524866
  hypo

SEQ ID NO: 338406 - DNA, 50 bp, Homo sapiens
  chr4:2622600-2622650
  hypo
cgacaggtcagccacccagatccgtgaagtgaatgctaaagaatatggcc

SEQ ID NO: 338407 - DNA, 72 bp, Homo sapiens
  chr4:2638080-2638152
  hypo
tgccctgccaggaagaatattttaatagcctcttcaaatcctgatagatcttctctgagagtacaccaacgc

SEQ ID NO: 338408 - DNA, 211 bp, Homo sapiens
  chr4:2639936-2640147
  hypo
cgtaagtcaggtcactgcctactcttctgttccccgggaactcctggagagcagcggactattgtagcaggaggtagtcttcgtgtcctcgtacctggcacagggcctgggcagcatgggcttggcatttcacctgcttattattacaagcacatttgtgggttccagcctggggctgggtatcagttacctggccctggtctcctgccac

SEQ ID NO: 338409 - DNA, 118 bp, Homo sapiens
  chr4:2640614-2640732
  hypo
cgactcaggagacgtggagtagccaagcatgatgaagtgcagcttccagagctggcggttgttgaagtcaggaacattcacccaaagatgtaacgtgatctgaacacaagtagtgtcc

SEQ ID NO: 338410 - DNA, 81 bp, Homo sapiens
  chr4:2672891-2672972
  hypo
cgtgaggtgtcctcagtgcatgcactgtgctctcctggtcagccagcgagttgtggacagcttaagaagcccttccgtggc

SEQ ID NO: 338411 - DNA, 409 bp, Homo sapiens
  chr4:2688489-2688898
  hypo
cggcacaatgggactgctgctcaaagctagcagtttggcatctgtcacgggcttctgccttttacaagaaggtcctcaagaccaagaagtcttctacttgttactttttgtcaattacttctcagcaaagcagctcttagcttatcgctgctttgtagaaatgggtatctattgaaatacgtttttttattttcctggctcttgtcccatggggctcccttaccaaaacaatgacttcaggccctttactgtatcctgggtggcccgtctggacctgtttattcctgctgttgagtcctgagtgtctgctctaccctcctctccccctttgccttcctgggcctgttccaggtcagtggactcgctgagctgtccagcagcccagaggggagtgcttcctctctgctcc

SEQ ID NO: 338412 - DNA, 855 bp, Homo sapiens
  chr4:2704088-2704943
  hypo
cgatgctccgggctcatctcgtgtcttctctctcccagccctgaaccagccatttctccaaggagccctcctctttcttcaacagtggtgttcagaaacccagacctggacactgccatatggcattgcttttaggccctctcagtcagcagagcaggaggagtgggggtgtgagcatgtgcacacgagcgcctgccacctacacacactaattgctatgtacaagccgtgagttcccacagatatcccagccccactcctgtgctacagtgagcgttctcccttccccgtccacctttgtaactccttagacagtaagaacctggaccccatcatccatggtgcctttactgacttgctgagtcctacaacacaggtaaagggttcagaagtccctgcccttacccgatggaaaactccgggcatgctttcggtatttgttcagttctttttgtctttagcctcagggtgtggtgattacactgaatttacaaatgacttaaattagttcttttcacctttagtacaattacgttattgattgaaaacacacctgattgcgtttttccatttgtgttccatttgttttctcccctacccagttcctctttttttttaatctgttcccacccactccctgtaggtaactaatcagtttcttatttgcttttcttttttacataaaaggtagtgtattatagacataatagtgacttctgggttcttttctacttcatatattctgggaatcactgcacatcagttcgtagagattgtcctcattctttctgcagcgacacggtactccatttaaagtgtacgatgatttctgcagtcactcttctttgtgcgagc

SEQ ID NO: 338413 - DNA, 121 bp, Homo sapiens
  chr4:2907414-2907535
  hypo
cggccatagtggcgagtcaccttctgactcctgttgggtgcggcatgacccaagtgcagcgcaggccatctgcaggcaccagcgacagacgctgcaaggggtgcttcgtttcagcgttaat

SEQ ID NO: 338414 - DNA, 154 bp, Homo sapiens
  chr4:2926297-2926451
  hypo
cgtcgtcatcctgggagctaggcactcctcctaagaggacctcttcaccggtttttgtctcgttctagaccagccactgcattacgtagttgtgactgaaatttgagttgctgaattgtttttcagtgtcacaccgctatttactattcaggcc

SEQ ID NO: 338415 - DNA, 212 bp, Homo sapiens
  chr4:2932837-2933049
  hypo
cgcagtgtacccatgaccgtgcccttctgccctggtgagcctgtgggaagaggcacagtcaggcaccactgcccttctcccgctcaggtggcttcggccgagggaagggggctcaccatagccagcgaccacggaggacaggcagggcaccacaacggcggcggctggtgggagacatcgaggaggtgcccgtcagcccaggggagggtgca

SEQ ID NO: 338416 - DNA, 205 bp, Homo sapiens
  chr4:3217005-3217210
  hypo
cgtgcaccgcggtgagtgtggactcctggaagcgcaccgtagctccgctgtgtcctgctgctcctccctagctgtcagggaggctgtagtccattgctttgccagctcttttgtttccgagtgaacaccttatccgtacacatgcggctgtctctgaccctacagaccagctgggatgccactgggggagcgctcccttcccccc

SEQ ID NO: 338417 - DNA, 149 bp, Homo sapiens
  chr4:3220650-3220799
  hypo
cgtgcctgcctgtgtgtgtgtgtgcacgtgtgtgtatgtatgctggagagtctagggaggcttgctccaaggacgcagtattgtttgatcctgagagataaggattctgccgcagggaatgaaggtattccagatggcgggcttattcc

SEQ ID NO: 338418 - DNA, 242 bp, Homo sapiens
  chr4:3245192-3245434
  hypo
cgaggacactcgcttgccgggcctgggcctcctgggaaggagggagctgctcagaatgccgcatgacaactgaaggcaacctggaaggttcaggggccgctcttcccccatgtgcctgtcacgctctggtgcagtcaaaggaacgccttcccctcagttgtttctaagagcagagtctcccgctgcaatctgggtggtaactgccagccttggaggatcgtggccaacgtggacctgcctac

SEQ ID NO: 338419 - DNA, 781 bp, Homo sapiens
  chr4:3252217-3252998
  hypo
cggtgagggtcttgcagggtgtgaaggtcataggtgtgcggtgaaggtcacaggtgtggggtgatggttttgggtgtggggagggtcttgcacggagcgagggtggcagcaagagctggaagctgcagggggagaatggcagcagagagcacccggccctgtgggcggcctggacagggctgggcctggggctgccggagagcctgtcagcttccaggatgggagtggcctcactcagctgctccacctccgggtcaggcaggtgagcctggggcagagaggctgagagcacctgagccacttgtgggagaggccacccccactgcccccctcaggcgaggagccggcctccagcacagcagaagggaacccccagtccccagccctagtgggagtggggaagaggcccagcaaggccccggacagaccgccagcctgtgaggtctccgctttcagttgcgttgatttgattttttctgagccttgaaggaggggtccggggcctggccctgcccaaaggcccctaggcaggccccaaagccgggacctagggtgctgagcatgacggatgttgggtttgagcggctggcttgcgacgtgagggctgaggtgtgagcctgggtatcttcagaggttcggtggacacaggcagctgcccgcggccccactgttcccgtggcctcctagtcctgctcaggcacctggtgaggaagggacgcagagggcagtgggaggtggccacgactgttccagcaggctcccctctgactcaggaattcac

SEQ ID NO: 338420 - DNA, 140 bp, Homo sapiens
  chr4:3313496-3313636
  hypo
atatacagatgttccgaatcagaaaaaatccacagcccttctggtcccaaaaatctcttctaagggacactcagcctgtgtgacgtggtcggtgactcctgatgggaggtggcagtgctgtgcggcgagtggggaccttc

SEQ ID NO: 338421 - DNA, 148 bp, Homo sapiens
  chr4:3439566-3439714
  hypo
cgggctgggcacgctcaagaggggagtcacaccttccgcccgcagcccggacttgttcacagatgcctcatggaggctgcttccggaagcttggactgagggtgaggaggggcacgctgggattggggaccttggtggccacggagcc

SEQ ID NO: 338422 - DNA, 1080 bp, Homo sapiens
  chr4:3446158-3447238
  hypo
ccgacatacaggtgcgccacggggtgtgagccgtgccactgacccctgacgggtgtccctgtccacacccgagtgggaggaatggcctgaggtcacccagaaacaagggacaaggggtggaccccggccccgactccgctgtcgtggggcactgcgcggcccctggcccagctcctcggccctgcccccagcttgtctgagcagcccttgcctgaacgggggcacctgccacctgatcgtggccaccgggaccaccgtgtgtgcctgcccaccaggcttcgctggacggctctgcaacatcggtgagtgggtcagccccccggggtgccctggggcagtgccgggtggacccaccgtgggccggcctcactgcccctctgcccgcagagcctgatgagcgctgcttcttggggaacggcactgggtaccgtggcgtggccagcacctcagcctcgggcctcagctgcctggcctggaactccgatctgctctaccaggagctgcacgtggactccgtgggcgccgcggccctgctgggcctgggcccccatgcctactgccggtcagcaccacgccgctccaggccgccgcatgcggggcaggcaggatttgtcctggggagaggccccccggctccctaggacccaggcggggccagctccgtccagacaggccccggaacctctgcctgggaggctgcccgagggagggccactctcttcccactgctccaggtgcggggaaccgccctgctgggggttccgatgccccctccccatgccctcttcgaggggcagtgtgactccctgccagcccccacttatgcaccgcaggaatccggacaatgacgagaggccctggtgctacgtggtgaaggacagcgcgctctcctgggagtactgccgcctggaggcctgcggtgcgcggctggcggggggtgctgccttgggccccaccgaggtcacagcagttttccccgtgatcctcctagcccctccgcacacctggctactgcatctctgacaaatggggaaactggagctcacgggatcaggctggtccaaggtcacgcagtgggtc

SEQ ID NO: 338423 - DNA, 206 bp, Homo sapiens
  chr4:3447795-3448001
  hypo
cggatctcctggcgaccctgcctgagccagcctccccggggcgccaggcctgcggcaggaggcacaagaagaggacgttcctgcggccacgtatcatcggcggctcctcctcgctgcccggctcgcacccctggctggccgccatctacatcggggacagcttctgcgccgggagcctggtccacacctgctgggtggtgtcggcc

SEQ ID NO: 338424 - DNA, 213 bp, Homo sapiens
  chr4:3467319-3467532
  hypo
cgtttttctcaatcgtgagcacgtctttctgttatgacaaggtttagcgaatgaaagggaaacccttttatcaaagggctgctcagccacagcgcctggcatggccagtggacgtcgggccgtctgcctcggtgtgggactgcagggtgccctgcagtgggaccacgttcctcaatgtctccaccgcgtcctcactgcggaatgcgtgtctgc

SEQ ID NO: 338425 - DNA, 104 bp, Homo sapiens
  chr4:3514613-3514717
  hypo
ggcgggctgtccacggaaatgccacggccaagagcccaggtccttcacgctggcctcttccctgccgggctgggctccccaatgccttcagagttcgttgtgcc

SEQ ID NO: 338426 - DNA, 1324 bp, Homo sapiens; identical to SEQ ID NO: 332016
  chr4:3767158-3768482
  hypo

SEQ ID NO: 338427 - DNA, 284 bp, Homo sapiens
  chr4:4417408-4417692
  hypo
cgtttctgagccatctcgtatgccagccctgagcggggccgccactccacaggtgttggccgcatcaggtcttgcaggactctgctgggtgccgaggtgggagggaagaggggaacccttggtccgtttccctgagggatgacgagcagcagatggagaggacagcgtgaaggggcgtggcggtgaggctggaggggagtttgtctggcctgcagagcctccttcctgatgcacgcgctgctggtctgaatgggctgtttgttctgtagcgtgtcaggtgcttc

SEQ ID NO: 338428 - DNA, 438 bp, Homo sapiens
  chr4:4509159-4509597
  hypo
cggctagtatgcgaactggagaaaaagttcagtggaaagcatattatctttatcgctcagaggagaattctgcctaagccaattcgaaaaagccgcacaaaaaataagcaaaagcgtcccaggagtgcactctgacagctgtgcacgacgcaagccttgaggacttgatcttcccaagcgaaattgtgggcaagagaattcacgtgaactggatggcagccggctcataaaggttcgtttggacaaagcccagcagaacaacgtggaacacagactgaaactttttctggtgtctctaagaagctcacgggcaaggatgttaattttgaattcccagagtttcaattgtaaacaaaaatgactaaataaaatatattcacagtaaaaaaaaaaaaaaaaaaaaaagttaaaaagcggcagctagctagaaaaatatac

SEQ ID NO: 338429 - DNA, 856 bp, Homo sapiens; identical to SEQ ID NO: 332022
  chr4:5052378-5053234
  hypo

SEQ ID NO: 338430 - DNA, 400 bp, Homo sapiens; identical to SEQ ID NO: 222358
  chr4:5889213-5889613
  hypo

SEQ ID NO: 338431 - DNA, 898 bp, Homo sapiens; identical to SEQ ID NO: 332026
  chr4:5889853-5890751
  hypo

SEQ ID NO: 338432 - DNA, 230 bp, Homo sapiens
  chr4:6058789-6059019
  hypo
cgcatgcggaaggctgacctcataccccgcagactggccagagccacactgacatgcttttgttcattccactctctctgcctgcgatgcccttcccacgtttctttgcctggtcgtatcctcttgcataagtcctgtgagcacacggcaccaagtccgtcttgtcgctgtggcaccctgagcctggcacagtgcctgtcacatggggacagggggactctgtgaatccc

SEQ ID NO: 338433 - DNA, 821 bp, Homo sapiens; identical to SEQ ID NO: 332029
  chr4:6271360-6272181
  hypo

SEQ ID NO: 338434 - DNA, 122 bp, Homo sapiens; identical to SEQ ID NO: 222362
  chr4:6717792-6717914
  hypo

SEQ ID NO: 338435 - DNA, 496 bp, Homo sapiens
  chr4:6733162-6733658
  hypo
cgccccgtcccacagacagaagcacacacaggcgcctctcctcatgtgcagctggctctgagattcatggaacaagaagagccaactcctaggaggaggccagttcaaattctgcctttttccggctgtgtactcttggagaagttacacacctctctgaaaaattgttgaaagtaaacttactgcacaggacactttctgtgctcagttatgtctgccgagttcagctggcgtgcaggcactgccacaggccccgagaaaagaacggggtgcagagcaggggctgctttcagggacccgccgtgctagtgaaggtggaacggtaaagagggtcccgggtttaagggcgcgggcagtgatgggagcacagacccagtgaggcaggggagggtgagggaggccttctgcagagggggtaccctgcagacagagtcagggagagatcaagagacggggatggccaggagggcacagggctcactggccaggcaacatc

SEQ ID NO: 338436 - DNA, 233 bp, Homo sapiens
  chr4:6748324-6748557
  hypo
cgtccaccggcaaaggacaatggatctccaaggggtgcggccagcggatgggtgatggcatggatggagggtgggtgcatcaatgctggagcatcaactctgtgtgcccctgcggggagaatcgcccctgccgaagccccggctggtccaaaaccacgccagccgctttaggggtgtctgtggacccaggaccacacagcctcaagagccaagagtcccgagtgtgtgcacct

SEQ ID NO: 338437 - DNA, 129 bp, Homo sapiens
  chr4:6769454-6769583
  hypo
cgtctttggaatgagtgtttgggggtggcctgtccccctgccgcccgcccgggccagggagatggccaatgcacggcgggcgcacccctattccctcctcactcatgagtctggtgggacaactcatcc

SEQ ID NO: 338438 - DNA, 163 bp, Homo sapiens
  chr4:6950171-6950334
  hypo
cggctgtatgggtatcccactctttgttctcccatgtgtggaggtttgatttgttcagggtccaatggttacaaataatgcccaccatggtgttctcacggatgtcactggcgtgtgcgtgcctggggggtgggacaggtgggtctcccgtgggtcccactcg

SEQ ID NO: 338439 - DNA, 149 bp, Homo sapiens
  chr4:7004195-7004344
  hypo
cgtattgttttggattgggctaaaccgctgacgagtcagttacatgtttagacatgagtcttagacatttatccaaaccttggtattggctcgatttgtgtacattgtgtctgtcttgtattgtgaaccgcgcagtgtcagtggccccc

SEQ ID NO: 338440 - DNA, 117 bp, Homo sapiens
  chr4:7035963-7036080
  hypo
cgcagggaaggatgtgcgtagacgcggacagtggtcagaactgggtttcagactccagccttgtgaatgactcccaagcccttgtcagaaacaccctctaggggagggggcctttgc

SEQ ID NO: 338441 - DNA, 436 bp, Homo sapiens
  chr4:7047046-7047482
  hypo
cgtagtcccggctgatgtttacgtttacttcttgccttgaccactttgggagcctccttgttcgttattccccctccaccccattcccctattccacacaccataaccggagcgagctttggaagcacaaagcgcctcacaccggcctcagtggcttttacttcaattaaggcagctttagaagtgttgagcaatgagatctcatctgttacctcccttgatcgttttatatttcttctacctagagtgctctccctgtaaatcatggcccaggattgagctttccacttaaatatcagtgcctcagagggcccttcccttcaccatcccagcacttacctctacgttagctgctaaggaggcgcagagccttggtggcatatctgtgcgtatctcaggacattttcccgacagcccttggcagttggctttggac

SEQ ID NO: 338442 - DNA, 190 bp, Homo sapiens
  chr4:7647755-7647945
  hypo
cgtgttcattcggtcagcaaatgggccttgcgcacccggcagccacggattccgggctaccgctggtgccgcaggtgagcgaggcaggtgtgtgcccccgggctgtgagcggcttagccgaggagcaggagataaactcccaggacgcaaggaagtcagcaaacagctgtgcaggcgtgagctccgcaca

SEQ ID NO: 338443 - DNA, 178 bp, Homo sapiens
  chr4:7844888-7845066
  hypo
cgcagagcaacttggtccactggccgaaccgcttcttccgcagcaggaaggcgcagattttggcgtccttgaccaggtccatggaggcctcctcggagggccactggtgccgggttttcttccccttcccatcctcctcctcttcatcatacgactcataagagctgctcatcgcatc

SEQ ID NO: 338444 - DNA, 273 bp, Homo sapiens
  chr4:8070965-8071238
  hypo
cgagccgtccagtggggacgttctgaacaaggcaacacggtgcccaggaggccagcctgagcggccctagaggaccagagaacttgactaagtttgggaaaggctagggcagaatcccgcctgtggatgttcacacgcactgcagcgtgtccaggctcggagggtcccaccacgaagacagtgatgagcacattgcccggggaccaggggacgcaagggaggacacgacaggccagcgtggaagggtaggaccaggggctctgatgcgctgcc

SEQ ID NO: 338445 - DNA, 841 bp, Homo sapiens; identical to SEQ ID NO: 332037
  chr4:8159729-8160570
  hypo

SEQ ID NO: 338446 - DNA, 298 bp, Homo sapiens
  chr4:8372577-8372875
  hypo
cgcagaaatgcccatcaacccttggggcactcccgtgaggccctgtcctccctttacctcgccgtcggctctgccaatcggtgagtccagaacaaagtcaggaggagcgatcacgtctaccagggcaactgcatcgtctttcagctgttggaaaacaaagcccagacacttggcacctcccgggaatttccatggtgaccaaagcataacagccccgtgtgtggttgccaggacccactagcaacgggtcacctgagcggcacgtgcggctctgctgcccatgcgtgatctcttcacc

SEQ ID NO: 338447 - DNA, 220 bp, Homo sapiens
  chr4:8386124-8386344
  hypo
cgctgaaacaaactaggcaggaaaacgggcactgacgggcagtgaattctcttgctcggaatgcggctgctggcggcctgaggacacacccagcgtcaacaacctctgtcctcaagactctcccagaatcctgggtcaccacggcctttccatgtgcctcacaccagaaggactctcgaaggtgcccccagccgccctgtgcacccaatgactgcccctc

SEQ ID NO: 338448 - DNA, 82 bp, Homo sapiens
  chr4:8386747-8386829
  hypo
cgcagcagccccccaccgagggcaccatggcctggcccctgccaggtggcatggggtgaccgcattccctccccactgtctc

SEQ ID NO: 338449 - DNA, 165 bp, Homo sapiens
  chr4:8398723-8398888
  hypo
agtggctgagaagcgaagagcgatggccacggccagctttaggttaaggatggccaggctcacgatggagacccggcccgaggacaggctccccagggacgctccaaagcgctgcctgacgtcctacgggagggacacagatgataagctcaagcccggctgcgc

SEQ ID NO: 338450 - DNA, 161 bp, Homo sapiens
  chr4:8466231-8466392
  hypo
cgcacggggagctgtgtgtgtccgagagacttggtcacgaagcaggttgtgctgctcctcgttgacgtttcgttgctgagtctccttatctcagattcttctgagctgttttcattctcaaggagtaactaggtgaaagatcaggtcttcgctcaggcttc

SEQ ID NO: 338451 - DNA, 111 bp, Homo sapiens; identical to SEQ ID NO: 253658
  chr4:8607741-8607852
  hypo

SEQ ID NO: 338452 - DNA, 115 bp, Homo sapiens; identical to SEQ ID NO: 332040
  chr4:8609457-8609572
  hypo

SEQ ID NO: 338453 - DNA, 217 bp, Homo sapiens
  chr4:8615876-8616093
  hypo
cccctcagctgcaggaggggcgtctgtggcgagtacctgctgcactcacctgcctgctgggcacttggctgacaccccgacgtcccggctgtctctgcgcggctgacaccccggcgtcccggctgtctctgtgcggctgacacccctgacgtcccggctgtctctgtgcggctgacacccctgacgtccccgctgtctctgtgccacaggcatgtcc

SEQ ID NO: 338454 - DNA, 960 bp, Homo sapiens; identical to SEQ ID NO: 332041
  chr4:8861937-8862897
  hypo

SEQ ID NO: 338455 - DNA, 1100 bp, Homo sapiens; identical to SEQ ID NO: 332043
  chr4:8872917-8874017
  hypo

SEQ ID NO: 338456 - DNA, 116 bp, Homo sapiens
  chr4:9523562-9523678
  hypo
agtagctgtcagtgcgcctagcccggcgtgtggacctggggactcaccagaagggcccgatgtggagtctcacggagcgtcggcggaaggcgcacaggatgctaaagctttacaac

SEQ ID NO: 338457 - DNA, 67 bp, Homo sapiens
  chr4:9602020-9602087
  hypo
cgagcaagaaacgccaccaggcgagagccgggttagctccgggcctgctgcgggctcccccggaagg

SEQ ID NO: 338458 - DNA, 340 bp, Homo sapiens
  chr4:10087761-10088101
  hypo
aagccttactcacccgtgtacaatttctcaccatcccacttggaggcccactggagcatggtctcgacaagagccctcagctcccccaggcaacaacctcctcggccccatgctgtgcgtgccttcctttttatactcatcaccctgggctgtgagcccagcaaggaggcgctcccgattcccctctatcctcgaggccacgtctagtgaacctttatggttcagccttccccctctcagcagtgctgctgcccccactgccccggcacaaaggaaccgtgactctatgcatgagcgttgaggtgacctggtccgtaggagtcacacacacaacgttaac

SEQ ID NO: 338459 - DNA, 207 bp, Homo sapiens; identical to SEQ ID NO: 332046
  chr4:10090148-10090355
  hypo

SEQ ID NO: 338460 - DNA, 413 bp, Homo sapiens
  chr4:10120458-10120871
  hypo
cgggtcacttagactccgttgtccgcctcccctcatctgtatcatctttgccttgggtactggcttcggagggtgttttcctgaaactcttacctgagatctacttggctgactcctgtgtccttcagaagtacttaattgctcaaatgttagttgatgagtgtcaccggtctcattttaaattgcaacttcaaccccttgcaaacactgcttctcattcccgcgttccctaactttaactctcaggaataaccctgacacctggaagatgctcctagggatgaccccactccccacccacaactgttaatcaggaaataacggatatgaaagtagctctgcgaactgaggagccgtggagaatgtacaaaacagattcctaaagtaagatacgcaggcccggcttgtaggcc

SEQ ID NO: 338461 - DNA, 58 bp, Homo sapiens
  chr4:10128984-10129042
  hypo
cgcagtctttgagatttgaaggggcggggttgcccctccacatccgtgggtgtttctc

SEQ ID NO: 338462 - DNA, 1021 bp, Homo sapiens; identical to SEQ ID NO: 332047
  chr4:10458331-10459352
  hypo

SEQ ID NO: 338463 - DNA, 1310 bp, Homo sapiens; identical to SEQ ID NO: 332051
  chr4:13545599-13546909
  hypo

SEQ ID NO: 338464 - DNA, 358 bp, Homo sapiens
  chr4:13600978-13601336
  hypo
cgtctgcccagacgtctgttctggtcctctcaggtgggcaggtgagttagcattcccctctaagccccttcctgctgaataacttgctgtgctactgccccctgctgtccctgtctctgggctcttatcttctttctgaagggagttcaacaatacattcttctcttctgcatttatgaggtgtaaagtgctctctttctgtcctcttcctgcaaatggtcctatttcggggcactccttgccatgcttctcttctttttccgcacaaacagcacttggatggccttgccctgcagagggcttgtggactgatggcccgttgtgcccctcctcggtgctcactgccaacacgggaccc

SEQ ID NO: 338465 - DNA, 499 bp, Homo sapiens; identical to SEQ ID NO: 332055
  chr4:16228976-16229475
  hypo

SEQ ID NO: 338466 - DNA, 108 bp, Homo sapiens
  chr4:24534559-24534667
  hypo
cgacgaggcaaattaaatctgtccataattcgagatagctgctggcgtacattgtctgcggacatcagggacctgtagttaatgaagttgtcataacaccactgaacc

SEQ ID NO: 338467 - DNA, 609 bp, Homo sapiens; identical to SEQ ID NO: 332060
  chr4:24914265-24914874
  hypo

SEQ ID NO: 338468 - DNA, 173 bp, Homo sapiens
  chr4:25013897-25014070
  hypo
cgcgggcttgccgcaatgctgaaattagttcaacacatctgatcaaagccacaacacacctgtaatgttgtcatagctccggaaattcatttcaatgtggtcccactccagcaccatgcagttctccatgctgggctgcgcgatggccacgtacacatcgttcttggagttga

SEQ ID NO: 338469 - DNA, 609 bp, Homo sapiens; identical to SEQ ID NO: 332064
  chr4:25863681-25864290
  hypo

SEQ ID NO: 338470 - DNA, 122 bp, Homo sapiens
  chr4:26855447-26855569
  hypo
cgcctggccaagaaacaacttttaaaatctgatcttctttctttcgtatttacaataatgctctgggaatgtgctcatccgtaattcaaacatccacatttccagactttctgttttccttc

SEQ ID NO: 338471 - DNA, 965 bp, Homo sapiens; identical to SEQ ID NO: 332070
  chr4:36245423-36246388
  hypo

SEQ ID NO: 338472 - DNA, 969 bp, Homo sapiens; identical to SEQ ID NO: 332071
  chr4:37245693-37246662
  hypo

SEQ ID NO: 338473 - DNA, 657 bp, Homo sapiens; identical to SEQ ID NO: 332072
  chr4:37246687-37247344
  hypo

SEQ ID NO: 338474 - DNA, 528 bp, Homo sapiens
  chr4:39447953-39448481
  hypo
cgagtctgtggcttcgtccccacagttcagcgatcctcatctgtacgtgtggaacgccactggcaacagactgttgcaccgagtggaaggggtgaggctgaaaacacgacccgctcaatgcacagattttgtaaacatcaaaaaacaacttgagatgttggcaagaatgaaagtcacccactaccggtttgctctggattgggcctcggtccttcccactggcaacctgtccgcggtgaaccgacaggccctgaggtactacaggtgcgtggtcagtgaggggctgaagcttggcatctccgcgatggtcaccctgtattatccgacccacgcccacctaggcctccccgagcctctgttgcatgccgacgggtggctgaacccatcgacggccgaggccttccaggcctacgctgggctgtgcttccaggagctgggggacctggtgaagctctggatcaccatcaacgagcctaaccggctaagtgacatctacaaccgctctggcaacgacacctacggggcggc

SEQ ID NO: 338475 - DNA, 43 bp, Homo sapiens
  chr4:40261237-40261280
  hypo
cgcggcatcgtcttgggtaaatacccagggttcatcatcttgc

SEQ ID NO: 338476 - DNA, 180 bp, Homo sapiens
  chr4:40485408-40485588
  hypo
cggggtagcggaagcagagggagcgagacaggcaggggtcagatgggagcgttataacacccaggagaggacttcaagttctccttggctgattggaggattctgagcagagaagcgctgtgatctgcttttctgttttttaagatcactggtgtgcagccgggtgcattggctcacgcc

SEQ ID NO: 338477 - DNA, 133 bp, Homo sapiens
  chr4:40910434-40910567
  hypo
cacattcctgtcaccgcgccttgctgcctcctaggtgcggcaacaatgctggctttcctgacggagagagggaggccggcatccccaggccacacctataatgcctctcaccccatacacgtgtgcacaacac

SEQ ID NO: 338478 - DNA, 305 bp, Homo sapiens; identical to SEQ ID NO: 332077
  chr4:41218387-41218692
  hypo

SEQ ID NO: 338479 - DNA, 1135 bp, Homo sapiens; identical to SEQ ID NO: 332078
  chr4:41258731-41259866
  hypo

SEQ ID NO: 338480 - DNA, 1565 bp, Homo sapiens; identical to SEQ ID NO: 332079
  chr4:41362252-41363817
  hypo

SEQ ID NO: 338481 - DNA, 2245 bp, Homo sapiens; identical to SEQ ID NO: 332087
  chr4:42152842-42155087
  hypo

SEQ ID NO: 338482 - DNA, 108 bp, Homo sapiens
  chr4:42317330-42317438
  hypo
ccccagatcaagcccagcaggcgcccaccggccgcaccgactgcggggcccacttagcccgtgcccacctggaacctgcgccggcccacaagggccgtgtgcagcccc

SEQ ID NO: 338483 - DNA, 2263 bp, Homo sapiens; identical to SEQ ID NO: 332088
  chr4:42398819-42401082
  hypo

SEQ ID NO: 338484 - DNA, 1065 bp, Homo sapiens; identical to SEQ ID NO: 332089
  chr4:42657902-42658967
  hypo

SEQ ID NO: 338485 - DNA, 145 bp, Homo sapiens
  chr4:48572780-48572925
  hypo
cgaaaagagattacgttctctaggatcattccagagttttaacaatgtgaatccaatactgacctgtgactaatgacaccagcatctgccagcagttcaaatattcgtaccagttgtactcgtaaaatgtctcgacgcctgcgcc

SEQ ID NO: 338486 - DNA, 133 bp, Homo sapiens
  chr4:48678686-48678819
  hypo
cgtgagccactgcgcctggccaagtttcaatttctttaaagtgacagaagaaactgaaggtatccaagggcaaaatccttccaatcttgtatactttcctggcctatgtgaaattcaaatgcacatttttctc

SEQ ID NO: 338487 - DNA, 172 bp, Homo sapiens
  chr4:48679706-48679878
  hypo
cgtgagccaccgcgtcagcccgaaaaaataactttttaaatattgaattagtaattaaagaagttggaaacaactgattcaagtataaagctttgagattacatgccatttttttctctaaaagaatagctctttctttgcatctttttacatgaagtctctccatatcatc

SEQ ID NO: 338488 - DNA, 70 bp, Homo sapiens
  chr4:48887296-48887366
  hypo
cgccatgccccgacatgttcttaaagagcagaaaaacatgtaacgcttagttcacttgaaagccttccac

SEQ ID NO: 338489 - DNA, 76 bp, Homo sapiens
  chr4:56222936-56223012
  hypo
cgcgatcttggctcactgcaacctccgcctcctgggtagcctagagggatttttaaaacataaattactacctcac

SEQ ID NO: 338490 - DNA, 958 bp, Homo sapiens; identical to SEQ ID NO: 332106
  chr4:56914942-56915900
  hypo

SEQ ID NO: 338491 - DNA, 87 bp, Homo sapiens
  chr4:57093728-57093815
  hypo
cgaccaacttttataaagggccagatagtaaatattttaggctttacgggccacatagaccggctgcagctgttcaactccatcttc

SEQ ID NO: 338492 - DNA, 861 bp, Homo sapiens
  chr4:57179994-57180855
  hypo
ggaaacagaatacacgtccttttctccattcgcacgacagagtcttgcgtggggtgaccgatgcctgagtttagctatccctgaacttgagaatacctgcttccaggtgttcttgagaaattaagagggtcgctggcactgtgaataggaaaaggaacgactgtgggtggagaaagcaaaaggctaattgtgttttcctttccaatgttaggatccacaacatgagcaaggcggccttgagagtcggccctgcctggaccagaacggacacccaggcgaggacaagccaacgtggcacgaagaggaacccaatccgctggattccgaggaagagagaagacgccaagaagactactggcgagaactggaggccaagtgcaagcggcaaaaggcggaagcagccgagaagagacgcctagaggagcagaggctgcaggcgctggagaggaggctttgggaagagaacagaaggcaggagctcttggaggaggagggcgaggggcaggagccgcctctagaggcggaaagggcgccgcgggaagagcagcagcggagcctggaagcgccaggttgggaggacgcggagcggagggagcgtgaggagcgcgagcgcctggaggcggaggaggagcgaaggcgtctgcaggcccaggcccaagcggaggagaggcggcggctggaggaggacgccaggctggaggagcggaggcggcaggaggaggaggaaggaagatgcgcggaggagctcaaaaggcaggaggaggaggaggctgagggatgggaagagctggaacagcaggaggcggaggtgcaggggccgcccgaggcgttggaggagactggggagggccggcggggcgc

SEQ ID NO: 338493 - DNA, 1876 bp, Homo sapiens
  chr4:57180896-57182772
  hypo
cgcacctggaggactggagggggcagctcagtgagcttctgaacgactttgaggagaggctcgaagaccaggaacgcctgaaacccgaaggacaaagagaacactccgaggagccaggtatttgcgaggagcagaacccagaggccgagcggcgaagagagcagcagggaaggagcggggatttccagggggccgatcgtcctgggcccgaggaaaagagagaagaaggggacacggagcctctcctgaaacaagaggggccggtggaagccgcgcagcctccggtggagaggaaagaagccgccgcccttgaacaaggccgcaaggtggaggagctgcggtggcaggaggtggacgagagacagaccatgccccggccctacacgttccaggtgtcctccggagggaagcagattctctttcccaaagtcaacctgagccccgtgacgcccgcaaaggacacggggctcaccgctgctccccaggaaccaaaggcccccaaagccagcccagtccagcacgccctaccgtcgtccctgagcgttccccacaccgccattctggtcacgggcgcgcagctctgtggcccggcagtcaacctgagccagatcaaggacaccgcgtgcaagtccctcctgggcttggaggagaagaagcacgcggaagccccagctggggagaaccctccccgaggccccggcgacgcgagggcgggcagcgggaaggctaagccccgccaggagtctcccagcagcgcgtccgcactcgcagaatgggcttccattcggtccagaatcctgaagaacgcagagagtgacccgcgcagcagcgagagggaccagttgaggcccggtgatgagtccactcccaggggccggtgtgattcccgcgggaaccaacggaagactccgccagtcaatgcaaagttctctattatgcctgcctggcagaaattttccgatggtggcacggagacctccaaacagagcacggaagctgaaagcatacgaaaaagacccatgctgggacccagcgaagagacagccccccagcctcctcctgctggtgttcgcgagctcgggaagggtccggagaagtcggagatgcaccgggagcccgcagacaccaccgagggatgcaaatttgccaaagacctcccgtctttccttgtcccaagccttccttaccctccgcagaaagtggtggcccacacagagttcacgacctcgtcggacagcgagactgcaaacgggatagcaaagccagaccctgtgatgccaggtggagaggaaaaagcctcaccgtttggaataaaattgagaaggaccaactattccttgcgcttcaactgcgaccaacaggcagaacagaagaagaagaagaggcacagcagcaccggagacagcgcggatgcagggccgcctgcagcggggagcgctcgtggagagaaagagatggagggtgtggccctcaagcatggtccatccctcccccaagagcggaagcaagccccttccacccggagggactccgctgaaccttccagcagccgctctgttcctgtggcccaccctgggcctccaccggccagcagccagaccccggctccggagcacgacaaggcagcaaacaaaatgccactggcacaaaagccagcactggctcccaagcccaccagtcagaccccaccagcatccccactttccaaactgagcaggccctacttggtagagctgctgtctcgccgagcggggaggccggacccagagccaagtgagccgtccaaggaggaccaggagagcagtgaccgccggccaccctcgcccccaggccccgaggaaaggaagggacagaagagggacgaggaggaagaggc

SEQ ID NO: 338494 - DNA, 824 bp, Homo sapiens; identical to SEQ ID NO: 332107
  chr4:57396531-57397355
  hypo

SEQ ID NO: 338495 - DNA, 1425 bp, Homo sapiens; identical to SEQ ID NO: 332108
  chr4:57521376-57522801
  hypo

SEQ ID NO: 338496 - DNA, 547 bp, Homo sapiens; identical to SEQ ID NO: 332109
  chr4:57687545-57688092
  hypo

SEQ ID NO: 338497 - DNA, 219 bp, Homo sapiens
  chr4:57777264-57777483
  hypo
cgaagaccaaaccctttcgctgtaagccatgccaatatgaagcagaatctgaagaacagtttgtgcatcacatcagagttcacagtgctaagaaattttttgtggaagagagtgcagagaagcaggcaaaagccagggaatctggctcttccactgcagaagagggagatttctccaagggccccattcgctgtgaccgctgcggctacaatactaatc

SEQ ID NO: 338498 - DNA, 85 bp, Homo sapiens
  chr4:57896316-57896401
  hypo
cggtgtttataataaaaaataagtacaaagtaataatttttttctcttaacagtgatggtggcctgcgttttggagaaatggaac

SEQ ID NO: 338499 - DNA, 979 bp, Homo sapiens; identical to SEQ ID NO: 332110
  chr4:57976114-57977093
  hypo

SEQ ID NO: 338500 - DNA, 838 bp, Homo sapiens; identical to SEQ ID NO: 332113
  chr4:66534909-66535747
  hypo

SEQ ID NO: 338501 - DNA, 37 bp, Homo sapiens
  chr4:71566942-71566979
  hypo
cgattctgctgcctcagtcttacaggcgtgagccacc

SEQ ID NO: 338502 - DNA, 115 bp, Homo sapiens
  chr4:71706531-71706646
  hypo
cgagagctgtagcacaagtctgtgctgccctgcgctgtgccaccgaaacccgtggtgtgagtggctaaagaaccctttctgaaaggaattgtgataccttggttataaaaaaatc

SEQ ID NO: 338503 - DNA, 108 bp, Homo sapiens
  chr4:71857989-71858097
  hypo
cgtgttgaacaaagaattgaacaaaacgtagaaacaaagcaacaaaagaagcaacgaaagacaaaacaacaaaagaacgaagtaacaaaagcacaaatttattgaagc

SEQ ID NO: 338504 - DNA, 121 bp, Homo sapiens
  chr4:75241344-75241465
  hypo
ctgaccagcgattcttaaggttaacaggatagtggatgtaatatttctctggagatagattttttattcattggatcgcattcactcttctaccctagtttgcaagtgtttgggagcagac

SEQ ID NO: 338505 - DNA, 862 bp, Homo sapiens; identical to SEQ ID NO: 332120
  chr4:77227668-77228530
  hypo

SEQ ID NO: 338506 - DNA, 137 bp, Homo sapiens
  chr4:79689620-79689757
  hypo
cgcagtgtcgtggcagcaggcacagtcttgagatgcagaaggacagcggcgagcttgtggacctgtacatgcggcagaaagtctctgctagtaaccgcgtcaccggtgccaagaaccatgcatccatccagatgaac

SEQ ID NO: 338507 - DNA, 1870 bp, Homo sapiens; identical to SEQ ID NO: 332124
  chr4:81123012-81124882
  hypo

SEQ ID NO: 338508 - DNA, 387 bp, Homo sapiens
  chr4:81307585-81307972
  hypo
cgggtcaggcaagggggtcaccaccttgcgcccaccactgccgccacggcgcggggctgccctcttctcgcgggcggtggtggggggggggggtgccgccgggtttgcaggtccttttccttctgggggccgagacgacagcggtgatctttgaggtatttgtggcggaaaaagcccttggcacagccagcatagcggaacttgtagtagcccgtgtgggcgcgcaggtgctcggcgaggtgggcacggcggctgaaggacctgctgcacagggcgcatttgtggagcttcatgccggagtgggagaggacatgggccttcagcttgtccggccggttgaacaacttaccgcagcttgtgtgcgtcgataaagggcatttatatttc

SEQ ID NO: 338509 - DNA, 1262 bp, Homo sapiens; identical to SEQ ID NO: 332130
  chr4:82135701-82136963
  hypo

SEQ ID NO: 338510 - DNA, 299 bp, Homo sapiens
  chr4:83323437-83323736
  hypo
gcaaatgatctagacgcttgctggagttgacttgtttcatggtgagggctccttgaaacactggcaccaccaggtacttcaggtcggtggaagcaatctcttccaaatcttcatttcggctgaacaactcgagctgcgataacatttcggcagccttctcaaggagatccatccaggcccttgaacaccttctcctggactatccgggaatcggcaggttcagtcgctacttctacttcgtccagaatctgtttgccggtttccagcagctcggcggggggcagcgggagcagtagttc

SEQ ID NO: 338511 - DNA, 46 bp, Homo sapiens; identical to SEQ ID NO: 253854
  chr4:83839359-83839405
  hypo

SEQ ID NO: 338512 - DNA, 1544 bp, Homo sapiens; identical to SEQ ID NO: 332142
  chr4:85503546-85505090
  hypo

SEQ ID NO: 338513 - DNA, 1640 bp, Homo sapiens; identical to SEQ ID NO: 332143
  chr4:85886808-85888448
  hypo

SEQ ID NO: 338514 - DNA, 56 bp, Homo sapiens
  chr4:87946924-87946980
  hypo
cgctctgcaggtttcgcctagttcctatgcatggggatgtttgtgtttccgagagc

SEQ ID NO: 338515 - DNA, 90 bp, Homo sapiens
  chr4:87993079-87993169
  hypo
cgggtcaggagctctggattaaaggccaacgggaatcttttaaacttcttggttgtgtgtgtgtgtcggtgtgtgaagtcagaggcagac

SEQ ID NO: 338516 - DNA, 749 bp, Homo sapiens; identical to SEQ ID NO: 332147
  chr4:89378198-89378947
  hypo

SEQ ID NO: 338517 - DNA, 72 bp, Homo sapiens
  chr4:95127605-95127677
  hypo
cgtatgagaaacggtagaacgatggctaccagaggctgggaagggtagtgtggggcgggggaggaccccggt

SEQ ID NO: 338518 - DNA, 310 bp, Homo sapiens
  chr4:99399725-99400035
  hypo
cgagtaaccaggtaagaagagggttcaaccaaaaaatcactctgctcgtcccatgcacactctcggcatgatgtacagagtaggccaatagttcgctggcattcacttactgcgggatctttagtgcagcaggagaatggaacgccacatcgctctcgacttgcattggaatctgtgcaattgaagtaaatatttaggttccaatcatcagctccaaaagccccacagcactgccactagagcaaacaggaaagaattagaacatcccaacttggaggcaagcagtcacctacactcacacccgccgaac

SEQ ID NO: 338519 - DNA, 57 bp, Homo sapiens
  chr4:99936215-99936272
  hypo
cgtcgcatgtgaagaacacttaagtggaaaggggacaatctgggcctctggcttacc

SEQ ID NO: 338520 - DNA, 113 bp, Homo sapiens
  chr4:100555198-100555311
  hypo
cgctgtacatatggctcgtgcctggactcgctcgtgcctagaaagagtaaagccatgtcgaaactgtctacgtttccttgagtgtttttccagctcccccgcactcgcccacc

SEQ ID NO: 338521 - DNA, 1017 bp, Homo sapiens
  chr4:100573606-100574623
  hypo
cgtctccacatgtttgatttccccctcgactttgctgaccacgaactccaaggccttggtctgagacttcttggactggatgtagagctggtcggcagtggcccgggccccactgcccttcctcagacctgcagccacagaggccgcgctgctcctgaggaggctctgctccaccctggccccaacacccccacattttaagtccaggaaagttgaccagcgcccaaagcccacttcggagagcgtggtggaggactcccgggagctgatgttcagagcctcaaagtaggggtaagccaggctccggaaggcccgggaggtcaggttacgcacctctttgtccgcatcgtccagttcgctcacggcactggaggctccgctggagtagtccaccagctccttcgcccggatggccccgcacctggtttgcaggcgagcaggtacagcaatgaatttctttgcatggtcctgagccactgctgcagccgggttttgcttcagcgaacttgaattgtgttcagcagctgtagagacgcggaggctcatgtcgccttcatgcttggcagcataaataatgttttgctttgcacgcacgttgctaggctcatttatagcccgggaagccggtttgattgataggaggatctggcttgctgcactcccacagctgcttgcggcggcggctgctgcccctgaagctgcctccggggtctcaggcaagggctcagtcaggggggcagtgccaggcccagtgggtgggggagtggggccactgtcagaggggccactgcccacttcggtgctgctggtgtcgcggccactgcggcctgcattggggcgggccaggtcgctgcttgtagggctgggcgtccgggtggtgttggtgctgggagtggtgctgaggtagcagctgttgtcgtcgtcctcttcggtcagactggtgatgtcccctggggtctcgtcgctgccaccaaaggaagcataatccacgaacgagtagatcacgttgttgtcctc

SEQ ID NO: 338522 - DNA, 279 bp, Homo sapiens; identical to SEQ ID NO: 332155
  chr4:100867923-100868202
  hypo

SEQ ID NO: 338523 - DNA, 168 bp, Homo sapiens
  chr4:103421142-103421310
  hypo
cgcacccggctcacagaatttcttaaaaagtcattgtgttcagtctttatggatcctctaaattccagctgctcagcctcccggagctaaatgagatcacttaaaggtcgactgttggggcctccaaggtcgcctcggagactcacctcataggcaatcaaatggatc

SEQ ID NO: 338524 - DNA, 959 bp, Homo sapiens; identical to SEQ ID NO: 332157
  chr4:103997179-103998138
  hypo

SEQ ID NO: 338525 - DNA, 60 bp, Homo sapiens
  chr4:104854506-104854566
  hypo
cgtctccaggaataaattctaatttaaaagtgcatttaaaaaaagatcagccccgggcgc

SEQ ID NO: 338526 - DNA, 443 bp, Homo sapiens; identical to SEQ ID NO: 332158
  chr4:106067046-106067489
  hypo

SEQ ID NO: 338527 - DNA, 1352 bp, Homo sapiens; identical to SEQ ID NO: 332159
  chr4:106156138-106157490
  hypo

SEQ ID NO: 338528 - DNA, 185 bp, Homo sapiens
  chr4:106335558-106335743
  hypo
cggcctggcaggctgcgctccgctcgtgctaagcctggatcccacgcatgccaagggcaagccaggtatggagtggcaaagggcaggcaactccgggcaccagcacaggcaccggctccctgcgaggctgcagctggaccaggcaaaccccgcaagtggcttccactagaggctccaggaaacac

SEQ ID NO: 338529 - DNA, 1703 bp, Homo sapiens; identical to SEQ ID NO: 332168
  chr4:111542887-111544590
  hypo

SEQ ID NO: 338530 - DNA, 1902 bp, Homo sapiens; identical to SEQ ID NO: 332175
  chr4:113435438-113437340
  hypo

SEQ ID NO: 338531 - DNA, 1053 bp, Homo sapiens; identical to SEQ ID NO: 332176
  chr4:113437637-113438690
  hypo

SEQ ID NO: 338532 - DNA, 35 bp, Homo sapiens
  chr4:113559154-113559189
  hypo
taaaacattttgcgaggctgggcacggtggctcac

SEQ ID NO: 338533 - DNA, 706 bp, Homo sapiens; identical to SEQ ID NO: 332182
  chr4:115520454-115521160
  hypo

SEQ ID NO: 338534 - DNA, 305 bp, Homo sapiens; identical to SEQ ID NO: 332186
  chr4:120549993-120550298
  hypo

SEQ ID NO: 338535 - DNA, 1246 bp, Homo sapiens; identical to SEQ ID NO: 332187
  chr4:121843130-121844376
  hypo

SEQ ID NO: 338536 - DNA, 1886 bp, Homo sapiens; identical to SEQ ID NO: 332189
  chr4:122871295-122873181
  hypo

SEQ ID NO: 338537 - DNA, 281 bp, Homo sapiens
  chr4:123300379-123300660
  hypo
cgggacagtaagggaggaggctgaactgcgcgattttacctggcttctccagaagggtaaggcggccagttggacccggtccttgtgttcggagaacagagtcacccaggcctcgaacgcctgcgatggtcggcgtctcttccctaggtgacgcaagacgcggagctcggctgcacgacgctggcgcaagcgcgggggcaagagcgccggcctccgagacggttagtgattggacgaagcagggcgcgggggcgcaagcccgggtcctgcaggggcgacgc

SEQ ID NO: 338538 - DNA, 1562 bp, Homo sapiens; identical to SEQ ID NO: 332190
  chr4:123747656-123749218
  hypo

SEQ ID NO: 338539 - DNA, 1537 bp, Homo sapiens; identical to SEQ ID NO: 332191
  chr4:124317751-124319288
  hypo

SEQ ID NO: 338540 - DNA, 162 bp, Homo sapiens
  chr4:128702523-128702685
  hypo
cgatcaaaccaagagggagggcgctggaccacactgggctcttttttgaggaccacagggcagcggctggaggctaaagcacagacttggctggtgtgagtggcacacttaattaaggtcactttcctgtaaaactggtttccagagacaagggtcagcggc

SEQ ID NO: 338541 - DNA, 132 bp, Homo sapiens
  chr4:130168471-130168603
  hypo
cgcagcaagtgttcgcgacacaaccatttatgccgatagagtttgcagacaccagctccaccttggcctgtgtgcaatggctgctcccttgtggaggggaccaacgcaaacatcggagcttggatcataatc

SEQ ID NO: 338542 - DNA, 189 bp, Homo sapiens
  chr4:141007383-141007572
  hypo
cgcacataggcgctacctcacaaatgtgtctgggtaagaccctgccccatcagcgtcccctgaaacttctcttccttgaatctcactttgataagcacacatgcttggactcaaacaggtcatctccagtatccatttctttcattttcttttgtcccacaatagagttaaacaatacactgtctcgtc

SEQ ID NO: 338543 - DNA, 174 bp, Homo sapiens
  chr4:141207770-141207944
  hypo
cggcatgtgcagccgtgtgcccgcgccgttcctcacgtgcacatgggtggcttgagcgcataagcatgactgccaatatcacggttggttagcttgtggcccaatactgggcggtgtggtgtgtgcgggaggcggggcgctggagccgctgtcaaggacgactgtgggagtcac

SEQ ID NO: 338544 - DNA, 1351 bp, Homo sapiens
  chr4:141563919-141565270
  hypo
cggcagagatttgctgctcagctttccgctactgttgcagttcttccccctcttgcgggcgggcgacagggctctcgggggcgtgggtctgtttccacggcctgcgtgccaagcttccatgggactcctcgtgcctgtcctcggagtcccggcgccgctgcagcttcaccagctcatgctgcttctccttgtactggtgctggacctcggcccgccacattctgaagtccagttccaggacgtccatgtcctccacggaggacttcatggggtacatccgctcctccttcttgcgcatccagctgtacttattgtgggcttcagctcccgtgggagccgcaggttcttgagcgggtcccaccacgggcccatccagcacctccctcagcatgtggctgccggctgccagcaggctctccagtgagggccgagccaccagggcccgctccgcacctcccaccttcttgctcctcctctccagctccagctctgcgatctcgctcagcagggtgatgccgtgcagaaagctctgctccaagacaaggctctcggcagcttcctgcttctccaaggcctggactccagtagcacctggggagggcagaggcctggcctggggcagctccatggccacctccatgccagccagtgggtcttccaggccgggcaggaactgctcagagcttgcctcttccaggtagcaggtgctgccgggcacaggcacggcctcccggggctccagtctcgggcactctccctccccggcgggcacgtcacagtctgacatttctaggctgggctggggctcgctcagggccgcctgggccaggccttcctccggcgctgcctctgccgcaggaaccgccacaggcacctccactggctcctccttggcctccactagcgtctcgggtgtcagctgcacccccaggtccaatgcggccgtgcagggttctgtccggcccggggaatccacgcatgcttcaggcccctccgcaaagtctgggcactcagagggctcggtgcagccctgcccggtggcactcagcgcctgggcctccaacgggccacctctgcatccgcctgcagggctcggggtagccatggtttccatggcgggcagtggcagcggcaactccagaggcggcagctctgcggggcgctcgtccacatcctccacctccaccttcgcctcctgttcagccagcggctcttcctccgggtcctcccgcagcggctctgggatcttggagggggacaggaggatgagcttgtcttcgggcgagagtgtcaggcgcttggtcccatcagctgggagcagcacatcaggggccaggccatccgcatcggc

SEQ ID NO: 338545 - DNA, 837 bp, Homo sapiens; identical to SEQ ID NO: 332198
  chr4:142053208-142054045
  hypo

SEQ ID NO: 338546 - DNA, 837 bp, Homo sapiens; identical to SEQ ID NO: 332199
  chr4:142054075-142054912
  hypo

SEQ ID NO: 338547 - DNA, 824 bp, Homo sapiens; identical to SEQ ID NO: 332200
  chr4:142557243-142558067
  hypo

SEQ ID NO: 338548 - DNA, 1910 bp, Homo sapiens; identical to SEQ ID NO: 332207
  chr4:147559191-147561101
  hypo

SEQ ID NO: 338549 - DNA, 1595 bp, Homo sapiens; identical to SEQ ID NO: 332210
  chr4:149364662-149366257
  hypo

SEQ ID NO: 338550 - DNA, 1048 bp, Homo sapiens; identical to SEQ ID NO: 332213
  chr4:152329824-152330872
  hypo

SEQ ID NO: 338551 - DNA, 116 bp, Homo sapiens
  chr4:152591291-152591407
  hypo
cgacgtgagtcagaggtaacaaaggcatatatataccgaacaaaggtgctccggtgcagtggagagaacagtattagtgtcgcaagcacaggagtgcagacagccccgccttcatc

SEQ ID NO: 338552 - DNA, 64 bp, Homo sapiens
  chr4:153247365-153247429
  hypo
cgagaaccgctaacaactctgcagagggagaaacagaaaaacaaaacaaaacaaaaaaacccac

SEQ ID NO: 338553 - DNA, 199 bp, Homo sapiens
  chr4:153918932-153919131
  hypo
cggtgcatccctgaggccctttcctctgcaccgatgctcggactctccgtgtgtgccattttgcagtggggtcacgctccacgtgttgttctgccactgcctttggtttctcgacactgcctcgtggacacgcagggagagcttgcagctggtgacaagctctccagcaggtgagtaatccagcagctctttctgcctc

SEQ ID NO: 338554 - DNA, 388 bp, Homo sapiens
  chr4:153943319-153943707
  hypo
cgaggtaggtccaggtgactgggacacgggagggctccagacagccgctatttgccacacggaaccaaagcatttcactgttttaacaagcggttcagctggtccggagtatccctgctggctctcagccctaaagtggcgtgagggctgggcacgtcgacagcacttgatccgctccttccctctggaaatgcatttccttccattaccagaacagcctctcacagtttggcctgcctcttctcatgctatgtcgaaacaaagccacctgcctcccatgaaagacggcattgtttttccacctgagccacccacacctgggcaggtagaacagcgggtccccactccagggagctctcccactcgggcctgtcatggctcacacccc

SEQ ID NO: 338555 - DNA, 908 bp, Homo sapiens
  chr4:154216342-154217250
  hypo
cgcttgctcagagccacctgcgtgggcaggtgtagagtctccttctcgccggtggagggcactgccccgggctaggccccgccctgtgggacgagctcaccaggcctccggttttcccgcaggtcctccagtcgcagctggatactctgctccaggggcaggagagcattaagagctgcagcaacttcacagcgcaggccctcaaccatggcacggagaccgaggtcctactggtgaagaagcagatgagcgagaagctgaacgagctggccgaccaggacttccccttgcacccgcgggagaacgaccagctggatttcatcgtggaaaccgaggggctgaagaagtccatccacaacctcgggacgatcttaaccaccaacgccgttgcctcagagacagtggccacgggcgaggggctgcggcagaccatcatcgggcagcccatgtccgtcaccatcaccaccaaggacaaagacggtgagctgtgcaaaaccggcaacgcctacctcaccgccgaactgagcacccccgacgggagcgtggcagacggggagatcctggacaacaagaacggcacctatgagtttttgtacactgtccagaaggaaggggactttaccctgtctctgagactctatgaccagcacatccgaggcagcccgtttaagctgaaagtgatccgatccgctgatgtgtctcccaccacagaaggcgtgaagaggcgcgttaagtccccggggagcggccacgtcaagcagaaagctgtgaaaagacccgcaagcatgtacagcactggaaaacgaaaagagaatcccatcgaagacgatttgatctttcgagtgggtaaggagagggcttctgtgcccgacgcctgagctggcactggttaaggggtaactgggcac

SEQ ID NO: 338556 - DNA, 225 bp, Homo sapiens; identical to SEQ ID NO: 332217
  chr4:154387495-154387720
  hypo

SEQ ID NO: 338557 - DNA, 111 bp, Homo sapiens
  chr4:154421947-154422058
  hypo
cgctcacacacgcgtgcatgcacacacacacaggcatgtgcacttttttcctagttgtgaaaatcgatggaatgactacatggcttagtctcctctttctccagagacgcc

SEQ ID NO: 338558 - DNA, 986 bp, Homo sapiens; identical to SEQ ID NO: 332218
  chr4:154709413-154710399
  hypo

SEQ ID NO: 338559 - DNA, 721 bp, Homo sapiens; identical to SEQ ID NO: 332220
  chr4:154713481-154714202
  hypo

SEQ ID NO: 338560 - DNA, 558 bp, Homo sapiens; identical to SEQ ID NO: 332221
  chr4:155254035-155254593
  hypo

SEQ ID NO: 338561 - DNA, 711 bp, Homo sapiens; identical to SEQ ID NO: 332225
  chr4:156297402-156298113
  hypo

SEQ ID NO: 338562 - DNA, 723 bp, Homo sapiens; identical to SEQ ID NO: 332231
  chr4:159690017-159690740
  hypo

SEQ ID NO: 338563 - DNA, 144 bp, Homo sapiens
  chr4:170043204-170043348
  hypo
cgtttaaatgaacacataagcagtaacagacgacacgctcacttacacactggggcgagtctgcggccgtaaatgtgcaatctggtcagtggatcctgccatgggcctcggtcccattccagcagcagcagcagcggcggtggc

SEQ ID NO: 338564 - DNA, 1685 bp, Homo sapiens; identical to SEQ ID NO: 332246
  chr4:174089737-174091422
  hypo

SEQ ID NO: 338565 - DNA, 1076 bp, Homo sapiens; identical to SEQ ID NO: 332252
  chr4:174450407-174451483
  hypo

SEQ ID NO: 338566 - DNA, 164 bp, Homo sapiens
  chr4:183626546-183626710
  hypo
cgtatctgatgtctacactataccgaggattcaagccagtagcccggtgaaaatattatacggtactatttaatatgcctccaccaagcgcattgttgacagcggaaacaatgtgagttgttcatagccatacacatcagcaactgcttatatacagtgaaacc

SEQ ID NO: 338567 - DNA, 132 bp, Homo sapiens
  chr4:183808118-183808250
  hypo
cggggccaggttggcgaggcacactgcacattcaggaaaggatggctgcagaagatgggagcggcccaggtgtccattggtgcgtgaatggctaaacaaaaggcagtatgtgaacacaatgggcgattcttc

SEQ ID NO: 338568 - DNA, 166 bp, Homo sapiens
  chr4:183809411-183809577
  hypo
cgatgaaatggctttagattcttccaacagttccgaaataaaagtcgagctagctaaaggtatctccagaacaattctggggcaccctgctctaaatgtgactcctgggcccagggttattttgccggcacctctgcagccagtaatccataactctagtcatcac

SEQ ID NO: 338569 - DNA, 290 bp, Homo sapiens
  chr4:183815970-183816260
  hypo
cggccaggacggccgaggtcaagtgccttccccaccctaagcgcagctccgcttcacggctccacaagaccctggggcatgaaagtgcccacctgagctggctcattggtgtgctgacacgcacacatggggaagttcaccgtggctgttaagagggctaggggattttaagagcaagagaatcaacaagtgacgaagctgagcgtgtccatcctgagggatctgctttaccacatcgtgctcagcccacatacgcacaaggaaaaacgccagcagccagactgggtctc

SEQ ID NO: 338570 - DNA, 2041 bp, Homo sapiens; identical to SEQ ID NO: 332265
  chr4:184019261-184021302
  hypo

SEQ ID NO: 338571 - DNA, 155 bp, Homo sapiens
  chr4:184278181-184278336
  hypo
cgccccgccccggcctgccccgccggcaccaaacgcaagcatcagactcacctgctctccggtgtgtgtgaccaagaaccctgcgggctcctctccaccctccactctcaggaaataacaggaaagatgtctccctggcatgcctggactcgtgc

SEQ ID NO: 338572 - DNA, 166 bp, Homo sapiens
  chr4:184667624-184667790
  hypo
gataggaccaggcagggggccgtgcccgctggggaggcttgagttgtgcgggaacccactgcagggcgggagcgagctcgggcatggcaggctgcaggtcccgagctcttccccatgcagaggccgctgagaccgggtgagaattcaagcatggcacgggcccgcc

SEQ ID NO: 338573 - DNA, 365 bp, Homo sapiens; identical to SEQ ID NO: 332268
  chr4:185747631-185747996
  hypo

SEQ ID NO: 338574 - DNA, 140 bp, Homo sapiens
  chr4:185765461-185765601
  hypo
cggaagcaccgctgctgaggaacaaccacctcctcctgaccatcgcaagctgcccaggaagacatgctcatagcagtgtccgtttccctgcctaactttccaccagaagattccttcatgtctacgggcggacccaggcc

SEQ ID NO: 338575 - DNA, 992 bp, Homo sapiens; identical to SEQ ID NO: 332270
  chr4:185939454-185940446
  hypo

SEQ ID NO: 338576 - DNA, 128 bp, Homo sapiens
  chr4:186348212-186348340
  hypo
cgtctcaaaaaaaaaaaaaaattaataagaaaaaagttaagtgatgggaaagttctaggcaagaatttcttccctccctcctccctggctcgcttgtgtgccgggagctgcgcagatgcggggatacc

SEQ ID NO: 338577 - DNA, 394 bp, Homo sapiens; identical to SEQ ID NO: 332272
  chr4:187026478-187026872
  hypo

SEQ ID NO: 338578 - DNA, 1311 bp, Homo sapiens; identical to SEQ ID NO: 332273
  chr4:187647047-187648358
  hypo

SEQ ID NO: 338579 - DNA, 346 bp, Homo sapiens
  chr4:188427955-188428301
  hypo
cggccttacccgctcagaagcgcttccgaagtgcttcctccaggctccacagcggccttccccgctcgctcctttgagctcctcctcggtcgcttttgccagcctctgcctccctttctagcgtcctatttcagcacactcattttcgtttcaggcaggtgcgctttccgttcccagagcgcactggaacctctttcccgctggcctcagccttttcttggaatgccctttccagccttttcacgtggaagcaccactcagcttcaaagccacctccttgggaggccttctctgaccgcccagcctcgttcgcgccacgtgtacattctcagtgcagccagtaacc

SEQ ID NO: 338580 - DNA, 482 bp, Homo sapiens
  chr4:189552385-189552867
  hypo
cgttcctacaccggttgacctcaccgtgatgcccaagtgctaattctactccacgttcctgcaccggttgacctcaccgcgatgcccaagtgctaattctactccacgttcctgcaccggttgacctcaccgcgatgcccgaattctacctctactccacgttcctgtacctgttgacctcaccgcgatgcccgaatgctacttctactccgtgttcctgcaccagttgacctcaccgcgatgcccgaatgctacctgtactccacgttcctacaccggttgacctcaccacgatgctggaatgctacctgtactccacgttcctgtaccggttgacctcaccacgatgccggaatgctacctgtactccacattcctgcaccggttgacctcaccgcgatgcccgagtgctacttctactccaagttttgtctccgtgtaaatatcgccatgtccccagaataatgtgtctcaactatttc

SEQ ID NO: 338581 - DNA, 203 bp, Homo sapiens
  chr4:189717765-189717968
  hypo
cgcccatcacagacgccgcgcccctcacagacgccgcgccgcacctcacagacgccgcgccacacctcagaccctgcgccgcacctcacagaccctgcgccctacatcacagacgccgcgccacacctcacagacgccgtgccacacctcacagaccctgcgccccacctcacagacgccgcgccacacctcacagaccccgc

SEQ ID NO: 338582 - DNA, 183 bp, Homo sapiens
  chr4:190345382-190345565
  hypo
cgcatacacacacacacacacacactgcacggaactcctgtatgcatacgcacacgcactcacactgcacggaacccctgtacgcatatacacacaggcacacacgcactcacactgcacggaactcccgtatgcatatacacacaggcacacacgcactcacactgcatggaacccctgtac

SEQ ID NO: 338583 - DNA, 702 bp, Homo sapiens
  chr4:190462487-190463189
  hypo
cgaggcatcatacaacccgacttcaaaatgcaccaagccggaggcatcatataacccgacttcaacatgcaccaagccggaggcatcatataacccgacttcaaaatgcaccaagctgcaggcttcatataacccgacttcaacatgcaccaagctgcaggcatcatacaacccgacttcaaaatgcaccaagccggaggcatcatataacccgacttcaaaatgcaccatgccagaggcatcctatcactcgacttcaaaatgcaccaagccggaggcatcatgtaacccaacttcaacatgcaccaagccggaggcatcatataatccgacttcaaaatgcaccaagccgcaggcatcatacaacccgacggcaacatgcaccaagccgcaggcaccatataacccgacttcaaaatgcaccaagccagaggcatcatataacccgacatcaaaatgcaccaagccgcaggcatcatataacccgacatcaaaatgcaccaagccgcaggcatcatataacccgacgtcaaaatgcaataagccgcaggcaccatataacccgatgtcaaaatgcaccaagccgcaggcatcatacagtccgacttcaaaatgcaccaagccgcaggcatcatacagtccgacttcaaaatgcaccaagccgcaggcatcatacagtccgacttcaaaatgcaccaagcc

SEQ ID NO: 338584 - DNA, 240 bp, Homo sapiens
  chr5:110225-110465
  hypo
cgtgcacgcacccacacagtctgcaacacacgtgcacacatccagtctgcaacacgtgcacacaccggccactctgcaacgcacatgcacacatccatacaatctgcaacacatgcacacaccggccactctgcaacacacatgcacacatccacacaatctgcaacacacatgcatacacccacacaatctgcaacacacgtgcacgcacccacacagtctgcaacacgtgcacacacc

SEQ ID NO: 338585 - DNA, 334 bp, Homo sapiens
  chr5:110572-110906
  hypo
cgtgcacacatccacacaatctgcaacacgtgtgcacactggccactctgcaacacacatgcacacatccacacaatctgcaacacacgtgcacacacccacgcaatctgcaacacacgcgcacacatccacacaatctgcaacacgtgtgcacacaccggccactctgcaacacacgtgcacacatccacacaatctgcaacacacgtgcacgcacccacacaatctgcagcacacgtgcacacatacaaaatgcaacacgtgtgcacacaccagccactctgcaacaaacgtgcacacatccacacaatctgcaacacgtgcacacacccgc

SEQ ID NO: 338586 - DNA, 497 bp, Homo sapiens
  chr5:139637-140134
  hypo
cgctgtgcgcccatgagaaggtggtggtgcagctggcgtccctgcacggagtcaggctccagcccggggacttctacctgcaggtcacgtcggcggggaagcagtcagctagactggtcttgaaatgcctgtcccggctgggaagaggcacagaggaagtcaccgtccctgaggccatgtatggctgtgtcttcacgggggcgttcctggagtgggtgaaccgggagcggcgccatgtccccctgcaaacctgcttgctgacctcaggcttggccgtccaccgagccccgtggagcgacgtcactgaccctgtctttgtccccagccctggagccatcctgcagagctactccagctgcacaggtcctgagcggctgcccagcagcccctcagaggccccagtccccacccaagccacagcaggcccccatttccagggaagcgcctcttgccccgacaccctgacctcaccctgccgccgagggcatacgggcagc

SEQ ID NO: 338587 - DNA, 491 bp, Homo sapiens
  chr5:192159-192650
  hypo
cgaggcggtggtgcaggctctgaggccagcgggcccggcccctctgcgggtgcactgcccctcgttccgggcggacagcctgagccccagccagctcctgcacgtgctgcgtctggctggcccgggtgccctgcgcaagctggaggtggtgcacaacgtgcggctgcatgcgggccacgtgcagcagcttctggcccaggtgggcttcccccggctggcctcgctcaccctgcccaccaaggcctttgatgcaccccccacctacgcctccactcccgacggcgaggaccccctcctcgcctccatcgcccgggagctcagcaagatggcgcagctcactgagctcagtgtggccttctccacgctgaccgggaagatcccgacgctgcttgggtgagtcttggggaggggactgagggcgggctggtggctgcagaggcaaggagagatcgtccaggggcctgctcatgtccaaggccatgaggctacac

SEQ ID NO: 338588 - DNA, 94 bp, Homo sapiens
  chr5:429668-429762
  hypo
cgagacccacccgacttgtcctcggcccctcggcgctgcaggcccaggccctggtaaccaagtgcagctcagccttgccgcgcgatcctgcagc

SEQ ID NO: 338589 - DNA, 331 bp, Homo sapiens
  chr5:453948-454279
  hypo
cgccacctggaaattataaggaagtacgtcctggatgacctcattgtcgccaaaaacctgatggttcagtgctttcctccccactatgagatctttaagaacctcctgaacatgtaccaccaagccctgagcacgcggatgcaggacctcgcatcggaagacctggaagccaatgagatcgtgagcctcttgacgtgggtcttaaacacctacacaaggtaaagctaacctggcgcctgtgttggctcttaggtagaagccgtgtgtgagaggggcctgcagctgcttgctggagagccgacctcagggtgttgctctgggcaggtgctcc

SEQ ID NO: 338590 - DNA, 173 bp, Homo sapiens
  chr5:462216-462389
  hypo
cggtggaggccggcctgcccagccgctgtgttgaacctgaaccctttccttgcagggaatccatagtcagtttaaaaagaaagtatttaaagaatgaagtggaagagggtgtgtctccgagccagcccagcatggacgggattttagacgccatcgcgaaggagggctgcagc

SEQ ID NO: 338591 - DNA, 1046 bp, Homo sapiens
  chr5:465064-466110
  hypo
cgctcctcctctgcggtgagatgccagagccgtggcggagcgaggaggagtgggctcagagcctccggggagccaccgggagccccagcctgggtttcaatgagggtgctcctggccgccagagccgtggagcctgccgctgaccgcgcgtgtctccccagaggatgacggccgaggcgcaccggcgcgtggtggtggagtacctgcgggcggtcatgcagaagcgcatttccttccggagcccggaggagcgcaaggagggtgccgagaagatggttagggaggcagagcagctgcgcttcctgttccggaagctggcgtccgtgagtgtcgcgcaggtccgggctggagaaggcctgtcgctccgcggccctgttcagcctccaccccgggactcgggccagtagatgggagtgtgtcgtgtgtttgtcaggcggggggagcctgggtccaggtcctgcctgaccttgtggttggacacgaatgtccacagaggtagacgcgccggccccgccggcttcccgaggccgcccacagctccctgacggacgcttcccagtctgtcctgcgctgcgaggtgctggctgcctcccacggtctcgccctcaccccagacccctggccctgtcactgagctttcagagtagatcctgaggagtcaggtgaagagggaggttcccagtcaggaaggggctcagccagaatccagctgctcccagcgccgcgggacagccgagggcggctcctcacattgctgctgccttccagggtttcggggaagacgtggacggatactgcgacaccatcgtggctgtggccgaagtgatcaagctgacagacccttctctgctctacctggaggtctccactctggtcagcaagtatccagacatcaggtaagggatgcacgtcttagaatcctgccttagaatcctggagtggagcggcaggtccctccttctgtctggggcgggtggggctcctggttcgcaagttcagccctgcagcacggcaagggttcaggtgcggcacagcggggcccaggc

SEQ ID NO: 338592 - DNA, 1660 bp, Homo sapiens; identical to SEQ ID NO: 332275
  chr5:472600-474260
  hypo

SEQ ID NO: 338593 - DNA, 368 bp, Homo sapiens
  chr5:476496-476864
  hypo
cgggatcaggcacggaggtcacagctgtgcccaccgccggacattctcgccctcctgccgcaggagctgagcacggatcccccgtggtcccaggaggggacgaggaagccgccccacggggtccctgcggggtcctccagcccccagcccgcagtgcccacctcctgccgcggcttgtacaggtactgctgtagcgtgtggtgcgtgaccatgtcctccgcgtcccggatgctccgccgtcgctgctccagagactgcatgtccaggcagacagcgctgacattttctctcctgcgtggggaccagcgctgagccatacaggctccctcagggtggggtctcttgcgcgcccctcgccttcccacggc

SEQ ID NO: 338594 - DNA, 460 bp, Homo sapiens
  chr5:488144-488604
  hypo
cgctctggggaccaggagggcgggatttcaacagcgccatcattaaccctgaagctatggagtgggcgggcagggcctgggaactgtggaagatacaaagaagcctcgcgaaagctgccagtcgttctgagctgggaggaaggaggtggagggacgggacgcccccgggaggggagtttgaggacagggtttcacgccctcctttgctgactgaccgatggggggtgagacggggcccaggcctcccacggctcgcccgctctggagcggtggctccgttgctcaccacggtgactgcgtcgttcagcagcgactccccgaagacgatgatgaacaggacctcgttgacatggacctcctcaaacacggccaggacggccaccgggtccacagccgccatgaggctgccaaacaggaggaagtccagcagcccaatctgcaggtcgcctggaagacaagc

SEQ ID NO: 338595 - DNA, 1541 bp, Homo sapiens; identical to SEQ ID NO: 332276
  chr5:490616-492157
  hypo

SEQ ID NO: 338596 - DNA, 512 bp, Homo sapiens
  chr5:508111-508623
  hypo
cgcctgaatctccccgctacacccaaatgcccacccacacccatgtggctccagttcccattcggcttcttggcgcccgcccctcacaccagtggagccaggggaaggggtgaccagtgctcaggcgcggagcccagctatggaatcacaagcagcccagagcgcgcccgggatggagatgccgcagggagacgcaggcctcaggatggagtagccgcaggcagacgcagtcctcagcgcgccagggatggagatgccgcagagagacgcagcccatagtgtgcccgggatggagatgccgcagggagacgcagcccacagtctgccggggatagagatgccgcagggagacgcaggcctcagcgcgcccggggatggagatgccgcagggaaactcaggcctcagcgcgcccggggatggagatgccgcagggagacgcagcccatagcgcgcctgggatggagatgccgcagggagacacagcccatagtgtgcccgggatggagatgcc

SEQ ID NO: 338597 - DNA, 383 bp, Homo sapiens
  chr5:510026-510409
  hypo
cgggcagccggcgttgtccctcctgcagtcagcgctccactgccccacactcagctggcttcccagggcctgagcaaggatgggggaggcttcgggagaagaggggctccaacgatgtggaggagaatgtgttggggagacaggtgctgggctggaccggggagccgctggaggcctgggggcattggaagcaggaggatccgtgggtgcttgggcccctggcggagcgcggcagcttgttgggagctgggagcagagccacttactgtgagctcagagaggctgccaagagcagcgacagagaccatcgttccctccaggcaaagccagatgctgtgtgggaaaggaaacgtggccgtacgctgccacggagctctaaggtg

SEQ ID NO: 338598 - DNA, 214 bp, Homo sapiens
  chr5:520003-520217
  hypo
cgtcctcctgaccctcctacggctgcgcgaggcactgcagactccagatacccgtctcgctcctgcctgcccttccagccagggttcaccaagatgtggggcggcctgggcctccgccatcacatccctcagcaacacaagctccacttcgagagcctgcccccaccgcccccacccagccccactgtcctggtttccccgtgggcagtcactg

SEQ ID NO: 338599 - DNA, 1150 bp, Homo sapiens; identical to SEQ ID NO: 332277
  chr5:523704-524854
  hypo

SEQ ID NO: 338600 - DNA, 757 bp, Homo sapiens
  chr5:554314-555071
  hypo
cgagccgttacctttcaccaaatcgcactgtattttattcatttagggtgtacacacctatctgctcttcaaaggaattttgggcagattgtaaaattacgctcaacatacagcaaggcgactataaatacaaaagcagcactgaggtgctggtgctgcgggtgggtcacgggataaaccaggcgtggggtctgggtcacgggatgacccgagggtgggtcacgggataaaccaggggtggggtctgggtcacaggatgacccgggggtgggtcacgggataaaccaggggtggggggctgggtcacgggatgaacggggggcgggtcacaggatgaaccgtgggcgggtcatgggataaaccagggtggggtctgggtcacaggatgacccgggggtgggtcacgggataaaccaggggtggggggtgggtcacgggatgaacggggggcgggtcacaggatgaaccgtgggtgggtcatgggataaaccagggtggggtctgggtcacgggatgaacggggttgggggctgggtcacgggatgaaccggggggtgggtcacgggatgaacggggggggggtgggtcacgggctaaaccggggttgggggtgggtcacgggatgaacggggttgggggctgggtcacgggatgaacggggggtgggtcacgggatgaacagggggtgggtcacgggataaaccggggtggggggctgggtcatgggatgaacggggggtgggtcacgggatgaacc

SEQ ID NO: 338601 - DNA, 386 bp, Homo sapiens
  chr5:569858-570244
  hypo
cgcttactcgaagaagatttaaaacacacaaggaaccgtgaaaccaaaccagaaaagccctgctgaccgagccgccccttctagaggccgaacaggcatggaaaccctgagccgacacaggcacttacccagcagagaggacagggccaccaggatccacatggccacaaagaagggggtgtgcacgggtagccaccgcaggctgaccactggaaacccgctgctgttccgggcaacggggggctctggccctgggccccggccaacgagtgtgcagggatgggctgtgcccaccagcaaggccagcaacgtgaaggcacagagtccagacccctggggctgcatgctgggggcacgtgccgccgacaaggcgctgtgtatccgcc

SEQ ID NO: 338602 - DNA, 507 bp, Homo sapiens
  chr5:600977-601484
  hypo
cgcccaccatggcgttagggccacagcctcctgccccatgtgccaggcccggctctgcccagctccctgcagctgcgccagtgtgtgctgtgactcgtgctcctggtttgtcatctgcctctcagtagacaccacggccttcaagctttctccgctccgtgaccagcagctgggacgggaccagcagtgcatgcggctctggattcatgtttgttgaatgactgactgaacggaggctcccttacagaagtgaacggcgcggccctccctgagttccggcctggctctggataccaaggagcaaggtggtcaggggtcaggggctggagtggggagattgcctgggagggggctggagggtgtggtggaactgcaggttctctccttgacatgcctgtgggggagcctttcccggccctctctccgctggttttcaccctttctccggtgcagccacactgggcatcccaccccagggatccaggaagggggcgtgtcggccgagtg

SEQ ID NO: 338603 - DNA, 54 bp, Homo sapiens
  chr5:667302-667356
  hypo
cgaggcttgactgcaaagtggcagcgacgtgggcacgggcacgcggccagcccc

SEQ ID NO: 338604 - DNA, 772 bp, Homo sapiens; identical to SEQ ID NO: 332278
  chr5:676510-677282
  hypo

SEQ ID NO: 338605 - DNA, 487 bp, Homo sapiens
  chr5:851421-851908
  hypo
cgctgcggctgctcctggccagtcaggtggggagggcggcaggggtgggagggacgtggtgtcacagagcggcagtgaaagacactcaacggccgctacggggtggggggttgatcttgaggggctgggcggtctctacagaggagggttaggaagcttcgccacgttatgcctcgctcaaagtccttgttgtctctttgggaaaaaaccttcagaaaatgaagttgatattaaatgtatttctttgagaagagagacattgagaaatagttaacaattcttcgttcttgcagtcgtgaacgtccatgatacagtggctctgcgctgcctttggtggctcctccctggtcctctaaatgtgacaccaggcggatgcggggccacaggaccctggggcttgagtcacacaagaatgtctctgggagacccgagagactcacagttatgaaacaggaccatggttctttggccgggcgcgggggctcac

SEQ ID NO: 338606 - DNA, 432 bp, Homo sapiens
  chr5:883821-884253
  hypo
cgtggcctccacgatgcatgaaacaccagcggcagccctgccagaggcacctggaccccgactgaagagaccagccttatgtgtgtctgatccggacctcccgtcagggccccacgctgacctctggatcccggtggctgtgctagatcacacagcaccaacccagaaggagaggcacacagagagtctggggccacgtggcaccctctctcggtggccacagagcactaccttgccgcctgggaggaaccggttgatcctgtcccgagcttcgtcagctgcgtgctccaccagcgccagcacgtgctcctctgcggtactgtccgtcaagctgcaggcattcccttcaggctcaaacatgcagctgtgaggtggggacaaccaagtcacctggaggcagcgtccccaccgcacacctgctccccatgcgtc

SEQ ID NO: 338607 - DNA, 187 bp, Homo sapiens
  chr5:913200-913387
  hypo
cggagctctgtggagctttgcctggagaatgccagtgatctgaagactgattctacagcagttttgctgccaaggagccccacgtgatagcagatcctgcgaggaagtcgtgtgtgttggaggtcctcacgcaccttcagtgtgggttccagccctcgcagtgtgacgtttatacacttgtacactc

SEQ ID NO: 338608 - DNA, 487 bp, Homo sapiens
  chr5:962533-963020
  hypo
cgggaatgagggggcagaccacccccaccgagcccagatgccagggaaggagcctggccagaaagatccagaaggactcagtgtctggcggccctcgctgctccccattctttgaggccgttgttcccagatgggatgtcggatgcgtctctggcccgggcccctggtgaaatgtgatggaggggtgtggatggagcgtggtggacacagcaagagcctggccaggcatccctggggcaggacagcatcagccggggagcggggtctagccccagccgcctggcacagagtggcgcccaattctagagcttgaatgaaagagggaattcaggaagacgcttacaccagccaggccccggggcactcaggacggtagcatcacggggtgccaaagtctgcaaaggtgacagaggacgtggggcctcggcagggctgcctccacttccccaagcacacggaagacaggcagggtggacgggggtgaccc

SEQ ID NO: 338609 - DNA, 150 bp, Homo sapiens
  chr5:1032302-1032452
  hypo
cgggaggaccagtgtcccctacagggtgagtgcagctcccgcagccctccctccccaaactcacagacttcatcccgtaccaaggcaacgccgaaaaccacccttaaaacaaccccgtgtgcggagcgagggcacttcccaggcttagac

SEQ ID NO: 338610 - DNA, 440 bp, Homo sapiens
  chr5:1033274-1033714
  hypo
cgtgggctggtgagaggagggcacacccggctgtggctggccgggatagggcctccctcccctccgcaggggtcccaagatcgggctctcagctcaggcccgtctggacaggatcatggtgtggtgaggggagagcagcgagggtccccaatggcgggccacatcctccatgtgccctctgccagccccttcgcctcctcttgtccccctagtggcactccccgctgagaaagctgagggccgcgagcacccgggacaactcctcagcgcagatgacggagagagggcagcaaaccgcgagggcccgcgaggaccgggcgggcagcgcctcaacattgacgtgggtctctctccggcctcacttgcgggaacacgtccctggggccgggggctcagggacaggcatgtgttgccctaaactgggcatctgtggacacggc

SEQ ID NO: 338611 - DNA, 423 bp, Homo sapiens
  chr5:1034298-1034721
  hypo
cgtgttggcgtgggtaggaggcgaggtcccggcccccacgtccccccacaggcactccagtgcgatgtctcggtggaggaggacgaccgccaggagtggacgttcacgctctatgactttgacaactgcgggaaggtcaccagggaggtaggtgagcttgtgtttgcgtcaggtccacagtagtagacagacggggcagacagactgtgctggcctcgcgatacctcagggggcaggaggggacctgcctgctgcgaggtcctcatgccagctgggcttgcgtctccccagggcccagttcacgtgtgtttctgggccgagcctgcgccgcccatttctgcggctgtgcttcccacactgcaaggctgccctcagggcactggaggcgctcacagggccacctgggcagacccaggctgctcc

SEQ ID NO: 338612 - DNA, 637 bp, Homo sapiens
  chr5:1037852-1038489
  hypo
cgtttctgaggagatgggaacctgagcctgcactcccagggcctcacactctgacctgtgtccgcagggtcccctcctgtgcaagcaaagcaggagccccagggcagggcctcgcacctccaggcccggtcccgctcccaggagccagatacacatgccgtacaccaccgcaggtcacaggtgctggtggaacacgtcgtgccagcctcggagcctgctgcccgggccctggacacgcagccccggccgaaggggccggagaagcagttcctcaagtcccccaagggctccgggaagccgcctggggtgccagccagcagcaagtccgggaaagccttcagctactacctgccggccgtcctgccgccccaggcccctcaggacggccaccacctcccgcagcccccaccgccaccctacggccacaagcggtaccgccaaaagggcagggagggccactcgccactcaaggccccacacgctcagcctgccacagtggagcacgaggtggtgcgggacctgccgcccacgccagcaggagagggctacgcggtgccagtgatccagcggcacgagcaccaccaccaccacgagcaccaccaccaccaccaccaccaccacttccacccgtcctagc

SEQ ID NO: 338613 - DNA, 520 bp, Homo sapiens
  chr5:1039295-1039815
  hypo
cggtcccaacactcacggggcgacttctgtgacatgtcagctttggagaaaggtgtgtcctgcaagggtcaggagacggttgcaggccagaaggacgtcccagtgacgtttcggagtcttgcagcctgcaggggtccatgtggttacccggaacaggaaccgtgggggtgctttccgggacccagggggcccgtgccaatgtttctgagtcttggagcctgcaggggtccacgtgtttaccctgaacaggaacatgcgggtgttttccggaatctggcgaggccgcgcggcagttttgcatttacattccttgttttgtttttaaggataaagcggtgctgggtggggtctgtgggaggggtttgagccatggcggaagatccctggtgaatggcttggatgtttgtcgcctccgagtctcatgctgagacgtgatccgtggtgctgggtggggtctgtgggaggggtttgagccatggcggaagatccctggtgaatggcttggatgtttgtcgcctcc

SEQ ID NO: 338614 - DNA, 236 bp, Homo sapiens
  chr5:1049758-1049994
  hypo
cggggaaggggcggctctgtctctcacactttcaggaaccacaggcccttcccgtgcagctacaaccctgcaagaggggtccgattccgcacgtcctccccgcgattctctggttttggctgtgaccatcacaggtgtgagttggcatctcacgagttagaacacgctgtccccactcatggcggactctctggtgcctccatccttatataaattaaattataaatcgaatggcc

SEQ ID NO: 338615 - DNA, 263 bp, Homo sapiens
  chr5:1051312-1051575
  hypo
cgccgcctccatgcaaggcacaggccatggcaggggacgcccgggactcagccagacagacctgacaccaggcgccactgctgcctgaggacctcccacgtcgggtccgtgtcctccttccctggagcaccggggtggggatggcacgtgtgagccagctcagaggctgaactgtgtgccgtgctcctggggtggggtggggtggggagggcagtcctggctgtcgtgggctgtcgggggaactcactgttcactctgcgcgc

SEQ ID NO: 338616 - DNA, 1232 bp, Homo sapiens
  chr5:1051905-1053137
  hypo
cgagggtgacacgggcatggacagagtcctccagcttcagtgccttgaggtacagaaacacaaagacagtcaaggaacagagtgactcggaggtgaccggggccctgagcggagccatggccagggctgacgtttcaccttcatcatcagggacagcttcagctccgggtgctcttccaagaatgttctggatggggtagaaatgcaacctaaccactgggtaaatccagccaaggaaaagaacttccagaaaccaaggcaagggctcactggcttcttgtgacctgcgagaagatctggccacgtccaggtcactccggtagcagcgtctgccctcagatgcaaggaaatcgtccagccacgccctgatttgctgagcctgttaaggctgaacaggagagccctaggtgacgggcctagaaacttccgtaggaagccccatgggcagcttgggcggcatcactgggggacaggtgtgtctgccgtctgtttccctgggccaagcccaggcccaggctgcccacgccgtcctccgtgcctgtcccagagtgccgtgatgctgttgggcattaggagtagatggtgatcacctcccggccgccacccctgaccaggaggactctgttcagcccctcggtcaggacttcaagaaactccatgtctgtggtcaacagagttaaggccacagctgatcttacctgagcgtgtgtagctgaaatcgtgataggagtgaggtttatcctctcctggttagctaagatttggtttgagaaacccagagccaaggtgaaaagagaggtggggattagagagaccccccaggcggggaggagcagggcaggggagagaggggccagtgctcgggaaagagagggagcaccgtggccacagggaggacgagcagagacagcgacacagcccacggtgctgaccccacccgacagggaaccccagccacgggactgggtcctcaccagcctacaggggacctgggccacggattccgatcaggacgcatggaggacatgccctcactggccccagttcttggtgccaacctggcagggatgtgccaggcgtcaccctgtctgtgccaatacgcccagatgcactgcggagttctccttccaaagcacaaattcccaaagctgcgaccaattgtggccttaaagccgagagctgggctcctcacctcccaccgttgtcggcgcagggtggggctgagccccagc

SEQ ID NO: 338617 - DNA, 1614 bp, Homo sapiens
  chr5:1053406-1055020
  hypo
cgagaagccaccagggggtgcccgcacgctcagcaggcacactgcaagaaaggatacagttctcgtctccctgccggtttttgggaggacctggcatgttgagcaggaccagctgcgcatcctgggacttgttgaggacgacgccattgagcttcacagccgtgtgcatccgcctgacgttggactggtccctgcaggggaggtgggcacggtcagcgggcggcgggtgcaccccacgctccggacacgaggctgagctgagccctgatgagctgcattcacacgtgttggaaagggctgtgtgagtcaggatcaggcggattctctgaccctgaaggatgcagaagtggcggctccgagcgaaaggcgctgactgcagccagggcgggcgttcagcagcgggatgctttggcctccagggacctagaactcagcccactaaggctgccaagcttctaagggctacagtcacacaacacaaaccgcaagcgctttcctaactacatctacatctgcaaagcaggcagaacagtggaagccgtctgggtggcccatgtgcctgacgccttcaaggctgacacgcttctcttgacatctacatcatcgcccctaaaccccacgtcagacactgccaaacacagacccgtcaggctgggcacacatggcctcctctccgagggtcctgatacaactgggtccaaggggccggaagctcaggaaggaaaggcccagagtcccccacaccggcctgtgcagccgttgctgctgaagctcccaggcctgacaaggacagggtatgccgaggactcagctggaggcacaggccctcagtggccactactgggtcccctcctacggcccaccctgcccctgtctggccaagggctaaaggacaagcacttccaccgtgtggccgtccagcccccgccttccgtcctcacaacgcagctctgctccacgaccctccctgtctgctctctgaagctgctgtggccggtccatgtctcaaagcgtccctggcggcctgggcccggccacagccccacaggaggctccccaaccaagtaggtttggggacactgcagaatcatgctgtgaggtgctcaggcccttgcgggacagagcttatctccctcctctaccccacggtcccctcctaggcaggcccctaaactgcagcagaactggcgttccaggaggccacctggggaaacgctgggcggaggggagcacttgcgtttctgtgttggaaaaacccggcccgtgtgtggacttgaaagtcggagcgggtctcaggccagctgcagccgtgcggtcgtgactgtggccccctgggggaggtcaccagcgccctggacgcagaggggcggcggcggacagacagaggccgcccatgcagggtcatggagaggccccacggacgctatccaggctcacgccctttgatccgcttgacgcttaagccacataaacgtgatcataaccaccaatttccaggaggaacacagggagagaccttctatcttctctccagcctggtctaattacagatggggtctctgtccacagcacagtcaaggggctttcgtgccaggaacttggaactttgaattc

SEQ ID NO: 338618 - DNA, 122 bp, Homo sapiens
  chr5:1055426-1055548
  hypo
cgtacgtggacgtgcacacaggcaggtacacgtccaccggcaggtgcgctgacaggtacatgcgagcacgcacacaaacagacatccgttaagtgtgctcccggggacgtcacagtaagcca

SEQ ID NO: 338619 - DNA, 418 bp, Homo sapiens
  chr5:1055588-1056006
  hypo
cgacctccagatcttcggagggcttctcccagcccaaccccgagaaactgctgggccaagagagtcaatgccatcccagacgcacgccacacatgaatacaaagcccacgcgttgtccattctggcccaccttctcctgaccctacaggcctgtggggacctgcccccgccccgaccaaggggaggcaagccccggcgctgggaggaggcacaggtgccactgagggtccccgagtgtgtgtgcctgtgcatgtgtgtgtcaaaccctactcctgggtctacgtcgttcttcggctttaattaacacgctattctgaaggcactttcagatttacagaacggagcaggaagtacagggattccctgcacgcctcgcacatagctgcacagtttcttgagtctgattaattcaggtttc

SEQ ID NO: 338620 - DNA, 1823 bp, Homo sapiens
  chr5:1056108-1057931
  hypo
cggttactggcgggggcaggcaggggacagagacggcatcgaggactcccagggagcaccctgggggtccgtccagggtacaccctcccacctgccccggagctcagacgcaggtagctcctgccgagggtccgaccacacagagaactgatctgcacccctctccgcctggaggctggacagctttaacatggaaggcattccaggtgggaacgcgactcagctagcgcctgacccagaaggacgtggatggactcactgacgggccctgcgaggcgcacgcctcccctccactccggagcggctcggacacctcccaggtctcagttcctgggcctcacttaggaagaggcttcaggcgtgtgctggagccaccgtgaacagaggggagcgaaggcaacaggaaactgacgtgggagccgcagcagctctgggtgagctctggctgtacgcggacgcacacaagccaccgtgcacggggcaggcacaggcctagaacacgcgcacagacacacgcaggccacacacacacaggcatgcagggcaaccgggcccggaaggcgacctggttgtagcgagtggacttacaggtttccccattctctatgcaggagaaaaaaacaagagtgtgttactgacttcaggagagagcaccaggctgttccagatcgcatggctgcccaggaggacgccgcctcatcccaccccacagggcccaggagcccccagcccttcctgagaacctggctttagggtctggctctgaccccgggtgagaggtgtctcttgcgctctcatctggaactcagaggctgcgtctgcagaaccaaacccacacccgcaaggaccctgtacagccctggtgttcgcagcccaaggccacaggtgggagccttggcgtagggcaggccctaaggcccgacagcagcctgaactacccacagggtgaaggccaggaattctgtgcccagcggcacaagcctcctcgcctccatggaacagacccatctgcctgctgcagtgaggcttgcctgagtaaagcaggcctggccgcagggctgacttcagggctggcccaggtaccaggaggactgctcgtcacccagctgtggggttaacatcaggacccaccctaggtcctacaaggacccctcagcgcttggcactagaaggacccctcagcgcttggcactagaaggacccctcagcacttggcacccaggtcttacaaggactcccggccttggcactagaaggatccctcagcgcccggccacagggctgaactcagggcccggccttggcaccaaaaggacccctcagtgcccactcaggcggctccctgttctctaacgggcccactggcctgcagggttgccccgaagctcttcagtggtcagggaagggactctgtcctcactgccgggccagcactgccaggatctgttccccccaggccacacgcacggacactcacggcttcatgctgaagaggtctttgaaaccagataggctggtgtctctgctcctgtacttctcagcgatcagcttctccctggtccaggtcatctgcaccttgtctggcgtaggcggcgcttgggtcctggctgccgccgcggtgtgggacgcggtgttcctgtcgtggatcagctgggcctggcgggcccgggacttggtgagaccagccggtctcaaaactcctctgggcgagagcgacccgggatgccaggccggaggtgagggcagctcacagaacctgaagggccctgtgtgcctgacccgggacccagcctggcgtcccacactggtcctgcgccgccccc

SEQ ID NO: 338621 - DNA, 1026 bp, Homo sapiens
  chr5:1058847-1059873
  hypo
cgcccggcccagcctaaatttcccatggccttgaacgtgaaaccagagcccaagggctgcccgctctcggcagagccagcgccgcccacctggcccgagggccaccgtgtaagtcactagagggtgtccacccagcgtctgcacagcagctcatccaaacccttctgcagagcggtgacacctccaacccccacctggcccaggaggggcccttcgagctcgagcttgctgttcccgctcccggtccctcctcggtcagcatttgctgactctccacactgaacttcccatgaagccatgggtggattcttgttcctagctggacccgggctgaacccttgtgacgccagggcgaccctgccggatctcagggacctggcctggacagaaaacagaggatgtgggtcctcccagacactcccggctgcccggacccccgtggaaggggtctctgtccacggacaagctgggcggccccccgtgtcctgcatctgtgcccaccctgacctgcccggggtctgggagtggacaggaccgcagctccacacgcctttctctgttgggggagagcagcagtcgctgcttagtgattccggctgtcagcacatatggccccacacgcagacccgtgtactgcaggttcctgctgaggccaaggccccagggcaggcaaatcccctgcccctgcctccgccgtcactgcagtctcagaaaaccaacacctgcacctggtctgcagacacacgtgtgtgataccagcctggtgggacccacgaagaccccatgaggccgtgacctcacagagctgagcatcccgctaccaggtgacccccgtgctgtcctccagtgcgaagtgaccacaaagacacctgcccttggggtctcacagtggccatggggcccaggccagtataactcaggtggatacacccagacgtcctcagcagcctacagttacccacggagccaaagccgctgcagccaggcggccagcttccacgcacggaggctgcacaggtctgtgtc

SEQ ID NO: 338622 - DNA, 97 bp, Homo sapiens
  chr5:1060676-1060773
  hypo
cgcgtcccgggccccacaggccccctctggctctcaggccccccgcccagtggccaggaaggtgtgagcgcacgatgggcagtcacgccgcacacac

SEQ ID NO: 338623 - DNA, 342 bp, Homo sapiens
  chr5:1060864-1061206
  hypo
cggctcagggcgaggcactgccccatggggctgcatgatccacgctcacaggtgtcattgtctatgctcaggggggcttggcaccatgggaaacccacccagaacacatggagaagccacagcacaacctcagcgcccgccatgcaggaccctgggtctcacccattgcacccaccgtgcgggacccctgcgcctcacccggaacatccacagtgtgggactgctgcgtctcacccactgcacctgccgtgcaggatccctgagtctcacccgccgcacccgccgtgcgggatccctgagtctcacccgccgcacccgccgcacctgccgcatccgccatgc

SEQ ID NO: 338624 - DNA, 207 bp, Homo sapiens; identical to SEQ ID NO: 332281
  chr5:1061585-1061792
  hypo

SEQ ID NO: 338625 - DNA, 811 bp, Homo sapiens
  chr5:1062902-1063713
  hypo
cgtgacagtctctatccagctttatgtcttcccagcacccacctccaggagtccaggcccctgaggacctgcaaaaccatgcgctggggtcacgggagccggaagaaaccaggactttgcgggttctgacttcaagaccagtgttgtcggcgtgatccaagtggggtcagaacccacaaagtcccgggaccgccagcaggaccggaggggaaggcacagccgtggatccgggtgggctggtagcgagcaggcatggttccatccagcacaaggggcccaccagatccccaggatccagagctccatgcttgggggccgggggcaagcgctccaatgccaggcctccgcccatcaaccccgtcctctccaggcgtgaaggacgggacgagtctctgtccaggccctgcctatagctgaccgagggcctgtctgtcccacgtgacagctgcagcctggcctcactgaccagtgcccctctccccgggtcccgactgctgatgtgtggtttccagccgtgggaaggtgagcccatctggggagagcacccaaaacgggaggtgctcagaggtgcacccaccatggcaacaccactgaggtgtgaggtcctggacggggtcccgggccgaggaggacacgggaccatggaggacacggagatgctgatgccggctctagggcaacacccacacccgtgttacacgaggtgtccacaagcaacacacggggctctgtgctttctgtgatgtcctggcgattccaaaaccaagcctccttgaccaccccgcaaggcctggcagcccccgccacaatc

SEQ ID NO: 338626 - DNA, 860 bp, Homo sapiens; identical to SEQ ID NO: 332282
  chr5:1064412-1065272
  hypo

SEQ ID NO: 338627 - DNA, 890 bp, Homo sapiens
  chr5:1065329-1066219
  hypo
cgaggggacactgagaggacacagaggggacggtgaggggatgccgaagggccgccagccatgcctacccacaaagttcttccaggagaaggggttgtcctcctgcttccaggatgcgggccaggccatgagcaccgtgttgtgcttcaggccgcccaggccggccgactggatcaggtgggacatgccatcccgcaggctggacgagaccaccagctggcagaagcccttggtcttctctgtgctcattagggaccgtatgttctgcgggagacaggacaggttggtgctacagcaggaatggggtgcacagacccacgcccaccacccacggtggccagggcacccgcaccacctcccctgtggacccagcaggagggaaggcccgaaggctcaacggtgtgctgcggtgctcccggccgctgtgtgtgtatgtgtgtatgtgcgtgctcacacactggggagagagacacagagcaggtgtgactgatgccacgtgcaggggatgtggagggctgctctggggacacaacgccaggcagttctctgaggcgatccacaacatcccagacccacccccagttcactcggacgctctgggccaggttcatccacctggtgcatcagaaacacccgaaaatgggccaaattagcagctcttcaaagggaggccgtggggtccaggatgcagcaccctaacagcaacggcggggggcgggggtgggggactgccgtgtggtctcctcccggggttggagggggtcactgctgtgtgcagtctcttcccaggggtgtctgatgaggctgcaccacggaacggcttgactccatggggtttgcacgtgcgtggccgaggacctgccacgcactaaagccatgcatgtgtggac

SEQ ID NO: 338628 - DNA, 1414 bp, Homo sapiens
  chr5:1068627-1070041
  hypo
cgatggaggagaatacggctccccagggcagtgcagccccaaaggcagccaagggaaggcggggcctgcggctggctccagccctcgcaaccaatgcagctaagtcacagccaaaggctcgctgagagcagcgggggcagggtgcgctcgtcctcccgtccgcaagagcgggctcctgtctgaggctgccccagaccccccagccgaagggctgtcggacggagaggatctgcctgtgagctccgttaacgtgagagtataagtgagcgcagctcttcccatggccgtgaagactgtggcagagcgtggcagggggtcccgtcatcccccagtcactgcaatccctgccctgtccctcgtgcgcacagacgcgccctcacacacctccagggaggccaggcagtgccaggattcttagaatccacgccagcagggcagttccaactccgggattcctcctaagagcattccagcatgggataaggaacacggaaagggacatatggggaccaggaccgtgaacatccccccgaaaaccacgatacctaaatccacgggttcacagtcaatagcagctaacgcctgaacccgtggtgagccatgacgccgccgtcagggaaagggaaggcccagagcatctcctgtcttccctgggaaggcgaacctgtgcaacagcctgagaaggtggccatccacgtggccaacgtggcgggagcggcgggggccattttttacctccatgggatcctggccctaggccacaccacctgaggctgctaccatccacgtgcccacagccctcttgagcagggttcccacccctaggctgaccggcccagacctggacgggcctcagtgcggctgtggttgtgcagagaaacggaccggggaggcggtggggggcggctgcagatgcctggacacacccacaaggtcccagtgggggcctggcagcagggagctggctcccaacccacagcaaggacagagggggcacccgcatgggagggacctcggacacacaccactgcaacaggcacgtggtataggccccacagactcccacacacatgagggggaaggaggaggctcgaggcgcccacggcagccagccctgcctgggaatgaggtgcccttggcatgaaaatcacgcaggtgggcactcaaaagctccctgctttagcaagaaatacagaagtaactccaggtgacgtgacgtgacgtgacgtgatgggaccccacaggctttcatcgtgtcatcattccgtttctggatagtgtgaagcttcccataagaagtttgaaaatcagagaaatgaagacacaaagtctcagaccccgatgtcctggggcagccgactgcagcagcagggctcagagctggcaccagcatgctacacgcccggggcactca

SEQ ID NO: 338629 - DNA, 204 bp, Homo sapiens
  chr5:1073469-1073673
  hypo
cggctctggacggggctcacccatggcgggaggaggcggtcccagggttcgcccttggaaagctaatggccctcacacctcccaagcttcccggggtgcggctggtgctcccaggccttagcgcgctgctctgagctcaaagccaccgccacggctaaaacacagcagcgccacgcacagcaccgtgttgacacgctgcgatga

SEQ ID NO: 338630 - DNA, 333 bp, Homo sapiens; identical to SEQ ID NO: 254306
  chr5:1073703-1074036
  hypo

SEQ ID NO: 338631 - DNA, 888 bp, Homo sapiens
  chr5:1074307-1075195
  hypo
acacccgaggcccccgccgaggcccctgaggggacaatggcccggggcacacacctgaggcccccgccgaggccctgaggggcagaggcttcccaaagatggcctttgcttcagcaggagccaccctctcccaccccaagcccagggctgtgctggcagaggggccggctccccacacccccaccctgcagcagggacacccccggcccccagctgcgccatccgctctgcaccaggcagtgttcacaccccagaccttgcctgagcggctgaaggtgagaggcccctgagactcaaaggtccccactcaaaggccgacctcagaaacagctcttctgtgcgtctgaggaccacggggcatgggcggtgctcacctccagttcttggtgtgggggggaccgtgctccacgcgcagcagggcgtagcgggcggcgttcagggataggccacggatgccatcgccccactccttctcggccctgtgggaaaggaagtcggggtttgtccagccgcgtacctggaggctcctctcccacctgggaaaggggacttctgggggcaggtgagttggggcaaacaggacccccaggaaaagtccctggatgaggagggaggcctccatgcccacccttgccctgaagggagcccgtcctaggagccaccgggtcagagggtgctgtggctgtggagggaacgaggtctacgtccagcatgcgtgaggtgccttcctcacaggacgggggacaggaggcccatgacagggaagtggctggaccccgggcacgaggcgggtgcaggtggagggagggtgggtgctggggcacggggaaggacgcctgtggctgccgagtgagtacagacacaacctggggacacctcgcgagacac

SEQ ID NO: 338632 - DNA, 4905 bp, Homo sapiens
  chr5:1075478-1080383
  hypo
cgcttacccgcggtactcgatgtacttgtagatgcagccagcgatgagcatggcggacagcgcgtagtaccaggagcagatgaacatcagcgccaggcacaggctcatacccagaaaggacagggtcctgggggcggggcaagtggctcggggcggcccaacgccatgcagcccccacacctcagccaccaccacacggacactgcccctccctcagtaaaactctctgttaacactaggaaaacagtcactgacgcctgacgaccatggctgtactcaaccacctctgaggggtgacgtggctccctgggcccctgtgggagctgtcactccaaaacccagtacatagctccagctcccagcgtgcacacagcacctcggctgtgcatgcaacaaggggctgaagcgtccacccagcgcctgattcctggggaggggagttaagaagacccacagccctgatgggctacgccccaagcctgggaaggctgggctgaccacgggaggtacaaggcacatgcagacacctgggcatcctcgtaaccagaggccttcctcaggtgcagtctcatcagctgcgcaggggcttactccgcaaaggaacagtcaaggacgcgctggggtcttcaggcccagagcagctggccttgtagaggcacccagtgtcccagcctgtggggctcctgacgcctgtgctgagcggcctcaccagtggcagaggcacccagtgtcccagcctgtggggctcctcacgcccgtgctgagtggcctcaccagtggtagaacttgaagcgtggacgccagttgggggtacgtagcagggtctgcacggcgcaggccaggttcacgaacaggtagcacatgaggaagaacctgcagggacggccggccactgatacgggcccactgggcccccctgagcccccagtcactgccacctgggagaccacccttgtcactgtccctcccacctgcgccttgtctccccatgtctgtctctgcacgtgagctgactcagactgattccgaatcaggccccctcaggttccagccatcctgtgaccacctggtccatcaagagatgggccatcgtcccttccccagcagccgtctgtccagccacactgtccctggctgaccccagcgggcggctgcctggaggcctgtgtacttgtcttccccggcgcaactcccttcccggcaggatcctgactgcccacagctggccatgcctgtctactgcttgtcctgagcaggacctcccatccacactgccccacgctccaggcccatacacccatccccaggtccccgtcctgtgggggctcacatggagaggatcggggccacgctgtccagagaggcgatgaggatgccagtctcgcagatgaggactgtcagcagcagcgcccacgtgggctccccgttggccttcccgtggccaaacacctgcagggagaagggcaggaagatggggcagatgacaccacccttttaggagagaagctgcaggctggtcaggtctagcccagatgaatcttaaagacacagaccagcagaaacgcctttcacagtaggtccccgggacatcacgcggctggcctgggaagaagccctgacaaagggctgcagcccaggaggcttcagagctgtgcctacgcccggcttgcctgcaacctgtgtggccccagcctgcccccccgcctcagtttccccgaccacacaacacaggaccagcgtctccagggcactcgcggttccccagaccctgtggtgacctttctcatcaggccaccctcacctcccagaagctgaggcccacggggcctgtgtgcctgtccccttcctggacaccatgccctaggcccggctgggactgaagatgcaaccacacaaaggccctgcgggtcggcaccctgccgagggaccagcgacgggcaaggatggctctgccatccacgaccttcccacagctgcccctgggcccaggtagcaggaggagccacaatcggcagctctgggcacagcacacggacaggacccatgcgggcgtccgtgcaatcctcagagcagccacacacactggctgcaggtggctggtgacgccacctcccacgggctgaagagctcagccacacagagaaagatgtggcaggcaggcagagggcttctgaccagacaacagaccaggcacctctggacacgtggctgtgggccctcacagccgctcctgacacacccggggccgagctcggagggacctgcaggcaggagggctagaattgcctctgcccaccacccacctcccaccactcccatgctctgtgcagtggccaggggcagaatgaccaccatggggtccaagccgcgggcatgcgtcccacacacggcactgtgaggatcccgcaggggaggagagcccccgaccctgaccttccagggtccccccgacgagggtgcgggactcacctgcaggaaggggacgatgccgtcacgggcaatggcctgcagtaggcgcggtgcccccgtgaggctctgcaggccggcaccgcaggtggagaagaaggagccgatgacgatgacccagggggagggccaggccagcatgccgatgaccaggttcccctgcagggcctccccgaacctgcaggcaggcgggcaggcgggcgggcggctttcagaagtgagcctgagtcagacaaaatgtcttctcccacccagagcgaggggcccagtgcagtgggggcgactccttggaaagctgaggcccggcctccagtccccgttggctgaaacctccaccaggctctgcccagcatggccagaatgctctggagggtcttcagcgggggagggggtcctgctcacctcagggtcgctcttgggagcagggaagacccagcctggcatcagcttcagtcagggaccacccaggacccccggggccttggggctgccagacacgcacaccccatgaggatgcagggtcagtgatgacctgcctgggaccccactacttctccacttgccagcagggctgagggatctcccagggccaagcctcacccgtccacacccctgtggcctccccaggaagggcctgcgcccccagccgcatcagggcttggagttggctctgaacggttccccaggccctaggctccagcggaagagacgacacatcagaccaagggatcccaaccctgggaccaggacgccttcagctctgcacgcggacatgaagtcctagggcgatgtaatttcaaagccgaattcatcctcaggaaaacccttgaagactacaggctttgcacgaaaactgcaggtggaaacgtacttatctcgtaagaccacgccttcaatgcaggccccaaacagcacaatgcaggagagatccacagccctcgtcaaggaaaggcaggtccgtgggtgcagggtcctcaggtacggggggtggggtggggtggggtggggtgggtggggagatgcactggccagcgggccgcaggatccaggtgggcggggaccgttctgcatcccatcccatcccgggcacgtcctgtcccccgtgtcctcagcgcaccctcctggggctctgtccagcgccacagaacggggccctggggtggtggacacacacctggcctggtgcttgaccgccagggattggcaggggaccatgctgaggggacaatgctcggctggaaagaggcagccttgggattgagaagccagaggccccgcgggcccagcctgccggcggcacaccccacacaccgctgcgcatcactgtccacacgcggcagggtgactgcttctgttttctctacgatcgcatcacacagtggtgaagaagccagggtcctgacagcagcccttgccccgtctcccagggaggatgacgtggtgagagcacagcctaacctgggaagtcacatgctggtggccgagggtatgatgctgagccggggagggcatgggggcctccccccaggcagaggctggaaccctcgcctgcacccctccaaggatacagatgaaagacgtcgtcactatggccaggatggtccccgtggggatggacttctgtgcatccttgaggtccccggaccggtttgaacccgccatgatacctgtgaacatggaaaatgctgcaaagacccatctgaggagtcagtgccatgtgatggcagcccctgcccagaaagctggaaaggcggtctctggggagaccccgagcgtgagctgcagccgaggctgcagtccaagctccgccagcccacgctgcaatactgcggctgaggggatgcgggcccaggcacgcggatgagcacccacgtctactgctcccctggatccgaggacgagaaccgaccccgtcactgacccccacgccccccacacccagggcttctctggagcctgtgttaatcccatggccaagggtcagcccagagacggtgctgagcaatggctcacaggcccccaggacctaaggactttgggaatgagatcctagaacgactcagcccagccagccaggccagcagacgctgcgacccctcccgctgtggcaccaccttgctctagggagccacggccggggatgtttccacacaatcggctcctacaaagctctgggaagccgggtcggtgggggccacttcacgcctggctcggtcccatccaaggcgcagcctgaagcacccattgctcggggtggcctgggaggcagcagagcccacaatccagtgccgcggagacacccggagccacgcagaggctctgcccccacgccctccacccgcggctcagagacacccggagccacgcagaggctctacccccacgccctccacccgcggcgcggagacaccaggagccacgcagaggctctgcccccac

SEQ ID NO: 338633 - DNA, 69 bp, Homo sapiens
  chr5:1081429-1081498
  hypo
cgggcgtggtaccgtgtgcctggggtcccggctgcccccctctacaaaaaatacagatattagccgggc

SEQ ID NO: 338634 - DNA, 304 bp, Homo sapiens
  chr5:1081824-1082128
  hypo
cgcccccgcgtgcgcgtacgtactccacaggttctctgccgggcaaggaagatcccatgggtttctggcaccttctgtgcagtgcccccgccatggggccgcccactccccggcaggtgccactggtggccggaggggaagggtcacagcttgtgcgccgcaagcaggctccaattcaaacacgctttcgagatggtacctctgggaaagctgcctgtctgcgtctacggagggaaggtcagcactaaagagaagcctcatgtggggaacaacatactcctggaaagcctgggcttcccgtctc

SEQ ID NO: 338635 - DNA, 708 bp, Homo sapiens
  chr5:1083641-1084349
  hypo
cggaggctgtctccctgccacaccgtgtttggcttctatggctctgccaggggtgtgtacagggacccccaggctcatcagcagcagctgggaaggggctcggccaggcaggaggaattggggccctgagagtgactctaaggcgagagcagccaccagggccagcgcctgctgcccccgccaccccccagctccagctgcagccctgtgagcctcacccaggaagacaccactggccgcgcccgggatgccctggatttcggtgacgttgttctggatgaagtactcgtcacaggcggcgctgggctgggagccgttgcagaagaggccccagagcgcggaggtggctgagttgttgtggatgccgtaggccttgacgcaggcatcgaagctgcgccgtgacagcgtgcggttccccaggaggcagaccctgggcgggacagggaggcacggcacgtgtgctgccaccgaagtggcttttactgccccacccagctcccccaacgggcacccatggtgtcgcccgcgagtggctcctggcaccctgcacctcccaagacaggaaggccacagatcacgccagggaccgggcccaggccaggctgcagcaggaatgcaagggccagggatcacactggggaccggggactggggaccagggaccggggaccaggccaggctgcagcaggaacgctgtactgtacagcc

SEQ ID NO: 338636 - DNA, 541 bp, Homo sapiens
  chr5:1084390-1084931
  hypo
ctaaatgaagcgttctagacgtaaacaattcacacgttttccaccgcgcggtgccgagtagtgaggtggaacccagcaacctccccccgcgccagcacagccacgctgcagccgctccctccccgaggccctcggcggcgtcctggccgggtcagctgtcacaatctcagtgtctgagttcaagccaccctcgtgccacgtgccaacggccaagagcacaggagtgccgcccccgacgtataagccaggcctgtacgtggaaaacagtctacacagggccgtagcgtcaagcatcggcagggggtctcaggacgggtccccgagggggagggcagctgtgcttccctaaaacgggcttgtggggttgcagctgttctgcctccctctgttttgaggcctctatgaggctgttccttcaggggctccctccacgcagagacggcaaaaccgcgggagcctcaaggggcttggctgctggccctttctggacctgctccctgcgggctctggtggccactcccatgttccaggaccctgggcc

SEQ ID NO: 338637 - DNA, 1658 bp, Homo sapiens; identical to SEQ ID NO: 209985
  chr5:1085200-1086858
  hypo

SEQ ID NO: 338638 - DNA, 2187 bp, Homo sapiens
  chr5:1087088-1089275
  hypo
cgacagcgcctccaaactcgggtcccagcgagcgcgatatcatgtagtaggacccgccagctgcggagacaaaggcggcagccgcgggtcaggggcgcacttggactcggacccgaggtgcggtctgcgctgccattcacgggcaaaggagggcctgtctctgcgaaggcagcgtgtagaccctcgtccacccgcaaagcagcacatggagacgcttccacggtgaactctcccctcccgaggctcggcacacgttccacaccaagagcacgcgctctcatggacatgaggaccaggtgagatcagggataaggctctctggggagcaggaggccccagcaggtcccagaaaaagtcccgcgtacatcagtggcagccccagcccccacttccactaagttttgcttatgaaaaaggcaaaagagaaactaggatgttcaggagtcgtctcgtgtactgtgaaccacgcacgctatcactggcgggaaagccgggcgcaaccccagggctgcctggagaacacagctctccctgctctgagcagtgcgtgtggcatgtggaaggggtcctaatggacgcggccatcgtgaagcagagactggtcccttggctgcggagggagacccctggtgaaggccctcgtgctctcctgaggccggggaagtccgctgagcaccaagcgatgcccccgtggggatggggaccagctgcgtgaggacctggtgctgagcaagcccagccgttaacacgcgcagcacacatgcactcagaagcagacgtggcagcgtctccgttcactagttatttcgtatcgtaattcgtttattactaattaacagtatcatctcagtttactagttattacgtattgtaattaacttattactaattaatatcatctcggttcactagttatttagttattatgtattgtaattaacttattactaattaacaaggtcagggcagtgttttgtcttcaccttccctcgtgagatacaggttccaagaactcagcctatggcacacgctgggctacaggagccactggaatcgcccgtgcctccccctccccagcccgctgcctggtgggcactgcctaccctggcaagagacggtcaccacgcagcaaaatggggaagaaaaccaaacagccgtgacctcacggctcaaacgccagaggagccagtggagaacacgcagaaggcccggctgagacccccaggcagcccccggcccggcctcgccaagcggcctcctcgcggttgccgtgcggcaaaacacagactcctctaacaggactcagggccgcggctggcgggcaccccttacctgggaccacaccgttggtagcgatcgcactcatggaaatggcggtcagcattgtctgcaaaaagacaggcagccatctgaggagagttttccaacagcctgccggcatcgcaacactcccaagtcagggtctatgacccggctcccgccgaatgccagcccccaactccagggctctccatctcaatggagtggctaggaaacaggacctggaggctcccgggcaccaggcatgcgtgtcctggttcccaccccttcccctatgacagcgacccctgaaagtgcccaaggtccttccaaactggaggtgatgtcatcaaaacacagggtgtcccttcccttggaagcctcagcccccgggtgccgccccatgacacccaccactggctgagatgcctgtccgcagacacgggtaaatgaggtgccagcacgccagtcaacacgccagcactaaccccggacagtgtggcatctcatccccgcagctgcccggctctcgtggaggagacggcgctgaacgacgtctacacgggcgtctggggagggccctactgtccggctgccaccgcccgaaggcacaaccacagcggccaggggagacggcatctggggagagccctactgtccagctgccaccgcccgaaggcacagccacacctggccgggggagactcacacatgtgcagcacatggccacgatgaggaaggactccaggacaccagccacccccacgatccacgtcaggcgcaggaagaggatgacgcccaggatgttctgcaggcacggcaggtagacgccgatgaaggtgcccatgcgcggagcctgcgacagagcatagcgtgtcccaggggctc

SEQ ID NO: 338639 - DNA, 212 bp, Homo sapiens
  chr5:1090437-1090649
  hypo
cggagcgtgggaagccctggatctgagagcctgggggattcacttggttccctgagccctaggtgggaagcaacaggggagcgacttgcttctgacgggggccctggagaggagagggtgacggggctgggggccgctgctgggccctccaaatctgggtatgctttgttcttggtgcaaacgagagaagcggtggcggatggtggagaacc

SEQ ID NO: 338640 - DNA, 247 bp, Homo sapiens
  chr5:1091634-1091881
  hypo
cggacagacagggaaggcctgtggctcctgagttttggtgccagagtaccagcctgagcccatgaggcctcaaggtagtgcccagcatgcgtgaaaccccagaaaggtgctgagtgctgagcccggcaatacccagttccacagcgtccacgtgcggaaaggtactgagtgctgagcccggcacaccaccacccaattccgcggcgtccacgtgcggcacggcaatacccagttccgcagcgtccac

SEQ ID NO: 338641 - DNA, 157 bp, Homo sapiens
  chr5:1094026-1094183
  hypo
cgtggggccggagcaccctagatccaggaaggagcccagaaggcaccagccgaggagcacgtcccagctcaagtgcgggactgggcccccgccacagccttcaggacagggaggccccagttccttccacgtggtgtccagtcctgtgggaggcccc

SEQ ID NO: 338642 - DNA, 622 bp, Homo sapiens
  chr5:1094563-1095185
  hypo
cgctagtcccaggacacatgctagccccaatgcgcaagctatccccagaacacaagctatccctaggacacaagctatccccagaacacacgctagctccagggcatacgctatcccccacacacatcatcattgaagacaaagcccctgaaagcctcggcaagtgagctgttcagcccagggcaagggtacctccctctggcgttgaaaatctctcattcagccaaatgtgggcaaaattctcactcttaaaagtcggggtggcacctcctagccttgctgcttaatccgccatttcggagggacacagaggacttcccactgttccctgttgaggacgccgcccacaggctctctaggtaaatgagcccctcctgagtctttcaggaaggctgggccggcgacccctccatggggctgagcccaggcttcgaaccagggggtaatcctagcagctgcccgagagcatgagcaagggaattggtggggaggaggacttgaggctccctggcaggttgaggcccgatggcccatgtgacggtgttagaagatagggtcggtaggaggtgggggcggtaggaggcggggggccggtaggaggcggggccggtaggaggtgggg

SEQ ID NO: 338643 - DNA, 390 bp, Homo sapiens
  chr5:1095619-1096009
  hypo
cgaccaagccgggacccttcctaggggtgctcggcccatccttgcccagtccaccctagccctgcacagaatggtgtgggaccctgagggtgcagaagaaacggtcaaggcaggatgcgaggtggccggaggagggcaggccaagacctcatcactgcaccaaacaaccccagctgggagggtgggcattctctatgggacatttcagatgtgccagagcccactggcggccaccctggctggctgacaggcaccagccgcaggagtggtgggttccagccgtgccagcaaagagggcatcgccgtctgggggcaggcgggcagcacgtgctcccagtagggtgcctggggcggaaagcacagccttcagggtgtgcaggtccttggtgc

SEQ ID NO: 338644 - DNA, 991 bp, Homo sapiens; identical to SEQ ID NO: 332283
  chr5:1111396-1112387
  hypo

SEQ ID NO: 338645 - DNA, 239 bp, Homo sapiens
  chr5:1114657-1114896
  hypo
cgttgtgtgactttcagtgctctcttcctacccacctccatccctctgtccttttctgtacccggcacctgttgtaggaagtggccctcggacacgtggaggtacccgaggcctgggttggagctgcatctttcggtgcaggcctctgcgtctcctggaagtgggcacctggagccaggggactgctgggatccgggtccagtcccctggcaaggccgggggctcgcagagggagccac

SEQ ID NO: 338646 - DNA, 635 bp, Homo sapiens
  chr5:1115157-1115792
  hypo
cgctgatgaaacacattggtgggtctcagtcgatcaccattagtgccctttccaagcatcggtgtccagctttgcccagggggcctcttcaaatgcaatctcgcatccttatgatgtgagcctggtcatctgcgatggcctcttggccgtgtgcagggcacagccaggggaaccctgggatttagtgcgaaagtgtagccgatggtggttacattctgtgtgtagattctcgaaacagtccctgctgcctgccaccctggggtggagtttctaatggattaggacggacacccaatgccagcttccaagccaggaggccgctcgtgcccacggcttggaatcagggctgtggcctgggagggctctcaccagacgcaggctgcctccaggtatctgtgtgcctctgcccacggagcttctccccaggtccgcgggtccccccagtccacttctgctttcctgttagggtggggggctcatctcctggtgcgccatctgcatccttctgggctgggaacctgctgtcgggtatcaggcagggcgcacctccagggctgaaggatgcaggtggggctggcaggcagagtgtccgtggagagctccgtgtccagggaaggggacacctggaggaggcc

SEQ ID NO: 338647 - DNA, 601 bp, Homo sapiens
  chr5:1116675-1117276
  hypo
cggacactgagtcttcgctcaagttccctctggaagattccgtggatgagtccgacacactcttcccctcactcaggaggctccaggatttttagaccacgtgtgtggctttccttctctcaaagtgtaactcacataatgttactcagaatctcacacggacgcccgtgagttgcagacacagggaaggttcgcatctcctctgaagtccaagctgcccagaagcccacccaccccccgccagctctcgttcctgctccacaggtgacttctttcccgtgaagcttgggcaaatgtttgctgtcggctcagggggaaaggccatgccagggtccagatgggctcaaaacctcccaacctggcagacacgcagcccttcagaaatggaagcagagcccaggacacgatgtggccaatcctctctcagacgtcataaagagctgggtttggaagacgaggccaaccctcatggatgccgcccccgaccccagcaacaccatgagatcagggatttgctggctctgtctcagagccgcggagggtcctgctcaaaccccagagccgtggggatgggctggggggctggtggggagcgtactgc

SEQ ID NO: 338648 - DNA, 189 bp, Homo sapiens
  chr5:1120359-1120548
  hypo
cgctctcaagggcaggggagcaagcccgggtgcagctgggtgggcacctgccgtccacagggcccccccaccggcagtgtccggatcacacgaagacggcttacagaccagcaaggaaacgctgaacccggaggacaagagggcaaagacttgaactaacatggaggagcacgtggagatgccacctcg

SEQ ID NO: 338649 - DNA, 102 bp, Homo sapiens
  chr5:1120578-1120680
  hypo
ggggacaccacggtgtgctggccagatgctcacagccgctgtacctccccacacaactggaggtccgtggaatgcacggccactgtggaaaactccagacac

SEQ ID NO: 338650 - DNA, 178 bp, Homo sapiens
  chr5:1122647-1122825
  hypo
cgacggacgaaccgcattcccacagctgtgcgtccaccttcaccaccggtctccagagtcctcccaaactgaaggcctctccccagcctggcacctgccattctgcgttcggtctctacagatctgggaactccagggacctcccaggagaggatcagacagggccccgcggcatgac

SEQ ID NO: 338651 - DNA, 919 bp, Homo sapiens
  chr5:1143150-1144069
  hypo
caccacagagcttacggctccatctgtgacacgggccttccttccctgagggccccaacacagcctcctgggcaacatgcccctccatccgcagggtcagaagccgcagctcaaggatcacctgcggaaggtggcatttcccaagaccggagcttcccgacatcccgccacctcccgcagcgctggtgccagtcctgtcggataaggggcaagtgtaagaccggcctcatcagctccagcaattgtaacaaagcgccatgggcgggggcttcaacactagaaattgttccctcgcagcctgggggctggaagtcccagaccaaggggctgctgggcggtttctcccaaggcctattcatggcccgcagacggtggcttctcctgtgtcctcccacggccgctcctctgcacacacgcatccctggtgtcgctttctcttcttacaaggacacgtcctattgggtcagggccttcctcacaacctcatttaaccttaagtccctccctcaaggtcctagctccagatacagtcccgttggggctgggcctcagctgcgaatctgggggcacgactcagtcggcagctgtctgtgtcctgcatgcgcctccactgaccttcccagggttctccctgtgtcctggtgctgcttcttcacccagagcgctgccacccactgctgagcttcagacatgtgacctgcccagtcccctctgcaagccctgcaccttcctcagtaccaaccagcaaacccgtggctgcaccggggccagcagacactctcgggcagagtgctgggcaccctggcctcctgggcaccctggcgcttggcaccctggcctcctgggcaccctggcgctgggaaacctggcctcctgggcaccctggcgctgggaaacctggcctcctgggcaccctggc

SEQ ID NO: 338652 - DNA, 182 bp, Homo sapiens
  chr5:1193762-1193944
  hypo
cgtgggcgcttacctcggagaactccgggcatgaatgtgcgaaaggcaggaacagacgtccacggcggctttcatcctcatggcgcaaacgggacccctaccgtcagcaatggagccgtgaaggagctgcagccgtggacctggagcaggcacagcgagccagggtgcgaggcccggacagc

SEQ ID NO: 338653 - DNA, 984 bp, Homo sapiens; identical to SEQ ID NO: 332285
  chr5:1294715-1295699
  hypo

SEQ ID NO: 338654 - DNA, 259 bp, Homo sapiens
  chr5:1331488-1331747
  hypo
cgcccaggcctgcgctggtcggggaaggaacaccggcgggaggacggggcgagggaaccaagacaggggatgtgaggccccagccctgctcagcgcccatgagcagccgggaaggctcgagaggtccatgcatctcactctccacagcccagacccagaccccatgcacgccagagtccgcagccaggccctgagctgtgcagccgctggaggccctgagccgtgcagcctctgatggtcccaccacaattgccgcaac

SEQ ID NO: 338655 - DNA, 343 bp, Homo sapiens
  chr5:1409813-1410156
  hypo
cgaagccggcgatggtacgtacgttggtgacgcagaacagggacaggaggaaggtcgccaggacgatgaagagcgtgaagagctcacggtgtctgtgcagcagctggaactcatcgatgagcccggtgatcactgactccataccacccatctgcacacagagcacagggtcgggctgcaggctggcggcgctcctgaccgcagcctgggccaagacctacttgtcacccagtggacgcacacccggggatggacacggaacaggggccacatggccgtccagggtgcaggatgcctggtagtgaggacagctgttggcgagggcttctatggcggcacgacc

SEQ ID NO: 338656 - DNA, 373 bp, Homo sapiens
  chr5:1476334-1476707
  hypo
cggagcacaggtgctgggcttggaggtgggaatgcattcccctggctcggcgcctactcagctttttgtattgttcagagctgcctgtggtgggggttgagtggagctttgcgggacagagactgccgggcccatttctaccctcggacacatgctttgggagggagaggatgggaacgtgagggaacgggccgcccagctgaatcttcagggtgtcagcggagtgtgaacaaagtggctcggaggtcagagccaggcacactctgatgggcccggccgtggctgtgttcccctctgggctctctggagaggcgagttcccagccatgccccgacctgctgcagcaggagcctgggggtggggccggtggacc

SEQ ID NO: 338657 - DNA, 254 bp, Homo sapiens
  chr5:1551543-1551797
  hypo
cgtagctgtaggaaagcaaaacaccaaaaaacaggcacagctcatgaacaggagactcgctgagaggagacctaccgggccacggagacagggcacctgccgtgctggagctggctggggtaccgaagctgcaatgggcacccggcctggagctggctggggtaccggagctgcagcgggtgccccgctggggatggatgcacctctctcccctcgactgaggaagggagcaggtctgaccaggcctagagccc

SEQ ID NO: 338658 - DNA, 327 bp, Homo sapiens
  chr5:1553050-1553377
  hypo
cgatgctgacccagcgacacacagctcccttgtgttcccgctggacgctggcccggcggccgtggcctatagagcaggcccctcggtgcatgaagccagcacagccctggaaatcccgtgcaacaaaaagcctctgttccacccagaagagctctgagcagagagggccccgccgaggcctgccgcgacggactcacagatgggcgcctggagagagcgggctttcattaggtcagcccaggggtggggggagcagacagcactgctgggcttggcttgggaaagaggcgccccgaacccggaggaacttccaagagtttacaggac

SEQ ID NO: 338659 - DNA, 130 bp, Homo sapiens
  chr5:1641262-1641392
  hypo
ggctgtggggctgcccgccgccctcctcctcccacgctaggctgcccgccgccctcctcctcccaccctaggctacctgacccatggagaccggcctgagacagacgcatccccgaacaccaggtgcccc

SEQ ID NO: 338660 - DNA, 277 bp, Homo sapiens
  chr5:1702104-1702381
  hypo
cgtctggggccgggtgagtcctgacgcacctaaaccagcccacagcccctcagcgactcccgggcacggctcacactcactcagaatggaaggatgtggctgcttaggggcctggctgccacgctgagagctttctggtcaagccacgctagcattgagctctgaactcaagcctggagcccgatggggagctcgaacccattgtgccgatgcgtcattgaaagttacacgcgtgcccaggactggacaacaggttgaagcgatgtccgatttcttc

SEQ ID NO: 338661 - DNA, 534 bp, Homo sapiens
  chr5:1729774-1730308
  hypo
cgcggctgtgttagaggaggcgccggggcctgggtgcagaacgagtctccaagtgccgcgtgagcgagggtgggtggctggagctcccgggccagcccgggcggaggcgctgcctccagacccagcctgtgtgcagaggggctggcggagctcggacgccgggctcgctggcctttgccgatggacctcgggtgtgtccaggccgggcgagggccggcagctccagtgaggcgggacctcactctatctgtgttgtgcatcctgttcgagtttctgggtcccgatcttgagcaagccaactgacctctctgatgttggtttgctcagatgtaacgtgcggttgacagcgtctatgctggagcacgtggcggcttaagagcaataggtgaaaggggtatctcagaagacgccctcaggacacggggatgccataggcctcgggtggtggagggtgccccggctccgaagggctcctgagcctggcaggctggcacccgcgcgtgggctggggctcactctagctgttcccttggc

SEQ ID NO: 338662 - DNA, 771 bp, Homo sapiens; identical to SEQ ID NO: 254407
  chr5:1746028-1746799
  hypo

SEQ ID NO: 338663 - DNA, 64 bp, Homo sapiens
  chr5:1746829-1746893
  hypo
ctcagatccagcagggagggagacgaaaggcggatggaagaggggcccccggaccccgcccctc

SEQ ID NO: 338664 - DNA, 267 bp, Homo sapiens
  chr5:1787325-1787592
  hypo
cgcccaggctgctgggcaggctgaggctgggggaagcagagctcctgggcaggtgagtgtgagctgggcggtgcctcccggccaggcctgctctgcctgcattccccacgcagcccatggctttcccaggtgaggccgaggtaaacacaaggaaactcgctgtgcggcagtttcctttgccacgcactcttccatcagagatggcctccagcctacccccagccacctcccatcttccatatccctgtcctggagggctgcctcgcc

SEQ ID NO: 338665 - DNA, 185 bp, Homo sapiens
  chr5:1808331-1808516
  hypo
cgtcctttagggggtgtttgagacgcgggcggtgcgatgtgcgccatggctgctctccagagcttttgtgtggcttcccgcttctgcatgctcctcctcctgagcttccctcccaaatacgccatctttatagtggagtgaaggcaatcggattttaaaagaaatcttctggatggataagaacc

SEQ ID NO: 338666 - DNA, 623 bp, Homo sapiens
  chr5:1809067-1809690
  hypo
gtattctacagtgtcgatgatccagctggtggacttttcccttctgcgttggttttgatgctgtgtcacagaatcacatattttatgttttatctttaatagatgtaatctcagtttgacacaataggactttgactcctaaagatttaaacctacatatctttatgcccaatcatttgatcatcaagaggtcaatggaaagagtgtttcctattttttacattagtgacgggcgagggactcattttacagaggttggacacttcactgtgtatgatgtgccgtgtgcttaacaagagatggcgtgcgggctgctgtgacggttctcccttgattccctcgtgaagtgcagcagcgctcttcagtttttctcacctttccccaggtgaaagcaggtgagaatggagccttgagtctgaacccagagcggggctttgtgttgtggctgggtgtgttcactgccggagcttggccgtgtgaacccggagccgggctctgtgtcgtggctgggtgtgttcactgctggttctttgtattcctgcggttgcactgagctcctggagccagacgtttgctggtgatgggcggtcagggtcacccttgagctgcgcacactaaatgac

SEQ ID NO: 338667 - DNA, 2703 bp, Homo sapiens; identical to SEQ ID NO: 332289
  chr5:1874606-1877309
  hypo

SEQ ID NO: 338668 - DNA, 1917 bp, Homo sapiens; identical to SEQ ID NO: 332291
  chr5:1882899-1884816
  hypo

SEQ ID NO: 338669 - DNA, 335 bp, Homo sapiens
  chr5:1910394-1910729
  hypo
cggctgctcatgtgccgacatgccatgtcacccaggtggggatccggtcattaccacggagtggtcttgggcctctgtggaggggccctgcacctgcccaggccggcgtctgactccacatcgcgtgctctgtgggaagagcccagtggagccctgtacctgcccaggccggtgtctgactccagatcgcatgctctgtgggaagagcccagccagccacgcacaggctcctgccttgaaatatctgcgccttccgaaggagaggagaggatccaccactgggggggtcagagcccagcgttgtctctgcacgtcttctgtatacgctggaaggc

SEQ ID NO: 338670 - DNA, 295 bp, Homo sapiens
  chr5:1922827-1923122
  hypo
cgctgctgctcagggacccctcctcccattctggaaaccatcggcaaaacctcagcagaccacggggccattactgtgggctccggtttccagccactgcacttccagacttttctcttcggagccagtgggaatttagcaaatgactggatggggtctgggcaaccaggcatcacgaggcgccttctccttccactcggtggagcagggtctccagtgaatgcggcgtccacgcctgatcggggctcctgccagggcggccatgcctgctgctagagcctctgagaaaacagcc

SEQ ID NO: 338671 - DNA, 826 bp, Homo sapiens; identical to SEQ ID NO: 332293
  chr5:1931173-1931999
  hypo

SEQ ID NO: 338672 - DNA, 470 bp, Homo sapiens; identical to SEQ ID NO: 254433
  chr5:1951386-1951856
  hypo

SEQ ID NO: 338673 - DNA, 292 bp, Homo sapiens
  chr5:2007541-2007833
  hypo
cgaggaatgacaatgaatgttggagagcctctcccgcagatgggtggcacggcctcagcctgagggaaacgtgttcccatcccgctccgggggcaagtccccgccggctcggaccccagggaggtggaggcaggcaccgtccccttgtccgggtgaccctgtgtggcctccctgctaagcccgcagcctgggctggcaacagcctcgatcgggggccgggggaagcggccgagatgtggctcggaggtggcagctggcaggcggggtcctccagtgacagctgatgtgtcgc

SEQ ID NO: 338674 - DNA, 498 bp, Homo sapiens; identical to SEQ ID NO: 332294
  chr5:2038439-2038937
  hypo

SEQ ID NO: 338675 - DNA, 224 bp, Homo sapiens
  chr5:2225378-2225602
  hypo
cgcaggtgcacagcaagggagccgagtttcctccagcgcttgaaaaaaaagtgtttactttgccagcggaccttgtcgcaggagtggaggaacggcctggaagcgcacttgtgatctcagcaaactgctgaaatctgtactgattgaggaaaagtatccctgttaaaggacgcgtgttcatgtatgaaagaagtggcttgaaatggaagatcgttcttgttccc

SEQ ID NO: 338676 - DNA, 463 bp, Homo sapiens; identical to SEQ ID NO: 254445
  chr5:2261211-2261674
  hypo

SEQ ID NO: 338677 - DNA, 418 bp, Homo sapiens
  chr5:2371462-2371880
  hypo
cgggactgcgctgagccatggtgacctgctatgccaggttccttttctgcacagcgtcgctccctctgcttggcttggtcgccaccagtttactcctcctggaggtgactgggcgagagggtctcactggactctggagccacatgccgaacaccggcttctttccccgcagggaggccgagtttcctgttcctcgaactctaaatctcctctccaccgcgagcttggatgtgcagttgagtttcccactttcacctcggcagagaccacctgtgcacacgcggccttctagccaacccttccccagcaagcgtgacctccaaccttccccaggccccgcctatccctccccatcagtgatggtgcgtttggctgttagctaggagcccgattacgtaatttaccatccaggtcggac

SEQ ID NO: 338678 - DNA, 213 bp, Homo sapiens
  chr5:2412076-2412289
  hypo
cgctctggccggattcggccattctcatggaaaccaggggcccttcccagggcgcctcctcacttcatctccaagctgagaggcaattagtaggagtccgtctcagagtttctggagcctcagccatgatggcggccacctcatccccggaaaggacgtaccgggagcacagtcagaagtgaggagcagccgtggtaacaaatctcatctgtc

SEQ ID NO: 338679 - DNA, 155 bp, Homo sapiens
  chr5:2524957-2525112
  hypo
cgggatcatccgggtggaaagtcctcagtgagagtgcagcgggcagctctcgattgtttaagcctggtttcctctcactaggatcctggagatgggcttacctagaaacccaggcactggagccatggctcgcactgtcccggtctcacattagc

SEQ ID NO: 338680 - DNA, 172 bp, Homo sapiens
  chr5:2541496-2541668
  hypo
cgcatgcgtgtgcaggctctgctgtgtgtgtgtggtgtgtgcctgtgtgcacgcatgcatgtgcgggctctgctgtgcatgtctgtgtatcgtgtgactgcgtgcatgcttgcatgtgccgactctgatgtgcgtgtctatgtattgtattgtgtgccctgtgtgcatactc

SEQ ID NO: 338681 - DNA, 205 bp, Homo sapiens
  chr5:2547115-2547320
  hypo
cggtgttagtgcccaccagcctccccggtcaccctgttagcccagactttaattagctctggcgtcctcttcataatgataaatgcagagatgatgaatcgaaatgcaaatgacggtgaagtgcctcagccatcagcgctgaatatcattaataccttcccactgttaaatcgatcactgtcatccccggatgccggcgtgcggc

SEQ ID NO: 338682 - DNA, 312 bp, Homo sapiens
  chr5:3221011-3221323
  hypo
cggcgcactgtgctcctggtcctggcgcgagcatctcctttccagcctgcccggcgctagggctccatggaaccccaagctctctggcttcagaactgctccaggcaaatgcgtggcatcattcataaggaggcagcgtcttgcggtgctgagaccgagcccctggctgcttccagatgtcacttccaatgccagcccttccgcatgatagctctgtcaccaggagcgctcgggcgccttcactctgcttgcgcctctaaagcacacctgccccgcccacctggatctgctgtcaatagctgtcgggcgtgc

SEQ ID NO: 338683 - DNA, 317 bp, Homo sapiens
  chr5:3282952-3283269
  hypo
cgcacacatgggcacagacacgcacaggcgcacacacgggcacagacacgcacaggtgcacacacgggcacagacacgcacaggcgcacacacatgaacacaggcacagacacgcacaggcggacacacaggcacagacacgcacaggcggacacacaggcacagacacacacaggcgcacacacatgaacacaggcacagacacccacaggtgcacacacaggcacagacatgcacaggcgcacacacgggcacagacacgcacaggtggacacacaggcacagacacacacaggcgcacacacgggcacagacac

SEQ ID NO: 338684 - DNA, 914 bp, Homo sapiens
  chr5:3324702-3325616
  hypo
cggcgcggtggggctgggtcccaggctggctccccgccctccctcctactgtgatcccaggaccctcggccaccgcccttcctgcccaggcccgtcctgggacccgggtggccctcgtcatagaaggctgtgttgcccccagcaagagcaaagccaccgctccacgcctgcccggggaattggtggccgagcttatctgggaccactggtccacgcgatgccccgtgacgggccaggaagggttcaggcttggaaatgtcggacggggacgactctgggccttgctggttggtggagctgggagcagcttcattctcctctgactgtgtggacacagccctcaaggggagagggccgcatccctgttccccgccttcctcgccatgactggacgcagcggggcgccctgtccctgcctggagctcttccagctcagggccccatcagcgccaccaccttggactgccgccatccagggcgcagggcccgctgccccacacctgagggacacagccaggctttctgcttggcctgctgttctctacgtctcacaggcgtcttgctttccaccatgcaacttcacaatctgcccaaatgtccttttattaaaactagtcgacaaagtcccaaagccctagctgttcggcgtgtgtgtgtgtgtgtgtgagcgcgcgcgtgcgtggggttaagtgtttccataattgcatctctcttgaaaatcaaaacagaacaaaccgtgctttatgtacgagtaagagtcatgattcaacaatggggcctgcctgaaggagctgcctatttagtcacataccacagcaacctactggcttgtcattttatgatctggcacggagccgacggcgcacacggtgtcttgggcagccttgggagcccgtgacagtgctgtgaccagc

SEQ ID NO: 338685 - DNA, 130 bp, Homo sapiens
  chr5:3326328-3326458
  hypo
cgcgccgcggcgggcgctgcgtcttaattcaatgttccggcttcagagcagccgtggaagccgggccctgaagtgtgtgcacatggtcgataaactgtaataaactttacgggttcggtaacgaggctgc

SEQ ID NO: 338686 - DNA, 245 bp, Homo sapiens
  chr5:3454259-3454504
  hypo
ggacatcacccactaacacacgctcccgctagcacggcaggcgtcacccactaacacacgctcccgctagcacggcgggcgtcacccactaacacacgctcccgctagcacggcgggcgtcacccactaacacacgctcccgctagcacggtgggcgtcacccactaacacacgctcccgctagcacggtgggcgtcacccactaacacacacggcagccctggactcttctttcctggatgtcc

SEQ ID NO: 338687 - DNA, 216 bp, Homo sapiens
  chr5:3627893-3628109
  hypo
cgggtgctgcactcctggcctgtccgccggacctggacctgcagccgccatgctcaccgagaccttcatttctgcagatccgacggtgtgtggcgcctcttctcctgactcagcttctccatcgcatctggcacacttggcctctctggccccgtagcgggaaagcatgatttagatgtggcttctgggcttgcctacaccctagctgtccttccc

SEQ ID NO: 338688 - DNA, 449 bp, Homo sapiens
  chr5:3740590-3741039
  hypo
cggtgtgaggtgaccgcgtgctgtgctctgcagggccaggcctagaccccgacgtcccagtcccagtctctgtctgcccaagtgggcgggagaatctgggggagggagggagaggctgcttcccaggccgtcatcccagcacggcttcctcactgggaggacgcggcttgttcccatttctggagtcaggctgtatgggcccctccacaatcttcagcgccgcgtccctgcaggtccacatgtcccccgcgggccctcccctggtttccgatgcccatcacccaacctcttctgtgtcctcagcccggggtgggggtgcagcccctgcaggtgcctcagggtgtctgtgctcccagccctacccactgctcggtcaaaccttcacatcgccttctctcctgcgcgcagctggcggcttctatcttctgacccaccccagcgtgcctacc

SEQ ID NO: 338689 - DNA, 790 bp, Homo sapiens
  chr5:3761134-3761924
  hypo
cgctgaatgcggctctagcagctgtcgtgggccttcagagaggaagaatcttaaggcgcgtccaagacaagcggagtcgaggactccgtttcggggaggtttacctgaaaagctgtgtggaaaaacccgactgcgactttcaagcttgtgcttcacaacccaggagccgtgcattatgtccatgtgttcagatgcaagatgctcagaccccaggaaaaagggaattcggtgtaaagaaaaaaggactcttagcatggtccagtattaggacagtaacaccctgtgtgtgtgcacgtgccctccctccatctccctggcctttgcgtctctgtgtgggtgcacatgccctccctcctccctccatctccctggcctttgcgtctctgagtgggtgcacatgcgctccctccatctccgtggcctttgcgcctctgtgtgggtgcacatgcgctccctccatctccgtgggctttgcgtctctgtgtgggtgcacatgccctccctcctccctccatctccgtggcctttgcgtctctgtgtgggtgcacatgcgctccctccatctccgtggcctttgcgtctctgtgtgggtgcacatgcgctccctccatctccgtggcctttgcgtctctgtgtgggtgcacatgcgctccctccatctctgtggcctttgcgtctctgagcgggtgcacatgccctccctccatctctgtggcctttgcgtctctgagtgggtgcacatgcgctccctccatctctgtggcctttgcgtctctgagtgggtgcacac

SEQ ID NO: 338690 - DNA, 130 bp, Homo sapiens
  chr5:3781386-3781516
  hypo
cgcgcctagagtgagatgcatgatgcacacataggccaacccaccctggcagggcgatgatgtcgtgctccgtggcgtgattgccatggctttcagctgcaggcagagcccaggccaggaggaaaggagc

SEQ ID NO: 338691 - DNA, 146 bp, Homo sapiens
  chr5:3865173-3865319
  hypo
gtgactggagaaggcggtatttacaagtctactgtgggcccatattaaacttcactttgacataggctcacttctttggcagtgagagtgaaaggggtggagtgagtgtgccacgctagttggctccgggacacaatggggctggc

SEQ ID NO: 338692 - DNA, 207 bp, Homo sapiens
  chr5:3932150-3932357
  hypo
gcccggggaaagttcgtaggcaacattcatttgcacaacgagcgcactttgaaagactccagcgcaggcctgtgttcctggccgcaacaaaacacctgcttgaagcggagacaaaatgccaagctggagagagttcaaaagaacagggtgacaatcacacagtgttgaacaacagcaacggcaacccatcactacagccttttgtcc

SEQ ID NO: 338693 - DNA, 901 bp, Homo sapiens
  chr5:4144311-4145212
  hypo
cgtgatattctatgcaagcaacattcatagaagcacagcttactacatgtgttctgtgtgccgtgctcttgcgtgcacctggaatgccaactgcacagtttactgtgtcctgtgtgccgtgctcttgtgtgcatgcagaatgctgaccgcacagttactaagtgttctgtgttccgtgctctcgtgtgcacgtggaatgtggaccacacagctaagtgtgttctgtgtggcatgctctagtgtgcgcatggaatgctgactgcacagcttactacgtgtgttctgtgttccgtgctctcacatgcatgcggaattctgacggcacagcttactaagtgtgttcggtatgccacacacttgtgtgcatgcggaatgctgactgcatagcttactatacgtgttctgtgtgccccactctcctgtgcatgtggaatgctgactgcatagcttactatgtatgctctgtgggctgtgctctcatgtgcacgtggaatgctgaccgcacagcttactaagggcgtcctacgtgcggtgctctcatgcacatgcacaatgccgatggcacagcttactaagtgtgtactgtgtgctctgctctcgtgtgcacgtggaatgctgactgcacagcttactacatgtgttctttgtgccacgctctcatgtgcgtgcacaatgatgactgcacagcttactacgtgtgttctgtgtgccgtgctcttgtgtgcatgcagagtgctgaccgcacagcttactacgtatgttctgtgtgccacactcttgcctgcacgtggaatgctgactgcacagcttactacctgtgttctgtgtgtgacgctcttgtgtgcatgtggaatgctgatggcacaacttactctgtgtgttatgtttgccacactctcgc

SEQ ID NO: 338694 - DNA, 859 bp, Homo sapiens; identical to SEQ ID NO: 332304
  chr5:6448769-6449628
  hypo

SEQ ID NO: 338695 - DNA, 106 bp, Homo sapiens
  chr5:7825260-7825366
  hypo
cgctgctgtgtgccacgacaacgctgctgtgcgccacgacaacgctgctgtgcgccacgacaacgctgctgtgcgccacgacaacgctgctgtgtgacatgacaac

SEQ ID NO: 338696 - DNA, 382 bp, Homo sapiens
  chr5:9122712-9123094
  hypo
cgagaatctgagtttaatacacagcagcacaactggcgtgttctgagcggcacacctggaacagttggcgatctccatgccagggccctcgcactgccagccaccacactgcggggccgggctgtcgcaggagcgggttcgacagaggcaggatcccacggcgctgccatctgtgtgcgtgcaaggcgtccacggagaccacacaccaaagtgcccatccacggtgagattcctggtctaggaagcaaaaccaagcagaggtgtcagaaaaggttaaagctgaacacataatggagtaaaaattaaaaatccctcataagacaatcaaaactcctctagaatttgttgttgttgttgctgcagttagaaaaagggccaggcg

SEQ ID NO: 338697 - DNA, 158 bp, Homo sapiens
  chr5:9497496-9497654
  hypo
cggttcagacacaatggactggggatagagacggctatagtgccgataatggagaaactagccagagcttcagatatttgttttccaggacatctcaataattgggtacacctcacaatatgtgagacttgacgtcgagtggcacggcatactctggc

SEQ ID NO: 338698 - DNA, 87 bp, Homo sapiens
  chr5:10248604-10248691
  hypo
cgcgtaagtatgccaagcatgaagagttaacagatcaccaaccatcccatgacagtcagtcctccctgtttttagagacagaatctc

SEQ ID NO: 338699 - DNA, 176 bp, Homo sapiens
  chr5:10256093-10256269
  hypo
cggagcaattgctagaccgaggcattcacccaatcagaatagccgatggctatgagcaggctgctcgtgttgctattgaacacctggacaagatcagcgatagcgtccttgttgacataaaggacaccgaacccctgattcagacagcaaaaaccacgctgggctccaaagtgtac

SEQ ID NO: 338700 - DNA, 123 bp, Homo sapiens
  chr5:10479715-10479838
  hypo
gctggcagctgcttcgggcgtctcaccttgtgactatttcctgggcactgtgggagaggaggcctcttgcctgagctcctgtccctactgtctcctctcactaaatgcacggcacggctttgc

SEQ ID NO: 338701 - DNA, 1429 bp, Homo sapiens; identical to SEQ ID NO: 332311
  chr5:10564301-10565730
  hypo

SEQ ID NO: 338702 - DNA, 73 bp, Homo sapiens
  chr5:10702280-10702353
  hypo
cgcctggcacatggtctggtgcgcacacatactcaacaaatgctttgagcaccaaatgacatcaccggtcagc

SEQ ID NO: 338703 - DNA, 359 bp, Homo sapiens
  chr5:12794972-12795331
  hypo
cgcgtctccctgcggcagcgccgcgctgaggtgccacactgctggttccaacaccgcagccgccaccgccgccgccattttcgtggcggatgagggcccgtggctgcccttcatggctgctgtgccggcgaagaggcattctgacctccagggctgccgcaggcctcaccatgtccttggatgtgtgatgccctacggggacagccaggccgctgtggggccacccccgaaggccactggccactccgacgagcacccggcccagaccaagagccctgcaaacaaccgtcataggaagcggccaggccgcaaccaggctgtcgcagctcagaggcctccagggcggggtctgtttcctc

SEQ ID NO: 338704 - DNA, 873 bp, Homo sapiens; identical to SEQ ID NO: 332314
  chr5:14142660-14143533
  hypo

SEQ ID NO: 338705 - DNA, 453 bp, Homo sapiens
  chr5:14328256-14328709
  hypo
cgcccaatacgctagttaaaacaaagcactcaatacaccagttaaaacaacgcgctcaatacatgagttaaagtaatgtgcactcaatacgttaaaacaatgtgcaagttaaaacaatgcactacttaaaacaatgagctcaatacgctagttaaaacaatgtgctcaatacactagttaaaacaatgcactgaatacgcttgttaaaacaatgcactcgttaaagtaatgtgcactcaatgcactagttaaaacaatgcgcccaatatgctatttaaaacaatgtgctcaatacactagttagtgtgctcaatacgtgagttaaaacaatgcgctcaatacacgagttaaaataatgcgctcaatacgccagttaaaacaatggactcaatactctagttaaaataatgtaccgaatacattagttaaaatggaatatgtacagcctgtgcc

SEQ ID NO: 338706 - DNA, 274 bp, Homo sapiens
  chr5:14332870-14333144
  hypo
cggagcctcggttttccttgctgtaaaatgatacctaacacctaccttcaccgagtcgctgtgatgagaatacatgtagaaatgcctgacacccagcaggcgcttgtggtgctgtctttgcctagaacagtacgatcattcagattattcagatcttttggtgaatactagccttgtgtttacgttttgggacaagagccactagaagccaaatgcgcctgcgactttgcccttcctgcagtcttcagctgcaggaccagtttttactaaagac

SEQ ID NO: 338707 - DNA, 259 bp, Homo sapiens
  chr5:14461130-14461389
  hypo
cgctctccgtctccagcaatgacgccagtccacccgcatccgtggcttccctccagccccacatgatcggggcccagagctcgccgggccccaagcggccgggcaacaccctgcgcaagtggctcaccagccccgtgcggcggctcagcagcggcaaggccgacgggcacgtgaagaagctggcgcacaagcacaagaagagccgcgaggtccgcaagagcgccgacgccggctcgcagaaggactccgacgacagtgc

SEQ ID NO: 338708 - DNA, 154 bp, Homo sapiens
  chr5:14492758-14492912
  hypo
ctaccaaggagaggtcgttcaaattctggccagcaaccagcagaacatgtttctggtgttccgagccgccactgaccagtgccccgcagctgagggctggattccaggctttgtcctgggccacaccagtgcagtcatcgtggagaacccggac

SEQ ID NO: 338709 - DNA, 112 bp, Homo sapiens
  chr5:14681608-14681720
  hypo
cggcgagtccgtggtgataattactgtgcactgagggccacgctgttccaggccatgagccaggctgtggggctgccgccctggctgcaggacccggagctcatgctggtac

SEQ ID NO: 338710 - DNA, 867 bp, Homo sapiens; identical to SEQ ID NO: 332317
  chr5:15500076-15500943
  hypo

SEQ ID NO: 338711 - DNA, 1370 bp, Homo sapiens; identical to SEQ ID NO: 332318
  chr5:16179011-16180381
  hypo

SEQ ID NO: 338712 - DNA, 270 bp, Homo sapiens
  chr5:16794700-16794970
  hypo
cgcggagggactcctgggccatgggaaagtccgactggctgtgagccccgttacctgatgaggatgcactggttgtcgtggcgcttccacaggcagcggtagcactcgttggcgatggcgaagatgtgcgggggcagctcgcccaggtggcgccggctgtactgctccatggtggcaggctcgtacagcccggcgatgggctggtaggggttcacggaggccaggatggagccgatgtaggtctgcaagcacagagtgagacagggatgc

SEQ ID NO: 338713 - DNA, 1600 bp, Homo sapiens; identical to SEQ ID NO: 332320
  chr5:16935468-16937068
  hypo

SEQ ID NO: 338714 - DNA, 1280 bp, Homo sapiens; identical to SEQ ID NO: 332322
  chr5:17217633-17218913
  hypo

SEQ ID NO: 338715 - DNA, 628 bp, Homo sapiens
  chr5:17275369-17275997
  hypo
cgacgagaaagccaaggagaaagacaagaaggccgagggcgcggcgacggaagaggaggggaccccgaaggagagtgagccccaggcggccgcagagcccgccgaggccaaggagggcaaggagaagcccgaccaggacgccgagggcaaggccgaggagaaggagggcgagaaggacgcggcggctgccaaggaggaggccccgaaggcggagcccgagaagacggagggcgcggcagaggccaaggctgagcccccgaaggcgcccgagcaggagcaggcggcccccggccccgctgcgggcggcgaggcccccaaagctgctgaggccgccgcggccccggccgagagcgcggcccctgccgccggggaggagcccagcaaggaggaaggggaacccaaaaagactgaggcgcccgcagctcctgccgcccaggagaccaaaagtgacggggccccagcttcagactcaaaacccggcagctcggaggctgccccctcttccaaggagacccccgcagccacggaagcgcctagttccacacccaaggcccagggccccgcagcctctgcagaagagcccaagccggtggaggccccggcagctaattccgaccaaaccgtaacc

SEQ ID NO: 338716 - DNA, 337 bp, Homo sapiens
  chr5:17354400-17354737
  hypo
cgcggtcaaagtagtaagacatggacaggtaaacgcaggaggcgtagagctccaggttgatctggcggttgatggcggcctttagtcctggtggtagtcctggcgcacctgtgaggtggacgcggtcgtcatggcggcgactaaggagaggcggctgcgttcgcggtggtgactgcgcagtgctggagcggcggcgggggccttggggcagtccgagggcgcggtgaggaggtgacggagggctggctatgggcagccggccggtgtgggggacgagcgccaggttctgtccaagcactgttgaagcaggaaaccccgacgactctcgtggaagaac

SEQ ID NO: 338717 - DNA, 188 bp, Homo sapiens
  chr5:27523835-27524023
  hypo
cgcacctgctgaggatgagcccctcgaggagcggcgcggggtgtgtgggagaacaatcacgggctccggccaccgtgcacagccacgcacaccggctagcacagtggggagggcagctccaggtgcctgcacacgtgccggctgcgtgcaaggctcctgctgaaccggatgtactgcacacggcttcc

SEQ ID NO: 338718 - DNA, 71 bp, Homo sapiens
  chr5:31410355-31410426
  hypo
cgttaactataataggattatttacaatgctgccagaccatatcggaaactgcaaaagacgacatttgtcc

SEQ ID NO: 338719 - DNA, 796 bp, Homo sapiens; identical to SEQ ID NO: 332324
  chr5:31639088-31639884
  hypo

SEQ ID NO: 338720 - DNA, 1236 bp, Homo sapiens; identical to SEQ ID NO: 332325
  chr5:31854462-31855698
  hypo

SEQ ID NO: 338721 - DNA, 2064 bp, Homo sapiens; identical to SEQ ID NO: 332326
  chr5:32711037-32713101
  hypo

SEQ ID NO: 338722 - DNA, 576 bp, Homo sapiens; identical to SEQ ID NO: 332328
  chr5:33936135-33936711
  hypo

SEQ ID NO: 338723 - DNA, 1296 bp, Homo sapiens; identical to SEQ ID NO: 332336
  chr5:37839492-37840788
  hypo

SEQ ID NO: 338724 - DNA, 137 bp, Homo sapiens
  chr5:40775162-40775299
  hypo
cgattaattacattaagatacatattcaaagtatttgtataccctggaagcataagtctgaggattatgagttctgggggctcaagccaattccgtcattaataaatcacgttactgtgagcaatcatataagccgc

SEQ ID NO: 338725 - DNA, 796 bp, Homo sapiens; identical to SEQ ID NO: 282880
  chr5:41870078-41870874
  hypo

SEQ ID NO: 338726 - DNA, 770 bp, Homo sapiens; identical to SEQ ID NO: 332344
  chr5:42424338-42425108
  hypo

SEQ ID NO: 338727 - DNA, 328 bp, Homo sapiens; identical to SEQ ID NO: 332354
  chr5:43557434-43557762
  hypo

SEQ ID NO: 338728 - DNA, 215 bp, Homo sapiens; identical to SEQ ID NO: 332355
  chr5:43603571-43603786
  hypo

SEQ ID NO: 338729 - DNA, 742 bp, Homo sapiens; identical to SEQ ID NO: 332356
  chr5:49736607-49737349
  hypo

SEQ ID NO: 338730 - DNA, 549 bp, Homo sapiens; identical to SEQ ID NO: 332366
  chr5:56112644-56113193
  hypo

SEQ ID NO: 338731 - DNA, 133 bp, Homo sapiens
  chr5:61681266-61681399
  hypo
cgtgtaatacaatacttattccctctttcttttctttttccaagataaagtgaaatctttccgtgcagctctacaagaggaggaacaagccagcaagcaaatcaacccgaagagaccccgtgccctttaaacc

SEQ ID NO: 338732 - DNA, 327 bp, Homo sapiens
  chr5:67590957-67591284
  hypo
cgtttcttttgcctgcaggattatgcataattatgataagttgaagtctcgaatcagtgaaattattgacagtagaagaagattggaagaagacttgaagaagcaggcagctgagtatcgagaaattgacaaacgtatgaacagcattaaaccagaccttatccagctgagaaagacgagagaccaatacttgatgtaagtatttgaaatggaatcctatacatgaataattggtgattgctacaattcaggatgagttaatgcgttctcttttcaaaactgtttttcaggtggttgactcaaaaaggtgttcggcaaaagaagttg

SEQ ID NO: 338733 - DNA, 96 bp, Homo sapiens
  chr5:67717809-67717905
  hypo
cgagcgtttatgtgggagagcggtagagcataacgtgtctgtaaggagtcctcatgtctgtgcgagctgggctgtgttctaggctgaggagtttgc

SEQ ID NO: 338734 - DNA, 143 bp, Homo sapiens
  chr5:71714802-71714945
  hypo
cgtgcccggcccatgccaggttaatttttatactggttaatttttatatactggttatacaggttaatttttataccggggagggggagtctcgcagtgttgcccaggctggtctcgaactgctgagttcaagccatccgctc

SEQ ID NO: 338735 - DNA, 76 bp, Homo sapiens
  chr5:72236834-72236910
  hypo
gacgtatttttcttcctgttgacgaaacatgagacagcagggcctagagagaagtgaaaagaatgttaaaattagc

SEQ ID NO: 338736 - DNA, 1295 bp, Homo sapiens; identical to SEQ ID NO: 332384
  chr5:72732470-72733765
  hypo

SEQ ID NO: 338737 - DNA, 1443 bp, Homo sapiens; identical to SEQ ID NO: 332385
  chr5:72742484-72743927
  hypo

SEQ ID NO: 338738 - DNA, 703 bp, Homo sapiens; identical to SEQ ID NO: 332386
  chr5:72744430-72745133
  hypo

SEQ ID NO: 338739 - DNA, 64 bp, Homo sapiens
  chr5:73205673-73205737
  hypo
cggccggcagaggagcctgcccgcggtgctccttccgggtggccccgaggtatggaccttctgc

SEQ ID NO: 338740 - DNA, 164 bp, Homo sapiens; identical to SEQ ID NO: 332389
  chr5:73843900-73844064
  hypo

SEQ ID NO: 338741 - DNA, 181 bp, Homo sapiens
  chr5:73932104-73932285
  hypo
cgactgcatgcagccagcactgcccggtggcaagggaaggtcctatttccggcatggagaaggacgtcagtgaagagacgctgctggcgtaaaagattcaggtgagtgaggacgctgtcagcgtaggaggacttgtgaaacagatagatgttaatggagccgctgctggccctggacttgc

SEQ ID NO: 338742 - DNA, 865 bp, Homo sapiens; identical to SEQ ID NO: 332390
  chr5:74349128-74349993
  hypo

SEQ ID NO: 338743 - DNA, 62 bp, Homo sapiens
  chr5:74753672-74753734
  hypo
cgtgttagcttttctttctcaagccagactggtttttcttgggtgtatgggtataggcgcgc

SEQ ID NO: 338744 - DNA, 2324 bp, Homo sapiens; identical to SEQ ID NO: 332391
  chr5:75378679-75381003
  hypo

SEQ ID NO: 338745 - DNA, 1998 bp, Homo sapiens; identical to SEQ ID NO: 332392
  chr5:75698194-75700192
  hypo

SEQ ID NO: 338746 - DNA, 80 bp, Homo sapiens
  chr5:76327297-76327377
  hypo
cgtttatcatcttcggctttcttgtgtaagtagggacgatatataactgcttttgttggagacgttaagcagcttatttc

SEQ ID NO: 338747 - DNA, 1268 bp, Homo sapiens; identical to SEQ ID NO: 332395
  chr5:76506030-76507298
  hypo

SEQ ID NO: 338748 - DNA, 646 bp, Homo sapiens; identical to SEQ ID NO: 332406
  chr5:77268330-77268976
  hypo

SEQ ID NO: 338749 - DNA, 266 bp, Homo sapiens; identical to SEQ ID NO: 332407
  chr5:77269196-77269462
  hypo

SEQ ID NO: 338750 - DNA, 173 bp, Homo sapiens
  chr5:77291967-77292140
  hypo
cgattatggtgtggtaatagtaatccagcgatggaggccgagtcggttggaaatggattgaggtaaaataactcccgcaccatgataaatgtgaacagcgctttgctgacagatgatctaacaggtgttcataacaactatataagaggatttatttatgaccagccacagcc

SEQ ID NO: 338751 - DNA, 35 bp, Homo sapiens
  chr5:77425063-77425098
  hypo
cggtctctgatgtcgtagttttgatcatacttgcc

SEQ ID NO: 338752 - DNA, 219 bp, Homo sapiens
  chr5:78105396-78105615
  hypo
cggcacttcttgccttcagctgaagctgggagacccatcctacggtcaggctgagggccgccagagcctgcggccaggcctaacactaggcagagacgactctgcagctgtctgctcacactcactgccagtcacgcttcactccactttcctgctctgaaaatcacgtcctggcaacctgcccatcggacctggagccagccttgccctctccactgc

SEQ ID NO: 338753 - DNA, 78 bp, Homo sapiens
  chr5:79097441-79097519
  hypo
cgaaaactgtctaatgcaactgcgcatgcaccctcgctagccgcgggtgaaggggaccaagtgccagcagcatctgcc

SEQ ID NO: 338754 - DNA, 142 bp, Homo sapiens
  chr5:79598641-79598783
  hypo
cgagagcagtgatatcgtcatgcatggtgagctggcagcaggtgtggatgggcggcggagtggagagggcgaggctctgtgctcgtggggaggatgcagtcttggcttcttttgttttgtttgttttttgagatggagtttc

SEQ ID NO: 338755 - DNA, 1515 bp, Homo sapiens; identical to SEQ ID NO: 332413
  chr5:79864945-79866460
  hypo

SEQ ID NO: 338756 - DNA, 423 bp, Homo sapiens
  chr5:79911142-79911565
  hypo
cgcggggctacagaggaagacagcagccacgcctgcatatgggcttctgcactgctagcctcaaggctgccagagtgcaaagaatgccaggataatggctttatccacgtgtggccttttgacacataagctaatgactatattccaggtacaaatagttctttcccacgagctgtttctgcaggtctccaaacagacaattacccggttccacttaacagagtgactcaaggacggatctgagggctgggtcttgtgaacgcgggctgttgtcctgccctctcccagctctaacattgtgctgaaaagttaaaatacaaaacgccaaagctccccaatcccatcccacgcccctgcctgcgcagcctttcatgcattgaatgggcagcttcatgatgctgctgcgacaatagcgacaatagc

SEQ ID NO: 338757 - DNA, 112 bp, Homo sapiens
  chr5:86672217-86672329
  hypo
cgctgccagttgagccgattacagaaagggcatgccacagatgaatggtttctgctcagctcccatataccattaaaaggtattgaaccagggtccctgcgtgttcgagcac

SEQ ID NO: 338758 - DNA, 955 bp, Homo sapiens; identical to SEQ ID NO: 332419
  chr5:87436549-87437504
  hypo

SEQ ID NO: 338759 - DNA, 716 bp, Homo sapiens; identical to SEQ ID NO: 332432
  chr5:88178399-88179115
  hypo

SEQ ID NO: 338760 - DNA, 1197 bp, Homo sapiens; identical to SEQ ID NO: 332433
  chr5:88179191-88180388
  hypo

SEQ ID NO: 338761 - DNA, 102 bp, Homo sapiens
  chr5:90670755-90670857
  hypo
cgcggattatactacagtcgaggatagagggagaaactggtggaattttcagcaacttgccattccacgtctctgtctttccagatgataaggattccccac

SEQ ID NO: 338762 - DNA, 52 bp, Homo sapiens
  chr5:90672526-90672578
  hypo
cggctttcacccaatagcgcacactgccatgtcggccttcgaatgaggtagc

SEQ ID NO: 338763 - DNA, 1634 bp, Homo sapiens; identical to SEQ ID NO: 332439
  chr5:94955630-94957264
  hypo

SEQ ID NO: 338764 - DNA, 31 bp, Homo sapiens
  chr5:94982109-94982140
  hypo
cgtgaaccaccgcgcccggccttaacatcct

SEQ ID NO: 338765 - DNA, 446 bp, Homo sapiens
  chr5:96111437-96111883
  hypo
cggagctaagaccctcaggggaggccagcccgaggcatcccgcaagggaatcagggaagaacacctccacctactacctcctccgaccccagctccagctctccggctccccactgaccaacatccaaagggcaagaaagcttgatgacttggcctttacaagtcagcccctgggcatggagcaaggaagagggatgggcagcgggtctggaggggtgagccgggagagctttaacccagtcatcgtccggcttagtctcagatccaggtgttcattgttcagtagtcgactattcagagtctttcgaggagactgatgaaacagtttatgaatgataaacatggggtacagggttttggacacgggtgcttaagcataaactataaaatgagaagaataaggtactttattcttctgtggcagggaacccaacacttgggtttac

SEQ ID NO: 338766 - DNA, 169 bp, Homo sapiens
  chr5:96114516-96114685
  hypo
cgcaagatccagtgcatgtgctgagggaagaccggcaggacttgcgtagttagatgtctggggaagaaaggattcaggatgactcccgtattttatatgtccgtagtttgctctccattatgataacatctcgggctctttacttttcatgccctgcttcaggatcttc

SEQ ID NO: 338767 - DNA, 132 bp, Homo sapiens
  chr5:96121466-96121598
  hypo
cgcgactttgtgcagcgtgtattacctgacgagctgaaatgcattgttaatgagactcgcccgatcattactgctgactgctgtgtgtgttccttttaaaaggccagtcaaagagtcccatccatcatcctc

SEQ ID NO: 338768 - DNA, 70 bp, Homo sapiens
  chr5:96362713-96362783
  hypo
cgtggctacagactatttcatagcaaccatttagctatgcatattgaaaaatacctctgtatggccgggc

SEQ ID NO: 338769 - DNA, 140 bp, Homo sapiens
  chr5:98200950-98201090
  hypo
cgctggaaccaagtaagtcagagaagtggccggcaacgatgggaggtgactagatgctacgaggctggtttcaggctaagaatcttttctcctaaatgagatggaaagccactggagtgttgtaggcacagaaatataac

SEQ ID NO: 338770 - DNA, 91 bp, Homo sapiens
  chr5:98239940-98240031
  hypo
cgtcaacgatgtcactaggcacattgttttagctcagatttgagcggggggccggtagcaacatttttctctatgaaggaatctgtgtgtc

SEQ ID NO: 338771 - DNA, 1887 bp, Homo sapiens; identical to SEQ ID NO: 332443
  chr5:100238197-100240084
  hypo

SEQ ID NO: 338772 - DNA, 1938 bp, Homo sapiens; identical to SEQ ID NO: 332445
  chr5:107005346-107007284
  hypo

SEQ ID NO: 338773 - DNA, 309 bp, Homo sapiens
  chr5:107703589-107703898
  hypo
cgccagtacttgcaaaccaatgatgcggaaaggcaacgctcatccagtgacaaattggaaaatatctgtgaataaaaaacggtaccatataatatgtgctaaacattttcaaggcacaggaaaaggtttttattagttagaaaaagttaactttgtaaaaagaaaaccttcttgaataaaagaggccattattgtaagtcaccgtaagagatcaccttaaagagaaactatgatacaggagctaaaaacggactgatgttatattttctgtaagaagaggaggggaagagaacaggcatgtactgacac

SEQ ID NO: 338774 - DNA, 279 bp, Homo sapiens; identical to SEQ ID NO: 332446
  chr5:109024730-109025009
  hypo

SEQ ID NO: 338775 - DNA, 1005 bp, Homo sapiens; identical to SEQ ID NO: 332447
  chr5:110559569-110560574
  hypo

SEQ ID NO: 338776 - DNA, 738 bp, Homo sapiens; identical to SEQ ID NO: 332448
  chr5:110847638-110848376
  hypo

SEQ ID NO: 338777 - DNA, 268 bp, Homo sapiens; identical to SEQ ID NO: 332453
  chr5:114506308-114506576
  hypo

SEQ ID NO: 338778 - DNA, 497 bp, Homo sapiens
  chr5:115783187-115783684
  hypo
cgtgttgccgggagtggcgagcttgccgttgtgcatgagtggcgtgaggatggcctccggctttgggtctttggattgagtgtccccaaagaggccgctgagcttggtgacgctgctcatggagccccggcgcgagtgggtgagctccttctccttgcgctgcaccacagccacgtctttgcgccgatgatcacagacgcagtagacggtgatgcccgagaagacggcccccatgacgaaagccaggatgactgcaatggccaagagggtgacgggaaccagctggtcgtggcctttgaggtaactttcccgaatcactcctgcaatagacatcgcatatggcgttaagaaatgaaagcacaccccgaggcttgtttttgcttggcattcaccttgttaattaataacagtagtaagtgacaacagcacctctgcacaacttgtcttccaagctcagcttgccaaacattaaccaattaatcctccccaagcccctc

SEQ ID NO: 338779 - DNA, 1906 bp, Homo sapiens; identical to SEQ ID NO: 332464
  chr5:122424905-122426811
  hypo

SEQ ID NO: 338780 - DNA, 204 bp, Homo sapiens; identical to SEQ ID NO: 332469
  chr5:124084158-124084362
  hypo

SEQ ID NO: 338781 - DNA, 381 bp, Homo sapiens; identical to SEQ ID NO: 332470
  chr5:124084660-124085041
  hypo

SEQ ID NO: 338782 - DNA, 246 bp, Homo sapiens
  chr5:126213748-126213994
  hypo
cgccagcaatcgaaggtctgttttctaccgggcaggtgagatgtgttacagacaagaggaaaggcttgtgccagctgtgaggctgccagctccaaatggcctgaaccccagccacggcccatacttactagtgtccaaaagaggtaaatagtgaagagtgcgacagtgagtgcaatcagtccgacggcttccagccgactactaaagtgcaggtggtccacggcgccccgcaggcacagccagccc

SEQ ID NO: 338783 - DNA, 269 bp, Homo sapiens
  chr5:126250520-126250789
  hypo
cgtgcttcagtaaagctgtacagggcttgtgatccaggcataaaaacagacatcatttgctcattagagctaagttttcaggacgtgccccacttactgacctccactaacggcctgggtttgcgctcgactgcaaacctgaagtggcagagttcacagtagctggtgtttgaggatgacagccagtgctccaggcagctccgatgaattgtccccaaggtccctgtacattcacatggagagagcaagtcctcttggctgctgccctc

SEQ ID NO: 338784 - DNA, 2330 bp, Homo sapiens; identical to SEQ ID NO: 332474
  chr5:127872759-127875089
  hypo

SEQ ID NO: 338785 - DNA, 1872 bp, Homo sapiens; identical to SEQ ID NO: 332475
  chr5:128795584-128797456
  hypo

SEQ ID NO: 338786 - DNA, 1888 bp, Homo sapiens; identical to SEQ ID NO: 332476
  chr5:129239570-129241458
  hypo

SEQ ID NO: 338787 - DNA, 160 bp, Homo sapiens
  chr5:131037398-131037558
  hypo
cgggtctacccacctctcgtctcttactccagtctcttcaaaacgcactaccaagtgctcgtttcagcagccatatacaaaacacactgccaagttaatctccccaaagtacaacttgcaaacagccttaaagacaaagtcagaactccctggcaagcac

SEQ ID NO: 338788 - DNA, 455 bp, Homo sapiens
  chr5:131607799-131608254
  hypo
cgtggttacttctttctggacgagcggctctactgtgagagccacgccaaggcgcgcgtgaagccgcccgagggctacgacgtggtggcggtgtaccccaatgccaaggtggaactcgtctgagctgggaccctgctcccacgcctgcttcttaaggtccctgctcggccggtgtaaatatgtttcaccctgtccctctaataaagctcctctgctccaccttgaacctgtcacctggcctgccaccctcctgcgcaggccatgcatggctcccgagtacagtagtatctgcttaggtgccaggcatgtcctaggctctgggtgcagtagtgagcaggacgggtaccatgctgccctgaagggggccacagcctgggtggaaggcagacctgaatcacaacgggccagctctagtaatacgaaggtgaggtctgggatgctgcgtgcggcgcgac

SEQ ID NO: 338789 - DNA, 238 bp, Homo sapiens; identical to SEQ ID NO: 200029
  chr5:131831522-131831760
  hypo

SEQ ID NO: 338790 - DNA, 228 bp, Homo sapiens
  chr5:132083840-132084068
  hypo
cgacgaaaagtgggcgcgaggggtgggggtgatgggtgagccgctgcgccggggggcgcttactcccagcgggcatgcagaggaagggacttctcactgccccaccccccgcaccttaagcaggaggctcctgctgctgggggaccaggagtggccgctagcgaccttcctcgccccacctgctcttcttcctagcaggatgaaatctgcgacgccttcgaggaagtc

SEQ ID NO: 338791 - DNA, 805 bp, Homo sapiens; identical to SEQ ID NO: 332483
  chr5:132386973-132387778
  hypo

SEQ ID NO: 338792 - DNA, 252 bp, Homo sapiens
  chr5:132607933-132608185
  hypo
cggccatttcttgaagccaacaaccaaaggaatgagtgtttgccaagaagcaatagctcttgtaacacttacactcactgcattcttaacgcattgtttgtctgtggaaaaagcagtttgcccagcgtggtggtaaggagggcatgatggaaagccggcgtggagggagagaggaggcacgcgcgtgcagcgccgtgacgtgcatttagttacacgacggcttctggaggcccacaactgattaatatacac

SEQ ID NO: 338793 - DNA, 546 bp, Homo sapiens; identical to SEQ ID NO: 332485
  chr5:133450702-133451248
  hypo

SEQ ID NO: 338794 - DNA, 98 bp, Homo sapiens
  chr5:133820039-133820137
  hypo
tttgttttgttttgttttgttttttactgtgatggccagaaccgttagtataatgttaaataaaagtggtagtaatgatgccaggcgcggtggctcac

SEQ ID NO: 338795 - DNA, 873 bp, Homo sapiens; identical to SEQ ID NO: 332486
  chr5:133862738-133863611
  hypo

SEQ ID NO: 338796 - DNA, 62 bp, Homo sapiens
  chr5:134273891-134273953
  hypo
cgatgtcgctgccttttggtatttatcataaggcatgtctccagatccgtcattgttgccat

SEQ ID NO: 338797 - DNA, 128 bp, Homo sapiens
  chr5:134278947-134279075
  hypo
cgaagcacttgtgacttcggagcagtgtgatctgattttgaagtggttttgaaaactggggacggtatacataaggtgcaaagatcacggaaacatgaattagcaagtggggcctcagtctaggttac

SEQ ID NO: 338798 - DNA, 263 bp, Homo sapiens; identical to SEQ ID NO: 332492
  chr5:134370281-134370544
  hypo

SEQ ID NO: 338799 - DNA, 189 bp, Homo sapiens
  chr5:134524776-134524965
  hypo
atgggaacatgcgccgatcaccagtcagtgacttgggaatttttcaggaggcatattttcttacgttaatgcttttgtagattccatcgatgttcagacatcaaagggcatgcaattaataatgggcatctggagggccgatcacatgtttccgatgttaaagtggtgaacgacaggaaaatcggccac

SEQ ID NO: 338800 - DNA, 257 bp, Homo sapiens
  chr5:134579620-134579877
  hypo
cgcttgtcatgcacagccccgtcagagccggctccctgggctgaggggctgccctgtgctcctctgagtccccggccgagcgcaccgaattatgtaatgctgctgagccaacatttacgcgtctcagccaatttgctggcctagagttacactgtgcagatgctctgccttacggcttgcttttgtctcggaggccgtaagcagatagcataaccctgcttaccattagacatttcgcaaatcatctaggctcgagc

SEQ ID NO: 338801 - DNA, 391 bp, Homo sapiens
  chr5:135091190-135091581
  hypo
cgctatggtattaatgaaatatcactgtggtatttatcatatctaatgtcaacacactatggtgttaatgaaatatcgctgtgatatttaccatatgtagcgtcaacgcactatggtattaatgaaatatcgctgtgatatttatcatatctaatgacaacgaactatagtattaattaaatattgctgtggtatttcttatatctagtgtcaacgcactatcttattaaggaaatatcgctgtgatatatatatatggtcatacgtagtgtcaatgcactatggtatgaatgaaatatcgctgcgacatttatctcatatctaatgtcaatgcagtgtagtattaatgaaatatcgctgtgatatttatcatatcatatttagtgtcaac

SEQ ID NO: 338802 - DNA, 145 bp, Homo sapiens
  chr5:135188298-135188443
  hypo
cgtctacaactccgtggtgtttggggtcttcagtaacacgcagcggttcctcagccagcaccgctgcggggagccagaggccagtcctccccgcacgctgtcagacctgctcctggccagcatggtggccggcgtggtctctgtc

SEQ ID NO: 338803 - DNA, 1147 bp, Homo sapiens; identical to SEQ ID NO: 332506
  chr5:136833998-136835145
  hypo

SEQ ID NO: 338804 - DNA, 102 bp, Homo sapiens
  chr5:136983271-136983373
  hypo
cggtccctcgggccagggcaggaagcgagagtctctcttaccctggtgcgtggggccgcagggctaacaccaacaattcatccgatggagcatgtcgaggtc

SEQ ID NO: 338805 - DNA, 196 bp, Homo sapiens
  chr5:137895663-137895859
  hypo
cgtgacatcgccggccaacacacctccctgaatggcagctccaatggccacagcctcatcaggattgacagctttacttggggctctgccaaaaagatcctgtacagtctgctgaacctgaacatcaaggaaaaagaacctgtcggcccacacttgggaactacctgagcagaacaaaagggagcacgtgtcctac

SEQ ID NO: 338806 - DNA, 118 bp, Homo sapiens
  chr5:137912556-137912674
  hypo
gagccaccgcgcccaacccagttttagatttttaagaagaggaattaattgattcaacagatatgttttggcatgcctaccgtgtgtcagtcactctcccaggtggtaggaatacagc

SEQ ID NO: 338807 - DNA, 469 bp, Homo sapiens; identical to SEQ ID NO: 332510
  chr5:139088846-139089315
  hypo

SEQ ID NO: 338808 - DNA, 211 bp, Homo sapiens
  chr5:139113843-139114054
  hypo
cgaggggtatcccggggtgagtccgtgagtgtgcatttgggtgaggacgtgattctgggtgtgaggggtcttgcttgagcgcttgagcacatgagcagcccctagcctgctcagaacagagcactgctgtctctgctgcgccaacaacgaggcctctctgtctcagcgcataatgtcccctctgtattgtctgctgcatcgctgtggtgac

SEQ ID NO: 338809 - DNA, 276 bp, Homo sapiens; identical to SEQ ID NO: 332516
  chr5:139554306-139554582
  hypo

SEQ ID NO: 338810 - DNA, 127 bp, Homo sapiens
  chr5:140905588-140905715
  hypo
cgtcttcactcctcacctgcattcatgtctatgagttgctctctcttctgctgcttctctagccgctccttctctgccttctccttggctagttttgctcgcctcatcttttcttctgtctcccgcc

SEQ ID NO: 338811 - DNA, 689 bp, Homo sapiens
  chr5:141248116-141248805
  hypo
cggagggggcctctcacctggatgaccgagtggcctatggggctattctcagatagttcggcctcataggagggccgctcaaacttgggggcgttgtcattggtgtcaagcacggtgacacgcagcagggcactgctggcgcgtggggggctgccgccatcctgcaccttgatggtgaggtcataggagtcccagcgctcacggtccaggttgcccatcacaatgagctgtggttgcttctcctcctggtcctctgccacctgcagcccaaatagctcctgggcctcaggcccagcctgcagctcataggatgccacaccgttgggaccagcatcacggtctgaagccagcgggatggggaagagtgagccgatgttggtgttctcagggatggccagagtgatgactggtgaggcgaagttgggtgtgttgtcattgatgtcttgtacttctatctggccctctagcagccgggggctgccattctgcacgaggtctgtgatagatacctcaaactccaggatgcagggatcaccagggagctggttctggcattcacggagcccctcacggtcgatggaggtctcggtggtgaaaatgtcacctgtcttgccatccacgcgaaggtacggggcacccacctctagcttgtacaggtgccccacatctggaaaaccatagtcggctgc

SEQ ID NO: 338812 - DNA, 65 bp, Homo sapiens
  chr5:141355864-141355929
  hypo
cgcatgtgcgtgcatgcacgtgcatgcacacacacgcacaaaacagggacagattaactggatgc

SEQ ID NO: 338813 - DNA, 175 bp, Homo sapiens
  chr5:142625544-142625719
  hypo
cggtcatgccaagtctcagtgccccctccgcttcaggggcttagaccgccacttggaatgcgtgcattctggcaggtgcggtgcatgcaggggtcagacccctatggtttgatgagataagagcctcctgcacagaatctcattttttctccatctgcaccgccatttgggcctc

SEQ ID NO: 338814 - DNA, 1481 bp, Homo sapiens; identical to SEQ ID NO: 332528
  chr5:142781722-142783203
  hypo

SEQ ID NO: 338815 - DNA, 1697 bp, Homo sapiens; identical to SEQ ID NO: 332529
  chr5:142783607-142785304
  hypo

SEQ ID NO: 338816 - DNA, 201 bp, Homo sapiens
  chr5:145887336-145887537
  hypo
cgcaggtcagtgtgtaatattatgtacctatgtgctgcagtttgactccctaagtaaaagtgagttgtatttatgttttttattcatgtcttttcaaagattaccttaacatccacgtggaaagaagtaaaaaaaatcattaaggaagatcctcgatgtattaagttctcctccagtgacagggtaagaggattttgtgtc

SEQ ID NO: 338817 - DNA, 393 bp, Homo sapiens; identical to SEQ ID NO: 332537
  chr5:148206075-148206468
  hypo

SEQ ID NO: 338818 - DNA, 1151 bp, Homo sapiens; identical to SEQ ID NO: 332539
  chr5:148650971-148652122
  hypo

SEQ ID NO: 338819 - DNA, 87 bp, Homo sapiens; identical to SEQ ID NO: 332540
  chr5:148724812-148724899
  hypo

SEQ ID NO: 338820 - DNA, 100 bp, Homo sapiens
  chr5:148821027-148821127
  hypo
cggaaggtcttagagcaggggtcgctgaccaagtcgtctcatgtagaagtgggatctcggtccctgcggcccacccgcttcctgagccatcgttgaggac

SEQ ID NO: 338821 - DNA, 413 bp, Homo sapiens
  chr5:149323779-149324192
  hypo
cgttagcaatcttcttagagtgtgcgacatggcccacgatgcccatgtccaaagggaagacgatctcttggtcgggcatcaccaggcagtcctcgaggacagcatccttgtggacattgaaaagcctggtggccagctctgcgatgccattgcgggtccggtacatgaacaggctcatgcggtctgcctgcaggaggaagcacagcttcttcatgacattgaagatgcatttctctgtctgtaaattctcctgaaagtcccgcaggagatcaaagatgatttcgctctcctccatgctgctcggggagtggtagttgctgaagtccacggcagcctccttggccccaaggaggtcggagatgagcttggcccggtagtggaggttgtagtactgtttggcaaagccaatattc

SEQ ID NO: 338822 - DNA, 66 bp, Homo sapiens
  chr5:149375694-149375760
  hypo
cgctcctcatccttttccgctggggtcccacggatgcctcccgcaccttttcttcaaatttggtgc

SEQ ID NO: 338823 - DNA, 195 bp, Homo sapiens
  chr5:149810733-149810928
  hypo
ggtggacttgggcacgtgaggtcgccggcgaagctgacaagagcaggcttgtgaactgcttgaggatgggtggagcagcactgggagcagcggcaggaggtgaggcagtggctggacaagatgcagccccgggtgcgagcatgcttgtccgcagagggagtgactccgtggggagggagagccaatgatgctgac

SEQ ID NO: 338824 - DNA, 186 bp, Homo sapiens; identical to SEQ ID NO: 255227
  chr5:150911166-150911352
  hypo

SEQ ID NO: 338825 - DNA, 705 bp, Homo sapiens; identical to SEQ ID NO: 332548
  chr5:151150205-151150910
  hypo

SEQ ID NO: 338826 - DNA, 108 bp, Homo sapiens
  chr5:153785974-153786082
  hypo
cgcagaaccacagagatgcctgaatcaggtgcggccttttattatggtgactaacaaccctcaattacttgcagaccacatttaaaatatttgttcagtgggccgggc

SEQ ID NO: 338827 - DNA, 225 bp, Homo sapiens
  chr5:154209748-154209973
  hypo
cgagccagactcagggaacagtgggacccacttcccggcgctgtgcaagtcagagttccttgtaagcagggtctgggcctcacttatcatggatttgccctggtgcctttcactattggtcgaattgagtatttcggaaggagaacttgtttaaaagacagccaccgcccacacattcagaatccatactatccgtctattacagtggagttatccattgttttc

SEQ ID NO: 338828 - DNA, 67 bp, Homo sapiens; identical to SEQ ID NO: 255238
  chr5:154318107-154318174
  hypo

SEQ ID NO: 338829 - DNA, 79 bp, Homo sapiens
  chr5:156485569-156485648
  hypo
cgtctcaaaaaacaaaacaaaaaaaaagaaaagaaaaggaaactggaagcagagaaccagcgtggctcaatggcagcac

SEQ ID NO: 338830 - DNA, 76 bp, Homo sapiens
  chr5:156558383-156558459
  hypo
cgctatgcggagatgtgtattatgtttaccattgttaaggaaattgagttttatggaagttttttcttttttgaga

SEQ ID NO: 338831 - DNA, 116 bp, Homo sapiens
  chr5:156811500-156811616
  hypo
cggaggacagaaggtggcctctcttctggcaaaacatggtaagtatttttggagcacgatgcaaagcctcatctgcacagacgtcatgctgaggaagccaccccagcccggccccc

SEQ ID NO: 338832 - DNA, 225 bp, Homo sapiens
  chr5:156895577-156895802
  hypo
cgatcagactctccagggagagagcgtatggatcaagattttaaggaatgctggtctgggattctccagcttgttgcacacggaattattcgtctggaatggagatggtgcttctgcgccatgctagcctcttttctcccttcgtttcctagtggctgctggagaagttgccaactttggagcctacgcatttgcacctgcaacagtcgtcacgcctctgggagc

SEQ ID NO: 338833 - DNA, 1322 bp, Homo sapiens; identical to SEQ ID NO: 332556
  chr5:157001782-157003104
  hypo

SEQ ID NO: 338834 - DNA, 135 bp, Homo sapiens
  chr5:158139227-158139362
  hypo
cggcagagccgtatccgttcatgctcgtggtgacggagttatagttggtctgctggggagtggtgctcggcacgtacccgtgtggtgatacgctgcttgagttgcgggtgaaacctgaggggcgggggcaaaacc

SEQ ID NO: 338835 - DNA, 222 bp, Homo sapiens; identical to SEQ ID NO: 222730
  chr5:158526150-158526372
  hypo

SEQ ID NO: 338836 - DNA, 629 bp, Homo sapiens; identical to SEQ ID NO: 332561
  chr5:158527374-158528003
  hypo

SEQ ID NO: 338837 - DNA, 1196 bp, Homo sapiens; identical to SEQ ID NO: 332562
  chr5:158634816-158636012
  hypo

SEQ ID NO: 338838 - DNA, 584 bp, Homo sapiens; identical to SEQ ID NO: 332563
  chr5:159343216-159343800
  hypo

SEQ ID NO: 338839 - DNA, 168 bp, Homo sapiens
  chr5:159489238-159489406
  hypo
cgtcggcagtttgaatatttgcagtcttagcttggaatggtctttctgcactagagggaaacctcctttagtgcagaccagcctaaagccaagccattgctgcctgaggaagctgccatctctggagcacggtgacatgccaccaccctggacctattcccatccccc

SEQ ID NO: 338840 - DNA, 58 bp, Homo sapiens
  chr5:159659095-159659153
  hypo
cgggtccagggatctccagcgatgtaatcgaaaaggcccgcaacttcaagatcgtcac

SEQ ID NO: 338841 - DNA, 435 bp, Homo sapiens
  chr5:159691947-159692382
  hypo
cgaaaagagagagagaaatgttactataatgaactcccttgaatgttattacccagtgccaacagtcatcagcatttacactgcctttaaaaaagcccgaaaacttaaaacaaaaaggtaaccagcacagaacaaggttctgtagaaattcagcattctctcattcctgttgcccaggcttgagcgcggcccacccccaactagacagaccgtgttctgcactgtgccccacgaatgcccccaaaagtccttcatgcgtgggaagatgcctactgatggacccattcagggctacctgctgccctttcaggtgcttaacccaggctcagagattaggccaaagtttcctggctaaagagaaacaggttttaaagccacagctggctacttttcttccctaaagaaatgcaatgccggccaggtgtggtggctcac

SEQ ID NO: 338842 - DNA, 398 bp, Homo sapiens
  chr5:159707402-159707800
  hypo
cgctcagtgaaggatgaacatataagacgtgcaaagatcgtcaaaatgtaaagtgatttggaagcagccaggcgcactgagcgggaggagaccgcacaagcgcggaggaagacgtaggttttcgcttacttgcaagcaggaggcaggagacggccacggtgtagagctgcttggaggtggtgacgttgtagcgatccatgaagtggtccagcaggtagacggccaggtgccgggctgcagggcagagctggcagtggctgctcagcagggtcaggatgtccacgaagaaccggcggctcttcaggagtggggagtgggctcggaaggtgggcagcttcagttcctggaggacaggcggggcggaggggtgacggtcagggctgcctcctgagagtctc

SEQ ID NO: 338843 - DNA, 567 bp, Homo sapiens
  chr5:159776168-159776735
  hypo
gcatgtctatacctcgttggggtcatcctggtcggcatagattaggaagcccgtaaagaggctgtctgtccagtaagggtcatagaagagcccgttctgctctgagtagaagatctgcagccaaacttcgtcaccctgcttgagagccaggatggtggagcctgaggccacatcgtggttgccggtgttggcatcaaaggtccggatgcggtactggccgttgtgcaccaggccgatggccaggtgcttgttggccagcgtgatgtcgtaggtgaagtagtagatcccaggcacgccgcagacgaacttgccgctggaagcattgtagtggccaccctcgttcatcagaatcttgtcaaacttgatgggcagccgctcccgtgggtagctcttggtcactgccaccgagaaagctgacttggtatggccactgccacagctgcaggggcctgggaggcctggctcccccttcttgcccttgggccccttcttgcctggtgtgccatgcttcccgggggtaccgttgacccccttggggccacgggggccagcccgcccaatggcccc

SEQ ID NO: 338844 - DNA, 881 bp, Homo sapiens; identical to SEQ ID NO: 332567
  chr5:160974516-160975397
  hypo

SEQ ID NO: 338845 - DNA, 196 bp, Homo sapiens
  chr5:168112681-168112877
  hypo
cgggacacacctgcagggagatgttggcctggggtcggaccttggcggaggccagttccacgtaggagtctttgcccacgaagttgacagtgatgagcttctcgcatctggggccggcgaagcctggtgggcagcggcaggtgggctcctgctgcaccacgatgcactgggccccgttctggcactcgtactggtc

SEQ ID NO: 338846 - DNA, 214 bp, Homo sapiens
  chr5:168189525-168189739
  hypo
cgccgaggttggacttacaggtcggtgacatattcagggaggtggcttgggatgcggaccagcttctggttggagcagtccacaatcgtgccctcacagcgacacttctcggggcacacgaggtccatgaagcactcgctgctgaacctgctgcggtaatcctcggagcctgggaggggccaaagaggggacgtcagcgtcacccgagttccac

SEQ ID NO: 338847 - DNA, 304 bp, Homo sapiens
  chr5:168195091-168195395
  hypo
cggtgctccagagcagaggagaggtgtccagcggtggtggcggcggtggcgggccatgctgcaggagagcacggtgctttccgcggtgcttgacagaaccatgttccgtttccatcgttccaccacatggttagatcaagcacaaaggaaagccccgcagcgactggtcagagtcaaggtcaggaagcagcgtcagagagaggacaggagcgctcagaggaagcagcgtggagaagcggaagccggagcaggcccccactgagcgtgattagtatcaggagtggggttccactggaacacttcc

SEQ ID NO: 338848 - DNA, 144 bp, Homo sapiens
  chr5:168284824-168284968
  hypo
cgctccacggaaaaccaccgagcttaaaagccctcaacggtgtgcctatcaggtagagattcacgtaggagttcttaggcgggacaagactggctctccagcttctggatgcatacggggttagacacaaggtgtcgggccacc

SEQ ID NO: 338849 - DNA, 795 bp, Homo sapiens; identical to SEQ ID NO: 332569
  chr5:169063996-169064791
  hypo

SEQ ID NO: 338850 - DNA, 615 bp, Homo sapiens; identical to SEQ ID NO: 332570
  chr5:169930891-169931506
  hypo

SEQ ID NO: 338851 - DNA, 687 bp, Homo sapiens; identical to SEQ ID NO: 332572
  chr5:170171114-170171801
  hypo

SEQ ID NO: 338852 - DNA, 250 bp, Homo sapiens
  chr5:171471000-171471250
  hypo
cgggggccagcacgcatcgcagcctggcagtacagcctgtgcttttccatgcctccggtgccaacaccccgcacgtgccacaccaactgctccacctaacatgctcagtggcacaggctcaggcagcaaacgtgttccaacccacctgggcagaagaggccaggccagcagaccaagtcctgtgtgtacgcgtatgtgtgtgcattcacacccatgtgcaggaagggggacgcgagatggcatgaaacac

SEQ ID NO: 338853 - DNA, 293 bp, Homo sapiens
  chr5:171478667-171478960
  hypo
cgagggacgttgcaaaggggctagtgacagagaagaaacccagcagaaggtgggcctaggaggacaaggcaggcgaggaagagagtgactggcagcactggctgccaccaggaggtcaagtccagccagccgtatccatgcgagtcagccaccaggatgttggtattgaccatgccagcagcggctgcagtgggctgagaaaggaatttctcagtgggtggaggaagaaattgtgacagggcttcgcagagaaagagagagacagggcagtaaagaaagatgtgggactgagc

SEQ ID NO: 338854 - DNA, 262 bp, Homo sapiens
  chr5:171523262-171523524
  hypo
ccacatgccatcttacgttacctgcagcgtgggagtctgcaacctctgagctggcaataaattgcctgagccagagtcctggccttccctgcccctcccacaccagcagggccagctgagatcctgtcctcccagcccccgctaagccccactctccctggccttacggaggcggcatccacggcgtcctcctcttccccctcatcccggccgtcttcgatctcttccatcacctcggccttggcctcagccaccagctccc

SEQ ID NO: 338855 - DNA, 194 bp, Homo sapiens
  chr5:171533446-171533640
  hypo
cgaagggcccgggggggctcagaaacgcctgaagacccccaggccccaacctctcctttggagctagcagcaccaggagaacgctaccactgcacctccccagccccgtccaccacatattccagccctaatcccggcgcaggcaccccggcaggtggccctgcccctgcccctcaccacttagagggcgtgag

SEQ ID NO: 338856 - DNA, 45 bp, Homo sapiens; identical to SEQ ID NO: 210445
  chr5:171724015-171724060
  hypo

SEQ ID NO: 338857 - DNA, 465 bp, Homo sapiens
  chr5:171766390-171766855
  hypo
cgggctggagggatgtgtttggctggcatcatcggcaaaatcacgcccggaggcttgggagtggggccccggagctgctccgtcctctgccgctcccgctcccgctccagcagctccccctccgacttgatgatggattctttccgcggagggaggctgggcttctcctccatgtcggggtctgagatctcctcgtagcctgctgacgcagacatgtctgaagatgccttcctcaggacatccttactgcccttccagtctttagaccatggcaaccccgagtccatgacaccatgcggtgcgtcaggcaggggccgggaggggcccgtggcttcgctgcccgtgttgttctccagcgctgctgcttcccccagccggagctgggtcacctcgtggggcaggggagccagaaagttgggtctcgacgcgttgctcgtcttcttgtacttgtcaatgaaggtggcc

SEQ ID NO: 338858 - DNA, 121 bp, Homo sapiens
  chr5:171859487-171859608
  hypo
tgcacgttgggtgacgcaaatttttcaccgctctgcacgtgcccatgtccgaaaatgcccacaaaagtgcttcgagtatcgcttttgagttacaaataaattttagcaagtaggcaaattc

SEQ ID NO: 338859 - DNA, 306 bp, Homo sapiens
  chr5:171916875-171917181
  hypo
cgggccagctcagctggggcataggcacttgaggtggccaggccagtcacaagtccaccgtggagtggggtcagtcaatttccctgactgcctcaaggacagtgggcggcaaaagccctgcgcccctgaggcaacaggaacatggagccttctccgtgtgcccgcgaggttggaagatgaagcgggtgtcggatcataggtgaggatggaggctcctgcgtccacacgcaccccacagtcgggctacctgacctggggggagaggtgcaactaccccagtgctttaaatatcaccctgtggtggcc

SEQ ID NO: 338860 - DNA, 108 bp, Homo sapiens
  chr5:172191069-172191177
  hypo
cgttgtctgatgcgcgcccagggtgtcactttggtgaggcagcccacttttgtgggcgctcaagcacgagcgcccctccggagcgctccagagccactccggaggggc

SEQ ID NO: 338861 - DNA, 413 bp, Homo sapiens
  chr5:172353789-172354202
  hypo
gcacagcagacgcacgcacgcagtggataccagctattaccattattgttgctctcatcacagccacatcatcatccttagttgaactaattacctaagatcccacagggagctatggcagaaccaggatctgttctgcctccaggtcgcaccgtgagaacaggtctgtgggtggcccagtcagctgtgaccacatggctgcctcccccacacctcactctcctcctgctcagactcctcccatcgatagtggctcctcctagagtcctcgccctccttagctccctggcaccttggcccagatcaaagagaaccgcacatctccacacgcagacaggagagcacgcatacctttcgtgcacaccaacacacatgagctcacatggccccagacacgtgcacagaatgggccc

SEQ ID NO: 338862 - DNA, 291 bp, Homo sapiens
  chr5:172461494-172461785
  hypo
cgttaacagcacatttgaatgccttattctacaatgcagcgtgttttcctttgccttttttgcactttggtgaattacgtgcctccataacctgaactgtgccgactccacaaaacgattatgtactcttctgagatagaagatgctgttcttctgagagatacgttactctctccttggaatctgtggatttgaagatggctcctgccttctcacgtgggaatcagtgaagtgtttagaaactgctgcaagacaaacaagactccagtggggtggtcagtaggagagcac

SEQ ID NO: 338863 - DNA, 898 bp, Homo sapiens; identical to SEQ ID NO: 332582
  chr5:172659536-172660434
  hypo

SEQ ID NO: 338864 - DNA, 940 bp, Homo sapiens; identical to SEQ ID NO: 332584
  chr5:172665306-172666246
  hypo

SEQ ID NO: 338865 - DNA, 224 bp, Homo sapiens
  chr5:172724564-172724788
  hypo
cggcttctccgctgcccactcccgcctggtcattccgtgcaggggcatctcctgactgctcttcgcaacaaaccttgcaattttctgtcttgaatctgtttcctgtgaagcccatcgaagaccactgccttctcgggcaggcctccactgccagctccagctgcctccccaccgtgagtcccctggcctggggacagatacaggctcattcccgagtagcctcc

SEQ ID NO: 338866 - DNA, 501 bp, Homo sapiens
  chr5:172744598-172745099
  hypo
cgaggataacgcgggcgcgctcccttgagtacgtgtaagtgcagaattcaccaggcacccctgagaccccacggccccaggggtctccatctcacctgtccgttccgcgaacacacacctcgatgaagtccacagtccccacagaatcctgcgtgtgacatcccccctctctaatggtaaatgttttggaatgtccatagataagaaaatggacggcgtggaggaaagatttcgtggccaggcctttcatttcacctccggatatcagaatactcagactgttcgtcttcccactcgctgcttccggaaggtccctgagccccaaggcccccgactctgcctcgggcatgggcgtttgggtggctcttgctacctcgctcacccttggcacctcggccagtctccctactgctgggctctgggaggtgatgtcctgcttccccgtggtgggccctggagagcttggttctgtccacctggggctggcgctcggggggcgcc

SEQ ID NO: 338867 - DNA, 308 bp, Homo sapiens; identical to SEQ ID NO: 332595
  chr5:174220739-174221047
  hypo

SEQ ID NO: 338868 - DNA, 762 bp, Homo sapiens; identical to SEQ ID NO: 332596
  chr5:175084709-175085471
  hypo

SEQ ID NO: 338869 - DNA, 920 bp, Homo sapiens; identical to SEQ ID NO: 332598
  chr5:175298515-175299435
  hypo

SEQ ID NO: 338870 - DNA, 93 bp, Homo sapiens
  chr5:175578331-175578424
  hypo
cgctctgtcgccagtgctggagcgcagcagcacgatgctagctcactgcagcctggacctccggggccaccacgcctggctgatttttcaaac

SEQ ID NO: 338871 - DNA, 211 bp, Homo sapiens
  chr5:175777496-175777707
  hypo
cgggagcgagactaactccacagcccccaactaactgagctggtaacttcaaaaccacagccacatttcaagccatgaacactgaaggttttgttttttcaaagttcctaagagcttacgtggagtgcttcggccactcgaaggtacttggtctcctcggtggtgaggcccttgtggggtgtgtagccagcatctctcagccctgcctgtc

SEQ ID NO: 338872 - DNA, 985 bp, Homo sapiens; identical to SEQ ID NO: 332599
  chr5:175792171-175793156
  hypo

SEQ ID NO: 338873 - DNA, 616 bp, Homo sapiens
  chr5:175831167-175831783
  hypo
cgccacatagtagctaatagggcccaaagtcacttctgtgacgcatagtttgtgtgcctgcttgtcttcctctcaagacaagactagagactgggtccccagctccggttgcccccaggtctcatggcccgccttcctctgggacgcacccccacacaccaccctcagctcgcctaggggctgggtcaggagtttgtgagaagcgtccggggctgcagagcacttttttccacagccctttggggcagcggagcggagcctctaattcgcattttacaaatgagaagccaggctcagagtagttaagtgactagcccacagccagccagctgggaaaaagcagaaagtgaagtccaggtcttctgactccatctaaacctccgctgcagcctgcagtctgggtgtgggaacagccttaaggaaactcagcccccacggtgtcctgccccagtcccaaggtgccaagcctggccaaactgggcccacatctccgccacctgccaccagctgcaaggcccactgatgcactctagtgggggctatgcagggctcacccgaaacctttggcctctcctggcacgtccctttgtgcagcaggtcccgggctccggtgaac

SEQ ID NO: 338874 - DNA, 254 bp, Homo sapiens
  chr5:175832699-175832953
  hypo
tggagggcacgggacgagcgctggacactccatcagaggggctgggctttacatcccccttctgccactcactggactcgcgacctttgagaagtcccttccctgggcagcttggctttcaaacctgttaaatgagtgacaatatcctactaccggtgggaagtgaggcttacgagatgctatggtaacactctgcagcccatagagggcgtgtgcgtatgagggacagcatggctgctgtggcctgctgttcc

SEQ ID NO: 338875 - DNA, 77 bp, Homo sapiens; identical to SEQ ID NO: 255367
  chr5:175971759-175971836
  hypo

SEQ ID NO: 338876 - DNA, 892 bp, Homo sapiens; identical to SEQ ID NO: 332602
  chr5:176056921-176057813
  hypo

SEQ ID NO: 338877 - DNA, 150 bp, Homo sapiens
  chr5:176225713-176225863
  hypo
cggggagccgcgcggggcaggagccaggcccacagacagcaagcagcgttctgcttggctgatccacgatgtcggggctgcggcatctccgcttccgcccggagagtgacggcgtccgcaagctcatgcgaggggggttattttactaac

SEQ ID NO: 338878 - DNA, 395 bp, Homo sapiens
  chr5:176558657-176559052
  hypo
cgccaaaaatggcctttctcccaggtgggctcaaagttaacagaaggcagtgagtaaacagtccactggggcaataactatgcacatttactaagccatgggaagaatagtagtcacgtggccctcgagggcggtgccctcagcttgagatggagttaactccaaatctaatcacagaaggctttctggaggaggcggaatttttatggcggccggatccggctttctctgaacagcgagaaggcgcttagcgccctagggaccaggtaactcctgaggtgagcttcttggtggggatcaagcccagggggcgacggagtccgggctgggggaagggcccgaggggctggagtcgcaagttcaggcccagcttgggctccctgtcccgcccttcc

SEQ ID NO: 338879 - DNA, 709 bp, Homo sapiens; identical to SEQ ID NO: 332605
  chr5:176559896-176560605
  hypo

SEQ ID NO: 338880 - DNA, 59 bp, Homo sapiens
  chr5:176596473-176596532
  hypo
cgttgtcaacttcccatggccggctactactcctcatcttcaagggtctcgcctgcttc

SEQ ID NO: 338881 - DNA, 50 bp, Homo sapiens
  chr5:176663899-176663949
  hypo
cgaacacggttcactgcagccttgacctcctgggtttaagcaatgtttcc

SEQ ID NO: 338882 - DNA, 87 bp, Homo sapiens
  chr5:176698049-176698136
  hypo
agtataaggaataccgcaggtctgagcctgcctaagctctgagattctgccttaatcagggggtttctaggtgcctctgacttcttc

SEQ ID NO: 338883 - DNA, 315 bp, Homo sapiens
  chr5:176764115-176764430
  hypo
cgcctggcccggcccactcaccagacaggtcgccggtgccggcggaggccccgaagtagtagccggtgggcaggcgcactcccgtgatgtcaatgcagttcttccactcgttcttgtcctccaggtcggtcatcacctgcagggcccagcacgctaagcacctcgcaggacagcagcctgccctcctgagcctctgtgggaccagcacagggccaccagctgccacccccaccgcctagcctgctcaccgtcagacggccccgggagtagcgcacagccaggaaggtgtcgtgatcgcggttgcggaagtcagcc

SEQ ID NO: 338884 - DNA, 717 bp, Homo sapiens
  chr5:176794807-176795524
  hypo
cgcaagtccttccgccggggtgagggcaggagcgagcaacagagatgtggggaaggcgggagtttggttaaatttggggagtgcccccttcctcctacgtggcccacagtctgtaagtctgtgaaaattgaaacccaggtcccagtgaccaccacactcccctgggtggttcgggtcttgggctagacctcagacgtttggaaatctccaacggtggtgtcgctcccagggatttacacctgggcccctgcaggatggctccaaacaaggcccaccagtggggaacaggcttccgcagaggatgggtgagggcggggggctgttcgcgttcatcgctccctcttcactagagctgggcgggactgcaaacgccgccttgcgccgagagtctcagggctccctcaactcctccgccagcctggaccttggcttcctagccttcgtcagcagcaaatctgaggtgagccgactgttggggaagacaagatgctctatgggctagagtcactactcaggcccatttacgtggtggccctcattccaagttgctgtccttactgcgtctcccagcttgctctgcgtagccaacccttcagcctccttacttgtctcactacattggtccccatatatgtcatgggtacacatcctcagttggcaaatgtgtgcacatgtgcagcacccaggtgtgtatacacagcacgtgtgtgggaatca

SEQ ID NO: 338885 - DNA, 130 bp, Homo sapiens
  chr5:176901651-176901781
  hypo
cgtccacagcgcttagaagccttttccaccactacaaagcctccaacctcgacctccctgagcaaacttcacctggtcccaaccgcaccgcggaggaggaggtggttctagccaggcctccgagttctgc

SEQ ID NO: 338886 - DNA, 176 bp, Homo sapiens
  chr5:176911117-176911293
  hypo
cggatgggcgtcttgcaggcagcacaggtaaagcagtgcacgtgccaggtcatcttcagggcgtgcatgatctcctggaaggaggtcccagtcactcggcaggctcaggcccctcctgccctgccctgggtcacgggaacacaggagggctggccgcaagccctgttccttctcgc

SEQ ID NO: 338887 - DNA, 841 bp, Homo sapiens
  chr5:176918898-176919739
  hypo
gcggagggtccgcggcgggggcggaggcctgggcagagacacagccgggcagggcgggcgggcagggtaaggtgggggcctgggtggaagtggggcgcctgcagcagaggacagcggcagctccagccccccacccccaccccaccccctacatctatttggaggctacggggagaggacgactcaggtttcaaggggcccatttgggagtggcgatctcagtccacgcaggaccgagggctgaccgagtgcgggcgagcacgcagcgccggcggcgggaggcagcaggcggacagacaggcggacagacaggcggacatgcgtggtgccaggaccgtgcagcagcccctggctcaactccagggccctagacccgccttagctccggtttctgccctccactcccggccagggattggggtaccgagaatgtgccaggagggcgagcaggcctggccgtccaagcccacaccgcccaccgcccggatgtcccggccagcctcgtaccttctgcggtttgctctgaaccggctgggccctggaggagaaggaaagcgtgacagcgggccgggcccgcagggatccccactgccagcgcgggcgcacccatccatgtccacccgcatacctgctgaggcccaggctgaggcgctccccgcaggcccggatcttgttctgagcttcgatgtgtgtgaggctacccgcattctcgccatcgatgctcagcacccagtcacccacggccactccggcctgcgccgctttgcccccaggagtgagctgtggagagagaagcaaagtgaccgaggccctggaccctgcagacccaagccaggctgac

SEQ ID NO: 338888 - DNA, 59 bp, Homo sapiens
  chr5:176922905-176922964
  hypo
cgccatgctgtgcctcaattccaatccctgcttcaccatggactcgatgagcgagcccc

SEQ ID NO: 338889 - DNA, 503 bp, Homo sapiens
  chr5:177031080-177031583
  hypo
cgagttatgtgcagcctcctcgtggggaggccagagaacgggtctgtcacagggccagccctgccccgccctcctgaccctgtcccgcgcttgctccaggtccgggttgctctccggcggcctccctcggaagtgttccgtcttccacctgttcgtggcctgcctctcgctgggcttcttctccctactctggctgcagctcagctgctctggggacgtggcccgggcagtcaggggacaagggcaggagacctcgggccctccccgtgcctgccccccagagccgccccctgagcactgggaagaagacgcatcctggggcccccaccgcctggcagtgctggtgcccttccgcgaacgcttcgaggagctcctggtcttcgtgccccacatgcgccgcttcctgagcaggaagaagatccggcaccacatctacgtgctcaaccaggtggaccacttcaggtagcgcccgcccccaccctctcccctcggcacccctgccc

SEQ ID NO: 338890 - DNA, 158 bp, Homo sapiens
  chr5:177310267-177310425
  hypo
cgtaaaaagattaaaactgtatagaaaacttcgaagaggaaagtaaagaacttgaaattccactatgtaaagaatgctcctgttagtcacgttgtggtgaacattgtccagcatccagccatgcagatccttcatgtaactgcatgtccctgtgacgc

SEQ ID NO: 338891 - DNA, 53 bp, Homo sapiens
  chr5:177525861-177525914
  hypo
cggcggagtaaaacttgccgcaggcaagatccaccaactgacgcaagagagtc

SEQ ID NO: 338892 - DNA, 293 bp, Homo sapiens
  chr5:177650761-177651054
  hypo
cgccaacagtcttccctctgttgtcaccgtaggtaacacacctctctctcctatgtctgcgcctccactccatctccaccatactgcccccgtcaggcctccccacagctcacttggggcctgctggccacttcacggtcacctgacctcaagccgccgcattccaatccatcctccacatagccctggagtcagagagcagccccggccccaggtcttagcgctctcctgcttaagactctggtggttcccgggggcctccagggcagaactgctgccgcccagcatagttc

SEQ ID NO: 338893 - DNA, 165 bp, Homo sapiens
  chr5:177654009-177654174
  hypo
cgatggatgccctgggagagcgagccagagggggcatgtttatgggctgagctgcacccccccacccccaatttatgtgttgaacccctaatccccggtagctcgcaatggcccgtatgtgaatggatatggagataagagaggtgattacattaagatgaggcc

SEQ ID NO: 338894 - DNA, 118 bp, Homo sapiens
  chr5:177680784-177680902
  hypo
tttttatttttttaacatcatgccctgcatggactatggctgcccgctgcccatcaaactgagtcggcatctcagtctggcatccaaagtccatctctggctgggcgtggtggctcac

SEQ ID NO: 338895 - DNA, 117 bp, Homo sapiens
  chr5:177802468-177802585
  hypo
cggaaccctgcaatgactttctgtctcacacagagtcgatggtctcacctcacgatggcccaaaaggccctgcgtggtcccgccctgcccctccgacagcctcgttcctgctttccc

SEQ ID NO: 338896 - DNA, 174 bp, Homo sapiens
  chr5:177882646-177882820
  hypo
cgccatcgcttctgtgtgtttcctctctgccacgcggacggaccgcacctcaaggccgagagctggcacctatcccctgcccacccatcccaccaggctccacgaggaggtcagagcggaggaccagccctctacagtggccctatgtctgacactggctccctcagctcgccc

SEQ ID NO: 338897 - DNA, 421 bp, Homo sapiens
  chr5:177892711-177893132
  hypo
cgcggggtggcggtcacgtcctcacgagatggggaggcagagtgatcgtgctacacacggtaaagaagtagactgtcctggggattcaacagcagtgagtcctctgagggactggcgtgcaggggcagggagatgtggggtggtcagtaccaaccagcggtggtgtggactcgccgcttgcctggcttcctgcctgctccggatggcgagtctaactcagcgcacacttcaggacacaaaacacagtagagcctcggggtgagtgcacctcaaggccatcgtgtccacatcaccctggtccctcagtctcccctctgcgccacctctttcctgaatcccatcctggtgaacgacccccatgaatctcatcttgggagacacacatcggcctccaagccgtgggcctcagaggcattgcaac

SEQ ID NO: 338898 - DNA, 315 bp, Homo sapiens
  chr5:178220780-178221095
  hypo
cgttcagaacagcgcctggccccagcaggatgagggaagcaattaagcagccatgaaacagaatgaggtctgggctgacgcggaaccgcctccaaagaaggaggtctgggctgacgcggaaccgtctccaaagaaggaggtctgggctgacgcggaaccgtctccaaagaaggaggtctgggctgacgcggaaccgtctccaagacattgttcatacaaagcaagcatgcagcataaccctgtcagtccagaggaaaggacagatatgtaaacacacacgctcacacacacatgcccatacatatgcacacacac

SEQ ID NO: 338899 - DNA, 143 bp, Homo sapiens
  chr5:178259527-178259670
  hypo
cgcagccaggcaggcctcagtggcaaacgctccagcctccagcatgcacaagtggtccccgcttctcgtcctctagccggtcaggagcagctcttcctgccggccatccttctaccgctccggccgccctcctacactctgcc

SEQ ID NO: 338900 - DNA, 159 bp, Homo sapiens
  chr5:178411695-178411854
  hypo
gggacactcaggccctgttacgtggaggaagacgggagcacctcctagtcacggagaactgcatgacccgaggcacgtggcgtgtgtggaacgaatagagaaggggctcgccgggagtggacagcaccgggagtgctccaaacgggtgagcaggtgttc

SEQ ID NO: 338901 - DNA, 255 bp, Homo sapiens; identical to SEQ ID NO: 255472
  chr5:178580404-178580659
  hypo

SEQ ID NO: 338902 - DNA, 572 bp, Homo sapiens; identical to SEQ ID NO: 332609
  chr5:178594083-178594655
  hypo

SEQ ID NO: 338903 - DNA, 147 bp, Homo sapiens
  chr5:178650433-178650580
  hypo
cgaacgcactcacacacgcacactcacacacgaatgcactcacacacaaatggactcacactcacatgcacactcatacgaatgcactcacacacatgcactcacactcacacgaatgcactcacacacacgcgaatgcactcgcac

SEQ ID NO: 338904 - DNA, 128 bp, Homo sapiens
  chr5:178651199-178651327
  hypo
cgcttactgcagccatgcggtgggtgcacgctaccaccgtcttctcctctttttcttgggagctgtcgccatggctcccggcacaccctgacatccgtaggcgccatcctgacaacacgctgccggcc

SEQ ID NO: 338905 - DNA, 102 bp, Homo sapiens
  chr5:178652545-178652647
  hypo
cggctggacgtcgagaggagcgcatgaggggaggaacacacaggcggctggacgtcgagaggaacgcaccaacgagcaccagcacgctgcaggccaccgacc

SEQ ID NO: 338906 - DNA, 2353 bp, Homo sapiens; identical to SEQ ID NO: 332610
  chr5:178770455-178772808
  hypo

SEQ ID NO: 338907 - DNA, 121 bp, Homo sapiens
  chr5:179023553-179023674
  hypo
cgcatccaggttgcagcactcggagcgggcgaggcagggggctgaggagcggagccacaagctgcagcaggagctgggcgggaggatcggcgccctgcagctgcagctctcccagctgcac

SEQ ID NO: 338908 - DNA, 727 bp, Homo sapiens; identical to SEQ ID NO: 332613
  chr5:179245848-179246575
  hypo

SEQ ID NO: 338909 - DNA, 500 bp, Homo sapiens
  chr5:179401697-179402197
  hypo
cgatggctttgaaagagagttttaaaaactggactgggaaatgcgagtgtcacgagatgccggcgagtggagacagaacactggaaggagcagccagccaagagaacgaggccccgaggaagggagagagcaggcacgcagcggcgcggggaggagcggcatggaccgcagcagacggcctctccggcctgcgcacccgggtcagcacgctgagggaattaaacccattgcttcctctgggcagtcaatggtgaagcggtcctctgagagtgaagaacaagcgtgtgagttaaggtgttgaagtagagtgaacacacctgcaggtgctgctgtgccgaatgcggagcgccagccaggcggggaggctctgtcttgccaagtctgttcagagtcccgtgggaagacggtgagggaacagaaccgcttagcaacatgaggtacagaaagccacagcaggtaacaccgactctgggcttcaaagacaataggggcggggaggc

SEQ ID NO: 338910 - DNA, 234 bp, Homo sapiens; identical to SEQ ID NO: 255505
  chr5:179448857-179449091
  hypo

SEQ ID NO: 338911 - DNA, 1326 bp, Homo sapiens; identical to SEQ ID NO: 332614
  chr5:179498011-179499337
  hypo

SEQ ID NO: 338912 - DNA, 135 bp, Homo sapiens
  chr5:179546922-179547057
  hypo
cgctcgggacttcagacccctgtgatgcgcagaaccacaccatgtccttccccagccatcctgggctgcagctggctccctggggggctcaggccaggcttcgcccaggctcggccctctcgcctgcagccagcg

SEQ ID NO: 338913 - DNA, 146 bp, Homo sapiens
  chr5:179564199-179564345
  hypo
tagagccctaccgacgcgtgtgcaatagaggcagcccgcaggacccggccaggactgggaaggtggagcggatgtgctgggggaaggaagcccaccagaggcagcaggccctcccggccacagatgggtcctactgaccgggctcc

SEQ ID NO: 338914 - DNA, 108 bp, Homo sapiens
  chr5:179708846-179708954
  hypo
cgaggtgtgttagcgtgccagccagggagtgactccagtgacgccacagcgcttagatgctggacaaacagctgctcatacaacccgcaccgcaggagtctcagtccc

SEQ ID NO: 338915 - DNA, 165 bp, Homo sapiens
  chr5:179743768-179743933
  hypo
cggcagcgtggtagctggttccacagccaatcacgatgagccgtcggcatcgtcgaatctccttcaagtggtccttcaagccacccaggagcactgcagggcacacgacaaggcgttaatgctgagtctacacagtcaccgcattccctgagactaggctcgggc

SEQ ID NO: 338916 - DNA, 1466 bp, Homo sapiens; identical to SEQ ID NO: 332615
  chr5:179779452-179780918
  hypo

SEQ ID NO: 338917 - DNA, 1348 bp, Homo sapiens; identical to SEQ ID NO: 332617
  chr5:180017458-180018806
  hypo

SEQ ID NO: 338918 - DNA, 280 bp, Homo sapiens
  chr5:180036597-180036877
  hypo
cgctcactgaccaggcccgggacccccgaacctgccaccgaggaggagccgtccttccactggggtttctgcgctgctgaggaggggaggcctcgtgtgggggtgacgagggcataggacagaaagcagctgtgagtcgtggcatcgcaggagggcccaaatgtgcccaaggctcaccctggacttgcactttcaaaggacagtcgttgggttctgccatttgccttacgaattcctgacgctgcctcccctgaggcggccccagccctgagccgagagc

SEQ ID NO: 338919 - DNA, 521 bp, Homo sapiens; identical to SEQ ID NO: 332618
  chr5:180046791-180047312
  hypo

SEQ ID NO: 338920 - DNA, 364 bp, Homo sapiens
  chr5:180055790-180056154
  hypo
gggaggacgctgcccgtcttcccctatggtctgttttgcccctggacttggaagggtatcggcggggtcggtggggagccagggctgttaccactggaactcgggcggggggtacgctgccagcttcacgggcagcttcaccagctcgtctcctgccgtggcctccaggatgggtcctttgagccactcgacgctgatgaagggattttctgccggacaggagaagtcactgtaaatccaggactgacccgtcgtggactgaccagggactccccccacggcccctgcagccccggcagccggacatccgcagactggggctggccatgccgcccggtgcaggagctgggcagctcctctgctc

SEQ ID NO: 338921 - DNA, 1229 bp, Homo sapiens; identical to SEQ ID NO: 332619
  chr5:180075844-180077073
  hypo

SEQ ID NO: 338922 - DNA, 596 bp, Homo sapiens
  chr5:180218508-180219104
  hypo
cggaaaaatcaaaaagataaatgcacctaagagggaaacacaggcaggccgatgcagcctggggactgtggtcccacctcagctcatgatgtggcaaggaggggcccaggaaggacaggcaggtgctaattccagctaggatcatagccctcccacgtcagtgggggcgccaggtggacacggcggccccggaactggaaggtgacaataccccggtagccagctctcggaacccccgacttaaggtcatccatgacacccagagccttggcgaaagccttgaagctgtccctgcccgtatactgcacccgcacctcccccagctccttccggtcattggtcctcactttctccacctgcagctggggagcaccgtagacgcgggcgaggaaatctcggtcataggcctcccgctgcaggtaagacaggtccagctgggtgaagtgcacaaactgctggttcagcttgataaacttgaggtgctggtcaaagaactgcccgtggctcacacccttgcggccaaaggtcatcgttcttgagatctcagggcgtatgcaggcccgcccctgccgctgctccggccgccgcatccagtc

SEQ ID NO: 338923 - DNA, 430 bp, Homo sapiens
  chr5:180326141-180326571
  hypo
cgatggagtagactctcagaacagcgcagtttgccctccgctcacgcagagcctctccgtggcttccgcaccttgagcattaggccagttctcctcttctctctaatccatccgtcacctctcctgtcatccgtttccatgccgtgaggtccattcacagaacacatccatggctctcatgctcagtttggttctgagtctcctcaagctgggatcaggtaagactcatctttgtttcctccttactaactaacagtttgagttctttagctacaatggttgcagcataatggaatgaaggcatctttgtcgtttccattcctttggcttctcctagcctcagcctggggaaggatcaggcgctgtggaaacaattatagtagcccccaaataatggaaacacgggtgttgaagacgcaccgtgatcgtt

SEQ ID NO: 338924 - DNA, 1486 bp, Homo sapiens; identical to SEQ ID NO: 332622
  chr5:180479644-180481130
  hypo

SEQ ID NO: 338925 - DNA, 2706 bp, Homo sapiens; identical to SEQ ID NO: 332626
  chr6:391113-393819
  hypo

SEQ ID NO: 338926 - DNA, 120 bp, Homo sapiens
  chr6:550612-550732
  hypo
cgtttcgtgaataaacggccagaaggaaaacagtgaataagcactggaaactcgcccaggtgagggagggacgaggacgctacattcccctccagtccccgggcctggagtcaccatgac

SEQ ID NO: 338927 - DNA, 791 bp, Homo sapiens; identical to SEQ ID NO: 332627
  chr6:710660-711451
  hypo

SEQ ID NO: 338928 - DNA, 543 bp, Homo sapiens
  chr6:1080648-1081191
  hypo
cgctgatggatctggaaccacttctaaacccgctgcctgtttgcgaggagggcagaccactgacggtgggaaggatgcatttccccaagccacggaccacactgccgaggccctgactgtcctttcccggacccctgcctggcacgcctgggaaaggtttaccctgggggcgggggcaggttggcgccaggcagcttgcagaatgtgtgctcggaccccgggcatcgcgaagtgtgcgggccgtgggccccggctgcaccgccagcccctgcctggccaccccaccgcttacttgacctccaggaagcgcctgaaagaaagcgagctctgatatgtgcagctccagtgtgtttcaataagctgttttcaaagagtttgggtgcctcttcagactaagcccgttcgaaacctccatcttctttctagggttttcttcaacgggggcttagatgataaacggagacccctgttccctaccggttgaaactgtgtctgcggcaacagtaagcacccggccgagacacccacacccccatgtcgtgc

SEQ ID NO: 338929 - DNA, 985 bp, Homo sapiens; identical to SEQ ID NO: 332631
  chr6:1389802-1390787
  hypo

SEQ ID NO: 338930 - DNA, 310 bp, Homo sapiens
  chr6:1515515-1515825
  hypo
cgttgccacgttcatcccggggctggagctgctgcttcacactgacttacacggtgagcagcggcggcaggggaggaggtggaacccgcggcgagctgctgcttcacactgacttacaccgtgagcagcggcggcaggggaggaggtggaacccgcggccggagacacacgccgtggggtcggtcaacacacactcacgcacttgcacacgctccaaggcccggaaggaagctgaggccggcccgcctcccgccaaagggccgaggaatcccgccacctaacggcaggggcaggggccacagctggcaac

SEQ ID NO: 338931 - DNA, 303 bp, Homo sapiens
  chr6:1523653-1523956
  hypo
cgccttgcttggtttccactcctcttgaaggaagaggtgctggcatctgcaccattcttagcgtcggcactgctttgcaccccccggctggccagcgcgggatgtgggtggggaaatagccactacagtccggagtctccccactccctccccaggcccacttccccgacgaagtttcactccattgttcctgggcatctccaggggtgtctagtttgaacaagaaaaggaatgttctggatggctggtcctgggcgctcaccgggaatgaacgtgagccactctttcgcacacaggccactc

SEQ ID NO: 338932 - DNA, 301 bp, Homo sapiens
  chr6:1708438-1708739
  hypo
cgtgaaacaaaatgcggcatctgggtatatctcaaaggtagggaaggaaacaactcgaaggctgtaactttcccgacacttgagacgtcactcctttgcaaggcagcattcccagcaggcagcgaagcgtgtttggagaagctggagggcagatgaggagtggagggaaggcgggtagggggcttgcactcgaaaccacctctgaaggcgttgtcaatacagcaacagcaacgaggacaaacatgccacacggtgggtccaagtctgaactgcccggggctaagtcagtcaccgcacaatc

SEQ ID NO: 338933 - DNA, 319 bp, Homo sapiens
  chr6:1726588-1726907
  hypo
cgcatttgcccagccagccagccaaatgtggccacgcactgggtggccagagagtccttaccacttcagttggccggtagtacttgagatccacagtcacgtgaactttgccggtctctttacatctgcccacttcattttcattctttccttcccacctgtaaggaagataaacactgaatcagctcctaattgcttgggaacatttggccatgctgtagcaccttgggatgccccagccctctccccgcaggagcgcttaagctcattaaccacagcagcacaggctgatgctccagctgattattaaagcaacggc

SEQ ID NO: 338934 - DNA, 155 bp, Homo sapiens
  chr6:2108917-2109072
  hypo
cgatataaagtatcagagtcctgcggtatcttcccctcacagttcaacgatactgcccacctcggtattctcagcttagtagtgtgacaggaagactgagtggcatcatatctgggctggagactaggtagcgtgtggctgcttatgaaccgcac

SEQ ID NO: 338935 - DNA, 551 bp, Homo sapiens
  chr6:2434643-2435194
  hypo
cggggccgcccctgcccctggtccttcagtgttgctcaaactagaaacagaagccatgctggaagacagagctgctgacctaagcccaaagcccaggtaaggtgcagacaacaggcaggcactggagtggcaaggaccatcacgtggttcctgggtccatgcgtgttctgcccgggcgacagctggcactctgaaacaccactcacagctccagtcctggccctgccgccacgttagcttgtgctctcatgcagtcactgaccctccccagacctccgtgtttttatcaggagaatgagaagctggatgtcatcgctcctttgcaatgattctgaggtactgcatttagggagaaaaccccaccacacacatgctcaatacaaaccctatttctgggggtagatttgatttaaaacgtcaccataaaccgtttaaagcatccagtaatttactaataatgcgtttcctgatgaggggagggaaggccgcggtttcaatctctcctactgattcagtgtgtgctgttccctaaaataaaaatcagcttcatc

SEQ ID NO: 338936 - DNA, 235 bp, Homo sapiens
  chr6:2920900-2921135
  hypo
acggttgctgtagatgcgggcggcgagcatgtcaggacttcccctcctcctatccggtgactccttggaccacatcaacccagagcaacaagacccattgcccctgctacctggggcccgcatggcatgtctgagcaatgaccccatcctcgctgcccgctgcccagctggcggaccctgccaggttcttactgcgatggccactccccaaccaccacacccgcagcacctccac

SEQ ID NO: 338937 - DNA, 119 bp, Homo sapiens
  chr6:3065529-3065648
  hypo
cggctttctgaggtgccgtgcggctgtggcgggggtggctgggggtgcgggttgtgttcattgtccaaggctctccagtgctttgcgtggcgttttggggagcacagatgaggtgtccc

SEQ ID NO: 338938 - DNA, 138 bp, Homo sapiens
  chr6:3263649-3263787
  hypo
cgagcctttcgtgtgaaactggtcctagaacttagtagcactgtggttccagcttcatctttcccaactccgctgacctcatatgcgacatggggtccacctacttggttgttgacggacgccacccctctttccctc

SEQ ID NO: 338939 - DNA, 519 bp, Homo sapiens
  chr6:3285282-3285801
  hypo
ggaagcacagcccacgcgcttgggactcacctgagtctgggtgctggctgtactttccaatcactggacccgcagacatgatcgcacccacacggacaagggccaagcaagcgagaagagagaagagagcacattaggtgtggagttagcctagcgtgttcccatgcgacttggttcaagcaaactcccttccgtgtctgggatggcgctggccgccggggcagtggaattcatactgcgctaaacaaagatctttttgttaggaagacaggagtgagaccctgctggcctcagagcctgaggagaaaatggaaccttcacagtgagaccccagcaggtgcaaagggtgagcttccttgcatgtaaagtcacccacaggtcactgccgcctgcattcaagctgcgtcaagtgctgtggggtgcccctgccagccccagctctgctcctcacggctgcttggtgttcgcctggggctcctgtgcattcctgctcagggccaaaggggcaccacaacaccc

SEQ ID NO: 338940 - DNA, 265 bp, Homo sapiens; identical to SEQ ID NO: 255626
  chr6:3307210-3307475
  hypo

SEQ ID NO: 338941 - DNA, 219 bp, Homo sapiens
  chr6:3333118-3333337
  hypo
cgctggttttatgtgactgtcccgtgatgtcgttcacatgttccttcatgccctggtttaatctctaaactggaagctccacctaatgtctggtgagacccaggttcaggtttttggaagagcgtatcgcagctggtgcctgtgcgtcacggtgctgccccgcaggaggtcacctactgggaatgacgctaccactgacccatggagcaaagcggcggc

SEQ ID NO: 338942 - DNA, 684 bp, Homo sapiens; identical to SEQ ID NO: 332639
  chr6:3457545-3458229
  hypo

SEQ ID NO: 338943 - DNA, 199 bp, Homo sapiens
  chr6:3579868-3580067
  hypo
cgggccgcactgggcttctgtgattgggcggatcacgccggcctcatgttccttctcttgtccctctctacccctcatgaaattgtgctccttcagagcatacaggccgtcaggatgcggggtagggtcaagacttatcagactgagcgatgaacaccttggcttctccatcagaccccgtgagaaccacaatggacac

SEQ ID NO: 338944 - DNA, 462 bp, Homo sapiens
  chr6:3593183-3593645
  hypo
cgcagtgggggccccggggttttaccaactggtccacttggccctattatttctcttcattctttgtgagccatgtggctcctcactggtggctgctgctaatattttagacccaccatttgtgtcctacaccttcgaaactgcaggaaagtctccgggggagtgggggcaacgggctctcccccccgcaccccattaatcgtatcttgctggaaggggctgcaaagcggtgcttagggaaacctctatttccaccgataaccctttccctcaaaaatacatactccttattttgctgatgatgaaaaccaagtttcaggttgttgaagagatttgccttagatttcctcttgagaagacagtagacgggaaataaatccagccggaaacccattcaactaaccaacactgcctctttgcatgtttgtgcatgtaggtaaatacatccgtagatttatttaa

SEQ ID NO: 338945 - DNA, 503 bp, Homo sapiens
  chr6:3618095-3618598
  hypo
gacatctgtctctccgagacctccaaccccagcctggagccgccgtgcctatttctggaatctgagagacctcaaattccaaaggcaccgtgagagtctcaggactcagcctttccacccttgccggggtgactcgtggagggaatcgagcctaagtcttacggcacgttgtgcagtttgggccggggcggaggaccagggcccagctgaggctggccttagtgactcagccttgatcctgccacggtgacaagggtgggagggttcccgcaggggtccagctcgtgtctgtgagaagcaccttcccttcagggtcgcacgtggaccgtggctgctaccacgctaccgttgccttcagtgctcttttgcaggagtgcagacgggcagttcagcgcgggccccagtgccgggggtggggggcagggagctcccgcagggctttgctgagaaggggcataaccatgacccactggtgatgtctgtgaggtggaggcagtggttgc

SEQ ID NO: 338946 - DNA, 349 bp, Homo sapiens
  chr6:3646980-3647329
  hypo
cgggtccaccagaattctgtgctcataagggcatcccgagcgccatgtgcgaagtgggtggccggggccggggacgtgcgtatcgctcaggtgctgctgtactgtcccaccaggcttacaaaaatctcagagacgcggttaggaagatttcaagacagcaacgacagagccttaaaccgagcacagggctcttccgggtgtggggtctcttgtgactgcgcaggtcatccatccaagaagccggccttgaattacagagaacaactgaaagaccgaagagaagccagttccgctctcaacagccacagggcggatgatgccttcccccagaaattcaccaacagtgcac

SEQ ID NO: 338947 - DNA, 114 bp, Homo sapiens
  chr6:3654816-3654930
  hypo
cgcacaccagcggtcaagtgacaatgcggggcaggtcgctccacgggccgctaggcatcttcctgtgacctcctctggccagagcccctgggtgccaccactgcacagaaacac

SEQ ID NO: 338948 - DNA, 307 bp, Homo sapiens
  chr6:3724319-3724626
  hypo
cgcctgcctcgtgctgggccctggggacagctgagagaggagtggtcacgagctcacagcctgaccgcagcagagatgacacacggacgcacaggaggctgcgagggaacaggaggctggagaagagccggcgaggcccgtggaggtcacggggggagacaccttctagcggggaagcctgcatgtgggtacgtgtttcattcgcgctctggcagatgagaagcatccgaacatgggggacttacatggggtgtggagaactagggaagaatacaaaccccaaacataaggggacgtaaaagcccgc

SEQ ID NO: 338949 - DNA, 416 bp, Homo sapiens
  chr6:3725763-3726179
  hypo
cggggcagcctgctgagactctgctgtgggggccctgctgtgggcccggcggcactgggctcacaggctcgggccagacaatcagcctcgggtgccagggaggacagccacgcagggaggtgaagcctccagttccacaaagggtgtctgtgctcttggtcgctgtcaaccccccacccgacagccggtgccgtgtagaaacagatcgtccctgtgagacactggagctggaccatcgactccactgcactgcccgagattgaggagccagagaaaggcccggcaagcccaagtcggaactccctccagatgctcccgagccccatggcggcaggcgtttctttgttaggcttttctggggtcatggagattttctcggccctctctgtgagccaggcatcccggagcaggtggcc

SEQ ID NO: 338950 - DNA, 87 bp, Homo sapiens
  chr6:3734377-3734464
  hypo
cgtttctccctgttaaatttcgtctcactatgctcgccccttagggtccacgtgggccatgtgttcatacacatcgctgatagagac

SEQ ID NO: 338951 - DNA, 699 bp, Homo sapiens; identical to SEQ ID NO: 332640
  chr6:3750702-3751401
  hypo

SEQ ID NO: 338952 - DNA, 210 bp, Homo sapiens
  chr6:3880057-3880267
  hypo
cgtgattagtaacaaacaactgtgagcacctcagagatgttcgacgcttgaaaagttgggttctgggggagatccctgggatggaggtgacggtcccgcctctgatcagaggaccgcggctccctggatggatctcatccccacacccggcactccagtttgatcctggcattttataggtgcagaaactgagaagccacgcgactgccc

SEQ ID NO: 338953 - DNA, 126 bp, Homo sapiens
  chr6:4061573-4061699
  hypo
cgcgcttgatggatagagcgccttcagtgtactgtttcttattaactttactttttttaaatcaacttgctatagactttatatacattttgttaaatatagttcctagtgacatagaaacgatgc

SEQ ID NO: 338954 - DNA, 406 bp, Homo sapiens
  chr6:4559591-4559997
  hypo
cgcacatgctcacttccactctcacactcatgctcactcacgcacactcacgttcacacgcacacacgcatattcacactctcgtgcactcacactcatgcacactcccattcatacacagttttgcgagtgtacttctggagtgctttgctggcagctctaggaaggaaagagagacgctccaattaggtctggagaagaacgagggggcatggcgagagggcccagcgggccgccactccattccagaaaggagtgcccctgctttccctggggctccctgcaccagctggtatgtggcgtggcatggcacggtatggtgtggcagggtgtggtatggtatagtctagtgtggcatgcgctggtatggcatagtctagggtagtgtggcctgatgtcgttcggc

SEQ ID NO: 338955 - DNA, 1132 bp, Homo sapiens; identical to SEQ ID NO: 332642
  chr6:4775131-4776263
  hypo

SEQ ID NO: 338956 - DNA, 126 bp, Homo sapiens
  chr6:4874031-4874157
  hypo
cgagagcctggtttgaaaccgccaagtaggaacatcgcacaggggacaccttcacatgcgccgcagctgtgcagatttcacctcctgccactgcttgctcattctggttcccgccttctgcctgtc

SEQ ID NO: 338957 - DNA, 67 bp, Homo sapiens
  chr6:4910917-4910984
  hypo
gggaaaaggtgtctccgtgggcctggaaggattagtcgggtttttataaagcagcagtgttggaagc

SEQ ID NO: 338958 - DNA, 161 bp, Homo sapiens
  chr6:4932028-4932189
  hypo
cgaggagccaacacagttttaactcaggagtctgaaggccaagttcagtagtcttggtcagcgtgagccaaaatgaatccatttttaaattagcagaaccacggatagttcgtagggactatcgcctcaaagaaaatgctgaagctgtttctgagactcac

SEQ ID NO: 338959 - DNA, 465 bp, Homo sapiens; identical to SEQ ID NO: 332643
  chr6:4948996-4949461
  hypo

SEQ ID NO: 338960 - DNA, 176 bp, Homo sapiens
  chr6:4951262-4951438
  hypo
cgtgtttgctttgccgcctctgcctgtgtgctctccaagctgcgggtttcacatgcagtaaacggcatcaagacattgacagaaggtgtatgggcagtcttacactgtctcagcgacttcagggccaaaactgtcttttgtgattttgcctcttttggaagtggaagccacctacc

SEQ ID NO: 338961 - DNA, 1762 bp, Homo sapiens; identical to SEQ ID NO: 332644
  chr6:5084683-5086445
  hypo

SEQ ID NO: 338962 - DNA, 123 bp, Homo sapiens
  chr6:5108225-5108348
  hypo
cgagactccatctcaaaaaaaaagactttatcctgaaatcaaaagttgtactgccaaatagaatggctacacgttacatctatttgaacgcatcattgcagcaaatctatgctctctaaaagc

SEQ ID NO: 338963 - DNA, 55 bp, Homo sapiens
  chr6:5413113-5413168
  hypo
cgcctcgccgtagcttagatgtagtctagagcaggttgctctttccgataaaaac

SEQ ID NO: 338964 - DNA, 789 bp, Homo sapiens; identical to SEQ ID NO: 332649
  chr6:6008843-6009632
  hypo

SEQ ID NO: 338965 - DNA, 911 bp, Homo sapiens; identical to SEQ ID NO: 332650
  chr6:6546401-6547312
  hypo

SEQ ID NO: 338966 - DNA, 95 bp, Homo sapiens
  chr6:6780570-6780665
  hypo
cgcaccccagatcgggtatttggacagcggacttacatgcgacaagaaagatgctgtgcccgctcagcgtacctggacctctttgtacagggctc

SEQ ID NO: 338967 - DNA, 108 bp, Homo sapiens
  chr6:6984882-6984990
  hypo
cgcgcagagaggcttcaagggtacttgtattgggaaacgttgatgcgcccagtacagtcgggaaacaaaaggagatgaagctgagaaggcagaatgtggccagatggc

SEQ ID NO: 338968 - DNA, 302 bp, Homo sapiens
  chr6:7204219-7204521
  hypo
cggtgcatttcaccaggagcatcctgcgagccctgggagctgcctggctgacggcattcccacagcgagcctacagactgtgggtttacacttcatgccaggctgactttagatttttctaagggctggctttggaggtcagcacaggtgcttacgcattgtctaaccttcctccacaccctgggagagctggtgtgacctgccttccggacaagcatgactgaacccatacaacacctgaattactagaaggtgcctctgtactttacaggtggggccacaccaggaattgctcagttgcc

SEQ ID NO: 338969 - DNA, 205 bp, Homo sapiens
  chr6:7237775-7237980
  hypo
cgctcgcgttggggcttgcagaatgctgtaggtcctgagtgcgcaggtaactcactgtggttacaggtgcttttacaaatccccttctaaagcagttattcgtggcagctaccaaataaatagaatcatttgctactttctatatagatggctggccaacaagtgtttttgaaacctgcgttattataaaatactaaacgggccc

SEQ ID NO: 338970 - DNA, 194 bp, Homo sapiens
  chr6:7247353-7247547
  hypo
cgtggccagcaaggcagacaagaggaagaaggtctgcagcgtgtgcaacaagcggttctggtcgctgcaggacctgacccggcacatgcgctcccacacaggtaaccagggcaggccaggtccccggcccaacaagaggaggcgagccgggcacctctcctaggagctcccctgaagcggcgctggaggccacc

SEQ ID NO: 338971 - DNA, 2758 bp, Homo sapiens; identical to SEQ ID NO: 332652
  chr6:7726066-7728824
  hypo

SEQ ID NO: 338972 - DNA, 348 bp, Homo sapiens
  chr6:7882630-7882978
  hypo
cgtgttaacatgaggaactaaagacatgtttcaccccgtgagaaacagaaggatcccctgaacagtaactgatttgacaagtatcgacacataaagttatggcatcagcattctcttactcaggcacggtcagaagtaacgctgctttcatcacggctaacctctcacactgagagaagtattcacagcaacagaagctccagcagcggccgtgaaggtatcttccagaggtgtgggtttttgcatttcaatctgctccatgctacggaccaacacagtattgagtcaactgtgaccttaagatcagaggaacgtcaatactgccacaaggccacctttccagaactc

SEQ ID NO: 338973 - DNA, 327 bp, Homo sapiens
  chr6:7887548-7887875
  hypo
cgcagccccaggctcatggttggaactgccactggacactgccacctacacagccgaaagccttgaagatcaacaccttgaaaaccaagctcatccctttcctcgagctctggccccgcccctgtgctgggtaccatcctccaccagatatgcgggaatcagactcgcctcggaccctccctccctctccgcgctgcacagcggctggactccttatgctggctttctcctcctcgccatcgcacagtcacggctgcagcatgagggaacgcatcatctttaaaggcctaatagagcagcttcccacctccagcacacgtgcatgcc

SEQ ID NO: 338974 - DNA, 861 bp, Homo sapiens
  chr6:7888481-7889342
  hypo
cgctgcggatgccctcttggctacaggtcttctaggggcctttacaacgggtaaaggaaaatgcccggagcaaggtcaggaatagaatcagggccccggggccagcagtcgagatttcatagcagaaacatgcccagcagagtcattctttaaaatgaatgaagcggaaaggaaggattctctagagatttttgacaccaaatattgtcttgggatttgtctcacatccatttcatgttttcaaaaggaaagcttttgtttgcattcgcccctgaaagcatgtgaaagtcgatgaaaaatacgtgttgaaaacgcaactggagccaaccatcagatgactgtgtccccaaactgtcattttgtccaaagcatttgaggaggcctctgagggtggggaggtggggggccgggggccacgggccacttatggggatcccgactccagcaggcacccaccttgtcagcctcgggctcagctgccagcaccggggcctctgagggcgtgacggtctccgtcgctccagtctctgtgcgctgcagctgcgactccacgtactccctcagtgactccaaatcccgctttcccttgtactgatccacctggccaagacacgggcacgcggctgagtgagtccactgaggtgttctgaatcacttaagccttcctgcaacccctgcttgcccgggtcagagctcccagatgtcttagcggtggtgcaaagtctgcatgttcatatttagacgggaatgtagagaggataactgaatgcctcggctttggtgagagaactgtacaggcccctcttccctccacggggttacacatcacagaagtctggggcagaggcctgccagcaagcc

SEQ ID NO: 338975 - DNA, 188 bp, Homo sapiens
  chr6:7890532-7890720
  hypo
cgggggtaaaaatactatttcaacacctaagacccgtcagagagcagctaaggtgcggaactgaagtacaagaggcctcagcccaaggtcgggagaggacaagcatttttaagggtccagtgtaacccagccacatgtgccagggatgaagggcttcagcgtggtcacctgggcttgtgtctgctcac

SEQ ID NO: 338976 - DNA, 127 bp, Homo sapiens
  chr6:7891513-7891640
  hypo
cgaacgtggacggtctccaagttcgtccagtgaacattctacaaggctctaccccatctctttgcagaacgggctctggggctgccaattcagatttggccatctcttcaaaataaacaaagcagcc

SEQ ID NO: 338977 - DNA, 94 bp, Homo sapiens
  chr6:7891873-7891967
  hypo
cggaatgttcaaggcccagagccagctgctcccaggttggagccagggctttgcagtgaccacaccacggagcgaagaacttgataaagtggtc

SEQ ID NO: 338978 - DNA, 242 bp, Homo sapiens
  chr6:7893721-7893963
  hypo
cgacacagctgtgtggcagtgacccacttagggaggcgctggctaggcctgccggagtcggtctgtcctgccggagtcggtccgtaacaggtgatttgggaaacacaccctgctcagagcccaagacaatcccagctgaaaatgcattcccgtagcggaaagcatgctagagttctgccgtcagggcgctggtatggatgaaataacttttagcaaaagtgggaaaaggctgaaggcctcac

SEQ ID NO: 338979 - DNA, 181 bp, Homo sapiens
  chr6:7898587-7898768
  hypo
cgagttgagagagtctttgcaggtgagggatggaagcactgaatcagcagccaagtttctgattaggtcatcagagaagatggggcagagcggaagagccgcacagacacactggaaactggcaacagtaagcggcaaagctccaaaaggaccaccacagaccaccttcaaatcagtgggc

SEQ ID NO: 338980 - DNA, 183 bp, Homo sapiens
  chr6:7920003-7920186
  hypo
cgaatgaataagaaggcagtacagaatgagaacactggcttttacgaatgagaagggaagtcatcggagggttttcagaagaaacacgacaggatctggcttccaattatttctacagcatggctctgagagctgtagcgaggaatgcgaagggggcaaggatagaagggaggcgaccactcc

SEQ ID NO: 338981 - DNA, 451 bp, Homo sapiens
  chr6:10319622-10320073
  hypo
cgtggggatagagggacgtgggggttttccgtggggatggagggatgtgggcaggttttcggtggggatggcgggacgtgggcagttttccgtggggatggcgggacgtgggcagttttccgtggggatggcgggacgtgggcggttttccatggagatgacgggacgtgggcggttttccttggggatggcgggacgtgggcggttttccgtggagatgacgggacgtgggcggttttccgtagggatggtgggacgtgggtgagttttccgtggggatggagggacgtggagtgttttccatggggatggaggaacgtgggcggttttccgtggggatggagggatgtggcgggttttccgtggggatggagggacgtgggcggttttccgtggggatggagggacgtgggcggggtttcgaggcattcagaaggtgttaagagaagac

SEQ ID NO: 338982 - DNA, 1231 bp, Homo sapiens; identical to SEQ ID NO: 332667
  chr6:11043624-11044855
  hypo

SEQ ID NO: 338983 - DNA, 430 bp, Homo sapiens
  chr6:11273720-11274150
  hypo
cgatgctgaggtgcgaacggccggggactgcgcctatctgtgtgcgttcacctgtgttgccctccacacagtccccgcctgtggtctagccttctactccctttccggccggcagattccgtcttgccagtggcttgatatgacttcatttatttgaggttgtgagtcaatgttatcaagatccgaattaccctgggcattgttcatacaatggaaggccgaaatggacacccatgacatgtagggcaaccgtgagtagagcctcactcaatatgagattgttccctggaaaattcctgtgttcacccgacagcaagtgattcagatgtcaagattaaggaaaacgactatgggggtggacaggtactttgacgtactctgacctctttttataggattggtttcttcttcattagcattttcccaagtc

SEQ ID NO: 338984 - DNA, 138 bp, Homo sapiens
  chr6:12287989-12288127
  hypo
cgcgcgcgcgcgcgcgcaggcacacgtcttgcaaattcaggattcaaagagacaggggcaccattatatttggcacggtggggcccttccaggtctgaaatcctgcattcttccttactatttactttccccgagctc

SEQ ID NO: 338985 - DNA, 249 bp, Homo sapiens
  chr6:12338243-12338492
  hypo
cggtatataggcaatactgtaggcaattagaacaccgtgttaaggatttgtgtatctagacagagaaaaggtacggtaaaaatacagtatgaggatctcacaggactctcgtgtatgcggtcagcattgactgaaatatcacgtggcatctgaccgtatttacaataacgggaggcagtggacactatctgactcctgaaatcagatcacctaggtgactccttcaaaactgtggatgtttggctgggc

SEQ ID NO: 338986 - DNA, 230 bp, Homo sapiens
  chr6:13318572-13318802
  hypo
cgtctgcctgaggctgcagtaaaggtgtctcagcttggaacacagacaagctgagtagcggtgaggcggaacctataccctgtcatctcaattcctaatctaatttaatttgatatataatttaagaacttgtgtagtactatcaacttcactttgccaataagtgaaatttaaagatgattgcttaaattattccaattattttttagggaccttctctctcgataaac

SEQ ID NO: 338987 - DNA, 144 bp, Homo sapiens
  chr6:13386531-13386675
  hypo
cgtcaggtccaaatcccccttttcatttataagcaagcaaactgatacacctgtgcactagatacacaccgcgtaggtgaaagctgactccaggtagcacctggcctgactgtgaaggaatctcgcgtacttcggaggacatgc

SEQ ID NO: 338988 - DNA, 643 bp, Homo sapiens
  chr6:15513386-15514029
  hypo
cggtgtggggtgcgtgtgtcccctctgctggtgagcatggcaggccgtcactaaaggtgcgggccgtctcccgtgtctggcagggatacagagctgcggcagcgcaggcagctgttcgaggctggcctccactcctccgcacgctatggcagccacgatggcagcagcacggtggcggacgggaagaaaaagcctcgaaagtggctgcagttggagacgtcagagaggaggtgtcagatctgccagcacctgtgctacctgtccatggtgagcccgcctggccctgccggcgccctcgcatgtagtgcttggcctgagagctccggggttgcccccagaagagggagggcgctctctgcccaggagacctgctgtgctcccatctctggagccggctgtgggacctcggcggagcttctggccgccggaggtggctgcctcacccacagtgaccaggccacacagaggctgtccctctgttctgcccacgcgtggccctccctcggtcctgcagtgcgtccttcctccctggggagcaggtggcctccctctccgccctactttgtcactccagcccccacgcactctgctcttacccattctttctgaggcagtgaggggcgggtttccagtactgggcagc

SEQ ID NO: 338989 - DNA, 256 bp, Homo sapiens
  chr6:16197031-16197287
  hypo
aaccaagccgaggccgctccacagagaaagcatttagaccacccctagccaaagggaaatcagaatcgcccatcccagcagttcagaattgagttctgatgtgtccggaattgatgggttgtctcactgacttcaaggaaaaagccgcagatctccgtggtgggtgctaaaattcttaaaggtggtgtgtctggagtatgttccttttcatgttcagacgtgtgcagtttacgggggtggggaggttctaggtctc

SEQ ID NO: 338990 - DNA, 118 bp, Homo sapiens
  chr6:16218404-16218522
  hypo
cggggttgctggtggagctgcctgccagtcccgcaccgtgtgcctgcacaccggggctgtaaatggagctgcctgccagtcctgcatcatgtgctaagtccctcattgcctggggcta

SEQ ID NO: 338991 - DNA, 120 bp, Homo sapiens
  chr6:16322061-16322181
  hypo
cgacgctaataaatttttacaagggctgtgctgttctggaaagtataaaagtgaagcattaaaaaacggaaccctctcaagagattatctcctatgaagaatcatacgtggccgggcgcc

SEQ ID NO: 338992 - DNA, 1364 bp, Homo sapiens; identical to SEQ ID NO: 332672
  chr6:17281034-17282398
  hypo

SEQ ID NO: 338993 - DNA, 77 bp, Homo sapiens
  chr6:18035943-18036020
  hypo
tcgagtacataccaggtactcgataaatctcaagtaatatgtgaatgaacaaataaacgtttacttatttcatgagc

SEQ ID NO: 338994 - DNA, 1440 bp, Homo sapiens; identical to SEQ ID NO: 332674
  chr6:18263786-18265226
  hypo

SEQ ID NO: 338995 - DNA, 235 bp, Homo sapiens
  chr6:18368676-18368911
  hypo
cgtcagcggcgtcttcagcgtgatcttccgggtcaggactgaggtcaggtccacctcatcagctatgaagtctatgaatcctgggagaatcgggacgtcgttgtaggtgaggccgtcagcgctggtgaagagctgctgtgggatgagcccgtcctcaggcacgtagccggtgcagcagttgctcagatagtccgccatgctgcgggagaccccgcgaccccacgtaaacacccgc

SEQ ID NO: 338996 - DNA, 813 bp, Homo sapiens; identical to SEQ ID NO: 332677
  chr6:20212279-20213092
  hypo

SEQ ID NO: 338997 - DNA, 70 bp, Homo sapiens
  chr6:20640182-20640252
  hypo
agccaccgcgccgaccattttcattggttttaagaagttatttttcaagttgtaccttaagggtgctttc

SEQ ID NO: 338998 - DNA, 187 bp, Homo sapiens
  chr6:20686909-20687096
  hypo
cgtgccaaaacggttgggggccactgaactaggacatccagtatgatattgaaaaggagtggtgaggggacatttttgtctttgttcgtgattttagtgggaaagcttcgagtttctcaccgttaagtatgatgttagctatagatttttgtagtctttttaactagttgaagttactctatatctc

SEQ ID NO: 338999 - DNA, 162 bp, Homo sapiens
  chr6:21202340-21202502
  hypo
cgcttcactctggcaatagtaccgcttcactctggcaatagcaacaaagacaatactattgtctgtgttctcactgactgtggcactggattcttgtgtccgacagcagtgataattcacatgtgcttcacaagtgcccatgaaggatctgcgtgcatggcc

SEQ ID NO: 339000 - DNA, 174 bp, Homo sapiens
  chr6:21602337-21602511
  hypo
cgccccagctggactaccaccatggaactcagggccgaatacctcagggagaagctgcagcgggacctggcggcggagcatgtggcggtggaggacaacacgaccctcaaccattgcgcctgtagcttctggcggtgtcggccaagttcgaggggaagccgctgcttcagagac

SEQ ID NO: 339001 - DNA, 94 bp, Homo sapiens
  chr6:24662806-24662900
  hypo
cgcatccccctcaccgagatggggatagtgatcaataaatactgagggaactcagagaccagtgcccatgcagatcctccgtatgctaagcgcc

SEQ ID NO: 339002 - DNA, 783 bp, Homo sapiens
  chr6:25726863-25727646
  hypo
cgtctacccaatcagaaagtcgtactagaatcgcctcatttgcattcacgccacttcccattgtccaatcagattttggataccgaacgcggcgtttgagggccgtgcctataaataccgcatctttcatcctccagttctgtttgtttacttggcgagacttggagctgaggtcatttggagctgtttaatactgaagagctgttgagcactggaaagtgctgtgtaaccctggaaaagaaccgtgtaacgctgcagaagtgtgtggtagctatgccggaggtgtcatctaaaggtgctaccatttccaagaagggctttaagaaagctgtcgttaagacccagaaaaaggaaggcaaaaagcgcaagaggacccgtaaggagagttattctatttacatctacaaagtgctaaagcaggtccatccggacactggcatctcttcgaaagctatgagcattatgaattccttcgtcactgatatctttgagcgtatagcgagcgaggcatcacgtttggctcactacagcaagcgctccaccatttcttccagagagattcagacagcagtgcgcttgctactgccgggagagctggctaaacatgctgtgtctgagggcaccaaggctgtcactaagtacaccagctccaagtaagcctgctaagtaaacgtcatttctaacccaaaggctcttttcagagccacttaaacatactgaaacagctgtgggcttcgtttttgtgtagtttctaaccgtaagggttttttttttttttgaggc

SEQ ID NO: 339003 - DNA, 200 bp, Homo sapiens
  chr6:26025541-26025741
  hypo
gggattacaggcgtgagccaccttgccgggcctatatttcttaagctctatgtttcgttctgaagcttgaagtgggtggaagcaaactgatagaatttggagaggtggttaggcatcccgggaatgagaaacagcccgaagctgccactatcacaggctttggcattgctagaagttaacgtggcacttacagctaggcc

SEQ ID NO: 339004 - DNA, 719 bp, Homo sapiens; identical to SEQ ID NO: 332683
  chr6:26188711-26189430
  hypo

SEQ ID NO: 339005 - DNA, 1020 bp, Homo sapiens; identical to SEQ ID NO: 332686
  chr6:26198852-26199872
  hypo

SEQ ID NO: 339006 - DNA, 746 bp, Homo sapiens; identical to SEQ ID NO: 332693
  chr6:26240648-26241394
  hypo

SEQ ID NO: 339007 - DNA, 104 bp, Homo sapiens
  chr6:27428748-27428852
  hypo
cgacataattctgtgtgcctagtcactgattaatgacgttattctgtgtgcccagtgcactgggacaagatgtaccaaactgtcaacatcgtttaaagaaacac

SEQ ID NO: 339008 - DNA, 697 bp, Homo sapiens; identical to SEQ ID NO: 332747
  chr6:27805774-27806471
  hypo

SEQ ID NO: 339009 - DNA, 126 bp, Homo sapiens
  chr6:28327754-28327880
  hypo
cggcgccgcaggtagaaagaacaggtttagtatctgagcgctgtggcctgtttcctcctgaaatcccagatcagagtgaggggcattcctttaacatccaggagttcttcatctcttttttgtacc

SEQ ID NO: 339010 - DNA, 338 bp, Homo sapiens; identical to SEQ ID NO: 332758
  chr6:28414768-28415106
  hypo

SEQ ID NO: 339011 - DNA, 149 bp, Homo sapiens
  chr6:33914107-33914256
  hypo
cgctctacggtgtctcggcagaggttaacacacggaatacatctgaattgcgttccaagtttggacaggccaaactgccttgctttatcaggcaccgagccggagatgcgagcagtgacttccagggctcctcaggctgctgcctgcac

SEQ ID NO: 339012 - DNA, 277 bp, Homo sapiens
  chr6:33995852-33996129
  hypo
cggggcctggggcccgagagggcagaacggggccaggcactcacctggggcctcaaggttctcgcagagctcagacttggcctctccgttgggccggaagttgcccttctgcgtgaacttgttggacatggtggccgccgtaacgacggctttgaggctgcgcttgcgcttgggcacgttctgctccgggtggaagaggatgatgtagactttgggcatgtagagcattcccagggacaccgaggcgctcagactcaccgagaccgtcagcgtcgtc

SEQ ID NO: 339013 - DNA, 1376 bp, Homo sapiens; identical to SEQ ID NO: 332761
  chr6:34111735-34113111
  hypo

SEQ ID NO: 339014 - DNA, 165 bp, Homo sapiens
  chr6:34170821-34170986
  hypo
ccgcagccacagtttgggtggctgtagccccgcccaagagggcggggcttctgtcggctccatggagccggaggcccgggtctgcctccgtttggtttgggtggccatggtttgggtggctgcagcggcaccccagggcgctcctgcccccaactcagaaggggc

SEQ ID NO: 339015 - DNA, 54 bp, Homo sapiens
  chr6:34219827-34219881
  hypo
cgtgagccaccgcgcctggctaacatcttttaactacttaaagaaaaaactctc

SEQ ID NO: 339016 - DNA, 152 bp, Homo sapiens
  chr6:34518788-34518940
  hypo
cgggccctcccagctggggcagccagcattattcccacttgacggacaagggcgctgtgacctgctacggggcacctgtccatgcgtgagtgagcagggactcgaactcaagactcggctccaccctcctttctgctggtgctggcagaccc

SEQ ID NO: 339017 - DNA, 142 bp, Homo sapiens
  chr6:34520752-34520894
  hypo
caaccagtctcaggcgctggagccccgggctgggcagtccctccagccacgtctcccctgtgccagagctagagggagaaggaggggggtctttatcctggtggtgcgccgtcataatcctggggaggtcccggtcccatcc

SEQ ID NO: 339018 - DNA, 77 bp, Homo sapiens
  chr6:34618522-34618599
  hypo
cgcctggccaggaatttaattttaaacagtgcgcaacgttcgccttcttcgggaaagctattgggacaactatatgc

SEQ ID NO: 339019 - DNA, 251 bp, Homo sapiens
  chr6:35109297-35109548
  hypo
cgaggccagagcatgcatggggcttttcttcaggctgtttggacagccgagaagccgagccacacccaggagggttgtttcacagcgtgtgccgcaggggcgcaggggccgcgctctttcctcacatgtgggagaagcggaggagccgccagggctggggccaggctctgcccactggggttccgcccgttgtcgccctccgcctcctgggctctagcccttgcctttcttgactctaagtctactctgtc

SEQ ID NO: 339020 - DNA, 772 bp, Homo sapiens
  chr6:35454062-35454834
  hypo
cgagcccggcttgtttatgaggaggagcgcggaggaggatccagacacacaggcttgcgcgcccagactcgcccggccagcggctggcggcctccgacgtcaccaaaccggttgggtgagagggcagagagcagggggaagggccgcagtcccgcccgcgccccccggcacgcaccgtacatcttgccctcgtctgacaggatgatcttccgccggccgcagggcgggtagatggccagggcctcctggaagctctgctcgatgtccgggctccacacgccctccgcatcgttgtccagccccttgtccaggccctcgggcccatcctcccgggcctccccggggctgctgctggcgttccagctgttggacgctattgtgctggttgctctgggctctgggcctgagcccactgggcggctgagcctgggggacagacagacaggaactgggaccagggtcctcctcgaccacagcaatctcctatcccacagccgctggctctggagctccgcccccagccccaagcccaccctaggagcaggtgctccaggtggaacggaggtaaccagaggaacaaccacagcttgttcagagctgtgtgacctgggatgcacgcgctacttcacctctctaggcctcagtcctgtaaaacgagaaaagggtctccttgaggagacctccttgaggttgtgagggttaaaatgtaaatgagctcatgacaaagtaccaaccacatgcccagctcataatactcaagaaataggtaatc

SEQ ID NO: 339021 - DNA, 1248 bp, Homo sapiens; identical to SEQ ID NO: 332764
  chr6:35655519-35656767
  hypo

SEQ ID NO: 339022 - DNA, 109 bp, Homo sapiens
  chr6:36165692-36165801
  hypo
tggggaaggagaagatggagcggctttcatgaaagtgggcgccgcaccgcctgtctgcgctgtttggggtcggtgtggaggcagatgttctcacctcttctagggcctc

SEQ ID NO: 339023 - DNA, 150 bp, Homo sapiens
  chr6:36178154-36178304
  hypo
cgagcagctgtccgcctgcgggacctgggaggggccatcctacggcacgcccggcggcaggcagagaacatcggctatgaccccgagaggggcactcacctgcccgagtcacccaaattggaagacttttaccgcttctcctgggaagac

SEQ ID NO: 339024 - DNA, 223 bp, Homo sapiens
  chr6:36198250-36198473
  hypo
cgtggacaagctcaagatgctggaaggccgcaagaccagcatccgcaagtcagtgcaggtggcctatgaccgtgcgatgatccacctgagcagagtccgggggccccactccttcgtcacttccagctacctgtaagggcagggctgggcctgcatccgcttgccctgcctccatcccgcagggcacagagaagcctcttctgcccctgccagatgtatggcc

SEQ ID NO: 339025 - DNA, 186 bp, Homo sapiens
  chr6:36214657-36214843
  hypo
cttaaatatgtcttcttgaacgccatcgccccatcccagactcaggaccagcctccccgcgctcactgctgtcactgctttccgcactccctgcggattttaggattttagctcccatctcgcgtcctctctccagctcctcctgccccctgcctggtggtttcaccatccacttaccagcccgcc

SEQ ID NO: 339026 - DNA, 210 bp, Homo sapiens; identical to SEQ ID NO: 256023
  chr6:36238215-36238425
  hypo

SEQ ID NO: 339027 - DNA, 97 bp, Homo sapiens
  chr6:36939067-36939164
  hypo
cggcagcctcacctcggcctttaagccacatacagaaaagcactcgaaaaacactttagacaaatctgttgactgctgttgttgctgatgtaagcac

SEQ ID NO: 339028 - DNA, 809 bp, Homo sapiens
  chr6:37023826-37024635
  hypo
cggccacatcttctgagctgcggggtggaggcctggctgcccacctgcattccttactctgcgtacccatgatctcatcccggccctcagccacccacagggcaggaggctttgccccattgtgcagatgagacagccatgccctgccctgggatggtcatttggcctgggctcagggcactctagtgggccccaggctccggcggggtgagtggaatgtggtcacggaggccaccccacgctgtcttgttgggtttaatgagccccattggtctgtccataccctgaataagctctggtctaccgaccctcctatgggctgctggggcgggggaggtcccagggttttccagattcagctgtcctccctctgcagtctcagggacccagacagggctggctgacaaacaggtcctgcccgggatgggcgtggggctgagcgagcgaaactccttttaggaaggaaatctcggccaggttgagaaaccagcatcttgccaaggcctagggggtgggggagcccaggtgagccgactcagtcctcaggaatgggtggggtctccaggagaggcgggcacttcctccgccccagcccagggtcctgttcaatccttattgaggagtttcctggcgacaggcagtgacctgtcggctgcctgtgtgggaagccgcttggcgtggccctccccatctcattagtggtgattcacctggactcacctggctgtcagggacctgtcccactgcccgctggaaccagctcagcaggcaccctctgaggggcagagacctcgttccctcagctcccc

SEQ ID NO: 339029 - DNA, 126 bp, Homo sapiens
  chr6:37275447-37275573
  hypo
cgcaaggtattcttatgagtccggttcaacaacaacaacaacaaggacccgaatcaggtaaaccagaggctttggaaaatagaaaggccatctgcagctgaggcgttggagcctcttggtccggcc

SEQ ID NO: 339030 - DNA, 411 bp, Homo sapiens
  chr6:37358463-37358874
  hypo
cggaagggaaatacaggctcctcatttatttatttctcttctttttctccaaagcaaagagattgttctgaagaccgtgctctaagggcatttgaaagactgccaggtagtgcgagcctgagatggtctggaggattctctctagccgtgactccgctgctctgaaggtcaactgagaagtcttgtgggacagagacttgagttaggaagccctcagtcacttgccttccacggtggccagccctgctgccatcattggctgaagcaccaccaggattcacggcacccaactgcttcagggtacttcgtagactctgcctcactacatgtcgaaagagttatttgagttctcttctgtttttttttaatttgttgttgttgttactgttttgatacctcggaaacacctcc

SEQ ID NO: 339031 - DNA, 70 bp, Homo sapiens
  chr6:37450290-37450360
  hypo
cgaagatggattaactccgcactcccctgggatcgccacatgaccacttcaagtccccaagccgcccttc

SEQ ID NO: 339032 - DNA, 158 bp, Homo sapiens
  chr6:37450665-37450823
  hypo
cgtccaccctccgctagtcagaccatgacatttactcagcagacgggaacagctttgtgttctttattgcctctcccttgggctaagggagggaccagcaccatgtccttctggagacccggaaccccccagcaggccagggaggcaaggcctgggcc

SEQ ID NO: 339033 - DNA, 1671 bp, Homo sapiens; identical to SEQ ID NO: 332770
  chr6:37664032-37665703
  hypo

SEQ ID NO: 339034 - DNA, 609 bp, Homo sapiens; identical to SEQ ID NO: 332771
  chr6:37666475-37667084
  hypo

SEQ ID NO: 339035 - DNA, 49 bp, Homo sapiens
  chr6:38020529-38020578
  hypo
cgccgggcgtggtggctcacgcctgtaatcccagagtgattacaggcac

SEQ ID NO: 339036 - DNA, 132 bp, Homo sapiens
  chr6:38084382-38084514
  hypo
cggccacgactacttgagaatacggaacggtccgaggaaaccagtcgatctaaacagaagagtcgacgtcggtgcttccagtgccaaaccaaactggagctggtgcagcaggaattgggatcgtgtcgctgc

SEQ ID NO: 339037 - DNA, 219 bp, Homo sapiens
  chr6:38118812-38119031
  hypo
cgttttgaaagaggcggccagcagactctggggacctcagacgtctgtgctccacatgcgtatcggccgctctagagattgcctgggaagctggagggaatgggagacaccccggtgcagctgcgccctgagttctctgagcctggctcctggctccctgcagccctcccctccttgttcctgacccagagtgactttacctgtaccggctccctgctc

SEQ ID NO: 339038 - DNA, 502 bp, Homo sapiens
  chr6:38141432-38141934
  hypo
cgccctcaccctcctttgatcagggttgcaggttggcgccgaagacccaaggactgcagtgctgctcacgtgccatgccgtcctggggagactcccaggctgatgctgatggcgacagaggccggagctctggggacagcggaggggcaggcaatgttgtgcgcagttacccagggcaggcagcactggaatggaaatcactaagtaggagacggagccacatcaagccaccatcgtcaaatgaggtccttttgatgaggattaggagaaaagcttcttggaactgctatttttcagtccccagttgagtactgtggtgtgggggaagcacggagtcccagttctgcgttcctgacgctgatgggcaggtggctgcctctccaatgcttcgataaacacaactggaggggcagctaagccacggcagtccccggcaggtttggccacgccagaactcggtatatgtttatctacatggacttcggaacagtgaattagcagc

SEQ ID NO: 339039 - DNA, 802 bp, Homo sapiens
  chr6:39158588-39159390
  hypo
cgtcccggtcatctcgggacaccctagggtgaggggggaagaggccatcaaaggtggggtggggagccggccctgcctcatgtgcccttggggctgttagccttgttgtactcattcatcagctgttcgtaaggcacagagagctcagactcagtgctggtgaaggtggactcggaggaggaggggaactcgcccatgttcaggggcgccttggcttcagccccctgctgggggctctcctcccctgccaagttgtcctctagcgaggacttggaggtctcctcgtctgagaggccagcctccgtgttcacgaaggtgatgctggcgtcctggaagatgagtgggtggtagtcctgggcgtcccatggctcgcattcctcgctgatgcggtccagctggttcatgaacacctcgggggcaggggagctgtcttcaggggcccgtgccacagcctcctcatctggggaccttgatacgtggcctttgctcctcagtgtctgtgacacctcttccaaggtgggcacccggttcttggagtagactaccaggggcaccagggaagggggcagtgctgggagcccaccgccttgaggccccagccctgggcccgggcccgtctccccacccccgcttgtcttcatggccttcttcccgatctgcttgatgaggtcgttgtaggtctcttccttcttggaaagaaagctgaagatgttgacgtccttggaggctgtgctccccttcacctgcagggccttccgggagtgtggggagctctcaaaggactccttccgtcgccgccgcc

SEQ ID NO: 339040 - DNA, 754 bp, Homo sapiens; identical to SEQ ID NO: 332774
  chr6:39281374-39282128
  hypo

SEQ ID NO: 339041 - DNA, 261 bp, Homo sapiens
  chr6:39895099-39895360
  hypo
cgcaggtagctgtgctgccggccgaagctgtctgtgaggaaggcggagaagggggccgcatgctcccgcaggaactgcctccgcctggacacctcctgcgaggacagaccagggaggaagcatgggcccctgctaccgggctgggaagaggcacaaggagaaccgcctgccccctcccttactctgacatctgtgcggagcttccaactcttccacatgtttgggctctgcaatgttggggaagctgggattgtccctctc

SEQ ID NO: 339042 - DNA, 454 bp, Homo sapiens; identical to SEQ ID NO: 332776
  chr6:39901937-39902391
  hypo

SEQ ID NO: 339043 - DNA, 320 bp, Homo sapiens
  chr6:40360223-40360543
  hypo
ccaggagctcgttgcgcaccaccaccttcggcgggccctgcggcggggccccggctggtgcgctgcttggaggcggtggctgggcgccgttggtctgcgagtacacattgctcacggccgctgccatcttgctgggggcctcgtggttgcagaccttgtagcgcaccatgaggatgacgatgaagaccagcagcgtggccacgatgatgcccccgatgaccaggatcatggtgccgcccagaatctggctgtgcatggactggcactgcgggtagtcagccttggtgaagaactgggcgcagcccacgatgttggtggcc

SEQ ID NO: 339044 - DNA, 706 bp, Homo sapiens
  chr6:40399988-40400694
  hypo
cggctcgcacacaaactcctcctcacgcacatgccagaagtagcgacccttgaggccccctggggagccacaggtttccaggtcatcgtcccgctcgagcctccgcagccagagaagctcacaattgcagtgaagtgggttacccccaaaactaaaggacaagggtggggcaaagggtgtggctgtcaaagccgaagcctgggagcgggcaaagatgggatcagggggcagcttctgcagccgattggaggtgagatccaggcgggccagtttctgcaggtctgcaaaggtgccctcggcgatgtgatccagcaggttgtggtccaggctcagctggtggaggttgaccatgcgtcgcacggagtcccacggcaggccatggaggttgttgtaggagaggtccagatcctccaatgtcagcaggaagtcctcaaaagcctcatctgcgatgccgcccagctggttgttgttcacgataaggtgctgcaggttgaccaggccccggagggtgtcctccccaaggcttggcagccgattgctgtcaagatgcagggagcggaggctctcgaggtccagaaaggaaaagggctggatgtggctgatggtgttcctggacagggtcaggtccaccagccccgtcatgttggcaaagtcctggcggctgatgtggatgatgaagttgccgcccaggcgcagctccactgtc

SEQ ID NO: 339045 - DNA, 851 bp, Homo sapiens; identical to SEQ ID NO: 332777
  chr6:40554364-40555215
  hypo

SEQ ID NO: 339046 - DNA, 1317 bp, Homo sapiens; identical to SEQ ID NO: 332779
  chr6:41339070-41340387
  hypo

SEQ ID NO: 339047 - DNA, 252 bp, Homo sapiens; identical to SEQ ID NO: 332780
  chr6:41340935-41341187
  hypo

SEQ ID NO: 339048 - DNA, 312 bp, Homo sapiens
  chr6:41620850-41621162
  hypo
cgctccgatgtgcttaactgtctgtgcctcggggtcatcacctagaaaatggagctgtggggacggattcgtgagcttcaggcacacagtgaacactcagcgtccctgctgctgccgctgccgcaggcccccacacccccggctatttcacacacgctcatccctcccctctctcacccgtccccctctccaccgccaccccgcagactgctgtgtccactgcatcctgtcctgcctgttctgcgagttcctgacgctgtgcaacatcgtcctggactgcgccacctgtggctcctgcagctcggaggactc

SEQ ID NO: 339049 - DNA, 249 bp, Homo sapiens
  chr6:41715240-41715489
  hypo
cgtgtatcgtttctgtgtatttttccttcttgagggtggccgcaacagactttcatcttattgactttttggttcaagcatcggaggccaggaggtgcaagcgataagagagaaagttgccgtaagatggagtggtgaagattacgtcttgttcccaaaccagaggcataatgtgtgcatttagggacgagggccagaaaaaggtagaggcagagtgctgggatagataggatctatagccagggtttc

SEQ ID NO: 339050 - DNA, 1023 bp, Homo sapiens
  chr6:41773505-41774528
  hypo
cgcagagaaattcctgcgcgtcctgttggtcgtagccgcggaaggcagggatcaggctccacactgagtggagcatggcgaagggcgacactagggcccacttcccggaccacatgactcggaagagggtgtgcagttcacggcagagggaaatgtgctttgaactcggctccttgttctggatgagctccagactccgactaatggaggccctgccgttccagcagaagccctcccgctcgcatgcctcggccctgtcatttctcaaggacagctccgtggccgagctgttggttggcttgccagaaagctgagtcttcccgttggtggctttgggaaacagatgttccgttttggaagggtcaaggttgaggaaacattctcggaacttctggaggtggctgagcacctggaggatggagttcatgtagcaggtgttgcccaggttgcgcaggcccgtgacgcctggggccatggccggctggcgacgcagcttgagtgtggcggcgggcactctgcgtgaggtagggagggcggcggggcgcgaggcagccgggcccgcgtcgcggggcgtgtgcaggagcagccgtgcactcttgcgcggaggggtgctggccagctcctccagcagccgccgtttcacctcgcgccgccgcctccgcgcctcctccttcttgcgctccagggcctcctcctgccgccgctgctccagcttcgcctggccccgggagctcttctcgaaccacagccgcagcgtcctggccagcaggcgctgacgccggtaccacagagccgtgagcatctgcggctgtccctgaggagcgcgctgcggcaggaccacgtcctcacccgaagccatggaccgcagcgtccgcccacgtctcaccggcgtgtcctgtttctggccccggaccgccaggagggagcttcttagcagcttcaggtccccctctgggttatcattgagcacgtagtccttgcacaggtaacagaacacgtagagatcccggacttccatggcta

SEQ ID NO: 339051 - DNA, 171 bp, Homo sapiens
  chr6:41827211-41827382
  hypo
cgagcacgtgtgtactttcccttattcagcatctaccatgctgtactgtaattgtctgtctgcttgactgtgtcccaactataacaaacctgaagaagacatcgtgccgagaacagagcaggaacctaataaattttgttgaattaaagaccgagtgaataaacaaataac

SEQ ID NO: 339052 - DNA, 104 bp, Homo sapiens
  chr6:42762779-42762883
  hypo
cgcatgaacgacagtcaaggtaactgaaaagatctacatctattgttagaaagttgtctaacttgttttccaaaactttctgctattagatttaaaaacgtgac

SEQ ID NO: 339053 - DNA, 79 bp, Homo sapiens; identical to SEQ ID NO: 256109
  chr6:42813437-42813516
  hypo

SEQ ID NO: 339054 - DNA, 236 bp, Homo sapiens
  chr6:43096747-43096983
  hypo
cgtcctcccaggatgcactgcaggggcgccgggcgctgcttcgctgtgaggttgaggctccgggcccggtacatgtgtactggctgctcgatggggcccctgtccaggacacggagcggcgtttcgcccagggcagcagcctgagctttgcagctgtggaccggctgcaggactctggcaccttccagtgtgtggctcgggatgatgtcactggagaagaagcccgcagtgccaac

SEQ ID NO: 339055 - DNA, 236 bp, Homo sapiens
  chr6:43478566-43478802
  hypo
ggccccaggggccacggctgggcagagccagcttgagctgctggggagaagggtaccccatagggtccctagggcaggggagcctcagatagatgcaaggtcctggtgccacaccttctcaggtacgcagggcactgttgacatctgagggtgtgtccgtgccgcgagactggggcagccaatacaaagaaggtgccagggccagggccctggagcactggtgaggacgtgaaggc

SEQ ID NO: 339056 - DNA, 92 bp, Homo sapiens
  chr6:43639563-43639655
  hypo
cgggcatgcgcaccctgttccagcgggggccttttttgtagatgggcttgacggagccaggagcccagcgcgtcaggtacctgtggagggag

SEQ ID NO: 339057 - DNA, 293 bp, Homo sapiens
  chr6:43641288-43641581
  hypo
cgccacacggagcggccagctggcagggggtgggccgggtggcctccagccagctctttgggaacaccccagctctagcaagaaccaagtctctttcctaaaccagccccttcctacctctcctgaaggggcagcaggaggagcgacacagcagcagacaaagcatggctccgccaggccccagcggagcctgggcccatgcatggcagcattaaacgagactcccctgcaagggaatccatttccttcgtagcctgaactccccctcccgctcagcgtggccttttgcaacc

SEQ ID NO: 339058 - DNA, 278 bp, Homo sapiens
  chr6:43745076-43745354
  hypo
cgttagattttggaaggacttgcctgattcggaagctccaaagagtggcattacagagctgggtggagagaggggctagccatcttttgtgtcgcccaccgggctcatgtgtcatcgcctctcatgcagtggtgaagttcatggatgtctatcagcgcagctactgccatccaatcgagaccctggtggacatcttccaggagtaccctgatgagatcgagtacatcttcaagccatcctgtgtgcccctgatgcgatgcgggggctgctgcaatgac

SEQ ID NO: 339059 - DNA, 312 bp, Homo sapiens
  chr6:43748290-43748602
  hypo
cgcctgtgtgcgcccgcgcatgcctccccagagaccacctgcctcctgacacttcctccgggaagcggccctgtgtggctttgctttggtcgttcccccatccctgcccaccttaccacttcttttactccccccaccgcccccgctctctctctgtctctgtttttttattttccagaaaatcagttcgaggaaagggaaaggggcaaaaacgaaagcgcaagaaatcccggtataagtcctggagcgtgtacgttggtgcccgctgctgtctaatgccctggagcctccctggcccccagtacaacctcc

SEQ ID NO: 339060 - DNA, 126 bp, Homo sapiens
  chr6:43752469-43752595
  hypo
cgcagagcactttgggtccggagggcgagactccggcggaagcattcccgggcgggtgacccagcacggtccctcttggaattggattcgccattttatttttcttgctgctaaatcaccgagccc

SEQ ID NO: 339061 - DNA, 85 bp, Homo sapiens
  chr6:43814642-43814727
  hypo
cgttggctgaaacatcattatgcggtacatgactgtataaaactaaataggtagtttcatgagagaaataatcagaagttactac

SEQ ID NO: 339062 - DNA, 346 bp, Homo sapiens; identical to SEQ ID NO: 332791
  chr6:44044201-44044547
  hypo

SEQ ID NO: 339063 - DNA, 116 bp, Homo sapiens
  chr6:44077041-44077157
  hypo
cgcacggggaggttggagcggaacggccttgggctcccacctgcacagtaggatctcacccccggattgaccccggccctggccctcctccacactcttgacacaggaggaggcac

SEQ ID NO: 339064 - DNA, 204 bp, Homo sapiens
  chr6:44120364-44120568
  hypo
cgcctggatgatgtgcgtcttcacggtggtcatgacctacagtatcacctgccccatcatcgtgcccttcggtaggcaccgccgcgccgggacctgggccctgctcggggggacccaggacttcaccctctccactctaggaatgcaggccaccccgagtggacagggcccggctgggagaccggcccctcggggctcccgccc

SEQ ID NO: 339065 - DNA, 997 bp, Homo sapiens; identical to SEQ ID NO: 332795
  chr6:45390544-45391541
  hypo

SEQ ID NO: 339066 - DNA, 525 bp, Homo sapiens; identical to SEQ ID NO: 332796
  chr6:45631099-45631624
  hypo

SEQ ID NO: 339067 - DNA, 965 bp, Homo sapiens; identical to SEQ ID NO: 332798
  chr6:46097250-46098215
  hypo

SEQ ID NO: 339068 - DNA, 605 bp, Homo sapiens
  chr6:47202003-47202608
  hypo
cgcacggcctaaaacctgtacttctgactctcaagataagttcaactttaaatctttggatacagcaagcttggtaaataattttcaaaaatcttgccagactacattttatcaggccttccccgaaacacacatttgatagcatcatgaggataaagggtggccgatagctctccaccgggcagtgcgagctgcaaagattttggaggcgtgtcttcgccagccaatggcgaggttactctcgggccagcgtatcttgaagttttggactggtcttcctgggcaggtaattcagatgactcaactctcagctacaactggactgtggacggggagggacgaatcccaggggctctttggggggtttaagtgcgtgtgtgaggtctgctgcgatgcccgtacctttggtaataaaggaaccgttcctgctcagcgcggaggagccgctggatgtagagtcacagcggagaaggggctccgactcatccacgaagaagcccttgttcttgtcctgtggggaaggctccaccgtcaggagagcggaattctcaagtttcgcgttggggctggggatggggctcgggctaagcgggctggggctcatc

SEQ ID NO: 339069 - DNA, 198 bp, Homo sapiens
  chr6:52141070-52141268
  hypo
cgtagacagggttggcagctgccaaaacactgcagcgggcattcagccgagcatggatgccagccttggcaatggtcactcgaccctgctccatcacttcatggatggctgtgcgatccatgtcagacattttgtcaaattcatcaatgcaaaccacgcctcggtcagccaggaccatggcccctgcttccagacggc

SEQ ID NO: 339070 - DNA, 908 bp, Homo sapiens; identical to SEQ ID NO: 332820
  chr6:52227115-52228023
  hypo

SEQ ID NO: 339071 - DNA, 261 bp, Homo sapiens
  chr6:52344303-52344564
  hypo
cgtttaaagaaagctcattagtttctgtcataaatgcatacctgtgaatttatcattggagggttaatactattttactcctgattgcgtgagagaacatcaccaagctaagtgtgttgctaccttctctccagtgtttggtcaccggttcatcatccttgatacagacgagtatgttttgaaatacatggagagcaacgctgcccagtattcaccagaagcactcgcgtcaattcagaaccatgtccgaaagcgagaagc

SEQ ID NO: 339072 - DNA, 110 bp, Homo sapiens
  chr6:52409363-52409473
  hypo
cggcactggcgtttgagtccatcttgctcgagtctacaaagaccggccaatgaccacctacgtgagggaacccgataagcagaacttcatgatgatgatttgattccagc

SEQ ID NO: 339073 - DNA, 115 bp, Homo sapiens
  chr6:53139871-53139986
  hypo
cgtctctaatacttacagtggccgcaggggacccagttcatcacaaaccaccagatgttcagcatcgaggcatggtggtagacgtgcaggaccgtgatctggtggttgttcttgc

SEQ ID NO: 339074 - DNA, 1839 bp, Homo sapiens; identical to SEQ ID NO: 332821
  chr6:53212372-53214211
  hypo

SEQ ID NO: 339075 - DNA, 1731 bp, Homo sapiens; identical to SEQ ID NO: 332824
  chr6:56818408-56820139
  hypo

SEQ ID NO: 339076 - DNA, 126 bp, Homo sapiens
  chr6:56894243-56894369
  hypo
cgcccttcggtggaaaagttcagtctgaacgtttagcgagtgctgcctctaaagagagcaatcactacacttacggctgagactttgcgcttagtagttcagaggcccccaggcagactacagacc

SEQ ID NO: 339077 - DNA, 77 bp, Homo sapiens
  chr6:57085548-57085625
  hypo
cgggggagcgatagatttgttctacatccttactgtagtggtggttacatgagtctaaaattcgcagaactgtacat

SEQ ID NO: 339078 - DNA, 1074 bp, Homo sapiens; identical to SEQ ID NO: 332828
  chr6:62995456-62996530
  hypo

SEQ ID NO: 339079 - DNA, 197 bp, Homo sapiens
  chr6:64150651-64150848
  hypo
cgttcagccgaccgtcaccatgaccaacgcagatagcgagggcggaaacctccgccaccagctggacagcaacaaacaggacctgagcctcagcaacctggatgaagacccggtcaaggagctggctgcccttccaaagactaccacactggatctgtcttgtaataaatgactattgtgccgggcacggtggctca

SEQ ID NO: 339080 - DNA, 1998 bp, Homo sapiens; identical to SEQ ID NO: 332829
  chr6:69344116-69346114
  hypo

SEQ ID NO: 339081 - DNA, 897 bp, Homo sapiens; identical to SEQ ID NO: 332833
  chr6:71123138-71124035
  hypo

SEQ ID NO: 339082 - DNA, 1679 bp, Homo sapiens; identical to SEQ ID NO: 332834
  chr6:71665452-71667131
  hypo

SEQ ID NO: 339083 - DNA, 100 bp, Homo sapiens
  chr6:71955569-71955669
  hypo
cgccaccgatggcctgccgatgtctgctggtgtctgtgtgtttgcttttctgctcctcttgacgaccagccatttgtgtctgtgcccgctacggtctctc

SEQ ID NO: 339084 - DNA, 1130 bp, Homo sapiens; identical to SEQ ID NO: 332836
  chr6:72129577-72130707
  hypo

SEQ ID NO: 339085 - DNA, 2326 bp, Homo sapiens; identical to SEQ ID NO: 332839
  chr6:73330782-73333108
  hypo

SEQ ID NO: 339086 - DNA, 481 bp, Homo sapiens; identical to SEQ ID NO: 332840
  chr6:73972647-73973128
  hypo

SEQ ID NO: 339087 - DNA, 823 bp, Homo sapiens; identical to SEQ ID NO: 332841
  chr6:74019373-74020196
  hypo

SEQ ID NO: 339088 - DNA, 192 bp, Homo sapiens
  chr6:74079530-74079722
  hypo
cgcggagcgcgctcgaggcggctttcgcaagacctcttccagacccaggcgcgaagctcgggctctcttttaccatattcgacccgctccgccccttccggcggcgcctcgcaccgcgtcggggtgagcgggtgcaagcgacgccccggcatagcggcaccattggacacttcctgcgctgcttcaatcgcc

SEQ ID NO: 339089 - DNA, 1016 bp, Homo sapiens; identical to SEQ ID NO: 332842
  chr6:74161047-74162063
  hypo

SEQ ID NO: 339090 - DNA, 589 bp, Homo sapiens; identical to SEQ ID NO: 332843
  chr6:74405600-74406189
  hypo

SEQ ID NO: 339091 - DNA, 63 bp, Homo sapiens
  chr6:75985977-75986040
  hypo
aaataaagtgtttacctgagttctatgagccgctctagcaaataaagcaaactcaaggagggc

SEQ ID NO: 339092 - DNA, 1112 bp, Homo sapiens; identical to SEQ ID NO: 332847
  chr6:80656571-80657683
  hypo

SEQ ID NO: 339093 - DNA, 988 bp, Homo sapiens; identical to SEQ ID NO: 332849
  chr6:84417712-84418700
  hypo

SEQ ID NO: 339094 - DNA, 53 bp, Homo sapiens
  chr6:86325389-86325442
  hypo
cggtcatgcctgtaatcccagctatgcgggaggctgagtgaagcaggtgaatc

SEQ ID NO: 339095 - DNA, 2035 bp, Homo sapiens; identical to SEQ ID NO: 332856
  chr6:88875397-88877432
  hypo

SEQ ID NO: 339096 - DNA, 129 bp, Homo sapiens
  chr6:89554102-89554231
  hypo
cggcttatttctgacgctaaatggttcctgtgttttgtcaatgagcccagtcttcattttttcgtgtcgaggacttataatttctcgttctatacactgcagacgaacattaaaatcacaatctccaac

SEQ ID NO: 339097 - DNA, 65 bp, Homo sapiens
  chr6:89857597-89857662
  hypo
cgaggcctcctcttaaaaaaaaaaagagcggcggcttcatgtcagagtttgagcactgtagaacc

SEQ ID NO: 339098 - DNA, 1561 bp, Homo sapiens; identical to SEQ ID NO: 332858
  chr6:90120936-90122497
  hypo

SEQ ID NO: 339099 - DNA, 1067 bp, Homo sapiens; identical to SEQ ID NO: 332859
  chr6:90142647-90143714
  hypo

SEQ ID NO: 339100 - DNA, 79 bp, Homo sapiens
  chr6:90359827-90359906
  hypo
cgaagccaaatcttgtctttccgaaattgactagcaatgtatggaatgactttccgtatgtttagtcgtttcccagttc

SEQ ID NO: 339101 - DNA, 206 bp, Homo sapiens
  chr6:90367697-90367903
  hypo
cgaaattgctgaatgaggcatttttcagaatgtatccctgtctttaaaaaataactgttcagtcacgcgttgcttaaagaatgagatgtggtctgttagatgtcaacaacaaaacaaacaacaaaataaccaaacataaaccaactaatgctacacagaatgtgatgtcggacagggagaagagaccctactaagaggcagctggc

SEQ ID NO: 339102 - DNA, 2100 bp, Homo sapiens; identical to SEQ ID NO: 332860
  chr6:91004776-91006876
  hypo

SEQ ID NO: 339103 - DNA, 1033 bp, Homo sapiens; identical to SEQ ID NO: 332861
  chr6:91320248-91321281
  hypo

SEQ ID NO: 339104 - DNA, 1483 bp, Homo sapiens; identical to SEQ ID NO: 332871
  chr6:100061279-100062762
  hypo

SEQ ID NO: 339105 - DNA, 1413 bp, Homo sapiens; identical to SEQ ID NO: 332881
  chr6:105584128-105585541
  hypo

SEQ ID NO: 339106 - DNA, 975 bp, Homo sapiens; identical to SEQ ID NO: 332882
  chr6:105627242-105628217
  hypo

SEQ ID NO: 339107 - DNA, 375 bp, Homo sapiens
  chr6:105750354-105750729
  hypo
cgggtacggccgctccttccgcggctgctgcttggtcttcaggttctcctcgtgcttgctgggccagtggcgcaggcgcatgttttctcaggccgcaggtccaggggcttgtacctcttgcccttgtagaatttcctgaggttttctttgtgtgagtctggttaattacggtgagaacacgggcaatggaattgtggatgacacggatcttagagagcttggagaccgcgccgcctgtcagtggcgatgcgcagctgggacagctccaccttcaggtcgtccagctgtttgagcagcaactctttctccttcccgtgaaggtcccgagacttgatcttagccattgctgcacaggccgcccccgccgcctgctcc

SEQ ID NO: 339108 - DNA, 142 bp, Homo sapiens
  chr6:106456830-106456972
  hypo
cgcagcggtggccaggtccatggccaggcattgtctctgactcctaagaccccagcaactgaacacaggcccctcacggcagtggttatattctgccacgttctatgtctaccctttcgctcacgcccccttctgtcttagc

SEQ ID NO: 339109 - DNA, 769 bp, Homo sapiens; identical to SEQ ID NO: 332885
  chr6:106533694-106534463
  hypo

SEQ ID NO: 339110 - DNA, 1654 bp, Homo sapiens; identical to SEQ ID NO: 332888
  chr6:106959524-106961178
  hypo

SEQ ID NO: 339111 - DNA, 1077 bp, Homo sapiens; identical to SEQ ID NO: 332889
  chr6:107810018-107811095
  hypo

SEQ ID NO: 339112 - DNA, 163 bp, Homo sapiens; identical to SEQ ID NO: 332893
  chr6:108455187-108455350
  hypo

SEQ ID NO: 339113 - DNA, 85 bp, Homo sapiens
  chr6:109053387-109053472
  hypo
cggagtgatggatgcggcaggagtgttcaagcagtgcctctcccatctgcagcttcgtccggtttccagtcaagcactactgcac

SEQ ID NO: 339114 - DNA, 121 bp, Homo sapiens
  chr6:109058656-109058777
  hypo
cgtaacacaaaagcagtccaaataattcttttcagatcatagtatacagtttactggcctagaattagtttataatcagttgtggtcgggccaagaaaattattgatattgggccgggcgc

SEQ ID NO: 339115 - DNA, 114 bp, Homo sapiens
  chr6:109059982-109060096
  hypo
cgcgcagggaaggatggccgccccaccctaatcttataaggcaaatcaactttccccttagctggtgccatcttctctgctccttactgtacaggtggctggcaaagaagggac

SEQ ID NO: 339116 - DNA, 117 bp, Homo sapiens
  chr6:109647760-109647877
  hypo
tgcagcaaagcggacgccttcctccatggaatgtgctgatttcagacggggcatcagccaatgtagaaaacactaacattttttcttggaactggattgtgatgagaggtgcttgcc

SEQ ID NO: 339117 - DNA, 94 bp, Homo sapiens
  chr6:110768091-110768185
  hypo
cgagcagccatgaaggtgtaataatcaactgcaaacgccgctgctattccaaacaaaaacatgctactgcttgtggcccacaagaccacccggc

SEQ ID NO: 339118 - DNA, 93 bp, Homo sapiens
  chr6:110842285-110842378
  hypo
cgcaatcacacctcaccatcctagcctagtgccggctctcagccggtgtttaagggagttgttcagtaaaggggccctccccggcaccgcacc

SEQ ID NO: 339119 - DNA, 1114 bp, Homo sapiens; identical to SEQ ID NO: 332903
  chr6:111408744-111409858
  hypo

SEQ ID NO: 339120 - DNA, 184 bp, Homo sapiens
  chr6:111751880-111752064
  hypo
cgccttcaagagtcccagcaaagaaaataaaaagaaagacaaagacatgcttgaagataagtttaaaagcaataatttagagagagcgcaggagcagcttgaccgcatcgtgaaggaatctggaggaaagctgaccaggcggcttgtgaacagtcagtgcaaattggaaagaagaaaaccagac

SEQ ID NO: 339121 - DNA, 135 bp, Homo sapiens
  chr6:111766152-111766287
  hypo
cgaaggagatttatggaaggcaatgattaacccagagaactaacctaggcagtcaagcaaccgatcacctcatcgttttcaagaatcaactacagataataagacggcaacaggagagaaatataagaagctctc

SEQ ID NO: 339122 - DNA, 66 bp, Homo sapiens
  chr6:112021634-112021700
  hypo
cgctccttaaacagcgctacaccagcagacgaccacacacacggtggaagatcagacgccacacac

SEQ ID NO: 339123 - DNA, 899 bp, Homo sapiens; identical to SEQ ID NO: 332908
  chr6:118228010-118228909
  hypo

SEQ ID NO: 339124 - DNA, 178 bp, Homo sapiens
  chr6:119510833-119511011
  hypo
cgattatatgattcatgacaagtacgggcaatttcagccccgagttcaaggtagtgttgggccatgccttcgggagctgcatcagccccgagtgcgaacatgccccccgcgaagcaggtcaggtggcccatcttgtgctccaggaggccccctttccactctgcgatataagttagtc

SEQ ID NO: 339125 - DNA, 917 bp, Homo sapiens; identical to SEQ ID NO: 332913
  chr6:124124391-124125308
  hypo

SEQ ID NO: 339126 - DNA, 1894 bp, Homo sapiens; identical to SEQ ID NO: 332916
  chr6:127439825-127441719
  hypo

SEQ ID NO: 339127 - DNA, 1750 bp, Homo sapiens; identical to SEQ ID NO: 332918
  chr6:127836030-127837780
  hypo

SEQ ID NO: 339128 - DNA, 734 bp, Homo sapiens
  chr6:128901277-128902011
  hypo
cgatgtcgacactctgcacatgctcctcaaacttggtgatctcctcctccagcaagtctgtccccactttgtcgtcctccaccacacactgaatctgcatcttccggataccatagcccacggacgccagcttggaggccccgctcactagcccatccagctggatagagcgcacacatgcctccagctgggtcatgtccgtcttattgtcccaaggcttgatgtccagcaggatggaggacttggccaccagcgagggattcttggccttcttggcgtacagccgcagccgctcctcccgcagccgccttgcctccttgtcttcctccttattgtcgctgccaacagatcaatgtcatcgtcctcgttatcctctgcttcttggccggggtcgtagtaaggggggcgaggggaggggcgctccacttggcgcatgggagacacgtgctgtgtctgcgggactgtggaccatggccaggcgagctcttctctcttctccggcatgttcagccaggcctccaggttggagaccgcctgctgcagctcctgcaccacgccgcgcaggctctggttctccacttccaggctggcgatctggaggacgagctcgctgtggtcttccctggggccgagctctggcgggaggcgctggccacaggcccattcatctgcttgtagaatttcctttctgtatcttcatatttgaatttgtcgagccagatcttctcatgtgc

SEQ ID NO: 339129 - DNA, 89 bp, Homo sapiens
  chr6:130499429-130499518
  hypo
cccttcttgaagacagtgccttagggctgcttctgctgctcttctccgctgcaatgccgtgtgattgaatagatccccacagtgagtgc

SEQ ID NO: 339130 - DNA, 1357 bp, Homo sapiens; identical to SEQ ID NO: 332921
  chr6:130686392-130687749
  hypo

SEQ ID NO: 339131 - DNA, 365 bp, Homo sapiens; identical to SEQ ID NO: 332922
  chr6:131383375-131383740
  hypo

SEQ ID NO: 339132 - DNA, 133 bp, Homo sapiens
  chr6:131455819-131455952
  hypo
gagtaactagtttgccgacttctagtgtgcagcctttacgccagctgttgtggctgtgtaggggtcttcttttcttccatccctattctacgatgcattcaacataagcgaagtgttattattcacgaaaggc

SEQ ID NO: 339133 - DNA, 2534 bp, Homo sapiens; identical to SEQ ID NO: 332924
  chr6:133561662-133564196
  hypo

SEQ ID NO: 339134 - DNA, 41 bp, Homo sapiens
  chr6:136552688-136552729
  hypo
cgctcagagccaaggacaaaagtgaacgagacactctcagc

SEQ ID NO: 339135 - DNA, 138 bp, Homo sapiens
  chr6:136556325-136556463
  hypo
cctgattcctagatcttaagcaaccgggtgatcgtgttgccatttgctaatatgcaaaagacgtgggaaagaacaggttttcaaggtggcggaaaagaacaggtaggaaggaaaagtcctgttttggacctgtgaaac

SEQ ID NO: 339136 - DNA, 176 bp, Homo sapiens
  chr6:136682773-136682949
  hypo
cggtccagcgagtgcatgagatccttccccagggtacagttgtgttcgtttgaagaacaattatattgacattcgtcttattaggcccagaagatgaccaattaaacaaactgtttctggaatactgcctggcaggcaatcatggggcatgtaaagatcccacctggctaccctcc

SEQ ID NO: 339137 - DNA, 135 bp, Homo sapiens
  chr6:136901469-136901604
  hypo
cgccttccgaatgatactgtctaaggcaaacatccagtgcggcttgatgttatgattccgaagaactttattgacctggagagagagtgacatttagcctactttaatttttaattgcaaatagcctagatgatc

SEQ ID NO: 339138 - DNA, 97 bp, Homo sapiens
  chr6:136980882-136980979
  hypo
cgtgtacagagttttaatttggaagataaaaaagttcgggaggtgaatagtggtgttggctgcgtaacagtgcgaatgttcttaatgccactgaagc

SEQ ID NO: 339139 - DNA, 99 bp, Homo sapiens; identical to SEQ ID NO: 256370
  chr6:137144497-137144596
  hypo

SEQ ID NO: 339140 - DNA, 2362 bp, Homo sapiens; identical to SEQ ID NO: 332930
  chr6:137241797-137244159
  hypo

SEQ ID NO: 339141 - DNA, 852 bp, Homo sapiens; identical to SEQ ID NO: 332931
  chr6:137244173-137245025
  hypo

SEQ ID NO: 339142 - DNA, 249 bp, Homo sapiens; identical to SEQ ID NO: 332941
  chr6:138724531-138724780
  hypo

SEQ ID NO: 339143 - DNA, 865 bp, Homo sapiens; identical to SEQ ID NO: 332944
  chr6:142622583-142623448
  hypo

SEQ ID NO: 339144 - DNA, 761 bp, Homo sapiens; identical to SEQ ID NO: 332947
  chr6:146136035-146136796
  hypo

SEQ ID NO: 339145 - DNA, 455 bp, Homo sapiens
  chr6:149915200-149915655
  hypo
cgccacttgtgctgccgccatgtctctagtgatccctgaaaagtcccagcatattttgccgagtagtcaacaccaacattgatgggtggcggaaaatggcctttgccatcactgccgttaagggtgtgggccgaagatatgctcatgtggtgttgaggaaagcagacactgacctcaccaagagggcgggagaactcactgaggatgaggtggaacatgtgatcaccattatgcagaatccacactagtacaagatgccagcctggttcttgaacagacagaaggatgtaaaggatggaaaatatagccaggtcctagccaatggtctggacaacaagctctgtgaagacctggagcgactgaaaaagattcgggcccgtagagggctgcgtcacttctggggccttcgtgtccgaggccagcacaccaagaccacaggctgccgtggccgcatc

SEQ ID NO: 339146 - DNA, 462 bp, Homo sapiens
  chr6:150654152-150654614
  hypo
cgcgagttgatagtgcgtgagttgatagtgtgtatgagttgatagtttgtgccaggtgatagtgggtgagttgatagtgtgcacgagttgatagtgtgcacgtgatagtgtgtgcacgagttgacagtgtgtgagttgatagtgtgtcagttgatagcatgtgagttgatagtgtgtgcatgagttgctagtgcacgagttgattgagttgatagtatgcaagttgatagtgtgcacgagttggtattgtgtgcaagttgatagtgtgcacgagttgatagttgcaggttgatagtgtgtgcacgagttaacagtgtgcaagttgatagtgtgtgcatgagttgctagtgcgcgagttgattgagttgatagtgtgcaagttgatagtgtgcacaatttgatattgtgcgcgagttgatagtgtgcacgagttgataatgcgtgcgagttgatagtgtgtgc

SEQ ID NO: 339147 - DNA, 752 bp, Homo sapiens; identical to SEQ ID NO: 332955
  chr6:150921277-150922029
  hypo

SEQ ID NO: 339148 - DNA, 142 bp, Homo sapiens
  chr6:151346267-151346409
  hypo
cggttaccctcaccgcaccccaggtttgccgtagaaggatgagattccctacatgtaggcgtcttcagagtgaacctgttgctcagggcccgcgagcccacagggctccatgcccactgagcaggctcgtggacgtcggcac

SEQ ID NO: 339149 - DNA, 1443 bp, Homo sapiens; identical to SEQ ID NO: 332957
  chr6:151561222-151562665
  hypo

SEQ ID NO: 339150 - DNA, 256 bp, Homo sapiens
  chr6:151687263-151687519
  hypo
cggcttcaggcacttccatggcatctttcccgaggtcagctgcattgctacagagagtcagggggacgcgactttctccctgttggctagatgtgaaaggtactcctgtgtggatctggaggtgttcacgtaagctgctccggagagtgaagcgccgtccacacaggtggcaggcatagtactttggaaagctcccattcctcttcatgatgcttggcttgacgtgggctattgtgagggacgcaggctgctcatc

SEQ ID NO: 339151 - DNA, 96 bp, Homo sapiens
  chr6:152527379-152527475
  hypo
cgagttcggcctgcaaggcggcctcagcgccactgtccgccgagagaaggagttgcttgccagcctccacagtcaggatgtagctgccttgttgcc

SEQ ID NO: 339152 - DNA, 776 bp, Homo sapiens; identical to SEQ ID NO: 332959
  chr6:152622733-152623509
  hypo

SEQ ID NO: 339153 - DNA, 962 bp, Homo sapiens; identical to SEQ ID NO: 332960
  chr6:152957527-152958489
  hypo

SEQ ID NO: 339154 - DNA, 101 bp, Homo sapiens
  chr6:154727653-154727754
  hypo
cggatgtagtccgcaccccggaccagatgccgctcggtcgtgggtctggagaaccggtatgggggagaggagctctcttcaatgatcggaggaatccgctc

SEQ ID NO: 339155 - DNA, 146 bp, Homo sapiens
  chr6:154826922-154827068
  hypo
cgcgcctggccaactacacaattgttgagagcctacccactcgaggctgatcaacagccaaggctaggacagttctgctgggacaaccagtcccacgtcttcctcgtcgaaggcactccccagtggcctttttaaagcagaaaaac

SEQ ID NO: 339156 - DNA, 1128 bp, Homo sapiens; identical to SEQ ID NO: 222960
  chr6:155316128-155317256
  hypo

SEQ ID NO: 339157 - DNA, 739 bp, Homo sapiens
  chr6:155568750-155569489
  hypo
cgcacctggccacgcttcatggcttttaatgaattgtttgaaactcactttttaggccacctataacaatatttctcatgggtatgcatgaaatgtgtctttaaagtcagacattcctgcattttgagtcagtgttagtctttggggcgcagcctgcattccatcctcggaagctcccagcactccagggctctgtcagggctgtgaggcggaatcccacgctgacagctgggtgcctgacccactgatgtgttggggttttcattaaagaatggcattaggaggactatagaaatagatgatctataaatgttaaaagagaaatgaagaatttaattcaccccactgtgctcttctgaggtcttttatccatctgcttgtagctaaaactgacaaagccttcaaggcttttctggacgcccggaaccccaccaagcagcattcctccacgctggagtcctacctcatcaagccggttcagagagtgctcaagtacccgctgctgctcaaggagctggtgtccctgacggaccaggagagcgaggagcactaccacctgacgggtgaggcggcggcggcacctccgggcgagggcctgcacagggcggcgaggggctgccagccgtgccctgggcctgacagctcacctcttccccgcctagtggcacgtcctaagtcacttttcagttctgcgatggttaatcttaggtttcacgtgaatatgtgaaactagctaggc

SEQ ID NO: 339158 - DNA, 398 bp, Homo sapiens
  chr6:155577660-155578058
  hypo
cgagtggaccggtgagactggcaagggaaccttgctggactctgacgagggcagcttgagcagcggcacccagagcagcggctgccccacggctgagggcaggcaggactccaagagcacttctcccgggaaatacccacaccccggcttggcagattttgccgacaatctcatcaaagagagtgacatcctgagcgatgaagatgatgaccaccgtcagactgtgaagcagggcagccctactaaagacatcgaaattcagttccagagactgaggatttccgaggacccagacgttcaccccgaggctgagcagcagcctggcccggagtcgggtgagggtcagaaaggaggagagcagcccaaactggtccgggggcacttctgccccattaaac

SEQ ID NO: 339159 - DNA, 63 bp, Homo sapiens
  chr6:157159632-157159695
  hypo
cgatagcgagagcgtacctgaaagcaagagctcttaaaacgctctaagtcaccgaagcctgtc

SEQ ID NO: 339160 - DNA, 65 bp, Homo sapiens
  chr6:157193703-157193768
  hypo
ctcagcctcccaaagtgctgagccacctcccaaggtgcgagccaccactcctggcctaacccatc

SEQ ID NO: 339161 - DNA, 210 bp, Homo sapiens
  chr6:157351875-157352085
  hypo
cgccttgaaattgtgtcttagagtactaagtttatcaaatgctttttgattgcatagatgtatttttcattgttaccaatatttattgggtccctgtatagagacaaggttttagttcatttccaatacattcagaggacggccgctgtactcagcagcacgaggctaccgtgcgtgttctttccactgctggctaacggtgcactgagc

SEQ ID NO: 339162 - DNA, 147 bp, Homo sapiens
  chr6:157430380-157430527
  hypo
cggggggcgaattggtgatgatctttaggacactaatttttttctttattatttgtaattcttttgagcaatatgcctgactatgaagcagtgggtctgacggagtcagagcggttagcctgatccagccggggtcccaggaccacc

SEQ ID NO: 339163 - DNA, 233 bp, Homo sapiens
  chr6:157478300-157478533
  hypo
cggagatggctcaccgtgactcgcgcaccactgtctatgccacctgtcttcacttccagcttcatggctctgttaacatcccgcccccatagatacacacttacaccagatgtcctgggatcgtcacagcgagaaccagcattaaagcgcacccatcactaggcgtcattagcagcccagcccagcaacccccacggttctgagttacgaaaggcagggatctttggaattac

SEQ ID NO: 339164 - DNA, 376 bp, Homo sapiens
  chr6:157502185-157502561
  hypo
cgaccgatacctcaccttcatggaagagagaggctctcctgtctcaagtctgcctgccgtgggcaagaagcccctggacctgttccgactctacgtctgcgtcaaagagatcgggggtttggcccaggtaagaatgagtgagggagggggtgaaaaaggaagcattgtggataagttcttacagtggctttctttgaatgtgtggactcattttttttctcacaaaggaaaagctaagcctgtgtgaaagtcgccttcttgcaacccacgtctgtgtgctgtcagggagcactgggggaccctggctctgccaccaactcgcagcgtgacctcagcaggtcatgttcttggacctcagtttcgtcatgtatacagc

SEQ ID NO: 339165 - DNA, 283 bp, Homo sapiens
  chr6:157505832-157506115
  hypo
cgaattctaagccatatacgtttattgcttatacaagtattcaaaaagattccatctacctctacacaaaataaagatcccccagtggccagtttgaatacatgtgcacttctaggaaatgccaccctacaggttcgacagctcgagctcccccgccctctttcggaaatcctcagatttgaactttagtaaaatgaagcctgggcttcgtttctaatgtcccctacccagcaagttctcacttctagggaatttaacaagctgtcgtggtaaggatccacac

SEQ ID NO: 339166 - DNA, 693 bp, Homo sapiens
  chr6:158024060-158024753
  hypo
cgtggggccatcgtccccctgggtgtctgaagtggatgttgccgtggcttactgcaggctgggacgtccacagtgcttcatggcagtgccagggcccagggctggacatggagagtcaggtgaggaatccagccatctctgtggaacgctttgtgaagcaagtgtttacaatgaatccagaagcacttatggagtggctgctatgtgcacgtagagggcaaagaaatttcacacaggttcgttccctgcccttaacgagttttccacgtagttatgaaaagataactaacatcataaagaagtacttgacaaggtcgtagcactcaggatggtcattttagaccaattcccgtaaaggggagaaatgagagaaaaggctgaagaaattagctggcagccacactgagaggcccttggatgcccatctaggaaagagggacttgactcagctgctggagcacgatgcttgaacaggagattgagagggctggaattcagccctaggaggactgatctggcatccgagtataaagtgagctgatgacaggtagtaggcagctgttgtctgatgatgccgtattacaagcaccctcaaaaacctctgtggcccttaacaagcagcatttctttttctcgtgtgtctgtgggacatctggggcagctctgcggattaggcaaggctcggccccgggc

SEQ ID NO: 339167 - DNA, 62 bp, Homo sapiens
  chr6:158057907-158057969
  hypo
cggtgtgccactgacgcccctcccctcatcgatgctgtggttgcctaaaggttctgtgttcc

SEQ ID NO: 339168 - DNA, 617 bp, Homo sapiens
  chr6:158093637-158094254
  hypo
cggtttctctcttctcgcaccccaccctccccgcccgtgccctgtccccatccctgtccctccccacctctgccccctcctctccaccttctctttgctggcgcctcccgctctccagtgcgaccaagaccagtgcattcagagcaccaaattcgttttgcaggctgcagccacgcccctgctgcagagcgagcccagcctcaccagcgacgagctgcacctgcccgggaagcctggcctgggcacgccctgcgccagcctcacactgggcccgcccacaccgcccgcctccatgcccaacctcgccgaggccacgctcgcggacgtgatgccccggaaagatgagcacatgggccaccagttcctgacgcccgatgaggcgccctcgccccccaggctactggcggcgggcagccccctggcgcacagccgcaccatgcacgtgctgggcctggccagccaggactccctgcatgaggactctgtgcgcggcctggtgaagctcagctccgtgtgacccacatggccccaggccgggggacaccagaggctcctccatgggcagcaggagtgagcggaggggtgtgtcccacagcgactttcccagccaatgccac

SEQ ID NO: 339169 - DNA, 56 bp, Homo sapiens
  chr6:158321417-158321473
  hypo
cgcaaatattttctcccagcctattgcgggatctggccagcagcccgcaatgcaac

SEQ ID NO: 339170 - DNA, 518 bp, Homo sapiens; identical to SEQ ID NO: 332964
  chr6:158402115-158402633
  hypo

SEQ ID NO: 339171 - DNA, 172 bp, Homo sapiens
  chr6:158651816-158651988
  hypo
cgcattcaaacatgaggcaactattcttggttcagttacttttaaattaatatttaattttcttgtgttagagccgggtttcgctatgctcaggctggagtccacaggcatgattatagctcactgcggcccccagctcctggtctccagggatccacccgcctcagcctcc

SEQ ID NO: 339172 - DNA, 869 bp, Homo sapiens; identical to SEQ ID NO: 332966
  chr6:158957708-158958577
  hypo

SEQ ID NO: 339173 - DNA, 433 bp, Homo sapiens
  chr6:159045072-159045505
  hypo
cgtgagccactgtacccggcagaaaagctctttaaaacaatgtttttactcccagtctttggtttgtggctgacgcagtttgaggccctgtcactgtggttctggtcggctgctcttccttcccagtcaggtgtcggggagaaccagccatgtgggctctggaacagaccccagggcccacgtctgttgctgaaggagacaccggagagcagagccttctcggtgctaaacacgctggtctagtccagtccctttgctttacgtaaggtcccagctaaagtcacttaggtgcttttgagaaaaatgatcccgattcctgctgtgctgtcctgtgctctgagccttgactgtaagaggggagctctggcgctgagaggacaggaaaggggtggggggatggcgtgggccggagccatcgaggagcggggactgc

SEQ ID NO: 339174 - DNA, 175 bp, Homo sapiens
  chr6:159076962-159077137
  hypo
cgatgcgtggaaatgcagagcgcatgtggtcagggaatggtcttgaatgaggtcagtatgggagtggcgagcattctgtgggaactgaggatggaggagtcaggagaactggatcgggaggtcacgactgggatgcctgtgctttagaatgtgtttacgggaagggaaaaccagc

SEQ ID NO: 339175 - DNA, 69 bp, Homo sapiens
  chr6:159203076-159203145
  hypo
cgctgtgcctggcttttccgtgcttctttaccaatgctgcatccagcacacttggagtaggagcgaacc

SEQ ID NO: 339176 - DNA, 84 bp, Homo sapiens
  chr6:159205631-159205715
  hypo
cgcacggagatggcaagatcccaacagcagggcacagcactcacttgagcatcccacggtgttccgcatgccacacctggatcc

SEQ ID NO: 339177 - DNA, 200 bp, Homo sapiens
  chr6:159206098-159206298
  hypo
cgagaagtttgctatgccatgtcccacaggacacggccacgctttagtttccatgaggaatggcagctcgccttccctggctatgtttcaggtcgctggtcagtgacttaatgactagcatgaaggagcacttgacactggcgaagtccttgtgtttttaaactgtgcttctaaggcaatcacttctccctgccgaggac

SEQ ID NO: 339178 - DNA, 1632 bp, Homo sapiens; identical to SEQ ID NO: 332967
  chr6:159589686-159591318
  hypo

SEQ ID NO: 339179 - DNA, 195 bp, Homo sapiens
  chr6:160452681-160452876
  hypo
cgtgggcagaagcatcgattatgagtcaaacagaagagggttgggcctgcagctctgcaacttactaattgtgtgcgacctgtttgtaaacctggcacctagtgcctggcgtgtagcaggtgctcagtgagtatttacggaatgaatggtgctgggaagcagcacggctatgcccggtgctaagcccagtaagtc

SEQ ID NO: 339180 - DNA, 50 bp, Homo sapiens
  chr6:160455514-160455564
  hypo
cggatgagcgtcataaactttgagtgcaataaaaccgcaggtaagtgtgc

SEQ ID NO: 339181 - DNA, 542 bp, Homo sapiens
  chr6:160511922-160512464
  hypo
ggtgctgagctcatcgccgagaaggagcaggtgctccgtgccctggtgctgagcgcatcgccgagaaggagcgggtgctctgtgccctggtgctgagcgcatcgctgagaaggagcgggtgctctgtgccctggtgctgagcgcatcgctgagaaggagcgggtgctctgtgccctggtgcggctgagaaggagcgggtgctccgtgccctggtgctgagcacatcgccgagaaggagcaggtgctccgtgccctggtgctgagcacatcgccgagaaggagcaggtgctccgtgccctggtgctgagcgcatcgccgagaaggagcaggtgctccgtgccctggtgctgagcgcatcgccgagaaggagcaggtgctccgtgccctggtgctgagcgcatcgccgagaaggagcaggtgctccgtgccctggtgctgagcgcatcgccgagaaggagcaggtgctctgtgccctggtgctgagcgcatcgccgagaaggagcaggtgctccgtgccctggtgctgagtgcatctccacgac

SEQ ID NO: 339182 - DNA, 447 bp, Homo sapiens
  chr6:160679377-160679824
  hypo
cggtgacgatggacgagccaggcgtctcgtacacccagccgtcccggcaggggcccagtggcaggcggctcctgttggtgtccaggctggccagggggtccacgcagtcgaaggtgctctggttccagtccacctcgtagcgcctacactgtcttggggaggcttcgcccgcaggtcctgggcccggcaccgtgtagttcagttcctctgcaggactccagccgcagcgcagactcagctcggccactccggggctccggcagcggtggtcaggggtgaagcccaggaagacgatgcccacgtagatgggcgcgaaggtagccgagagcagagccaagaggaaaaacatttgcttctggaaaaagtgaaactcccctccatgctccaggacatcgtccacggtggtgggcatgatcctgcaggcaggagggcccgaggctgcccgac

SEQ ID NO: 339183 - DNA, 168 bp, Homo sapiens
  chr6:161585070-161585238
  hypo
cggtccctatgctgcaggtgggatgggcgtgctgttgacttgctttcccgccatcagcgctcccgcccttatgctcagagttgtaaagtgatcatggattcggaagcctttgggagcaaaaccctaaacggtgctgagattaaattcccgctccgtgaatgtctcttc

SEQ ID NO: 339184 - DNA, 160 bp, Homo sapiens
  chr6:161685582-161685742
  hypo
cgtgcccgcgcatccctgccctgcaagtcttatccactgcgtgggaacccctcgctgaggcttccgtcttgccctctgggcagcaggctcctcaaaggcacttgcagggtcggctccctctttgtattcctgcgggctgaatgcacgggctccctaagaa

SEQ ID NO: 339185 - DNA, 112 bp, Homo sapiens
  chr6:161725123-161725235
  hypo
cgctggcgaaatgggcttggtctcttcctgctccgcacactttgacatcagctcgttgtggctccctgtctctgctctcccgggtggccagtgacgctgtgcggggtgcagc

SEQ ID NO: 339186 - DNA, 3633 bp, Homo sapiens; identical to SEQ ID NO: 332970
  chr6:163834161-163837794
  hypo

SEQ ID NO: 339187 - DNA, 31 bp, Homo sapiens
  chr6:163946675-163946706
  hypo
cgtgagccaccacgcccggccatcttgtttc

SEQ ID NO: 339188 - DNA, 75 bp, Homo sapiens; identical to SEQ ID NO: 256614
  chr6:164241313-164241388
  hypo

SEQ ID NO: 339189 - DNA, 157 bp, Homo sapiens; identical to SEQ ID NO: 256620
  chr6:164322567-164322724
  hypo

SEQ ID NO: 339190 - DNA, 131 bp, Homo sapiens
  chr6:164441358-164441489
  hypo
cgaatatgagggctcatattcaagggtacggatgtgtctcagctgggcagggcactcgctaacccccagctggggcgggagcaggggtacctgcggcaccagaggtacgtggggcctggccccggctgcgc

SEQ ID NO: 339191 - DNA, 2300 bp, Homo sapiens; identical to SEQ ID NO: 332977
  chr6:166579761-166582061
  hypo

SEQ ID NO: 339192 - DNA, 1333 bp, Homo sapiens; identical to SEQ ID NO: 332978
  chr6:166582089-166583422
  hypo

SEQ ID NO: 339193 - DNA, 860 bp, Homo sapiens; identical to SEQ ID NO: 332979
  chr6:166666751-166667611
  hypo

SEQ ID NO: 339194 - DNA, 65 bp, Homo sapiens
  chr6:166742989-166743054
  hypo
cgtacctggctaacgcagcaagattgccgagggtataaaacactgcaaaaagctttatgccgccc

SEQ ID NO: 339195 - DNA, 180 bp, Homo sapiens
  chr6:167139157-167139337
  hypo
cggggagaccctcactccacctgccttctcttcagatgctggggacgagagtgaagctccgagtttctgcttgcacagcttcctcgggccagcgtggacgttcccgacctgccccacagcacagagactggctccaggtatgccgggcagggaggctcctggcggcgcaggcccagaggg

SEQ ID NO: 339196 - DNA, 319 bp, Homo sapiens
  chr6:167140099-167140418
  hypo
cgtgatcaccttaaatcacataaacatgatcaccttaaacagagaactggatctcgtgtactgatgctgctggcagcattggaaagtgactcttacaacttcagttgcgataccggtttccataagcttctgtgaattcttgtcaaagctttaaaactgaacacggcaacaactctaggtgaggagtgtttggcagatgaaacccctccaccagggaggtgacgggtctcagggagtgtgtctggcgggtggggaggaatcccaggcctggaatctaccgtcctgggtgctgtctcctccaccacgtaagccaaacctg

SEQ ID NO: 339197 - DNA, 1797 bp, Homo sapiens
  chr6:167314272-167316069
  hypo
cgcacaggagagagaacgcaacctgaacacacggtgggggctggaggaagaacgtcgggagatcacacagggaggagaacgccaggtgaacgcacaagagaaaacgcctggtgaacgcgcaaagaaaggagaaagccaggtgaacgcacagggagaacgccgcacaaccgcacaggtaggagaaagccatgtgaacgcacaaagaaaggagaacgctgagtgaacgcacacagggccgagaacgccaggggaacgcacacagtaaagagaacaccgagaacgccgtgggaacgcacaggagagagaacgccacgtgaacacacgagggagaacgccgcgggaacacacagaagggcgaatgcccggcgaacgcacagaggggagaacgccaggggaacacgcacgggggagaacgctgcgcgatcacacagcggggagaacaccgggtaaacacacactggggaaaacaccgcgtgaacgcatagaggggagaaccccgggtgaacacacagaggggagagctccgtgtgaacacaaagggaggagaacgcctggtgagcacacacggggagagaacaccgcgcggacccacaagggggagaatgcctggtgaacgtacagcgggaggggagaacgctggtgaacgcacagcggggaaaacgccatgtgaacgcacaaaggaaggagaacgccaggtgaactcatacagggggtaggaacgccagaggaaagcacacagtaaagagaaggccgtgggaacgcgcaggggagagaacgccgggagaacacagagggaggaaaatgccaggtgaacgcacaagggggaaaacgcctggtgaacgcacaaaggagaaagccaggtgaacgcacaagcagcagaacgccaagtgaacgcacgaggggagaatgctgcgccaacacacacgggaaacacaaccgcgcgagcacgcagtggggagaacggcacgcgaacgctcagcaagaagaacgtaagttgaacggacagcggggagaacgccgccctaacacacgcgggaaataacgacgcgtgaacacacagcagggagaacgccgcgtgaaagcacaggggggagaacgccgcgtgaatgcacacacgggaaataacgccgtgtgaacacacagcggggagaacgccgcgtgaacgcacacaggggaaataacgccgcgcgaacacacagggggaagaacgtcacagggacgcacagtggggaaacgccatgtgaacgcacaaagaaagaacgccacgtgaactcgcacacgcggggagaacgccggggaaacgcacacagtaaagagaacgcagtttgaacgcacaggggagagaacgccacgtgaacacacagaagggagaatgcagtgcgaacacacagaagggagaacacctggtgaaggcacagaggggagaacgccgagcgaacgcacagggtggagaatgccatgtgaacgcacaaagaaaggagaacccctggtgaacgcacacaggagaaagaatgccgaggaacgcacagagtaaagagaccgccgtgggaacacacaggggagagaacgccacgtgaacacatggggagaacgccgcgggaacacacagaagggcgaccgcctggtggatgcacagaggggagaacgccaggggaacacacacaggggagaacgctgggcgatcacacagggtggagaacgccgggtaaatacacactggggaaaacgctgtgcaatcgcatagagggaagaacgccgggtgaacacacagggtgcgttcttccatcatgcggctgc

SEQ ID NO: 339198 - DNA, 394 bp, Homo sapiens; identical to SEQ ID NO: 256656
  chr6:167834914-167835308
  hypo

SEQ ID NO: 339199 - DNA, 453 bp, Homo sapiens; identical to SEQ ID NO: 256657
  chr6:167836478-167836931
  hypo

SEQ ID NO: 339200 - DNA, 722 bp, Homo sapiens
  chr6:168062973-168063695
  hypo
cgcagtcacgatcactggagcacgttcagggcctgcaggtggtgatgggccgcgcagtcgggaccctggagctcttcaacgtgcttcatggcactgcttctcgacctgagattcaaggctccagaggccccactggccactccgcttccgggacccctcacacctcccagccgggacttggggaggcacttgcgagaggctgcgtttgccgttgcgctctctggagctggagaaccactgggcgactctgcgtgactcctgcacccactgtcaggaccccggaagccaaccggtttggagaaaagggcccactcctcaccgcgctctctgcccgcggcctggcgcagggcctcacggggctgagatcctgatcaccaggaggagccacacctggcggagcccctcctttaccgagcccatctcaggtggctggtgaggatgcgtgaaggggtaaaccgaggcaccaggagggcctcccaagcactggctgggcactttcccattcttgtttagtcctcaggccacccgccagtgaggcgcaccccaggccatcccctgatgagcctcagaggtagccagggagatgcccccgcccgtttcacccgcgctgtcactgctcgctgccccgtgagccagcctgggttctgggtggcaccagcggcagtggctctgcctttgggagcctggggacagtgctggctgcatggagcgcgggcctctgc

SEQ ID NO: 339201 - DNA, 233 bp, Homo sapiens
  chr6:168137821-168138054
  hypo
cgacccagcccagcacacccagttctgctgcccgcatagccagaggactagcggactttgtgtgatgtggctgcttcgtgacccccattcagagaggctgacggagtgcgaggggcatggcccacgggcccaccgtggggttgcagggccagggcgccgcctggcctgggctgagtaacgatgagctgctgggacagtgggggctgcagcagagacccagggtggctcggagc

SEQ ID NO: 339202 - DNA, 644 bp, Homo sapiens
  chr6:168378621-168379265
  hypo
cgaagccgggacagataaagttcttctagtcactgccctcttggagtataccgttgaatccgggaagtagatcaatgaaataaacacagaatggttgtaaaatacagaacgctgggaagtggaggtgcgtggtcttacccgtgtttataattcagccgtcgcctaacctgagaaatcaaggatttctgcgtcgtgcgcgtgcccgctgagctgagctctgctgggatggggagtccttctccggctggaggctgagggcaggagctctcggtgagaggctgcggccagcggtgctgtgagccgggcgggggtcagcgcgggcggccggggcgaggctgacagcacagcaggggccgagctcccccgggtcaggcgggaccaggaagggatcatccttcttttgagggcacggagccaccgtcggagggcctgtgagaagggtgggaagctgagattacattcctattctgaaaatgtcacactgtggagggcggtggttcaagcgcagtaatggccatggagggagaacaccgcccggggacacccggggtggcagggaccggagccccggaaacctgagcaaaacgcgcaaaatggggaaaaccacccaggttttaatggaaattgtgcgaacagctgtcaac

SEQ ID NO: 339203 - DNA, 257 bp, Homo sapiens
  chr6:168462450-168462707
  hypo
cggctgcggagcccagcatacccagcccagccccaccttctgcctcctcccgctgccgcagctgttgcagagtgggccgcacgcggaggtggagctggtggctggcgcgcagcaggtgcagcaggtgcctggaccgccaggtgcaccccgtgtagtaaaccagcttctgtgctgcgggcagcccatccagctggatctccagcttctttccctgagcaaacaggagagaagttgccactccacaggtggaaaaccac

SEQ ID NO: 339204 - DNA, 513 bp, Homo sapiens
  chr6:168529700-168530213
  hypo
cgtctcccgcttggcgcccccaggcagtcagacttcccacacctgaaggaaactaggtggaagcgacttggcctctccggccccgcctaggcctcggaggtcaggtggcctcacctcccctgcgggcaccggccagctgctaaggcctgtccacgaggagagcggggtgtgggacacagacttcgcctctcagtgggaagcgtgttccgactctgccacgtgcctcttactttagaaaagtgaatccatcattgttccagttaccttgggctgcactctaaccgccaccaagtgccacggcttcaacacggttcattaattgccagcgtgtgtgtggctggtctggccacagcggccggttttcgctcgaggtccttcatgtggttgccgtcagatggtcagatggcggccggggccggggctggggtcgctggacacttgacccagctggaggcctacggggaggccttggttggagtgtctgaggcctcagctgggcccctgcctccgcgc

SEQ ID NO: 339205 - DNA, 365 bp, Homo sapiens
  chr6:168672446-168672811
  hypo
cgttcccgctgaaatctgcctgggcggccacacgcttcctgtgcaggctgcagggacccagaggacggtgtcttgccgagggatcctccctccctccaggtacctcgccccgggacagcagaagtgagagacaatccgagcatatccatgtaatgtggaaatgctgtactatcacccatctaaacaaagctcggaactgtctgcgccccaggacggggtcccagctggcccaggagaaatcgcactcacaggcccagcagagcccaacgccagcgctcagaatcccacagtgtctagacacgcacagcagcaacacggaagcggcacagggacagccccagcggtggcgacccagctccacaggc

SEQ ID NO: 339206 - DNA, 611 bp, Homo sapiens
  chr6:168709592-168710203
  hypo
cggcgtgcagggggctggggtacgggtacacctccctgccgccctgggacaccaggtcctgccgatacttggggtccggcacgtgcagcgggatatccaccccctggcagaggagcccgaggagctcggcgtccgcgctggctttctggagccccgtgtccgccggcagggctctgtcaagatcacctgggagcgagaaaaatgaacaaacacgtaactacggagacgatttagtgcactgttgatttcatttcatgcgtggcagctgggatggaaacgctgctcattcactgcttcgaggaactcctgggtcccatgggagacggcgactcacagtcactgaggtccgcgtgtagacacagggcgcggggcagacgggaatgcgtttaagacactgggcgcggggcagacgggaatgcgtttagacacagggtgcagggcctcatttgcatttagacacaggcgtggggcccgtctgcatctagacaccgcacagggccgtttgcgtgtagacacagggtgcggggccgtttgcgtgtagacacagggtgcggggccctatttgcgcctgcagcgcggccccctcagcctgttctgatcctgcccgttgc

SEQ ID NO: 339207 - DNA, 385 bp, Homo sapiens
  chr6:169567224-169567609
  hypo
cggcccaaggcctcacactggacggaggctgagctccactgcggccccggcaggcgggcttcctaagagcagcgtggaatcccggggctctgcgcaccgtgcccggccccgggctccctgacgcgaggcaatgcctgggcacagcgtacggccaccggcaccttcactcctcacctgtgcacgcgagtgtgggggatgaagcgacatcggtgtgtggcgtctcagtgcagcgccggcacacacagccctaagcagatgcggagcagagatgacggtggagtcaccccgcgggtgcaaccccatcttagcaggagggccgggttttgggcagctcgggccttcagaaaaaggatcatgtcagcgtgcatgccacgctgcacgtccc

SEQ ID NO: 339208 - DNA, 314 bp, Homo sapiens
  chr6:169641077-169641391
  hypo
cgccaccctccctgccccggtctcctgccatcgaccccctccctgccccaggctcctgccctcgccgccctccctgccccggactcctgcccctgccgccctccctgccctgggctccatctcctggcatcatttacttcatgccctctgggtacgagtgacagtcagcatcactgcaccctggttagccatgtgtatgttgtggggcaccgtggcccggagcacctcattatgttcagtccctttctctaaactgcgagctgcccgtcctgagccccgcaggcatcgctctctcttcctggccgcgctgtgcc

SEQ ID NO: 339209 - DNA, 502 bp, Homo sapiens; identical to SEQ ID NO: 332984
  chr6:170124883-170125385
  hypo

SEQ ID NO: 339210 - DNA, 117 bp, Homo sapiens
  chr6:170178959-170179076
  hypo
cgcagactgtacctgcctggtgccctgtgagcgtgcatggcccctggcagccctgatgtagaccgggcgcctcagatggtgactcagagcaagaaatgcggacgtgcaggatgggcc

SEQ ID NO: 339211 - DNA, 594 bp, Homo sapiens
  chr6:170339178-170339772
  hypo
cggggcctcccagcccttcacgcagcgctgacggggcctctgcccaccggccaccctggtctcaagacggagcccacgtctcctgcttgggctggatgagtgacccttccctgcggccatgaacagggagctttaaacgtgttgaggttggaccctgcccagcccggctgaaccccactctgtaggaggcgcaggcatcagacgccggggacgtcatggtggaggagactacccgtgagcccggtgacgtcacggtggagaccacccgcgaggctggtgacgtcacagtgcaggagaccaccgcgaacctggtgacgtcacggtgggggagaccaccccgagccctgtgacgtcacggtggaggagaccaccctgagcctggtgacgtcacgggtggaggagaccgccccgagccctgtgacttcacggtggaggagaccaccctgagcccggtgacgtcacgggtggaggagaccgccccgagccctgtgacttcacggtggaggagtccaccccgagcctggtgacatcatggtggaggagaccgcccctgagcccgggtgcccctgatcccaggcactggatgggatcccc

SEQ ID NO: 339212 - DNA, 730 bp, Homo sapiens
  chr6:170454148-170454878
  hypo
cggcggtgcccttgagcacctggagaacggcagtgcccgtgagcacctggagaacagcggtgcccttgagcacgtggagaacggcagtgccctttagtacatggagaacagcagtgcccgtgagcacctggagaacagcggtgccctttagtatatggagaacggcggtgcccttgagcatgcagcgaactgcagtgccctttagtacatggagaacggcagtgccctttagtacatggagaatggcagtgcccgtgagcacctggagaacggcggtgcccttgagcacgtggagaacggcagtgccctttagtacgtggagaacggcggtgccctttagtatatggagaacggcggtgcccttgagcatgcagcgaactgcagtgccctttagtacatggagaacggcagtgcccgtgagcacctggagaacggcagtgccctttagtacgtggagaacggcggtgccctttagtacatggagaacagcagtgcccgtgagcacctggagaacggcagtgcccttgagcatgtggagaacggcggtgccctttagtacgtggagaacgacggtgcccttgagcacgtggagaacggcggtgcccgtgagcacctggagaatggcggtgcccttgagcacgtggagaacggcggtgccctttagtacatggagaacggtggtgcccgtgagcacgtggagaacggcagtgcccttgagcactcggagaac

SEQ ID NO: 339213 - DNA, 995 bp, Homo sapiens
  chr6:170474572-170475567
  hypo
cgcccgccatcctcctgcattagcatactcctaattgattaagtggatgattgattattggacccgtgcggtctgctttccagacccgttggctgggaatggaaagccacgctcggccctcggatgcagcagaagccccctgccccgtccgctccaggctgcagagccgaggtgattggcgccaggctgcccaccccgcctgccccagcaagtgcgtcgcgcccccatggtttctgctgtttgcatgtcaggtcccggcaggaagctgcagtccgacgttgctcagcgtccagcaaggggctgcccagatcccgtcttccacagaccccctctgaggccctcgttccctcaaaccccaggagccagctctgcccccgcacagctccacggccccaggctgcttcccgctactgtaacagacgaccacaggtcgcataggccagagcccggcacggcttcttgggtgacaatcgaggggtcctgacccagcacccgtgggcacacccttatttggaaattgggcctagcccggagtgatcatgaggccacgtgacatgggcgtgccagtctcaccaacgtgtgttttcacgggcaccacagagtctgttttctatgggtggggcagcggtgaacatatccctcttaatagcggtacgggtacggccagggaggcggcagaacgtagacagaacccgggcactgagagaccggtgccgccccccgccgtccacacaacccgggcctcgggcagcaccagcaggacttttattcctcaccccgcacgccgccgtccatctcctaggccagcgtgattcttctgagtgcagctgggtctcctcctgggagatccggtggctctagcagcgtgggtgctgggaacaggaccagcctcgccggcggacagtgtggacgcctgagggcaaaccctggaccactctctccccgggggactccgttcccgcctccagggagctgcgaacgctccttctgggaca

SEQ ID NO: 339214 - DNA, 161 bp, Homo sapiens
  chr6:170531590-170531751
  hypo
cgagtggctgtctggcacaccaggcatcgatctccgcaaaacgaactggaaaatgctcttccccagaagcgcagcacctgagcgtgtgacgtgcacatgtttgtgtggaaggcccgagacgccatccaaccccgtggctctcaaaccgggtctccagaacc

SEQ ID NO: 339215 - DNA, 316 bp, Homo sapiens
  chr6:170667214-170667530
  hypo
cgcctatacacacactcatagttaataactgagatcaatttgtaagaaatgtttaatttttcctgtagcctaacactggcctttctctgtccttttcaggtggacacgctttgcctggaggatttgcatgcgtttattgcgcaggccttgtgcctccaaggaaaatccacctcgcagcttgtaaatctacaggtacagacgtgaccagttagttgtcactgcccggaagacagctgtgcagtccagccttctctttcccattatagttgaagtttcacagaaaagatcaggaaggtattttagtcaggatcttttc

SEQ ID NO: 339216 - DNA, 148 bp, Homo sapiens
  chr6:170871281-170871429
  hypo
cgccagcttcggagagttctgggattgtaccgcagctgcagtgagtacttcgtgttttatgtttcctcccacttaggagtccctttgagttatgttcctgctctgttttcagatggatccttttattaagggagggagtggcactaac

SEQ ID NO: 339217 - DNA, 190 bp, Homo sapiens
  chr7:84219-84409
  hypo
cgctgtgcgtctcttccaccacacgcactggggcatgaggccaagggcatcgtctgcagagcgagagggaaactggggtggcagggcttgcgggcgcaggacagcgccaaggggctttcgtctcccagcattaggacgaccttgtcctctgcccctgtctgggggccgctgggtccctcctcacaggagc

SEQ ID NO: 339218 - DNA, 771 bp, Homo sapiens; identical to SEQ ID NO: 332986
  chr7:149024-149795
  hypo

SEQ ID NO: 339219 - DNA, 149 bp, Homo sapiens; identical to SEQ ID NO: 256758
  chr7:168485-168634
  hypo

SEQ ID NO: 339220 - DNA, 255 bp, Homo sapiens
  chr7:170034-170289
  hypo
cggtccgcctggatcctgcacacccagcccggtggctcctgcccactcagcggggccctgacgccctacatctcctctgtgagcaaaagctctcttgttgttagagagacttgcggaagccacacacccatagaccgttacttctacacattctttttatttcacacagatctgcatcccttgaagtactcacggggacgtattccgcatggtttccatcttagtgcacatagaacacggttttaacttacaatc

SEQ ID NO: 339221 - DNA, 465 bp, Homo sapiens
  chr7:173194-173659
  hypo
cggaggacaggacccgccccgcgctgccagtgccgaagcttgggttctctgaggactgcgagggggtctcagcactgtgtccacagatggggcagggacctccgcagggaaccttctctcggctgggccagcccaccccaggggctgtagacgagggagttaatgaacacgggatgggttgagccgcctggtttgcccacagaggggcgaggaagggagtggggagtctgctgtgagcggagagaggacagcctgaggcctcaggaacgctggctgcctgcctgcagcgggagctaacggggcgtctgtcgggaaggggcacggccacaggatttaggggcagtttggacacactggtccggtgagcttgatttcagattccgggatctggtttcggagtggagttgtggactctccaggacccatcgctgaggagcaggaggttctccaggggccatggggccc

SEQ ID NO: 339222 - DNA, 2016 bp, Homo sapiens; identical to SEQ ID NO: 332987
  chr7:191993-194009
  hypo

SEQ ID NO: 339223 - DNA, 321 bp, Homo sapiens
  chr7:212459-212780
  hypo
ctcaaaaaaaaaagttttctttagtaaaggactttgctctctgcgctcatcacggctcggtgagttcctagtacaacgtcgtgaattagagagcacagtgtttctcctccgaggtgctagatgtgcggtgagagggtgtaggtgaggggccggcggtgaggtgggggccagcctggggtgctgcacagcgtgtggggggcgggatcaccaggggaagttttagggtctccgtttctaatagtcgctgaaaagcacgtagccggcacatcaacccaagcgctcctgggtgcttttgctttagggttacgttaagatatttac

SEQ ID NO: 339224 - DNA, 197 bp, Homo sapiens
  chr7:229498-229695
  hypo
cgccgtcctcacgcaaacagtccagaccacagcggtggcacatcgtgagaatgacagatgggggatgagcaaggtgccaggggttttaaataagacggccgcgttttgccaaacacctaccccacggggctggaacaagtgacgcagaaatgggcaggaagcgtggaccgcgaactcggggaccaaaaggtcgtgcc

SEQ ID NO: 339225 - DNA, 736 bp, Homo sapiens
  chr7:286020-286756
  hypo
cgtgccggggcccccagccagtgcaggagaggcctttgagcagcttacctgagaagggcccatggggagctgggacctccggcctccgtcgcaagggcctgcgctgctctgagggcccgtcggcagctgggtcagggccacggggagctgggacccccggcctccgtcgcacgtgcctgcgctgctctgagggcccgtcggcagctgggtgcccagggtcccgaaggctcagggtggccctgaggaggctggagctccaccgcatttttcatatgaggaacccagcacgtcccgcctgcctccggcccctggaggctttctcagtgacaaaccgtttctgtttctgtcttgttttctcagacaaacgagggagcaggagacaccccctgactttttttatttctctgactacgagaggcacaatgcggagattgctgccttccacctggacaggtgagcccttccttcctccctccatccgcgctcccgtgcgctcagacccaccggtgagtgaggccgtcctgcactggacacagcaggacgtcatcgtcaccttcgtcaccatcaggcagcgccggtgcctgctctccccccaccccgagtgctgccctgagcagggtcctgtatgtcatcgtcacctttgtcaccatcaggcagcgccggtgcctgctctccccccaccccgagtgctgccctgagcagggccctctgtgtcatcgtagcccacacaacacgc

SEQ ID NO: 339226 - DNA, 1066 bp, Homo sapiens
  chr7:287728-288794
  hypo
cgagccgtctgacaggtggagggggagggtgctccacgcagaggcgtggtcgggccttgggtcccgggtcggccctggcagacggcccacgtccctccacacctggtcacctcgcctcacaggacaatcaccacgtcctccgtcagcaagaaaagctctcgccctgcattctccatttaattaagcgagtgggagcctgtggtgtggttcagaaggagttccattaaaagtggctcctttaatttaattttgttttaaatttagccctggaatgagggcaggctttagctatgcaggcagttggtgctgtgtgcccatcagtgaggcatcgccagccccagtccctcaggggcctctcccacccccatcaccgtggggccaggcagagccaccggacctagggctgggtttattcggaggcagggacacagaggcccgctgagccgcacagagcacagaccctcccctgccccgttcttatttggaggcagggacacagaggcccgctgagccgcacagagcacagaccattccccgcccgtttcttgccaggatcctggacttccgccgggtccctcccgtggccggcaggatggtcaacatgaccaaggagatccgggacgtcacacgggacaagaagctctggaggaccttcttcatctctccaggtagcctggcacgggggcccgcattcatctctccaggtagcctggcacgggggcccgcattcatctctccaggtagcctggcacggggagcccacattcatctcgccaggtagcctggcacgggggcccacattcacctctccaggtagcctggcacggggggccgcattcatctcttcaggtagcctggcacggggagcccacattcatctcgccaggtagcctggcacgggggcccacattcacctctccaggtagcctggcacgggggcccgcattcatctctccaggtagcctggcatggggagcccacattcacctccccaggtagcctggcacggggagaccacattcatctcgccaggtagcctggcacaggggcccgcattcatctctcc

SEQ ID NO: 339227 - DNA, 217 bp, Homo sapiens
  chr7:290557-290774
  hypo
cgcctccccaccctgggagtccagggcttcctaagcacgcctgagctccggccgctgtcagcccttgggtcgaccctgaccgcactgtccagccaccgcctcctgccccaccgtccacaggactgaccgcactgcagcccgccatgcacaccctggtgcccacggaggctgggctccgctccagtgatgcctggatgcccgactgcttcttatccac

SEQ ID NO: 339228 - DNA, 1325 bp, Homo sapiens
  chr7:293618-294943
  hypo
cgcttcccgggcgaggggctgggcacagagcagggaggcacttgcctgaggtcacacagctccaagccctcctaaccccgcccgggaggcccctttaatacccgatttggatctgcaaagagaaatggctgtgggcccgagaaatgcctttctcttttaacacgataccatctgaaaccggcttaggcgaggacgggaggctgttaacagcagacgaattttaagcctccagccaatgagcgctcagatgaagattttcctcctgaaatggagctcctgccccggtgggggctgcctcgtccgactgtgggctgccgactaatctgtatcagcacgagacaggattgcagctggtctttccttgatcgttcgttcttacaataatgacccagcgttggcagtggggtgagggggcgcgggaaggagggggcaggcaggtgatcggggcgttggaaccagaccagccgggacctgccgggtgcgtggggtgtggtgggggccaggtcggcctggcacccaccccgtttcctctccgaacctcagcttgttcagctaagaaagggcagccgggaccggccaccctcctgttcactccgctgggaagcgccctgccgaacctgccttctgatcccacggggagcctgccctgcagccaggagagacccctggaatcactcagcctggctgcataggaatgctgggactgggggagctgtgagtgaggttcggggctccggccccaacaaaaccacgttctcaccagttctacagccccaggctttccagagtttctccacaaacaaataaagcaagaaaaactagatttaatcagcaaataaatacaggaatagcgccgtcggccgggcctccagcatcagagcagtgaacccgcactgctagcgggcctggacagcgcttgcatttttctgattattctttctttattaaggtataattcatgtaccacaaaatttaccatttaaaagcgtacagttccgtggtttttagtatatccacaatggtgtgcaaccatcaccactgtctaaatccagaatgtcctgctgaccccaaaaaggagccccgtaccatgagcaggcggtcaccgttcctcaccccgcagccctcgacgagcagcgtcccacccccagtctatctggatttgcctgttctgggcgtttcatattaagagggtcatacgacgtgtggcctcctctgtctggcctccttcgcggagcacagggttctcgggttcagtgagggcttcattcctcttcttgtttcatttcgtttcgtgtcatcgcacggatggaccatgttcacctggc

SEQ ID NO: 339229 - DNA, 1047 bp, Homo sapiens
  chr7:299930-300977
  hypo
cgcctcggcgaggtagtgtccgccggccgctgcgctgcccgggacggagacagaggcgccggacctcccagcaagcgcatgcgcccgtcgtgaattcagtgaattcagaggcaggacgggatcatccggagtcgggagctgctgccacaggaggcgaggctccccaggtctcataggacacattttgtcagtgtttgaccagaaaagcttgggaaggaagcgctgtctgtgctcacggacagaggcggccggcgccggaggcattccatcctttctgtagggaaaggagcctttatttactattttgtatttatatttgatgaataagtatataaacagagacgtgtacacagatgccaatcacctaccaaaccaaacacgaggaccgccctccctggttctgggggcccctcaaggccaagctcacccctcaagtgctctcacactcgggacctaattcaagtaaaaaccctttctccttcctggggcctcggctcctggagggctggagggtctcgtctgaggacgggaggaggctctcgctggacgtctggcctgtgcgctggtggacggatgcctacgtggttttggaggacccgatgaccaggcgtcctgcgagtccgcccgctggcctgcagcacccacctcggacttggctgtggacggttggtgcaagtgcatcctgcagggctggctgtgcgcagctgtgggctgacctttgcagagttttgtggaatagtttgcaatgtcataaaagtgcaataaaggtacagcagatgtgtgtcggcctcacggggcgggtccctcacaccctggtgtgtggctgcctgtccaccccctctccaaagaaaaaccagtcctggaaccaggcatggccaggagtcggcattcaaggtggcctggacccgaggcctgctggggtcggagggggctgcctgccaagccctggtgcaaacaggccaggtggggccccacctccaaggcagggcggtccgtcctgggttgctctcagaggctggggccgcgacccaaagctgcggcggcccc

SEQ ID NO: 339230 - DNA, 118 bp, Homo sapiens
  chr7:325309-325427
  hypo
cgcccctggggctgtggctgggatttattgtgtttattttccgatgtgtagcttttatgatctggggtccgctgagcggggctcggacagtaccctaagctaggtcgggtcgcactgc

SEQ ID NO: 339231 - DNA, 119 bp, Homo sapiens
  chr7:328241-328360
  hypo
cgctggatgtgtctgagagccgctggatttgtgagattcactgctggtctttgagaacgtccccaaaacaggctgcagctcccgactggctgatcgccggctctctgtttcccttgcgc

SEQ ID NO: 339232 - DNA, 505 bp, Homo sapiens
  chr7:345250-345755
  hypo
cgctgtttgtacagagaaaggggtgcacagagccgtggacctgcagctcctggagcttcccggagctggtcctccagtagaggtgctggggatggggggacgcagccacggccttcatgcaccaacctggggtctccacgagcaaactctgtgttcaaggaggcactcggcctggggacgcggtgggaagagctatcggaggagcccctcggagctgcctcagcacagctgatgaaagcaatcagcgcccgcctgagctggatgtaaaggttaatacataaatcaaagggaaatgtcaggtgccttttaacactgattgagatgtaattgggcagggaccgtgcgccaggcacccgcgctcacggaaccacggcaggacgtggaagaaattatgtggcttgtttgtgtgtctgcaatcgcgtcaagaccgatggtccctcggctctggacagacgcccccccagccagctgaggatgcgaatattcatggcctggtgccgggtcc

SEQ ID NO: 339233 - DNA, 246 bp, Homo sapiens
  chr7:373783-374029
  hypo
cgcgcacacatgcacacatgcacccacatgcacgcagaaacacacgcacaaacaaacgcgcacacatgcacacatgcatccacatgcatgcagaaacgcacacacaaacgcgcacacatgcacacatgcacccacatgcacgcagaaacacacacacaaacgtgcacacatgcacacatgcacacatgcacccacatgcacgcagaaacacacaaacgtgcacacatgcacacatgcacccacatg

SEQ ID NO: 339234 - DNA, 345 bp, Homo sapiens
  chr7:378637-378982
  hypo
cggtaccccgctctcttgcaagggtgtctgcctgtgccaattttcacagcagcgggtgggttccgtgggcctccacaggtgcctggctggacagcaacgttggtgatggctccctcatagcgacccgctctgagagaactgctagcccctttcacagatggggagactgaggctgcaaagatgagcggatttcccagagcatcagagccgggggtgggagagctggatcgctcactctcctccataccttcccaggtctagggcaggcaggactccgtgcaggacccccaagagccccgctctgtgcgacgaggatggcagcgtccagggcacgtcctggctgcc

SEQ ID NO: 339235 - DNA, 234 bp, Homo sapiens
  chr7:380956-381190
  hypo
cgaagaccctgtttccaaaggtcacattcgagggtttgggtgggcacgaattttgaggggataccgtccgatccggtgcagggactttccagccgcaggctctagggaaggctctgtgctaaaatgcatccccggttcacactgcagggcaggagtgtgcgggcggaaggagccatgctgttgaggggcctgggtaactgtataacctgagggtctccatgttttccggcctgc

SEQ ID NO: 339236 - DNA, 702 bp, Homo sapiens
  chr7:409502-410204
  hypo
cgccgtggccagacgcccggcgatcgtccactgtgccgaggccccgggccccaggctggctgcagaggcgaacgacgcggccggccccgcgctgcagacgggccgcctaccccagcggtgccaccaaggccgctctcaggctgccccacagctgcgtgccaagcccctgacgggcactttatggcacgttatctcgcctgtgccccacaacaacccggccgggtgggaattccgctcccattaaacagataaggaaccgggattcggagaggcgagggcggccccaggtcccgcgggttataaagcaagggctggacccagcccgggcccacctgactccgagcccacctgatgctccggcacgggcccacgccccgttaataaaatgtaataaatagactctttgtttcaaagaaaatgtttttaaaagcaaggcagccaagccgggcccaggtaacaagcagagggaggaggcctcagagggaggaggcctcagcttcggactcagcccaggcctggcctcccgactcccaccaccaggggcctggctgtacctgtgggggctggagccccagggcagacacttcgcagactctgtgcagggccaggtgagccccagggcggagctggcagctgagggtgctccgtggctcggtgcactggccctgactcacgaatgccgcagcgcgtcctacgggaagc

SEQ ID NO: 339237 - DNA, 434 bp, Homo sapiens
  chr7:431401-431835
  hypo
cgggctcacccaggccagctctggatgctgaagccaccaggcacggggctgtgtgtgcagaagcagccaggcagggcggcccagcagacgcagggagcggccgccagccgctaggatcccgatgccgccgcaagtaaggacaggcccgggtgctgccgcaggaggccaggcctgcgctcgccgctgtggaatgtgtgtttgtctgatgagcatccctgcagggccccagatggagggtgtgacaaggatgggggctgagtctccagggcccgggggcacctgcacgctgcccctggcaggggcccgggcatcccacctgagctggcagccctgagcctgagaccagggctctgactcacttctgggccgccctcctcacagagatctgagaggggctttcccggagccaggcagggaggcggccgtgcacctgc

SEQ ID NO: 339238 - DNA, 300 bp, Homo sapiens
  chr7:455133-455433
  hypo
cgggggatgcggcctgcggtgccctccaggctcagcctgggtgacagggccaactcacggggcccgtggcctgcggagtcctccaggctcaccctgggtcacagggccagtttgcagggacagcagcctgcggtgccttccaggctcaccctgggtcacgcggccagttcgcggggcccgtggcctgcagagtcctctaggctcaccctgggtcatgcggccagttcgtggggacagcagcctgaggtgtcctccaggctcaccctgggtcacgcagtcagctcacgggggccgcggcct

SEQ ID NO: 339239 - DNA, 365 bp, Homo sapiens
  chr7:455747-456112
  hypo
cgacgccgtggctagccaaggagctgccgagccgccgggagctcagagggcctggcgccttcctgaaactcctcatgctggtgttggggacacagaggtgggtcccacagggtgggtctgctctcgaggggcaccaagcaggggagagaagacagagcagagatcagtgagggaactgcacgccgatcccgggccagaccccgactttcacaaggagacacacgtcggggacgccagggaggcaggaaaacgttcccagacactcagcggggcccgcaggctgcccaggagcagagactccagacgttcatgccacagaggcagagagggagaggaggcactggggccccgaggctgagaggggc

SEQ ID NO: 339240 - DNA, 183 bp, Homo sapiens
  chr7:462339-462522
  hypo
cgcgcagcctgcggggcaggggaagctcccacgaggggctgcgtgcctgacactcccctcaccctccactcaactaagctcgggcttgggggaaggaataggagagcttggagctttgtgaacggaggcagcttcttgccacctgcccagaggggaaagcctgccggcctccggggccgcatc

SEQ ID NO: 339241 - DNA, 559 bp, Homo sapiens
  chr7:462752-463311
  hypo
cggagacccccgagactcccccaacacgcccagcatcggatggaacccgggtgttggttccaggggtccccgccctatgcaccgcaccccctgctcaggccggcttatcttcgagggaataagaaagcatcgtgtccaccccaagacccccgcaggcccagtgtccccagagggccgggcgccccaggcctagtgaggaaggggcacccactgaggctgctgggagctttcagggtgaggggtgtggcaccggggacggaacgcccaggccaggtttcaggctgggattaagggtcctccagaccctccttgaattttaggagaagcacgaaggggtgggggcgtctctctcttctcttaggagatctggaggagacttcgggcactgcactgtggcctccacgacaagccgaggaacaaggccgtccacccctgagaaggccacgcagaccactcaccgagggtcctgggggctatggacagaatgtttgtgccccaaactcctgctctgaaatcctcactcctaaggtgttggtgtttggagcggggccttggggaa

SEQ ID NO: 339242 - DNA, 291 bp, Homo sapiens
  chr7:479019-479310
  hypo
cgatggccagcggacaacaacagtgtgggcacagtgatgggcacccccccgtgtccactcggccgggctgcagtgcccagcggcacggtcaagccccatccagatgccactgtggctgtgctgcaggtgtgatggacacgcacaattggctaattgcaagtgctgcagatcacgagatgtggctgggcctcagctgcagctgaagatgaacgccgaggcttcctggagaaggatttctgccccaagactgcaacataaaatcctgcccgggctcccagcctgctcccctgc

SEQ ID NO: 339243 - DNA, 137 bp, Homo sapiens; identical to SEQ ID NO: 256825
  chr7:497765-497902
  hypo

SEQ ID NO: 339244 - DNA, 1058 bp, Homo sapiens
  chr7:502958-504016
  hypo
tgggacccagcctccggggagccgtgaagccctgccgtcttgtggctccaaagccggtccaccaatgacctcgtgccagcggcatcacgacgctgcctcacaccgcacaagactcgccgggaagatgcgagacccatgacagagcccagaaaggcgacggggtggcccaaggtcacacccacgccaggcccagcactctgctcttcccgctcacccactcggccgggcctgtgccctcccgcccggccaagtgggggctccaggaagggcagcgagtgccccgcggccccggccccactgcgggcggccggaacacagagggcggtgaggaaggaggcgttccctgccgggtgccctccagcaggattcgcgaacccaggggagcgagcgggaggattttccatgtgaggccggcttcctggggcgaggcccacccggcgccagcgtggagagaggagaggagcaaagcgcctcgacacattctccctcggtgatttaatggccggagcattcgtgcgatatttatgcagtaaatccttccactggggggtttcactgtgtcacgggaggctcctcccagcccgtccccatcccgtcccccccaaaaaaagaatcctgagaaaatctcatttcacagtttcccatcgagccaggtgcacagcagctgcggtgggcatggcgggcgcgggtcctggggaacaccctctgctggcgtccgcagcccgggagggagcgtgaagtggaggatctcggcaggcgtggctgtgtccaggcaggcgggtgctgccgcgtccccggctgcagggtcttggttccccggagccacaggacggcagggcttcacggctccccggaggctgggtcccagcgctggggaaggacaccgggccctgagggccaacgccaaacccagacgacgttcaaatccagctttccgagcaaggctcacaccaccaggaaagccgatacactttctaaactccacttctgagttgaatattcgaaataggctcttaaagcaaatgttggcccccacgtcagagtcaaccatgttcatc

SEQ ID NO: 339245 - DNA, 367 bp, Homo sapiens
  chr7:531216-531583
  hypo
cgcttttcatctgagtaccctcagggagtggggttggactccagctgtgccaggccagggtgggagtccagggggcaggccaactcccgcttgctgcagtcacctttgaggccccgctgggtcccggctcccaccccagggagaacgggagcagcctcaaatgctgacggcgaagacccagggcccccagaagtgcgagggcctccttcagtgcccgctcggggccagggactctgccaagtgacctggtgtgcccagaaaggactcagcccccagcgctgggcagggcaaggtggcctgggaagtccttcagggagggcaggcagggacgcttcaagagcctggggtctagaggtctcatggtgcc

SEQ ID NO: 339246 - DNA, 265 bp, Homo sapiens
  chr7:540536-540801
  hypo
cgcagcttgggccaccctccccaccggacacctgcaggtgtgggatccgtctcccccgcaggcatctggcccgggagcagggcaacgaatccttcaacagcagcccagatgctcacagcagtaagcgttgcgctcaagggggccacctaacaccccaaaagcaaggctctgaagacctgttctccaacaccgatgccgacgaaggcagccactcacccgtgtcctcttcccgataatccggattcaggcttgtggtcgcgcaggc

SEQ ID NO: 339247 - DNA, 662 bp, Homo sapiens
  chr7:551473-552135
  hypo
cgcgggggtggagccctggagccaggtgtgagtggggcggggcacacgggtgtggtgagggtgtcggggggcagccgccggacacagcacgcgcgtccccaccagttcagcagccggcgcaggagcacgatgcccacactgcgaattggaaattaggcgcgaccacgtttccggcaaggctcctggggacaggccccgacaagacagggcgcttaaggaatttatgatggctcttctctcctggaagctctcttggcccagaccaggactccaggaggagcaggcgggctggggcaggagacaccctcgaaggagggaggcctcgggagaggccagagccagaggcaccagggccaggcctattttagggaggagggaacgggtggcttgcctgaggccactgcgctgggagagcgggcagctcctccccacccggccctgccctgcccatcgcggcctcctggactcaccctgacccggccctgccctgcccatcgcggcctcctggactcaccgatgcttctcttcctccgaatgggcaggggccgcttctcgggcacatgcttagtggcatggaccccgtgagctctcaggctggtgtccaaagaatcctcactccctgcaggcggaaggagaacaccgtgaatgccccaggcccgtgc

SEQ ID NO: 339248 - DNA, 367 bp, Homo sapiens; identical to SEQ ID NO: 332989
  chr7:557636-558003
  hypo

SEQ ID NO: 339249 - DNA, 189 bp, Homo sapiens
  chr7:564189-564378
  hypo
cggcgttaagaccaggccctcacggagccctcactctctgaggaggaacaataagtcagagagcgcgcgagtgcagcccttcaggcaaaggatttcaggcccaggtcaggaaggccttgtctgaggagtctgagaagaagtcaattgacaacagctagaacatctaggtcaggcactccaggccgacac

SEQ ID NO: 339250 - DNA, 469 bp, Homo sapiens
  chr7:617512-617981
  hypo
cccgctaggcagtgcgctgagggtagcagctcagggcgcttttgcagtcccatttatacccactttaaattatgtgcacattaaggggtgggttatacacagctctctggttaagggtggtaattttccgggtcatcagaccacattgccatggaaaggggcgggagcgcccgggtgttgtcatggcaacggtaaactgacaatggtgcacgggtgggcgtggcttacggagagtggcttgcaccctggccctgttttagccagtcctcaattaggtccagtgtcccagccccacctctggagtcgagtcccacctgctaactctcaggcacggagtccctcgccggcacccggaatgggagttcacacgcgaattcctgccgtgtcctcaggacagctgctcggcccacccaacagtctgcgtgcggccaccacggactgcggccccagcacatcccgggagctccac

SEQ ID NO: 339251 - DNA, 142 bp, Homo sapiens
  chr7:653116-653258
  hypo
tctgaggaagcgtacgggatcagaaccagcagctccgttcacagccaaactcgccttcaaaaggcaaggagatggcgcgccaagctcagcccctgaaatcacacacgcggggttgaacgtgagtaactcagcccatcgttcc

SEQ ID NO: 339252 - DNA, 271 bp, Homo sapiens
  chr7:653525-653796
  hypo
ccccaggacagggaagcctgcggagccaagagggtgcagtgctgggaggtccccgcaggggcaagcagggctgccaccaagcgggtgggagacacccaaggactcgtccaccacccagggaaccggactgtgaggttcaggtcagcatggagggcgggaggcgtggcgcccacagaggggaggggagccaggcccagatgacagacgcctgcagactccacgccccgcacgcccgaccaggacaggccaacgcagggctgggcacttcttc

SEQ ID NO: 339253 - DNA, 315 bp, Homo sapiens
  chr7:667329-667644
  hypo
cgggcgctctccatccagagccccccgcccagctcacgcccgccctccccgggcactgggggaggaggtgagcacccgccactcaggctcaggcagcctggaagatccaggccacgactgccagcgctcaactccactcggccctcactggtattttccgagtgcccgctatgtacaggcaggtctgtgctgggcgccaggttgccgggaaatggggcacacacagcccctgtctcataaaggcaccagcaaaacaggggtgaacatcgaatgggtggggcccttctgactgtcactcacggaacaaacacaggc

SEQ ID NO: 339254 - DNA, 40 bp, Homo sapiens
  chr7:711727-711767
  hypo
cggagcctggcacacaatgaatcctctggaagtatttgtc

SEQ ID NO: 339255 - DNA, 252 bp, Homo sapiens
  chr7:716729-716981
  hypo
cgagcaacgggggctgcccacctcctggaggccagggagggaggcagtgatgcccaggcaagtggcgggacctgcccacctcccggaggccgaggagggcggcggtgatgccggggcaggggacgagtctgcctacctcctctcgttgtcatccaggtgagcgaagagcacgttcttggagatggccttggccagcgcagtcatggttttgtagtccttgggaatcacctgaagcggagccaacacatcacc

SEQ ID NO: 339256 - DNA, 89 bp, Homo sapiens; identical to SEQ ID NO: 211117
  chr7:778948-779037
  hypo

SEQ ID NO: 339257 - DNA, 626 bp, Homo sapiens
  chr7:803211-803837
  hypo
cgctgcagagacggcgttggtgtgaacgggatcagggtctcgccctgcacccgcggctctcgctctcctgcaccctgggcggggctccctgtggcagcctccctcccgattatcctggcaggcccggcctgtgtggttcttacgcgtgagggggatagtgagtcccagcaggcaggcaggcttgagccctgagtgttggaattgtctcagtctctgacttgtaacctccaggcacaggagacgatggactcactggccatggtggagggtgtcagcagctgccaggacctctaccgcaagcacattggtcccctcctggagcgggtgaccgcgtcgcaccttgactggaccgcacactcgccggagctcctgcagttcagtgtcatcgtcgcacagtcaggtgagccgtcccgacagctggcgtgccgtgcctggccccactcaggctacacacctgctcccccaggtgctcagcaggtaccagcgccgaccagctgagctgtggttcactgaagcgtgttgttaaaagtacccaatagtcactcttgcctggggagaagcagcattttaaggagcatcgcattgaagactgtgggacgcagctcttccacttggcccgggcacac

SEQ ID NO: 339258 - DNA, 838 bp, Homo sapiens
  chr7:808392-809230
  hypo
cgtcagcgtgcttctttttcccatcccaggagttggacttgacctgtggacatttggctgttttctttttgtttttaagccagaaacactgtcttgtttccagtttaagatgtagagagggtgaaacagtcagaaactgggtcagaagcagcgtggttctcgtggcagggcggcacttggcccaagactcgtgctctggcgggaggctcaagtcaggcgtcccagcagcttcggtgcaacgcctcctgcccggctgcgtggggaggccctccaagacaccagctggtctcaccgcgaggcctgacttcgagccagagcagcgagtacattgcgtctccgtgtggcaagggcaggtgcgggggtctcagtccactaccgagcagcctgctctgatgactggcggcgccagggagaaggctcacatcgcgaggtccccagcaacggctcaaggtgactcacagttgcttggataagccagtggacgctccctctacactggcccggggccagagcgcctccttctgcggccccaacccagtccccaccctgagccttcagctcctgggcctgcaggctgagcctggcaggagacgctgcagggactctcagagctgtccttgccctgtcattcatggagacttacagggaggcggggcggccctactgcagtggggaccccttggggcgtaggatgcacagtgcaggcgcccaagcctcgcgcccaccggagagcagccacggtgcaggagcttggccctgagtgtgggcggggtgagggctgcaacgctgagaagcagatattaaagaagttctttcactgaaacaattgattttggtc

SEQ ID NO: 339259 - DNA, 241 bp, Homo sapiens
  chr7:818258-818499
  hypo
ccagcaggaggcctcggaggatcctgtccgggcccatagatgtttgctagcgggacaagcttgggtgagttgagcatctgactccgtccttcctcctgagacacgtgcagcgagggcacccactgtgcagcgagggctcccgccgtgcagtgagcataccccctgtgcagtgagggcacctgccgtgcagtgagcataccccccatgcagcaaaagcaccccccatgcagcgagggctccc

SEQ ID NO: 339260 - DNA, 474 bp, Homo sapiens
  chr7:819362-819836
  hypo
agcagggcctgggccgcctccactctgttggctggggttcaggggtcccaggtcgccaggagcaccttgcatgtggctcgggatgcacggagtctcccgtgaggtgtgggtttcttaggaccccagggcaggtgtcccatgggagtatgaactaaatgcctttgtggacgtttagacgtgaaatgtctgctctagactcacacacctgtctcgctccctccttccagaactcttaaaacgcctagatgacgtgtccaacgatgtgaggatggcagccgcctccaccttggtcacctggctgcagtgtgtcaagggtgccaacgcaaaatcctactatcagagcagtgtccagtacctgtaccgagagttgctggttcaccttgacgatccagagagggccatccaggatgcaattttaggtgagactccgacggcttggccttcgttccgatgcctgctttcggcgcctgccac

SEQ ID NO: 339261 - DNA, 238 bp, Homo sapiens; identical to SEQ ID NO: 332992
  chr7:822395-822633
  hypo

SEQ ID NO: 339262 - DNA, 945 bp, Homo sapiens
  chr7:834245-835190
  hypo
cgggtccaggggatgtctctgagcccccaatcctttacggggccttttcctggggtccctgtgggctccatcccgggatgcaggacagagatgtgggatgcggaagggttccccgcagggatccaggtccgggggcaggaggagcccagagggtggcaccatcacgcaaaggcctccagaggcgtggcccgggacaagcacagcgccagccgcctgcgctgccagggcagggtccacacccacagactgtaacctggacccgggcagggcggggtccacacccacagactgtaacctggacccaggtggggtccacacccgcggactgtaacctggacctgggcagggcagggtccacacccgcggactgtaacctggacccgggcagggcggggtccacacccttggactgtaacctggacccgggcagggcggggtccgcacccgcggactgtaacctggacccgggcagggcggggtccgcacccgcggactctaacctggacccaggcagggcagggtccatccacacccacagaatctaacctggactggggcagggcctaaacccagggactctaacctggacccgggcaggggaagggtccacacccgcagactctaacctggaccagagcctgggagggtccacacccgcagaatctaacctggacctgggcagggcagggtccacacccacagagtctgtctaatctgcagaggacaagggtggggtctcccacagagccagcctgaggggtgggtgcacctgaggggtgggcgcacctgaggggtgggctcgtcgccctctgcctcatgctggcaggacccgagaggcctgggagtgctgggaactgagaaacagtcatcaccaattaaaagtcccgctgccttttattaacaccatgcgtcacccttctgtacaatatcagtgagaaaacactc

SEQ ID NO: 339263 - DNA, 274 bp, Homo sapiens; identical to SEQ ID NO: 332994
  chr7:889360-889634
  hypo

SEQ ID NO: 339264 - DNA, 410 bp, Homo sapiens
  chr7:907671-908081
  hypo
cgtcttcacagcgcggtagaagacggcttgggggctgaggggcagtaaatccacagctggcatagaggagaagccggcgggtacgtgcccatcgttcaccatctcttctaaacacgaatgaaatgcgtgtgtcgtcctcacacactgaaggcaggctgcgtgcacggtctcctcctccgttgcgcacagcaacgtggctgcctgggcgcagcgtctgcaacttgtcagtcagtccctgtgtgtgcctggggacgctgtgctgcgaacagtgctctccggtcacatctgccctgcacctggaggtgggggtgcgatcgcaggccagaggcagatgtgtgcgcagcaggccgaccttgccaggctgtgcttctggggctgcaggctgcaccgtggccgggttaggttagaac

SEQ ID NO: 339265 - DNA, 300 bp, Homo sapiens
  chr7:915072-915372
  hypo
cggaggagtcttcggaccgaacggcgaaccgccttcaaaccccaattcttacagccaagccgttcccaaccctgcacggctagggctgggcctcaggccccgtttctaactctgactggggtttggaccccgtttccgcagcctgacagggctggaagctctaggccgacccagttcccccttccagcaggacccgatcctggaggagtgagccgtccacccaggcacagccgcaggtccccagccacggccagggaaggaccgcaggtggcctttcaaagaggaggaacgcccctcagc

SEQ ID NO: 339266 - DNA, 223 bp, Homo sapiens
  chr7:920933-921156
  hypo
cggcactgtggggctctgcaaccaggcctcctcgcccccactcccaccccaccccaccccatccccggcacccgtgcatctgcgggctgcacttaggtgaggtggtgtttcctggagttttacgtatgtggaatcacagtgcgcactttctgtctaaccgcttgaattcattcaccacggaggctgggagactcctcctggagcgtccgcagttccttttatc

SEQ ID NO: 339267 - DNA, 742 bp, Homo sapiens
  chr7:925633-926375
  hypo
cgggggagcgcggtggcgagggcacgtgggcgtggctcacggtctcctctctgtggcaggtacatgtcccagagcaagcacacggaggcccgggagctcatgtactcgggagccctgctcttcttcagccatggccaggtaagccgtcttgcttcctcctgcatccctttctgctccgggcaggcaagtggaggtgggaatgacctcccacctccactgatgggcaaccttgcgctgccctgggcctcggccactggggctgtgggtggcagaggggcccagagtcccccctggcttggctgctccactctcaagactggggctctgcgctgcgtttgtgcacgatggggctgagagggcgttgtgttggtataaacgtccccgtccattttcatgtgattctcggccaggagctctctttttcggcggcattgccaagggacgtggtgctcagaagagactcctcagcaccggccgcactctggcttctgctggaaacccagccttgtctttgctgtcctgaacaggtcagggctttgttcttgattcttgtgtgttgctttctcttgtagcaaaacagtgcagcagacttgtccatgctggtcctggagtccctggagaaggcggaagtggaggtggctgacgagctgctgggtgagcatccggcccttcaccccgggaccctgtgacagcggccccagtacgcccctccccgggtctctgcgctgtgtttcgtgtctgc

SEQ ID NO: 339268 - DNA, 594 bp, Homo sapiens
  chr7:943355-943949
  hypo
cggctaccgtccacatctcctccccgtaggaccccagttccccccgaggtcccctctgggcattgtgggggcggtggatcctctagcccgagctggcagcccccactgacagggccaagctgggtggccccagagacagcgtggtgatccggctcctgggcagcccggccctgggaagctgccttcctgcacctgtcttcccatgctgcccggcgccagtgcccacactcccacacgtccaagcacccgccttcccacgctgcccagcccgacttcccgccttctcatgccgcctagctcaagtgcctaccctcccgtaccgtccaagcacccaccttcctgcgccacccgggcctgagggcccaccctcctgtgccacccgggcccgagtgctcgccagcacccaccttcccgtcctcatggtagatgaagatgttacgggtgctgttgtccttcaggtaggtgacctgcaggccgtgggggtggccgatcttggccggctggaaggtggcgttcaggtgctcgatcttcatcacggccttgggctccttggcctgagaaggggtggggtctaagcacctcacaggggccgtc

SEQ ID NO: 339269 - DNA, 708 bp, Homo sapiens
  chr7:965802-966510
  hypo
cgtccgctcccgccctgaggagccagggcaggccccgaaacaacagccgcccctcccgttcccctcccagaccgccaggagcacctgggagggcccctcagatccacccgagacccccaaggcctcagcgaacctgggtgggctgtagctactgatgcacaatgaccttcccagccccaccccagcgccccccgccccagaaccaaagcccggtggtggccagcagacacaggcggcacctcggggtctgggggacgcagctgcggctggcttctccccgaccctgtgggcggcacccaactccccaccctgccgggtcctcccggggccatctcggagccacccagcacttgaccatggccctgacaaggcccctttgtactcactggcagtcggagggcgtgggccggtagtagaaggagggtactttggactcaaacctggctctcgcggcgtcgttcccgtgggaggccatgaactgcaagagaggaggggccgggtcagaggcctggggtcccaggggcagcctaggaggtgccagctgcccttggggccgtcaccacagtgacccgcagacccaaggctctgagggctccaccagcaccaggacgggaacgccacctcctcctgccccagggacaccatttctgagtgatcgaccctcccctgggacagggaaggagccagcgtccctaacgacggggtccc

SEQ ID NO: 339270 - DNA, 121 bp, Homo sapiens
  chr7:966926-967047
  hypo
cacactgtgctcctggcaggcgcaaaggccctgagggtggacgctggcaatgaccctgccgccagccaggtatggtgagccttgagcagcaggaggggccgccacaccccacgccagcccc

SEQ ID NO: 339271 - DNA, 192 bp, Homo sapiens
  chr7:987241-987433
  hypo
cgacatcccgttgaccagcaaatatttcaagacgatccaggctttgaccctccccacactcacgccccgccctaggcctagccaccgccacccggcctcggtcactgcagcagcgtcccacccacctcccgctcccgcgctggccctacctgccctggaccctgtgacgcgtcgtgggctgggacactcctc

SEQ ID NO: 339272 - DNA, 333 bp, Homo sapiens; identical to SEQ ID NO: 332995
  chr7:1001822-1002155
  hypo

SEQ ID NO: 339273 - DNA, 113 bp, Homo sapiens; identical to SEQ ID NO: 256911
  chr7:1026935-1027048
  hypo

SEQ ID NO: 339274 - DNA, 412 bp, Homo sapiens
  chr7:1029912-1030324
  hypo
cagtgtgacagtggcgcgtgtgctgggggtggtgtggtcggcagtgtgacagtggcgcgtgtgctgggggcggtgtggtcggcagtgtgacagtggcgcgtgtgctgggggcggtgtgatgggacacctgctgtctgagacggccctggcccccgtcccagcgctgaccatgcacgtgagcggcaggcggcccctcaccgagaagagaggataagccgtggcacattcccacctgcgccacgtgaagcggcgccccaaggccaggacgtggtggccgggacacacgggtgcacggcaggcctcacactcccaggtggggccgcagggtccctaagtcatgggtggggctgctgctacggaggctgctgcaaggacgagaaggggacggagggatggaggctcggctgcgtcc

SEQ ID NO: 339275 - DNA, 177 bp, Homo sapiens
  chr7:1075890-1076067
  hypo
cggacttcgggcggttgtgctgtggccatgtagggttcgggtgctcgtgctgtggccgtgcagggttcgggtgctcgtgctgtggccgtgcagggctcgggtgctcgtggtgtggccgtgcagggctcgggtgctcgtgctgtggccgtgcagggctcgggtgctcgtggtgtggcc

SEQ ID NO: 339276 - DNA, 130 bp, Homo sapiens
  chr7:1115608-1115738
  hypo
cggggctgccactctccagggcgccccactcccagctccagcggctgagtccaccaagccaggacaggcccaaggaccagagggcgaggtgattcacagtggagctcggaaagacccatccatgcccagc

SEQ ID NO: 339277 - DNA, 420 bp, Homo sapiens
  chr7:1202650-1203070
  hypo
cgagtgaacgggctgtgctaaggggaattgccaccttgggaaacctgtgtagttgcggcttttctgattaagtatcaataaaagtctgaccttgtgaaaaaagcaaacgtgagtggccctgcttatgtttcaccttgcgttgctcagtgatagttctgcaaagtcgcaggaaacctggaatcatctaattatcgtgagtgttggtgagtaacacccataggcactggctcccggggaaatacagagtcaggttcctccgagccgctggccacagcatttttgttaagcagttcatcgttaaccttgttgtacatgtctctctctcaaggttccttatttaataatgtctagttgattcattaacatggaattcatggccagtacctctgtcactcatgcctgactgaagttgatcagcac

SEQ ID NO: 339278 - DNA, 71 bp, Homo sapiens; identical to SEQ ID NO: 211164
  chr7:1303352-1303423
  hypo

SEQ ID NO: 339279 - DNA, 101 bp, Homo sapiens
  chr7:1303453-1303554
  hypo
cccgctgcccgcccggctttcactccagaatggcgctgcccgtgcctgtacagacagctggcaaagcgtcagatggcattacaatatttttacttataatc

SEQ ID NO: 339280 - DNA, 357 bp, Homo sapiens
  chr7:1308164-1308521
  hypo
cgcgaccctggcaggaggtctcagagaagacggctcgccacaggccctcagaacaccctcctggtctacagaggggacgctgaggctgggagcgggaatgtggctggtccctgctgctccctcgctcgcccctgtccccgaagccccaggacacccagtggccctctttgggctggacccaccctggccaccctggcccttccggctgccggctggggacgcgggcgtggtgcggcaggcctgccttgattgtgtcgatgggagatgattttcaaggtgaaatttctagttcactagagtcactttcgttcaaggcgacgcacaaaatgtcatcccggcctgttccgcgtgcaacgc

SEQ ID NO: 339281 - DNA, 229 bp, Homo sapiens; identical to SEQ ID NO: 256945
  chr7:1315705-1315934
  hypo

SEQ ID NO: 339282 - DNA, 383 bp, Homo sapiens
  chr7:1328511-1328894
  hypo
gaaagcagacaactcgtccgcgttgtcctggagatgcagccgacatcggcctgcttgtcctgctgccagggccgctgggggccccatcgatgtccacccggccagacacagctcccgtcattcaatatggcaaagtgtggtggtgctggctccgcagaccccactgtggaggcgaaaggtaagaagtcagggttcgaggttggggttccgtgaacacagccccgagaccgggtgtctaccccaccgagaggaggggtctcgtcggggggcctcgctgagcctccgtgtcccacccggagccagggtgggcaccctcccgtccccgcagccccggaagatctggcaggtggcatgacacccacccgggggccctggtcaccggc

SEQ ID NO: 339283 - DNA, 263 bp, Homo sapiens
  chr7:1333595-1333858
  hypo
cgccgtcataaacccgcgtgcaccgcgtcactccccgggcgccgagttccgccggcctggcacgggctcacgggcacccttggcccccgaggggctgtgggaccccgggaccgggtgctcgctgagggacggcccttgtctgcggtcatccctcccctcctgagtggaaggtgatgccgtgggcccagggctggctgcgtctgccaggcatgccctgcattcaggcagaactcgagggaggactcatctccaaacagaagagc

SEQ ID NO: 339284 - DNA, 913 bp, Homo sapiens
  chr7:1370055-1370968
  hypo
cgtgatggctcaggtgcgtcttccacgcagatcactctggcagggagcgcggatggagacccgaggctggggcctgctggctttgcccctctacgcgaacagaatggcctctgccctgcaggaatcttgagtccaggagaggagagtttccctggaggtggaggtcaggcccggcagtcagcaggccaagctccttcgggccagggcaagccggagggcttcccagagcgggcacagtggacagctgagcaggccagactctgacatgaggtctggacaggcccttccgcccttccggatgccagtccccctgcttgtctgaccactggcccgcctgcccacggggcggctgagatgctggcgtgtgcgtgcgcatgtgcacgtgtgtttgtgtgcgcgtggggctttctgacagccgataattcacaggcgcctccagagccggctcccgctcccacccgctcactcctgtttatgaagcgaagggtaagtgtttaattagtcgcctaattgcctgggtaattggagacgaactcagctctccaagtaatcagtcggaacagcctcgaaaatatctggcccaatattcattagtgtggcttgatcgttaaacagttaccgtgtttggttcatgacaaggcccagcaaacagctgcgcgcccaacagcccccgccagccctggcagacaaacagctccacgcagacggacggacagccggccagcaccggggcagagatgtgagcggccagcggggcacagacgcgggcggccagcggcacccgcacgttccgtctgtgccctgtccggctgccctttcccctgggccccccggtctccctggagctgcagaggctccctcggtcagttgggccacccccaccccgccagcctcctttgcccccagggagccc

SEQ ID NO: 339285 - DNA, 431 bp, Homo sapiens; identical to SEQ ID NO: 333002
  chr7:1408460-1408891
  hypo

SEQ ID NO: 339286 - DNA, 212 bp, Homo sapiens
  chr7:1451120-1451332
  hypo
cgtatccggggtgttcgaacaattgtgcggcgccgacgatgcaagctgttgacctgcacagataaaccgtgcgtgcggaggaatcgggggcggcggacggggtggggggagtgtacatggctgttcttttctgctggggcgcccggcgggccctgcctgtggttcgccctgtgtgcgggcggtgtgggcgtctttgccgcagggtgcttgtc

SEQ ID NO: 339287 - DNA, 316 bp, Homo sapiens
  chr7:1460672-1460988
  hypo
cgtaacacgcatcccatgggcgtcccgtgccaggaattgagggggccacaccctactcaacgcgggggacagtctccgggctccgtggctcacggatggtggagcgtgtcatttcccgcatgtgacacagagtgcggactgtgcagaaggcggctctgtgcctcggaaggcagggtgcagaggcgtgcagcgctcaccacggggatgcggccggctcctgggacgggacctggaacgcggatgtggccggatgtttagtgggtgccgtgcacggtgtctgacacatcagatgtgatgtatacctcgcacgaaagac

SEQ ID NO: 339288 - DNA, 576 bp, Homo sapiens
  chr7:1473784-1474360
  hypo
cgacgtctcctctgaggctcccaccagcccatctgtgccaggaagctatgaaagggcccaccttcgagggccaggccctgagagggtcggctcctgcccgaggccacagagcacgtccgtcctgcaggcaagagctgggaggcaggcgagaccccaggcaggtgcggggccgcccaggggcaccgaggcaaacacggaggcacgtaggagtccggggccatgtggtcggtttctttattgagaccacagacggtagcgcaggtccctgctgtccacatgccccttgtagggacaggaggcccttcccgagtccaagtccgaatgccgggtccgggccgagcccacggccccgagtacaagtccgggttccgggtccgggccaagcccatggccccgagtccaagtccggatgccaggtccgggccgagcccacggccctactggctactactgggaggggctgcttttgctttttggtgaccagatcttggacaagcggaacttggacttcttcctctggaggcctaggggacaggtggacagtgaggccgtgctcaacgccgcagccgcacagcc

SEQ ID NO: 339289 - DNA, 267 bp, Homo sapiens
  chr7:1475105-1475372
  hypo
cgaccacaccggtgacctgggacaggagggcctgggccgaccacacaggtgatgtgggacaggagggcctgggccgaccacaccagtgacctgggacagaagggcctcggccgacccatgccaaggccccgtcacgctcccagagggtctcatagaggtggacttcaggtgccgacccagaatgccatgtgctggacccctcatgagacgagacaggaaagctgtcggggacagtcacacagtccgtgcaggagccaggagacgcac

SEQ ID NO: 339290 - DNA, 882 bp, Homo sapiens
  chr7:1476273-1477155
  hypo
cgcctggtcagaaagttctacggggctggctgaccctgagggccgggagcatggaccaggcgacctggcctggctgggaggggcccccggcacctgcccctcaccggagccggtcctcgtccagcgagtccacgatgtcactgcggtcgttcacggtgctcacgtactgctccagcagctcctgctcccgccgccgctcctgcagtgacttcagagcctctgtggggatggctcgtcagcaggagccccccccaccactgccatgcccctcacaggacacaatgtccccaccacccaagcgccaggctcctcttttggaggaagaaggtggggtcttggggggatccggagcagaatgaatgagtgaataagtgaatgaaggaaggaacggccacgtcagagcccgtgtgctgggatccttccccatcatctcgcagaaacaccactcgctgcagagatatggacactgaggctcagggcgtcgctgtccctgcagcacagcaaggaaagggcagaggcagacggcctgggcctgtgccctcagccagggcaccctgcatcacgagacaaatgcctatggctcgccctgactgctgctacactaaatgccttgtgcgaattgattcgtttaatcctcacaacagctgcgtgaggtgggtgctacaagcatcctcactttgcagaggatgaaacccaagcacagcaaggttaagtaccttggctgaggacacacagccaggaggtgggagatttgaaactcaaacgtgggctcgcctggctccagggaaggtctcaccaccaggacagtcaggtggcctcacagagccggcccccagacatcctgggctccgcggcatccctggctggggccccttggctggc

SEQ ID NO: 339291 - DNA, 883 bp, Homo sapiens
  chr7:1477156-1478039
  hypo
cgcgggggacgcaccgggcttggccatgagccggcgcagctcgccctcgatgtccagctgctgctcctccagacgctgggccttggacctgccgcacagacacgcgtctgaggcctgactctgccgccctgtcccccgcctggcccgcccagcccgcaacgaggtcctggacctgccacacagacacgagtctgaggcctgactcgccgcccgtcccccgcctggcccacccagaccgcaacgaggtcctggacctgccgcacagacatgcatctgaggcctgactctgcgctcctgtcccccgcctggcctgcccagcccgcaacgaggtcctggccttcgaggaggggcccacggctgggctctcacttgtacatcagctctgactcctgtctcagcagaagctgcttctcgtgaatgagccagaaccagtccaccatgaggctatcctcagcgtcatctggggagaggagccagctggggcaggggggcccgccagagttcatggcccccagccccaggactgagggtgtctgtgggagtcgggctggcccagggccaggccgaggcgctcacctccctcggccgcccgcagtcgcttctccagctccacgccgcggagctccagggcgtccagccgcctctcgatgtcctgcagctgcctctgtatctcctccggggagaggtagtcggggtgcagctgggaacggaggggcggtgaggatgccggagggctgggcccctgcccggctccccaccactactcaccctgactggggaggtcaccgtctcgccaggcagagcagggacattggccggggacaagggtctccctggagaaggagcagggtgagcctctgggacctgggccaccaggcccaac

SEQ ID NO: 339292 - DNA, 524 bp, Homo sapiens
  chr7:1479741-1480265
  hypo
cggaacccgaaccaccagccccagggcctggcccacctggaggggctcccaggccatatgcagaccagccggagggagcaggtggccttctgagcaaatgccacctcccagcccactgactacacctgctgggaccctcctgcaaacacacgtgtccatcgctacctgccgtggtgcgaagcagattccaggcgtgagctccgggccccacgggacccacacatggggagactccaccccagctgcaggcatggtgcgtgaacccacacgggtgctgccatgcccaggtgagacacgcaacgctgcccccaaaccagggacagcggcccccatgtccctcaggcaggggtgacctggcctctgctactcacagggaggtgcgtctatccctggataggcgtgtcaatcggtcgattacatactcactgcatttattaagcacctatggtgtaccaggccctgggccagccccacccatccctaacctctcagctgggcttctcctgtccacgggcttcagattc

SEQ ID NO: 339293 - DNA, 1005 bp, Homo sapiens; identical to SEQ ID NO: 333003
  chr7:1498587-1499592
  hypo

SEQ ID NO: 339294 - DNA, 532 bp, Homo sapiens
  chr7:1533923-1534455
  hypo
cggaaggccgcagtgaaggtgaacagagcgcccagggcacgaggtgggggcagggtgaactggcaggagccccaggcggggctggaggggagtgtagaccaagaacccacggggtcacccatggggcttgaagggggacagagctgtgaggccagccggctggggaaggacagtgtgcggctgtctggacagaagcaggggcagacggtgcatctgagactgcgtgaagggtggcgtgcccgtggacgccctggaagcaactggaaggcgggggtccgggggaggctgcggctggggcttggagtcacgtggacgcagacggcagctgaatccctacagtggcgctgggacgccagcatgggagtgggagaagggtggcacccaggattgtggaggaggagcaggatggtgctgtgaccatgggaacagccgcccaactcccactggcccttcctgccgcagccggcccggcaccccgcagccccgcccagcccggcacacaggagccccaggcggcagcgcactcacttgc

SEQ ID NO: 339295 - DNA, 137 bp, Homo sapiens
  chr7:1556125-1556262
  hypo
gccgaactttcctttaaaaaaacaaaaaaaaaaaagccaatacatgtcccagggattccaacccatgtcctatcgcagttcccagatggcatttctttcactgagtcgtgccacaacaaactcacaccagatcatgc

SEQ ID NO: 339296 - DNA, 233 bp, Homo sapiens
  chr7:1563405-1563638
  hypo
cgccatgctcagggctcctgcctgtcttctccctgcagtagaattgatcctggtggtctccgtgtcccttcctttccccgacctcagccggggccacctgagtcccccgggttaccctgcatacctccaactctcaggaagaagcgagggtaggagggaccccacccctcccggggcgccccgggctcatggtgcaactggactcgtctccctgcaagaaccagccctgcacc

SEQ ID NO: 339297 - DNA, 336 bp, Homo sapiens
  chr7:1584054-1584390
  hypo
cgggtgcgctgggcccagatacgcggctcctgcctgcctcatggcctgctcctctgtcggggcctgtcaccgggaaaccccttttttagcagcgatgacgacactggaaccacgctagtctccgtccctcccgctcacatgcgcccacgctccccctcgaggcaggttgagccccggcctggaccgccccacgctgccttccgtccacgcagagcgggctcggccctcagggctttccttcgagtcgtgttggaaagaagcagaagcagcctcacccgtggggcggaggcgtctgagggtcaggaggcagggaggagagagggcctctgtggagcc

SEQ ID NO: 339298 - DNA, 839 bp, Homo sapiens
  chr7:1598549-1599388
  hypo
ggctgagccagatgcgccagctcgggaaccgtggaccaagtgtactggtctggggatgtcaggagcagggcctggtccccagggaggggcagtcgggaggttgaccgctctgccacctgctcacagggctcgccggctgatcgaggcctcacccggtgctggtgtcacagcctctgcgcccggtcacaggaggcggcagggccggctgggcctgatttttctggcgggggcgggacactgaccaagcccattgcaggacagacctgtctgcccagatccaggcgacggggccctctgaccattgttcactgcgtccaggtgcccagagctgtggggaggctgagaagccgcccagccagtcccacaccctggccctggcacagccacctcctcctgctctcatgagaaacccggctgagggcccatgagctgttgcctggttccaggccggctgccctgctagtgcccaccccgaccccctgcctgcccgtctctctgcagatgcggacaggcatggtgtacccccctgcctgcctccttcactgctgggtggaactcggggcgcccaggagccgcctcctcagggctggctcatttgatgtcccaggctgagctgcacactagggggatgaggtgaccggtgggcacccatctcagacacccggcttcccaggtcccgcggccctcccctgggggccctggccagcagttcaccaaggcagcagccccgggtgtgagcagggggtgacagggatggggctccacatcctcccggctctgcttctgggattcccccggctcctgtccacgggcacggcctcctgagagccgcgtggggc

SEQ ID NO: 339299 - DNA, 226 bp, Homo sapiens
  chr7:1607246-1607472
  hypo
cggggagggaggtgagacttgagtccctgagtgggtgtctgggtgttcacgtgtcctgctgagcagcgcggggcggctgcctccaggtcaccacacctggcacacccggatcacctccctcagcgccttcagcccctccatgcttttgtccttcacggccacggcgaggaggactgctctgtttccagcttcttgagacacaaacgctaccaggttctttgcaaag

SEQ ID NO: 339300 - DNA, 309 bp, Homo sapiens
  chr7:1607697-1608006
  hypo
ttcccagcgccttccgcagccccgcctcttctggctctctctcatctaaaagaacccaggaaagagaagcctgcagaagcgagtgctgtcgaatctcacgtgtgatctccacagagcacagcacagccagccgcctgctcacgtaatgtaccatggcaggggaggcggctcgaatgacaaaactgctgcttctgcttgtctgctggataaaatgcctgcgggctggacaaagcatccactgagggcaagcagggcgccttgagacccacaaatgcccggaaaatgctatcgctgtaggggtatttgtcc

SEQ ID NO: 339301 - DNA, 527 bp, Homo sapiens
  chr7:1615030-1615557
  hypo
cgtttaacaccacacagtaaacacaaaggaaacccaccgttgctgggccgccttccatcatggcgcagaattgagagtcgagcacgtcgctttgttttctgccaaacttagccaagctccggtcttaaaatcttttcgttcctagcgtgaggctttctgtctttgttgcaaatattgaaacctgccacgtcacctcttgcactatttgtttagttctttaagaaatgaaaccttaatccatgtacaatttctaaaagcctttatttcaatattttaagaagttatttcccctggcaaagaagccgccctgttgcccggtgtggagctcgatgacaaagctcatcagcctgagtggaagctcattcattattgctgcgttttcgctcttccaggagagaacggagagccagtgtgctgtgtgtcacggtccctggatgaacgtttgtggaactggattgaattaaacaagacgtgcaaagcaagtggttcacgaggtagtgtgggggtgtagggatggggactgaccc

SEQ ID NO: 339302 - DNA, 659 bp, Homo sapiens
  chr7:1641740-1642399
  hypo
tgggtcagcccggacgcaccggcctctgtctgggtcccagtcttctcaccgccaggcgggcaggtcagcagaccaggcaggaccgagcccgtcgcccggggctcttgttgtctgtgccatttcggtgccttttgtccttgcttcccgccgctccttgaggatgtttaccggctgctggggccgtgccttccaggtgaggcctcggtcattccaggtgcagcctcggatcagggatgacggcccaggctgaagtatcatgatgaagagcttggaccgagggcagttaaggtgtgtgagtattcagatcccccacgtgcccttctctggaaggtgccagcgacctgtcctctctgggcctctgtcttctcctctgtggaatgggaatgatggcgtccgcacctcatagggctgctggaaaatgggtctgggtctcggctggaatttcagccagcgccgaggaccagaggccctggttcctgtccacgtggcctgggacccccgcggccccgcacctgggctccgggggcaagtgtgttcgctttgaggacccagccttggaggtcagatggcatccgttatgggttaaattttgtccccctaaattcatatgttgaagtcttaacccacagggcctcagaatgggatggtatttggagccc

SEQ ID NO: 339303 - DNA, 82 bp, Homo sapiens
  chr7:1689040-1689122
  hypo
ggtaaggtgtgcctggtgagcgctgtctgggctgaaggaggagtttgagaaggcggctttatgaagggaggtggccgggcgc

SEQ ID NO: 339304 - DNA, 400 bp, Homo sapiens
  chr7:1694568-1694968
  hypo
cgaagggggtgcccagcctcgccccgcccagcgcacccctgcagcagcccgggagggcaggccgtggctcctgggaacacggcgcccagctgcaatccacattgctgctagtgaatatggacaattcagagacatgaaataaggcagacagagaaaaagcatcggtgactctgccaggctacatatgtgtgtgcgtgtctgcatatatatacacacacgtgtatacgcacacacagagccacacatcactcaacgacagggacacgttctgagaaatacatggttccgtgattttgtcatcgcgcgtacatcctagagtgactcacacgaacgcagatggcggagcctaccccacgcctgggcctcgcggtacagcctgtggctccggggctacacaccc

SEQ ID NO: 339305 - DNA, 2892 bp, Homo sapiens; identical to SEQ ID NO: 333004
  chr7:1703861-1706753
  hypo

SEQ ID NO: 339306 - DNA, 751 bp, Homo sapiens; identical to SEQ ID NO: 333005
  chr7:1708913-1709664
  hypo

SEQ ID NO: 339307 - DNA, 465 bp, Homo sapiens; identical to SEQ ID NO: 257015
  chr7:1714478-1714943
  hypo

SEQ ID NO: 339308 - DNA, 186 bp, Homo sapiens; identical to SEQ ID NO: 257018
  chr7:1733134-1733320
  hypo

SEQ ID NO: 339309 - DNA, 355 bp, Homo sapiens
  chr7:1734710-1735065
  hypo
cggctccggatgcacgtggctgtgccaggcagcagacgtggccgacaggcacatggtgggacctgctctgtggctccagagctcatgcgcagcccgctggggctgtgagggttctgtccatccaccaggaaggccaccaggaccctgctcctgcctgagaaccccaggaagtagtagcgtgccaggtgcgtggccggcctcccagcccttcccagcaccagctgcgtcctcctcctccagggctgcagctcagggctcaggtgtccgcgtcgagggcactccctaaagggcaggagcaggaccattggcacaagcctgggcgagtctcgctgggaggcaggagcagactcagccc

SEQ ID NO: 339310 - DNA, 913 bp, Homo sapiens
  chr7:1784384-1785297
  hypo
cgaggccatcccacagcagatcaacagcaccatcgtggacctgcggctcaacgagaaccgtatccgcagcgtgcagtacgcctcgctcagccgctttggcaacctcacgtacctcaacctcaccaagaacgagatcggctacatcgaggacggcgccttctcgggccagttcaacctgcaggtgctgcagctgggctacaaccggctgcgcaacctcacggagggcatgctgcgcggcctgggcaagctggagtacctgtacctgcaggccaacctcatcgaggtggtcatggccagcagcttctgggagtgtcccaacatcgtcaacatcgacctgtccatgaaccgcatccagcagctcaacagcggcaccttcgccggcctggccaagctgtcggtgtgcgagctctacagcaaccccttctactgctcctgcgagctgctgggcttcctgcgctggctggccgccttcaccaacgccacacagacgtacgaccgcatgcagtgcgagtcgccgcccgtctactccggctactacctcctgggccagggccgccgcggccaccgcagcatcctcagcaaactgcagtcagtctgcaccgaggactcgtacgcggctgaggtggtcgggcccccacgtccagcatccgggcgctcacagccgggccgctccccgccgcccccgcctccgccggagcccagtgacatgccctgtgccgatgatgagtgcttctccggggacggcaccacgccactggtggccctgcccacgctggccacgcaggccgaggcccgccccctcatcaaggtcaagcagctcactcagaactcggccaccatcaccgtccagctgcccagcccgttccaccggatgtacaccctggagcatttcaacaacagcaaggcctccacc

SEQ ID NO: 339311 - DNA, 284 bp, Homo sapiens
  chr7:1931663-1931947
  hypo
cgccagccctgcgagctccgttcacggtgagcaccctacgcaggtgcaccgtcttccacccttcatacatcatgtttatggcaccttttccatatttaaacacgtacagacacgcagatgcttagcactgcgccacggtggtctactgcattcagcacagtcacgcactgcacacttttgcagcttggcagcagccggctaaaccatgcggcccaagggtgcgggaggctgcacggcccaggctcgtacaagtcattctaggaagttcccgcaaagacaacact

SEQ ID NO: 339312 - DNA, 212 bp, Homo sapiens
  chr7:1932177-1932389
  hypo
cggaaacgctccattaagcatttcctttgagtgacagacccacaataaaaaaagctgtggattttggaacattcccgacttcaggttttcgaatcggggaggctggacctgtatacctttccccctcatccatatgacaaacccggtaggtcgacatcgccacatgtttgtgcagttccggaatctgtgccgtccacgcctctggccctgac

SEQ ID NO: 339313 - DNA, 163 bp, Homo sapiens
  chr7:1962376-1962539
  hypo
cggtgagctgcacggtttctgcagatgctctttggcaaacttgggggttctcggcttctcctggtttgccgagtttccccatgaacgtgtgttgggcctcgctgactgcatttgtgcatccgttggtttggccatgtaatttttccttttggcgagctgacgc

SEQ ID NO: 339314 - DNA, 212 bp, Homo sapiens
  chr7:1970797-1971009
  hypo
cgcacggtcacaggagcgagggcgcgtcgtggggtccacgtcaagggtctgctgacaccacgggaacacccccaactcctcaccccacgcacggtcacaggagcgagggcgcgtcgtggggtccacgtcaagggtctgctgacactgcgggcacacccttgctcctcatctggagaatggggaggggacagccctctctggcagcaagcggc

SEQ ID NO: 339315 - DNA, 303 bp, Homo sapiens; identical to SEQ ID NO: 211224
  chr7:1997041-1997344
  hypo

SEQ ID NO: 339316 - DNA, 167 bp, Homo sapiens
  chr7:2006411-2006578
  hypo
gtgaggaggaggaacgccgcaatcgtggcgtgctgggaggcgagggccgcgggccgcgctgcgtgcgcagggcagagctccttcaggaacacgagaggaataaagacggacccacccgagggaaaccgtgaggaatcgtagccacctgctctccaggagaggctgcc

SEQ ID NO: 339317 - DNA, 321 bp, Homo sapiens
  chr7:2019124-2019445
  hypo
actggatggggcagcgccaacacaggcaccaaagcggagcccggagctccacctgcatctgcctggaaacctcttgcctgaggaccctgatgggtccacaaggcgggggagaggcagagagctctagaaaagcagcccggcctgcagaccctgctctaggggcgccgtgtgcaagcaggagctggggtgagggtggcctaggacagtgcagtggcagagagctggcagcatgtctgaagcggagcccaagggctgctggacacgcctggctgctgcactgcctgggctctgctctgagccacactcccgtgcagccatctc

SEQ ID NO: 339318 - DNA, 522 bp, Homo sapiens
  chr7:2024704-2025226
  hypo
cggttcattccatgtgtccactggacaggacctggggtactcagatcaaaacactttctgggtgtgtctgggagggtttgtggatgagatcagcatttgaatcggggactcagcagacggccccgggcagcatgggtaggcctcctccaaccccttgaggccggaatgaaatgaaaactggaggaggcgaccgttcctcccttgcctgcctggtggcctgagcggggcagctcccgttttccgcccaggactggggctttcaccacaggctccgctggttctcaggcctgcagagcggactgggcacagcacaggctcttccaggtctgctgtgcacagatgcagaccacgggatcctggctccatggccaagagcgagggcctcacagtcactctctcgggatagaccagtctaccgcacctggtgctctagggagcctaacatgcagctcgatctgctctccccacctgatactacctttagatggtgtgtctgtgtcttcggctctcaacagcgaagcc

SEQ ID NO: 339319 - DNA, 548 bp, Homo sapiens
  chr7:2041390-2041938
  hypo
cgtaggctctcacacctgctttgccccgacaccgtggcctcatgcggcaaacatgtcactggccccctgccacaaacacggtggtggggcccgaggggctgtgctccccgccggcgcatgccacctgtcactagtagagatgggactcaggctcctcacacacccttccccgctcaacgcagcttccgacgacagaagaggcagccatgcactggcgcctgcagcctaaaggcttatggggacaggcgtccctgcccagacccagggtccaggtgccctgaatcccagccactcccgcgtctgactcaccatgtctgctctttgtttctggcctcccagctcctccagggcctgcgacagctgagcctgcaagacaagacaggattcggcctgagactgtggtgggccaggccccatttctaggactgcagggaacacaacccccaccaccccgcagcctccactctctggggagcaacgggacccaggagctgggaagtgggcagccagagggtgggcaggggccagtgtggctgccccgcgaggcc

SEQ ID NO: 339320 - DNA, 147 bp, Homo sapiens
  chr7:2068947-2069094
  hypo
cgaaagattacacgctgcatggctccatttcacaacatttttaaatgggcagaactggcgtgtgagaatcgggaaggcagggctttgggggaggtggaggagccggcaggtgaacttgggagccctggtgacaccgtgttcccgacc

SEQ ID NO: 339321 - DNA, 109 bp, Homo sapiens
  chr7:2069789-2069898
  hypo
cgcggaacccagagctgtgtacaggtgcatgtccgctacgccccgccccgcgctccacggaaggtccacacacagcctgaggaggttcccccagcccacagtgacgccc

SEQ ID NO: 339322 - DNA, 142 bp, Homo sapiens
  chr7:2070150-2070292
  hypo
cgcgggcccctgaacagccttgatgtgcagaggcccctgggtaagccagggcgccagtgacaggtggccggaccccgcaggagtggaacctgcccatctgcgcttgacgaaaatgcctccaaaacaaaccagacgccgcccc

SEQ ID NO: 339323 - DNA, 251 bp, Homo sapiens
  chr7:2071776-2072027
  hypo
cgggacgcccggccccagtccctgtccagtgcctggaacagaacaggtgctcaggaactgtgtgttcaattaaaaaatgaacgagtgaaaccatcagccaatcagtcctcggaaccacctcctgaggcaggctggagtcctccctttcagatgaggacaaggctccaggggaaggcgcgcgccccaggtctccagcctccgtgaagccgagcctgggctcttggccatcatgctaacgggcaggtgggaaa

SEQ ID NO: 339324 - DNA, 309 bp, Homo sapiens
  chr7:2102525-2102834
  hypo
cgctgcattcccagggacgaaggtcaaaaggataacgctaagataaaaacaaagagaagccacagaagcgtggctctatgtacagaaaacataaaaatgggaaaagcggagcaatgtttaaagatatacacacaattaaactagaaagaaaaatgagggaagggactgctctacgtttagagcacggctccgtctgacagcggaggctgttctgtttcttacactgggactgagacacgggaacttgctgtattctttgagctgtatgtatatgttctatatgatctttgcacacgcaatgtgtttcac

SEQ ID NO: 339325 - DNA, 382 bp, Homo sapiens
  chr7:2113550-2113932
  hypo
cgggcccgcgtcatcagggccacatccccaaggcctgatggctgacactgaaatcttctgaacaacagaactagactgtaaaaatccaacaccaagacgtgacaaggagacgacactgtggaatgctcgccaagaaccatgtccgggatgtttgccactcacacctgactggcaggcgagtctacccagtctgttcagcacacgggatgtgggtgaggacggccacatgccgttccaggcagcagagatggcagcacggaacaccgcagccagcctgggctcgctgggcctccattctactggggtgggaatctcaagcaaagaagccacgcgtgtggcatgagcagagaatctcacggcgggtgcaggtactgaggtcacc

SEQ ID NO: 339326 - DNA, 177 bp, Homo sapiens
  chr7:2158537-2158714
  hypo
cgcgattgtgcctcccgtctctctccttgacctgcagtgcagacctggagctgagacgtcctccatcaaggccaaaagctccacacgcccagctgcctgggctcgccccagcctccagccccacgtgacggtctgcctcccagacccctgcgcggacaagcaggagcggctgggctc

SEQ ID NO: 339327 - DNA, 842 bp, Homo sapiens
  chr7:2163000-2163842
  hypo
cgctacagcttggagacattgcgggagggctcccagcaagcgaaactgggctggggtgcaggacggagagagggcgctggtgaggccctggtcctgtgtgtgagggcggctgacacccggtgggctctgtttgcgcttgagctggtgacggtagggtttccttccctgtcaagcaggagagcaccccagtccacccagggagcacccaggaggagccagccccgccaagggcacgcatgggaggcgtcaatccgctggagggcagcagccctcaagcgaggactcacggggacatgcgataccaggaagcgagtcggaggcaattaagcctgtttcagagtgcacttcgcaggcggcgctgaatcgatagatcctccggcggcgtggtgctgcaggtgaggaatcagtcaggtaaatgcctcccaatctgttcctgctgtgcaaagaatcagcgctgtttaccactcaagccagaaataaataaataaagctgccaattagccagcgcccttttccgctctggcaagggctttttagcttctccaaatacaccagagtcctgcaaggctgcacacaagcaaaggcagcccaggcagcaaggggcgggggcttaggccccgggggcaagaactctgcttcctgggaagccccctgtagccaggtcaggctcctcctctagacggggaagccgggcaaacacctccaggagcaaggcgaaggctctcagtacccccagtacagatgcagccgggagcccccagctctccacaggtcagaggccacgccacgcccctgctcaactcgcagagcagcaaggcaggaggggcaggccatcgggcagc

SEQ ID NO: 339328 - DNA, 419 bp, Homo sapiens
  chr7:2196807-2197226
  hypo
cgtcttcaaaagagtgctaagtaatacaatattttaagaatagaaatcaatagtaagaaggcgatgggaacactgttgtggggaggcctggctccactgaccactccagcagtgcaggtcaccgtgatcaggaagcggtaatgatggaacaaatcacagcactcagagggctcctccccttcatgttaccatttgagctccccaccatgcaagtccacacctcacatgcgtaagaacccgcaaaaactaagagactgagaagagaaaagcagcacagcatgctcccgacacggaagacgctgcccatctgggaggagtgggagagccggtcccctacagtctctgctcagtgcagcacaggcccagggccctgggacacagggcagagggtgtctgaaagaggagggcagacacctccc

SEQ ID NO: 339329 - DNA, 590 bp, Homo sapiens
  chr7:2208345-2208935
  hypo
gcgtggagggcgccacgaggtcaaggtcctgaggccggaacaccaaggagctctgggagggtggaggaagaacacaagcctggagcagggggcagacacacggggcgtggggcccagaggccaccgggaggactcaggttttattccgagtgtgctaaggagccagggattgtggctgaagcgggaggaacacgctaaggagccagggatggcggctgaagcgggaggaacacgcgctcggacttgctgatgggctcttacgtgggcttttccccagctgaagaatgagttactaaatgtgttttaaaatgcaaaaatgtgtacccggtgcttgtcctggcgctgttcagaacaggaagaaccggaaacaacctgaatattcacaggaggcaaacgatccgtgacaggacaagcgtgggatggcctcctgtgtggcagaaaggacattcgggacctatgacgcaaacgcaggcggctacacattcgcctgcaggactgcaccttttaaagtccgcatgtagacagtgaaaatctacaaaggtaaaccggaatctcctaagagcgggtagggatgcgactggtgggattac

SEQ ID NO: 339330 - DNA, 199 bp, Homo sapiens
  chr7:2222256-2222455
  hypo
cgtgccatgtggtggaagggagcgctgatccgtgccacagggtagacgccccttgagaacgtgctgagaggaaagcgccagcacagaggccacctatggtgcgattccactgatacacaacgtccagaacaggtaaacccagagacaaagagcagaggagtgactgccaggggctggggaaaggagaacagggaacttc

SEQ ID NO: 339331 - DNA, 592 bp, Homo sapiens
  chr7:2232864-2233456
  hypo
cggcccaagccacgccccagcatactcacttgcccaagcaaccggggtgagacaagggccacccagctccgacagccaccacgtcctggagagaaagcgtccccgcccagaggacggtccttgtcctagaacagcaaggccctccaactcttggtcctcaaagcccttccccgcctccgcacccagcaccacattgctgtgctgagtttcagcacagggaccgtgcgtcctgctctctgctgcatctcccagccagtatacaccacggtacgtcataagccctcaacaaatatttgttgaatggaacagacgtgatcacaatatgtgctcctgggaaccctcggctaccagaaaaaaaggcgagacagaaatgagcacttctcaaccctgggagcaaatttataagggttttatcccttcaaaattattaccaaggggtaacacggccgcgggtaactccagattcctccggaaaacctcactgtgcactgccaaggctccagccagagcaggtgctgagccgcgatccgggagacgccagtctcaccctaggctctcttccacaaccaccctcaggcaaggccacaccgtc

SEQ ID NO: 339332 - DNA, 156 bp, Homo sapiens
  chr7:2236075-2236231
  hypo
cgcaaaacgctcctgcggcatcttccaaaagattgcatctgaggaggcacccctgttgttttcattgtttaaagctgtctgtgtgtgtgcactacgtgggcagactgtgctgtgctcgtcacagcgtcgccagagccagcccaaagcctggcaaac

SEQ ID NO: 339333 - DNA, 114 bp, Homo sapiens
  chr7:2237109-2237223
  hypo
cgccccgacccacgcatcactccgccgacgcctggtacacacgacgtgcactgcacagccaccttctccctgcacacgggcccaagctcggacacaggcacgaccaggactggc

SEQ ID NO: 339334 - DNA, 311 bp, Homo sapiens
  chr7:2237982-2238293
  hypo
cgcctttgcttctgccagccactcacgctctccacaggctgcagccaggtacacaccccccttcaagcaacaaaaccactgcctgagcacctggcctgctctaagcccagggctgagacaagggggagccagccacacacaacaccaggagcgctggcatcgccggagcaaggagcccgtgatggccgtccacccgggacagcaatcgcgctctgcggcacgaggctttcaacagaggcgagtgcttcctgggggtcaagagcatggaacacacacttcaggccccctctccaggctgcaggccaacaggc

SEQ ID NO: 339335 - DNA, 260 bp, Homo sapiens
  chr7:2255763-2256023
  hypo
ggctgccccatcccccgcaacccctcaccgcaggtgcgcgctctcctcccgcagctgcttcagctcccgttccagcctagggagccgtaccagctcagacttcatgttcttcacaatcgctgcatcctgctcttgcagggacagcttctgctccagatcctgatggaggccagggacagagaagaagggaaaaatgagccacgaagagacctggagaaaatcacacgcacacggctaagagaaggaagccggtctgcaac

SEQ ID NO: 339336 - DNA, 475 bp, Homo sapiens
  chr7:2264018-2264493
  hypo
cgccccacctctcagggaaaacagctctcaaagcagcaacggagccaaccctgaggcagtggcccccaccccagcggtgcctcagtctcactgagcccacacaacgcacaccgcagtcaggatctgcaggccaggggcaagcaatccaaccagcatcacaccccggaagacgtgagctatttttctagggcccaggagagtgtgtgaatacaccgcatgatgtcagggcggggctggacatccacccgccaagagagggcacggaggccagggagactttccgcccaatactctgcctgaaccttggcagcatttccacaactgatcagcactgactgaaaccctggcaaagtgctgttaatcagagcagaggggatccgcgcactcagtggaaacctaattccctccccaaggacagggtgttttccctgctgccctggggagccaggagcaacacagagccgccattgagacc

SEQ ID NO: 339337 - DNA, 619 bp, Homo sapiens
  chr7:2264982-2265601
  hypo
cgtgcacagcccccttgcttcctggggctgtctgggccgaccctcgccccgcctgaacccacctcgtagttcctggcactggtgctggctgctctctccagctccactcgagccctcttgtgactcagctccatctgcattttctcccgctccacctggatgaggtgggacttcgaacggatctgctctgctctttcctccagctgagcaggtcgcacccaaagaaaaacagaatcctcagtgacggcatcaaaccaggtgagtgactcagtgcagcagacacactccctgaggacccattcccgcaggtcccgtgctaagtcttgatgtggcccagccactgggctccaggctggggaacaggggaggggcaggaaacgggaaggtgaaaaagcctgggaagaggaagacgtcttttgagatgacattaagcatattagtgaaggcaacggcctcgaatgccacccatttatttaccagccaacggctccgtgggtcggaagtccagacgtaggtggctgcattctctgaccagggtctcccagactaaaaatcaatgcagtcggccaggacatgttctcacgtggagctcagagatggagaatgaggtctccttccc

SEQ ID NO: 339338 - DNA, 392 bp, Homo sapiens
  chr7:2298049-2298441
  hypo
cgcaaagccggcgactctcccaacacatatgctgggagagccagatgccccagaccccccgacccctaaggctccatcaagcactgcagaaaacccgagttcccatataacgctgtgagccgtgtgcaaaacgggcacgcccaggaggggcacggaggagaacaagggtgttgtctccgcatcagtaacaggagagagaaacgcaggcctaggaagggggcacagggaagggggcgcagggtaggtaggagagacagcagctgcaggaaggacgtgctgctgatccaggaagagaggcggccgccccaggctgcacgcagaagcaccacactcggcggtgggggcagcggtggacacaggctcctcttcggccctcacacaaggctctgtgc

SEQ ID NO: 339339 - DNA, 384 bp, Homo sapiens
  chr7:2349364-2349748
  hypo
tcaaaaaaaaaaaagtataaactttaagtgacagcgcaatgaattctgaccaacgtattcacacagagaacagacctgacatgagcgagcagctgcaggtaagggttgatgggagcccagggtgcatggaagtcgcccaggcaagaggggaaggctcggggcaggggtgaaggagccccgagggtcagcaaaggccctggacctgcctcaatgacactcaaggagtcatcgccaggtcaacgcggacaaacagcacggagcttccgaaccgaatggaatgtatggaatgccatgggatgagccgcaagtgaagcgtgactcaccctcgttctaaagagtcaatgtagggccgcaggactgtatacggcagagccaggatacgcc

SEQ ID NO: 339340 - DNA, 242 bp, Homo sapiens
  chr7:2448743-2448985
  hypo
cgcagctgtggatagcctcgccgcaatgatagtaatttatgtaaacactgactgctgctctaattgaaattatgatgcacctgggcagagaaggtgtggggaggagagcgctgcattttcgcctgtcgccttgggaagtcagtcgctaatgccccaagctgaacaaccaaggttcactctgaaggcagacattaaaagaattagctaaaaagaattatggagcgggtagggcgtggtggttc

SEQ ID NO: 339341 - DNA, 1296 bp, Homo sapiens
  chr7:2472811-2474107
  hypo
cgcgtgatgatcgtgctgagcggaagcctgctgcaccgcggtgcgccctaccgcgacccgctgcgcatcccgcgcgagcacgtgcacaacgccagcgcgcacctgaccttcaacaagttctggcgccgctacgggaagctctcccgccacctcatgaaggtcaagctcaagaagtacaccaagttcctcttcgtgcgcgaccccttcgtgcgcctgatctccgccttccgcagcaagttcgagctggagaacgaggagttctaccgcaagttcgccgtgcccatgctgcggctgtacgccaaccacaccagcctgcccgcctcggcgcgcgaggccttccgcgctggcctcaaggtgtccttcgccaacttcatccagtacctgctggacccgcacacggagaagctggcgcccttcaacgagcactggcggcaggtgtaccgcctctgccacccgtgccagatcgactacgacttcgtggggaagctggagactctggacgaggacgccgcgcagctgctgcagctactccaggtggaccggcagctccgcttccccccgagctaccggaacaggaccgccagcagctgggaggaggactggttcgccaagatccccctggcctggaggcagcagctgtataaactctacgaggccgactttgttctcttcggctaccccaagcccgaaaacctcctccgagactgaaagctttcgcgttgctttttctcgcgtgcctggaacctgacgcacgcgcactccagtttttttatgacctacgattttgcaatctgggcttcttgttcactccactgcctctatccattgagtactgtatcgatattgttttttaagattaatatatttcaggtatttaatacgaaatgtggaagggaatgctggagtaaaatatcccctctcccctccgcccgcccacccgcccgcccgctcgcccgctcgcccgctcctgtggtttttctgagcgtgcgggcgccgggaggggatgctgaggctgatggagctgcctccagggctagggccactcaccggaggagggcggggcctgcacttgaagtcaggccgcacctgtctgtttttggaagggtagccgacaaatccttccagagggaaagttctttgtttaagtgttgtacttgaaaaggtcaatcttcagggcttcctgtttgaagtcaagtcagaggtaaaccggtcagttacagaagcaggatttctaggatttctaactccagctgttcccatactgtctagtttaaattatggctgttaaggccgggc

SEQ ID NO: 339342 - DNA, 254 bp, Homo sapiens
  chr7:2477361-2477615
  hypo
cgcgcgcacacacacacacacacacacactctctctcacacacacatcgggatatttttcttgtttccttcttccagagggtgtaggagttgtgttccaagtttgttcctgcaaaccctccgatgaggccagctgcattcatcggggcctggatggccgcacctctctctccccgccctgtctcctgcactcaggtgagaggctggcagggctgccgtaggggtggagagtgaacgcagggtggctaagccctc

SEQ ID NO: 339343 - DNA, 775 bp, Homo sapiens
  chr7:2566359-2567134
  hypo
aagggaggccagggcagggccgttgcctcactcagggctgtgtggccagcctggggcggggcccagggatgtcgggcccctcccggcatcactccgcccgctccccacaggtgacgctgagctacggtatgtttgaaaacaagcggaacgccgtccacgtgaaggggcccttctcggtggaggccgacccatccaggtaaggaaaccccggcccagatgggcttgcgtagggtggcctaggggcgtcagggggcctcgtggagctgcagcagggtctctctaagcggcatgactctacatagaggtgtcccccggagtcctgcttgctcggggtggggccgccagtgttgtgggactgcaaatgggagctcagcacctgcctgccacccacgcagaccagcccctgctctgttcccacaggttccgctccatccactgccacctgtacccggacacaccctggtgtccccgcactgccatcttctagtggccatggctgagacccaatccctgggcgcccctggtatccaaagggcccagggaccctgttgcgctgccctggcctcggcattcgaggctcccctagggccgtgcctgtgcgtgtgcgtgtgcgtgtgtgtgtgtgtgtactgcatgcccacccgggtagcaggctgctgggcagttctgctctgtggaggggcgggcaccagcgccacttatgtgcctctgctccgagggccagtgggctgcagggcctgcttggaggaaggatttgtgtgtcggaggccactcc

SEQ ID NO: 339344 - DNA, 440 bp, Homo sapiens; identical to SEQ ID NO: 257151
  chr7:2643038-2643478
  hypo

SEQ ID NO: 339345 - DNA, 327 bp, Homo sapiens
  chr7:2679783-2680110
  hypo
cgtggctggaatggcagggtggtgggatcgtggccactgcctgtggctggggctggaggctgcatcgggccaaacttctcatcagagtccctgtgagcaccccccagtgggccagggcctcctcagcccagccacgcgccacggtagcccacaggttggtggcacagagcggcgtgtgggtccgtggcgcagggtagcggggtgggcagctgctcccaggcgtgtgcatgtagagcagccgcctgtgtgtgtgtggggggggacgtgtgttccataggccggccgtgacttgctgtgcaccctcccgagtggcatgcttcctcacac

SEQ ID NO: 339346 - DNA, 175 bp, Homo sapiens
  chr7:2686784-2686959
  hypo
cgcagtgggattctacggcaacggggagaccagtgatggcatccatagggccacctactcgctccgccacgccaaccgcacggtggccggggtccaggaccgcgtgagtggccgcggagttggggccaggagcactcttgctgctccggagccccacgtctgcgcgaggacgggc

SEQ ID NO: 339347 - DNA, 423 bp, Homo sapiens; identical to SEQ ID NO: 223011
  chr7:2727879-2728302
  hypo

SEQ ID NO: 339348 - DNA, 359 bp, Homo sapiens
  chr7:2751985-2752344
  hypo
cggtggtggggacgtggcccagccaggaggcgggggagccgtcagtgtgggaggacaccccgcctgccagcgccgactcgggcatgtgctgtgagagtgactcggagcccggcaccagtgtgtcggagcccctcacccctgatgccgggagtcacaccttcgcctcggggccagaggaagggctgagctacctggcagcctcagaggctccgctgccacctgggggccctgcggaggccatcaaggagcatgaacggtggctggccatgtgcatccaggccctgcagcgggaagtggcagaggaggacctggtgcaggtggacagagccgtggacgccctcgaccgctgggagatgttc

SEQ ID NO: 339349 - DNA, 414 bp, Homo sapiens
  chr7:2770625-2771039
  hypo
cgtgacagtttccatgtccttttgcctagagctcgctggctggctggtctgacagcattcctgagccaggtattccagggcacggatccgagaaacccactcaaggaccacacagacaacacacacccaagagtctgaccgacagccgtgggggctgctcaacgacgacaaaccccggggcttcctcgctcactgcagcatgatgtccttcaggttctcctgcaggatggtgtctttcacagcatggaacacgaagcggacgttctcggtgtcgatggcggtggtgaagtggtggaagagtggcttgctgcggttccgtctcttcctgtcgaagcactggaccaggtagcgctggacgtcctccagcctgtgcgggtcgcccctgaagtccgggaagtgcttcttgatgctcac

SEQ ID NO: 339350 - DNA, 58 bp, Homo sapiens
  chr7:2798471-2798529
  hypo
cgcatgtatcaacatgatgggtctctgctgggcgcggtggctcatgcctataatccca

SEQ ID NO: 339351 - DNA, 145 bp, Homo sapiens
  chr7:2804422-2804567
  hypo
cgtgagccggcggaccctgaagggaacactgagactgaccacagctggacttgcgccgcctcgtcctcttagtgaatgaggtcctcagaggcttaagcacgcgttagttatccaaaatgcttctgttcaggtgaatgcacaaagc

SEQ ID NO: 339352 - DNA, 157 bp, Homo sapiens
  chr7:2959057-2959214
  hypo
cgacccgcgcgcacagccactcgtgcctgtcctggtacatggtgtcacggacgtgcacaacatcgtcacacttcagggacatggtgcaggcgtccagctggctggagatgttcaggttcagccggatgtagaacgagtcccccgatgtgatcaggcc

SEQ ID NO: 339353 - DNA, 955 bp, Homo sapiens; identical to SEQ ID NO: 333011
  chr7:3082731-3083686
  hypo

SEQ ID NO: 339354 - DNA, 74 bp, Homo sapiens
  chr7:3211469-3211543
  hypo
cgcggtcgaccgaatttgctgttggcagaggctgcgcgctgccacacaaggctgtgtctattccacacaagccc

SEQ ID NO: 339355 - DNA, 200 bp, Homo sapiens
  chr7:3283455-3283655
  hypo
cgtgagccaccgcgcccagcctcagaagtgctccttttttaccaatggagaaacagcccagagaggaaaagcgatttgcacagagtcacgcagctgaagactggcagatccaggctgtttgctgtcagtctgagctctcgaattctaagacgagccacttctctcgggaagccaggaaggctcctcgcaaatcctggtgg

SEQ ID NO: 339356 - DNA, 1675 bp, Homo sapiens; identical to SEQ ID NO: 333012
  chr7:3340362-3342037
  hypo

SEQ ID NO: 339357 - DNA, 367 bp, Homo sapiens
  chr7:4153573-4153940
  hypo
cggagttggcctcacagggcaggcccatcccttacaacccgtgagggtggcagttctgagatgtcagctcatcgcgactcctcgttccttcctagcccctgccggattctcagtacaacgggaaccccgagtccgtgggctacaggattaagtactggcgctcagacctccagtcctcagcagtggcccaagtcgtcagtgaccggctggagagagaattcaccatcgaggagctggaggagtggatggaatacgagctgcagatgcaggccttcaacgccgtcggggctgggccgtggagcgaggtggtgcggggccggacgcgggagtcaggtgaggggaaggcgattcccatcctggagacacc

SEQ ID NO: 339358 - DNA, 276 bp, Homo sapiens
  chr7:4211365-4211641
  hypo
cgtccatttgagaatttggagctagatgccgggcagtgccatttccccatctctggtctgtggtgggcagcgggagtcctcggacctggggctgcaagcccgcaggatggatacgtgacccttgtaactttctgcaaaattgaagagggctgtggggcattgacaagcacaccgtggggggaacacaggggactcagacgcgcccccacccccagacgacagctctctcagcccctgggtttgctcactggggtccgacacccctgggccaggagc

SEQ ID NO: 339359 - DNA, 761 bp, Homo sapiens
  chr7:4219149-4219910
  hypo
cggattttttccggaatggtcaagcggtatttgcatacaaatgaggatgcgtggagagaggcatcaagagcatacggtatttctgcctctctttgcacgaaaatatgttcaaaggggtcactcagagccaccgaggtacggctcagctttccctcagggatggacctggctgtagaggagcccattgagggccatggtggggccaccaagggtgctgtcagagaggggtgccagggtgccgtcagtaaagggtgggtgccactgcggacggcggccatggcagattctgtgctctccagttgtattcgggtgactgggccccagttggcccccatggctgggggtgggtcagcctgtggcatcgggggagcacaggaaaggagggccgggaactacagtgtctgaactgcaagcagaaggtgtgggtgtcagagctctgcctgagggtctgcctgcgcctgggcataggacaccaggaaccagggggctcagggcacttgggcaggccctgagaccgaggcagacgtccagagaaaagagcttcagcaagcggtagggaagccaggggtggtgcgggaaactggggagtcgcgccagggccagccaagcggcaacaggactggatgcccagcaaacagctccagctctatgcccagcgcccagctccagctctatgcccagcgcccggctccagctctatgcccagcgcccagctccagctctatgcccagtgcccggctccagctctatgcccagtaccc

SEQ ID NO: 339360 - DNA, 203 bp, Homo sapiens
  chr7:4243576-4243779
  hypo
cgtctccaccccagagaaaggggcatgcgggcccctaatttatgggggttcacctggcgctcacagacccaccagttcctacaggcggatatccaagtccagagctgtcgtgggcgcgctgagttgggccatctttggaaagaaaccctggggctgtcgcggggggagggcgatgtctcaccgactaccagggtaatggccgc

SEQ ID NO: 339361 - DNA, 123 bp, Homo sapiens
  chr7:4254687-4254810
  hypo
cgggaccctggcgctcgcctgcctcccctgatggtattggccagaaccctggctcgccgagacactaaccccaggcctgtccgacaagccacatcccgtacccacatacgtcaaaagaagaac

SEQ ID NO: 339362 - DNA, 303 bp, Homo sapiens
  chr7:4349445-4349748
  hypo
gccctcacttttgacgccaattgcgagttcagaggccctcgagaccacccttaggttcgacgatttgctggaaagactcggaactcgctggaagctgtgatagtcccagctatggtttatcacagggaaaagacaccgattaaaatcagcatgcaggggcagagcccacgagggttccacacactgagcgtctgctgtcctctcctgtggagctgcggacagcgttacccctctgacaatgtgcgatcatacgcacaaaacacggtcagccaggaaggttcctccacaccagggcttccctgc

SEQ ID NO: 339363 - DNA, 316 bp, Homo sapiens
  chr7:4410656-4410972
  hypo
cgctgtgcctctagacccacagccaagggtctgcatgtggagtcagtgggaggtgccggccgtcaatggagctgaaggcctgtgcacccccaggtggagtgggggtcggcggggacagctggacccacaagcacgttaggtccatccttcccttcaccagactaggatgctcagggaatagtggttgctctttcctcttccaaatcccctgtgaactcctctttccagaaacgctaaccagaagcttatggggcagggtcctctcggacatgcagtttttggtctcagcgacattgcgcagataatcccgcccatc

SEQ ID NO: 339364 - DNA, 668 bp, Homo sapiens
  chr7:4751238-4751906
  hypo
cggcattgtgtggatgggcggtagtgagaataattactaagggcgtcataccctctcgtatctgcatcacccataaggggtgggcagtggtgctgccgtgtcttgtcaggaggccagctctgtgtcacccaccaggctgggctcagccacaagtcggcaacgtagtgcctccagggcagatgccacggaccgtagagaagcaacgcaaggtcagagagaaaagattgcggccggccggtgtcaaggcgggggacctgtgagctgggcctggagctgaggcagaacttgatggactatgactcaaggttgagatggggcagggactccgggggaggggcagagggcaggtgccgccgagcaggagggaggacgcggcaggtcacagagcccaccaagtccgaagctggaagttcagattctttgatattcagaggtggatcatctgtgcttttttttttttatcagtctctcactttttatccatcatctaattgtgacagcttatttgcctttataccataagatggggagtagggttgagatgaaatccaagcatcgtttcccttccccgatggtcgcctccctggggtgagacgttcgacgtgtcagacttcaccaagagcatctcccgcctcggtgcagtaatggacttggaaacgatttactcc

SEQ ID NO: 339365 - DNA, 185 bp, Homo sapiens
  chr7:4771516-4771701
  hypo
cgcttgctacgtgccagccgtccggtcaggactgatgttcacggcatggagacctgaggccacacggaggccgggctggccagggcggggctcagattcagtgacttgcccaggtgcccccagggcatctgagcagcccaggctccagccaggcaggtctgacttcacctcccttgccgtgagcc

SEQ ID NO: 339366 - DNA, 101 bp, Homo sapiens
  chr7:4800783-4800884
  hypo
gtccccggacacacggtcaccatcctgcagcccgccacacccgtgaccctcgggcagcaccaccttccagtccgggccgtgacccagaacggaaagcatgc

SEQ ID NO: 339367 - DNA, 1366 bp, Homo sapiens
  chr7:4801650-4803016
  hypo
cggcagggcccgcagggagcagagcaagggtagccgtcctgcctggcaggggtgcactgacctccggttccggcttggtggcttagcccctgtataggggacttgaaaaaagcagctgggtcctaaccagaccccagagtaaccctcttcttcctccactccagccctcaccagccctttgcagctccttgcgacccaagcgagttcatccgcgccggtggtggtcacccgggtgtgcgaggtggggcccaaggagccagcagcagccgtcgcggccacggccaccaccaccccagccactgccaccaccgcctctgcctccgcctcttccactggagagcccgaggtcaaaaggtcccgggtggaggagcccagtggtgctgtaaccacaccggctggagtgatcgcagctgccggcccccaggggccaggcaccggggagtgaggtcacctgcaacgcgggggagtgggactcacccagcggcgaccccgaagctggacccggcagctcaggcggccgcacccacagacggaggagaacagcccgcggcggcctgtgggcatcggcggcacctggacacacccagccctttccatttgatcgcctgccttcccgtggtttaagacaaaaacacataaacaagttcagacaactgattgtatgattctgggaattctttgctttcctttccttctccctcggcaccacctcctctccccaggcctccctgtcgggcatggggaggaggttggagctcagcatcttgaggaatgtgtcaagacagcccctccgctccgcgctgcacggccagccgcctttgtccgggaggacagacagaaacgcagcaaggcacacaccaaggctgccggggaggcccgggcaccggacagatgcctgttgggaagccaggagctgccgagccacggaccacctaacagcctctccgcccggaacgtgacatagagagtgttggcattaactcggggggtgtccgatttcacttcagaccccaagtttttctttgtttgtttaaacatggaattcagacttcattgtacacctgagacagacacaaaagggatcatgtatttttgaggattttacctgttgacgtctgatgaccggccgtaggtccagggttcccgctgggtttaatcccctcgaagagtaaacctgccgctctgtctgataacttcaagtaagagcagcggcttcctgggttggcgttcgcggtggaaggttcctaggatgaaaggtgagcctggatccgccggccgcagacatcgcgctgctggggacgattggggccgctgctctgcagaccagaccttcccgaattatccgtggctccgatgtcccggtgct

SEQ ID NO: 339368 - DNA, 824 bp, Homo sapiens
  chr7:4855734-4856558
  hypo
cgctcagggagcaggaggccaaaaagggcagagccgcctccaggagctggcgagggaggcgccagcagccgtcatgtccaggaatgtgagcccccgacccctcaaccctgcacgaggccctcacccctgtcgaggagctggttgagaagcagtgtcccggagaagaagaagaggtaggcgagcatctgcgaggccacctcggggtgcacctgcagctgccgcaggaggtccagggctgcctggtacacagacaccacgcggcgcagctcctcgggcagttcgggggccgaggaccagctctcacggcgctccgtctggaatggcgggcactccaggagtgccgggaggcagatgtacagggactggcgggggcaagaggagaacagcaaccagcatttccaggagcgctggcggccgaacggggggcctgacccagcgagctccccacccacgcactgcttgcagggacccggcctcggtagcttcctgctggacaggccatggctttgcaaatgtccagtgtgggatgtggggacacaggagctgcctcctggggctgctgggagcagaggtggggtgcagggggctcagggggatctgctgtcggaggcacagatgaactcagaaggcgcacagaggtggcgcctggggggatgggctccaacaaaggggctccaacaaaatgacgggagagtcaccactcccccagaaagtggctcaccgcacccccgatgcaccccaagctggccagggccacagggggaccggcggcagcacctctggcacccgtgggtccagggtgacaacagggccatgtcccttgc

SEQ ID NO: 339369 - DNA, 777 bp, Homo sapiens
  chr7:4856619-4857396
  hypo
cgtttcaaggcgagggaaagggagctgggatggttctagggcttctgtgcgacctgaggaggagcgggtgtggggggtgcagctgggcctgtgcagaacctgcagccactgctccctgatgaagtggagcttgtcacggtcccctccctcagccccccagaaggctccttaggagagccacaggcacaagcttgagccccacttgatcccaggagctgcctgagtgcagaagcagagcccgtccgtgcaccttggagacatagtagacgcactgctggaaggcgtacagcaccacctcctccagcaccgccatggcctcctcgctggccgtcagcgtgcaggagaacagcgattccttcgagcctgccgggagacagccacgccaatggtcacaacgggcacagcgctcaggaacgcagcaactcagccagccgccagctctttccctggcgcgggcaccacccaacgcgcccatctggggtccagatgcgataaactggccgagggactctgggccctggctgggacgagcgcagcaaacctgccgccactcttacctggggaggggaatgccgggaggggcaggaggggtccagacacccaacatctcaatgcccagcccagcccagcccaagcgctcattcactcccacgttctggatacgttttctgttacaaccaactgcacccaacatagcaggtcctaactgcctccccacaggtcacctctcactcgcgacacgggtcacaggactctggcagcagcccctgagtggcc

SEQ ID NO: 339370 - DNA, 422 bp, Homo sapiens
  chr7:4857860-4858282
  hypo
cggcgcctggtgagccaggccaacactcaccccagcgcgggcctcccaggagcacaggcccccagctgcccctctgccgggcagactgcaccggaggccggcccactcatggccaggacaatggtgcgccaagcccttggacaagcccctgtcactttcgctctgccgctcctggtgctcctccttcaggggcttggggctgcctggcccccacccaccaagcccgctccccaagaacctgtgaagccccccagtgcctgccccacagggtcacatctgggaaccaggcagggcagctggagggaccccggggtccggggcagtaaggggctctcgggctctgccaacctcaacactgtgcccagaagcctccaggcctgtggagacacacaaggtggcccgacggcgcccacagcgagtgc

SEQ ID NO: 339371 - DNA, 258 bp, Homo sapiens
  chr7:4913172-4913430
  hypo
cgtgcgctggacctcactgggcctgccctgcaggggcagatgtgatcctgccatcccgccgtccttttgaaactacaccacccacttcagtaggatttgtttcactgcagccccccaccttcccccaaagcgacacggtgacacatgccccacactgagggccactctcaggacaaacagacaccacagcagccccatcggtgcccagggaggcgcaggacaggcgggctgctggaaggcgcagagctcaccatcacc

SEQ ID NO: 339372 - DNA, 526 bp, Homo sapiens
  chr7:4917102-4917628
  hypo
cgggctccgactgcctcctgcagagcgagcccgccccacgcatgtcccctgcaccactccttctccgcctacctcggctggccttctcagcgctcagacccacggctcttcctgaacctgtggcccccctcacctgccgtgatggtgtccacctccttggctgccagctcctccacgtccgacctcttcctcagctcaaacctccgggataaaccttctcggggtttccataattcctggatcaagaggggcttctcactgtccccaaacacccgaaagcaccgggcctgccaccgctgcccagcatcgccggcttggcccaccacgtcacacagcacgtactggccggcctgcctggggtccagggcgtaccgctccagcgcctccttcaccagctcacgggcgctggaggtgccggtggccaggacgctcttgtagtgggttcctgtgcagacactgtccccaaacaccttcaggacaccaggggccgacagctgggtggagagctcggcggggtcatcgctgg

SEQ ID NO: 339373 - DNA, 237 bp, Homo sapiens
  chr7:5230941-5231178
  hypo
cgtgcgcggccctccctgttctttttgggacatcaactttgatgtcttctccagcaagtaacaaacttagcaataaccttggcatctgacctagctagggagaaactgagccaagagaggcgttacggaccagtgccccaggagtctcagagctccagcgggtgggtcatcctcagggcaagagaaggccttaatgccagcccgtgcattcggaacgctgtttgtccccactgatac

SEQ ID NO: 339374 - DNA, 55 bp, Homo sapiens
  chr7:5240151-5240206
  hypo
cgtttgtgtgtgcgtaggttctgtgcagtcttttttgtttgtttttttttgagac

SEQ ID NO: 339375 - DNA, 561 bp, Homo sapiens
  chr7:5262406-5262967
  hypo
cgagcatttctagcccggctgggtcaccgggtaagatctgggcgtcggtcttgtcatgggaattgaagagcactttcagaaaagcaaattgggtttttgtttgcgatcccaccagctagcgtgagagttgtgaagagctcacgcaaccaggtgggccctccagtgcccggcagctcccagcctgctgtaagggacggggcggcgacgtcatgggtagcacaccctcccctttaaaggccacgctctgagaacctgttccagctctccagctccgcctccaccctcagcaaatggcattggccccttcttttaacccagaagccgcagcctggagttctcttgtcttcctccctccaggctgcaaagcttccctcatcggtgcttacatgcctcctgtggcgcctgctttggaggcaggactgtccctccctcgtcggacagtagagcgggggaggcctcgggctctggagcccgtgcctcagattggagccctagggagcactttcagtcgcatggccgtggtcggcgggaccccacctcaggtctgtggctccacgtctc

SEQ ID NO: 339376 - DNA, 190 bp, Homo sapiens
  chr7:5396687-5396877
  hypo
cgaggcccttggccagcgccttcctgttcttccccagcaggctgtcgtaaggagtcaagtacctgccgcagcccccgctagttttcgatttccccccagcactgtccgaaaacttgaagggcgacttcaacttgtcctgcttggtgagggagagggccttgtcgagcttgcttgccaactgctcctggtc

SEQ ID NO: 339377 - DNA, 542 bp, Homo sapiens
  chr7:5428494-5429036
  hypo
gcgccgcagcagccgcgcgccctcgtcctgccgggcagcctccttggcacccccgcgccccgcttcggccaccagcgcgggcagccccacgtccccggcgccgccgttgcacatggtcagtaccgacggctgcagcgccgcattcttggtcttggactcagccaggaagggcgacaggcgctcagccaggcgcgggggcccccggtcctggcggccctcggcgcgcgcctcctgggtcaggtccaccacgccccgtggccccgaggcctcctcgccccgggcgcgcgggtccttcttgccgaaaagcggaggcggctccccgccgcggcccgcccgctccttggctggaccgtcccgcgacgacgagcctttggccggggcgcccgaggagtggccgccgccaggggtccgggccgagggcgcgtgagagtgcagggagcccggagcccccgcggtgggcaggtagaaaccgtctgcggagaagggaacagcaggcagtgagcgagcgccacctcccctcccacccctgcctgggcggaggc

SEQ ID NO: 339378 - DNA, 80 bp, Homo sapiens
  chr7:5441350-5441430
  hypo
cagcattactaggtatgctacgagttattttttattcctagtcctatgctgcacatcggaggtactcaagtagtatttac

SEQ ID NO: 339379 - DNA, 917 bp, Homo sapiens; identical to SEQ ID NO: 333018
  chr7:5632268-5633185
  hypo

SEQ ID NO: 339380 - DNA, 199 bp, Homo sapiens; identical to SEQ ID NO: 333019
  chr7:5633396-5633595
  hypo

SEQ ID NO: 339381 - DNA, 552 bp, Homo sapiens
  chr7:5647853-5648405
  hypo
cgggggcatctctggggtcccaggtgagatgcgggtcgagggagccaggccacggttctccagactcgcgtggaggccacgagcgtcttctggaggagcgggcactgcgcggaccggcagactctggggcgctcaggctccccatctcctgaccttttcctaccttcagttccctcctgtcaggacaggttctggggctcgccggggcagggagccagggcagagggtgcagtttccgctcctgcctgagtcaccttcgctttctcagcgattcttcattcacaagggcgtggcccatcacacgcactcacacacttgtgaacttgcacgcacacacacatatggacctgtgcaaagagccccatgcacaggcaggtacacgtgcatgtaggcgtgcacacagacacgcacagatgcaggcagaccaactcccaggaatctgtctccagcctacagggattcagcactcagggtaccagcctctgtcccgtgcacccccattcccggcagttctcccaggtgggtcgggggccactagggaccccatacccc

SEQ ID NO: 339382 - DNA, 122 bp, Homo sapiens
  chr7:6034958-6035080
  hypo
cgcccggacagaaaagtcttcagttgaaacatctgaagctgggggccatctgcggtagacttctgtaaatgcacaaaataagataatgttaaagccatgtttctcaaagtcccgagctccac

SEQ ID NO: 339383 - DNA, 145 bp, Homo sapiens
  chr7:6058662-6058807
  hypo
cgtgaagatgagcatgaaatcccaactgcgtaacattaattgtggaacaaacagactgtactgctggaataatttcacagccgcctccagcgtggggagtgtctgcttcaatctgcttcagacaccctgtgacgctaatcatctc

SEQ ID NO: 339384 - DNA, 320 bp, Homo sapiens
  chr7:6060523-6060843
  hypo
cgagctcttacctataaaactgctaacacctgagacttaacgggaaaagataaacacagctgctgatcttttggttgtacaacgtctggacaagaacgctttttctggattaattccattgatgccttgtccttgaagtcaggatgtaccttgccagtaaggtacacctttttaaagttcttcaatgctgcaggcactcagagccccacgagttaacaccaagggcgtcaaagtcgtctacttgcccccaggctcattacacacagtactctatgaaattgtcagtgctatgaaagagaaccctggctgggcatggtggc

SEQ ID NO: 339385 - DNA, 126 bp, Homo sapiens
  chr7:6068161-6068287
  hypo
cgtgagccactgcacccaaccctgtattgttatttaagactgcagaataagttgaatgaaagggcagaaagcaacaaatactaccttggcatcatactcagatccttccaactgttcgggtgaagc

SEQ ID NO: 339386 - DNA, 79 bp, Homo sapiens
  chr7:6124621-6124700
  hypo
ttacaggtgcgagccaccgcacccagccaaggactcttaagtgtaactgatccaccctacttttctccctggcatgaac

SEQ ID NO: 339387 - DNA, 422 bp, Homo sapiens
  chr7:6188625-6189047
  hypo
cgctgggaaggccacacgtgatctgttaactgactttcacgcctgcgcctccacgggggtgcagcagccatgggggaacctgcagcgagtctcactgcgtgaggagaatgtggagacgttgtggggcagtggtggggtcatggctgagtgagtggcggctgaagcagcccctactctccgcccacgtgaccgtctcctttgctccgaggcgagggtgattcctccttcctggcactctgcatcagcgagctcccaggaaacccaaccaggtagcaagtgtgtgactccatgccacaggtcctgctgatttcgatcagatctgggacagaacgagtttggtcggaggattgttttctgtgaaacatgtatgtcctgtttgttgatttattgccagaaaactagggcctgtggaaagtatgcgc

SEQ ID NO: 339388 - DNA, 521 bp, Homo sapiens
  chr7:6207763-6208284
  hypo
cgttagcaggcaggcgcgtacgtgcacacacaggtccacatgcacacactttctgtatggcagctcggattgggccacctcctaggattttttttttttttttttttctggtgattgattcaagactcgaagtcttaagttaccaacaatcgtaagccacgcctgtgtacacagcagggctcctacgctctggcaaagcatccaggcctttttaagaccacctgttctaaaagcaaatctacaataagaatgcaaccaagccaggccgcactccccgctgagcacacgcctggaagcacgttctagatcctgcacccatctcgtctgcctccagccagggccctggctcgccagcctttggtctcgaactttgtttctgagaacacagcagacatacagggtgctgggagaggacaaggaagccagcccctagagcagcaggtgctcaccgggccgcccaccacactgaggccacgccagctggaccagcccctccagggcccctgcgcttggcacccggc

SEQ ID NO: 339389 - DNA, 183 bp, Homo sapiens
  chr7:6222712-6222895
  hypo
cgaggacgctgcctgttttcacggactaagtgctccctcttgcttttcccacctggagacacaatcactgctagacacaaggtcaggagagcgtgaccagtctcgacgtccctcccacagtcctgttccctgaatgtacctcctctgcactcggggaactctgaagctgctcttgccgccccc

SEQ ID NO: 339390 - DNA, 209 bp, Homo sapiens
  chr7:6442423-6442632
  hypo
cgagaacaccgagcactgaactttgcaaagaccttcgtctttgagaagacggtagcttctgcagttaggaggtgcagacacttgctctcctatgtagttctcagatgcgtaaagcagaacagcctcccgaatgaagcgttgccattgaactcaccagtgagttagcagcacgtgttcccgacataacattgtactgtaatggagtgagc

SEQ ID NO: 339391 - DNA, 167 bp, Homo sapiens
  chr7:6443294-6443461
  hypo
cgacactgtcacttgaccaatactgaccctctttacctcgcccacgcggacacacgcctcctgtagtcgctttgcctattgatgttcctttgggtctgtgaggttctgtaaactgtgctagtgctgacgatgttctgtacaacttaactcactggcgagaatacagc

SEQ ID NO: 339392 - DNA, 425 bp, Homo sapiens
  chr7:6443704-6444129
  hypo
cgtgtctccacacaggagggacagggagtgccacctccaggggagaactgggtgagcccaaatacggcaggagtggaggtgacattcatgtttggacctgtcgaacagtggcgaagctctgagggagaagcgcctatcggggtgtgtgtgcacatcctggcccagagctaggggctgaagatggagatgttgggaccctagactggccctggaagagtagaggttggtgaaccacatgcccttaagatcctttccagaggctgagtgcgtggcttacgcctctaagcccgacgctttgggaggctgacacaggaggagcgcttaagcccaggagttctagaccagcctggacaagaaagagacctacccaaaaaaaaaatgcaagagcctgaacttgtactacataaaggttcatgttagaattc

SEQ ID NO: 339393 - DNA, 177 bp, Homo sapiens
  chr7:6448767-6448944
  hypo
cgcgcgctttattgtttcaactcctgaatccactggccgaccccagagccagaagagtagcaagaattcaatcagcaactcctgatgtggacaaacaactgggcagtgggaataggcagttggggggctgtggctcggcggggccgggggctccacttactttcccgatcgggtttc

SEQ ID NO: 339394 - DNA, 168 bp, Homo sapiens
  chr7:6524924-6525092
  hypo
cgggatggggacgtcacaagaaattgcaaacaaaaaaagctgacaaacaggatctgctacataatttgcgggacggagtgcaaaacaaaaacgcacagttcgcagttcaaaaagcagggcgggggcgaggacctggtgcggtggctcatgcctgtagtcccaacactt

SEQ ID NO: 339395 - DNA, 256 bp, Homo sapiens
  chr7:6545733-6545989
  hypo
ctcctggggtcaatcgagactcaagacttggaacactactcgtgcagaagccagcaaggtgggactgcagcgggggcatgaaggagctgtgaagaggctagagccaagtaaggggctaccggaggtggctcaggggtctggctctgtcatcaggtctccttggagagcggtgagttcaccagggctgccctgggcagagtgagctggtgctgagagaactgcaactgtgacagcctaggggccagacgctggacac

SEQ ID NO: 339396 - DNA, 188 bp, Homo sapiens
  chr7:6560221-6560409
  hypo
agctctcgagggcccggcagaccccatagcgctcaggaggtgtgagtaggtgctccagctgctggctgaaggtcctcccttggacccggatgctggacggcaggatctccgccacccactgcagggaggtgagcgccgacgacgggttgggtgagtccagagaatcggagtctgctgggaccacaggc

SEQ ID NO: 339397 - DNA, 802 bp, Homo sapiens; identical to SEQ ID NO: 333022
  chr7:6570393-6571195
  hypo

SEQ ID NO: 339398 - DNA, 357 bp, Homo sapiens; identical to SEQ ID NO: 333023
  chr7:6654778-6655135
  hypo

SEQ ID NO: 339399 - DNA, 651 bp, Homo sapiens; identical to SEQ ID NO: 333024
  chr7:6655356-6656007
  hypo

SEQ ID NO: 339400 - DNA, 145 bp, Homo sapiens
  chr7:6682673-6682818
  hypo
cgaggatgatttgctgacggctgggtgtcaggtgagccgccctctccgtttggggcttgggtaacctgggcagggtttcccccggggcctcggcacctgctgtttggaggcgtctgttggcagcggccatggcactggagtcccc

SEQ ID NO: 339401 - DNA, 162 bp, Homo sapiens
  chr7:6694972-6695134
  hypo
cgagccgcctcctcttctctacccacacttgcaccgaggtcaccccggcaccctccgcaccggttcggttttggtctctgcttgtcctctcagtccttggtactttcgtctccctcagccggaggtggcaaactcagacatctacgggcgcccgaggccctc

SEQ ID NO: 339402 - DNA, 123 bp, Homo sapiens
  chr7:7102882-7103005
  hypo
cggggggagtcagtgatattggcaatatcacagggtgtgtacaccacacctgttatattgttttttttttccggcaatgaagaaattgatactattgtcaaaacagaatgcgcggtacacccc

SEQ ID NO: 339403 - DNA, 196 bp, Homo sapiens
  chr7:7605217-7605413
  hypo
aacttggaatcctctttcaccgtcattcacttggtcagtcaccaagctctgttcatcccgccttctaagtattccccagggcccccacttctctccatgcccactctccgtgccactggtaacctgcgtttctatcatccctcattctgatactctatccctccagctctctgcgcaaaaactgatcatactggcc

SEQ ID NO: 339404 - DNA, 119 bp, Homo sapiens; identical to SEQ ID NO: 333025
  chr7:7605673-7605792
  hypo

SEQ ID NO: 339405 - DNA, 246 bp, Homo sapiens; identical to SEQ ID NO: 257412
  chr7:7605822-7606068
  hypo

SEQ ID NO: 339406 - DNA, 76 bp, Homo sapiens
  chr7:7612745-7612821
  hypo
cggaatacaagccaaaagatgttcgtaaatacaaaagctgttcagggtgtgacggtagacccatatttccacgatc

SEQ ID NO: 339407 - DNA, 157 bp, Homo sapiens
  chr7:7613138-7613295
  hypo
cgaacaatgtcagacttcactgtttttgaaaggatatctcttgcctggagcccaattacatctttaatgtgggcttgtggtcgtcatttatatgaatgtacggaagaagaaaatgataattctttagaaaaagatatagcaacgaagatgcgtcttc

SEQ ID NO: 339408 - DNA, 31 bp, Homo sapiens
  chr7:7839208-7839239
  hypo
cgagtaaaggactttttatagtgcgttatac

SEQ ID NO: 339409 - DNA, 838 bp, Homo sapiens; identical to SEQ ID NO: 333031
  chr7:8483148-8483986
  hypo

SEQ ID NO: 339410 - DNA, 491 bp, Homo sapiens; identical to SEQ ID NO: 333038
  chr7:16793071-16793562
  hypo

SEQ ID NO: 339411 - DNA, 1008 bp, Homo sapiens; identical to SEQ ID NO: 333040
  chr7:18125868-18126876
  hypo

SEQ ID NO: 339412 - DNA, 2154 bp, Homo sapiens; identical to SEQ ID NO: 333043
  chr7:19155978-19158132
  hypo

SEQ ID NO: 339413 - DNA, 986 bp, Homo sapiens; identical to SEQ ID NO: 333047
  chr7:20817295-20818281
  hypo

SEQ ID NO: 339414 - DNA, 751 bp, Homo sapiens; identical to SEQ ID NO: 333050
  chr7:20826098-20826849
  hypo

SEQ ID NO: 339415 - DNA, 1114 bp, Homo sapiens; identical to SEQ ID NO: 333056
  chr7:21984772-21985886
  hypo

SEQ ID NO: 339416 - DNA, 1258 bp, Homo sapiens; identical to SEQ ID NO: 333058
  chr7:22893437-22894695
  hypo

SEQ ID NO: 339417 - DNA, 1247 bp, Homo sapiens; identical to SEQ ID NO: 333059
  chr7:23052818-23054065
  hypo

SEQ ID NO: 339418 - DNA, 2253 bp, Homo sapiens; identical to SEQ ID NO: 333061
  chr7:23507580-23509833
  hypo

SEQ ID NO: 339419 - DNA, 929 bp, Homo sapiens; identical to SEQ ID NO: 333062
  chr7:23510081-23511010
  hypo

SEQ ID NO: 339420 - DNA, 1450 bp, Homo sapiens; identical to SEQ ID NO: 333063
  chr7:23513246-23514696
  hypo

SEQ ID NO: 339421 - DNA, 31 bp, Homo sapiens
  chr7:23569158-23569189
  hypo
cgtgagccactgcgcccggccagaaacgatt

SEQ ID NO: 339422 - DNA, 221 bp, Homo sapiens; identical to SEQ ID NO: 333064
  chr7:23570157-23570378
  hypo

SEQ ID NO: 339423 - DNA, 620 bp, Homo sapiens
  chr7:23749573-23750193
  hypo
cgtgaacagattaggaaagaccacgaaatcctacgtcacctctaaagtcacagcttgaagccttgcgaaaggaactggccctagaccccaccccggcctataaatcaccagggcgcagcctcagtgcctgggggtcggcagcagccagcgtcaggcggctcccgcacgcttcttcctaggcggcaggccgtggctgccacgtgactcccgctaacaccggatgatggcgcagcgctgtgcacgcaggcgcagtgtggggcccttgcggtcgaagctcacgcggtaagccgctgcacgtgtgctacggcgggcggagggccgaaagtccagtatgtgggtccagggtcactcttctagagcttccgcaacggaaagtgtgaggtcagtagtagtttttgtggtacgtgcagtggtggccgcttcaaggactattttcgtcgctgcttgcgttttaagtctccaatcctgggacgaggcccatttcagggttttctgtcaccttctagccgcccgccaccccagaggggtgccagatgccccagtttttgagtgcatgcaggcaggcgaaagtggctcgaaaagacctccggcctgaatgatctccatgaagacgcggtcac

SEQ ID NO: 339424 - DNA, 1084 bp, Homo sapiens; identical to SEQ ID NO: 223048
  chr7:24796417-24797501
  hypo

SEQ ID NO: 339425 - DNA, 1194 bp, Homo sapiens; identical to SEQ ID NO: 333069
  chr7:25019060-25020254
  hypo

SEQ ID NO: 339426 - DNA, 695 bp, Homo sapiens; identical to SEQ ID NO: 333070
  chr7:25891919-25892614
  hypo

SEQ ID NO: 339427 - DNA, 898 bp, Homo sapiens; identical to SEQ ID NO: 333075
  chr7:25989915-25990813
  hypo

SEQ ID NO: 339428 - DNA, 79 bp, Homo sapiens
  chr7:26198616-26198695
  hypo
cgcttcttccccaatttactcccgtccattgtgttgtcaggtgcaggtttccaaagcacaccttggttcgtctctctgc

SEQ ID NO: 339429 - DNA, 236 bp, Homo sapiens
  chr7:26283743-26283979
  hypo
gtctcgactaatggtttctccgggagcccagttaacagggaaaaattcgcatggcctctcggtttcttcggtccgaaaatccaacgttggtccaagaaggctctggtgtgtgccaggcactcactgatcatctggtcttacggagacgcctctaagccatttgatcccgttccgggaacgaaaatggcagcggtgacggttgctccttttatggtctccctccggctgtccaggac

SEQ ID NO: 339430 - DNA, 108 bp, Homo sapiens
  chr7:26667960-26668068
  hypo
cggggcagattaaaatatgcattttctcctaattgagcatagtgaaatcagccggcggtcctgtcacaagtgcaggaatgaattgtcacagcacgacacacacgactc

SEQ ID NO: 339431 - DNA, 1756 bp, Homo sapiens; identical to SEQ ID NO: 333078
  chr7:27135176-27136932
  hypo

SEQ ID NO: 339432 - DNA, 1890 bp, Homo sapiens; identical to SEQ ID NO: 333083
  chr7:27212396-27214286
  hypo

SEQ ID NO: 339433 - DNA, 2286 bp, Homo sapiens; identical to SEQ ID NO: 333085
  chr7:27223010-27225296
  hypo

SEQ ID NO: 339434 - DNA, 836 bp, Homo sapiens; identical to SEQ ID NO: 333093
  chr7:27278959-27279795
  hypo

SEQ ID NO: 339435 - DNA, 497 bp, Homo sapiens
  chr7:27531212-27531709
  hypo
cggctccagcagagttgtctgagcagcggcctgaggtgctgggtctgacatgattgttggccgtggaaggcctcgggccatcctgagctcagatcttggctgccggccgctagggcggctgcttctgcagcagggctagggtgtcccgcttctcaatggagcgcagctgctgctgctttgcccgcttgagcttggcagggtttcggatcacttggacgatctccaccttccgctcgttctccaggcggcatttcaggttctccgcccgacgctgtttcttctcctggcggcgcctctcctactcctcctccaggtgacgggcaaagtccttggccagcttcctctcctgcttcatcttccgctgccacgatatacgcaggggcttgtcctaaagcatctgagagaatcttttcttggagcggtccttccacacttgccccgacttgggcttccccttcgggattacaggaagctcctcctccttcagcttcttggac

SEQ ID NO: 339436 - DNA, 88 bp, Homo sapiens
  chr7:27651058-27651146
  hypo
cgagagctgatcaagttggaaccaacactgtggtagcagacccactgcgtgtgtgcgcgcacacacacacacccacccacccacacac

SEQ ID NO: 339437 - DNA, 123 bp, Homo sapiens
  chr7:27686737-27686860
  hypo
ctttggaccattatgaaataaaataagggttacctgaaaataagcacgcgatatcacaacacccgatcactgaggcggctagtaagtgactaatgggccagggagtgtctgcagcatggagac

SEQ ID NO: 339438 - DNA, 126 bp, Homo sapiens
  chr7:27831654-27831780
  hypo
cgtaaagcagaggaacaggttcaggcaactcggcaagaagttgtctttctggctaaagaactcagtgatgctgtcaacgtacgagacagaacgatggcagacctgcatactgcacgcttggaaaac

SEQ ID NO: 339439 - DNA, 501 bp, Homo sapiens
  chr7:27907637-27908138
  hypo
cgcttggtgactcaggcaagacattcaattccatttgccattttcttctcttgctacagagcccacttcagaggattcaatgagtgaatacgacaacggtgcttggatcagtgcctgccatactgtcagcactagtcgttactattttcactggttgaacagacacgtgagttcacacatgacaccatctattgggatgagtcacgttgcttgctcaacaactttaaggcctaggatcagtgacagaactccaggagcagcggggttaacacgggtgaccaatttctcctgcccactgtcactcacatggcccatgcctgctcctgcagatgccgttccccggtcctcaccgcaactccctgtggggttgactgccgcttgcttctcccgctcccatccccctctccagattcctccgcccctgcatgggccgcctcacgggggtttctcaccatccactctgaacaaggcgtggagttgcttgctccagcctggctggtc

SEQ ID NO: 339440 - DNA, 120 bp, Homo sapiens
  chr7:27914823-27914943
  hypo
cgctttctcttccagcctcatccaactcccatcggctctactccaaaacattccgagttcatccgcacttccctgctctgtgatcctcgtcccagccttacatcactttcctctttcctc

SEQ ID NO: 339441 - DNA, 98 bp, Homo sapiens
  chr7:28110716-28110814
  hypo
cggaatcggctctggagagccagaatccctgtgtgtagcgaaatactacaggtcagcaagcaatgcggtgtgatacaaagatccaactaggtgtagcc

SEQ ID NO: 339442 - DNA, 81 bp, Homo sapiens
  chr7:28989198-28989279
  hypo
cgagagtgagacaccgtctcaaaaaaaaaaaaaaaagtacagctgaccttcctgagtctcggattatgtatctgtgaattc

SEQ ID NO: 339443 - DNA, 580 bp, Homo sapiens; identical to SEQ ID NO: 333100
  chr7:29185654-29186234
  hypo

SEQ ID NO: 339444 - DNA, 1049 bp, Homo sapiens; identical to SEQ ID NO: 333101
  chr7:29233996-29235045
  hypo

SEQ ID NO: 339445 - DNA, 62 bp, Homo sapiens
  chr7:29390389-29390451
  hypo
cggacgttgtcccaagaatttcatatgcattgtctcatttaattcccacaatgcggccgggc

SEQ ID NO: 339446 - DNA, 94 bp, Homo sapiens
  chr7:30205901-30205995
  hypo
cgcgcagggtggtttaggataatagcagacacattttttttctggtatccatgtacttacaaagatttttgaaagtgactggaagaaccggggc

SEQ ID NO: 339447 - DNA, 34 bp, Homo sapiens
  chr7:30341584-30341618
  hypo
cgcttcactccctggtgttcgcaaggcagttttc

SEQ ID NO: 339448 - DNA, 54 bp, Homo sapiens
  chr7:30599500-30599554
  hypo
cgcttcactcgctgcactcaaacattgcttcacgtttccatagtgctcatcacc

SEQ ID NO: 339449 - DNA, 208 bp, Homo sapiens
  chr7:30603338-30603546
  hypo
cgactcaccgttctggaggctggaagaccaagatcaaagtgttggccgagccatgctcctgctgaagccgctgggggaggctccgtgtagtttctgggagccccaggcatttgtggcgtgtggcagcatctctccgatctctgcctccatcttcacacggcggtctctgctctgtgtgtgtccagatttccctcttcttaataaggac

SEQ ID NO: 339450 - DNA, 126 bp, Homo sapiens
  chr7:30656768-30656894
  hypo
cgcatctacctctacctcacgaaggttggaatatctccagataaactccgcttccggcagcacatggagaatgagatggcccattatgcctgtgactgttgggatgcagaatccaaaacatcctac

SEQ ID NO: 339451 - DNA, 123 bp, Homo sapiens
  chr7:30675617-30675740
  hypo
cgggccggcagcagagctctctggttctgtctgtaccatgtttgcttgattttaagaacaagcagttgaagtgctgttttctaaatgaagagactctttacccacgagtttgcgtatgcatac

SEQ ID NO: 339452 - DNA, 1132 bp, Homo sapiens; identical to SEQ ID NO: 333104
  chr7:30721275-30722407
  hypo

SEQ ID NO: 339453 - DNA, 175 bp, Homo sapiens
  chr7:30972844-30973019
  hypo
cgggctccacgcttgctcagcttcactatcagggacacacagagggacgggggtctggggacctttctcagaggctccggcatcccagcgaccagcgttaggtggggccactgtgacggtccacttgtaaaaggggtaggcctgaactcacccgaggggacctgctgcccctgcc

SEQ ID NO: 339454 - DNA, 277 bp, Homo sapiens
  chr7:31032061-31032338
  hypo
cgtgtccagcttggccgaggttgccactcctggtcctgcgggaatggtgtgcatgcctgcacgcacgcatgtgtgtgcgcacaggagcatgtgtgctgagggtgcaggcacgtgcctgggcttgtgcctgggcatgtgcccggctctgccctgacaaggcctgccggctccctagcagctggagcacccgctgtgctgacagggcctgcaatcacgggaaattaccaaacccagaactaaaattaaggctgctgctgctgctgctgctgccgccgcc

SEQ ID NO: 339455 - DNA, 951 bp, Homo sapiens; identical to SEQ ID NO: 333105
  chr7:31091717-31092668
  hypo

SEQ ID NO: 339456 - DNA, 878 bp, Homo sapiens; identical to SEQ ID NO: 333108
  chr7:32337796-32338674
  hypo

SEQ ID NO: 339457 - DNA, 89 bp, Homo sapiens
  chr7:32609681-32609770
  hypo
cgatgtcaccgttcgggggtttgttgctggagctactaacatcctttttcgacaacagaaacacctcagtgatgccattgtggaagtac

SEQ ID NO: 339458 - DNA, 1183 bp, Homo sapiens; identical to SEQ ID NO: 333111
  chr7:32981774-32982957
  hypo

SEQ ID NO: 339459 - DNA, 877 bp, Homo sapiens; identical to SEQ ID NO: 333112
  chr7:32996732-32997609
  hypo

SEQ ID NO: 339460 - DNA, 485 bp, Homo sapiens; identical to SEQ ID NO: 333114
  chr7:33943730-33944215
  hypo

SEQ ID NO: 339461 - DNA, 497 bp, Homo sapiens; identical to SEQ ID NO: 333115
  chr7:35225753-35226250
  hypo

SEQ ID NO: 339462 - DNA, 170 bp, Homo sapiens; identical to SEQ ID NO: 333116
  chr7:35226470-35226640
  hypo

SEQ ID NO: 339463 - DNA, 254 bp, Homo sapiens
  chr7:36124398-36124652
  hypo
cgctggcggatggacaccgccatgctagatctgtgcggtcgcccggggagcaccgggccattcctaacaagcgtgcagtcgagatgcagacaggaaggccaagggagggagaagggggcttcagcacacggcagcgcgtggcccctgggcccgaccccttctccggcagcgcagcagtcctccaccttgtcttgctaattcccagccactgccccgcctcaggtcatcctcctggcggtcagagtgacctactc

SEQ ID NO: 339464 - DNA, 490 bp, Homo sapiens
  chr7:36338992-36339482
  hypo
cgtgccaggcgcgtaccccaccaggtgggcaaagcagaaacctgcggggagcggagacgccttttatctctggatgccacagacctgagcagcattgggctggctgtccgctgctgactggatggcagcacaaagacaatatgagcagagggaggagaagaaggggtgctcaggctgcgggccacagtccagcagcgccagaagcactcatttctgaccaccaggctatgacgttcctgctgcgcattacagaaagcttttaactgtgatcaggcactctgctcagatacattgagtggcgatttttagttttgttttgaaaaaataaacagattaacctgcctcgctgcagtgagagcatgggacaagtccgccacagccctcccccgcccccttcccccgccccccaacgcgcagtgtgtatttgcaccacggcaggtgcctctgtgtggagctagggtcaagccctgagcagcttcacttcccctgc

SEQ ID NO: 339465 - DNA, 335 bp, Homo sapiens
  chr7:36352569-36352904
  hypo
cggggacctgaccgggtgagtagcagatggcatccccggaagaggggaccaggagggccggggtgtggagggaggacagcagtgatgtggctgctcctggcaagagcttaggacgagatatggagaggagactgacgggagccacaggccagctcttccaaggcaggctaaggatgttgaggtggttctgcggcgctggggagcattgcaggcttgtgtgggagtaggaacaggtagaggagggggcctgcatccgcagtgccgggagcggcgcaggtatcggggcagggatgggggatggctctcgttgccggcatattattgtgcggtccttc

SEQ ID NO: 339466 - DNA, 540 bp, Homo sapiens
  chr7:36894954-36895494
  hypo
cgaggaacagaatcagggcggtgagcaagatgccagctaggggctgaaagttgccagggctagaggtgatgctgaagggaatgtggacccacagcttccctttaccaaaggacggttccaaggcgtgggtgtgttttcattcctctctcctgttagctaggtgttccagttttggaaggggcatgtctgggcccggccacttcagttacagtcatagacgaagtcatagttgctgggctccttgggaatcggcggaggtgcgtcagggatctggatgttttccaggtccaggaggcggagcttgatttccatgctgagcagggtgtccaggtcattccgcgtcaggtcgctcatcatgtccttcccgagtagcgcattcagtccatccgtccagatacagtactggcaggaagggaggcaacagcgatcattactggtggcaattacagaagtattaatagtaaaaatagctaacagtgaatactcatccctcagtaggctgtgcgctaagggctctgcctacttcgtcatttcatattt

SEQ ID NO: 339467 - DNA, 1722 bp, Homo sapiens; identical to SEQ ID NO: 223084
  chr7:37487368-37489090
  hypo

SEQ ID NO: 339468 - DNA, 947 bp, Homo sapiens; identical to SEQ ID NO: 333122
  chr7:37960179-37961126
  hypo

SEQ ID NO: 339469 - DNA, 257 bp, Homo sapiens
  chr7:38725412-38725669
  hypo
cgtctgcgggttcctccaggttatcatgccaagacataggcttcctcgtaatcctgtgaaccttgcgcaggggattcacatggtactgcgtgtggagtttctgggttcgtaactctttgaggtacagctcccgcaagatctggttctgatggacctcatctgtgaccaccctctctttcgggtgtcccgccatagccttggggctgctccgtgggtccggggctctctcggcgtcctcttaccactcgcttggctgc

SEQ ID NO: 339470 - DNA, 835 bp, Homo sapiens; identical to SEQ ID NO: 333123
  chr7:39453515-39454350
  hypo

SEQ ID NO: 339471 - DNA, 41 bp, Homo sapiens
  chr7:39503999-39504040
  hypo
cgagtttatcgggagtgaaccatccaaaaagcgcaagcggc

SEQ ID NO: 339472 - DNA, 258 bp, Homo sapiens
  chr7:42237186-42237444
  hypo
gtgctactggagcacggagcccttactcagtacagagaaggatgggggcctttgtcacctgaaattcaccactttgctatgttccggtcagcgggaggtacagttcgctactcacaggcctaaaagcagtgtcgggcttagctaccccagacaggagagtcagcgcctgctcatgcattgagactgaaacaatggtctgggcgtcacagcagctgtgcaaatccctgaaaattcagtccacgttaacgcaaggctctc

SEQ ID NO: 339473 - DNA, 1819 bp, Homo sapiens; identical to SEQ ID NO: 333125
  chr7:42276003-42277822
  hypo

SEQ ID NO: 339474 - DNA, 180 bp, Homo sapiens
  chr7:42834387-42834567
  hypo
cgctcgggttcgctccacgctgtcgcagccaccgctgtggtcgccagtcagccgaggggctgcgatactggttgcccgcggtgtgagcagaattcaacgtgtaccgctgccgtgaaaatggagaggcctttgtccgtgtttggggaccgcagcactggggaggcgatctgctcccagaac

SEQ ID NO: 339475 - DNA, 173 bp, Homo sapiens
  chr7:43116313-43116486
  hypo
cggcaacctttccgggtccccttccaccacgtggaagctttattttcgctttaataagtcttgctaccgcacactcattgggtctgtgcgtttctctaatcaagctgtaacactcgccgctgcggtccacagcttcattccttgaagcccgtgagaccacgaacgcttcaatc

SEQ ID NO: 339476 - DNA, 828 bp, Homo sapiens; identical to SEQ ID NO: 333127
  chr7:43152000-43152828
  hypo

SEQ ID NO: 339477 - DNA, 100 bp, Homo sapiens
  chr7:44097742-44097842
  hypo
cgtcggctggaggaaaagcggcgggccgaggaggcacagcggcagctggagcaggagcgccgggagcgtgagctgcgtgaggctgcacgccgggagcagc

SEQ ID NO: 339478 - DNA, 465 bp, Homo sapiens
  chr7:44153157-44153622
  hypo
cgctctggggcagccggatcgttctccctccgcagccagtggtggtgattactggcgaatcttgaacccgggtgagtaccgcgtgacagcccacgcggagggctacaccccgagcgccaagacctgcaatgttgactatgacatcggggccactcagtgcaacttcatcctggctcgctccaactggaagcgcatccgggagatcatggccatgaacgggaaccggcctatcccacacatagacccatcgcgccctatgaccccccaacagcgacgcctgcagcagcgacgcctacaacaccgcctgcggcttcgggcacagatgcggctgcggcgcctcaacgccaccaccaccctaggcccccacactgtgcctcccacgctgccccctgcccctgccaccaccctgagcactaccatagagccctggggcctcataccgccaaccaccgctggctgggagga

SEQ ID NO: 339479 - DNA, 1178 bp, Homo sapiens; identical to SEQ ID NO: 333130
  chr7:44364449-44365627
  hypo

SEQ ID NO: 339480 - DNA, 225 bp, Homo sapiens
  chr7:44430996-44431221
  hypo
cgatgtattaatacgtgctgtaccggaaggtaagactaagacaatccagatacaccacaaggtaaggttcctccaagagacaaaatgagaagaaaatatcgatcagcgatcttcagggggaggaggcggtccgtgtttacagaacaaaaataaggagactgtgcccagcagatgacccctccccactgactcaaggctgcactgcgtccgcgtgccctgctgtac

SEQ ID NO: 339481 - DNA, 112 bp, Homo sapiens
  chr7:44611096-44611208
  hypo
cgcagtggaagctctccattgagcacacaggtggggatgctgaactgttccaagaacaggcgtagccggtaactccgttctagagtgttgacaaagagcagagacttgcccc

SEQ ID NO: 339482 - DNA, 66 bp, Homo sapiens
  chr7:44740657-44740723
  hypo
cgagggagtgccctgctgccctgggataccgcgggggtgggagtatggggtggaggcttgcagctc

SEQ ID NO: 339483 - DNA, 475 bp, Homo sapiens
  chr7:44746549-44747024
  hypo
cgaagtctgagccaagctgttttgaaggctagcctggtgttacttgatacccagagctggccatgtctgctgtgtatttgttacacgtaacgtgcttttcaaagtgtgcctggtctgagcaaatacagggcatcagaggctggtgaaggggaagcatctctaacccttgaaagctgcgtctcctggcagcagtccctggcacagccctgggcccaggagagctctcagccacatacctgagagaaccagcctagccatgggaactctcttgtaggaacccacttccagcgggtgatcccagaagatggccctgcagctcagaacccagaaaatgtcaaaaggcttctcttctgcaccggcaaagtgtattatgacctcacccgggagcgcaaagcacgcgacatggtggggcaggtggccatcacaaggattgagcaggtgagggcaggtggtgccatcagggtgtccccccagc

SEQ ID NO: 339484 - DNA, 265 bp, Homo sapiens
  chr7:44835105-44835370
  hypo
cgggctcaagcaatcctccccgcccagcctcctgagtagcgagcgcctcgacgcccagctaatttttatttttatttatttttttgtagagacggcgtctctctaagatgcccaggctggtggccggtgtcgaactcctaagatgaagcgatcctccccggccttggcctccgcgcctcctaaagcgccaggtatgagccaccgcgcctggcctacaagtgcattttaattaaagtattattaatgtctttgcctgaagaaattc

SEQ ID NO: 339485 - DNA, 685 bp, Homo sapiens; identical to SEQ ID NO: 333132
  chr7:44924093-44924778
  hypo

SEQ ID NO: 339486 - DNA, 79 bp, Homo sapiens
  chr7:45046889-45046968
  hypo
cgggagcagtgagcccagccatgtcctctgcatgcatcgctgtgtccttgtgaacagtggatctttgttagcgcgcttc

SEQ ID NO: 339487 - DNA, 149 bp, Homo sapiens
  chr7:45091550-45091699
  hypo
gcctcggcctcccaaagtgctggggttacaggcgtgagggtattttataggacattgaattccgtgatcatgtgcctactgctgtacctcctttagcactaagtgagtcccttgatccaaggtgatgatggtacttgctgtcccacatc

SEQ ID NO: 339488 - DNA, 173 bp, Homo sapiens
  chr7:45222845-45223018
  hypo
cggcatccacaggcagttcttctccaactgcaccgtggacagggtccacttggaggaccccccagacgaggttctcatcccgctgatcgttatacccgtcgttctgactgtcgccatggctggcctggtggtgtggcgcagcaaacgcaccgacacgctgctgtgagggtccc

SEQ ID NO: 339489 - DNA, 187 bp, Homo sapiens; identical to SEQ ID NO: 333133
  chr7:45299664-45299851
  hypo

SEQ ID NO: 339490 - DNA, 1738 bp, Homo sapiens; identical to SEQ ID NO: 333134
  chr7:45613459-45615197
  hypo

SEQ ID NO: 339491 - DNA, 93 bp, Homo sapiens
  chr7:47370861-47370954
  hypo
cgagggaccaggcactgcagactgagatcctcagctttattcgaatgtacttgtttgttcctgagaattacgtgctggccagcaccccagggc

SEQ ID NO: 339492 - DNA, 270 bp, Homo sapiens
  chr7:47515282-47515552
  hypo
cgcttgcagagtgtatgaaggtaaacacaggatggaaaaaaacaaggacactctgcccttgaacttcaatcaaaagctgtggggccaccattcggaccactgttaggccgcagcatcatgaaaagatcctgcaaacctgcaactaccaaggacagactcgcatgcgcccttgttctgaccgtggtgcctccaagtctgcaaatgcgggatcacaggaatcatctactgtgtctgtcatcggtgccctcaccctcaggaagcaggggacac

SEQ ID NO: 339493 - DNA, 437 bp, Homo sapiens
  chr7:47605260-47605697
  hypo
gcttggccagttttttatttcttaaggtaataagccagtaggtgggggacaaagttaaatataaacaaatgctgaaaatacgcacaaatttacactagttaacaccaacctcgctttccaatttcgcactctgctggatttcttaatcttaggcaaaaattcacattgggggttcagggagctaaaaggagttctcctaagtatgagaactgtaaatgcagcttattcctcacacgggcgctgggaggctttggaagagcaaccagccacagtctgatggcatgatatgcgtggattactgcaaagccacatggaactttaaagacatctcaattaacagcttcactggggtttcagattagtatacatattggaaaaaagattaatccagatgagtggttctaaaccctgccgagccgcaacccaaagtgtctgac

SEQ ID NO: 339494 - DNA, 216 bp, Homo sapiens; identical to SEQ ID NO: 333136
  chr7:47621704-47621920
  hypo

SEQ ID NO: 339495 - DNA, 58 bp, Homo sapiens
  chr7:47639927-47639985
  hypo
cggctgatcgtcgagagcacgcaggcagaagagcacattgacaggcaccggcatgccc

SEQ ID NO: 339496 - DNA, 1005 bp, Homo sapiens; identical to SEQ ID NO: 333137
  chr7:48074954-48075959
  hypo

SEQ ID NO: 339497 - DNA, 94 bp, Homo sapiens
  chr7:48147036-48147130
  hypo
cggcgtccgcaatatcgagatggagtcctcggtgtttgccgccatgtgcagcgcctgcggcctccaaggtaagcggcacttgatgggcctcggc

SEQ ID NO: 339498 - DNA, 3000 bp, Homo sapiens; identical to SEQ ID NO: 333138
  chr7:49812751-49815751
  hypo

SEQ ID NO: 339499 - DNA, 206 bp, Homo sapiens
  chr7:50251517-50251723
  hypo
cctcacactggcatcgggaggaggtacctacatgcttgaatagggaggaggtgctcacacgctggcatcgggaggcaggtgtccacacgctggtatcgggaggcaggtgtcagcatgctggcattgggaagaggcaccctcacactggcatcgggaggaggtgtccatatgttggcatcaggaggaggtgtccacacgctggtatc

SEQ ID NO: 339500 - DNA, 1629 bp, Homo sapiens; identical to SEQ ID NO: 333139
  chr7:50343211-50344840
  hypo

SEQ ID NO: 339501 - DNA, 111 bp, Homo sapiens
  chr7:50441160-50441271
  hypo
cgcgtaggggaacatgccaagaggattatcccaatgcctgttctgcgtggtgtcctttttctagcctcggaagcactaggcctacaccttcgctatagccctcgtcttagc

SEQ ID NO: 339502 - DNA, 382 bp, Homo sapiens
  chr7:50560501-50560883
  hypo
cgagcgccggggaagagttgtccgggagagatgagcgcacagccgccaacttgctggcatcagctctgcagcgtctgcggcagcctcggggcatcagctctgcggcaggcactccacgtcccgaaaggctcaactccttctcaccaccgcactgactaagcaggttttcttcagccttaacatacgcactggttgtctggacctgagggcaggacgccgcattcattacactccttcttatcgtgtgtcaatatttgcctccaagattagggacccaaaatatttctggtccctgaccgcttcagtttcctcatctgtaaagagagcgtggcaatgtctgtgtccctcaacacagggctgtcgtgggggtccagagagctac

SEQ ID NO: 339503 - DNA, 590 bp, Homo sapiens
  chr7:50660402-50660992
  hypo
cgctggatcttccatgccctccccaatttggccgatgcagagggaggcgaccctgctgggttcacagcagcaaatcgtcgtttaagtccaacaaactagtcaatcttggtcggctggcaccgaacaaacccatctcgctctgggtccccaggtgcagaatcgatgtgtgttcttcaccaacgcacagaccgcttcttcactccagtgttcacttcctccagtcttcagccgagaggacatctgcggtcataaggccactcggatgcagtggtgcttgagtttgcaaggcaggactcctttgttcagctggtaaaagtcaaccagctggatcaggtcagagaatttggtgttcccgtcatctaggctgaagaacgtctgcccgtcgtcctcgcactggagagacacaagaacacttgccaggttagaggctgccacctcagggaacagaacggggcccacggccagcagcagctacatctgcccatgatttgattccagagggacacacagggcaaggtaggctagaaaacaccaggggcgggaaagacgggagcagaggatgtgtgctgggggctgccatgtccctgagc

SEQ ID NO: 339504 - DNA, 178 bp, Homo sapiens
  chr7:50687526-50687704
  hypo
cgcacgcacatcatggaatagttcttgtcaaccgaattacacgtgaaggcagggaagaaaacacactccatcctccagcacccgctgtggacacgtacacacacacacatgcacgtacgcacacgcctccttcacagcatcttacatagcagcactgtcccccagaaagggaaaagtc

SEQ ID NO: 339505 - DNA, 176 bp, Homo sapiens
  chr7:50715838-50716014
  hypo
gcagagaggggagacggagcaccaaggcccagtgactgaagagccagcaacgatggctgagaaggaaagtccagcaaagagggtggaaacccagacggagctgtggaaaggagagcagcgagcgacaggagccctcatgctgctgcaggcccggcaagcggaagacagagaacccc

SEQ ID NO: 339506 - DNA, 88 bp, Homo sapiens
  chr7:50823307-50823395
  hypo
cgcgaggagagtgtgcgcagcccggctctgctgcagcccaggtcctcccatccctacccgactcagcccggtgttcccaggcagagcc

SEQ ID NO: 339507 - DNA, 332 bp, Homo sapiens
  chr7:51092672-51093004
  hypo
cgccggctctctctcaacccactcccatgtgaccgcctcgcagctcctgcccacaggcaagcgtgtccctggatctacgctgcacctccaaccctctggccccattgaaatgcgcacacacagtcgccatcacctttctcagtctcgcagcccctgtgccggagcggatggcgtccatcaaggcttgccttgcgtctgcggtgttgctgagggtgcccgtgctgaacctggaggccgtccttggtgcagagagagcctgggagggtggagggggtggtgggggaatggctggtggggacagaagaccaaggtcttctagcagaggactttcc

SEQ ID NO: 339508 - DNA, 200 bp, Homo sapiens
  chr7:52736865-52737065
  hypo
cgggcaggcggcccgcccaggccacgctttccgtgtcctctggcccgcgaggctttgcatggacagaaccaacggcgagccgcgccctggggactccaggctgccgggatccagtcccgcctccagcgcaggctccaccctggggagctcccgagaggcctgcgcgctcctgccactctccaagcctgcaaggaagaacc

SEQ ID NO: 339509 - DNA, 726 bp, Homo sapiens
  chr7:53103571-53104297
  hypo
cgcccggtgcccagcacccacctcatcgaggtgcggcccacccaggaccccgccaagccgcagcgggtggtctccgagggctggaggcgccctgcccttcccggggagaccgctctggggcgagacctctcctgtgcctgggagggttgcatgaaaggggggctgtgtcgtgcctggaacccaggacggacctggagcccggtgaccatcgggatcgcgccccctgagcgtcaggagagcccctggagatcccctggacagagagcccgccccgcaggccgccccgccgcccaggagctcctggacccctgcacccgggagactctgctgggggcgctcagccagtgccccaagggaagcgctaggttcgacgggccgttgtggttcgaggtctcagacagcaagggtggcaggcggaacctgcagccccggccctctgccttcaagcccctgagcaaaaatggagcggttgcttccttcgtgcccaggccagggcctctgaagccgagcctcggcccctggagcctcagtttttgtgatgatgcttggccttccgtgctggtccagcccgccccatccgccatctgggacttctgggaggcgacaacgccttcctgcggcagctgcagtagggtctccttcgccctcgaggtcacccagtctgctggcccctttggctcctaagaatctgggctctgctacccacctccggagacacaagcccac

SEQ ID NO: 339510 - DNA, 777 bp, Homo sapiens
  chr7:55145822-55146599
  hypo
cgtgccgtgttcctgtcctggggtatttgggtgtgtggcgtgtggggaggggagaaggagcaaggcggcagggaggggatgaggaccaccctgtccatgggacaggccctgggccccgcacacaccccaagccccgcgtcccgcgtcctcactgtcctgggacaccccccaccccaccccaccgccacagcccagagcggtgccaggaagccgcctcgacgcagccgtatcttgaggctccagccccatccccagggtaccacgccacgtagagacactatttttcacttcgtgtttgtcactcctaaagcatgtgtgctagctgcaccaaccctgggatgcctcggtgcatagggtttatgtgcgtcctcctccttccctctgagctggtcccccgtggggaactgctgcccagactgacctgcgtccttccgcacgtgcaggaaaatgtccacgtgcacttgtcagggtgggggccacacgggcaccaccactgatcatctgtgggatcgagttactgcccatgcagatcccacgtgcagggcccagtcgctttggtgagagagtggacgctgtggtgactccacggtctgtggctgtgctcaggaggacagagaggggacatcctgagatggtttgggcagcccgcggatcctgtgcatgtccccagagcgtccactttctccatggagcagtggagtggcgttgctgagacagaaagttcaggttctccactccccatgcagcccccactcccctgtctccggccaggcacgc

SEQ ID NO: 339511 - DNA, 120 bp, Homo sapiens
  chr7:55223544-55223664
  hypo
cggctcgtgcgtccgagcctgtggggccgacagctatgagatggaggaagacggcgtccgcaagtgtaagaagtgcgaagggccttgccgcaaaggtaggaagcccgccggtgtgcggac

SEQ ID NO: 339512 - DNA, 133 bp, Homo sapiens
  chr7:55506201-55506334
  hypo
cggtaaccatgacaccaaagtcaacactcggagaaagtgaagaggctggcaggtgaataagtgtggacagggcgcctcacagagcaggacaggcaaaggccccggggaagcacttctcactcgctgcagaatc

SEQ ID NO: 339513 - DNA, 573 bp, Homo sapiens
  chr7:55553240-55553813
  hypo
cgtttttctatgagaggaggtcggaagtcactgtcgccctgtcctcatcccagagctgcaggccggggacagctgcctcataaccccggctgtcctgtggctgcactgtgacgccacacagggcccacacagggcgcccgcacacgggacgtgcacacagtacattcacagagcacttagtgacagacggcaggttggacgtgttaggcacagggacctcacgtggggctgcagacctcattgcaacaagggacctccagtcttgtttggcccacattttccctcatccgcccctcggaagggccggacgcagccatttcaaatattaatacatttagggagaaaagtgcaatggtagactcgggagacaagggatctgaaggaggctctgcttcccacggggagaggaatgcagccagcgaggcgggcgggggacctgtcagacccagagcttgcgtgagcaaatgtgagggagacccttggtacgtgcagtgtgtccctccagatgcaggcacccatgagtggaccacgacgggccagaggctccggctccacctcagccccatcactggc

SEQ ID NO: 339514 - DNA, 158 bp, Homo sapiens
  chr7:55571348-55571506
  hypo
cggttaccaaggtgaagccctcgtgacagggttgggggtctctgtaagaagagccatgaagagggcttgctgcttgctccactccccaccacgtgaggatggaacaagacagtgcctacgaaccacggacagagccctcaacagacaccagagctgac

SEQ ID NO: 339515 - DNA, 131 bp, Homo sapiens
  chr7:56037272-56037403
  hypo
cgtgtttgtctgtctgccctcaccagcaaactgagctcccgtgaagtcagggccaggttcatctgtgcatcgtcagtggctgacaggtgtagtgcacagtctgtaaataacagtgatcatattgccgggcg

SEQ ID NO: 339516 - DNA, 56 bp, Homo sapiens
  chr7:56075649-56075705
  hypo
cgtcacacggacaatcagccatgcctttctgagtccatcctagtgtaggcatgtgc

SEQ ID NO: 339517 - DNA, 427 bp, Homo sapiens
  chr7:57247618-57248045
  hypo
cgtcggttgtccaaatcggcagggaagctccagaggccacccagctccttgggctcccgcgacggactctccttggggtacagcatcccgccttgcagtgccagcacacagcaacagcggcccaaacgccgtgcaggccacacctgtccactaggtcacgctttccactccactgcttggccaccgtctgcagggctaagagcagtgcaggaggaggctgcggacaggtcgcatcaggtacctgagacgatccgcgccatctttgctgagggcgagtgccaggcctagaggggcgggatgggcctggcgctgcccagtggggcctgtggctggaaccccgggctaggcctttggggaagcgggaccctcactctcagccccagccaagaagggcaaggtcggttccccaccccagcacagtctggac

SEQ ID NO: 339518 - DNA, 294 bp, Homo sapiens
  chr7:57324312-57324606
  hypo
cggcacctcgagttgggattctcccctgaagattccccagaggtcccgcacaacttggggaaatgcggggctgtgggcgtggagctgtcccgggagggctggagcgagccaaagtcaccgaccagggaccaggcgatactggacgcccgggctcccggcggccgccttgctaccatcttgcaccttagcagactgagggcggagctgcgccgaagaggactcgaatcctggtccctgcaccgaccgcgaggaggcccgggttccccccacagccggttccgaccaggcgcctcc

SEQ ID NO: 339519 - DNA, 188 bp, Homo sapiens
  chr7:57706384-57706572
  hypo
cgtggagcggcggctgcgggagtagggcggcggcgggtgaagtgaagattgggagagaggcctcgtcaactctccccgaatccaggcctgaggctgggatctcgcgctgccgcccaggtgatccgcctgaggtttcttccttgtgaggtttcttcctggtggtcgaccctccgagaatcccaggctcc

SEQ ID NO: 339520 - DNA, 247 bp, Homo sapiens
  chr7:57706651-57706898
  hypo
cgcaaagtctcagaaacccatccccgggcaacagtgtcaatcactacgaccaaagcggaggctcaggccttgcgcatgcgcactggcaaggccgactcccagcttgcttcggagagtcaggcctcagatcctttaaaaaatggcggcgatgcgcggccgggggtctggggcagcggtggcggtggcagcgcagtccgaggcggcgggtgggaagaggactacaagagggtactgcgggagacccaac

SEQ ID NO: 339521 - DNA, 118 bp, Homo sapiens
  chr7:63569143-63569261
  hypo
cgttactgctgttagggaaataaatgagcctacgaatgaaatagtatctcatgcggtgtatgcaccgggataattggagtaatggcgaggcatactggataggctgcggaaatgctgc

SEQ ID NO: 339522 - DNA, 331 bp, Homo sapiens
  chr7:63652630-63652961
  hypo
cgccttgggcacctcggcctgcgtcattgcgctctgcctggctgcggccgctgtggccaacacctccccggagctcctggagagcgaggcgaagaaagactcagccggcacaaggcaaaggttcagcgggttgagggttcaaggacacggaacgggtgcctgggtggaaagcggtcaccaggtgtgagtgtcaccgtggggccagtgcccagttttgctgcccccgcttcctgaagatcgcagctggagccacctgggcgcagcgtttgatgtggcacctgcagtggccaaagtgacacccaaccgtgaggacgctgcagggagtcggcac

SEQ ID NO: 339523 - DNA, 429 bp, Homo sapiens; identical to SEQ ID NO: 333145
  chr7:63767582-63768011
  hypo

SEQ ID NO: 339524 - DNA, 405 bp, Homo sapiens
  chr7:64146495-64146900
  hypo
cgtcgaaaaaggtgggctatgcacctttttaggggaagattgtttttccaccaaccagtctggactagtacgagatgctgcctcgcagttaaatgaaaaggcttctaaaatcagacaatgtctttcagacttttaacaccaatctttggagctgggcgttgtggcttctccctatagctgggcccctcatttccatcattctccttctcctatttggaccctgcctcttccgtctagcctctcagttcctacaaaatctcattcaagctattaccaatcaatctatgcgacaaatgctactcctaactgcccctcaatgtcacccccaccccaagatctctctcccaattaggagtccatgccgccccaagtcccgctcgaagaatccctgagaaacatcacccc

SEQ ID NO: 339525 - DNA, 494 bp, Homo sapiens
  chr7:64332690-64333184
  hypo
cgggaattgaatcagaagagcagtttccagcgcccacctcacagtctcaaagcgcctcctactccagcagggtcgaccaccgagacgccccaaagaggctgtacggtcaagactttaagggtccctcggtgtttgtcataggcagccttttccccgagaccaggccggctctgcttgtaccattttcctctgcttaggcaggctgacagccctgacagccaggtgccccagcctacctcgcgaatgcccatgctccagtcgcaggacacctggcggaagcggggagccctggctcgcatcacagtgaaggccacctttgcctggtgacgagtccctgcggcttggcggagcaggagacctctgtgaacatgcgtcggtgttggactcacacctgtcttcactggggaatccaccggatagtcccgcgttcctagaagtggtcagtgccgacccagcctgaagaaacgtcaagcggagccccggggatgcagcac

SEQ ID NO: 339526 - DNA, 347 bp, Homo sapiens
  chr7:64345105-64345452
  hypo
cggattcttgcacacagactctttcgggaatggagtccaaagagaagttcccagcgcccacctcacattctcgaatcgccttttcctccagcgggacccgactaatgagacggcccgaggatgccctatggtagttacttttaggcttccacagtgattgtcgcaggcagcattttccctagactaggccggctctgccttcccattttcctctgctcaggcaggctgacagccctgacagccctgacagcctggccccagcacctgcctcgcggattcgcatgcgccagtcgcgggacacctgtcgcgagcggtgagccttggctcgcgtgtcagtgtatgccacc

SEQ ID NO: 339527 - DNA, 976 bp, Homo sapiens; identical to SEQ ID NO: 333147
  chr7:64349108-64350084
  hypo

SEQ ID NO: 339528 - DNA, 102 bp, Homo sapiens
  chr7:64458273-64458375
  hypo
cggttgcccccccttgaacctgcccctgttcatcataatagataggtccccgtgtttcacggaggggcatctgccacactctggtgtggccaggtcgaaggc

SEQ ID NO: 339529 - DNA, 719 bp, Homo sapiens; identical to SEQ ID NO: 333150
  chr7:64974274-64974993
  hypo

SEQ ID NO: 339530 - DNA, 137 bp, Homo sapiens; identical to SEQ ID NO: 333151
  chr7:65037624-65037761
  hypo

SEQ ID NO: 339531 - DNA, 448 bp, Homo sapiens
  chr7:65553884-65554332
  hypo
cgtgcagctctcagatgcctacaggtaagccctgaactgccacctccatctgccgctgccggcctctgtatcccccgccgcccgcggacgtggctgccttcctccccgtcccacccctccgccagacctggccattgcggcgctggaccagccaagggtccagccccttcagcgccagcacctctgtccccagcacgggaagcagcctgatgccccagaagaaaaaccccgacagtttggagctgatccggagcaaggctgggcgtgtgtttgggcgggtgagcaaggcagggggaggggcggggcctctgggctgatggtgggtggccaggggggcaggatcccgggtccagcccctgtgcctccctcttcccgcagtgtgccgggctcctgatgaccctcaagggacttcccagcacctacaacaaagacttacaggtgcgaggcc

SEQ ID NO: 339532 - DNA, 54 bp, Homo sapiens
  chr7:65562589-65562643
  hypo
cgcgcccagctgtgccattactttcaatggcaaaaccggcaattacttttggac

SEQ ID NO: 339533 - DNA, 258 bp, Homo sapiens
  chr7:65877891-65878149
  hypo
ggggggaaaaaaatacaccaagcgtgcaccacgcctggctaatttttgaaacttttctacagacggggttgcgtcacgttgcccagggcagtctcgaactccttagaccaagccatcctccccctcggcctcccaaagtgctgggattatagagtccagccagcctcatgttttctttaagcagtccctccctgttgcacagttggatagtttatttttttatttttttagacatggtttacctcagtctcgcaggac

SEQ ID NO: 339534 - DNA, 96 bp, Homo sapiens
  chr7:66204269-66204365
  hypo
cgtagcacacattaggcacttaggaagaatctgagaaacgaatcagttaatccctactttaccaataatgaataaagactgagaaactcgggccgg

SEQ ID NO: 339535 - DNA, 107 bp, Homo sapiens
  chr7:66293261-66293368
  hypo
cgcgcctggcttccacggtgttttctaacgccgcagcgaaacccatccgtgtgccacgtcaattccttagccgccatgccatgctgtcatctcagcctgagcttggc

SEQ ID NO: 339536 - DNA, 115 bp, Homo sapiens
  chr7:67353388-67353503
  hypo
cggtaggccaactgactgggaagtgaggagcacctcttcccggccgccaactgtctgggaaacgtggagaacttctgcacggctgccaattgtcagggaagtgaggagagcctct

SEQ ID NO: 339537 - DNA, 67 bp, Homo sapiens
  chr7:67648558-67648625
  hypo
cgcaccgcttgggggaggtggtaggacgggagggctctcttgggtttccagagcctgagctggtatc

SEQ ID NO: 339538 - DNA, 3158 bp, Homo sapiens; identical to SEQ ID NO: 333153
  chr7:69062203-69065361
  hypo

SEQ ID NO: 339539 - DNA, 112 bp, Homo sapiens
  chr7:70543004-70543116
  hypo
cgcggcggcactcgcaagccagtgcagttccgggtgggcatgggcttggccgccccacactgggagcagcaggccggcgtcaccagccccgggcagtgaggggcttagcacc

SEQ ID NO: 339540 - DNA, 1482 bp, Homo sapiens; identical to SEQ ID NO: 333155
  chr7:71800958-71802440
  hypo

SEQ ID NO: 339541 - DNA, 272 bp, Homo sapiens
  chr7:76106210-76106482
  hypo
cgtgccttcgtggaaagttttagctgatgtcctcgcctgtatttcccaggctgtttttgcagagttgtgagagttggttcatccgggccatgaggacatgttgggacataccccgtgtgccgatgatggaggcggccgtggctgcccgagagatgcgtgacacccaggagtaattggcttggaaggcagtcctctgatttgtacctcattgtggttacagaaacttccaattgaagacactgagctgaaccattccgcccgcccgcccgccc

SEQ ID NO: 339542 - DNA, 171 bp, Homo sapiens
  chr7:76631508-76631679
  hypo
cgcagcgtctggatacagcgatgtgactgacagcaaggcaatcgggcccctggctgtgggctgcctcaccaagtgcagccacgccttccacctgctgtgcctcctggccatgtactgcaacggcaataaggtgcccccactggcccggggcggaggcgggtggcctgcccc

SEQ ID NO: 339543 - DNA, 112 bp, Homo sapiens
  chr7:77309585-77309697
  hypo
cgtgagccatcgtgcccggccagacgatagatggattctttttttttttttttttttttgagcaaattgagctacttgagcctcggcctcccaaagtgctgggattactggc

SEQ ID NO: 339544 - DNA, 207 bp, Homo sapiens
  chr7:77324199-77324406
  hypo
cgcgcccggccacattccttatcttttaagctaaaacccatctccccaaattgcttattttcgaagcaaaaatcaaagcacatgcttacaaaacatcgaacacgcagtgtgcttactaaacgctaaaatacagaaacctaaaaaaacaattcttgcttttcaaacatccataaataatcgccaacgaatttttcctggcaagtctac

SEQ ID NO: 339545 - DNA, 2290 bp, Homo sapiens; identical to SEQ ID NO: 333158
  chr7:79081837-79084127
  hypo

SEQ ID NO: 339546 - DNA, 828 bp, Homo sapiens; identical to SEQ ID NO: 333160
  chr7:80548021-80548849
  hypo

SEQ ID NO: 339547 - DNA, 571 bp, Homo sapiens
  chr7:86415591-86416162
  hypo
cggctcttccagatccctcagatcagctacgcatccaccagcgccaaactcagtgataagtcgcgctatgattactttgccaggaccgtgccccccgacttctaccaggccaaagccatggctgagatcttgcgcttcttcaactggacctacgtgtccacagtagcctccgagggtgattacggggagacagggatcgaggccttcgagcaggaagcccgcctgcgcaacatctgcatcgctacggcggagaaggtgggccgctccaacatccgcaagtcctacgacagcgtgatccgagaactgttgcagaagcccaacgcgcgcgtcgtggtcctcttcatgcgcagcgacgactcgcgggagctcattgcagccgccagccgcgccaatgcctccttcacctgggtggccagcgacggctggggcgcgcaggagagcatcatcaagggcagcgagcatgtggcctacggcgccatcaccctggagctggcctcccagcctgtccgccagttcgaccgctacttccagagcctcaacccctacaacaaccaccgcaacccctggttcc

SEQ ID NO: 339548 - DNA, 966 bp, Homo sapiens; identical to SEQ ID NO: 333165
  chr7:87256927-87257893
  hypo

SEQ ID NO: 339549 - DNA, 484 bp, Homo sapiens; identical to SEQ ID NO: 333166
  chr7:87257959-87258443
  hypo

SEQ ID NO: 339550 - DNA, 1361 bp, Homo sapiens; identical to SEQ ID NO: 333167
  chr7:87563203-87564564
  hypo

SEQ ID NO: 339551 - DNA, 1513 bp, Homo sapiens; identical to SEQ ID NO: 333171
  chr7:90225111-90226624
  hypo

SEQ ID NO: 339552 - DNA, 805 bp, Homo sapiens; identical to SEQ ID NO: 333183
  chr7:96636033-96636838
  hypo

SEQ ID NO: 339553 - DNA, 256 bp, Homo sapiens; identical to SEQ ID NO: 257986
  chr7:97869428-97869684
  hypo

SEQ ID NO: 339554 - DNA, 415 bp, Homo sapiens
  chr7:97925156-97925571
  hypo
cgcagcaagaagcaccgactcctgccaggaggactgaggaggaaaaagaacgcttaagatgacagctggaagccactcagtgttgggccaaccccgtgcacgcatgcctggggcccaacaatcctgctccctgtaggaacaagcagggcacacacccatgggcaccgagacactcgggcagccctggagaaacagcccagaccagaaacaccagacgcccgtcaatgggagagtcagaaccagcttctgtgcagacagcaggtcaccacacagcactgagcgactgtccctacggggccaccccagacagccatctctgtgccagggcttggggagtctggtgttggagaagggatggtcacggaggtgggccatgctgggtgatcgtgggggccgggaacgtcctgctgggtat

SEQ ID NO: 339555 - DNA, 231 bp, Homo sapiens; identical to SEQ ID NO: 333188
  chr7:98030420-98030651
  hypo

SEQ ID NO: 339556 - DNA, 663 bp, Homo sapiens; identical to SEQ ID NO: 333189
  chr7:98245893-98246556
  hypo

SEQ ID NO: 339557 - DNA, 696 bp, Homo sapiens; identical to SEQ ID NO: 333190
  chr7:98247077-98247773
  hypo

SEQ ID NO: 339558 - DNA, 336 bp, Homo sapiens
  chr7:98598608-98598944
  hypo
cgtagactaagtggttcacatgtgtggtattcaaagaatctcctaaagactcattgtgtcctagatgacacagttaatattaagtcacataaaagaaaatcttcatctccttaatcggaaaggacactcaacagccatagctgtgaccagggttgcatcgaggttgcatccagctgaagtgtggcgtgtgccctgcagttgctccaggcagtctgggggcgcagctccctgttcgtgatgtgtgggttgggcttgccttaggtgaacccacagctgagggaggtgctctttgaaaagtgaagggcaagcccggtcctccccgtctatacgtgaagc

SEQ ID NO: 339559 - DNA, 170 bp, Homo sapiens
  chr7:98599246-98599416
  hypo
cgcacagccagagctcatccaccttccgctctcctgtacacaggggaggctgtttctgtctctttgtctgtgttccgttcgtggaatgcagtccgattctctagcagagctgcatgtgtgggctgccaaccacatgtctgtaaagaggtggaagaaagctcagaaatggc

SEQ ID NO: 339560 - DNA, 201 bp, Homo sapiens
  chr7:98639739-98639940
  hypo
cggggttgattgaagaatccggatttatttgcaacatgtaaatattgtccgtagaatactggaagagcccgtaataaggattcagcatttcatggcacagcaagtaaagccactccctgggagcaaacaacaaaaatgcatttgagacgcgctaaaatttctacattttttttttttccctgagatggagtctcactctgt

SEQ ID NO: 339561 - DNA, 216 bp, Homo sapiens
  chr7:98955444-98955660
  hypo
cgtttggttcatcttggtagctctagctcctaacacagtgcctggccgtcagcacagatctgtgtggtcacagccctctcggagctccggtgagcacaggcaaggagaaggtcctagcacaggtgtctgctgccaagtcatagtaacaggaagagctctaggagctaagagcagggagaagccactttaggcggaagtggcccgggaaagtggacc

SEQ ID NO: 339562 - DNA, 62 bp, Homo sapiens
  chr7:98966395-98966457
  hypo
cgcagccagaagccctcagtgctttatttcaacgctggggccttttgagtttgtgacgctcc

SEQ ID NO: 339563 - DNA, 682 bp, Homo sapiens; identical to SEQ ID NO: 333191
  chr7:98971524-98972206
  hypo

SEQ ID NO: 339564 - DNA, 164 bp, Homo sapiens; identical to SEQ ID NO: 258028
  chr7:98991540-98991704
  hypo

SEQ ID NO: 339565 - DNA, 215 bp, Homo sapiens
  chr7:99084631-99084846
  hypo
cggcagctcgcgtatcttgttgaacataagaggattcacaccaaagaaaaaccttataaatgtagcaaatgtgaaaaaacgtttagtcagaattcaacccttattcgacatcaggtgatccatagtggagaaaaacgccataaatgccttgagtgtggaaaagcctttggccggcattcaacccttctatgtcatcaacagattcacagtaaacc

SEQ ID NO: 339566 - DNA, 1384 bp, Homo sapiens; identical to SEQ ID NO: 333192
  chr7:99155672-99157056
  hypo

SEQ ID NO: 339567 - DNA, 141 bp, Homo sapiens
  chr7:99723169-99723310
  hypo
catagctagctggtcgatgaggcagcacccagaatggccgctgtcttgttaagctcaagctccagcctgagcaacatagtgaaaccccaattctacacacacacacacacacaaagaagactgcagggctggtggtgcagc

SEQ ID NO: 339568 - DNA, 260 bp, Homo sapiens
  chr7:99819908-99820168
  hypo
cggggcgggtctgtgtctcccacctcagactagctccagggcaggtccatgtctcccacctcagactagttctggggcgggtctttgtctccccgctcagactagctctggaacgggtccttgccttcccactcagattagttccggggtgggtccatgtctccccgctcagactagctccagggaaggtctgtgtctcttccctcagatgagctcctggcaaagcctcccccgtcagactaagactcctaggcagagcc

SEQ ID NO: 339569 - DNA, 87 bp, Homo sapiens
  chr7:100030648-100030735
  hypo
cgagggcctgaagcgcatgtttcgccggatctaccggcacctacgccctgggggcatcctggtcctagagccccaaccctggtcgtc

SEQ ID NO: 339570 - DNA, 414 bp, Homo sapiens
  chr7:100034752-100035166
  hypo
cgcacctggccataaatggggcagctttaaggtaacggtccagtgtgccctgacctcccactcagacctgcacagcatttccggtgttccgttgcctccaaactcggaccggagttggcctgtatgagtgcgggcgagggtcgccgaccccatcccggactcccttctgggacacagcaactcttgcagctttttgtgactacttttaccttcgagagttccctgaaatattaatttgtataaaaagtagatatctggcacgggtgcggtagcgcatacctgcaattccaactctgggaggccaaggcgggaagatgtcttgaaaccctgagctggagacaagcatgggcaacataccgagactccacaccaccattcccaatctctaccaaaagaatttaattttagccgggc

SEQ ID NO: 339571 - DNA, 236 bp, Homo sapiens
  chr7:100064586-100064822
  hypo
cggagggcccattgggcgcagggggcccaagccgtgggacccccgaggagggcagctgagccagctgctccgggctggccagggcgcgcagcagcccattctcctgctccagcgcagcgttccgctccgccaattcccggatctgctccttcagcacctccacctcctcccggaccgcaaacatgaggtgggacttcaccaagtcctgggggccccgggacaggcacagcgtcaac

SEQ ID NO: 339572 - DNA, 157 bp, Homo sapiens
  chr7:100179313-100179470
  hypo
cggtctgcagtgttttcgttaccgcagcctgagccaactgggacgcacatacaaacacctcctctccagttcttcattcttctcaccttcgggcagcgtactgagctggttcctccggacattgaggtcccgcagggaagagaggccacacagttcc

SEQ ID NO: 339573 - DNA, 413 bp, Homo sapiens; identical to SEQ ID NO: 258072
  chr7:100179714-100180127
  hypo

SEQ ID NO: 339574 - DNA, 831 bp, Homo sapiens
  chr7:100402457-100403288
  hypo
cgagttgacacattgttaccgtgagagccgggcctggaatgcagatagatgcacaaagatagctagaagtgagaggcggaagcgcgatggcccagggctgtgatggcaggaggaggtgaggcgggcaggctggccccaaagagtccttgggtcctcagctccatggggctgtgactgctcctctggggcccttctaggcatggcatgagcgcagtgcaagaagacagcattggcacccgaagctgaccccaaaagcccctggagaccccgtgggcctgactccagctgccccgctctcccagccccactccagctcctgccactgcttactcagcagagatctggctgaccagctcgaaggagccaaagccagcggctgcgaaactttcttcgtatcttcccattttgatggcccgaagccactcgcccacagagccaaaagctgagtagtgaggctgccgctggtccaggagagggtgtgaggccctagggggcaaggatggggaggaatgctgagtaccaggcccaggtccgggggaggaggtggaacccagccttgcagaggcggacagaggccctcccacccaacaccaatgaacggacacttctgggcaaggagtgggggcagagagcgggaaggagggcccattctctgcagtcctcacccgccattctcccgggccacgattttgaggctggcggggttccggatcatcttgtccagggcgctgaccacctgggggaagcggggccgggcattccggtctttctgccaacagtccagcatgagctggtggagggaggtgggacagtctgggggcgggggcagcc

SEQ ID NO: 339575 - DNA, 217 bp, Homo sapiens
  chr7:100405032-100405249
  hypo
cgggaaaggccaaagtcagacactttgcagacgaggttgctgttgactaggatgttgcgagcagccaggtctcggtggacgtagctcatctcggcaaggtaccgcatgcccgaggcgatgccccgcagcatgcccacgagctggatgactgtgaactgtccgtcgtttagctggagagcagatagggtgggggcttggtgaggacagcccacccacc

SEQ ID NO: 339576 - DNA, 380 bp, Homo sapiens
  chr7:100421158-100421538
  hypo
cgcgcgggccagaggcctcgcaactacatcggctgccctccaggccacgggcctgctggctggaatcccaccttggctgtggctgagccctgggggcacccaggtaccttgatgtaggggttctccatccaggctggcgtgagggccgtggccgtgtccgcatcgctctcatagtagaagacggtgaaggtctccttgcaggagcgcccagcccgaggcagggacaggcactcgagcatggtgaagcgcagcgtggcgtacacgtggacggcgccccgccgtgggacccaacctgtgcgaagccagtgggcctggcccggggcacgctgcacgtcacacacttcgtaggtgcgcacgctgtgctgttcctcatccaggcc

SEQ ID NO: 339577 - DNA, 619 bp, Homo sapiens; identical to SEQ ID NO: 333206
  chr7:100823171-100823790
  hypo

SEQ ID NO: 339578 - DNA, 74 bp, Homo sapiens
  chr7:100838061-100838135
  hypo
gtgagccaccgcgcccagcctcagctgtgttcttaactctatttttccttcactggggatggtaccatttcccc

SEQ ID NO: 339579 - DNA, 201 bp, Homo sapiens
  chr7:100849441-100849642
  hypo
cgcggaacatgaactcaggaagtggggagacagagagacccatcccccaactcccaggacgggggccaggccccctaaaaaggcacaatggcagggcaggtttggcagagtggttgagtgtcaggggtcgacaaaggacaccatgatgtagcgtgtgccccaggtcgttggcagcccctcgtggtagtgggtgaggcggcc

SEQ ID NO: 339580 - DNA, 484 bp, Homo sapiens; identical to SEQ ID NO: 333209
  chr7:101460545-101461029
  hypo

SEQ ID NO: 339581 - DNA, 420 bp, Homo sapiens
  chr7:101475674-101476094
  hypo
cgacatggcacatccagcgagcccactgtgtccccagcacctgcggtgcagggggctggcaccttcaggggcgggcttcgtgcagacgtccacccagtcagtccccacaggtttatcaaacacaagtggggcgacaggacccacacttcggcgttggacgtgactcacgcggggagttggcttggagttcctttattcatccctatttgctttctgtctgtaatcctttgtaattccctggtttcatgatgtaattctaatggaaataaacccgaacctttcaaaattatgtaattaattgcattcagcttcaatgacaatgactaattatagtgatacctggtggcaaggcaggtacctactgctggggggctcctgtctgcttggtactaggactgccacttctgggcgcgtcggagc

SEQ ID NO: 339582 - DNA, 132 bp, Homo sapiens
  chr7:101536683-101536815
  hypo
cgtgaaagatttgccttgtagacggaaagttctggaaacatcagctccaggctgtggtgtgaagctgtcgggctgatttgcctggtaagaagcgcgtttggggcacggagggtcaccttgccccctgcgagc

SEQ ID NO: 339583 - DNA, 330 bp, Homo sapiens
  chr7:101566736-101567066
  hypo
cgtcagtcggcccagtcctactccagaacgcttcttgggtgtctgtctgcaggactttgctcagttaatttttgtctcctctaaaacagaccccgttgctctgggaggagagccgagctgcggctcaggggccgtcactggtcatttttgccctgatgtatttttgcctctacatttcttgatctctggaacgttaatcccaacgatgcctggtctgcggtgctcacagtctgtgtctgtgctttctacacctgtcctgctcagatgcacatgatgtcacacccaggtctccatcctggctcttgttggctgcggcggcagccctgactg

SEQ ID NO: 339584 - DNA, 477 bp, Homo sapiens
  chr7:101603073-101603550
  hypo
cggaggatttcaccgcgtacatattctctgtttggacatggtacaacctgtggacccttttaaacatagttacatgtttgactctttatagggtaataactcgattaattttgcaaggctttttagaataccattgttctcttgaaaagaacaggtttgctgttttaacaagactttaatgccatcgagatgcctcacattggcacggttgcgtaagaatcgcacggtcccatgaaatgaaattgagagagctttttccggcgcctggttggttggggcggcctccgttcggtgcttttttcatcctcgacccagtgaccaactgtgtttgccctgatgtttctttcaattccaccattccgaaatgtctccggaatctgtcgttttagcttttgcagcaaggttcgttgtgtttgtcttgcccgcttcaggtttctctaatgagattcacgtgtaaaggaggattggcaattaatc

SEQ ID NO: 339585 - DNA, 288 bp, Homo sapiens
  chr7:101616410-101616698
  hypo
cggtatccatcagagcgtgattggggtttcagcagagccaggcctgcttttcctggcagaggctgggcccctttagatttttcttgtagattttgcttgagcctcccagcccttccttgctcagcacctgtgacccactgggtcacagtgacccacatcccatggctctgaccgcagctggactcatctcacactcacgttcatcacggctcccagaaggcacgtgtttttaatgagaggctcatttccaccactgccccccagccctccgcagcaagccagtgcaac

SEQ ID NO: 339586 - DNA, 468 bp, Homo sapiens
  chr7:101627660-101628128
  hypo
cgtgggacaatgtagataaaaacctcgatatacagcctagtacacaaaggacggtgtaaatattctcttccgtgcttcgtagatttcatttttgaacgctcagattgttctccggcaaaaaaaaaaaaaaaaaaaagtgcttgcagtgagaacctgccctgcactctcaggcgagctgttgggtgcaagtcctgcaggactgagctctgaaggccacccacaccctgggttgtgcttggatgatggcatccctcctggcacaagcgcagatgggcagtcgggagggaacatcagcctgggaaaactagatgtcagtgaaaaatgctggaggtggctggcgttcgcaaaactcagtcgtaaaaaacagcacgttctcagtacaaaatgagcactgttaaaaataaaccgcgcaagaagaaatatatgaatacgagggcatggcaaacagttttgcaaggtattaagatc

SEQ ID NO: 339587 - DNA, 429 bp, Homo sapiens
  chr7:101649223-101649652
  hypo
cgaggagcgagcggccgcgtggatgaggttggccagagaaactggtttgttttggaagccgatggaagatgcgcttggaaggctaaggctgccgaggttgaagtccgtcattctcagtgcagaccctagggaggaagtagcaggaccccagtggggctgcaggcattcagaaagagagctgcctggggtttcccttcagaacctccctccttttaacccgggagtaaagagaaaaagacccgcggggtccactggctcggaagtcggtctctttcagtttggagcctccagttggaaacctgccttttaatggccaggctgatggtctagttactctttgaacagggaagcctcgtcaggctctctgctgaccacgcctcagtgctccctcgaaggacaactctggaatgccagtttttatctcatctc

SEQ ID NO: 339588 - DNA, 412 bp, Homo sapiens
  chr7:101652279-101652691
  hypo
cggccccgcgtgctccagcaggtctgcatgattaacctgaattgcagtgttcagaggctcggcctgccagccacagcggttccagatgaaatgcagcttagaaggcagcatggtgtagtagctttggcgccagccgcacccagagtttggattgtagccagatggcctcaggtgcaatgtataacctctgggaattccagatttcctatttacacgacagggatgattccatacctgaagggctgtttggaagcatctagaagcaagcacagtggagtggctgtcatgacgctgaccgcacaaatgatggtgttaggatccctccacggatgtggccaggtgacacccctcacctaggccgcacagcaccctaatgtacacactgaagaaaggctgcgtggggctgcagagc

SEQ ID NO: 339589 - DNA, 120 bp, Homo sapiens
  chr7:102782154-102782274
  hypo
tgcccatatgcctgcccttccggcaggccaaggtgtttttccggcatcaagcgggggaatggaccatcacaggcttgcggatgatcagcccatctttgatcagcttccggatctgctgac

SEQ ID NO: 339590 - DNA, 1160 bp, Homo sapiens; identical to SEQ ID NO: 333210
  chr7:103085750-103086910
  hypo

SEQ ID NO: 339591 - DNA, 975 bp, Homo sapiens; identical to SEQ ID NO: 333211
  chr7:103629365-103630340
  hypo

SEQ ID NO: 339592 - DNA, 63 bp, Homo sapiens
  chr7:104917805-104917868
  hypo
agccactgcgcccggcccaacttggtatttttaagagacttctcgctgaaatgcaaaaggccc

SEQ ID NO: 339593 - DNA, 465 bp, Homo sapiens
  chr7:105254063-105254528
  hypo
cgtgaggactcagtgaggtaataaccgtaaagtgccgagaacagtgtctagcacatagtgagcgtggtatcaagtacttgttcagtaaagtgctctcaaagcagagggtgaaaactgccttcggggaaaacgagaacaggaatcaagcttgtgttacctgtcggagccgcccggctaagcaggggcgctgcccagctccccctgccccccagagccggtgaaggcggtgccaggaggtcccttacctgccgagaggaggtgctgttaacgggatcgggcaccggtgcgagaaggctgggcgggttctttttgtgaacgctattcataccaggcattttagtgattttacaggctttgctactagaactcgagttcttacgcttttttccttctgatttgtcaaaagagaggggcagagaagacacagcattgtgtgaggccagagagaggtcccctgcgtggagc

SEQ ID NO: 339594 - DNA, 313 bp, Homo sapiens
  chr7:105279344-105279657
  hypo
cgagggaatgctagagttaatccaggtgcaggtgggaggctcgattcggcccagacaaacagagccaccaagcagagagggccatcgccttgatcccaagaagcactagcagttcagcatgaaatacagggctttgggcgacccaatggcggccgccttgggtcagctgttcccctggccaccccggtgtggctggatcaggggcgcggcatatcatcctcccctccagggctgcctttcagggcgctgccgccgccgccgccgccgctgccgctgctcctgcatacattaaaacgtagcaggctttagaacc

SEQ ID NO: 339595 - DNA, 75 bp, Homo sapiens
  chr7:105280248-105280323
  hypo
cggcagcaccgccgaacgcagcacaaggctcggggaatagggcgggagcaggcaccgaagggaaggagaggagcc

SEQ ID NO: 339596 - DNA, 257 bp, Homo sapiens
  chr7:106622690-106622947
  hypo
accggaacaatgtgcggcacatattagacactcaatacatgtttgccaaatgaatacgtgaatgattgtagtcttggacaagtcaaatggcccttagggactatttgttcattgattattttcccacctgcgtcacagcatggctgctgtcttggaaagcgtaaactgctcatgagtggcaggtgtgaagaagagaggctgacggagtgaacggtggtgaggcacaggaggaaagttgcaaggtgtgaggcgtggac

SEQ ID NO: 339597 - DNA, 1328 bp, Homo sapiens; identical to SEQ ID NO: 333213
  chr7:106684813-106686141
  hypo

SEQ ID NO: 339598 - DNA, 67 bp, Homo sapiens
  chr7:106802886-106802953
  hypo
gactccgtccataaaacaaacaagcttaaaaattcttcaagtgaaacggcatgaagcaagagacttc

SEQ ID NO: 339599 - DNA, 80 bp, Homo sapiens
  chr7:107148318-107148398
  hypo
cgtatttggttttaagaatattctctcatggggtgggtggagctaagatggctgaacaggaacagctcccagcgtgagcg

SEQ ID NO: 339600 - DNA, 359 bp, Homo sapiens
  chr7:107483576-107483935
  hypo
cgagaaaaagctgaagaccgtgatcagtgaagcacacaaacggggcatggtgatagagaaaaacagtgggcacgcaatctagcttgggaaaatgaggtagcacccctttcaggaggtgatttcagcagagacccgcaggtacaaggacaccacccaggcgaggagccagaaagagcagccgcagcaggtggagcgcatgggcagaggggcggtggtgggacacgcgactgtttgggattgagcgaggccacctaagcagattgcggtgagtgagcgcggaatgacgtcactgacctccaatcaactgtcacatgaaaataccaaaagcggcagtgttcctttagtcatgtggatcacgc

SEQ ID NO: 339601 - DNA, 2444 bp, Homo sapiens; identical to SEQ ID NO: 333217
  chr7:108095249-108097693
  hypo

SEQ ID NO: 339602 - DNA, 1440 bp, Homo sapiens; identical to SEQ ID NO: 333223
  chr7:113726354-113727794
  hypo

SEQ ID NO: 339603 - DNA, 948 bp, Homo sapiens; identical to SEQ ID NO: 333227
  chr7:116962854-116963802
  hypo

SEQ ID NO: 339604 - DNA, 748 bp, Homo sapiens; identical to SEQ ID NO: 333231
  chr7:120496826-120497574
  hypo

SEQ ID NO: 339605 - DNA, 3107 bp, Homo sapiens; identical to SEQ ID NO: 333246
  chr7:126891155-126894262
  hypo

SEQ ID NO: 339606 - DNA, 436 bp, Homo sapiens; identical to SEQ ID NO: 333247
  chr7:126987826-126988262
  hypo

SEQ ID NO: 339607 - DNA, 459 bp, Homo sapiens
  chr7:127371042-127371501
  hypo
cgtatggagctgcctttagcagcatctgcttctccagctggagaggcttgttttagaacgactggcatgcggaagcggtaggtggaggtctgggaggagctgcgtagccagggctccccttccagcctcccgtctcccttaggctctttctggcctgaggcatggtcgccatgggtgggggcactgcccgcccgattctggttggaccccctttcctctacttcataccgcagctgctgtgagcgagtgcactgtgctctgcacaggagaattggcagacagttccatatgctggttttggccattgggacattcaggattattaggccagtttgtactttaagaggagggagacttgacatcgctcaaagcagcttattttatttatttctatttcttataaaggggaaagaagctagcccagcccttagctgttcctttcaacgtagccggctcaac

SEQ ID NO: 339608 - DNA, 174 bp, Homo sapiens
  chr7:127670460-127670634
  hypo
cgggtgttcgagggaataccctgcgggacctcggagaggccccggcgcgtgcacaccaccttgctgaactggttactgcacgagcagacggaggggcagttctggggcccggctgaggcggcagcagcgatggctgcacacagaatccacacttgcgccgtgaggtagacgaac

SEQ ID NO: 339609 - DNA, 657 bp, Homo sapiens; identical to SEQ ID NO: 333249
  chr7:127671336-127671993
  hypo

SEQ ID NO: 339610 - DNA, 67 bp, Homo sapiens
  chr7:127673475-127673542
  hypo
cgtgtgatttctggcaggctcgcttgataaaccctcatcacctgcgcgtgggctgttgcttaagaac

SEQ ID NO: 339611 - DNA, 90 bp, Homo sapiens
  chr7:127679932-127680022
  hypo
cgccccattacctcgctttatggagagctgggtaaatttaaaggcagctataaatatcccactgagtgccagagctatagcacagtcggc

SEQ ID NO: 339612 - DNA, 496 bp, Homo sapiens; identical to SEQ ID NO: 333250
  chr7:127744072-127744568
  hypo

SEQ ID NO: 339613 - DNA, 71 bp, Homo sapiens
  chr7:128097004-128097075
  hypo
cgcgcctggcctaagaaagtaaaagttttaagaagtgttcttgaattagtccaagaagcaacactggctcc

SEQ ID NO: 339614 - DNA, 216 bp, Homo sapiens; identical to SEQ ID NO: 333258
  chr7:128509984-128510200
  hypo

SEQ ID NO: 339615 - DNA, 257 bp, Homo sapiens
  chr7:128528758-128529015
  hypo
cgtgcccgggacctctatcaaaggtgagggagtcggagagtgagagaaaagtatggtggagcggcaggcagtgggagggctgggaggaaagtggaatcggtgagaaaggcaccccgggagccccagcagggggaatggaagggcaggtgtggctctaccctggcaggtcgggcagcagtgcccagaggggatgagtgggtggctgcagcccggaggctcacagggccggcggccgcaggtcacgaagcctccaagac

SEQ ID NO: 339616 - DNA, 188 bp, Homo sapiens
  chr7:128597312-128597500
  hypo
cgaaacaacctggtgaagtctcgcaaggcccagcaaacttgtttacattcctcagcactagaaaagaaaaggtaggttggtccttgactgaggagaaagacagaatatgctgaaaaacaactgcaacattggggcacactgagaaccgtcccaactctgctaggagctctctccatcgtctcctgagc

SEQ ID NO: 339617 - DNA, 56 bp, Homo sapiens
  chr7:128602091-128602147
  hypo
cgtcccagctttcttcaagttgaccaactaaaaaagctagggaattggccaggcgc

SEQ ID NO: 339618 - DNA, 876 bp, Homo sapiens; identical to SEQ ID NO: 333259
  chr7:128828489-128829365
  hypo

SEQ ID NO: 339619 - DNA, 192 bp, Homo sapiens
  chr7:129330248-129330440
  hypo
cgtaagtacaagagcatgatcctggaagacctggagtctgctctggcagaacacgcccctgcgccacaggaggttaactcagaactgccgcctctcaccatcgacggaattccagtctctgtggacaaaatgacccaggtgaggggtgggaggtgaggaggagactcaaagacaagtggcacaggtgtgggc

SEQ ID NO: 339620 - DNA, 1457 bp, Homo sapiens; identical to SEQ ID NO: 333261
  chr7:129421203-129422660
  hypo

SEQ ID NO: 339621 - DNA, 194 bp, Homo sapiens
  chr7:129470923-129471117
  hypo
cgcatgacagggccggctcccccttctcaaagggcttcctcccactcatcccatccctaacagaatcgccgaggtgttcacgggccagagaaagcacaaacatggattcagaagtccaaagaaatgcagttcgttgcgcccaatcagagatagatgatttcattcaacaaggctggaagcccagttgggaagtc

SEQ ID NO: 339622 - DNA, 255 bp, Homo sapiens
  chr7:129483371-129483626
  hypo
cgctgccgcaaatttcacgaaggcacaagctccccatgtctctgggtcaaaatcgcataccatcgctggcagggaagctaaatccatggatcagagatgatcaccctcctccccaaagaatccctcacaagtgcaaagaagcatgctaagcaaaggacgttcagatgtttctgtggctattcacagagacggtgtgcttgttttcatgcagctccaccgcaggaggtaacccgcagacacctgcacacagcgaac

SEQ ID NO: 339623 - DNA, 311 bp, Homo sapiens
  chr7:129780417-129780728
  hypo
cggcggcaggcacatgggcctggatagttactgagaaaattctttcagaagggctttcggggacgtgaagtcacccctggcttcccgggattctgggttgggagcagccgcgcaggggcggtgaagccaggggccagggcggtccgtgctgcgggcggctccccaaggcccggtgcgctgggctacccgcccgctggccatggacttgccgcctgcagcgcacatggctggggaggaagagccgtggatttcagtctgtacacccagacgactaagaagctgccgcccgctagcggggaggggactcggcc

SEQ ID NO: 339624 - DNA, 661 bp, Homo sapiens
  chr7:129782272-129782933
  hypo
cgcccctcctgggggccgaggactgtcaccatgtcactacggcactctccagctgctgaccaaagccctcgctaaccgcagccctgccatactctgggtctttcctctggagcaaggtgaagagactgcagcgaggcgtggaattgggaagctcttctggttttattaaaaactcgttccaccacaggagtcagcctggccactcaggtgtggggcgggtctctcctcatttagctttcacctgcgtgcccagggataggagaaaaacggcacagagggaggttgtagggagtaagcatcctgccctggcaaagctgagtgaacgtgggtagcttcagcccagtgaagcagcagcagggacgcctgtggaaacctgggtggaggtgccttctgaccttggtttgtctgggccagggggcgaatgcttctggcagtggagcttccaggcccggaaaacccaggcctcttctcctcacgtgggccctcaggtgcttgtggactgcccggagacagaacagaactgagggtgggagggcctgcttttgcctgcagaacaccctgaaatgtcccatttacccagctctctccagggcccgcacagtccaaacttctctggcctcaactcctaccactgtgcctttgctcactctcgaccagccac

SEQ ID NO: 339625 - DNA, 174 bp, Homo sapiens
  chr7:129800291-129800465
  hypo
cggaatttaattttgagatggaagccacgtaacaccttctcaaaccgccaggtttgcggcctggcagcttaggttcagatttccgtctgccaagtctttcccgagtcaggggactcctcaggctgtaccgtggatgacactcctccccactaggaacacaaggggcctttcttc

SEQ ID NO: 339626 - DNA, 155 bp, Homo sapiens
  chr7:129846026-129846181
  hypo
ctgagccaggcgcacggatatagaaaataagaccttcctggttattacccagaggagctcaaccccagcggaggcccacagatgcatttcggtggcaggtgaggtggatgcagtgctccccaaggaggcgcatccagcccagccccagctctcgc

SEQ ID NO: 339627 - DNA, 98 bp, Homo sapiens
  chr7:131041484-131041582
  hypo
cgaggattacctggagcttaatggccactagggaatgtatccaaatcgtgtgcgccaaatatgttgccggtggcagatacccaagttaccccgattcc

SEQ ID NO: 339628 - DNA, 987 bp, Homo sapiens; identical to SEQ ID NO: 333269
  chr7:132261071-132262058
  hypo

SEQ ID NO: 339629 - DNA, 220 bp, Homo sapiens
  chr7:132418888-132419108
  hypo
cgcccccacctgagcctataaaaaccggataccctagcaaggcagagacagaagctgttggacggtgagaggaacacgttggcggaagaagacaagcagctggatatcgaggggacatcgaggggagcatgctggcagaagaacacaccaacagagggacacccgcactctggctggtctcacaacccgcaggacaaggcagagtttggctggggcaatc

SEQ ID NO: 339630 - DNA, 58 bp, Homo sapiens
  chr7:132527738-132527796
  hypo
cgagtcctgcctgcagcaatgattactgtagtgttctgatggtacatagatttctttc

SEQ ID NO: 339631 - DNA, 141 bp, Homo sapiens
  chr7:133630779-133630920
  hypo
cgtggtaattcctctctcgcttcagtatttacaagtttcaaatatttgttgactgttatcagacagttcctcctcagcctaccttacatgtttagtttctctaatcacctttctatggttagactttccgtgcccttcatc

SEQ ID NO: 339632 - DNA, 1138 bp, Homo sapiens; identical to SEQ ID NO: 333270
  chr7:134142980-134144118
  hypo

SEQ ID NO: 339633 - DNA, 163 bp, Homo sapiens
  chr7:134613459-134613622
  hypo
cgtggcaagtggcacgctcaagaggttgtctttgtaatgttgcagaatcgcctaccagaggaatgacgatgatgaagaggaggcagcccgggaacggcgccgccgagcccgacaggaacggctgcggcagaagcaggaggaagaatccttgggacaggtgacc

SEQ ID NO: 339634 - DNA, 128 bp, Homo sapiens
  chr7:134862682-134862810
  hypo
cgtgaactcggcagtgggcagaaggaagccatatgtgcgctccccactcctgtcacccggcgacaagtaagggagtttttaggggcagcaggcttttgctgtacttcaatgccaaacctttcactcac

SEQ ID NO: 339635 - DNA, 398 bp, Homo sapiens
  chr7:134880754-134881152
  hypo
cgactcccatgactctactgccatgactgtggccctcgtccaagcccccattctccgccatctcctgctggccacacctccacgtgtactgcctgaaaatctgagcttcccagggtttccttggccccaggcccaacccacctgcagtgcatgatggatgagtggtgttccccgtactcctcctgtcccagcacaataaagggctgctcggggcggactcctccaccctcagggcctgccgaggatgcccgagtcagtggctccactggctccgtgtggagctctgggcagggctcagcctctgggccactggcttctggtttcttctctgcacactgtcacaagcagggtggggacaagtcagccaggaaagggtcccccacaccagggtgtacacc

SEQ ID NO: 339636 - DNA, 177 bp, Homo sapiens
  chr7:134898284-134898461
  hypo
cgacagagcgagactccgtctcaaaaaaaaaaaaatggtgacaataacacccaccttgcacagtagtaatgaagatttaataagacagtgtatgtaaaacgcttagcacagtgaatggcctattggtaaaatgcatggagtgttcccttctccttccctcgaatggtatgacttttc

SEQ ID NO: 339637 - DNA, 474 bp, Homo sapiens
  chr7:134918319-134918793
  hypo
cgagctgattactgacgcgagggtcccctccctgacccctcgcgaccctgcgaggtgagtcagccccgcccctccctcttctctctcctcccttttctgtcgccttcggacaacttgtaacactgtttcttccactgcccacacgcccattggcccgtcaccacgcatccccattggctgtggcggccagggacagggccgcgattggtccccacccctgtaacgaggtgccaggtctgttttctgacccagacaggaaccgcgatccccactccggcgcacgaagccgggtgactgctgtcccgggagtggggacgtcgcgtgcaccgttggcgagtaagtatcctttgaacgctcctctccagaaaggtgcccttgggcatatgagtgtttgtgtagacttgaaagaattcagtgcagcggagcctaacaggtgaacttttagcgcggggttcacaggagccttttgtatcc

SEQ ID NO: 339638 - DNA, 236 bp, Homo sapiens; identical to SEQ ID NO: 258309
  chr7:135412148-135412384
  hypo

SEQ ID NO: 339639 - DNA, 165 bp, Homo sapiens
  chr7:135611103-135611268
  hypo
cgtagttgagtttgggaaatgcagatctccaagaaatgtggagcaacttagatgagcaatgaaaggatcagaggtttaaccacgactccattttcttcaagccccctgaagatcctgacgatctgggatgtgctggctacaccctgctccccgtcaaccaggagc

SEQ ID NO: 339640 - DNA, 151 bp, Homo sapiens
  chr7:137564632-137564783
  hypo
cggcctgagaatatgaacgagagccctcgcctgccagtgctgctgcaggagacgagacgatccagcgagggctcccagggggcagagtgggcggagggctgctgtcgggggtgttcacaccagagaccccagtgcgagcaacggaggacac

SEQ ID NO: 339641 - DNA, 293 bp, Homo sapiens
  chr7:138042035-138042328
  hypo
cggccaggtttttttttttaacaaaagaatcaaccgatgcctcacaagaaacaaacgcagcgcctgcttcagtaccagtccaaggagtggtcctgtttacctttttgcccctccctgcctccctgcctgtgtctgctttttttgcaaggaaaaaaaaaatcaagacaaatgaaggtgggagatccgccagctctgtacaaacgcaggcattagaggctggccagagcaggcgggagggcgagaaacaccctactttgcatctcattcatgatatgggttttttttttctttga

SEQ ID NO: 339642 - DNA, 75 bp, Homo sapiens
  chr7:138993466-138993541
  hypo
cggtcaggacttgaaatgtagatgtgggaatcatacaaaaataattcaaccttagaaattcaggtaagaggccgg

SEQ ID NO: 339643 - DNA, 1438 bp, Homo sapiens; identical to SEQ ID NO: 333274
  chr7:139167556-139168994
  hypo

SEQ ID NO: 339644 - DNA, 356 bp, Homo sapiens; identical to SEQ ID NO: 333275
  chr7:139208473-139208829
  hypo

SEQ ID NO: 339645 - DNA, 256 bp, Homo sapiens
  chr7:139257804-139258060
  hypo
cgagggcaggacccgggggcccatgctcacggggacctggtggacgatgctggctgggtaggcagtgtgctgcacggtgtggcgcgcagagccttgcgaggccaccaggtgggccacggtgccggtggagcccagggccgccggcgcagtgtaggtgtagaggtggggctgggtggggaggtgggcagcggcagcggctgcagccagatgcgggtgcacagtgccgtggctggggctgttgtgcgggaaggagtac

SEQ ID NO: 339646 - DNA, 241 bp, Homo sapiens
  chr7:139690720-139690961
  hypo
cgacggtgcaggcacgggggcacagaggcagcaggacattgcaggagcagagacacgaagacaaaagaaacaaatgattccttaagatccatggccaaaacaaattgccgcaattaacacgtgccactgccacgatctatgggctgaaacgtggctggaacgacgcagaagcagaaaccacagagagcgtgcgctccaataaaacggcactaaatggcacggctgtgatggaactcgtttc

SEQ ID NO: 339647 - DNA, 176 bp, Homo sapiens
  chr7:139717431-139717607
  hypo
cgggtgttctgggccagccctgaccacacggacctgcaggttcacggctgaggcccggcagcagcaccggcccttcacgtacctgcccttcggggccggcccacggagctgcctcggggtgcgtctagggctgcttgaggtcaagttgacactgctccacgtgctgcacaagttcc

SEQ ID NO: 339648 - DNA, 854 bp, Homo sapiens; identical to SEQ ID NO: 333276
  chr7:139929854-139930708
  hypo

SEQ ID NO: 339649 - DNA, 171 bp, Homo sapiens
  chr7:140156493-140156664
  hypo
cgaatgcacttgagacagtaggtgtggttgcagttggagaggatcccgaagcggcgctcactggggttggctttctcatagaccacctccatgcagatcccacacaccatgtccttgctgcgctgcacggcaaatgagagctccatgtccttctcatgggcctcaatgcac

SEQ ID NO: 339650 - DNA, 88 bp, Homo sapiens
  chr7:140156968-140157056
  hypo
cggttttccatactgtttgttatttctggtttctacatgaggttaagaccctagttaaaacctgtcggaaaataagggtgacaggcac

SEQ ID NO: 339651 - DNA, 813 bp, Homo sapiens; identical to SEQ ID NO: 333278
  chr7:140340170-140340983
  hypo

SEQ ID NO: 339652 - DNA, 924 bp, Homo sapiens; identical to SEQ ID NO: 333280
  chr7:140772338-140773262
  hypo

SEQ ID NO: 339653 - DNA, 956 bp, Homo sapiens; identical to SEQ ID NO: 333281
  chr7:140773774-140774730
  hypo

SEQ ID NO: 339654 - DNA, 999 bp, Homo sapiens; identical to SEQ ID NO: 333283
  chr7:142985430-142986429
  hypo

SEQ ID NO: 339655 - DNA, 1569 bp, Homo sapiens; identical to SEQ ID NO: 333285
  chr7:145812737-145814306
  hypo

SEQ ID NO: 339656 - DNA, 134 bp, Homo sapiens
  chr7:147354952-147355086
  hypo
cgggtttagaagtttcactgaaaggaaaagaaacttgacttgctgcctcaaattctagtagctgaaattatatgaggtgaagtttccaacgctgtctcttaagatagccgacctggccgggcgcggtggctcac

SEQ ID NO: 339657 - DNA, 669 bp, Homo sapiens; identical to SEQ ID NO: 333286
  chr7:148036392-148037061
  hypo

SEQ ID NO: 339658 - DNA, 202 bp, Homo sapiens
  chr7:148079472-148079674
  hypo
cgcagacagatacggctttgaaacaattgattttctgtggtgtcatagggaaacctgccctcctcaaagttgcgaaaactgtcagggaccctatgaaatggagcgggagtcacaagttttctacccagctctaaaagaggagacaaaactaacactggttcacaatagataacagaacggcttcagcaaagggcaagcaagc

SEQ ID NO: 339659 - DNA, 125 bp, Homo sapiens
  chr7:148448819-148448944
  hypo
cgttacacagtatattacagctgcggctatgtcagataccatcaaaaacaaatggcagagcaaatgtacatattacagtttgtataatttaaaaatgtagaacatggccagacgcggtggctcac

SEQ ID NO: 339660 - DNA, 503 bp, Homo sapiens
  chr7:148480954-148481457
  hypo
cgctggctttgtggctgctcttgataaggtaggtgcgtgagggttgtgacttgcctgtagtatgtatggatggggcgtttgtctctaactatattccgtgtaacgcaggcttgtggtcgcttcataaacaacaacgcggttaccaagatggcccaatcatccagtaaatcccctgagttgctggctcgatactgtgactccttgttgaagaaaaggtattaaatgaccctatgttttcttagtatgcctgtttaaaatctcagcttttatatgaggaattaaaacctacattacattttacatacattaaattggaatttttgtaccttatgagaaaaatgcttaaacataatcgtccttgccgttgaaaatctgcattccctcccactggctgtttttcaaacagaaatgtctcaatgtattgtgggactttggttattctccatccaagcactaaccaggccccaccctgttcgcttctgagatcagacaagatcgggcac

SEQ ID NO: 339661 - DNA, 168 bp, Homo sapiens; identical to SEQ ID NO: 333288
  chr7:148523540-148523708
  hypo

SEQ ID NO: 339662 - DNA, 202 bp, Homo sapiens
  chr7:148851195-148851397
  hypo
cggcgactcctacacctggaaggtcggacagggacagcagagaagaaactagccagctgtgaaaagacagttaccgagcttgggaaccagctggagggcaagtgggccgtgctgggaaccctgctgcaggagtacgggctgctgcagaggcggctggagaacttggagaacctgctgcgcaacaggaacttctggatcctgc

SEQ ID NO: 339663 - DNA, 132 bp, Homo sapiens
  chr7:148884015-148884147
  hypo
gcatttttaatgtttttgtaagaataaggattattgtcatgaaaaaggtcctggaaaacaagtcaggaggccagagttttaaccttgctttcagttttctcattcataatgtgaggataatacctagtttac

SEQ ID NO: 339664 - DNA, 98 bp, Homo sapiens
  chr7:148907697-148907795
  hypo
cgcaggatgcgtcctcccaggtgaagcgtgaggacaccctgtgtgtccggggtcagcggggcctggaggaaagagccatccctacggaatccattacc

SEQ ID NO: 339665 - DNA, 158 bp, Homo sapiens
  chr7:148979109-148979267
  hypo
cgagtgcctgcgcttcttccagcagcgcaagagcctgctgctgcaccagcgcctgcacaccggcaatggccagggctggcccgcctgcccctactgcggcaaggccttccgccggccctcggacctcttccggcaccagcgcatccacaccggtgagc

SEQ ID NO: 339666 - DNA, 1010 bp, Homo sapiens; identical to SEQ ID NO: 333291
  chr7:149411354-149412364
  hypo

SEQ ID NO: 339667 - DNA, 133 bp, Homo sapiens; identical to SEQ ID NO: 258437
  chr7:149418014-149418147
  hypo

SEQ ID NO: 339668 - DNA, 117 bp, Homo sapiens
  chr7:150006604-150006721
  hypo
cgcctgctgtaagacaaaccccagccatgccttcagcacacaaaaacttcagaacaaccaaaccacagcctccagctactcctttaaatcctcctcatggaccttgattcaagtgcc

SEQ ID NO: 339669 - DNA, 112 bp, Homo sapiens
  chr7:150006790-150006902
  hypo
cgggaccccactggaaatcggactgtccaactaatatcacagccacttctagggcccctggagctctggatcaaagctctctggctgactgcttctcagatctcggctttgc

SEQ ID NO: 339670 - DNA, 1534 bp, Homo sapiens; identical to SEQ ID NO: 258447
  chr7:150068715-150070249
  hypo

SEQ ID NO: 339671 - DNA, 247 bp, Homo sapiens
  chr7:150079258-150079505
  hypo
aggctcctgtgtggcgctgggggcctctgagattcccaactggctggaaggagtgatggcttaggaggagtgagtggcagcggggacgctggcagagaggcttgtacagatactgcccgatgcatccggctcaggcttgccgccctgtggtgctcctcccaaactcagggagcaggtatttccgttcacctgcgccttcaagaacctgagctcaaagcgctgcaatgactggccagggactagcagc

SEQ ID NO: 339672 - DNA, 221 bp, Homo sapiens
  chr7:150081214-150081435
  hypo
cctgacccggtgcgcggagggccgggccagggccaggcgtgggaagggggcccctgtgtgtcctgctcccctcagagcccgaggggcagcagagaggaaaggtggtccggtaggggcccgggggcccttgtgcgatagacaaagcggccttccaagacttggtgtgggcactggtgggagatggcgcatctggcccttgatgcctgtcttccagccggggc

SEQ ID NO: 339673 - DNA, 846 bp, Homo sapiens; identical to SEQ ID NO: 333298
  chr7:150671471-150672317
  hypo

SEQ ID NO: 339674 - DNA, 351 bp, Homo sapiens; identical to SEQ ID NO: 333299
  chr7:150676178-150676529
  hypo

SEQ ID NO: 339675 - DNA, 1353 bp, Homo sapiens; identical to SEQ ID NO: 333300
  chr7:150714968-150716321
  hypo

SEQ ID NO: 339676 - DNA, 138 bp, Homo sapiens
  chr7:150753916-150754054
  hypo
cgcctgacagacgtccagtgtcagcccccgcctcccccaagcggccacaccggcaaggagcacccgcctcccgcacacctgacgatgttcttgtgcttcagctccttgagtaggcagatctcccggagggcggaactc

SEQ ID NO: 339677 - DNA, 593 bp, Homo sapiens
  chr7:150758626-150759219
  hypo
cgaggctccgttgtctgcctgggccttcactcccctctttccccagctcattatcactccctccctcatctttgttgctttctctccgggcctgggccttgactcctttctccctcatttttcttgcggcctttcccacctcctctctcctcctccctctactcagcctctcggcccttttcggcccccctcgcctcagtcctctcctgtctccttgttcttctcttttcttcctataaataactctcctctgtgctgtggctgccgctaagggccactctgaggcccttcatactccaggaggatccccagcagcgcagcctgcgcgtggtggctcctgccctcccagggctctcgatggtgatcaggcctctcccccatccaggttatgcctccgcctcgttgccctgaaagccgcagcgacagcgaaaagggctaagattcggccatgagcagcgcccctcggcgccccgccaagggcgcagattctttctgtacggtgagtgtggcccccaggtcgccagcccaaccttccctccctgggcagccttgggtgctccggccaagggtcctcgccaaccaggggtgtgagc

SEQ ID NO: 339678 - DNA, 304 bp, Homo sapiens
  chr7:150773909-150774213
  hypo
cgaagggtagctgtggggagaggagagggcggcaggttacccgcaggctgggagtgaggatgcgccacgggccaggccagggccactcaccggcaggagctggtagcccatcaggcctaggtgccgctccctcagggccctcgagcccagcagcacccggccgtcccggcagaaatgccagcgttcccgcaacaccagcaccaccctgcagggggagggacgtggctcagggcatggcgggcaaggtggccagggctcccccaccctgcctcctttacctctgggcagggtctcgagtagtggc

SEQ ID NO: 339679 - DNA, 571 bp, Homo sapiens
  chr7:150774308-150774879
  hypo
cgcacagcaggaagtctggaggggagcagggccggcggccttagccagggctccgtctccccgggcctgccgcctgccccttgctcacctgtgcagtagcctggaggcacagtcaggtcctggcggtatttctcctcccccagcagctggcgcaacccctcagctactatgtccttgtgactgaggagaaaggacaccagtagcaggaagggcccggcacctcatcctaatctgtcccagtctagtgccaccaccctgggcaaagccctctgctgcttcagggcccagttttatggtggccgagagctccttagctttggcgcttcatggtccctctggcttttccactctgctggtcccaggctggcccctccccttgccccaggctgccccatccacctgtacttgcagcgggcacggtcggtgatgagaggctggggaaagatgggcacttgctgccttcggggaaggcggggaccccggtatcctgggagctccagctccacggccgtgtccagcagggagaggtagcgacgcacaatcagagcatgaggggtgcctgtggggaggc

SEQ ID NO: 339680 - DNA, 960 bp, Homo sapiens; identical to SEQ ID NO: 333303
  chr7:150784079-150785039
  hypo

SEQ ID NO: 339681 - DNA, 456 bp, Homo sapiens
  chr7:150812868-150813324
  hypo
cgtctggggtcttcggcagtggccgaggaggacaggccggagggggagctctcgggtgcggcccaggaaaggaagaggagactcaccagagtcagagggctctgggctaggccagacacctttcctagttccctgtcggggcagcgcgctcgcctccggttgcccctgtgcatgaggttagggactgctgtggacctggtcgtcataactgctctttgacacaaacttgggacagtgcctctgggagccagggagggaagcagtgctgcccagctagagaggggttcccagagctagcccgagcacccatgtggaacctggaggtgacggagatgggggcctggctgtcggagggctctgggtaaagggacttgccagtcaggttctgaggacagactgaagggaagggagcccaggaggcggcctccctgctaaggaggagcttagagaggaggc

SEQ ID NO: 339682 - DNA, 557 bp, Homo sapiens
  chr7:150816833-150817390
  hypo
cggggccccaggacgagggtttgctgccctagtggggcagccctggcaaggtgacagtagatcctgctggcctccaggccaggtgaatgttccccccatatcatctgtaggggctagtggcccctctgctgcccatgagccccggccaggcccccattagcacagggattcccggcacccgcctggtgcccgtcccgcccctgacccggagctgccctcagcagccctctttgtccttaggccacgaatggcggcggcagcgccttcagcgactactcgtcctcagtcccctccacccccagcatcagccagcgggagctgcgcatcgagaccatcgctgcctcctccacccccacacccatccgaaagcagtccaagcggcgctccaacatcttcacggtacgtgactgccctcctcccccgcccagctgcctttgctgcacaggcagggctgagcgccgagctcccagccaggaggggcgtgggcagccccaagtcaggaagacggtacctgcagtctctccctcagatacacacggctcccgagggtccttgcc

SEQ ID NO: 339683 - DNA, 368 bp, Homo sapiens
  chr7:150889159-150889527
  hypo
aggaattagagcctcggaggacatagaccacctgctcgcgtccacagagccaaagccaggacccaggccactgggctgcttgtccagcagcccttccagaagaccgggctgtgggggtgagggctcgcagcagcaatggggtatggggcgggaggtgggcaggctttggtaggcgcagccgtccccacatccccaggcctcaccatagcgggatgcgtagtcaggccggggcatgaagaggatccgctcgtagacccggcacagaccccgcatctcggccagctgtggccgggaggttgtcccaatcagcatcacacggtctccgggagtcagcagccgcaaggccttggtgaggtccttctttatcc

SEQ ID NO: 339684 - DNA, 370 bp, Homo sapiens; identical to SEQ ID NO: 333305
  chr7:151038589-151038959
  hypo

SEQ ID NO: 339685 - DNA, 977 bp, Homo sapiens; identical to SEQ ID NO: 333306
  chr7:151106536-151107513
  hypo

SEQ ID NO: 339686 - DNA, 271 bp, Homo sapiens
  chr7:151165408-151165679
  hypo
cggtcagctcagactcagcaggccaccatggcgccactgtacttcaactcccttccctaccaactgtcgctggcacggtgcccgcggccacaccgtaaacgctgcccagggaaaacacacaccgctcactgctgacctcacacccatgaccaggaacctggcgcagacacttggtgctgcctagccacccgcctgcatccctggatctgggcactccccagagaaagcatccacgccttgtcccttctcctcaaatgttccccgtgcttac

SEQ ID NO: 339687 - DNA, 211 bp, Homo sapiens
  chr7:151411325-151411536
  hypo
cggcctaacttacgtttgacttctaagccttgaggaaaatgtgtgccaaggtatgggggaggcggcagggcttccgagagagccgtcctcccatcccagccctgccatcctcccacacgcacgctgccgtcctcccatccgcgccccgccgtgcctaggtggagaggcggcagggcttcccggagagccgtcctcccatccgcgacccgcc

SEQ ID NO: 339688 - DNA, 137 bp, Homo sapiens
  chr7:151506379-151506516
  hypo
cgagacgggtgcagaatcagcagcggggatcatccagagactctcgcagtccacggcaggtgtcggagtgggcctcattccagagttgtggtggccgctccacctggcgagcttcgaggggactccggcaggcgctc

SEQ ID NO: 339689 - DNA, 961 bp, Homo sapiens; identical to SEQ ID NO: 285541
  chr7:151572578-151573539
  hypo

SEQ ID NO: 339690 - DNA, 789 bp, Homo sapiens; identical to SEQ ID NO: 333309
  chr7:151722451-151723240
  hypo

SEQ ID NO: 339691 - DNA, 195 bp, Homo sapiens
  chr7:151791364-151791559
  hypo
cgacctggacagttttgctttttgtttatttcaacttcagtgaagtgactcagccacttaagaatgtgcccgtcaaggggtctgggccccacggaccatctccaaaaaaattctatccccgtttcactcgaggcccaagtcgagtgctcgagccacagttcaaagcaaacaaaattgacgatgtgatagacagtc

SEQ ID NO: 339692 - DNA, 154 bp, Homo sapiens
  chr7:151802406-151802560
  hypo
cgtgaggggttgattcgagggagaatgattggcgcggcccacgcgacaggtatcacttctcgttagctttgctctacaggtgttggatgacaagggctcgagcctcagcgcctgtcctgattctgcaaagtctatgaagagtagtgtttcaaac

SEQ ID NO: 339693 - DNA, 146 bp, Homo sapiens
  chr7:152152776-152152922
  hypo
cggtttattgttcgaacaatttgaacatttattaagtgccaacccttgtaaagaattacccagcaaccagaattcaacttggtcagcaggcaaggagtctcgatcagacaaactcgccattttgaaatatgaaaaattatgccggg

SEQ ID NO: 339694 - DNA, 313 bp, Homo sapiens
  chr7:152273159-152273472
  hypo
cgtacttatgttcagctgcaatttactcagcagagtgattaatccattaattattccattcagtgaactattcgaaagcatttgcgagtgtttaccatatgctctcttattgttggagggtcggactattcgaaagcatttgcgagtgtttaccatacgccctcgtatcgttggagggtcggagcagccgggagttgggaggcctgtgatgaaagagatctgaacagctgcagagacacgtttgcaagtgggcctggggcccacctcaggactgggggccggtcgggcaccctgcctctcacccccaaacaac

SEQ ID NO: 339695 - DNA, 54 bp, Homo sapiens
  chr7:152371372-152371426
  hypo
cggaccttaacctgggtttcaaataatcatttaaatataaggttttggccgggc

SEQ ID NO: 339696 - DNA, 193 bp, Homo sapiens
  chr7:152562704-152562897
  hypo
cgcagagtcggggccaccgcacctccagaccagaccgcagggttggggccaccgcacctccagaccagatcacagagtcggggccactgcacctccagaccagaccgcagggtcggggccaccgcacctccagaccagaactcagagtcggtgctaccgcagagtcagggccactgcatctccagaccagatc

SEQ ID NO: 339697 - DNA, 219 bp, Homo sapiens
  chr7:152569939-152570158
  hypo
cggtggctgcgcaggagggttggtcgagcggccgcgcaggagggatggtggagtggccgcgcaggatgcctgctctgacctgcctgactatctgtctatgctgtgacctgtctgggtctgtgctgtgaccgcctggaagccgtgtggactgtgtctcagagtcacccctttgctggggagagaggagggagtgttatccactccttcggcccccccgcc

SEQ ID NO: 339698 - DNA, 303 bp, Homo sapiens
  chr7:154540210-154540513
  hypo
cgcggcactagacaacgccaagagaatggcttagtaataatgagataataacttaatgaaaaacccctgcgagccctgcggggcggggagggagacctggtgtgtggtgctggacgcttcctgagcacctccctgcacagcctgcctctggagtttctcgcgcatggcggtaagcagggccaggcctcactctttccccttcacagtggagggtgtgagcagggcttcgatgccttttgctcacggtgtccagcagtggatgcgctggttggaacggacgtgcctataaccatgactcccacc

SEQ ID NO: 339699 - DNA, 478 bp, Homo sapiens
  chr7:154541944-154542422
  hypo
cgtagatgaacaccctcgctctccagaagacaagaagcgggagtcgcagcctattgaagtgtagacatgatgtctacacagccaccctgtgtcctgcaagagcccaggctcagagcgtgtgcaccgtgagggccgcctgtgccggagcaggccgcttctccgtagcaaccacatcccacagtgtggaggttcccagcggcgggtagtgcggaaaacagggaaggcaggaaagaaacttagccaggcactgagtgcgtgggaaggcaaaacactcttttctcctcccacggcgggggcgctccctgggcgatgctcacggagagtgggagggcgtcccgcaccgggcagagctgaagggtggcgggggtcggcttcctcctctctgcctcttcccttccgccacgcttcctacccacaccagccagtctccagtaacagatatagaatgccttcatttggaacacggagagacaagcgt

SEQ ID NO: 339700 - DNA, 172 bp, Homo sapiens
  chr7:155079954-155080126
  hypo
cggggggaccgtggcacccccggcctcagccagaccgtccgctgcacacctgcatggcactgactgaacatgacgtgtccgatcaacacggggccatgcctccgagaacgcgactgcagctctccctgcacctctgtcccatcttcagctacagaaccggagctccatacgc

SEQ ID NO: 339701 - DNA, 1423 bp, Homo sapiens; identical to SEQ ID NO: 333313
  chr7:155166425-155167848
  hypo

SEQ ID NO: 339702 - DNA, 1864 bp, Homo sapiens; identical to SEQ ID NO: 333316
  chr7:155246273-155248137
  hypo

SEQ ID NO: 339703 - DNA, 996 bp, Homo sapiens; identical to SEQ ID NO: 333317
  chr7:155249624-155250620
  hypo

SEQ ID NO: 339704 - DNA, 1884 bp, Homo sapiens; identical to SEQ ID NO: 333321
  chr7:155258815-155260699
  hypo

SEQ ID NO: 339705 - DNA, 139 bp, Homo sapiens
  chr7:155502704-155502843
  hypo
cgtcttctttaccctcgttcatctcacactgctgtgaatgatcattttcctaccaaagagatcattcgtgatcccttattatacgtgttgtctctgtggcatagtaatggatcatttacttggaatttagaagccctcc

SEQ ID NO: 339706 - DNA, 180 bp, Homo sapiens; identical to SEQ ID NO: 333325
  chr7:155580730-155580910
  hypo

SEQ ID NO: 339707 - DNA, 1084 bp, Homo sapiens
  chr7:155581242-155582326
  hypo
cgaagtaacaaagcgacaatcggccttggtcctgcgagggcagggagggcagggagggcagggagggcagggagggcagggagggcagggtccactgcccagccggggatgcaaggacggccatggggctccagcacagggaccgggccccgcgggctttgagtgacgcggtaggccaggacgagccccatccacacttggacaatgagcaaccgcagccggccgcgcagcctgggggccgtctccctctccagcccccgtgtcctctggtccacgactggctcttgccctcattccgttggggctgagtcacagccagggaaagggctgaggcagagcaacgctgggtgaaccccgtcttcctgaggccacgtttgcaccgggaagagaacacagtgaaccccctgagcaccaacacgctcccacaccccccacgagcagcccagccctggggaggagcccgtccttctccctgcttgccacaccggccacgtccgtaaccctgcccagcatcccacccaggttgtgtgggtccccacgtggtcaccagcgtcctttcaggacaagagaaaactgagcaggaccagggcttccgcctgccgcattcatctgccccccttcggctgtgccaggtgccttcccatgtggcctcttgctcctcggcatccctgggggagggaaaggcaagtgtctccctgtttcatgcagccgcgcaggcctaaacgcagcctctcctgttccaacaggcctttctggggcctgtcctgcttgccttgcggcagccaagggatataatgggtgccggccagcctcccctcccatgaccccgaggaagtccctccagcccctccctgagtctgctcctggcagaatccctctgtaagtggatgcggggtccagagatgccaccggctgggccagaccccatgaggagaagctgtgccggagcctgcaggactgggtccaggtcagggctctcacacccgctgggcggcctttgcttcccggtgctggctgtgcccagacgcctgggcttgtgcgtgtttaacccgcccagagactggtgctgccgcatttgttcatc

SEQ ID NO: 339708 - DNA, 731 bp, Homo sapiens
  chr7:155623733-155624464
  hypo
cgaagcgcctctgcgttccgggcaccaagggagagtgagttctgaccgggttgtcggggggtcagggactctgccctcagccactttggctgctggttctgccgagccactgcccgaacagcaccccggatgcacccgaggaggtgaggctctgcggaccgggtgccctgtgagtgacaggggagaggcccctgaggtttgcacagtgcctgtcacttctcaaagcacctccttcgttctggcaatttagtgagggaggctgggcagccggggctgtccattttatagaggaggacaccaagcctcagggagggagagggaagccggtggagccgggcagaagcctgtggagctgggtagaggccggcgggtttcccagcagcggtcttctgcatcttctggctgagtcctccgctgtcaggagaccccggcctgggccaggaggtccgattctgggatgcgaacgtggtggggctgttgccatagataccgatgtggtcaccagcctgaaacccttgagccacggagagatcagacggtggtccccactcctcagcctggagcctggcagagacgctcaaggaagagggtgggctgaccgcgcacgcctctcctttcttcatatcctgcgcggctcgggcgctgtgcaggaggcctgtgctcagcgaggagagagacagagagtgcagtgggaggagcgcggggtcggggggctctgcttcccacggtgc

SEQ ID NO: 339709 - DNA, 593 bp, Homo sapiens
  chr7:155679115-155679708
  hypo
cgtgtgcagacgtggagagggcgtggggtgagggacgcccacccctgtgggtgagaaaatgggcaagcatgcgcagacgtggagagggtgtgggggagcagaatgtggttttacgggtgcgatcacagggaggacagactggaatggaaggcttagcccggaggtggtcctgttcacctgagcgagagggcgtctgctggctcctttccctgacaaggccaactcggagggcaagctgggagcctggggtggggctggcggggtgaaggggctcagagggacgcctgcgttcttcatgatcttcccatccaagacttgctgcacgtcggcttcttccaggctccacatcacgggcagacccatgcagctccgctgagggcgtgcgcctggtatgggtgccctgccgccacgtacagctgagggaggccgtgggagcctccctggactcatctctgcctctgtttcttccccgtgagacatgggagctgagacctgccgactggctgtgctcctgcagggattggaaagggcttaacccagattggcagagagcgctgagtgtgactccagcaccccgggcgtcctgattttgc

SEQ ID NO: 339710 - DNA, 165 bp, Homo sapiens
  chr7:155898220-155898385
  hypo
ggaaacctgaataagacctgcggggccacatggaggcgaggggaagtcagaagcagtgagggtggagccccgcggagcctgtaagtccctgtgagggctccggactttgtgccgttctccgcacccctcaggcccggtggagtgcgtgacccctacgccgggccc

SEQ ID NO: 339711 - DNA, 267 bp, Homo sapiens
  chr7:155913343-155913610
  hypo
ggagggagatacagagatggcgaggcgcttcttcacgtgtcccacctgctctgatctgctccccgggagatacagagatggcgaggcgcttcttcacgtgtcccacctgctctgatctgctccccgggagatgcagagatggcgaggcgcttcttcacgtgtcccacttgcactgttctgctccccggctgctcactctccccctgatgtgacgcgttgtcagacatgaccaaatgccacggttacttgggagacaacagcagaaac

SEQ ID NO: 339712 - DNA, 288 bp, Homo sapiens
  chr7:155916075-155916363
  hypo
cgccatctccctccgcctcccaggagtggtactgtggaaactgacggcctcaggagccatggcaaccaacctccgggtcacatccatccagatgtctcccacagggaaacgggtgtcacacggagcaccaggagagcatcaggtccctgtccgccgagctcacacgcagctgttgcgtggagaggggtccgcgtgttgcccgccgagctcacacgcagccgttgcgtggagaggggtccgcgtgttgtcctccgagctcacacgcagccgttgctcgtcagcgctgcc

SEQ ID NO: 339713 - DNA, 265 bp, Homo sapiens
  chr7:156347383-156347648
  hypo
cgcgggacgggtaaatggaaagacccttcagcgccaaacactgctgaggaggtagagcaggtggaacacgcatatgccacaggcgggaaagaacaatgacaaacactttgcaaaatggatgggcaggtttgtttggtttttcatttgtttgttttaacgtgcccttactatgcagcctagcaattctactcttgggtatttacctaaaacaagaaaaaatatccacacaaatacttgtcgcccaagtgttcataacgcttcattc

SEQ ID NO: 339714 - DNA, 103 bp, Homo sapiens
  chr7:156435920-156436023
  hypo
cgcagcaaagcggtagagttcaattggaactcaagttggtctgtccccatattctgtacttctgtgttctggacagactgaagttagccagtgttcctcttgc

SEQ ID NO: 339715 - DNA, 31 bp, Homo sapiens
  chr7:156734692-156734723
  hypo
gcgaatgggtgacgaggcgcgattgggtgac

SEQ ID NO: 339716 - DNA, 149 bp, Homo sapiens
  chr7:156744700-156744849
  hypo
gttttgatttttatcatataaacttagatattacttttaaacaagtttgaaattgtttttaggacactttccctccaaaattagcggtttgtttaatttaggttcttgtatgctactgtgcctgcagtaagttaaggccgagcaaaagc

SEQ ID NO: 339717 - DNA, 169 bp, Homo sapiens
  chr7:156782599-156782768
  hypo
cgagggctcctcgtccactgtggcgagtgcagaggacgcggcctgggcagtgcctgcggggagaccgtgctggcctgggcttcccagtgagcggggctcctcaggcttcctgggccctcgtcctcccggactggtggcactgtgtgcctgttggggggtggcaggcagc

SEQ ID NO: 339718 - DNA, 1332 bp, Homo sapiens; identical to SEQ ID NO: 333334
  chr7:156801418-156802750
  hypo

SEQ ID NO: 339719 - DNA, 2231 bp, Homo sapiens; identical to SEQ ID NO: 333338
  chr7:156812847-156815078
  hypo

SEQ ID NO: 339720 - DNA, 695 bp, Homo sapiens
  chr7:156832501-156833196
  hypo
cgcgggaccatcttataaggacacagtcacatcgaattgggggcccatcctactcctgcacagctaatcactaaccacatcttgttccgcagtaaagtcccattccgagacactggggctaggacttccacctgtctcttggacacatttcaacccgcagcaccaccactgaggaaacgcaagtgtgctgaagacgcaaacctaacacgcaggaggcaggaaccgtctgaggcagcccccggcaaacgtcaggctgtgtggctcagacccggcacagcctccgcgatgggagctccggggggggctggctggggacaaggacaagcggacttgggagcgacggggtttgggcatctgggagacgggaactccttcccgggaggaagaccgtgagggaggcgtggaagtggatgtgagccggtgtgcactgggctgcagtgcgcgctgctgggccggtccgggagcccacactgttgggtgctggctgctagaagcccacagcaggggcccgaggcccaccccctagcctcagggcacagcttcccctgtccagccaaggctgccttacccaagccctggtcctgcctgttccgtgccttctcccgcaaggcttcttcaacagcacaccgcgaaaacgtgcaggcatcgcccccagcacaagggtcgctgctagggaagctgcccttcgacagggc

SEQ ID NO: 339721 - DNA, 131 bp, Homo sapiens
  chr7:156974878-156975009
  hypo
cggcgcttgcagatgcgcagaccgttttcccttacgagccctttctgaatgcactgttgttaatagagagtagatgttcaagaaagagtggtggagcaccctggcttttctatttcgttttaactgttggc

SEQ ID NO: 339722 - DNA, 458 bp, Homo sapiens
  chr7:157052694-157053152
  hypo
cgacgccgttatgttctggaagtaatgaataataaagacgtataaacttaaacgtgttagtgaataccatcactcaatgatatcagtagaaatgataatcttccaaattgttggagagaaaaaataaccatgcaaataaaacaggacaaacagaaccaactctgtttaccagatatggggggtgggggtgggaagtaacattcagaatcgtaaaatagaaaacatagaatgagagaagcctgaatgttacaacagtgagtgcggagaaactgacgtaatgaaagaaaaagactttgagacagggccaggaaaacgctgccgcctacaagcaacacacctaaacggagtgacccagaagggtttagtggcacgtccaggttcgtgtgtgaagaaatagatgggtccccttcagagtttgaagcatgacccatgtgaccagataggagaatctctcgagc

SEQ ID NO: 339723 - DNA, 350 bp, Homo sapiens
  chr7:157085947-157086297
  hypo
agcctctgctcccacggtctcaggccctccccgccctgatgagtctccgctcccaacacaagggccacgtggtctggagggaccttttgcccagctgcaggggccatctcagggagaccccgccttggaggacttgttctccggatctccagacgtttaggctgaaagtgcagagatttagaagtcggacagggagttggggagcagcgctgtgcacgttccactcacctgaacggcatcgtctgagtcgcgtttgataaaattcgtaggaggccactggtctggcctgagctcctgcaggaggcctggcagaacagaccaaaacgcagccactcgtgctagagctccac

SEQ ID NO: 339724 - DNA, 144 bp, Homo sapiens
  chr7:157100035-157100179
  hypo
cgggcgcggcggctcatgcctgtaatcccagcactttgggaggccccgccactctaactaggtgaactctccctcgcccgaggctccaaccagcttccacctcctggtttgtccactccgcttcacggccacacctctgactgc

SEQ ID NO: 339725 - DNA, 53 bp, Homo sapiens
  chr7:157128236-157128289
  hypo
cgatcacgaattcataagcgttgttagttcagaaggtggctgagcaggccccc

SEQ ID NO: 339726 - DNA, 226 bp, Homo sapiens; identical to SEQ ID NO: 333340
  chr7:157129089-157129315
  hypo

SEQ ID NO: 339727 - DNA, 146 bp, Homo sapiens
  chr7:157151185-157151331
  hypo
cgtgatttgcccatccccagcagcctcatcactgaccacctgtttttacttgcaggacccattccaacaatctcgtaaaacatggtggattactatgaagttctaggcgtgcagagacatgcctcacccgaggatattaaaaaggc

SEQ ID NO: 339728 - DNA, 649 bp, Homo sapiens
  chr7:157202475-157203124
  hypo
gctgtgcctgcaggtgtggccgacgacgatgccctcgctgaggagcgcatgcggagaggccagaacgccctgccagcccagcctgccggcctccgcccgccgaagccgccccggcctgcctcgctgctgagacacgcgcctcactgtctctctgaggaggagggcgagcaggaccgacctcgggcacccgggccctgggaccccctcgcgtccgcagcaggtgtgcaaagggaggcagccgtggagcaggcgcagagtgagacttctctgggtgccagaggacagcgaggacacaaaccgcgcctgggctgctgtgttctgacctgagcgggcgtgggcggtcgggcggggcgggaggaggtagcctcgctctgctcctctcccgctcgcggcgccccacgccacggtggctccgggccccccaccgttaaaacggggtccgcgtgtcctgtacgcagcgtgttgctccgcaaaggatgacagagctgccacggcagtgcgaggtgctgcttttaccgtagacgtgccttttcgtagctttcagcgtagagcttgaggcctgtggcttaggccgggtggtctcgtgctggtggggtctgcgtttgcccctgcccctccgtcagcttcaccttctcgtgccttcttctgc

SEQ ID NO: 339729 - DNA, 513 bp, Homo sapiens
  chr7:157262486-157262999
  hypo
cggcggcgcctaattccaccttgtgtgccagtgcagttcatagcccagcagtcacccggggtggggtcaactctggaaggcccctgtgtgttgactccagggtgaacccgggactcctgagtgggcgcccaggcccctctagtgctggccgcctctgcttccctctccaggcccacctgccggccaccacagtggcccccagcgcccagcccaggtcccccacgccggcttctctcggcccaggtcactctcttcacactgtcatctgccagtcacttgcacactctgattcccaaggcgactctgctgcaggcacacgccctcagcaagacctggctgagtgccgtctgtgcccgtggatgcacgcgcagctctcctggggacactggccctggctccactccctggacagatctgtgcccggcactgggtctgctccctgcacagacccacacctggtgctggcgccactccccggacacacctgcccctggcgctggcctgggttgggtg

SEQ ID NO: 339730 - DNA, 657 bp, Homo sapiens
  chr7:157263029-157263686
  hypo
ggtgtgtccgtgtgtccggcactggcctgcgttgggtgtgtccgtgtgtccggcgctggcctgggttgggtgtgtccgtgtgtccggcgctggcctgggttgggtgtgtccatgtgtccggcgctggcctgggttgggtgtgtccgtgtgtccggcgctggcctgggttgggtgtgtccgtgtgtccggcgctggcctgggttgggtgtgtccgtgtgtccggcgctggcctgggttgggtgtgtccgtgtgtccggcgctggcctgggttgggtgtgtccgtgtgtccggtgttggcctgtgttgggtgtgtccggcgctggcctgcattgggtgtgtctgtgtgtccggcgctggcctgggttgggtgtgtccgtgtgcccggtgctggcctgcgttgggtgtgtctgtgtgtctggcgctccagcggggagtctgtggggggcatgttgctgaggtgctgggagctgggcctgacacttctgtgttttattgaatctcccaacatccaacatcccatttccatttaacagatgaggaaatgaaaacacagagaggagaaggcactcgcctgaggtaccctgccagacgctggggacgggctcacacgcagcggcccaaagcctgctgcctctcggagcagcgggggtctgggac

SEQ ID NO: 339731 - DNA, 141 bp, Homo sapiens
  chr7:157281193-157281334
  hypo
cgccgaagcccctccggcggcggctctttgttccccgcgtcacctcactgcacgccccgtcaccagcgtcgtgctccagcagcggcgctcctccagccaaagagggaggcactgacgaaacccgtgcagtcaaattctcgc

SEQ ID NO: 339732 - DNA, 217 bp, Homo sapiens
  chr7:157334647-157334864
  hypo
cgcggcctcttagtgtacgtgttagaacctattattaaaggagtcaactgagcctggcggccacctcagggtgggacccggggagatgtgtctgcctgcgccccgtctctctcccctctgcactgccagagggcacctttctgctcctcgaaattacgtgggagctgcccctgtgggggcaggggctcaggtcgggctgtgccgggaaggtccgcaa

SEQ ID NO: 339733 - DNA, 309 bp, Homo sapiens
  chr7:157336700-157337009
  hypo
cggtggagagagacagagagaggtggagagagacggagagaggtggagagagacggagagaggtggagagagacggagagaggtgaagagaggcggagagaggtggagagagatggagagaggcggagagaggcggagagagacggagagaggtggagagagacggagagaggtggagagagatggagagctacggaaatgaacagtttcaatggcacgggaggccttgggagaagtgggctgcgggcctggagctgatgtgtgagcgtggactgcgctacgcgtgacagaatccgtgtctgtcactcc

SEQ ID NO: 339734 - DNA, 533 bp, Homo sapiens
  chr7:157341258-157341791
  hypo
ggccccggagaggccgggcagcgctcagagagctcagaacatcctcctgagggttctgggatttatcgtcaacctctttctacaaaaatgcagcgttctccccccacccccaaatctagtgaatggaaagagccagtggatcgagttcctaggacttgagatgtggctgcatctggaggtgttgcaggaaacgccagtggacctttgggggcccagaagtgaccccgcccatgcaaggccggcatggacgaggccggtcagagcagagcaatcggtgtgcggctcacattaaaccaggccctccccgtgctcctctcaggaacacggccgcagagaggcaccttgaatgggtctgcgtcccggaggagagactgacagtaccttcgtctggaccatgccgggtctctggtccctcaagtgctccagggtcgctgcgatatcaatctctttagcacctgcaacaaaccacaaattgggctgagttcagagcacaagataatccatgccacatctgtcaatctcctgctagccac

SEQ ID NO: 339735 - DNA, 531 bp, Homo sapiens
  chr7:157347322-157347853
  hypo
cgaaagttaaattccagggaaacagaaaggcccagtggtgtgacgctgacatcgaaaagcctgcaaacagtcgaggagtcagcgcacacacaaagaaaatccagatggaaggaaagaaaggaaccttaacgatgtctaccggggacagagcgtggggtccacggagaagtcccaggcgttttccacctaagaagcatcatggtgattcaaacaccagggaaatgaatggactcagtggagccactttctgctacttgaccaggtttaattcgagttgtccatgtcgggaatctacagggaagtgacgcaggctgccatcttgctcagcaccccagtgtggcgggcgccccagtgtggcgggcgtcccagtgtggtgagcaccggccaagtcagtttgggttgggctgcaccctcgtgcctgggacacccaggaagacccacctctctcgtgttagtggaccagggaggcagccacagacaccaggctctgcgtgctccgctggcacccgaatggccactgggtaccatccc

SEQ ID NO: 339736 - DNA, 592 bp, Homo sapiens
  chr7:157370313-157370905
  hypo
cggaccccacttaaaggcttgttatatgggaccgggaccacgctgtgaggcgaatgttttttctactctgttatcatttggatttagaaaaatctaaaagataaaaaccacaccacactcccagggtctggttcatgagcacacagccgtgtgaaccatccacacgggcatgcggccctcgggggtgactcagcctccgtcccctgaacatggggtgcgctgagcctccctgcatgcggccctcgggggtggctcagcctccatcccctgaacatggggtgcgctgagcctccctgcatgcggccctggggggccctaacgaatcccattcggaggaggagcagggcccgtcctcgtccggctggtgggtcctgccctgggtggctctggtcggagtacctcatagatgtggtagagattggagccttcatccggccagtagtggtagcactgccggacgccgttctccgcgaggggtgtcagcatgacgatcaccacgcagccgctctcccacaccatctgcggacaaagaaggcccgtggccgcggtgtgactgtctcatcaccgcgtgacatgtgtaattactgcactc

SEQ ID NO: 339737 - DNA, 401 bp, Homo sapiens
  chr7:157404210-157404611
  hypo
cgtaccctcccccaaaaagacacactggagtcccagccctgggaacatgaccttatttggaaatagggtctttacagaggtaagcgagcggagggcatttgggcggccctaatgcaatatgactggcgtgctgttaggaagaaggactctgcacacccacacgggagggagagcgcccgtgtgaagacgaagacagccgcggtcatgctggggacacgcggagggagcgcgcccgtgtgaagacgaagacagccgcagtcatgctggggacacgcggagggagagcgcccgtgtgaagacgaagacagccgcagtcatgctggggacacgcggagggagagcgcccgtgtgaagacgaagacagccgcagtcatgctggggacacgcggagggagagcgcc

SEQ ID NO: 339738 - DNA, 315 bp, Homo sapiens
  chr7:157410957-157411272
  hypo
cggtgagcacgcggaaaggacgcggtgggagcggcaggtgcagagggaggacttgaaggttccatccctaacagaggacagcgtggccgagtactcatgcttccaaccctgcacagaggatagtgcatgcccagcatgcagactcgcttccatcgcgacacagaggacagcatggagcccagctcgagtgccgtccccccaccatgacagcgcagcatgggccttccaagccacagagccacagggaagccagtcctcctggaccgtgtgtggctgttttggagccagttgtgtcctgtgaagagcgcagcggcc

SEQ ID NO: 339739 - DNA, 152 bp, Homo sapiens
  chr7:157414227-157414379
  hypo
cgcacctaggtggtgagcccagaccggcagatgcacaaaaggcagcggaggcctttgcactcgccgcgtgggccatgcccaccttgctcacgagcctgggccatggtgcgacgttgtgctacggtgcacaatgcatatcataccatgcaacc

SEQ ID NO: 339740 - DNA, 338 bp, Homo sapiens
  chr7:157445780-157446118
  hypo
cgctcttggtgctgagcctgccccccagacggtgcagccggcctctcccacctgctggggctcctcacatctagcttggcctccagacatcaccaacctctgctgtttatttcatcggatcgtggggttcagatgccacgttttgtccaacgtgccccaggagtggctgcatgtcaggaacatgtcgctgggaatctctgtggcttatctgaccatcctgccatcctcaggtgaggggcactgaggtggccggttgggtgtctggcggaaacgaggctttgcgcacagagggctgggctgctggatcaccacggaattggctgccttgtagctgtgat

SEQ ID NO: 339741 - DNA, 69 bp, Homo sapiens
  chr7:157446148-157446217
  hypo
cctgcggcaccaacctgcatgtgctttctacagcctgtgtgtgccagggagggtggcggtcagtgcccc

SEQ ID NO: 339742 - DNA, 267 bp, Homo sapiens
  chr7:157446450-157446717
  hypo
cgtctggcccacttggttgctggactccacacgatgcccgctgctccccacacccaccccaactgcacacgacgcccgccactccccacacccaccccgactccacacgatgcccgctgatccccacacccaccccaactccacatgacgcccgtctctccccacacccaccccaactgcacacgatgcccgctgctccccacacccaccccgactccacaccatgcccgccgctccccacacccaccccgactccacacgacgccc

SEQ ID NO: 339743 - DNA, 237 bp, Homo sapiens
  chr7:157448328-157448565
  hypo
cgtctccagtgcgggaaacagcacagccaggcacggtcacccaccaggacgacgcctacggcctggagatccaggaggcagccagcaggacgtgctgcgctattgacagctgtcctaataacacccggacattcattatgtatggagtggcaatgcacggccacacacgcgtgatcactccagcgaggaccctggaaaaggccgctgaagccgcgtcgccgtgagcctctggccggc

SEQ ID NO: 339744 - DNA, 187 bp, Homo sapiens
  chr7:157464624-157464811
  hypo
cgctgtaccccaagaaggggacgggtggggcagcagccctggaggaaaacccgtgagcgagtcgtggagggagtgtgagggtttttggggagtgaactttgcagagggtgctgggagcagccggcccgaggacaccgctgactggggtacaggggccacgggtcgcacgtggggtgtcagctctgcc

SEQ ID NO: 339745 - DNA, 851 bp, Homo sapiens; identical to SEQ ID NO: 333342
  chr7:157476570-157477421
  hypo

SEQ ID NO: 339746 - DNA, 232 bp, Homo sapiens
  chr7:157507378-157507610
  hypo
cgatgcccagtccgacgtgcttctcctgagccgattttgggtttcccgttttctaaagccagctccccagggaacggcgcccagtccgacatgcttctgaaaggattctaggtctcccgctttctgaagccaactccctggggaacggcactgagcttgaggcgcttctcctgagcagattctaggtctcccgctttctgaggccatttccccagggaatggctccaagccc

SEQ ID NO: 339747 - DNA, 284 bp, Homo sapiens
  chr7:157510178-157510462
  hypo
cgagcctgcaattgaccgcggaagccagtgccctccctagttggcaacgttgttcagctgagctacagagaaagagctcggaggtctatggactccttcatggaaatcgctcccttgcgtctcctcatgtggacacagctccacgcctcacctctcaggccaggcagcggccaacccagcctcttcaccaggtatgggcaccggctgctccttgctgcaggaccgctggctggggtggccggggcacgcagcaggcacatcccgacctgcgggccagcacctgc

SEQ ID NO: 339748 - DNA, 161 bp, Homo sapiens
  chr7:157511449-157511610
  hypo
cggggtgagtctcagcacgtccaggcgtccgcggtgacactgcagccactcttggtttctcagctgccgcaatcggtccttccagtgtccgacctctggggccctcagacccccaaacccaccttgtcgctgtggcctctccgcctcctgcaggtggcagc

SEQ ID NO: 339749 - DNA, 408 bp, Homo sapiens
  chr7:157513007-157513415
  hypo
cggctgccgcaatcggtcattccaatgtccgacctctggggccctcagacccccaaacccaccttgtcactctggcttctccgcctcctgcagctcctgctctgtgtttgggaacgcgtgcggcccacaggacaaagccttgttgcacacccgggtcaagggcaaatcccagctgcacagccgggtgatccagcggccgaccctgcttccctgcgtaggaggcctgagccaaggacactgcggccccggctgcaccgatgcatgggtgtgcacgcggggaccgagggagtcacgtgaatcatgtggcttccacgagctacctcttcccacaccaggagcaggtgccctcgtctccatcaagcgctttctggggagaaactccttcaaggataacggcaaatggtgagc

SEQ ID NO: 339750 - DNA, 43 bp, Homo sapiens
  chr7:157527707-157527750
  hypo
tgatgccaactgcagcaggacggttagtggtgccgctggcacc

SEQ ID NO: 339751 - DNA, 429 bp, Homo sapiens
  chr7:157550880-157551309
  hypo
cggtgtcgtaattgactggacaggtactaatgccgaccacatccaaatatggatgatgacgagcgtggtgttgcccacagtccaggcctgtccaggcgccattccccgtggcctgcacgctcctgggtcatgctccgctcaggcggctccttcagtgaagttgcacagcagtcagggtaacctccatgtccccaaagggcaagaccggctcagaggcgaggtaggtggcacgaggccacacagctggtcagctcagccgggctgggacgcgggccccagaccgtggcccccgtgcagctctgggtccagctggccaaggtggactttgcacaaggtttgggaggctaaagggagccgaggcaggtggcagctgctgtgctgggaaggctgcgtgcgcggggcatcctctcttggcccgggtgggcggac

SEQ ID NO: 339752 - DNA, 283 bp, Homo sapiens
  chr7:157583915-157584198
  hypo
cgtccatttgctgtgataagaaaagatattccacagtttcgtatttgttaagtattttcagcaaatcatggaacacgatgcaacacccgattccatgtttgaaaacagaacagaacaaaattcaacaagaaataagcgcccgcgtccacatattctcgtgcctggcgtgttttacgtgcttgggaagcggagcggccgctgggcttggctctgaggtcgggactggtgcaggcggatgcatgtatgtgcccgggtcccgcctccacacgcctgcctggcgcca

SEQ ID NO: 339753 - DNA, 250 bp, Homo sapiens
  chr7:157589680-157589930
  hypo
cgagttccgactcgccgctcagacgaactcacggctcagctgggagaatcacacgggaggggcccatgaacgggcactggggccacagccggggattcaactgcaccgaaatcccagccctcaacacggcccacggctgtgtcatcccggatttatcactataaagcaaaaccaaaaacggacctcaggtttctctgcaatatgtaggatccgtgaaacctccaacgtgaaatgagaagtaggtagcctc

SEQ ID NO: 339754 - DNA, 242 bp, Homo sapiens; identical to SEQ ID NO: 333344
  chr7:157594777-157595019
  hypo

SEQ ID NO: 339755 - DNA, 297 bp, Homo sapiens
  chr7:157607768-157608065
  hypo
cgcgggaggcagtggagacgtggaagcaggctccggctgctgggcctgcatgaccggtttccctgcagaagattctgcgcccttcagcctcaccgtcctcacctggcctgggtgctgctgtgggcaggcgctgggcacgctgggaagagcagggccagccgtttgcaggacgggaggctgaggctgtgtgcacctcctgagggctgggccacaggtgggctcaggcctgcgccctcccatggccgtggcctcttcctcggtcctttgccctccagggtgccaggcctaggcctccgc

SEQ ID NO: 339756 - DNA, 332 bp, Homo sapiens
  chr7:157621949-157622281
  hypo
cgtcttgctgcgagtgttggggcaggtgctatctgaacacggtggcgcaaaagagatgaggcctcgccactgatcaaacactcggctggtaagtagaagtccttaaaaaagacgaacatcaaacaggtcctcatctggggcgctctttttgtggggtcaccctgaccgtgaggccacagatgcgggcccgtgtgcaccgcaggccatacgtggggttaggtaagtttgaaagtctggacaaggctgtcattaaagcgtaggtgatgctaaacggcgtgaaagcctctgctttctagaggctccagcaagactgacacggaaaagctgaggac

SEQ ID NO: 339757 - DNA, 469 bp, Homo sapiens
  chr7:157625840-157626309
  hypo
cgtaaactcgttcaggaagtatgcgacgtggccagcgcccatccatcctgtatgatggtgaacttatccaggagcgagatgtggccggtgcccatctatcccatatgattgtaaactcgtccaggaagtgtgtgatgtggccggtgcccatccatcctgtatgacggtgaactcgtccaggagcgagatgtggctggtgcccatccatcccatatgatggtaaactcgtccaggaagtgtgtgacgtggggggcgcccatccatcctgtatgatggtgaacttgtccaggagcgagatgtggccggtgcccatccatcccatatgatggtaaactcgtccaggaagtatgcgacgtggccggcgcccatccatcctgtatgacggtgaatttgtccaggagcgagatgtggccggtgcccatctatcccatatgattgtaaactcgttcaggaagtgtgtgacgtggcc

SEQ ID NO: 339758 - DNA, 203 bp, Homo sapiens
  chr7:157642963-157643166
  hypo
cgacatggggtgcctcaggctcgcgtaagggatcccaggtctccgaatttccgacgtgggtgcctcaggctcgcgtaagggatcccaggtctccgaatttccatttccgacgtggggtgcctcaggctcgtgtaagggatcccaggtatccgaatttccgacgtggggtgcctcacgctcgcataagggatcccaggtctccc

SEQ ID NO: 339759 - DNA, 230 bp, Homo sapiens
  chr7:157653875-157654105
  hypo
cgtgctccatggtgacactgccccacggggtccaaatgctgaattcctgtaccttttacatacgtgaagtctatacaataatggaaccgaagccctctgtggggaatccgtgggaggatgagaggcctggattgcaccggaagcacctccggctggagctcggccaaggagcccgggtcccttcagtctgcgctccctgcggtgggcagtggcttctgtgttttgccgtc

SEQ ID NO: 339760 - DNA, 279 bp, Homo sapiens
  chr7:157659219-157659498
  hypo
cgcatgtgcctctcagcccttgccatgacaaccatgaggtctgcaggaaacacgtccatagaggtggagctgaggctggtgtgcattctcccaggcacccagcatgagtgcccagctcagggtctgcaccgaggctgtctggcccgagtcccaggctcgccccagtgcttgccacacacaccctggggtctcctcagaagcagtgcctgtgccccgagatgcacggccaccaccccgcccctgaggccctggatacacggccactaccccgcccccgac

SEQ ID NO: 339761 - DNA, 261 bp, Homo sapiens
  chr7:157703229-157703490
  hypo
ccgtaggaacgggcgcagaatcacacacgtacaccgttctgcacagctggcggacgcttcctctttcccacatggtgtggtgtaacctgatcgtttgtatgcaaagcaaacccatgcacagctgactgtgtcaaaacacagccagaaagatgccatgcggcagggcacgtgtgtgtgtgtgtgtgtgcgagcgcgcgtgcgcccctgcgatcagcccagcagacagagcacgttcctgtaacgtgttgtgatccactgcgc

SEQ ID NO: 339762 - DNA, 239 bp, Homo sapiens
  chr7:157730053-157730292
  hypo
cgtctaactgagcacgtggggactggagcaattcactgaagaaatgaaaggtgcgggaataggcaagcccttgatgtctggagcagatcgcatcagctactactaagccgctgttgtcaggcacagagaagacactcagcatcggatgagagaataaagccgtgtgcggtgtggcttcatgtctctcacaatagcgctcccgagtgcggccgctccacctttcccacccaggagaagcc

SEQ ID NO: 339763 - DNA, 227 bp, Homo sapiens
  chr7:157736806-157737033
  hypo
cgagcccaggacaggctccagatgcccggccttcatgcagcaaacaccttcacagggaaggaaggcggaactctctttccttgccacagaaaaggattctaacggcatttgacaaagattgagcatggttcgtcgcgaacgccagcctgcccccacggtcatgtccagcttaaccaacacacggcccagcagtctcggtcagtggagcccaccacccaagcgggggc

SEQ ID NO: 339764 - DNA, 273 bp, Homo sapiens
  chr7:157738113-157738386
  hypo
cgtctgacaaatcaatgtatctttccccgtggatgtttctccaacccattcactcttctcccgctcagtgacctggcccctgaacctgccgttcccaactcagacaaagccgtctccaactcggacaatggcgcctccaactcgaacaatgccacctccaacttggacaatgtcgcctccacctcagacaatggcgcctccagcttggacgatgccgcctccaagtcagacgatgccgcctccagcttggacgatgccgcctccagcttggac

SEQ ID NO: 339765 - DNA, 145 bp, Homo sapiens
  chr7:157744287-157744432
  hypo
cgggtgaaaagggaaacgccttactaaacgatgttcccgtgatcagaatcacgggctaacgtccctccgcttccgcagtcttcaggcctcaggcactgccagtgacattagctgctgtgcgtccctcctgccggactgcaacacc

SEQ ID NO: 339766 - DNA, 410 bp, Homo sapiens
  chr7:157853839-157854249
  hypo
cgccgtcgggcggtgactgattacaatcatttgttgtgatgcatcgcaaattaaagggacaagcccagccaagctgctccgctcagagagtgcgcgtcccgcctctgcaattactgatgtgcacaaaggacccagggaccacttaaaacaaggggaggactgagtccacgcagggatgaagccacaggcacagtccccacgtgcttgacagtggccccgcaacccacctgctccagacacctgttccgagggaatctctcccatccacctgccgctgtggctcagaccccaggcacaacacaagcgctcggcagagaaatggaccgtgccgccaatgcactcggcgctgaaccatcattgaggagagaccagctgctgctgtggcccctggggctgcagcataaacagtc

SEQ ID NO: 339767 - DNA, 337 bp, Homo sapiens
  chr7:157860325-157860662
  hypo
cgggcagtccaccgtgaccacgcagctctgcctgtggcgaaagctgccagagacaaggcgtgaaggagtgagcgagtgacagagtgagtgagtgagcactgttcccaccaggcttccttcccagagcagcacaccgggtcaggccgggccgcgggcagcacaccgggtcgggtcaggctgggccgtgggcagcacactgggtcacgctgggccatgggcagcacactgggtcacgccgggccatgggcagcacaccagggcaggccgggtcatggtgtgcttagaatttggtgaggcggcagggtcggggcagacagggtggggtctgaggacagcc

SEQ ID NO: 339768 - DNA, 256 bp, Homo sapiens
  chr7:157877355-157877611
  hypo
cccatccacacccacgacgcccatccacacccaccacgcccatccacacccacgacactcatccacacccacgatgcccatccacacagatgcccatacactccgacactcatccacacccacgatgcccatccacacggatgcccatacactcctacaatgcccatccacacccacgatgcccatccacatccttgatgcccatccacacccatgatgcccatccacatcctcgatgcccatccacacccaccac

SEQ ID NO: 339769 - DNA, 777 bp, Homo sapiens
  chr7:157890840-157891617
  hypo
cgcacgcaggcaccagaactcaagacccagcgtggggcagcctctgcctggccaggactggggacctcggagaagcgctggacgcagcaagaatcaggcttcagctccgcaatgtgggcaggggacccgcaaaggatcctgcgggtgaggccaccgggggggctccctggggaggaggtggagaggtccagattcccgaaggctccgagggacgggcggcgggactcaggtttgactctgtaggaaagagggggccgccagtgtcctaaggcgggagatgcccgagggtgacgcttacccaggactgagcctggcaaagcccagccctgctcccggaatgcggagaagccgtccgtgctcagaatccgtcttccgacagcgaaggcggtggccaggagggccaggggcagggagcaggcacgggcgaggcccagctgctctgtgaaaccagaggctccccgaggcacacgcctccctcgcccgccccggcctggcatctgccagtcccaccattttgctgagactctgtgaaggtgaatggggttgcttgggctcggggactggaagaagaaggacgtttatctcgtgaacgcgggacgctccttatgggagaggagtgggagacatgaagcaaagcgtgaccaccgaggagctggggagaaagcgagaaagcaaggaagcagtgggggacggggaacggggccgcggggagggccggagaagatggtagaaggtgacagtgcggggtgcagcgttcctgggtccttgaggggagcc

SEQ ID NO: 339770 - DNA, 218 bp, Homo sapiens
  chr7:157916520-157916738
  hypo
cgtgaacccgtgctgacccaggcagagctggttctctaatctgattggatctcagatcccgtgccgacccaggcggaacaggctctctaacctgatttgacctcagatcccgtgccgacccaggcggagctggttctctaatctgattcagcctcagatcccgtgccgacccaggcggagctggttctctaatctgattcgacctcagatcccgtgcc

SEQ ID NO: 339771 - DNA, 241 bp, Homo sapiens
  chr7:157919964-157920205
  hypo
cgtgcacctgtgccctgcgtcctcctctgcgtgcaccctgcgtcctcctctgcttgcgccctgcatcctctgcacgtggcccgggctctgctccacctgagccccgttcatctctccacagtccaggagccacacactgcggctgccactccagagaccaggaaacccaagcacaggggcgtttgccacattctaggtctcggggctgccgtgggaccctgaccctggatgccggacttcc

SEQ ID NO: 339772 - DNA, 234 bp, Homo sapiens
  chr7:157929571-157929805
  hypo
cgcgagagcggaggggactgaggagctaaatggtagacgtgaaggcagccacaatgacctcacccagctctgggggtctcacgtgatcgacaaagttaactcacggcaaaaaaaaaccccatcgtaccgagcagttcacgtcatgaaaaagcaaagtgaagccttcgccaaaaccacctcacaattaagatggcttcagaatccactgacttaggttatttcactgtggtcagc

SEQ ID NO: 339773 - DNA, 111 bp, Homo sapiens
  chr7:157934031-157934142
  hypo
cgttcactcagccgcacgtcccgtcctctctccacagcgcaggctgtgtctagtccatgccgaggcagcggggccggcacccggtccccacgtgccccgttcactgcatac

SEQ ID NO: 339774 - DNA, 196 bp, Homo sapiens
  chr7:157934555-157934751
  hypo
cggacagagtcctttaaagtcaatctgtacacgaaatgtgtgacggacacgggcgttctgatcggagcgtgctgggcgttcactgccaccgatgtcccctgctggggtggccgagtgccccgctctggccgacgttgaggcctctgaattgttcggcagacagtggcggcttctttaccttcgggttgaagtgtcc

SEQ ID NO: 339775 - DNA, 117 bp, Homo sapiens; identical to SEQ ID NO: 258763
  chr7:157935699-157935816
  hypo

SEQ ID NO: 339776 - DNA, 264 bp, Homo sapiens
  chr7:157936035-157936299
  hypo
cggcaggaaccggcacagctgcagggagacctgaagggccctcggcattgggcatggctgtccccagcagtcggcgtcctccgtgcttaggaggcgagggatgtctccacacatgcctgcactagccaagatgtgtgtcagagtcggcccggccatagctcacggtggacaccagtccccgtgatggaatttcatcggagggaaagaaacagggaggtgaggaatgagtggtggttgctaaggaaaggtccttcctgtggacac

SEQ ID NO: 339777 - DNA, 224 bp, Homo sapiens
  chr7:157949173-157949397
  hypo
cggagctgcccacattcgctaaatgagctaagccgacatctgcagaaacgccctcgtaatgggaacagttacctcgaaaagttctagaaatgccggtggagagggcaggtgaacacacagctgcagtcagacgctcggcatgatcagacccaaagcaaaccaactgctgcatagaacgccctggggcttcgagcccccagttccagcctgtgacgcactcaccc

SEQ ID NO: 339778 - DNA, 150 bp, Homo sapiens; identical to SEQ ID NO: 258768
  chr7:157958518-157958668
  hypo

SEQ ID NO: 339779 - DNA, 105 bp, Homo sapiens
  chr7:157959868-157959973
  hypo
cgagggtccgcggcaggaggtcctcgcggagctgggtccgggacccgggagggtaggtcagcgcagacgtgtgggccacataggtcaggatgctctcggagaagc

SEQ ID NO: 339780 - DNA, 464 bp, Homo sapiens
  chr7:158037654-158038118
  hypo
cgaggccagcagttcgaagcccctgctccctggctgtgtcatgtggacaagtgacgtcgtcttgaggatggcctcgtgaggcggcggtgggcatgaaatgagatgaggcgtccagccctgcatctgcagcgtggtcagcacagaggctgacatccatggtcatgccggaatccgtggtcatgccagaatccgtggccatgccggaatccatggccatgccggaatccgtggtcatgctggaatccacggtcatgccggaacccatggccatgccggaatccgtggtcatgctggaatccacggtcatgccggaacccatggccatgccagaatccgtggtcatgccagaatccgtggtcatgccggaatccactgatggtgcacgtgacccacgatgggaaaagtcacaagacagcttcagagctggtcaaacgggactgagaggggctgcaccaggaatgcgc

SEQ ID NO: 339781 - DNA, 394 bp, Homo sapiens
  chr7:158039908-158040302
  hypo
cgaggcgcacgctgggctctgagacgccccctggccaagaggggtggaggaagggggcaggcgccaggatctggaaggagatttccaacccacgtggggtctcacaggagaaggccgtgatgggaggtggggaagtggggaggagggcgctcttgaccgtgtctgcgtgtctaagcaaaggatacaggggcgcaaagggaaggagtggccaggggtgcccgtcccaggtgtgctcttcttcacggcgcccctgcttccccaccacgcccatgtccacggctcgtgggcagctgggcactgggccactcagacaccgtcctaaacactccacacaggtaacttgctccctctccagccacacagcaaacacagcaaaggggacttgggtgtctgc

SEQ ID NO: 339782 - DNA, 1122 bp, Homo sapiens
  chr7:158066166-158067288
  hypo
ggcacagggggagccgcaggcacagggggagccgcagacagacatgggaggagccgcagacacggggagccgcagacacagggggagccgcaggcacagggggagccgcagacagacatgggaggagccgcagacacggggagccgcaggcatgggggagccgcagacagacatgggaggagccgcagacacgggaggagccgcagacacagggagccgcagacacagggggagctgcagacacaggaggagacacacaaggagccgcagacacagggggagccacagacagacatgggaggagccgcagacacggggagccgcagacacagggggagccgcaggcatgggggagccgcagacacagggggagccgcagacacaggaggagacacacgaggagccgcagacgcaggaggagccgcagacagacgcgggaggagccgcagacacagggggagccgcagacacagggggagctgcagacagacatgggaggagccgcagacacagggagccgcagacacagggagccgcagacacagggggagccgcagacacaggaggagacacacgaggagccgcaggcacagggggagccgcagacacagggggagctgcagacagacatgggaggagccgcagacacggggagccgcagacacagggagccgcagacacagggggagccgcagacacaggaggagacacacgaggagccgcagacacagggggagccgcagacagacatgggaggagccacagacacgggagccgcagacacggggagccgcagacacagggggagacgcagacacaggaggagacacacaaggagccgcagccacagggggagccgcagacgcgggagagccacagacacagggggagccgcagacacagggggagccgcaggcacagggggagccacaggcacagggggagccgcagacagacatgggaggagccgcagacacggggagccgcagacacaggaggagacacacgaggagccgcaggcacagggggagccacaggcacgggggagccgcaggcacagggggagccacagacaccctcacactccgggatctagcgtgtgtggacgagcccgaggcgctc

SEQ ID NO: 339783 - DNA, 264 bp, Homo sapiens
  chr7:158072920-158073184
  hypo
cgggcccaatcggaaagcaggtcctctccggcctgaagctgcgaagagaggcagcagccatgagaaggtggctaaccccgtcgggggccatggctgcctaggggaggccggcagagcctgcctgggggtcggtaaggacgctggctttggtctgacaccggcagggagggacagcgacgagggcaggagccgcggctctacctgggaacgcaggatcatctctactctgacggctcagcctctgcacacaaaccatccttctgc

SEQ ID NO: 339784 - DNA, 654 bp, Homo sapiens; identical to SEQ ID NO: 258784
  chr7:158075396-158076050
  hypo

SEQ ID NO: 339785 - DNA, 127 bp, Homo sapiens
  chr7:158087705-158087832
  hypo
cgcgcatggttcacccacctttctgagggtccaagcccatggcgcccgctgaccctgcctgtctgcccagacattgcaccacatcatggttcacccgcctttccgagggtcagagcccatggcaccc

SEQ ID NO: 339786 - DNA, 192 bp, Homo sapiens
  chr7:158103405-158103597
  hypo
cggacagagcgcaagtcccacggagggcaagccctgagccggacagagcgcaagtcccacggagggcgagccctgagccggacagagcgcaagtcccacggagggcgagccctgagccggacagagcgcaaatcccacggagggcgagccctgagcctgacagagcgcgagtcacacggagggtgagcacca

SEQ ID NO: 339787 - DNA, 338 bp, Homo sapiens
  chr7:158136094-158136432
  hypo
cgaaaataacgcgtgtgggtgagaacatggagaaaatagggccctgtgctccgcgggcaggaacgtaacctgatgcagtcgccgtggaaagcacacgggaaaagttcaatgtggaagtagcagatgatccgacagccccatttgattttacacccaatacctgcaagcagggctcgcgcagaggctcaggcagccatgctggtggcacatgggctgtcgcgactgctcccggtggaatcagccccatttctgattttacacccaacacctgcaagcagagctcgcgcagaggctcaggcagccatgctcgtggcacgtgggctgtcgcggctgctccc

SEQ ID NO: 339788 - DNA, 118 bp, Homo sapiens
  chr7:158198545-158198663
  hypo
cgcagtggctcatccgtgagacacgtgtccgcacactgagatcccgcagtggctcatccgtgagacacgtggccgcacactgagatcccgcagtggctcatccgtgagacacgtgtcc

SEQ ID NO: 339789 - DNA, 477 bp, Homo sapiens
  chr7:158270797-158271274
  hypo
tgggacaggcacggcggcaaagagagtgggctgagtgggtcatcacacagcacgggagccgcggccccaggtgctgcttgaatgaagaaggctcagcccatgactgctacgtctggtccccaggacccaaactgtccagaaatcagccagcactcctgcaggtgcactgcagtggacggctagaggagggaaagcagcgccgtacagacactcggaaaactgcagactggaaggggcgtgaaagcacaaggtcttgatcattctcctggcattcggtgctgtgcgtagggtgagcaatggacgccactggggaagagtgggaaaggaaggctcagcacgtcggtaacgaatgaggaggcagaggcccgctctgcgtctcaaagaacgggtgggatgcggagccgtgacaagggcatgggaaagaaagtggagtgggaataacgccaaaattaacctgataaggaagctgctttcaac

SEQ ID NO: 339790 - DNA, 615 bp, Homo sapiens
  chr7:158277387-158278002
  hypo
cgtgacttttgtgactcggtttcttcctctgagcacggcgattcccaggttcctccgcgtcagtgtgccggtgcttcctgcctccctttccacggccggacagcactccaccatcacagacgtcctcggttcctggtggttttctgccctcttcagtggagaaagggcttggaatagaagaagctgcagttggagacgtgaaggctgtggctgtgacgccgccacggggagtcggctgcaggaggagcctccccaccatcagcgtggccggcggagtgagccacgagcgcaagggcacccctcccagccgctgttgctgtggccccggccgccagcgtcccgggagggcacctgcggagggaaggcagacaccctgcaacggcccgcaggcccgtgtcacctgggccaccgagcgcagggcttgtgggtcgtcacagcataattcagccttgagccacgagacacggagccgacaggtgtgtagctgagccatcctcccccacctgtcagtcaccattcttccacctccctccaaacggagagcgcgacttgctcctcttgccctcctggacgtccgggatttccgcccctgggctccagcgctatggtgtggtc

SEQ ID NO: 339791 - DNA, 871 bp, Homo sapiens
  chr7:158282164-158283035
  hypo
aaacttgccgaaggacagagcaaaacaaaatcagaaagcaagggttggtgcgagcgatgggcgcccagaacccgggcaacctcttctccccacccaccgaggccgcagcccatggctccggggttccatccgcctcctctcggcagcgcgccccgggcggccccagctccaggccagcggcggggctcaccaggctgggcgctgcgcacggcgggcaggagaggggcagaccagggcgcagcagccaggaccccacactcaccgttcacacaggcctcggacgctccgcagaggccctcctcgagcaggcagcctgcggggaaacagagaagagacgcggtcagctggaggggaggaggggggtgcccccgaggctgccttcctggccccctggtgaatttcagagaaaccgccggtcaagcaggctcctccgacccggcttttccgagatggggccgattattctgaagccagaacgctgcgcccctgacccggccacgtgcgaggcctcctggcctagtcccggagcccagctctcacctggaccaggcccacagctctgggctgagggtcaagccggcgtcatcacaggagactctctggccgcgggagcagcagcggggccggggcctccccttgaggcctcccctgggcccggcgcctcccctggaccgggtgctcaccgcacgcaccgcgtccctggaagcaaggctgccgggcgccggggagcggaggcttccagggaggtaacgagctccgcggggagcccggctgcgtgggaagcaaaccgtggcgtccgtggccacagacaagagacgcaggagagggtcgggagaggaaaggaggcagcggaggcagcagagacgaagac

SEQ ID NO: 339792 - DNA, 48 bp, Homo sapiens; identical to SEQ ID NO: 258806
  chr7:158301564-158301612
  hypo

SEQ ID NO: 339793 - DNA, 721 bp, Homo sapiens
  chr7:158349387-158350108
  hypo
cgcgcaggtcagacggctcccgggcaggtcaggcggctcccgggcaggtcaggcggctcccgagcaggttgctcccacgcaggtcgctcccacgcaggtcaggcggctcccgcgcaggtcgctcccacgcaggtcaggcagctcccgcgcaggtcagacagctcccgggcaggtcaggcggctcccgtgaaggtcagggggctcccgtgcaggtcgctcccacgcaggtcaggcggctcccgcgcaggtcactcccacgcaggtcaggtggctcccgcacaggtcaggcggctcccacgcaggtcgctcccacgcaggtcgctcccacgcaggtcagagggctcccgcgcaggtcactcccaggcaggtggctcccgcgcaggtcaggcggctcctgtgcaggtcgctcctgggcaggtcgctcccgcgcagggcaggcggctcccgggcagggcaggcggctcccacgcaggtcaggcggctcccgcgcaggtcaggcggctcccacgcaggtcgctcccacgcaggtcagagggctcccgtgcaggtcactcccaggcaggtggctcccgcgcaggtcaggcggctcctgtgcaggtcgctcctgggcaggtcgctcccgcgcagggcaggcggctcccgcgcaggtcagacggctcccacgcaggtcaggcggctcccacgcagtttaggcagctcccgcgcaggtcaggcagctccc

SEQ ID NO: 339794 - DNA, 458 bp, Homo sapiens; identical to SEQ ID NO: 333345
  chr7:158379348-158379806
  hypo

SEQ ID NO: 339795 - DNA, 177 bp, Homo sapiens
  chr7:158451052-158451229
  hypo
cggcataaaggacattagcatgaataaagggatcttgcagcgatcatcctaaaagcgaaaaaagaaaaacaaaacaaagcatatgtaagcactataaattctgaaagtctctctacgtaaattcctgataacttactaccaaagttgctcaagaagaaccatggcagtcctttccac

SEQ ID NO: 339796 - DNA, 284 bp, Homo sapiens
  chr7:158550070-158550354
  hypo
cgacgctcgcctctcttttaagtagccacacccaaagtttccctcgtagatgcccttagggcagtggagccaggggagaaagcagagaacggtggattgtggtcaatgagagcaccaggagcaccacagacagtgagaggcagagccaaaggatcccagagctcgcgggacgccccttaatccagcgccaaaggatcccagagctcgcgggacgccccttaatccagagccaaaggatcctagagcccgcgggacgccccttaatcccgcgccaggcaccccgc

SEQ ID NO: 339797 - DNA, 340 bp, Homo sapiens
  chr7:158552753-158553093
  hypo
cgaggtttgacgcatttggcattaacgtgagccactccagtctcaagtgtagcttccccttgggaacctcgtccagagtgaaccactgaagagaaaaaatgtttacgttcagcaaaagttcttctgaatcaaaaatccaaattaaacccagtctctacaaatgttccatgctgctcactaaccacgaggcatcaacagttctcagtaacgcgaaggctgagcctcaccatatccagctctacgctatgtggatgccagtgacctcacgtttggaggcgatggcagcaacaggtgtgagcgaccattctaagtgctttacacacaccaaccccgtgacccc

SEQ ID NO: 339798 - DNA, 140 bp, Homo sapiens
  chr7:158556274-158556414
  hypo
cgcacccagccagtaaattcttttaggacacttatttttttattgtcaagtcacacacacctcttgaggacgggaggtcactgaaacacctgccacacagtaacagtctaccgtgcttgtttctagggatcctggattgc

SEQ ID NO: 339799 - DNA, 204 bp, Homo sapiens
  chr7:158570568-158570772
  hypo
cgagaattgccgaaacatgacacagagccatgaagtgagcacatgctgttcgcttcacagcacggacaggcttatttttcacagggctgccataaactttcaactagtaaaaacacagtatctacgaagcgcaataaagcaaagcacaataaagcgaggtgtgcctatgaacactttcatcttaaatgtcgcattcatatttta

SEQ ID NO: 339800 - DNA, 210 bp, Homo sapiens
  chr7:158583831-158584041
  hypo
cgcttctgtctatgagtttgactcccccagaaacctcacacaagtgcaattatgcagacgctgtccctttgtgtctggcttgtttccttcagcataaggtcctcaaggtccagcatgtggcggcctggagcaggagtcccgtgtttctaaggtgtacaggccacattctgcttatccattcatcggcccacgcatccttgggctgcttcc

SEQ ID NO: 339801 - DNA, 201 bp, Homo sapiens
  chr7:158741237-158741438
  hypo
cgcccccgggtgcttcggacacgggaggtgctcagtgaaggtggcgcgggggatggctgagtggcagttgtgtctgcagggcagagtcatatcggaatgtacaagcgcaactggatatgcagacttttattcctggaggctacagtctggtccctcaatgaccccacaccccccacaattatttacaaaattccatttgac

SEQ ID NO: 339802 - DNA, 1464 bp, Homo sapiens; identical to SEQ ID NO: 333349
  chr7:158936507-158937971
  hypo

SEQ ID NO: 339803 - DNA, 929 bp, Homo sapiens
  chr7:158962544-158963473
  hypo
cgagggcataaccgggctccatcccaatgctgcctcatccctgcagtcaccccgcacaggtgacgcaggcttcagagggccccggacctcgcctgagggtgaagaaaatcacggcatcactgacaaggccgccatgaggatcgcgtgagcagaaacacgatgatcatggctcactgatggggcagctctgaggatcgcgtgagcagaaacacacagataatcacagaatcactgacggggcagctctgaggatcacgtgagcagaaacacacagataatcacagaatcactgacggggctgctgtgaggatcccgtgagcagaaacatggatgatcacggctcactgacggggcagctctgaggatcgcgtgagcagaaacacacagataatcacagaatcactgacggggccgctgtgaggatcccgtgagcagaaacatggatgatcacggctcactgacggggcagctctgaggatcacgtgagcagaaacacacagataatcacagaatcactgacgaggcctctgtgaggatcccgtgagcagaaacatggatgatcgcggcctgactggcggggctgctgtgaggatcatatgaccagaaacacgtggaagatcatggctcactgacggggctgctgtgactattgcgtgagcagaaacacgatgatcatggctcactgaatgggcagctctgaggatcgcgtgagcagaaacatggatgatcatggctcactgacagggaggtctgaggattgcgtgagcagaaacacagataatcacagaatcactgagggggccactgtgaggatcgcatgagcagaaacacacagatgatcacggctcactaatggggccgctgcgagaatcgcgtgagcagaaacacggatgatcatggctcactgacggggcaactctgaggatcac

SEQ ID NO: 339804 - DNA, 538 bp, Homo sapiens; identical to SEQ ID NO: 333350
  chr8:495481-496019
  hypo

SEQ ID NO: 339805 - DNA, 423 bp, Homo sapiens
  chr8:591520-591943
  hypo
cgtaatgtatttcctcaaaggtgtctctcattccacatcgaaagaccttttcacacagattattcaaattatagcttaatatttcttgattaattgtactgggaggaggtagtgtgtctgagcgtgatctaatcagtggagaacgcagcggccgtcacgcctgggtacgctggcagcggagctcctcccggaggacccctccccctccccgccgattcctctcctgtctgcgttttccaggctcatctcagatgccgccttgtctatgaagctctctttggttcctgcccagacctcatcagaatcaacgccccggctctgtgctggccaaaaccccacggtgcctctggccgtatgcagtcctttcttctgaccccatctcgtcctccagtctccactggtctcaggtcaatagctttttcc

SEQ ID NO: 339806 - DNA, 138 bp, Homo sapiens
  chr8:593193-593331
  hypo
cgttaaacattgcatgcgattcctgcgagttctctggcatgagacgatgacctagtaatggggtcgcagcagggacgggaagctggccaggcgcaggctgtgctcgcagggacgggaagctggccaggcgcaggctgc

SEQ ID NO: 339807 - DNA, 550 bp, Homo sapiens
  chr8:644618-645168
  hypo
cagtcacaggcaccacgcagacaggagcaccacgaggggcctcacggcttgctcgtctgtgaatcacggtgaccatgtaacccataataccttctggttctaactttttatattcttttgggtaatgtatggtttactgtgaggacacttacgccttgcacaagttgaacgttacatgtcttgatcaggtgcaaggaagagaccggttacactttatggggtgggcggcagcgagagttccccgtcccatcatctcctccgccggacgcacagagaatgcagcgtctgtgagcacagctgccctggacctggcatctaagagtcagggtcagagaggggcagtcagaaacccacctccctgctggacaagtcacaagcaccagcatccctcgggaaaggcagaggggcgtggtggctcggagccctagggtgataggcggttggctgccctgtgggtttcaccagtgtcacctcttcgcaggtgtcattgacctggctcctttctccccgtcaggttcccctcagctcctctgggctgctcctggcagcc

SEQ ID NO: 339808 - DNA, 986 bp, Homo sapiens; identical to SEQ ID NO: 333351
  chr8:687561-688547
  hypo

SEQ ID NO: 339809 - DNA, 155 bp, Homo sapiens; identical to SEQ ID NO: 333352
  chr8:798795-798950
  hypo

SEQ ID NO: 339810 - DNA, 406 bp, Homo sapiens
  chr8:972329-972735
  hypo
cggtcccgtgccgaggtagacactctaaacaccacccaccctccctgggagtggacagtcccgtgccaaggtagacgctccaaacagcacccaccctccctgggagtggacggtcccgtgccaaggtagacactccagccgccatccatcctccctgggattggacggtcccatgccgaggtagacactccagccgccacccatcctccctgggagtggacggtcacgtgccgaggtagacactccagccgccacccatcctccctgggagtggacactcccgtgcttaggtagatgctccaaacagcacccaccctccctgggagtggacggtcccgtgccgaggtagacgctccaaacagcacccaccctccctgggggtggacagtaccgtgccgaggtagat

SEQ ID NO: 339811 - DNA, 298 bp, Homo sapiens
  chr8:1026288-1026586
  hypo
cgccggctgtccgcagctcacacggcactgacacagacactgagctgcaagtcccagctcactacgtggcagtgagtcgcagctccccgtctccgagcctcagtttccatgcaggagacgtacggtattttgcggaaagtcggatgggttagagggcaggatgctttcgaagttcttgtggaacaggaggcagatctgccgctcatggcccacacctgggttggtctcggaagatggcctctgggctgtgatgctccggccagggccacggctcagcccctctcttgagccgccttcc

SEQ ID NO: 339812 - DNA, 230 bp, Homo sapiens
  chr8:1078116-1078346
  hypo
gaggacctgctccccgtgttgtgttcggtgaggacctgctcccggtgttgtgttccgtgaggacctgctccccgtgttgtgttcggtgaggacctgctccccatgttgtgttcggtgaggacctgctcccggtgttgtgttcggtgaggacctgctcccggtgttgtgttccatgaggacctgctcctggtgttgtgttcggtgaggacctgcccccggtgttgtgttcc

SEQ ID NO: 339813 - DNA, 467 bp, Homo sapiens
  chr8:1132651-1133118
  hypo
cgtggtgagttgggcattgagctgccgtaggtcactgagtctgccctgccatcacgtctgcgctgccctgagacacggagctccagcacattctgcagagctcacactatcgagtccagcgcgcatgtgagaggcaggaagggagagtccacgggtcggcaactctgggcagtggcgcgtgggggacggactccgcagcctgtgggatcggcagcatccagtgaggtggagcggggctcaggggcactcaggatgcagtgagcgcacagccctgcggtggcatgggtgggagacgcgcaccatggagccggtggaaggtagacattcgagcgagctggggccagttcctggaagtgtgtcactgccagtgcggggaacgtgagatttactcacccagcagcgggacctactggagtgctttcggtaagagctgggatgacacaaatgcattcacgttcgattccctc

SEQ ID NO: 339814 - DNA, 567 bp, Homo sapiens
  chr8:1150825-1151392
  hypo
cgctttgttttccgttcccacatatcggtttggcatcgaacgatgcgtccgctgctggctcccgtgctcggtttctccacgccgcctccgggcggtgcgcgattcagctccaggagcgtgttgtgcacggcggggcgctgcgctcggccttagggaaagaaggcgcggctgtctccccggaccccaccgttagggacccacacctagaggtgagtgtggcgtgagcggccaggcgggtgccgagatgcccagagaccagcactggggaggctgctccccgtccccgaggcctggagccgtgggaggaagaggaggatgccacggagccctgtggaggctgaagccgctgcgtagggagccccttgtccatcagggttctcgagagacgcagaaccaggggtgcatgcacgcgtgtgattgtggaggctggcaggtcccaaccacagagccgaagtccccagcatccccgcgcaggtgtgaggccctcagcgaccctggaaccagcaggagctctgctcccgctcaggggccgtggggcagggggctcccccttcctcgggaagggac

SEQ ID NO: 339815 - DNA, 239 bp, Homo sapiens; identical to SEQ ID NO: 258869
  chr8:1246593-1246832
  hypo

SEQ ID NO: 339816 - DNA, 239 bp, Homo sapiens
  chr8:1269311-1269550
  hypo
catgcatccgtgcccgtatgtgtctgcgtccatgtgtctctacgtgtgcacgtgcatccatgtgcctctgcatgtgtgtgtgcatctgtgtctctgcatgtgcacgtgcatctgtgccatgtgcgtgtgcgtgcatctgtgtgtctctgtgtgcatctgtgtgtctctgcgtgtgcgtgtgtgtctgtgtgtctctgcatgtgcttatgcatccgtaccatgtgcgtgcatgtgtatcc

SEQ ID NO: 339817 - DNA, 116 bp, Homo sapiens
  chr8:1326617-1326733
  hypo
cgcacacctgacttcgcctgtccatcctgcacacacctggcctcacctgtctttcctgcgcacacctgacctcacctgtccctgacacacacagctgacttcgcctgtctgtcctg

SEQ ID NO: 339818 - DNA, 260 bp, Homo sapiens
  chr8:1379963-1380223
  hypo
cgtgcatgacagggactcttctgatgcctccgtgtcgatggccaccaagccctgagaaccctgccggcacccagcaccccatgccagccagcaccgctacggctgccatccatcagggctgaaccctgccggcacccagcaccccatgccagccagcaccgctacggctgccatccatcggggctgaatcctgccggcacccagcaccccatgccagccagcaccgctacggctgccatccatcggggctgaaccctgcc

SEQ ID NO: 339819 - DNA, 363 bp, Homo sapiens
  chr8:1471350-1471713
  hypo
cgggcccatggtcctgccaggggcccacagcatgaagatgtagctccctcacacacacgttgaatttggatttgcttgtctggcttctgctggggcgcaggatgtggggatggaaggaccaagacacacgacagagaacagcgtcacggggtcaccgtcccacttcccaccccgcgcctcacagcacagacgggggatttgccggcctcacgccggccgagccactgctgacttcacgcagccccagccatgcccccacgcagacacacggagccccaaggcgggccagatctcagggccggatggggctgtggagctgtgccttagacgggggggaaggactccctgccccaggccggcacc

SEQ ID NO: 339820 - DNA, 104 bp, Homo sapiens
  chr8:1724066-1724170
  hypo
cgattctcagtcttccgtaagtgggaatctgtgggaggcacatatgcatgtggtgcggcacacacgacagaagattctggaagctgaatctgtgaggggcacac

SEQ ID NO: 339821 - DNA, 88 bp, Homo sapiens; identical to SEQ ID NO: 258895
  chr8:1783965-1784053
  hypo

SEQ ID NO: 339822 - DNA, 494 bp, Homo sapiens
  chr8:1797609-1798103
  hypo
cgtggggcggccacatggacacagacagcaaatgctgaggggggcgtggggcagccacgtggacacagggcaaatgctgaggagggcgtggggcggccacgtgggcatggacagcaaatgctgaggagggcgtggggccagctgcgtggacacagacggcaaatgctgaggagggcgtggggcagtcgtgtggacacagacggcaaatgctgaggagggcgtggggtggccacgtgggcatggatggcaaatgctgaggagggcatggggtggccacgtggtcacagacagcaaatgctgaggagggcgtggggcggccacgtggacatagagggcaaatgctgaggagggcgtgggccggctgcgtggacacagggcaaatgctgaggagggcttgggcggccacgtggacacagacagcaaatgctgaggagggcgtggggcgaccatgtggacacagagggcaaatgctgaggagggcgtgggccggctgc

SEQ ID NO: 339823 - DNA, 329 bp, Homo sapiens
  chr8:1885046-1885375
  hypo
cgggctaatgccgtcttcagccaggaaagggctctccggctggcccctggagacgtgggtttggttaggaatgcgaggtccacactggggcaaggtgcagatgggacctgggtcctgagcctcctggaggccgacgctctgccgtggatcatgaatagcattcccgcgtgagtctttttttgacacagcctccccgacgtccttcgagacctggtctgctagacaggaacagaaaatagctggacagggaggttggggtacatgttagatgatttttggcagtattgttcctgttacttttcatatccatctgacacttcttatttcac

SEQ ID NO: 339824 - DNA, 169 bp, Homo sapiens
  chr8:3509598-3509767
  hypo
cgcttaccaccatcagagcacctaccaccatcagcacgcttaccatcagagcgcttaccaccatcagagcgcttaccaccatcagagcgcttaccaccatcagaacacctaccaccttcagcgggcctaccaccatcagagcgccatcaccaccagagcgcctaccaac

SEQ ID NO: 339825 - DNA, 313 bp, Homo sapiens
  chr8:6414561-6414874
  hypo
cggggtcatatggtgttcactcacttacgctaatgaactgagaaataacgcacttctgcccaaattcatgttcattcacactcctctcagcagttttctgcagtcttcccagccccacggaaaattctgcttttgtcagaggaggggatatgcgtgctttcccgtgtttgctttaccgctgggcaatccatacaaggctactaaactgcagagggtactggtgttagcatgccccgtgtttataagggacttaaaaaaatatacaggcttgcatccaccatacctaccatacttgtgtactagagatattctc

SEQ ID NO: 339826 - DNA, 248 bp, Homo sapiens
  chr8:6434438-6434686
  hypo
agataaaagcaatggcgcctcctttgaaatctgagagacgcagggccctgcccattctgcggaattccttctccctgctgcctgctgtgaggaggccccctttgccacggaacctgaaattcctgccactggaattacgctctggacaagcggcaagatactcctttcagtcccagccactgggttcctgctgcacaggaggccagggtgctgtgaacctgctctcagccccgggcaaagggaatctc

SEQ ID NO: 339827 - DNA, 95 bp, Homo sapiens
  chr8:6633002-6633097
  hypo
cgagaaacaccaccggctggaaatgtggctctgctcccgatctttgtctgcgttggcgagacaccggccgctctgggccggaatctctcatctac

SEQ ID NO: 339828 - DNA, 388 bp, Homo sapiens
  chr8:8560686-8561074
  hypo
cggtggacgtcctcgacggggaggggtgggagtcccaggacgctccctcgtgcagcacccacccctgcgacagctcgctgccctgcgactccgacctctagacgcttgtagagcctggggggcgccgggtggcaaaggactcacccccgcacaggcccgcctggcttcgagttggaacccggacacttgcccctcactggtgtggatggaaatctgcctttcgtgggaccaaacaggactccttggacgattagttcaggttgggtttggttttcttcttaaagagtttagttttcctctccagagggatcagggtcctcttagggagtgacgggcttttcatatatttttgctgaagaatatatggaaagggtggcatttgcgtcac

SEQ ID NO: 339829 - DNA, 201 bp, Homo sapiens; identical to SEQ ID NO: 333359
  chr8:8639885-8640086
  hypo

SEQ ID NO: 339830 - DNA, 166 bp, Homo sapiens
  chr8:8651879-8652045
  hypo
cgatccccccaaatctcccgcttccaatccactgtcaaccacccatgaatgggaccttccccggagcctggcccggcctccacatgagtttgtttttgtccatgtgttcatggatgtaaactgtgggtgcttaaggcggtgaaggtgggggaacactgggcagctc

SEQ ID NO: 339831 - DNA, 110 bp, Homo sapiens
  chr8:8680452-8680562
  hypo
cgacaggctggtggcgggaagggagggtaacagagccaggcatgggatcccgcacagaggacacagacagaagaccgggaaggagagacagagggacacaggacagtctc

SEQ ID NO: 339832 - DNA, 59 bp, Homo sapiens
  chr8:8680894-8680953
  hypo
cggggccccgcgctccgatcctggtgctgcgctaactccctgcaagttcccgaaacacc

SEQ ID NO: 339833 - DNA, 171 bp, Homo sapiens
  chr8:8681197-8681368
  hypo
cgtcttcagtctttgacacaggtaatgaacccacaggtcaccgagaagagcatcacctgcgaaatttcaagacccacggtggctgtgctccatctctgatgtagcacagaagatagtgggggctgagaaaagaaagaatctcgcctctcagagatgtgcctgtctccatgc

SEQ ID NO: 339834 - DNA, 416 bp, Homo sapiens
  chr8:8731310-8731726
  hypo
cgttcttaattatatttcattgatttcttacatggacagaacatcattcttgctgccactgttttattttgatcagcggtatatctatctgtaaacatgtacaatttgtaattattgctatgtctaaacactgcatcacgtgtaatggctgaattaagctgtgaaatgcgtaattatgctgaaaacaatggtgttccaatacacatcaccaaagccaatttaaaaaaattaccttgtttcaaatcacaaagcgaagccttcataaccctcgaggctttttttaggtcccaccactttgatttagagatttgtctttttctaattgcatctcaagagtgttccgagcacagagagggattattaaccctgaaggaaataaaactgagtatttcttacacctctggaaggtggagaac

SEQ ID NO: 339835 - DNA, 1395 bp, Homo sapiens
  chr8:8748226-8749621
  hypo
cggagcagttcctggctgggggtggaccgcgccatgggcggggagctttccccctccgccttgccctctccactggtccctaggagcagcttatgcagcagcaaagagggatccctctggaagaagacattgaggatgtcgatgaggcgggtgaggttgtggaagacgtgctccttgagagccggactgtcctcaaagtagagtagcttgccgctctcatgcaggtaggagagggcactctgcagtcggtcctcggtcagacccgcctgcaggcccaagcgcgccgagtcccaccagcttagccacagtcgctgggcctgaggtggctggaaatgcagttcctccagcacctgccaggatcgaggcagtactctgtgtaagttggggaagatctctcggtgctcagcaactgacagcaacttgtcccgaaggcgtcgtaagtggcgcgggtccctgcagctaacaggcaacacgggggagaggatctgcagccggtggttgagcaggtattgaaaatgggccttgcgccgtcgaaggttcttgtccgaaacgccatagtaggctgcgtgggggctggcagagcgcagctcgaagtcccgggccagtgcctcgtccaccaccttggccaagcggctcagtccctccgcgtcgtgcttctcctgcagggcgatctggcggtgaatgtccagacatttctcctccagctcacgctctccgcacaggtctgcgtgggtgcccacgatgcacaccaccgcgtggggcactctcgccccgacccgatgcaagaaggagcccacggtggtaggaaagtggcgaggctcataggtggccaagttgaccaccagcacgtatagggcccctggggacaggaagaagggctggatcacctcataactttcatccccagctaagtcatacacgatgaaccgcaggccccgggaggcatcggccgtccagctggtcacctcgatgcccttgctcacagggggaggtgacggtgggtagcacttctccttgtcccctcctcctgggcatccctccactctctcctcggtgaggcagtggcgcagcaaagtctttcctgcagccttatgccccatcaggagcagcttgagccggggctgcaccgccggctgggaatgagccagttccttctggtaggctgcgatgtaggggatccccttcatgcagacctcgtaggggggctggatcagtgggttgtctttgatcttccacaaacccacccgggagagctggccaaagtggtcgggcagcaccgcgatctggttcccctgcagcacgagctcctccaggccggtcagctccacgatggagtccggcaggtagcggatgcggttattatccagccacaaggtgagaagccggcccaggccc

SEQ ID NO: 339836 - DNA, 143 bp, Homo sapiens
  chr8:8780059-8780202
  hypo
cgcacccagccgggtgtttctttacagcaatcagaaaatagactaatacagggacaggtgcctgacatggaaggaacatccatcttggactacatggagtgaaaagcaagggctgaatacgatggaacaagaagacggaagac

SEQ ID NO: 339837 - DNA, 101 bp, Homo sapiens
  chr8:8898512-8898613
  hypo
cgtaatgagaccgttttcagtgcagacagctgagcccccaggcacttgctccgctgagtgtttcagcgattacgctgcacttctgctcgcctgcctaaaac

SEQ ID NO: 339838 - DNA, 1210 bp, Homo sapiens; identical to SEQ ID NO: 333360
  chr8:9760527-9761737
  hypo

SEQ ID NO: 339839 - DNA, 2086 bp, Homo sapiens; identical to SEQ ID NO: 333361
  chr8:9762660-9764746
  hypo

SEQ ID NO: 339840 - DNA, 1360 bp, Homo sapiens; identical to SEQ ID NO: 333362
  chr8:10587216-10588576
  hypo

SEQ ID NO: 339841 - DNA, 1157 bp, Homo sapiens; identical to SEQ ID NO: 333363
  chr8:10873138-10874295
  hypo

SEQ ID NO: 339842 - DNA, 1232 bp, Homo sapiens; identical to SEQ ID NO: 333364
  chr8:11058136-11059368
  hypo

SEQ ID NO: 339843 - DNA, 1162 bp, Homo sapiens; identical to SEQ ID NO: 333365
  chr8:11204526-11205688
  hypo

SEQ ID NO: 339844 - DNA, 657 bp, Homo sapiens; identical to SEQ ID NO: 333368
  chr8:11550051-11550708
  hypo

SEQ ID NO: 339845 - DNA, 209 bp, Homo sapiens
  chr8:11705932-11706141
  hypo
cgagtgcccttccgggtagaacactgattctcaactgagcagacgctaaacttccctaaggtacttaaaaacaccaccagttctctgaaatgagaatcgccagtgattcccatttaactagttaggggagaagcccatgcatttttttaagccctcaggcatttcggatctgcagccgccagtgaacaccgctactgcggaaccaaggc

SEQ ID NO: 339846 - DNA, 131 bp, Homo sapiens
  chr8:11708345-11708476
  hypo
cgcttccccgccagccagcagggccttacccagcaggagccacaggagccctggtctctgatctctttgatggtgggacactgtggccattgttcccgtgcatcgaagcttgcaggcagcttcaggtcctc

SEQ ID NO: 339847 - DNA, 140 bp, Homo sapiens; identical to SEQ ID NO: 333372
  chr8:11726011-11726151
  hypo

SEQ ID NO: 339848 - DNA, 130 bp, Homo sapiens
  chr8:12959279-12959409
  hypo
cgcggcattcataaacactaaggaacgtctttgctgattatgcccgatttatgtacaggactcagggataagctgtcacacggactattgcatcttggccttttcggcaggatatcaaagggcacaattc

SEQ ID NO: 339849 - DNA, 829 bp, Homo sapiens; identical to SEQ ID NO: 333376
  chr8:16884178-16885007
  hypo

SEQ ID NO: 339850 - DNA, 78 bp, Homo sapiens
  chr8:18541368-18541446
  hypo
cgggagtatttcacggaacctgaggtcctcacccgtaccttgctggcactctggacactattcacgccaatcattttc

SEQ ID NO: 339851 - DNA, 1070 bp, Homo sapiens; identical to SEQ ID NO: 333379
  chr8:18870226-18871296
  hypo

SEQ ID NO: 339852 - DNA, 859 bp, Homo sapiens; identical to SEQ ID NO: 333383
  chr8:19796843-19797702
  hypo

SEQ ID NO: 339853 - DNA, 45 bp, Homo sapiens
  chr8:21624023-21624068
  hypo
cgagttagcgcggaagcctccagtcgcaggacgccccaaacacac

SEQ ID NO: 339854 - DNA, 56 bp, Homo sapiens
  chr8:21959292-21959348
  hypo
cgagcgacctttcttcgagggccacttcctccgagtgctgtttgaccgcatgtccc

SEQ ID NO: 339855 - DNA, 244 bp, Homo sapiens
  chr8:21959595-21959839
  hypo
cgttcacagtggccaggcaccttgctgggggagtgcaaaaatactcaccagccctgccagccctcggctctgtccaccatgttcctacagccatacagcctgaacctgcaggtgacctcggtcctgtcccggcttgccctcttcccccacccccatattcatgagtacctgctggatccgtacatcagcctggcccccggctgcaggagcctattctccgtgttggtgagggtgaggacgcctc

SEQ ID NO: 339856 - DNA, 287 bp, Homo sapiens
  chr8:22256736-22257023
  hypo
cgcgcggacccctgcccggcctccccgtcccagcggcgtcaacagctgtgtgtgtttccctcttctttctttcctctctaataccttttacaaaccttttccccgctaagaataacttgtagttaaaaagaagacaagactccactggagcagaaaactcccctttcatgcctgccaaaaggccggggtcacttggacttaagtgtcactcgcagctcctagatcctccccaacccttgcgggtgagtgcatgtctcaagcgctggccaggcaggggggctgtgctc

SEQ ID NO: 339857 - DNA, 934 bp, Homo sapiens; identical to SEQ ID NO: 333387
  chr8:22436799-22437733
  hypo

SEQ ID NO: 339858 - DNA, 429 bp, Homo sapiens
  chr8:22874780-22875209
  hypo
cgagaagcatcggtggccacctgtgtggtacctgaaggaggaagatcattaccagcgggcacggaaggagcgtgagaaggaggactacctccacctcaagcggcagcccaaacggcgttggctcttctggaacagtccatcctccccgtcttcctcggcagcctcctcctcatccccatcttcctcctcggctgtggtctgagatgctgccaccctcttctgaccctgctgctgttgtccccatccgccttcacccctctgctcttccgcatcaccccatccaccttacagggaccagggggcccacgtaaccaggacccagagggtggagctcttcttaccagccaccgtggctcagccagagaggagctgagccctgtggagcagaacgggaaccacctgcagaggtccccagacccaaagcaggac

SEQ ID NO: 339859 - DNA, 794 bp, Homo sapiens; identical to SEQ ID NO: 333391
  chr8:23020923-23021717
  hypo

SEQ ID NO: 339860 - DNA, 115 bp, Homo sapiens
  chr8:23399609-23399724
  hypo
cgatgtttcggtcaactatggactccatatgtgatgagacagtgatcccatagattatagtggagctgaaaaattcctattacctaggggcatcacaacgcattgcatttcgccc

SEQ ID NO: 339861 - DNA, 334 bp, Homo sapiens
  chr8:23423722-23424056
  hypo
cgaggcgtcaacgtcatgatcatgggtgcagggccggcccatgccatgtattttgcctgctatgaaaacatgaaaaggactttaaatgacgttttccaccaccaaggaaacagccacctagccaacggtattttgaaagcgtttgtctggagttagaaagttctcttcttcaacacgtccctccccagggtgttcctccctgtgacccagccgcctcgacttcggcccgcttgctcacgaataaagaactcagagttgtgtgtgcaatgcacacccagacacacgcacgcacacacacgcgcgcgcacacacatgcttttttctgttcccctcc

SEQ ID NO: 339862 - DNA, 986 bp, Homo sapiens; identical to SEQ ID NO: 333394
  chr8:23566785-23567771
  hypo

SEQ ID NO: 339863 - DNA, 150 bp, Homo sapiens
  chr8:25397060-25397210
  hypo
cggcccagttcaacagactgtgagcccggctggctgctgggcgtgtagcgatcactgaggacaggtcagcctggggatttggagcgcagctacctgcagtacctgttctaactccgtctgtgtcggagcgcccttctgttatcctcagtg

SEQ ID NO: 339864 - DNA, 959 bp, Homo sapiens; identical to SEQ ID NO: 333402
  chr8:25900912-25901871
  hypo

SEQ ID NO: 339865 - DNA, 309 bp, Homo sapiens; identical to SEQ ID NO: 333407
  chr8:26148759-26149068
  hypo

SEQ ID NO: 339866 - DNA, 165 bp, Homo sapiens
  chr8:26193961-26194126
  hypo
cgtggaatgtgccttcccaccccacccctcagtctcaaatctcaattgttttactgtaatgctgtccttactgacttaatcatctctaggttttacgtgttcagttcacttaaggaatattaaggtttcttccttattagaaattgagcccggctgggtatggta

SEQ ID NO: 339867 - DNA, 106 bp, Homo sapiens
  chr8:26267649-26267755
  hypo
cgagccccgatatttaatgagtaaacaaactcatataaaaccagtttggccgggctggtgactggttttaagaaagtcagtgatgatttcacggtgtttggggagc

SEQ ID NO: 339868 - DNA, 576 bp, Homo sapiens; identical to SEQ ID NO: 333408
  chr8:26436208-26436784
  hypo

SEQ ID NO: 339869 - DNA, 146 bp, Homo sapiens
  chr8:26481184-26481330
  hypo
cggtaatgagagagcaggtaatgcccgggaacttttgaaaggcccggtccgtgtggctctgctccagcaccttcaagttccctgccgtctggcggggggcgtctcataagctgctttcaacacaaagaagggtttggctgctcccc

SEQ ID NO: 339870 - DNA, 188 bp, Homo sapiens
  chr8:27315870-27316058
  hypo
ctggcacagcagaacgccgtgacctccctaagtgaggagtgcaagaggcagatgctgacggcttcacacaccctggctgtggacgccaagaacctgctcgacgctgtggaccaggccaaggttctggccaatctggcccacccacctgcagagtgacggagggtgggggccacctgcctgcgtcttcc

SEQ ID NO: 339871 - DNA, 367 bp, Homo sapiens
  chr8:27779460-27779827
  hypo
cgccgtgtcgctctgctggcccgtgcggtcccgcagcagggccaccgcctgctcggtctgcaccgcctgcgcctgcagcccccacagcgcgccctccagccgctgcactgcgcccgccagcgccagcaacgagtctgactggttctgcagcgcgtcctgcaccttccacacctgctccgtcaggtccgcttgcagcggagcctgcagcagccgcagctgcaagtcccggaagctctcattcagccggttcacattgcgagtcagggccttcaggtcgtcaggggagctgcgcggcctggacactgcggaggaggaagaggggagacttgagcaccgctggggaggaaggccccgggtgacaagaggc

SEQ ID NO: 339872 - DNA, 128 bp, Homo sapiens
  chr8:28207473-28207601
  hypo
cgacctgtggccacgtgccccgtgcccaagggatggcctccagccctgggatgtgtgggagagccctcggccatacgaggccccagccgtgctgcccgcacactcaccggagagagagagcaggcggc

SEQ ID NO: 339873 - DNA, 89 bp, Homo sapiens
  chr8:28207908-28207997
  hypo
cgctggtctacgtgctagcctcatgacttaatcaccgcagaagatttaacttctcaactggatcacctaccaagaacatgccatggcac

SEQ ID NO: 339874 - DNA, 92 bp, Homo sapiens
  chr8:28237888-28237980
  hypo
cgactgaaccttgatttgtctgcaaaaccagcaattcctctcacttctgcgccactaacaaatctgatgagcgcgccttctctgtcttcacc

SEQ ID NO: 339875 - DNA, 304 bp, Homo sapiens
  chr8:28938419-28938723
  hypo
cgcactcgaatagcgtcttctaactccattctcttcaaatccactttccaaactacagctggagggagctttccgaaaaacaaaagtgaccatgtcccatgtcgctcgccaccttgcagctgccagggtttcccactgcagcagacagggaaacgctggcaggtcctgcatggtgtatttctgcggctcgatccgtccctcctgcaaacgctctactgattgattcattccacaaatacaatgacttggttactcttaatcactgtcagtgaaatctcttacagtcacacgtgagcatttaacc

SEQ ID NO: 339876 - DNA, 84 bp, Homo sapiens
  chr8:29053260-29053344
  hypo
cgggagtggggaggatgagtcggttttgaccgcagtttggaactaccagtctagagccaatctatggaggcggcttgaggccgc

SEQ ID NO: 339877 - DNA, 1886 bp, Homo sapiens; identical to SEQ ID NO: 333411
  chr8:29205985-29207871
  hypo

SEQ ID NO: 339878 - DNA, 267 bp, Homo sapiens
  chr8:30561955-30562222
  hypo
cgcaatgcttgtgctttcgtaaaatgggaagaataccacaaaagtacatgacactgaagttctacgctggagacggtgagaactcagactcttacttttggatttgctcttactggaatcctctgtacccaggccttcacttaggggctgctggcacgctttcgccagccatgatacatgcaggggcatgcaaatgtggtcaacttacaagaataatggaaccatgtaagcatgattacaaagtggaatgctttaacatattggaac

SEQ ID NO: 339879 - DNA, 640 bp, Homo sapiens; identical to SEQ ID NO: 333415
  chr8:33371797-33372437
  hypo

SEQ ID NO: 339880 - DNA, 1274 bp, Homo sapiens; identical to SEQ ID NO: 333416
  chr8:37552902-37554176
  hypo

SEQ ID NO: 339881 - DNA, 943 bp, Homo sapiens; identical to SEQ ID NO: 333418
  chr8:37655257-37656200
  hypo

SEQ ID NO: 339882 - DNA, 402 bp, Homo sapiens
  chr8:37702286-37702688
  hypo
cggtggctccttctctcgggtctccacttctgctgtcccatcccgaaaggcagagcggaccagtgactggcggtgctggagaaggtcaccgatgtgcttcaccacagaccgtttgtcaagtctcagaactcgtaaccaggccagctgctcagccatccgcagcagcacagccagcagctcctgcaggcgggaggacgccgggtagggcaggtccacatttgccaatttacaaaatcgggcaagggaacatgaaagccgatctgcaggctgcagcgactgccaagccaggaaagtcgcagcagtgatgacgggcaagggatgcctcccggtcaccagccacgtctcatttgccagctccaccaactgcattgttcgagacagcatcttctctttgtcttccac

SEQ ID NO: 339883 - DNA, 1808 bp, Homo sapiens; identical to SEQ ID NO: 333422
  chr8:38324508-38326316
  hypo

SEQ ID NO: 339884 - DNA, 85 bp, Homo sapiens
  chr8:38697075-38697160
  hypo
cggtagccatccataataaccaacttggatatgacgtcaaaagtgatgggggcaccaccattgagggcaggggaggacgtgatgc

SEQ ID NO: 339885 - DNA, 1650 bp, Homo sapiens; identical to SEQ ID NO: 333423
  chr8:41165698-41167348
  hypo

SEQ ID NO: 339886 - DNA, 93 bp, Homo sapiens
  chr8:41478655-41478748
  hypo
gctttcgccgagccgcagcgggatccctgtgcacccggcgcagcctacccttggtggtctaaacggatgctgctgggtgttgcgacccaggac

SEQ ID NO: 339887 - DNA, 459 bp, Homo sapiens
  chr8:41553941-41554400
  hypo
cggccagtgggggcggcgtgctgagcttctggggcttgaccaggcggcaggtgatgcgggtgggcgctgcgcacgtccgtggcgggatcaccactcgcaggccgttgtggcgacttcctctcatggaaccaccccgggcgtcaaccatgaagctcaccagaaacctaggagtggggcagatgcacgttgggcttctgcatcccctctcggagatggagacaggagtccccgagccctgcgcccgccactcaccctgtatgcaccgggctggccaccgggctgatgttgtctgaggtctcggtggccgggctgctggggatgagggagtcctcatcatactctttagatgcctgaggagagagaaagggtcctcctgtcccacctcctcccgggccagctggatgccgtgccagggcgtggaggcttggaagaaccttgccgctagaaaccaggtgccac

SEQ ID NO: 339888 - DNA, 181 bp, Homo sapiens; identical to SEQ ID NO: 259194
  chr8:41643317-41643498
  hypo

SEQ ID NO: 339889 - DNA, 174 bp, Homo sapiens
  chr8:41668173-41668347
  hypo
ccagagcaacgtgccgccgaagcgtaatagcccgatgggttcatcttgcccgctgcccagaaagccaaaagcgcggagaacaggcactgccccaaagtaagggcctcatgaccacagggccgggagagccaggagaacaggagaaacttcccacacctgtctccccgggaattc

SEQ ID NO: 339890 - DNA, 1455 bp, Homo sapiens; identical to SEQ ID NO: 333426
  chr8:41753753-41755208
  hypo

SEQ ID NO: 339891 - DNA, 65 bp, Homo sapiens
  chr8:42134216-42134281
  hypo
cgtatgttttcttgtttttttttttttgagacagtctcactctcagctgagacaggtgcgatctc

SEQ ID NO: 339892 - DNA, 157 bp, Homo sapiens
  chr8:42146058-42146215
  hypo
cgcttggggcctggagacccctcccatgcagcagacagggtgggatttggcctgcagctcgctctgctggtccccactgtgctgtttctgtaggaaacaggtgagcagattgccatcaagcagtgccggcaggagctcagcccccggaaccgagagc

SEQ ID NO: 339893 - DNA, 132 bp, Homo sapiens
  chr8:42147407-42147539
  hypo
cgatgaggacttgggatgtggcacgcacaaaaaactgaagttacacgcagttgtgccctcagggtctgagttctggtgctgtgagtggggctgggtgagcgccactgacccaggcattgcggttggccaccc

SEQ ID NO: 339894 - DNA, 100 bp, Homo sapiens
  chr8:42316852-42316952
  hypo
cggtatctaaaaaaacaaagcatggcttctagtctctggataaactggtctgatatttccaggggtctgtactctgtgctgtgaacggctttagagctcc

SEQ ID NO: 339895 - DNA, 332 bp, Homo sapiens
  chr8:42333256-42333588
  hypo
cgaccacattggatacaaggcaagcagaaacatggaggatgagtcaggagcccgctgcatggcttaggcatgagatgaggcatccgggaccaggctgtggacggtggtgggtgggagggaatacgatgatttaagagaactgcagcggcaaaatccaacaggaccagatggtggattaaacatgggggtggagagaggatacatggtttatggaaccgaagtgaaaaataaccgagtgggtttttcttctcttttgcattgtttttagttttgctttttggggctaggatggggtctgaccacaggtgcgcttttgattgggtgaagtagcc

SEQ ID NO: 339896 - DNA, 209 bp, Homo sapiens
  chr8:42749975-42750184
  hypo
cgcgagacaccgcgcctggccacgtatgtgtaatttctaaaggtttctctgcccttggtgtagggaagaatgtttgaaaaaaagaccattgagaatacttcaggtaagtttttttttttttacacttacaaaatgctaaatgatcaggggtcaactatcaagtggtactctgtaaggcaaccttaaaaactcactgctgacccaggctc

SEQ ID NO: 339897 - DNA, 117 bp, Homo sapiens
  chr8:48044665-48044782
  hypo
cgacgaacgccaagccaagccgttacatacgcatgcgcagaacaccaagccaagctgctgcggcgtgcgcgtgcggcgtacctcagatggcaagttactgcacgtggcagtgtccga

SEQ ID NO: 339898 - DNA, 410 bp, Homo sapiens
  chr8:48292766-48293176
  hypo
cgcgtgctgcccctgcctgggcctggcagaaggctcccttgcagcagctcaggactcacactcactgagcaggttttaaaacacacagaatggccagacaggtcgtatcacagtttgtgtcagaattccacaggtgtacactatttttttttggagaagggggtacttttcatctgtgatcactgcagacaaggtgcgtcaggacctcggaggaccgtgttgctgggcggggcctgctgtttgctgtggagccccctggccctggtcactgccgccttctccaccctccactcctgcttggtgaactttgacccggcaggtgcctttcttgagcctcgtgattcccctcccctcttgccccgctgtctgtcatttctccttgggctcctcagagcaggtgccaggctgac

SEQ ID NO: 339899 - DNA, 198 bp, Homo sapiens
  chr8:48396539-48396737
  hypo
cgtgttaaaaaaaaaaaaatgtcgatgcatctttatcaagttagcaaacgatttctatgattgtctatttccagagtaatttgattgaacgggttctcaggtttccatagctggggttgtaggagtattctccacaagcgaagatagaccaagtgcttgacacgtgacctcaccgaaagaagtcacttaataaagtgc

SEQ ID NO: 339900 - DNA, 552 bp, Homo sapiens
  chr8:48744129-48744681
  hypo
ggctgatcccaggccggccacacttccacccgcggagagaactgggcgcactcctggacccccaccagagcgccatgagggctgcatccctgtgggggagccccaggaggctggtttggagcagtcccgcaacctggtttgcaggtgacattggaggcagtgtctggcaggaagcctgttcacttcgtctgtatcctgtgacagaaactgcatcgttctgatcaaattcttgacaagatacaaaccttctctcgtttttgctcagcaacgccttttctggcatacatcaaactgagcttctcctggtccctcataaaccgtctgcgcagtcgtagtaggtccgtccggccggccgcacctggagagggaaagcaggcccagttactccccgccgcccagacacttggctctgctggttcattttcacctcgggtttcctcaaagacaaaacctacaggtgccgcagaggcagcgaccgggagcaggagtgcaggggccacagctgcaactggaactgctcagcagtggattcagcaggcatgagcgctgaac

SEQ ID NO: 339901 - DNA, 166 bp, Homo sapiens
  chr8:48801168-48801334
  hypo
cgcgtcagggccatacaagttgacggcacaaagctcctcaatgctggccatgtgacaaaacagtaaattaggtgagctctgatctcgttaaattatcaagatacactgaaaaaaatgtttgcactgttatgaagcaaacagaggcaacatctaacaggatccacac

SEQ ID NO: 339902 - DNA, 207 bp, Homo sapiens
  chr8:49241546-49241753
  hypo
cggccgggtgcagattaccagttcctgggccccacccagccgggaaagcctgaggtccttgctcagtgactggactcacgggcttctccggtggtggagggcctggcccgggcgtaaatgtctgaggggcttactggacggcctgggagtgcagccactcagccccctcgggacaccgaggctggggattcgcagccctgcagggac

SEQ ID NO: 339903 - DNA, 335 bp, Homo sapiens
  chr8:49334914-49335249
  hypo
cggagtctgctctgagacccagggaccgtgcgttctgcagggaagctggcgcatgcccttaggttctgcagctgtgtgggctgcgctgccttcgggggcacgtgacgccacgtgggaagtgctgtgaggctggtgcggagagcaaacctcctgcaactcttagcgagtaaatgggcacatccacactggagttgaacacaggggcgccggccacgggttcaggctagcccgggcgtctggcttccctgccaggatggctgcctcgttactgagatggaacacacaacacagccgcgtgggcagtgggaggctgcgaggttagcctggcaaagctg

SEQ ID NO: 339904 - DNA, 201 bp, Homo sapiens
  chr8:49339738-49339939
  hypo
cgtgcctctgtgcgggtggcacctgccctatttgtgctcttcgttgtttgctactgggatcagtggcttacgacgaacagcccatggccctggggcctcctgcactgccgtctcctgggagaaaggccgctctcacagccagccatgtgcacatcatcccattggtacccacagatggcactggccccttccttcaaaccc

SEQ ID NO: 339905 - DNA, 560 bp, Homo sapiens
  chr8:49382262-49382822
  hypo
cgggaaaagtagacgtcaatcaggtggaaaagggcagagagagcaccgtccaggcagaagggagagcgtgagcaaggggcccgtgggactgagtgctgcgtgtcgccgcagaggggcatgaggacagtgctgggcacggcggctgtgggcagtgtgggccgacagaatccccaggccaggtcaggtgtcccggccatccatggagaacaaggagtcattacagaggctcggtggcacacggtgaaaatgaggttcttctgggaaattttaggctgcaggatgtgagtggcccacagcagggaaggtctggcaggcagcgagagcttccggactggaccccaagaaggaggtcaggctgggaacacagactcggaggttcccatccacagatggtaccgaggctactgtgtcgggtcagatcttccaggagaccggaggagggacgtggctgcgggaagcaagcccagagccgccagcccgggaccagcgggaggccagggagcaaggccacagcagaggcagccaggaccccaaatatcagaggctcaaatgaagttgac

SEQ ID NO: 339906 - DNA, 474 bp, Homo sapiens
  chr8:49390203-49390677
  hypo
cggacactcactacagcccggtgcctgcggagtattccgaacgcgagatccaaggaaaccacgaaggctcctctgcgggctcccttgcccctctgcggttcagtcgggagacgctcaggcgctgacaacagcctccaggtgccgttccctgcgcatggccccatctttgcgggcagtgtccagtgggcttgtgctcacacctgcgctgggggctccacactagacggccctggactactgaaatagtggacagaagggtctcccgagaatgtccagggtgggcaggcagtgctggggagccagcgggaagggaagggagcctgaggcggagaaacgcccacgcgggagctgctagtgcagccgcaagagcaaggcctgggctgcagtaggggggctgggcagtggcccgcagtgtgcagcaggccctggagaccaggccaagggaagccttggagtgaacctggtcgcaggtgc

SEQ ID NO: 339907 - DNA, 494 bp, Homo sapiens; identical to SEQ ID NO: 333429
  chr8:49468683-49469177
  hypo

SEQ ID NO: 339908 - DNA, 172 bp, Homo sapiens
  chr8:49496391-49496563
  hypo
gacactcgtcctcccgcccttccctgcccagtcctcgcctgactggcctcttccctacatgctgttctccacgttgccttcccgtgagctttcctttttgcctaaacacatttttcagctccatgtttctgacagactggttactaaaatccaacccaacaacgtgtaggac

SEQ ID NO: 339909 - DNA, 401 bp, Homo sapiens
  chr8:49571728-49572129
  hypo
cgtcgtcctatcacagttaagaaagaattatttcgtgagttttacctagcagtttacataaatcagtttacagcagatttggagaaaaagaacattaaaagcagaccaggtgaacgagtttgaaacggcacacggaattggaagggagaaaaggttgtgatcactgctcaaacaagttcttccttccctccaagaaatgaggcgtgggctgtggaacccattgcggctaatcgtaaacaggtgcatcttaaacataggatgccaacctgctccaacatgctgggcaccgggcttagctgcagctaattacgcgtgcgctctgaccgggcggcccacagcggctctgcaggctcagcggggcgagcgcaggaggcgcgggcccgacacgcgtgtttagacct

SEQ ID NO: 339910 - DNA, 239 bp, Homo sapiens
  chr8:49608990-49609229
  hypo
tgtctccccagcttctccaccgcaccatgtgtctgggtctgtgattaccggaggcgactcgcaacaggcccagactcgcctgtgtgcatagcactaagggtaatgacaactcctctgtgtgtgcaggtgcctgttggagacgcagagctctgcagcagcaggtgagctgatgctgcaacctgctaaacgccgctcctgcggagcgccagggcccagagtgcacatggctctcaggctcc

SEQ ID NO: 339911 - DNA, 262 bp, Homo sapiens
  chr8:49747358-49747620
  hypo
cgggtggcccctcatcaggagggatgaggagaggagccgtgggctcgcggaagagcagcgagggacactggcgcacagagcagagaggagcagtgagcaggcggcacccccgggcagggtaaaagggcacgaagaaaagcgaaggtgcgaggggaggaccgactggcagcaagcgtccgggaggggcaggcaaaggctctcctcgaagtgcctttacgcttaggtagaatttccatgcctccctcgcgctccaccctgctgc

SEQ ID NO: 339912 - DNA, 495 bp, Homo sapiens
  chr8:49808471-49808966
  hypo
cgaagcactatatgagactataaatggaattaatttttgtgaaaacaagaaaaggagtccccgaattaattactgctgtaagattgagcttgagaatttgtcttacaaaatcttttaataatgtattattctactcacaaaacagatattggttttgtgcctagtatgttccctgaggtgtacagggaacctcaaggagctcccagactatgggagtgacccctgcggagctgacaagccaatgctggagaagtgcacgggcaggctcaggcgcagccactcaatgggcctgtctgtgtcgggggcaggggcacagagaggggcaggtgagtcgaagctgattgggtgaagaaaagacagtgaaaagacggtgagaccaaaggcacagagcgggtttcccgccccagctaccacgctggtctgcagagcggtaagtctaaactggggagaggtcagaggcagcacaggggcctgtggggcaaccgcaggatccgc

SEQ ID NO: 339913 - DNA, 256 bp, Homo sapiens
  chr8:50313987-50314243
  hypo
cgccaagacagttatggtaaccgcaggcaggcagcaggagtgagcaaaccaaagcgagagcggactccggtgctggaggacagagcctcggaatccagctcaccagagcactatggaggaacaggaagtaacgcaccgccccccactccccggcaaagcttgtctgcatagtgagaccaccacagtcgctcacacacgaagaggtatggaaagctttgctgcttacataatgaggaccctggggagagcgggacac

SEQ ID NO: 339914 - DNA, 199 bp, Homo sapiens
  chr8:53322368-53322567
  hypo
cgcacaaagaaaatgctgtctattcagaactcatttcaaaactcttttcactgagagtgagcgaacaagcgggctcatgtcccgagcccagtcacatctccagcggtccggtgatggccgtggggctggcgccgagtggcacggcctccacagtggcccacaagggtctgttgtccacgccgcgtggaccgcgcaggcc

SEQ ID NO: 339915 - DNA, 785 bp, Homo sapiens; identical to SEQ ID NO: 333434
  chr8:53853387-53854172
  hypo

SEQ ID NO: 339916 - DNA, 1114 bp, Homo sapiens; identical to SEQ ID NO: 333435
  chr8:54163303-54164417
  hypo

SEQ ID NO: 339917 - DNA, 118 bp, Homo sapiens
  chr8:54645736-54645854
  hypo
ccagctgctcatgtactgaggacagctggttcacccgcctggacttgaaggacgctttctttagcatcagactagctcctgagagccagaaattgtctgctttccagtgggaagatcc

SEQ ID NO: 339918 - DNA, 989 bp, Homo sapiens; identical to SEQ ID NO: 333438
  chr8:54792065-54793054
  hypo

SEQ ID NO: 339919 - DNA, 2275 bp, Homo sapiens; identical to SEQ ID NO: 333439
  chr8:54793072-54795347
  hypo

SEQ ID NO: 339920 - DNA, 1496 bp, Homo sapiens; identical to SEQ ID NO: 333440
  chr8:55366131-55367627
  hypo

SEQ ID NO: 339921 - DNA, 2384 bp, Homo sapiens; identical to SEQ ID NO: 333441
  chr8:55370185-55372569
  hypo

SEQ ID NO: 339922 - DNA, 550 bp, Homo sapiens; identical to SEQ ID NO: 333443
  chr8:55382673-55383223
  hypo

SEQ ID NO: 339923 - DNA, 2149 bp, Homo sapiens; identical to SEQ ID NO: 333444
  chr8:56013636-56015785
  hypo

SEQ ID NO: 339924 - DNA, 460 bp, Homo sapiens
  chr8:56364032-56364492
  hypo
cgagtctgcctggaactggcctggagaaggtgcgttctgggccttaaagagtccgactacacctatgccgtacaggcccccagaatgcagcagtactgccttggaccgccggatgcgccagcagacaacggtgaagcggttctggcggtagcagtaggacacgcgctgcagggcgttgtcctggacactctggggcacgatcagcagccccgggtacctgcggtagatggcatgcatgcggttgaccagagaaatgcggaaggattcagacttggcccggctcaggcggctgctcagggggcccaggccaaggcactgatagtcgcggcagcaagccctttccaccaggaggctgctcatggtcatgccgtccgagggcttcaaggctgaggacggggtcagtgtgctgggctccagctcttccgacactgagatctcctcctcctggtcctcagagggc

SEQ ID NO: 339925 - DNA, 139 bp, Homo sapiens
  chr8:56364908-56365047
  hypo
agggggtctgtgagcatccccgtgaagatgacccggtacgtagtgaggaagagggcgccctcagctgggagcagtgctggccaccccgcactgcccgccctcgcaccctcctcacgcccatccggtggcaggtagatgc

SEQ ID NO: 339926 - DNA, 290 bp, Homo sapiens
  chr8:56602062-56602352
  hypo
cgcccttcccggactccatccggctgcgcggggcagagttctgcattgcagaggccgggctgtggggacccaggccagcaccactcagggagcagcttggtgggccccgttcccgggtgtgagggcaggaaaactggctgaggagtcggcactagaagccttgacagggggcgggctccaggtccagccttgtcggagttgaccgagggcttaggccagagatgaggaagaaggacccagaaggtcccgggcgggcacagaggcagcgcccagggaggtacgcgctggcc

SEQ ID NO: 339927 - DNA, 1387 bp, Homo sapiens; identical to SEQ ID NO: 333445
  chr8:56791852-56793239
  hypo

SEQ ID NO: 339928 - DNA, 606 bp, Homo sapiens; identical to SEQ ID NO: 333447
  chr8:57122656-57123262
  hypo

SEQ ID NO: 339929 - DNA, 202 bp, Homo sapiens; identical to SEQ ID NO: 223393
  chr8:57360600-57360802
  hypo

SEQ ID NO: 339930 - DNA, 124 bp, Homo sapiens; identical to SEQ ID NO: 259324
  chr8:58106024-58106148
  hypo

SEQ ID NO: 339931 - DNA, 89 bp, Homo sapiens; identical to SEQ ID NO: 259328
  chr8:58130492-58130581
  hypo

SEQ ID NO: 339932 - DNA, 284 bp, Homo sapiens
  chr8:59059045-59059329
  hypo
gcccggctgccaagcgcgcactgggcagccccacgctcaaagtgttcggcaaccacgccaagaccgagagcggcgtgcagagggagaacctgaagctggagatcctgaagaacatcatcaatagctccgagggctctagctcgggctcggggcacaagcacagctcccgcaactggccgccccaccggtcggaagccactgacctgcaccgtcactccttcgcggagtccctgaaggtctaccccacgcagggccgcaggagcccgcaggagggcggctcccac

SEQ ID NO: 339933 - DNA, 2618 bp, Homo sapiens; identical to SEQ ID NO: 333451
  chr8:60030068-60032686
  hypo

SEQ ID NO: 339934 - DNA, 114 bp, Homo sapiens
  chr8:61156160-61156274
  hypo
cgtctacggccataccaccctgaacgcgcccgatctcgtctgaaacttctcaccatgttccccactaaatcacgttttcgcctgggagaccagatcacctgctctgcagcagcc

SEQ ID NO: 339935 - DNA, 1018 bp, Homo sapiens; identical to SEQ ID NO: 333452
  chr8:61193218-61194236
  hypo

SEQ ID NO: 339936 - DNA, 768 bp, Homo sapiens; identical to SEQ ID NO: 333453
  chr8:61822259-61823027
  hypo

SEQ ID NO: 339937 - DNA, 384 bp, Homo sapiens; identical to SEQ ID NO: 333456
  chr8:65281383-65281767
  hypo

SEQ ID NO: 339938 - DNA, 866 bp, Homo sapiens; identical to SEQ ID NO: 333457
  chr8:65281846-65282712
  hypo

SEQ ID NO: 339939 - DNA, 2224 bp, Homo sapiens; identical to SEQ ID NO: 333463
  chr8:65492354-65494578
  hypo

SEQ ID NO: 339940 - DNA, 69 bp, Homo sapiens
  chr8:66877733-66877802
  hypo
cgagccatcaacgtcacccccatggccgctagagatcatatcaaaggaaagcgcagagtgatccactgc

SEQ ID NO: 339941 - DNA, 1501 bp, Homo sapiens; identical to SEQ ID NO: 333466
  chr8:67024920-67026421
  hypo

SEQ ID NO: 339942 - DNA, 2284 bp, Homo sapiens; identical to SEQ ID NO: 333470
  chr8:67873384-67875668
  hypo

SEQ ID NO: 339943 - DNA, 349 bp, Homo sapiens
  chr8:68115303-68115652
  hypo
cgtgtgcagcttacctgctttccacagggcagtcctctgttcgttgttggaattaaacgcttttgcaaatctatgtgactctaataagcagtccagtagcttaaaaagttgttgtgatgttaaaaagcggtacattccttggtcttgagtatcaacgcgaacatcaaagtccaccgcatctctctttggaaaacaaaccaccccagcatatacacacagtcacaataattttacttgatttacaactcaatgctccccaaagaccagttttacaagaaagccacagatactcagcttgatctaacctaacagaaagtaagggaaggtccaccttccagtacgcatcctc

SEQ ID NO: 339944 - DNA, 1308 bp, Homo sapiens; identical to SEQ ID NO: 333471
  chr8:69242761-69244069
  hypo

SEQ ID NO: 339945 - DNA, 110 bp, Homo sapiens
  chr8:70246389-70246499
  hypo
cgcgccaggtcctggggtgagcacacatggctgcccgtcccgccgtgtctctcctccgcactgggtcccggggtgcgtgtgcaggtgtgtctgtccctcctccgcgccac

SEQ ID NO: 339946 - DNA, 1917 bp, Homo sapiens; identical to SEQ ID NO: 333473
  chr8:70744866-70746783
  hypo

SEQ ID NO: 339947 - DNA, 85 bp, Homo sapiens
  chr8:71017208-71017293
  hypo
cgtgagccaccgcgcccagatgatttggcttcttaatcacgcatccagaggtgctggctggctcctgagccgggagacatctgtg

SEQ ID NO: 339948 - DNA, 311 bp, Homo sapiens; identical to SEQ ID NO: 333477
  chr8:71316520-71316831
  hypo

SEQ ID NO: 339949 - DNA, 226 bp, Homo sapiens
  chr8:71447632-71447858
  hypo
cgcgacacaggctgagtatttctgttcctttttgcccccgctctttcctgattaattatttctaaataatgcgttttaaccgatcaagcgttgccttttccaatactacctatgacctgcccctcccctattctaagcctataaaaagctcgtgacccagccacgaggggaggaaaaaaccatccgactaagggggtgggcgaccaccccccagagtcccttctcc

SEQ ID NO: 339950 - DNA, 232 bp, Homo sapiens
  chr8:71447942-71448174
  hypo
cgtggtacaagagcttgggaactgccgaacgcgggtacaagagcttgggaaccgccgaacgtgggtacaagagcttgggaaccgccgaacgcggatagaagctataacacaggcgagctggggcatgccagcgtggctgagcagggcgcgggtggggcatcgctggccggaggtcccggtttgcaaagtgaccgagaagaaaaatcctgcatcaaaagttacagttgctgcc

SEQ ID NO: 339951 - DNA, 100 bp, Homo sapiens
  chr8:71522547-71522647
  hypo
cggtatccgcgggggccctggaaccagtcccctgtgaagactgagggacgactgtacatgccatgacatgctctcttcccatgctctcccctgcctttgc

SEQ ID NO: 339952 - DNA, 933 bp, Homo sapiens; identical to SEQ ID NO: 333478
  chr8:72459564-72460497
  hypo

SEQ ID NO: 339953 - DNA, 1450 bp, Homo sapiens; identical to SEQ ID NO: 333481
  chr8:72755554-72757004
  hypo

SEQ ID NO: 339954 - DNA, 1489 bp, Homo sapiens; identical to SEQ ID NO: 333483
  chr8:73448692-73450181
  hypo

SEQ ID NO: 339955 - DNA, 145 bp, Homo sapiens
  chr8:73979624-73979769
  hypo
cgccgaacttttttccaagttccttgacaccgaggattaccaattgcttgccaatggagagtctgatttctgaaacgatatttcgaaagtgttagttacactaaaagcataccgaagaaaggtctaatttacagaattaaaactc

SEQ ID NO: 339956 - DNA, 120 bp, Homo sapiens
  chr8:74674345-74674465
  hypo
cggcggcaaaggtaaaaggccgacgacaacggacttggtccaggtgaacccacctgacaggcgcacgaaaacttcccttgccctccccggctactcgttgtccaccgaaattcattctcc

SEQ ID NO: 339957 - DNA, 943 bp, Homo sapiens; identical to SEQ ID NO: 333485
  chr8:75896528-75897471
  hypo

SEQ ID NO: 339958 - DNA, 710 bp, Homo sapiens; identical to SEQ ID NO: 333489
  chr8:77589904-77590614
  hypo

SEQ ID NO: 339959 - DNA, 1054 bp, Homo sapiens; identical to SEQ ID NO: 333492
  chr8:80524710-80525764
  hypo

SEQ ID NO: 339960 - DNA, 804 bp, Homo sapiens; identical to SEQ ID NO: 333494
  chr8:80803351-80804155
  hypo

SEQ ID NO: 339961 - DNA, 506 bp, Homo sapiens
  chr8:81213177-81213683
  hypo
cgatgatgtgcagatctggcacttgcttgcaggattacactgcagtgaaggagaagtatgccaagtacctgcctcacagtgcagagcggtatgccgccaaacgcttccgcaaagctcagtgccccatcgtggagtgcctcacttactccatgatgacgcacggccgcaacaaccgcaagaagctcatgatcatgcgcatcgtcaagcacgccttcgagatcatccagctgctcacaggcgacaaccctctgcaggtcctggtgaacgccatcatcaacagtggtccccgggaggactccacactcactgggcgagccaggatcgtgagacgacaggctgtggccgtgtccccattaagccgtgtgaatcaggccatctggccgcagtgcacaggagctcttgaggctgccttccggaacatcaagaccattgctgagttcctggcagatgagctcatcagtgctgtcaagggctcctccaactcctatgctagcaagaagaaggac

SEQ ID NO: 339962 - DNA, 2529 bp, Homo sapiens; identical to SEQ ID NO: 333495
  chr8:81397833-81400362
  hypo

SEQ ID NO: 339963 - DNA, 915 bp, Homo sapiens; identical to SEQ ID NO: 333497
  chr8:81785915-81786830
  hypo

SEQ ID NO: 339964 - DNA, 1369 bp, Homo sapiens; identical to SEQ ID NO: 333498
  chr8:82192428-82193797
  hypo

SEQ ID NO: 339965 - DNA, 124 bp, Homo sapiens
  chr8:82903010-82903134
  hypo
cgctttacgtattcaagcctcagcaatggcagacgctcctccctcagccaggcttgcagcctcaccgttggatctcagactagcagtgagcaaggctcactgggcgtgcgacccacgggcatgc

SEQ ID NO: 339966 - DNA, 70 bp, Homo sapiens
  chr8:86544713-86544783
  hypo
cgggcacctccatgttaattagcaatagaagttagaaaaattcacaagaatttatggccgggtgcggtga

SEQ ID NO: 339967 - DNA, 83 bp, Homo sapiens
  chr8:90768494-90768577
  hypo
cgcgcgttaacagaatgaatggatagaaaagtcttctgagtactttttaagaaaaaagcttattggccgggcgcggtggctca

SEQ ID NO: 339968 - DNA, 124 bp, Homo sapiens
  chr8:90913515-90913639
  hypo
cgtccgcctcggccttccaaaaggaatttaggtactttaaaatgctgttatgtatgttaacggaaaagtaactacatgcttcattttcagaaccaacattcaaatgaaatgaacgtgtcaaatc

SEQ ID NO: 339969 - DNA, 518 bp, Homo sapiens; identical to SEQ ID NO: 333503
  chr8:91657148-91657666
  hypo

SEQ ID NO: 339970 - DNA, 1072 bp, Homo sapiens; identical to SEQ ID NO: 333505
  chr8:91996920-91997992
  hypo

SEQ ID NO: 339971 - DNA, 71 bp, Homo sapiens
  chr8:92120822-92120893
  hypo
cgtgcaactgagttaagatctaaagcaagcttgtctaacccgtggcccgcgggccacatgcggcccaggac

SEQ ID NO: 339972 - DNA, 107 bp, Homo sapiens
  chr8:94684099-94684206
  hypo
cgatatatcaccaatatcacagtgtgtaaacactgtgcttaattacaaatatcagagcgatatatcaacagtgtgaaaacactgtgcataattaaaaatatcagagc

SEQ ID NO: 339973 - DNA, 136 bp, Homo sapiens
  chr8:94685462-94685598
  hypo
gtcaatatcacagtgtgtaaacactgtgcataattacaaatttcagagcgagggagcgatgtatcaccaatatcaccgtgtgtaaacactacatgtaattacaaatatcagagcgatatgtcatcaatatcacaac

SEQ ID NO: 339974 - DNA, 1049 bp, Homo sapiens; identical to SEQ ID NO: 333506
  chr8:94712366-94713415
  hypo

SEQ ID NO: 339975 - DNA, 60 bp, Homo sapiens
  chr8:94747749-94747809
  hypo
cgtcaatactgagggacagattttttaagtgaacataaaatccaagaggggaacgagaac

SEQ ID NO: 339976 - DNA, 39 bp, Homo sapiens
  chr8:95556587-95556626
  hypo
cgtatcaacattcacactaaataaagattatggccgggc

SEQ ID NO: 339977 - DNA, 79 bp, Homo sapiens
  chr8:95816370-95816449
  hypo
cgttttcatttatagccactgttagtaatgaggaaagacagcagaaaagaaagctcagtcaaaaaattaaatgcgggcc

SEQ ID NO: 339978 - DNA, 78 bp, Homo sapiens
  chr8:95848311-95848389
  hypo
cggcaacagcgacagtaaaatctagtttccggggacagcacttgcaggagtgtagctgctgctttcagggtctggtcc

SEQ ID NO: 339979 - DNA, 1485 bp, Homo sapiens; identical to SEQ ID NO: 333518
  chr8:97172008-97173493
  hypo

SEQ ID NO: 339980 - DNA, 264 bp, Homo sapiens; identical to SEQ ID NO: 259451
  chr8:97339835-97340099
  hypo

SEQ ID NO: 339981 - DNA, 335 bp, Homo sapiens; identical to SEQ ID NO: 333520
  chr8:97657762-97658097
  hypo

SEQ ID NO: 339982 - DNA, 931 bp, Homo sapiens; identical to SEQ ID NO: 333525
  chr8:98880996-98881927
  hypo

SEQ ID NO: 339983 - DNA, 1123 bp, Homo sapiens; identical to SEQ ID NO: 223446
  chr8:99438692-99439815
  hypo

SEQ ID NO: 339984 - DNA, 1157 bp, Homo sapiens; identical to SEQ ID NO: 333530
  chr8:99954061-99955218
  hypo

SEQ ID NO: 339985 - DNA, 1300 bp, Homo sapiens; identical to SEQ ID NO: 333531
  chr8:99956460-99957760
  hypo

SEQ ID NO: 339986 - DNA, 382 bp, Homo sapiens
  chr8:100708328-100708710
  hypo
cgcacggtggcgagagtgccatggacctctgccacagtggattttatggttgcgggacctcggtgccttcctgtgcacagctggcactcttcacgccgtgtctctgatgacttggtagtagagaagtccctcaagtccttcaaggacaagaacaagaagcttgaggaaggcggccaagtgtacacccccaccccacagaggtggtggtgaataagtcgctcgggcagagggagctggatgagctgaagcgctactgccttggcttctgcctgctgtggatccatgccaagatcgtggtgctcatgctgtggcacatccttgacagccacaccctgaccaggcaaagcgcaggcagtttctccggatccgcgccgacctcctc

SEQ ID NO: 339987 - DNA, 445 bp, Homo sapiens
  chr8:100796509-100796954
  hypo
tccatgttggctttcgtatcctttttctttcagaacaaatgccctgaggtagaggagttggtcttcagccattttgtgatctgtaatgacacacaggagacactgcggtttggccaggtggatactgatgaaaatattctgctggcgagtctccacagtcaccagtacagctggcgctctcacaaatccccacaggtatttgagaaacacccttacaaacagccattgttaaggttggggattcatttcttctgcacttgtgtgcctgtccagttatttccctttttaagtctccgaaggaaccacacagcgtagctacatctgacggaaacccaagagtgtttagagatgggagcacacgcttctcttggaatggagcattttcctgtttagcactggtgcttggggcgggggcagcagggtgtggtgatgaagaggctgactc

SEQ ID NO: 339988 - DNA, 76 bp, Homo sapiens
  chr8:100851164-100851240
  hypo
cggctgtagcgccaaatgacagagggtcggagagagggctggtgaggcgatgagagaccaaacctggcaaggcccc

SEQ ID NO: 339989 - DNA, 96 bp, Homo sapiens
  chr8:101717065-101717161
  hypo
cgatgtaagtgttctgtacaattaagtccccataaaaagccacgtaataactgtgtaagaggcaacttggtaaataaatttaaatcaccttagaac

SEQ ID NO: 339990 - DNA, 216 bp, Homo sapiens
  chr8:102039330-102039546
  hypo
cgcttgctacatgcacagatctccttgaccctgcagccaatgcctcggtcagccagtgcacctgtactgtctctcctcttgggatagggtccctctccatcaggtacaatatatgggaaatcgaggggtggcctttgtcccagctgtcttagtcaccgcattcttcaggtcactaaccgccccattggagagggttcacgcagctcacgtgtaaac

SEQ ID NO: 339991 - DNA, 160 bp, Homo sapiens
  chr8:102190390-102190550
  hypo
cgttttcttacgaataacagggcttatagtttcacttgagtaatttttccaccctcttaaactgcagtttaaggtcttgatgaggttaccaaatctctgacaagcatatattctttccagtcttcacagggcacgcttcggcccttgctaggagtccatc

SEQ ID NO: 339992 - DNA, 250 bp, Homo sapiens
  chr8:102450882-102451132
  hypo
gaaacttcctcgaggcgctggggtggggaggctgtaggctgcaggcctgcttagcgcccttctcaacaactgctgtcatcagggagagcgagcagagtgcgtgcactccgggcggcgaagccccagcagaggcctgcctggctgtgctctgggtgccactcattcatgagggctgcgctgcgctgcgggcaccacgattcccacggaggggctgtaggtacttaaggggccctcagacgtcaggacaaac

SEQ ID NO: 339993 - DNA, 860 bp, Homo sapiens; identical to SEQ ID NO: 333541
  chr8:102505557-102506417
  hypo

SEQ ID NO: 339994 - DNA, 89 bp, Homo sapiens
  chr8:103315038-103315127
  hypo
cggcgtggataataagactcctgtgctttcatctgttcaaccggcagccctgagtttgaactggttaagagcactgcagtgaaatcttc

SEQ ID NO: 339995 - DNA, 124 bp, Homo sapiens
  chr8:103572768-103572892
  hypo
atcaagtcaaagttcgagtgaaggatggaaaggtatgtgtgtcggctgagcgggagaacaggtacgactgccttggatcgaaaaagtacagctacatgaacatctgcaaagagttcagcttgcc

SEQ ID NO: 339996 - DNA, 2917 bp, Homo sapiens; identical to SEQ ID NO: 333543
  chr8:104510995-104513912
  hypo

SEQ ID NO: 339997 - DNA, 1394 bp, Homo sapiens; identical to SEQ ID NO: 333547
  chr8:106330407-106331801
  hypo

SEQ ID NO: 339998 - DNA, 1702 bp, Homo sapiens; identical to SEQ ID NO: 333549
  chr8:107669381-107671083
  hypo

SEQ ID NO: 339999 - DNA, 756 bp, Homo sapiens; identical to SEQ ID NO: 333552
  chr8:109799189-109799945
  hypo

SEQ ID NO: 340000 - DNA, 142 bp, Homo sapiens
  chr8:117336931-117337073
  hypo
cggcagtattgaagccaacgtctcatgtaaagatttagggctttttcatcaagacactgtattggaaaatcgcctgctaagaatgtggtcattaccgtacattttgtgtgcaaagcaaaggcggttgatactgtaccttggc

SEQ ID NO: 340001 - DNA, 120 bp, Homo sapiens
  chr8:117631330-117631450
  hypo
cgggcgcgtcgtccatctcacggaagcaagaagctttaatgtgctcttggatgatgtggctctgcccctcgtgcttctgacctccatcatgagaagagtaggtcccaacgtgagaccacc

SEQ ID NO: 340002 - DNA, 221 bp, Homo sapiens
  chr8:118531602-118531823
  hypo
cgctcatcacaatagtgttctgtttgtccccatgacaaacatgctgcagggcttttgcctggtttgttcagtacgctatcttcactcctagcacccagcacataataggtgctcagccaatatttgtcgaatggtaattaccgaagacctgcgaattactatgtttaaaatctctaccagggttcctatgacatatttagtaactatttcctggaaagtcc

SEQ ID NO: 340003 - DNA, 90 bp, Homo sapiens
  chr8:119057056-119057146
  hypo
cgccccaccgcatgcttttgtaaacaaagttttattggaacatagctcatttgtttacatattgtctacagctgctatcctcttacaagc

SEQ ID NO: 340004 - DNA, 192 bp, Homo sapiens; identical to SEQ ID NO: 333560
  chr8:119123513-119123705
  hypo

SEQ ID NO: 340005 - DNA, 121 bp, Homo sapiens
  chr8:120846246-120846367
  hypo
cgaagccatcgtgtttgtatttcatgttcatgacaataaaacttgtaaacttcagtaacagttaaaccttctttaattatggattagccattaacatttttgaaacgtggaccatttaacc

SEQ ID NO: 340006 - DNA, 596 bp, Homo sapiens; identical to SEQ ID NO: 333563
  chr8:121823361-121823957
  hypo

SEQ ID NO: 340007 - DNA, 376 bp, Homo sapiens; identical to SEQ ID NO: 333564
  chr8:121824316-121824692
  hypo

SEQ ID NO: 340008 - DNA, 233 bp, Homo sapiens
  chr8:123830706-123830939
  hypo
cgatgctggacccgctccctcctccctctctgcctagtttctcgcccctcagattaggctctgtctgtggctagcttgaggggtggccatgaggcctaaatgagggcgtatctatatggagacagcacttggcctggggctctcccacattccctgttagtctctcacacaggcacaaaaccttgctttaaaaatgtgtcttacgatgaaacttggcatccaggacgcgcccc

SEQ ID NO: 340009 - DNA, 149 bp, Homo sapiens
  chr8:123865814-123865963
  hypo
cgtctcagccacgctcagccaggctgctcctttcagccgtgcccttgctctggacctcacccctccgctcccctccttggaattcatactctcccacccttctctggctggcaatttccacccattcttcatggacgaggacaaacacc

SEQ ID NO: 340010 - DNA, 318 bp, Homo sapiens
  chr8:123966060-123966378
  hypo
cggtcagagggcagcagccgggacggccagggtagcgacgagaacgaggagtcgagcgttgtggattacgtggaggtgacggtcggggaggaggatgcgatctcagatagatcagatagctggagtcaggctgcggcagaaggtgtgtcggaactggctgaatcagactccgactgcgtccctgcagaggctggccaggcctagacaggtaattccacctgctcacccaggcagcaggggagaacgcagcttgctttcttttcgttgccagggttaatatagattgtagggtacagagatgttgacacagatggtggc

SEQ ID NO: 340011 - DNA, 303 bp, Homo sapiens
  chr8:124186923-124187226
  hypo
cggtgccttcgacgtgccagccccaaactgggataggcacttggagttccaagaagctaagtcatgcctgaccccacccccaccccaaattgctcacagcctaaaggaggagattcccgcttaaaccagcagttacagacaaacgcaatccaggctctgtcatggggcccttaaggaatttacttaacctccctgtgcctcagtttcctcatctagaaaaacattaccgggctgcgccaggatgcagagtatatgcaacaggactatccgtccctgctgctgccctttctacccgccctgccc

SEQ ID NO: 340012 - DNA, 57 bp, Homo sapiens
  chr8:124238881-124238938
  hypo
cgaaaagtctcaatgcgtggcgaaaagtcccaacgcttccagataaaggaaagccgc

SEQ ID NO: 340013 - DNA, 308 bp, Homo sapiens
  chr8:124730010-124730318
  hypo
cgaggcgactttctgacggggcgtgtctcagcaggtttggagtgcagatgcacaagtccacaccttacgtaaccacgccacgtgaggcgcattaagtaaccactcagatgcgctcgtgcttggcttggagccactgttgtctgtaaaaggtacaattacgctgctaacgctgtacctctggcttggggctcacgcccagactcgcacccaggctcgcttgcgcccagagaaagagtaaagccatgttgaaactccctgcgattcctcgagtgtttttccagctgcccgccaccccaccgacttttttc

SEQ ID NO: 340014 - DNA, 62 bp, Homo sapiens
  chr8:125498221-125498283
  hypo
cgtcagcttttggaattgagctgcttcctcgaaaaggtccctcgctgtggatggcacttatc

SEQ ID NO: 340015 - DNA, 49 bp, Homo sapiens
  chr8:125498538-125498587
  hypo
cgaatttacggattacagttattgatggaggacacatggaagaggattc

SEQ ID NO: 340016 - DNA, 236 bp, Homo sapiens
  chr8:125573965-125574201
  hypo
cgaccctttgccctctctgcttgtgagcagcacatatggtttagtgaagcacacagcggggaagaggagctccttacagaccaagccaagcaccccaggtgggacacgcactctcaagcactctcaaactatagccgtggctcttggctctgagtgcgtttaaaattgagtgtgtatccaaggaaggcagacagaggccacagtccccaggatggctgaaaaatgctaatgggagc

SEQ ID NO: 340017 - DNA, 146 bp, Homo sapiens
  chr8:125580656-125580802
  hypo
cggccacgttcttcaatcaaagccttccggacagcctgcttttctgtttcttccaataagagatacttatcattgacatcttggagagcactgtccaactgaggctggatatcacctctccctgcaaaaaacagagacccaagcac

SEQ ID NO: 340018 - DNA, 73 bp, Homo sapiens
  chr8:125680364-125680437
  hypo
cgctgggctctaaaaccaagatgccaacaggcccggccagcaactgaggaggacacagcgcaagcggccacac

SEQ ID NO: 340019 - DNA, 334 bp, Homo sapiens; identical to SEQ ID NO: 223479
  chr8:125985497-125985831
  hypo

SEQ ID NO: 340020 - DNA, 132 bp, Homo sapiens
  chr8:126042734-126042866
  hypo
cgggaaataacgacattggggtttagaaagaatgcaaaatcagtaggagccactggtatgcactggatgtcaagaaacccatcactgcaaagccgagatcacgccactgcactccaacctgggcgacagagc

SEQ ID NO: 340021 - DNA, 340 bp, Homo sapiens
  chr8:126044399-126044739
  hypo
cgataagaggaatttggtaatgtgaggtttaagttaggttttgtgacaagaagtcccacgtagtcctggttggtcttctgtaccttgtacactgctccaccgtggagcagataaactggccaatcagcgccaggaactgctcggtgtaccgggaatggaactgcttcagcagagtgagcagtcccaggacaagtggtggccaatcaaccgggtcggtcggttttcggcagaccattcctgcaagggaacaagttgcaacaccatatgaagtacttgccttcagcaacattcattaaataccaacgctgtgaaggtcaaaatgtttggggcccatattctc

SEQ ID NO: 340022 - DNA, 200 bp, Homo sapiens
  chr8:126061282-126061482
  hypo
cgttgtaatttatgatacgagatacttcttcctgccaaatcttcagaccataaatgttgacatagtcctgtatgtattcaaaagaacgatggaatccatccatggtcgctcccaactctttcagcttgggcatcaattcacttggctgtggaaaaggggaaacataaagctcttacactggagtagattgtcaactattc

SEQ ID NO: 340023 - DNA, 971 bp, Homo sapiens; identical to SEQ ID NO: 333568
  chr8:127569937-127570908
  hypo

SEQ ID NO: 340024 - DNA, 62 bp, Homo sapiens
  chr8:128745557-128745619
  hypo
cgatgactcgcacttgtattcccagcagtttcagaggcaaaggccgaaggatcgctttaacc

SEQ ID NO: 340025 - DNA, 354 bp, Homo sapiens
  chr8:128867892-128868246
  hypo
cggtgaactcccgtcatgtcaggcctcagcagactgagcgggaacccccaccagcgaggttgctcaggacagcgtttctcttgggcctgtgtttggaacaagtatcctttgaactaatcactaacctgtgaaaatggatagacctcgtgtgaaaatgaaaatgtctggcttcccttctgaggagcggaggcatgaaaggtgtggccggtaggggtgggggccccacacctgtgcagccgccctggccagagcccacaagcagcgtcccctggtcatgccccactcccttctccataatctcgcccctccctgaccaggccacctgacgttgccatttatattcaagttcattcc

SEQ ID NO: 340026 - DNA, 997 bp, Homo sapiens
  chr8:128871653-128872650
  hypo
cgccgtggctgactccaaacttgaactctggtctctgtttttggagcttgcttccttcctacgaccctagactgctcctcctaaataattaagtggcaaacatggcacagacagtaacctcacataagaagctatgaggttaggacagaaatatccactgctggcctgcgaactattcacacaggtctgactccccgccagagtcctggctgccctggtcctgtggaatcccgtcatggcttctgtctaaacggagcaggctcagggccatgctgaacttggagaaatctgtgcaggagtcagatttgggctttagagtcacctggggttgaatctcgggcctgctatttattgaacctgtcctagcctcaatcgccttatctgtaccatggggatgataccatctaggtcgaaggtagttgcaggagattctcatgcacggaggcccttggccgtcatttgtttctttgtctctacaagcagagaggctgagtcatacagatcctgaggggagatcactttctcttccctcctttcgtgtgtcatctccacctgggtgtggtgagccccaggaataatgctgtgacatcaagccccgtgaacacctcctttcacacggaccccgtgactggctgcggctgccagcggtgatgagaactgatgacactccagggctaccaggaacggtgtgtgtgcctctgggcagggccacttcctagaaccatggggctgctctgtgaagagaaccggctcccagtgagctccaggagacgaggagcaggtcctggtggcggaggtgctggcgcaggaggccggctcctggcagaatcggcttccagctctgggcactggggtgcggtgtgggaccagcaacaggctgctcctctgccaggaaccgccagaaccaaagtcttctcgaaggcatcttcagaaggcaagcacagggctgagcactccggagaggagcctttgggggaaaactttttctcggagcttc

SEQ ID NO: 340027 - DNA, 617 bp, Homo sapiens
  chr8:128888848-128889465
  hypo
cgtacactcttcccatctcctggcccctccagttctgaagggatggggactaagtgggatctgtcctctaagcaggcggaggagggaaccatgtcagctcctaggtgcccccagagcacctgctgccagttttccacaactcctgtcctccgtggcgcttgggtgacagcagagcagagccgatgtgcctgctcctggtcatgggctgttcgtgctgtcatcgctttcatttgccccatccccccaatttggacttacccagaatccttgggcaagctagatggctgccaaagtttacttagcgagatgtgcctgcgtgacttgagtagagacctgcttctgagaaagtcagaagtgcattccaaagtcaggagcgtgacctccccggaagcccagctaatccaggttttaaagaggagttggaacaaaggtggtgcttatgggatgtatggagctgtgggatgtgggagaggacaggtttagcagagtggcgtggtggaaagtttcctctcgccgaggaggacaactccccagcgcctgagacagcgggagctcagagcgcctagaatgtgcccagattctaaagtgaagcaggctgtggtgtgatgatggccccc

SEQ ID NO: 340028 - DNA, 440 bp, Homo sapiens
  chr8:128893135-128893575
  hypo
cgctcagctttccagtcatttcttaagcgatgttgagttcccaagcactgtgccggacacgcatgggttgctggaggctggcagaacccgaatgtcagtattcctgaagaatggctctaagcaatgtaccttgcagagctcaagcagggctctgctgcatcatgcccatgaaggtgcctgctggtagaaggctggttctatactggctgcttgcctcctccttgtggagacccacattgtgtctggcaaagtgcagaaggaaatcaagcccttaataacattagggaactggactgggttcggtttgcatctcccgagtctgactcgtgggagtaaccaccataatagcagcgctgtgctgttgagggtgactttgactatctgcttgtgttgtgagcccactgtgtgccggagcactctctatacattcagtcttgtcc

SEQ ID NO: 340029 - DNA, 355 bp, Homo sapiens
  chr8:128931048-128931403
  hypo
cgctgcattcttttctaaccacccaagagataagttgaacccccactcgtagcaacctggccacttgtctgtttagtcagccctggaatacctccactgacggggcactcactaccactgaaagatggtgtgcagaattctaatgttcttcctctcgcggggtcgtgggggctttcttccagttctctgggttctgatcgttggggctgtcctgacacccttcttcagatgaccgctgtcaggttggtgaaggcagtgcgcgttgggccttccctccctagagatgtgattgcacgtcgggtaccaggagcctggccagccctcagcttctgctaaccagggagcagtgaagccc

SEQ ID NO: 340030 - DNA, 107 bp, Homo sapiens
  chr8:128957492-128957599
  hypo
cgcacatgctttcttggtcacttatgtgagagctcatccaggatttataccctgaggcgacttcactgccgtggaggctaaggaacattttctgtttcataagacgc

SEQ ID NO: 340031 - DNA, 208 bp, Homo sapiens
  chr8:129069818-129070026
  hypo
cgtgggaggtacagaatgaggtgtccgtccctccaaggcacggtgacctagaatcccactgctcactgcctgtctctgttcagcctttcagttcataaacatgctttcctccctgcattttgacatccatcatcgtttaaattccaggtcgtcatccttgtagaacgaggttcggatctcggcattaaatctcccccacggtgtgtgc

SEQ ID NO: 340032 - DNA, 159 bp, Homo sapiens
  chr8:131064030-131064189
  hypo
cgtgacagaagtgctgtccacacgacaacatgtaagcctcgtgcccctccaccctcttcttgccctgttcacatcaacgggcgcacaagtggacgtggtggaggtggaatgcggaaggtggaggacagaaaggggccgaaggcccacagtttgtaagcc

SEQ ID NO: 340033 - DNA, 1205 bp, Homo sapiens; identical to SEQ ID NO: 333570
  chr8:131455079-131456284
  hypo

SEQ ID NO: 340034 - DNA, 2397 bp, Homo sapiens; identical to SEQ ID NO: 333571
  chr8:132051950-132054347
  hypo

SEQ ID NO: 340035 - DNA, 267 bp, Homo sapiens; identical to SEQ ID NO: 333572
  chr8:133491923-133492190
  hypo

SEQ ID NO: 340036 - DNA, 1533 bp, Homo sapiens; identical to SEQ ID NO: 333573
  chr8:133492250-133493783
  hypo

SEQ ID NO: 340037 - DNA, 101 bp, Homo sapiens
  chr8:134254220-134254321
  hypo
cgacacatgccccgacccactgcacacggggaatgccatactcactgtatcccatgccctgcacgaagtacttgaaggcctcagcgagcttggccggctgc

SEQ ID NO: 340038 - DNA, 120 bp, Homo sapiens
  chr8:134268431-134268551
  hypo
cggtgataaaaattctcacctcctagagttactatgaagattaactgagatcatgcacacacagcaacgtagaatgaaactagcacatggtaaactctcaatctacgttagctaattatt

SEQ ID NO: 340039 - DNA, 171 bp, Homo sapiens
  chr8:134335659-134335830
  hypo
cgctgttctgccaggtggcccagcccgacgggtgtctccctagcttctccgacagctttgccaccttgcacccacttgcccgcgtgctcagtcacgtcctcctcgtcggccgcgttccccaggcagctgtgtcagcctcccaaaatacaggcaagcctctggcctggggcc

SEQ ID NO: 340040 - DNA, 1981 bp, Homo sapiens; identical to SEQ ID NO: 333574
  chr8:134582236-134584217
  hypo

SEQ ID NO: 340041 - DNA, 66 bp, Homo sapiens
  chr8:135805728-135805794
  hypo
cggttttgggaagaaactgttccacctcaactcatcgggcattaattagattcttgtaaggagcac

SEQ ID NO: 340042 - DNA, 1267 bp, Homo sapiens; identical to SEQ ID NO: 333575
  chr8:136469252-136470519
  hypo

SEQ ID NO: 340043 - DNA, 624 bp, Homo sapiens; identical to SEQ ID NO: 333576
  chr8:139509098-139509722
  hypo

SEQ ID NO: 340044 - DNA, 1771 bp, Homo sapiens; identical to SEQ ID NO: 223494
  chr8:140714565-140716336
  hypo

SEQ ID NO: 340045 - DNA, 199 bp, Homo sapiens
  chr8:140770366-140770565
  hypo
cgtgacagcggggaggccaagcgctcgggcctgggaagccagtgtcacccctcagggccgggatggctggaggtgcccatcgctggacttgctggctggggctggagcaaatgccaggcttatgtggggtggggacatgtgcctgtggaggagaccgccctgtgtggaatgggactcacactgagcatgcccacgtcgc

SEQ ID NO: 340046 - DNA, 368 bp, Homo sapiens
  chr8:140785341-140785709
  hypo
cgtggcaggaccacgcctctgaaggagcactggctgcctcgggagtcacgtggctgcacctacccagcaggtagggctgtgtggggttagtcacccagcaggacgcctggcgcgcccaggtctctgcctctgtccctcctcgtgccgatggctctaacaggtttcaacgaaaatccaaagtgaatgctagagagtatttagcaccagtgggatcactaaaatgaacacaaatgaagacaaagttcccaacggctgccagaggccccggctacattcctggagtttgtcctgaaagcctccctgggagcaggcagtgcagcagacggcactgggtgggggaatcagcagcctgaacaggcgactgcccc

SEQ ID NO: 340047 - DNA, 322 bp, Homo sapiens
  chr8:140799730-140800052
  hypo
cgggcctgcctggctctgtcctcccttctgccccgaccctgcagacgctttcaaagcctaatatggaaaaaggcctcaccgaaagcttaaatgtaaatgaaccaagctaaggacgctgatatacacagaatttctttctacatggttattaggttaatagttaaaaactggcgactattaactttcactttaaatttattgttcaagctaacaccactgtttttcaacgtccctgtccggggtcggtgctacctgccaatgagcacctgggtgtgtttctgtctagagaccactgggtgctcaccagaccccacaggaagac

SEQ ID NO: 340048 - DNA, 482 bp, Homo sapiens
  chr8:140815079-140815561
  hypo
cgtgtgcatccgtatctgaaggtgcgtgtgtgtgtgctgttgtatgagtgctctgtgtgcatgttgtgtatgtcggtgtgtgttgtgtgcctccatgtgtgaatgtgtatgtgaagatgtgtgctgttgtgtgagtgcattgtgtgcgtgttatgtatgtcagtgtatgttgtgtgtgcatccgtagatgaacgtgtgtgtatgtgaaggtgtctgtgtgccgtcgtgtgactgtgctgcgtgcttgttgtgtatgtcattgtgtgtgcatccatgcgtgaatgtgtatgtgaaggtgtgtctgtgtgccgtcgtgtgagtgtgctgtgtgcgcgttgtgtatgtcattgtgtgtgcatccatgtgtgaatgtgtatgtgaaggtgtatgtctgtgtgctgttgagtgtgtgtgtgtcacaggctctcatcaggctcacagcctctcaggaaggcaacgtccgttggaaactctagagcggc

SEQ ID NO: 340049 - DNA, 131 bp, Homo sapiens
  chr8:140932087-140932218
  hypo
cggtctccatgctccctggttttacccttcatgacccgctcagactccaggcgcggcatggcactgcccggacccttccgcctagtgctggaaccatttcaacactcttccagatttgttctgtctgtaac

SEQ ID NO: 340050 - DNA, 641 bp, Homo sapiens
  chr8:140937017-140937658
  hypo
cgtccacctccttcgctcctggaccgtgaattctacagagtgagggaattacatcttactcatcttttacaggcctagaactcaagggctcattacatgtttgctgaatgagttactggaaacggccttagatcacctgaatgactttcatgagcaggggggtcagcggtgttcagtgtggccccagagggtagagccagagcagacggcctgcagcggccaccagcttcgtgttctccagcacgaggggccaccccactacaactcacgcctcccactgcctacaggggaaagctcccgaaaagcacacaaaaacagctccctgaggaatccgggagtaaaacaaaagcagcagaatgtggaggagtcgacacatggaatgagctcgcccacggggtggcggcgcctcccacttttccctcgacctttcctccacagtgtggaaaaaaatgccctgttacagagcatcaggcaacagcactggaggccgaaactctaacagaaatatcgcctttctgcccaggaaaaggggtggagtctttgtaggctgcagagttgcatatggaggtgggggaatcttagaggcgagagagctagagaagtggaccctttcattctgcatagaaacctgcagaaatctc

SEQ ID NO: 340051 - DNA, 110 bp, Homo sapiens
  chr8:140950018-140950128
  hypo
cggaaatgcggacgcaaatgtcacgtattattaccgctgccgccacggtttctaatcgcgttaaacatgggtaatgaagccttctctggccagcgcttgacaaagccatc

SEQ ID NO: 340052 - DNA, 413 bp, Homo sapiens
  chr8:140963130-140963543
  hypo
gtgaacaccggctccgaaggcctctttggtatgcaccaaaacacatggcatgcggcaagaggaggcgcggcagggagggagccgcacccgccttacagccaaacaaatgaactataaaagggtgaggtgagtcaaccgaggacaatgccctgccaaacagagtgcctcacctgctcacggcttggagtcagccagacccaggcgcgcacatccccaccgccacctccccacctgtgacacaggcctggttacgccacctctctgagctccatttcttcctcctaagaagttggagaatcaccctgacacctcacagaattggtatgggaaggaacaaagcctctgccaacgctcctcacacaaagccctactcctataggggcttgatgcctgcaggccccaccgttctcttc

SEQ ID NO: 340053 - DNA, 498 bp, Homo sapiens
  chr8:140971025-140971523
  hypo
cgccccgaggcaggacagggtgtgcagtcagcttccttagacatgtaaggagtgccttttcctttccacaaggaaaaggggagttgtgtagacaccatgagatgtgaccactgccctcgggaacacatgccagagatgacagcctgacacagagcactgcattccgagtcacacagaggagcactgcattccgagtcacacaggggagccctgcattccgagtcacacaggggagcactgcattccgagtcacacgggggagcactgcattccgagtcacacgggggagcactgcattccgagtcacacgggggaggcctgcattccgagtcacacgggggagccctgcattccgagtcacacgggggagccctgcattccgagtcacacgggggagccctgcattccgagtcacacgggggagccctgcattccgagtcacacgggggagccctgcattccgagtcacacgggggagccctgcattccgagtcacac

SEQ ID NO: 340054 - DNA, 90 bp, Homo sapiens
  chr8:140992426-140992516
  hypo
cggttgtgcatggaaaatggacgaggagggaaggccgattctgggaacgcagcctagggaaccatgggcaactcccacagaaaggcgggc

SEQ ID NO: 340055 - DNA, 165 bp, Homo sapiens
  chr8:141106975-141107140
  hypo
cgtggactggacgtgagacattcctatgctgagaagtcaagaagaatgtgtcctcgcagctcctcctgcagcacctcacagtgcacaaccggctgggccagcccatccagcatagagatgtgaaaacctgtccaggtcgctggtgtatagccagaacaatggcac

SEQ ID NO: 340056 - DNA, 610 bp, Homo sapiens
  chr8:141107409-141108019
  hypo
ggctcacccgagtccgccatgcgcagccctgccactgtctgcagggtaaggacgcccacctgggttcttgtgccagccacagttgtgccacagtccgtagggtaaggactcccccagagtaaggactcccgcctgagtcctggctgcgcagcctgtgttgccagtcgcagggtaatacactcgcctgcatcgtgggtgccccgccaccgccctgccacagtctacaaggcaagaacgcccgtctgggtccgtagtgtgcagccgcagctgtgctgctgtccacaccataaaaactcctggccacagacgtgccacagtcggcaggataagaatgcccagctggatcttggggtgcacagccccagctgtgccgctgtccacagggtaagaacgcctgtctgggtgggtccttggtgcacaaccacaggcgcgctgcagtcggcagagtgaggagcctgcctgggtcctccatacgcagtcgcagctgtgccgctgctcccagggtcatgacgcctacccaggtccttagtgcgtggctacagacgtgccgcagtcctaccgggaaagatgccagctcatgtcctcaatgagcagctgcagaattgccgcc

SEQ ID NO: 340057 - DNA, 392 bp, Homo sapiens
  chr8:141147354-141147746
  hypo
cggtgctcctcactgggctgccagcgactccaaagcagagaccacatgctccagtgaccaccttggccccacacctggcactcaaggaggtctgcgtaattagtaagtgctggatctcatcatagagatgactgtccaagatcactcatcatagagatgagtgtccaaagtgctgtccaaagtccagatcactctggagcgggtagtgagctttccacggcagataacatggtggcgagcacgtcctgggtgcctaccgcagaccggccctgggcggcctcaccccacgctgcccactcactgtgacggtcggggtcaagccactgcggcaggatctcccacaccagccccaccccgcacctgctgaatcaggttttacattttaactagac

SEQ ID NO: 340058 - DNA, 111 bp, Homo sapiens
  chr8:141159884-141159995
  hypo
atctccttgaaaggtctgctcgccttgacgcagcacatgaagtacgagtgcgagcagtggagcctacatgaggtggctctctgtatatcatgcatacatacatgcatgtac

SEQ ID NO: 340059 - DNA, 195 bp, Homo sapiens
  chr8:141249566-141249761
  hypo
cgctaggaacaaaaaacaagtaagactccggccctgcccgcgagatgagggtggtggagtgagaaggaccaaagtgcaggtgtgcttccctttgctcgggactcactggcacggaggccgcatccacctcctcacggccgtggaggggatgcgtgggaggcgcctggacacctacaccaacacaccgtgcactcc

SEQ ID NO: 340060 - DNA, 261 bp, Homo sapiens
  chr8:141458771-141459032
  hypo
cgacctggcaggtggccgccaagctgtgcacaccatacagcaacaccttatcagggatgactcccacagtgcctgctggctggacagcagtgtgcgctattcacgaggcacaggaggcgcagcagaaggcaacaaggtgaggtagaaaggccccgggcctcagagacagacctggtgcttatatcagctctgctgcttggtggctgcccgggtctctaaaccttgctgcctcagccccacatcagccagcacagcaacccc

SEQ ID NO: 340061 - DNA, 48 bp, Homo sapiens
  chr8:141525521-141525569
  hypo
cgccacagacagccagagggaaagcgacccagacagcagcccctcctc

SEQ ID NO: 340062 - DNA, 104 bp, Homo sapiens
  chr8:141534528-141534632
  hypo
aatgagaccgagtgcgtcccccgcggctccagactgcatggcatcacagtttacaagtcaggggctgaggagcggaaagaaagcttccaaggctggaggtccac

SEQ ID NO: 340063 - DNA, 110 bp, Homo sapiens; identical to SEQ ID NO: 259760
  chr8:141559646-141559756
  hypo

SEQ ID NO: 340064 - DNA, 401 bp, Homo sapiens
  chr8:141596808-141597209
  hypo
cgactgagcttctctctacgccacaccggagtagaacaaagcacttgccaacacgtggccctgttctcaggtggctccaaccacccagtgagacggctcccaggaaacgtctaggacagagcccgggaatctggccctgtggccaatctcgatttcagggtcgggcacgctcctctcggggaggagagtcactgtccttcggtgactcccagcttacaaggtgctcatgcagttacttaaccgagcctcacaaccataccacaaaggggcacaccgctggctgcaagaaggttttgggctggaacacgagctacttgcaggtgaagcaaagctgctgggccggctccaaaccaggcccctccaccgggcccccaagcagagtccaggcacagacgcagctc

SEQ ID NO: 340065 - DNA, 323 bp, Homo sapiens
  chr8:141599879-141600202
  hypo
cgagatccgtgccatcagcacgagccgcagaacaggacggagtgatggctcagtgagtacagaccagagagtagatgctatcaagctgtactctcctgctaaaatcaggacacgagggtgacaactcacctgttgtctacacaagcaagcctcccttatggccacccaagttgacgctaaacacagtcatggcagcttttttggtgaaatggacagagacggtctcagaatgtgtgctgggaatgcagtcggaacatctgctcctgtcagccggagtgcagacaactgtatgctgtctcccatgccaggcccgggccaccaat

SEQ ID NO: 340066 - DNA, 99 bp, Homo sapiens; identical to SEQ ID NO: 259770
  chr8:141600232-141600331
  hypo

SEQ ID NO: 340067 - DNA, 171 bp, Homo sapiens
  chr8:141613224-141613395
  hypo
cggatggtgcgggttgactcaggcccccacggcggcgtggcggagattaaagatggggtctaatctggccctgtggacccggctcagcagacgatggaatcccagatctcatcgggaagtctgtcagccaaaaacacacacctcaaagcggagtgcgtggtgcctccacac

SEQ ID NO: 340068 - DNA, 58 bp, Homo sapiens
  chr8:141623740-141623798
  hypo
aatactggcagaatcggcgacaaatggaactctatccacaagaccactgcagaaattc

SEQ ID NO: 340069 - DNA, 82 bp, Homo sapiens
  chr8:141624866-141624948
  hypo
cgggaggatggcaggacccacagagtcatgaccgcctaaagccctttgcaagcacctggcactcagcattcgccgtgccctc

SEQ ID NO: 340070 - DNA, 104 bp, Homo sapiens
  chr8:141634072-141634176
  hypo
cggggcaaggaggtcacagtgggtgatggagacaggacaggagagcccaccatagggcgagatgcacggggagccaggaaggtgcagggcgagcgcgatggacc

SEQ ID NO: 340071 - DNA, 1631 bp, Homo sapiens; identical to SEQ ID NO: 333579
  chr8:142138208-142139839
  hypo

SEQ ID NO: 340072 - DNA, 325 bp, Homo sapiens
  chr8:142227281-142227606
  hypo
agggggcctgttccggaaatgagacgggggctgacgagggcatctgctgggccctccaggccaggagcgtatttcccatgggaactgctggccggctgctcattctaagagcggtgacaggaaagtcccatccaggaggagagcccagcccaagtcggttgctatctgtaaagcatttccatgcctcccagaccacgaatgttctgtgacgtgactctgccaccgcggcaagaggcggagggttctgtgtgtctcccggtccccagtctgggctggtctggacttgcagaagtgacgctcccgcagcctctgccgtggccctctc

SEQ ID NO: 340073 - DNA, 934 bp, Homo sapiens
  chr8:142235190-142236124
  hypo
cgcacacccatctgaccagtgcgacacgcgacatcatcgtgggtcagcctccactgctgccgtcctccagcaacggtcgccttttcttttttaaaaaaaacatgtctaataacattgagttgtatcctagacactgtgaatgatgtgtcatagactacactgctatattcctctgagagtgttcatggttttatttaacacgagggtttgaaattcccgccccatctcctaactccacccgaactctgcctgtgggttcttcaagaaaggcagagtggagttaactatccaagtttcagccaccctgtgttgcgtcaacgaaggccaacagtcgggttaaaagcggtgccaagagagaaacccaggcattccctcttccagccatcaccttcctacttggtttctgccccaagcgctggctgggtgtcaggagggtggggaggacctgcaggtgcgacccagcccacctaatctagaggaggcgctgcgtgcacaggcctgtcccgcctttgtgctgccaaccctgggagccgggaagacgctgggtccggagcagccctggaccaggcagccgtccccagcccagaagggaggcttctcaccccgggagacaagaaggcacagggcactggggggaaccgctaggcccgggccaggccctcggctcccagtcctcctgtggaggctgcttctccacccttgtcccacaggcccctccagagcctggtgggacccggccccaggcctccctgggcacctccacccgccagcctcctcccctttgccctcagctctgactcctatagtccccacagctgccccagcctccgtgcggccccggccctggtctctcctgtgttgccagcccccagccctaggtcaggcctccccacgcctctctctgactcccactaactcacccctacatctggcc

SEQ ID NO: 340074 - DNA, 840 bp, Homo sapiens
  chr8:142240180-142241020
  hypo
cggtaaatgaattacatgtcagaggccgcattagactattttccacaacacagccggcccggtgagtagactcttggaagtaggtttcccagaagctgaagaagcacaggcctctgtttctgcatcaccgactcaaataagacccactgtggctgtcagggctgggccctggaggtctttaaagttaaaggtgctgtcagagcaccccatctcaacaagggagggccgctcctgaagtccccgcccttccatcagaaagcctctcaggacagaaggcagagagggaagcggccgcaaagacccatgggtgccgagggttcccagcacggccaacagggccctgcacactcacaggacagtccttgtattggagacaaacagctgtgccggagaggggtcctgagacagcagctccggtggccacgtgaaggtctgaagccccaagcgtgcccagctccaggatggggtaagcagcgggggaggtagggccctggtggctggggggccgccaggagcagcgcccaggccagtgctgcctctgccgcccggccttgctgcccgagcgcacgctgtgtctggggacagtccggccgctgccccggcacctatacctgacactatcttcctgtggaattagccacctgaaaagtctcctgcccagggaagtgcaatgctgacactgtccattttctgaagaaatgaaaagaagagaaatgctgccagagagcatgtggcacaggcgtggtgagtgcattctgccagccaaattgggaacgtggcactgatgacggccccaacgacgcggaaccaggcctgccccacccggggatccaggaatgc

SEQ ID NO: 340075 - DNA, 323 bp, Homo sapiens
  chr8:142242748-142243071
  hypo
cgggaacacagacattcagtggctcccaggtgagcgctcaccagctgcaacgggaacacagacattcagtggctcaacacagacattcagtggctcccaggtgagcactcacaagctgcaacgggaacacacacactcagtggctcccaggtgagcgctcgcgagctgcaacgggaacacacgcactcaatggctcccgggtgaacgctcacgaccagcttgggctggactggcgtctcctttcagtggttgccactttccatggtgtagatgctaccaccccgcccaatctcaagctgctgaggtgacgtcgctgaacagga

SEQ ID NO: 340076 - DNA, 125 bp, Homo sapiens
  chr8:142243860-142243985
  hypo
cggcaggcccctgggaaacggctatggagcgtggcacccgttttgctgtgcttttcccgttttgctggtgcagggccttggctaggcaggtccagcaggtctgcggctggacctgactctgggct

SEQ ID NO: 340077 - DNA, 95 bp, Homo sapiens
  chr8:142244185-142244280
  hypo
atcgtcgccaacatcggggcctgcatcgctcacctgagggagtggggactgttcttctctatgtccactgaggcctaattcacatctcgtccctc

SEQ ID NO: 340078 - DNA, 204 bp, Homo sapiens
  chr8:142248320-142248524
  hypo
cgtcaccatcaagctataagtctccagtcagcagggaatccaatttttagctttgtaaagtcgcccctttttttttcacatttttattgtgatcaaatatacacaacatcgaattgacctttttaatccctgtgagcgcacagctcaggggcggtgagcgcacttagactgccgtgcaaccatcaccactcaccccagagcgac

SEQ ID NO: 340079 - DNA, 593 bp, Homo sapiens
  chr8:142262690-142263283
  hypo
cgtgttttcatgcccacctgtgcatctgtgaatttccgtgttttcatgcccacctgcgtctgtgaatttccgttttcacgcccacctgtgcgtctgtgaatttccgtgttttcacgcccacctgcgtgtctgtgaatttccgtgttttcatgcccacctgcgtctgtgaatttccgttttcacgcccacctgtgcgtctgtgaatttccgtgttttcacgcccacctgcgtgtctgtgaatttccgtgttttcatgcccacctgcccgtgtctgtgaatttctgttttcatatccacctgtgtgtctgtgaattttcgtgttttcatgcccacctgcgtgtctgtgaatttccgtgttttcacgcccacctgtgcgtgtccgcgaatttccgtgttttcacacccacctgtgcgtctgtgaatttccgtgttttcacacccacctgtgtctgtgaatttccgtgttttcacgcccacctgcgagtgtctgtgaatttccgtgttttcacgcccacctgcgagtgtctgtgaatttccgtgttttcacgcccacctgcaagtctatgaatttccgtgttttcatgcccacctgc

SEQ ID NO: 340080 - DNA, 152 bp, Homo sapiens
  chr8:142292567-142292719
  hypo
cgctgccctccctccaggccgccgctcagggcacgccgcctccatcgctgccctctctccaggccaccactcagggcgcgctgcgctcagctcacaccaccccgtgcacagctcgtggatgcggtcctcccttttccatgaactctgcactc

SEQ ID NO: 340081 - DNA, 890 bp, Homo sapiens; identical to SEQ ID NO: 333580
  chr8:142317707-142318597
  hypo

SEQ ID NO: 340082 - DNA, 375 bp, Homo sapiens
  chr8:142349773-142350148
  hypo
cgcccagccctcacccagccccgagtcctgtgtggaaggcgattcctcccactttaccggggaggacacagaggctgagcgtggtcacggccggagccccagcgcagcatctgagctgcaggctggccgccccccaccccgctgcacccccatattccactcacagaccttcttcctgctgaacacagctgggccctgacgcctctgtgccttggccacaaggcaccttctgctcactcagctgtccctccagtccccgtagggctgcagacccaggcccacccagtcacaggcctggcagcgagggggaacaaaagggtcaaggggccgcccagggctgggaagggccttgctccacctcgctctcctccattc

SEQ ID NO: 340083 - DNA, 965 bp, Homo sapiens
  chr8:142367176-142368141
  hypo
cggccacgtggtagaccacgaggctcgtgtggtgtggcatgtcgggccacagcgccacggccacttggcgggcgtggaagggcgtgaagcagacgagaaagatgatgagcaccgtgagcaggagctgcatggcccgcacgcggcgctggcgaccctggtggagcagacccggccgcgacagtgcacacatgatgcggccggtaaacacgctgatgaccagcaggggcagcaggaactccaggacagtcagcgcaaagacacggcagcagggccggctgcctgtcacgcccagcaccgacagggtgacggcaccggcggccagccacacgaaggcgcacacggccctggcacaggcaggctggcggcagcggcgggagccttcgggccgcacgatggccaggtagcggtccacgcagatgcaggtgaggaagaggatggagcagtgcatgttgaggaagtaaccgaggacgtgcgggaaggcacagcgcaggcagcccctggcgccgtagtacacagcgaagcgcgtgggcagggacagccctaccagtagatcggtcaccaccaggttgatggtgtagatgactgagggtgtcttggcccgggtgcggcagcagaagacgtacagcgccagcccgttgagcaccagccctgccaggaagatggctccgtgcaccgccatcagcgccagccacaggcctgggaaggtgccatgcagctcctcgtccagccgggcaaacaggtggaacaggggcacctccagcccgctggcattggtccgcactgttgtcactgcggtggcattggggactgccccggccgagggccccgctggagacacagagggcatgacggcagccagcacaccccaggcctggaagcaaggagaccaggtcaccccaggcgccagcctggccttaagccctgccctgaggcccagaactcagctggcccgtctgcccctgcac

SEQ ID NO: 340084 - DNA, 789 bp, Homo sapiens; identical to SEQ ID NO: 333581
  chr8:142427489-142428278
  hypo

SEQ ID NO: 340085 - DNA, 245 bp, Homo sapiens
  chr8:142439127-142439372
  hypo
cgcacctgaggctgcgctggtcaggacaggttgggccatgctgcggaaacagccaggcctgaaccccaacgactcagaacagcacgggcgtttcttgcccctgttgcgtgtctgttggtgggggccctacccggaggcgtggctgagggctgcgccttccccagtgtgccggctgctgggcgaggaaacgagcacggtggagccacacggggcacctgcagctttgctgggcagagactcctcgc

SEQ ID NO: 340086 - DNA, 767 bp, Homo sapiens; identical to SEQ ID NO: 333582
  chr8:142528227-142528994
  hypo

SEQ ID NO: 340087 - DNA, 165 bp, Homo sapiens
  chr8:142590914-142591079
  hypo
cgggagcgcccctcggctgacaacactgtgatgggactgagatggggcggaacctcgagagtcaggagtcagggtccccagggcagagctgttgcgactaacagcgaaaagaccgaaggaccctccacccaaagccccgcggaggagccagagacacagagccgc

SEQ ID NO: 340088 - DNA, 83 bp, Homo sapiens; identical to SEQ ID NO: 259850
  chr8:142593602-142593685
  hypo

SEQ ID NO: 340089 - DNA, 451 bp, Homo sapiens
  chr8:142630171-142630622
  hypo
cgagggtggtgggcgccccggagcgctggtggggattgggcaaagacgtcaacaccagggctgtggaaggaggcgaggggccttcaggtgccgagggtggtgcgcaccccgggatgctggtggggattgggcaaagacgtcaacaccagggctgtggaaggaggcgagggccttcaggtgccgagggtggtgggcgccccggagcgctggtggggattgggcaaagacgtcaacaccagggctgtggaaggaggcgaggggccttcaggtgccgagggtggtgggcgccccggagcgctggtggggattgggcaaagacgtcaacaccagggctgtggaaggaggcgaggggccttcaggtgccgagggtggtgcgcacccagggatgctggtggggattgggcaaagacgtcaactccagggctgtggaaggaggcgagggccttcaggt

SEQ ID NO: 340090 - DNA, 333 bp, Homo sapiens
  chr8:142880985-142881318
  hypo
cggccacccctccttgcctggccatcctccttgccatgtcacccctcaacgccaacccgtgcatgtgggggtgcatgaccagctgacatgggagtgtgggtcagccccagggccaagggggaagtgggtgagccaagatcccggagcatgacaagggccctggcagctgattggcaggggagtgcgctgggcaggccgtggttctcactcttcactgcggctggagggtctgggtgggaaggtgggtacagggagcaggcatgtcggactatgaatgcggagtgggaaacacagaacgactcgttgtggggagactagggatggacggggtcc

SEQ ID NO: 340091 - DNA, 194 bp, Homo sapiens; identical to SEQ ID NO: 259857
  chr8:142984445-142984639
  hypo

SEQ ID NO: 340092 - DNA, 306 bp, Homo sapiens
  chr8:143054784-143055090
  hypo
cgtgtgcctgggctcacggtgcctgcgctcacgggtgcctgccctcacggtgcctgcgttcacgggtgcctgccctcacgggtgcctgccctcacggtgcctgcgctcacgggtgcctgcgctcacggtgcctgggctcacggtgcctgcgctcacgggtgcctgcgctcacggtgcctgcgctcacgggtgcctgcgctcacggtgcctgggctcacggtgcctgcgctcacgggtgcctgccctcacgagcctgcgctcacgggtgcctgtgcttacaggtgcgcaccaccccccacaccctct

SEQ ID NO: 340093 - DNA, 305 bp, Homo sapiens
  chr8:143089014-143089319
  hypo
cgagcgcctcagggtcggcttcccaggccttcgcagcccgtgtgaagctagagcgtctgggtgccctggaccgccacccatgccatcctcagtgaaggagctgggctcagacaggatgcccaagagaagaatgacctgaaatgacatctccgctgatgcccagctcagtgtgcagaggctattgtctccccgtccacccacccctgaggaagccagcctgtagctatcccctcaggcccttccctgacctgctgggctctgctgttagcccctgagcagccaccactcgcacctggacacaccgc

SEQ ID NO: 340094 - DNA, 241 bp, Homo sapiens
  chr8:143234575-143234816
  hypo
cgaggcatgcagaacccagccctggggcatggcgggacccgtgtctcaggagaaaccaggcgaaggcgaagggccggtggcaccagagcaagggctgagcagctgccgggctgtgagaaggcggatacgaatcccagcagggcaagcgggcgtctccttggccctcgctccaagaggcgcacaagaaatgaagccgctggcagcagaaggtgcaggaaagtggacagaccggagccttgtc

SEQ ID NO: 340095 - DNA, 261 bp, Homo sapiens
  chr8:143333267-143333528
  hypo
cgcccgcgttctctgtctgcagggcccgggcaccatgtacccgccgcccatgttctctgtcttcagggcccgggcaccatgtacccgccactcgcgttctctatctgcagggcccgggcaccatgtacccgccgcccacgttctctatctgcagggcccgggcaccatgtacccaccgctcgcgttctctatctgcagggcccgggcaccatgtacccgccgcccgcgttctctgtctgcagggcacgcacgttgagagag

SEQ ID NO: 340096 - DNA, 181 bp, Homo sapiens
  chr8:143334502-143334683
  hypo
cgggtgagagtgcggaggtggacaggctggcgacagcccaggctggcactacgggtacgggaggagggccggtagccgtggagtcacagcagtggtgacggcggtgcctgcagaagcagggccgctgggccacctcccgagcacaagcaacaagcgaggcacaggccagcgtgcgtgccgc

SEQ ID NO: 340097 - DNA, 1170 bp, Homo sapiens
  chr8:143386158-143387328
  hypo
cgctgtgagctacggggtagagacgttcctcccaggggggacatggccatacacgcccctggagagcggcatgacggttgagcacagcctcctcctgccagcggtgacaggccctacaacagccccactgactggggtcccgtggcctgggtaaagtcaaagcccccaggtaaacataacaaacttttgaggtaagaggtccccggggcagcccggctggtgtgcccgaggacggagatgtaggagcctgccctcggccctgacagcaaacagccacaggcgagggggctggaggaaatgtgctccctcccacgatgaaatcctccagggcagctaatgcgggcgagtgagatggccaggtggagaaggcaccacaggacgttctgtgcgatgttccctggacttgggggtttcagtgacagctccccaggagctgtgggcagagggtgccaggcacccatggagacctgcctcggatctgtgccttgggattgatgccacctcctgcatgtggagaaggggaagctcaggaggataggggagggcgcaggggtgggaggggggtgcaaacggggttccgtgtggacgcccaggaaagcggccaggctggggtgcgggctgtgtggacacccaggaaggcagtcacactgggatgcgagccgtgtggacacccaggaaggcggcagggctggggtgcgggccagaggagaccccgcaggtgctcggtctccctcacctccacagcgggaggatcgggggcctggtgccgctctccccagcagtgcaggacaaaagccaggggaggaagagatggcttagacgcccgggtccctccgcggcctcctcctgaaaggctcacaaagcgctcctttattctccccacaaaggcccaatttgggtcttgagctccgaggctgggattagggatttgctggcaaggtgctggggcaagcgcagaggggacggccctgtgatagttttccagctcaagaggcagacagacaaaggcggctttctcctccccacagggctcagggcctgggtccctgttccgacacgtagggaagagacatgctctaacgtgagtgctggagacagggcacacacggtttcccgtgggaagagactccgctctgccaggcattcagaaagcagggacccgaggccggc

SEQ ID NO: 340098 - DNA, 160 bp, Homo sapiens
  chr8:143397307-143397467
  hypo
tgcacccaccaagccgcgtgaaggagccattcgcttcacgaggaaactgcctgcacggaccacccaactctgctctcaccccacagaaacgcctctcagaatcgcaaccctccaccatgtggggccttgctcagcacctcacgtaagcgcagcgcctccc

SEQ ID NO: 340099 - DNA, 295 bp, Homo sapiens
  chr8:143405662-143405957
  hypo
cggctacagggtccaggaaacctgacccaagcatccctctcccagcactcctgtgcgaggtctgcacagctgccagctcggcggctcctgtactaccagccaggtggtgccgttgctgccagcagtcaggtgactgaggagtctgcgaggcctgcctggggggtgtgtcacctgaggcccatttgccctagcgccctgccctagtctgccggggccagaaccgacctgagtacggaggctctcgcatttgcttgtcattacttaagatgccgtttagaagcacctcatgtcccgc

SEQ ID NO: 340100 - DNA, 440 bp, Homo sapiens
  chr8:143436836-143437276
  hypo
cggccgtccctggaatggggagctgggcatcccgcccaaacctctcctcccgtgggctgcagctccagggactcagagcaaatgaccagaggataacgggagctctcctgcccagacactgccagagcgtcctccctgtgtgcaggggtccctgtgcgggcagcttctgactggcctacaccctaatgctatcactacggaacctgctggccaggccacaccttaagttctaaacacctcagggcaagggctccacccgcccacacaaacacctgaagtgcgaaggcaggtttcagagcaaagtgagcctcacgccagctgagtacagacccaagtccctagggccggggaaggcggtgtgaccccacgttccctctgagcaagacacccgcctgtgccatccagccctgcccagagcagggcagcaccaggacaccatc

SEQ ID NO: 340101 - DNA, 585 bp, Homo sapiens
  chr8:143509044-143509629
  hypo
cggttcttcccacgtgggatattctggctgtacgcgcgtgaccgtgactgtggggactggcccagggcttgactgtggggactggcccagggcttttcagggttggagctgggattggagcccgccctgcctcggggaagatcctcgctccctttctccacggcacctctgtgattctcgtcacctgccaacaccagcaccagggctgcccctcctgacggccccctcgccgtctttctgggcacactccatcggcacagcgtcttcactgtcctcctgacaaacctcgtgccacccccatcagcttcagcaccacctccacagcagccgtggccagcaccgacgtccttttccgtcaccgtcaagcctcaaaactgggaccgtgggtaatggcgtcaccccatccgccgtctctctctagctgccaacggcgccttcaccagacacgcccggcaccaccttccaggtcagcagtcccagccctgcgtatcggaggcctgctctcccacagcgtccacagtcactgggccaggctcgcacctgtgaggggccaggacccataccggagcccggcgaggctccctc

SEQ ID NO: 340102 - DNA, 975 bp, Homo sapiens; identical to SEQ ID NO: 333584
  chr8:143530860-143531835
  hypo

SEQ ID NO: 340103 - DNA, 2885 bp, Homo sapiens; identical to SEQ ID NO: 333585
  chr8:143531858-143534743
  hypo

SEQ ID NO: 340104 - DNA, 295 bp, Homo sapiens; identical to SEQ ID NO: 201622
  chr8:143556723-143557018
  hypo

SEQ ID NO: 340105 - DNA, 222 bp, Homo sapiens
  chr8:143557844-143558066
  hypo
gccaggtggcccagtgctgccgaactcagagcactgtggccacagagagagaggacgggggcaaagaaccgctcctgtgctgacctaagcccgtcctgcagccgctgggcgcaccagctcccggagccagtccctgcggtccacagatgcccggcggcgcgaggagctgggggacgagctgcagcagtttgggttcccagccccccagaccggtgagctggc

SEQ ID NO: 340106 - DNA, 307 bp, Homo sapiens
  chr8:143558404-143558711
  hypo
cggggtctggccccggtctgactgcagccccatgggcggcaggcctgtgacgctgtagtggggcctgcaggtgacccagcagccgaggagtggtccccgtggagcgtgtgctccagcacctgcggcgagggctggcagacccgcacgcgcttctgcgtgtcctcctcctacagcacgcagtgcagcggacccctgcgcgagcagcggctgtgcaacaactctgccgtgtgcccaggtgggtgggaccttgggctggggcagcggacagccagggcagcggggggccagggcagcgggggcggtggcc

SEQ ID NO: 340107 - DNA, 220 bp, Homo sapiens
  chr8:143582357-143582577
  hypo
cgccttggacatggtgagcacgggataaacacttgttgtcgaatgctggtgactgttaccaggctagtgtcagttccagggacagtgacggagctggttctgatgaggcgatggcagtgttggagacgagaatgatgatgtgcttatagtggaggtgacgctggtgaccatgggtgaccggtggtcattgtgatgactgtgaagggacagtaaaggtgac

SEQ ID NO: 340108 - DNA, 160 bp, Homo sapiens; identical to SEQ ID NO: 259905
  chr8:143595638-143595798
  hypo

SEQ ID NO: 340109 - DNA, 308 bp, Homo sapiens
  chr8:143614687-143614995
  hypo
cgctgctggcgctgacctggatgtcggctgtgctcgccgtcaccgaccgccgctccgccctcttccagatcctcttcgctgtcttcgactcgctggagggcttcgtcatcgtcatggtgcactgtatcctccgtagagaggtgggtgaggcagcctctgtcgggccgggctcctgcggggtcctggggctgccgagtggcctcctccttccccgaggacctcggcagggagattgtgggtaggcgcagcatccatgaccctgacacatctgcaggcctcggtggtccacagagcggggcctgcaggtg

SEQ ID NO: 340110 - DNA, 178 bp, Homo sapiens; identical to SEQ ID NO: 259909
  chr8:143623481-143623659
  hypo

SEQ ID NO: 340111 - DNA, 283 bp, Homo sapiens
  chr8:143660391-143660674
  hypo
cgtcagagagagcctcaaaccgtcagcgttggccaccgccttgcactgcgcccatgcttggagccccgagccccaggccaggccctgcccgcccgctcagccctgctcgccatgctcccgcccttgctgctggggcggccggcagggagcccacctgaggcgcagagggaggccattgccgggcgctgccaccatgaggagtcccgagtcctggggagacaggtcctgtgcagggaacagagggacgtgtcactcacgcctgccggggccagagctcgactcc

SEQ ID NO: 340112 - DNA, 258 bp, Homo sapiens
  chr8:143662796-143663054
  hypo
tctgcccgtccacccgcaaacagcagaagctttgctagggagactgatcagccccagccgtgggtgaccgccccgtctgcccgtccgtgagtgaccgccccgtctgcccgtccgtgggtgaccgccccgtctgcccgtccgtgggtgaccgccccgtctgcccatccaccccaaaacagaaattgcttgctaggctcctagacgtcatccgaccaaggagaagggaccaggcggcaggcaggggagcgcctcgaccgc

SEQ ID NO: 340113 - DNA, 111 bp, Homo sapiens
  chr8:143993982-143994093
  hypo
cgccgcccgaggcactggcgcatgccaaagccaaagggcacgtggtggaagttcctgccggagcccctgatgtctagccagcgctggggattataccgctcaggcctcggg

SEQ ID NO: 340114 - DNA, 321 bp, Homo sapiens
  chr8:144178383-144178704
  hypo
cgttcaacacaacacagtgctggaagctctggccggtgcacacagcaagacaaggaaaccctcgcgttcaacacaacacagtgctggaagctctggccggtgcacacagagagacaaagaaaccctcgcgttcaacacaacacagtgctggaagctctggccggtgcacaaagagagacaaagaaaccctcgcgttcaacacaacacagtgctggaagctctggccggtgcacacagagagacaaggaaaccctcgcgttcaacacaacacagtgctggaagctctggccggtgcacagagcaagacgaagaaaccctcgc

SEQ ID NO: 340115 - DNA, 419 bp, Homo sapiens
  chr8:144205317-144205736
  hypo
cacatgcatgccctcgtgtgtacacgtgcgcacacacacccttgaacacatatacatcttcacacatgtacacacaccctcacatgtacacacatgcaccctcaaacgtacagatcctcacacatgtacacacaccctcacacatgtacacacaccctcacacatgtacacaccctcacacatgtatacgtacgcacaccccctcaaacgtacacaccctcacacatgtacatgcacacacatgcacacatgcatgccctcgcatgtacaggcacaccctaatacatcctcacacatgtacgcacacaaaccctcacacgtacacacaccctcacatttacacactcaaacgtacacacatcctcacacatgtacacacaccctcgcacatgtatacatatgcacaccctcacacgtac

SEQ ID NO: 340116 - DNA, 134 bp, Homo sapiens
  chr8:144222940-144223074
  hypo
tgcgccccgcctccattttgcatccgacaacgttcacgcgaccaaagaaatgaactcgagccccaccttctgcagccacagggacctcgaatgctgcggagcttcccacggacacttcgcttctcccagtggcc

SEQ ID NO: 340117 - DNA, 1303 bp, Homo sapiens; identical to SEQ ID NO: 333589
  chr8:144240980-144242283
  hypo

SEQ ID NO: 340118 - DNA, 418 bp, Homo sapiens
  chr8:144292304-144292722
  hypo
cgcaccatcccaggtggcaccttctgtaggggctggaccagacccactagcctttccggggcgggacagagggaacagcctctcagtggcgagcactaaatttaattcaatctgcgaatcaaatgtgctctgattgtccctaggtgattctcgcaataagcacttgcctgggctgggcagtttgcacctgggctgaagaggagctgggcccagagggaggcaacgtgcaagggcctgggcccctgtggaggggaggcggcaggtggaggccccttgagaatcccagtagcgcccttcctaggagcagctcctgcagcactagattcaagggcctgtagcggtagccggggcggggcgcgggggaggtagggcagcaggaaagcggggcaccagggaagcggggcgacagggaggcggg

SEQ ID NO: 340119 - DNA, 505 bp, Homo sapiens
  chr8:144293590-144294095
  hypo
ccgagggcgagagggcgcagggaggcgggtgggggtggggccacgcgcggaggggcagggaagggcggggcggggcggggcgggacggggctgggggggacaggcatcaggtatgaagagtttggggctggcggggcgtgtccggctgtggcgtgggcaccactatgggagaccctggcttggcaagtgaccttgcagccttggctggggaagggctagatgctgggtgggtgccggtagagtggaaagaatgacaggttcaggtgaattaaggaaggatggttgactcggtggctgggacattagagacaggtattcccagcctcaggcgctgtcctaagcccagcaggtactgacccttgatggtcacctcaccctatgagggagctgaggcctggggaacccaaggggctagtccagaacccacagccgggggaaggaggaaccgggtcttaaacccaggtagctcactccagaaccaactcaacctctgttacaggtggcc

SEQ ID NO: 340120 - DNA, 943 bp, Homo sapiens
  chr8:144343416-144344359
  hypo
cgctgagatgtgatcgtttctttcctgagaatgagctgaggtaaaaacatgctggggaggaagatgggccctgggggcagcgagctgcgcctctgcaccgggagaaaggccgtgtccccagagctgaggcggtggtgggcagggctcctgagaagccggggcagggcagggtgtctctgaggtcaatgaggaacagctgaggtccagggacgcaggaaggatggggtgaactccgggatggggccggcagggagcctcacgcttacagagcctggtgttggcactctcctggcttcctccgcaaacctagccacgtggtcagggagcccgggcctagcagacggcccccaccttgacagaatccccagggtcgtgcgtggcggtgggggcgacttcacagccgagaccgggcctaacgctgctgtctcgcagtcacccctgcaggccgctcagggcagggctctggcctgacgggggttcctggacacgcctctgagccggcagcccctacccgcacccgtgcaccttccacgcccgtctccagcagcccctgcccccacccgcacccctgcacctgccacgcctgtctccggcagcccctgcccgcacccgcacccctgcacctgccacgcccgtctccggcagcacctgccacgcccgtctccggcagcacctgccacgcccgtctccggcagcacctgccacgcccgtctccggcagcccctgcccgcacccgcacccctgcacctgccacgcccgtctccggcagcccctgcctgcacccgcacccctcacggctgtctccggcagcccctgcccgcgcccgcacctctgcacctcccacgcccctctccggcagcccctgcccacacccgcacccctgcacctcccacgcccgtcttgccctggggcccaggtgcaggtctgtgaggagggcagcccc

SEQ ID NO: 340121 - DNA, 231 bp, Homo sapiens
  chr8:144351704-144351935
  hypo
cgctgtgcgccctccaccctgcatcccctgccctcacgtcccctgccctgtctcctcctgacctgccacgctggctgacttgagaggcgcctccagacacctgtatgcagctccttcagcagctggggttcccacaccctcaggccaggggctcggcgcgggttgggttggggcagcggtggttgaggctggggccaagcctgagctctcgctccctagggacagctcccc

SEQ ID NO: 340122 - DNA, 942 bp, Homo sapiens
  chr8:144359694-144360636
  hypo
cgaagctctgggagagctcagctgggggtggctccaagtgctgagtgccagtgattctgccagtgccttctccctgccctgcctgtgccctccgggacagctggcagaccccggaccccagcctggctcctccgaggctgtccctctccaggtctcacctcccctcctactgtgactcatccagaaccccgggcctggcccccagatgtgcctgtggcgggcctctgaggtcactgtcctggtgaagacgaaggctaccgtccccgctttctggcagtgtctgcgagggcctgcgcagcgcgcatctgatgtcatcagcccccagcaagcccgttttccagaagagaacccggaggctccgaggtgacgtgtggcttgctcgagatcacacgatcagtgacggcaccagatgaatccctgagctccctgaccagccatccacccaggcccctgctgagacagcgggacctcgtttccaactcagaagcccccggaacgcggctgcccggcttgggagcctgcggcacagggccctgtgcagccccttggggaagacggccccaggctctgccagcccccgccaccctctccagaccatgctctgggggccctatggccaccagcgctctggacgccccactctgccaggtgagaacgagtttaggggtgcgggctggaggtcagtgtgtctgtccgaagtcagctgggaggcaggcgcctacttgaggcgtccttgctggtgtgcggtgggcctggggttcagactgtctgcctgaaaggtaagggtgaggacgcctgcattctccttgttcagtaacacgcgtgggcagccaggccgaggtgctggctctactaggggattcatctggtgccgtcactgatcgtgtgacctcgagcaagccacgagtcacctcggagcctccgggttcttctctggaaaac

SEQ ID NO: 340123 - DNA, 551 bp, Homo sapiens
  chr8:144380308-144380859
  hypo
cggttgcaggattcgcccatcctggtctgggtgtggcttgtgaccacctcctgcagttctctgcccaggtaaggactaattgggaagaattctgggtcctgagctggctgccgcttccaagacagtcgctttgagggctcttggcaccgattttgttaaaatgcatgagcttagggttgtgcagcctgtaggggcaggggtggtctcagaatggatttggtggccccaccgttaattaagctcctgacccctgggccggtggtgaggtgggaagatgagcctgtgtctcccatgctgagccaagatcctcaggtaccagtagcggtcaaagcacctgctccctgaaggaagcttacctggcttagcctcattcctgctcgtaagtcaggcattcagcttgcaaagatccccaagcacacaaggagagtcagctgactgagggccaacagaaacagcaggcagccgctgtcagccacaaagaaacgcagatcctgaaactgtcatcatacaggtgagaggatagttatgtgtgaggtgttcaaagaagtcgc

SEQ ID NO: 340124 - DNA, 158 bp, Homo sapiens
  chr8:144383378-144383536
  hypo
aaagatggaaggaacgacctacatccaggcatgacgtgaaacatcagacagtccaggacatagagacgatctgaaagcgcagatcacacacacaggctgaggaataaatcccttcccaagggcagactggaagttagaaaatgacagaacaatgcttc

SEQ ID NO: 340125 - DNA, 510 bp, Homo sapiens
  chr8:144413516-144414026
  hypo
cggagacaggacgtgtcactctcctgggccaggccctgcatgagcctcttccccgctcccacagtggctcctccctgtggctcctagcaggtgagcagtgtggcctccacctcacgggggaggaaaacaaggcctgcagagggaggcaaccctacctgacctcagaccccatgcccgtgtacccgcccatgccccccacctgcagaggcccgtgtgctgctgagtcacggatcccaccaagcccagctaagcgggaaagggcaagcccagctaagtgggaaaggcaacgtgcctctcccaggctctagggcctctccccagatgggtcccttcagagccggtctagaatcttcgggaacctctccatgggaccatttcatttgctaaataaaggacctggctgcttatgagagagccctgcctccgaggagctgggtggaagggggtccagcagtgcagccagtggagaggcaccacagcagggcgcaggaccgccgcccacagaggatc

SEQ ID NO: 340126 - DNA, 226 bp, Homo sapiens
  chr8:144414263-144414489
  hypo
cgtggcggctacagcccatcctaactctccaggccagtcatcatctatccattgaggcaagcccaagcctgccctgaaccagcactgcgctgggtcctgcggatgcagatcaccaaaacccatacgaagggctcaactgaacctagattctgagatgggcctgggagaagaggagcgagatggggcgtggctggcaggcagtgggcaggctcggtcagcagggctg

SEQ ID NO: 340127 - DNA, 216 bp, Homo sapiens
  chr8:144457689-144457905
  hypo
gtcgggctgtgatcgcctgtggcctccctgcagggctgtgactccctgacgcagatccagtgcggccagctgcagagccgcagggcccagattcaccagcagattgacaaggagctgcagatgcggacgggcgctgagaacctctacaggtcagtgcttgagactgcccggccccgggagcagggcccacctgggtgaggggggcaggacagccac

SEQ ID NO: 340128 - DNA, 536 bp, Homo sapiens
  chr8:144461002-144461538
  hypo
cgggcggaggcaccctggggaggggaggcccagctgcgggaaccgtgggaactccacccagcctgacccaacactgcaggtacgactcgcttactggggtcccggcccagcagcgtgccctggccttcgagaagggcagcgttctcttcaacatcggtgccctccacacgcagattggggcgcgccaggaccgctcctgcaccgagggtgcccgccgcgctatggaggccttccagagggccgctggtgagggcggcccgggccgcggtggggcacggcgcggtgccagggtgttgcagagccccttttgcagggcaggagctggggagtggttaggacatcagtccctcaggtagggggagtgagcacatcaggtccatatgtgtcccaggagcatccctagctggccgccctgagtgctgcatggggcagagatgggcaggtacagggccctgcctgtgtgagcacccctccctccgcaggggccttcagcctcctgagggagaacttctcccatgcgccgagcccagacatga

SEQ ID NO: 340129 - DNA, 982 bp, Homo sapiens; identical to SEQ ID NO: 333592
  chr8:144511528-144512510
  hypo

SEQ ID NO: 340130 - DNA, 207 bp, Homo sapiens
  chr8:144557020-144557227
  hypo
caaggtggcggcgccggctgcctccagacacagttgtcgaggcgtcgccaatgcgattacgggcgccgcggccccaggtgtgcgctcgcccgggcgtgtttgccgtacctggcatcatcctttttccaaaagcgaaacatggtgcttgtgagcaactctcccccaccccacagaaaatcaggggccgctcagccacgcgaggtgggc

SEQ ID NO: 340131 - DNA, 231 bp, Homo sapiens
  chr8:144575951-144576182
  hypo
cgaagggatcggtaagcataatttcagaggccagtaatattttatataatcgccgagtggtttaaattgaaaacccccaactgaatcaatatttactgcattgaaacgaaatgaatagtaataagtcactaagctccctgtcctgtttcataaaataaaaaattataaaaatgagcacaggcacagggaggccatcacattaacttttacagcacttggggagccgtaacc

SEQ ID NO: 340132 - DNA, 372 bp, Homo sapiens
  chr8:144589930-144590302
  hypo
cgccgggcccgccaggagggcagagacagggggaagggcggggcgctgagaggcgaggccggcgtcttcttgacaatgcggtagcgggtcttgatcaccttgctggtgggtgcagtccgcacggcatgcaggctggacgctgtagagaaaacccagggcacagacatgggtcagggaaggccggcaagggtagggtcagagaggccacccacagtgccagctctgcccaccgcctccgccggagcttgaagaccctccatcgccccgtggataaaaccctcaacccatgtggcacacacatccccagggcgcctggcagccgacgcttcaggagctagccagtgcagcctctgagaggcgggcaccagcccc

SEQ ID NO: 340133 - DNA, 81 bp, Homo sapiens
  chr8:144617126-144617207
  hypo
cggcagcccccacacggctcttgggtctgcccaggcccagctccttccagagccgtctgaagcctccctagatgacggtac

SEQ ID NO: 340134 - DNA, 161 bp, Homo sapiens
  chr8:144621169-144621330
  hypo
cgttctgaccctgactgagctggacctgtctctcaaggacatgctgctgcgggacaggaggctggcccccccgggccccgtgcaacggccgcacagcatggtcggcaggagggtctgagggtcccgggggccgattcacgagggagtatttcttgcgccac

SEQ ID NO: 340135 - DNA, 310 bp, Homo sapiens; identical to SEQ ID NO: 333593
  chr8:144636562-144636872
  hypo

SEQ ID NO: 340136 - DNA, 393 bp, Homo sapiens; identical to SEQ ID NO: 333594
  chr8:144640377-144640770
  hypo

SEQ ID NO: 340137 - DNA, 277 bp, Homo sapiens
  chr8:144656841-144657118
  hypo
tgcaaatcttcctgctacctcgagctcagattcccgactccagcccagccgcagcccgggaggcgcagcccgtgggctgggtgaacaaacgacacaaacaacacaggacaagctgtggggaaaagtgagtgattcgtgttgtttccagtcagccccgctccgagtctcagggggactgccccgcacacagactgttcaccagggcctgcagcctctcggacagcaccacctgcagggagcagaggacaggagcggtgggcagggtgagggcgggggc

SEQ ID NO: 340138 - DNA, 265 bp, Homo sapiens
  chr8:144658240-144658505
  hypo
accccacctcctgggccagtcgggccagcgcctcctcgtcaatgttgttgctgactacgatgaggactgactccagccagggcacctggaacctgccgcgtgggtggagaaagggtgggggccacccctcgggtcttcctgattcaccctggtgtccccctgctccccgccccgcctcagtcaaggacacctgtgctcaccttctgcttgggagctcctagggagccccaccacttacttccctgccacggcctgcagtatcacc

SEQ ID NO: 340139 - DNA, 324 bp, Homo sapiens
  chr8:144668627-144668951
  hypo
cgacaggcaaaggcgcccatgtctgcgggggaaggagtgccaggcctggccccacaccaagtgcacaggcgccggcaggagggccctgagcagacccggcccgggggcccggccaaggccgcctgccccgagaccccactcccagcacccacagcagagccactgggccagggtgcctctgccttcctggcctggctgaatccgctttgtgtgccccggccactcctgtcgggcagcagagccgcccagccgccccacgtgcagctctcacctggcgggaggcacctgccacaggcccgttcatctgctcgtagaatctccttt

SEQ ID NO: 340140 - DNA, 218 bp, Homo sapiens
  chr8:144675988-144676206
  hypo
cgtccgagcccacctcctcatttccccgcttcccgcattcccaagcatgggaggacctgccggacgcagcgcaccatctctcctaacagagaccaagtctgagcttcaaagcttgcgcagacgacaggcacgtgcaagcctctcctctccagcaggagagcccggagcaggacacagcgactctttcaactgcgtcccgacaaacggtcagccccttc

SEQ ID NO: 340141 - DNA, 204 bp, Homo sapiens
  chr8:144683693-144683897
  hypo
cggccgcggtgccagtgagggctgcatagccaggccttgtctgtagtctgggcggcccgtggcgctgcccttcagcccaactactcattgccgctgcgtctttggcgaggctttcatttccaacctttcttcccatctcagcccttttgttggcccgggtcccaggaggctggtgtcggtgagggcaggcccgctcctctcatc

SEQ ID NO: 340142 - DNA, 95 bp, Homo sapiens
  chr8:145223919-145224014
  hypo
aaccctaggacagacgtggcccggctggctctcacctcccaggatttcggcctcgcctgatcttggttcagtggttctctgtcaccgctgacagc

SEQ ID NO: 340143 - DNA, 270 bp, Homo sapiens
  chr8:145226085-145226355
  hypo
cgcaagccccaggtgtggcctgtgcttctgaccgacctgccatgaatcagggttttcacgaccccctcctcaggcttgatgaattgcagcagtggctcacagaatgcagggacagagtggcctgcgtttacccatttatgacacaggctgtgacgaagggtgcgggtgcccagcaggtggaggagacgcttgggcaggaatggggaggggcgcggagctcccgggccctcctgggaaccacctccaggcacctgcgtgggttccgctacc

SEQ ID NO: 340144 - DNA, 154 bp, Homo sapiens
  chr8:145661380-145661534
  hypo
cgcggtgggccaggccccagccggctctgagcactgcccacaccccggatggctgcctggtaggctgcccggctggtgctggctgtggctgcttccctgttgctggcggggccaggcgtccaggctgccacccgttgtgctgtggccgagcacc

SEQ ID NO: 340145 - DNA, 892 bp, Homo sapiens; identical to SEQ ID NO: 333597
  chr8:145697859-145698751
  hypo

SEQ ID NO: 340146 - DNA, 429 bp, Homo sapiens; identical to SEQ ID NO: 333598
  chr8:145733644-145734073
  hypo

SEQ ID NO: 340147 - DNA, 163 bp, Homo sapiens
  chr8:145745116-145745279
  hypo
cgcttgtgttcttgagcacacggcaggtgctgcagtgccagccagctgcctgccaggccctgcccttgctgccacgcgaactcttccccctgctgttcaaggtggccttcatggacaagaagacagtggtactgcgcgagttggtacacacgtggcccttccc

SEQ ID NO: 340148 - DNA, 243 bp, Homo sapiens
  chr8:145758485-145758728
  hypo
cggcgcccggggttgccgtggcacctgaagatgccctctgtctggtcaccgttgagcgccagcacctcctcagagagccgtgtctgcacccagggcagctggcgctcggggtagcgctctctctgcatgcccatgacctcctgcagtgcgctgccgaacatggacgggctgaacacggcgttcttggcatgccggatctcctccacgttgggcttcttcagcccctgtgaagacagaggctcc

SEQ ID NO: 340149 - DNA, 541 bp, Homo sapiens
  chr8:145813621-145814162
  hypo
cgccccgagggctcctgagcacgcatcctgcgtgagggaaccaggcaggggcctgcaggctgtgcgctgcattgaggctcatggaggcacaaaaccaacggtgatgccagaggctgactgcccggtggggcacatcatgagcctgcacctcctcgaacacttctctgcacacacgtatgttagctaacatgttttcagaggaagagaaatgtgcctcaccctatggggaggtggccctaagcctccctcagcagccaggaagagcagccgtatgcagcagggacagaactgtggggaccgcggagagcggcagactgggtgcgggaggcggggctctcgccaagccatctggagaaactcggcccagggcccgaaggggaaggtaagacccagtagggctggggacccagctggccacctgaagcccacggcctgtctccgtcaaacccagcgagggtcagactcacagccggaggcagcacggcggcacgggggaacacagcaaagcctcagcagcctcagctgggccaccatggccaac

SEQ ID NO: 340150 - DNA, 632 bp, Homo sapiens
  chr8:145845229-145845861
  hypo
cgagcttgtgtgtccgagagagcgtgagcccgtgtgagtgagcctgtacatccctgagagagcgtgtgtgcccgtgtgcgtgtgagcctgtgtccctgagagcatgtgtgcctgtgtgcgtgtgagcctgtgcatctgagagcgtgtgtgcccatgtgtgagcctgtgcgtccctgacagtgtgtgccggtgtttgtgtgcctgtgcgtccctgagagcgtgtctgtgtgtgcccgagtgtgcgttgagcctgtgtgtccctgagcatgtgtgcccgtgtgcgtgtgagcctgtgtgtccctgagagcgtgtgcccatgtgagcttgtgtgtccctgagagagcgtgtgtgcccgtgtgtgagcctgtgtccctgagaaagtgtgtgtgcccgtgtctgttagcctgtgtgtccaagggagcgtgtgtgcccgtgtctgttagcctgtgtgtccaagggagcgtgtgtgcccgtgtctgttagcctgtgtgtccaagggagcgtgtgtgcccgtgtctgttagcctgtgtgtccaagggagcgtgtgtgcccgtgtctgttagcctgtgtgtccaagggagcgtgtgtgcccgtgtctgttagcctgtgtgtccaagggagcgtgtgtgccc

SEQ ID NO: 340151 - DNA, 96 bp, Homo sapiens
  chr8:145854692-145854788
  hypo
cgcaggctctagcgggccgaaggcagagcacggccgtgagacctccagggctccaagagcagacccgcaggctccagcggggctgaggcggagcac

SEQ ID NO: 340152 - DNA, 526 bp, Homo sapiens; identical to SEQ ID NO: 333600
  chr8:145910996-145911522
  hypo

SEQ ID NO: 340153 - DNA, 124 bp, Homo sapiens
  chr8:146079241-146079365
  hypo
gctattagagaaatgcgaatggaagccacggggaggtgccatttcataccattagaagggttataataaaaatgacaggttgggtgcggtggctcacgcctgtaatcccagcactttgggaggc

SEQ ID NO: 340154 - DNA, 63 bp, Homo sapiens
  chr8:146105109-146105172
  hypo
cgtttgcagctggctgctactagaaatggttctgattcggtttcaagaactgtatccttggcc

SEQ ID NO: 340155 - DNA, 81 bp, Homo sapiens
  chr8:146176654-146176735
  hypo
cgtgagattgtgcatggatcgtttctaatacggaaatgaattgtacacttggacataaagaatacaaataaggctgggtgc

SEQ ID NO: 340156 - DNA, 786 bp, Homo sapiens; identical to SEQ ID NO: 223535
  chr9:113512-114298
  hypo

SEQ ID NO: 340157 - DNA, 65 bp, Homo sapiens
  chr9:173878-173943
  hypo
cgtgctcatttaaaaattaaacttatagggaggccaaggcgggcggatcacgaggtcaggagacc

SEQ ID NO: 340158 - DNA, 958 bp, Homo sapiens; identical to SEQ ID NO: 333604
  chr9:214559-215517
  hypo

SEQ ID NO: 340159 - DNA, 878 bp, Homo sapiens; identical to SEQ ID NO: 333605
  chr9:503936-504814
  hypo

SEQ ID NO: 340160 - DNA, 888 bp, Homo sapiens; identical to SEQ ID NO: 333606
  chr9:504833-505721
  hypo

SEQ ID NO: 340161 - DNA, 877 bp, Homo sapiens; identical to SEQ ID NO: 333607
  chr9:841339-842216
  hypo

SEQ ID NO: 340162 - DNA, 993 bp, Homo sapiens; identical to SEQ ID NO: 333608
  chr9:842552-843545
  hypo

SEQ ID NO: 340163 - DNA, 545 bp, Homo sapiens; identical to SEQ ID NO: 333613
  chr9:1042427-1042972
  hypo

SEQ ID NO: 340164 - DNA, 440 bp, Homo sapiens
  chr9:2047360-2047800
  hypo
cgcagccggccccggggcagccctcgcccgtcctccagctgcagcagaagcagagccgcatcagccccatccagaaaccgcaaggcctggaccccgtggaaattctgcaagagcgggaatacaggtaacgcaccccgccagcaaggggccccctgcggtgtgctagcacctgccgcccaagccgaggggggtgaggcgcctgcctccttggttggccaaactgtgattttcacccgtgcggtcggaaaactttcatccactcctggggccttcccggtgctgaggggaggcaccggggttttgaagatcaaaagccgacggggacttcctgtggacccgagagagtgatcatctcacactgcgactgtggaatacactgtccgtgtttgtgcttgtgcggttcggtgatgacggaggggctgggacgctgagtgtgttgc

SEQ ID NO: 340165 - DNA, 128 bp, Homo sapiens
  chr9:2115839-2115967
  hypo
cgagctcaccgcatcgggcagcagaacgaggtccgggtactgaggctctgtaccgtgaacagcgtggaggaaaagatcctcgcggccgcaaaatacaagctgaacgtggatcagaaagtgatccaggc

SEQ ID NO: 340166 - DNA, 379 bp, Homo sapiens
  chr9:2177850-2178229
  hypo
cagaggtagatttcttaactagcatatcagccttcagcatgtctctaagcttaaaatataatcaaagctaaagctgacatttatgtaaagtttataatgtatgcagtcaccagtttagagtcatagtatagatgtggaattatacttttggtttgtggaggtaatgaggaaaaaaaaaaacggttcccagatgaagcataacaaattaaatctcagtagtgtgtgtatataagccatgcatacaaggagttcaaactaccacttgcacagtggtatgtggctcttttccatctcgtactctatggtctcatggccacgtcgcggtgtctgttcacttccatgaagaggagaggttcttgtccaccaacacctgtgaacc

SEQ ID NO: 340167 - DNA, 196 bp, Homo sapiens; identical to SEQ ID NO: 260071
  chr9:2876420-2876616
  hypo

SEQ ID NO: 340168 - DNA, 842 bp, Homo sapiens
  chr9:2933129-2933971
  hypo
cgctgccatgacgccggctgcagtggggtacaggagtaggtcgcgggtcctcaggtacagactctgaggtgtgcagcccctggagcctgcacctaggagcgcccccggaacctgctgccctgagaactcacccctgggagccccgggaatagggctgggcccagccaccccctggagggagagtagggaggtgaggcacagaaaatgggcagagagggtccccaagacagaactgggcccagggcggtgccgcgcttgcacgcggagcatgggggccgggcccgagacatggaactggggccccgcttcaggggcccagggcaagaagtgggagcggcacccacttcgaggacctgcccagtggcatgaccactgcgcccaacccgccgatggcgccaagttcctgcgcctcaggaagaggctccgtatggggccgcctgaggccgtatccccaggacctgccccacattaaggtgaccgctaagccagacaatcctgatggtgaggccccgtgcctgccatctgctcctggagacgccccccaaccccaggcatggccgtcagccggcgaggcggtactgaggcagggggcgcgtcctggtcattggagagtttcagcccagtgggtgaaccagacacactgttcaagggggcagcggttagtaagcaggacgagggggagccccaggccgcagggagaactcgtgacaacgtcacccctgccccagtcgtaggcccgggcccagtgaggacatgaagcccccgcctcaggctgcaaggaggcgccaccagggctgcaagctccacggagctggtgggacctggagacaggcgagaacccc

SEQ ID NO: 340169 - DNA, 1389 bp, Homo sapiens; identical to SEQ ID NO: 333617
  chr9:4298792-4300181
  hypo

SEQ ID NO: 340170 - DNA, 167 bp, Homo sapiens
  chr9:4864421-4864588
  hypo
cgctttatcagtgtttggcatctaacaaaggccgagccacgtcactcctttactccagcaaatgaaagctgtccggttgtcagggtttgcccgggtgtggggctgccctccttcctggtcgcatttggcccgtacctgtcaggtaccctgagcacgggcctgggatc

SEQ ID NO: 340171 - DNA, 384 bp, Homo sapiens; identical to SEQ ID NO: 333618
  chr9:6412586-6412970
  hypo

SEQ ID NO: 340172 - DNA, 200 bp, Homo sapiens
  chr9:6868325-6868525
  hypo
gtgaagagagtttccgtaggtaacatagcattcatcccaggaaaccctgggaactttgaggtgtgccataaaaagcagtttgaaaatcggttaactggatcaccgatttgagccacccctcagtatccatgaactgttggttccaggttccattcacaataccaaaacctgtggctgctcacgtccctgatataaagtgc

SEQ ID NO: 340173 - DNA, 205 bp, Homo sapiens
  chr9:6997072-6997277
  hypo
cggtgcctgcgtttacaaagtagtgatggtagcagcacctgccgcatggaggaattgttttgagggttaaaaaagtgtttggcacataatgactgtttgttgttgctgttgtaaggagagggggaaagtgacagctgattggtaagggggagccaagttgtggccgttgaggagaaattttccaggaccagaatgggcgcagagc

SEQ ID NO: 340174 - DNA, 229 bp, Homo sapiens
  chr9:7028698-7028927
  hypo
caccccagagtactctagcccgtggtggcaaggcttgctggaactgggatgtgtgatctccctctgacgtggactggttaaatattccctctgtgggcaggcgccaggtcagctcagccaggtttgctttctcttgtaactgggcagcacggaattcagtgcattctcttacaatttctgtgctctcctgtgccatgtgaccgttgccaggggataagggaggggcggc

SEQ ID NO: 340175 - DNA, 203 bp, Homo sapiens
  chr9:7172217-7172420
  hypo
cggctcacccagacacacgctgactgggggagaaactgttcaaaagagccagcagtccacctcagtgattgtgtggggttcttttccactcacttcagaagcagccccgttaccttttattgtctcacagaataaccatagcaacggtgcataattagctagagctcctggtaaatcggttttattattgtatttgagaggcc

SEQ ID NO: 340176 - DNA, 1138 bp, Homo sapiens; identical to SEQ ID NO: 333622
  chr9:13278637-13279775
  hypo

SEQ ID NO: 340177 - DNA, 148 bp, Homo sapiens
  chr9:13323299-13323447
  hypo
cggcgagaccgcccatctgtccggtcctgctctccaccagctccttcgtcggactcagtctggatcttctcaacgcccagctcctggctccgagtcagggctctctggatgcacggtaacaccctcctcttctgggtaccctccctcc

SEQ ID NO: 340178 - DNA, 194 bp, Homo sapiens
  chr9:14232126-14232320
  hypo
cgagggaaggagcgacaccatggctaggtaagaatgaaatgggttcatggatgttaggaagaaaaaaacgtatgccatggtgggcaagtcaatagtgtttgtgccttttctgcatggctgctttttctcatacaagagccacttctggacaataatgagaccccgtaaagcatctgcttagggattacgacccc

SEQ ID NO: 340179 - DNA, 2395 bp, Homo sapiens; identical to SEQ ID NO: 333623
  chr9:14313401-14315796
  hypo

SEQ ID NO: 340180 - DNA, 789 bp, Homo sapiens; identical to SEQ ID NO: 333628
  chr9:16871284-16872073
  hypo

SEQ ID NO: 340181 - DNA, 71 bp, Homo sapiens
  chr9:19374763-19374834
  hypo
cgcagtgcacacctgtagttcccaggcggtcaaggctgcagtgagccataccactgctcgccatccggggc

SEQ ID NO: 340182 - DNA, 973 bp, Homo sapiens; identical to SEQ ID NO: 333631
  chr9:20620372-20621345
  hypo

SEQ ID NO: 340183 - DNA, 371 bp, Homo sapiens; identical to SEQ ID NO: 333632
  chr9:21031427-21031798
  hypo

SEQ ID NO: 340184 - DNA, 748 bp, Homo sapiens; identical to SEQ ID NO: 333641
  chr9:22446681-22447429
  hypo

SEQ ID NO: 340185 - DNA, 184 bp, Homo sapiens
  chr9:27212729-27212913
  hypo
cgcgccccatggaaaccttctggacttccttcgcaagagccgtgtgctggagacggacccagcatttgccattgccaatagcaccgcgtccacactgtcctcccagcagctccttcacttcgctgccgacgtggcccggggcatggactacttgagccaaaaacaggtttgtccggaggacttc

SEQ ID NO: 340186 - DNA, 1370 bp, Homo sapiens; identical to SEQ ID NO: 333644
  chr9:27528537-27529907
  hypo

SEQ ID NO: 340187 - DNA, 1969 bp, Homo sapiens; identical to SEQ ID NO: 333646
  chr9:29212746-29214715
  hypo

SEQ ID NO: 340188 - DNA, 70 bp, Homo sapiens
  chr9:33023517-33023587
  hypo
gcctgacttacgtgatttttgtattacaaagccctagtacactgcctggtaatattagacgtttattaac

SEQ ID NO: 340189 - DNA, 137 bp, Homo sapiens
  chr9:34224363-34224500
  hypo
cgttattaaacgcattgtagacaacatcgatgatccttgttttgcaaatacaacgctgagccccaggagaaattccctacatgcagccttagggcacggtatttcttgttacctcctcaaacatggactgtgtggac

SEQ ID NO: 340190 - DNA, 665 bp, Homo sapiens
  chr9:34318282-34318947
  hypo
cgtgtcgcggctcgagagcgagactcccgtcttggagccagcccagcccaacccagcccaacccagcttgacctagccctgacaggtccatcgtggtgcacgcaaaccacctcccagccacgcgctccctcctgctcctcagcgccttctgcctcctggcggtggccttggcgaccgaggtgaagaaacctgcagccacagcagctcctggcaccgcagagaagctgagccccaaggcagccacgctggccgaacacagcgccggcctggccttcagcctgtaccaggccatggccaaggaccaggcggtggagaacatcctggtgtcgcccgtggtggtggcctcgtcgttggggctcgtgtcgctgggcggcaaggcgaccacggcgtcggaggccaaggcagtgctgagtgccaagcagctgagcgacgaggaggtgcacgccggcgtgggcgagccgctgcgttcactcagcaactccaccgcgcgcaacgtgacctggaagctgtgcagtcgcctgtagggacccagctcagtgagtttcgctgatgacttcgtgcgcagcagcaagcagcactacaactgcgagcactccaagatcaatttccatgacaagcgcagtgcgctgcagtccatccacgagtgggccgtgcagaccaccgac

SEQ ID NO: 340191 - DNA, 893 bp, Homo sapiens
  chr9:34372076-34372969
  hypo
cgtctgagcccacgcacactcggtagctcagctctggcgctgcggcgcggccggcgggtggcttgtagggcgtgtcgtggtagcgcgcctgaagccgcagcgagcgctccgtgctgttccagcccaggtggaagggcactgagtcattgactttgatggcggccgcgcgcgaagatagccagtagcgctcgaggatgcccccaaacgcggcgtcggaggagtagacatcgctggtgacgaacggctggggctcctgctggccatccaggcggatgggccagtgttgcgtcctcatctcggcgccaccataccagtgggccgccgcgtcgcccaagaacatggcgtgctccacggcccggcccggcgctgcctcctcccagcgcacgcggtagcacatgaccgtgtccttgggccgcacagtctggatgaagaagtgcagcggcagcccgtcggccgtgagcgagcagcccagcagggcgccatcgcggctgcaggagtcaaggtccagcgcgccggagcggaaggccaggcggaagacctgctctcccttctgattgcggatggagaagccgccagctttcaggtccagcagctccgcgcgaagtcgctccgccttgcgtagggagacgctgtagtagcaccaggccaccaccgcggccagcacaagcagcagccccagaaccgcggagcccagcagcggcttcaggtctttggaaggcttgggcttggcaggtgagaagttgtcgggcaggaaggtgtacatagctgcggctgcgatggcctcggggttctgacgctatgcgtagcagccaggccggcggcggcgggggtaggcctggctcttctcctgagggttctggagcattagtgggctgctaagaaaggagcgggcc

SEQ ID NO: 340192 - DNA, 496 bp, Homo sapiens; identical to SEQ ID NO: 333650
  chr9:34591191-34591687
  hypo

SEQ ID NO: 340193 - DNA, 904 bp, Homo sapiens; identical to SEQ ID NO: 333653
  chr9:35161771-35162675
  hypo

SEQ ID NO: 340194 - DNA, 606 bp, Homo sapiens; identical to SEQ ID NO: 333654
  chr9:35675615-35676221
  hypo

SEQ ID NO: 340195 - DNA, 310 bp, Homo sapiens
  chr9:35711931-35712241
  hypo
cgagagggaggaaggagaggcctggcattctttgactcctacgttcccccaccccctaccgtcctcctaccgagtcactcaggagtcgcttgctggcatctccaactgccctcagggcattatccacatcgcgctggccaggtaggcagctgacacagcggttcagagcctgggtcactgctttagccacctggggtgagaaaggagacagggttgcccaagtgaaaagaatttgagagatcgcctccattcacgcgacatgggagatgactagctctactgcctctgaaagtgaaaaaagaaagggggc

SEQ ID NO: 340196 - DNA, 41 bp, Homo sapiens
  chr9:35712966-35713007
  hypo
cgtcagtgcagcgactcccctagcggcctgggccagtgacc

SEQ ID NO: 340197 - DNA, 1028 bp, Homo sapiens; identical to SEQ ID NO: 333657
  chr9:36257924-36258952
  hypo

SEQ ID NO: 340198 - DNA, 2775 bp, Homo sapiens; identical to SEQ ID NO: 333659
  chr9:37025300-37028075
  hypo

SEQ ID NO: 340199 - DNA, 1734 bp, Homo sapiens; identical to SEQ ID NO: 333662
  chr9:37035403-37037137
  hypo

SEQ ID NO: 340200 - DNA, 83 bp, Homo sapiens
  chr9:37118395-37118478
  hypo
cgcagttcaaacctcagccaggaacagctgggactccaggtgtgggccaccacgccctgttattattattatttttttgacac

SEQ ID NO: 340201 - DNA, 60 bp, Homo sapiens
  chr9:37118799-37118859
  hypo
gtcttgctatattaccccggctggtttcgaattctcggccttaagctatcctcccacttc

SEQ ID NO: 340202 - DNA, 221 bp, Homo sapiens
  chr9:37928527-37928748
  hypo
tgctaaataccctacgacgcacagcacagcccccacaacaaagaataatgtagcccagcttcccacagtgcctaggctaaagccacaccactcgctagacggccagtgcctcaaattctgcatccacaacatgggaataaccagagtccacccttgctgctgtggtgaggggcagatgagaacctccacatgaagtgtgaacgtctgacgaatcccggctc

SEQ ID NO: 340203 - DNA, 360 bp, Homo sapiens
  chr9:37950454-37950814
  hypo
cggtaaaactgcagggaaagaataaagatcctcactgcccatgagtggacacactcaaaatacattcctgtttacatgatggtctctgcgcggtagtggagggggtgagactcagccaggagaggcagaggcacggggcggtactgtggttggagtgtgctttgtccacagagacatggatgctgctccgaatggtggctctgctgcctgctggccaggcaagccactgaccaggcggcttctattaagcgaggatcatgccaacctctcttgggttgtgggaatgtaacaagtggccccgcaggaagggccaatgtagagcctgatgtggggcgagtcttaaccgacggcagctgcagc

SEQ ID NO: 340204 - DNA, 42 bp, Homo sapiens; identical to SEQ ID NO: 223595
  chr9:66494115-66494157
  hypo

SEQ ID NO: 340205 - DNA, 62 bp, Homo sapiens
  chr9:71760295-71760357
  hypo
cggcctcaaagatttatgtgcggattaattggagtgtacattagatcgccgtgtttaaaacc

SEQ ID NO: 340206 - DNA, 1232 bp, Homo sapiens; identical to SEQ ID NO: 333669
  chr9:71788570-71789802
  hypo

SEQ ID NO: 340207 - DNA, 583 bp, Homo sapiens; identical to SEQ ID NO: 333670
  chr9:74061513-74062096
  hypo

SEQ ID NO: 340208 - DNA, 163 bp, Homo sapiens; identical to SEQ ID NO: 333671
  chr9:74640002-74640165
  hypo

SEQ ID NO: 340209 - DNA, 112 bp, Homo sapiens
  chr9:75271069-75271181
  hypo
cggctccgtgggtgtttttccggtatccttaaaagccatcactgctgcgcggcttcctgacctacttgttccggcaagagtgaacagtggtgagtcaggagcaggtgcgggc

SEQ ID NO: 340210 - DNA, 233 bp, Homo sapiens
  chr9:76089552-76089785
  hypo
cgcatcagcgactgctgcatacctctcgtacagggtccaccctccggccacatcccctgtggaccagcacctccgcaggaagcgctctagggcagggttgcccacagactggatcttgctgcggtcgagacggacctgggcttccgggcgcccatcggagcctgcggtgggagtgatggtaccgagtccctcgccagcctctggtaagactctcaggatcacaatccgggccc

SEQ ID NO: 340211 - DNA, 1762 bp, Homo sapiens; identical to SEQ ID NO: 333674
  chr9:77112712-77114474
  hypo

SEQ ID NO: 340212 - DNA, 125 bp, Homo sapiens
  chr9:78557022-78557147
  hypo
cgggcatgcgccaaagcgtagcgcactcgttgcctgcccggagcagctgctaccaactgaggccggctgtcctcaggctgcggagctggctcggtgttgccaatttaaaaggacatgcaagtctc

SEQ ID NO: 340213 - DNA, 662 bp, Homo sapiens; identical to SEQ ID NO: 333678
  chr9:79520881-79521543
  hypo

SEQ ID NO: 340214 - DNA, 2739 bp, Homo sapiens; identical to SEQ ID NO: 333681
  chr9:79629671-79632410
  hypo

SEQ ID NO: 340215 - DNA, 3137 bp, Homo sapiens; identical to SEQ ID NO: 333682
  chr9:79632892-79636029
  hypo

SEQ ID NO: 340216 - DNA, 96 bp, Homo sapiens
  chr9:80007524-80007620
  hypo
cgaatatggcaacaaagcaagtcacacgcatatatttgttctccagtgcatataaaaattatgtttataatgtagactattatgtacaatcacgtc

SEQ ID NO: 340217 - DNA, 110 bp, Homo sapiens
  chr9:80475592-80475702
  hypo
cgcccgcagctcactggtccatggcgcgggatgttcgggaccccttccataacacactgaacagtccccacaggactggaaggcagagcatttatttccctggctcttcc

SEQ ID NO: 340218 - DNA, 2087 bp, Homo sapiens; identical to SEQ ID NO: 333687
  chr9:80645542-80647629
  hypo

SEQ ID NO: 340219 - DNA, 295 bp, Homo sapiens
  chr9:80833898-80834193
  hypo
cgtctgtggggatccgcaaagatatgggatccagttagtctctggtgagtcgttaccttggccggatggggacatgttgcctgctgcacccccctcttcgcgctctctcatttcatttcctgcagtgtgccagcaggatggcccacaagccatctactactcggacaagtacttcgacgagcactacaagtaccggcatgttatgttacccagagaactttccaaacaagcacctgaaactcatctgatgtctgaagaggagtggaggagacttatgtccaatggcgtctaggcc

SEQ ID NO: 340220 - DNA, 330 bp, Homo sapiens
  chr9:81892891-81893221
  hypo
cgaaggccgcgggcgagaaagctgttctaattgtacaaatcactgcacagctgaatcacaggcgcagtcccaagtaatctgtgcaaccatttgactgaactttcgcactagctgggggcgctccccggagtctcctgaggccagcgtctgacaatggacataaagcagccgccaaatgagatgcgggaacagttgtatgtcaagcggcagtgattcaattccgggccgtcagaacgcaggcagcccccggccgcggcgtgattggcagtgtgctgatgcaggctcccaaacctcgacctacccatcttgttaaaatggggccccggatgc

SEQ ID NO: 340221 - DNA, 993 bp, Homo sapiens; identical to SEQ ID NO: 333689
  chr9:82185179-82186172
  hypo

SEQ ID NO: 340222 - DNA, 64 bp, Homo sapiens; identical to SEQ ID NO: 333690
  chr9:82188495-82188559
  hypo

SEQ ID NO: 340223 - DNA, 42 bp, Homo sapiens
  chr9:82275758-82275800
  hypo
cggggagacacgcttgttttgcagcaccctcctccgccgatc

SEQ ID NO: 340224 - DNA, 128 bp, Homo sapiens
  chr9:85843823-85843951
  hypo
ctgggagctgtagaccggagctgttcctattcggccatcttcatttcctcgctatttctaacgcatctgcagtgcttgtccccgctgaagtcttgaactcaaagtcattcaggatgattggaatccac

SEQ ID NO: 340225 - DNA, 395 bp, Homo sapiens
  chr9:86590191-86590586
  hypo
cgtttgggtgggcaactcacggtaaaagttcagtgacaaaaagacttaatggggaaaataagacagaaacttgaaaaacaatacaccgtctaaaggggatactatttaattatataaaaggcaggtaataaaatacatttctctctttctaatcaggcagtgaggcataaactgttgggacataccgctcggggccactgctgtctgggactgaaacactggcattgtactgcattggtcattggcgttcgtggatgttggcattgggcatgggcattcaatcagaagttgtcaagtatggtacccgtttggcaacgagcacatttttgggcatagccaaccagggttttcacatgggcgttcaggggcggatgggccaacgtcatggtgggcaa

SEQ ID NO: 340226 - DNA, 218 bp, Homo sapiens; identical to SEQ ID NO: 333696
  chr9:88355794-88356012
  hypo

SEQ ID NO: 340227 - DNA, 92 bp, Homo sapiens
  chr9:88661274-88661366
  hypo
cgcacggagcagaaggtgcatgctctatcggaggttacatctcagcttaatccccgcctcccaggtgccgtgcaccctgcactgtggcacgc

SEQ ID NO: 340228 - DNA, 1496 bp, Homo sapiens; identical to SEQ ID NO: 333698
  chr9:89560777-89562273
  hypo

SEQ ID NO: 340229 - DNA, 757 bp, Homo sapiens; identical to SEQ ID NO: 333699
  chr9:90112514-90113271
  hypo

SEQ ID NO: 340230 - DNA, 164 bp, Homo sapiens
  chr9:91993502-91993666
  hypo
tgcgggctaacctacgcagcactgcacgagactcggatactgaacaggagaaacacaaaactctccacgcctggacacgtcgcagccgaggcaccagcggggatgcacagccggcctcagtctccatctgcgtctgagtcagcgaacttcagctcacacttgac

SEQ ID NO: 340231 - DNA, 314 bp, Homo sapiens
  chr9:91995951-91996265
  hypo
cgtcgaggagtcactcacccgggcacacagaagcatcgccgctcatctcctgaatcaaacccctgcaaaacaaccggcacgtgttattcacccacacacatgggggacatccccaggcagcgcatcccgccccatacctgctggggctctcggtctggtgcagagccacgcaggtcgctgtgggcgggctccaggcgcagtaggggtcccgcgccagcacacagtcctcgcaggtgccgtgcttcccacagaaggccagcggggcctggaccacgcccgagttagagccagcatagacaaacctgttgccctgc

SEQ ID NO: 340232 - DNA, 151 bp, Homo sapiens
  chr9:92227900-92228051
  hypo
cggggccttggacgtgctggtccagctgcgtgaactgcatgttttcttgaacggcgactctgcttgcaggtggaatgcatggagtgcacgggcgtctgcctagagaggagatgtgggggctgggcatggaggtagccgaggagtcagcctg

SEQ ID NO: 340233 - DNA, 1191 bp, Homo sapiens; identical to SEQ ID NO: 333705
  chr9:93955385-93956576
  hypo

SEQ ID NO: 340234 - DNA, 507 bp, Homo sapiens; identical to SEQ ID NO: 333706
  chr9:94183474-94183981
  hypo

SEQ ID NO: 340235 - DNA, 884 bp, Homo sapiens; identical to SEQ ID NO: 333707
  chr9:94711200-94712084
  hypo

SEQ ID NO: 340236 - DNA, 146 bp, Homo sapiens
  chr9:95381233-95381379
  hypo
cgaattcccagaaacagaggggactggacaaaactagtgacattagggagaggggcggcacataggctggttattcagaagaggaagcagaatgaatgcgcgcctcacaggctttcaaatgactgtggtggtaaaaaggcaggtgc

SEQ ID NO: 340237 - DNA, 390 bp, Homo sapiens
  chr9:95417482-95417872
  hypo
ctttgcctaactcaccgacacatctgttcttccctcacgtggccctgtgtggccctgcagatgcagcgaccctgaggggtgcatcgtcagcctggaatgggctctgcacctactttcccactgcgccagagcccagcggcgtcctactgggacacgctcacctgcagggcaagcaagctctgcttcactttgtcggtatcttaaggcagaggaaatgcgctcacaggcggccttgtgggttgagccctgtttgctgtgggttcattactgtgacccttcccactgaggacaaacctggagccagactgctcattgctggaaatgctcccctatcctgtcccctcagagcagtccctaacgctcaccccaccaggttgccaatgggacctc

SEQ ID NO: 340238 - DNA, 341 bp, Homo sapiens
  chr9:95484997-95485338
  hypo
cgagtagtcctgcagcagacgagcttcccggaatttgtactccttgatgtcatcccgcaggcggccacgctggatctccacattctggttgatctgttgggggagagggaaaggcaggtatgagcagcctccacagggcacgagaggggctcagtgcagccaggcacgccatggccagccatacagccagaactcaagagccctggcctgcaggtgccagtgtgactgcctggagaggagagggagcccagagcagtatgccagagtgcacagcggactgcagaggttccagagtaaattccctcagcccttctcacctgggaacccgtgactgcctgctc

SEQ ID NO: 340239 - DNA, 310 bp, Homo sapiens
  chr9:95492133-95492443
  hypo
cgcgggggctgcacgtggcaaagaagtgcagggccttggggctcagggaggagaccttatgggtgagatcaaccagaaaggggtgctcacctagcccaggacgcccacctgcccacgcacctgagagtcgacagctgtgtcatgtccatgccccaaaatccaggccagccagcctcccatcgtgtacaccccaggcgagtggcccagcctccaagcaggtgccatccctctccttccctcccactgcccactacccccacatagctggcgtggcaggacagggcttccatgggtagagggcagacgggcc

SEQ ID NO: 340240 - DNA, 779 bp, Homo sapiens; identical to SEQ ID NO: 333709
  chr9:95570902-95571681
  hypo

SEQ ID NO: 340241 - DNA, 370 bp, Homo sapiens
  chr9:96069038-96069408
  hypo
cgtttctttttcccttgcagggtctgccctgaagcgtctctgcctaggcaaagaacacagcagtagtaattatccgggttttttcccctttgtcctctctcatcgcatgggctttctcgtggctagcgcacatcagggttcccgcggccgggcgggcgtgggcctgccctgtgcctgccccgcgcctgctccatgcctctcggccgggcactgcttcgcttctgcctggcgggatcgctgtcctcggctcccccgtgtgtctcgtggcgcctagagtttgtgcggtctcgccagttcacatctaacgggcttatccttccccggaacacccgcaaattgccgatcattaattggctccttttccaaaacc

SEQ ID NO: 340242 - DNA, 55 bp, Homo sapiens
  chr9:96155825-96155880
  hypo
cggcagtggcccgacgtagtctatttgccatctagtcaagggaatctgccctacc

SEQ ID NO: 340243 - DNA, 280 bp, Homo sapiens
  chr9:96348822-96349102
  hypo
cgtacaggccggatgggaacagtctgtgaggcttttgtgccactcctggctgcgcttggcagctctgcatgtcacacatgaggaatcctgagtctcaaaatggcccaggaatccagcatgagctgtgctaggagtcaagaggtttgccacgactgggcttggttccttgttcatgagcgagcacgtccctcagtctgtccatctagctggtgacgtttcctgaacaccaggggagaccaggctctgttctaggcacgggcagcagtgaggaagactgcac

SEQ ID NO: 340244 - DNA, 169 bp, Homo sapiens
  chr9:96435988-96436157
  hypo
cgctggctgcccatggtgcccggaagaatgggggtggcagtggcaagagtgcaggcaaacgactgctgaagagggctgccaagaacagtgtcgacctggacgactacgaggaagagcaggaccacctggatgcctgcttcaaggactcagactacggtgagtgtcactc

SEQ ID NO: 340245 - DNA, 304 bp, Homo sapiens
  chr9:96573430-96573734
  hypo
cgtggtacagtcactccctgctttgtaaagcgctgctgggtctcctgggaaacagcagcgtgcctggcactacgcaaggcccgcacagctgcgccgttgttgtcaccagccgcagttcccaggttgcacatgcctagagaaggtgttggcgggacgcggttgcgcctctgacttcctttaattccgacttctacttgcgtcgttgtgtaggcgtctgagggccacctgacgtcgtctagtgtctccacgccttgacacttgtctattgaaatgcatcttttttttttttttgagacggagtctc

SEQ ID NO: 340246 - DNA, 1550 bp, Homo sapiens; identical to SEQ ID NO: 333716
  chr9:96716717-96718267
  hypo

SEQ ID NO: 340247 - DNA, 685 bp, Homo sapiens; identical to SEQ ID NO: 333718
  chr9:96722524-96723209
  hypo

SEQ ID NO: 340248 - DNA, 352 bp, Homo sapiens
  chr9:97317346-97317698
  hypo
cggcatgcgcataacctcaggatataaataatgctgaagcagagttacgttttttttgttgttgttttttttgtttttgtttttttaggtttccgtgtgtttctattgagctgctcagtgcccggcttagaagaccaggaaaaggagtcacaggtcgtatgctggaggcttgagccgcggcaccgtggcgcggctcgcctcgctgcggttggtggtggcggtggacattgcagcgcggctggaggggtaggaagaagaagatagttttgggatagatagaggtgggtaaagagtgtggttagtgccaaagggaaaaaaggatagcgaggaggagaaggcgttgcaaaaagac

SEQ ID NO: 340249 - DNA, 428 bp, Homo sapiens; identical to SEQ ID NO: 333719
  chr9:97767434-97767862
  hypo

SEQ ID NO: 340250 - DNA, 124 bp, Homo sapiens
  chr9:97808146-97808270
  hypo
cgctgccggcccctgcggaatggagagtggtgttcggggatttgctttggaaatgccttgggaaggcgccgccacctccactttgaacaacggtaggaacgcagggtaggtgctcaggtggcac

SEQ ID NO: 340251 - DNA, 287 bp, Homo sapiens
  chr9:97864982-97865269
  hypo
ttactgcctcaggtccgacagcccaggacacccttcagaactgggccttccacctcctgaccaccactaaagggagcctcttgtcgcatgcgcactgtgtgaatggcagcgtggggacgcagagctaagagtaaacgacgtggtgtggaccatgacgttcgctctcctcggccccccctggcagcacacagggcctgcagccggcctgcaacgagcccgccagggtcagtgcagccagcacgggggctccggctgtagcccaggcacgtgccagtgtgtccctgggc

SEQ ID NO: 340252 - DNA, 360 bp, Homo sapiens
  chr9:97867233-97867593
  hypo
cgcgtctggcttatttcgctcagtgtaaagccctctaggttgggccgcattgttgcaggtgtgcattttataagagtacacaatagattctcgaaagcattctcgctgtgctggggccgggcccaaagaggtggcacctggcatgtggcagccagtcgtctttagccctgggccaccctcatgactcggattcgtcttagctgagacaccagcacctgggaggcacagcctgggcccactccacaggactgtcctaccaggatggagacaatctcctggccctggttcttggcaggtgggtcatgttacggggactttctgtacatggacattcacgtttcagtcaggcccggcctggac

SEQ ID NO: 340253 - DNA, 1264 bp, Homo sapiens; identical to SEQ ID NO: 333721
  chr9:98272643-98273907
  hypo

SEQ ID NO: 340254 - DNA, 262 bp, Homo sapiens
  chr9:99139238-99139500
  hypo
cggctcacaacactcaagagctgctcaagtgctgaaagaagcaagcagaagacaagtgcatgccaaagtgagaagaaaagagtctcacgtgtccctcctagagtggctctcagcggaccaagcagagaaacaatgccaggaggcacagtcacagcagcgagaagggactgaggaggaggcctggggaagccaagtgtggacagcctgcaggggagatctcggagaggtgcagttactcgtgttaccgctgatcatccgaaac

SEQ ID NO: 340255 - DNA, 1017 bp, Homo sapiens
  chr9:99258639-99259656
  hypo
cgctggaaaagggaggagatggacagcgctgtacttaccaccaccaccaccaccacagggcctgtctcagggcttgagtttgtgtggacggcaaggactagcttcctgggccgctaactctcaaccgcaaggcaaacttgggttggggcccagaacggccgtcagccgttaccctccagcctggccagtgagtgctgagtggacactccgcggctacttaaggacacgccaaccgcggtcctgccggggcgctccgtgcgtctccctccggctgggtcccggctgaccccgcaatccaggcgcaggcaagggagaccccgctggctccaccgcccaggccaccctgaagtccccgctggaggaggtgcagcggacccgctcccggggagcccgtcccgcgccctccctccgagaagccccttcctccagctccttcctctgcccgccggcccgagagcaccgaggcggcttctctgtcctgtgtactgcccaggacaagcggcattggaagcgagtgagccgttcccagctgggggcagcaacagcccggggccagggaaacgcatgggggcctggaccgtccggtggcaccgagtaggcgggtgccaggacgccagacacgctgcattccccggagtcccacgccagggagaacggccccgcctgaaaagacgtcgtttaacacagagaaacacacccagggccaggagaaaccattgtcctccccgagtcccacaacgcacaaagcacacggtggccctcccacgcggagtcgtctacccctttagaaacagacttggcccattagagcctccgcggccaggccggggcctccttacctggggatttaggtgtggacccagcacgcgtcgtccagaagcgtgtcaaagccatgcagacttgctgccaaagagtcaggcggggttagaggcggggaggcaggggcggggaggcagaggcgggaggccccccactcccacacaggccagggacccccgaggcgctggggaggaatcc

SEQ ID NO: 340256 - DNA, 500 bp, Homo sapiens; identical to SEQ ID NO: 333727
  chr9:99983230-99983730
  hypo

SEQ ID NO: 340257 - DNA, 356 bp, Homo sapiens; identical to SEQ ID NO: 333728
  chr9:99983792-99984148
  hypo

SEQ ID NO: 340258 - DNA, 139 bp, Homo sapiens
  chr9:100267700-100267839
  hypo
cgtttctagcgatgattctggagggtgatgagttgtgaccactgcgttgttgctctccatgcccaaaggaatgaaggaaagcagaactgcctctgggcatccttcagcctccttcatagactcatcgctgctgcccatc

SEQ ID NO: 340259 - DNA, 107 bp, Homo sapiens
  chr9:100299592-100299699
  hypo
cgtgcgtgcctgtgtgtgcgggtatatgtacgtgtgtgtgcatgtgtgttgcctctgtgtgcacatctgaacaagcccacaaggttctaggcaggatggcttctcac

SEQ ID NO: 340260 - DNA, 1595 bp, Homo sapiens; identical to SEQ ID NO: 333733
  chr9:100610054-100611649
  hypo

SEQ ID NO: 340261 - DNA, 3097 bp, Homo sapiens; identical to SEQ ID NO: 333735
  chr9:100614615-100617712
  hypo

SEQ ID NO: 340262 - DNA, 241 bp, Homo sapiens
  chr9:100843158-100843399
  hypo
cgatatctgtggccgcagtggctctgggggccaaggtgttggaacgtcacataactttggacaagacctggaaggggagtgaccactcggcctcgctggagcctggagaactggccgagctggtgcggtcagtgcgtcttgtggagcgtgccctgggctccccaaccaagcagctgctgccctgtgagatggcctgcaatgagaaggtgtgtcctgccggactctactcggttctgctgcc

SEQ ID NO: 340263 - DNA, 150 bp, Homo sapiens
  chr9:100849678-100849828
  hypo
cgctgatctaggtagattaggcgagactgggcagctgcggcgtacctggaggctgtcacgccggtcctggcccctagggcagccgggggatgctgatggccccctcccagagccgcagggccgggtagagcggctcctggaacgtggcgc

SEQ ID NO: 340264 - DNA, 1075 bp, Homo sapiens; identical to SEQ ID NO: 333737
  chr9:101469271-101470346
  hypo

SEQ ID NO: 340265 - DNA, 703 bp, Homo sapiens; identical to SEQ ID NO: 333740
  chr9:101569830-101570533
  hypo

SEQ ID NO: 340266 - DNA, 714 bp, Homo sapiens; identical to SEQ ID NO: 333741
  chr9:101705947-101706661
  hypo

SEQ ID NO: 340267 - DNA, 151 bp, Homo sapiens
  chr9:103493427-103493578
  hypo
cgtatatttctggccaataccacatctgacccgcgagcacagaaccccgcccttgccgctctgccgcccagtccacacccgccgccagctcaccatggatgatgatatcgccccacttgtcattgacaacggctcaggcatgtgcaaggcc

SEQ ID NO: 340268 - DNA, 1225 bp, Homo sapiens; identical to SEQ ID NO: 333744
  chr9:104248323-104249548
  hypo

SEQ ID NO: 340269 - DNA, 715 bp, Homo sapiens; identical to SEQ ID NO: 333746
  chr9:108418403-108419118
  hypo

SEQ ID NO: 340270 - DNA, 181 bp, Homo sapiens
  chr9:109689799-109689980
  hypo
cggacggtcaaaggggtactcattcattatcagaagaagcaccgagacttcaaggccaatgcagatgtgatccggcagcatacggccaccattcgaagcctctgcgaccgaaatcagaagaagcctgccagctgcgtgcttgtctccccctctaatctggagcgggacaaaacgaaactcc

SEQ ID NO: 340271 - DNA, 250 bp, Homo sapiens
  chr9:109690731-109690981
  hypo
cgtctacaaatgcaggcattgcccatacatcaacacccgcatccacggcgtactgacccactaccagaagcgacacccgtccatcaaggtgaccgctgaggactttgtgcacgacgtagagcagtctgctgacatatcccagaatgacgtggaggagacgagcaggatcttcaagcaagggtatggcgcctaccggtgcaaactgtgtccgtacacacacggcactttggagaaactaaaaatccactac

SEQ ID NO: 340272 - DNA, 321 bp, Homo sapiens
  chr9:110390680-110391001
  hypo
cggcttcccggggtggtcctttgattccagtaagagttatcacggataaagggagggtgcgtatcaggcaaagaatgcatggagtgtttggaggcgcggtgtgcagagcttgcaggaggcagtgtgcggtgagttgtggggactcctacgttgtctgatccctccttttctgctggatcctccccatcaacgtttacccgcactcaggtctctcatcttacagcaaaccctcactccacctcacatcttactccagctcctgactcatcaatttccctcccagccaaatttttcaaataaatgttctgtgctatgcgcatc

SEQ ID NO: 340273 - DNA, 179 bp, Homo sapiens
  chr9:112040343-112040522
  hypo
cgagggatgcgaaggacagtcatgaggtcagagggtaggacactggtcggcccaacctcaaaggaagcggaattggactcagaggtggaaagaggaaaagttgttctgcccttctcccgggtccggtggacggagtgagagtctctggctgagaaatgagaaggaacccgggagggttc

SEQ ID NO: 340274 - DNA, 1359 bp, Homo sapiens; identical to SEQ ID NO: 333753
  chr9:112081274-112082633
  hypo

SEQ ID NO: 340275 - DNA, 178 bp, Homo sapiens; identical to SEQ ID NO: 333756
  chr9:113017465-113017643
  hypo

SEQ ID NO: 340276 - DNA, 188 bp, Homo sapiens
  chr9:114556879-114557067
  hypo
cgtaacatggcagagaaggcgaggtgcacctattttcccttattgtttagcccatacaacttctagttgatgggctgaaatcccaccagcatctctgagaccttcacaccttctattctcaggttaagtggacagtgggtctggggttttgtctctacagagccacatcggccgggcctcacagatgc

SEQ ID NO: 340277 - DNA, 153 bp, Homo sapiens
  chr9:114860736-114860889
  hypo
cgtctacacccacctgctgggggagttgctattgttatttgcactgagtgccgcttaggagatctcagcagggtcacattcaccgtataatcagtcgtagggtacagatccaaacacactacaggcacttgttccctcgttgtgaagttaaac

SEQ ID NO: 340278 - DNA, 46 bp, Homo sapiens
  chr9:115087431-115087477
  hypo
cggcaaaatgcctaggcaaagagggaagggtccccggagaaccttc

SEQ ID NO: 340279 - DNA, 934 bp, Homo sapiens
  chr9:116059825-116060759
  hypo
cgtagtcaccatacccagcagcaaccgaaaaaggtttggtttcttgtctgggaacagcactcaccccacaccccaaaggaactgcttggtccaaaagatggagaatatgagcaacagagtgacactgaggatgacggccatcaggtaggcaaagatgcggaactgagggttgcggaaacactccctcaaagagtggtggctggggatgaggatgggcgtagacacggtggcagaggccgtgtctgggggcggcccagtctggcccccaggctgggggccaaggtccagcgtgtagacttgaggctggcgcaggaagtagcggctcttgggctggtccttgaggcacagctgatggccttccaggatgacatggtggggctccaggcggagcagggcgagcatggcagtgtccgtgggcaagtcagtgacaggctgccctgaggccagcactgtgggctggcgacagagtgggcacagcaggcggcgccgggctggagtcacaaggctgaggtgggccagacattccacgcagaaggagtggcagcaatccagcattttgggggtatggaacgtgttgttgaaggggttccagcagacggggcactcagcctcaagctcccggccctgctgctcagccatcctcagccacacacggggaggcttcgcgggagacgtcctggcagaagggggaaaggagcaaaggaacagccatgaagtcccatccttgtgcttggcctggggcaaagtgttctgtgggtgttgaaaggtgtaatcaccacgttttacttaggttcaaaagcgttttgttcttgatcaccagttcctaacccatcgagttgagtcaaatgctcctacagcctcccctctgtcaaggtgaaggcctgggccacccctaccaagagcccccaagagagccggcattggagcagatgtc

SEQ ID NO: 340280 - DNA, 529 bp, Homo sapiens
  chr9:116065600-116066129
  hypo
cgctcatccttgcaggcctctgttctgggtccgattgatctcctgccatcccctcggattccactgtcctctgtgcgctgacctgcctcgactcctggcttctgccgagatggatccttccctatgctgagtccctgtaaccaaaatacagatagctcttgcaaaatactgacaaaagcggccactaatacagcagaaaaatagtcgggagacggttgagcgtctgcctgaagagccagggttctcaagcaaggcacacttctaggtcagagttcagccctcactgagaatccaaactccgtttaactaccgatggagacttgagcaaattaattaacttctgccagcctcagtttcctcacctgaaaatggccataataacctacctacttgatctgtagattaaatgaggtaatacgtgtcgagatcgcgtaataacacagggcctggcagacagtaactcgctaaatgttaaccagaactattattgttataaccggtctgttcacgtggcccatcttttgttccc

SEQ ID NO: 340281 - DNA, 395 bp, Homo sapiens; identical to SEQ ID NO: 333758
  chr9:116111663-116112058
  hypo

SEQ ID NO: 340282 - DNA, 102 bp, Homo sapiens
  chr9:116299416-116299518
  hypo
agagccaaattaagcgtggcccatcagttctgcactctgttcttcggtttgcctatggcaaggtttaattcgggctggcctccctgatgctgcctggcatgc

SEQ ID NO: 340283 - DNA, 149 bp, Homo sapiens
  chr9:116708859-116709008
  hypo
cggccctgacccagcgtgtaattaccagtgcgaggtagggggcaagctgcgatgttaatcagcatcaccgctgaagagtgagtgtctgtgtgcgtcttttgcctcctctctgagaggggctgtgaaagtacccctcgcaggatgtagac

SEQ ID NO: 340284 - DNA, 127 bp, Homo sapiens
  chr9:116728180-116728307
  hypo
cgttggagaaggccttcgggctgtgtggtctggtggccactcatgagatgccgacttgcagcttgggattcggggaaggccttgaggcagaagacccatggtccaccccaggctggctctgcgactc

SEQ ID NO: 340285 - DNA, 121 bp, Homo sapiens
  chr9:116749805-116749926
  hypo
cgtttgtaaagcaggagcggggaagagcctggacaagatcccaagccttcttgcctaggaacgaagggaacagcactggatatcgcgtacatcaaagcacgaaacccttaccgcccaaagc

SEQ ID NO: 340286 - DNA, 280 bp, Homo sapiens
  chr9:116750660-116750940
  hypo
cgaggcctcgctgagtgccgagcaaggaacgatgacggaggtgaaggtgaagacagagctgcccgatgactacatccaggaggtgatctggcagggcgaggccaaggaggagaagaaggcggtcagcaaggatgggaccagcgacgtgcctgccgagatctgcgtggtgatcggcggcgtccgcaaccagcagacccttggtgagtgcccagcgtctgtggtcagggtggagaccagggtgggaacatggagtcagagtcctggggaaaagcggcctggc

SEQ ID NO: 340287 - DNA, 134 bp, Homo sapiens
  chr9:116761540-116761674
  hypo
cgaggggcaggcggggccctgggttttaggctgagctaggggcaggcggggccctgggttttaggctgagcgaggggcaggtggggccctgggctttaggctgagcgaggcgcaggcggggccctgggttttac

SEQ ID NO: 340288 - DNA, 240 bp, Homo sapiens
  chr9:116770600-116770840
  hypo
tgccgcctcctgcccgggcgcagtgtttagtgtggaaggggcccctgagaaccgggcaggtaagtccttggtgtctgcttgtcacctcccctgtccccggctgggctcctgagacctgggggaccagggtgctaagggccgtgtgttctcccacagaccccttcgaccaaggtgtcgtggccacggacgaggtgaaggaggagcccccggagccattccagaaaatcgggccaagtatgc

SEQ ID NO: 340289 - DNA, 299 bp, Homo sapiens
  chr9:116790949-116791248
  hypo
cgagaggccactcactctgccggctgggagggccctcggggactgagagcgtgaccctctcaggtactgcccccgggtgggagccaccggatgatccagacacgggctctgagtgttcacatccagaggtctccccatctccacgcttcgtggcagcgaagacccagacgaaccagtcggggaaaaaagctccggcctccgtggtccgatgtgccaccctcttacaccgcacccctccagccacccaaacccagacgttccgcactccaaattcgggatctccggcgagcaaggcaacc

SEQ ID NO: 340290 - DNA, 113 bp, Homo sapiens
  chr9:116796590-116796703
  hypo
cgccgggctggaaccgaggtctccagatgtgccctgtgctcccagccaagccatgctgcacccccatgcgtcccctgcccccagagctaatattcacaatcgggaacgatagc

SEQ ID NO: 340291 - DNA, 646 bp, Homo sapiens
  chr9:116800647-116801293
  hypo
cggagtggagccgtgggctgctttgttctggttcagcgcagccagagaatgcctggccggccatccagcgcaaagccaggctgaatcccagccacactgaatcgggattaaaggcttggctccatagagagaaattaagcatcatgagctgcgcagttcacagcgccgacgataaggaggatcagccttgaataacaccaatctcattatggagctgctgaatggcacagggtaattcccgctaataaacttcctttctgtgctgtaggaaaacctggcgtgccttggtgacgttggagaagcatgctttggcagtaataataccaaagatagctacaattttgtgagtgctttctatgcgtcacttgtggcactgagagctttacgcaggttatttcatcagatcttcctgattaggtagttgacgttttcatccccattatgcagatgatgaaaccgaggctcagagaacataatcactggcccaaagttgcacagctcctaaaaaaagtatccaatagcatttgagcttttacgtggcgccaggccttgttctaagacttttacatatattcacttatttaattctcggaacaaccctcagagttaagtgcccataacagttccacttcatagctaacgaaac

SEQ ID NO: 340292 - DNA, 1421 bp, Homo sapiens
  chr9:116810967-116812388
  hypo
cgaaaaggagcggcagaacatcgcagagcggctgttgagggtcatgtgtgccgacctgggtgcactgagcgtggtcagcgggaaggagttcctgaagttggcccagaccttagtagacagtggtgcccgctatggggccttctcggtcactgaaatcctgggcaacttcaacacgctggcgctgaagcacctgccacgcatgtacaaccaggtgaaggtgaaagtgacctgtgccttgggcagcaatgcctgcctaggcatcggtgtcacctgccactcccagagtgttggccctgactcctgctacatcctcacagcctaccaggccgagggcaaccacatcaagagctatgtgcttggtgtgaagggtgcggacattcgcgacagcggtgaccttgtgcaccactgggtgcagaacgtgctgtcggagttcgtgatgtcggagatcaggacagtgtacgtgacggattgccgggtgagcacgtccgccttctccaaggccggcatgtgccttcgctgctcagcctgtgccttgaactcggtggtgcagagcgtgctgagcaagcggacactgcaggcccgcagcatgcacgaggtcatcgagctgctcaacgtgtgcgaggacctggcgggctccacgggcctggccaaggagaccttcgggtcgctggaggagacgtctccaccaccctgctggaactcggtgacggactcactgttgctggtgcatgagcgctatgagcagatctgcgagttctacagccgggccaagaagatgaacctcatccagagcctcaacaagcacctgctcagcaacctggcggccatcctgacgccggtgaagcaggcagtcatcgagctgagcaacgagagccagcccaccctgcagctggtgctgcccacctacgtcaggctggagaagctgttcacggccaaggccaacgacgcaggcactgtcagcaagctctgccacctcttcctggaggcgctcaaggagaacttcaaggtgcacccggcccacaaggtggccatgatcctggacccgcagcagaagctgcggcctgtgccaccctaccagcacgaggagatcatcggcaaggtctgtgagctcatcaacgaggtgaaggagtcctgggccgaggaggccgacttcgagcccgctgccaagaagccccgctctgctgccgtcgagaaccccgcagctcaggaagatgatcggctaggcaaaaatgaagtgtacgattacctgcaggagcccctcttccaggctacccctgatctcttccagtactggtcgtgcgttacccaaaagcacacaaaactcgccaagctcgccttctggctcctggcggttccggccgtgggcgccagaagcgggtgtgtaaatatgtgtgaacaagcgcttctaatcaaacggaggc

SEQ ID NO: 340293 - DNA, 390 bp, Homo sapiens
  chr9:116813618-116814008
  hypo
cgttggggaggattcacgggttccacagctgcggggtttggtggccgtaggggaagcagtggtttgggagttctgaatgtaagcgccagagctgccctcctggtccgctgtgcgtggtacccagtgtgcatcacactactcaccccctcccggaccctggcagtccacagcgactccgaagtcagcccatagtcacatccaccacacctcagacctgccacagcctctcctcacttcccaggaccctgaggcttccaggagctctgctgcccacagccctcggggtcctcactcacacctccgacttccaggacggcagtgagcatggtgccttgtggccccaacagttgatgttccgagggtgggatggtgtttggccatgttcgactc

SEQ ID NO: 340294 - DNA, 216 bp, Homo sapiens
  chr9:116857267-116857483
  hypo
cgcctgtccctcagcttgtgcctgcctatactcaccttgggggcctgtggtcgggtggtgacccgctgagctcggcttgcatatcgcagggtgctgagagtctcaggaaggcactgggctgagggggacacgcaggccacctggggagtgcactccccctgagcgctcctctctgagggccccttcctcaagacccaaccttccctgccaggcccc

SEQ ID NO: 340295 - DNA, 404 bp, Homo sapiens
  chr9:116971577-116971981
  hypo
cgggcacctaccagcatccctgggggtgggcagggcttggtgccgtgctagcatctaacccagccgcgagcttccttctgcaggtcctggagccctggcgtggggcgggcctcctgccggcgagcgcctgcgcccttccctggcgtgagggtatgtgcctttggactacatcgtggaagccagcaccatgcagtccatgggcatatacacttgcctcaaggcctatgtcatcgaggagccaccggagctgccactgccaccagggaggaagaggaggagccgggatgtgggatggcagtggtgggtgggctgcggcaggttgggccagccacacctcactgcttgaccgctctgaccccctttcttctctttcctagggctacattgggctcccagggctcttc

SEQ ID NO: 340296 - DNA, 124 bp, Homo sapiens
  chr9:117045899-117046023
  hypo
cggagcggggctggagcctgcagggagactgctgtgtccccgctgtgagagccacactccataccaacgagggtctcctcctcttgtagggtgctccgggacgcatgggggcccaaggagaacc

SEQ ID NO: 340297 - DNA, 88 bp, Homo sapiens
  chr9:119976921-119977009
  hypo
cgctcttctgggggatgcggcgacgcttctgccaacgtcgctgggcgtacagcgccacggtgaacaccagcagcagcagcagcagcgc

SEQ ID NO: 340298 - DNA, 874 bp, Homo sapiens; identical to SEQ ID NO: 333764
  chr9:120176629-120177503
  hypo

SEQ ID NO: 340299 - DNA, 210 bp, Homo sapiens
  chr9:123146246-123146456
  hypo
cgaggccagggcgaccttgttctcttatttccctgtgtctgcccacaccgtcggccagtgtcacacacgagctgggaccacatgctgttctgtttggaacgagaaagtggcattaatacaaacagagggtcgttttagacctgaaaccatgtaattaagctctcccgtgaatgcctgttaacaaggaggtgctttcgcatttgagagaag

SEQ ID NO: 340300 - DNA, 126 bp, Homo sapiens
  chr9:123176142-123176268
  hypo
cgagatggagccattcggtttcccttgcaagctgcagcatgcacggtacttgggaaagatgtccctcccggctggtagctatgatggctagagaagaatgagacctggacaagggtccaaggactc

SEQ ID NO: 340301 - DNA, 398 bp, Homo sapiens
  chr9:123210124-123210522
  hypo
cgagccgtttgtctagctcacagggaatacatttttcttggtgcttaccattcagcaacgttttgtcgggcgttggcctcccctccatcactgcttcagccagaattaacttttggtgaagttgcttattacaagttttaaactccttcagctccccctgcagctccaagatctggctctgcagctgcgtcaccacctcctgggtggcagggagacgatacatatttcctaatgaccgggatggttttattaggattggcaagcgggacttcttagcctcctgaaaacacacatatgcaacaatgaatacactttgaacacacttcctttggttgcacagtcaacattctcatgccagccttataaaacggaattcgaactggctgcccagacttctc

SEQ ID NO: 340302 - DNA, 1023 bp, Homo sapiens; identical to SEQ ID NO: 333767
  chr9:124131788-124132811
  hypo

SEQ ID NO: 340303 - DNA, 250 bp, Homo sapiens
  chr9:124289769-124290019
  hypo
cgcagcggcagctgcccaatccgtggctgtggacccaggcatttctgtactctcgggggcctgggaagacacccccttcccccgcaggcttggaagttcctgctcccgttgcctggcctctccttgatcttggagtgaggttggggctgagcccaggcgctgtcacagcccggccgggtgtgggtacacttggtgcagtgctgacacacaagccgcctgccacctcagccccttccagactttgaacacc

SEQ ID NO: 340304 - DNA, 55 bp, Homo sapiens
  chr9:124639413-124639468
  hypo
cgtccctgctgttcggccaaggcgaagtcccctcagtcactagcggattccaaac

SEQ ID NO: 340305 - DNA, 174 bp, Homo sapiens
  chr9:124751431-124751605
  hypo
ggtcaaggctggaaacgcaggctgggaactggcaatggttacctggaagcacgtggggcccggcctccccgtggggatgtctgactggtagaagactttgagctctggagtcagcgcgatgaccgtcttaatcaccacggagatgatgtcagaccagaccttcttgatgtcaac

SEQ ID NO: 340306 - DNA, 98 bp, Homo sapiens
  chr9:124816011-124816109
  hypo
cgcgtgcaaggactgctctgacagttcacacacttcacagtgcccttccctcctgcccgtgggctacattcctgtctcacctccgccaggttcctagt

SEQ ID NO: 340307 - DNA, 716 bp, Homo sapiens; identical to SEQ ID NO: 333770
  chr9:124990438-124991154
  hypo

SEQ ID NO: 340308 - DNA, 78 bp, Homo sapiens
  chr9:125126554-125126632
  hypo
cgtaagcaaaaatgtttctttatactgtatatggctgaatgacggtaagttattaatgaagtgttaaagcaggaacgc

SEQ ID NO: 340309 - DNA, 60 bp, Homo sapiens
  chr9:125986796-125986856
  hypo
cgattcatcttttcacgcaactttcacggagcatttactacgtgttctaggcctgtactc

SEQ ID NO: 340310 - DNA, 179 bp, Homo sapiens
  chr9:126092355-126092534
  hypo
cgagcacccaaacaaggacaacgttccagaaccttgtttctaacaaatgtcggtaaaacaaaaacacccgctacagacccataaaatgtgaagaccaactccagtgataaaatatgttcgtttctatgtatttttatagctttccggataataaaaggaaccgtgttctaatcggatgc

SEQ ID NO: 340311 - DNA, 168 bp, Homo sapiens
  chr9:126139069-126139237
  hypo
cctccccttctctgcggtcttaggcctcggtgtcgtgtctcttgcagaagggcctgcccctgccgctgccattcccactgctggaggtggccgtacctgcagcctgtgcctgcctcctcctcctcctcctgggcctcctttcagggatcctggcagcccgaaagcgcc

SEQ ID NO: 340312 - DNA, 254 bp, Homo sapiens
  chr9:126152970-126153224
  hypo
cgtggccaagaagtggagaacagggactgcagcccggatggtccacccccaggggcctcaccctctcctgtgagcggggctcggagtagatgcacacgaggggacaccagccccggctcgggccaaatggagggaggctctccagtcgccctcacgtccaccttggttgcctttccgacacctatccaagcacgggcccccacctctggctctgacaagagagcacagatcacagcttgacacgttggtgcaac

SEQ ID NO: 340313 - DNA, 256 bp, Homo sapiens
  chr9:126158025-126158281
  hypo
cgcacgtcctaatcacacctggcacacagtaggtgctctttacctgtttgtggttgttaccggacgcccctaccccgcctcccaggtgcttgactgcaagccgcactctgccttcagattcctttgttcattcacccaggaaacatctcagagcagaggtctgggctcggatgtggtccaggagttggagagtcaaagctgaggaagagctcacagactactggtgtgcctggtgtgtgtgtgtgtgtgtgcacgc

SEQ ID NO: 340314 - DNA, 253 bp, Homo sapiens
  chr9:126165468-126165721
  hypo
cggctccctggcctctggggcctcccactggtgtgacaaccagaccgagtaaaagatcaagtcctgttccctgaatgacccctttgtgaaacacccgctgggagccccggggaagcctcacaaaggccggggctacacgcttgggcttcgcaaagtgctggctccgcagacacagggttcttacagacagaggggagaggcacaatactcactgctcagggctcggcacagacgtcctccggccttccactgc

SEQ ID NO: 340315 - DNA, 203 bp, Homo sapiens
  chr9:126180763-126180966
  hypo
cgcgttggaatagcaacttaattacctgggtggcatggatgagtgggcaccccgcacagggctgcagggtggaaaacgctcgacggccaggtggtgacttgggggcagagagcgcagtgtgtaggggaggagaggtggtgtccctgctgcctgggagccagcctgcctgtgctgtgggcagagccaaggcactttctgctgcc

SEQ ID NO: 340316 - DNA, 109 bp, Homo sapiens
  chr9:126321044-126321153
  hypo
cgcttcagagcacacctttcacgctgcgttccccataagaggaattgtgcgacgtggtgacctcgagttatccattcactcagcaaatatttattatttcctatgtacc

SEQ ID NO: 340317 - DNA, 259 bp, Homo sapiens
  chr9:126348901-126349160
  hypo
cgtggactcaagggccttcctgaagctcactgttcccaaggaaagaattggagcccagctcgctggacagtgcccggtcccccaaaggatcaaggcaactaggggaatgaagaaaggcaagaaaaactcaaactgggggtggggacaggaagcgcggatgagaagaaagccagaccgtcgccaggtgccggtgcctctcatcttaaccatgccatcagtcagggacactagcatctctgcatgggaaccaagtgggggc

SEQ ID NO: 340318 - DNA, 968 bp, Homo sapiens; identical to SEQ ID NO: 333773
  chr9:126771200-126772168
  hypo

SEQ ID NO: 340319 - DNA, 1420 bp, Homo sapiens; identical to SEQ ID NO: 333776
  chr9:126779532-126780952
  hypo

SEQ ID NO: 340320 - DNA, 90 bp, Homo sapiens
  chr9:127120340-127120430
  hypo
cggcgccttcccagtccacgagggcgtgagagtacatacacatgcaagtgcactccagcgctcacccaagcaacacccttggagaaacac

SEQ ID NO: 340321 - DNA, 55 bp, Homo sapiens
  chr9:128103464-128103519
  hypo
cgcaaagatagcgatgatgagaaatcagacaggaacagaccttggtggagaaaac

SEQ ID NO: 340322 - DNA, 109 bp, Homo sapiens
  chr9:128118022-128118131
  hypo
cgcgagtgaagaacagcttcaagatgcacagctggccattgagcgaagcgtgatgaaccggattttcaagctcgccttctaccctaatcaagatggggacatacttcgc

SEQ ID NO: 340323 - DNA, 445 bp, Homo sapiens
  chr9:128200066-128200511
  hypo
cgcaggagggacactgaagaggctgtcgaggactgcagaggcatctggtgtggccagaggcgtggtgtcaggggcatctgatcccttgcctgttcccacccagggagccggacggcacggacacaggtctccctccgctcacccctctccctgaaacgtgagaaacagcagctttccgcctgcttgaaaaaggaggcaggcgctgtaaggagaagaggaatggggaatgtggccccttccaaggcagcgaagcagagaacatgcaggtggaactgccagctgaaacctacacttgctacttaagaaacggaaagaccatgtctggctgggagtgcagcgtgcctgaggaccagccaccgcccctcctcctggcaccccacactgtccacgcagctcctgggctctgaggtcagaagctggggtgtgctgaaggggaaagtgacac

SEQ ID NO: 340324 - DNA, 139 bp, Homo sapiens
  chr9:128274083-128274222
  hypo
cgcatgaagccgcataccctccatttcacagcagagaggaacacaaaaggaagattctgggaagcagttactctgcagcgacgggaaaacctgcttgggcattccaatgatgtatttattgcagtaataccatgtcacc

SEQ ID NO: 340325 - DNA, 57 bp, Homo sapiens
  chr9:128274789-128274846
  hypo
cgtaaacttgtcgtttaatctttatgtttcttttcctctcacgtagtttattggttc

SEQ ID NO: 340326 - DNA, 447 bp, Homo sapiens; identical to SEQ ID NO: 333782
  chr9:128651916-128652363
  hypo

SEQ ID NO: 340327 - DNA, 233 bp, Homo sapiens
  chr9:128759727-128759960
  hypo
cgggctcagctgccttccctgccatgtgtcgtgtagttgttttcagcacataagctgtcaacgagcgttctttggagatacttgaactggagtggcccaggggcttttcgcctttccgtaagcctgctctgccagggaggcgctgccccaaaggtggcctggccaccgtccagaatggaggcccccggtgctggcctgcccagcagcacctgcggctcagtccctccaggatc

SEQ ID NO: 340328 - DNA, 380 bp, Homo sapiens
  chr9:129455261-129455641
  hypo
cgggagggaaggagatcttatcctgggccactggggagccacggcaggtgtcaacagaggggacaggctcccatcgggcagcaggttgccgaaggggacaaggctgaggcctgggctgcccccgccccttcatcacaggccgggttgtgtcccccacagtgaagagcgaggatgaagatggggacatgaagccggccaaggggcagggcagtcagagcaagggcagcggggatgacgggaaggacccgcggaggcccaagcgaccccggaccatcctcaccacgcagcagcgaagagccttcaaggcctccttcgaggtctcgtcgaagccttgccgaaaggtgaggggcggccggggggcggggctcaggctgatgccc

SEQ ID NO: 340329 - DNA, 275 bp, Homo sapiens
  chr9:129458627-129458902
  hypo
cgactgcttcctcggctcctcagacgtgggctccctgcaggcccgcgtggggaaccccatcgaccggctctactccatgcagagttcctacttcgcctcctgagagccagccaggcgcacggacgcttgggcaggggcctgggggggactgccagcctctgcggccagcctggccacccccgccctgctctccgcacagactacagacagccatacggtgccctcccctcggccagctgggcctgaccactgtgcccgttgggtacagccagacc

SEQ ID NO: 340330 - DNA, 116 bp, Homo sapiens
  chr9:129645183-129645299
  hypo
cgtgtgaactgctgcgctacacatcagtgttaactccctacagattacactctaatcccgctgctcccgaggagcggctttgctaaatcgggtatatagtatatgcctttttcctc

SEQ ID NO: 340331 - DNA, 195 bp, Homo sapiens
  chr9:130496563-130496758
  hypo
cgcatccagcctaccttgtagcgctcgatgtggctggggtgggggaagtggaggacgggagaaaagtggtgcacgcgggggctgcggaggccgccctggaagaggtagtgcgccagcagggagctgacataggatttgccggtgccggtccagccgtgcagggagaggaccagcggcttggtgggggctgggtcc

SEQ ID NO: 340332 - DNA, 233 bp, Homo sapiens
  chr9:130637231-130637464
  hypo
cgagggacataaacagcggccacacaactgcagagctgctcccctcgaaactcccagaaaacagggcgcagggccagcgtctgcccagacaccttgacaacgctccccagggccagagggaagctgccaggaggtgggaggtggccaggaactatgtgtgtctgggatgaggtttggatggggatcctctaagggacagaggcctggggtgaaggaatctacaggagccgctc

SEQ ID NO: 340333 - DNA, 367 bp, Homo sapiens; identical to SEQ ID NO: 333793
  chr9:130639769-130640136
  hypo

SEQ ID NO: 340334 - DNA, 456 bp, Homo sapiens; identical to SEQ ID NO: 333795
  chr9:130674546-130675002
  hypo

SEQ ID NO: 340335 - DNA, 233 bp, Homo sapiens
  chr9:130907031-130907264
  hypo
cggaacctattaccctgccccctgggctgggcacgctcctggactgtcctgggctctcgggagaaccagctttcaggagagccagaccggtcctctcacccagccacctctgatggtgccagcggaggcccagccaaggacctggagagcagggagcacgggagcatgtggggtaacgcaggggtggccgcagtggagatgcccctttcctggggtgctgggggctgcagtcc

SEQ ID NO: 340336 - DNA, 130 bp, Homo sapiens
  chr9:131399186-131399316
  hypo
tgccactcaccggccgtaggcacaggccaccacagagccagtggagttccaggagatgctggtcacatgcagaccctgcgcttgggctggcgggtagcccagggtatacagacaagacacctgcggagac

SEQ ID NO: 340337 - DNA, 36 bp, Homo sapiens
  chr9:131461564-131461600
  hypo
cctctcaaagtgttgggattacaggcgagccgccgc

SEQ ID NO: 340338 - DNA, 83 bp, Homo sapiens
  chr9:131675071-131675154
  hypo
cggggcctggcgtggccaaggcaggtagggatggagagacatggacggatctgggagacgctggagggggaattcaaagggac

SEQ ID NO: 340339 - DNA, 241 bp, Homo sapiens
  chr9:131821444-131821685
  hypo
cggaaggagtttgcagagaagctggagtccctgctgcaccgtgcctaccacctgcaggaggagttcggctccaccttccccgcagacagcatgctgctagacctcggtgagctgggcccagtgcaggtggggtgggcgtggagggtggcagggatggaggtgaggagaagttgcgagaaccgggtcgtggttctctcagtgcgtccaatgaatcagaatccccagggctctccgacctcgc

SEQ ID NO: 340340 - DNA, 859 bp, Homo sapiens; identical to SEQ ID NO: 333798
  chr9:131842789-131843648
  hypo

SEQ ID NO: 340341 - DNA, 269 bp, Homo sapiens
  chr9:132071041-132071310
  hypo
cgcaacgtccctgtagaaatgagcacatctgagtgtcctacccagtgccaggctggcttagcgtggatgcccccggcacacagctctcttccttttctcggcacctccgccgctctctaaatcccctgggaacatcgggaacactctccggtgttgctttacacctgtttttacttgcctcccgctctccagccaaggagtgggctggattcacgatgacgttcacctttgtcacttgaaggcaaaactggtatcaagtttgttgcctc

SEQ ID NO: 340342 - DNA, 280 bp, Homo sapiens; identical to SEQ ID NO: 333801
  chr9:132145475-132145755
  hypo

SEQ ID NO: 340343 - DNA, 610 bp, Homo sapiens
  chr9:132230776-132231386
  hypo
cgtgtaggtgtgtgcacagtgtacaactgtgtgcaagtgtgtacagtgtttctgcatgtgtgcagagtgtacctgtgtgtgtgcgtgtggacagtgtgcaccggcgtgacactgtgtcgaatgtgtgtgcacagtgtacctgtgtgtgtgcatgtggacagtgtgcaccggcgtgacactgtgtctagtgtgcaccgtgtacctgtgtgtgtgtgtgtggacagtgtgcaccgtgtacctgtgtgtgtgtgtggacagtgtgcaccggcgtgacactgtgtcgaatgtgtgtgcacagtgtacctgtgtgtgtgcatgtggacagtgtgcaccggcgtgacactgtgtctagtgtgcacagtgtacctgtgtgtgcatgtggacagtgtgcacagtgtacctgtgtgtgtgtgtgtggacagtgtgcaccagcgtgacactgtgtcaaatgtgtgtgcacagtgtacctgtgtgtgtgcatgtggacagtgtgcaccggcgtgacactgtgtctagtgtgcacagtgtacgtgtgtgtgtgtgtggacagtgtgcaccgtgtacctgtgtgtgtgtgtgtggacagtgtgcaccggcgtgacactgtgtc

SEQ ID NO: 340344 - DNA, 1561 bp, Homo sapiens; identical to SEQ ID NO: 333803
  chr9:132244512-132246073
  hypo

SEQ ID NO: 340345 - DNA, 690 bp, Homo sapiens; identical to SEQ ID NO: 333804
  chr9:132258226-132258916
  hypo

SEQ ID NO: 340346 - DNA, 762 bp, Homo sapiens; identical to SEQ ID NO: 333806
  chr9:132382255-132383017
  hypo

SEQ ID NO: 340347 - DNA, 354 bp, Homo sapiens; identical to SEQ ID NO: 260868
  chr9:132393701-132394055
  hypo

SEQ ID NO: 340348 - DNA, 498 bp, Homo sapiens
  chr9:132402759-132403257
  hypo
cgcccacccagcgtcgggccgcgtttaagccacctgcccacccccggggctctcgctgaccttcaaagttgagattggccccatgccgcaagagaacgtcggccgcccgcgtcagccccagctcagccatcttgagcagggcgttgctcacgccttcctggtaaaagggagagtgggctttcctctccagcagctcagtgagaacaaggattcggctctcctcgctggcgacataactgggcctgggacaggagagaggctgagggtaggcacagctgtgggaccgggtgaccgcgcagcctgtgggttggtgggctttagtcctgctatcatcatcagcaagcagggccctggctctgtgggtcacaggggcttgggggaagctctgaagtagagagagggccacgctgcatctcttaatacgggagcagactgggatttgcggagaatgggctgggtctgtctgcgctctcctcccgcgttgcccagagtccggtc

SEQ ID NO: 340349 - DNA, 294 bp, Homo sapiens
  chr9:132501760-132502054
  hypo
cgcgcagcaggctgccaggaaaccaggactcagggcccaccacaatctggaaggaacatcaagtccccaggtatagccacggcggctcttggcccatggtctggtggccaaggaggcatcagctgctggtcacaggtggcgggccgcttcccagaggatctgcagagccatggaggcgcaggggagctgggccagggtgtaggtcacggagcggatgggtgcccgcagcttccccaggtaggccacggtgtgtgccacacggcccacgaggaagaccaggaagtgcatccaggc

SEQ ID NO: 340350 - DNA, 277 bp, Homo sapiens
  chr9:132633604-132633881
  hypo
cgttgcagcgtgtgtgtcggaatgccctgccttttgtatgctggttatttattgttccattgtgtggatggctggggcctttctgcttattcgttcatccgtcagtggacactcaggccgcttccctgttagctattgtgaggaatgctgctctgaccatgggtgtgcacacctctcttctttcatccctttgggtctatgcctatttttaatttctcgaggagccaccgtactgggttccacagtggccaccccatttcacattcccaccagtgac

SEQ ID NO: 340351 - DNA, 258 bp, Homo sapiens
  chr9:132643756-132644014
  hypo
cggggcgtgggtggggaaggggctctgggaccagaccccccacactactgcgtctttgtttctatcagtctttgtagaagcaggtggtggtggaaattccagcaggtgggtcccgcagaggccctgaggcctcacttttcggatcttctgtcccagatcctgctccctccctgctgagcctggggttcccctggcattggccccagccttctgaaagccggcgctgcagccagaggccgcacgctgcactgtcgcgac

SEQ ID NO: 340352 - DNA, 1655 bp, Homo sapiens; identical to SEQ ID NO: 333808
  chr9:132804293-132805948
  hypo

SEQ ID NO: 340353 - DNA, 477 bp, Homo sapiens
  chr9:132874127-132874604
  hypo
cgcgtctttgtctctcctgtcacgcgcagtggcttctctcaggtcctcggtcactgagactcacagctgcactgcatcctccgagagggagcttaattgagtctcgcacagacacacctagcgctggctccactctgtctcgcctgctaagatttactggctctgactgcccttgagcccgcatccgcgttcccttctctttctccagtgtcattaccttataggactggcgtcgagatacacaccgtaaatttaattaacagtctctgctgctcaccatcctttttttgggccttgtgtttctgaggaaaagtcagaagatgtattctgaagagccttagctttcatgtgagcttcagaagtatttaaacaatcccggttggctggctgcagagttgatggaggaacggcttcattccgaggtgccgccgtgctctgaaaggagccgcgaccatgcgaggcatttgttagggcagc

SEQ ID NO: 340354 - DNA, 77 bp, Homo sapiens
  chr9:132874650-132874727
  hypo
cggtgtgagtctcttgtgctgttgacatttgcctgatggtgaaaagcaatgatgggtgaaattgccggcaccgtcac

SEQ ID NO: 340355 - DNA, 478 bp, Homo sapiens
  chr9:132881052-132881530
  hypo
cgatgattctgttgctcacccccattaagaaccattgctataaaggaattctcctccacatgaggaggtcgatgcctggagacagaggcagcaggccaagggcaggcacacccagctgagatggggcagggctggaaggcaggcctcctggatcctgcctggggccttgtctctctccccacactcattctttcaccgtatttgctgctcctcatggtgaggtcagaaatagcccgcccagccttggtgagccttcgctcccacaggagcccaacacccagcccgccacagtccggtgagcagcaggctgtcggtgttcctaagtcagggaaatctttggaagaacaatggagggagtcgtgggaccccaggctgcgacctgctgcctggctgctcactgcatcatgctggtttcaccctgctcagagcgggctccacccctgctcggcatcctgactcatcctatgcatatggcagc

SEQ ID NO: 340356 - DNA, 113 bp, Homo sapiens
  chr9:133300407-133300520
  hypo
cgatgacccaggtggcccggggtctggatcccgatggcctcctgctcctcgacgtggtggtcaatggcgttgtccccgagagcctggctgacgcagatcttcaagtgcaggtc

SEQ ID NO: 340357 - DNA, 640 bp, Homo sapiens; identical to SEQ ID NO: 333809
  chr9:133308611-133309251
  hypo

SEQ ID NO: 340358 - DNA, 370 bp, Homo sapiens
  chr9:133366624-133366994
  hypo
cggcgggattgcgaccccgaaaggaggattttagttacaaagtgagagagtcattaagacgtggcggaggagagagcacctggccgggctgctccggggcctccacggaggctgatcccaccgtggccgcggccacggctgccacttatcctgccatcttgctgctaggctctgagctgggcacctgatggggtattatctaatattagctgcgcagaggtgaggaaacggaggcccccaggtgaagacactcacccaggctctcctggctggtgatgggcagctttgagccggggacaggccagctgtagcggccaagttcccagttactccaacagattccaggatgctcgtgatcaaggggcacggc

SEQ ID NO: 340359 - DNA, 108 bp, Homo sapiens
  chr9:133484764-133484872
  hypo
cgtgacgaggcctgtggaggtaggaggctggatcctctccttcagatgcttatggtcttgggggtgggggggccggcgaggggggcaccagggggcgtctcctccccc

SEQ ID NO: 340360 - DNA, 131 bp, Homo sapiens
  chr9:133513763-133513894
  hypo
cgccggttcatccctctgcccctgcccgcggccgcccgagagggaaagaggattcctgcgggcctcgcccgtcatcttgcaccgcgtccacccgccttcgttggtgcacagtctagatgtctagctagttc

SEQ ID NO: 340361 - DNA, 210 bp, Homo sapiens; identical to SEQ ID NO: 223701
  chr9:133534647-133534857
  hypo

SEQ ID NO: 340362 - DNA, 324 bp, Homo sapiens; identical to SEQ ID NO: 333811
  chr9:133535058-133535382
  hypo

SEQ ID NO: 340363 - DNA, 972 bp, Homo sapiens; identical to SEQ ID NO: 333812
  chr9:133535423-133536395
  hypo

SEQ ID NO: 340364 - DNA, 144 bp, Homo sapiens
  chr9:133592887-133593031
  hypo
cgaacccagctgtgcaatctagtgagatcttacctctacagaaatttaaaaaattagccaagctcccactggagccaaagagtcgaggctgcggtgagccatgaacacagcactgcattccaatttgggcaatagagggagacc

SEQ ID NO: 340365 - DNA, 133 bp, Homo sapiens
  chr9:133641518-133641651
  hypo
cgggccgtggcatgcgttggtgcgctctcaagaatgcggccatggcactcacagacacataccaagaagcctcggcccccagtgcccccgccagcctgctcaggggcatgcggatgactggagcctggaaggc

SEQ ID NO: 340366 - DNA, 1351 bp, Homo sapiens; identical to SEQ ID NO: 333814
  chr9:133710055-133711406
  hypo

SEQ ID NO: 340367 - DNA, 81 bp, Homo sapiens
  chr9:133738154-133738235
  hypo
cgtctcctccgagagccgcttcaacaccctggccgagttggttcatcatcattcaacggtggccgacgggctcatcaccac

SEQ ID NO: 340368 - DNA, 458 bp, Homo sapiens
  chr9:133760420-133760878
  hypo
cgcagagcccgagccaggaggcggccggggaggcagtcctgggcgcaaagacaaaagccacgagtctggttgatgctgtgaacagtgacgctgccaagcccagccagccgggagagggcctcaaaaagcccgtgctcccggccactccaaagccacagtccgccaagccgtcggggacccccatcagcccagcccccgttccctccacgttgccatcagcatcctcggccctggcaggggaccagccgtcttccaccgccttcatccctctcatatcaacccgagtgtctcttcggaaaacccgccagcctccagagcggatcgccagcggcgccatcaccaagggcgtggtcctggacagcaccgaggcgctgtgcctcgccatctctaggaactccgagcagatggccagccacagcgcagtgctggaggccggcaaaaacctctacacgttctgc

SEQ ID NO: 340369 - DNA, 495 bp, Homo sapiens
  chr9:133761121-133761616
  hypo
cgggctcgcccatacccgtgacagtggctgacaagggactagtgagtcagcaccttggcccaggagctctgcgccaggcagagctgagggccctgtggagtccagctctactacctacgtttgcaccgcctgccctcccgcaccttcctcctccccgctccgtctctgtcctcgaattttatctgtggagttcctgctccgtggactgcagtcggcatgccaggacccgccagccccgctcccacctagtgccccagactgagctctccaggccaggtgggaacggctgatgtggactgtctttttcatttttttctctctggagcccctcctcccccggctgggcctccttcttccacttctccaagaatggaagcctgaactgaggccttgtgtgtcaggccctctgcctgcactccctggccttgcccgtcgtgtgctgaagacatgtttcaagaaccgcatttcgggaagggcatgcacgggcatgcacac

SEQ ID NO: 340370 - DNA, 527 bp, Homo sapiens
  chr9:133779434-133779961
  hypo
gacaaggtgcaccagtctagcggtcctcccggaccggccggatcttcatctcagagaacttgagtgagtactgccagccggtccaggaggaccactccacgccgtcggcataggaggcgtgcgcaccgcgcaggtactgcccattgaggttggacgtgtggcagttgcggtaccaccaggcaccgcggtagaaggcggcacagttgttctctgaatggtcgctgtcacggtccttggtggtgaacctcatgccgctgtgcttcaggagggagtcgcctgcgcaggggtgcacacaggtgtgggcacggggggcacgggtacacccactggtgttgcatgtgtgagcagacaccgagacactgcacgtgcacctggacgtgagtgcatacacgtacgcacgtgctctcacacatactgctgtgcacgcgtgcaagcgcacctgcccctccacacccgggtgtgtccatgcagctcacacgcacgcagtcccttctcgggcgtgcctggggctgcccctgggtctaggc

SEQ ID NO: 340371 - DNA, 543 bp, Homo sapiens
  chr9:133799052-133799595
  hypo
cggaatgcccgggttcaggtacacagcctcacggtccccggtgcctgccctgccgcccgcccagcctgggacactcaccgtccagccgccgccgtccgtgcgcatgtcacagtacacctggaagccggccgggtagtgggtgggaaagacagagtagacgccatcgtcctgctgtccgcttaggaggacgtccagacagtctcggggccgggagcctgagggaggcaaggctgtcagggtggctgcggccccagcacgttcctgcccagccccctggccaaactgtctgtccatcgataatgcatgtggggtcccatggggttgagagagcactggccttggagtccgaccttggctctgccactccctgctgtggctgggtgagagaatcaccctctctgggacttactctcctcatctggagaatggaccgagagggcttcagcgcaggccacatggaagtagggtcgggccctggagtctcatggctggggaaccctcaccccaacttccccgctccccagagctgggacccgaggcacc

SEQ ID NO: 340372 - DNA, 869 bp, Homo sapiens; identical to SEQ ID NO: 333815
  chr9:133814876-133815745
  hypo

SEQ ID NO: 340373 - DNA, 85 bp, Homo sapiens
  chr9:133945101-133945186
  hypo
cgagaacggcacatgcgtgtgcaggcctggcttcgagggctacaaatgtgaccgctgccacgacaacttcttcctcacggcagac

SEQ ID NO: 340374 - DNA, 109 bp, Homo sapiens
  chr9:134126685-134126794
  hypo
cggttaacacggatcaaaccttaggcactggctgcccacctcggtcaggctgcaaccaggaaggaggcagcccaccctccaagggacacgtggtccacatgagcagctc

SEQ ID NO: 340375 - DNA, 724 bp, Homo sapiens; identical to SEQ ID NO: 333817
  chr9:134151944-134152668
  hypo

SEQ ID NO: 340376 - DNA, 241 bp, Homo sapiens
  chr9:134818812-134819053
  hypo
gctgcctcccgagacggtgagcacggctagcgtctgcagcgggctctgcagtgcggcgccccactttgagagcagggctaaggacaggtaggaacagtgtgctcccctcctacacttccaccatatgttacactctgttctgtggcagaatcaaattactttaatttttacctttggaatataggcaaacaagcagtaacacagcagtggtgactagtttacacttgagcagacgcggcgc

SEQ ID NO: 340377 - DNA, 867 bp, Homo sapiens; identical to SEQ ID NO: 333818
  chr9:135036693-135037560
  hypo
